United States Patent Application Publication US 2016/0319361 A1 - sequence listing, part 6

SEQ ID NO: 135456 - DNA, 30 bp, Artificial Sequence
  Synthetic oligonucleotide
caaggtgcgatcacaccacgatataccttt

SEQ ID NO: 135457 - DNA, 30 bp, Artificial Sequence
  Synthetic oligonucleotide
aagggttgggcgcgtgtagctctagccttt

SEQ ID NO: 135458 - DNA, 30 bp, Artificial Sequence
  Synthetic oligonucleotide
catccaacacaaattagcttcaaggccttt

SEQ ID NO: 135459 - DNA, 30 bp, Artificial Sequence
  Synthetic oligonucleotide
gaggaaatacgacttagttgagaatccttt

SEQ ID NO: 135460 - DNA, 30 bp, Artificial Sequence
  Synthetic oligonucleotide
tcgttcaggtagcgcatatgtaggtccttt

SEQ ID NO: 135461 - DNA, 30 bp, Artificial Sequence
  Synthetic oligonucleotide
gacggcctggatccaggaaacaagagcttt

SEQ ID NO: 135462 - DNA, 30 bp, Artificial Sequence
  Synthetic oligonucleotide
acaatgaagtggtccactgtctctcgcttt

SEQ ID NO: 135463 - DNA, 30 bp, Artificial Sequence
  Synthetic oligonucleotide
agataccaatagcgtagggcgcctggcttt

SEQ ID NO: 135464 - DNA, 30 bp, Artificial Sequence
  Synthetic oligonucleotide
agtgactcacgtaaatagtttgtatgcttt

SEQ ID NO: 135465 - DNA, 30 bp, Artificial Sequence
  Synthetic oligonucleotide
cgtttaagctgtagtaagtcagattgcttt

SEQ ID NO: 135466 - DNA, 30 bp, Artificial Sequence
  Synthetic oligonucleotide
gggagaccgagaccggaacacgcaatcttt

SEQ ID NO: 135467 - DNA, 30 bp, Artificial Sequence
  Synthetic oligonucleotide
tcaggcaccagcgtactacgcctagtcttt

SEQ ID NO: 135468 - DNA, 30 bp, Artificial Sequence
  Synthetic oligonucleotide
gtggactatgcgatacgaactagcttcttt

SEQ ID NO: 135469 - DNA, 30 bp, Artificial Sequence
  Synthetic oligonucleotide
ctgccacaactccgttcgaacattaagttt

SEQ ID NO: 135470 - DNA, 30 bp, Artificial Sequence
  Synthetic oligonucleotide
tagggcgtacgttaatccttagcacagttt

SEQ ID NO: 135471 - DNA, 30 bp, Artificial Sequence
  Synthetic oligonucleotide
cggctactgctagcgatcccccgacagttt

SEQ ID NO: 135472 - DNA, 30 bp, Artificial Sequence
  Synthetic oligonucleotide
gccacaattacggttcataaagagcagttt

SEQ ID NO: 135473 - DNA, 30 bp, Artificial Sequence
  Synthetic oligonucleotide
tagcggttacgaatccttaagcaagagttt

SEQ ID NO: 135474 - DNA, 30 bp, Artificial Sequence
  Synthetic oligonucleotide
ctggggggaaggaggtgaggagcggagttt

SEQ ID NO: 135475 - DNA, 30 bp, Artificial Sequence
  Synthetic oligonucleotide
ctaatgcaacgggacatctggacttagttt

SEQ ID NO: 135476 - DNA, 30 bp, Artificial Sequence
  Synthetic oligonucleotide
gcgcgaaagatggcatagtattagccgttt

SEQ ID NO: 135477 - DNA, 30 bp, Artificial Sequence
  Synthetic oligonucleotide
gcgggatatctaaggacacattatccgttt

SEQ ID NO: 135478 - DNA, 30 bp, Artificial Sequence
  Synthetic oligonucleotide
caagtggaggaatatccagtcaacaggttt

SEQ ID NO: 135479 - DNA, 30 bp, Artificial Sequence
  Synthetic oligonucleotide
agaggatgcagagcgaaaacgtcacggttt

SEQ ID NO: 135480 - DNA, 30 bp, Artificial Sequence
  Synthetic oligonucleotide
aaatgaaaggataatggaattccgcggttt

SEQ ID NO: 135481 - DNA, 30 bp, Artificial Sequence
  Synthetic oligonucleotide
cgagtaggcctgcataaatcgatagggttt

SEQ ID NO: 135482 - DNA, 30 bp, Artificial Sequence
  Synthetic oligonucleotide
taatcgacgcgtatattaaagattgggttt

SEQ ID NO: 135483 - DNA, 30 bp, Artificial Sequence
  Synthetic oligonucleotide
ggcgacccttccgtagatctagaatggttt

SEQ ID NO: 135484 - DNA, 30 bp, Artificial Sequence
  Synthetic oligonucleotide
ttttcccgtcagggtaggagaatctggttt

SEQ ID NO: 135485 - DNA, 30 bp, Artificial Sequence
  Synthetic oligonucleotide
ctgcggggcgaaaatcacgggcagatgttt

SEQ ID NO: 135486 - DNA, 30 bp, Artificial Sequence
  Synthetic oligonucleotide
gggcggttagagggcagacattaagtgttt

SEQ ID NO: 135487 - DNA, 30 bp, Artificial Sequence
  Synthetic oligonucleotide
cctttcgagcggatgatctttagcgtgttt

SEQ ID NO: 135488 - DNA, 30 bp, Artificial Sequence
  Synthetic oligonucleotide
gatagcacagttccatgttagcccttgttt

SEQ ID NO: 135489 - DNA, 30 bp, Artificial Sequence
  Synthetic oligonucleotide
acaagacaaaagctgataatgatcttgttt

SEQ ID NO: 135490 - DNA, 30 bp, Artificial Sequence
  Synthetic oligonucleotide
cagacaagcctccttgcaaagactaatttt

SEQ ID NO: 135491 - DNA, 30 bp, Artificial Sequence
  Synthetic oligonucleotide
catagcgacaccggctgacgtactaatttt

SEQ ID NO: 135492 - DNA, 30 bp, Artificial Sequence
  Synthetic oligonucleotide
gaccaccgatgaagtgcgcatcaacatttt

SEQ ID NO: 135493 - DNA, 30 bp, Artificial Sequence
  Synthetic oligonucleotide
gagaccggggaagacgtcgggagccatttt

SEQ ID NO: 135494 - DNA, 30 bp, Artificial Sequence
  Synthetic oligonucleotide
acagaatatacccgttggagtgatgatttt

SEQ ID NO: 135495 - DNA, 30 bp, Artificial Sequence
  Synthetic oligonucleotide
ggtacatggggttacaaagatcacactttt

SEQ ID NO: 135496 - DNA, 30 bp, Artificial Sequence
  Synthetic oligonucleotide
ggcgagagcgaggagttgagtaaacctttt

SEQ ID NO: 135497 - DNA, 30 bp, Artificial Sequence
  Synthetic oligonucleotide
tagccagtggtatgctaacaatacagtttt

SEQ ID NO: 135498 - DNA, 30 bp, Artificial Sequence
  Synthetic oligonucleotide
gtaacaatgtgaagagtgtggtagcgtttt

SEQ ID NO: 135499 - DNA, 30 bp, Artificial Sequence
  Synthetic oligonucleotide
aggcatttaggacaggcgcgacgtcgtttt

SEQ ID NO: 135500 - DNA, 30 bp, Artificial Sequence
  Synthetic oligonucleotide
tcttggatgcgaatcaagacgatctgtttt

SEQ ID NO: 135501 - DNA, 30 bp, Artificial Sequence
  Synthetic oligonucleotide
gtttgggcgaagagtcaaaagagttgtttt

SEQ ID NO: 135502 - DNA, 30 bp, Artificial Sequence
  Synthetic oligonucleotide
tgagtcataccctcgtagtgtgtgcttttt

SEQ ID NO: 135503 - DNA, 30 bp, Artificial Sequence
  Synthetic oligonucleotide
gtacgtctgttaacatactgtaccaaaaaa

SEQ ID NO: 135504 - DNA, 30 bp, Artificial Sequence
  Synthetic oligonucleotide
acgctgaagggtgcactgattaccaaaaaa

SEQ ID NO: 135505 - DNA, 30 bp, Artificial Sequence
  Synthetic oligonucleotide
taaaatcacgaagtggaataagtgaaaaaa

SEQ ID NO: 135506 - DNA, 30 bp, Artificial Sequence
  Synthetic oligonucleotide
gaccaggtcaaatgttcctgatagcaaaaa

SEQ ID NO: 135507 - DNA, 30 bp, Artificial Sequence
  Synthetic oligonucleotide
ctatgcgtgctgcgtaaggcgttgcaaaaa

SEQ ID NO: 135508 - DNA, 30 bp, Artificial Sequence
  Synthetic oligonucleotide
atggtagtaagtgggcattgtcatcaaaaa

SEQ ID NO: 135509 - DNA, 30 bp, Artificial Sequence
  Synthetic oligonucleotide
gcagcgggacaagctggctccagtcaaaaa

SEQ ID NO: 135510 - DNA, 30 bp, Artificial Sequence
  Synthetic oligonucleotide
acctgactcatggatgtgggatgtcaaaaa

SEQ ID NO: 135511 - DNA, 30 bp, Artificial Sequence
  Synthetic oligonucleotide
catctatcgtatctagtggggcaagaaaaa

SEQ ID NO: 135512 - DNA, 30 bp, Artificial Sequence
  Synthetic oligonucleotide
gcaagcgaccaaatcaaaaccagagaaaaa

SEQ ID NO: 135513 - DNA, 30 bp, Artificial Sequence
  Synthetic oligonucleotide
acacgtgtccagaaagaacgctgagaaaaa

SEQ ID NO: 135514 - DNA, 30 bp, Artificial Sequence
  Synthetic oligonucleotide
cactagtgaggtgtataagcgaacgaaaaa

SEQ ID NO: 135515 - DNA, 30 bp, Artificial Sequence
  Synthetic oligonucleotide
taggtggacagtgaaaaaattcgcgaaaaa

SEQ ID NO: 135516 - DNA, 30 bp, Artificial Sequence
  Synthetic oligonucleotide
ggtacgactttaaatatgtacatcgaaaaa

SEQ ID NO: 135517 - DNA, 30 bp, Artificial Sequence
  Synthetic oligonucleotide
caggtgtgtcccgattctatcctcgaaaaa

SEQ ID NO: 135518 - DNA, 30 bp, Artificial Sequence
  Synthetic oligonucleotide
ggggagagggcataggcattctaggaaaaa

SEQ ID NO: 135519 - DNA, 30 bp, Artificial Sequence
  Synthetic oligonucleotide
ataggggtgggaatgatcgaatctgaaaaa

SEQ ID NO: 135520 - DNA, 30 bp, Artificial Sequence
  Synthetic oligonucleotide
tcattccgtgcctagattgctgggtaaaaa

SEQ ID NO: 135521 - DNA, 30 bp, Artificial Sequence
  Synthetic oligonucleotide
tggacggagacagtcgaggaactgtaaaaa

SEQ ID NO: 135522 - DNA, 30 bp, Artificial Sequence
  Synthetic oligonucleotide
tgcaaaaagtggggtttgcttcgttaaaaa

SEQ ID NO: 135523 - DNA, 30 bp, Artificial Sequence
  Synthetic oligonucleotide
taggtcaaacctagttgcgctagcacaaaa

SEQ ID NO: 135524 - DNA, 30 bp, Artificial Sequence
  Synthetic oligonucleotide
cacttcgggcgcgcacgggcacagacaaaa

SEQ ID NO: 135525 - DNA, 30 bp, Artificial Sequence
  Synthetic oligonucleotide
taactgatactgccgttcgataatacaaaa

SEQ ID NO: 135526 - DNA, 30 bp, Artificial Sequence
  Synthetic oligonucleotide
ggtgtggtgacgtggtgggaatagccaaaa

SEQ ID NO: 135527 - DNA, 30 bp, Artificial Sequence
  Synthetic oligonucleotide
aagccttccagaaccaacaatacgccaaaa

SEQ ID NO: 135528 - DNA, 30 bp, Artificial Sequence
  Synthetic oligonucleotide
ctccgtagtgaggttcgttgagtagcaaaa

SEQ ID NO: 135529 - DNA, 30 bp, Artificial Sequence
  Synthetic oligonucleotide
accagaggataggcacagggtcgtgcaaaa

SEQ ID NO: 135530 - DNA, 30 bp, Artificial Sequence
  Synthetic oligonucleotide
tctgccgtacctgatgccgcccgctcaaaa

SEQ ID NO: 135531 - DNA, 30 bp, Artificial Sequence
  Synthetic oligonucleotide
gccaccattactcataaggaaaagtcaaaa

SEQ ID NO: 135532 - DNA, 30 bp, Artificial Sequence
  Synthetic oligonucleotide
ccacgagcggctaacctatcatgttcaaaa

SEQ ID NO: 135533 - DNA, 30 bp, Artificial Sequence
  Synthetic oligonucleotide
cgtactagaggcacttttcccgaaagaaaa

SEQ ID NO: 135534 - DNA, 30 bp, Artificial Sequence
  Synthetic oligonucleotide
ccagtaagcaacccccgcttgacaagaaaa

SEQ ID NO: 135535 - DNA, 30 bp, Artificial Sequence
  Synthetic oligonucleotide
agtattgacgtgtaggtctgtggaagaaaa

SEQ ID NO: 135536 - DNA, 30 bp, Artificial Sequence
  Synthetic oligonucleotide
atgaggtggctgcttggttggggcagaaaa

SEQ ID NO: 135537 - DNA, 30 bp, Artificial Sequence
  Synthetic oligonucleotide
ggacgttctccgacagggttcgaacgaaaa

SEQ ID NO: 135538 - DNA, 30 bp, Artificial Sequence
  Synthetic oligonucleotide
aggtgatatggtagttgtcgcacacgaaaa

SEQ ID NO: 135539 - DNA, 30 bp, Artificial Sequence
  Synthetic oligonucleotide
gcgttgcacgtcagtactgaacgccgaaaa

SEQ ID NO: 135540 - DNA, 30 bp, Artificial Sequence
  Synthetic oligonucleotide
gctattgaaaaaaacatagtggaaggaaaa

SEQ ID NO: 135541 - DNA, 30 bp, Artificial Sequence
  Synthetic oligonucleotide
acctgacgaaattactaatgtagaggaaaa

SEQ ID NO: 135542 - DNA, 30 bp, Artificial Sequence
  Synthetic oligonucleotide
ataacaaacgctattggggtaatcggaaaa

SEQ ID NO: 135543 - DNA, 30 bp, Artificial Sequence
  Synthetic oligonucleotide
tgtttaatacgagttcgacgatatggaaaa

SEQ ID NO: 135544 - DNA, 30 bp, Artificial Sequence
  Synthetic oligonucleotide
tcagtacaggacgaatgatcacctggaaaa

SEQ ID NO: 135545 - DNA, 30 bp, Artificial Sequence
  Synthetic oligonucleotide
aacgcctgtggggaatcagcctttggaaaa

SEQ ID NO: 135546 - DNA, 30 bp, Artificial Sequence
  Synthetic oligonucleotide
acagtctgacaacaacctaaacaatgaaaa

SEQ ID NO: 135547 - DNA, 30 bp, Artificial Sequence
  Synthetic oligonucleotide
ccagagtcacatgcaatcgttaactgaaaa

SEQ ID NO: 135548 - DNA, 30 bp, Artificial Sequence
  Synthetic oligonucleotide
aaaggttgtctgctacgtccatactgaaaa

SEQ ID NO: 135549 - DNA, 30 bp, Artificial Sequence
  Synthetic oligonucleotide
tacgaaattctttggcaccttccctgaaaa

SEQ ID NO: 135550 - DNA, 30 bp, Artificial Sequence
  Synthetic oligonucleotide
ttctcagtaccatacgacttcatgtgaaaa

SEQ ID NO: 135551 - DNA, 30 bp, Artificial Sequence
  Synthetic oligonucleotide
gaatggacacacagcaaaggtcattgaaaa

SEQ ID NO: 135552 - DNA, 30 bp, Artificial Sequence
  Synthetic oligonucleotide
ggacgaaacggttaaaaaggattttgaaaa

SEQ ID NO: 135553 - DNA, 30 bp, Artificial Sequence
  Synthetic oligonucleotide
aaggatttggcagggaatgctccaataaaa

SEQ ID NO: 135554 - DNA, 30 bp, Artificial Sequence
  Synthetic oligonucleotide
atccctaatgggaaaaatcgagatataaaa

SEQ ID NO: 135555 - DNA, 30 bp, Artificial Sequence
  Synthetic oligonucleotide
acgtatcagtgagtctggcgtaagctaaaa

SEQ ID NO: 135556 - DNA, 30 bp, Artificial Sequence
  Synthetic oligonucleotide
aaaggtaatcaaagacttcaatcgctaaaa

SEQ ID NO: 135557 - DNA, 30 bp, Artificial Sequence
  Synthetic oligonucleotide
tggaacgccgaagccacagcctcgctaaaa

SEQ ID NO: 135558 - DNA, 31 bp, Artificial Sequence
  Synthetic oligonucleotide
acgtccgtcattacgtgataagatgctaaaa

SEQ ID NO: 135559 - DNA, 30 bp, Artificial Sequence
  Synthetic oligonucleotide
aagccgtaaggttagtgcgagactctaaaa

SEQ ID NO: 135560 - DNA, 30 bp, Artificial Sequence
  Synthetic oligonucleotide
cgatccattcgtataaacaattgagtaaaa

SEQ ID NO: 135561 - DNA, 30 bp, Artificial Sequence
  Synthetic oligonucleotide
ggtgtgaatgaaggtaagattttagtaaaa

SEQ ID NO: 135562 - DNA, 30 bp, Artificial Sequence
  Synthetic oligonucleotide
acggatattagtggcgaaaatcgtgtaaaa

SEQ ID NO: 135563 - DNA, 30 bp, Artificial Sequence
  Synthetic oligonucleotide
atggtaatctctcgggctgaggccttaaaa

SEQ ID NO: 135564 - DNA, 29 bp, Artificial Sequence
  Synthetic oligonucleotide
acagtccggggtcgtcatagcgcttaaaa

SEQ ID NO: 135565 - DNA, 30 bp, Artificial Sequence
  Synthetic oligonucleotide
taatccacgataaagtgaagacggttaaaa

SEQ ID NO: 135566 - DNA, 30 bp, Artificial Sequence
  Synthetic oligonucleotide
aggtgtttatgtaatgtgatgagtttaaaa

SEQ ID NO: 135567 - DNA, 30 bp, Artificial Sequence
  Synthetic oligonucleotide
tttagctcgtgtgccaagcggccaaacaaa

SEQ ID NO: 135568 - DNA, 30 bp, Artificial Sequence
  Synthetic oligonucleotide
cggttgagagttacttcgcccataaacaaa

SEQ ID NO: 135569 - DNA, 30 bp, Artificial Sequence
  Synthetic oligonucleotide
atatttgagaagtgagacaccaccaacaaa

SEQ ID NO: 135570 - DNA, 30 bp, Artificial Sequence
  Synthetic oligonucleotide
atcgttatgtctctcatcaggggcaacaaa

SEQ ID NO: 135571 - DNA, 30 bp, Artificial Sequence
  Synthetic oligonucleotide
ggtgtgtaggtcgattgaaatcaccacaaa

SEQ ID NO: 135572 - DNA, 30 bp, Artificial Sequence
  Synthetic oligonucleotide
gttaggcttgaaaattgaaccacccacaaa

SEQ ID NO: 135573 - DNA, 30 bp, Artificial Sequence
  Synthetic oligonucleotide
aaccctaagaacggttaatgagggcacaaa

SEQ ID NO: 135574 - DNA, 30 bp, Artificial Sequence
  Synthetic oligonucleotide
ggttgatgagctaaagtgcgcgggcacaaa

SEQ ID NO: 135575 - DNA, 30 bp, Artificial Sequence
  Synthetic oligonucleotide
ccggagaccgctgagcgggcctggcacaaa

SEQ ID NO: 135576 - DNA, 30 bp, Artificial Sequence
  Synthetic oligonucleotide
agcattctacgagggagacaagaagacaaa

SEQ ID NO: 135577 - DNA, 30 bp, Artificial Sequence
  Synthetic oligonucleotide
tatcttgatgggttaactggaaacgacaaa

SEQ ID NO: 135578 - DNA, 30 bp, Artificial Sequence
  Synthetic oligonucleotide
caatgatcgttccctggtgattacgacaaa

SEQ ID NO: 135579 - DNA, 30 bp, Artificial Sequence
  Synthetic oligonucleotide
gcgactgtccagcatacggtcaaggacaaa

SEQ ID NO: 135580 - DNA, 30 bp, Artificial Sequence
  Synthetic oligonucleotide
cgggtatttaaactagagcccgggtacaaa

SEQ ID NO: 135581 - DNA, 30 bp, Artificial Sequence
  Synthetic oligonucleotide
cagttcagaaaaggacaccaccgaaccaaa

SEQ ID NO: 135582 - DNA, 30 bp, Artificial Sequence
  Synthetic oligonucleotide
cagccagttacaaaaatgtcctacaccaaa

SEQ ID NO: 135583 - DNA, 30 bp, Artificial Sequence
  Synthetic oligonucleotide
ataacaatggtcatagatacttgcaccaaa

SEQ ID NO: 135584 - DNA, 30 bp, Artificial Sequence
  Synthetic oligonucleotide
gtccggagcagaacagacgcaaatcccaaa

SEQ ID NO: 135585 - DNA, 30 bp, Artificial Sequence
  Synthetic oligonucleotide
ataagaacaaaaacacaggttcttcccaaa

SEQ ID NO: 135586 - DNA, 30 bp, Artificial Sequence
  Synthetic oligonucleotide
tcaccctacgaaagaagacgtcaagccaaa

SEQ ID NO: 135587 - DNA, 30 bp, Artificial Sequence
  Synthetic oligonucleotide
taacaaagtacgtggggtgaaaacgccaaa

SEQ ID NO: 135588 - DNA, 30 bp, Artificial Sequence
  Synthetic oligonucleotide
gcagaagtctgcgctggactgacggccaaa

SEQ ID NO: 135589 - DNA, 30 bp, Artificial Sequence
  Synthetic oligonucleotide
ggcgtcgatattcttgcaccaggtgccaaa

SEQ ID NO: 135590 - DNA, 30 bp, Artificial Sequence
  Synthetic oligonucleotide
gaccgcatgcgtacccaagggccgtccaaa

SEQ ID NO: 135591 - DNA, 30 bp, Artificial Sequence
  Synthetic oligonucleotide
gtcaatgcactgcggaattattacagcaaa

SEQ ID NO: 135592 - DNA, 30 bp, Artificial Sequence
  Synthetic oligonucleotide
agagtcaagccctagtcagctacgagcaaa

SEQ ID NO: 135593 - DNA, 30 bp, Artificial Sequence
  Synthetic oligonucleotide
tacacggataccaatacgtaaaggagcaaa

SEQ ID NO: 135594 - DNA, 30 bp, Artificial Sequence
  Synthetic oligonucleotide
gcagatgtcgagcagcgggtttcgcgcaaa

SEQ ID NO: 135595 - DNA, 30 bp, Artificial Sequence
  Synthetic oligonucleotide
aaacacgctttactcccgatagggcgcaaa

SEQ ID NO: 135596 - DNA, 30 bp, Artificial Sequence
  Synthetic oligonucleotide
tgtttaagagagagaatatatcatcgcaaa

SEQ ID NO: 135597 - DNA, 30 bp, Artificial Sequence
  Synthetic oligonucleotide
catggttaaacctctatcaaacgtcgcaaa

SEQ ID NO: 135598 - DNA, 30 bp, Artificial Sequence
  Synthetic oligonucleotide
gtacacagtcgctttaccgggaaaggcaaa

SEQ ID NO: 135599 - DNA, 30 bp, Artificial Sequence
  Synthetic oligonucleotide
ggcccgagggtttatatagatataggcaaa

SEQ ID NO: 135600 - DNA, 30 bp, Artificial Sequence
  Synthetic oligonucleotide
ggggcacatcggggagtacacgatggcaaa

SEQ ID NO: 135601 - DNA, 30 bp, Artificial Sequence
  Synthetic oligonucleotide
tgtgctcaatccatgcatcgagaatgcaaa

SEQ ID NO: 135602 - DNA, 30 bp, Artificial Sequence
  Synthetic oligonucleotide
caagtgttgtgcctacgaaccgggtgcaaa

SEQ ID NO: 135603 - DNA, 30 bp, Artificial Sequence
  Synthetic oligonucleotide
cgacgccgttagccaaacttgcgaatcaaa

SEQ ID NO: 135604 - DNA, 30 bp, Artificial Sequence
  Synthetic oligonucleotide
tgtgtgaaagtccgaggtagaaccatcaaa

SEQ ID NO: 135605 - DNA, 30 bp, Artificial Sequence
  Synthetic oligonucleotide
acttacgataaaagcggtaagaagatcaaa

SEQ ID NO: 135606 - DNA, 30 bp, Artificial Sequence
  Synthetic oligonucleotide
cgcgttaataaacgttggacgagactcaaa

SEQ ID NO: 135607 - DNA, 30 bp, Artificial Sequence
  Synthetic oligonucleotide
tgcgcgggtaagcaggctctaaccgtcaaa

SEQ ID NO: 135608 - DNA, 30 bp, Artificial Sequence
  Synthetic oligonucleotide
aggtgctgggcggttatcaagaccgtcaaa

SEQ ID NO: 135609 - DNA, 30 bp, Artificial Sequence
  Synthetic oligonucleotide
taatgggatttgcaacgaaacgtcgtcaaa

SEQ ID NO: 135610 - DNA, 30 bp, Artificial Sequence
  Synthetic oligonucleotide
aggacccactaagctagagttttcgtcaaa

SEQ ID NO: 135611 - DNA, 30 bp, Artificial Sequence
  Synthetic oligonucleotide
aaaacaagagcgtggggagttaaggtcaaa

SEQ ID NO: 135612 - DNA, 30 bp, Artificial Sequence
  Synthetic oligonucleotide
ctgtagcaaatgtgcattcgtgtggtcaaa

SEQ ID NO: 135613 - DNA, 30 bp, Artificial Sequence
  Synthetic oligonucleotide
catacacttgaccagagaggaaaattcaaa

SEQ ID NO: 135614 - DNA, 30 bp, Artificial Sequence
  Synthetic oligonucleotide
agatacgttaaccgtcggctgccattcaaa

SEQ ID NO: 135615 - DNA, 30 bp, Artificial Sequence
  Synthetic oligonucleotide
aacaccaagattgcatacgcatacttcaaa

SEQ ID NO: 135616 - DNA, 30 bp, Artificial Sequence
  Synthetic oligonucleotide
atacgatccagagattctcggcggttcaaa

SEQ ID NO: 135617 - DNA, 30 bp, Artificial Sequence
  Synthetic oligonucleotide
tagggcttgatagcaggactggagaagaaa

SEQ ID NO: 135618 - DNA, 29 bp, Artificial Sequence
  Synthetic oligonucleotide
aggaattgacagaccctacaattaagaaa

SEQ ID NO: 135619 - DNA, 30 bp, Artificial Sequence
  Synthetic oligonucleotide
gcacagtcggcgcacagcaacgtacagaaa

SEQ ID NO: 135620 - DNA, 30 bp, Artificial Sequence
  Synthetic oligonucleotide
tggtagctagaggttagggcagagcagaaa

SEQ ID NO: 135621 - DNA, 30 bp, Artificial Sequence
  Synthetic oligonucleotide
ccggctaacatagttcggtgaatgcagaaa

SEQ ID NO: 135622 - DNA, 30 bp, Artificial Sequence
  Synthetic oligonucleotide
ctaccggcatacgactgagaagttcagaaa

SEQ ID NO: 135623 - DNA, 30 bp, Artificial Sequence
  Synthetic oligonucleotide
cgaactcggagttgctactgtaaagagaaa

SEQ ID NO: 135624 - DNA, 30 bp, Artificial Sequence
  Synthetic oligonucleotide
ctgaggacggatagcgaatgcggatagaaa

SEQ ID NO: 135625 - DNA, 30 bp, Artificial Sequence
  Synthetic oligonucleotide
taaaagacacggagcgagtcttagtagaaa

SEQ ID NO: 135626 - DNA, 30 bp, Artificial Sequence
  Synthetic oligonucleotide
accaactcgtggggtaaagcctggtagaaa

SEQ ID NO: 135627 - DNA, 30 bp, Artificial Sequence
  Synthetic oligonucleotide
cctggcgctacttgtatatagctgtagaaa

SEQ ID NO: 135628 - DNA, 30 bp, Artificial Sequence
  Synthetic oligonucleotide
ccgggaggatgctaagtcttgggcacgaaa

SEQ ID NO: 135629 - DNA, 30 bp, Artificial Sequence
  Synthetic oligonucleotide
ccacacaagacatcatcgcataagacgaaa

SEQ ID NO: 135630 - DNA, 30 bp, Artificial Sequence
  Synthetic oligonucleotide
atacttgaattggtatcgcgggcgacgaaa

SEQ ID NO: 135631 - DNA, 30 bp, Artificial Sequence
  Synthetic oligonucleotide
gaggatagtccaaccctaccaccaccgaaa

SEQ ID NO: 135632 - DNA, 30 bp, Artificial Sequence
  Synthetic oligonucleotide
tggaaaagccagatgagtcttggcccgaaa

SEQ ID NO: 135633 - DNA, 30 bp, Artificial Sequence
  Synthetic oligonucleotide
tgtatagctttgctagcagatgggccgaaa

SEQ ID NO: 135634 - DNA, 30 bp, Artificial Sequence
  Synthetic oligonucleotide
tcggggtatagtctatagctataagcgaaa

SEQ ID NO: 135635 - DNA, 30 bp, Artificial Sequence
  Synthetic oligonucleotide
tttgcagtatttataggccagggagcgaaa

SEQ ID NO: 135636 - DNA, 30 bp, Artificial Sequence
  Synthetic oligonucleotide
agggtcgctcaaacaagtgcttgagcgaaa

SEQ ID NO: 135637 - DNA, 30 bp, Artificial Sequence
  Synthetic oligonucleotide
gggccgaagttgcggtgctcccctgcgaaa

SEQ ID NO: 135638 - DNA, 30 bp, Artificial Sequence
  Synthetic oligonucleotide
gacacccggggggcgttggcgcgtgcgaaa

SEQ ID NO: 135639 - DNA, 30 bp, Artificial Sequence
  Synthetic oligonucleotide
cggatgacccgttgtataaaggttgcgaaa

SEQ ID NO: 135640 - DNA, 30 bp, Artificial Sequence
  Synthetic oligonucleotide
cgagccccagctgtcaaattttcatcgaaa

SEQ ID NO: 135641 - DNA, 30 bp, Artificial Sequence
  Synthetic oligonucleotide
tctactgccagaatgagagttttatcgaaa

SEQ ID NO: 135642 - DNA, 30 bp, Artificial Sequence
  Synthetic oligonucleotide
gactctagaggctcaagaaaaatctcgaaa

SEQ ID NO: 135643 - DNA, 30 bp, Artificial Sequence
  Synthetic oligonucleotide
agtgactgtgcattggatgcgtcgtcgaaa

SEQ ID NO: 135644 - DNA, 30 bp, Artificial Sequence
  Synthetic oligonucleotide
gcgtcatatgcaaaatagggaaggtcgaaa

SEQ ID NO: 135645 - DNA, 30 bp, Artificial Sequence
  Synthetic oligonucleotide
gtaaagttcagaatgactggatcaaggaaa

SEQ ID NO: 135646 - DNA, 30 bp, Artificial Sequence
  Synthetic oligonucleotide
ttgcatgagctgactgctttttagaggaaa

SEQ ID NO: 135647 - DNA, 30 bp, Artificial Sequence
  Synthetic oligonucleotide
ggccgtcacttttaggctaagaggaggaaa

SEQ ID NO: 135648 - DNA, 30 bp, Artificial Sequence
  Synthetic oligonucleotide
tgatacccgccagactaaaatttgaggaaa

SEQ ID NO: 135649 - DNA, 30 bp, Artificial Sequence
  Synthetic oligonucleotide
cgggatgcagcgaggctagcaagtaggaaa

SEQ ID NO: 135650 - DNA, 30 bp, Artificial Sequence
  Synthetic oligonucleotide
ttggtacctctcatgtgctcgctccggaaa

SEQ ID NO: 135651 - DNA, 30 bp, Artificial Sequence
  Synthetic oligonucleotide
ggatcggggcagggaaggccaactcggaaa

SEQ ID NO: 135652 - DNA, 30 bp, Artificial Sequence
  Synthetic oligonucleotide
gtgattcgcggtggttcaagttccgggaaa

SEQ ID NO: 135653 - DNA, 30 bp, Artificial Sequence
  Synthetic oligonucleotide
actccgtagtgaatattcgagcaatggaaa

SEQ ID NO: 135654 - DNA, 30 bp, Artificial Sequence
  Synthetic oligonucleotide
aggggcgcttgactaacaatcccatggaaa

SEQ ID NO: 135655 - DNA, 30 bp, Artificial Sequence
  Synthetic oligonucleotide
ataaatagaggttacaggcactcatggaaa

SEQ ID NO: 135656 - DNA, 30 bp, Artificial Sequence
  Synthetic oligonucleotide
aagacgccacaaggtggcaaagactggaaa

SEQ ID NO: 135657 - DNA, 30 bp, Artificial Sequence
  Synthetic oligonucleotide
aggttgtcgacgatcatcgcatcgtggaaa

SEQ ID NO: 135658 - DNA, 30 bp, Artificial Sequence
  Synthetic oligonucleotide
tagtctgcctgtttagagggccgttggaaa

SEQ ID NO: 135659 - DNA, 30 bp, Artificial Sequence
  Synthetic oligonucleotide
cactgacctgagtggactggtcccatgaaa

SEQ ID NO: 135660 - DNA, 30 bp, Artificial Sequence
  Synthetic oligonucleotide
cattcgcgtatcaatacaacacgactgaaa

SEQ ID NO: 135661 - DNA, 30 bp, Artificial Sequence
  Synthetic oligonucleotide
cggttcatctaacagggattcggactgaaa

SEQ ID NO: 135662 - DNA, 30 bp, Artificial Sequence
  Synthetic oligonucleotide
atagaacaaatagccaagtatcgcctgaaa

SEQ ID NO: 135663 - DNA, 30 bp, Artificial Sequence
  Synthetic oligonucleotide
gcttagaatcagatccacaatcatctgaaa

SEQ ID NO: 135664 - DNA, 30 bp, Artificial Sequence
  Synthetic oligonucleotide
ctgaggagttgtatcacgcgtcgtctgaaa

SEQ ID NO: 135665 - DNA, 30 bp, Artificial Sequence
  Synthetic oligonucleotide
aatgcgactcgtagtgtgggccttctgaaa

SEQ ID NO: 135666 - DNA, 30 bp, Artificial Sequence
  Synthetic oligonucleotide
tacactcacggtaaattacagagcgtgaaa

SEQ ID NO: 135667 - DNA, 30 bp, Artificial Sequence
  Synthetic oligonucleotide
ggactctccatgcgtaccagggcggtgaaa

SEQ ID NO: 135668 - DNA, 30 bp, Artificial Sequence
  Synthetic oligonucleotide
tgagcctccgtaaaatatagctatgtgaaa

SEQ ID NO: 135669 - DNA, 30 bp, Artificial Sequence
  Synthetic oligonucleotide
gggcctcgtaggtaggtgggtatattgaaa

SEQ ID NO: 135670 - DNA, 30 bp, Artificial Sequence
  Synthetic oligonucleotide
aaccggctcatagtaagcgtgtacttgaaa

SEQ ID NO: 135671 - DNA, 30 bp, Artificial Sequence
  Synthetic oligonucleotide
tacgggaccactcagcagttacccttgaaa

SEQ ID NO: 135672 - DNA, 30 bp, Artificial Sequence
  Synthetic oligonucleotide
atgattaagagctaggtcaaccccttgaaa

SEQ ID NO: 135673 - DNA, 31 bp, Artificial Sequence
  Synthetic oligonucleotide
cacagactatataattgtgaggaagttgaaa

SEQ ID NO: 135674 - DNA, 30 bp, Artificial Sequence
  Synthetic oligonucleotide
cgtgaatttacgtgacaaagttagttgaaa

SEQ ID NO: 135675 - DNA, 30 bp, Artificial Sequence
  Synthetic oligonucleotide
aagggtgagtctccggggcatagaaataaa

SEQ ID NO: 135676 - DNA, 30 bp, Artificial Sequence
  Synthetic oligonucleotide
gtgctttacggagagaggcacggaaataaa

SEQ ID NO: 135677 - DNA, 30 bp, Artificial Sequence
  Synthetic oligonucleotide
acatcgcactcgattgatccgggaaataaa

SEQ ID NO: 135678 - DNA, 30 bp, Artificial Sequence
  Synthetic oligonucleotide
tagaggcaccttagcggggacttaaataaa

SEQ ID NO: 135679 - DNA, 30 bp, Artificial Sequence
  Synthetic oligonucleotide
ctagtagaaaggttggtgaactacaataaa

SEQ ID NO: 135680 - DNA, 30 bp, Artificial Sequence
  Synthetic oligonucleotide
tccgagagtataagcagaagatgtaataaa

SEQ ID NO: 135681 - DNA, 30 bp, Artificial Sequence
  Synthetic oligonucleotide
acgcaatgtatgttaaaagtgcaccataaa

SEQ ID NO: 135682 - DNA, 30 bp, Artificial Sequence
  Synthetic oligonucleotide
ggaaaagtggaaggggacccttagcataaa

SEQ ID NO: 135683 - DNA, 30 bp, Artificial Sequence
  Synthetic oligonucleotide
gaccgatttaataccaaggagtggcataaa

SEQ ID NO: 135684 - DNA, 30 bp, Artificial Sequence
  Synthetic oligonucleotide
gctatttggtggatgcgaagagacgataaa

SEQ ID NO: 135685 - DNA, 30 bp, Artificial Sequence
  Synthetic oligonucleotide
tctaaggttgaaagcgagattgttgataaa

SEQ ID NO: 135686 - DNA, 30 bp, Artificial Sequence
  Synthetic oligonucleotide
gtacgtcaagatatgcgatgtgaatataaa

SEQ ID NO: 135687 - DNA, 30 bp, Artificial Sequence
  Synthetic oligonucleotide
catgatcgaaataagtagcacccctataaa

SEQ ID NO: 135688 - DNA, 30 bp, Artificial Sequence
  Synthetic oligonucleotide
agatgggcaaatgattcttaacagtataaa

SEQ ID NO: 135689 - DNA, 30 bp, Artificial Sequence
  Synthetic oligonucleotide
aacaaaggagaatatatgagtaattataaa

SEQ ID NO: 135690 - DNA, 30 bp, Artificial Sequence
  Synthetic oligonucleotide
acttatatagcaaggacgatattttataaa

SEQ ID NO: 135691 - DNA, 30 bp, Artificial Sequence
  Synthetic oligonucleotide
acgggatcccagaaattctctgtaactaaa

SEQ ID NO: 135692 - DNA, 30 bp, Artificial Sequence
  Synthetic oligonucleotide
cgactgacaaatgtagtagtgtctactaaa

SEQ ID NO: 135693 - DNA, 30 bp, Artificial Sequence
  Synthetic oligonucleotide
gacaacaaaacagcatcaattgagcctaaa

SEQ ID NO: 135694 - DNA, 30 bp, Artificial Sequence
  Synthetic oligonucleotide
tgtgtacgtaaagaggttggtaaggctaaa

SEQ ID NO: 135695 - DNA, 30 bp, Artificial Sequence
  Synthetic oligonucleotide
taacacacccaaagagcccagcgtgctaaa

SEQ ID NO: 135696 - DNA, 30 bp, Artificial Sequence
  Synthetic oligonucleotide
tcgcaaaggctactttgtcaagcctctaaa

SEQ ID NO: 135697 - DNA, 30 bp, Artificial Sequence
  Synthetic oligonucleotide
cactaaaagtcagtacagatcctgtctaaa

SEQ ID NO: 135698 - DNA, 30 bp, Artificial Sequence
  Synthetic oligonucleotide
tagtatgcccgtaatgactgttattctaaa

SEQ ID NO: 135699 - DNA, 30 bp, Artificial Sequence
  Synthetic oligonucleotide
cctcgattggatgctgacgagatcagtaaa

SEQ ID NO: 135700 - DNA, 30 bp, Artificial Sequence
  Synthetic oligonucleotide
gtatagctagatcaggaataaacgagtaaa

SEQ ID NO: 135701 - DNA, 30 bp, Artificial Sequence
  Synthetic oligonucleotide
cgggaatttctcatacagttaacgagtaaa

SEQ ID NO: 135702 - DNA, 30 bp, Artificial Sequence
  Synthetic oligonucleotide
cagtgccgataagggatgcaagggagtaaa

SEQ ID NO: 135703 - DNA, 30 bp, Artificial Sequence
  Synthetic oligonucleotide
ttgtagaattgctacaaactcgggagtaaa

SEQ ID NO: 135704 - DNA, 30 bp, Artificial Sequence
  Synthetic oligonucleotide
cggtgttaatggacactgccagtccgtaaa

SEQ ID NO: 135705 - DNA, 30 bp, Artificial Sequence
  Synthetic oligonucleotide
agaacggatgtcatcaagctgggaggtaaa

SEQ ID NO: 135706 - DNA, 30 bp, Artificial Sequence
  Synthetic oligonucleotide
aacttgacgttgaaagaggaatacggtaaa

SEQ ID NO: 135707 - DNA, 30 bp, Artificial Sequence
  Synthetic oligonucleotide
ttcgtagagtatgcgtcaactgtgggtaaa

SEQ ID NO: 135708 - DNA, 30 bp, Artificial Sequence
  Synthetic oligonucleotide
gagcccactatggaaggtctgcatggtaaa

SEQ ID NO: 135709 - DNA, 30 bp, Artificial Sequence
  Synthetic oligonucleotide
ggcccgagggtcactcattcatgtggtaaa

SEQ ID NO: 135710 - DNA, 30 bp, Artificial Sequence
  Synthetic oligonucleotide
atgagtggactcatcgtgaaggactgtaaa

SEQ ID NO: 135711 - DNA, 30 bp, Artificial Sequence
  Synthetic oligonucleotide
tgaagtattaagggcaagggttcgtgtaaa

SEQ ID NO: 135712 - DNA, 30 bp, Artificial Sequence
  Synthetic oligonucleotide
ctatggctcccgtgtagttagaattgtaaa

SEQ ID NO: 135713 - DNA, 30 bp, Artificial Sequence
  Synthetic oligonucleotide
ctacaaatcgatctcgctgcgaattgtaaa

SEQ ID NO: 135714 - DNA, 30 bp, Artificial Sequence
  Synthetic oligonucleotide
aagtcgacagcacgaaggaggtgttgtaaa

SEQ ID NO: 135715 - DNA, 30 bp, Artificial Sequence
  Synthetic oligonucleotide
caggcgtcgatgaacatgcttaacattaaa

SEQ ID NO: 135716 - DNA, 30 bp, Artificial Sequence
  Synthetic oligonucleotide
tatcatcgaacggagacccggtggattaaa

SEQ ID NO: 135717 - DNA, 30 bp, Artificial Sequence
  Synthetic oligonucleotide
ctgatgcgaccgcgagaagtggaacttaaa

SEQ ID NO: 135718 - DNA, 30 bp, Artificial Sequence
  Synthetic oligonucleotide
aaagccaacttcggattaattagccttaaa

SEQ ID NO: 135719 - DNA, 30 bp, Artificial Sequence
  Synthetic oligonucleotide
atggacgacggaagccttatgggtcttaaa

SEQ ID NO: 135720 - DNA, 30 bp, Artificial Sequence
  Synthetic oligonucleotide
aggccccacggagcatcatggtgagttaaa

SEQ ID NO: 135721 - DNA, 30 bp, Artificial Sequence
  Synthetic oligonucleotide
ctcgtagttgtcggatcgggagtctttaaa

SEQ ID NO: 135722 - DNA, 30 bp, Artificial Sequence
  Synthetic oligonucleotide
tcgggatctcgacatgacagagcgtttaaa

SEQ ID NO: 135723 - DNA, 30 bp, Artificial Sequence
  Synthetic oligonucleotide
cacacaggctgggttcgcacgtaaaaacaa

SEQ ID NO: 135724 - DNA, 30 bp, Artificial Sequence
  Synthetic oligonucleotide
atgcaaattcctacatcagttcgaaaacaa

SEQ ID NO: 135725 - DNA, 30 bp, Artificial Sequence
  Synthetic oligonucleotide
tttccccaaagggcttgatacaccaaacaa

SEQ ID NO: 135726 - DNA, 30 bp, Artificial Sequence
  Synthetic oligonucleotide
accttctcacagatactaccatagaaacaa

SEQ ID NO: 135727 - DNA, 30 bp, Artificial Sequence
  Synthetic oligonucleotide
ggctgttgccgtagaatcgcgtagaaacaa

SEQ ID NO: 135728 - DNA, 30 bp, Artificial Sequence
  Synthetic oligonucleotide
aaatgatttgccacgcgactgactaaacaa

SEQ ID NO: 135729 - DNA, 30 bp, Artificial Sequence
  Synthetic oligonucleotide
ctgcatgatcccaccttggaagttaaacaa

SEQ ID NO: 135730 - DNA, 30 bp, Artificial Sequence
  Synthetic oligonucleotide
atcggaggggggctattagacagacaacaa

SEQ ID NO: 135731 - DNA, 30 bp, Artificial Sequence
  Synthetic oligonucleotide
cgattaccacaacacgttccgtcccaacaa

SEQ ID NO: 135732 - DNA, 30 bp, Artificial Sequence
  Synthetic oligonucleotide
gagagcccaaaatacagaggttcccaacaa

SEQ ID NO: 135733 - DNA, 30 bp, Artificial Sequence
  Synthetic oligonucleotide
cggtaaggccagccctcgtcaaaggaacaa

SEQ ID NO: 135734 - DNA, 30 bp, Artificial Sequence
  Synthetic oligonucleotide
tggatgtcaggtccaatgtgaccggaacaa

SEQ ID NO: 135735 - DNA, 30 bp, Artificial Sequence
  Synthetic oligonucleotide
aggtctcccacagacggaccatatgaacaa

SEQ ID NO: 135736 - DNA, 30 bp, Artificial Sequence
  Synthetic oligonucleotide
tcgcataaaaagaatataaactgtgaacaa

SEQ ID NO: 135737 - DNA, 30 bp, Artificial Sequence
  Synthetic oligonucleotide
gggggtattacggaggtaatttcataacaa

SEQ ID NO: 135738 - DNA, 30 bp, Artificial Sequence
  Synthetic oligonucleotide
cgcctgttcgtgggtcatgtactataacaa

SEQ ID NO: 135739 - DNA, 30 bp, Artificial Sequence
  Synthetic oligonucleotide
ggcaaagcctcccgctaagcgtgttaacaa

SEQ ID NO: 135740 - DNA, 30 bp, Artificial Sequence
  Synthetic oligonucleotide
gtgcagtcaagcttaggaagatcaacacaa

SEQ ID NO: 135741 - DNA, 30 bp, Artificial Sequence
  Synthetic oligonucleotide
tgtgggtgaaatccagctatcggcacacaa

SEQ ID NO: 135742 - DNA, 30 bp, Artificial Sequence
  Synthetic oligonucleotide
aagcaaactgagtttcccgtcgggacacaa

SEQ ID NO: 135743 - DNA, 30 bp, Artificial Sequence
  Synthetic oligonucleotide
cacgacgtggtcccaggtagttttacacaa

SEQ ID NO: 135744 - DNA, 30 bp, Artificial Sequence
  Synthetic oligonucleotide
aggatgccatattccacatacccaccacaa

SEQ ID NO: 135745 - DNA, 30 bp, Artificial Sequence
  Synthetic oligonucleotide
catattccacacacaaatgctagaccacaa

SEQ ID NO: 135746 - DNA, 30 bp, Artificial Sequence
  Synthetic oligonucleotide
tatgaagccggcggatcgtagggcccacaa

SEQ ID NO: 135747 - DNA, 30 bp, Artificial Sequence
  Synthetic oligonucleotide
ggttgaacataaatgaacgtaacagcacaa

SEQ ID NO: 135748 - DNA, 30 bp, Artificial Sequence
  Synthetic oligonucleotide
tgcaacccgtgtaactgatcttcggcacaa

SEQ ID NO: 135749 - DNA, 30 bp, Artificial Sequence
  Synthetic oligonucleotide
ctgcctggtcctgcgataggcgaatcacaa

SEQ ID NO: 135750 - DNA, 30 bp, Artificial Sequence
  Synthetic oligonucleotide
ggctttactagcagcgatcacggtagacaa

SEQ ID NO: 135751 - DNA, 30 bp, Artificial Sequence
  Synthetic oligonucleotide
gtcgcagttgcaccatcaagataacgacaa

SEQ ID NO: 135752 - DNA, 30 bp, Artificial Sequence
  Synthetic oligonucleotide
agtgactagcatagacatagagagcgacaa

SEQ ID NO: 135753 - DNA, 30 bp, Artificial Sequence
  Synthetic oligonucleotide
tacggagtatacaacaagttgtggcgacaa

SEQ ID NO: 135754 - DNA, 30 bp, Artificial Sequence
  Synthetic oligonucleotide
tgtatggcacagtacataagttcaggacaa

SEQ ID NO: 135755 - DNA, 30 bp, Artificial Sequence
  Synthetic oligonucleotide
tctcgaaccgtgagaattaactccggacaa

SEQ ID NO: 135756 - DNA, 30 bp, Artificial Sequence
  Synthetic oligonucleotide
cgtctactaggttatcggttgttcggacaa

SEQ ID NO: 135757 - DNA, 30 bp, Artificial Sequence
  Synthetic oligonucleotide
acgctggttctacgcaggggagcgggacaa

SEQ ID NO: 135758 - DNA, 30 bp, Artificial Sequence
  Synthetic oligonucleotide
cctcaccgaatcgcgactattaggggacaa

SEQ ID NO: 135759 - DNA, 30 bp, Artificial Sequence
  Synthetic oligonucleotide
tggttacttaaaatctgcggtatgggacaa

SEQ ID NO: 135760 - DNA, 30 bp, Artificial Sequence
  Synthetic oligonucleotide
ggacgggttggttgaatgtacgcatgacaa

SEQ ID NO: 135761 - DNA, 30 bp, Artificial Sequence
  Synthetic oligonucleotide
attgttcaataacactcatcatcatgacaa

SEQ ID NO: 135762 - DNA, 30 bp, Artificial Sequence
  Synthetic oligonucleotide
ccgcagggcaaaagccttgtgcgatgacaa

SEQ ID NO: 135763 - DNA, 30 bp, Artificial Sequence
  Synthetic oligonucleotide
ggctcatggagaactggggtcaaaatacaa

SEQ ID NO: 135764 - DNA, 30 bp, Artificial Sequence
  Synthetic oligonucleotide
cttggaatatgaaagagggagatgatacaa

SEQ ID NO: 135765 - DNA, 30 bp, Artificial Sequence
  Synthetic oligonucleotide
agcctctgtagtcaagctgggactatacaa

SEQ ID NO: 135766 - DNA, 30 bp, Artificial Sequence
  Synthetic oligonucleotide
ctcccgacggcgggattcatgaaagtacaa

SEQ ID NO: 135767 - DNA, 30 bp, Artificial Sequence
  Synthetic oligonucleotide
ctcggctagtgtcacacttggccagtacaa

SEQ ID NO: 135768 - DNA, 30 bp, Artificial Sequence
  Synthetic oligonucleotide
tacttatgcgggtcacccatcctcgtacaa

SEQ ID NO: 135769 - DNA, 30 bp, Artificial Sequence
  Synthetic oligonucleotide
tcgattaatccaagtttgattatggtacaa

SEQ ID NO: 135770 - DNA, 30 bp, Artificial Sequence
  Synthetic oligonucleotide
agagcaccgcgaaaaaaggccaatgtacaa

SEQ ID NO: 135771 - DNA, 30 bp, Artificial Sequence
  Synthetic oligonucleotide
aatgataaggtacagtagtctcacttacaa

SEQ ID NO: 135772 - DNA, 30 bp, Artificial Sequence
  Synthetic oligonucleotide
aaataagggatagcgcgtgtacggttacaa

SEQ ID NO: 135773 - DNA, 30 bp, Artificial Sequence
  Synthetic oligonucleotide
acgggcaagattttaaccccctgtttacaa

SEQ ID NO: 135774 - DNA, 30 bp, Artificial Sequence
  Synthetic oligonucleotide
cccacaaacggaatggacatatccaaccaa

SEQ ID NO: 135775 - DNA, 30 bp, Artificial Sequence
  Synthetic oligonucleotide
gttaataatcgatagggtcagtagaaccaa

SEQ ID NO: 135776 - DNA, 30 bp, Artificial Sequence
  Synthetic oligonucleotide
gaagccacagtatggagtcgcgagcaccaa

SEQ ID NO: 135777 - DNA, 30 bp, Artificial Sequence
  Synthetic oligonucleotide
cgtacgctttctggctacatagttcaccaa

SEQ ID NO: 135778 - DNA, 30 bp, Artificial Sequence
  Synthetic oligonucleotide
aacaatcgacaattaacacgcgccgaccaa

SEQ ID NO: 135779 - DNA, 30 bp, Artificial Sequence
  Synthetic oligonucleotide
tcttgaatcacacggttatcctgctaccaa

SEQ ID NO: 135780 - DNA, 30 bp, Artificial Sequence
  Synthetic oligonucleotide
ccagtttcgaatatgaatcggcggtaccaa

SEQ ID NO: 135781 - DNA, 30 bp, Artificial Sequence
  Synthetic oligonucleotide
cggaggtcagatagcctgcgttggtaccaa

SEQ ID NO: 135782 - DNA, 30 bp, Artificial Sequence
  Synthetic oligonucleotide
ggagtccgttaggccctatactgaacccaa

SEQ ID NO: 135783 - DNA, 30 bp, Artificial Sequence
  Synthetic oligonucleotide
cgtggcgctggaacatgtaagttaacccaa

SEQ ID NO: 135784 - DNA, 30 bp, Artificial Sequence
  Synthetic oligonucleotide
cagcacggtatttactggaacgatacccaa

SEQ ID NO: 135785 - DNA, 30 bp, Artificial Sequence
  Synthetic oligonucleotide
tccaatctcggaccctaaggacctacccaa

SEQ ID NO: 135786 - DNA, 30 bp, Artificial Sequence
  Synthetic oligonucleotide
aacacggacatgtcggcacgaggtacccaa

SEQ ID NO: 135787 - DNA, 30 bp, Artificial Sequence
  Synthetic oligonucleotide
cacgtgtttctgtccctcggatcgccccaa

SEQ ID NO: 135788 - DNA, 30 bp, Artificial Sequence
  Synthetic oligonucleotide
tggcccaggactgaacgtgcgtgagcccaa

SEQ ID NO: 135789 - DNA, 30 bp, Artificial Sequence
  Synthetic oligonucleotide
aaaagagagcagtattctagcttggcccaa

SEQ ID NO: 135790 - DNA, 30 bp, Artificial Sequence
  Synthetic oligonucleotide
ctgacgcgctacgttgtggctcaatcccaa

SEQ ID NO: 135791 - DNA, 30 bp, Artificial Sequence
  Synthetic oligonucleotide
gctgcgacaccagtaagtaaccgatcccaa

SEQ ID NO: 135792 - DNA, 30 bp, Artificial Sequence
  Synthetic oligonucleotide
acgaccgaagtcaggaacagatgttcccaa

SEQ ID NO: 135793 - DNA, 30 bp, Artificial Sequence
  Synthetic oligonucleotide
tgacgtagggaggttataatccggagccaa

SEQ ID NO: 135794 - DNA, 30 bp, Artificial Sequence
  Synthetic oligonucleotide
gtaaacatagacgggtatgcgattagccaa

SEQ ID NO: 135795 - DNA, 30 bp, Artificial Sequence
  Synthetic oligonucleotide
ggctctagattactaggaaaccttcgccaa

SEQ ID NO: 135796 - DNA, 30 bp, Artificial Sequence
  Synthetic oligonucleotide
gaaagagagtgggcctcacaggagggccaa

SEQ ID NO: 135797 - DNA, 30 bp, Artificial Sequence
  Synthetic oligonucleotide
gaacgtacgcgacctgtgatggtgggccaa

SEQ ID NO: 135798 - DNA, 30 bp, Artificial Sequence
  Synthetic oligonucleotide
atcggccgggtaaccattgtacatggccaa

SEQ ID NO: 135799 - DNA, 30 bp, Artificial Sequence
  Synthetic oligonucleotide
acggcagtctaggaatgtttgttatgccaa

SEQ ID NO: 135800 - DNA, 30 bp, Artificial Sequence
  Synthetic oligonucleotide
cgagtggcagctactataggcaagtgccaa

SEQ ID NO: 135801 - DNA, 30 bp, Artificial Sequence
  Synthetic oligonucleotide
aaaaatacatcttgcatgcctgtcatccaa

SEQ ID NO: 135802 - DNA, 30 bp, Artificial Sequence
  Synthetic oligonucleotide
ctcagatgcattcttccacaacttatccaa

SEQ ID NO: 135803 - DNA, 30 bp, Artificial Sequence
  Synthetic oligonucleotide
atggcgccacatgggccaatgtgtctccaa

SEQ ID NO: 135804 - DNA, 30 bp, Artificial Sequence
  Synthetic oligonucleotide
aaggggctatatctatggattcacgtccaa

SEQ ID NO: 135805 - DNA, 30 bp, Artificial Sequence
  Synthetic oligonucleotide
atctggcgaccataatcgcagccggtccaa

SEQ ID NO: 135806 - DNA, 30 bp, Artificial Sequence
  Synthetic oligonucleotide
agagacacgattctgtgggtatgcttccaa

SEQ ID NO: 135807 - DNA, 30 bp, Artificial Sequence
  Synthetic oligonucleotide
ctaggaattgatcacgcgtgtagtaagcaa

SEQ ID NO: 135808 - DNA, 30 bp, Artificial Sequence
  Synthetic oligonucleotide
tgcacgtgtgcctttccacgattacagcaa

SEQ ID NO: 135809 - DNA, 30 bp, Artificial Sequence
  Synthetic oligonucleotide
agtaagagccaacctcgcatagtccagcaa

SEQ ID NO: 135810 - DNA, 30 bp, Artificial Sequence
  Synthetic oligonucleotide
cattgtacgacattggaatagggagagcaa

SEQ ID NO: 135811 - DNA, 30 bp, Artificial Sequence
  Synthetic oligonucleotide
aaagatctaggaagtagagtcatcgagcaa

SEQ ID NO: 135812 - DNA, 30 bp, Artificial Sequence
  Synthetic oligonucleotide
catggaaaactccgggcgatcacctagcaa

SEQ ID NO: 135813 - DNA, 30 bp, Artificial Sequence
  Synthetic oligonucleotide
tcaaacatgaacgagtctaccatctagcaa

SEQ ID NO: 135814 - DNA, 30 bp, Artificial Sequence
  Synthetic oligonucleotide
aggttagaccgatcgcgccccgggtagcaa

SEQ ID NO: 135815 - DNA, 30 bp, Artificial Sequence
  Synthetic oligonucleotide
agccgtataaaatctctaaatataccgcaa

SEQ ID NO: 135816 - DNA, 30 bp, Artificial Sequence
  Synthetic oligonucleotide
gttcaacctagcgcgatacctaccccgcaa

SEQ ID NO: 135817 - DNA, 30 bp, Artificial Sequence
  Synthetic oligonucleotide
gcacatgtgggtaagtcaaagagggcgcaa

SEQ ID NO: 135818 - DNA, 30 bp, Artificial Sequence
  Synthetic oligonucleotide
tgccgcctcgagaagtggcgacatgcgcaa

SEQ ID NO: 135819 - DNA, 30 bp, Artificial Sequence
  Synthetic oligonucleotide
caaaactgcggcaattacatgagatcgcaa

SEQ ID NO: 135820 - DNA, 30 bp, Artificial Sequence
  Synthetic oligonucleotide
caggaagtcccttggttacttatctcgcaa

SEQ ID NO: 135821 - DNA, 30 bp, Artificial Sequence
  Synthetic oligonucleotide
tcagaaagggttacttaaccactctcgcaa

SEQ ID NO: 135822 - DNA, 30 bp, Artificial Sequence
  Synthetic oligonucleotide
gactgggtcaacagctacagttcttcgcaa

SEQ ID NO: 135823 - DNA, 30 bp, Artificial Sequence
  Synthetic oligonucleotide
gcacgtcccaacctatgacgatgttcgcaa

SEQ ID NO: 135824 - DNA, 30 bp, Artificial Sequence
  Synthetic oligonucleotide
aacaaggttcagtctagcgcgtaaaggcaa

SEQ ID NO: 135825 - DNA, 30 bp, Artificial Sequence
  Synthetic oligonucleotide
ctgtaaaaaacaggatatgtgtggaggcaa

SEQ ID NO: 135826 - DNA, 30 bp, Artificial Sequence
  Synthetic oligonucleotide
tacgtccaatactccgttccagataggcaa

SEQ ID NO: 135827 - DNA, 30 bp, Artificial Sequence
  Synthetic oligonucleotide
atgggaaagttagttatcatagtccggcaa

SEQ ID NO: 135828 - DNA, 30 bp, Artificial Sequence
  Synthetic oligonucleotide
ggtctacggaaaagcagtgagtagcggcaa

SEQ ID NO: 135829 - DNA, 30 bp, Artificial Sequence
  Synthetic oligonucleotide
cgggatagacgctgggggagaatagggcaa

SEQ ID NO: 135830 - DNA, 30 bp, Artificial Sequence
  Synthetic oligonucleotide
gtcgccgtagggacggtcataatagggcaa

SEQ ID NO: 135831 - DNA, 30 bp, Artificial Sequence
  Synthetic oligonucleotide
ttcgcagagaccgaattcgtttcggggcaa

SEQ ID NO: 135832 - DNA, 30 bp, Artificial Sequence
  Synthetic oligonucleotide
ctagacggtaaagcgtattcaaatgggcaa

SEQ ID NO: 135833 - DNA, 30 bp, Artificial Sequence
  Synthetic oligonucleotide
agttagagagtgaaataagaccatgggcaa

SEQ ID NO: 135834 - DNA, 30 bp, Artificial Sequence
  Synthetic oligonucleotide
tgcgacagtccctcgtccaggattgggcaa

SEQ ID NO: 135835 - DNA, 30 bp, Artificial Sequence
  Synthetic oligonucleotide
taaagtcgagtcccgggaatatcgtggcaa

SEQ ID NO: 135836 - DNA, 30 bp, Artificial Sequence
  Synthetic oligonucleotide
ttagggcggaatgtatgcttggggtggcaa

SEQ ID NO: 135837 - DNA, 30 bp, Artificial Sequence
  Synthetic oligonucleotide
cggactcggggaagagttagccgcatgcaa

SEQ ID NO: 135838 - DNA, 30 bp, Artificial Sequence
  Synthetic oligonucleotide
gaaaaacgagctatgtaaacacggctgcaa

SEQ ID NO: 135839 - DNA, 30 bp, Artificial Sequence
  Synthetic oligonucleotide
aggattataatggtcttcgcgtatctgcaa

SEQ ID NO: 135840 - DNA, 30 bp, Artificial Sequence
  Synthetic oligonucleotide
ccagtgcattctactcagtagctagtgcaa

SEQ ID NO: 135841 - DNA, 30 bp, Artificial Sequence
  Synthetic oligonucleotide
ggatgacatatggatcacgccagggtgcaa

SEQ ID NO: 135842 - DNA, 30 bp, Artificial Sequence
  Synthetic oligonucleotide
gcgtatcgggtcgaacggaatgaattgcaa

SEQ ID NO: 135843 - DNA, 30 bp, Artificial Sequence
  Synthetic oligonucleotide
ctcggtaatagaggactccctggcttgcaa

SEQ ID NO: 135844 - DNA, 30 bp, Artificial Sequence
  Synthetic oligonucleotide
tgtcacagttgagcgatcttctatttgcaa

SEQ ID NO: 135845 - DNA, 30 bp, Artificial Sequence
  Synthetic oligonucleotide
tgtgcctgagtgtgagccaaaagcaatcaa

SEQ ID NO: 135846 - DNA, 30 bp, Artificial Sequence
  Synthetic oligonucleotide
acacagcgaccccgcgcagtaagcaatcaa

SEQ ID NO: 135847 - DNA, 30 bp, Artificial Sequence
  Synthetic oligonucleotide
ccgctacgtcacgtactgctgcctaatcaa

SEQ ID NO: 135848 - DNA, 30 bp, Artificial Sequence
  Synthetic oligonucleotide
tgttggccatgtgtagcagcccgtaatcaa

SEQ ID NO: 135849 - DNA, 30 bp, Artificial Sequence
  Synthetic oligonucleotide
agatcttggttccacgtcggtatacatcaa

SEQ ID NO: 135850 - DNA, 30 bp, Artificial Sequence
  Synthetic oligonucleotide
cggcgcacaaagcacaagagcccccatcaa

SEQ ID NO: 135851 - DNA, 30 bp, Artificial Sequence
  Synthetic oligonucleotide
tatgtagctgacttgaggaaaaagcatcaa

SEQ ID NO: 135852 - DNA, 30 bp, Artificial Sequence
  Synthetic oligonucleotide
agtacacgggagcgcaccatttagcatcaa

SEQ ID NO: 135853 - DNA, 30 bp, Artificial Sequence
  Synthetic oligonucleotide
cttgtcgagcaggtttaagctactcatcaa

SEQ ID NO: 135854 - DNA, 30 bp, Artificial Sequence
  Synthetic oligonucleotide
agagttgcgactaagttttcgagtcatcaa

SEQ ID NO: 135855 - DNA, 30 bp, Artificial Sequence
  Synthetic oligonucleotide
ggtcaacaagtgtcactctaaaaagatcaa

SEQ ID NO: 135856 - DNA, 30 bp, Artificial Sequence
  Synthetic oligonucleotide
tagggagagaaagagtgcttcatagatcaa

SEQ ID NO: 135857 - DNA, 30 bp, Artificial Sequence
  Synthetic oligonucleotide
tcccaatgtgagcaaaaaaaacccgatcaa

SEQ ID NO: 135858 - DNA, 30 bp, Artificial Sequence
  Synthetic oligonucleotide
cgtaagcgcttacggcgagcaggggatcaa

SEQ ID NO: 135859 - DNA, 30 bp, Artificial Sequence
  Synthetic oligonucleotide
cggggttcttttacggtatgatctgatcaa

SEQ ID NO: 135860 - DNA, 30 bp, Artificial Sequence
  Synthetic oligonucleotide
gctgggtactagatatacactcgctatcaa

SEQ ID NO: 135861 - DNA, 30 bp, Artificial Sequence
  Synthetic oligonucleotide
cggtgatgcgcgctaccgggtcgttatcaa

SEQ ID NO: 135862 - DNA, 30 bp, Artificial Sequence
  Synthetic oligonucleotide
taaggacggctatcccacaataaaactcaa

SEQ ID NO: 135863 - DNA, 30 bp, Artificial Sequence
  Synthetic oligonucleotide
ccctggtctcacggcctcgcgacgactcaa

SEQ ID NO: 135864 - DNA, 30 bp, Artificial Sequence
  Synthetic oligonucleotide
gggagtgggcgacaccgaagcgctactcaa

SEQ ID NO: 135865 - DNA, 30 bp, Artificial Sequence
  Synthetic oligonucleotide
gaggcgagaagaagagtttagagtactcaa

SEQ ID NO: 135866 - DNA, 30 bp, Artificial Sequence
  Synthetic oligonucleotide
atgagactatcaagacgatgtaaacctcaa

SEQ ID NO: 135867 - DNA, 30 bp, Artificial Sequence
  Synthetic oligonucleotide
tcatgttagttaggctaggcaaagcctcaa

SEQ ID NO: 135868 - DNA, 30 bp, Artificial Sequence
  Synthetic oligonucleotide
ttcaccctcatgggagggaaagagcctcaa

SEQ ID NO: 135869 - DNA, 30 bp, Artificial Sequence
  Synthetic oligonucleotide
ctatgatcgagtgttctatgctctgctcaa

SEQ ID NO: 135870 - DNA, 30 bp, Artificial Sequence
  Synthetic oligonucleotide
tacggcatgattgtgggaggcagtgctcaa

SEQ ID NO: 135871 - DNA, 30 bp, Artificial Sequence
  Synthetic oligonucleotide
caagataagttactatgcatgattgctcaa

SEQ ID NO: 135872 - DNA, 30 bp, Artificial Sequence
  Synthetic oligonucleotide
cacaagttaagctctatctgaacaagtcaa

SEQ ID NO: 135873 - DNA, 30 bp, Artificial Sequence
  Synthetic oligonucleotide
atgatcccattggcttacgcgtggagtcaa

SEQ ID NO: 135874 - DNA, 30 bp, Artificial Sequence
  Synthetic oligonucleotide
aatggacggggtaacggttatatgagtcaa

SEQ ID NO: 135875 - DNA, 30 bp, Artificial Sequence
  Synthetic oligonucleotide
ggctgaggctggcgcctgcagttacgtcaa

SEQ ID NO: 135876 - DNA, 30 bp, Artificial Sequence
  Synthetic oligonucleotide
atctctgacccctgacgtacatgccgtcaa

SEQ ID NO: 135877 - DNA, 30 bp, Artificial Sequence
  Synthetic oligonucleotide
atgatcttcaaactctcatcactccgtcaa

SEQ ID NO: 135878 - DNA, 30 bp, Artificial Sequence
  Synthetic oligonucleotide
gagaataccggaaatgaggaggtccgtcaa

SEQ ID NO: 135879 - DNA, 30 bp, Artificial Sequence
  Synthetic oligonucleotide
ttccaatatgaaagcatcgggaagcgtcaa

SEQ ID NO: 135880 - DNA, 30 bp, Artificial Sequence
  Synthetic oligonucleotide
cggccaaagcgtaaccttacgtagcgtcaa

SEQ ID NO: 135881 - DNA, 30 bp, Artificial Sequence
  Synthetic oligonucleotide
cattgagcacttgaccctccaatgcgtcaa

SEQ ID NO: 135882 - DNA, 30 bp, Artificial Sequence
  Synthetic oligonucleotide
tcacagagggattcggtattgggaggtcaa

SEQ ID NO: 135883 - DNA, 30 bp, Artificial Sequence
  Synthetic oligonucleotide
tgtcggaccaacttatagacatgttgtcaa

SEQ ID NO: 135884 - DNA, 30 bp, Artificial Sequence
  Synthetic oligonucleotide
atatgcaaaactttaagcgttagaattcaa

SEQ ID NO: 135885 - DNA, 30 bp, Artificial Sequence
  Synthetic oligonucleotide
agaaaagggggcaccagtatatctattcaa

SEQ ID NO: 135886 - DNA, 30 bp, Artificial Sequence
  Synthetic oligonucleotide
ccagtgggagatgggtgaagttcacttcaa

SEQ ID NO: 135887 - DNA, 30 bp, Artificial Sequence
  Synthetic oligonucleotide
agctacgccacgtcaattagtgggcttcaa

SEQ ID NO: 135888 - DNA, 30 bp, Artificial Sequence
  Synthetic oligonucleotide
gccggtatctgcaagtaaaacactcttcaa

SEQ ID NO: 135889 - DNA, 30 bp, Artificial Sequence
  Synthetic oligonucleotide
accatatgagccacgcgattcagtcttcaa

SEQ ID NO: 135890 - DNA, 30 bp, Artificial Sequence
  Synthetic oligonucleotide
tcacgtgggcccaacgagggcagatttcaa

SEQ ID NO: 135891 - DNA, 30 bp, Artificial Sequence
  Synthetic oligonucleotide
ggagcaatcaggtgtggtcagggatttcaa

SEQ ID NO: 135892 - DNA, 30 bp, Artificial Sequence
  Synthetic oligonucleotide
cgcgtataggatgtttgtaaatattttcaa

SEQ ID NO: 135893 - DNA, 30 bp, Artificial Sequence
  Synthetic oligonucleotide
atgttaacgaaacccaccgtcgtaaaagaa

SEQ ID NO: 135894 - DNA, 30 bp, Artificial Sequence
  Synthetic oligonucleotide
aggggcacttgggtcccagcagccaaagaa

SEQ ID NO: 135895 - DNA, 30 bp, Artificial Sequence
  Synthetic oligonucleotide
acgattggcctaattagggtagtgaaagaa

SEQ ID NO: 135896 - DNA, 30 bp, Artificial Sequence
  Synthetic oligonucleotide
tatatgctaggtgcgcctggtcataaagaa

SEQ ID NO: 135897 - DNA, 30 bp, Artificial Sequence
  Synthetic oligonucleotide
gcatacatagcctcggtatactataaagaa

SEQ ID NO: 135898 - DNA, 30 bp, Artificial Sequence
  Synthetic oligonucleotide
cacctgagtcctgggagtagacctaaagaa

SEQ ID NO: 135899 - DNA, 30 bp, Artificial Sequence
  Synthetic oligonucleotide
gatctggtggtgccggtagatattaaagaa

SEQ ID NO: 135900 - DNA, 30 bp, Artificial Sequence
  Synthetic oligonucleotide
acggatttagagacatcaaccccccaagaa

SEQ ID NO: 135901 - DNA, 30 bp, Artificial Sequence
  Synthetic oligonucleotide
tatgtggggagcctatggtatactcaagaa

SEQ ID NO: 135902 - DNA, 30 bp, Artificial Sequence
  Synthetic oligonucleotide
gctctcgcgggaagcgagcggtgtcaagaa

SEQ ID NO: 135903 - DNA, 30 bp, Artificial Sequence
  Synthetic oligonucleotide
cggcgggtgtccctgtttctataagaagaa

SEQ ID NO: 135904 - DNA, 30 bp, Artificial Sequence
  Synthetic oligonucleotide
gctatctcagtttacgaaacatcagaagaa

SEQ ID NO: 135905 - DNA, 30 bp, Artificial Sequence
  Synthetic oligonucleotide
taatatcattgaggggaggaaaacgaagaa

SEQ ID NO: 135906 - DNA, 30 bp, Artificial Sequence
  Synthetic oligonucleotide
gctgaataaatcttactgtccaacgaagaa

SEQ ID NO: 135907 - DNA, 30 bp, Artificial Sequence
  Synthetic oligonucleotide
gcttaccatagtatattgtaacccgaagaa

SEQ ID NO: 135908 - DNA, 30 bp, Artificial Sequence
  Synthetic oligonucleotide
ggctatgaagagtacatagtaagcgaagaa

SEQ ID NO: 135909 - DNA, 30 bp, Artificial Sequence
  Synthetic oligonucleotide
agggatcattgtgggtcggacgaggaagaa

SEQ ID NO: 135910 - DNA, 30 bp, Artificial Sequence
  Synthetic oligonucleotide
gggacatcacagaatccatacgcataagaa

SEQ ID NO: 135911 - DNA, 30 bp, Artificial Sequence
  Synthetic oligonucleotide
agtggtcgattaggagaccatatataagaa

SEQ ID NO: 135912 - DNA, 30 bp, Artificial Sequence
  Synthetic oligonucleotide
accccagtgatttaactacagccctaagaa

SEQ ID NO: 135913 - DNA, 30 bp, Artificial Sequence
  Synthetic oligonucleotide
aggatcttagtgcagaagaacatctaagaa

SEQ ID NO: 135914 - DNA, 28 bp, Artificial Sequence
  Synthetic oligonucleotide
actgtggacggggctctgcacgtaagaa

SEQ ID NO: 135915 - DNA, 30 bp, Artificial Sequence
  Synthetic oligonucleotide
aacagaagtgcatgtccatgtacgtaagaa

SEQ ID NO: 135916 - DNA, 30 bp, Artificial Sequence
  Synthetic oligonucleotide
atgggccattaaaataggaggtggtaagaa

SEQ ID NO: 135917 - DNA, 30 bp, Artificial Sequence
  Synthetic oligonucleotide
tggaaagacgatcaagtacatacttaagaa

SEQ ID NO: 135918 - DNA, 30 bp, Artificial Sequence
  Synthetic oligonucleotide
cctcagcggcaccgtgataaggcttaagaa

SEQ ID NO: 135919 - DNA, 31 bp, Artificial Sequence
  Synthetic oligonucleotide
cgccggaatggcctttagtgatataacagaa

SEQ ID NO: 135920 - DNA, 30 bp, Artificial Sequence
  Synthetic oligonucleotide
tgtgcactacaaagatgggtggcgccagaa

SEQ ID NO: 135921 - DNA, 30 bp, Artificial Sequence
  Synthetic oligonucleotide
ggtgtcccgggttaattcgttgggccagaa

SEQ ID NO: 135922 - DNA, 30 bp, Artificial Sequence
  Synthetic oligonucleotide
cagactatgtccgcgggtggtaaagcagaa

SEQ ID NO: 135923 - DNA, 30 bp, Artificial Sequence
  Synthetic oligonucleotide
catatgagttgtcgtccgaagccagcagaa

SEQ ID NO: 135924 - DNA, 30 bp, Artificial Sequence
  Synthetic oligonucleotide
gactaggccgggggagaggaataatcagaa

SEQ ID NO: 135925 - DNA, 30 bp, Artificial Sequence
  Synthetic oligonucleotide
tgtatgctacgagtcactgaactatcagaa

SEQ ID NO: 135926 - DNA, 30 bp, Artificial Sequence
  Synthetic oligonucleotide
tactctggctgattttcacgagtatcagaa

SEQ ID NO: 135927 - DNA, 30 bp, Artificial Sequence
  Synthetic oligonucleotide
ggtaaaggaccgatcaaatccatctcagaa

SEQ ID NO: 135928 - DNA, 30 bp, Artificial Sequence
  Synthetic oligonucleotide
gacgaaaaccagctgatgaatgattcagaa

SEQ ID NO: 135929 - DNA, 30 bp, Artificial Sequence
  Synthetic oligonucleotide
tgttatggaaggtcctgtaatggttcagaa

SEQ ID NO: 135930 - DNA, 29 bp, Artificial Sequence
  Synthetic oligonucleotide
taagccggaaggcggcgacacagagagaa

SEQ ID NO: 135931 - DNA, 30 bp, Artificial Sequence
  Synthetic oligonucleotide
gcggcttttgtttctattccccagagagaa

SEQ ID NO: 135932 - DNA, 30 bp, Artificial Sequence
  Synthetic oligonucleotide
agcttggaacaactccccacagctagagaa

SEQ ID NO: 135933 - DNA, 30 bp, Artificial Sequence
  Synthetic oligonucleotide
tctaatggcggaggacagatcgtacgagaa

SEQ ID NO: 135934 - DNA, 30 bp, Artificial Sequence
  Synthetic oligonucleotide
cccctcctcttaaaagaagcgagccgagaa

SEQ ID NO: 135935 - DNA, 30 bp, Artificial Sequence
  Synthetic oligonucleotide
gtgtgggagggttcgcccaccatccgagaa

SEQ ID NO: 135936 - DNA, 30 bp, Artificial Sequence
  Synthetic oligonucleotide
cgtttcgcggcctatagagacgagcgagaa

SEQ ID NO: 135937 - DNA, 30 bp, Artificial Sequence
  Synthetic oligonucleotide
ggatgaggtctgtatagcgttaggcgagaa

SEQ ID NO: 135938 - DNA, 30 bp, Artificial Sequence
  Synthetic oligonucleotide
ggaaggggaatatgcacatatacgggagaa

SEQ ID NO: 135939 - DNA, 30 bp, Artificial Sequence
  Synthetic oligonucleotide
gaggtatagtatgcctgcacggcgggagaa

SEQ ID NO: 135940 - DNA, 30 bp, Artificial Sequence
  Synthetic oligonucleotide
gttaaggttcctgtgtggctgtcgggagaa

SEQ ID NO: 135941 - DNA, 30 bp, Artificial Sequence
  Synthetic oligonucleotide
atgttacgtcggtgttgcgaaggtggagaa

SEQ ID NO: 135942 - DNA, 30 bp, Artificial Sequence
  Synthetic oligonucleotide
tgcggggtcagagagatcgacatatgagaa

SEQ ID NO: 135943 - DNA, 30 bp, Artificial Sequence
  Synthetic oligonucleotide
tgcattgtcttacacctgtggagctgagaa

SEQ ID NO: 135944 - DNA, 30 bp, Artificial Sequence
  Synthetic oligonucleotide
ctcaggcatcgtggaccaatacgttgagaa

SEQ ID NO: 135945 - DNA, 30 bp, Artificial Sequence
  Synthetic oligonucleotide
tcgtatgaataccaggacacaggaatagaa

SEQ ID NO: 135946 - DNA, 30 bp, Artificial Sequence
  Synthetic oligonucleotide
cacgtctcttcgctgctttgaggaatagaa

SEQ ID NO: 135947 - DNA, 30 bp, Artificial Sequence
  Synthetic oligonucleotide
tcagtagtatggcaaattgtctagatagaa

SEQ ID NO: 135948 - DNA, 30 bp, Artificial Sequence
  Synthetic oligonucleotide
aaaacgaagaacggacgccacactatagaa

SEQ ID NO: 135949 - DNA, 30 bp, Artificial Sequence
  Synthetic oligonucleotide
ggttggtccgggaacgtaattgggctagaa

SEQ ID NO: 135950 - DNA, 30 bp, Artificial Sequence
  Synthetic oligonucleotide
atggctcggcgatctatcggggctctagaa

SEQ ID NO: 135951 - DNA, 30 bp, Artificial Sequence
  Synthetic oligonucleotide
gcttcctgtgggaatgaggggtgtctagaa

SEQ ID NO: 135952 - DNA, 30 bp, Artificial Sequence
  Synthetic oligonucleotide
aacagaaaacaattgcttagagttctagaa

SEQ ID NO: 135953 - DNA, 30 bp, Artificial Sequence
  Synthetic oligonucleotide
agagtcgcaatcttgcaggttttagtagaa

SEQ ID NO: 135954 - DNA, 30 bp, Artificial Sequence
  Synthetic oligonucleotide
gacgagtactgtcggtttgtacgggtagaa

SEQ ID NO: 135955 - DNA, 30 bp, Artificial Sequence
  Synthetic oligonucleotide
gttaaatgtccctgttaagatttggtagaa

SEQ ID NO: 135956 - DNA, 30 bp, Artificial Sequence
  Synthetic oligonucleotide
tcagaagttggccacagttacaaattagaa

SEQ ID NO: 135957 - DNA, 30 bp, Artificial Sequence
  Synthetic oligonucleotide
cgatggttatacctagaccggccattagaa

SEQ ID NO: 135958 - DNA, 30 bp, Artificial Sequence
  Synthetic oligonucleotide
tgcgtgtctactaggggggtgacgttagaa

SEQ ID NO: 135959 - DNA, 30 bp, Artificial Sequence
  Synthetic oligonucleotide
tcgctgtggtcgggacttgccatgttagaa

SEQ ID NO: 135960 - DNA, 30 bp, Artificial Sequence
  Synthetic oligonucleotide
aagggtccggagtagtaaccaccaaacgaa

SEQ ID NO: 135961 - DNA, 30 bp, Artificial Sequence
  Synthetic oligonucleotide
gatgccaaccggcaccgatactcaaacgaa

SEQ ID NO: 135962 - DNA, 30 bp, Artificial Sequence
  Synthetic oligonucleotide
cagggcgctcgtgcaagccgctgaaacgaa

SEQ ID NO: 135963 - DNA, 30 bp, Artificial Sequence
  Synthetic oligonucleotide
aggttgcgcgtcccgccatcctccaacgaa

SEQ ID NO: 135964 - DNA, 30 bp, Artificial Sequence
  Synthetic oligonucleotide
acatcttagacagatcggaatcataacgaa

SEQ ID NO: 135965 - DNA, 30 bp, Artificial Sequence
  Synthetic oligonucleotide
gtggtgttccggttcggaccgtgtaacgaa

SEQ ID NO: 135966 - DNA, 30 bp, Artificial Sequence
  Synthetic oligonucleotide
aatggtagatttccgggccccagacacgaa

SEQ ID NO: 135967 - DNA, 29 bp, Artificial Sequence
  Synthetic oligonucleotide
gttgaaaagaaggacgtatacctcacgaa

SEQ ID NO: 135968 - DNA, 30 bp, Artificial Sequence
  Synthetic oligonucleotide
gctagtagggttaggtgggtcacagacgaa

SEQ ID NO: 135969 - DNA, 30 bp, Artificial Sequence
  Synthetic oligonucleotide
taccgtagcgaaatggagaacaactacgaa

SEQ ID NO: 135970 - DNA, 30 bp, Artificial Sequence
  Synthetic oligonucleotide
gacgttaattggcgagatactaattacgaa

SEQ ID NO: 135971 - DNA, 30 bp, Artificial Sequence
  Synthetic oligonucleotide
tacaggggacgcacctggcacggttacgaa

SEQ ID NO: 135972 - DNA, 30 bp, Artificial Sequence
  Synthetic oligonucleotide
cgggcactagccaagtatttggtgaccgaa

SEQ ID NO: 135973 - DNA, 30 bp, Artificial Sequence
  Synthetic oligonucleotide
atgctagaccctatctaggaagtccccgaa

SEQ ID NO: 135974 - DNA, 30 bp, Artificial Sequence
  Synthetic oligonucleotide
ctgaaattaggaaaattggcagtccccgaa

SEQ ID NO: 135975 - DNA, 30 bp, Artificial Sequence
  Synthetic oligonucleotide
atactacagtgtctcaatgaatatcccgaa

SEQ ID NO: 135976 - DNA, 30 bp, Artificial Sequence
  Synthetic oligonucleotide
ggggcaattgtgagacgacagggcgccgaa

SEQ ID NO: 135977 - DNA, 30 bp, Artificial Sequence
  Synthetic oligonucleotide
gcaccgaacgccatctccaatcaatccgaa

SEQ ID NO: 135978 - DNA, 30 bp, Artificial Sequence
  Synthetic oligonucleotide
catggaagaggctgacggaaatggtccgaa

SEQ ID NO: 135979 - DNA, 30 bp, Artificial Sequence
  Synthetic oligonucleotide
acaagggtgtggccttgtctgagttccgaa

SEQ ID NO: 135980 - DNA, 30 bp, Artificial Sequence
  Synthetic oligonucleotide
agcagaagactcttgttaaaaaccagcgaa

SEQ ID NO: 135981 - DNA, 30 bp, Artificial Sequence
  Synthetic oligonucleotide
aaagggtggaccgcggaccagtaacgcgaa

SEQ ID NO: 135982 - DNA, 30 bp, Artificial Sequence
  Synthetic oligonucleotide
gtaacaggcccttgtagccgtccacgcgaa

SEQ ID NO: 135983 - DNA, 30 bp, Artificial Sequence
  Synthetic oligonucleotide
catatatctgtggatcgagctaaccgcgaa

SEQ ID NO: 135984 - DNA, 30 bp, Artificial Sequence
  Synthetic oligonucleotide
cgccaaccaatggtacttactgtccgcgaa

SEQ ID NO: 135985 - DNA, 30 bp, Artificial Sequence
  Synthetic oligonucleotide
tcggatgcacatttgagaatagggcgcgaa

SEQ ID NO: 135986 - DNA, 30 bp, Artificial Sequence
  Synthetic oligonucleotide
agttaaatactctgaggatcgtacggcgaa

SEQ ID NO: 135987 - DNA, 30 bp, Artificial Sequence
  Synthetic oligonucleotide
acaaattccaagtgagattggtacggcgaa

SEQ ID NO: 135988 - DNA, 30 bp, Artificial Sequence
  Synthetic oligonucleotide
aagttgacagttcatgcgcgaatcggcgaa

SEQ ID NO: 135989 - DNA, 30 bp, Artificial Sequence
  Synthetic oligonucleotide
gggcagggcatacgagtatacgtgggcgaa

SEQ ID NO: 135990 - DNA, 30 bp, Artificial Sequence
  Synthetic oligonucleotide
gcgaatggcacataaattacctgctgcgaa

SEQ ID NO: 135991 - DNA, 30 bp, Artificial Sequence
  Synthetic oligonucleotide
ttaaagaagtgacgtacaagatagtgcgaa

SEQ ID NO: 135992 - DNA, 30 bp, Artificial Sequence
  Synthetic oligonucleotide
acgaaagaaaagtacgaaagggggatcgaa

SEQ ID NO: 135993 - DNA, 30 bp, Artificial Sequence
  Synthetic oligonucleotide
ccgtggagacagcaacccttgactatcgaa

SEQ ID NO: 135994 - DNA, 30 bp, Artificial Sequence
  Synthetic oligonucleotide
cggttctctagctcactagcaggactcgaa

SEQ ID NO: 135995 - DNA, 30 bp, Artificial Sequence
  Synthetic oligonucleotide
tgggtaccgaagcactacgacaagctcgaa

SEQ ID NO: 135996 - DNA, 30 bp, Artificial Sequence
  Synthetic oligonucleotide
ttaccatattcgcgtctgattgagctcgaa

SEQ ID NO: 135997 - DNA, 30 bp, Artificial Sequence
  Synthetic oligonucleotide
gcgtggggaagtcgctgcatgctagtcgaa

SEQ ID NO: 135998 - DNA, 30 bp, Artificial Sequence
  Synthetic oligonucleotide
aaggcctgtcggcgcgtagaccacgtcgaa

SEQ ID NO: 135999 - DNA, 30 bp, Artificial Sequence
  Synthetic oligonucleotide
attggaggaacattggggcaatatgtcgaa

SEQ ID NO: 136000 - DNA, 30 bp, Artificial Sequence
  Synthetic oligonucleotide
gtacggtctggcttgaagagttggttcgaa

SEQ ID NO: 136001 - DNA, 30 bp, Artificial Sequence
  Synthetic oligonucleotide
cccgtgtggagttctgtaaaggcaaaggaa

SEQ ID NO: 136002 - DNA, 30 bp, Artificial Sequence
  Synthetic oligonucleotide
aacatccgttctatggtgattcgaaaggaa

SEQ ID NO: 136003 - DNA, 30 bp, Artificial Sequence
  Synthetic oligonucleotide
taggttgcgtaatcgtcatgaataaaggaa

SEQ ID NO: 136004 - DNA, 30 bp, Artificial Sequence
  Synthetic oligonucleotide
tcaggtgacaggtcgggaatagggaaggaa

SEQ ID NO: 136005 - DNA, 30 bp, Artificial Sequence
  Synthetic oligonucleotide
gtaagggctatggggtttgggtgtaaggaa

SEQ ID NO: 136006 - DNA, 30 bp, Artificial Sequence
  Synthetic oligonucleotide
cgtcagtcatgccctcgttgggttaaggaa

SEQ ID NO: 136007 - DNA, 30 bp, Artificial Sequence
  Synthetic oligonucleotide
tgagtcgggtaacaaaggtgtggccaggaa

SEQ ID NO: 136008 - DNA, 30 bp, Artificial Sequence
  Synthetic oligonucleotide
tgccgaatttcttggcaatttgagcaggaa

SEQ ID NO: 136009 - DNA, 30 bp, Artificial Sequence
  Synthetic oligonucleotide
tcgggcgttatttaacagcagccgcaggaa

SEQ ID NO: 136010 - DNA, 30 bp, Artificial Sequence
  Synthetic oligonucleotide
acgcgtctaccatgaagccgtaggcaggaa

SEQ ID NO: 136011 - DNA, 30 bp, Artificial Sequence
  Synthetic oligonucleotide
gccgataaagtaaaataggtgcaagaggaa

SEQ ID NO: 136012 - DNA, 30 bp, Artificial Sequence
  Synthetic oligonucleotide
ttgaaaggacattgagcaaatttagaggaa

SEQ ID NO: 136013 - DNA, 30 bp, Artificial Sequence
  Synthetic oligonucleotide
gctcacgcgtgcaaatctaaactggaggaa

SEQ ID NO: 136014 - DNA, 30 bp, Artificial Sequence
  Synthetic oligonucleotide
atagttaaagaggctggtggttatgaggaa

SEQ ID NO: 136015 - DNA, 30 bp, Artificial Sequence
  Synthetic oligonucleotide
cagaccaaatgcggacgtggtagtgaggaa

SEQ ID NO: 136016 - DNA, 30 bp, Artificial Sequence
  Synthetic oligonucleotide
accaacggggggagggcgttgaaataggaa

SEQ ID NO: 136017 - DNA, 30 bp, Artificial Sequence
  Synthetic oligonucleotide
gtaacagttagtgtagacgggcaataggaa

SEQ ID NO: 136018 - DNA, 30 bp, Artificial Sequence
  Synthetic oligonucleotide
gtcgagaccattgattcccgggaataggaa

SEQ ID NO: 136019 - DNA, 30 bp, Artificial Sequence
  Synthetic oligonucleotide
cggttctagaccagtattgcgatataggaa

SEQ ID NO: 136020 - DNA, 30 bp, Artificial Sequence
  Synthetic oligonucleotide
catccacgccacgctcattgaggctaggaa

SEQ ID NO: 136021 - DNA, 30 bp, Artificial Sequence
  Synthetic oligonucleotide
ggtaaccaggctccacgcgcggattaggaa

SEQ ID NO: 136022 - DNA, 30 bp, Artificial Sequence
  Synthetic oligonucleotide
cgccgggatgtcagctctaagcgaacggaa

SEQ ID NO: 136023 - DNA, 30 bp, Artificial Sequence
  Synthetic oligonucleotide
ctgtgaactttacctgagcggtgaacggaa

SEQ ID NO: 136024 - DNA, 30 bp, Artificial Sequence
  Synthetic oligonucleotide
ccgtggcatataagaatacgattaacggaa

SEQ ID NO: 136025 - DNA, 30 bp, Artificial Sequence
  Synthetic oligonucleotide
cggatgggcaacaacgtatcctacacggaa

SEQ ID NO: 136026 - DNA, 30 bp, Artificial Sequence
  Synthetic oligonucleotide
cggggtctaacggagttgtacaatacggaa

SEQ ID NO: 136027 - DNA, 30 bp, Artificial Sequence
  Synthetic oligonucleotide
aagcgcatagggaccttacacgctacggaa

SEQ ID NO: 136028 - DNA, 30 bp, Artificial Sequence
  Synthetic oligonucleotide
tggccaaaagcaacttgcaagcaaccggaa

SEQ ID NO: 136029 - DNA, 30 bp, Artificial Sequence
  Synthetic oligonucleotide
atgcctcacctttacgtctacaagccggaa

SEQ ID NO: 136030 - DNA, 30 bp, Artificial Sequence
  Synthetic oligonucleotide
cagaacgacttaagtggcccttgtccggaa

SEQ ID NO: 136031 - DNA, 30 bp, Artificial Sequence
  Synthetic oligonucleotide
tcattatcttggaaacagcataaagcggaa

SEQ ID NO: 136032 - DNA, 30 bp, Artificial Sequence
  Synthetic oligonucleotide
atgttgaaagggaattaccagtaagcggaa

SEQ ID NO: 136033 - DNA, 30 bp, Artificial Sequence
  Synthetic oligonucleotide
ggcagtatgagtctaacgatgttcgcggaa

SEQ ID NO: 136034 - DNA, 30 bp, Artificial Sequence
  Synthetic oligonucleotide
gcatggagtccattggagggtccggcggaa

SEQ ID NO: 136035 - DNA, 30 bp, Artificial Sequence
  Synthetic oligonucleotide
gcactacgagtagattgcgggtcggcggaa

SEQ ID NO: 136036 - DNA, 30 bp, Artificial Sequence
  Synthetic oligonucleotide
ccagcgagaaactctcagctacctgcggaa

SEQ ID NO: 136037 - DNA, 30 bp, Artificial Sequence
  Synthetic oligonucleotide
gtattacatcgggtttgaaactgctcggaa

SEQ ID NO: 136038 - DNA, 30 bp, Artificial Sequence
  Synthetic oligonucleotide
cggggtttacgagcactatgacattcggaa

SEQ ID NO: 136039 - DNA, 30 bp, Artificial Sequence
  Synthetic oligonucleotide
gttactcgggttacgtgggagtaaagggaa

SEQ ID NO: 136040 - DNA, 30 bp, Artificial Sequence
  Synthetic oligonucleotide
gtgagagtctgctgatgagatggaagggaa

SEQ ID NO: 136041 - DNA, 30 bp, Artificial Sequence
  Synthetic oligonucleotide
ccggtttaggtggcaaacatgctaagggaa

SEQ ID NO: 136042 - DNA, 30 bp, Artificial Sequence
  Synthetic oligonucleotide
aaccaacggtgtttcagtcaaggtagggaa

SEQ ID NO: 136043 - DNA, 30 bp, Artificial Sequence
  Synthetic oligonucleotide
gcgtgagaacttgcgcagtatggtagggaa

SEQ ID NO: 136044 - DNA, 30 bp, Artificial Sequence
  Synthetic oligonucleotide
gtgcgacagaagcatatttgctgtagggaa

SEQ ID NO: 136045 - DNA, 30 bp, Artificial Sequence
  Synthetic oligonucleotide
gtcccagggagccttaaaatggagcgggaa

SEQ ID NO: 136046 - DNA, 30 bp, Artificial Sequence
  Synthetic oligonucleotide
aatgaagagagaaagcacgcccatggggaa

SEQ ID NO: 136047 - DNA, 30 bp, Artificial Sequence
  Synthetic oligonucleotide
acgaacaattttcgcacgtgagagtgggaa

SEQ ID NO: 136048 - DNA, 30 bp, Artificial Sequence
  Synthetic oligonucleotide
gaccagggttgtcatggtgctacgtgggaa

SEQ ID NO: 136049 - DNA, 30 bp, Artificial Sequence
  Synthetic oligonucleotide
cctagctatcagtccttgttaacaatggaa

SEQ ID NO: 136050 - DNA, 30 bp, Artificial Sequence
  Synthetic oligonucleotide
taggtactcaagtggtgttatccaatggaa

SEQ ID NO: 136051 - DNA, 30 bp, Artificial Sequence
  Synthetic oligonucleotide
agaatataggcgaccaatgcggggatggaa

SEQ ID NO: 136052 - DNA, 30 bp, Artificial Sequence
  Synthetic oligonucleotide
atgaccctagttggtagaagcatgatggaa

SEQ ID NO: 136053 - DNA, 30 bp, Artificial Sequence
  Synthetic oligonucleotide
gatcgcatgtactctgggtaaactatggaa

SEQ ID NO: 136054 - DNA, 30 bp, Artificial Sequence
  Synthetic oligonucleotide
gccgcatgataagtacttgcgaacgtggaa

SEQ ID NO: 136055 - DNA, 30 bp, Artificial Sequence
  Synthetic oligonucleotide
acaacgccaacgtgtgagaaacgcgtggaa

SEQ ID NO: 136056 - DNA, 30 bp, Artificial Sequence
  Synthetic oligonucleotide
acaagtcgagaagtatgtcatggcgtggaa

SEQ ID NO: 136057 - DNA, 30 bp, Artificial Sequence
  Synthetic oligonucleotide
taagtcaagaagataatcagttaggtggaa

SEQ ID NO: 136058 - DNA, 30 bp, Artificial Sequence
  Synthetic oligonucleotide
caacagaatactatgcctttaggggtggaa

SEQ ID NO: 136059 - DNA, 30 bp, Artificial Sequence
  Synthetic oligonucleotide
cccggcatcagaggccaaatacatgtggaa

SEQ ID NO: 136060 - DNA, 30 bp, Artificial Sequence
  Synthetic oligonucleotide
tcaaatgtgcgtgacataggcgatgtggaa

SEQ ID NO: 136061 - DNA, 30 bp, Artificial Sequence
  Synthetic oligonucleotide
agagacctcattgaagaattgtgtgtggaa

SEQ ID NO: 136062 - DNA, 30 bp, Artificial Sequence
  Synthetic oligonucleotide
tatcgtagggagcgaagcttccgcaatgaa

SEQ ID NO: 136063 - DNA, 30 bp, Artificial Sequence
  Synthetic oligonucleotide
cccatacgcgtggccccacaactcaatgaa

SEQ ID NO: 136064 - DNA, 30 bp, Artificial Sequence
  Synthetic oligonucleotide
tggctggatactggtcatggactgaatgaa

SEQ ID NO: 136065 - DNA, 30 bp, Artificial Sequence
  Synthetic oligonucleotide
tgggggtacccaaagttccgagtgaatgaa

SEQ ID NO: 136066 - DNA, 30 bp, Artificial Sequence
  Synthetic oligonucleotide
tcaaatcggcatataaacggacaccatgaa

SEQ ID NO: 136067 - DNA, 30 bp, Artificial Sequence
  Synthetic oligonucleotide
ggcatgctcttgcaaacgacttgccatgaa

SEQ ID NO: 136068 - DNA, 30 bp, Artificial Sequence
  Synthetic oligonucleotide
taagcaatctgtgtagtgccgtctcatgaa

SEQ ID NO: 136069 - DNA, 30 bp, Artificial Sequence
  Synthetic oligonucleotide
ggactcgatcaataaacggcgcacgatgaa

SEQ ID NO: 136070 - DNA, 30 bp, Artificial Sequence
  Synthetic oligonucleotide
gtatagatcccgaagtacagtaccgatgaa

SEQ ID NO: 136071 - DNA, 30 bp, Artificial Sequence
  Synthetic oligonucleotide
tctattcgactggggcaacaggccgatgaa

SEQ ID NO: 136072 - DNA, 30 bp, Artificial Sequence
  Synthetic oligonucleotide
cttgtgaactagtcacggaggaaggatgaa

SEQ ID NO: 136073 - DNA, 30 bp, Artificial Sequence
  Synthetic oligonucleotide
agccatagggctctactttttgaggatgaa

SEQ ID NO: 136074 - DNA, 30 bp, Artificial Sequence
  Synthetic oligonucleotide
tcgttgaatgccctggaggcatcggatgaa

SEQ ID NO: 136075 - DNA, 31 bp, Artificial Sequence
  Synthetic oligonucleotide
tacgatagtacacagactcctcgctgatgaa

SEQ ID NO: 136076 - DNA, 30 bp, Artificial Sequence
  Synthetic oligonucleotide
agacggtctccgacctgatatccatatgaa

SEQ ID NO: 136077 - DNA, 30 bp, Artificial Sequence
  Synthetic oligonucleotide
ggagtagcacattcgttatggctctatgaa

SEQ ID NO: 136078 - DNA, 30 bp, Artificial Sequence
  Synthetic oligonucleotide
tcaggtagtaaatcacttgacggcactgaa

SEQ ID NO: 136079 - DNA, 30 bp, Artificial Sequence
  Synthetic oligonucleotide
acagtatgtgaaatacgagtaaatactgaa

SEQ ID NO: 136080 - DNA, 30 bp, Artificial Sequence
  Synthetic oligonucleotide
cgcgcagtctagaagcaacacgaagctgaa

SEQ ID NO: 136081 - DNA, 30 bp, Artificial Sequence
  Synthetic oligonucleotide
atgttcagtcgtatagatgattatgctgaa

SEQ ID NO: 136082 - DNA, 30 bp, Artificial Sequence
  Synthetic oligonucleotide
acaatggtgcttgcgcatctatgtgctgaa

SEQ ID NO: 136083 - DNA, 30 bp, Artificial Sequence
  Synthetic oligonucleotide
taatacgagatgaagcgggccttgtctgaa

SEQ ID NO: 136084 - DNA, 30 bp, Artificial Sequence
  Synthetic oligonucleotide
ggagtcacactaaaactataagtaagtgaa

SEQ ID NO: 136085 - DNA, 30 bp, Artificial Sequence
  Synthetic oligonucleotide
tgtagtcatttgatctgccgactgagtgaa

SEQ ID NO: 136086 - DNA, 30 bp, Artificial Sequence
  Synthetic oligonucleotide
gtcggagggcctcacagcacgggacgtgaa

SEQ ID NO: 136087 - DNA, 30 bp, Artificial Sequence
  Synthetic oligonucleotide
gggaccattgattggtgtggagcgcgtgaa

SEQ ID NO: 136088 - DNA, 30 bp, Artificial Sequence
  Synthetic oligonucleotide
gccagacatgacagaaggtagctaggtgaa

SEQ ID NO: 136089 - DNA, 30 bp, Artificial Sequence
  Synthetic oligonucleotide
taagaatgacgagagccgaccggcggtgaa

SEQ ID NO: 136090 - DNA, 30 bp, Artificial Sequence
  Synthetic oligonucleotide
gatgaaagtggaaaaatgaatggcggtgaa

SEQ ID NO: 136091 - DNA, 30 bp, Artificial Sequence
  Synthetic oligonucleotide
tcacacgggatggaaaacgtacatggtgaa

SEQ ID NO: 136092 - DNA, 30 bp, Artificial Sequence
  Synthetic oligonucleotide
gcgagatcaaccaggccccttattggtgaa

SEQ ID NO: 136093 - DNA, 30 bp, Artificial Sequence
  Synthetic oligonucleotide
tgctcttgatcggatgagtaacaatgtgaa

SEQ ID NO: 136094 - DNA, 30 bp, Artificial Sequence
  Synthetic oligonucleotide
aaagccctctaacctcaccaacgctgtgaa

SEQ ID NO: 136095 - DNA, 30 bp, Artificial Sequence
  Synthetic oligonucleotide
tcaacgtctcctgagaaagggcacattgaa

SEQ ID NO: 136096 - DNA, 30 bp, Artificial Sequence
  Synthetic oligonucleotide
ggataataatgtgtcgttctccggattgaa

SEQ ID NO: 136097 - DNA, 30 bp, Artificial Sequence
  Synthetic oligonucleotide
gctggtgggaataactaaacgacgcttgaa

SEQ ID NO: 136098 - DNA, 30 bp, Artificial Sequence
  Synthetic oligonucleotide
tagaaagtggctggagagccatcgcttgaa

SEQ ID NO: 136099 - DNA, 30 bp, Artificial Sequence
  Synthetic oligonucleotide
gagcactggactctcccatgatggcttgaa

SEQ ID NO: 136100 - DNA, 30 bp, Artificial Sequence
  Synthetic oligonucleotide
gggaaatgacacagataagttcgtcttgaa

SEQ ID NO: 136101 - DNA, 30 bp, Artificial Sequence
  Synthetic oligonucleotide
tggcacttaaagcggcaccggggtgttgaa

SEQ ID NO: 136102 - DNA, 30 bp, Artificial Sequence
  Synthetic oligonucleotide
cagtcaggaaactcatcgccacactttgaa

SEQ ID NO: 136103 - DNA, 30 bp, Artificial Sequence
  Synthetic oligonucleotide
gagataccataccgacgtccggaaaaataa

SEQ ID NO: 136104 - DNA, 30 bp, Artificial Sequence
  Synthetic oligonucleotide
gggtgcacacaacgtatacttatcaaataa

SEQ ID NO: 136105 - DNA, 30 bp, Artificial Sequence
  Synthetic oligonucleotide
aaacaagtcccgtgccttggttcgaaataa

SEQ ID NO: 136106 - DNA, 30 bp, Artificial Sequence
  Synthetic oligonucleotide
ggtttgaggaacgggcacgcgtgtaaataa

SEQ ID NO: 136107 - DNA, 30 bp, Artificial Sequence
  Synthetic oligonucleotide
acaaatccggaaccatggggggttaaataa

SEQ ID NO: 136108 - DNA, 30 bp, Artificial Sequence
  Synthetic oligonucleotide
cgacagtacctcaattattgccaacaataa

SEQ ID NO: 136109 - DNA, 30 bp, Artificial Sequence
  Synthetic oligonucleotide
gaagccgatttgcgtccgccctcccaataa

SEQ ID NO: 136110 - DNA, 30 bp, Artificial Sequence
  Synthetic oligonucleotide
cattcgaatgtatgtcggagctgccaataa

SEQ ID NO: 136111 - DNA, 30 bp, Artificial Sequence
  Synthetic oligonucleotide
actttgtcattagaagcacccttccaataa

SEQ ID NO: 136112 - DNA, 30 bp, Artificial Sequence
  Synthetic oligonucleotide
aaacattgcatattaagtgtcccgcaataa

SEQ ID NO: 136113 - DNA, 30 bp, Artificial Sequence
  Synthetic oligonucleotide
ctgctggactcgcaaacgagcacagaataa

SEQ ID NO: 136114 - DNA, 30 bp, Artificial Sequence
  Synthetic oligonucleotide
acagagggataaaatattacatgggaataa

SEQ ID NO: 136115 - DNA, 30 bp, Artificial Sequence
  Synthetic oligonucleotide
cagggtctaacaccatccaagagataataa

SEQ ID NO: 136116 - DNA, 30 bp, Artificial Sequence
  Synthetic oligonucleotide
aagacacacaatgccaggtggaggtaataa

SEQ ID NO: 136117 - DNA, 30 bp, Artificial Sequence
  Synthetic oligonucleotide
cagacacacaggtaggggctgatttaataa

SEQ ID NO: 136118 - DNA, 30 bp, Artificial Sequence
  Synthetic oligonucleotide
acttgccacgagatgtaattgctaacataa

SEQ ID NO: 136119 - DNA, 30 bp, Artificial Sequence
  Synthetic oligonucleotide
ggaattattacgtataaatataacacataa

SEQ ID NO: 136120 - DNA, 30 bp, Artificial Sequence
  Synthetic oligonucleotide
aaaagctgacatctcctatcccagacataa

SEQ ID NO: 136121 - DNA, 30 bp, Artificial Sequence
  Synthetic oligonucleotide
cgttcgcaggggagggcgaagcagacataa

SEQ ID NO: 136122 - DNA, 30 bp, Artificial Sequence
  Synthetic oligonucleotide
caatggtcagtgacctgcgatacgacataa

SEQ ID NO: 136123 - DNA, 30 bp, Artificial Sequence
  Synthetic oligonucleotide
gccggggggggtagtagagataatacataa

SEQ ID NO: 136124 - DNA, 30 bp, Artificial Sequence
  Synthetic oligonucleotide
cgttcacaaaaaaccgttgacgctacataa

SEQ ID NO: 136125 - DNA, 30 bp, Artificial Sequence
  Synthetic oligonucleotide
cagttcatgagggaaccgcttgccccataa

SEQ ID NO: 136126 - DNA, 30 bp, Artificial Sequence
  Synthetic oligonucleotide
tgtgcctaataatttgtggaaagcccataa

SEQ ID NO: 136127 - DNA, 30 bp, Artificial Sequence
  Synthetic oligonucleotide
aatcgggagctgagtgtcgggttcccataa

SEQ ID NO: 136128 - DNA, 30 bp, Artificial Sequence
  Synthetic oligonucleotide
tgaagtcagcggaactcattcatgccataa

SEQ ID NO: 136129 - DNA, 30 bp, Artificial Sequence
  Synthetic oligonucleotide
caacttggtgcgagaatcgacgtgtcataa

SEQ ID NO: 136130 - DNA, 30 bp, Artificial Sequence
  Synthetic oligonucleotide
taggcatgattcacgcgaaagttgtcataa

SEQ ID NO: 136131 - DNA, 30 bp, Artificial Sequence
  Synthetic oligonucleotide
ggctacgtcgctgggacttaacattcataa

SEQ ID NO: 136132 - DNA, 30 bp, Artificial Sequence
  Synthetic oligonucleotide
acggcaattcatttctaaacgtgaagataa

SEQ ID NO: 136133 - DNA, 30 bp, Artificial Sequence
  Synthetic oligonucleotide
tgcaggtccgtgcgctatttagggagataa

SEQ ID NO: 136134 - DNA, 31 bp, Artificial Sequence
  Synthetic oligonucleotide
agaacagatagactcgacacaagtgagataa

SEQ ID NO: 136135 - DNA, 30 bp, Artificial Sequence
  Synthetic oligonucleotide
gaaatcacctttgatacaaacaatcgataa

SEQ ID NO: 136136 - DNA, 30 bp, Artificial Sequence
  Synthetic oligonucleotide
agacccagcgggatttatcgcaaaggataa

SEQ ID NO: 136137 - DNA, 30 bp, Artificial Sequence
  Synthetic oligonucleotide
ggacgtgtcaccaagcaccttacaggataa

SEQ ID NO: 136138 - DNA, 30 bp, Artificial Sequence
  Synthetic oligonucleotide
cagtcactaagtacatgtcttgacggataa

SEQ ID NO: 136139 - DNA, 30 bp, Artificial Sequence
  Synthetic oligonucleotide
ctcgaatgcgaagctgaatagaccggataa

SEQ ID NO: 136140 - DNA, 30 bp, Artificial Sequence
  Synthetic oligonucleotide
actgaccaaggcactctcccgtagggataa

SEQ ID NO: 136141 - DNA, 30 bp, Artificial Sequence
  Synthetic oligonucleotide
cagttgaggaggattgagagtacgggataa

SEQ ID NO: 136142 - DNA, 30 bp, Artificial Sequence
  Synthetic oligonucleotide
agatcagtgtgactcggggttgggggataa

SEQ ID NO: 136143 - DNA, 30 bp, Artificial Sequence
  Synthetic oligonucleotide
tagaacataagggaaagcatactgggataa

SEQ ID NO: 136144 - DNA, 30 bp, Artificial Sequence
  Synthetic oligonucleotide
gtggaggcttagcaatatcataatggataa

SEQ ID NO: 136145 - DNA, 30 bp, Artificial Sequence
  Synthetic oligonucleotide
gcaggtattacaccacaatctcgatgataa

SEQ ID NO: 136146 - DNA, 30 bp, Artificial Sequence
  Synthetic oligonucleotide
agggaaggaccatggtccctagtaatataa

SEQ ID NO: 136147 - DNA, 30 bp, Artificial Sequence
  Synthetic oligonucleotide
cacggatctcatccaactgtgtttatataa

SEQ ID NO: 136148 - DNA, 30 bp, Artificial Sequence
  Synthetic oligonucleotide
cgggctggtccggaccattccaaactataa

SEQ ID NO: 136149 - DNA, 30 bp, Artificial Sequence
  Synthetic oligonucleotide
tgcatgaccagggcagattggttgctataa

SEQ ID NO: 136150 - DNA, 30 bp, Artificial Sequence
  Synthetic oligonucleotide
cgtaatccgtaatgtctcatgattctataa

SEQ ID NO: 136151 - DNA, 30 bp, Artificial Sequence
  Synthetic oligonucleotide
cgtgcgccatgattaccccgcaaagtataa

SEQ ID NO: 136152 - DNA, 30 bp, Artificial Sequence
  Synthetic oligonucleotide
gggaactggggatgagttagacaagtataa

SEQ ID NO: 136153 - DNA, 30 bp, Artificial Sequence
  Synthetic oligonucleotide
aggaaaaggcctccggaaggatgagtataa

SEQ ID NO: 136154 - DNA, 30 bp, Artificial Sequence
  Synthetic oligonucleotide
gcggaggatctgcaaacaatcctagtataa

SEQ ID NO: 136155 - DNA, 30 bp, Artificial Sequence
  Synthetic oligonucleotide
cagataggtcgtatagtaaccaatgtataa

SEQ ID NO: 136156 - DNA, 31 bp, Artificial Sequence
  Synthetic oligonucleotide
cggtagattccagtagctaaccaaattataa

SEQ ID NO: 136157 - DNA, 30 bp, Artificial Sequence
  Synthetic oligonucleotide
tgtacgtgagcgccgatagcctacttataa

SEQ ID NO: 136158 - DNA, 30 bp, Artificial Sequence
  Synthetic oligonucleotide
taggaatggggggtgaacacgcgcttataa

SEQ ID NO: 136159 - DNA, 30 bp, Artificial Sequence
  Synthetic oligonucleotide
gaatgaatccacccaaaccaactcttataa

SEQ ID NO: 136160 - DNA, 30 bp, Artificial Sequence
  Synthetic oligonucleotide
ctgtaatgtagaccgaggaatctaaactaa

SEQ ID NO: 136161 - DNA, 30 bp, Artificial Sequence
  Synthetic oligonucleotide
tcagaagctcactaagcacgagctaactaa

SEQ ID NO: 136162 - DNA, 30 bp, Artificial Sequence
  Synthetic oligonucleotide
agaatcggtacgaaaaaggatagtaactaa

SEQ ID NO: 136163 - DNA, 30 bp, Artificial Sequence
  Synthetic oligonucleotide
aaagtctcgattcgaacagggtagcactaa

SEQ ID NO: 136164 - DNA, 31 bp, Artificial Sequence
  Synthetic oligonucleotide
agataccaagctttccgacaccgcgcactaa

SEQ ID NO: 136165 - DNA, 30 bp, Artificial Sequence
  Synthetic oligonucleotide
gtgcgtgggatggtacagagtttgcactaa

SEQ ID NO: 136166 - DNA, 30 bp, Artificial Sequence
  Synthetic oligonucleotide
gctgataaagacaaagatctacatcactaa

SEQ ID NO: 136167 - DNA, 30 bp, Artificial Sequence
  Synthetic oligonucleotide
tgcgaattctatctcagcccaggtcactaa

SEQ ID NO: 136168 - DNA, 30 bp, Artificial Sequence
  Synthetic oligonucleotide
ggcggcaggcaactgcctacagacgactaa

SEQ ID NO: 136169 - DNA, 30 bp, Artificial Sequence
  Synthetic oligonucleotide
tggacgccatggtggttaaaactcgactaa

SEQ ID NO: 136170 - DNA, 30 bp, Artificial Sequence
  Synthetic oligonucleotide
gaatgtgcaactggtacaattgatgactaa

SEQ ID NO: 136171 - DNA, 30 bp, Artificial Sequence
  Synthetic oligonucleotide
gcgaagagcctatcaatagggcgtgactaa

SEQ ID NO: 136172 - DNA, 30 bp, Artificial Sequence
  Synthetic oligonucleotide
ttgcatgtcagggctagctgctcaacctaa

SEQ ID NO: 136173 - DNA, 30 bp, Artificial Sequence
  Synthetic oligonucleotide
ccacactagtagatctgtattggcacctaa

SEQ ID NO: 136174 - DNA, 30 bp, Artificial Sequence
  Synthetic oligonucleotide
cggaatcttgggagagccaaaccgacctaa

SEQ ID NO: 136175 - DNA, 30 bp, Artificial Sequence
  Synthetic oligonucleotide
cgggccgctccccatgggtcactaccctaa

SEQ ID NO: 136176 - DNA, 30 bp, Artificial Sequence
  Synthetic oligonucleotide
ttgggatgagccggtaaccaatagccctaa

SEQ ID NO: 136177 - DNA, 30 bp, Artificial Sequence
  Synthetic oligonucleotide
atagatggacttaggttgggaggtccctaa

SEQ ID NO: 136178 - DNA, 30 bp, Artificial Sequence
  Synthetic oligonucleotide
gcgaatgctggcgcagagcaagaagcctaa

SEQ ID NO: 136179 - DNA, 30 bp, Artificial Sequence
  Synthetic oligonucleotide
acgcgaaccgggcttttccgtcaatcctaa

SEQ ID NO: 136180 - DNA, 30 bp, Artificial Sequence
  Synthetic oligonucleotide
cgaacattcggggaagcgcaaggatcctaa

SEQ ID NO: 136181 - DNA, 30 bp, Artificial Sequence
  Synthetic oligonucleotide
tgtgcgaaccgataccaggcacaaagctaa

SEQ ID NO: 136182 - DNA, 30 bp, Artificial Sequence
  Synthetic oligonucleotide
aagagggacacgtgttcgaggacaagctaa

SEQ ID NO: 136183 - DNA, 30 bp, Artificial Sequence
  Synthetic oligonucleotide
tctgggtggggtcgttagcgtaatagctaa

SEQ ID NO: 136184 - DNA, 29 bp, Artificial Sequence
  Synthetic oligonucleotide
cgtggaatcgagaatggtttgttagctaa

SEQ ID NO: 136185 - DNA, 30 bp, Artificial Sequence
  Synthetic oligonucleotide
agcaccgaggagacagttgcaccccgctaa

SEQ ID NO: 136186 - DNA, 30 bp, Artificial Sequence
  Synthetic oligonucleotide
caaccacggcgaacggaagggcaaggctaa

SEQ ID NO: 136187 - DNA, 30 bp, Artificial Sequence
  Synthetic oligonucleotide
tttactcgaacaatagtgcgtagaggctaa

SEQ ID NO: 136188 - DNA, 30 bp, Artificial Sequence
  Synthetic oligonucleotide
gtgtgattgtacactttcatagccggctaa

SEQ ID NO: 136189 - DNA, 30 bp, Artificial Sequence
  Synthetic oligonucleotide
tggtgtgggtgcatgttctagaggggctaa

SEQ ID NO: 136190 - DNA, 30 bp, Artificial Sequence
  Synthetic oligonucleotide
tagacacgtcggtatctcaactatggctaa

SEQ ID NO: 136191 - DNA, 30 bp, Artificial Sequence
  Synthetic oligonucleotide
tcggaccatgcaagaaaatctgattgctaa

SEQ ID NO: 136192 - DNA, 30 bp, Artificial Sequence
  Synthetic oligonucleotide
ttcggttgacagatatcatcggggatctaa

SEQ ID NO: 136193 - DNA, 30 bp, Artificial Sequence
  Synthetic oligonucleotide
gctgagggtagtttcgacgtacgactctaa

SEQ ID NO: 136194 - DNA, 30 bp, Artificial Sequence
  Synthetic oligonucleotide
caatcgtgtaaccactatatcaccctctaa

SEQ ID NO: 136195 - DNA, 30 bp, Artificial Sequence
  Synthetic oligonucleotide
gggaaaagtcctaatgcaattgagctctaa

SEQ ID NO: 136196 - DNA, 30 bp, Artificial Sequence
  Synthetic oligonucleotide
gcacaaggggcgtaacaataaaggctctaa

SEQ ID NO: 136197 - DNA, 30 bp, Artificial Sequence
  Synthetic oligonucleotide
gttagacttactaaccatagccatctctaa

SEQ ID NO: 136198 - DNA, 30 bp, Artificial Sequence
  Synthetic oligonucleotide
cacaggatcgaacggtctcacgccgtctaa

SEQ ID NO: 136199 - DNA, 30 bp, Artificial Sequence
  Synthetic oligonucleotide
catcacggttgggcggtgcaatcggtctaa

SEQ ID NO: 136200 - DNA, 30 bp, Artificial Sequence
  Synthetic oligonucleotide
ctaaaaggactattatcggacggggtctaa

SEQ ID NO: 136201 - DNA, 30 bp, Artificial Sequence
  Synthetic oligonucleotide
gtactgtaatcgtacgaggttaacttctaa

SEQ ID NO: 136202 - DNA, 30 bp, Artificial Sequence
  Synthetic oligonucleotide
atccagaaggcgacaatacgctgcttctaa

SEQ ID NO: 136203 - DNA, 30 bp, Artificial Sequence
  Synthetic oligonucleotide
cacgagttgaggtcagaccctaagttctaa

SEQ ID NO: 136204 - DNA, 30 bp, Artificial Sequence
  Synthetic oligonucleotide
gcaacaatcaaccattcatccatgttctaa

SEQ ID NO: 136205 - DNA, 30 bp, Artificial Sequence
  Synthetic oligonucleotide
aagagtaaacaggggtcgcacgaaaagtaa

SEQ ID NO: 136206 - DNA, 30 bp, Artificial Sequence
  Synthetic oligonucleotide
acataatgagggaactctagatcaaagtaa

SEQ ID NO: 136207 - DNA, 30 bp, Artificial Sequence
  Synthetic oligonucleotide
ggcgcccaaggtggagccatttgaaagtaa

SEQ ID NO: 136208 - DNA, 30 bp, Artificial Sequence
  Synthetic oligonucleotide
atgtttacaaagagaagcttgtcgaagtaa

SEQ ID NO: 136209 - DNA, 30 bp, Artificial Sequence
  Synthetic oligonucleotide
acagggaagcttggcctcgtagataagtaa

SEQ ID NO: 136210 - DNA, 30 bp, Artificial Sequence
  Synthetic oligonucleotide
cgggtcaataaacgcactcactgtaagtaa

SEQ ID NO: 136211 - DNA, 30 bp, Artificial Sequence
  Synthetic oligonucleotide
gcgattaggcgcagaacttataaccagtaa

SEQ ID NO: 136212 - DNA, 30 bp, Artificial Sequence
  Synthetic oligonucleotide
taactaaagtctctgtaacgataccagtaa

SEQ ID NO: 136213 - DNA, 30 bp, Artificial Sequence
  Synthetic oligonucleotide
atgtccaattcgtgctcagtgacccagtaa

SEQ ID NO: 136214 - DNA, 30 bp, Artificial Sequence
  Synthetic oligonucleotide
aatacggcgggcagggttcgacggcagtaa

SEQ ID NO: 136215 - DNA, 30 bp, Artificial Sequence
  Synthetic oligonucleotide
acgggctacaccgagtcgttcgatcagtaa

SEQ ID NO: 136216 - DNA, 30 bp, Artificial Sequence
  Synthetic oligonucleotide
ggactacgcactagcaacgatattcagtaa

SEQ ID NO: 136217 - DNA, 30 bp, Artificial Sequence
  Synthetic oligonucleotide
atataaagtggtaagatatcgaaagagtaa

SEQ ID NO: 136218 - DNA, 30 bp, Artificial Sequence
  Synthetic oligonucleotide
cgtcctctcggggctagagcgcgagagtaa

SEQ ID NO: 136219 - DNA, 30 bp, Artificial Sequence
  Synthetic oligonucleotide
ctgtaaaaggaaggtggagtttatgagtaa

SEQ ID NO: 136220 - DNA, 30 bp, Artificial Sequence
  Synthetic oligonucleotide
cactccgttatcacaaactttgaatagtaa

SEQ ID NO: 136221 - DNA, 30 bp, Artificial Sequence
  Synthetic oligonucleotide
cgatgcccgtacgtatctattgcctagtaa

SEQ ID NO: 136222 - DNA, 30 bp, Artificial Sequence
  Synthetic oligonucleotide
ttacggtctccgaacaagtagggctagtaa

SEQ ID NO: 136223 - DNA, 30 bp, Artificial Sequence
  Synthetic oligonucleotide
cctgagccaatgacatgcatcccttagtaa

SEQ ID NO: 136224 - DNA, 30 bp, Artificial Sequence
  Synthetic oligonucleotide
ggagttaaaacctgcagaattagcacgtaa

SEQ ID NO: 136225 - DNA, 30 bp, Artificial Sequence
  Synthetic oligonucleotide
ataaccagccacgatctctgagtcacgtaa

SEQ ID NO: 136226 - DNA, 30 bp, Artificial Sequence
  Synthetic oligonucleotide
gcggcgcgcaagcctggaatcaagacgtaa

SEQ ID NO: 136227 - DNA, 30 bp, Artificial Sequence
  Synthetic oligonucleotide
cgtcgtccaacatcgccattttcaccgtaa

SEQ ID NO: 136228 - DNA, 30 bp, Artificial Sequence
  Synthetic oligonucleotide
gttggctttagtatttctggtcgcccgtaa

SEQ ID NO: 136229 - DNA, 30 bp, Artificial Sequence
  Synthetic oligonucleotide
taacgcgacaatgattgacggactccgtaa

SEQ ID NO: 136230 - DNA, 30 bp, Artificial Sequence
  Synthetic oligonucleotide
gtgatggacacatcacggcgtcctgcgtaa

SEQ ID NO: 136231 - DNA, 30 bp, Artificial Sequence
  Synthetic oligonucleotide
tcgattataatgtgcgttgcagaatcgtaa

SEQ ID NO: 136232 - DNA, 30 bp, Artificial Sequence
  Synthetic oligonucleotide
cagtacgagaaaacggagtatgcctcgtaa

SEQ ID NO: 136233 - DNA, 30 bp, Artificial Sequence
  Synthetic oligonucleotide
gtcgtaactcagcacggtgtagggaggtaa

SEQ ID NO: 136234 - DNA, 30 bp, Artificial Sequence
  Synthetic oligonucleotide
gatcagctctgcttgaaccccctgaggtaa

SEQ ID NO: 136235 - DNA, 30 bp, Artificial Sequence
  Synthetic oligonucleotide
caaagagtatgagtcgcttatcttaggtaa

SEQ ID NO: 136236 - DNA, 30 bp, Artificial Sequence
  Synthetic oligonucleotide
gggcggaagcggtgtgttccaaaacggtaa

SEQ ID NO: 136237 - DNA, 30 bp, Artificial Sequence
  Synthetic oligonucleotide
attgtgtggaatttcagactaaaacggtaa

SEQ ID NO: 136238 - DNA, 29 bp, Artificial Sequence
  Synthetic oligonucleotide
tgccaataatgataaacttaagacggtaa

SEQ ID NO: 136239 - DNA, 30 bp, Artificial Sequence
  Synthetic oligonucleotide
gcagtaagtcatgaaaataaacgccggtaa

SEQ ID NO: 136240 - DNA, 30 bp, Artificial Sequence
  Synthetic oligonucleotide
aaccatccgggcaagagatgattccggtaa

SEQ ID NO: 136241 - DNA, 30 bp, Artificial Sequence
  Synthetic oligonucleotide
atgcagaagtagtattttaaagaagggtaa

SEQ ID NO: 136242 - DNA, 30 bp, Artificial Sequence
  Synthetic oligonucleotide
gccaggactcccgcgtcaaatgcagggtaa

SEQ ID NO: 136243 - DNA, 30 bp, Artificial Sequence
  Synthetic oligonucleotide
gaatgggaatagtaatcgaaaagagggtaa

SEQ ID NO: 136244 - DNA, 30 bp, Artificial Sequence
  Synthetic oligonucleotide
gaacgtaaacgcatataagatagggggtaa

SEQ ID NO: 136245 - DNA, 30 bp, Artificial Sequence
  Synthetic oligonucleotide
aggcggtacgcaatcttaaagggggggtaa

SEQ ID NO: 136246 - DNA, 30 bp, Artificial Sequence
  Synthetic oligonucleotide
agcacatcaacggagtcgtgctaatggtaa

SEQ ID NO: 136247 - DNA, 30 bp, Artificial Sequence
  Synthetic oligonucleotide
agagcagcaaccggcgtgacaacatggtaa

SEQ ID NO: 136248 - DNA, 30 bp, Artificial Sequence
  Synthetic oligonucleotide
tgatgctacgaaagaatacagccatggtaa

SEQ ID NO: 136249 - DNA, 30 bp, Artificial Sequence
  Synthetic oligonucleotide
tactatgatactaattgcgtagtatggtaa

SEQ ID NO: 136250 - DNA, 30 bp, Artificial Sequence
  Synthetic oligonucleotide
cgatcatgcttgcaacacgacggctggtaa

SEQ ID NO: 136251 - DNA, 30 bp, Artificial Sequence
  Synthetic oligonucleotide
ctgctataaccctagcaggcatgaatgtaa

SEQ ID NO: 136252 - DNA, 30 bp, Artificial Sequence
  Synthetic oligonucleotide
ggggtctagggcgcccgagggtacatgtaa

SEQ ID NO: 136253 - DNA, 30 bp, Artificial Sequence
  Synthetic oligonucleotide
acgatttgtgataagtctcgcgccatgtaa

SEQ ID NO: 136254 - DNA, 30 bp, Artificial Sequence
  Synthetic oligonucleotide
cagggatatcggcgtattgcgcggatgtaa

SEQ ID NO: 136255 - DNA, 30 bp, Artificial Sequence
  Synthetic oligonucleotide
tcccatgacaccgcgcgagacgatatgtaa

SEQ ID NO: 136256 - DNA, 30 bp, Artificial Sequence
  Synthetic oligonucleotide
gagatccgatatgtgcaaactgctatgtaa

SEQ ID NO: 136257 - DNA, 30 bp, Artificial Sequence
  Synthetic oligonucleotide
ccaccgagatcattcgacttcgttatgtaa

SEQ ID NO: 136258 - DNA, 30 bp, Artificial Sequence
  Synthetic oligonucleotide
gaacgataggcctagtcggcaacactgtaa

SEQ ID NO: 136259 - DNA, 29 bp, Artificial Sequence
  Synthetic oligonucleotide
gcgggggaagggaggtgggggcagtgtaa

SEQ ID NO: 136260 - DNA, 30 bp, Artificial Sequence
  Synthetic oligonucleotide
agcacacagaacagggttcgtatagtgtaa

SEQ ID NO: 136261 - DNA, 30 bp, Artificial Sequence
  Synthetic oligonucleotide
cgaggcgcgatagctctcaatctagtgtaa

SEQ ID NO: 136262 - DNA, 30 bp, Artificial Sequence
  Synthetic oligonucleotide
ctgtgtgtccaggcatgaggcaaattgtaa

SEQ ID NO: 136263 - DNA, 30 bp, Artificial Sequence
  Synthetic oligonucleotide
gcgacaaacagggtattttctggcttgtaa

SEQ ID NO: 136264 - DNA, 30 bp, Artificial Sequence
  Synthetic oligonucleotide
ttgtgacgttgtcttgcagcgaagttgtaa

SEQ ID NO: 136265 - DNA, 30 bp, Artificial Sequence
  Synthetic oligonucleotide
gcgacgttagatgcaattgaagtgaattaa

SEQ ID NO: 136266 - DNA, 30 bp, Artificial Sequence
  Synthetic oligonucleotide
agaggtcatgtgattactaaagctaattaa

SEQ ID NO: 136267 - DNA, 30 bp, Artificial Sequence
  Synthetic oligonucleotide
cgcgaggtgcgccggagcgacgctaattaa

SEQ ID NO: 136268 - DNA, 30 bp, Artificial Sequence
  Synthetic oligonucleotide
gtggagataaacatggttataggtaattaa

SEQ ID NO: 136269 - DNA, 30 bp, Artificial Sequence
  Synthetic oligonucleotide
aaaggacagattagcagcatgttccattaa

SEQ ID NO: 136270 - DNA, 30 bp, Artificial Sequence
  Synthetic oligonucleotide
taagtggtcacgtgcttgacaccgcattaa

SEQ ID NO: 136271 - DNA, 30 bp, Artificial Sequence
  Synthetic oligonucleotide
accgcatctcggaaaaatgcgtcgcattaa

SEQ ID NO: 136272 - DNA, 30 bp, Artificial Sequence
  Synthetic oligonucleotide
agaataaccgactatccaacccggcattaa

SEQ ID NO: 136273 - DNA, 30 bp, Artificial Sequence
  Synthetic oligonucleotide
gcacaacgaggttgcgtccatcctcattaa

SEQ ID NO: 136274 - DNA, 30 bp, Artificial Sequence
  Synthetic oligonucleotide
tatgtacaaagcccatcatccgaagattaa

SEQ ID NO: 136275 - DNA, 30 bp, Artificial Sequence
  Synthetic oligonucleotide
gggtcgtgagactctaacagataagattaa

SEQ ID NO: 136276 - DNA, 30 bp, Artificial Sequence
  Synthetic oligonucleotide
catcatagctatttagaaatcggagattaa

SEQ ID NO: 136277 - DNA, 30 bp, Artificial Sequence
  Synthetic oligonucleotide
cccgactcgggaatcagtaagggatattaa

SEQ ID NO: 136278 - DNA, 30 bp, Artificial Sequence
  Synthetic oligonucleotide
cttaaagctatagaatggtccccaacttaa

SEQ ID NO: 136279 - DNA, 30 bp, Artificial Sequence
  Synthetic oligonucleotide
tcggggggtgggagtcggtcggtcacttaa

SEQ ID NO: 136280 - DNA, 30 bp, Artificial Sequence
  Synthetic oligonucleotide
ccacgtcagtacgacagagcgcttccttaa

SEQ ID NO: 136281 - DNA, 30 bp, Artificial Sequence
  Synthetic oligonucleotide
gtaatagacggaacaacagacaaggcttaa

SEQ ID NO: 136282 - DNA, 30 bp, Artificial Sequence
  Synthetic oligonucleotide
gtcaggaccgaattcttagctagggcttaa

SEQ ID NO: 136283 - DNA, 30 bp, Artificial Sequence
  Synthetic oligonucleotide
atgacaggggggcgagtttcggctgcttaa

SEQ ID NO: 136284 - DNA, 30 bp, Artificial Sequence
  Synthetic oligonucleotide
gctataccccgatgggagaggtgatcttaa

SEQ ID NO: 136285 - DNA, 30 bp, Artificial Sequence
  Synthetic oligonucleotide
cgggccacatcctacgaaggaggctcttaa

SEQ ID NO: 136286 - DNA, 30 bp, Artificial Sequence
  Synthetic oligonucleotide
gaaggtatgttagaaagcacagattcttaa

SEQ ID NO: 136287 - DNA, 30 bp, Artificial Sequence
  Synthetic oligonucleotide
ataaaaacaatttaggcattaacaagttaa

SEQ ID NO: 136288 - DNA, 30 bp, Artificial Sequence
  Synthetic oligonucleotide
tagtgtaaaggtgctttattagcaagttaa

SEQ ID NO: 136289 - DNA, 30 bp, Artificial Sequence
  Synthetic oligonucleotide
gggtatcagtctacgaagctcgccagttaa

SEQ ID NO: 136290 - DNA, 30 bp, Artificial Sequence
  Synthetic oligonucleotide
acgccctgagggcgccatctagagagttaa

SEQ ID NO: 136291 - DNA, 30 bp, Artificial Sequence
  Synthetic oligonucleotide
tcatacttgaatactggcagactgagttaa

SEQ ID NO: 136292 - DNA, 30 bp, Artificial Sequence
  Synthetic oligonucleotide
tcacagaagcgagtggtgggaaatagttaa

SEQ ID NO: 136293 - DNA, 30 bp, Artificial Sequence
  Synthetic oligonucleotide
ggtcatgagatatggacgagaacacgttaa

SEQ ID NO: 136294 - DNA, 30 bp, Artificial Sequence
  Synthetic oligonucleotide
aacgggatttaagccgctatcagacgttaa

SEQ ID NO: 136295 - DNA, 30 bp, Artificial Sequence
  Synthetic oligonucleotide
cggggtgggcgatgaagtaatttccgttaa

SEQ ID NO: 136296 - DNA, 30 bp, Artificial Sequence
  Synthetic oligonucleotide
cccagacacgaactcatgaagtagcgttaa

SEQ ID NO: 136297 - DNA, 30 bp, Artificial Sequence
  Synthetic oligonucleotide
atgctcacgtcgataagaggtcaatgttaa

SEQ ID NO: 136298 - DNA, 30 bp, Artificial Sequence
  Synthetic oligonucleotide
agcgtaggggtggcggccgtagtatgttaa

SEQ ID NO: 136299 - DNA, 30 bp, Artificial Sequence
  Synthetic oligonucleotide
tgggagtggttgagatatctggtctgttaa

SEQ ID NO: 136300 - DNA, 30 bp, Artificial Sequence
  Synthetic oligonucleotide
atactggtgcgcaagatttcaaagtgttaa

SEQ ID NO: 136301 - DNA, 30 bp, Artificial Sequence
  Synthetic oligonucleotide
tcaaataggaatgatacaggctgttgttaa

SEQ ID NO: 136302 - DNA, 30 bp, Artificial Sequence
  Synthetic oligonucleotide
cgcatccaagtgaacatccgatccatttaa

SEQ ID NO: 136303 - DNA, 30 bp, Artificial Sequence
  Synthetic oligonucleotide
cgacacgtacctaatactcagtttctttaa

SEQ ID NO: 136304 - DNA, 30 bp, Artificial Sequence
  Synthetic oligonucleotide
gaggaatgactgggcacttctacagtttaa

SEQ ID NO: 136305 - DNA, 30 bp, Artificial Sequence
  Synthetic oligonucleotide
ttggatggcttacaattagacatagtttaa

SEQ ID NO: 136306 - DNA, 30 bp, Artificial Sequence
  Synthetic oligonucleotide
accagtaaaacagatgttgagaaggtttaa

SEQ ID NO: 136307 - DNA, 30 bp, Artificial Sequence
  Synthetic oligonucleotide
gatgtagcgtatggacaatggggtgtttaa

SEQ ID NO: 136308 - DNA, 30 bp, Artificial Sequence
  Synthetic oligonucleotide
aaggtttaaccacctctggaacttgtttaa

SEQ ID NO: 136309 - DNA, 30 bp, Artificial Sequence
  Synthetic oligonucleotide
aacgcgtgaaaggaacatacctttgtttaa

SEQ ID NO: 136310 - DNA, 30 bp, Artificial Sequence
  Synthetic oligonucleotide
gggacccataactcggcatgcctgttttaa

SEQ ID NO: 136311 - DNA, 30 bp, Artificial Sequence
  Synthetic oligonucleotide
cccacgaattggggcgtgtgcctgttttaa

SEQ ID NO: 136312 - DNA, 30 bp, Artificial Sequence
  Synthetic oligonucleotide
gatgatggcggcacgagggcattgttttaa

SEQ ID NO: 136313 - DNA, 30 bp, Artificial Sequence
  Synthetic oligonucleotide
actcatggagcttgccacctgaaaaaaaca

SEQ ID NO: 136314 - DNA, 30 bp, Artificial Sequence
  Synthetic oligonucleotide
atccgggtataccagactgatctaaaaaca

SEQ ID NO: 136315 - DNA, 30 bp, Artificial Sequence
  Synthetic oligonucleotide
ttatcagcgtatggcggagaacgcaaaaca

SEQ ID NO: 136316 - DNA, 30 bp, Artificial Sequence
  Synthetic oligonucleotide
agcagggtggaggtacgtgcagcgaaaaca

SEQ ID NO: 136317 - DNA, 30 bp, Artificial Sequence
  Synthetic oligonucleotide
ggtccgccaccctcggtcgaccggaaaaca

SEQ ID NO: 136318 - DNA, 30 bp, Artificial Sequence
  Synthetic oligonucleotide
acttaaagatggtcttatgatctgaaaaca

SEQ ID NO: 136319 - DNA, 30 bp, Artificial Sequence
  Synthetic oligonucleotide
gtctacaaaggtcatagccggctacaaaca

SEQ ID NO: 136320 - DNA, 30 bp, Artificial Sequence
  Synthetic oligonucleotide
caacaggagatgctttagcttccgcaaaca

SEQ ID NO: 136321 - DNA, 30 bp, Artificial Sequence
  Synthetic oligonucleotide
cttggctctgaaggagccagctcgcaaaca

SEQ ID NO: 136322 - DNA, 30 bp, Artificial Sequence
  Synthetic oligonucleotide
ccgtactaggagagcacatccgggcaaaca

SEQ ID NO: 136323 - DNA, 30 bp, Artificial Sequence
  Synthetic oligonucleotide
agtatcaagtccggacatacgtggcaaaca

SEQ ID NO: 136324 - DNA, 30 bp, Artificial Sequence
  Synthetic oligonucleotide
cttgctcgagaatctgggcccctgcaaaca

SEQ ID NO: 136325 - DNA, 30 bp, Artificial Sequence
  Synthetic oligonucleotide
tgacgttaaaccgatctttaccctcaaaca

SEQ ID NO: 136326 - DNA, 30 bp, Artificial Sequence
  Synthetic oligonucleotide
gccccctcaacacatcagctctaagaaaca

SEQ ID NO: 136327 - DNA, 30 bp, Artificial Sequence
  Synthetic oligonucleotide
caccgtagtcttacccgcataccagaaaca

SEQ ID NO: 136328 - DNA, 30 bp, Artificial Sequence
  Synthetic oligonucleotide
tgatgaaataatataataggataggaaaca

SEQ ID NO: 136329 - DNA, 30 bp, Artificial Sequence
  Synthetic oligonucleotide
acagtctaagatcgctttcacggggaaaca

SEQ ID NO: 136330 - DNA, 30 bp, Artificial Sequence
  Synthetic oligonucleotide
tctatcggtagctcgcctgagaaataaaca

SEQ ID NO: 136331 - DNA, 30 bp, Artificial Sequence
  Synthetic oligonucleotide
gcagtgggaataacgtattagacataaaca

SEQ ID NO: 136332 - DNA, 30 bp, Artificial Sequence
  Synthetic oligonucleotide
ttggcaagatcgccaaaattgggctaaaca

SEQ ID NO: 136333 - DNA, 30 bp, Artificial Sequence
  Synthetic oligonucleotide
gctcttgaggggtgaagatgtacgtaaaca

SEQ ID NO: 136334 - DNA, 30 bp, Artificial Sequence
  Synthetic oligonucleotide
accttgcgattacggaatcgtggttaaaca

SEQ ID NO: 136335 - DNA, 30 bp, Artificial Sequence
  Synthetic oligonucleotide
ccgccagacttgcaaatggaagggacaaca

SEQ ID NO: 136336 - DNA, 30 bp, Artificial Sequence
  Synthetic oligonucleotide
tcgagtaagctattagggattgctacaaca

SEQ ID NO: 136337 - DNA, 30 bp, Artificial Sequence
  Synthetic oligonucleotide
aactaagcagtcgctcacttaccgccaaca

SEQ ID NO: 136338 - DNA, 30 bp, Artificial Sequence
  Synthetic oligonucleotide
cgttgaaggagcctggctacaacagcaaca

SEQ ID NO: 136339 - DNA, 30 bp, Artificial Sequence
  Synthetic oligonucleotide
ggggatagagctacgtaaggcaactcaaca

SEQ ID NO: 136340 - DNA, 30 bp, Artificial Sequence
  Synthetic oligonucleotide
gacttgatcgagtcgtcatgaagctcaaca

SEQ ID NO: 136341 - DNA, 30 bp, Artificial Sequence
  Synthetic oligonucleotide
gctcgtatttggcacgagggaatgtcaaca

SEQ ID NO: 136342 - DNA, 30 bp, Artificial Sequence
  Synthetic oligonucleotide
aaggtgataatagttgcactcaattcaaca

SEQ ID NO: 136343 - DNA, 30 bp, Artificial Sequence
  Synthetic oligonucleotide
aaggaaggtacgcgctgtgggtaaagaaca

SEQ ID NO: 136344 - DNA, 30 bp, Artificial Sequence
  Synthetic oligonucleotide
ctgggacagaggccttgcctggtcagaaca

SEQ ID NO: 136345 - DNA, 30 bp, Artificial Sequence
  Synthetic oligonucleotide
gtggggtaatagtacagtacgtggagaaca

SEQ ID NO: 136346 - DNA, 30 bp, Artificial Sequence
  Synthetic oligonucleotide
attgcgaggttgccatcacagggccgaaca

SEQ ID NO: 136347 - DNA, 30 bp, Artificial Sequence
  Synthetic oligonucleotide
gaagcttgaattaccactggaagtcgaaca

SEQ ID NO: 136348 - DNA, 30 bp, Artificial Sequence
  Synthetic oligonucleotide
atatcaccccccgacgtcgacaaaggaaca

SEQ ID NO: 136349 - DNA, 30 bp, Artificial Sequence
  Synthetic oligonucleotide
gatgggcggtccgggaaatacccaggaaca

SEQ ID NO: 136350 - DNA, 30 bp, Artificial Sequence
  Synthetic oligonucleotide
gacgagaggatcaaagaatactccggaaca

SEQ ID NO: 136351 - DNA, 30 bp, Artificial Sequence
  Synthetic oligonucleotide
attggggatggcaaacaactttagggaaca

SEQ ID NO: 136352 - DNA, 30 bp, Artificial Sequence
  Synthetic oligonucleotide
ttcgatagaacattcgaaatggggggaaca

SEQ ID NO: 136353 - DNA, 30 bp, Artificial Sequence
  Synthetic oligonucleotide
atgacatagagctttcagcggtcatgaaca

SEQ ID NO: 136354 - DNA, 30 bp, Artificial Sequence
  Synthetic oligonucleotide
cctgcattcagaatgaggcgatactgaaca

SEQ ID NO: 136355 - DNA, 30 bp, Artificial Sequence
  Synthetic oligonucleotide
ttctaacccaatcccgtgtgagtgtgaaca

SEQ ID NO: 136356 - DNA, 30 bp, Artificial Sequence
  Synthetic oligonucleotide
cgaaccgtgcttatctatttgtcactaaca

SEQ ID NO: 136357 - DNA, 30 bp, Artificial Sequence
  Synthetic oligonucleotide
ggcattcgggtatgcgccgcccagctaaca

SEQ ID NO: 136358 - DNA, 30 bp, Artificial Sequence
  Synthetic oligonucleotide
actagcagcgcgtgaacaatgcggctaaca

SEQ ID NO: 136359 - DNA, 30 bp, Artificial Sequence
  Synthetic oligonucleotide
cagaacgagttagtgtatacagctctaaca

SEQ ID NO: 136360 - DNA, 30 bp, Artificial Sequence
  Synthetic oligonucleotide
actttggcaacagcttaatatcgagtaaca

SEQ ID NO: 136361 - DNA, 30 bp, Artificial Sequence
  Synthetic oligonucleotide
agtgagttgtaccgatcgtcccttgtaaca

SEQ ID NO: 136362 - DNA, 30 bp, Artificial Sequence
  Synthetic oligonucleotide
gcatgtgcacaggattttgggaaattaaca

SEQ ID NO: 136363 - DNA, 30 bp, Artificial Sequence
  Synthetic oligonucleotide
gttctcgagcaacgataagtatagttaaca

SEQ ID NO: 136364 - DNA, 31 bp, Artificial Sequence
  Synthetic oligonucleotide
gaacaggcaagtgaagtctacgaggttaaca

SEQ ID NO: 136365 - DNA, 30 bp, Artificial Sequence
  Synthetic oligonucleotide
gacagaggagagttgcgtaatggaaacaca

SEQ ID NO: 136366 - DNA, 30 bp, Artificial Sequence
  Synthetic oligonucleotide
tgaccgaacgaacctgacaactggaacaca

SEQ ID NO: 136367 - DNA, 30 bp, Artificial Sequence
  Synthetic oligonucleotide
ccagcagtatgtttatgtgaggataacaca

SEQ ID NO: 136368 - DNA, 30 bp, Artificial Sequence
  Synthetic oligonucleotide
ttgagaaatggataataaagttctaacaca

SEQ ID NO: 136369 - DNA, 30 bp, Artificial Sequence
  Synthetic oligonucleotide
tacatcgagtgggagcgattgcaccacaca

SEQ ID NO: 136370 - DNA, 30 bp, Artificial Sequence
  Synthetic oligonucleotide
taaaatgaacccaacagatccactcacaca

SEQ ID NO: 136371 - DNA, 30 bp, Artificial Sequence
  Synthetic oligonucleotide
cataagatgctttcagtagaactagacaca

SEQ ID NO: 136372 - DNA, 30 bp, Artificial Sequence
  Synthetic oligonucleotide
tcatgggattgcggttcgccctgcgacaca

SEQ ID NO: 136373 - DNA, 30 bp, Artificial Sequence
  Synthetic oligonucleotide
acttcgggctatactcggggcggggacaca

SEQ ID NO: 136374 - DNA, 30 bp, Artificial Sequence
  Synthetic oligonucleotide
aaacagcgacacttaaaggttgctgacaca

SEQ ID NO: 136375 - DNA, 30 bp, Artificial Sequence
  Synthetic oligonucleotide
aattacggggtccgttgggcaccatacaca

SEQ ID NO: 136376 - DNA, 30 bp, Artificial Sequence
  Synthetic oligonucleotide
gagcgtcccagaagattacgggtatacaca

SEQ ID NO: 136377 - DNA, 30 bp, Artificial Sequence
  Synthetic oligonucleotide
gtacgattctgagacagcgcgcactacaca

SEQ ID NO: 136378 - DNA, 30 bp, Artificial Sequence
  Synthetic oligonucleotide
tcaggagctagaggacaaccactgaccaca

SEQ ID NO: 136379 - DNA, 30 bp, Artificial Sequence
  Synthetic oligonucleotide
ggtgggctgattgcgttcagtaataccaca

SEQ ID NO: 136380 - DNA, 30 bp, Artificial Sequence
  Synthetic oligonucleotide
atgaatgtatctgactgctactcgcccaca

SEQ ID NO: 136381 - DNA, 30 bp, Artificial Sequence
  Synthetic oligonucleotide
ccgcaaatgactcgaaacatcaggcccaca

SEQ ID NO: 136382 - DNA, 30 bp, Artificial Sequence
  Synthetic oligonucleotide
accaacgagtttcaattctatatagccaca

SEQ ID NO: 136383 - DNA, 30 bp, Artificial Sequence
  Synthetic oligonucleotide
cgcatacgggtcatgggcacgaaatccaca

SEQ ID NO: 136384 - DNA, 30 bp, Artificial Sequence
  Synthetic oligonucleotide
taccagatgaagtccgtcagttaatccaca

SEQ ID NO: 136385 - DNA, 30 bp, Artificial Sequence
  Synthetic oligonucleotide
gtaggtgggcattgtctgtggacatccaca

SEQ ID NO: 136386 - DNA, 30 bp, Artificial Sequence
  Synthetic oligonucleotide
gacagtaactgaacgcagagcgggagcaca

SEQ ID NO: 136387 - DNA, 30 bp, Artificial Sequence
  Synthetic oligonucleotide
cgcgtataacagcggggcagtgtgagcaca

SEQ ID NO: 136388 - DNA, 30 bp, Artificial Sequence
  Synthetic oligonucleotide
caaactcaaaattcgaaacagaaacgcaca

SEQ ID NO: 136389 - DNA, 30 bp, Artificial Sequence
  Synthetic oligonucleotide
agtggtgtgcccctcagccagctacgcaca

SEQ ID NO: 136390 - DNA, 30 bp, Artificial Sequence
  Synthetic oligonucleotide
cacaggagtagttagttgttggtgcgcaca

SEQ ID NO: 136391 - DNA, 30 bp, Artificial Sequence
  Synthetic oligonucleotide
tacataggtaactcaaaaatctgtcgcaca

SEQ ID NO: 136392 - DNA, 30 bp, Artificial Sequence
  Synthetic oligonucleotide
cattcctgaatggaaaatgggccaggcaca

SEQ ID NO: 136393 - DNA, 30 bp, Artificial Sequence
  Synthetic oligonucleotide
ggatagaaccaccgtggttgcctaggcaca

SEQ ID NO: 136394 - DNA, 30 bp, Artificial Sequence
  Synthetic oligonucleotide
ttaaggatctaacaacagacctatggcaca

SEQ ID NO: 136395 - DNA, 30 bp, Artificial Sequence
  Synthetic oligonucleotide
tcaaataactcgtacctgggggaatgcaca

SEQ ID NO: 136396 - DNA, 30 bp, Artificial Sequence
  Synthetic oligonucleotide
cgccacacgaacacctagtaataatgcaca

SEQ ID NO: 136397 - DNA, 30 bp, Artificial Sequence
  Synthetic oligonucleotide
acagcacctagtttgtagagagcatgcaca

SEQ ID NO: 136398 - DNA, 30 bp, Artificial Sequence
  Synthetic oligonucleotide
tgctggaagctcgatttaggccactgcaca

SEQ ID NO: 136399 - DNA, 30 bp, Artificial Sequence
  Synthetic oligonucleotide
acctctgagcggaaccatcagaagtgcaca

SEQ ID NO: 136400 - DNA, 30 bp, Artificial Sequence
  Synthetic oligonucleotide
ggttagggtcgatagaatggggagtgcaca

SEQ ID NO: 136401 - DNA, 30 bp, Artificial Sequence
  Synthetic oligonucleotide
gtggactacatcatggtagattagtgcaca

SEQ ID NO: 136402 - DNA, 30 bp, Artificial Sequence
  Synthetic oligonucleotide
aagttgttaggagagggttaggcgtgcaca

SEQ ID NO: 136403 - DNA, 30 bp, Artificial Sequence
  Synthetic oligonucleotide
gatcatctaggttgagacgtttcgtgcaca

SEQ ID NO: 136404 - DNA, 30 bp, Artificial Sequence
  Synthetic oligonucleotide
tccgcgacactattgaaagatgagatcaca

SEQ ID NO: 136405 - DNA, 30 bp, Artificial Sequence
  Synthetic oligonucleotide
ttgttttaccaatctaataacgcgatcaca

SEQ ID NO: 136406 - DNA, 30 bp, Artificial Sequence
  Synthetic oligonucleotide
gcgtggtcgaaccattgttctaggatcaca

SEQ ID NO: 136407 - DNA, 30 bp, Artificial Sequence
  Synthetic oligonucleotide
ggttaaagtgtggcaaagacactgatcaca

SEQ ID NO: 136408 - DNA, 30 bp, Artificial Sequence
  Synthetic oligonucleotide
tcacaggatccggatgaggttgaactcaca

SEQ ID NO: 136409 - DNA, 30 bp, Artificial Sequence
  Synthetic oligonucleotide
gcgcgccctcttaacatgggtgcactcaca

SEQ ID NO: 136410 - DNA, 30 bp, Artificial Sequence
  Synthetic oligonucleotide
tgtgcttgtcacagtgttggttcactcaca

SEQ ID NO: 136411 - DNA, 30 bp, Artificial Sequence
  Synthetic oligonucleotide
atacgctctactacaaggggtgtactcaca

SEQ ID NO: 136412 - DNA, 30 bp, Artificial Sequence
  Synthetic oligonucleotide
aaagacctggaggcgtcaatcttactcaca

SEQ ID NO: 136413 - DNA, 30 bp, Artificial Sequence
  Synthetic oligonucleotide
ctgattcctggattgaggcttgacctcaca

SEQ ID NO: 136414 - DNA, 30 bp, Artificial Sequence
  Synthetic oligonucleotide
tcgcgtcaaaattacctctcgccgctcaca

SEQ ID NO: 136415 - DNA, 30 bp, Artificial Sequence
  Synthetic oligonucleotide
caacgagggccctggaccacacacgtcaca

SEQ ID NO: 136416 - DNA, 30 bp, Artificial Sequence
  Synthetic oligonucleotide
tgagaaatctcagaccagtcggccgtcaca

SEQ ID NO: 136417 - DNA, 30 bp, Artificial Sequence
  Synthetic oligonucleotide
ccgcgtgaggccagatcatgtggcgtcaca

SEQ ID NO: 136418 - DNA, 30 bp, Artificial Sequence
  Synthetic oligonucleotide
aaaacctaacgaaagagctgtctcgtcaca

SEQ ID NO: 136419 - DNA, 30 bp, Artificial Sequence
  Synthetic oligonucleotide
gtagggatagcagggaatccagtggtcaca

SEQ ID NO: 136420 - DNA, 30 bp, Artificial Sequence
  Synthetic oligonucleotide
atcaaaatcatccgtgtcgggagtgtcaca

SEQ ID NO: 136421 - DNA, 30 bp, Artificial Sequence
  Synthetic oligonucleotide
aggggtccgatatttcttacagttgtcaca

SEQ ID NO: 136422 - DNA, 30 bp, Artificial Sequence
  Synthetic oligonucleotide
tttcaatgctaacacgtgggcgtattcaca

SEQ ID NO: 136423 - DNA, 30 bp, Artificial Sequence
  Synthetic oligonucleotide
gtctttgagacaaattagttaaccttcaca

SEQ ID NO: 136424 - DNA, 30 bp, Artificial Sequence
  Synthetic oligonucleotide
gtaaggatgtgaagctgactcgtgttcaca

SEQ ID NO: 136425 - DNA, 31 bp, Artificial Sequence
  Synthetic oligonucleotide
tgtacagcttgcatgaggatcggaaaagaca

SEQ ID NO: 136426 - DNA, 30 bp, Artificial Sequence
  Synthetic oligonucleotide
ttgaggtcatgggtggaacaactaaagaca

SEQ ID NO: 136427 - DNA, 30 bp, Artificial Sequence
  Synthetic oligonucleotide
cgggcagcatcgccatttcgtgcgaagaca

SEQ ID NO: 136428 - DNA, 30 bp, Artificial Sequence
  Synthetic oligonucleotide
tgccaacattgacgtattaagtggcagaca

SEQ ID NO: 136429 - DNA, 30 bp, Artificial Sequence
  Synthetic oligonucleotide
gacaagcagggtcagccatcgtatcagaca

SEQ ID NO: 136430 - DNA, 30 bp, Artificial Sequence
  Synthetic oligonucleotide
agcttaggcctagtctggacaggtcagaca

SEQ ID NO: 136431 - DNA, 30 bp, Artificial Sequence
  Synthetic oligonucleotide
aatggatggaacagaggatcagttcagaca

SEQ ID NO: 136432 - DNA, 30 bp, Artificial Sequence
  Synthetic oligonucleotide
atgcgcgaaagacgacgtatgatagagaca

SEQ ID NO: 136433 - DNA, 30 bp, Artificial Sequence
  Synthetic oligonucleotide
tgtgaaccgtgggacacactgtaggagaca

SEQ ID NO: 136434 - DNA, 30 bp, Artificial Sequence
  Synthetic oligonucleotide
gatccgaagaagtgaaatcctaatgagaca

SEQ ID NO: 136435 - DNA, 30 bp, Artificial Sequence
  Synthetic oligonucleotide
actgagcgtagggatttgcctgctgagaca

SEQ ID NO: 136436 - DNA, 30 bp, Artificial Sequence
  Synthetic oligonucleotide
ataaccggcgtggttttgtatgaatagaca

SEQ ID NO: 136437 - DNA, 30 bp, Artificial Sequence
  Synthetic oligonucleotide
gcggtgtgaggggtcttggaaatgtagaca

SEQ ID NO: 136438 - DNA, 30 bp, Artificial Sequence
  Synthetic oligonucleotide
atgtactcaaccacttaagagcattagaca

SEQ ID NO: 136439 - DNA, 30 bp, Artificial Sequence
  Synthetic oligonucleotide
ccaattgttatgaacaacggaatttagaca

SEQ ID NO: 136440 - DNA, 30 bp, Artificial Sequence
  Synthetic oligonucleotide
tgagagtgttatacgatcgaagacacgaca

SEQ ID NO: 136441 - DNA, 30 bp, Artificial Sequence
  Synthetic oligonucleotide
tactaagtagtcgggtgggatcccacgaca

SEQ ID NO: 136442 - DNA, 30 bp, Artificial Sequence
  Synthetic oligonucleotide
caagagacagcggcggtattcggcacgaca

SEQ ID NO: 136443 - DNA, 30 bp, Artificial Sequence
  Synthetic oligonucleotide
aacattggctctcatggcaaacttacgaca

SEQ ID NO: 136444 - DNA, 30 bp, Artificial Sequence
  Synthetic oligonucleotide
aactcaattgtcaaatccgtcagcccgaca

SEQ ID NO: 136445 - DNA, 30 bp, Artificial Sequence
  Synthetic oligonucleotide
ttgaggcaatcacatacattcgggccgaca

SEQ ID NO: 136446 - DNA, 30 bp, Artificial Sequence
  Synthetic oligonucleotide
tgtcgcctggatacctcgagaatgccgaca

SEQ ID NO: 136447 - DNA, 30 bp, Artificial Sequence
  Synthetic oligonucleotide
acctaaagaccaggtttgacttgtccgaca

SEQ ID NO: 136448 - DNA, 30 bp, Artificial Sequence
  Synthetic oligonucleotide
aatcatagaatattgtgagtacgggcgaca

SEQ ID NO: 136449 - DNA, 30 bp, Artificial Sequence
  Synthetic oligonucleotide
accgattgcggctaacagatctatgcgaca

SEQ ID NO: 136450 - DNA, 30 bp, Artificial Sequence
  Synthetic oligonucleotide
tacgcgtatcccacgataggctactcgaca

SEQ ID NO: 136451 - DNA, 30 bp, Artificial Sequence
  Synthetic oligonucleotide
gtagcgttcatgagtggatggggctcgaca

SEQ ID NO: 136452 - DNA, 30 bp, Artificial Sequence
  Synthetic oligonucleotide
cggatagggaatacacgtaacaattcgaca

SEQ ID NO: 136453 - DNA, 30 bp, Artificial Sequence
  Synthetic oligonucleotide
taggttagtggaaaccacaccggaaggaca

SEQ ID NO: 136454 - DNA, 30 bp, Artificial Sequence
  Synthetic oligonucleotide
ccccaggtgcggtgtattggcataaggaca

SEQ ID NO: 136455 - DNA, 30 bp, Artificial Sequence
  Synthetic oligonucleotide
catgtctggctgggtacagagttaaggaca

SEQ ID NO: 136456 - DNA, 30 bp, Artificial Sequence
  Synthetic oligonucleotide
caacttaacattgtagttgaaaagaggaca

SEQ ID NO: 136457 - DNA, 30 bp, Artificial Sequence
  Synthetic oligonucleotide
gtaagactatgttagcgggcggttaggaca

SEQ ID NO: 136458 - DNA, 30 bp, Artificial Sequence
  Synthetic oligonucleotide
taccccgacgaaaagcacccgtaacggaca

SEQ ID NO: 136459 - DNA, 30 bp, Artificial Sequence
  Synthetic oligonucleotide
caaactattcgggtgcgccctcctcggaca

SEQ ID NO: 136460 - DNA, 30 bp, Artificial Sequence
  Synthetic oligonucleotide
tatcgttgcctgcagataatgcgagggaca

SEQ ID NO: 136461 - DNA, 30 bp, Artificial Sequence
  Synthetic oligonucleotide
aggtggggagtttaaggagacgacgggaca

SEQ ID NO: 136462 - DNA, 30 bp, Artificial Sequence
  Synthetic oligonucleotide
atattacttggatgttattcaccggggaca

SEQ ID NO: 136463 - DNA, 30 bp, Artificial Sequence
  Synthetic oligonucleotide
taacagcaactttcgctgctgaagtggaca

SEQ ID NO: 136464 - DNA, 30 bp, Artificial Sequence
  Synthetic oligonucleotide
gatgctgagactatgttaatccagtggaca

SEQ ID NO: 136465 - DNA, 30 bp, Artificial Sequence
  Synthetic oligonucleotide
accaccccactcgggaggaaagggtggaca

SEQ ID NO: 136466 - DNA, 30 bp, Artificial Sequence
  Synthetic oligonucleotide
gagcggcatgcaaggctacctcgttggaca

SEQ ID NO: 136467 - DNA, 30 bp, Artificial Sequence
  Synthetic oligonucleotide
caaggagacccatgcatcacggaaatgaca

SEQ ID NO: 136468 - DNA, 30 bp, Artificial Sequence
  Synthetic oligonucleotide
tagcctcaggcggtctcgaggtacatgaca

SEQ ID NO: 136469 - DNA, 30 bp, Artificial Sequence
  Synthetic oligonucleotide
ttaatgtcacataggaggaatctgatgaca

SEQ ID NO: 136470 - DNA, 30 bp, Artificial Sequence
  Synthetic oligonucleotide
atgggccatttgccaaatcttactatgaca

SEQ ID NO: 136471 - DNA, 30 bp, Artificial Sequence
  Synthetic oligonucleotide
ggcgtgacgaatacgcgaaacattatgaca

SEQ ID NO: 136472 - DNA, 30 bp, Artificial Sequence
  Synthetic oligonucleotide
gcaggtggttgatgctcaatgttactgaca

SEQ ID NO: 136473 - DNA, 30 bp, Artificial Sequence
  Synthetic oligonucleotide
tagaagatttcgacctcgacagacctgaca

SEQ ID NO: 136474 - DNA, 30 bp, Artificial Sequence
  Synthetic oligonucleotide
atcattaagaatcagttcgtgctagtgaca

SEQ ID NO: 136475 - DNA, 30 bp, Artificial Sequence
  Synthetic oligonucleotide
gatcgcctgggtgccaagcagggcgtgaca

SEQ ID NO: 136476 - DNA, 30 bp, Artificial Sequence
  Synthetic oligonucleotide
gtggagtcgtgaaccgaggaggcggtgaca

SEQ ID NO: 136477 - DNA, 30 bp, Artificial Sequence
  Synthetic oligonucleotide
gtaagccctcgtcaatacatcatccataca

SEQ ID NO: 136478 - DNA, 30 bp, Artificial Sequence
  Synthetic oligonucleotide
aggcacctctcgcgtgaacagtatcataca

SEQ ID NO: 136479 - DNA, 30 bp, Artificial Sequence
  Synthetic oligonucleotide
ttccaggtgtaaaggcaggactctcataca

SEQ ID NO: 136480 - DNA, 30 bp, Artificial Sequence
  Synthetic oligonucleotide
gtacaaaagctacagctcgtccttcataca

SEQ ID NO: 136481 - DNA, 30 bp, Artificial Sequence
  Synthetic oligonucleotide
gcgggcgttctcatagtatttgcggataca

SEQ ID NO: 136482 - DNA, 30 bp, Artificial Sequence
  Synthetic oligonucleotide
tggctacataggattgatccgagggataca

SEQ ID NO: 136483 - DNA, 30 bp, Artificial Sequence
  Synthetic oligonucleotide
attgcgctaatctggaggaaacatgataca

SEQ ID NO: 136484 - DNA, 30 bp, Artificial Sequence
  Synthetic oligonucleotide
ataaggtaagcgacgtagtaacatgataca

SEQ ID NO: 136485 - DNA, 30 bp, Artificial Sequence
  Synthetic oligonucleotide
atgaccgttggatatcgcctcgtatataca

SEQ ID NO: 136486 - DNA, 30 bp, Artificial Sequence
  Synthetic oligonucleotide
actggacgggatgaaggcacagtctataca

SEQ ID NO: 136487 - DNA, 30 bp, Artificial Sequence
  Synthetic oligonucleotide
caggcgataggacggcgaagccagtataca

SEQ ID NO: 136488 - DNA, 30 bp, Artificial Sequence
  Synthetic oligonucleotide
ctggtgtcactgggttcgaacacttataca

SEQ ID NO: 136489 - DNA, 30 bp, Artificial Sequence
  Synthetic oligonucleotide
ggcactcaatagattcgggataccactaca

SEQ ID NO: 136490 - DNA, 30 bp, Artificial Sequence
  Synthetic oligonucleotide
cttcgaacagcaaggctgtcacccactaca

SEQ ID NO: 136491 - DNA, 30 bp, Artificial Sequence
  Synthetic oligonucleotide
gtcggcacgtcaatcggttaccccactaca

SEQ ID NO: 136492 - DNA, 30 bp, Artificial Sequence
  Synthetic oligonucleotide
aggccgtctgtgtgtaaagcagagactaca

SEQ ID NO: 136493 - DNA, 30 bp, Artificial Sequence
  Synthetic oligonucleotide
ccggcgagtagcctctattgttcgactaca

SEQ ID NO: 136494 - DNA, 30 bp, Artificial Sequence
  Synthetic oligonucleotide
agtctcagtataatcacgtttggacctaca

SEQ ID NO: 136495 - DNA, 31 bp, Artificial Sequence
  Synthetic oligonucleotide
ccgggtaaatgctcggggcgtcgtacctaca

SEQ ID NO: 136496 - DNA, 30 bp, Artificial Sequence
  Synthetic oligonucleotide
atggtgctttctgcaatggtgcgcgctaca

SEQ ID NO: 136497 - DNA, 30 bp, Artificial Sequence
  Synthetic oligonucleotide
gacgcatcacagctgcggacaaaggctaca

SEQ ID NO: 136498 - DNA, 30 bp, Artificial Sequence
  Synthetic oligonucleotide
agtacggaagctctagtgttgacggctaca

SEQ ID NO: 136499 - DNA, 30 bp, Artificial Sequence
  Synthetic oligonucleotide
ggacggcatagggcgatggttgatgctaca

SEQ ID NO: 136500 - DNA, 30 bp, Artificial Sequence
  Synthetic oligonucleotide
ggtcacaagggccgagggcgaggtgctaca

SEQ ID NO: 136501 - DNA, 30 bp, Artificial Sequence
  Synthetic oligonucleotide
caggaagccaaggtacctttggaatctaca

SEQ ID NO: 136502 - DNA, 30 bp, Artificial Sequence
  Synthetic oligonucleotide
gacaggttgcgaggagcccacgaaagtaca

SEQ ID NO: 136503 - DNA, 30 bp, Artificial Sequence
  Synthetic oligonucleotide
ggcggtgaacaccatttagaaccaagtaca

SEQ ID NO: 136504 - DNA, 30 bp, Artificial Sequence
  Synthetic oligonucleotide
agattaacttcgtactgagggagaagtaca

SEQ ID NO: 136505 - DNA, 30 bp, Artificial Sequence
  Synthetic oligonucleotide
cgtcgggcgctttgcgagcattgcagtaca

SEQ ID NO: 136506 - DNA, 30 bp, Artificial Sequence
  Synthetic oligonucleotide
cttagctggaacaatttcgccgcgagtaca

SEQ ID NO: 136507 - DNA, 30 bp, Artificial Sequence
  Synthetic oligonucleotide
gaaggcgccgttgaaaaaatacaccgtaca

SEQ ID NO: 136508 - DNA, 30 bp, Artificial Sequence
  Synthetic oligonucleotide
tgtggtgaacgcgatccgtacagccgtaca

SEQ ID NO: 136509 - DNA, 30 bp, Artificial Sequence
  Synthetic oligonucleotide
cgtgaggggagcggtccccatagccgtaca

SEQ ID NO: 136510 - DNA, 30 bp, Artificial Sequence
  Synthetic oligonucleotide
gtgtgttgcccgtacagatggacgcgtaca

SEQ ID NO: 136511 - DNA, 30 bp, Artificial Sequence
  Synthetic oligonucleotide
caaaatacgccatatagctgagggcgtaca

SEQ ID NO: 136512 - DNA, 30 bp, Artificial Sequence
  Synthetic oligonucleotide
ctgagaatttgcttggcaatatatcgtaca

SEQ ID NO: 136513 - DNA, 30 bp, Artificial Sequence
  Synthetic oligonucleotide
gcgagttaacagtgcatccggggtcgtaca

SEQ ID NO: 136514 - DNA, 30 bp, Artificial Sequence
  Synthetic oligonucleotide
ttggagccttaagtaggcgtatacggtaca

SEQ ID NO: 136515 - DNA, 30 bp, Artificial Sequence
  Synthetic oligonucleotide
cacgtttcggaccgaggtcttgagggtaca

SEQ ID NO: 136516 - DNA, 30 bp, Artificial Sequence
  Synthetic oligonucleotide
cacaaactacggaacctcataccgggtaca

SEQ ID NO: 136517 - DNA, 30 bp, Artificial Sequence
  Synthetic oligonucleotide
atgttaaaataatactattaggcgggtaca

SEQ ID NO: 136518 - DNA, 30 bp, Artificial Sequence
  Synthetic oligonucleotide
aggattcgaaggacagggtggttatgtaca

SEQ ID NO: 136519 - DNA, 30 bp, Artificial Sequence
  Synthetic oligonucleotide
gaaaatagctaatacacttcgcagtgtaca

SEQ ID NO: 136520 - DNA, 30 bp, Artificial Sequence
  Synthetic oligonucleotide
ggacactgtgatgcagatgcaaggtgtaca

SEQ ID NO: 136521 - DNA, 30 bp, Artificial Sequence
  Synthetic oligonucleotide
tatcggcgcgcatcgaatgaaggaattaca

SEQ ID NO: 136522 - DNA, 30 bp, Artificial Sequence
  Synthetic oligonucleotide
ggggacgaattattagtacatgtaattaca

SEQ ID NO: 136523 - DNA, 30 bp, Artificial Sequence
  Synthetic oligonucleotide
taacgtcccgtagccttcatagcgattaca

SEQ ID NO: 136524 - DNA, 30 bp, Artificial Sequence
  Synthetic oligonucleotide
acctcggtgcagtcccgatttacccttaca

SEQ ID NO: 136525 - DNA, 30 bp, Artificial Sequence
  Synthetic oligonucleotide
ttcgctgaacgcatgggtcacggccttaca

SEQ ID NO: 136526 - DNA, 30 bp, Artificial Sequence
  Synthetic oligonucleotide
ggttgcgccacagctcaacgaatccttaca

SEQ ID NO: 136527 - DNA, 30 bp, Artificial Sequence
  Synthetic oligonucleotide
tgcgcctgctaacctggcatacctcttaca

SEQ ID NO: 136528 - DNA, 30 bp, Artificial Sequence
  Synthetic oligonucleotide
aagtagactgacagtgtttaaatcgttaca

SEQ ID NO: 136529 - DNA, 30 bp, Artificial Sequence
  Synthetic oligonucleotide
caaacactgaggataccggagcgtgttaca

SEQ ID NO: 136530 - DNA, 30 bp, Artificial Sequence
  Synthetic oligonucleotide
cggcattcatctggcacaaatcgatttaca

SEQ ID NO: 136531 - DNA, 30 bp, Artificial Sequence
  Synthetic oligonucleotide
agggttcaatcaaaattataagtgtttaca

SEQ ID NO: 136532 - DNA, 30 bp, Artificial Sequence
  Synthetic oligonucleotide
tcgatcaaacgtgaagctatattgtttaca

SEQ ID NO: 136533 - DNA, 30 bp, Artificial Sequence
  Synthetic oligonucleotide
agatgactgcatagtcaataagacaaacca

SEQ ID NO: 136534 - DNA, 30 bp, Artificial Sequence
  Synthetic oligonucleotide
acacactagtactcggtgcggtagaaacca

SEQ ID NO: 136535 - DNA, 30 bp, Artificial Sequence
  Synthetic oligonucleotide
ctacgcgagcgacacataatttagaaacca

SEQ ID NO: 136536 - DNA, 30 bp, Artificial Sequence
  Synthetic oligonucleotide
tgagcatttttagacacattccgacaacca

SEQ ID NO: 136537 - DNA, 30 bp, Artificial Sequence
  Synthetic oligonucleotide
acgtaggacgcttgtatcaccctccaacca

SEQ ID NO: 136538 - DNA, 30 bp, Artificial Sequence
  Synthetic oligonucleotide
catccacggcaatccagacattagcaacca

SEQ ID NO: 136539 - DNA, 30 bp, Artificial Sequence
  Synthetic oligonucleotide
gagccactcatatgacgacaatcagaacca

SEQ ID NO: 136540 - DNA, 30 bp, Artificial Sequence
  Synthetic oligonucleotide
ctgcgcagccagctacttattgtggaacca

SEQ ID NO: 136541 - DNA, 30 bp, Artificial Sequence
  Synthetic oligonucleotide
aggcccgacaatacggcctacttggaacca

SEQ ID NO: 136542 - DNA, 30 bp, Artificial Sequence
  Synthetic oligonucleotide
agtcaatacttacagggacagggtgaacca

SEQ ID NO: 136543 - DNA, 30 bp, Artificial Sequence
  Synthetic oligonucleotide
agaagttgcaggttattgcagtgtgaacca

SEQ ID NO: 136544 - DNA, 30 bp, Artificial Sequence
  Synthetic oligonucleotide
gaactaggaaggccctcaacgcttgaacca

SEQ ID NO: 136545 - DNA, 30 bp, Artificial Sequence
  Synthetic oligonucleotide
ggcgccaatgcggccctgtgacattaacca

SEQ ID NO: 136546 - DNA, 30 bp, Artificial Sequence
  Synthetic oligonucleotide
tgggtagtctccagtacttagtgaacacca

SEQ ID NO: 136547 - DNA, 30 bp, Artificial Sequence
  Synthetic oligonucleotide
actacattgaggtcaattcagaggacacca

SEQ ID NO: 136548 - DNA, 30 bp, Artificial Sequence
  Synthetic oligonucleotide
tatcgaggtttagaacgttggggtacacca

SEQ ID NO: 136549 - DNA, 30 bp, Artificial Sequence
  Synthetic oligonucleotide
acgattcaccgcccggacgcctaaccacca

SEQ ID NO: 136550 - DNA, 30 bp, Artificial Sequence
  Synthetic oligonucleotide
aagagttgtaacagtctcatagcgccacca

SEQ ID NO: 136551 - DNA, 30 bp, Artificial Sequence
  Synthetic oligonucleotide
tgcaaaagcaatctatcgcgcgggccacca

SEQ ID NO: 136552 - DNA, 30 bp, Artificial Sequence
  Synthetic oligonucleotide
tgttgattaaccattagagtgaatccacca

SEQ ID NO: 136553 - DNA, 30 bp, Artificial Sequence
  Synthetic oligonucleotide
atgcgttacggacggtcatacacagcacca

SEQ ID NO: 136554 - DNA, 30 bp, Artificial Sequence
  Synthetic oligonucleotide
cgactgtccatcaattaggtgtccgcacca

SEQ ID NO: 136555 - DNA, 30 bp, Artificial Sequence
  Synthetic oligonucleotide
aggtgggccgaatgcgagtattttgcacca

SEQ ID NO: 136556 - DNA, 30 bp, Artificial Sequence
  Synthetic oligonucleotide
catccatccgcataacatgacaaatcacca

SEQ ID NO: 136557 - DNA, 30 bp, Artificial Sequence
  Synthetic oligonucleotide
cgatctcgactaccgtgagacatatcacca

SEQ ID NO: 136558 - DNA, 30 bp, Artificial Sequence
  Synthetic oligonucleotide
ctattaagtctctcgactaacaactcacca

SEQ ID NO: 136559 - DNA, 30 bp, Artificial Sequence
  Synthetic oligonucleotide
taagcctgggatacgggaagcgtgtcacca

SEQ ID NO: 136560 - DNA, 30 bp, Artificial Sequence
  Synthetic oligonucleotide
acgaattgatctacgaatgaccaaagacca

SEQ ID NO: 136561 - DNA, 30 bp, Artificial Sequence
  Synthetic oligonucleotide
agaagacggggaccggttgggccaagacca

SEQ ID NO: 136562 - DNA, 30 bp, Artificial Sequence
  Synthetic oligonucleotide
acgtgacgttgctggtgtatcaccagacca

SEQ ID NO: 136563 - DNA, 30 bp, Artificial Sequence
  Synthetic oligonucleotide
acaccgcctctcattatcacgacacgacca

SEQ ID NO: 136564 - DNA, 30 bp, Artificial Sequence
  Synthetic oligonucleotide
gcggggtcaaaagcttacgcgtgccgacca

SEQ ID NO: 136565 - DNA, 30 bp, Artificial Sequence
  Synthetic oligonucleotide
taatttcggcgtagagatcttctgcgacca

SEQ ID NO: 136566 - DNA, 30 bp, Artificial Sequence
  Synthetic oligonucleotide
gtcggtagcgatgaattccgctctcgacca

SEQ ID NO: 136567 - DNA, 30 bp, Artificial Sequence
  Synthetic oligonucleotide
gcctactgacacgtggtgcaggcaggacca

SEQ ID NO: 136568 - DNA, 30 bp, Artificial Sequence
  Synthetic oligonucleotide
accgcgtttactgatacgtcattaggacca

SEQ ID NO: 136569 - DNA, 30 bp, Artificial Sequence
  Synthetic oligonucleotide
gatgcacataaacaaggttcgtggggacca

SEQ ID NO: 136570 - DNA, 30 bp, Artificial Sequence
  Synthetic oligonucleotide
aactgattgaacatggggatacatggacca

SEQ ID NO: 136571 - DNA, 30 bp, Artificial Sequence
  Synthetic oligonucleotide
atgaaagagacagactctcatacatgacca

SEQ ID NO: 136572 - DNA, 30 bp, Artificial Sequence
  Synthetic oligonucleotide
ccacacaaccacacctcgtcgccctgacca

SEQ ID NO: 136573 - DNA, 30 bp, Artificial Sequence
  Synthetic oligonucleotide
agcattacggaggtgaaactttcttgacca

SEQ ID NO: 136574 - DNA, 30 bp, Artificial Sequence
  Synthetic oligonucleotide
cgcgtagtgtcacaatagttctcgctacca

SEQ ID NO: 136575 - DNA, 30 bp, Artificial Sequence
  Synthetic oligonucleotide
tgcgtttataactaaacaagtgcagtacca

SEQ ID NO: 136576 - DNA, 30 bp, Artificial Sequence
  Synthetic oligonucleotide
ttacgagtaggtatgttggcgcacgtacca

SEQ ID NO: 136577 - DNA, 30 bp, Artificial Sequence
  Synthetic oligonucleotide
gcatcacgatcggtaagtccgcccgtacca

SEQ ID NO: 136578 - DNA, 30 bp, Artificial Sequence
  Synthetic oligonucleotide
gtgggtacatgtcgatccgccaggttacca

SEQ ID NO: 136579 - DNA, 30 bp, Artificial Sequence
  Synthetic oligonucleotide
acgtttctagtattttagcgcaggaaccca

SEQ ID NO: 136580 - DNA, 30 bp, Artificial Sequence
  Synthetic oligonucleotide
tcatggggcatcgtatttaatcggaaccca

SEQ ID NO: 136581 - DNA, 30 bp, Artificial Sequence
  Synthetic oligonucleotide
ccctgaggcgattcctacacgtctaaccca

SEQ ID NO: 136582 - DNA, 30 bp, Artificial Sequence
  Synthetic oligonucleotide
gggtcggtagcgagatcctaagttaaccca

SEQ ID NO: 136583 - DNA, 30 bp, Artificial Sequence
  Synthetic oligonucleotide
agcgagtgtaccatgatgaaaatacaccca

SEQ ID NO: 136584 - DNA, 30 bp, Artificial Sequence
  Synthetic oligonucleotide
ggcacaaagggagacacgtgatttcaccca

SEQ ID NO: 136585 - DNA, 30 bp, Artificial Sequence
  Synthetic oligonucleotide
aaaggcttaaaatactcacctaacgaccca

SEQ ID NO: 136586 - DNA, 30 bp, Artificial Sequence
  Synthetic oligonucleotide
tatcgaagacggacagccaccgacgaccca

SEQ ID NO: 136587 - DNA, 30 bp, Artificial Sequence
  Synthetic oligonucleotide
aggattctctgtatgataaaagaggaccca

SEQ ID NO: 136588 - DNA, 30 bp, Artificial Sequence
  Synthetic oligonucleotide
ctagagagcctagagtatggctaggaccca

SEQ ID NO: 136589 - DNA, 30 bp, Artificial Sequence
  Synthetic oligonucleotide
gaagtactgatagggcgggtagtggaccca

SEQ ID NO: 136590 - DNA, 30 bp, Artificial Sequence
  Synthetic oligonucleotide
agagcttcactctcagcagctcgataccca

SEQ ID NO: 136591 - DNA, 30 bp, Artificial Sequence
  Synthetic oligonucleotide
gtccgctaccaaatagctacggactaccca

SEQ ID NO: 136592 - DNA, 30 bp, Artificial Sequence
  Synthetic oligonucleotide
tctctaacggtcaatggcagaggctaccca

SEQ ID NO: 136593 - DNA, 30 bp, Artificial Sequence
  Synthetic oligonucleotide
gcgatgcatgaatatggaatgaggtaccca

SEQ ID NO: 136594 - DNA, 30 bp, Artificial Sequence
  Synthetic oligonucleotide
acgttgaaagtattggtgtttagttaccca

SEQ ID NO: 136595 - DNA, 30 bp, Artificial Sequence
  Synthetic oligonucleotide
acatactaacaggtcctggcgacaacccca

SEQ ID NO: 136596 - DNA, 30 bp, Artificial Sequence
  Synthetic oligonucleotide
ggtcagggaggaaccatcaacctaacccca

SEQ ID NO: 136597 - DNA, 30 bp, Artificial Sequence
  Synthetic oligonucleotide
tcttggaactgtcggatcccgaccacccca

SEQ ID NO: 136598 - DNA, 30 bp, Artificial Sequence
  Synthetic oligonucleotide
cgcgattctcacttgtccgttgcgccccca

SEQ ID NO: 136599 - DNA, 30 bp, Artificial Sequence
  Synthetic oligonucleotide
cccatcagaggctactcagcctaggcccca

SEQ ID NO: 136600 - DNA, 30 bp, Artificial Sequence
  Synthetic oligonucleotide
ctgtgggtagatgtaaggtcatgggcccca

SEQ ID NO: 136601 - DNA, 30 bp, Artificial Sequence
  Synthetic oligonucleotide
tggataagcagtactgctctagcttcccca

SEQ ID NO: 136602 - DNA, 30 bp, Artificial Sequence
  Synthetic oligonucleotide
tgttacctacaacatgaaggtgaacgccca

SEQ ID NO: 136603 - DNA, 30 bp, Artificial Sequence
  Synthetic oligonucleotide
gtgtaccaggttaaactaatatcacgccca

SEQ ID NO: 136604 - DNA, 30 bp, Artificial Sequence
  Synthetic oligonucleotide
aggtctcgcggtctcgtactcactcgccca

SEQ ID NO: 136605 - DNA, 30 bp, Artificial Sequence
  Synthetic oligonucleotide
tccgtagggcttagagtgggacctcgccca

SEQ ID NO: 136606 - DNA, 30 bp, Artificial Sequence
  Synthetic oligonucleotide
cagcgaagtcgttcaccacggtacggccca

SEQ ID NO: 136607 - DNA, 30 bp, Artificial Sequence
  Synthetic oligonucleotide
gctatcgtcacgtcagtatcgacgggccca

SEQ ID NO: 136608 - DNA, 30 bp, Artificial Sequence
  Synthetic oligonucleotide
tgcgcgtgaagatacaaccacgctggccca

SEQ ID NO: 136609 - DNA, 30 bp, Artificial Sequence
  Synthetic oligonucleotide
ctgtgggtcagcggcgggggtaactgccca

SEQ ID NO: 136610 - DNA, 30 bp, Artificial Sequence
  Synthetic oligonucleotide
gtgaacagtttatatatcgttcggtgccca

SEQ ID NO: 136611 - DNA, 30 bp, Artificial Sequence
  Synthetic oligonucleotide
tctacacgccgggtggcgagtccaatccca

SEQ ID NO: 136612 - DNA, 30 bp, Artificial Sequence
  Synthetic oligonucleotide
cggtataagctcaatctacgaagcatccca

SEQ ID NO: 136613 - DNA, 30 bp, Artificial Sequence
  Synthetic oligonucleotide
agtgcgctgtaagtcagtgatgggatccca

SEQ ID NO: 136614 - DNA, 30 bp, Artificial Sequence
  Synthetic oligonucleotide
tcacctcggcactccgaatcatgtatccca

SEQ ID NO: 136615 - DNA, 30 bp, Artificial Sequence
  Synthetic oligonucleotide
taacgaaagagcaagatttcacgactccca

SEQ ID NO: 136616 - DNA, 30 bp, Artificial Sequence
  Synthetic oligonucleotide
ccaagatcgcgtcagatcctatcgctccca

SEQ ID NO: 136617 - DNA, 30 bp, Artificial Sequence
  Synthetic oligonucleotide
gatccaatcgaactactacctcctctccca

SEQ ID NO: 136618 - DNA, 30 bp, Artificial Sequence
  Synthetic oligonucleotide
tagctacgactgaaagattccgcagtccca

SEQ ID NO: 136619 - DNA, 30 bp, Artificial Sequence
  Synthetic oligonucleotide
gcactgaggcaatgattatcattcgtccca

SEQ ID NO: 136620 - DNA, 30 bp, Artificial Sequence
  Synthetic oligonucleotide
gcgatcagttctaatagcactgtggtccca

SEQ ID NO: 136621 - DNA, 30 bp, Artificial Sequence
  Synthetic oligonucleotide
tacggagtttttaagcctagcgacttccca

SEQ ID NO: 136622 - DNA, 30 bp, Artificial Sequence
  Synthetic oligonucleotide
tgtaaactgttagtgtgactggacttccca

SEQ ID NO: 136623 - DNA, 30 bp, Artificial Sequence
  Synthetic oligonucleotide
ccgcctggtcacttagggtcgtcaaagcca

SEQ ID NO: 136624 - DNA, 30 bp, Artificial Sequence
  Synthetic oligonucleotide
gctgagcgtaggcagagcctcagaaagcca

SEQ ID NO: 136625 - DNA, 30 bp, Artificial Sequence
  Synthetic oligonucleotide
cttggtttgttacagcagatagagaagcca

SEQ ID NO: 136626 - DNA, 30 bp, Artificial Sequence
  Synthetic oligonucleotide
gtgtcagataggatatcttgatgtaagcca

SEQ ID NO: 136627 - DNA, 30 bp, Artificial Sequence
  Synthetic oligonucleotide
accatggtgtgcttatatggttgtaagcca

SEQ ID NO: 136628 - DNA, 30 bp, Artificial Sequence
  Synthetic oligonucleotide
ccggacgcataaaaagtgttgtcagagcca

SEQ ID NO: 136629 - DNA, 30 bp, Artificial Sequence
  Synthetic oligonucleotide
acaagggacttctttagctaccgcgagcca

SEQ ID NO: 136630 - DNA, 30 bp, Artificial Sequence
  Synthetic oligonucleotide
agatatgcggtccgagtgctggatgagcca

SEQ ID NO: 136631 - DNA, 30 bp, Artificial Sequence
  Synthetic oligonucleotide
atggaaccagtgacctgatctgcatagcca

SEQ ID NO: 136632 - DNA, 30 bp, Artificial Sequence
  Synthetic oligonucleotide
gtggcccgaaactgcgatggtttttagcca

SEQ ID NO: 136633 - DNA, 30 bp, Artificial Sequence
  Synthetic oligonucleotide
caggtgcacatggttgagaccgggacgcca

SEQ ID NO: 136634 - DNA, 30 bp, Artificial Sequence
  Synthetic oligonucleotide
ccaaggcggtggaaaatgagtcctacgcca

SEQ ID NO: 136635 - DNA, 30 bp, Artificial Sequence
  Synthetic oligonucleotide
gccagagtaaaacggtatgactgtacgcca

SEQ ID NO: 136636 - DNA, 30 bp, Artificial Sequence
  Synthetic oligonucleotide
cacggggactataaagattcacaaccgcca

SEQ ID NO: 136637 - DNA, 30 bp, Artificial Sequence
  Synthetic oligonucleotide
agcgagttatgggatgcccggagtccgcca

SEQ ID NO: 136638 - DNA, 30 bp, Artificial Sequence
  Synthetic oligonucleotide
ccgaaaacagatagggctagagtatcgcca

SEQ ID NO: 136639 - DNA, 30 bp, Artificial Sequence
  Synthetic oligonucleotide
atgcccggataactgtaaggctcctcgcca

SEQ ID NO: 136640 - DNA, 30 bp, Artificial Sequence
  Synthetic oligonucleotide
caatgctgcgggggttcaccgtgctcgcca

SEQ ID NO: 136641 - DNA, 30 bp, Artificial Sequence
  Synthetic oligonucleotide
tgggttatgggccacgcggttgagtcgcca

SEQ ID NO: 136642 - DNA, 30 bp, Artificial Sequence
  Synthetic oligonucleotide
ggacattggtaacgaatagcctattcgcca

SEQ ID NO: 136643 - DNA, 30 bp, Artificial Sequence
  Synthetic oligonucleotide
atcagaaactctgcaagaaaactcaggcca

SEQ ID NO: 136644 - DNA, 30 bp, Artificial Sequence
  Synthetic oligonucleotide
agaatcggcttagtgtaccttccacggcca

SEQ ID NO: 136645 - DNA, 30 bp, Artificial Sequence
  Synthetic oligonucleotide
agggagagcgcgtagtgtgtaaaccggcca

SEQ ID NO: 136646 - DNA, 30 bp, Artificial Sequence
  Synthetic oligonucleotide
catggcgcgcgcactgcaattaaagggcca

SEQ ID NO: 136647 - DNA, 30 bp, Artificial Sequence
  Synthetic oligonucleotide
cataagtggtatttacattgcactgggcca

SEQ ID NO: 136648 - DNA, 30 bp, Artificial Sequence
  Synthetic oligonucleotide
tgcgaaatggtcactaaattacgctggcca

SEQ ID NO: 136649 - DNA, 30 bp, Artificial Sequence
  Synthetic oligonucleotide
acgcgtgcaggaacgcactcacattggcca

SEQ ID NO: 136650 - DNA, 30 bp, Artificial Sequence
  Synthetic oligonucleotide
attattgatacaaggactccactcatgcca

SEQ ID NO: 136651 - DNA, 30 bp, Artificial Sequence
  Synthetic oligonucleotide
ccaccggactgacccaccgcgcggatgcca

SEQ ID NO: 136652 - DNA, 30 bp, Artificial Sequence
  Synthetic oligonucleotide
cagtggcggaccgaacgaggacgtatgcca

SEQ ID NO: 136653 - DNA, 30 bp, Artificial Sequence
  Synthetic oligonucleotide
ttgattgaagtaggtacgatgggtatgcca

SEQ ID NO: 136654 - DNA, 30 bp, Artificial Sequence
  Synthetic oligonucleotide
ttgaaatgagagagagaccttgcactgcca

SEQ ID NO: 136655 - DNA, 30 bp, Artificial Sequence
  Synthetic oligonucleotide
cctagggcaactaattcagtcttcctgcca

SEQ ID NO: 136656 - DNA, 30 bp, Artificial Sequence
  Synthetic oligonucleotide
caataagcgacgagcttcagttaagtgcca

SEQ ID NO: 136657 - DNA, 30 bp, Artificial Sequence
  Synthetic oligonucleotide
tgggcccatcggacaaaggaacgagtgcca

SEQ ID NO: 136658 - DNA, 30 bp, Artificial Sequence
  Synthetic oligonucleotide
tcgtctatgcaaggggcttaacacgtgcca

SEQ ID NO: 136659 - DNA, 30 bp, Artificial Sequence
  Synthetic oligonucleotide
tgctcataccctaatagtcggcgggtgcca

SEQ ID NO: 136660 - DNA, 30 bp, Artificial Sequence
  Synthetic oligonucleotide
tggcgacggctactcagaatgaatgtgcca

SEQ ID NO: 136661 - DNA, 30 bp, Artificial Sequence
  Synthetic oligonucleotide
gccatccaagggtgtaatccaactgtgcca

SEQ ID NO: 136662 - DNA, 30 bp, Artificial Sequence
  Synthetic oligonucleotide
tttgacagggggctcaggcagagtgtgcca

SEQ ID NO: 136663 - DNA, 30 bp, Artificial Sequence
  Synthetic oligonucleotide
tgtaacgggtgcctaggctcgtttgtgcca

SEQ ID NO: 136664 - DNA, 30 bp, Artificial Sequence
  Synthetic oligonucleotide
atgtacgcgggcgccctaagactcttgcca

SEQ ID NO: 136665 - DNA, 30 bp, Artificial Sequence
  Synthetic oligonucleotide
gccatacatgattatgcgaacccgttgcca

SEQ ID NO: 136666 - DNA, 30 bp, Artificial Sequence
  Synthetic oligonucleotide
tctacgaggtatcctggtaaactgttgcca

SEQ ID NO: 136667 - DNA, 30 bp, Artificial Sequence
  Synthetic oligonucleotide
gcaacgaccctctcattttgccagaatcca

SEQ ID NO: 136668 - DNA, 30 bp, Artificial Sequence
  Synthetic oligonucleotide
ctcgctccggcgtgcgacgtctagaatcca

SEQ ID NO: 136669 - DNA, 30 bp, Artificial Sequence
  Synthetic oligonucleotide
gcggtgacatatccagcttttcagcatcca

SEQ ID NO: 136670 - DNA, 30 bp, Artificial Sequence
  Synthetic oligonucleotide
catgatagtttgtcaatggtctagcatcca

SEQ ID NO: 136671 - DNA, 30 bp, Artificial Sequence
  Synthetic oligonucleotide
tggagtattaaagcgtattcgtccgatcca

SEQ ID NO: 136672 - DNA, 30 bp, Artificial Sequence
  Synthetic oligonucleotide
ccgaaattcagtgggcttacacaggatcca

SEQ ID NO: 136673 - DNA, 30 bp, Artificial Sequence
  Synthetic oligonucleotide
caaaaaggtcactaccgaaagtcggatcca

SEQ ID NO: 136674 - DNA, 30 bp, Artificial Sequence
  Synthetic oligonucleotide
gtacattgaccaatacagaactcgtatcca

SEQ ID NO: 136675 - DNA, 30 bp, Artificial Sequence
  Synthetic oligonucleotide
tggcgcacatcaacctggcagtattatcca

SEQ ID NO: 136676 - DNA, 30 bp, Artificial Sequence
  Synthetic oligonucleotide
ggggccattacactcgactctgggactcca

SEQ ID NO: 136677 - DNA, 30 bp, Artificial Sequence
  Synthetic oligonucleotide
ctgtctagtgcatcgcgctacgtgactcca

SEQ ID NO: 136678 - DNA, 30 bp, Artificial Sequence
  Synthetic oligonucleotide
ctgaaaaggtaacggttacctccccctcca

SEQ ID NO: 136679 - DNA, 30 bp, Artificial Sequence
  Synthetic oligonucleotide
gctaaggtacacttatcacaaagtcctcca

SEQ ID NO: 136680 - DNA, 30 bp, Artificial Sequence
  Synthetic oligonucleotide
tcgaactattttattttcgttccagctcca

SEQ ID NO: 136681 - DNA, 30 bp, Artificial Sequence
  Synthetic oligonucleotide
gaatcgacaaagcacaaattggcagctcca

SEQ ID NO: 136682 - DNA, 30 bp, Artificial Sequence
  Synthetic oligonucleotide
cgacatacccgagtgctcacattagctcca

SEQ ID NO: 136683 - DNA, 30 bp, Artificial Sequence
  Synthetic oligonucleotide
tacaggtcctggagcctaatgcctgctcca

SEQ ID NO: 136684 - DNA, 30 bp, Artificial Sequence
  Synthetic oligonucleotide
acttcgtaaacttggagtgcaccatctcca

SEQ ID NO: 136685 - DNA, 30 bp, Artificial Sequence
  Synthetic oligonucleotide
atgcctaaacggacttcggtatcaagtcca

SEQ ID NO: 136686 - DNA, 30 bp, Artificial Sequence
  Synthetic oligonucleotide
ggtaggcgattttcatgagtctcaagtcca

SEQ ID NO: 136687 - DNA, 30 bp, Artificial Sequence
  Synthetic oligonucleotide
cacggctccatgcggcttctgcccagtcca

SEQ ID NO: 136688 - DNA, 30 bp, Artificial Sequence
  Synthetic oligonucleotide
cgcgtgcctaaattagatgcggtcagtcca

SEQ ID NO: 136689 - DNA, 30 bp, Artificial Sequence
  Synthetic oligonucleotide
ggtagggcggggagtaatgccgggagtcca

SEQ ID NO: 136690 - DNA, 31 bp, Artificial Sequence
  Synthetic oligonucleotide
tgtagtaggagcaatatgattgaatagtcca

SEQ ID NO: 136691 - DNA, 30 bp, Artificial Sequence
  Synthetic oligonucleotide
ggagatcaatggtcgtcggataagcgtcca

SEQ ID NO: 136692 - DNA, 30 bp, Artificial Sequence
  Synthetic oligonucleotide
tgttcggtaatcaagaggatgcagcgtcca

SEQ ID NO: 136693 - DNA, 30 bp, Artificial Sequence
  Synthetic oligonucleotide
gcggagaggttcagcatcagaacaggtcca

SEQ ID NO: 136694 - DNA, 30 bp, Artificial Sequence
  Synthetic oligonucleotide
tggacataccgtcgcgaatcggcaggtcca

SEQ ID NO: 136695 - DNA, 30 bp, Artificial Sequence
  Synthetic oligonucleotide
ggacgtaaaaattcgattacaaagggtcca

SEQ ID NO: 136696 - DNA, 30 bp, Artificial Sequence
  Synthetic oligonucleotide
aaatcacaggcttcggggaaatcgggtcca

SEQ ID NO: 136697 - DNA, 30 bp, Artificial Sequence
  Synthetic oligonucleotide
atcattgaggaaactatcgttaggtgtcca

SEQ ID NO: 136698 - DNA, 30 bp, Artificial Sequence
  Synthetic oligonucleotide
gcattggatccaagactgttattgtgtcca

SEQ ID NO: 136699 - DNA, 29 bp, Artificial Sequence
  Synthetic oligonucleotide
actcaagacggttattgcgagattgtcca

SEQ ID NO: 136700 - DNA, 30 bp, Artificial Sequence
  Synthetic oligonucleotide
ggacacttagttgaggaaaatcgttgtcca

SEQ ID NO: 136701 - DNA, 30 bp, Artificial Sequence
  Synthetic oligonucleotide
cactggcaagttgctcacgccgtaattcca

SEQ ID NO: 136702 - DNA, 30 bp, Artificial Sequence
  Synthetic oligonucleotide
ggcaccaatacaacagaagaatccattcca

SEQ ID NO: 136703 - DNA, 30 bp, Artificial Sequence
  Synthetic oligonucleotide
ttaatccacaaaacaatccgtcgtattcca

SEQ ID NO: 136704 - DNA, 30 bp, Artificial Sequence
  Synthetic oligonucleotide
tttgcatataaaatcccgaggatacttcca

SEQ ID NO: 136705 - DNA, 30 bp, Artificial Sequence
  Synthetic oligonucleotide
tggtgcttaggctatggaagtagggttcca

SEQ ID NO: 136706 - DNA, 30 bp, Artificial Sequence
  Synthetic oligonucleotide
gctaataacggggtaagtatagttgttcca

SEQ ID NO: 136707 - DNA, 30 bp, Artificial Sequence
  Synthetic oligonucleotide
aaaacatcggcagaaaaatacgcctttcca

SEQ ID NO: 136708 - DNA, 30 bp, Artificial Sequence
  Synthetic oligonucleotide
ggaattatactatatagaaggctcaaagca

SEQ ID NO: 136709 - DNA, 30 bp, Artificial Sequence
  Synthetic oligonucleotide
tctcttcctatcgtgggggccgagaaagca

SEQ ID NO: 136710 - DNA, 30 bp, Artificial Sequence
  Synthetic oligonucleotide
cccagtcgagcgaaacgtgaagggaaagca

SEQ ID NO: 136711 - DNA, 30 bp, Artificial Sequence
  Synthetic oligonucleotide
gacgtccatcatggcgagagaagtcaagca

SEQ ID NO: 136712 - DNA, 30 bp, Artificial Sequence
  Synthetic oligonucleotide
gggtggtccgtacttagggcaggagaagca

SEQ ID NO: 136713 - DNA, 30 bp, Artificial Sequence
  Synthetic oligonucleotide
atgtggctgtatccgatgaaagtggaagca

SEQ ID NO: 136714 - DNA, 30 bp, Artificial Sequence
  Synthetic oligonucleotide
gtgggacaagcttaattcagtacgtaagca

SEQ ID NO: 136715 - DNA, 30 bp, Artificial Sequence
  Synthetic oligonucleotide
actattgcaacgattttaccggcttaagca

SEQ ID NO: 136716 - DNA, 30 bp, Artificial Sequence
  Synthetic oligonucleotide
caaaacgtagatacacaacagtcaacagca

SEQ ID NO: 136717 - DNA, 30 bp, Artificial Sequence
  Synthetic oligonucleotide
catcggccgagggacatgggggtgacagca

SEQ ID NO: 136718 - DNA, 30 bp, Artificial Sequence
  Synthetic oligonucleotide
cgttagtcaccggactggacattcccagca

SEQ ID NO: 136719 - DNA, 30 bp, Artificial Sequence
  Synthetic oligonucleotide
ccgaagattaagaacccacgacagccagca

SEQ ID NO: 136720 - DNA, 30 bp, Artificial Sequence
  Synthetic oligonucleotide
cgtatgccacgatatcgcccatggccagca

SEQ ID NO: 136721 - DNA, 30 bp, Artificial Sequence
  Synthetic oligonucleotide
gagcgatagcaattaaaacgtgttccagca

SEQ ID NO: 136722 - DNA, 30 bp, Artificial Sequence
  Synthetic oligonucleotide
ataaatccaacgaacggattcatagcagca

SEQ ID NO: 136723 - DNA, 30 bp, Artificial Sequence
  Synthetic oligonucleotide
gaagcaattaagggaagaggccccgcagca

SEQ ID NO: 136724 - DNA, 30 bp, Artificial Sequence
  Synthetic oligonucleotide
tcacggtgaagggtcagccttatcgcagca

SEQ ID NO: 136725 - DNA, 30 bp, Artificial Sequence
  Synthetic oligonucleotide
gtcacggatagggtattaataccggcagca

SEQ ID NO: 136726 - DNA, 30 bp, Artificial Sequence
  Synthetic oligonucleotide
tctgcaaggtgaagcggctctcggtcagca

SEQ ID NO: 136727 - DNA, 30 bp, Artificial Sequence
  Synthetic oligonucleotide
cgtaccccgcccagggcggttgattcagca

SEQ ID NO: 136728 - DNA, 30 bp, Artificial Sequence
  Synthetic oligonucleotide
aataattacaggcgagtaagccatagagca

SEQ ID NO: 136729 - DNA, 30 bp, Artificial Sequence
  Synthetic oligonucleotide
gttaaacgagtgagatagagttttagagca

SEQ ID NO: 136730 - DNA, 30 bp, Artificial Sequence
  Synthetic oligonucleotide
aataacgccgccgaagaaaattctcgagca

SEQ ID NO: 136731 - DNA, 30 bp, Artificial Sequence
  Synthetic oligonucleotide
tgtcggcttatacgaaggatcagaggagca

SEQ ID NO: 136732 - DNA, 30 bp, Artificial Sequence
  Synthetic oligonucleotide
accggttgtagcgtctcgtgtgtaggagca

SEQ ID NO: 136733 - DNA, 30 bp, Artificial Sequence
  Synthetic oligonucleotide
gggtggcgggagatgcgtggtcccggagca

SEQ ID NO: 136734 - DNA, 30 bp, Artificial Sequence
  Synthetic oligonucleotide
actgattccacccatagtgactgcggagca

SEQ ID NO: 136735 - DNA, 30 bp, Artificial Sequence
  Synthetic oligonucleotide
attagaagatacatgattaacgagggagca

SEQ ID NO: 136736 - DNA, 30 bp, Artificial Sequence
  Synthetic oligonucleotide
ttatgatacgacatgaacaatgggggagca

SEQ ID NO: 136737 - DNA, 30 bp, Artificial Sequence
  Synthetic oligonucleotide
ctcgtacactggcaacttactcgtggagca

SEQ ID NO: 136738 - DNA, 30 bp, Artificial Sequence
  Synthetic oligonucleotide
cttcgtacgactaattgagattgatgagca

SEQ ID NO: 136739 - DNA, 30 bp, Artificial Sequence
  Synthetic oligonucleotide
cgagagggtggtagctgcgagctatgagca

SEQ ID NO: 136740 - DNA, 30 bp, Artificial Sequence
  Synthetic oligonucleotide
actactagccctctaggcggtctgtgagca

SEQ ID NO: 136741 - DNA, 30 bp, Artificial Sequence
  Synthetic oligonucleotide
aagtgatggttcggcgccgtacacatagca

SEQ ID NO: 136742 - DNA, 30 bp, Artificial Sequence
  Synthetic oligonucleotide
agctaaggggttcgcaaataagcgatagca

SEQ ID NO: 136743 - DNA, 30 bp, Artificial Sequence
  Synthetic oligonucleotide
aatacagtgtgtaaggcagacggtatagca

SEQ ID NO: 136744 - DNA, 30 bp, Artificial Sequence
  Synthetic oligonucleotide
tggtgctcagaaaagggtatacaactagca

SEQ ID NO: 136745 - DNA, 30 bp, Artificial Sequence
  Synthetic oligonucleotide
gaaagaatgacttgaacaatttcactagca

SEQ ID NO: 136746 - DNA, 30 bp, Artificial Sequence
  Synthetic oligonucleotide
agaaagtaagttaaccagaggagtctagca

SEQ ID NO: 136747 - DNA, 30 bp, Artificial Sequence
  Synthetic oligonucleotide
gtagcgggctgaacggcgagaggtctagca

SEQ ID NO: 136748 - DNA, 30 bp, Artificial Sequence
  Synthetic oligonucleotide
actgagccaaaggaaaggattctcgtagca

SEQ ID NO: 136749 - DNA, 30 bp, Artificial Sequence
  Synthetic oligonucleotide
cacggatggatagatttccgattcgtagca

SEQ ID NO: 136750 - DNA, 30 bp, Artificial Sequence
  Synthetic oligonucleotide
gcaaaagcgcgtgctgcccgtcgattagca

SEQ ID NO: 136751 - DNA, 30 bp, Artificial Sequence
  Synthetic oligonucleotide
ccggacatcgacgaatataggtccttagca

SEQ ID NO: 136752 - DNA, 30 bp, Artificial Sequence
  Synthetic oligonucleotide
acagaacagtgggcatggaaaactttagca

SEQ ID NO: 136753 - DNA, 30 bp, Artificial Sequence
  Synthetic oligonucleotide
ggggaggaacggaacctacggactttagca

SEQ ID NO: 136754 - DNA, 30 bp, Artificial Sequence
  Synthetic oligonucleotide
atgaggtccctgtcggatacatttttagca

SEQ ID NO: 136755 - DNA, 30 bp, Artificial Sequence
  Synthetic oligonucleotide
ggtttacgtgggtttcttggccacaacgca

SEQ ID NO: 136756 - DNA, 30 bp, Artificial Sequence
  Synthetic oligonucleotide
gggagggtccgttcatgcagccataacgca

SEQ ID NO: 136757 - DNA, 30 bp, Artificial Sequence
  Synthetic oligonucleotide
tgccggacgagacccccgtgatctaacgca

SEQ ID NO: 136758 - DNA, 30 bp, Artificial Sequence
  Synthetic oligonucleotide
atgcgagacgagaccacgagggcgcacgca

SEQ ID NO: 136759 - DNA, 30 bp, Artificial Sequence
  Synthetic oligonucleotide
tgtgcggcatataacgaaactatctacgca

SEQ ID NO: 136760 - DNA, 30 bp, Artificial Sequence
  Synthetic oligonucleotide
tttcgggagctactctccgtagcgtacgca

SEQ ID NO: 136761 - DNA, 30 bp, Artificial Sequence
  Synthetic oligonucleotide
tgggcataggaggcaattatttaaaccgca

SEQ ID NO: 136762 - DNA, 30 bp, Artificial Sequence
  Synthetic oligonucleotide
gcattgtatccctgagagtaactagccgca

SEQ ID NO: 136763 - DNA, 30 bp, Artificial Sequence
  Synthetic oligonucleotide
gaggcgtcaaagagggggcataaggccgca

SEQ ID NO: 136764 - DNA, 30 bp, Artificial Sequence
  Synthetic oligonucleotide
gtttgaggcacgctcaccattaagtccgca

SEQ ID NO: 136765 - DNA, 30 bp, Artificial Sequence
  Synthetic oligonucleotide
cggatcgggcgggattggggtaaaagcgca

SEQ ID NO: 136766 - DNA, 30 bp, Artificial Sequence
  Synthetic oligonucleotide
tcagccaaaggaaaatcttagacaagcgca

SEQ ID NO: 136767 - DNA, 30 bp, Artificial Sequence
  Synthetic oligonucleotide
taatagcagtcagaaggttattgaagcgca

SEQ ID NO: 136768 - DNA, 30 bp, Artificial Sequence
  Synthetic oligonucleotide
agacttgtgactttagtgataaatagcgca

SEQ ID NO: 136769 - DNA, 30 bp, Artificial Sequence
  Synthetic oligonucleotide
accgcagaaagcgggtgttaacgtagcgca

SEQ ID NO: 136770 - DNA, 30 bp, Artificial Sequence
  Synthetic oligonucleotide
ctccaggagagttaatcctggggccgcgca

SEQ ID NO: 136771 - DNA, 30 bp, Artificial Sequence
  Synthetic oligonucleotide
taagttatcggcggaatcggcggtcgcgca

SEQ ID NO: 136772 - DNA, 30 bp, Artificial Sequence
  Synthetic oligonucleotide
caaggcacaaatacatcacgtttgggcgca

SEQ ID NO: 136773 - DNA, 30 bp, Artificial Sequence
  Synthetic oligonucleotide
gtgggatcaggggccgaattaaatggcgca

SEQ ID NO: 136774 - DNA, 30 bp, Artificial Sequence
  Synthetic oligonucleotide
aagctgttaatgattaagcggtgatgcgca

SEQ ID NO: 136775 - DNA, 30 bp, Artificial Sequence
  Synthetic oligonucleotide
actactaggtacaatgcggtagagtgcgca

SEQ ID NO: 136776 - DNA, 30 bp, Artificial Sequence
  Synthetic oligonucleotide
ctcaacggaaaacacgccccgaaaatcgca

SEQ ID NO: 136777 - DNA, 30 bp, Artificial Sequence
  Synthetic oligonucleotide
aacaaagatctataacattcagtgatcgca

SEQ ID NO: 136778 - DNA, 30 bp, Artificial Sequence
  Synthetic oligonucleotide
ccaaccggtcgccagctaagaggcctcgca

SEQ ID NO: 136779 - DNA, 30 bp, Artificial Sequence
  Synthetic oligonucleotide
tagcagcaggtaatagagagtaagctcgca

SEQ ID NO: 136780 - DNA, 30 bp, Artificial Sequence
  Synthetic oligonucleotide
ttctcagaaggactagcaatgatgctcgca

SEQ ID NO: 136781 - DNA, 30 bp, Artificial Sequence
  Synthetic oligonucleotide
atgggcctacaaacgccgtatactctcgca

SEQ ID NO: 136782 - DNA, 30 bp, Artificial Sequence
  Synthetic oligonucleotide
gtacctgttgagagttggatatgagtcgca

SEQ ID NO: 136783 - DNA, 30 bp, Artificial Sequence
  Synthetic oligonucleotide
aggaggaactcacacggttcagtggtcgca

SEQ ID NO: 136784 - DNA, 30 bp, Artificial Sequence
  Synthetic oligonucleotide
attctccgctagcgataatggagtgtcgca

SEQ ID NO: 136785 - DNA, 30 bp, Artificial Sequence
  Synthetic oligonucleotide
agggtacgaaggaaacctttactattcgca

SEQ ID NO: 136786 - DNA, 30 bp, Artificial Sequence
  Synthetic oligonucleotide
atcctgtacaacgtgtaaccactcttcgca

SEQ ID NO: 136787 - DNA, 30 bp, Artificial Sequence
  Synthetic oligonucleotide
ttcacgcgtgagtatcgctacggtttcgca

SEQ ID NO: 136788 - DNA, 30 bp, Artificial Sequence
  Synthetic oligonucleotide
acttgtaagcttatatggccagggaaggca

SEQ ID NO: 136789 - DNA, 30 bp, Artificial Sequence
  Synthetic oligonucleotide
aaggtatgcagttattggggtactaaggca

SEQ ID NO: 136790 - DNA, 30 bp, Artificial Sequence
  Synthetic oligonucleotide
caacagcgcgactcggcgcttgttaaggca

SEQ ID NO: 136791 - DNA, 30 bp, Artificial Sequence
  Synthetic oligonucleotide
gctagaacgattactgaggggtaacaggca

SEQ ID NO: 136792 - DNA, 30 bp, Artificial Sequence
  Synthetic oligonucleotide
gcatataaatggtatgtcccactacaggca

SEQ ID NO: 136793 - DNA, 30 bp, Artificial Sequence
  Synthetic oligonucleotide
tgaggaatgccctcccgatgcttacaggca

SEQ ID NO: 136794 - DNA, 30 bp, Artificial Sequence
  Synthetic oligonucleotide
cttcacagaggacattctccataccaggca

SEQ ID NO: 136795 - DNA, 30 bp, Artificial Sequence
  Synthetic oligonucleotide
atctgagacagctgtagacattagcaggca

SEQ ID NO: 136796 - DNA, 30 bp, Artificial Sequence
  Synthetic oligonucleotide
agttacatagcgccatcgtgtccagaggca

SEQ ID NO: 136797 - DNA, 30 bp, Artificial Sequence
  Synthetic oligonucleotide
ggcgtagcactgagcttgccttgcgaggca

SEQ ID NO: 136798 - DNA, 30 bp, Artificial Sequence
  Synthetic oligonucleotide
gttcagagacgactggccagtgaggaggca

SEQ ID NO: 136799 - DNA, 30 bp, Artificial Sequence
  Synthetic oligonucleotide
cataaaggcgaggtgtcacactctgaggca

SEQ ID NO: 136800 - DNA, 30 bp, Artificial Sequence
  Synthetic oligonucleotide
atccatagtcagggtaccgctcgtgaggca

SEQ ID NO: 136801 - DNA, 30 bp, Artificial Sequence
  Synthetic oligonucleotide
cttaagtgtgactcaagccgtcttgaggca

SEQ ID NO: 136802 - DNA, 30 bp, Artificial Sequence
  Synthetic oligonucleotide
cgtatgaagtatgctacgctgggataggca

SEQ ID NO: 136803 - DNA, 30 bp, Artificial Sequence
  Synthetic oligonucleotide
atcgttagttgggcagacaatagctaggca

SEQ ID NO: 136804 - DNA, 30 bp, Artificial Sequence
  Synthetic oligonucleotide
gcaatcacaatgtagggttgcaggtaggca

SEQ ID NO: 136805 - DNA, 30 bp, Artificial Sequence
  Synthetic oligonucleotide
ccgggcgttcggggcaagaatgattaggca

SEQ ID NO: 136806 - DNA, 30 bp, Artificial Sequence
  Synthetic oligonucleotide
gggatccactatcgccaagcgaaaccggca

SEQ ID NO: 136807 - DNA, 30 bp, Artificial Sequence
  Synthetic oligonucleotide
cgaggttgaccccctgtaccctcaccggca

SEQ ID NO: 136808 - DNA, 30 bp, Artificial Sequence
  Synthetic oligonucleotide
tcggcaatccggagcgaaagcacgccggca

SEQ ID NO: 136809 - DNA, 30 bp, Artificial Sequence
  Synthetic oligonucleotide
taggcacttactgtcgagcatttgccggca

SEQ ID NO: 136810 - DNA, 30 bp, Artificial Sequence
  Synthetic oligonucleotide
gggatgaaacggtgacacaaaactccggca

SEQ ID NO: 136811 - DNA, 30 bp, Artificial Sequence
  Synthetic oligonucleotide
ctgtcaggttacggggctcactttccggca

SEQ ID NO: 136812 - DNA, 30 bp, Artificial Sequence
  Synthetic oligonucleotide
gcacccagctaccagggtgtaaacgcggca

SEQ ID NO: 136813 - DNA, 30 bp, Artificial Sequence
  Synthetic oligonucleotide
atcgacacacgatatggattcactgcggca

SEQ ID NO: 136814 - DNA, 30 bp, Artificial Sequence
  Synthetic oligonucleotide
acgttacagccatagtcatgtggtgcggca

SEQ ID NO: 136815 - DNA, 30 bp, Artificial Sequence
  Synthetic oligonucleotide
aagcgcaagcctactggagttcaatcggca

SEQ ID NO: 136816 - DNA, 30 bp, Artificial Sequence
  Synthetic oligonucleotide
actggaaagaacatgtcccactaatcggca

SEQ ID NO: 136817 - DNA, 30 bp, Artificial Sequence
  Synthetic oligonucleotide
aagcacttatggactcagttaaactcggca

SEQ ID NO: 136818 - DNA, 30 bp, Artificial Sequence
  Synthetic oligonucleotide
tcgccttagccgggtagagaagtctcggca

SEQ ID NO: 136819 - DNA, 30 bp, Artificial Sequence
  Synthetic oligonucleotide
attaaccactacccaaggagtttctcggca

SEQ ID NO: 136820 - DNA, 30 bp, Artificial Sequence
  Synthetic oligonucleotide
gaagaaccgccctagatcctcaagtcggca

SEQ ID NO: 136821 - DNA, 30 bp, Artificial Sequence
  Synthetic oligonucleotide
atcggtaacgtaccgttggaaactagggca

SEQ ID NO: 136822 - DNA, 30 bp, Artificial Sequence
  Synthetic oligonucleotide
aacgatatattgagcgtaatatttagggca

SEQ ID NO: 136823 - DNA, 30 bp, Artificial Sequence
  Synthetic oligonucleotide
gaatggaaatcgggcgaccaatcccgggca

SEQ ID NO: 136824 - DNA, 30 bp, Artificial Sequence
  Synthetic oligonucleotide
ccattgtattcgtccagtactagccgggca

SEQ ID NO: 136825 - DNA, 30 bp, Artificial Sequence
  Synthetic oligonucleotide
accattaacttagggctcatgttccgggca

SEQ ID NO: 136826 - DNA, 30 bp, Artificial Sequence
  Synthetic oligonucleotide
gaaagtgcagagccagacgtcaagcgggca

SEQ ID NO: 136827 - DNA, 30 bp, Artificial Sequence
  Synthetic oligonucleotide
caaagcgtaacagctagcggcacgcgggca

SEQ ID NO: 136828 - DNA, 30 bp, Artificial Sequence
  Synthetic oligonucleotide
gtcccatgacgaacgggcaaagggcgggca

SEQ ID NO: 136829 - DNA, 30 bp, Artificial Sequence
  Synthetic oligonucleotide
atgtatcatttgggatcaggtaccggggca

SEQ ID NO: 136830 - DNA, 30 bp, Artificial Sequence
  Synthetic oligonucleotide
ctcattgataagcaccggggtcagggggca

SEQ ID NO: 136831 - DNA, 30 bp, Artificial Sequence
  Synthetic oligonucleotide
cgtatagctgcacatccagcatagggggca

SEQ ID NO: 136832 - DNA, 30 bp, Artificial Sequence
  Synthetic oligonucleotide
agccaccgcgatatggctcaattgggggca

SEQ ID NO: 136833 - DNA, 30 bp, Artificial Sequence
  Synthetic oligonucleotide
ccgcctccacaccttaacttctcctgggca

SEQ ID NO: 136834 - DNA, 30 bp, Artificial Sequence
  Synthetic oligonucleotide
tccctatcgctcggggcttcagtgtgggca

SEQ ID NO: 136835 - DNA, 30 bp, Artificial Sequence
  Synthetic oligonucleotide
ctgggtaaggagtacagtcgtaaaatggca

SEQ ID NO: 136836 - DNA, 30 bp, Artificial Sequence
  Synthetic oligonucleotide
ggataggtatcattaacaacgggaatggca

SEQ ID NO: 136837 - DNA, 30 bp, Artificial Sequence
  Synthetic oligonucleotide
gaaagcggctagaaatctatcagcatggca

SEQ ID NO: 136838 - DNA, 30 bp, Artificial Sequence
  Synthetic oligonucleotide
gcactggtcaagcccgaagtgcatatggca

SEQ ID NO: 136839 - DNA, 30 bp, Artificial Sequence
  Synthetic oligonucleotide
tccctcaactaagccacataatctatggca

SEQ ID NO: 136840 - DNA, 30 bp, Artificial Sequence
  Synthetic oligonucleotide
tccatcgtgaaggcacacaggacactggca

SEQ ID NO: 136841 - DNA, 30 bp, Artificial Sequence
  Synthetic oligonucleotide
tgacgcggttgagaacatgcgcacctggca

SEQ ID NO: 136842 - DNA, 30 bp, Artificial Sequence
  Synthetic oligonucleotide
attggggtggtttgcgagtatcccctggca

SEQ ID NO: 136843 - DNA, 30 bp, Artificial Sequence
  Synthetic oligonucleotide
gctctaacacagaattattgcaaagtggca

SEQ ID NO: 136844 - DNA, 30 bp, Artificial Sequence
  Synthetic oligonucleotide
catgtaggaatacgtatatgggtagtggca

SEQ ID NO: 136845 - DNA, 30 bp, Artificial Sequence
  Synthetic oligonucleotide
tcctactaactgcaagggaggtacgtggca

SEQ ID NO: 136846 - DNA, 30 bp, Artificial Sequence
  Synthetic oligonucleotide
ctgccgacaagttaaaggtgaaaggtggca

SEQ ID NO: 136847 - DNA, 30 bp, Artificial Sequence
  Synthetic oligonucleotide
tcggaacggcttctctcccccagattggca

SEQ ID NO: 136848 - DNA, 30 bp, Artificial Sequence
  Synthetic oligonucleotide
aatggttcagggcagatatcaaggttggca

SEQ ID NO: 136849 - DNA, 29 bp, Artificial Sequence
  Synthetic oligonucleotide
ggagatgaaaagcggttagtatgttggca

SEQ ID NO: 136850 - DNA, 30 bp, Artificial Sequence
  Synthetic oligonucleotide
actccgtagtaaaagtagattgtgttggca

SEQ ID NO: 136851 - DNA, 30 bp, Artificial Sequence
  Synthetic oligonucleotide
gcgacaactcggtcaggtttcgctttggca

SEQ ID NO: 136852 - DNA, 30 bp, Artificial Sequence
  Synthetic oligonucleotide
gcgagataggatcgttgatagaccaatgca

SEQ ID NO: 136853 - DNA, 30 bp, Artificial Sequence
  Synthetic oligonucleotide
ttaagtccaacaggtctaaaaactaatgca

SEQ ID NO: 136854 - DNA, 30 bp, Artificial Sequence
  Synthetic oligonucleotide
ccttagtgtaagctccctaattctaatgca

SEQ ID NO: 136855 - DNA, 30 bp, Artificial Sequence
  Synthetic oligonucleotide
ttgagtccggcattgttaagaccccatgca

SEQ ID NO: 136856 - DNA, 30 bp, Artificial Sequence
  Synthetic oligonucleotide
acctgaaggattggaaagccttttcatgca

SEQ ID NO: 136857 - DNA, 30 bp, Artificial Sequence
  Synthetic oligonucleotide
gaatcaagggaaaaaatcatgaacgatgca

SEQ ID NO: 136858 - DNA, 30 bp, Artificial Sequence
  Synthetic oligonucleotide
gccaggaattagaagttcatgaaatatgca

SEQ ID NO: 136859 - DNA, 30 bp, Artificial Sequence
  Synthetic oligonucleotide
catcgtaccaggagatactgtagatatgca

SEQ ID NO: 136860 - DNA, 30 bp, Artificial Sequence
  Synthetic oligonucleotide
ataaacatattttgtcagaccttatatgca

SEQ ID NO: 136861 - DNA, 30 bp, Artificial Sequence
  Synthetic oligonucleotide
tggaagggtgatcatatgtcgttatatgca

SEQ ID NO: 136862 - DNA, 30 bp, Artificial Sequence
  Synthetic oligonucleotide
tgagcgaaggccagtgtcgcgcagactgca

SEQ ID NO: 136863 - DNA, 30 bp, Artificial Sequence
  Synthetic oligonucleotide
agtactttgaggaggcctttcaacgctgca

SEQ ID NO: 136864 - DNA, 30 bp, Artificial Sequence
  Synthetic oligonucleotide
atacaatataagtgagaagtcgtcgctgca

SEQ ID NO: 136865 - DNA, 30 bp, Artificial Sequence
  Synthetic oligonucleotide
taaggaaatcgcgcgatttcatcaagtgca

SEQ ID NO: 136866 - DNA, 30 bp, Artificial Sequence
  Synthetic oligonucleotide
ataggggatgggctggtaacatcacgtgca

SEQ ID NO: 136867 - DNA, 30 bp, Artificial Sequence
  Synthetic oligonucleotide
gatagggccccacttgaaaacctaggtgca

SEQ ID NO: 136868 - DNA, 30 bp, Artificial Sequence
  Synthetic oligonucleotide
acgtcgctccgggaacaatctgcgggtgca

SEQ ID NO: 136869 - DNA, 30 bp, Artificial Sequence
  Synthetic oligonucleotide
ccgatgttgacttcggtgcctcgatgtgca

SEQ ID NO: 136870 - DNA, 30 bp, Artificial Sequence
  Synthetic oligonucleotide
gtgtaccaaaaattgagcactggatgtgca

SEQ ID NO: 136871 - DNA, 30 bp, Artificial Sequence
  Synthetic oligonucleotide
tgtgatctcccgctaggactactatgtgca

SEQ ID NO: 136872 - DNA, 30 bp, Artificial Sequence
  Synthetic oligonucleotide
aaagacagtcatatacatataggctgtgca

SEQ ID NO: 136873 - DNA, 30 bp, Artificial Sequence
  Synthetic oligonucleotide
ttgcagcagaatgcgggaatgattattgca

SEQ ID NO: 136874 - DNA, 30 bp, Artificial Sequence
  Synthetic oligonucleotide
cagaaaccctggggaaaacgaatacttgca

SEQ ID NO: 136875 - DNA, 30 bp, Artificial Sequence
  Synthetic oligonucleotide
attcagctacggaattactgtaagcttgca

SEQ ID NO: 136876 - DNA, 30 bp, Artificial Sequence
  Synthetic oligonucleotide
cgaaatccaatccattgtatagtgcttgca

SEQ ID NO: 136877 - DNA, 30 bp, Artificial Sequence
  Synthetic oligonucleotide
ccaatctgaggggacgtcgcatttcttgca

SEQ ID NO: 136878 - DNA, 30 bp, Artificial Sequence
  Synthetic oligonucleotide
catttaactcgtttggtggcgatcgttgca

SEQ ID NO: 136879 - DNA, 30 bp, Artificial Sequence
  Synthetic oligonucleotide
agtgtaatctcgatttacggaattgttgca

SEQ ID NO: 136880 - DNA, 30 bp, Artificial Sequence
  Synthetic oligonucleotide
agggtatcgtcaccgttatagtactttgca

SEQ ID NO: 136881 - DNA, 30 bp, Artificial Sequence
  Synthetic oligonucleotide
agaagtgagtcgtcgtcacgaaggtttgca

SEQ ID NO: 136882 - DNA, 30 bp, Artificial Sequence
  Synthetic oligonucleotide
acagtcgacgtgaagcttacgcggtttgca

SEQ ID NO: 136883 - DNA, 30 bp, Artificial Sequence
  Synthetic oligonucleotide
aagtgagccactcacgccctaacttttgca

SEQ ID NO: 136884 - DNA, 30 bp, Artificial Sequence
  Synthetic oligonucleotide
aatggcatctggtaacataagctttttgca

SEQ ID NO: 136885 - DNA, 30 bp, Artificial Sequence
  Synthetic oligonucleotide
gggttgcgatacgcgacccgaaaaaaatca

SEQ ID NO: 136886 - DNA, 30 bp, Artificial Sequence
  Synthetic oligonucleotide
gcgatactattacttctagtgtagaaatca

SEQ ID NO: 136887 - DNA, 30 bp, Artificial Sequence
  Synthetic oligonucleotide
agggcccgatgttggtagaatacgaaatca

SEQ ID NO: 136888 - DNA, 30 bp, Artificial Sequence
  Synthetic oligonucleotide
atcgacaccatcaaatcctacagccaatca

SEQ ID NO: 136889 - DNA, 30 bp, Artificial Sequence
  Synthetic oligonucleotide
ggcaaacctctatatgtacatcggcaatca

SEQ ID NO: 136890 - DNA, 30 bp, Artificial Sequence
  Synthetic oligonucleotide
tgaacaatcaatctcgtaaatactcaatca

SEQ ID NO: 136891 - DNA, 30 bp, Artificial Sequence
  Synthetic oligonucleotide
cagaatcagtactacgtttcgtctcaatca

SEQ ID NO: 136892 - DNA, 30 bp, Artificial Sequence
  Synthetic oligonucleotide
gtccagtgaacagagagaattagtcaatca

SEQ ID NO: 136893 - DNA, 30 bp, Artificial Sequence
  Synthetic oligonucleotide
atgttcgcaagaaaagttttagaagaatca

SEQ ID NO: 136894 - DNA, 30 bp, Artificial Sequence
  Synthetic oligonucleotide
tctggatgattcagagttgaacaggaatca

SEQ ID NO: 136895 - DNA, 30 bp, Artificial Sequence
  Synthetic oligonucleotide
caaccaccacactagaagttgggggaatca

SEQ ID NO: 136896 - DNA, 30 bp, Artificial Sequence
  Synthetic oligonucleotide
aaagaaagatacatggtgtactatgaatca

SEQ ID NO: 136897 - DNA, 30 bp, Artificial Sequence
  Synthetic oligonucleotide
tggcactgactcgaacatgcgccataatca

SEQ ID NO: 136898 - DNA, 30 bp, Artificial Sequence
  Synthetic oligonucleotide
agcgtctcacgcaagtattactcctaatca

SEQ ID NO: 136899 - DNA, 30 bp, Artificial Sequence
  Synthetic oligonucleotide
cgtcacggtgaggggctgttgtcctaatca

SEQ ID NO: 136900 - DNA, 30 bp, Artificial Sequence
  Synthetic oligonucleotide
tcctgattggcgataattacaatctaatca

SEQ ID NO: 136901 - DNA, 30 bp, Artificial Sequence
  Synthetic oligonucleotide
agtcagctatagctttcgcaaccgtaatca

SEQ ID NO: 136902 - DNA, 30 bp, Artificial Sequence
  Synthetic oligonucleotide
aaagaaggtgagtgctactgacattaatca

SEQ ID NO: 136903 - DNA, 30 bp, Artificial Sequence
  Synthetic oligonucleotide
gcggcatagtactataacgcggcaacatca

SEQ ID NO: 136904 - DNA, 30 bp, Artificial Sequence
  Synthetic oligonucleotide
aggaggaagatttggagacctcccacatca

SEQ ID NO: 136905 - DNA, 30 bp, Artificial Sequence
  Synthetic oligonucleotide
gtgtgattatggcgtctttccgtgacatca

SEQ ID NO: 136906 - DNA, 30 bp, Artificial Sequence
  Synthetic oligonucleotide
atagactcaagtgggcttaggtatacatca

SEQ ID NO: 136907 - DNA, 30 bp, Artificial Sequence
  Synthetic oligonucleotide
gtagtttctgctgacaagtggcggccatca

SEQ ID NO: 136908 - DNA, 30 bp, Artificial Sequence
  Synthetic oligonucleotide
gatggcatctatgaacgacaccaagcatca

SEQ ID NO: 136909 - DNA, 30 bp, Artificial Sequence
  Synthetic oligonucleotide
gcacagggtgaaggcaggctacgcgcatca

SEQ ID NO: 136910 - DNA, 30 bp, Artificial Sequence
  Synthetic oligonucleotide
gtccaaggaggcgttccccaagctgcatca

SEQ ID NO: 136911 - DNA, 30 bp, Artificial Sequence
  Synthetic oligonucleotide
gcgatcttaacaccattgcacctctcatca

SEQ ID NO: 136912 - DNA, 30 bp, Artificial Sequence
  Synthetic oligonucleotide
gcctaggacgtgtttaacaatgtgtcatca

SEQ ID NO: 136913 - DNA, 30 bp, Artificial Sequence
  Synthetic oligonucleotide
cactaaatggtctgtggcataagcagatca

SEQ ID NO: 136914 - DNA, 25 bp, Artificial Sequence
  Synthetic oligonucleotide
aacaaacggcagggcaagccgatca

SEQ ID NO: 136915 - DNA, 30 bp, Artificial Sequence
  Synthetic oligonucleotide
gctgagttaacagaccgatgagtccgatca

SEQ ID NO: 136916 - DNA, 30 bp, Artificial Sequence
  Synthetic oligonucleotide
acagggataaaacgttggggccttcgatca

SEQ ID NO: 136917 - DNA, 30 bp, Artificial Sequence
  Synthetic oligonucleotide
atcagtggtaggggactgtggttaggatca

SEQ ID NO: 136918 - DNA, 30 bp, Artificial Sequence
  Synthetic oligonucleotide
tccatagcgcgaaatggatttgatggatca

SEQ ID NO: 136919 - DNA, 30 bp, Artificial Sequence
  Synthetic oligonucleotide
acactacacggtagtccaagcaggtgatca

SEQ ID NO: 136920 - DNA, 30 bp, Artificial Sequence
  Synthetic oligonucleotide
gcttcttagtcaggggacctggggtgatca

SEQ ID NO: 136921 - DNA, 30 bp, Artificial Sequence
  Synthetic oligonucleotide
aagactgaccgagaccagcgcgattgatca

SEQ ID NO: 136922 - DNA, 30 bp, Artificial Sequence
  Synthetic oligonucleotide
ccgatttactgaatagggactggttgatca

SEQ ID NO: 136923 - DNA, 30 bp, Artificial Sequence
  Synthetic oligonucleotide
atgagaattagtgatgccgaggtttgatca

SEQ ID NO: 136924 - DNA, 30 bp, Artificial Sequence
  Synthetic oligonucleotide
accggcgtcgtaccggcgaagtaaatatca

SEQ ID NO: 136925 - DNA, 30 bp, Artificial Sequence
  Synthetic oligonucleotide
gatgcgaaatcattgggcggttcaatatca

SEQ ID NO: 136926 - DNA, 30 bp, Artificial Sequence
  Synthetic oligonucleotide
ctaccccctggcaacttataccacatatca

SEQ ID NO: 136927 - DNA, 30 bp, Artificial Sequence
  Synthetic oligonucleotide
cggatacaatgggtgtcgtagcttatatca

SEQ ID NO: 136928 - DNA, 30 bp, Artificial Sequence
  Synthetic oligonucleotide
cactacgataaccttaaggatacactatca

SEQ ID NO: 136929 - DNA, 30 bp, Artificial Sequence
  Synthetic oligonucleotide
gtgtcccgccccaccatcaggagcctatca

SEQ ID NO: 136930 - DNA, 30 bp, Artificial Sequence
  Synthetic oligonucleotide
gatagtcaaggcatcacacctacgctatca

SEQ ID NO: 136931 - DNA, 30 bp, Artificial Sequence
  Synthetic oligonucleotide
atcgacgagggagtgctgcgacctctatca

SEQ ID NO: 136932 - DNA, 30 bp, Artificial Sequence
  Synthetic oligonucleotide
agcattagcttcgaatgcagtcgtctatca

SEQ ID NO: 136933 - DNA, 30 bp, Artificial Sequence
  Synthetic oligonucleotide
ggcaggagcgtagtaagagctatggtatca

SEQ ID NO: 136934 - DNA, 30 bp, Artificial Sequence
  Synthetic oligonucleotide
tcgccgtaagacttatgaggaatattatca

SEQ ID NO: 136935 - DNA, 30 bp, Artificial Sequence
  Synthetic oligonucleotide
ggatgtaccactaggcacacgttattatca

SEQ ID NO: 136936 - DNA, 30 bp, Artificial Sequence
  Synthetic oligonucleotide
cggaatgactaaccataagaagccttatca

SEQ ID NO: 136937 - DNA, 30 bp, Artificial Sequence
  Synthetic oligonucleotide
aacataggggcttctgtgttagggttatca

SEQ ID NO: 136938 - DNA, 30 bp, Artificial Sequence
  Synthetic oligonucleotide
ccagaaagctcttacataaacgggttatca

SEQ ID NO: 136939 - DNA, 30 bp, Artificial Sequence
  Synthetic oligonucleotide
aggtcaccccccgtcaaccggccaaactca

SEQ ID NO: 136940 - DNA, 30 bp, Artificial Sequence
  Synthetic oligonucleotide
agacgggcgctgacgcgtaggacacactca

SEQ ID NO: 136941 - DNA, 30 bp, Artificial Sequence
  Synthetic oligonucleotide
tgatgcacgtcgtacactaagatccactca

SEQ ID NO: 136942 - DNA, 30 bp, Artificial Sequence
  Synthetic oligonucleotide
cagaaaagctacatcaagcccttccactca

SEQ ID NO: 136943 - DNA, 30 bp, Artificial Sequence
  Synthetic oligonucleotide
ttctcagacccgacactggctcgggactca

SEQ ID NO: 136944 - DNA, 30 bp, Artificial Sequence
  Synthetic oligonucleotide
ttcacccagtcaagaaggaccaagacctca

SEQ ID NO: 136945 - DNA, 30 bp, Artificial Sequence
  Synthetic oligonucleotide
gcattgtctacatggatttgagctacctca

SEQ ID NO: 136946 - DNA, 30 bp, Artificial Sequence
  Synthetic oligonucleotide
cggaatcaacattcacagtttttaccctca

SEQ ID NO: 136947 - DNA, 29 bp, Artificial Sequence
  Synthetic oligonucleotide
tcatctccattattcctgtatatgcctca

SEQ ID NO: 136948 - DNA, 30 bp, Artificial Sequence
  Synthetic oligonucleotide
tcaacgttcgaactcgattcgggatcctca

SEQ ID NO: 136949 - DNA, 30 bp, Artificial Sequence
  Synthetic oligonucleotide
ggtgtcattcttcccggggcatgctcctca

SEQ ID NO: 136950 - DNA, 30 bp, Artificial Sequence
  Synthetic oligonucleotide
ctttgaaacgggtagttacctatgagctca

SEQ ID NO: 136951 - DNA, 30 bp, Artificial Sequence
  Synthetic oligonucleotide
acactcgcgactagcacagatctacgctca

SEQ ID NO: 136952 - DNA, 30 bp, Artificial Sequence
  Synthetic oligonucleotide
ctaggggcgtagaattggtttaaccgctca

SEQ ID NO: 136953 - DNA, 30 bp, Artificial Sequence
  Synthetic oligonucleotide
atcatatccataggcgcgtgaagccgctca

SEQ ID NO: 136954 - DNA, 30 bp, Artificial Sequence
  Synthetic oligonucleotide
tgtgagaaccaatgcctcgcaattcgctca

SEQ ID NO: 136955 - DNA, 30 bp, Artificial Sequence
  Synthetic oligonucleotide
aaaaacggatgggaagccagcgtcggctca

SEQ ID NO: 136956 - DNA, 30 bp, Artificial Sequence
  Synthetic oligonucleotide
tattgtcctagttccgacgttggtggctca

SEQ ID NO: 136957 - DNA, 30 bp, Artificial Sequence
  Synthetic oligonucleotide
tgttagctgtgcgaatcgaacaaaatctca

SEQ ID NO: 136958 - DNA, 30 bp, Artificial Sequence
  Synthetic oligonucleotide
gaaactgatcgcaaggtccccacaatctca

SEQ ID NO: 136959 - DNA, 30 bp, Artificial Sequence
  Synthetic oligonucleotide
aggcccatggcgtgttgtaagatgatctca

SEQ ID NO: 136960 - DNA, 30 bp, Artificial Sequence
  Synthetic oligonucleotide
gataacatagctccggtatccacactctca

SEQ ID NO: 136961 - DNA, 30 bp, Artificial Sequence
  Synthetic oligonucleotide
atcaaggtacttaagtatgtaatcgtctca

SEQ ID NO: 136962 - DNA, 30 bp, Artificial Sequence
  Synthetic oligonucleotide
agcgtacggattttaggggagtaggtctca

SEQ ID NO: 136963 - DNA, 30 bp, Artificial Sequence
  Synthetic oligonucleotide
tacgtagggcacggtacctaactggtctca

SEQ ID NO: 136964 - DNA, 30 bp, Artificial Sequence
  Synthetic oligonucleotide
gcggacattctcactaagagtcatgtctca

SEQ ID NO: 136965 - DNA, 30 bp, Artificial Sequence
  Synthetic oligonucleotide
gcctcggacgaactcaattggttgttctca

SEQ ID NO: 136966 - DNA, 30 bp, Artificial Sequence
  Synthetic oligonucleotide
agagggtccttgtagacaagggaaaagtca

SEQ ID NO: 136967 - DNA, 30 bp, Artificial Sequence
  Synthetic oligonucleotide
tgacggtgacacaatacgtgctgcaagtca

SEQ ID NO: 136968 - DNA, 30 bp, Artificial Sequence
  Synthetic oligonucleotide
gcacgagatcagcgtcgcgcctctaagtca

SEQ ID NO: 136969 - DNA, 30 bp, Artificial Sequence
  Synthetic oligonucleotide
gcactggtgcaaaacggggtaagtaagtca

SEQ ID NO: 136970 - DNA, 30 bp, Artificial Sequence
  Synthetic oligonucleotide
ccaatcgcgccagtctggaacgttaagtca

SEQ ID NO: 136971 - DNA, 30 bp, Artificial Sequence
  Synthetic oligonucleotide
tcacataaccattcgtaagaaccgcagtca

SEQ ID NO: 136972 - DNA, 30 bp, Artificial Sequence
  Synthetic oligonucleotide
tagcaatgctacagtgctcaagggcagtca

SEQ ID NO: 136973 - DNA, 30 bp, Artificial Sequence
  Synthetic oligonucleotide
actgtggtgcacagtgggacgtcagagtca

SEQ ID NO: 136974 - DNA, 30 bp, Artificial Sequence
  Synthetic oligonucleotide
tcgtatcgagtcgctcctcgtcaatagtca

SEQ ID NO: 136975 - DNA, 30 bp, Artificial Sequence
  Synthetic oligonucleotide
cgcgagtcgataccgatcctcgtcacgtca

SEQ ID NO: 136976 - DNA, 30 bp, Artificial Sequence
  Synthetic oligonucleotide
ttacggggtgctagtaaccatactacgtca

SEQ ID NO: 136977 - DNA, 30 bp, Artificial Sequence
  Synthetic oligonucleotide
aagagtaacgatattaaactgttcccgtca

SEQ ID NO: 136978 - DNA, 30 bp, Artificial Sequence
  Synthetic oligonucleotide
aagtcgaagcactcaggctatccgccgtca

SEQ ID NO: 136979 - DNA, 30 bp, Artificial Sequence
  Synthetic oligonucleotide
ggcgcggtgttggtccatgccgtgccgtca

SEQ ID NO: 136980 - DNA, 30 bp, Artificial Sequence
  Synthetic oligonucleotide
tgacatcttgaaaaaagtagaggagcgtca

SEQ ID NO: 136981 - DNA, 30 bp, Artificial Sequence
  Synthetic oligonucleotide
ttatcgctggaacgtgaagtagaggcgtca

SEQ ID NO: 136982 - DNA, 30 bp, Artificial Sequence
  Synthetic oligonucleotide
agtgcgcagagtgagcccctcactgcgtca

SEQ ID NO: 136983 - DNA, 40 bp, Artificial Sequence
  Synthetic oligonucleotide
tacttattggctctcaataagtcgtttacttgctgcgtca

SEQ ID NO: 136984 - DNA, 30 bp, Artificial Sequence
  Synthetic oligonucleotide
tagcagaacatatcggagtacacctcgtca

SEQ ID NO: 136985 - DNA, 30 bp, Artificial Sequence
  Synthetic oligonucleotide
gtgtggctggcagtaacgtatcggtcgtca

SEQ ID NO: 136986 - DNA, 30 bp, Artificial Sequence
  Synthetic oligonucleotide
aaagaagccaataaactagagataaggtca

SEQ ID NO: 136987 - DNA, 30 bp, Artificial Sequence
  Synthetic oligonucleotide
aatgctcttctcatcggggctcagaggtca

SEQ ID NO: 136988 - DNA, 30 bp, Artificial Sequence
  Synthetic oligonucleotide
gagcgcaaatactaatctgcttataggtca

SEQ ID NO: 136989 - DNA, 30 bp, Artificial Sequence
  Synthetic oligonucleotide
tccgatgctataagataagtggctaggtca

SEQ ID NO: 136990 - DNA, 30 bp, Artificial Sequence
  Synthetic oligonucleotide
agagcgtacaagccgttgcaaggtaggtca

SEQ ID NO: 136991 - DNA, 30 bp, Artificial Sequence
  Synthetic oligonucleotide
caggttttggaggggatagcacaccggtca

SEQ ID NO: 136992 - DNA, 30 bp, Artificial Sequence
  Synthetic oligonucleotide
cgagcccaagaagtgccgttcaaggggtca

SEQ ID NO: 136993 - DNA, 30 bp, Artificial Sequence
  Synthetic oligonucleotide
aagcggggtccaactttccatagggggtca

SEQ ID NO: 136994 - DNA, 30 bp, Artificial Sequence
  Synthetic oligonucleotide
atactacttacccaagcgtacagtgggtca

SEQ ID NO: 136995 - DNA, 30 bp, Artificial Sequence
  Synthetic oligonucleotide
tcgctatgctgtgcgttattgaggtggtca

SEQ ID NO: 136996 - DNA, 30 bp, Artificial Sequence
  Synthetic oligonucleotide
gcacacgtaggagggattcgggggtggtca

SEQ ID NO: 136997 - DNA, 30 bp, Artificial Sequence
  Synthetic oligonucleotide
cgattacgatattaaggtagatgaatgtca

SEQ ID NO: 136998 - DNA, 30 bp, Artificial Sequence
  Synthetic oligonucleotide
cgacagggaaccccttatggcgtcatgtca

SEQ ID NO: 136999 - DNA, 30 bp, Artificial Sequence
  Synthetic oligonucleotide
agagttgctgttcatccgatgtccctgtca

SEQ ID NO: 137000 - DNA, 30 bp, Artificial Sequence
  Synthetic oligonucleotide
ctggatgagggcatcaaaattgccgtgtca

SEQ ID NO: 137001 - DNA, 30 bp, Artificial Sequence
  Synthetic oligonucleotide
ggttgatgggttaccacagcgcgggtgtca

SEQ ID NO: 137002 - DNA, 30 bp, Artificial Sequence
  Synthetic oligonucleotide
aagagacgccccgggggtctcactgtgtca

SEQ ID NO: 137003 - DNA, 30 bp, Artificial Sequence
  Synthetic oligonucleotide
caatcggcggtaatccaattgactgtgtca

SEQ ID NO: 137004 - DNA, 30 bp, Artificial Sequence
  Synthetic oligonucleotide
actcaacctacaggtaggcaaggattgtca

SEQ ID NO: 137005 - DNA, 30 bp, Artificial Sequence
  Synthetic oligonucleotide
gggtaaccggcgcaacaagagagcttgtca

SEQ ID NO: 137006 - DNA, 30 bp, Artificial Sequence
  Synthetic oligonucleotide
agtgtgtacatatggccctagtagttgtca

SEQ ID NO: 137007 - DNA, 30 bp, Artificial Sequence
  Synthetic oligonucleotide
tagggcgatgcagtttcacactggttgtca

SEQ ID NO: 137008 - DNA, 30 bp, Artificial Sequence
  Synthetic oligonucleotide
acccatggtggggcaagccaatctttgtca

SEQ ID NO: 137009 - DNA, 30 bp, Artificial Sequence
  Synthetic oligonucleotide
gaccatggtcagtcaacagggacgaattca

SEQ ID NO: 137010 - DNA, 30 bp, Artificial Sequence
  Synthetic oligonucleotide
aacgcccccttgagtaaatggagtaattca

SEQ ID NO: 137011 - DNA, 30 bp, Artificial Sequence
  Synthetic oligonucleotide
tctcgcgcgaaacttcagccgagccattca

SEQ ID NO: 137012 - DNA, 30 bp, Artificial Sequence
  Synthetic oligonucleotide
atattccgaggtacgaccaggatagattca

SEQ ID NO: 137013 - DNA, 30 bp, Artificial Sequence
  Synthetic oligonucleotide
gcaaggctagggggttgttattacgattca

SEQ ID NO: 137014 - DNA, 30 bp, Artificial Sequence
  Synthetic oligonucleotide
ttcacggtatgtgaggttgagcgggattca

SEQ ID NO: 137015 - DNA, 30 bp, Artificial Sequence
  Synthetic oligonucleotide
acttgatcaggtgtgcaagttcttgattca

SEQ ID NO: 137016 - DNA, 30 bp, Artificial Sequence
  Synthetic oligonucleotide
tcgttaaagtggtagttacctcactattca

SEQ ID NO: 137017 - DNA, 30 bp, Artificial Sequence
  Synthetic oligonucleotide
tcaaagcctgcggtattatgctcttattca

SEQ ID NO: 137018 - DNA, 30 bp, Artificial Sequence
  Synthetic oligonucleotide
tgataaatgatacttgagtcaaaaacttca

SEQ ID NO: 137019 - DNA, 30 bp, Artificial Sequence
  Synthetic oligonucleotide
gccaacgagatgcttaacaaccacacttca

SEQ ID NO: 137020 - DNA, 30 bp, Artificial Sequence
  Synthetic oligonucleotide
acgtacgtatgtttggtacagaccacttca

SEQ ID NO: 137021 - DNA, 30 bp, Artificial Sequence
  Synthetic oligonucleotide
tccgaagactaagtcacgagagtcacttca

SEQ ID NO: 137022 - DNA, 30 bp, Artificial Sequence
  Synthetic oligonucleotide
ggtcgcaaagtcgacagtttccatacttca

SEQ ID NO: 137023 - DNA, 30 bp, Artificial Sequence
  Synthetic oligonucleotide
gaggataccgtcgccttattgatcccttca

SEQ ID NO: 137024 - DNA, 30 bp, Artificial Sequence
  Synthetic oligonucleotide
acggcgtttgctattagatatcgtccttca

SEQ ID NO: 137025 - DNA, 30 bp, Artificial Sequence
  Synthetic oligonucleotide
caattaggtcaggcgcaagggagcgcttca

SEQ ID NO: 137026 - DNA, 30 bp, Artificial Sequence
  Synthetic oligonucleotide
tttaggcctgacaatcgaacaaatgcttca

SEQ ID NO: 137027 - DNA, 30 bp, Artificial Sequence
  Synthetic oligonucleotide
ccggcaacacttccgttaggacttgcttca

SEQ ID NO: 137028 - DNA, 30 bp, Artificial Sequence
  Synthetic oligonucleotide
caaattaaaggccagaaactgcaatcttca

SEQ ID NO: 137029 - DNA, 30 bp, Artificial Sequence
  Synthetic oligonucleotide
aacactagcgactgtgagcacgtctcttca

SEQ ID NO: 137030 - DNA, 30 bp, Artificial Sequence
  Synthetic oligonucleotide
gaggaaataaaagtggcactatcaagttca

SEQ ID NO: 137031 - DNA, 30 bp, Artificial Sequence
  Synthetic oligonucleotide
actagaacagaaagcaatccgcctagttca

SEQ ID NO: 137032 - DNA, 30 bp, Artificial Sequence
  Synthetic oligonucleotide
acccagatgggcattaacacaggtagttca

SEQ ID NO: 137033 - DNA, 30 bp, Artificial Sequence
  Synthetic oligonucleotide
catatggcagatcagcccgagatacgttca

SEQ ID NO: 137034 - DNA, 30 bp, Artificial Sequence
  Synthetic oligonucleotide
cgtcagtggtccacagattgtgcgggttca

SEQ ID NO: 137035 - DNA, 30 bp, Artificial Sequence
  Synthetic oligonucleotide
cgggacgctccaagggtacatgggggttca

SEQ ID NO: 137036 - DNA, 30 bp, Artificial Sequence
  Synthetic oligonucleotide
tggctgtaaactgtttattgccatggttca

SEQ ID NO: 137037 - DNA, 30 bp, Artificial Sequence
  Synthetic oligonucleotide
gcctcatcagcaggctcgactctctgttca

SEQ ID NO: 137038 - DNA, 30 bp, Artificial Sequence
  Synthetic oligonucleotide
cgggagagaaaaactataaattaaatttca

SEQ ID NO: 137039 - DNA, 30 bp, Artificial Sequence
  Synthetic oligonucleotide
tgataattttggtggggatcacgaatttca

SEQ ID NO: 137040 - DNA, 30 bp, Artificial Sequence
  Synthetic oligonucleotide
ccgaggtaggtgggtttcgctggaatttca

SEQ ID NO: 137041 - DNA, 30 bp, Artificial Sequence
  Synthetic oligonucleotide
aactaagcaaggcactacaagagcatttca

SEQ ID NO: 137042 - DNA, 30 bp, Artificial Sequence
  Synthetic oligonucleotide
ggtgggaaaaaggacgcccggcgcatttca

SEQ ID NO: 137043 - DNA, 30 bp, Artificial Sequence
  Synthetic oligonucleotide
cgaacaggggtggactctaagcagatttca

SEQ ID NO: 137044 - DNA, 30 bp, Artificial Sequence
  Synthetic oligonucleotide
agccgataatccacggttagaactatttca

SEQ ID NO: 137045 - DNA, 30 bp, Artificial Sequence
  Synthetic oligonucleotide
ggttcgatggacaactactaacgagtttca

SEQ ID NO: 137046 - DNA, 30 bp, Artificial Sequence
  Synthetic oligonucleotide
cgcacgtgcacaggttgtgaactcgtttca

SEQ ID NO: 137047 - DNA, 30 bp, Artificial Sequence
  Synthetic oligonucleotide
gggagagtcaatctgggaaggtgggtttca

SEQ ID NO: 137048 - DNA, 30 bp, Artificial Sequence
  Synthetic oligonucleotide
gataggaattatgggcaccggaagttttca

SEQ ID NO: 137049 - DNA, 30 bp, Artificial Sequence
  Synthetic oligonucleotide
tggtccgtgaaggggcagtcagcgttttca

SEQ ID NO: 137050 - DNA, 30 bp, Artificial Sequence
  Synthetic oligonucleotide
ccatgaaaagaatgccaaactaggttttca

SEQ ID NO: 137051 - DNA, 30 bp, Artificial Sequence
  Synthetic oligonucleotide
cggcaggttgtaatttaggggggaaaaaga

SEQ ID NO: 137052 - DNA, 30 bp, Artificial Sequence
  Synthetic oligonucleotide
gctatacagaaatcatttcattgaaaaaga

SEQ ID NO: 137053 - DNA, 30 bp, Artificial Sequence
  Synthetic oligonucleotide
cgacactcggggttacgtaagtacaaaaga

SEQ ID NO: 137054 - DNA, 30 bp, Artificial Sequence
  Synthetic oligonucleotide
cctacattgaagtataaacgaccgaaaaga

SEQ ID NO: 137055 - DNA, 30 bp, Artificial Sequence
  Synthetic oligonucleotide
ccagagttgcctgaatgagttgcgaaaaga

SEQ ID NO: 137056 - DNA, 30 bp, Artificial Sequence
  Synthetic oligonucleotide
ccagtcaaaagcgcaaagtttcaacaaaga

SEQ ID NO: 137057 - DNA, 30 bp, Artificial Sequence
  Synthetic oligonucleotide
agcaaatgttggaaaaccaggaaccaaaga

SEQ ID NO: 137058 - DNA, 30 bp, Artificial Sequence
  Synthetic oligonucleotide
acaacaaagggtttagcggccgggcaaaga

SEQ ID NO: 137059 - DNA, 30 bp, Artificial Sequence
  Synthetic oligonucleotide
catgcagtactgaggacccccttgcaaaga

SEQ ID NO: 137060 - DNA, 30 bp, Artificial Sequence
  Synthetic oligonucleotide
gctggcacgggccgtattagcgatcaaaga

SEQ ID NO: 137061 - DNA, 30 bp, Artificial Sequence
  Synthetic oligonucleotide
accctgggtaccattattacccgtcaaaga

SEQ ID NO: 137062 - DNA, 30 bp, Artificial Sequence
  Synthetic oligonucleotide
agttataaatattggctaaaatgagaaaga

SEQ ID NO: 137063 - DNA, 30 bp, Artificial Sequence
  Synthetic oligonucleotide
cggtataaggtttgtgtttggagcgaaaga

SEQ ID NO: 137064 - DNA, 30 bp, Artificial Sequence
  Synthetic oligonucleotide
aaaggttagcttttaccggccatcgaaaga

SEQ ID NO: 137065 - DNA, 30 bp, Artificial Sequence
  Synthetic oligonucleotide
tctaaatcacatacatcttccaatgaaaga

SEQ ID NO: 137066 - DNA, 30 bp, Artificial Sequence
  Synthetic oligonucleotide
tacggatattaccacgataaaaactaaaga

SEQ ID NO: 137067 - DNA, 30 bp, Artificial Sequence
  Synthetic oligonucleotide
gacacgagccctgatggtgacccgtaaaga

SEQ ID NO: 137068 - DNA, 30 bp, Artificial Sequence
  Synthetic oligonucleotide
aatcaggatagtcatccccggttaacaaga

SEQ ID NO: 137069 - DNA, 30 bp, Artificial Sequence
  Synthetic oligonucleotide
ggttgcaggttcagtatcttatcgacaaga

SEQ ID NO: 137070 - DNA, 30 bp, Artificial Sequence
  Synthetic oligonucleotide
ctataatcgagtgacacgtctgctacaaga

SEQ ID NO: 137071 - DNA, 30 bp, Artificial Sequence
  Synthetic oligonucleotide
cctgggatagtgaaccgagtgtgtccaaga

SEQ ID NO: 137072 - DNA, 30 bp, Artificial Sequence
  Synthetic oligonucleotide
gtatctcatttgaatcaacggtaagcaaga

SEQ ID NO: 137073 - DNA, 29 bp, Artificial Sequence
  Synthetic oligonucleotide
agattgctgagttgcgcatgctagcaaga

SEQ ID NO: 137074 - DNA, 30 bp, Artificial Sequence
  Synthetic oligonucleotide
ccggtgggaatgcgcgagcactaggcaaga

SEQ ID NO: 137075 - DNA, 30 bp, Artificial Sequence
  Synthetic oligonucleotide
gggactttaccctcagatctaatggcaaga

SEQ ID NO: 137076 - DNA, 30 bp, Artificial Sequence
  Synthetic oligonucleotide
ccgccgtacagcataaaggtggtggcaaga

SEQ ID NO: 137077 - DNA, 30 bp, Artificial Sequence
  Synthetic oligonucleotide
ggtcagcatcggtgagctcggattgcaaga

SEQ ID NO: 137078 - DNA, 30 bp, Artificial Sequence
  Synthetic oligonucleotide
tagcaatacaatgtagagaacgcaagaaga

SEQ ID NO: 137079 - DNA, 30 bp, Artificial Sequence
  Synthetic oligonucleotide
ggtgtgattatggatgtagggggcagaaga

SEQ ID NO: 137080 - DNA, 30 bp, Artificial Sequence
  Synthetic oligonucleotide
tcacgtcggtacttgaccacaatgagaaga

SEQ ID NO: 137081 - DNA, 30 bp, Artificial Sequence
  Synthetic oligonucleotide
aaccaaatagtagcgggaacatagcgaaga

SEQ ID NO: 137082 - DNA, 30 bp, Artificial Sequence
  Synthetic oligonucleotide
cagcaacccaattttggtagctcgcgaaga

SEQ ID NO: 137083 - DNA, 30 bp, Artificial Sequence
  Synthetic oligonucleotide
ggccaaggattgacagcctcctatcgaaga

SEQ ID NO: 137084 - DNA, 30 bp, Artificial Sequence
  Synthetic oligonucleotide
ttccgacacggtataagattaaaaggaaga

SEQ ID NO: 137085 - DNA, 30 bp, Artificial Sequence
  Synthetic oligonucleotide
gggcgccagagatccgtctgttagggaaga

SEQ ID NO: 137086 - DNA, 30 bp, Artificial Sequence
  Synthetic oligonucleotide
agcctgtaacctagaaaagtcactggaaga

SEQ ID NO: 137087 - DNA, 30 bp, Artificial Sequence
  Synthetic oligonucleotide
ctacaggcggaaataaagttgagtggaaga

SEQ ID NO: 137088 - DNA, 30 bp, Artificial Sequence
  Synthetic oligonucleotide
gtacccagacagacgaaacggttatgaaga

SEQ ID NO: 137089 - DNA, 30 bp, Artificial Sequence
  Synthetic oligonucleotide
accctgtggaccaatctcgggaagtgaaga

SEQ ID NO: 137090 - DNA, 30 bp, Artificial Sequence
  Synthetic oligonucleotide
gattggcctaattacaggtacgcttgaaga

SEQ ID NO: 137091 - DNA, 30 bp, Artificial Sequence
  Synthetic oligonucleotide
cggatacactatgtcgagaaaatttgaaga

SEQ ID NO: 137092 - DNA, 30 bp, Artificial Sequence
  Synthetic oligonucleotide
tcaggttaccaacttgcctccgaaataaga

SEQ ID NO: 137093 - DNA, 30 bp, Artificial Sequence
  Synthetic oligonucleotide
cttggaatcacgatccgtgtgtcaataaga

SEQ ID NO: 137094 - DNA, 30 bp, Artificial Sequence
  Synthetic oligonucleotide
gaattagatggcggacacagccgaataaga

SEQ ID NO: 137095 - DNA, 30 bp, Artificial Sequence
  Synthetic oligonucleotide
agtggcttgcaaaggggttcccgcataaga

SEQ ID NO: 137096 - DNA, 30 bp, Artificial Sequence
  Synthetic oligonucleotide
tgagcgatgcggcccataaatatcataaga

SEQ ID NO: 137097 - DNA, 30 bp, Artificial Sequence
  Synthetic oligonucleotide
gtgcacacgacggggtggatgcagataaga

SEQ ID NO: 137098 - DNA, 30 bp, Artificial Sequence
  Synthetic oligonucleotide
ctcgggacaatagccgtcaagggtataaga

SEQ ID NO: 137099 - DNA, 30 bp, Artificial Sequence
  Synthetic oligonucleotide
tatgatacctgtcattgacttgccttaaga

SEQ ID NO: 137100 - DNA, 30 bp, Artificial Sequence
  Synthetic oligonucleotide
cgaaggatctctttcaaagtgcgcttaaga

SEQ ID NO: 137101 - DNA, 30 bp, Artificial Sequence
  Synthetic oligonucleotide
atggccgtgcggaaattgacggtgttaaga

SEQ ID NO: 137102 - DNA, 30 bp, Artificial Sequence
  Synthetic oligonucleotide
atgtctgggaaccttttaccaaggaacaga

SEQ ID NO: 137103 - DNA, 30 bp, Artificial Sequence
  Synthetic oligonucleotide
atgcgtgttacacacgtctttgtgaacaga

SEQ ID NO: 137104 - DNA, 30 bp, Artificial Sequence
  Synthetic oligonucleotide
tatggcagggagaattcccaatataacaga

SEQ ID NO: 137105 - DNA, 30 bp, Artificial Sequence
  Synthetic oligonucleotide
agagtcttagagcgaatgcgacctaacaga

SEQ ID NO: 137106 - DNA, 30 bp, Artificial Sequence
  Synthetic oligonucleotide
gagataaggtataaatctctcggtaacaga

SEQ ID NO: 137107 - DNA, 30 bp, Artificial Sequence
  Synthetic oligonucleotide
atgtcaattctgtgaataagcgcacacaga

SEQ ID NO: 137108 - DNA, 30 bp, Artificial Sequence
  Synthetic oligonucleotide
acgagggttaggcaaatactgttccacaga

SEQ ID NO: 137109 - DNA, 30 bp, Artificial Sequence
  Synthetic oligonucleotide
tcgcatggtcgctgagcgtatgatcacaga

SEQ ID NO: 137110 - DNA, 30 bp, Artificial Sequence
  Synthetic oligonucleotide
gtcaaccgagcaccgcggagtcctcacaga

SEQ ID NO: 137111 - DNA, 30 bp, Artificial Sequence
  Synthetic oligonucleotide
actacaggggggcccgtggtcgctcacaga

SEQ ID NO: 137112 - DNA, 30 bp, Artificial Sequence
  Synthetic oligonucleotide
acggtctctaggcttatatgcgaagacaga

SEQ ID NO: 137113 - DNA, 30 bp, Artificial Sequence
  Synthetic oligonucleotide
gtcagcactaagcttattatggaagacaga

SEQ ID NO: 137114 - DNA, 30 bp, Artificial Sequence
  Synthetic oligonucleotide
aagaggcgagcataagcccaaatagacaga

SEQ ID NO: 137115 - DNA, 30 bp, Artificial Sequence
  Synthetic oligonucleotide
tgacgatgacaacttcgtaggaacgacaga

SEQ ID NO: 137116 - DNA, 30 bp, Artificial Sequence
  Synthetic oligonucleotide
ccgaacttggctgggtgtaaaaccgacaga

SEQ ID NO: 137117 - DNA, 30 bp, Artificial Sequence
  Synthetic oligonucleotide
aggggttcttaggtcggatacgaggacaga

SEQ ID NO: 137118 - DNA, 30 bp, Artificial Sequence
  Synthetic oligonucleotide
gcgatcagctgttgcgagcatagtgacaga

SEQ ID NO: 137119 - DNA, 30 bp, Artificial Sequence
  Synthetic oligonucleotide
gtcgcttattacgaggtagtttaatacaga

SEQ ID NO: 137120 - DNA, 30 bp, Artificial Sequence
  Synthetic oligonucleotide
gtatcgaaggggctactcaaggcctacaga

SEQ ID NO: 137121 - DNA, 30 bp, Artificial Sequence
  Synthetic oligonucleotide
atgtgaataaggtaaaactctgggtacaga

SEQ ID NO: 137122 - DNA, 31 bp, Artificial Sequence
  Synthetic oligonucleotide
accggaccgaagataggagttgcttaccaga

SEQ ID NO: 137123 - DNA, 30 bp, Artificial Sequence
  Synthetic oligonucleotide
gacagtacattcccagggggggaacccaga

SEQ ID NO: 137124 - DNA, 30 bp, Artificial Sequence
  Synthetic oligonucleotide
ccgtaatagagacgggtggatacccccaga

SEQ ID NO: 137125 - DNA, 30 bp, Artificial Sequence
  Synthetic oligonucleotide
taggacgctcagagcggcgacccagccaga

SEQ ID NO: 137126 - DNA, 30 bp, Artificial Sequence
  Synthetic oligonucleotide
cagggccaagcgccgttaagctgggccaga

SEQ ID NO: 137127 - DNA, 30 bp, Artificial Sequence
  Synthetic oligonucleotide
aaacggtgatcacccggatcaactgccaga

SEQ ID NO: 137128 - DNA, 30 bp, Artificial Sequence
  Synthetic oligonucleotide
gacgagtttgagtttatgtagggtgccaga

SEQ ID NO: 137129 - DNA, 30 bp, Artificial Sequence
  Synthetic oligonucleotide
gaataatattttgaggacagtggtgccaga

SEQ ID NO: 137130 - DNA, 30 bp, Artificial Sequence
  Synthetic oligonucleotide
aggcctaaggaaatctgggtcatatccaga

SEQ ID NO: 137131 - DNA, 30 bp, Artificial Sequence
  Synthetic oligonucleotide
tgcttgttatgatgaaatagttactccaga

SEQ ID NO: 137132 - DNA, 30 bp, Artificial Sequence
  Synthetic oligonucleotide
aactgacatcaatctattgccttctccaga

SEQ ID NO: 137133 - DNA, 30 bp, Artificial Sequence
  Synthetic oligonucleotide
agtacataggcaggggatataagttccaga

SEQ ID NO: 137134 - DNA, 30 bp, Artificial Sequence
  Synthetic oligonucleotide
tagtgcttgcaacctaaaatttagggcaga

SEQ ID NO: 137135 - DNA, 30 bp, Artificial Sequence
  Synthetic oligonucleotide
accaatgaccctttgattggagggggcaga

SEQ ID NO: 137136 - DNA, 30 bp, Artificial Sequence
  Synthetic oligonucleotide
gttcagctaacgataagacggcttggcaga

SEQ ID NO: 137137 - DNA, 30 bp, Artificial Sequence
  Synthetic oligonucleotide
aataaccttaaccgagagatcaactgcaga

SEQ ID NO: 137138 - DNA, 30 bp, Artificial Sequence
  Synthetic oligonucleotide
cagtcccaacggacaaggtgtacctgcaga

SEQ ID NO: 137139 - DNA, 30 bp, Artificial Sequence
  Synthetic oligonucleotide
agatagatagaccggggtccaaattgcaga

SEQ ID NO: 137140 - DNA, 30 bp, Artificial Sequence
  Synthetic oligonucleotide
gggccaccttacgatgctaagatttgcaga

SEQ ID NO: 137141 - DNA, 30 bp, Artificial Sequence
  Synthetic oligonucleotide
caagtcagccgatccagtgcataaatcaga

SEQ ID NO: 137142 - DNA, 30 bp, Artificial Sequence
  Synthetic oligonucleotide
ctactatgaatcccagctttaagcatcaga

SEQ ID NO: 137143 - DNA, 30 bp, Artificial Sequence
  Synthetic oligonucleotide
cgaaacacgtcatgtgtccacttcctcaga

SEQ ID NO: 137144 - DNA, 30 bp, Artificial Sequence
  Synthetic oligonucleotide
agcgatagtcgctttagttcgtggctcaga

SEQ ID NO: 137145 - DNA, 30 bp, Artificial Sequence
  Synthetic oligonucleotide
caggtgcagtctcaaaactagtctctcaga

SEQ ID NO: 137146 - DNA, 30 bp, Artificial Sequence
  Synthetic oligonucleotide
tcttacaacaattgaggggattgtctcaga

SEQ ID NO: 137147 - DNA, 30 bp, Artificial Sequence
  Synthetic oligonucleotide
caggcttaggtgaggtgtagttgagtcaga

SEQ ID NO: 137148 - DNA, 30 bp, Artificial Sequence
  Synthetic oligonucleotide
cacacgtactactcatttcgcaccgtcaga

SEQ ID NO: 137149 - DNA, 30 bp, Artificial Sequence
  Synthetic oligonucleotide
ttgcggcactatgacctttagcgcgtcaga

SEQ ID NO: 137150 - DNA, 30 bp, Artificial Sequence
  Synthetic oligonucleotide
ttaatagcagtaaagattgaaacggtcaga

SEQ ID NO: 137151 - DNA, 30 bp, Artificial Sequence
  Synthetic oligonucleotide
taagggtcgaagaagcctataacggtcaga

SEQ ID NO: 137152 - DNA, 30 bp, Artificial Sequence
  Synthetic oligonucleotide
acgccagggcctcggctcgagggggtcaga

SEQ ID NO: 137153 - DNA, 30 bp, Artificial Sequence
  Synthetic oligonucleotide
ggctaaacgatttttatagtcgatgtcaga

SEQ ID NO: 137154 - DNA, 30 bp, Artificial Sequence
  Synthetic oligonucleotide
caattgtgagcattttaccgtgatgtcaga

SEQ ID NO: 137155 - DNA, 30 bp, Artificial Sequence
  Synthetic oligonucleotide
atgttaaaggcgccagtcgaatacttcaga

SEQ ID NO: 137156 - DNA, 30 bp, Artificial Sequence
  Synthetic oligonucleotide
actgcgctccggaccatagaaaccttcaga

SEQ ID NO: 137157 - DNA, 30 bp, Artificial Sequence
  Synthetic oligonucleotide
cataccagctgggggcgtgcttaaaagaga

SEQ ID NO: 137158 - DNA, 30 bp, Artificial Sequence
  Synthetic oligonucleotide
tcggtgcaggaagttctcgctacaaagaga

SEQ ID NO: 137159 - DNA, 30 bp, Artificial Sequence
  Synthetic oligonucleotide
gagttcaagccgtctattaatgcaaagaga

SEQ ID NO: 137160 - DNA, 30 bp, Artificial Sequence
  Synthetic oligonucleotide
gcctgaatttacacacttagctcaaagaga

SEQ ID NO: 137161 - DNA, 30 bp, Artificial Sequence
  Synthetic oligonucleotide
tttcgtgatagggtggcaatccgaaagaga

SEQ ID NO: 137162 - DNA, 30 bp, Artificial Sequence
  Synthetic oligonucleotide
gggggaacaagggacggatccggaaagaga

SEQ ID NO: 137163 - DNA, 30 bp, Artificial Sequence
  Synthetic oligonucleotide
tgtcagctataagaaatcttgaacaagaga

SEQ ID NO: 137164 - DNA, 30 bp, Artificial Sequence
  Synthetic oligonucleotide
tctccgggcaagaacattgtgaataagaga

SEQ ID NO: 137165 - DNA, 30 bp, Artificial Sequence
  Synthetic oligonucleotide
cagacaccatcaatcagttgctaccagaga

SEQ ID NO: 137166 - DNA, 30 bp, Artificial Sequence
  Synthetic oligonucleotide
agcggttccggagactgtaaatcccagaga

SEQ ID NO: 137167 - DNA, 30 bp, Artificial Sequence
  Synthetic oligonucleotide
gagaaacgaatagctcaatcgcgccagaga

SEQ ID NO: 137168 - DNA, 30 bp, Artificial Sequence
  Synthetic oligonucleotide
cacgacccgtatcaccagccgcctcagaga

SEQ ID NO: 137169 - DNA, 30 bp, Artificial Sequence
  Synthetic oligonucleotide
tagccaagcgaaacccggtgaggtcagaga

SEQ ID NO: 137170 - DNA, 30 bp, Artificial Sequence
  Synthetic oligonucleotide
ttgcagtggcacggggatgcgattcagaga

SEQ ID NO: 137171 - DNA, 30 bp, Artificial Sequence
  Synthetic oligonucleotide
agcctatctaatcagcagctcatggagaga

SEQ ID NO: 137172 - DNA, 30 bp, Artificial Sequence
  Synthetic oligonucleotide
agtacccaaagtagaactttataatagaga

SEQ ID NO: 137173 - DNA, 30 bp, Artificial Sequence
  Synthetic oligonucleotide
gctaagttcacctccgtttaaccatagaga

SEQ ID NO: 137174 - DNA, 30 bp, Artificial Sequence
  Synthetic oligonucleotide
ggcactaggtggccaaatgatagctagaga

SEQ ID NO: 137175 - DNA, 30 bp, Artificial Sequence
  Synthetic oligonucleotide
gtggtggggtaaggaaatgttgtctagaga

SEQ ID NO: 137176 - DNA, 30 bp, Artificial Sequence
  Synthetic oligonucleotide
gacgaggtatatgccctctgagattagaga

SEQ ID NO: 137177 - DNA, 30 bp, Artificial Sequence
  Synthetic oligonucleotide
ggtggcaggcgccaaaagttcacttagaga

SEQ ID NO: 137178 - DNA, 30 bp, Artificial Sequence
  Synthetic oligonucleotide
cacggaaggacttccaactgtttcacgaga

SEQ ID NO: 137179 - DNA, 30 bp, Artificial Sequence
  Synthetic oligonucleotide
caagaaatccagtactaataagagacgaga

SEQ ID NO: 137180 - DNA, 30 bp, Artificial Sequence
  Synthetic oligonucleotide
cccgggcgagaacagtacggcccgacgaga

SEQ ID NO: 137181 - DNA, 30 bp, Artificial Sequence
  Synthetic oligonucleotide
attaaggatatcgaggacataatgacgaga

SEQ ID NO: 137182 - DNA, 30 bp, Artificial Sequence
  Synthetic oligonucleotide
ttgggaaacctgttgcttgacctcgcgaga

SEQ ID NO: 137183 - DNA, 30 bp, Artificial Sequence
  Synthetic oligonucleotide
acttccaatcatggtacgtacccggcgaga

SEQ ID NO: 137184 - DNA, 30 bp, Artificial Sequence
  Synthetic oligonucleotide
cgagactccgacatcgttaaaatggcgaga

SEQ ID NO: 137185 - DNA, 30 bp, Artificial Sequence
  Synthetic oligonucleotide
tggggtgatgcgctcgaatgactggcgaga

SEQ ID NO: 137186 - DNA, 30 bp, Artificial Sequence
  Synthetic oligonucleotide
gaatggcgttatcctagtctcgtggcgaga

SEQ ID NO: 137187 - DNA, 30 bp, Artificial Sequence
  Synthetic oligonucleotide
attggaaactaggaaaagggcctgtcgaga

SEQ ID NO: 137188 - DNA, 30 bp, Artificial Sequence
  Synthetic oligonucleotide
tgtttcgacgtacccaaaggcccaaggaga

SEQ ID NO: 137189 - DNA, 30 bp, Artificial Sequence
  Synthetic oligonucleotide
aggatgtaacgactttcgcaatcaaggaga

SEQ ID NO: 137190 - DNA, 30 bp, Artificial Sequence
  Synthetic oligonucleotide
acgtagcttgacgcggttggagagaggaga

SEQ ID NO: 137191 - DNA, 30 bp, Artificial Sequence
  Synthetic oligonucleotide
ctgataataacaagctattagcataggaga

SEQ ID NO: 137192 - DNA, 30 bp, Artificial Sequence
  Synthetic oligonucleotide
tatgacacccgaaggggcgcttcccggaga

SEQ ID NO: 137193 - DNA, 30 bp, Artificial Sequence
  Synthetic oligonucleotide
tagacatgttgggtttattcaggccggaga

SEQ ID NO: 137194 - DNA, 30 bp, Artificial Sequence
  Synthetic oligonucleotide
gtaaaaacgtcagcgcgttgcggccggaga

SEQ ID NO: 137195 - DNA, 30 bp, Artificial Sequence
  Synthetic oligonucleotide
aaatattcgttaggaatctattagcggaga

SEQ ID NO: 137196 - DNA, 30 bp, Artificial Sequence
  Synthetic oligonucleotide
aatacggcccgatggaaatgaaggcggaga

SEQ ID NO: 137197 - DNA, 30 bp, Artificial Sequence
  Synthetic oligonucleotide
tgggcgcccgattaaaaggcggtgcggaga

SEQ ID NO: 137198 - DNA, 30 bp, Artificial Sequence
  Synthetic oligonucleotide
tggtctggctttaaaatgtgatctcggaga

SEQ ID NO: 137199 - DNA, 30 bp, Artificial Sequence
  Synthetic oligonucleotide
gctcaacaaagtaagcgactcggtcggaga

SEQ ID NO: 137200 - DNA, 30 bp, Artificial Sequence
  Synthetic oligonucleotide
tcgctatacatacgactggttattcggaga

SEQ ID NO: 137201 - DNA, 30 bp, Artificial Sequence
  Synthetic oligonucleotide
ctaagcacagtgatttgatggtcagggaga

SEQ ID NO: 137202 - DNA, 30 bp, Artificial Sequence
  Synthetic oligonucleotide
cgcggataacacacaccgaatcgcgggaga

SEQ ID NO: 137203 - DNA, 30 bp, Artificial Sequence
  Synthetic oligonucleotide
acccaagggacatttaaagcggttgggaga

SEQ ID NO: 137204 - DNA, 30 bp, Artificial Sequence
  Synthetic oligonucleotide
atggagcaagcatacactaggtagtggaga

SEQ ID NO: 137205 - DNA, 30 bp, Artificial Sequence
  Synthetic oligonucleotide
aagtcggcttagtgtgcaataaggtggaga

SEQ ID NO: 137206 - DNA, 30 bp, Artificial Sequence
  Synthetic oligonucleotide
tgataagttttggagtaatatttgtggaga

SEQ ID NO: 137207 - DNA, 30 bp, Artificial Sequence
  Synthetic oligonucleotide
acggaagttttcaataaacaatacatgaga

SEQ ID NO: 137208 - DNA, 30 bp, Artificial Sequence
  Synthetic oligonucleotide
cctcctgtcggtcctggagtaatagtgaga

SEQ ID NO: 137209 - DNA, 30 bp, Artificial Sequence
  Synthetic oligonucleotide
ttttccggacaggataaaagactggtgaga

SEQ ID NO: 137210 - DNA, 30 bp, Artificial Sequence
  Synthetic oligonucleotide
acataccggcaacgttcactttaattgaga

SEQ ID NO: 137211 - DNA, 30 bp, Artificial Sequence
  Synthetic oligonucleotide
tacggagtgcggaacccagtttaattgaga

SEQ ID NO: 137212 - DNA, 30 bp, Artificial Sequence
  Synthetic oligonucleotide
gcaacaaagcaaggggtccgactcttgaga

SEQ ID NO: 137213 - DNA, 30 bp, Artificial Sequence
  Synthetic oligonucleotide
tgtcgccgacttagacgacgacaaaataga

SEQ ID NO: 137214 - DNA, 30 bp, Artificial Sequence
  Synthetic oligonucleotide
cacgggaatattggtcgcaaagagaataga

SEQ ID NO: 137215 - DNA, 30 bp, Artificial Sequence
  Synthetic oligonucleotide
gggagcaaagtcattttgtaaccacataga

SEQ ID NO: 137216 - DNA, 30 bp, Artificial Sequence
  Synthetic oligonucleotide
gctagctaaaaggaacgttcagatcataga

SEQ ID NO: 137217 - DNA, 30 bp, Artificial Sequence
  Synthetic oligonucleotide
ctaaccttccatatctcgagccttcataga

SEQ ID NO: 137218 - DNA, 30 bp, Artificial Sequence
  Synthetic oligonucleotide
tctagtggttggatggggtggtaagataga

SEQ ID NO: 137219 - DNA, 30 bp, Artificial Sequence
  Synthetic oligonucleotide
gagtcgagagggccgaattatgaggataga

SEQ ID NO: 137220 - DNA, 30 bp, Artificial Sequence
  Synthetic oligonucleotide
gacccactggagataaatagcggggataga

SEQ ID NO: 137221 - DNA, 30 bp, Artificial Sequence
  Synthetic oligonucleotide
ttgggccgttacttaaggccggctgataga

SEQ ID NO: 137222 - DNA, 30 bp, Artificial Sequence
  Synthetic oligonucleotide
gagcagatactacttatagcatctgataga

SEQ ID NO: 137223 - DNA, 30 bp, Artificial Sequence
  Synthetic oligonucleotide
tgcatcacaagctagtagctaacgtataga

SEQ ID NO: 137224 - DNA, 30 bp, Artificial Sequence
  Synthetic oligonucleotide
ttattgatagctaggaaacgggattataga

SEQ ID NO: 137225 - DNA, 30 bp, Artificial Sequence
  Synthetic oligonucleotide
ttaacacaatagttcagaagcgacactaga

SEQ ID NO: 137226 - DNA, 30 bp, Artificial Sequence
  Synthetic oligonucleotide
ctccatgcctgaagaagccagtgcgctaga

SEQ ID NO: 137227 - DNA, 30 bp, Artificial Sequence
  Synthetic oligonucleotide
taggcgaccctagtccctacatgggctaga

SEQ ID NO: 137228 - DNA, 30 bp, Artificial Sequence
  Synthetic oligonucleotide
cacgtacttaagttaaagtcaaatgctaga

SEQ ID NO: 137229 - DNA, 30 bp, Artificial Sequence
  Synthetic oligonucleotide
gcggtagttcgatagcgtagagtatctaga

SEQ ID NO: 137230 - DNA, 30 bp, Artificial Sequence
  Synthetic oligonucleotide
caacctgacgactaataaaatataagtaga

SEQ ID NO: 137231 - DNA, 30 bp, Artificial Sequence
  Synthetic oligonucleotide
tgtcgcgatcatgagtcaaccagtagtaga

SEQ ID NO: 137232 - DNA, 30 bp, Artificial Sequence
  Synthetic oligonucleotide
gcggccgggttgatccattgggagcgtaga

SEQ ID NO: 137233 - DNA, 30 bp, Artificial Sequence
  Synthetic oligonucleotide
aggattacaccttcgaagactcatcgtaga

SEQ ID NO: 137234 - DNA, 30 bp, Artificial Sequence
  Synthetic oligonucleotide
gactccggtattaaacccccataaggtaga

SEQ ID NO: 137235 - DNA, 30 bp, Artificial Sequence
  Synthetic oligonucleotide
tgaacggcagcaatatatcaagcaggtaga

SEQ ID NO: 137236 - DNA, 30 bp, Artificial Sequence
  Synthetic oligonucleotide
gttacatcagctgggcacgaatccggtaga

SEQ ID NO: 137237 - DNA, 30 bp, Artificial Sequence
  Synthetic oligonucleotide
tgaggggatcgggaccggtctctgggtaga

SEQ ID NO: 137238 - DNA, 30 bp, Artificial Sequence
  Synthetic oligonucleotide
ctgctagtctgggcagtaggtgaatgtaga

SEQ ID NO: 137239 - DNA, 30 bp, Artificial Sequence
  Synthetic oligonucleotide
cccatagaatacgttgtggtgtcatgtaga

SEQ ID NO: 137240 - DNA, 30 bp, Artificial Sequence
  Synthetic oligonucleotide
gcgcaagggccaggttatctaatctgtaga

SEQ ID NO: 137241 - DNA, 30 bp, Artificial Sequence
  Synthetic oligonucleotide
ggaacggaaccagcaccctcacaaattaga

SEQ ID NO: 137242 - DNA, 30 bp, Artificial Sequence
  Synthetic oligonucleotide
agaacaccggtcttcctaactgctattaga

SEQ ID NO: 137243 - DNA, 30 bp, Artificial Sequence
  Synthetic oligonucleotide
taagagtgaaagaagtcgacgcaccttaga

SEQ ID NO: 137244 - DNA, 30 bp, Artificial Sequence
  Synthetic oligonucleotide
atcgtagattcgagttcaaaagaccttaga

SEQ ID NO: 137245 - DNA, 30 bp, Artificial Sequence
  Synthetic oligonucleotide
agtcgttcaaactaattaaaggtccttaga

SEQ ID NO: 137246 - DNA, 30 bp, Artificial Sequence
  Synthetic oligonucleotide
tacctgcgattgataaatagtaaagttaga

SEQ ID NO: 137247 - DNA, 30 bp, Artificial Sequence
  Synthetic oligonucleotide
gggaaatatgcataactaagaatcgttaga

SEQ ID NO: 137248 - DNA, 30 bp, Artificial Sequence
  Synthetic oligonucleotide
actgactagccccgagaagagatcgttaga

SEQ ID NO: 137249 - DNA, 30 bp, Artificial Sequence
  Synthetic oligonucleotide
ttcgaacccgattgaccaaatgcggttaga

SEQ ID NO: 137250 - DNA, 30 bp, Artificial Sequence
  Synthetic oligonucleotide
aggaggggaagcaacgcgttcttggttaga

SEQ ID NO: 137251 - DNA, 30 bp, Artificial Sequence
  Synthetic oligonucleotide
gtggattcaggtgtctcggcagtatttaga

SEQ ID NO: 137252 - DNA, 30 bp, Artificial Sequence
  Synthetic oligonucleotide
cgagcgatggttctatttgctacgtttaga

SEQ ID NO: 137253 - DNA, 30 bp, Artificial Sequence
  Synthetic oligonucleotide
ggaaaggtagggtcagtgaggttgtttaga

SEQ ID NO: 137254 - DNA, 30 bp, Artificial Sequence
  Synthetic oligonucleotide
accggccaagtcagggcactactaaaacga

SEQ ID NO: 137255 - DNA, 30 bp, Artificial Sequence
  Synthetic oligonucleotide
gttagcctatcatcacaaccagagaaacga

SEQ ID NO: 137256 - DNA, 30 bp, Artificial Sequence
  Synthetic oligonucleotide
gagaagttccagtcgcacgtccggaaacga

SEQ ID NO: 137257 - DNA, 30 bp, Artificial Sequence
  Synthetic oligonucleotide
tcgtccgctggaccttcaacctggaaacga

SEQ ID NO: 137258 - DNA, 30 bp, Artificial Sequence
  Synthetic oligonucleotide
ctccagatcctgtcagcctgtaataaacga

SEQ ID NO: 137259 - DNA, 30 bp, Artificial Sequence
  Synthetic oligonucleotide
atcgcgtactggtcagcccttgataaacga

SEQ ID NO: 137260 - DNA, 30 bp, Artificial Sequence
  Synthetic oligonucleotide
cgcaaaatcactactcggtaataacaacga

SEQ ID NO: 137261 - DNA, 30 bp, Artificial Sequence
  Synthetic oligonucleotide
ttaagggggcaagatgtcctggaccaacga

SEQ ID NO: 137262 - DNA, 30 bp, Artificial Sequence
  Synthetic oligonucleotide
ctatgaaatctcttacgggactcccaacga

SEQ ID NO: 137263 - DNA, 30 bp, Artificial Sequence
  Synthetic oligonucleotide
atttaggaactggaatttatagagcaacga

SEQ ID NO: 137264 - DNA, 30 bp, Artificial Sequence
  Synthetic oligonucleotide
agccctaaaggcgacgttcgttagcaacga

SEQ ID NO: 137265 - DNA, 30 bp, Artificial Sequence
  Synthetic oligonucleotide
tagatggaggtcttgtgaaaatcagaacga

SEQ ID NO: 137266 - DNA, 30 bp, Artificial Sequence
  Synthetic oligonucleotide
gtgttgctaaaaatactatgaggagaacga

SEQ ID NO: 137267 - DNA, 30 bp, Artificial Sequence
  Synthetic oligonucleotide
aactttgccatagggtggagattagaacga

SEQ ID NO: 137268 - DNA, 30 bp, Artificial Sequence
  Synthetic oligonucleotide
tatcatgtggtgggagattaggaggaacga

SEQ ID NO: 137269 - DNA, 30 bp, Artificial Sequence
  Synthetic oligonucleotide
acatatcttggcaagagtattcttgaacga

SEQ ID NO: 137270 - DNA, 30 bp, Artificial Sequence
  Synthetic oligonucleotide
taaggcacctccagacttttgctgacacga

SEQ ID NO: 137271 - DNA, 30 bp, Artificial Sequence
  Synthetic oligonucleotide
tgtacactgaagaaccattcgtctacacga

SEQ ID NO: 137272 - DNA, 30 bp, Artificial Sequence
  Synthetic oligonucleotide
ccaatcataatccaagccagtagtacacga

SEQ ID NO: 137273 - DNA, 30 bp, Artificial Sequence
  Synthetic oligonucleotide
gggctagcacaaccacaggcacgtacacga

SEQ ID NO: 137274 - DNA, 30 bp, Artificial Sequence
  Synthetic oligonucleotide
aacctgcctcccccaatacacccgccacga

SEQ ID NO: 137275 - DNA, 30 bp, Artificial Sequence
  Synthetic oligonucleotide
ttccaggctacggggcaacttacctcacga

SEQ ID NO: 137276 - DNA, 30 bp, Artificial Sequence
  Synthetic oligonucleotide
tatctcagtaacattaaagcagcctcacga

SEQ ID NO: 137277 - DNA, 30 bp, Artificial Sequence
  Synthetic oligonucleotide
ctcatcagtgggttggtctccgtgtcacga

SEQ ID NO: 137278 - DNA, 30 bp, Artificial Sequence
  Synthetic oligonucleotide
ataactaaagtgcatgtgggatgaagacga

SEQ ID NO: 137279 - DNA, 30 bp, Artificial Sequence
  Synthetic oligonucleotide
agagtccgctgggctttcggggatagacga

SEQ ID NO: 137280 - DNA, 30 bp, Artificial Sequence
  Synthetic oligonucleotide
caaatagccagcgagagctgacctagacga

SEQ ID NO: 137281 - DNA, 30 bp, Artificial Sequence
  Synthetic oligonucleotide
tcttgtgggccatggtgtcggttacgacga

SEQ ID NO: 137282 - DNA, 30 bp, Artificial Sequence
  Synthetic oligonucleotide
tgaagcccactgtagtggcgttcccgacga

SEQ ID NO: 137283 - DNA, 30 bp, Artificial Sequence
  Synthetic oligonucleotide
aacaaataacatcttccatgtccaggacga

SEQ ID NO: 137284 - DNA, 30 bp, Artificial Sequence
  Synthetic oligonucleotide
taggacttggagggcagatgggcaggacga

SEQ ID NO: 137285 - DNA, 30 bp, Artificial Sequence
  Synthetic oligonucleotide
gaacccatatgggatgttggtctgggacga

SEQ ID NO: 137286 - DNA, 30 bp, Artificial Sequence
  Synthetic oligonucleotide
tatgagtcagatatgacacgatatggacga

SEQ ID NO: 137287 - DNA, 30 bp, Artificial Sequence
  Synthetic oligonucleotide
gtagcttcattaagcgaaggggcatgacga

SEQ ID NO: 137288 - DNA, 30 bp, Artificial Sequence
  Synthetic oligonucleotide
tagacccagttcgctgtccgtcggatacga

SEQ ID NO: 137289 - DNA, 30 bp, Artificial Sequence
  Synthetic oligonucleotide
gtggtggcgaggcactgggtgcatatacga

SEQ ID NO: 137290 - DNA, 30 bp, Artificial Sequence
  Synthetic oligonucleotide
gaggaacatggttatactatcgatatacga

SEQ ID NO: 137291 - DNA, 30 bp, Artificial Sequence
  Synthetic oligonucleotide
agacagtagcggctgataaggtggctacga

SEQ ID NO: 137292 - DNA, 30 bp, Artificial Sequence
  Synthetic oligonucleotide
aaccgggttattcgcataggtggagtacga

SEQ ID NO: 137293 - DNA, 30 bp, Artificial Sequence
  Synthetic oligonucleotide
agctgttatgtccgtcttagtgtagtacga

SEQ ID NO: 137294 - DNA, 30 bp, Artificial Sequence
  Synthetic oligonucleotide
ccgggtggagggccagacctattagtacga

SEQ ID NO: 137295 - DNA, 30 bp, Artificial Sequence
  Synthetic oligonucleotide
gggctaaaccaagatttatatgaggtacga

SEQ ID NO: 137296 - DNA, 30 bp, Artificial Sequence
  Synthetic oligonucleotide
gtgcgagtgtgtttcactcgaagtgtacga

SEQ ID NO: 137297 - DNA, 30 bp, Artificial Sequence
  Synthetic oligonucleotide
atcctgctcgcagggcttacagacttacga

SEQ ID NO: 137298 - DNA, 30 bp, Artificial Sequence
  Synthetic oligonucleotide
ctcgtaagtcaaaacctttgacaaaaccga

SEQ ID NO: 137299 - DNA, 30 bp, Artificial Sequence
  Synthetic oligonucleotide
tgagcgtggttaaatccatataacaaccga

SEQ ID NO: 137300 - DNA, 30 bp, Artificial Sequence
  Synthetic oligonucleotide
agaagttgttggcatcgccagcaacaccga

SEQ ID NO: 137301 - DNA, 30 bp, Artificial Sequence
  Synthetic oligonucleotide
cggccgcataccatacaagcagtacaccga

SEQ ID NO: 137302 - DNA, 30 bp, Artificial Sequence
  Synthetic oligonucleotide
agtgccggtggacgaccccgctaccaccga

SEQ ID NO: 137303 - DNA, 30 bp, Artificial Sequence
  Synthetic oligonucleotide
actataaaccgggccgaagatcaagaccga

SEQ ID NO: 137304 - DNA, 30 bp, Artificial Sequence
  Synthetic oligonucleotide
ttaaagcgcggaagtaaatagccagaccga

SEQ ID NO: 137305 - DNA, 30 bp, Artificial Sequence
  Synthetic oligonucleotide
tgcaaaccgtcagaaggttgagtagaccga

SEQ ID NO: 137306 - DNA, 30 bp, Artificial Sequence
  Synthetic oligonucleotide
ggttttgccccgagattgtaaacggaccga

SEQ ID NO: 137307 - DNA, 30 bp, Artificial Sequence
  Synthetic oligonucleotide
gatatgagcgatagcttacttgcggaccga

SEQ ID NO: 137308 - DNA, 30 bp, Artificial Sequence
  Synthetic oligonucleotide
ctcattgtgcagtcactatcgatggaccga

SEQ ID NO: 137309 - DNA, 30 bp, Artificial Sequence
  Synthetic oligonucleotide
caccagcttagagtgtcttacctggaccga

SEQ ID NO: 137310 - DNA, 30 bp, Artificial Sequence
  Synthetic oligonucleotide
ccaaatcctgggcgtctgctcactgaccga

SEQ ID NO: 137311 - DNA, 30 bp, Artificial Sequence
  Synthetic oligonucleotide
ccttaagagagagccatgcgtaaaacccga

SEQ ID NO: 137312 - DNA, 30 bp, Artificial Sequence
  Synthetic oligonucleotide
cgtatataaattggacaagatgcaacccga

SEQ ID NO: 137313 - DNA, 30 bp, Artificial Sequence
  Synthetic oligonucleotide
aaaaagggcggtctggtaacattaacccga

SEQ ID NO: 137314 - DNA, 30 bp, Artificial Sequence
  Synthetic oligonucleotide
gggccagggactctaaacgataacacccga

SEQ ID NO: 137315 - DNA, 30 bp, Artificial Sequence
  Synthetic oligonucleotide
acggcgccgtaaacgttgggcggtacccga

SEQ ID NO: 137316 - DNA, 30 bp, Artificial Sequence
  Synthetic oligonucleotide
acctcggaaatgtgagcgagtactccccga

SEQ ID NO: 137317 - DNA, 30 bp, Artificial Sequence
  Synthetic oligonucleotide
ctcgttcaagttcgctcgaccagcgcccga

SEQ ID NO: 137318 - DNA, 30 bp, Artificial Sequence
  Synthetic oligonucleotide
taaaaatgggggtgtgtgccactggcccga

SEQ ID NO: 137319 - DNA, 30 bp, Artificial Sequence
  Synthetic oligonucleotide
gtctcgagatttagccgttccgatgcccga

SEQ ID NO: 137320 - DNA, 30 bp, Artificial Sequence
  Synthetic oligonucleotide
acatggtgatactaggctgctccatcccga

SEQ ID NO: 137321 - DNA, 30 bp, Artificial Sequence
  Synthetic oligonucleotide
tggcaaaaataatgccagggtgcatcccga

SEQ ID NO: 137322 - DNA, 30 bp, Artificial Sequence
  Synthetic oligonucleotide
accttggaaggatcatgtcggtattcccga

SEQ ID NO: 137323 - DNA, 30 bp, Artificial Sequence
  Synthetic oligonucleotide
cgtctaatacgcaaccatgttggcagccga

SEQ ID NO: 137324 - DNA, 30 bp, Artificial Sequence
  Synthetic oligonucleotide
gcggaccaccatagtactagaccgagccga

SEQ ID NO: 137325 - DNA, 30 bp, Artificial Sequence
  Synthetic oligonucleotide
cagcagtctatgtcaataacaatgagccga

SEQ ID NO: 137326 - DNA, 30 bp, Artificial Sequence
  Synthetic oligonucleotide
gtgaagagttcgcaacgccaagatcgccga

SEQ ID NO: 137327 - DNA, 30 bp, Artificial Sequence
  Synthetic oligonucleotide
atgatatacgatttcgtcgaggaaggccga

SEQ ID NO: 137328 - DNA, 30 bp, Artificial Sequence
  Synthetic oligonucleotide
tccgagagcaaaaggctaggcgcaggccga

SEQ ID NO: 137329 - DNA, 30 bp, Artificial Sequence
  Synthetic oligonucleotide
gtgtgaaatgctgaggggttgctcggccga

SEQ ID NO: 137330 - DNA, 30 bp, Artificial Sequence
  Synthetic oligonucleotide
gtgaaagatgagcacattcttttcggccga

SEQ ID NO: 137331 - DNA, 30 bp, Artificial Sequence
  Synthetic oligonucleotide
gtcaccacgcgaatggtccataagggccga

SEQ ID NO: 137332 - DNA, 30 bp, Artificial Sequence
  Synthetic oligonucleotide
tcgatgtagagtatgtgtggcaatggccga

SEQ ID NO: 137333 - DNA, 30 bp, Artificial Sequence
  Synthetic oligonucleotide
ttagcttaccaggaataacaacatggccga

SEQ ID NO: 137334 - DNA, 31 bp, Artificial Sequence
  Synthetic oligonucleotide
gatggaaacgacccagggctccaactgccga

SEQ ID NO: 137335 - DNA, 30 bp, Artificial Sequence
  Synthetic oligonucleotide
gaggtagggttcaccatccggcggtgccga

SEQ ID NO: 137336 - DNA, 30 bp, Artificial Sequence
  Synthetic oligonucleotide
gcggaaaaattttacatgaagagaatccga

SEQ ID NO: 137337 - DNA, 30 bp, Artificial Sequence
  Synthetic oligonucleotide
caggcagtaggtgtacgcgtactaatccga

SEQ ID NO: 137338 - DNA, 30 bp, Artificial Sequence
  Synthetic oligonucleotide
caaaggtctaggcgtgataatgacatccga

SEQ ID NO: 137339 - DNA, 30 bp, Artificial Sequence
  Synthetic oligonucleotide
gcgcgagcatatattatgattgggatccga

SEQ ID NO: 137340 - DNA, 30 bp, Artificial Sequence
  Synthetic oligonucleotide
tgaccggccccgcactctaatgcgctccga

SEQ ID NO: 137341 - DNA, 30 bp, Artificial Sequence
  Synthetic oligonucleotide
gcgcggtaggaaagtggtctcctgctccga

SEQ ID NO: 137342 - DNA, 30 bp, Artificial Sequence
  Synthetic oligonucleotide
aaacaccagaggttacataatgaagtccga

SEQ ID NO: 137343 - DNA, 29 bp, Artificial Sequence
  Synthetic oligonucleotide
acgctcgccgagtccattagtgaaagcga

SEQ ID NO: 137344 - DNA, 30 bp, Artificial Sequence
  Synthetic oligonucleotide
cgattgagagtccacccggatatgaagcga

SEQ ID NO: 137345 - DNA, 30 bp, Artificial Sequence
  Synthetic oligonucleotide
tgtagttgagaaagcgggcttgtgaagcga

SEQ ID NO: 137346 - DNA, 30 bp, Artificial Sequence
  Synthetic oligonucleotide
gcagttaaggtggacatggcgtgccagcga

SEQ ID NO: 137347 - DNA, 30 bp, Artificial Sequence
  Synthetic oligonucleotide
tgttctaggacactcctccgttcgcagcga

SEQ ID NO: 137348 - DNA, 30 bp, Artificial Sequence
  Synthetic oligonucleotide
aaggagcacgggcgaaccggcaggcagcga

SEQ ID NO: 137349 - DNA, 30 bp, Artificial Sequence
  Synthetic oligonucleotide
tagattggcagatatatagtcagagagcga

SEQ ID NO: 137350 - DNA, 30 bp, Artificial Sequence
  Synthetic oligonucleotide
acccgcttattgatcatttcctccgagcga

SEQ ID NO: 137351 - DNA, 30 bp, Artificial Sequence
  Synthetic oligonucleotide
acgatacacgcgatgtgatatgctgagcga

SEQ ID NO: 137352 - DNA, 30 bp, Artificial Sequence
  Synthetic oligonucleotide
gttctggagataccaaatgggtgtgagcga

SEQ ID NO: 137353 - DNA, 30 bp, Artificial Sequence
  Synthetic oligonucleotide
atggacatcatcgatatctggcaatagcga

SEQ ID NO: 137354 - DNA, 30 bp, Artificial Sequence
  Synthetic oligonucleotide
gggagcacactttctgagtttaactagcga

SEQ ID NO: 137355 - DNA, 30 bp, Artificial Sequence
  Synthetic oligonucleotide
aaatgggtatatggtggtactagctagcga

SEQ ID NO: 137356 - DNA, 30 bp, Artificial Sequence
  Synthetic oligonucleotide
ggttaactcagcttagtcaattgctagcga

SEQ ID NO: 137357 - DNA, 30 bp, Artificial Sequence
  Synthetic oligonucleotide
aggaatatctgataattggggtagtagcga

SEQ ID NO: 137358 - DNA, 30 bp, Artificial Sequence
  Synthetic oligonucleotide
tactggacaatcattctatggccaacgcga

SEQ ID NO: 137359 - DNA, 30 bp, Artificial Sequence
  Synthetic oligonucleotide
tgttattcaccgaatcaccatgcgacgcga

SEQ ID NO: 137360 - DNA, 30 bp, Artificial Sequence
  Synthetic oligonucleotide
cacgatgggattcggaagacaataccgcga

SEQ ID NO: 137361 - DNA, 30 bp, Artificial Sequence
  Synthetic oligonucleotide
ttgtgttagtcaagggaaagtaaagcgcga

SEQ ID NO: 137362 - DNA, 30 bp, Artificial Sequence
  Synthetic oligonucleotide
gtccgggataggtgcagaggtccagcgcga

SEQ ID NO: 137363 - DNA, 30 bp, Artificial Sequence
  Synthetic oligonucleotide
cccaagtacggatgtcggactggggcgcga

SEQ ID NO: 137364 - DNA, 30 bp, Artificial Sequence
  Synthetic oligonucleotide
acggcgagcgcgataaaaagcgctgcgcga

SEQ ID NO: 137365 - DNA, 30 bp, Artificial Sequence
  Synthetic oligonucleotide
gatcagttagagtgtattcggattgcgcga

SEQ ID NO: 137366 - DNA, 30 bp, Artificial Sequence
  Synthetic oligonucleotide
cagagagggaactgttacctgcaatcgcga

SEQ ID NO: 137367 - DNA, 30 bp, Artificial Sequence
  Synthetic oligonucleotide
catcgctcacaaaccctactaaattcgcga

SEQ ID NO: 137368 - DNA, 30 bp, Artificial Sequence
  Synthetic oligonucleotide
ataggccctcagcgtcacccagaaaggcga

SEQ ID NO: 137369 - DNA, 30 bp, Artificial Sequence
  Synthetic oligonucleotide
ggtaagaaatggtaaaccgtccataggcga

SEQ ID NO: 137370 - DNA, 30 bp, Artificial Sequence
  Synthetic oligonucleotide
agagatggtcgcggaggagcgccccggcga

SEQ ID NO: 137371 - DNA, 30 bp, Artificial Sequence
  Synthetic oligonucleotide
gaccaccataaattgtttagccctcggcga

SEQ ID NO: 137372 - DNA, 30 bp, Artificial Sequence
  Synthetic oligonucleotide
tatctaagagatggcaatatcgatgggcga

SEQ ID NO: 137373 - DNA, 30 bp, Artificial Sequence
  Synthetic oligonucleotide
gactaggttgagttgagagataggtggcga

SEQ ID NO: 137374 - DNA, 30 bp, Artificial Sequence
  Synthetic oligonucleotide
accatgtaagggcaggacgtggtttggcga

SEQ ID NO: 137375 - DNA, 30 bp, Artificial Sequence
  Synthetic oligonucleotide
tcagagtaagtgacacgcgtcgaaatgcga

SEQ ID NO: 137376 - DNA, 30 bp, Artificial Sequence
  Synthetic oligonucleotide
cttataggtatagtgaaaggaacaatgcga

SEQ ID NO: 137377 - DNA, 30 bp, Artificial Sequence
  Synthetic oligonucleotide
cggttcggaccaaatcactgatgaatgcga

SEQ ID NO: 137378 - DNA, 30 bp, Artificial Sequence
  Synthetic oligonucleotide
taaagagatagctataccggcttaatgcga

SEQ ID NO: 137379 - DNA, 30 bp, Artificial Sequence
  Synthetic oligonucleotide
tcaaggagcaaatgtttcatagcactgcga

SEQ ID NO: 137380 - DNA, 30 bp, Artificial Sequence
  Synthetic oligonucleotide
gtcaggcgtataaaacctgacatactgcga

SEQ ID NO: 137381 - DNA, 30 bp, Artificial Sequence
  Synthetic oligonucleotide
agttgcgtggcgacaggccggcagctgcga

SEQ ID NO: 137382 - DNA, 30 bp, Artificial Sequence
  Synthetic oligonucleotide
ggcggtatttaatcttgcgaatacgtgcga

SEQ ID NO: 137383 - DNA, 30 bp, Artificial Sequence
  Synthetic oligonucleotide
ccgtgggcacacgagtgaaacttcgtgcga

SEQ ID NO: 137384 - DNA, 30 bp, Artificial Sequence
  Synthetic oligonucleotide
agtaaaggcaacacacaacatatggtgcga

SEQ ID NO: 137385 - DNA, 30 bp, Artificial Sequence
  Synthetic oligonucleotide
tcaggctgtaaatgaaaaccgcctgtgcga

SEQ ID NO: 137386 - DNA, 30 bp, Artificial Sequence
  Synthetic oligonucleotide
gcggttccatatttcaagaacgacttgcga

SEQ ID NO: 137387 - DNA, 30 bp, Artificial Sequence
  Synthetic oligonucleotide
tgttagttcacccggattaatgacttgcga

SEQ ID NO: 137388 - DNA, 30 bp, Artificial Sequence
  Synthetic oligonucleotide
ttggcacgagcggcgctgtcggagttgcga

SEQ ID NO: 137389 - DNA, 30 bp, Artificial Sequence
  Synthetic oligonucleotide
tcggaacaacgaatctcaacggcgttgcga

SEQ ID NO: 137390 - DNA, 30 bp, Artificial Sequence
  Synthetic oligonucleotide
ctgcctgtttaactatacaggcgaaatcga

SEQ ID NO: 137391 - DNA, 30 bp, Artificial Sequence
  Synthetic oligonucleotide
tgcgtggatttgttttacccactaaatcga

SEQ ID NO: 137392 - DNA, 30 bp, Artificial Sequence
  Synthetic oligonucleotide
ggggtaagcttattgatacctcgcaatcga

SEQ ID NO: 137393 - DNA, 30 bp, Artificial Sequence
  Synthetic oligonucleotide
tcttgcgctgatcacacgaggcctaatcga

SEQ ID NO: 137394 - DNA, 30 bp, Artificial Sequence
  Synthetic oligonucleotide
aggcttaacgccgattcaaagcgacatcga

SEQ ID NO: 137395 - DNA, 30 bp, Artificial Sequence
  Synthetic oligonucleotide
tctcagaccgcgctaagagggatacatcga

SEQ ID NO: 137396 - DNA, 30 bp, Artificial Sequence
  Synthetic oligonucleotide
cctactgtgaaggctagacactagcatcga

SEQ ID NO: 137397 - DNA, 30 bp, Artificial Sequence
  Synthetic oligonucleotide
aaacatataaagaacgctggtccgcatcga

SEQ ID NO: 137398 - DNA, 30 bp, Artificial Sequence
  Synthetic oligonucleotide
ttttacagagcgtgaagccaatcagatcga

SEQ ID NO: 137399 - DNA, 30 bp, Artificial Sequence
  Synthetic oligonucleotide
gggatcggagcgaatgactttggcgatcga

SEQ ID NO: 137400 - DNA, 30 bp, Artificial Sequence
  Synthetic oligonucleotide
gcactcattgtttaccgcccagatgatcga

SEQ ID NO: 137401 - DNA, 30 bp, Artificial Sequence
  Synthetic oligonucleotide
aatcaggtcaaccagtgtctaattgatcga

SEQ ID NO: 137402 - DNA, 30 bp, Artificial Sequence
  Synthetic oligonucleotide
ccttttttaccgggagaactaacatatcga

SEQ ID NO: 137403 - DNA, 30 bp, Artificial Sequence
  Synthetic oligonucleotide
gcgtgaatagggagaatccctctatatcga

SEQ ID NO: 137404 - DNA, 30 bp, Artificial Sequence
  Synthetic oligonucleotide
gtaatctccgaaggagctcagaactatcga

SEQ ID NO: 137405 - DNA, 30 bp, Artificial Sequence
  Synthetic oligonucleotide
gccatggagaaaccaatgggctggtatcga

SEQ ID NO: 137406 - DNA, 30 bp, Artificial Sequence
  Synthetic oligonucleotide
agctaccgggtctccgtcagtcaaactcga

SEQ ID NO: 137407 - DNA, 30 bp, Artificial Sequence
  Synthetic oligonucleotide
taacagtatgggctggagcgcccaactcga

SEQ ID NO: 137408 - DNA, 30 bp, Artificial Sequence
  Synthetic oligonucleotide
ggaaagatgcattgccatgatcggcctcga

SEQ ID NO: 137409 - DNA, 30 bp, Artificial Sequence
  Synthetic oligonucleotide
cgtcgcagaagccaacgggcgcaagctcga

SEQ ID NO: 137410 - DNA, 30 bp, Artificial Sequence
  Synthetic oligonucleotide
ccgtacgtgcaggttacaagttcctctcga

SEQ ID NO: 137411 - DNA, 30 bp, Artificial Sequence
  Synthetic oligonucleotide
gcgatgtacgatctgttgcataagtctcga

SEQ ID NO: 137412 - DNA, 30 bp, Artificial Sequence
  Synthetic oligonucleotide
ctaatatactaagtcatatcctaaagtcga

SEQ ID NO: 137413 - DNA, 30 bp, Artificial Sequence
  Synthetic oligonucleotide
gacttgatcattaacaataagatcagtcga

SEQ ID NO: 137414 - DNA, 30 bp, Artificial Sequence
  Synthetic oligonucleotide
tcattaggggacaatagtgagctcagtcga

SEQ ID NO: 137415 - DNA, 30 bp, Artificial Sequence
  Synthetic oligonucleotide
acacatcgaagtcccgctatattgagtcga

SEQ ID NO: 137416 - DNA, 30 bp, Artificial Sequence
  Synthetic oligonucleotide
taaccgatagtattccaaacgtaccgtcga

SEQ ID NO: 137417 - DNA, 30 bp, Artificial Sequence
  Synthetic oligonucleotide
acatcacccttgaggcctagccttcgtcga

SEQ ID NO: 137418 - DNA, 30 bp, Artificial Sequence
  Synthetic oligonucleotide
acctgcggtgatgcactataagggggtcga

SEQ ID NO: 137419 - DNA, 30 bp, Artificial Sequence
  Synthetic oligonucleotide
gagctataaagtggtcagactcatggtcga

SEQ ID NO: 137420 - DNA, 30 bp, Artificial Sequence
  Synthetic oligonucleotide
ggaccgtcgatattgcgcttggaatgtcga

SEQ ID NO: 137421 - DNA, 30 bp, Artificial Sequence
  Synthetic oligonucleotide
ccagacgtgacaccagtacagccatgtcga

SEQ ID NO: 137422 - DNA, 30 bp, Artificial Sequence
  Synthetic oligonucleotide
cgtataactatacgtgaagggatatgtcga

SEQ ID NO: 137423 - DNA, 30 bp, Artificial Sequence
  Synthetic oligonucleotide
agtaacaccgtgatgcatggtgccattcga

SEQ ID NO: 137424 - DNA, 30 bp, Artificial Sequence
  Synthetic oligonucleotide
acactctaaccttaaagtccaacacttcga

SEQ ID NO: 137425 - DNA, 30 bp, Artificial Sequence
  Synthetic oligonucleotide
gggtcgcggagtgggtggcgtctgcttcga

SEQ ID NO: 137426 - DNA, 30 bp, Artificial Sequence
  Synthetic oligonucleotide
taaattgagtgacagacgatagttcttcga

SEQ ID NO: 137427 - DNA, 30 bp, Artificial Sequence
  Synthetic oligonucleotide
cctaagagccgaaaaggcaattaagttcga

SEQ ID NO: 137428 - DNA, 30 bp, Artificial Sequence
  Synthetic oligonucleotide
ttgtacggccgatgtacatagcgatttcga

SEQ ID NO: 137429 - DNA, 30 bp, Artificial Sequence
  Synthetic oligonucleotide
tgataatcatgttgtgcaaatgtatttcga

SEQ ID NO: 137430 - DNA, 30 bp, Artificial Sequence
  Synthetic oligonucleotide
tgccatagccgtagattatgcacctttcga

SEQ ID NO: 137431 - DNA, 30 bp, Artificial Sequence
  Synthetic oligonucleotide
gctagctcttgcacatggcgaggaaaagga

SEQ ID NO: 137432 - DNA, 30 bp, Artificial Sequence
  Synthetic oligonucleotide
ccatcagagtggtagtccgcgtgcaaagga

SEQ ID NO: 137433 - DNA, 30 bp, Artificial Sequence
  Synthetic oligonucleotide
gcaggacgttgctgtgattgaactaaagga

SEQ ID NO: 137434 - DNA, 30 bp, Artificial Sequence
  Synthetic oligonucleotide
ggatagcgtctagtaacatgggttaaagga

SEQ ID NO: 137435 - DNA, 30 bp, Artificial Sequence
  Synthetic oligonucleotide
tactcagatgcctgagtagcgtaccaagga

SEQ ID NO: 137436 - DNA, 30 bp, Artificial Sequence
  Synthetic oligonucleotide
gctatgtcggacgacgacggacgccaagga

SEQ ID NO: 137437 - DNA, 30 bp, Artificial Sequence
  Synthetic oligonucleotide
gagggcgatttgagtggctcgacgcaagga

SEQ ID NO: 137438 - DNA, 30 bp, Artificial Sequence
  Synthetic oligonucleotide
cggttgaacgttgttatcaggccgcaagga

SEQ ID NO: 137439 - DNA, 30 bp, Artificial Sequence
  Synthetic oligonucleotide
agctgtcgaaatagccaacgcctagaagga

SEQ ID NO: 137440 - DNA, 30 bp, Artificial Sequence
  Synthetic oligonucleotide
gtcgcagtgacttgaaagggttgggaagga

SEQ ID NO: 137441 - DNA, 30 bp, Artificial Sequence
  Synthetic oligonucleotide
taccgcgtgatttatctgagctatgaagga

SEQ ID NO: 137442 - DNA, 28 bp, Artificial Sequence
  Synthetic oligonucleotide
tacgtgcaactaatgactgagtgaagga

SEQ ID NO: 137443 - DNA, 30 bp, Artificial Sequence
  Synthetic oligonucleotide
tggatcacgcctgacaaagacaaaacagga

SEQ ID NO: 137444 - DNA, 30 bp, Artificial Sequence
  Synthetic oligonucleotide
ccatcgggtgctgcatagccgccgacagga

SEQ ID NO: 137445 - DNA, 30 bp, Artificial Sequence
  Synthetic oligonucleotide
aacgggtggaagcctagttcgactacagga

SEQ ID NO: 137446 - DNA, 30 bp, Artificial Sequence
  Synthetic oligonucleotide
agcacgtaggatgcataactaattacagga

SEQ ID NO: 137447 - DNA, 31 bp, Artificial Sequence
  Synthetic oligonucleotide
ccagtctgtcaattgcccgttttaaccagga

SEQ ID NO: 137448 - DNA, 30 bp, Artificial Sequence
  Synthetic oligonucleotide
acgtatgctgtatggttcagccgcccagga

SEQ ID NO: 137449 - DNA, 30 bp, Artificial Sequence
  Synthetic oligonucleotide
catatagtgccacgtgccagatagccagga

SEQ ID NO: 137450 - DNA, 30 bp, Artificial Sequence
  Synthetic oligonucleotide
agatgcgagtgccggaatctcctagcagga

SEQ ID NO: 137451 - DNA, 30 bp, Artificial Sequence
  Synthetic oligonucleotide
acgtggttaatgtcagggctaactgcagga

SEQ ID NO: 137452 - DNA, 30 bp, Artificial Sequence
  Synthetic oligonucleotide
catctataatgccgactagcacaatcagga

SEQ ID NO: 137453 - DNA, 30 bp, Artificial Sequence
  Synthetic oligonucleotide
gagatggtagatgttggtaggccctcagga

SEQ ID NO: 137454 - DNA, 30 bp, Artificial Sequence
  Synthetic oligonucleotide
ccaaacccttgaaaagtctcaaattcagga

SEQ ID NO: 137455 - DNA, 30 bp, Artificial Sequence
  Synthetic oligonucleotide
ataccagacatttgcccacgtccttcagga

SEQ ID NO: 137456 - DNA, 30 bp, Artificial Sequence
  Synthetic oligonucleotide
aacttgcgaggccggtggttgatttcagga

SEQ ID NO: 137457 - DNA, 30 bp, Artificial Sequence
  Synthetic oligonucleotide
tggtcagctcctggaggcaacccaagagga

SEQ ID NO: 137458 - DNA, 30 bp, Artificial Sequence
  Synthetic oligonucleotide
tcactttttcatgacacccttattagagga

SEQ ID NO: 137459 - DNA, 30 bp, Artificial Sequence
  Synthetic oligonucleotide
aaagtgacccaccccgtactcagacgagga

SEQ ID NO: 137460 - DNA, 30 bp, Artificial Sequence
  Synthetic oligonucleotide
ttcacgcgatacaatggtactggacgagga

SEQ ID NO: 137461 - DNA, 30 bp, Artificial Sequence
  Synthetic oligonucleotide
acatacttaggagtccgaatccgccgagga

SEQ ID NO: 137462 - DNA, 29 bp, Artificial Sequence
  Synthetic oligonucleotide
cgtattgacagttgccaggtttaggagga

SEQ ID NO: 137463 - DNA, 30 bp, Artificial Sequence
  Synthetic oligonucleotide
acggttgaggaaacacgactcgagggagga

SEQ ID NO: 137464 - DNA, 30 bp, Artificial Sequence
  Synthetic oligonucleotide
atcagcataaaaaggacacatgcgggagga

SEQ ID NO: 137465 - DNA, 30 bp, Artificial Sequence
  Synthetic oligonucleotide
ggtcgcgggggccacaggccaattggagga

SEQ ID NO: 137466 - DNA, 30 bp, Artificial Sequence
  Synthetic oligonucleotide
gaaatggggggcccattgaagaactgagga

SEQ ID NO: 137467 - DNA, 30 bp, Artificial Sequence
  Synthetic oligonucleotide
aatcatggagagctattcagggtaatagga

SEQ ID NO: 137468 - DNA, 30 bp, Artificial Sequence
  Synthetic oligonucleotide
actctagaatagcaagccctcgggatagga

SEQ ID NO: 137469 - DNA, 30 bp, Artificial Sequence
  Synthetic oligonucleotide
cgggaggtaggaaaaatagtcttgatagga

SEQ ID NO: 137470 - DNA, 30 bp, Artificial Sequence
  Synthetic oligonucleotide
gcggtcaccaatggggcagagttgatagga

SEQ ID NO: 137471 - DNA, 30 bp, Artificial Sequence
  Synthetic oligonucleotide
ttaagaatcaagtgaaccgccccactagga

SEQ ID NO: 137472 - DNA, 30 bp, Artificial Sequence
  Synthetic oligonucleotide
cagacgatggtggagatgagggggctagga

SEQ ID NO: 137473 - DNA, 30 bp, Artificial Sequence
  Synthetic oligonucleotide
ggggagccgtttccgtagccatggctagga

SEQ ID NO: 137474 - DNA, 30 bp, Artificial Sequence
  Synthetic oligonucleotide
gaaccgagcaaaggcccgtagatgctagga

SEQ ID NO: 137475 - DNA, 30 bp, Artificial Sequence
  Synthetic oligonucleotide
atagacggtgtggctgaggtgtccgtagga

SEQ ID NO: 137476 - DNA, 30 bp, Artificial Sequence
  Synthetic oligonucleotide
ctggttcggtgtaggagacgtccggtagga

SEQ ID NO: 137477 - DNA, 30 bp, Artificial Sequence
  Synthetic oligonucleotide
ttgcaagagactatccgaggttatgtagga

SEQ ID NO: 137478 - DNA, 31 bp, Artificial Sequence
  Synthetic oligonucleotide
tactttgcgcaagttcaaatttaacttagga

SEQ ID NO: 137479 - DNA, 30 bp, Artificial Sequence
  Synthetic oligonucleotide
aagctaagattgagactgagacacttagga

SEQ ID NO: 137480 - DNA, 30 bp, Artificial Sequence
  Synthetic oligonucleotide
ggatcaggtccgaccaaggacaccttagga

SEQ ID NO: 137481 - DNA, 30 bp, Artificial Sequence
  Synthetic oligonucleotide
agcgcaggtataaaaagaggtcgcttagga

SEQ ID NO: 137482 - DNA, 31 bp, Artificial Sequence
  Synthetic oligonucleotide
aaccgacataagatacgtggacctcttagga

SEQ ID NO: 137483 - DNA, 30 bp, Artificial Sequence
  Synthetic oligonucleotide
ggatgctataccttaggaaaatggttagga

SEQ ID NO: 137484 - DNA, 30 bp, Artificial Sequence
  Synthetic oligonucleotide
gaggtactgtcgagcctagtcattttagga

SEQ ID NO: 137485 - DNA, 30 bp, Artificial Sequence
  Synthetic oligonucleotide
actataagcgtccaaggtactattttagga

SEQ ID NO: 137486 - DNA, 30 bp, Artificial Sequence
  Synthetic oligonucleotide
cggctctccctctgcaataattaccacgga

SEQ ID NO: 137487 - DNA, 30 bp, Artificial Sequence
  Synthetic oligonucleotide
gaggtaggagcagtaacgagtcggcacgga

SEQ ID NO: 137488 - DNA, 30 bp, Artificial Sequence
  Synthetic oligonucleotide
aaaggacctccaatcatggttaaagacgga

SEQ ID NO: 137489 - DNA, 30 bp, Artificial Sequence
  Synthetic oligonucleotide
cagaactccctagagccgattcgcgacgga

SEQ ID NO: 137490 - DNA, 30 bp, Artificial Sequence
  Synthetic oligonucleotide
ccggctgacaatgttcaacaagcggacgga

SEQ ID NO: 137491 - DNA, 30 bp, Artificial Sequence
  Synthetic oligonucleotide
cagatggaggctacagtgcgtaatgacgga

SEQ ID NO: 137492 - DNA, 30 bp, Artificial Sequence
  Synthetic oligonucleotide
ttctgggcgagacaccaaagcagatacgga

SEQ ID NO: 137493 - DNA, 30 bp, Artificial Sequence
  Synthetic oligonucleotide
cgataaatggtcggttggctcagatacgga

SEQ ID NO: 137494 - DNA, 30 bp, Artificial Sequence
  Synthetic oligonucleotide
cctttttcaggtgcaaacggacgatacgga

SEQ ID NO: 137495 - DNA, 30 bp, Artificial Sequence
  Synthetic oligonucleotide
tgccgtacgggtgcaccagattagtacgga

SEQ ID NO: 137496 - DNA, 30 bp, Artificial Sequence
  Synthetic oligonucleotide
gccacgcaatagcgcaggtggtggtacgga

SEQ ID NO: 137497 - DNA, 30 bp, Artificial Sequence
  Synthetic oligonucleotide
acgcaactgggccattacgtaccttacgga

SEQ ID NO: 137498 - DNA, 30 bp, Artificial Sequence
  Synthetic oligonucleotide
gtacgtacgagctctataattgcttacgga

SEQ ID NO: 137499 - DNA, 30 bp, Artificial Sequence
  Synthetic oligonucleotide
taaagtactgtgtcgcgcttggtaaccgga

SEQ ID NO: 137500 - DNA, 30 bp, Artificial Sequence
  Synthetic oligonucleotide
agatgccaactacatctctgaaacaccgga

SEQ ID NO: 137501 - DNA, 30 bp, Artificial Sequence
  Synthetic oligonucleotide
cgactacgttaagactcttggtctaccgga

SEQ ID NO: 137502 - DNA, 30 bp, Artificial Sequence
  Synthetic oligonucleotide
agtcgtgcgtgccacgtctcccctcccgga

SEQ ID NO: 137503 - DNA, 30 bp, Artificial Sequence
  Synthetic oligonucleotide
tctagagaatgcggactgtccagtcccgga

SEQ ID NO: 137504 - DNA, 30 bp, Artificial Sequence
  Synthetic oligonucleotide
ttgactggggagtggatcaaacgagccgga

SEQ ID NO: 137505 - DNA, 30 bp, Artificial Sequence
  Synthetic oligonucleotide
tatcacttctcgacgagccattccgccgga

SEQ ID NO: 137506 - DNA, 30 bp, Artificial Sequence
  Synthetic oligonucleotide
tacaaaaagttatgttagaaaagcgccgga

SEQ ID NO: 137507 - DNA, 30 bp, Artificial Sequence
  Synthetic oligonucleotide
ataaatatcggtggaaggaccagcgccgga

SEQ ID NO: 137508 - DNA, 30 bp, Artificial Sequence
  Synthetic oligonucleotide
gggacggctggactaatggcggtatccgga

SEQ ID NO: 137509 - DNA, 30 bp, Artificial Sequence
  Synthetic oligonucleotide
gatgtccctcacccagtacccacgtccgga

SEQ ID NO: 137510 - DNA, 30 bp, Artificial Sequence
  Synthetic oligonucleotide
tagtgtcggtgcgtttcttatttaagcgga

SEQ ID NO: 137511 - DNA, 30 bp, Artificial Sequence
  Synthetic oligonucleotide
cagacgttgataggaagggcgtacagcgga

SEQ ID NO: 137512 - DNA, 30 bp, Artificial Sequence
  Synthetic oligonucleotide
gccgacagactgttcatcgtgtgtagcgga

SEQ ID NO: 137513 - DNA, 30 bp, Artificial Sequence
  Synthetic oligonucleotide
gtgaagggcttataaagtcgccttagcgga

SEQ ID NO: 137514 - DNA, 30 bp, Artificial Sequence
  Synthetic oligonucleotide
atgtcctacaacgacattcggatccgcgga

SEQ ID NO: 137515 - DNA, 30 bp, Artificial Sequence
  Synthetic oligonucleotide
aaagaccgatgaggggcattaaggcgcgga

SEQ ID NO: 137516 - DNA, 30 bp, Artificial Sequence
  Synthetic oligonucleotide
taaaggaactctggaaaagccgaaggcgga

SEQ ID NO: 137517 - DNA, 30 bp, Artificial Sequence
  Synthetic oligonucleotide
ctatcagccaaaccaataccataaggcgga

SEQ ID NO: 137518 - DNA, 30 bp, Artificial Sequence
  Synthetic oligonucleotide
tggcaagggtttatttaaggcaccggcgga

SEQ ID NO: 137519 - DNA, 30 bp, Artificial Sequence
  Synthetic oligonucleotide
tcacaaaagcggtaaatacctgtcggcgga

SEQ ID NO: 137520 - DNA, 30 bp, Artificial Sequence
  Synthetic oligonucleotide
cgtcccgcccgaacatatcgctatggcgga

SEQ ID NO: 137521 - DNA, 30 bp, Artificial Sequence
  Synthetic oligonucleotide
cggagtgaagttgcattattgcactgcgga

SEQ ID NO: 137522 - DNA, 30 bp, Artificial Sequence
  Synthetic oligonucleotide
cactaagggtgctgaaatcgctcctgcgga

SEQ ID NO: 137523 - DNA, 30 bp, Artificial Sequence
  Synthetic oligonucleotide
ggtcactattttgggagaggagtgtgcgga

SEQ ID NO: 137524 - DNA, 30 bp, Artificial Sequence
  Synthetic oligonucleotide
taacgctgagaatgtgttaccaaaatcgga

SEQ ID NO: 137525 - DNA, 30 bp, Artificial Sequence
  Synthetic oligonucleotide
tgacggtagtcatcagaggcccgaatcgga

SEQ ID NO: 137526 - DNA, 30 bp, Artificial Sequence
  Synthetic oligonucleotide
gtagcggatctttaaaagtagttcatcgga

SEQ ID NO: 137527 - DNA, 30 bp, Artificial Sequence
  Synthetic oligonucleotide
tgatagcgtgcacgcgggataaagatcgga

SEQ ID NO: 137528 - DNA, 30 bp, Artificial Sequence
  Synthetic oligonucleotide
ccacgtgggtggagtttaacggggatcgga

SEQ ID NO: 137529 - DNA, 31 bp, Artificial Sequence
  Synthetic oligonucleotide
ggtatattaccataaacatagtggtatcgga

SEQ ID NO: 137530 - DNA, 30 bp, Artificial Sequence
  Synthetic oligonucleotide
ctcgaaaggacagaacttggtattatcgga

SEQ ID NO: 137531 - DNA, 31 bp, Artificial Sequence
  Synthetic oligonucleotide
atggctgtgatcggcaacagtacttatcgga

SEQ ID NO: 137532 - DNA, 30 bp, Artificial Sequence
  Synthetic oligonucleotide
gtgggattgaggaaaggcgcctgactcgga

SEQ ID NO: 137533 - DNA, 30 bp, Artificial Sequence
  Synthetic oligonucleotide
acagttaagacggatggtgataacctcgga

SEQ ID NO: 137534 - DNA, 30 bp, Artificial Sequence
  Synthetic oligonucleotide
ctcattgggtccaagagcaatggagtcgga

SEQ ID NO: 137535 - DNA, 31 bp, Artificial Sequence
  Synthetic oligonucleotide
tgacgcgggataacagatagtggtagtcgga

SEQ ID NO: 137536 - DNA, 30 bp, Artificial Sequence
  Synthetic oligonucleotide
cccttccatctggatgtactcttggtcgga

SEQ ID NO: 137537 - DNA, 30 bp, Artificial Sequence
  Synthetic oligonucleotide
cataagctgagtgtaagaaataatgtcgga

SEQ ID NO: 137538 - DNA, 30 bp, Artificial Sequence
  Synthetic oligonucleotide
gggattgaacgaaggtgaggcctaaaggga

SEQ ID NO: 137539 - DNA, 30 bp, Artificial Sequence
  Synthetic oligonucleotide
ttattggcaacaagcaggtctcccaaggga

SEQ ID NO: 137540 - DNA, 30 bp, Artificial Sequence
  Synthetic oligonucleotide
taggtggaaaagcacgccgcacaccaggga

SEQ ID NO: 137541 - DNA, 30 bp, Artificial Sequence
  Synthetic oligonucleotide
cttcagcaggctccaaaagcatagcaggga

SEQ ID NO: 137542 - DNA, 30 bp, Artificial Sequence
  Synthetic oligonucleotide
ccgttacacttcgaatcggtcatagaggga

SEQ ID NO: 137543 - DNA, 30 bp, Artificial Sequence
  Synthetic oligonucleotide
ctcatccacattacccagtcgcacgaggga

SEQ ID NO: 137544 - DNA, 30 bp, Artificial Sequence
  Synthetic oligonucleotide
agacggcgttgagaagcggtgagtgaggga

SEQ ID NO: 137545 - DNA, 30 bp, Artificial Sequence
  Synthetic oligonucleotide
atctcccgaaagagggtctgcccataggga

SEQ ID NO: 137546 - DNA, 30 bp, Artificial Sequence
  Synthetic oligonucleotide
acagcaggcaggagctccacacgctaggga

SEQ ID NO: 137547 - DNA, 30 bp, Artificial Sequence
  Synthetic oligonucleotide
ttgatatataccagatggcgacgaacggga

SEQ ID NO: 137548 - DNA, 30 bp, Artificial Sequence
  Synthetic oligonucleotide
tccaatccgtgaagggcgaccgccacggga

SEQ ID NO: 137549 - DNA, 30 bp, Artificial Sequence
  Synthetic oligonucleotide
gtggagtgcgaatattcaagttacccggga

SEQ ID NO: 137550 - DNA, 30 bp, Artificial Sequence
  Synthetic oligonucleotide
gctaagtcattaagttgaaggttcccggga

SEQ ID NO: 137551 - DNA, 30 bp, Artificial Sequence
  Synthetic oligonucleotide
ttgttccggaggaccgcccgcgtgccggga

SEQ ID NO: 137552 - DNA, 30 bp, Artificial Sequence
  Synthetic oligonucleotide
ggttgacacccgtgaaagatagtagcggga

SEQ ID NO: 137553 - DNA, 30 bp, Artificial Sequence
  Synthetic oligonucleotide
acatcagatgtagggatacgaactgcggga

SEQ ID NO: 137554 - DNA, 30 bp, Artificial Sequence
  Synthetic oligonucleotide
aggcggatcctaaagactaagattgcggga

SEQ ID NO: 137555 - DNA, 30 bp, Artificial Sequence
  Synthetic oligonucleotide
taggaaaatgaggaataatcacattcggga

SEQ ID NO: 137556 - DNA, 30 bp, Artificial Sequence
  Synthetic oligonucleotide
aggcagaaagagaagacaaccggttcggga

SEQ ID NO: 137557 - DNA, 30 bp, Artificial Sequence
  Synthetic oligonucleotide
acaacacggagatgcgagagattttcggga

SEQ ID NO: 137558 - DNA, 30 bp, Artificial Sequence
  Synthetic oligonucleotide
ttcggaggaaccacttgatcccgaagggga

SEQ ID NO: 137559 - DNA, 30 bp, Artificial Sequence
  Synthetic oligonucleotide
taagtaaagtcccgaaagtagcgaagggga

SEQ ID NO: 137560 - DNA, 30 bp, Artificial Sequence
  Synthetic oligonucleotide
tgactgatagggctatcctaactcagggga

SEQ ID NO: 137561 - DNA, 30 bp, Artificial Sequence
  Synthetic oligonucleotide
tataacgctgtggagagctaccagagggga

SEQ ID NO: 137562 - DNA, 30 bp, Artificial Sequence
  Synthetic oligonucleotide
acggaccgaacgccgggttcacggagggga

SEQ ID NO: 137563 - DNA, 30 bp, Artificial Sequence
  Synthetic oligonucleotide
ttacaacacgtggttggatgaaatagggga

SEQ ID NO: 137564 - DNA, 30 bp, Artificial Sequence
  Synthetic oligonucleotide
taaagaagacgcaggtagacatgtagggga

SEQ ID NO: 137565 - DNA, 30 bp, Artificial Sequence
  Synthetic oligonucleotide
ctaaaatgataattacttcctcaacgggga

SEQ ID NO: 137566 - DNA, 30 bp, Artificial Sequence
  Synthetic oligonucleotide
taaacgccttgcgtggcgtggctccgggga

SEQ ID NO: 137567 - DNA, 30 bp, Artificial Sequence
  Synthetic oligonucleotide
atgaacgcgtgcaaaagcagaggcggggga

SEQ ID NO: 137568 - DNA, 31 bp, Artificial Sequence
  Synthetic oligonucleotide
cctatgccacttagccttaagtaagggggga

SEQ ID NO: 137569 - DNA, 30 bp, Artificial Sequence
  Synthetic oligonucleotide
gacgatatgctttgaggggtatagggggga

SEQ ID NO: 137570 - DNA, 30 bp, Artificial Sequence
  Synthetic oligonucleotide
ctagagacctcttagtcacaagcgggggga

SEQ ID NO: 137571 - DNA, 39 bp, Artificial Sequence
  Synthetic oligonucleotide
aagataatacattatggtatggtcggggatcggggggga

SEQ ID NO: 137572 - DNA, 30 bp, Artificial Sequence
  Synthetic oligonucleotide
atgactcggcgcatatttgtagactgggga

SEQ ID NO: 137573 - DNA, 30 bp, Artificial Sequence
  Synthetic oligonucleotide
acccgtggatctaagagcatgccgtgggga

SEQ ID NO: 137574 - DNA, 30 bp, Artificial Sequence
  Synthetic oligonucleotide
cggcccgacagccatgggccaacttgggga

SEQ ID NO: 137575 - DNA, 30 bp, Artificial Sequence
  Synthetic oligonucleotide
agtgctcattttagtggtgtatgttgggga

SEQ ID NO: 137576 - DNA, 30 bp, Artificial Sequence
  Synthetic oligonucleotide
tctcgaagtacatatttgccaatttgggga

SEQ ID NO: 137577 - DNA, 30 bp, Artificial Sequence
  Synthetic oligonucleotide
ccgaggttagtagagagtggactttgggga

SEQ ID NO: 137578 - DNA, 30 bp, Artificial Sequence
  Synthetic oligonucleotide
gtctggggcatgggcgcgatataaatggga

SEQ ID NO: 137579 - DNA, 30 bp, Artificial Sequence
  Synthetic oligonucleotide
cagggtcgggattaaagcaccgtaatggga

SEQ ID NO: 137580 - DNA, 30 bp, Artificial Sequence
  Synthetic oligonucleotide
ttggtggtcgcatatctctggtgtatggga

SEQ ID NO: 137581 - DNA, 30 bp, Artificial Sequence
  Synthetic oligonucleotide
tcctaaaaacgagcattgggtattatggga

SEQ ID NO: 137582 - DNA, 30 bp, Artificial Sequence
  Synthetic oligonucleotide
ggccactacgaggccggtgtagtactggga

SEQ ID NO: 137583 - DNA, 30 bp, Artificial Sequence
  Synthetic oligonucleotide
aaagcgcaaagatatctgtgagtcctggga

SEQ ID NO: 137584 - DNA, 30 bp, Artificial Sequence
  Synthetic oligonucleotide
tgaacgatctgacttgtacgccggctggga

SEQ ID NO: 137585 - DNA, 30 bp, Artificial Sequence
  Synthetic oligonucleotide
cactggcaggttctacttagaacagtggga

SEQ ID NO: 137586 - DNA, 30 bp, Artificial Sequence
  Synthetic oligonucleotide
cggcaatgctgttggtggcgaagcgtggga

SEQ ID NO: 137587 - DNA, 30 bp, Artificial Sequence
  Synthetic oligonucleotide
gtcgagggtctgatcacagacatcgtggga

SEQ ID NO: 137588 - DNA, 30 bp, Artificial Sequence
  Synthetic oligonucleotide
gaggagcgagtacaactgagaaatgtggga

SEQ ID NO: 137589 - DNA, 30 bp, Artificial Sequence
  Synthetic oligonucleotide
gtagcggacggaggggggacgtaattggga

SEQ ID NO: 137590 - DNA, 30 bp, Artificial Sequence
  Synthetic oligonucleotide
atacgaaatgggtctaccattcagttggga

SEQ ID NO: 137591 - DNA, 30 bp, Artificial Sequence
  Synthetic oligonucleotide
tcaaacacagtactgatgcggtacaatgga

SEQ ID NO: 137592 - DNA, 30 bp, Artificial Sequence
  Synthetic oligonucleotide
ttgcagaccaccttgcaactcgtcaatgga

SEQ ID NO: 137593 - DNA, 30 bp, Artificial Sequence
  Synthetic oligonucleotide
gtgcgttacgatatttactattagaatgga

SEQ ID NO: 137594 - DNA, 30 bp, Artificial Sequence
  Synthetic oligonucleotide
tatggcttactcagaagcctgcttaatgga

SEQ ID NO: 137595 - DNA, 30 bp, Artificial Sequence
  Synthetic oligonucleotide
gttagctgggcctctccctgcgaacatgga

SEQ ID NO: 137596 - DNA, 30 bp, Artificial Sequence
  Synthetic oligonucleotide
caaaacctcgcttcgagtacgagccatgga

SEQ ID NO: 137597 - DNA, 30 bp, Artificial Sequence
  Synthetic oligonucleotide
gaagacaaaatgagtcataacgcagatgga

SEQ ID NO: 137598 - DNA, 30 bp, Artificial Sequence
  Synthetic oligonucleotide
gaccaggatcagtcaaccggcaacgatgga

SEQ ID NO: 137599 - DNA, 30 bp, Artificial Sequence
  Synthetic oligonucleotide
taaaagacagcaagctcggcttgcgatgga

SEQ ID NO: 137600 - DNA, 30 bp, Artificial Sequence
  Synthetic oligonucleotide
gcatacgatagatcttcaataaaggatgga

SEQ ID NO: 137601 - DNA, 30 bp, Artificial Sequence
  Synthetic oligonucleotide
cactatcatcgtgcaaataggttgtatgga

SEQ ID NO: 137602 - DNA, 30 bp, Artificial Sequence
  Synthetic oligonucleotide
gctagtcgcgaggatccggcaacaactgga

SEQ ID NO: 137603 - DNA, 30 bp, Artificial Sequence
  Synthetic oligonucleotide
gtgacttacggtgaccaatttgggactgga

SEQ ID NO: 137604 - DNA, 30 bp, Artificial Sequence
  Synthetic oligonucleotide
aaactaaagcgcagctgaagggtagctgga

SEQ ID NO: 137605 - DNA, 30 bp, Artificial Sequence
  Synthetic oligonucleotide
tatcgaaaggtttaactaagtattgctgga

SEQ ID NO: 137606 - DNA, 30 bp, Artificial Sequence
  Synthetic oligonucleotide
gaaatgagagctataaaagctgactctgga

SEQ ID NO: 137607 - DNA, 30 bp, Artificial Sequence
  Synthetic oligonucleotide
tagacgatgacagtaaacttcgtctctgga

SEQ ID NO: 137608 - DNA, 31 bp, Artificial Sequence
  Synthetic oligonucleotide
catgaacgactttaaaattgtgcattctgga

SEQ ID NO: 137609 - DNA, 30 bp, Artificial Sequence
  Synthetic oligonucleotide
aggcatgagctttccactttcggttctgga

SEQ ID NO: 137610 - DNA, 30 bp, Artificial Sequence
  Synthetic oligonucleotide
cggtactttagatggaagttttgttctgga

SEQ ID NO: 137611 - DNA, 30 bp, Artificial Sequence
  Synthetic oligonucleotide
atcgaggtttactggtttagcgacagtgga

SEQ ID NO: 137612 - DNA, 30 bp, Artificial Sequence
  Synthetic oligonucleotide
gggtacacgatcatcaaacggtacagtgga

SEQ ID NO: 137613 - DNA, 30 bp, Artificial Sequence
  Synthetic oligonucleotide
aagcgcaaagattcggtcaagcagagtgga

SEQ ID NO: 137614 - DNA, 30 bp, Artificial Sequence
  Synthetic oligonucleotide
ccagctctaaccattcagtcggagagtgga

SEQ ID NO: 137615 - DNA, 30 bp, Artificial Sequence
  Synthetic oligonucleotide
ttgctacactctcaccagtgtctgagtgga

SEQ ID NO: 137616 - DNA, 30 bp, Artificial Sequence
  Synthetic oligonucleotide
caattccctaaggtaaatgagattagtgga

SEQ ID NO: 137617 - DNA, 30 bp, Artificial Sequence
  Synthetic oligonucleotide
atggagatgcttataatttcctgacgtgga

SEQ ID NO: 137618 - DNA, 30 bp, Artificial Sequence
  Synthetic oligonucleotide
accatgacggactcccttcacctacgtgga

SEQ ID NO: 137619 - DNA, 30 bp, Artificial Sequence
  Synthetic oligonucleotide
cacggcacacagcattcccggccgcgtgga

SEQ ID NO: 137620 - DNA, 30 bp, Artificial Sequence
  Synthetic oligonucleotide
tagtcggttggcgccccgagggtgcgtgga

SEQ ID NO: 137621 - DNA, 30 bp, Artificial Sequence
  Synthetic oligonucleotide
tctcgcgaagacctgttgtcccttcgtgga

SEQ ID NO: 137622 - DNA, 30 bp, Artificial Sequence
  Synthetic oligonucleotide
ctggattgacgcgggtgtatgaaaggtgga

SEQ ID NO: 137623 - DNA, 30 bp, Artificial Sequence
  Synthetic oligonucleotide
actaggaagaagtgctagcgtgggggtgga

SEQ ID NO: 137624 - DNA, 30 bp, Artificial Sequence
  Synthetic oligonucleotide
gcaacgagcatgttgcaacctccgtgtgga

SEQ ID NO: 137625 - DNA, 30 bp, Artificial Sequence
  Synthetic oligonucleotide
ctagttaccaggtcgtgtgtgtggtgtgga

SEQ ID NO: 137626 - DNA, 30 bp, Artificial Sequence
  Synthetic oligonucleotide
agcgagcttatgtgatcaagagcttgtgga

SEQ ID NO: 137627 - DNA, 30 bp, Artificial Sequence
  Synthetic oligonucleotide
gcatgagtctcaatggagacgggttgtgga

SEQ ID NO: 137628 - DNA, 30 bp, Artificial Sequence
  Synthetic oligonucleotide
gatggactcttgcatgaaacttgcattgga

SEQ ID NO: 137629 - DNA, 30 bp, Artificial Sequence
  Synthetic oligonucleotide
acacgtacgctgtgacatattccacttgga

SEQ ID NO: 137630 - DNA, 30 bp, Artificial Sequence
  Synthetic oligonucleotide
atgagtggcctcgtccaacgccgacttgga

SEQ ID NO: 137631 - DNA, 30 bp, Artificial Sequence
  Synthetic oligonucleotide
gcaagcaaaggaaggcggccgtgacttgga

SEQ ID NO: 137632 - DNA, 30 bp, Artificial Sequence
  Synthetic oligonucleotide
gaaaaaataaagaagtgtgacccgcttgga

SEQ ID NO: 137633 - DNA, 30 bp, Artificial Sequence
  Synthetic oligonucleotide
cagcatacggtcattgttcgaaggcttgga

SEQ ID NO: 137634 - DNA, 30 bp, Artificial Sequence
  Synthetic oligonucleotide
ggcaagagcagttggccactaaaatttgga

SEQ ID NO: 137635 - DNA, 30 bp, Artificial Sequence
  Synthetic oligonucleotide
gaaacgggcaatgtgagtcctccatttgga

SEQ ID NO: 137636 - DNA, 30 bp, Artificial Sequence
  Synthetic oligonucleotide
ctagtgggctaagaaacagcagactttgga

SEQ ID NO: 137637 - DNA, 30 bp, Artificial Sequence
  Synthetic oligonucleotide
atgttcgagataggataaagatactttgga

SEQ ID NO: 137638 - DNA, 30 bp, Artificial Sequence
  Synthetic oligonucleotide
accacagtgtaataggtggtcccaaaatga

SEQ ID NO: 137639 - DNA, 30 bp, Artificial Sequence
  Synthetic oligonucleotide
cgctaagttagacacgtgccatgaaaatga

SEQ ID NO: 137640 - DNA, 30 bp, Artificial Sequence
  Synthetic oligonucleotide
ccacgtgtaactaataggtaattaaaatga

SEQ ID NO: 137641 - DNA, 30 bp, Artificial Sequence
  Synthetic oligonucleotide
gcaggggggcggcggggaatcggcaaatga

SEQ ID NO: 137642 - DNA, 30 bp, Artificial Sequence
  Synthetic oligonucleotide
aggaggagttccgccaacttgccgaaatga

SEQ ID NO: 137643 - DNA, 30 bp, Artificial Sequence
  Synthetic oligonucleotide
ggtgattggcgttgggtcgaccataaatga

SEQ ID NO: 137644 - DNA, 30 bp, Artificial Sequence
  Synthetic oligonucleotide
atagggacatagcttactgcgccacaatga

SEQ ID NO: 137645 - DNA, 30 bp, Artificial Sequence
  Synthetic oligonucleotide
agatcgtccctacggatgcgcgcacaatga

SEQ ID NO: 137646 - DNA, 30 bp, Artificial Sequence
  Synthetic oligonucleotide
accagggaatttcgctaggaaagacaatga

SEQ ID NO: 137647 - DNA, 30 bp, Artificial Sequence
  Synthetic oligonucleotide
tcatagatccggtgttcattttagcaatga

SEQ ID NO: 137648 - DNA, 30 bp, Artificial Sequence
  Synthetic oligonucleotide
ccagacttgcttactcaggcccctcaatga

SEQ ID NO: 137649 - DNA, 30 bp, Artificial Sequence
  Synthetic oligonucleotide
atggtagcaaagaacctaatcggtcaatga

SEQ ID NO: 137650 - DNA, 30 bp, Artificial Sequence
  Synthetic oligonucleotide
cttacaaaacaagtgtataggcccgaatga

SEQ ID NO: 137651 - DNA, 30 bp, Artificial Sequence
  Synthetic oligonucleotide
ggcatcagatcaagtgtacagagcgaatga

SEQ ID NO: 137652 - DNA, 30 bp, Artificial Sequence
  Synthetic oligonucleotide
ggcggttcaaccttaatagaacgcgaatga

SEQ ID NO: 137653 - DNA, 30 bp, Artificial Sequence
  Synthetic oligonucleotide
ataaataattacaacgcttacgaggaatga

SEQ ID NO: 137654 - DNA, 30 bp, Artificial Sequence
  Synthetic oligonucleotide
tctctgtatggaacgaggatctaggaatga

SEQ ID NO: 137655 - DNA, 30 bp, Artificial Sequence
  Synthetic oligonucleotide
ggcttgtatctcggtaaaaccacataatga

SEQ ID NO: 137656 - DNA, 30 bp, Artificial Sequence
  Synthetic oligonucleotide
atgaaaacgaatgttcgacaagcataatga

SEQ ID NO: 137657 - DNA, 30 bp, Artificial Sequence
  Synthetic oligonucleotide
gcaatagctgcgtctccggcatgataatga

SEQ ID NO: 137658 - DNA, 30 bp, Artificial Sequence
  Synthetic oligonucleotide
acagaaagcgcccatccctcatgataatga

SEQ ID NO: 137659 - DNA, 30 bp, Artificial Sequence
  Synthetic oligonucleotide
tccacagggatttcacgtactgtataatga

SEQ ID NO: 137660 - DNA, 30 bp, Artificial Sequence
  Synthetic oligonucleotide
cagtaccatgggtacgttaaacagtaatga

SEQ ID NO: 137661 - DNA, 30 bp, Artificial Sequence
  Synthetic oligonucleotide
tatgaggagaccgaaaaacccaattaatga

SEQ ID NO: 137662 - DNA, 30 bp, Artificial Sequence
  Synthetic oligonucleotide
ttcaaacactgctaaagcggaacttaatga

SEQ ID NO: 137663 - DNA, 30 bp, Artificial Sequence
  Synthetic oligonucleotide
catctagcacccatctcctgcccttaatga

SEQ ID NO: 137664 - DNA, 30 bp, Artificial Sequence
  Synthetic oligonucleotide
atacggtggtgaatacgtgaaatttaatga

SEQ ID NO: 137665 - DNA, 30 bp, Artificial Sequence
  Synthetic oligonucleotide
ggtgccctcagcacgaacattaaaacatga

SEQ ID NO: 137666 - DNA, 30 bp, Artificial Sequence
  Synthetic oligonucleotide
gtttcgattcgcctctgactacacacatga

SEQ ID NO: 137667 - DNA, 30 bp, Artificial Sequence
  Synthetic oligonucleotide
catggggtaacgtggagattttggacatga

SEQ ID NO: 137668 - DNA, 30 bp, Artificial Sequence
  Synthetic oligonucleotide
ggagggttactcagctggacccgtacatga

SEQ ID NO: 137669 - DNA, 30 bp, Artificial Sequence
  Synthetic oligonucleotide
ccaacgctgggtgtgtgataccaagcatga

SEQ ID NO: 137670 - DNA, 30 bp, Artificial Sequence
  Synthetic oligonucleotide
aggtacactactcgtcgctgggccgcatga

SEQ ID NO: 137671 - DNA, 30 bp, Artificial Sequence
  Synthetic oligonucleotide
atatctgtccatacgtgcgttaaatcatga

SEQ ID NO: 137672 - DNA, 30 bp, Artificial Sequence
  Synthetic oligonucleotide
agtacaataacatgagagtatatatcatga

SEQ ID NO: 137673 - DNA, 30 bp, Artificial Sequence
  Synthetic oligonucleotide
tgacgcacaaacgacgatttcgcttcatga

SEQ ID NO: 137674 - DNA, 31 bp, Artificial Sequence
  Synthetic oligonucleotide
ctgaggtaattgtatgcaaatacgttcatga

SEQ ID NO: 137675 - DNA, 30 bp, Artificial Sequence
  Synthetic oligonucleotide
gcgtggatattgggacgatcactttcatga

SEQ ID NO: 137676 - DNA, 30 bp, Artificial Sequence
  Synthetic oligonucleotide
agacttccaccacactcggcaggaagatga

SEQ ID NO: 137677 - DNA, 30 bp, Artificial Sequence
  Synthetic oligonucleotide
cgggcttgagagaggtatttactaagatga

SEQ ID NO: 137678 - DNA, 30 bp, Artificial Sequence
  Synthetic oligonucleotide
gggccctctggctcaaaaaatttacgatga

SEQ ID NO: 137679 - DNA, 30 bp, Artificial Sequence
  Synthetic oligonucleotide
gtatggcctagtccaacgtatggccgatga

SEQ ID NO: 137680 - DNA, 30 bp, Artificial Sequence
  Synthetic oligonucleotide
ccatacttttcgtgacgtcttcctcgatga

SEQ ID NO: 137681 - DNA, 30 bp, Artificial Sequence
  Synthetic oligonucleotide
gtcagtcctctccgacaaagagtcggatga

SEQ ID NO: 137682 - DNA, 30 bp, Artificial Sequence
  Synthetic oligonucleotide
atagtaagtaaggagctaggaaggggatga

SEQ ID NO: 137683 - DNA, 30 bp, Artificial Sequence
  Synthetic oligonucleotide
gacgtggatggactgttctgtaatggatga

SEQ ID NO: 137684 - DNA, 30 bp, Artificial Sequence
  Synthetic oligonucleotide
gcggtactctttcttatccaaaatatatga

SEQ ID NO: 137685 - DNA, 30 bp, Artificial Sequence
  Synthetic oligonucleotide
ggtggaacctcgggactgtttgatatatga

SEQ ID NO: 137686 - DNA, 30 bp, Artificial Sequence
  Synthetic oligonucleotide
ggtcagaggtattaaaatgaacgactatga

SEQ ID NO: 137687 - DNA, 30 bp, Artificial Sequence
  Synthetic oligonucleotide
ttaataccactcaagtaggaattactatga

SEQ ID NO: 137688 - DNA, 30 bp, Artificial Sequence
  Synthetic oligonucleotide
atgcgtgtgcacgagtccgtctcgctatga

SEQ ID NO: 137689 - DNA, 30 bp, Artificial Sequence
  Synthetic oligonucleotide
acagacatatctttgactatcggcgtatga

SEQ ID NO: 137690 - DNA, 30 bp, Artificial Sequence
  Synthetic oligonucleotide
tcgtaataacgcaatggctagagggtatga

SEQ ID NO: 137691 - DNA, 30 bp, Artificial Sequence
  Synthetic oligonucleotide
tataacatcacggggctaccgggattatga

SEQ ID NO: 137692 - DNA, 30 bp, Artificial Sequence
  Synthetic oligonucleotide
gcgtctagtgcaggggaaagaggcttatga

SEQ ID NO: 137693 - DNA, 30 bp, Artificial Sequence
  Synthetic oligonucleotide
tacgcaacgaacacgatgtaatgcttatga

SEQ ID NO: 137694 - DNA, 30 bp, Artificial Sequence
  Synthetic oligonucleotide
cacctgatatagatcaggagaaggttatga

SEQ ID NO: 137695 - DNA, 30 bp, Artificial Sequence
  Synthetic oligonucleotide
tattatgtaacaggaagataggatttatga

SEQ ID NO: 137696 - DNA, 30 bp, Artificial Sequence
  Synthetic oligonucleotide
ccgttgaaatcggtgcagacttaccactga

SEQ ID NO: 137697 - DNA, 30 bp, Artificial Sequence
  Synthetic oligonucleotide
gtagggcacgaaccgtcatattgccactga

SEQ ID NO: 137698 - DNA, 30 bp, Artificial Sequence
  Synthetic oligonucleotide
acgtgccaaacttcgtgtaagggtcactga

SEQ ID NO: 137699 - DNA, 30 bp, Artificial Sequence
  Synthetic oligonucleotide
actgcacagttgaagaagcacccagactga

SEQ ID NO: 137700 - DNA, 30 bp, Artificial Sequence
  Synthetic oligonucleotide
tgggtcgtgcgctttcttacagcagactga

SEQ ID NO: 137701 - DNA, 30 bp, Artificial Sequence
  Synthetic oligonucleotide
agtagtgagaatttagctccgtgcgactga

SEQ ID NO: 137702 - DNA, 30 bp, Artificial Sequence
  Synthetic oligonucleotide
ggtaatagcctcgcttgccgtggggactga

SEQ ID NO: 137703 - DNA, 30 bp, Artificial Sequence
  Synthetic oligonucleotide
ggatttgagacgagtgccccccgtgactga

SEQ ID NO: 137704 - DNA, 30 bp, Artificial Sequence
  Synthetic oligonucleotide
aactaaccaggtgacgaattaagttactga

SEQ ID NO: 137705 - DNA, 30 bp, Artificial Sequence
  Synthetic oligonucleotide
ctgccgatgaaatagacacctttttactga

SEQ ID NO: 137706 - DNA, 30 bp, Artificial Sequence
  Synthetic oligonucleotide
tataatgggttattaccggctacaacctga

SEQ ID NO: 137707 - DNA, 30 bp, Artificial Sequence
  Synthetic oligonucleotide
tgtcagcttgcggacggccatagaacctga

SEQ ID NO: 137708 - DNA, 30 bp, Artificial Sequence
  Synthetic oligonucleotide
cggaatctacaagcacgtaaagacgcctga

SEQ ID NO: 137709 - DNA, 30 bp, Artificial Sequence
  Synthetic oligonucleotide
cagtgccctataccgcgggggatcgcctga

SEQ ID NO: 137710 - DNA, 30 bp, Artificial Sequence
  Synthetic oligonucleotide
gtggttcagaccagagcttaacaatcctga

SEQ ID NO: 137711 - DNA, 30 bp, Artificial Sequence
  Synthetic oligonucleotide
gataagccatcggacatttagctatcctga

SEQ ID NO: 137712 - DNA, 30 bp, Artificial Sequence
  Synthetic oligonucleotide
gccactagtcgaagtccaatggattcctga

SEQ ID NO: 137713 - DNA, 30 bp, Artificial Sequence
  Synthetic oligonucleotide
ttgtggagtacgtatctatttcacagctga

SEQ ID NO: 137714 - DNA, 30 bp, Artificial Sequence
  Synthetic oligonucleotide
gatggcaccactcgcaaattctgacgctga

SEQ ID NO: 137715 - DNA, 30 bp, Artificial Sequence
  Synthetic oligonucleotide
ctggtagtgacgatatgctaataaggctga

SEQ ID NO: 137716 - DNA, 31 bp, Artificial Sequence
  Synthetic oligonucleotide
ccaaaatcctcggtgaacgttatccggctga

SEQ ID NO: 137717 - DNA, 30 bp, Artificial Sequence
  Synthetic oligonucleotide
aacttaaccactaagtgattacggggctga

SEQ ID NO: 137718 - DNA, 30 bp, Artificial Sequence
  Synthetic oligonucleotide
acgtcaggtgtcagtaattcgcatggctga

SEQ ID NO: 137719 - DNA, 30 bp, Artificial Sequence
  Synthetic oligonucleotide
cacggatgtacagatgcatcctcatgctga

SEQ ID NO: 137720 - DNA, 30 bp, Artificial Sequence
  Synthetic oligonucleotide
ccttgcactcggtaacacgggttatgctga

SEQ ID NO: 137721 - DNA, 30 bp, Artificial Sequence
  Synthetic oligonucleotide
agcgaaatatggagtatcggactgtgctga

SEQ ID NO: 137722 - DNA, 30 bp, Artificial Sequence
  Synthetic oligonucleotide
gacttaggctcatcttaattagacatctga

SEQ ID NO: 137723 - DNA, 30 bp, Artificial Sequence
  Synthetic oligonucleotide
aagaataggaggtggaggccaaccatctga

SEQ ID NO: 137724 - DNA, 30 bp, Artificial Sequence
  Synthetic oligonucleotide
tgagtacatttcatggccattggcatctga

SEQ ID NO: 137725 - DNA, 30 bp, Artificial Sequence
  Synthetic oligonucleotide
caagaatccaaaaaaagtcctcggatctga

SEQ ID NO: 137726 - DNA, 30 bp, Artificial Sequence
  Synthetic oligonucleotide
acttgcacatcacgggtaacttggatctga

SEQ ID NO: 137727 - DNA, 30 bp, Artificial Sequence
  Synthetic oligonucleotide
gaaagcccagttcggtctaatactatctga

SEQ ID NO: 137728 - DNA, 30 bp, Artificial Sequence
  Synthetic oligonucleotide
ataggccgaaagggcggaatgccactctga

SEQ ID NO: 137729 - DNA, 30 bp, Artificial Sequence
  Synthetic oligonucleotide
cgcaaaggtgtgcgaagtgtaacgctctga

SEQ ID NO: 137730 - DNA, 30 bp, Artificial Sequence
  Synthetic oligonucleotide
tactgcgtaagaactgctctgccagtctga

SEQ ID NO: 137731 - DNA, 30 bp, Artificial Sequence
  Synthetic oligonucleotide
cggatccgaagtacaagatacaacgtctga

SEQ ID NO: 137732 - DNA, 30 bp, Artificial Sequence
  Synthetic oligonucleotide
ccagcccgggcaaataatatcggattctga

SEQ ID NO: 137733 - DNA, 30 bp, Artificial Sequence
  Synthetic oligonucleotide
cgttcgagggcccataatcgggtattctga

SEQ ID NO: 137734 - DNA, 30 bp, Artificial Sequence
  Synthetic oligonucleotide
ggttacaaggctattaacatcgcgttctga

SEQ ID NO: 137735 - DNA, 30 bp, Artificial Sequence
  Synthetic oligonucleotide
atctaatcaatactggggtatgcgttctga

SEQ ID NO: 137736 - DNA, 30 bp, Artificial Sequence
  Synthetic oligonucleotide
ttcgggcggggatacgaggtccaaaagtga

SEQ ID NO: 137737 - DNA, 30 bp, Artificial Sequence
  Synthetic oligonucleotide
gggtcagagtggctgcaaagggcaaagtga

SEQ ID NO: 137738 - DNA, 30 bp, Artificial Sequence
  Synthetic oligonucleotide
ctctggtcgaactaagataagtccaagtga

SEQ ID NO: 137739 - DNA, 30 bp, Artificial Sequence
  Synthetic oligonucleotide
accaaatgaggtggtggcagagtgaagtga

SEQ ID NO: 137740 - DNA, 30 bp, Artificial Sequence
  Synthetic oligonucleotide
gaataatgggcgcgcgtaagatataagtga

SEQ ID NO: 137741 - DNA, 30 bp, Artificial Sequence
  Synthetic oligonucleotide
atagacacttccaccatcaaatcccagtga

SEQ ID NO: 137742 - DNA, 30 bp, Artificial Sequence
  Synthetic oligonucleotide
tgtgtccgttgctagccaaagaagcagtga

SEQ ID NO: 137743 - DNA, 30 bp, Artificial Sequence
  Synthetic oligonucleotide
tgtaagcggggaagttagagtcttcagtga

SEQ ID NO: 137744 - DNA, 30 bp, Artificial Sequence
  Synthetic oligonucleotide
gtaaaacagagaaaatggttgaaagagtga

SEQ ID NO: 137745 - DNA, 30 bp, Artificial Sequence
  Synthetic oligonucleotide
cctatttcgaagttgtgataaggcgagtga

SEQ ID NO: 137746 - DNA, 30 bp, Artificial Sequence
  Synthetic oligonucleotide
aggagctggactcaactctagttcgagtga

SEQ ID NO: 137747 - DNA, 30 bp, Artificial Sequence
  Synthetic oligonucleotide
ttgtagacaagcaataaaacattggagtga

SEQ ID NO: 137748 - DNA, 30 bp, Artificial Sequence
  Synthetic oligonucleotide
gaggcagagagagcggccgtctatgagtga

SEQ ID NO: 137749 - DNA, 30 bp, Artificial Sequence
  Synthetic oligonucleotide
taaatggactatgagtggagccgtgagtga

SEQ ID NO: 137750 - DNA, 29 bp, Artificial Sequence
  Synthetic oligonucleotide
atagtgaagaagatagaccgattgagtga

SEQ ID NO: 137751 - DNA, 30 bp, Artificial Sequence
  Synthetic oligonucleotide
gaatggacattagcgaaaggaccatagtga

SEQ ID NO: 137752 - DNA, 30 bp, Artificial Sequence
  Synthetic oligonucleotide
cgctcgacatgctcaggctccctatagtga

SEQ ID NO: 137753 - DNA, 30 bp, Artificial Sequence
  Synthetic oligonucleotide
ctgtgagagggcaaatatctttcgtagtga

SEQ ID NO: 137754 - DNA, 31 bp, Artificial Sequence
  Synthetic oligonucleotide
tgcgctattaactgcagaagatgtgtagtga

SEQ ID NO: 137755 - DNA, 30 bp, Artificial Sequence
  Synthetic oligonucleotide
acctatagcaagataaaatcaggaacgtga

SEQ ID NO: 137756 - DNA, 30 bp, Artificial Sequence
  Synthetic oligonucleotide
tcgttgagtacatggatggatcagacgtga

SEQ ID NO: 137757 - DNA, 30 bp, Artificial Sequence
  Synthetic oligonucleotide
gtgaggaagtagaatttttcgcatacgtga

SEQ ID NO: 137758 - DNA, 30 bp, Artificial Sequence
  Synthetic oligonucleotide
gaaaaagaaccgtatttgttaaaaccgtga

SEQ ID NO: 137759 - DNA, 30 bp, Artificial Sequence
  Synthetic oligonucleotide
ccgcaacctggacagaagtacgaaccgtga

SEQ ID NO: 137760 - DNA, 30 bp, Artificial Sequence
  Synthetic oligonucleotide
gtgcggacgcaccactggactaatgcgtga

SEQ ID NO: 137761 - DNA, 30 bp, Artificial Sequence
  Synthetic oligonucleotide
gtaccggcgtccctacaaggaacctcgtga

SEQ ID NO: 137762 - DNA, 30 bp, Artificial Sequence
  Synthetic oligonucleotide
tcgggggttatgcatgtcgcgtcttcgtga

SEQ ID NO: 137763 - DNA, 30 bp, Artificial Sequence
  Synthetic oligonucleotide
tgagtagggtcaattagtcgtcaaaggtga

SEQ ID NO: 137764 - DNA, 30 bp, Artificial Sequence
  Synthetic oligonucleotide
ggaagagcatggtcccctccgatcaggtga

SEQ ID NO: 137765 - DNA, 30 bp, Artificial Sequence
  Synthetic oligonucleotide
ctaccggggaagtcttcgggcctcaggtga

SEQ ID NO: 137766 - DNA, 30 bp, Artificial Sequence
  Synthetic oligonucleotide
tggaaactatagacccataaatggaggtga

SEQ ID NO: 137767 - DNA, 30 bp, Artificial Sequence
  Synthetic oligonucleotide
ctgtgcacaggagctctaaaagttaggtga

SEQ ID NO: 137768 - DNA, 30 bp, Artificial Sequence
  Synthetic oligonucleotide
gcttactctagtctagaatggctacggtga

SEQ ID NO: 137769 - DNA, 30 bp, Artificial Sequence
  Synthetic oligonucleotide
atgtaccctatgatggtgtcggtccggtga

SEQ ID NO: 137770 - DNA, 30 bp, Artificial Sequence
  Synthetic oligonucleotide
actcatacacggaaacagctatgagggtga

SEQ ID NO: 137771 - DNA, 30 bp, Artificial Sequence
  Synthetic oligonucleotide
atagcaataaatcttcactgtaccgggtga

SEQ ID NO: 137772 - DNA, 30 bp, Artificial Sequence
  Synthetic oligonucleotide
cgaaatggtgtcagactagtggtcgggtga

SEQ ID NO: 137773 - DNA, 30 bp, Artificial Sequence
  Synthetic oligonucleotide
ccagacgaactacgggtttacgaggggtga

SEQ ID NO: 137774 - DNA, 30 bp, Artificial Sequence
  Synthetic oligonucleotide
taggcacgtatccacactagggggtggtga

SEQ ID NO: 137775 - DNA, 30 bp, Artificial Sequence
  Synthetic oligonucleotide
gcgggagtcagctttttacgtgtgtggtga

SEQ ID NO: 137776 - DNA, 30 bp, Artificial Sequence
  Synthetic oligonucleotide
acagttgttcctccacatatgagaatgtga

SEQ ID NO: 137777 - DNA, 30 bp, Artificial Sequence
  Synthetic oligonucleotide
tcgtcgagatctaaaataggatagatgtga

SEQ ID NO: 137778 - DNA, 30 bp, Artificial Sequence
  Synthetic oligonucleotide
tccagaagagcggctgtaaggagtatgtga

SEQ ID NO: 137779 - DNA, 30 bp, Artificial Sequence
  Synthetic oligonucleotide
catcagcgtataaaaggcgcctgtatgtga

SEQ ID NO: 137780 - DNA, 30 bp, Artificial Sequence
  Synthetic oligonucleotide
tgttcaggcgacgtagggaccgaactgtga

SEQ ID NO: 137781 - DNA, 30 bp, Artificial Sequence
  Synthetic oligonucleotide
gactgcattttagtcggaacattactgtga

SEQ ID NO: 137782 - DNA, 30 bp, Artificial Sequence
  Synthetic oligonucleotide
caccgtaattaaccggggcaatagctgtga

SEQ ID NO: 137783 - DNA, 30 bp, Artificial Sequence
  Synthetic oligonucleotide
ccgggaccacggaatgtagctagtctgtga

SEQ ID NO: 137784 - DNA, 30 bp, Artificial Sequence
  Synthetic oligonucleotide
gatacattgaacgctatttgaccagtgtga

SEQ ID NO: 137785 - DNA, 30 bp, Artificial Sequence
  Synthetic oligonucleotide
cgtcgggacgcctacgtctgcaccgtgtga

SEQ ID NO: 137786 - DNA, 30 bp, Artificial Sequence
  Synthetic oligonucleotide
atgcgagggtgcttgactgctagcgtgtga

SEQ ID NO: 137787 - DNA, 30 bp, Artificial Sequence
  Synthetic oligonucleotide
agctctggaacaataacagacaacaattga

SEQ ID NO: 137788 - DNA, 30 bp, Artificial Sequence
  Synthetic oligonucleotide
gtcgtggcgcgatatcatcacaatcattga

SEQ ID NO: 137789 - DNA, 30 bp, Artificial Sequence
  Synthetic oligonucleotide
aaaccgggcccacacaggagcaatcattga

SEQ ID NO: 137790 - DNA, 30 bp, Artificial Sequence
  Synthetic oligonucleotide
aggggtaatggagatgagtccagggattga

SEQ ID NO: 137791 - DNA, 30 bp, Artificial Sequence
  Synthetic oligonucleotide
actccggtttacgcgtacatgggggattga

SEQ ID NO: 137792 - DNA, 30 bp, Artificial Sequence
  Synthetic oligonucleotide
aagcgcgcacaaccgaggtagtgtgattga

SEQ ID NO: 137793 - DNA, 30 bp, Artificial Sequence
  Synthetic oligonucleotide
cggggtgatgtacatacctcgattgattga

SEQ ID NO: 137794 - DNA, 30 bp, Artificial Sequence
  Synthetic oligonucleotide
ggaagagaagcagtccacattgaatattga

SEQ ID NO: 137795 - DNA, 30 bp, Artificial Sequence
  Synthetic oligonucleotide
agccggattattgcgggtagatgatattga

SEQ ID NO: 137796 - DNA, 30 bp, Artificial Sequence
  Synthetic oligonucleotide
cactcagatagtatatgagggaagtattga

SEQ ID NO: 137797 - DNA, 30 bp, Artificial Sequence
  Synthetic oligonucleotide
tcgagttcgggggttaattgcatgtattga

SEQ ID NO: 137798 - DNA, 30 bp, Artificial Sequence
  Synthetic oligonucleotide
tggcaaagcacagttagaatagcttattga

SEQ ID NO: 137799 - DNA, 30 bp, Artificial Sequence
  Synthetic oligonucleotide
ggacggcgtcgggctaaatgtttttattga

SEQ ID NO: 137800 - DNA, 30 bp, Artificial Sequence
  Synthetic oligonucleotide
agcgcgaagctttacctacgcccaacttga

SEQ ID NO: 137801 - DNA, 30 bp, Artificial Sequence
  Synthetic oligonucleotide
ggctagtaaattgatcctgataagacttga

SEQ ID NO: 137802 - DNA, 30 bp, Artificial Sequence
  Synthetic oligonucleotide
ctcgctggttacacaccgtgtaggacttga

SEQ ID NO: 137803 - DNA, 30 bp, Artificial Sequence
  Synthetic oligonucleotide
atcgagcgcatagcaggctatgtgacttga

SEQ ID NO: 137804 - DNA, 30 bp, Artificial Sequence
  Synthetic oligonucleotide
acaactatcgactttagtagtgagccttga

SEQ ID NO: 137805 - DNA, 30 bp, Artificial Sequence
  Synthetic oligonucleotide
tgaataagcgacaaaaagtggtaagcttga

SEQ ID NO: 137806 - DNA, 30 bp, Artificial Sequence
  Synthetic oligonucleotide
ttgtttatcgccagaccaatcgcggcttga

SEQ ID NO: 137807 - DNA, 30 bp, Artificial Sequence
  Synthetic oligonucleotide
cgccccatgggaggtgagtgagatgcttga

SEQ ID NO: 137808 - DNA, 30 bp, Artificial Sequence
  Synthetic oligonucleotide
ggggaagctgaaaagtacgtaatatcttga

SEQ ID NO: 137809 - DNA, 30 bp, Artificial Sequence
  Synthetic oligonucleotide
ggtgagtaaaaagaaacaggccgctcttga

SEQ ID NO: 137810 - DNA, 30 bp, Artificial Sequence
  Synthetic oligonucleotide
tgtaatacaggtttctcgtaaaagtcttga

SEQ ID NO: 137811 - DNA, 30 bp, Artificial Sequence
  Synthetic oligonucleotide
attagcacggtccttataattccgtcttga

SEQ ID NO: 137812 - DNA, 30 bp, Artificial Sequence
  Synthetic oligonucleotide
acgtagcagtgacaagggtgggtttcttga

SEQ ID NO: 137813 - DNA, 30 bp, Artificial Sequence
  Synthetic oligonucleotide
gccatgccattcatacaaaacacgagttga

SEQ ID NO: 137814 - DNA, 30 bp, Artificial Sequence
  Synthetic oligonucleotide
ggatttcccactgacaaaagaaggagttga

SEQ ID NO: 137815 - DNA, 30 bp, Artificial Sequence
  Synthetic oligonucleotide
cagggaccgcacctatatcaacaacgttga

SEQ ID NO: 137816 - DNA, 30 bp, Artificial Sequence
  Synthetic oligonucleotide
tgtataatcccagcgtacgggccacgttga

SEQ ID NO: 137817 - DNA, 30 bp, Artificial Sequence
  Synthetic oligonucleotide
aggccaggtgttggctcaaactcccgttga

SEQ ID NO: 137818 - DNA, 30 bp, Artificial Sequence
  Synthetic oligonucleotide
aagagacattcttacggcgcaaagcgttga

SEQ ID NO: 137819 - DNA, 30 bp, Artificial Sequence
  Synthetic oligonucleotide
atcggtcgtatgctatgtgatcagcgttga

SEQ ID NO: 137820 - DNA, 30 bp, Artificial Sequence
  Synthetic oligonucleotide
cttgacaggttaaataactgcaggggttga

SEQ ID NO: 137821 - DNA, 30 bp, Artificial Sequence
  Synthetic oligonucleotide
ctagggtggaaccggggttaggatggttga

SEQ ID NO: 137822 - DNA, 30 bp, Artificial Sequence
  Synthetic oligonucleotide
gtcgcagacggccaattgcatggtggttga

SEQ ID NO: 137823 - DNA, 30 bp, Artificial Sequence
  Synthetic oligonucleotide
aaccgtggaccgagaggaggccttggttga

SEQ ID NO: 137824 - DNA, 30 bp, Artificial Sequence
  Synthetic oligonucleotide
cgcctggaatttaacgtttcatggtgttga

SEQ ID NO: 137825 - DNA, 30 bp, Artificial Sequence
  Synthetic oligonucleotide
acgctgtaggtgggtctacgacattgttga

SEQ ID NO: 137826 - DNA, 30 bp, Artificial Sequence
  Synthetic oligonucleotide
tggtatgcggaacacatcacttaaatttga

SEQ ID NO: 137827 - DNA, 30 bp, Artificial Sequence
  Synthetic oligonucleotide
gatgtagccacctcatagtagagcatttga

SEQ ID NO: 137828 - DNA, 30 bp, Artificial Sequence
  Synthetic oligonucleotide
aagaacacgaagattgacgccacgatttga

SEQ ID NO: 137829 - DNA, 30 bp, Artificial Sequence
  Synthetic oligonucleotide
taaccccaaacacatgcttgtgatatttga

SEQ ID NO: 137830 - DNA, 30 bp, Artificial Sequence
  Synthetic oligonucleotide
agccgtgggcaaagctagaatatcctttga

SEQ ID NO: 137831 - DNA, 30 bp, Artificial Sequence
  Synthetic oligonucleotide
ggacttagtagccaggaagcatcgctttga

SEQ ID NO: 137832 - DNA, 30 bp, Artificial Sequence
  Synthetic oligonucleotide
ggttcgggaaagacttgacaaatgctttga

SEQ ID NO: 137833 - DNA, 30 bp, Artificial Sequence
  Synthetic oligonucleotide
gctacacgtaatgcaaaagggtaattttga

SEQ ID NO: 137834 - DNA, 30 bp, Artificial Sequence
  Synthetic oligonucleotide
ggctgaccaggaataccttcgtcgttttga

SEQ ID NO: 137835 - DNA, 30 bp, Artificial Sequence
  Synthetic oligonucleotide
aaacggctggagtaactttgtaggttttga

SEQ ID NO: 137836 - DNA, 30 bp, Artificial Sequence
  Synthetic oligonucleotide
cctcgatggtggtatacaaagcgaaaaata

SEQ ID NO: 137837 - DNA, 30 bp, Artificial Sequence
  Synthetic oligonucleotide
gatgcttagaggtgaacatcaaacaaaata

SEQ ID NO: 137838 - DNA, 30 bp, Artificial Sequence
  Synthetic oligonucleotide
cttagtcgggaacatagtgacaacaaaata

SEQ ID NO: 137839 - DNA, 31 bp, Artificial Sequence
  Synthetic oligonucleotide
tgctgctgcaggctaaaatacccttaaaata

SEQ ID NO: 137840 - DNA, 30 bp, Artificial Sequence
  Synthetic oligonucleotide
gtcaggtttcagggctcgatgtcacaaata

SEQ ID NO: 137841 - DNA, 30 bp, Artificial Sequence
  Synthetic oligonucleotide
agactgcctttcggtggtataggacaaata

SEQ ID NO: 137842 - DNA, 30 bp, Artificial Sequence
  Synthetic oligonucleotide
gatacgagtaatttcgaaagtggccaaata

SEQ ID NO: 137843 - DNA, 30 bp, Artificial Sequence
  Synthetic oligonucleotide
aggctacatgggagtggcatgtagcaaata

SEQ ID NO: 137844 - DNA, 30 bp, Artificial Sequence
  Synthetic oligonucleotide
cgaaccacgatacgtgatagccgtcaaata

SEQ ID NO: 137845 - DNA, 30 bp, Artificial Sequence
  Synthetic oligonucleotide
aaaacggtttaaatactcagagaggaaata

SEQ ID NO: 137846 - DNA, 30 bp, Artificial Sequence
  Synthetic oligonucleotide
ccattgtaagtagatagtgagttataaata

SEQ ID NO: 137847 - DNA, 30 bp, Artificial Sequence
  Synthetic oligonucleotide
aaagacgcacctggtaggctccactaaata

SEQ ID NO: 137848 - DNA, 30 bp, Artificial Sequence
  Synthetic oligonucleotide
ttagcagtcacgttccaggcgggctaaata

SEQ ID NO: 137849 - DNA, 30 bp, Artificial Sequence
  Synthetic oligonucleotide
ggatctcaagtcatcacctcgagttaaata

SEQ ID NO: 137850 - DNA, 30 bp, Artificial Sequence
  Synthetic oligonucleotide
cggtgcgtccatcactctccgtacacaata

SEQ ID NO: 137851 - DNA, 30 bp, Artificial Sequence
  Synthetic oligonucleotide
actcactcgatcttccatccggccacaata

SEQ ID NO: 137852 - DNA, 30 bp, Artificial Sequence
  Synthetic oligonucleotide
ccataaacatcaataatgtagcagacaata

SEQ ID NO: 137853 - DNA, 30 bp, Artificial Sequence
  Synthetic oligonucleotide
caacaaatttagacagggagaggtacaata

SEQ ID NO: 137854 - DNA, 30 bp, Artificial Sequence
  Synthetic oligonucleotide
cggggaaaggggtcatttgtatttccaata

SEQ ID NO: 137855 - DNA, 30 bp, Artificial Sequence
  Synthetic oligonucleotide
agcgtattgcatcagaatcgactagcaata

SEQ ID NO: 137856 - DNA, 30 bp, Artificial Sequence
  Synthetic oligonucleotide
ccgtcagtgccccgagtgtcggccgcaata

SEQ ID NO: 137857 - DNA, 30 bp, Artificial Sequence
  Synthetic oligonucleotide
ttgaaaaggctcacgccttacatcgcaata

SEQ ID NO: 137858 - DNA, 30 bp, Artificial Sequence
  Synthetic oligonucleotide
tgaatactataaacaccgactatcgcaata

SEQ ID NO: 137859 - DNA, 30 bp, Artificial Sequence
  Synthetic oligonucleotide
atagttgcttggaaagggcagtatgcaata

SEQ ID NO: 137860 - DNA, 30 bp, Artificial Sequence
  Synthetic oligonucleotide
ggtgagttaatcatgaggttcacatcaata

SEQ ID NO: 137861 - DNA, 30 bp, Artificial Sequence
  Synthetic oligonucleotide
gcgaggaccattccagaatgtgcatcaata

SEQ ID NO: 137862 - DNA, 30 bp, Artificial Sequence
  Synthetic oligonucleotide
tccgtacgcggtccccaggcattatcaata

SEQ ID NO: 137863 - DNA, 30 bp, Artificial Sequence
  Synthetic oligonucleotide
cataactgcgtgctataaacgcgctcaata

SEQ ID NO: 137864 - DNA, 30 bp, Artificial Sequence
  Synthetic oligonucleotide
ttcacgacgtcggatgcgctctagtcaata

SEQ ID NO: 137865 - DNA, 30 bp, Artificial Sequence
  Synthetic oligonucleotide
gatgacatgcgcggtggatccaggtcaata

SEQ ID NO: 137866 - DNA, 30 bp, Artificial Sequence
  Synthetic oligonucleotide
aggctgagatacgattgtgctgattcaata

SEQ ID NO: 137867 - DNA, 30 bp, Artificial Sequence
  Synthetic oligonucleotide
gggtaagcgaattttttttaccacagaata

SEQ ID NO: 137868 - DNA, 30 bp, Artificial Sequence
  Synthetic oligonucleotide
ctaggattaggaagatcggaaaccagaata

SEQ ID NO: 137869 - DNA, 30 bp, Artificial Sequence
  Synthetic oligonucleotide
tgaaaaacaacacgttttgatgcgagaata

SEQ ID NO: 137870 - DNA, 30 bp, Artificial Sequence
  Synthetic oligonucleotide
tcgtacagtatcttggaccagtcgagaata

SEQ ID NO: 137871 - DNA, 30 bp, Artificial Sequence
  Synthetic oligonucleotide
agccgtcatcagggtgatccggggagaata

SEQ ID NO: 137872 - DNA, 30 bp, Artificial Sequence
  Synthetic oligonucleotide
gcgggcgggctatgattaatgctgagaata

SEQ ID NO: 137873 - DNA, 30 bp, Artificial Sequence
  Synthetic oligonucleotide
gggccgtgggcgattcaaccagtgagaata

SEQ ID NO: 137874 - DNA, 30 bp, Artificial Sequence
  Synthetic oligonucleotide
aagcctggccacccatcttaacatagaata

SEQ ID NO: 137875 - DNA, 30 bp, Artificial Sequence
  Synthetic oligonucleotide
ccgtaggaatgttaaattgaagttagaata

SEQ ID NO: 137876 - DNA, 30 bp, Artificial Sequence
  Synthetic oligonucleotide
gctcatctgagcaagcaaaccgttagaata

SEQ ID NO: 137877 - DNA, 30 bp, Artificial Sequence
  Synthetic oligonucleotide
gtgtgatgtctctactgtgtctcacgaata

SEQ ID NO: 137878 - DNA, 30 bp, Artificial Sequence
  Synthetic oligonucleotide
gcgcatgctgcaatctcatccttacgaata

SEQ ID NO: 137879 - DNA, 30 bp, Artificial Sequence
  Synthetic oligonucleotide
caccagtgtggggagaatagctcccgaata

SEQ ID NO: 137880 - DNA, 30 bp, Artificial Sequence
  Synthetic oligonucleotide
tgggcctaccatatagcgcgactccgaata

SEQ ID NO: 137881 - DNA, 30 bp, Artificial Sequence
  Synthetic oligonucleotide
agcagtaagaactatggtgacgtccgaata

SEQ ID NO: 137882 - DNA, 30 bp, Artificial Sequence
  Synthetic oligonucleotide
ccataaagtgtaatttgtatcgctcgaata

SEQ ID NO: 137883 - DNA, 30 bp, Artificial Sequence
  Synthetic oligonucleotide
gtggtgagcgccaggaagcggaccggaata

SEQ ID NO: 137884 - DNA, 30 bp, Artificial Sequence
  Synthetic oligonucleotide
gtattatatagtcaatataaaactggaata

SEQ ID NO: 137885 - DNA, 30 bp, Artificial Sequence
  Synthetic oligonucleotide
ttaaaaggtcgtgtggtcatcgttggaata

SEQ ID NO: 137886 - DNA, 30 bp, Artificial Sequence
  Synthetic oligonucleotide
gcgaggacaactgtgtaccgagcatgaata

SEQ ID NO: 137887 - DNA, 30 bp, Artificial Sequence
  Synthetic oligonucleotide
cattcaatcattatacaacgtaactgaata

SEQ ID NO: 137888 - DNA, 30 bp, Artificial Sequence
  Synthetic oligonucleotide
ggtcctccctagcccgtgactagctgaata

SEQ ID NO: 137889 - DNA, 30 bp, Artificial Sequence
  Synthetic oligonucleotide
ctcacatagcgaaatatacaatagtgaata

SEQ ID NO: 137890 - DNA, 30 bp, Artificial Sequence
  Synthetic oligonucleotide
acataggcgaagatgtgtgcagcactaata

SEQ ID NO: 137891 - DNA, 30 bp, Artificial Sequence
  Synthetic oligonucleotide
gggtggcactttcaccatttggatctaata

SEQ ID NO: 137892 - DNA, 30 bp, Artificial Sequence
  Synthetic oligonucleotide
acgaaaggagggcaagactccggggtaata

SEQ ID NO: 137893 - DNA, 30 bp, Artificial Sequence
  Synthetic oligonucleotide
gcatgtaagcctggggaaaaataattaata

SEQ ID NO: 137894 - DNA, 30 bp, Artificial Sequence
  Synthetic oligonucleotide
cagttagaactacactaccgattattaata

SEQ ID NO: 137895 - DNA, 30 bp, Artificial Sequence
  Synthetic oligonucleotide
aggaacgatcccatgcacaacaccttaata

SEQ ID NO: 137896 - DNA, 30 bp, Artificial Sequence
  Synthetic oligonucleotide
gttagaatgaaatagccgtgtaagttaata

SEQ ID NO: 137897 - DNA, 30 bp, Artificial Sequence
  Synthetic oligonucleotide
gtcgagacgttggatgtcccgctaaacata

SEQ ID NO: 137898 - DNA, 30 bp, Artificial Sequence
  Synthetic oligonucleotide
gcagctccaagtcaccaggtgtccaacata

SEQ ID NO: 137899 - DNA, 30 bp, Artificial Sequence
  Synthetic oligonucleotide
atgtgaccgtacgaattggacatgaacata

SEQ ID NO: 137900 - DNA, 30 bp, Artificial Sequence
  Synthetic oligonucleotide
ccagtccaaacatcccgagcgatccacata

SEQ ID NO: 137901 - DNA, 30 bp, Artificial Sequence
  Synthetic oligonucleotide
cttcggcagaggtgatgattgagagacata

SEQ ID NO: 137902 - DNA, 30 bp, Artificial Sequence
  Synthetic oligonucleotide
ccaccagctgccggctcgaaaaacgacata

SEQ ID NO: 137903 - DNA, 30 bp, Artificial Sequence
  Synthetic oligonucleotide
caccaccctcgatgatcggactaggacata

SEQ ID NO: 137904 - DNA, 30 bp, Artificial Sequence
  Synthetic oligonucleotide
ggttacagtttggacagggggttggacata

SEQ ID NO: 137905 - DNA, 30 bp, Artificial Sequence
  Synthetic oligonucleotide
cgagtcacaattctgtcaggcaaatacata

SEQ ID NO: 137906 - DNA, 30 bp, Artificial Sequence
  Synthetic oligonucleotide
aaccgagtgtccgattattggttctacata

SEQ ID NO: 137907 - DNA, 30 bp, Artificial Sequence
  Synthetic oligonucleotide
ggatatagggtgaccataggaacgaccata

SEQ ID NO: 137908 - DNA, 30 bp, Artificial Sequence
  Synthetic oligonucleotide
atcttatactgtgcgactccgccgaccata

SEQ ID NO: 137909 - DNA, 30 bp, Artificial Sequence
  Synthetic oligonucleotide
ggctagggtaaatactggttaattaccata

SEQ ID NO: 137910 - DNA, 30 bp, Artificial Sequence
  Synthetic oligonucleotide
gcataatagtcattccggaaacgacccata

SEQ ID NO: 137911 - DNA, 30 bp, Artificial Sequence
  Synthetic oligonucleotide
ccctaggagtccctgagcatagtgcccata

SEQ ID NO: 137912 - DNA, 30 bp, Artificial Sequence
  Synthetic oligonucleotide
acttaatggtaaagactaggctctgccata

SEQ ID NO: 137913 - DNA, 30 bp, Artificial Sequence
  Synthetic oligonucleotide
gtggccggtgaagacaaaacctttgccata

SEQ ID NO: 137914 - DNA, 30 bp, Artificial Sequence
  Synthetic oligonucleotide
cagattggtaaggggtaggcacgatccata

SEQ ID NO: 137915 - DNA, 30 bp, Artificial Sequence
  Synthetic oligonucleotide
ccggggaatatatagtagaatcgctccata

SEQ ID NO: 137916 - DNA, 30 bp, Artificial Sequence
  Synthetic oligonucleotide
ggacctgaggtccgccgagagtgttccata

SEQ ID NO: 137917 - DNA, 30 bp, Artificial Sequence
  Synthetic oligonucleotide
atacagaacctatgtaagtgatgaagcata

SEQ ID NO: 137918 - DNA, 30 bp, Artificial Sequence
  Synthetic oligonucleotide
cagaccgaccggaattatggggccagcata

SEQ ID NO: 137919 - DNA, 30 bp, Artificial Sequence
  Synthetic oligonucleotide
acccggaagctatcaagtggggccagcata

SEQ ID NO: 137920 - DNA, 30 bp, Artificial Sequence
  Synthetic oligonucleotide
ccgtagcgaatcttgctcggtagcagcata

SEQ ID NO: 137921 - DNA, 30 bp, Artificial Sequence
  Synthetic oligonucleotide
gacctggctaggcaaagcttcttcagcata

SEQ ID NO: 137922 - DNA, 30 bp, Artificial Sequence
  Synthetic oligonucleotide
cacagtcgcatgaagctgggtgggagcata

SEQ ID NO: 137923 - DNA, 30 bp, Artificial Sequence
  Synthetic oligonucleotide
cgcgtgcgggcttcgtaaaaacctagcata

SEQ ID NO: 137924 - DNA, 30 bp, Artificial Sequence
  Synthetic oligonucleotide
aaagattgcataagacagatacgtagcata

SEQ ID NO: 137925 - DNA, 30 bp, Artificial Sequence
  Synthetic oligonucleotide
ggccataacgacgcgtgggcgtgtagcata

SEQ ID NO: 137926 - DNA, 30 bp, Artificial Sequence
  Synthetic oligonucleotide
cacgcgccaccggtatcgatcgttagcata

SEQ ID NO: 137927 - DNA, 30 bp, Artificial Sequence
  Synthetic oligonucleotide
cacgcaagggggaaatatcggatacgcata

SEQ ID NO: 137928 - DNA, 30 bp, Artificial Sequence
  Synthetic oligonucleotide
tagtggcaggctttgttttgcgctcgcata

SEQ ID NO: 137929 - DNA, 30 bp, Artificial Sequence
  Synthetic oligonucleotide
gcaatttgacacgtgtaagggaacggcata

SEQ ID NO: 137930 - DNA, 30 bp, Artificial Sequence
  Synthetic oligonucleotide
acgggactcagcggttcaccgacgggcata

SEQ ID NO: 137931 - DNA, 30 bp, Artificial Sequence
  Synthetic oligonucleotide
cccaccgtctgcacggaaaacctgggcata

SEQ ID NO: 137932 - DNA, 30 bp, Artificial Sequence
  Synthetic oligonucleotide
aaagcatagctcactgcacaggctggcata

SEQ ID NO: 137933 - DNA, 30 bp, Artificial Sequence
  Synthetic oligonucleotide
agctaatcgctgaccggacctgtatgcata

SEQ ID NO: 137934 - DNA, 30 bp, Artificial Sequence
  Synthetic oligonucleotide
acttagattatggacgcgccacgctgcata

SEQ ID NO: 137935 - DNA, 30 bp, Artificial Sequence
  Synthetic oligonucleotide
cacttgaatagactggataaccgctgcata

SEQ ID NO: 137936 - DNA, 30 bp, Artificial Sequence
  Synthetic oligonucleotide
acgcaagacattaaaattacaaaactcata

SEQ ID NO: 137937 - DNA, 30 bp, Artificial Sequence
  Synthetic oligonucleotide
ctaacgactcaatataagacaggactcata

SEQ ID NO: 137938 - DNA, 30 bp, Artificial Sequence
  Synthetic oligonucleotide
ccgatagacttatctgaagggaacctcata

SEQ ID NO: 137939 - DNA, 30 bp, Artificial Sequence
  Synthetic oligonucleotide
atgcggaggcctggggaagcaggcgtcata

SEQ ID NO: 137940 - DNA, 30 bp, Artificial Sequence
  Synthetic oligonucleotide
acggcggcctagagtggatacttggtcata

SEQ ID NO: 137941 - DNA, 30 bp, Artificial Sequence
  Synthetic oligonucleotide
caaggcgccgggaagggtgttcctgtcata

SEQ ID NO: 137942 - DNA, 30 bp, Artificial Sequence
  Synthetic oligonucleotide
tcacagagggatccagcacgaatcttcata

SEQ ID NO: 137943 - DNA, 30 bp, Artificial Sequence
  Synthetic oligonucleotide
acgggtaatcccattactaaactcttcata

SEQ ID NO: 137944 - DNA, 30 bp, Artificial Sequence
  Synthetic oligonucleotide
cgggatcgcactcgcaacttccgtttcata

SEQ ID NO: 137945 - DNA, 30 bp, Artificial Sequence
  Synthetic oligonucleotide
taacacaagaagccctacccatttttcata

SEQ ID NO: 137946 - DNA, 30 bp, Artificial Sequence
  Synthetic oligonucleotide
ccgtaccttgtgatacgtgggtcaaagata

SEQ ID NO: 137947 - DNA, 30 bp, Artificial Sequence
  Synthetic oligonucleotide
gcgtatagaaggtttaagatgtacaagata

SEQ ID NO: 137948 - DNA, 30 bp, Artificial Sequence
  Synthetic oligonucleotide
gagtcaatgaggtcagccgtgttgaagata

SEQ ID NO: 137949 - DNA, 30 bp, Artificial Sequence
  Synthetic oligonucleotide
aaccggagactttggaactacggtaagata

SEQ ID NO: 137950 - DNA, 30 bp, Artificial Sequence
  Synthetic oligonucleotide
gcttaatggtgagcgacaaagattaagata

SEQ ID NO: 137951 - DNA, 30 bp, Artificial Sequence
  Synthetic oligonucleotide
atacgcaaagcgagcacgttggaagagata

SEQ ID NO: 137952 - DNA, 30 bp, Artificial Sequence
  Synthetic oligonucleotide
accagtgtacaaatggtgtattaggagata

SEQ ID NO: 137953 - DNA, 30 bp, Artificial Sequence
  Synthetic oligonucleotide
gtggtagcttcattcattcgacttgagata

SEQ ID NO: 137954 - DNA, 30 bp, Artificial Sequence
  Synthetic oligonucleotide
taagactcagtataggagaatcgcacgata

SEQ ID NO: 137955 - DNA, 30 bp, Artificial Sequence
  Synthetic oligonucleotide
ttcttgcgcgccccgggcgtaacgacgata

SEQ ID NO: 137956 - DNA, 30 bp, Artificial Sequence
  Synthetic oligonucleotide
gactgagagcggtcaatgggaaggacgata

SEQ ID NO: 137957 - DNA, 30 bp, Artificial Sequence
  Synthetic oligonucleotide
atccagagtagttcaaaatagcctacgata

SEQ ID NO: 137958 - DNA, 30 bp, Artificial Sequence
  Synthetic oligonucleotide
cggtaggttatgctcggaccgtttacgata

SEQ ID NO: 137959 - DNA, 30 bp, Artificial Sequence
  Synthetic oligonucleotide
caaggagggatacgcccgtgaaggccgata

SEQ ID NO: 137960 - DNA, 30 bp, Artificial Sequence
  Synthetic oligonucleotide
cattacctcgtctgtaggaccaggccgata

SEQ ID NO: 137961 - DNA, 30 bp, Artificial Sequence
  Synthetic oligonucleotide
gatggggccgcacaggtgcctaggccgata

SEQ ID NO: 137962 - DNA, 30 bp, Artificial Sequence
  Synthetic oligonucleotide
cctcagtaacacgagaatgaggtgccgata

SEQ ID NO: 137963 - DNA, 30 bp, Artificial Sequence
  Synthetic oligonucleotide
aaatggccaataaggtacgatgctccgata

SEQ ID NO: 137964 - DNA, 30 bp, Artificial Sequence
  Synthetic oligonucleotide
tacttggcagtgctagaattccgagcgata

SEQ ID NO: 137965 - DNA, 30 bp, Artificial Sequence
  Synthetic oligonucleotide
ggaaacctctggccgatgtatttagcgata

SEQ ID NO: 137966 - DNA, 30 bp, Artificial Sequence
  Synthetic oligonucleotide
ggaccattttccacattgtgataggcgata

SEQ ID NO: 137967 - DNA, 30 bp, Artificial Sequence
  Synthetic oligonucleotide
gacctgttagcacgcattgaagtggcgata

SEQ ID NO: 137968 - DNA, 30 bp, Artificial Sequence
  Synthetic oligonucleotide
atgcccggatgacaagagcaggatgcgata

SEQ ID NO: 137969 - DNA, 30 bp, Artificial Sequence
  Synthetic oligonucleotide
cagtcaggtatcttgtatagacaatcgata

SEQ ID NO: 137970 - DNA, 30 bp, Artificial Sequence
  Synthetic oligonucleotide
tatctataatggtacggcgagggatcgata

SEQ ID NO: 137971 - DNA, 30 bp, Artificial Sequence
  Synthetic oligonucleotide
gtaagactgtcaaattaagaaacctcgata

SEQ ID NO: 137972 - DNA, 30 bp, Artificial Sequence
  Synthetic oligonucleotide
tcaagcacttattagtctaagagctcgata

SEQ ID NO: 137973 - DNA, 30 bp, Artificial Sequence
  Synthetic oligonucleotide
tccgaactatatcggtaaaaagcttcgata

SEQ ID NO: 137974 - DNA, 30 bp, Artificial Sequence
  Synthetic oligonucleotide
tggttcaggatgcctcttcggaaaaggata

SEQ ID NO: 137975 - DNA, 30 bp, Artificial Sequence
  Synthetic oligonucleotide
gagagagggttgatggaaattcttaggata

SEQ ID NO: 137976 - DNA, 30 bp, Artificial Sequence
  Synthetic oligonucleotide
ttgttgggcataaccactctgtcgcggata

SEQ ID NO: 137977 - DNA, 30 bp, Artificial Sequence
  Synthetic oligonucleotide
cttaaagaaataatggtagcagtgcggata

SEQ ID NO: 137978 - DNA, 30 bp, Artificial Sequence
  Synthetic oligonucleotide
gcgggggattcgagtgatacccatcggata

SEQ ID NO: 137979 - DNA, 30 bp, Artificial Sequence
  Synthetic oligonucleotide
ataagctcatcacatcataccgaggggata

SEQ ID NO: 137980 - DNA, 30 bp, Artificial Sequence
  Synthetic oligonucleotide
agacgttcggttgaatagacaacggggata

SEQ ID NO: 137981 - DNA, 30 bp, Artificial Sequence
  Synthetic oligonucleotide
ttggcacctaccaagtacagattggggata

SEQ ID NO: 137982 - DNA, 30 bp, Artificial Sequence
  Synthetic oligonucleotide
aggagcatcgcaaaagtatcaaatgggata

SEQ ID NO: 137983 - DNA, 30 bp, Artificial Sequence
  Synthetic oligonucleotide
taactgcctaacccgttgcaccaatggata

SEQ ID NO: 137984 - DNA, 30 bp, Artificial Sequence
  Synthetic oligonucleotide
aggtgggacggcattagtaattgatggata

SEQ ID NO: 137985 - DNA, 30 bp, Artificial Sequence
  Synthetic oligonucleotide
cacacccacatcctgcatggtaactggata

SEQ ID NO: 137986 - DNA, 30 bp, Artificial Sequence
  Synthetic oligonucleotide
acgaacagaatacccctcaagaggtggata

SEQ ID NO: 137987 - DNA, 30 bp, Artificial Sequence
  Synthetic oligonucleotide
catctcgtagagcctatatactaaatgata

SEQ ID NO: 137988 - DNA, 30 bp, Artificial Sequence
  Synthetic oligonucleotide
ccatcgcggtgaatagatagccgcatgata

SEQ ID NO: 137989 - DNA, 30 bp, Artificial Sequence
  Synthetic oligonucleotide
acacatttgcgatagccacaactgatgata

SEQ ID NO: 137990 - DNA, 30 bp, Artificial Sequence
  Synthetic oligonucleotide
ggtgaatagtccgtgtaacgcctgatgata

SEQ ID NO: 137991 - DNA, 30 bp, Artificial Sequence
  Synthetic oligonucleotide
aaactgcaggtgacgtcgtatgctctgata

SEQ ID NO: 137992 - DNA, 30 bp, Artificial Sequence
  Synthetic oligonucleotide
gtaaaatgcatggagagactgcttgtgata

SEQ ID NO: 137993 - DNA, 30 bp, Artificial Sequence
  Synthetic oligonucleotide
ggatcagaacggccgtacgacggattgata

SEQ ID NO: 137994 - DNA, 30 bp, Artificial Sequence
  Synthetic oligonucleotide
agactggaactgatatcgtggaacttgata

SEQ ID NO: 137995 - DNA, 30 bp, Artificial Sequence
  Synthetic oligonucleotide
gccatggcgagttcagtgcaaagaaatata

SEQ ID NO: 137996 - DNA, 30 bp, Artificial Sequence
  Synthetic oligonucleotide
gtataggatcgatatctcagccgaaatata

SEQ ID NO: 137997 - DNA, 30 bp, Artificial Sequence
  Synthetic oligonucleotide
gcttcataatccacatagagaccacatata

SEQ ID NO: 137998 - DNA, 30 bp, Artificial Sequence
  Synthetic oligonucleotide
agtaagcccgccctagattttaccgatata

SEQ ID NO: 137999 - DNA, 30 bp, Artificial Sequence
  Synthetic oligonucleotide
cggcatttagttacagtcgagcgcgatata

SEQ ID NO: 138000 - DNA, 30 bp, Artificial Sequence
  Synthetic oligonucleotide
gagcgagcatagggtagttttaatgatata

SEQ ID NO: 138001 - DNA, 30 bp, Artificial Sequence
  Synthetic oligonucleotide
gtcgactagagggatagcctacctgatata

SEQ ID NO: 138002 - DNA, 30 bp, Artificial Sequence
  Synthetic oligonucleotide
acataagaaaaccgcagtgaccgtgatata

SEQ ID NO: 138003 - DNA, 30 bp, Artificial Sequence
  Synthetic oligonucleotide
atcgtatcgaggaatgtttctaaaactata

SEQ ID NO: 138004 - DNA, 30 bp, Artificial Sequence
  Synthetic oligonucleotide
tcagatgcgggctgtaccgtggtaactata

SEQ ID NO: 138005 - DNA, 30 bp, Artificial Sequence
  Synthetic oligonucleotide
gagttaaagccttgaaaatgcctcactata

SEQ ID NO: 138006 - DNA, 30 bp, Artificial Sequence
  Synthetic oligonucleotide
tggtggtcaaaaataaactttaagcctata

SEQ ID NO: 138007 - DNA, 30 bp, Artificial Sequence
  Synthetic oligonucleotide
ccaacgaaaataccgcgaacaatagctata

SEQ ID NO: 138008 - DNA, 30 bp, Artificial Sequence
  Synthetic oligonucleotide
gcacgggatcatccaggttctccggctata

SEQ ID NO: 138009 - DNA, 30 bp, Artificial Sequence
  Synthetic oligonucleotide
aggagcgtcgtataaatagatactgctata

SEQ ID NO: 138010 - DNA, 30 bp, Artificial Sequence
  Synthetic oligonucleotide
gttaagggtatgggtactgagtgatctata

SEQ ID NO: 138011 - DNA, 30 bp, Artificial Sequence
  Synthetic oligonucleotide
gaagggccgaactcaacgtcactaagtata

SEQ ID NO: 138012 - DNA, 29 bp, Artificial Sequence
  Synthetic oligonucleotide
ctcgatcccaaaaggtggggcccagtata

SEQ ID NO: 138013 - DNA, 30 bp, Artificial Sequence
  Synthetic oligonucleotide
ttcaccggtcttagcgcatggcggagtata

SEQ ID NO: 138014 - DNA, 30 bp, Artificial Sequence
  Synthetic oligonucleotide
ggagacaaaagcctcactaacccacgtata

SEQ ID NO: 138015 - DNA, 30 bp, Artificial Sequence
  Synthetic oligonucleotide
cattcaaggcaggaacatacaatacgtata

SEQ ID NO: 138016 - DNA, 30 bp, Artificial Sequence
  Synthetic oligonucleotide
cggtatcaaaacattctatacatatgtata

SEQ ID NO: 138017 - DNA, 30 bp, Artificial Sequence
  Synthetic oligonucleotide
atggcactaggtaactgtggtaactgtata

SEQ ID NO: 138018 - DNA, 30 bp, Artificial Sequence
  Synthetic oligonucleotide
tgaatgtacccgcgaatccaagggtgtata

SEQ ID NO: 138019 - DNA, 30 bp, Artificial Sequence
  Synthetic oligonucleotide
gacctaaaaaagcgaagaccccattgtata

SEQ ID NO: 138020 - DNA, 30 bp, Artificial Sequence
  Synthetic oligonucleotide
aatgaaggactcaaaaagaacccaattata

SEQ ID NO: 138021 - DNA, 30 bp, Artificial Sequence
  Synthetic oligonucleotide
tgggaccagcagtgcgcaatgcagattata

SEQ ID NO: 138022 - DNA, 30 bp, Artificial Sequence
  Synthetic oligonucleotide
tcaatgcaaccgcatccgtttagtattata

SEQ ID NO: 138023 - DNA, 30 bp, Artificial Sequence
  Synthetic oligonucleotide
tgtggaggatagggaaaaacattacttata

SEQ ID NO: 138024 - DNA, 30 bp, Artificial Sequence
  Synthetic oligonucleotide
acaggcgtaatcgtctttcaccagcttata

SEQ ID NO: 138025 - DNA, 30 bp, Artificial Sequence
  Synthetic oligonucleotide
gcgactacgccaactccaggacgggttata

SEQ ID NO: 138026 - DNA, 30 bp, Artificial Sequence
  Synthetic oligonucleotide
gcacgatcatcggcaaaatgcaggtttata

SEQ ID NO: 138027 - DNA, 30 bp, Artificial Sequence
  Synthetic oligonucleotide
ggagctatattccctctgttgacaaaacta

SEQ ID NO: 138028 - DNA, 30 bp, Artificial Sequence
  Synthetic oligonucleotide
acatcagatggtcaggtccaatcaaaacta

SEQ ID NO: 138029 - DNA, 30 bp, Artificial Sequence
  Synthetic oligonucleotide
catttaccggaaagatagcatatccaacta

SEQ ID NO: 138030 - DNA, 30 bp, Artificial Sequence
  Synthetic oligonucleotide
gcctatgtgggcgtgagggccttgcaacta

SEQ ID NO: 138031 - DNA, 30 bp, Artificial Sequence
  Synthetic oligonucleotide
ccatagggggaacgtgaacatagagaacta

SEQ ID NO: 138032 - DNA, 30 bp, Artificial Sequence
  Synthetic oligonucleotide
gtgatactgcgatatctaaggtgagaacta

SEQ ID NO: 138033 - DNA, 30 bp, Artificial Sequence
  Synthetic oligonucleotide
ggaccagcaccagcacccgaaaaggaacta

SEQ ID NO: 138034 - DNA, 30 bp, Artificial Sequence
  Synthetic oligonucleotide
tctaggaaggaaagagacgtgtggtaacta

SEQ ID NO: 138035 - DNA, 30 bp, Artificial Sequence
  Synthetic oligonucleotide
ggccagaaaagtgaatccgggccttaacta

SEQ ID NO: 138036 - DNA, 30 bp, Artificial Sequence
  Synthetic oligonucleotide
tttcactaattcgacaacctgtgcacacta

SEQ ID NO: 138037 - DNA, 30 bp, Artificial Sequence
  Synthetic oligonucleotide
acggtgggagagagacccgcaatgacacta

SEQ ID NO: 138038 - DNA, 30 bp, Artificial Sequence
  Synthetic oligonucleotide
gcataagacgttgaaacttacatgacacta

SEQ ID NO: 138039 - DNA, 30 bp, Artificial Sequence
  Synthetic oligonucleotide
tcggaaaaagggactcgtgcctaaccacta

SEQ ID NO: 138040 - DNA, 30 bp, Artificial Sequence
  Synthetic oligonucleotide
acggaaggcaggcacgagggaggggcacta

SEQ ID NO: 138041 - DNA, 30 bp, Artificial Sequence
  Synthetic oligonucleotide
actgaaaactcagaacgaccgggcagacta

SEQ ID NO: 138042 - DNA, 30 bp, Artificial Sequence
  Synthetic oligonucleotide
ggcattaacttacaagagtactctagacta

SEQ ID NO: 138043 - DNA, 30 bp, Artificial Sequence
  Synthetic oligonucleotide
gtacagcggtcgaacgttttcggaggacta

SEQ ID NO: 138044 - DNA, 30 bp, Artificial Sequence
  Synthetic oligonucleotide
caccgcgcccacagttcaataaacggacta

SEQ ID NO: 138045 - DNA, 30 bp, Artificial Sequence
  Synthetic oligonucleotide
cagaatacggtacgagtttatggcggacta

SEQ ID NO: 138046 - DNA, 30 bp, Artificial Sequence
  Synthetic oligonucleotide
ggaattcattcgcacgccgaccggggacta

SEQ ID NO: 138047 - DNA, 30 bp, Artificial Sequence
  Synthetic oligonucleotide
acgcgcactcttatttttcgccctggacta

SEQ ID NO: 138048 - DNA, 30 bp, Artificial Sequence
  Synthetic oligonucleotide
ttagacgattacgtaaggacgccctgacta

SEQ ID NO: 138049 - DNA, 30 bp, Artificial Sequence
  Synthetic oligonucleotide
aaatcctacataaggttagaaatctgacta

SEQ ID NO: 138050 - DNA, 30 bp, Artificial Sequence
  Synthetic oligonucleotide
aggacacggacttcctgaagtaggatacta

SEQ ID NO: 138051 - DNA, 30 bp, Artificial Sequence
  Synthetic oligonucleotide
aagtctacgtattggatagagatgatacta

SEQ ID NO: 138052 - DNA, 30 bp, Artificial Sequence
  Synthetic oligonucleotide
cctaattagagaaactttagctaagtacta

SEQ ID NO: 138053 - DNA, 30 bp, Artificial Sequence
  Synthetic oligonucleotide
actagagtaccgagacatgccaaggtacta

SEQ ID NO: 138054 - DNA, 30 bp, Artificial Sequence
  Synthetic oligonucleotide
cgtgtgttctgcgccaagcaataggtacta

SEQ ID NO: 138055 - DNA, 31 bp, Artificial Sequence
  Synthetic oligonucleotide
gcgcggcacggatcgttggtttcctgtacta

SEQ ID NO: 138056 - DNA, 30 bp, Artificial Sequence
  Synthetic oligonucleotide
atagccagggatgtggaacgaaggttacta

SEQ ID NO: 138057 - DNA, 30 bp, Artificial Sequence
  Synthetic oligonucleotide
ccctactcatcgcccctaatatggttacta

SEQ ID NO: 138058 - DNA, 30 bp, Artificial Sequence
  Synthetic oligonucleotide
acggcagtaaagtccttagtgaatttacta

SEQ ID NO: 138059 - DNA, 30 bp, Artificial Sequence
  Synthetic oligonucleotide
cgatgacaagaggaattaaggattttacta

SEQ ID NO: 138060 - DNA, 30 bp, Artificial Sequence
  Synthetic oligonucleotide
cgcttctgacgtgaccgaaccctgaaccta

SEQ ID NO: 138061 - DNA, 30 bp, Artificial Sequence
  Synthetic oligonucleotide
tctgacaattagtacggacgacttaaccta

SEQ ID NO: 138062 - DNA, 30 bp, Artificial Sequence
  Synthetic oligonucleotide
cacgatcgttacgttgacctctgccaccta

SEQ ID NO: 138063 - DNA, 30 bp, Artificial Sequence
  Synthetic oligonucleotide
ggcgggaagcgtcagtgcaggcagcaccta

SEQ ID NO: 138064 - DNA, 30 bp, Artificial Sequence
  Synthetic oligonucleotide
gaagtcggaaggcaagatcattggcaccta

SEQ ID NO: 138065 - DNA, 30 bp, Artificial Sequence
  Synthetic oligonucleotide
cgtacggcggacgttaaagtgctgcaccta

SEQ ID NO: 138066 - DNA, 30 bp, Artificial Sequence
  Synthetic oligonucleotide
gaacgctagatgcgggggttgctgcaccta

SEQ ID NO: 138067 - DNA, 30 bp, Artificial Sequence
  Synthetic oligonucleotide
taaccgggaagatagtaattcgtgcaccta

SEQ ID NO: 138068 - DNA, 30 bp, Artificial Sequence
  Synthetic oligonucleotide
cgacgtacaagctcagggacgtgagaccta

SEQ ID NO: 138069 - DNA, 30 bp, Artificial Sequence
  Synthetic oligonucleotide
tcgacttccacttaagatttgtacgaccta

SEQ ID NO: 138070 - DNA, 30 bp, Artificial Sequence
  Synthetic oligonucleotide
gaccaaattcatgccagaatgtccgaccta

SEQ ID NO: 138071 - DNA, 30 bp, Artificial Sequence
  Synthetic oligonucleotide
aaacacacacaatgattttgcaaggaccta

SEQ ID NO: 138072 - DNA, 30 bp, Artificial Sequence
  Synthetic oligonucleotide
ataccaggagtggattggcagactgaccta

SEQ ID NO: 138073 - DNA, 30 bp, Artificial Sequence
  Synthetic oligonucleotide
aaaaagcatctcgaataaaacagtgaccta

SEQ ID NO: 138074 - DNA, 30 bp, Artificial Sequence
  Synthetic oligonucleotide
gtcttacggattcagatagaaagataccta

SEQ ID NO: 138075 - DNA, 30 bp, Artificial Sequence
  Synthetic oligonucleotide
cctcgaacacagtgtcgctcggtataccta

SEQ ID NO: 138076 - DNA, 30 bp, Artificial Sequence
  Synthetic oligonucleotide
aggaaaaaagcggtgcgcactttgtaccta

SEQ ID NO: 138077 - DNA, 30 bp, Artificial Sequence
  Synthetic oligonucleotide
gcatcgctacagattcggtggacaacccta

SEQ ID NO: 138078 - DNA, 30 bp, Artificial Sequence
  Synthetic oligonucleotide
gaggagggttggtatggggggcgaacccta

SEQ ID NO: 138079 - DNA, 30 bp, Artificial Sequence
  Synthetic oligonucleotide
caaacccacctcccatttgataacacccta

SEQ ID NO: 138080 - DNA, 30 bp, Artificial Sequence
  Synthetic oligonucleotide
taagtgcacacgtacaggggtcgcacccta

SEQ ID NO: 138081 - DNA, 30 bp, Artificial Sequence
  Synthetic oligonucleotide
gcgctgctcattcgcggactcttgacccta

SEQ ID NO: 138082 - DNA, 30 bp, Artificial Sequence
  Synthetic oligonucleotide
gggctacgcagtagaaccatcaatacccta

SEQ ID NO: 138083 - DNA, 30 bp, Artificial Sequence
  Synthetic oligonucleotide
caatagcgtggccctatatgacttacccta

SEQ ID NO: 138084 - DNA, 30 bp, Artificial Sequence
  Synthetic oligonucleotide
caatgcggcctggatcgcgatgtaccccta

SEQ ID NO: 138085 - DNA, 30 bp, Artificial Sequence
  Synthetic oligonucleotide
tgacgggttcgaattgtataatgcccccta

SEQ ID NO: 138086 - DNA, 30 bp, Artificial Sequence
  Synthetic oligonucleotide
ggagaaaataatgtgtgtagtttagcccta

SEQ ID NO: 138087 - DNA, 30 bp, Artificial Sequence
  Synthetic oligonucleotide
gccataaagcaacattctcctcgctcccta

SEQ ID NO: 138088 - DNA, 30 bp, Artificial Sequence
  Synthetic oligonucleotide
ttacacgtcggggagatttcgctttcccta

SEQ ID NO: 138089 - DNA, 30 bp, Artificial Sequence
  Synthetic oligonucleotide
ttctacctattagcaccgccgataagccta

SEQ ID NO: 138090 - DNA, 30 bp, Artificial Sequence
  Synthetic oligonucleotide
agataggcgccaaccggcctcacccgccta

SEQ ID NO: 138091 - DNA, 30 bp, Artificial Sequence
  Synthetic oligonucleotide
cgcgaacggtcgacctacgggtggggccta

SEQ ID NO: 138092 - DNA, 30 bp, Artificial Sequence
  Synthetic oligonucleotide
ctggagctaagtcaagccacactgggccta

SEQ ID NO: 138093 - DNA, 30 bp, Artificial Sequence
  Synthetic oligonucleotide
aagttgcgagtacgggaagcagtgggccta

SEQ ID NO: 138094 - DNA, 30 bp, Artificial Sequence
  Synthetic oligonucleotide
caatttacgtacacggggcacattggccta

SEQ ID NO: 138095 - DNA, 30 bp, Artificial Sequence
  Synthetic oligonucleotide
caactggccgatgggaccctcgcatgccta

SEQ ID NO: 138096 - DNA, 30 bp, Artificial Sequence
  Synthetic oligonucleotide
taatgaaagggcacccatgtgttatgccta

SEQ ID NO: 138097 - DNA, 30 bp, Artificial Sequence
  Synthetic oligonucleotide
cagaaagctcattgacctggtttttgccta

SEQ ID NO: 138098 - DNA, 30 bp, Artificial Sequence
  Synthetic oligonucleotide
cacaaatttcaacgattagcagggctccta

SEQ ID NO: 138099 - DNA, 30 bp, Artificial Sequence
  Synthetic oligonucleotide
cgctgtttagtgtaagtgaccggcgtccta

SEQ ID NO: 138100 - DNA, 30 bp, Artificial Sequence
  Synthetic oligonucleotide
acaggcactggtaaagggttggcggtccta

SEQ ID NO: 138101 - DNA, 30 bp, Artificial Sequence
  Synthetic oligonucleotide
agaaaaaaccggaaagagtgctcggtccta

SEQ ID NO: 138102 - DNA, 30 bp, Artificial Sequence
  Synthetic oligonucleotide
gtcttgtgtggcaggctgtccgtggtccta

SEQ ID NO: 138103 - DNA, 30 bp, Artificial Sequence
  Synthetic oligonucleotide
gtccttcgtaacacgcaaaaggtcaagcta

SEQ ID NO: 138104 - DNA, 30 bp, Artificial Sequence
  Synthetic oligonucleotide
taaaggcttataaacacgggagctaagcta

SEQ ID NO: 138105 - DNA, 30 bp, Artificial Sequence
  Synthetic oligonucleotide
acacaaccactggtactgtagtttaagcta

SEQ ID NO: 138106 - DNA, 30 bp, Artificial Sequence
  Synthetic oligonucleotide
tttaagggtaatgcccaggtgtcccagcta

SEQ ID NO: 138107 - DNA, 30 bp, Artificial Sequence
  Synthetic oligonucleotide
gacgccttaacggttcggctccaagagcta

SEQ ID NO: 138108 - DNA, 30 bp, Artificial Sequence
  Synthetic oligonucleotide
acacgtctactgattatatgtgatgagcta

SEQ ID NO: 138109 - DNA, 30 bp, Artificial Sequence
  Synthetic oligonucleotide
acccgctgctggataaaggaagtatagcta

SEQ ID NO: 138110 - DNA, 30 bp, Artificial Sequence
  Synthetic oligonucleotide
gacggaatcagaccagatatctgaacgcta

SEQ ID NO: 138111 - DNA, 30 bp, Artificial Sequence
  Synthetic oligonucleotide
acggctgaacattgggaaactcgcacgcta

SEQ ID NO: 138112 - DNA, 30 bp, Artificial Sequence
  Synthetic oligonucleotide
gaacaccctgctcaaggactcatcacgcta

SEQ ID NO: 138113 - DNA, 30 bp, Artificial Sequence
  Synthetic oligonucleotide
acggggggaattcatgtgacccggacgcta

SEQ ID NO: 138114 - DNA, 30 bp, Artificial Sequence
  Synthetic oligonucleotide
aagtgagcgtaaaggtatactgcaccgcta

SEQ ID NO: 138115 - DNA, 31 bp, Artificial Sequence
  Synthetic oligonucleotide
cgatacggacgcaaaaatatggaagccgcta

SEQ ID NO: 138116 - DNA, 30 bp, Artificial Sequence
  Synthetic oligonucleotide
aagagatggcttggagagcataagccgcta

SEQ ID NO: 138117 - DNA, 30 bp, Artificial Sequence
  Synthetic oligonucleotide
gatcagtcctgcacaagaaacggtccgcta

SEQ ID NO: 138118 - DNA, 30 bp, Artificial Sequence
  Synthetic oligonucleotide
ctgaaaaccttgattagtggaagcgcgcta

SEQ ID NO: 138119 - DNA, 30 bp, Artificial Sequence
  Synthetic oligonucleotide
accctcgtaatggcgggggtgtgatcgcta

SEQ ID NO: 138120 - DNA, 30 bp, Artificial Sequence
  Synthetic oligonucleotide
gacaggttaccgggctactgtaaaaggcta

SEQ ID NO: 138121 - DNA, 30 bp, Artificial Sequence
  Synthetic oligonucleotide
aaaataactcacccgaagagggacaggcta

SEQ ID NO: 138122 - DNA, 30 bp, Artificial Sequence
  Synthetic oligonucleotide
cacctgagctacgtgaccagacctaggcta

SEQ ID NO: 138123 - DNA, 30 bp, Artificial Sequence
  Synthetic oligonucleotide
tctaagatatgccatacgttctgtaggcta

SEQ ID NO: 138124 - DNA, 30 bp, Artificial Sequence
  Synthetic oligonucleotide
gccaaaaaggcaatcgtacaatttaggcta

SEQ ID NO: 138125 - DNA, 30 bp, Artificial Sequence
  Synthetic oligonucleotide
tttaggagacggcgtagccacaagcggcta

SEQ ID NO: 138126 - DNA, 30 bp, Artificial Sequence
  Synthetic oligonucleotide
tggtgggcgtcgatgacgtcgcacgggcta

SEQ ID NO: 138127 - DNA, 30 bp, Artificial Sequence
  Synthetic oligonucleotide
gacgactggcgctcacttgcgttttggcta

SEQ ID NO: 138128 - DNA, 30 bp, Artificial Sequence
  Synthetic oligonucleotide
aggaatatgccagtcatcctaaacatgcta

SEQ ID NO: 138129 - DNA, 30 bp, Artificial Sequence
  Synthetic oligonucleotide
acactggagtaagttctctcttgcatgcta

SEQ ID NO: 138130 - DNA, 30 bp, Artificial Sequence
  Synthetic oligonucleotide
gaagactacaaccaaagcatcatgatgcta

SEQ ID NO: 138131 - DNA, 30 bp, Artificial Sequence
  Synthetic oligonucleotide
aatgtggacagggatattgttgtcctgcta

SEQ ID NO: 138132 - DNA, 30 bp, Artificial Sequence
  Synthetic oligonucleotide
gcaataacgcgtatgtaggtaaagctgcta

SEQ ID NO: 138133 - DNA, 30 bp, Artificial Sequence
  Synthetic oligonucleotide
caactaaagttcgagggaaccttgctgcta

SEQ ID NO: 138134 - DNA, 30 bp, Artificial Sequence
  Synthetic oligonucleotide
cgtgtcggtagtggccggactcgggtgcta

SEQ ID NO: 138135 - DNA, 30 bp, Artificial Sequence
  Synthetic oligonucleotide
gtcgataccgcatacaacgggttggtgcta

SEQ ID NO: 138136 - DNA, 30 bp, Artificial Sequence
  Synthetic oligonucleotide
actaacttccaatgtccattatgtgtgcta

SEQ ID NO: 138137 - DNA, 30 bp, Artificial Sequence
  Synthetic oligonucleotide
tggtagagttaaaccaaggacaggttgcta

SEQ ID NO: 138138 - DNA, 30 bp, Artificial Sequence
  Synthetic oligonucleotide
acaaggttttgtgtggatgttcaaaatcta

SEQ ID NO: 138139 - DNA, 30 bp, Artificial Sequence
  Synthetic oligonucleotide
taatgagcgagtgtctcacggctaaatcta

SEQ ID NO: 138140 - DNA, 31 bp, Artificial Sequence
  Synthetic oligonucleotide
aggcatgacacctgccggaacatgtaatcta

SEQ ID NO: 138141 - DNA, 30 bp, Artificial Sequence
  Synthetic oligonucleotide
aaccagaaacatcacagagacacacatcta

SEQ ID NO: 138142 - DNA, 30 bp, Artificial Sequence
  Synthetic oligonucleotide
gtgggctttgcgcttattactgagcatcta

SEQ ID NO: 138143 - DNA, 30 bp, Artificial Sequence
  Synthetic oligonucleotide
cgggaccagactgattaggatgatgatcta

SEQ ID NO: 138144 - DNA, 30 bp, Artificial Sequence
  Synthetic oligonucleotide
cacgggacatgttccccgtcggctgatcta

SEQ ID NO: 138145 - DNA, 30 bp, Artificial Sequence
  Synthetic oligonucleotide
tcgtcgagaaggctggttaatgtaactcta

SEQ ID NO: 138146 - DNA, 30 bp, Artificial Sequence
  Synthetic oligonucleotide
agaaacttagtggcgagacttggcactcta

SEQ ID NO: 138147 - DNA, 30 bp, Artificial Sequence
  Synthetic oligonucleotide
gagcggtcctcagcgattgtggtgactcta

SEQ ID NO: 138148 - DNA, 30 bp, Artificial Sequence
  Synthetic oligonucleotide
gcctagacacgtgctaaatagagtactcta

SEQ ID NO: 138149 - DNA, 30 bp, Artificial Sequence
  Synthetic oligonucleotide
ttaggctgaggcctctcgtacattactcta

SEQ ID NO: 138150 - DNA, 30 bp, Artificial Sequence
  Synthetic oligonucleotide
cggatctatgtttccaataaacgagctcta

SEQ ID NO: 138151 - DNA, 30 bp, Artificial Sequence
  Synthetic oligonucleotide
cgtcaatcttgttgcacggattacgctcta

SEQ ID NO: 138152 - DNA, 30 bp, Artificial Sequence
  Synthetic oligonucleotide
cgcctcccattgagtgctcatccggctcta

SEQ ID NO: 138153 - DNA, 30 bp, Artificial Sequence
  Synthetic oligonucleotide
aagttactcacggctcgtaatggatctcta

SEQ ID NO: 138154 - DNA, 30 bp, Artificial Sequence
  Synthetic oligonucleotide
ggtgctcaatagtcataagcacaaagtcta

SEQ ID NO: 138155 - DNA, 30 bp, Artificial Sequence
  Synthetic oligonucleotide
cggacgcgaattctgtctaggcgaagtcta

SEQ ID NO: 138156 - DNA, 30 bp, Artificial Sequence
  Synthetic oligonucleotide
cacgaatgagctatcgcagacaccagtcta

SEQ ID NO: 138157 - DNA, 30 bp, Artificial Sequence
  Synthetic oligonucleotide
ggctagagcagccaatctgttggtagtcta

SEQ ID NO: 138158 - DNA, 30 bp, Artificial Sequence
  Synthetic oligonucleotide
caggagaatattcccggaagtccccgtcta

SEQ ID NO: 138159 - DNA, 30 bp, Artificial Sequence
  Synthetic oligonucleotide
gctggcgcccaacacacctatcggcgtcta

SEQ ID NO: 138160 - DNA, 30 bp, Artificial Sequence
  Synthetic oligonucleotide
ggcaggcgtgctcgtgccaataacggtcta

SEQ ID NO: 138161 - DNA, 30 bp, Artificial Sequence
  Synthetic oligonucleotide
tgggttaagtagattctaattcgtggtcta

SEQ ID NO: 138162 - DNA, 30 bp, Artificial Sequence
  Synthetic oligonucleotide
acggttcaactcatcaatcgtggtggtcta

SEQ ID NO: 138163 - DNA, 30 bp, Artificial Sequence
  Synthetic oligonucleotide
ctagaaaataaagggaacatgatttgtcta

SEQ ID NO: 138164 - DNA, 30 bp, Artificial Sequence
  Synthetic oligonucleotide
ataaaagcatgaggtgggtgtgctcttcta

SEQ ID NO: 138165 - DNA, 30 bp, Artificial Sequence
  Synthetic oligonucleotide
caactgtaaatgatctagcgattagttcta

SEQ ID NO: 138166 - DNA, 30 bp, Artificial Sequence
  Synthetic oligonucleotide
acatgtaaaaccgcgtctataacggttcta

SEQ ID NO: 138167 - DNA, 30 bp, Artificial Sequence
  Synthetic oligonucleotide
caatcgtcatccttaaaagtaaactttcta

SEQ ID NO: 138168 - DNA, 30 bp, Artificial Sequence
  Synthetic oligonucleotide
ggcgaatgcctccttattgaatagtttcta

SEQ ID NO: 138169 - DNA, 30 bp, Artificial Sequence
  Synthetic oligonucleotide
accggcgatatgccgcttggagacaaagta

SEQ ID NO: 138170 - DNA, 30 bp, Artificial Sequence
  Synthetic oligonucleotide
tgaattatatggccagggcgggggaaagta

SEQ ID NO: 138171 - DNA, 30 bp, Artificial Sequence
  Synthetic oligonucleotide
ctcatctccctcaaaagggcgaaacaagta

SEQ ID NO: 138172 - DNA, 30 bp, Artificial Sequence
  Synthetic oligonucleotide
agcaaatatgaacattacttaccacaagta

SEQ ID NO: 138173 - DNA, 30 bp, Artificial Sequence
  Synthetic oligonucleotide
ccagtgttgacgatttagtatgagcaagta

SEQ ID NO: 138174 - DNA, 30 bp, Artificial Sequence
  Synthetic oligonucleotide
ctcacgcctcaccagtggcttgatcaagta

SEQ ID NO: 138175 - DNA, 30 bp, Artificial Sequence
  Synthetic oligonucleotide
ttgggaccaccggttacttcggctcaagta

SEQ ID NO: 138176 - DNA, 30 bp, Artificial Sequence
  Synthetic oligonucleotide
acaagtagggtcgggccctaaagtcaagta

SEQ ID NO: 138177 - DNA, 30 bp, Artificial Sequence
  Synthetic oligonucleotide
cattggagcatccgaggcaagggagaagta

SEQ ID NO: 138178 - DNA, 30 bp, Artificial Sequence
  Synthetic oligonucleotide
gcagggaaatcaacattattgggagaagta

SEQ ID NO: 138179 - DNA, 30 bp, Artificial Sequence
  Synthetic oligonucleotide
ttagataatcccggaccatgctgcgaagta

SEQ ID NO: 138180 - DNA, 30 bp, Artificial Sequence
  Synthetic oligonucleotide
tagctcgtagaccgtgaccacgcataagta

SEQ ID NO: 138181 - DNA, 30 bp, Artificial Sequence
  Synthetic oligonucleotide
gtaacttgggggataggaaatgtataagta

SEQ ID NO: 138182 - DNA, 30 bp, Artificial Sequence
  Synthetic oligonucleotide
ccttaggaccaattacctaatcactaagta

SEQ ID NO: 138183 - DNA, 30 bp, Artificial Sequence
  Synthetic oligonucleotide
agccagttcaacttgagtcatcactaagta

SEQ ID NO: 138184 - DNA, 30 bp, Artificial Sequence
  Synthetic oligonucleotide
cgtgtgctttagaaaacactaacgtaagta

SEQ ID NO: 138185 - DNA, 30 bp, Artificial Sequence
  Synthetic oligonucleotide
gggcctacttctattatgaagtgaacagta

SEQ ID NO: 138186 - DNA, 30 bp, Artificial Sequence
  Synthetic oligonucleotide
gctcagaaaaatccggcccagtcgacagta

SEQ ID NO: 138187 - DNA, 30 bp, Artificial Sequence
  Synthetic oligonucleotide
gagtacgagagggagcgttcctatacagta

SEQ ID NO: 138188 - DNA, 30 bp, Artificial Sequence
  Synthetic oligonucleotide
gagagcatgtcagtgggtctaataccagta

SEQ ID NO: 138189 - DNA, 30 bp, Artificial Sequence
  Synthetic oligonucleotide
cgcgactgtgggcgcgtaggccctccagta

SEQ ID NO: 138190 - DNA, 30 bp, Artificial Sequence
  Synthetic oligonucleotide
tggctgctctggtgagatatttgagcagta

SEQ ID NO: 138191 - DNA, 30 bp, Artificial Sequence
  Synthetic oligonucleotide
cgagctgtaatatggaatgagtacgcagta

SEQ ID NO: 138192 - DNA, 30 bp, Artificial Sequence
  Synthetic oligonucleotide
atgacgtcctttagttgaaaatgtgcagta

SEQ ID NO: 138193 - DNA, 30 bp, Artificial Sequence
  Synthetic oligonucleotide
ctatgacaggcacaacttaatcactcagta

SEQ ID NO: 138194 - DNA, 30 bp, Artificial Sequence
  Synthetic oligonucleotide
cctataaaagcgctccgaaaggtgtcagta

SEQ ID NO: 138195 - DNA, 30 bp, Artificial Sequence
  Synthetic oligonucleotide
agtatcaaagagggtaagccggattcagta

SEQ ID NO: 138196 - DNA, 30 bp, Artificial Sequence
  Synthetic oligonucleotide
caaaacggcagggcgaaaacttgttcagta

SEQ ID NO: 138197 - DNA, 30 bp, Artificial Sequence
  Synthetic oligonucleotide
ctcatgaatattcgcgccacaaaaagagta

SEQ ID NO: 138198 - DNA, 30 bp, Artificial Sequence
  Synthetic oligonucleotide
actatcggtttacatctgacacacagagta

SEQ ID NO: 138199 - DNA, 30 bp, Artificial Sequence
  Synthetic oligonucleotide
gaggcccacaatctcctttgttccagagta

SEQ ID NO: 138200 - DNA, 30 bp, Artificial Sequence
  Synthetic oligonucleotide
attgggttcacgacaggcatgagtcgagta

SEQ ID NO: 138201 - DNA, 30 bp, Artificial Sequence
  Synthetic oligonucleotide
cagtactaccagatcatgtatacaggagta

SEQ ID NO: 138202 - DNA, 30 bp, Artificial Sequence
  Synthetic oligonucleotide
atgtatagagtgcaactatgcaacggagta

SEQ ID NO: 138203 - DNA, 30 bp, Artificial Sequence
  Synthetic oligonucleotide
cagtgaggatagctgctccagaacggagta

SEQ ID NO: 138204 - DNA, 30 bp, Artificial Sequence
  Synthetic oligonucleotide
cggatgaggtaatatctaaccgagggagta

SEQ ID NO: 138205 - DNA, 30 bp, Artificial Sequence
  Synthetic oligonucleotide
gagaattaaaactccacttaggcgggagta

SEQ ID NO: 138206 - DNA, 30 bp, Artificial Sequence
  Synthetic oligonucleotide
agtgagggagactagatgtacgttggagta

SEQ ID NO: 138207 - DNA, 30 bp, Artificial Sequence
  Synthetic oligonucleotide
acttgttcgattacgtctatcacatgagta

SEQ ID NO: 138208 - DNA, 30 bp, Artificial Sequence
  Synthetic oligonucleotide
cattaccaggtaacgcatctgcgatgagta

SEQ ID NO: 138209 - DNA, 30 bp, Artificial Sequence
  Synthetic oligonucleotide
atgagacgtgaagactaaggtaattgagta

SEQ ID NO: 138210 - DNA, 30 bp, Artificial Sequence
  Synthetic oligonucleotide
ctaagtgctagcgaacgggatcattgagta

SEQ ID NO: 138211 - DNA, 30 bp, Artificial Sequence
  Synthetic oligonucleotide
gtctagctggatcaaatttagcgaatagta

SEQ ID NO: 138212 - DNA, 30 bp, Artificial Sequence
  Synthetic oligonucleotide
tttgcggcgcttaagaaatagaacatagta

SEQ ID NO: 138213 - DNA, 30 bp, Artificial Sequence
  Synthetic oligonucleotide
acatgggaaagcaaggccttatccatagta

SEQ ID NO: 138214 - DNA, 30 bp, Artificial Sequence
  Synthetic oligonucleotide
gcgtcgcggggtaataaacccaggatagta

SEQ ID NO: 138215 - DNA, 30 bp, Artificial Sequence
  Synthetic oligonucleotide
tcgtatggtgaagagacaagactactagta

SEQ ID NO: 138216 - DNA, 30 bp, Artificial Sequence
  Synthetic oligonucleotide
gcgagattcagtgaatcgcataacctagta

SEQ ID NO: 138217 - DNA, 30 bp, Artificial Sequence
  Synthetic oligonucleotide
caagccgcccccgcaggtattcctctagta

SEQ ID NO: 138218 - DNA, 30 bp, Artificial Sequence
  Synthetic oligonucleotide
catcgggcacatcacatctgtccagtagta

SEQ ID NO: 138219 - DNA, 30 bp, Artificial Sequence
  Synthetic oligonucleotide
gccgccgtctataacatgacagcattagta

SEQ ID NO: 138220 - DNA, 30 bp, Artificial Sequence
  Synthetic oligonucleotide
cacacagctaatgaaattttgatgttagta

SEQ ID NO: 138221 - DNA, 30 bp, Artificial Sequence
  Synthetic oligonucleotide
ctggacagaatagcaagcacacatttagta

SEQ ID NO: 138222 - DNA, 30 bp, Artificial Sequence
  Synthetic oligonucleotide
ccacttaaaatactgaattcgggcaacgta

SEQ ID NO: 138223 - DNA, 30 bp, Artificial Sequence
  Synthetic oligonucleotide
tggagcgaattacgcctgtctatcaacgta

SEQ ID NO: 138224 - DNA, 30 bp, Artificial Sequence
  Synthetic oligonucleotide
actaataatatatgggtccaagggaacgta

SEQ ID NO: 138225 - DNA, 30 bp, Artificial Sequence
  Synthetic oligonucleotide
ggcgatcccgctgcataggacgtgaacgta

SEQ ID NO: 138226 - DNA, 30 bp, Artificial Sequence
  Synthetic oligonucleotide
agcatagacgagggataagtgagacacgta

SEQ ID NO: 138227 - DNA, 30 bp, Artificial Sequence
  Synthetic oligonucleotide
atacagaaagtgccaatagcagcgcacgta

SEQ ID NO: 138228 - DNA, 30 bp, Artificial Sequence
  Synthetic oligonucleotide
ggggcagagcatcaaccagtaacagacgta

SEQ ID NO: 138229 - DNA, 30 bp, Artificial Sequence
  Synthetic oligonucleotide
gaaaagatggattggcgggagtgagacgta

SEQ ID NO: 138230 - DNA, 30 bp, Artificial Sequence
  Synthetic oligonucleotide
ggggggttagatatgtgattaaaatacgta

SEQ ID NO: 138231 - DNA, 30 bp, Artificial Sequence
  Synthetic oligonucleotide
caggtactgacttatgacatttgatacgta

SEQ ID NO: 138232 - DNA, 30 bp, Artificial Sequence
  Synthetic oligonucleotide
aaggtactgcagggacgcggtttatacgta

SEQ ID NO: 138233 - DNA, 30 bp, Artificial Sequence
  Synthetic oligonucleotide
accccatgtatcagatgtccagggtacgta

SEQ ID NO: 138234 - DNA, 30 bp, Artificial Sequence
  Synthetic oligonucleotide
aatgggcaacactcgacgccattaaccgta

SEQ ID NO: 138235 - DNA, 30 bp, Artificial Sequence
  Synthetic oligonucleotide
ggcgcacaaacatatggccgaaggaccgta

SEQ ID NO: 138236 - DNA, 30 bp, Artificial Sequence
  Synthetic oligonucleotide
aaatgccgacctgaaaaaaaaaaacccgta

SEQ ID NO: 138237 - DNA, 30 bp, Artificial Sequence
  Synthetic oligonucleotide
taggatctttaggacaatcccacacccgta

SEQ ID NO: 138238 - DNA, 30 bp, Artificial Sequence
  Synthetic oligonucleotide
ttatactgagcggtagatgggtcccccgta

SEQ ID NO: 138239 - DNA, 30 bp, Artificial Sequence
  Synthetic oligonucleotide
tggaacggtgtcggctacagggtgcccgta

SEQ ID NO: 138240 - DNA, 30 bp, Artificial Sequence
  Synthetic oligonucleotide
cgttaatttagtccccacatctgggccgta

SEQ ID NO: 138241 - DNA, 30 bp, Artificial Sequence
  Synthetic oligonucleotide
gggactgccgattatctataaaaatccgta

SEQ ID NO: 138242 - DNA, 30 bp, Artificial Sequence
  Synthetic oligonucleotide
gtggagaatgtaaatacgacgatatccgta

SEQ ID NO: 138243 - DNA, 30 bp, Artificial Sequence
  Synthetic oligonucleotide
gagctagagggtatgtttgcgtaaagcgta

SEQ ID NO: 138244 - DNA, 30 bp, Artificial Sequence
  Synthetic oligonucleotide
tgagtggatttcggcaggtaggtaagcgta

SEQ ID NO: 138245 - DNA, 30 bp, Artificial Sequence
  Synthetic oligonucleotide
tagtgttgcgccaatgcgtccttaagcgta

SEQ ID NO: 138246 - DNA, 30 bp, Artificial Sequence
  Synthetic oligonucleotide
cctgcaactgaccttgagtatgacagcgta

SEQ ID NO: 138247 - DNA, 30 bp, Artificial Sequence
  Synthetic oligonucleotide
ggtggtcagtagtgttgcaaaacacgcgta

SEQ ID NO: 138248 - DNA, 30 bp, Artificial Sequence
  Synthetic oligonucleotide
agaggggtcttaacctggtttggacgcgta

SEQ ID NO: 138249 - DNA, 30 bp, Artificial Sequence
  Synthetic oligonucleotide
gctacgggaaaagatcattagatacgcgta

SEQ ID NO: 138250 - DNA, 30 bp, Artificial Sequence
  Synthetic oligonucleotide
cgtttatgatacgggatgcgtatacgcgta

SEQ ID NO: 138251 - DNA, 30 bp, Artificial Sequence
  Synthetic oligonucleotide
taaagttgaatcaaacttccattgcgcgta

SEQ ID NO: 138252 - DNA, 30 bp, Artificial Sequence
  Synthetic oligonucleotide
tagccatgttcgatgtggtcaccaggcgta

SEQ ID NO: 138253 - DNA, 30 bp, Artificial Sequence
  Synthetic oligonucleotide
ctacgaagtaaaaactactatccatgcgta

SEQ ID NO: 138254 - DNA, 30 bp, Artificial Sequence
  Synthetic oligonucleotide
tccttataagtaccccccgagcgttgcgta

SEQ ID NO: 138255 - DNA, 30 bp, Artificial Sequence
  Synthetic oligonucleotide
catcagttgcccgggcctggaataatcgta

SEQ ID NO: 138256 - DNA, 30 bp, Artificial Sequence
  Synthetic oligonucleotide
attggcaagggttcccgatggttactcgta

SEQ ID NO: 138257 - DNA, 30 bp, Artificial Sequence
  Synthetic oligonucleotide
cgacatccggcggaagacgcgaccctcgta

SEQ ID NO: 138258 - DNA, 30 bp, Artificial Sequence
  Synthetic oligonucleotide
atccagtacccaagtaggatcgacgtcgta

SEQ ID NO: 138259 - DNA, 30 bp, Artificial Sequence
  Synthetic oligonucleotide
acattagtcatccactcacaacgcgtcgta

SEQ ID NO: 138260 - DNA, 30 bp, Artificial Sequence
  Synthetic oligonucleotide
attctaacctattaccttagttcggtcgta

SEQ ID NO: 138261 - DNA, 30 bp, Artificial Sequence
  Synthetic oligonucleotide
gctggattacaaaacacgccctacttcgta

SEQ ID NO: 138262 - DNA, 30 bp, Artificial Sequence
  Synthetic oligonucleotide
agctgccatggtgcgaactcgtacttcgta

SEQ ID NO: 138263 - DNA, 30 bp, Artificial Sequence
  Synthetic oligonucleotide
atgcaaacgcctatctgaggctaaaaggta

SEQ ID NO: 138264 - DNA, 30 bp, Artificial Sequence
  Synthetic oligonucleotide
agcgctcaattgttgcaccgtagaaaggta

SEQ ID NO: 138265 - DNA, 30 bp, Artificial Sequence
  Synthetic oligonucleotide
ttcaagacatctaacatcctaggaaaggta

SEQ ID NO: 138266 - DNA, 30 bp, Artificial Sequence
  Synthetic oligonucleotide
tttgagaggatgccgataattcaacaggta

SEQ ID NO: 138267 - DNA, 30 bp, Artificial Sequence
  Synthetic oligonucleotide
agactggtactgaagaataaaacacaggta

SEQ ID NO: 138268 - DNA, 30 bp, Artificial Sequence
  Synthetic oligonucleotide
agctttcgggggcagccagtagctcaggta

SEQ ID NO: 138269 - DNA, 30 bp, Artificial Sequence
  Synthetic oligonucleotide
cccgagagcatcttggacaatattcaggta

SEQ ID NO: 138270 - DNA, 30 bp, Artificial Sequence
  Synthetic oligonucleotide
atgtctaaagatgactacatgaatgaggta

SEQ ID NO: 138271 - DNA, 30 bp, Artificial Sequence
  Synthetic oligonucleotide
gttacgagagaagtgactttcgcataggta

SEQ ID NO: 138272 - DNA, 30 bp, Artificial Sequence
  Synthetic oligonucleotide
acattagaagcgacgccacgtttataggta

SEQ ID NO: 138273 - DNA, 30 bp, Artificial Sequence
  Synthetic oligonucleotide
catactagtactagtaagataacgtaggta

SEQ ID NO: 138274 - DNA, 30 bp, Artificial Sequence
  Synthetic oligonucleotide
accgcgactgcgcattgggaaacttaggta

SEQ ID NO: 138275 - DNA, 30 bp, Artificial Sequence
  Synthetic oligonucleotide
cagacaaaattcaagtagagttccacggta

SEQ ID NO: 138276 - DNA, 30 bp, Artificial Sequence
  Synthetic oligonucleotide
ggggcggaaggtccctgatcggtcacggta

SEQ ID NO: 138277 - DNA, 30 bp, Artificial Sequence
  Synthetic oligonucleotide
tagctaaatgcgtgaacgtagagaccggta

SEQ ID NO: 138278 - DNA, 30 bp, Artificial Sequence
  Synthetic oligonucleotide
actaaacccgaattgttctgacgaccggta

SEQ ID NO: 138279 - DNA, 30 bp, Artificial Sequence
  Synthetic oligonucleotide
agacaaactggtcaaacggcgaaagcggta

SEQ ID NO: 138280 - DNA, 30 bp, Artificial Sequence
  Synthetic oligonucleotide
caatcacgggggggttgtaacctagcggta

SEQ ID NO: 138281 - DNA, 30 bp, Artificial Sequence
  Synthetic oligonucleotide
ggttccacaataaagggaactgtagcggta

SEQ ID NO: 138282 - DNA, 30 bp, Artificial Sequence
  Synthetic oligonucleotide
taggatatcgtgagtagttaccaggcggta

SEQ ID NO: 138283 - DNA, 30 bp, Artificial Sequence
  Synthetic oligonucleotide
aacaacatgcttggccagagttgtgcggta

SEQ ID NO: 138284 - DNA, 30 bp, Artificial Sequence
  Synthetic oligonucleotide
attaatagaacgtaccaaaacgttgcggta

SEQ ID NO: 138285 - DNA, 30 bp, Artificial Sequence
  Synthetic oligonucleotide
agcgtcttagtccactacgtctaatcggta

SEQ ID NO: 138286 - DNA, 30 bp, Artificial Sequence
  Synthetic oligonucleotide
gagactgcgaggcacttcaactcatcggta

SEQ ID NO: 138287 - DNA, 30 bp, Artificial Sequence
  Synthetic oligonucleotide
aagtggtaactggagactatgaactcggta

SEQ ID NO: 138288 - DNA, 30 bp, Artificial Sequence
  Synthetic oligonucleotide
gcatgaagctgtacgttggatggctcggta

SEQ ID NO: 138289 - DNA, 30 bp, Artificial Sequence
  Synthetic oligonucleotide
aaacattcagtggatacatgtggctcggta

SEQ ID NO: 138290 - DNA, 30 bp, Artificial Sequence
  Synthetic oligonucleotide
gtaccagagagggatattcgatcgtcggta

SEQ ID NO: 138291 - DNA, 30 bp, Artificial Sequence
  Synthetic oligonucleotide
tctaagccacagggttgtggaaggtcggta

SEQ ID NO: 138292 - DNA, 30 bp, Artificial Sequence
  Synthetic oligonucleotide
aggggcgttgccgagtagaccgtttcggta

SEQ ID NO: 138293 - DNA, 30 bp, Artificial Sequence
  Synthetic oligonucleotide
aggtgaaaaccggtagctcttacaagggta

SEQ ID NO: 138294 - DNA, 30 bp, Artificial Sequence
  Synthetic oligonucleotide
agggtgcatttgtcgagtctagcaagggta

SEQ ID NO: 138295 - DNA, 30 bp, Artificial Sequence
  Synthetic oligonucleotide
gtacggctagcagagaggtctgtaagggta

SEQ ID NO: 138296 - DNA, 30 bp, Artificial Sequence
  Synthetic oligonucleotide
acgcaggcgaaggtgtcatgattgagggta

SEQ ID NO: 138297 - DNA, 30 bp, Artificial Sequence
  Synthetic oligonucleotide
tatgtcatgtagagtcaagtggaacgggta

SEQ ID NO: 138298 - DNA, 30 bp, Artificial Sequence
  Synthetic oligonucleotide
acggcctcgaccaacacgtagatacgggta

SEQ ID NO: 138299 - DNA, 30 bp, Artificial Sequence
  Synthetic oligonucleotide
cgactgcaacagcagttgcgtttacgggta

SEQ ID NO: 138300 - DNA, 30 bp, Artificial Sequence
  Synthetic oligonucleotide
tgcttaaatctgggaagtgtaactcgggta

SEQ ID NO: 138301 - DNA, 30 bp, Artificial Sequence
  Synthetic oligonucleotide
acaggtatgtacacgggaagactaggggta

SEQ ID NO: 138302 - DNA, 30 bp, Artificial Sequence
  Synthetic oligonucleotide
gccggagagaatttaacaattggcggggta

SEQ ID NO: 138303 - DNA, 30 bp, Artificial Sequence
  Synthetic oligonucleotide
cagtctagaagggggtatatctgcggggta

SEQ ID NO: 138304 - DNA, 30 bp, Artificial Sequence
  Synthetic oligonucleotide
gatcagaaagggctgctgggtacgggggta

SEQ ID NO: 138305 - DNA, 30 bp, Artificial Sequence
  Synthetic oligonucleotide
ggtatacagaacgtacttcctgtatgggta

SEQ ID NO: 138306 - DNA, 30 bp, Artificial Sequence
  Synthetic oligonucleotide
agcggtgtcaacacttaattagcgtgggta

SEQ ID NO: 138307 - DNA, 30 bp, Artificial Sequence
  Synthetic oligonucleotide
ggaagaaacaccatctgatgcgattgggta

SEQ ID NO: 138308 - DNA, 30 bp, Artificial Sequence
  Synthetic oligonucleotide
cgaatttacgggtcgtatcagtattgggta

SEQ ID NO: 138309 - DNA, 30 bp, Artificial Sequence
  Synthetic oligonucleotide
ggatgaggattgaggaaatcgatttgggta

SEQ ID NO: 138310 - DNA, 30 bp, Artificial Sequence
  Synthetic oligonucleotide
gtcttaacacgggtacaaatgtgaatggta

SEQ ID NO: 138311 - DNA, 30 bp, Artificial Sequence
  Synthetic oligonucleotide
gtaagggtccggagctgctctaagatggta

SEQ ID NO: 138312 - DNA, 30 bp, Artificial Sequence
  Synthetic oligonucleotide
cgaccaatcaggcacgtaacgccgatggta

SEQ ID NO: 138313 - DNA, 30 bp, Artificial Sequence
  Synthetic oligonucleotide
cgctcggtaggagtaccacagattatggta

SEQ ID NO: 138314 - DNA, 30 bp, Artificial Sequence
  Synthetic oligonucleotide
agcgctagaggatccttggggaaactggta

SEQ ID NO: 138315 - DNA, 30 bp, Artificial Sequence
  Synthetic oligonucleotide
tgcccggaaacgttacatcgacaactggta

SEQ ID NO: 138316 - DNA, 30 bp, Artificial Sequence
  Synthetic oligonucleotide
cgaggctgcactgtccatcatcttgtggta

SEQ ID NO: 138317 - DNA, 30 bp, Artificial Sequence
  Synthetic oligonucleotide
gcggatatgagcctgttgctcgggttggta

SEQ ID NO: 138318 - DNA, 30 bp, Artificial Sequence
  Synthetic oligonucleotide
ctacgtgacacagaatcgctatatttggta

SEQ ID NO: 138319 - DNA, 30 bp, Artificial Sequence
  Synthetic oligonucleotide
tgtgtgtctttgcgagcgaaaataaatgta

SEQ ID NO: 138320 - DNA, 30 bp, Artificial Sequence
  Synthetic oligonucleotide
aggaacagtagtcctgacatggtaaatgta

SEQ ID NO: 138321 - DNA, 30 bp, Artificial Sequence
  Synthetic oligonucleotide
gactcaatggctgagcgatcgatcaatgta

SEQ ID NO: 138322 - DNA, 30 bp, Artificial Sequence
  Synthetic oligonucleotide
gacgtggtttaagtaaagtctggtaatgta

SEQ ID NO: 138323 - DNA, 30 bp, Artificial Sequence
  Synthetic oligonucleotide
atgaaagagggttgggaggcgatccatgta

SEQ ID NO: 138324 - DNA, 30 bp, Artificial Sequence
  Synthetic oligonucleotide
ttagggagagcaccagttcgccttcatgta

SEQ ID NO: 138325 - DNA, 30 bp, Artificial Sequence
  Synthetic oligonucleotide
gtattatttaaatgggcacttaccgatgta

SEQ ID NO: 138326 - DNA, 30 bp, Artificial Sequence
  Synthetic oligonucleotide
gtttggagcgcaatagtggccccggatgta

SEQ ID NO: 138327 - DNA, 30 bp, Artificial Sequence
  Synthetic oligonucleotide
ggtataatgcttaggcagggtatggatgta

SEQ ID NO: 138328 - DNA, 30 bp, Artificial Sequence
  Synthetic oligonucleotide
gcgaatccttattacatgtcctcctatgta

SEQ ID NO: 138329 - DNA, 30 bp, Artificial Sequence
  Synthetic oligonucleotide
gcaggtgtacagagttgaagttcctatgta

SEQ ID NO: 138330 - DNA, 30 bp, Artificial Sequence
  Synthetic oligonucleotide
ataacagacccagacacttacagctatgta

SEQ ID NO: 138331 - DNA, 30 bp, Artificial Sequence
  Synthetic oligonucleotide
ggacaaggggtcctaagtacaccgactgta

SEQ ID NO: 138332 - DNA, 30 bp, Artificial Sequence
  Synthetic oligonucleotide
aggggacacgagcgtgtcaagattactgta

SEQ ID NO: 138333 - DNA, 30 bp, Artificial Sequence
  Synthetic oligonucleotide
cagcctcgtgggacatatgcgaaacctgta

SEQ ID NO: 138334 - DNA, 30 bp, Artificial Sequence
  Synthetic oligonucleotide
ttgaaaccctcgccgtaaccaccgcctgta

SEQ ID NO: 138335 - DNA, 30 bp, Artificial Sequence
  Synthetic oligonucleotide
gctgaagagtcgagaagaggttggcctgta

SEQ ID NO: 138336 - DNA, 30 bp, Artificial Sequence
  Synthetic oligonucleotide
gcgcaacaacatcacggttcaaaggctgta

SEQ ID NO: 138337 - DNA, 30 bp, Artificial Sequence
  Synthetic oligonucleotide
gttttaaaggcagaaagcagaacggctgta

SEQ ID NO: 138338 - DNA, 30 bp, Artificial Sequence
  Synthetic oligonucleotide
gagctgatgatatcagtgcaattggctgta

SEQ ID NO: 138339 - DNA, 30 bp, Artificial Sequence
  Synthetic oligonucleotide
tgcgtgtgacaatatcctagcgatgctgta

SEQ ID NO: 138340 - DNA, 30 bp, Artificial Sequence
  Synthetic oligonucleotide
cacgaaacttttctattagtgttatctgta

SEQ ID NO: 138341 - DNA, 30 bp, Artificial Sequence
  Synthetic oligonucleotide
cgatagggtataacagtgaatttatctgta

SEQ ID NO: 138342 - DNA, 30 bp, Artificial Sequence
  Synthetic oligonucleotide
gtaagctgaccggaagggttcacaagtgta

SEQ ID NO: 138343 - DNA, 30 bp, Artificial Sequence
  Synthetic oligonucleotide
cacaatacacctcacgcaaaccgaagtgta

SEQ ID NO: 138344 - DNA, 30 bp, Artificial Sequence
  Synthetic oligonucleotide
gtaaggaaatggacgtaatacgtcagtgta

SEQ ID NO: 138345 - DNA, 30 bp, Artificial Sequence
  Synthetic oligonucleotide
aagcccgggcagggtcgaaacaaacgtgta

SEQ ID NO: 138346 - DNA, 30 bp, Artificial Sequence
  Synthetic oligonucleotide
gctgcgggccgaatagggagcgaccgtgta

SEQ ID NO: 138347 - DNA, 30 bp, Artificial Sequence
  Synthetic oligonucleotide
caacaggcgttgaatcgaaaatcccgtgta

SEQ ID NO: 138348 - DNA, 30 bp, Artificial Sequence
  Synthetic oligonucleotide
gtggatagaacctggaggacccagcgtgta

SEQ ID NO: 138349 - DNA, 30 bp, Artificial Sequence
  Synthetic oligonucleotide
gacactaacacgagctggcaaagcggtgta

SEQ ID NO: 138350 - DNA, 30 bp, Artificial Sequence
  Synthetic oligonucleotide
aggtaacttgctattggcatgttgggtgta

SEQ ID NO: 138351 - DNA, 30 bp, Artificial Sequence
  Synthetic oligonucleotide
taaggatgagcaatcaactcatatggtgta

SEQ ID NO: 138352 - DNA, 30 bp, Artificial Sequence
  Synthetic oligonucleotide
ctggaggtctgaggtttactatgtggtgta

SEQ ID NO: 138353 - DNA, 30 bp, Artificial Sequence
  Synthetic oligonucleotide
gctaagatagatcgaaagcttacaattgta

SEQ ID NO: 138354 - DNA, 30 bp, Artificial Sequence
  Synthetic oligonucleotide
agctgagtccaaaattcaatgaacattgta

SEQ ID NO: 138355 - DNA, 30 bp, Artificial Sequence
  Synthetic oligonucleotide
ctcagaggggaaagtcctacaaagattgta

SEQ ID NO: 138356 - DNA, 30 bp, Artificial Sequence
  Synthetic oligonucleotide
cgattgacgatctcagtcagaggtattgta

SEQ ID NO: 138357 - DNA, 30 bp, Artificial Sequence
  Synthetic oligonucleotide
cgagaggtaataagtgtctaacgtcttgta

SEQ ID NO: 138358 - DNA, 30 bp, Artificial Sequence
  Synthetic oligonucleotide
acgcctcaatcaatgtgctattaagttgta

SEQ ID NO: 138359 - DNA, 30 bp, Artificial Sequence
  Synthetic oligonucleotide
cggggccagcttagtctgtgtgtagttgta

SEQ ID NO: 138360 - DNA, 30 bp, Artificial Sequence
  Synthetic oligonucleotide
gaggatgaaacggcctttccgcgcgttgta

SEQ ID NO: 138361 - DNA, 30 bp, Artificial Sequence
  Synthetic oligonucleotide
caagtggttcaaccacgcgatattgttgta

SEQ ID NO: 138362 - DNA, 30 bp, Artificial Sequence
  Synthetic oligonucleotide
taaggacacacggcccaattagcgaaatta

SEQ ID NO: 138363 - DNA, 30 bp, Artificial Sequence
  Synthetic oligonucleotide
gaagagtgcaatggttttattaataaatta

SEQ ID NO: 138364 - DNA, 30 bp, Artificial Sequence
  Synthetic oligonucleotide
cgatgagattatgaaatcaccttggaatta

SEQ ID NO: 138365 - DNA, 30 bp, Artificial Sequence
  Synthetic oligonucleotide
gtaaagcgagtataacggcgcgcctaatta

SEQ ID NO: 138366 - DNA, 30 bp, Artificial Sequence
  Synthetic oligonucleotide
tcaccaaagggagacgggcaagagtaatta

SEQ ID NO: 138367 - DNA, 30 bp, Artificial Sequence
  Synthetic oligonucleotide
tcggcattcgtcgtaagcgtgacgtaatta

SEQ ID NO: 138368 - DNA, 30 bp, Artificial Sequence
  Synthetic oligonucleotide
tgggtagggggatgtgcaatgggttaatta

SEQ ID NO: 138369 - DNA, 30 bp, Artificial Sequence
  Synthetic oligonucleotide
aagagaatcccgataggggctcggacatta

SEQ ID NO: 138370 - DNA, 30 bp, Artificial Sequence
  Synthetic oligonucleotide
agtgaaactcggacatccgtaacgccatta

SEQ ID NO: 138371 - DNA, 30 bp, Artificial Sequence
  Synthetic oligonucleotide
cacgaattctcttaaagcatagtcgcatta

SEQ ID NO: 138372 - DNA, 30 bp, Artificial Sequence
  Synthetic oligonucleotide
catctgtaaagtacaattaataaggcatta

SEQ ID NO: 138373 - DNA, 30 bp, Artificial Sequence
  Synthetic oligonucleotide
cgtcgatctccaaaagctgtaaactcatta

SEQ ID NO: 138374 - DNA, 30 bp, Artificial Sequence
  Synthetic oligonucleotide
agagtaactccagtgtgcgaagactcatta

SEQ ID NO: 138375 - DNA, 30 bp, Artificial Sequence
  Synthetic oligonucleotide
tggattaaggtctgtgggggtagctcatta

SEQ ID NO: 138376 - DNA, 30 bp, Artificial Sequence
  Synthetic oligonucleotide
accatgcggtgttggttcgtaaagagatta

SEQ ID NO: 138377 - DNA, 30 bp, Artificial Sequence
  Synthetic oligonucleotide
ccacgtggtgtacaaactgtcgagagatta

SEQ ID NO: 138378 - DNA, 30 bp, Artificial Sequence
  Synthetic oligonucleotide
atatagcgcaaacaaggcggaatgagatta

SEQ ID NO: 138379 - DNA, 30 bp, Artificial Sequence
  Synthetic oligonucleotide
attagtatggcctaagttggaccgcgatta

SEQ ID NO: 138380 - DNA, 30 bp, Artificial Sequence
  Synthetic oligonucleotide
cgcatagactgccctatatcagagggatta

SEQ ID NO: 138381 - DNA, 30 bp, Artificial Sequence
  Synthetic oligonucleotide
acgcttacaagcgagcgtgtggtatgatta

SEQ ID NO: 138382 - DNA, 30 bp, Artificial Sequence
  Synthetic oligonucleotide
gatgtgtttatcccgattcagtcctgatta

SEQ ID NO: 138383 - DNA, 30 bp, Artificial Sequence
  Synthetic oligonucleotide
ctgcagccgggcaggacgtatcagtgatta

SEQ ID NO: 138384 - DNA, 30 bp, Artificial Sequence
  Synthetic oligonucleotide
gctcctgaaaggaacgttggtaagatatta

SEQ ID NO: 138385 - DNA, 30 bp, Artificial Sequence
  Synthetic oligonucleotide
cccttgaaactggtccccagtgtgatatta

SEQ ID NO: 138386 - DNA, 30 bp, Artificial Sequence
  Synthetic oligonucleotide
tctgaaatataaggaaagggaaagctatta

SEQ ID NO: 138387 - DNA, 30 bp, Artificial Sequence
  Synthetic oligonucleotide
tcccttctcccgaactgatgtcgaaactta

SEQ ID NO: 138388 - DNA, 30 bp, Artificial Sequence
  Synthetic oligonucleotide
cgtatatgacagtgcctggaactaaactta

SEQ ID NO: 138389 - DNA, 30 bp, Artificial Sequence
  Synthetic oligonucleotide
gccggacattacctacctagtgccaactta

SEQ ID NO: 138390 - DNA, 30 bp, Artificial Sequence
  Synthetic oligonucleotide
gctagccctgagagagggtcctagaactta

SEQ ID NO: 138391 - DNA, 30 bp, Artificial Sequence
  Synthetic oligonucleotide
caaggggccgaaaccagtaccacgaactta

SEQ ID NO: 138392 - DNA, 30 bp, Artificial Sequence
  Synthetic oligonucleotide
gctctagcagctcaataacaggtccactta

SEQ ID NO: 138393 - DNA, 30 bp, Artificial Sequence
  Synthetic oligonucleotide
tggtaggagatggcgaattaccttcactta

SEQ ID NO: 138394 - DNA, 30 bp, Artificial Sequence
  Synthetic oligonucleotide
ggcggacattaggatatacacttcgactta

SEQ ID NO: 138395 - DNA, 30 bp, Artificial Sequence
  Synthetic oligonucleotide
tctacggtgaagcaatgacaggttgactta

SEQ ID NO: 138396 - DNA, 30 bp, Artificial Sequence
  Synthetic oligonucleotide
gcgaaggccctccagtaacacgtaacctta

SEQ ID NO: 138397 - DNA, 30 bp, Artificial Sequence
  Synthetic oligonucleotide
aggagtgtacatcgtagtcacggaccctta

SEQ ID NO: 138398 - DNA, 30 bp, Artificial Sequence
  Synthetic oligonucleotide
accgggagcgaaagtggagagggggcctta

SEQ ID NO: 138399 - DNA, 30 bp, Artificial Sequence
  Synthetic oligonucleotide
ctcatcgggtcgaccgccaccctatcctta

SEQ ID NO: 138400 - DNA, 30 bp, Artificial Sequence
  Synthetic oligonucleotide
cgtgcaatgtagacatgactagggtcctta

SEQ ID NO: 138401 - DNA, 30 bp, Artificial Sequence
  Synthetic oligonucleotide
aatcgacatgccagagtgtcaatgtcctta

SEQ ID NO: 138402 - DNA, 30 bp, Artificial Sequence
  Synthetic oligonucleotide
ctagaaacgcgtaagccaggaccaagctta

SEQ ID NO: 138403 - DNA, 30 bp, Artificial Sequence
  Synthetic oligonucleotide
gtctcggactaatgggcgagatatcgctta

SEQ ID NO: 138404 - DNA, 30 bp, Artificial Sequence
  Synthetic oligonucleotide
gatggcatagggggtggctaaacaggctta

SEQ ID NO: 138405 - DNA, 29 bp, Artificial Sequence
  Synthetic oligonucleotide
tatcaagagtagtcggcttcaacggctta

SEQ ID NO: 138406 - DNA, 30 bp, Artificial Sequence
  Synthetic oligonucleotide
aactccggatgaaaatgtccaggcggctta

SEQ ID NO: 138407 - DNA, 30 bp, Artificial Sequence
  Synthetic oligonucleotide
cgctgtgagcaacatacgttcaatggctta

SEQ ID NO: 138408 - DNA, 30 bp, Artificial Sequence
  Synthetic oligonucleotide
catcttgaggcctcgacgatatcttgctta

SEQ ID NO: 138409 - DNA, 30 bp, Artificial Sequence
  Synthetic oligonucleotide
aagtcaaaacaagttaccccgagcatctta

SEQ ID NO: 138410 - DNA, 30 bp, Artificial Sequence
  Synthetic oligonucleotide
aggccatggtcgtcgtagtgttgcatctta

SEQ ID NO: 138411 - DNA, 30 bp, Artificial Sequence
  Synthetic oligonucleotide
ctaataagcggttagcgcatgaggatctta

SEQ ID NO: 138412 - DNA, 30 bp, Artificial Sequence
  Synthetic oligonucleotide
ggatgagtaggagagtagaacggattctta

SEQ ID NO: 138413 - DNA, 30 bp, Artificial Sequence
  Synthetic oligonucleotide
caggttacgatatcaataggaaagttctta

SEQ ID NO: 138414 - DNA, 30 bp, Artificial Sequence
  Synthetic oligonucleotide
ggaccatcgactggtgttgctaagttctta

SEQ ID NO: 138415 - DNA, 30 bp, Artificial Sequence
  Synthetic oligonucleotide
taggctatagcatggtccctggtcaagtta

SEQ ID NO: 138416 - DNA, 30 bp, Artificial Sequence
  Synthetic oligonucleotide
cacgtaaaaactcgagtgtgtacacagtta

SEQ ID NO: 138417 - DNA, 30 bp, Artificial Sequence
  Synthetic oligonucleotide
cttggatagtttaatcgagcaatacagtta

SEQ ID NO: 138418 - DNA, 30 bp, Artificial Sequence
  Synthetic oligonucleotide
gcaaagaagggagctgttcattcccagtta

SEQ ID NO: 138419 - DNA, 30 bp, Artificial Sequence
  Synthetic oligonucleotide
tactagagtagctccagagcccagcagtta

SEQ ID NO: 138420 - DNA, 30 bp, Artificial Sequence
  Synthetic oligonucleotide
aagtataggcttgactatataacgcagtta

SEQ ID NO: 138421 - DNA, 30 bp, Artificial Sequence
  Synthetic oligonucleotide
ccacagcagagtgtaactgggcgggagtta

SEQ ID NO: 138422 - DNA, 30 bp, Artificial Sequence
  Synthetic oligonucleotide
gcacaaacacgaagagattccgctgagtta

SEQ ID NO: 138423 - DNA, 30 bp, Artificial Sequence
  Synthetic oligonucleotide
tcttctgcaaaacactggcctgactagtta

SEQ ID NO: 138424 - DNA, 30 bp, Artificial Sequence
  Synthetic oligonucleotide
ggaatacgcaagaatcaagagctttagtta

SEQ ID NO: 138425 - DNA, 30 bp, Artificial Sequence
  Synthetic oligonucleotide
gaggatccatggttcactgagactacgtta

SEQ ID NO: 138426 - DNA, 30 bp, Artificial Sequence
  Synthetic oligonucleotide
gaccattagataggtagaatagtcgcgtta

SEQ ID NO: 138427 - DNA, 30 bp, Artificial Sequence
  Synthetic oligonucleotide
gagaaactatcaagatcaatagaggcgtta

SEQ ID NO: 138428 - DNA, 30 bp, Artificial Sequence
  Synthetic oligonucleotide
tcacctcctattgaagtcaatcgggcgtta

SEQ ID NO: 138429 - DNA, 30 bp, Artificial Sequence
  Synthetic oligonucleotide
ttagagcatggaacggaccgtcgtgcgtta

SEQ ID NO: 138430 - DNA, 30 bp, Artificial Sequence
  Synthetic oligonucleotide
tatggtgagattgttttctgcattgcgtta

SEQ ID NO: 138431 - DNA, 30 bp, Artificial Sequence
  Synthetic oligonucleotide
ggcgaatggctggcaaatgatacgtcgtta

SEQ ID NO: 138432 - DNA, 30 bp, Artificial Sequence
  Synthetic oligonucleotide
caagtacgaggttggtccgtagggtcgtta

SEQ ID NO: 138433 - DNA, 30 bp, Artificial Sequence
  Synthetic oligonucleotide
ccgcatttgtcccgactgggagcaaggtta

SEQ ID NO: 138434 - DNA, 30 bp, Artificial Sequence
  Synthetic oligonucleotide
gaggagggaaccgatacgggatacaggtta

SEQ ID NO: 138435 - DNA, 30 bp, Artificial Sequence
  Synthetic oligonucleotide
cccatgcgttagagaatgagaaagaggtta

SEQ ID NO: 138436 - DNA, 30 bp, Artificial Sequence
  Synthetic oligonucleotide
atttaccaacgaccgtagccgaagaggtta

SEQ ID NO: 138437 - DNA, 30 bp, Artificial Sequence
  Synthetic oligonucleotide
ttctgcgaatctaagtgggtgcggaggtta

SEQ ID NO: 138438 - DNA, 30 bp, Artificial Sequence
  Synthetic oligonucleotide
tgggggtggttccgggattgcacccggtta

SEQ ID NO: 138439 - DNA, 30 bp, Artificial Sequence
  Synthetic oligonucleotide
tctggggactagtgcaaaatgaagcggtta

SEQ ID NO: 138440 - DNA, 30 bp, Artificial Sequence
  Synthetic oligonucleotide
agcaagtaattggacaggtagacgcggtta

SEQ ID NO: 138441 - DNA, 30 bp, Artificial Sequence
  Synthetic oligonucleotide
tgaagggggctggtcgcgatgtatcggtta

SEQ ID NO: 138442 - DNA, 30 bp, Artificial Sequence
  Synthetic oligonucleotide
cctatgggtactagggaatacaaagggtta

SEQ ID NO: 138443 - DNA, 30 bp, Artificial Sequence
  Synthetic oligonucleotide
cgcaaggagctcatctaatataccgggtta

SEQ ID NO: 138444 - DNA, 30 bp, Artificial Sequence
  Synthetic oligonucleotide
ctagactggtcttgcataaagagggggtta

SEQ ID NO: 138445 - DNA, 30 bp, Artificial Sequence
  Synthetic oligonucleotide
ggtaggattgaatgtctcggaatggggtta

SEQ ID NO: 138446 - DNA, 31 bp, Artificial Sequence
  Synthetic oligonucleotide
cttcgaagcactttatgaagatcgaatgtta

SEQ ID NO: 138447 - DNA, 30 bp, Artificial Sequence
  Synthetic oligonucleotide
caggtatgtcagaagcttcaaataatgtta

SEQ ID NO: 138448 - DNA, 30 bp, Artificial Sequence
  Synthetic oligonucleotide
tcgtgcgtaacaaggggaactgaactgtta

SEQ ID NO: 138449 - DNA, 30 bp, Artificial Sequence
  Synthetic oligonucleotide
acggtgaaagccaccgctactgccctgtta

SEQ ID NO: 138450 - DNA, 30 bp, Artificial Sequence
  Synthetic oligonucleotide
gacggtctgaggtggaaatgtgagctgtta

SEQ ID NO: 138451 - DNA, 30 bp, Artificial Sequence
  Synthetic oligonucleotide
cgaatctgggcaatgggaatcaaggtgtta

SEQ ID NO: 138452 - DNA, 30 bp, Artificial Sequence
  Synthetic oligonucleotide
caggagcatactgcgcctacacgtgtgtta

SEQ ID NO: 138453 - DNA, 30 bp, Artificial Sequence
  Synthetic oligonucleotide
cgaggcatcggttaggagcaaatgcattta

SEQ ID NO: 138454 - DNA, 30 bp, Artificial Sequence
  Synthetic oligonucleotide
gaatgaagggtggacagcataactcattta

SEQ ID NO: 138455 - DNA, 30 bp, Artificial Sequence
  Synthetic oligonucleotide
taactgattaaggaagcaatccacgattta

SEQ ID NO: 138456 - DNA, 30 bp, Artificial Sequence
  Synthetic oligonucleotide
cttaaagtggtggtaggatactccgattta

SEQ ID NO: 138457 - DNA, 30 bp, Artificial Sequence
  Synthetic oligonucleotide
cagaatctaaccttaagactcgactattta

SEQ ID NO: 138458 - DNA, 30 bp, Artificial Sequence
  Synthetic oligonucleotide
acctgcctgaaaggcgatcgtacctattta

SEQ ID NO: 138459 - DNA, 30 bp, Artificial Sequence
  Synthetic oligonucleotide
aggtatccgagcaatacggacggcacttta

SEQ ID NO: 138460 - DNA, 30 bp, Artificial Sequence
  Synthetic oligonucleotide
gtacaaggttgatcaaaagactgcacttta

SEQ ID NO: 138461 - DNA, 30 bp, Artificial Sequence
  Synthetic oligonucleotide
gccgcaacggctcagagcaggattgcttta

SEQ ID NO: 138462 - DNA, 30 bp, Artificial Sequence
  Synthetic oligonucleotide
cacgcgcccgagaggatgtggtggtcttta

SEQ ID NO: 138463 - DNA, 30 bp, Artificial Sequence
  Synthetic oligonucleotide
cgcgatgcgtggttaacatccaaaagttta

SEQ ID NO: 138464 - DNA, 30 bp, Artificial Sequence
  Synthetic oligonucleotide
catagcctgaaacgtaagccggcaagttta

SEQ ID NO: 138465 - DNA, 30 bp, Artificial Sequence
  Synthetic oligonucleotide
actacaaatgctacaccagtattgagttta

SEQ ID NO: 138466 - DNA, 30 bp, Artificial Sequence
  Synthetic oligonucleotide
gacagccagggcgattcgcgggttagttta

SEQ ID NO: 138467 - DNA, 30 bp, Artificial Sequence
  Synthetic oligonucleotide
gctcgagatcaggtaggggatcgacgttta

SEQ ID NO: 138468 - DNA, 30 bp, Artificial Sequence
  Synthetic oligonucleotide
taagataaaagttatcggagtgaatgttta

SEQ ID NO: 138469 - DNA, 30 bp, Artificial Sequence
  Synthetic oligonucleotide
tgtggatggatttacagagaactatgttta

SEQ ID NO: 138470 - DNA, 30 bp, Artificial Sequence
  Synthetic oligonucleotide
ttgggaacgataatcagaatgccctgttta

SEQ ID NO: 138471 - DNA, 30 bp, Artificial Sequence
  Synthetic oligonucleotide
caaggcaaactaaccgtgtcagcgtgttta

SEQ ID NO: 138472 - DNA, 30 bp, Artificial Sequence
  Synthetic oligonucleotide
aagtctgccacgacgacaaggttgctttta

SEQ ID NO: 138473 - DNA, 30 bp, Artificial Sequence
  Synthetic oligonucleotide
gcggcctaaagaggagtttaatgagtttta

SEQ ID NO: 138474 - DNA, 30 bp, Artificial Sequence
  Synthetic oligonucleotide
cgagtaccgtccagaaatattgctgtttta

SEQ ID NO: 138475 - DNA, 30 bp, Artificial Sequence
  Synthetic oligonucleotide
tacggattgagcgagggtacactattttta

SEQ ID NO: 138476 - DNA, 30 bp, Artificial Sequence
  Synthetic oligonucleotide
aagttagcacagacgtgaccgaagttttta

SEQ ID NO: 138477 - DNA, 30 bp, Artificial Sequence
  Synthetic oligonucleotide
gtagaaaaacaggcacacgggttcaaaaac

SEQ ID NO: 138478 - DNA, 30 bp, Artificial Sequence
  Synthetic oligonucleotide
gactatataccgagttacaagggacaaaac

SEQ ID NO: 138479 - DNA, 30 bp, Artificial Sequence
  Synthetic oligonucleotide
aaggatgatcgcgatgaggtccccgaaaac

SEQ ID NO: 138480 - DNA, 30 bp, Artificial Sequence
  Synthetic oligonucleotide
cccttagactgcggccacaagcaggaaaac

SEQ ID NO: 138481 - DNA, 30 bp, Artificial Sequence
  Synthetic oligonucleotide
gcgatcacaatcaaatagtcatcggaaaac

SEQ ID NO: 138482 - DNA, 30 bp, Artificial Sequence
  Synthetic oligonucleotide
gccagacacagcctaaatctaaaataaaac

SEQ ID NO: 138483 - DNA, 30 bp, Artificial Sequence
  Synthetic oligonucleotide
ccgatggaaaggcgcccatctggataaaac

SEQ ID NO: 138484 - DNA, 30 bp, Artificial Sequence
  Synthetic oligonucleotide
tcacctacacttcattcctcccgctaaaac

SEQ ID NO: 138485 - DNA, 30 bp, Artificial Sequence
  Synthetic oligonucleotide
gaacgatacacgattgggtgcgaaacaaac

SEQ ID NO: 138486 - DNA, 30 bp, Artificial Sequence
  Synthetic oligonucleotide
cactgtcattacacgtgggttggaacaaac

SEQ ID NO: 138487 - DNA, 30 bp, Artificial Sequence
  Synthetic oligonucleotide
aaggcatggggctccatcagtcgaccaaac

SEQ ID NO: 138488 - DNA, 30 bp, Artificial Sequence
  Synthetic oligonucleotide
atagaagtcgataccaagcgttaagcaaac

SEQ ID NO: 138489 - DNA, 30 bp, Artificial Sequence
  Synthetic oligonucleotide
atcggtaattgaccgaggcacggcgcaaac

SEQ ID NO: 138490 - DNA, 30 bp, Artificial Sequence
  Synthetic oligonucleotide
aactggacggacagtccaaggttcgcaaac

SEQ ID NO: 138491 - DNA, 30 bp, Artificial Sequence
  Synthetic oligonucleotide
aatacactctcgatgcgccgcgcggcaaac

SEQ ID NO: 138492 - DNA, 30 bp, Artificial Sequence
  Synthetic oligonucleotide
gctggcatagagaagtggccatgggcaaac

SEQ ID NO: 138493 - DNA, 30 bp, Artificial Sequence
  Synthetic oligonucleotide
taacgctggaacgtttaaacacttgcaaac

SEQ ID NO: 138494 - DNA, 30 bp, Artificial Sequence
  Synthetic oligonucleotide
ccccgggagtggcacaacccgatctcaaac

SEQ ID NO: 138495 - DNA, 30 bp, Artificial Sequence
  Synthetic oligonucleotide
aagaaccagccagctccgccattgtcaaac

SEQ ID NO: 138496 - DNA, 30 bp, Artificial Sequence
  Synthetic oligonucleotide
tacgcccagaaatatgccgaaaattcaaac

SEQ ID NO: 138497 - DNA, 30 bp, Artificial Sequence
  Synthetic oligonucleotide
actaaatcaacggagagataggtaagaaac

SEQ ID NO: 138498 - DNA, 30 bp, Artificial Sequence
  Synthetic oligonucleotide
ggcacaactaggtataaccgctacagaaac

SEQ ID NO: 138499 - DNA, 30 bp, Artificial Sequence
  Synthetic oligonucleotide
atataagtcaactggtgggggagcagaaac

SEQ ID NO: 138500 - DNA, 30 bp, Artificial Sequence
  Synthetic oligonucleotide
tcctgtggagtagaacctgtcgcgagaaac

SEQ ID NO: 138501 - DNA, 30 bp, Artificial Sequence
  Synthetic oligonucleotide
tgaattcagttaacggcatcttaacgaaac

SEQ ID NO: 138502 - DNA, 30 bp, Artificial Sequence
  Synthetic oligonucleotide
cgcttaaggtacgaaattatgagcggaaac

SEQ ID NO: 138503 - DNA, 30 bp, Artificial Sequence
  Synthetic oligonucleotide
gcaggtatatacaagcattcctgcggaaac

SEQ ID NO: 138504 - DNA, 30 bp, Artificial Sequence
  Synthetic oligonucleotide
cgatcaatgcggccttcaatatggggaaac

SEQ ID NO: 138505 - DNA, 30 bp, Artificial Sequence
  Synthetic oligonucleotide
gcctcgtataggttggttcatactggaaac

SEQ ID NO: 138506 - DNA, 30 bp, Artificial Sequence
  Synthetic oligonucleotide
ccataccacttgaatcttgcacctggaaac

SEQ ID NO: 138507 - DNA, 30 bp, Artificial Sequence
  Synthetic oligonucleotide
ctcttggggggcgttatggagaaatgaaac

SEQ ID NO: 138508 - DNA, 30 bp, Artificial Sequence
  Synthetic oligonucleotide
gtagctcactgctgtagaggaacttgaaac

SEQ ID NO: 138509 - DNA, 30 bp, Artificial Sequence
  Synthetic oligonucleotide
tgtcgaagtccactattaatttagataaac

SEQ ID NO: 138510 - DNA, 30 bp, Artificial Sequence
  Synthetic oligonucleotide
ggtagtaactaagctctccaagctataaac

SEQ ID NO: 138511 - DNA, 30 bp, Artificial Sequence
  Synthetic oligonucleotide
tagctcggtgcatagtcgactggtataaac

SEQ ID NO: 138512 - DNA, 30 bp, Artificial Sequence
  Synthetic oligonucleotide
catccgtcatgacaatcctacatcctaaac

SEQ ID NO: 138513 - DNA, 30 bp, Artificial Sequence
  Synthetic oligonucleotide
gcggggattctcgtatacccaacagtaaac

SEQ ID NO: 138514 - DNA, 30 bp, Artificial Sequence
  Synthetic oligonucleotide
cgcgcggtgagaaatctttttgtagtaaac

SEQ ID NO: 138515 - DNA, 30 bp, Artificial Sequence
  Synthetic oligonucleotide
atattgcaaatggactacctaaaggtaaac

SEQ ID NO: 138516 - DNA, 30 bp, Artificial Sequence
  Synthetic oligonucleotide
tagtaggttacactagatcagcaggtaaac

SEQ ID NO: 138517 - DNA, 30 bp, Artificial Sequence
  Synthetic oligonucleotide
ggttgctaaacctgaatcgagcacttaaac

SEQ ID NO: 138518 - DNA, 30 bp, Artificial Sequence
  Synthetic oligonucleotide
cagcttcatcctcaggacagtcccttaaac

SEQ ID NO: 138519 - DNA, 30 bp, Artificial Sequence
  Synthetic oligonucleotide
tgctatatgaaacggcaggcgagtttaaac

SEQ ID NO: 138520 - DNA, 30 bp, Artificial Sequence
  Synthetic oligonucleotide
acgaggcacacgtgctatttgcgtttaaac

SEQ ID NO: 138521 - DNA, 30 bp, Artificial Sequence
  Synthetic oligonucleotide
caaggaacaccagtagcctctcaaaacaac

SEQ ID NO: 138522 - DNA, 30 bp, Artificial Sequence
  Synthetic oligonucleotide
gcgagggggtgggcaagactctcaaacaac

SEQ ID NO: 138523 - DNA, 30 bp, Artificial Sequence
  Synthetic oligonucleotide
ctgattaaatagggcgtcgaaatcaacaac

SEQ ID NO: 138524 - DNA, 30 bp, Artificial Sequence
  Synthetic oligonucleotide
cacgggataactaagagactagtcaacaac

SEQ ID NO: 138525 - DNA, 30 bp, Artificial Sequence
  Synthetic oligonucleotide
ctgttaccactggaggggcttcagcacaac

SEQ ID NO: 138526 - DNA, 30 bp, Artificial Sequence
  Synthetic oligonucleotide
tacctacgacagaactgtgtatcgcacaac

SEQ ID NO: 138527 - DNA, 30 bp, Artificial Sequence
  Synthetic oligonucleotide
tcttggggcgagggaacttgaatgcacaac

SEQ ID NO: 138528 - DNA, 30 bp, Artificial Sequence
  Synthetic oligonucleotide
tggcgacggcaatcctcttcaaatcacaac

SEQ ID NO: 138529 - DNA, 30 bp, Artificial Sequence
  Synthetic oligonucleotide
aaagatatcatagtcgccatggatcacaac

SEQ ID NO: 138530 - DNA, 30 bp, Artificial Sequence
  Synthetic oligonucleotide
tcaataaattcacgttaagaagcggacaac

SEQ ID NO: 138531 - DNA, 30 bp, Artificial Sequence
  Synthetic oligonucleotide
acagccacttccgccgccggggtggacaac

SEQ ID NO: 138532 - DNA, 30 bp, Artificial Sequence
  Synthetic oligonucleotide
gcgactatccgggaaatcccaccatacaac

SEQ ID NO: 138533 - DNA, 30 bp, Artificial Sequence
  Synthetic oligonucleotide
gagaatggtgcgtgctagaatggatacaac

SEQ ID NO: 138534 - DNA, 30 bp, Artificial Sequence
  Synthetic oligonucleotide
aaaactagggaacatggatagtgatacaac

SEQ ID NO: 138535 - DNA, 30 bp, Artificial Sequence
  Synthetic oligonucleotide
tcgataaaaagcaatacaaattaaaccaac

SEQ ID NO: 138536 - DNA, 30 bp, Artificial Sequence
  Synthetic oligonucleotide
cgcaggccaccgtctaaatacgagaccaac

SEQ ID NO: 138537 - DNA, 30 bp, Artificial Sequence
  Synthetic oligonucleotide
gatcgcgcacgaacattcacttctaccaac

SEQ ID NO: 138538 - DNA, 30 bp, Artificial Sequence
  Synthetic oligonucleotide
tacgccccgtaaccatctcatagtaccaac

SEQ ID NO: 138539 - DNA, 30 bp, Artificial Sequence
  Synthetic oligonucleotide
caggagaaaaatccgggcgtgaaacccaac

SEQ ID NO: 138540 - DNA, 30 bp, Artificial Sequence
  Synthetic oligonucleotide
ctaaaaggaacacatactgagtcacccaac

SEQ ID NO: 138541 - DNA, 30 bp, Artificial Sequence
  Synthetic oligonucleotide
acaacgtatccgttctccgatcgtcccaac

SEQ ID NO: 138542 - DNA, 30 bp, Artificial Sequence
  Synthetic oligonucleotide
aataggaaacactcggcggcgacatccaac

SEQ ID NO: 138543 - DNA, 30 bp, Artificial Sequence
  Synthetic oligonucleotide
atgaaggaggacatgtaacgccactccaac

SEQ ID NO: 138544 - DNA, 30 bp, Artificial Sequence
  Synthetic oligonucleotide
actgctacgggctgcctcgacacgtccaac

SEQ ID NO: 138545 - DNA, 30 bp, Artificial Sequence
  Synthetic oligonucleotide
aaccaataatacgtaccatagtattccaac

SEQ ID NO: 138546 - DNA, 30 bp, Artificial Sequence
  Synthetic oligonucleotide
agccgtaaagggaggttcatattttccaac

SEQ ID NO: 138547 - DNA, 30 bp, Artificial Sequence
  Synthetic oligonucleotide
tcggtatgcagactccccatttagagcaac

SEQ ID NO: 138548 - DNA, 30 bp, Artificial Sequence
  Synthetic oligonucleotide
aggtatataaaggccagtaggagtagcaac

SEQ ID NO: 138549 - DNA, 30 bp, Artificial Sequence
  Synthetic oligonucleotide
gctggagatgacattgttacagaacgcaac

SEQ ID NO: 138550 - DNA, 30 bp, Artificial Sequence
  Synthetic oligonucleotide
ctactacgggaaccgaatcaaaaccgcaac

SEQ ID NO: 138551 - DNA, 30 bp, Artificial Sequence
  Synthetic oligonucleotide
aagtacatatcacagatttacccgcgcaac

SEQ ID NO: 138552 - DNA, 30 bp, Artificial Sequence
  Synthetic oligonucleotide
gaccatctccggataaacgggacgggcaac

SEQ ID NO: 138553 - DNA, 30 bp, Artificial Sequence
  Synthetic oligonucleotide
taacagccaataataaccgatatgtgcaac

SEQ ID NO: 138554 - DNA, 30 bp, Artificial Sequence
  Synthetic oligonucleotide
gcacgtgttgcggtgccgtctctgtgcaac

SEQ ID NO: 138555 - DNA, 30 bp, Artificial Sequence
  Synthetic oligonucleotide
aactcggttggggagagacccggttgcaac

SEQ ID NO: 138556 - DNA, 30 bp, Artificial Sequence
  Synthetic oligonucleotide
gtggtgattcgtgtggatctgtgttgcaac

SEQ ID NO: 138557 - DNA, 30 bp, Artificial Sequence
  Synthetic oligonucleotide
aggggggttaatacggggacaaagatcaac

SEQ ID NO: 138558 - DNA, 30 bp, Artificial Sequence
  Synthetic oligonucleotide
ctagtagccaaggaatctgcccagatcaac

SEQ ID NO: 138559 - DNA, 30 bp, Artificial Sequence
  Synthetic oligonucleotide
attaggcttcgtaggatgcaaactatcaac

SEQ ID NO: 138560 - DNA, 30 bp, Artificial Sequence
  Synthetic oligonucleotide
tacgtcaattggcaactgagttttatcaac

SEQ ID NO: 138561 - DNA, 30 bp, Artificial Sequence
  Synthetic oligonucleotide
acatctactatcgtaaagcccactctcaac

SEQ ID NO: 138562 - DNA, 30 bp, Artificial Sequence
  Synthetic oligonucleotide
ctaccggtggacgagggatccatagtcaac

SEQ ID NO: 138563 - DNA, 30 bp, Artificial Sequence
  Synthetic oligonucleotide
atcgatcttacatcataataccgcgtcaac

SEQ ID NO: 138564 - DNA, 30 bp, Artificial Sequence
  Synthetic oligonucleotide
agtgtttacgacaggccagagtaggtcaac

SEQ ID NO: 138565 - DNA, 30 bp, Artificial Sequence
  Synthetic oligonucleotide
ccaaagctcaagtccgagatcacggtcaac

SEQ ID NO: 138566 - DNA, 29 bp, Artificial Sequence
  Synthetic oligonucleotide
acagatggaataaaatatttgcggtcaac

SEQ ID NO: 138567 - DNA, 30 bp, Artificial Sequence
  Synthetic oligonucleotide
ttacgacaagcagcccccagagcaaagaac

SEQ ID NO: 138568 - DNA, 30 bp, Artificial Sequence
  Synthetic oligonucleotide
caggttagagcaggggcgtctgcaaagaac

SEQ ID NO: 138569 - DNA, 30 bp, Artificial Sequence
  Synthetic oligonucleotide
cgctggatgtcaagggacatttcaaagaac

SEQ ID NO: 138570 - DNA, 30 bp, Artificial Sequence
  Synthetic oligonucleotide
ggcttgtgttgaggcgcgtgattcaagaac

SEQ ID NO: 138571 - DNA, 30 bp, Artificial Sequence
  Synthetic oligonucleotide
tgggccgtgattacgggcgcaacgaagaac

SEQ ID NO: 138572 - DNA, 30 bp, Artificial Sequence
  Synthetic oligonucleotide
actaagacccacacggggggaacgaagaac

SEQ ID NO: 138573 - DNA, 30 bp, Artificial Sequence
  Synthetic oligonucleotide
ggggagctggaaactaaataaaaacagaac

SEQ ID NO: 138574 - DNA, 30 bp, Artificial Sequence
  Synthetic oligonucleotide
tgcgatcagagaattggaggccaacagaac

SEQ ID NO: 138575 - DNA, 30 bp, Artificial Sequence
  Synthetic oligonucleotide
agcccgatactaggagacactagacagaac

SEQ ID NO: 138576 - DNA, 30 bp, Artificial Sequence
  Synthetic oligonucleotide
cgtcaaggtgcgccttactgcctcgagaac

SEQ ID NO: 138577 - DNA, 30 bp, Artificial Sequence
  Synthetic oligonucleotide
ggtcaaccttttgatcgagttgcggagaac

SEQ ID NO: 138578 - DNA, 30 bp, Artificial Sequence
  Synthetic oligonucleotide
agggcaacatattcgttactctctgagaac

SEQ ID NO: 138579 - DNA, 30 bp, Artificial Sequence
  Synthetic oligonucleotide
ggcctgtgagaaggcgaaagtggtgagaac

SEQ ID NO: 138580 - DNA, 30 bp, Artificial Sequence
  Synthetic oligonucleotide
agccatttaggccgacagacgaaatagaac

SEQ ID NO: 138581 - DNA, 30 bp, Artificial Sequence
  Synthetic oligonucleotide
gcgattctcctaaaatctcattgttagaac

SEQ ID NO: 138582 - DNA, 30 bp, Artificial Sequence
  Synthetic oligonucleotide
atggagataggggcgctaaacgaaacgaac

SEQ ID NO: 138583 - DNA, 30 bp, Artificial Sequence
  Synthetic oligonucleotide
aaaaagtgtgcgcacgatggtcacacgaac

SEQ ID NO: 138584 - DNA, 30 bp, Artificial Sequence
  Synthetic oligonucleotide
cttaacacggcacggtataaacatacgaac

SEQ ID NO: 138585 - DNA, 30 bp, Artificial Sequence
  Synthetic oligonucleotide
ctagaacctcacacactccccaaaccgaac

SEQ ID NO: 138586 - DNA, 30 bp, Artificial Sequence
  Synthetic oligonucleotide
tcatgcctacgatagacgtgaggaccgaac

SEQ ID NO: 138587 - DNA, 30 bp, Artificial Sequence
  Synthetic oligonucleotide
ggccaccgaggggtcatgtgcataccgaac

SEQ ID NO: 138588 - DNA, 30 bp, Artificial Sequence
  Synthetic oligonucleotide
ccggacgagtttggcctacaattcccgaac

SEQ ID NO: 138589 - DNA, 30 bp, Artificial Sequence
  Synthetic oligonucleotide
agggtctattgaatacaaacggagccgaac

SEQ ID NO: 138590 - DNA, 30 bp, Artificial Sequence
  Synthetic oligonucleotide
gcttaattctggggaaacgtaaatccgaac

SEQ ID NO: 138591 - DNA, 30 bp, Artificial Sequence
  Synthetic oligonucleotide
tcggcaaggttatcgttaagggctccgaac

SEQ ID NO: 138592 - DNA, 30 bp, Artificial Sequence
  Synthetic oligonucleotide
ccaatagttaagacgatggacccatcgaac

SEQ ID NO: 138593 - DNA, 30 bp, Artificial Sequence
  Synthetic oligonucleotide
gtgaggacgccgtatggtgcgccatcgaac

SEQ ID NO: 138594 - DNA, 30 bp, Artificial Sequence
  Synthetic oligonucleotide
tgcggtagtcgcggtcatgcattatcgaac

SEQ ID NO: 138595 - DNA, 30 bp, Artificial Sequence
  Synthetic oligonucleotide
gaatagagagccaaaacagtgtactcgaac

SEQ ID NO: 138596 - DNA, 30 bp, Artificial Sequence
  Synthetic oligonucleotide
ccgcggcatctctcggtgaaggcttcgaac

SEQ ID NO: 138597 - DNA, 30 bp, Artificial Sequence
  Synthetic oligonucleotide
ggcataacaatatgtgtacccataaggaac

SEQ ID NO: 138598 - DNA, 30 bp, Artificial Sequence
  Synthetic oligonucleotide
gcggatgttaaccgaaaggtaactaggaac

SEQ ID NO: 138599 - DNA, 30 bp, Artificial Sequence
  Synthetic oligonucleotide
ataacaaccttggaagtagtgcctaggaac

SEQ ID NO: 138600 - DNA, 30 bp, Artificial Sequence
  Synthetic oligonucleotide
ctctgaaggggctggtttaaggcgcggaac

SEQ ID NO: 138601 - DNA, 30 bp, Artificial Sequence
  Synthetic oligonucleotide
atacgcgccgctttagtaacaacagggaac

SEQ ID NO: 138602 - DNA, 30 bp, Artificial Sequence
  Synthetic oligonucleotide
tgcaaaatcgtgtaggtctgcgccgggaac

SEQ ID NO: 138603 - DNA, 30 bp, Artificial Sequence
  Synthetic oligonucleotide
cgagttttgactgtgctcgaccatgggaac

SEQ ID NO: 138604 - DNA, 30 bp, Artificial Sequence
  Synthetic oligonucleotide
gtctagagaggtgaatatttcactgggaac

SEQ ID NO: 138605 - DNA, 30 bp, Artificial Sequence
  Synthetic oligonucleotide
atcacgtgccagaatcgataccactggaac

SEQ ID NO: 138606 - DNA, 30 bp, Artificial Sequence
  Synthetic oligonucleotide
tatcaaggtgcccaacaacaggtctggaac

SEQ ID NO: 138607 - DNA, 30 bp, Artificial Sequence
  Synthetic oligonucleotide
cgccgaggatagattgagccgagaatgaac

SEQ ID NO: 138608 - DNA, 30 bp, Artificial Sequence
  Synthetic oligonucleotide
tgagtctgcatcctaacatctgagatgaac

SEQ ID NO: 138609 - DNA, 30 bp, Artificial Sequence
  Synthetic oligonucleotide
ccagacattcaagcagcaggtagcctgaac

SEQ ID NO: 138610 - DNA, 30 bp, Artificial Sequence
  Synthetic oligonucleotide
atgaaccagatcatacactggtatctgaac

SEQ ID NO: 138611 - DNA, 30 bp, Artificial Sequence
  Synthetic oligonucleotide
cacatacatttattgttacagccagtgaac

SEQ ID NO: 138612 - DNA, 31 bp, Artificial Sequence
  Synthetic oligonucleotide
atgggttaaatcaaacggcccagtggtgaac

SEQ ID NO: 138613 - DNA, 30 bp, Artificial Sequence
  Synthetic oligonucleotide
gcgctaaaggcggcgattaggctattgaac

SEQ ID NO: 138614 - DNA, 30 bp, Artificial Sequence
  Synthetic oligonucleotide
gtacgggcgtgacgggacccattaaataac

SEQ ID NO: 138615 - DNA, 30 bp, Artificial Sequence
  Synthetic oligonucleotide
ttctccgaccaacgcgaaacgcacaataac

SEQ ID NO: 138616 - DNA, 30 bp, Artificial Sequence
  Synthetic oligonucleotide
acaaaggcttctacaattgccctgaataac

SEQ ID NO: 138617 - DNA, 30 bp, Artificial Sequence
  Synthetic oligonucleotide
ggatgagaacgacggcaccggactaataac

SEQ ID NO: 138618 - DNA, 30 bp, Artificial Sequence
  Synthetic oligonucleotide
agtcgggctcgatttcaatgcactcataac

SEQ ID NO: 138619 - DNA, 30 bp, Artificial Sequence
  Synthetic oligonucleotide
cggccgggtcgccgacggaaaacagataac

SEQ ID NO: 138620 - DNA, 30 bp, Artificial Sequence
  Synthetic oligonucleotide
aggctctcactgtgctgggggaaggataac

SEQ ID NO: 138621 - DNA, 30 bp, Artificial Sequence
  Synthetic oligonucleotide
cggctctaaaattcggaaacgtcggataac

SEQ ID NO: 138622 - DNA, 30 bp, Artificial Sequence
  Synthetic oligonucleotide
agtgtgcatatatccagtgggtcgtataac

SEQ ID NO: 138623 - DNA, 30 bp, Artificial Sequence
  Synthetic oligonucleotide
ctctaaagaccttatactggagaaactaac

SEQ ID NO: 138624 - DNA, 30 bp, Artificial Sequence
  Synthetic oligonucleotide
cgatggcactgggtaagcagagacactaac

SEQ ID NO: 138625 - DNA, 30 bp, Artificial Sequence
  Synthetic oligonucleotide
ggtcagaatatctgagtggatcgcactaac

SEQ ID NO: 138626 - DNA, 30 bp, Artificial Sequence
  Synthetic oligonucleotide
agggcccgcccggttaatcaacggactaac

SEQ ID NO: 138627 - DNA, 30 bp, Artificial Sequence
  Synthetic oligonucleotide
aacataggacgtacccgcaaccgccctaac

SEQ ID NO: 138628 - DNA, 30 bp, Artificial Sequence
  Synthetic oligonucleotide
atcgtgatactctagcataatattcctaac

SEQ ID NO: 138629 - DNA, 30 bp, Artificial Sequence
  Synthetic oligonucleotide
gtacatggtgatgtaccggttcgggctaac

SEQ ID NO: 138630 - DNA, 30 bp, Artificial Sequence
  Synthetic oligonucleotide
acaaatttgtgagtaacataaatggctaac

SEQ ID NO: 138631 - DNA, 30 bp, Artificial Sequence
  Synthetic oligonucleotide
atgagttaatgaagcctctgaggctctaac

SEQ ID NO: 138632 - DNA, 30 bp, Artificial Sequence
  Synthetic oligonucleotide
gttcgggctgtgtcattcttcggaagtaac

SEQ ID NO: 138633 - DNA, 30 bp, Artificial Sequence
  Synthetic oligonucleotide
tgccactgataatgtcctaagtggagtaac

SEQ ID NO: 138634 - DNA, 30 bp, Artificial Sequence
  Synthetic oligonucleotide
tgctgactacacgctctaatgatgagtaac

SEQ ID NO: 138635 - DNA, 30 bp, Artificial Sequence
  Synthetic oligonucleotide
gtctatcagtgattcagtgtgatgagtaac

SEQ ID NO: 138636 - DNA, 30 bp, Artificial Sequence
  Synthetic oligonucleotide
ttcggagcgagacgacagggtaaaggtaac

SEQ ID NO: 138637 - DNA, 30 bp, Artificial Sequence
  Synthetic oligonucleotide
acttgcagttcagtgggttatcaaggtaac

SEQ ID NO: 138638 - DNA, 30 bp, Artificial Sequence
  Synthetic oligonucleotide
ggttgagtaagtcaaatagcgcacggtaac

SEQ ID NO: 138639 - DNA, 30 bp, Artificial Sequence
  Synthetic oligonucleotide
tacgaacaggcgctttattgtatcggtaac

SEQ ID NO: 138640 - DNA, 30 bp, Artificial Sequence
  Synthetic oligonucleotide
ggtccgtgaaactagtggttttggggtaac

SEQ ID NO: 138641 - DNA, 30 bp, Artificial Sequence
  Synthetic oligonucleotide
catctacgagagggagcctcagatggtaac

SEQ ID NO: 138642 - DNA, 30 bp, Artificial Sequence
  Synthetic oligonucleotide
aggatataatagccaaagggtgatggtaac

SEQ ID NO: 138643 - DNA, 30 bp, Artificial Sequence
  Synthetic oligonucleotide
ggtgtcgataagggctgccgcggtggtaac

SEQ ID NO: 138644 - DNA, 30 bp, Artificial Sequence
  Synthetic oligonucleotide
gcaaacactgtgaggccgtcagattgtaac

SEQ ID NO: 138645 - DNA, 30 bp, Artificial Sequence
  Synthetic oligonucleotide
acctgcttaggttacatcctagcttgtaac

SEQ ID NO: 138646 - DNA, 30 bp, Artificial Sequence
  Synthetic oligonucleotide
agaatgagcggggaatgaggtagttgtaac

SEQ ID NO: 138647 - DNA, 30 bp, Artificial Sequence
  Synthetic oligonucleotide
ggggaattaagtaaatcttgcatcattaac

SEQ ID NO: 138648 - DNA, 30 bp, Artificial Sequence
  Synthetic oligonucleotide
ggacatgacgaccgcgagggctttattaac

SEQ ID NO: 138649 - DNA, 30 bp, Artificial Sequence
  Synthetic oligonucleotide
ggacacaactcggaggtagcgcagcttaac

SEQ ID NO: 138650 - DNA, 30 bp, Artificial Sequence
  Synthetic oligonucleotide
gaatggtaagagagcaacttgtcagttaac

SEQ ID NO: 138651 - DNA, 30 bp, Artificial Sequence
  Synthetic oligonucleotide
cacactggccaaatcgaccggatagttaac

SEQ ID NO: 138652 - DNA, 30 bp, Artificial Sequence
  Synthetic oligonucleotide
ctcgaagcgtgccttggacgtgtggttaac

SEQ ID NO: 138653 - DNA, 30 bp, Artificial Sequence
  Synthetic oligonucleotide
aggatagtacatctcaggggtcaatttaac

SEQ ID NO: 138654 - DNA, 30 bp, Artificial Sequence
  Synthetic oligonucleotide
gccacgaccatcctgagtctaacatttaac

SEQ ID NO: 138655 - DNA, 30 bp, Artificial Sequence
  Synthetic oligonucleotide
cgctatcgtgaacgccgttctgcatttaac

SEQ ID NO: 138656 - DNA, 30 bp, Artificial Sequence
  Synthetic oligonucleotide
acgggatatctctcgtcccctgtgtttaac

SEQ ID NO: 138657 - DNA, 30 bp, Artificial Sequence
  Synthetic oligonucleotide
atgaactcaacgccaggtggagaaaaacac

SEQ ID NO: 138658 - DNA, 30 bp, Artificial Sequence
  Synthetic oligonucleotide
gaccagcgatctgaaatgacaaacaaacac

SEQ ID NO: 138659 - DNA, 30 bp, Artificial Sequence
  Synthetic oligonucleotide
gggttgcaaggtcccggacaaaataaacac

SEQ ID NO: 138660 - DNA, 30 bp, Artificial Sequence
  Synthetic oligonucleotide
tgggcccttggccacatcaaaagtaaacac

SEQ ID NO: 138661 - DNA, 30 bp, Artificial Sequence
  Synthetic oligonucleotide
atggtctacatacctaagcgcatacaacac

SEQ ID NO: 138662 - DNA, 30 bp, Artificial Sequence
  Synthetic oligonucleotide
cgcgcacgaacgtgggactataaccaacac

SEQ ID NO: 138663 - DNA, 30 bp, Artificial Sequence
  Synthetic oligonucleotide
gaacatcaggacccagttaaatcccaacac

SEQ ID NO: 138664 - DNA, 30 bp, Artificial Sequence
  Synthetic oligonucleotide
ggggtccgtgcggacctggctaagcaacac

SEQ ID NO: 138665 - DNA, 30 bp, Artificial Sequence
  Synthetic oligonucleotide
agcggggggaggccagcggtagtagaacac

SEQ ID NO: 138666 - DNA, 30 bp, Artificial Sequence
  Synthetic oligonucleotide
gaatgtggacattatagggactgggaacac

SEQ ID NO: 138667 - DNA, 30 bp, Artificial Sequence
  Synthetic oligonucleotide
gggccagagtccatgaaaatacctgaacac

SEQ ID NO: 138668 - DNA, 30 bp, Artificial Sequence
  Synthetic oligonucleotide
aagttagataggagaccggcgtaataacac

SEQ ID NO: 138669 - DNA, 30 bp, Artificial Sequence
  Synthetic oligonucleotide
cgtggtattccgtgacatttagggtaacac

SEQ ID NO: 138670 - DNA, 30 bp, Artificial Sequence
  Synthetic oligonucleotide
tacgccaccatgatcgtatgactgtaacac

SEQ ID NO: 138671 - DNA, 30 bp, Artificial Sequence
  Synthetic oligonucleotide
ttacccccaagacaacgcgacatttaacac

SEQ ID NO: 138672 - DNA, 30 bp, Artificial Sequence
  Synthetic oligonucleotide
cgaaggtagatgtcaccatgggtaacacac

SEQ ID NO: 138673 - DNA, 30 bp, Artificial Sequence
  Synthetic oligonucleotide
ggggaactcctatgtgcagataggacacac

SEQ ID NO: 138674 - DNA, 30 bp, Artificial Sequence
  Synthetic oligonucleotide
aactggagacaatgtatgacttgtacacac

SEQ ID NO: 138675 - DNA, 30 bp, Artificial Sequence
  Synthetic oligonucleotide
acacggcgcactcattagtatggaccacac

SEQ ID NO: 138676 - DNA, 30 bp, Artificial Sequence
  Synthetic oligonucleotide
aacgatcagtggaaagcctcggtcccacac

SEQ ID NO: 138677 - DNA, 30 bp, Artificial Sequence
  Synthetic oligonucleotide
gcgcgcgcagccgaaagacgcaccgcacac

SEQ ID NO: 138678 - DNA, 30 bp, Artificial Sequence
  Synthetic oligonucleotide
aaccgggacgttcagaattctcgctcacac

SEQ ID NO: 138679 - DNA, 30 bp, Artificial Sequence
  Synthetic oligonucleotide
tctgcaaccaacgtgctgcatgggtcacac

SEQ ID NO: 138680 - DNA, 30 bp, Artificial Sequence
  Synthetic oligonucleotide
agaggtgaccctaggaattaacgttcacac

SEQ ID NO: 138681 - DNA, 30 bp, Artificial Sequence
  Synthetic oligonucleotide
cacgcagcaccacgcgactcggcaagacac

SEQ ID NO: 138682 - DNA, 30 bp, Artificial Sequence
  Synthetic oligonucleotide
ctccagaggccatactatatggtaagacac

SEQ ID NO: 138683 - DNA, 30 bp, Artificial Sequence
  Synthetic oligonucleotide
cagcgcatgactcggtggaacgctagacac

SEQ ID NO: 138684 - DNA, 30 bp, Artificial Sequence
  Synthetic oligonucleotide
tcactagaaaattcaattgttcaccgacac

SEQ ID NO: 138685 - DNA, 30 bp, Artificial Sequence
  Synthetic oligonucleotide
gggtgacataaggcgaatacggtaggacac

SEQ ID NO: 138686 - DNA, 30 bp, Artificial Sequence
  Synthetic oligonucleotide
aactcgatcgtaagcgcattatccggacac

SEQ ID NO: 138687 - DNA, 30 bp, Artificial Sequence
  Synthetic oligonucleotide
aaactcaggcccagggcaacaagcggacac

SEQ ID NO: 138688 - DNA, 30 bp, Artificial Sequence
  Synthetic oligonucleotide
tatcgtgtcattccacgtggctggggacac

SEQ ID NO: 138689 - DNA, 30 bp, Artificial Sequence
  Synthetic oligonucleotide
gtatcgaccgaagcccaactgtggggacac

SEQ ID NO: 138690 - DNA, 30 bp, Artificial Sequence
  Synthetic oligonucleotide
tcatcagttggctggccccaaagtggacac

SEQ ID NO: 138691 - DNA, 30 bp, Artificial Sequence
  Synthetic oligonucleotide
atacgacgggttagacgaaggcttggacac

SEQ ID NO: 138692 - DNA, 30 bp, Artificial Sequence
  Synthetic oligonucleotide
ttaccgcaggtaactcacggaaaatgacac

SEQ ID NO: 138693 - DNA, 30 bp, Artificial Sequence
  Synthetic oligonucleotide
ggacgtagatccggggataaataatgacac

SEQ ID NO: 138694 - DNA, 30 bp, Artificial Sequence
  Synthetic oligonucleotide
catgcaggcacgtatcaaggccactgacac

SEQ ID NO: 138695 - DNA, 30 bp, Artificial Sequence
  Synthetic oligonucleotide
ttggaatcgacgggctaggcgagctgacac

SEQ ID NO: 138696 - DNA, 30 bp, Artificial Sequence
  Synthetic oligonucleotide
accaacctcgggatctagcccaattgacac

SEQ ID NO: 138697 - DNA, 30 bp, Artificial Sequence
  Synthetic oligonucleotide
cctaagtgatttaggagcacagtttgacac

SEQ ID NO: 138698 - DNA, 30 bp, Artificial Sequence
  Synthetic oligonucleotide
tcctgagtatatctatgcgtggcaatacac

SEQ ID NO: 138699 - DNA, 30 bp, Artificial Sequence
  Synthetic oligonucleotide
cgtggtgcgtacaagccagaggccatacac

SEQ ID NO: 138700 - DNA, 30 bp, Artificial Sequence
  Synthetic oligonucleotide
cgcccgaggttgaaacacagcctgatacac

SEQ ID NO: 138701 - DNA, 29 bp, Artificial Sequence
  Synthetic oligonucleotide
ccgggagggcgctccggaaccatctacac

SEQ ID NO: 138702 - DNA, 30 bp, Artificial Sequence
  Synthetic oligonucleotide
ctaacggataagtaaaacgttcttctacac

SEQ ID NO: 138703 - DNA, 30 bp, Artificial Sequence
  Synthetic oligonucleotide
tctaggtagcgatagcactagaacgtacac

SEQ ID NO: 138704 - DNA, 30 bp, Artificial Sequence
  Synthetic oligonucleotide
agtatgtaggactccacggcccgcgtacac

SEQ ID NO: 138705 - DNA, 30 bp, Artificial Sequence
  Synthetic oligonucleotide
atggtgtaagcacagctgaattaggtacac

SEQ ID NO: 138706 - DNA, 30 bp, Artificial Sequence
  Synthetic oligonucleotide
ggtggatactgaagattgggggatgtacac

SEQ ID NO: 138707 - DNA, 30 bp, Artificial Sequence
  Synthetic oligonucleotide
cggacgtctttatagggtatactgttacac

SEQ ID NO: 138708 - DNA, 30 bp, Artificial Sequence
  Synthetic oligonucleotide
aggcccccgaatgaatcccggcgcaaccac

SEQ ID NO: 138709 - DNA, 30 bp, Artificial Sequence
  Synthetic oligonucleotide
gcgctaaactgccaaatcgtttaacaccac

SEQ ID NO: 138710 - DNA, 30 bp, Artificial Sequence
  Synthetic oligonucleotide
gtggaacaatccggttcagggggccaccac

SEQ ID NO: 138711 - DNA, 30 bp, Artificial Sequence
  Synthetic oligonucleotide
gcatgatagtgagtgcacgtggtcgaccac

SEQ ID NO: 138712 - DNA, 30 bp, Artificial Sequence
  Synthetic oligonucleotide
ggccagatctccgtgaacggcatggaccac

SEQ ID NO: 138713 - DNA, 30 bp, Artificial Sequence
  Synthetic oligonucleotide
ccatgacaagaggttgagagtgtggaccac

SEQ ID NO: 138714 - DNA, 30 bp, Artificial Sequence
  Synthetic oligonucleotide
gccgtacgagcttgcctaaatactgaccac

SEQ ID NO: 138715 - DNA, 30 bp, Artificial Sequence
  Synthetic oligonucleotide
acaagctagagcgggtcaaatgactaccac

SEQ ID NO: 138716 - DNA, 30 bp, Artificial Sequence
  Synthetic oligonucleotide
agaagtagagacgatcacccagcctaccac

SEQ ID NO: 138717 - DNA, 30 bp, Artificial Sequence
  Synthetic oligonucleotide
tcctaggactttagacgtcaatcgtaccac

SEQ ID NO: 138718 - DNA, 30 bp, Artificial Sequence
  Synthetic oligonucleotide
gtacacggacagcctattatagacacccac

SEQ ID NO: 138719 - DNA, 30 bp, Artificial Sequence
  Synthetic oligonucleotide
gtggcattcgagccgtgaagggacacccac

SEQ ID NO: 138720 - DNA, 30 bp, Artificial Sequence
  Synthetic oligonucleotide
attggtgcccaactgtgcatgaggacccac

SEQ ID NO: 138721 - DNA, 30 bp, Artificial Sequence
  Synthetic oligonucleotide
agttaggatgttatacatctcgctacccac

SEQ ID NO: 138722 - DNA, 30 bp, Artificial Sequence
  Synthetic oligonucleotide
aatatcaatgtttggagacccccagcccac

SEQ ID NO: 138723 - DNA, 30 bp, Artificial Sequence
  Synthetic oligonucleotide
agcgtatggcaaaccaagtgtgcggcccac

SEQ ID NO: 138724 - DNA, 30 bp, Artificial Sequence
  Synthetic oligonucleotide
gggaagatcttatagtggttgcgggcccac

SEQ ID NO: 138725 - DNA, 30 bp, Artificial Sequence
  Synthetic oligonucleotide
ggcgcgattcgaaaataccacaggtcccac

SEQ ID NO: 138726 - DNA, 30 bp, Artificial Sequence
  Synthetic oligonucleotide
gaaaatcacgtaccagatacggggtcccac

SEQ ID NO: 138727 - DNA, 31 bp, Artificial Sequence
  Synthetic oligonucleotide
caattagagtgtagcctggggtttaagccac

SEQ ID NO: 138728 - DNA, 30 bp, Artificial Sequence
  Synthetic oligonucleotide
atgagtactgggattcgagattggagccac

SEQ ID NO: 138729 - DNA, 30 bp, Artificial Sequence
  Synthetic oligonucleotide
tagcagggcctcacaaggggcgctcgccac

SEQ ID NO: 138730 - DNA, 30 bp, Artificial Sequence
  Synthetic oligonucleotide
ccgaccggtgctacagaactagcaggccac

SEQ ID NO: 138731 - DNA, 30 bp, Artificial Sequence
  Synthetic oligonucleotide
atagtatgatgggctaaatggataggccac

SEQ ID NO: 138732 - DNA, 30 bp, Artificial Sequence
  Synthetic oligonucleotide
tgctcgacaaacattcaagatttcggccac

SEQ ID NO: 138733 - DNA, 30 bp, Artificial Sequence
  Synthetic oligonucleotide
tgtacaaggtggcatatgttagatggccac

SEQ ID NO: 138734 - DNA, 30 bp, Artificial Sequence
  Synthetic oligonucleotide
tacatccctagatgcgctgccaagtgccac

SEQ ID NO: 138735 - DNA, 30 bp, Artificial Sequence
  Synthetic oligonucleotide
acggatcactatgcgggtaggcgttgccac

SEQ ID NO: 138736 - DNA, 30 bp, Artificial Sequence
  Synthetic oligonucleotide
gtactgggggtttgtttgagccacatccac

SEQ ID NO: 138737 - DNA, 30 bp, Artificial Sequence
  Synthetic oligonucleotide
ttaacagaggttgaggggggtggactccac

SEQ ID NO: 138738 - DNA, 30 bp, Artificial Sequence
  Synthetic oligonucleotide
agtgttcgtgatccgacacattacctccac

SEQ ID NO: 138739 - DNA, 30 bp, Artificial Sequence
  Synthetic oligonucleotide
acacggcttggctaccagatcgagctccac

SEQ ID NO: 138740 - DNA, 30 bp, Artificial Sequence
  Synthetic oligonucleotide
cgcaaatatacctgaaggagtgcggtccac

SEQ ID NO: 138741 - DNA, 30 bp, Artificial Sequence
  Synthetic oligonucleotide
tcacctgcgactcaaaataaagcgttccac

SEQ ID NO: 138742 - DNA, 30 bp, Artificial Sequence
  Synthetic oligonucleotide
ggcagtgaaatgttaagggggcaaaagcac

SEQ ID NO: 138743 - DNA, 30 bp, Artificial Sequence
  Synthetic oligonucleotide
ctgcaatggctcagaaaacagcacaagcac

SEQ ID NO: 138744 - DNA, 30 bp, Artificial Sequence
  Synthetic oligonucleotide
ctgatactagccgcccgtcggctcaagcac

SEQ ID NO: 138745 - DNA, 30 bp, Artificial Sequence
  Synthetic oligonucleotide
caactcgagcttcgtaatgtggagaagcac

SEQ ID NO: 138746 - DNA, 30 bp, Artificial Sequence
  Synthetic oligonucleotide
cgcgaggtctgggtaatagtggaccagcac

SEQ ID NO: 138747 - DNA, 30 bp, Artificial Sequence
  Synthetic oligonucleotide
gagacaagtaaccttcgtgagttccagcac

SEQ ID NO: 138748 - DNA, 30 bp, Artificial Sequence
  Synthetic oligonucleotide
ggtgtcaattggaggttacgctaagagcac

SEQ ID NO: 138749 - DNA, 30 bp, Artificial Sequence
  Synthetic oligonucleotide
tagggcctgtaaactgtccgggacgagcac

SEQ ID NO: 138750 - DNA, 30 bp, Artificial Sequence
  Synthetic oligonucleotide
ggggggcaggaccgggaacagctcgagcac

SEQ ID NO: 138751 - DNA, 30 bp, Artificial Sequence
  Synthetic oligonucleotide
gggggaccaaattggagaaccttaacgcac

SEQ ID NO: 138752 - DNA, 30 bp, Artificial Sequence
  Synthetic oligonucleotide
cctccgattctcgaagataaccagacgcac

SEQ ID NO: 138753 - DNA, 30 bp, Artificial Sequence
  Synthetic oligonucleotide
atggccgttacgcgaggggatccgacgcac

SEQ ID NO: 138754 - DNA, 30 bp, Artificial Sequence
  Synthetic oligonucleotide
gatgagcaactcgacagggcagaaccgcac

SEQ ID NO: 138755 - DNA, 30 bp, Artificial Sequence
  Synthetic oligonucleotide
ggaggggggatagccactcttgtgccgcac

SEQ ID NO: 138756 - DNA, 30 bp, Artificial Sequence
  Synthetic oligonucleotide
gtcgaaagtccttattcgagaactccgcac

SEQ ID NO: 138757 - DNA, 30 bp, Artificial Sequence
  Synthetic oligonucleotide
ggatcagtaagttcacagtcactcgcgcac

SEQ ID NO: 138758 - DNA, 30 bp, Artificial Sequence
  Synthetic oligonucleotide
gtgagtcgtagggccgtcaattcggcgcac

SEQ ID NO: 138759 - DNA, 30 bp, Artificial Sequence
  Synthetic oligonucleotide
ggagtattcgtacggctccaacatgcgcac

SEQ ID NO: 138760 - DNA, 30 bp, Artificial Sequence
  Synthetic oligonucleotide
agatgaggattcacgaccctgattgcgcac

SEQ ID NO: 138761 - DNA, 30 bp, Artificial Sequence
  Synthetic oligonucleotide
ttgcatcaatacagggcgagtaaatcgcac

SEQ ID NO: 138762 - DNA, 30 bp, Artificial Sequence
  Synthetic oligonucleotide
atgaggtcgtctgtttacgcctactcgcac

SEQ ID NO: 138763 - DNA, 30 bp, Artificial Sequence
  Synthetic oligonucleotide
aagtcaggtagagcaagttggaggtcgcac

SEQ ID NO: 138764 - DNA, 30 bp, Artificial Sequence
  Synthetic oligonucleotide
cctcgtgtgtagcaggataagacttcgcac

SEQ ID NO: 138765 - DNA, 30 bp, Artificial Sequence
  Synthetic oligonucleotide
cggattgcgagaaagtaacttgaaaggcac

SEQ ID NO: 138766 - DNA, 30 bp, Artificial Sequence
  Synthetic oligonucleotide
tcatatgtatcatcctggttgtcaaggcac

SEQ ID NO: 138767 - DNA, 30 bp, Artificial Sequence
  Synthetic oligonucleotide
tacgctacgtcgcaataataacgaaggcac

SEQ ID NO: 138768 - DNA, 30 bp, Artificial Sequence
  Synthetic oligonucleotide
cgcgttctacaataccagaagtgcaggcac

SEQ ID NO: 138769 - DNA, 30 bp, Artificial Sequence
  Synthetic oligonucleotide
aatgggtaaggctatggctacggtaggcac

SEQ ID NO: 138770 - DNA, 30 bp, Artificial Sequence
  Synthetic oligonucleotide
gcggcgatgtcaatcgaggcctaacggcac

SEQ ID NO: 138771 - DNA, 30 bp, Artificial Sequence
  Synthetic oligonucleotide
aaatcacaccagccgtgtgtgtaacggcac

SEQ ID NO: 138772 - DNA, 30 bp, Artificial Sequence
  Synthetic oligonucleotide
ggaaactgacaacaagctttcgtccggcac

SEQ ID NO: 138773 - DNA, 30 bp, Artificial Sequence
  Synthetic oligonucleotide
gaagaaaaacttgaataaccccaagggcac

SEQ ID NO: 138774 - DNA, 30 bp, Artificial Sequence
  Synthetic oligonucleotide
agtggtgggcgtcaaaggcttggagggcac

SEQ ID NO: 138775 - DNA, 30 bp, Artificial Sequence
  Synthetic oligonucleotide
atatcatcgttttgccacactctagggcac

SEQ ID NO: 138776 - DNA, 30 bp, Artificial Sequence
  Synthetic oligonucleotide
tcgttggtgtaccccgatacgaatgggcac

SEQ ID NO: 138777 - DNA, 30 bp, Artificial Sequence
  Synthetic oligonucleotide
caatcgtagagactgtggcggtgtgggcac

SEQ ID NO: 138778 - DNA, 30 bp, Artificial Sequence
  Synthetic oligonucleotide
tcggcagtgaggcaacgctcataatggcac

SEQ ID NO: 138779 - DNA, 30 bp, Artificial Sequence
  Synthetic oligonucleotide
ggctcagtttgcattctcgtaagctggcac

SEQ ID NO: 138780 - DNA, 30 bp, Artificial Sequence
  Synthetic oligonucleotide
ggggacaatctatcttttgcgctctggcac

SEQ ID NO: 138781 - DNA, 30 bp, Artificial Sequence
  Synthetic oligonucleotide
tagcttgccggattacgtgtgagaatgcac

SEQ ID NO: 138782 - DNA, 30 bp, Artificial Sequence
  Synthetic oligonucleotide
cgcatcgacctttgtgaccgctacatgcac

SEQ ID NO: 138783 - DNA, 30 bp, Artificial Sequence
  Synthetic oligonucleotide
caacgtgaaggaatataagagcctatgcac

SEQ ID NO: 138784 - DNA, 30 bp, Artificial Sequence
  Synthetic oligonucleotide
taatcaagggtggttcggtgtcttatgcac

SEQ ID NO: 138785 - DNA, 30 bp, Artificial Sequence
  Synthetic oligonucleotide
ctgtccaggtaaaatggggggtttatgcac

SEQ ID NO: 138786 - DNA, 30 bp, Artificial Sequence
  Synthetic oligonucleotide
caacacgtaacggatctcgcttaactgcac

SEQ ID NO: 138787 - DNA, 30 bp, Artificial Sequence
  Synthetic oligonucleotide
cgaagtgcgacctctttactgggactgcac

SEQ ID NO: 138788 - DNA, 30 bp, Artificial Sequence
  Synthetic oligonucleotide
ttacttccagaaggctctgccggcctgcac

SEQ ID NO: 138789 - DNA, 30 bp, Artificial Sequence
  Synthetic oligonucleotide
cagtcggtcccgttcaggggtagagtgcac

SEQ ID NO: 138790 - DNA, 30 bp, Artificial Sequence
  Synthetic oligonucleotide
gtgagtactccttacccggggttagtgcac

SEQ ID NO: 138791 - DNA, 30 bp, Artificial Sequence
  Synthetic oligonucleotide
caatccgggctacatggtaaggatgtgcac

SEQ ID NO: 138792 - DNA, 30 bp, Artificial Sequence
  Synthetic oligonucleotide
aagccagcgcgttctgcgtcatctgtgcac

SEQ ID NO: 138793 - DNA, 30 bp, Artificial Sequence
  Synthetic oligonucleotide
cgccaacatccactccttatataattgcac

SEQ ID NO: 138794 - DNA, 30 bp, Artificial Sequence
  Synthetic oligonucleotide
aaacgaggtaaagattgagcctacttgcac

SEQ ID NO: 138795 - DNA, 30 bp, Artificial Sequence
  Synthetic oligonucleotide
aagacatatacaagggtgtctaagttgcac

SEQ ID NO: 138796 - DNA, 30 bp, Artificial Sequence
  Synthetic oligonucleotide
tatacgaactatagtaagagttatttgcac

SEQ ID NO: 138797 - DNA, 30 bp, Artificial Sequence
  Synthetic oligonucleotide
actcatctcactaagaggcataagaatcac

SEQ ID NO: 138798 - DNA, 30 bp, Artificial Sequence
  Synthetic oligonucleotide
aacatggaacaattcctttgggatcatcac

SEQ ID NO: 138799 - DNA, 30 bp, Artificial Sequence
  Synthetic oligonucleotide
gggtactatcaccctcctaagttagatcac

SEQ ID NO: 138800 - DNA, 30 bp, Artificial Sequence
  Synthetic oligonucleotide
ggacagggcattgacacaaatgacgatcac

SEQ ID NO: 138801 - DNA, 30 bp, Artificial Sequence
  Synthetic oligonucleotide
tgcggcagttccacgagagatgacgatcac

SEQ ID NO: 138802 - DNA, 30 bp, Artificial Sequence
  Synthetic oligonucleotide
cgacagtataatctcgaccataaggatcac

SEQ ID NO: 138803 - DNA, 30 bp, Artificial Sequence
  Synthetic oligonucleotide
aagggcatccgttgatagtggagtgatcac

SEQ ID NO: 138804 - DNA, 30 bp, Artificial Sequence
  Synthetic oligonucleotide
cgaagtgggatcacttagggtcgatatcac

SEQ ID NO: 138805 - DNA, 30 bp, Artificial Sequence
  Synthetic oligonucleotide
atggtacggcgagctatatccgtgtatcac

SEQ ID NO: 138806 - DNA, 30 bp, Artificial Sequence
  Synthetic oligonucleotide
acagattgagaagcgtgacaatgaactcac

SEQ ID NO: 138807 - DNA, 30 bp, Artificial Sequence
  Synthetic oligonucleotide
tcgtgggagccattcactcagctaactcac

SEQ ID NO: 138808 - DNA, 30 bp, Artificial Sequence
  Synthetic oligonucleotide
acttaatacagcatcctgctagccactcac

SEQ ID NO: 138809 - DNA, 30 bp, Artificial Sequence
  Synthetic oligonucleotide
atgcgatctctccacggaggttctactcac

SEQ ID NO: 138810 - DNA, 30 bp, Artificial Sequence
  Synthetic oligonucleotide
tccgattcttttggggatgggaaacctcac

SEQ ID NO: 138811 - DNA, 30 bp, Artificial Sequence
  Synthetic oligonucleotide
acgtgtaacgaagcacccaggaaccctcac

SEQ ID NO: 138812 - DNA, 30 bp, Artificial Sequence
  Synthetic oligonucleotide
taatggtgggaatatcttggaggagctcac

SEQ ID NO: 138813 - DNA, 30 bp, Artificial Sequence
  Synthetic oligonucleotide
tggctgtacaatctcggactcctggctcac

SEQ ID NO: 138814 - DNA, 30 bp, Artificial Sequence
  Synthetic oligonucleotide
ctgtcggggcacgaggtcctttcaagtcac

SEQ ID NO: 138815 - DNA, 30 bp, Artificial Sequence
  Synthetic oligonucleotide
taggtatgatacagattatgggcgagtcac

SEQ ID NO: 138816 - DNA, 30 bp, Artificial Sequence
  Synthetic oligonucleotide
acaagcaaagcagcctttttagatagtcac

SEQ ID NO: 138817 - DNA, 30 bp, Artificial Sequence
  Synthetic oligonucleotide
agggcttgattctttccagtgttacgtcac

SEQ ID NO: 138818 - DNA, 30 bp, Artificial Sequence
  Synthetic oligonucleotide
gtcagcaataaacgaggctagaagcgtcac

SEQ ID NO: 138819 - DNA, 30 bp, Artificial Sequence
  Synthetic oligonucleotide
gggcaatctctgggcacacaataaggtcac

SEQ ID NO: 138820 - DNA, 30 bp, Artificial Sequence
  Synthetic oligonucleotide
caaaacgaggtcttagactatcatggtcac

SEQ ID NO: 138821 - DNA, 30 bp, Artificial Sequence
  Synthetic oligonucleotide
ctaaacagccaaagtgagaccggatgtcac

SEQ ID NO: 138822 - DNA, 30 bp, Artificial Sequence
  Synthetic oligonucleotide
atgattagagtgggtcaacgcccctgtcac

SEQ ID NO: 138823 - DNA, 30 bp, Artificial Sequence
  Synthetic oligonucleotide
tgaggtgccaaagcagacttcgtctgtcac

SEQ ID NO: 138824 - DNA, 30 bp, Artificial Sequence
  Synthetic oligonucleotide
gtaacacgagtacgtcttagagagtgtcac

SEQ ID NO: 138825 - DNA, 30 bp, Artificial Sequence
  Synthetic oligonucleotide
ttctcactataacgctccgagatgtgtcac

SEQ ID NO: 138826 - DNA, 30 bp, Artificial Sequence
  Synthetic oligonucleotide
ggagagggattcatgctcccactttgtcac

SEQ ID NO: 138827 - DNA, 30 bp, Artificial Sequence
  Synthetic oligonucleotide
tagtgctttaagcataaattgtcgattcac

SEQ ID NO: 138828 - DNA, 30 bp, Artificial Sequence
  Synthetic oligonucleotide
gtgctcgcaactggattacagaggattcac

SEQ ID NO: 138829 - DNA, 30 bp, Artificial Sequence
  Synthetic oligonucleotide
cagttacgagacccgtccgcttctattcac

SEQ ID NO: 138830 - DNA, 30 bp, Artificial Sequence
  Synthetic oligonucleotide
agaaccacggggagacatattttccttcac

SEQ ID NO: 138831 - DNA, 30 bp, Artificial Sequence
  Synthetic oligonucleotide
tccctaatttatgaataagaccggcttcac

SEQ ID NO: 138832 - DNA, 30 bp, Artificial Sequence
  Synthetic oligonucleotide
tggatggaatgagcaaattcggtatttcac

SEQ ID NO: 138833 - DNA, 30 bp, Artificial Sequence
  Synthetic oligonucleotide
tagatacatcatcaacggctggactttcac

SEQ ID NO: 138834 - DNA, 30 bp, Artificial Sequence
  Synthetic oligonucleotide
gccgttccacgagagtatgtgctgtttcac

SEQ ID NO: 138835 - DNA, 34 bp, Artificial Sequence
  Synthetic oligonucleotide
gatactacaccaccaagtgtccatcagaaaagac

SEQ ID NO: 138836 - DNA, 33 bp, Artificial Sequence
  Synthetic oligonucleotide
gaactagaccaccacgtgtccatcagaaaagac

SEQ ID NO: 138837 - DNA, 30 bp, Artificial Sequence
  Synthetic oligonucleotide
cgcgttcgggcaggaatctggagaaaagac

SEQ ID NO: 138838 - DNA, 30 bp, Artificial Sequence
  Synthetic oligonucleotide
cgaacttatgggcgtaccaggttaaaagac

SEQ ID NO: 138839 - DNA, 30 bp, Artificial Sequence
  Synthetic oligonucleotide
cggataagcttctcagaaaaccagaaagac

SEQ ID NO: 138840 - DNA, 30 bp, Artificial Sequence
  Synthetic oligonucleotide
gcgacggcaaatgaccctctagaacaagac

SEQ ID NO: 138841 - DNA, 30 bp, Artificial Sequence
  Synthetic oligonucleotide
tccccagggcagagcataaactgacaagac

SEQ ID NO: 138842 - DNA, 30 bp, Artificial Sequence
  Synthetic oligonucleotide
tcctctgtgccctggaggagatggcaagac

SEQ ID NO: 138843 - DNA, 30 bp, Artificial Sequence
  Synthetic oligonucleotide
gacaactcaggggcacaggtaactcaagac

SEQ ID NO: 138844 - DNA, 30 bp, Artificial Sequence
  Synthetic oligonucleotide
tgagtgaggcgtattgatctatctcaagac

SEQ ID NO: 138845 - DNA, 30 bp, Artificial Sequence
  Synthetic oligonucleotide
tcggagggccgtgaactggggatagaagac

SEQ ID NO: 138846 - DNA, 30 bp, Artificial Sequence
  Synthetic oligonucleotide
ctcaagcgggtgccaagttctggcgaagac

SEQ ID NO: 138847 - DNA, 30 bp, Artificial Sequence
  Synthetic oligonucleotide
tgacggtctactgagcacgcctgcgaagac

SEQ ID NO: 138848 - DNA, 30 bp, Artificial Sequence
  Synthetic oligonucleotide
gtgactacggttatagtcagctcggaagac

SEQ ID NO: 138849 - DNA, 30 bp, Artificial Sequence
  Synthetic oligonucleotide
taacagtcgctacttcggggcttggaagac

SEQ ID NO: 138850 - DNA, 30 bp, Artificial Sequence
  Synthetic oligonucleotide
cacctgggcttgtgtcggtagaaataagac

SEQ ID NO: 138851 - DNA, 30 bp, Artificial Sequence
  Synthetic oligonucleotide
aatgattaaggctgagaacgcgtgtaagac

SEQ ID NO: 138852 - DNA, 30 bp, Artificial Sequence
  Synthetic oligonucleotide
cacgtggtcggtaccgtcacagtttaagac

SEQ ID NO: 138853 - DNA, 30 bp, Artificial Sequence
  Synthetic oligonucleotide
caactaataccgttggccaagctgacagac

SEQ ID NO: 138854 - DNA, 30 bp, Artificial Sequence
  Synthetic oligonucleotide
cggccttttgtactctaactagtagcagac

SEQ ID NO: 138855 - DNA, 30 bp, Artificial Sequence
  Synthetic oligonucleotide
taccgtattcccatcagatgtttagcagac

SEQ ID NO: 138856 - DNA, 30 bp, Artificial Sequence
  Synthetic oligonucleotide
ctacgtaagtcgatgaaggagatggcagac

SEQ ID NO: 138857 - DNA, 30 bp, Artificial Sequence
  Synthetic oligonucleotide
gaggtctgcagaggagaaaagtattcagac

SEQ ID NO: 138858 - DNA, 30 bp, Artificial Sequence
  Synthetic oligonucleotide
ggaccggaccgtaactagagctacagagac

SEQ ID NO: 138859 - DNA, 30 bp, Artificial Sequence
  Synthetic oligonucleotide
ctgtttatgcggcccgaaatgcccagagac

SEQ ID NO: 138860 - DNA, 30 bp, Artificial Sequence
  Synthetic oligonucleotide
gagaaattcccaactgttaatcccagagac

SEQ ID NO: 138861 - DNA, 30 bp, Artificial Sequence
  Synthetic oligonucleotide
gcgagagttcaaatgggacaccgtagagac

SEQ ID NO: 138862 - DNA, 30 bp, Artificial Sequence
  Synthetic oligonucleotide
acaacttgcgagtgtggagtatttagagac

SEQ ID NO: 138863 - DNA, 30 bp, Artificial Sequence
  Synthetic oligonucleotide
cgtggacaccggcctcttgcacaacgagac

SEQ ID NO: 138864 - DNA, 31 bp, Artificial Sequence
  Synthetic oligonucleotide
agtactatccctttgctatgcttgccgagac

SEQ ID NO: 138865 - DNA, 30 bp, Artificial Sequence
  Synthetic oligonucleotide
gcacagaccagggggagcagcatccgagac

SEQ ID NO: 138866 - DNA, 30 bp, Artificial Sequence
  Synthetic oligonucleotide
ttacctgagatgcctgttagaattcgagac

SEQ ID NO: 138867 - DNA, 30 bp, Artificial Sequence
  Synthetic oligonucleotide
cgcaggaggtgcaaccaagacgaaggagac

SEQ ID NO: 138868 - DNA, 30 bp, Artificial Sequence
  Synthetic oligonucleotide
caactggggttagctatagaagcaggagac

SEQ ID NO: 138869 - DNA, 30 bp, Artificial Sequence
  Synthetic oligonucleotide
catcttgtgaataggtgttgctccggagac

SEQ ID NO: 138870 - DNA, 30 bp, Artificial Sequence
  Synthetic oligonucleotide
ggagagatgttgggttgcattggtggagac

SEQ ID NO: 138871 - DNA, 30 bp, Artificial Sequence
  Synthetic oligonucleotide
tgtccaagggcatgcgccatagactgagac

SEQ ID NO: 138872 - DNA, 30 bp, Artificial Sequence
  Synthetic oligonucleotide
agactaaacggaaggaggggcagctgagac

SEQ ID NO: 138873 - DNA, 30 bp, Artificial Sequence
  Synthetic oligonucleotide
taacgtctggggaaattgtgtcggtgagac

SEQ ID NO: 138874 - DNA, 30 bp, Artificial Sequence
  Synthetic oligonucleotide
caagtgtcagcaacgttagccgattgagac

SEQ ID NO: 138875 - DNA, 30 bp, Artificial Sequence
  Synthetic oligonucleotide
atgggcacgatgacgtaaagacacatagac

SEQ ID NO: 138876 - DNA, 30 bp, Artificial Sequence
  Synthetic oligonucleotide
ggtggtaaagggccattgcaggtcatagac

SEQ ID NO: 138877 - DNA, 30 bp, Artificial Sequence
  Synthetic oligonucleotide
cctcaatcaaactatctgagtcctatagac

SEQ ID NO: 138878 - DNA, 30 bp, Artificial Sequence
  Synthetic oligonucleotide
aaaggaggtgcttgcaggcacgtgctagac

SEQ ID NO: 138879 - DNA, 30 bp, Artificial Sequence
  Synthetic oligonucleotide
atacataatgatcggcctcatgcagtagac

SEQ ID NO: 138880 - DNA, 30 bp, Artificial Sequence
  Synthetic oligonucleotide
gtagggggagaagagaaccccagagtagac

SEQ ID NO: 138881 - DNA, 30 bp, Artificial Sequence
  Synthetic oligonucleotide
gccacaagccagttgtagtgggtagtagac

SEQ ID NO: 138882 - DNA, 30 bp, Artificial Sequence
  Synthetic oligonucleotide
cgaaggtggtagccaattgccttggtagac

SEQ ID NO: 138883 - DNA, 30 bp, Artificial Sequence
  Synthetic oligonucleotide
tagtcgagtcgacttcaatcgagtgtagac

SEQ ID NO: 138884 - DNA, 30 bp, Artificial Sequence
  Synthetic oligonucleotide
gttgcagatatgtgtccagcgttattagac

SEQ ID NO: 138885 - DNA, 30 bp, Artificial Sequence
  Synthetic oligonucleotide
tacatggtttcggatcgagaggcgttagac

SEQ ID NO: 138886 - DNA, 30 bp, Artificial Sequence
  Synthetic oligonucleotide
gcacgacttatgtgaaagtaattgttagac

SEQ ID NO: 138887 - DNA, 30 bp, Artificial Sequence
  Synthetic oligonucleotide
tagcgccaattaatagtagcactgaacgac

SEQ ID NO: 138888 - DNA, 30 bp, Artificial Sequence
  Synthetic oligonucleotide
gggggatgaattaaattccggagtaacgac

SEQ ID NO: 138889 - DNA, 30 bp, Artificial Sequence
  Synthetic oligonucleotide
cacgtcgggtactgcctatcgttacacgac

SEQ ID NO: 138890 - DNA, 30 bp, Artificial Sequence
  Synthetic oligonucleotide
gatgaagaccttgagtcagtgatccacgac

SEQ ID NO: 138891 - DNA, 30 bp, Artificial Sequence
  Synthetic oligonucleotide
acgtttgtagaatcccgaatgatgcacgac

SEQ ID NO: 138892 - DNA, 30 bp, Artificial Sequence
  Synthetic oligonucleotide
ggatgacctccaacattcagactagacgac

SEQ ID NO: 138893 - DNA, 30 bp, Artificial Sequence
  Synthetic oligonucleotide
tcgacaatcgatgacttagggaattacgac

SEQ ID NO: 138894 - DNA, 30 bp, Artificial Sequence
  Synthetic oligonucleotide
tcacccttacacttacgaggaccaaccgac

SEQ ID NO: 138895 - DNA, 30 bp, Artificial Sequence
  Synthetic oligonucleotide
ggcccggccgttcatcgacaaataaccgac

SEQ ID NO: 138896 - DNA, 30 bp, Artificial Sequence
  Synthetic oligonucleotide
taggcgcaccgggaaatgggacccaccgac

SEQ ID NO: 138897 - DNA, 30 bp, Artificial Sequence
  Synthetic oligonucleotide
cttggactggaccacctggggccgaccgac

SEQ ID NO: 138898 - DNA, 30 bp, Artificial Sequence
  Synthetic oligonucleotide
tgtattggttggctgtgtggtatgaccgac

SEQ ID NO: 138899 - DNA, 30 bp, Artificial Sequence
  Synthetic oligonucleotide
acggtgctttctgtttctgtcaatcccgac

SEQ ID NO: 138900 - DNA, 30 bp, Artificial Sequence
  Synthetic oligonucleotide
gaaggtaccgaactcgttatattggccgac

SEQ ID NO: 138901 - DNA, 30 bp, Artificial Sequence
  Synthetic oligonucleotide
accatccaacgagacacttctcaaagcgac

SEQ ID NO: 138902 - DNA, 30 bp, Artificial Sequence
  Synthetic oligonucleotide
taggtaccttttcaggcgatacccagcgac

SEQ ID NO: 138903 - DNA, 30 bp, Artificial Sequence
  Synthetic oligonucleotide
taaggagtataggtcggtgtatggagcgac

SEQ ID NO: 138904 - DNA, 30 bp, Artificial Sequence
  Synthetic oligonucleotide
agtggtattatagcaccctcaactagcgac

SEQ ID NO: 138905 - DNA, 30 bp, Artificial Sequence
  Synthetic oligonucleotide
ttgtcacctgaccaacttaaggctagcgac

SEQ ID NO: 138906 - DNA, 30 bp, Artificial Sequence
  Synthetic oligonucleotide
agatggtgtcagggggttctcaaacgcgac

SEQ ID NO: 138907 - DNA, 30 bp, Artificial Sequence
  Synthetic oligonucleotide
tgtgaagattggaagcacggtggacgcgac

SEQ ID NO: 138908 - DNA, 30 bp, Artificial Sequence
  Synthetic oligonucleotide
tcatccgggtatatgaaaggctagcgcgac

SEQ ID NO: 138909 - DNA, 30 bp, Artificial Sequence
  Synthetic oligonucleotide
ggccacgtacgaggttagagttatcgcgac

SEQ ID NO: 138910 - DNA, 30 bp, Artificial Sequence
  Synthetic oligonucleotide
gctacgcgataagctgggattagtggcgac

SEQ ID NO: 138911 - DNA, 30 bp, Artificial Sequence
  Synthetic oligonucleotide
gtggtgactatgaggtagcttaccatcgac

SEQ ID NO: 138912 - DNA, 30 bp, Artificial Sequence
  Synthetic oligonucleotide
ggattaagatggaacagacttaatatcgac

SEQ ID NO: 138913 - DNA, 30 bp, Artificial Sequence
  Synthetic oligonucleotide
gcgaggcttggcgtaatgtcgagtatcgac

SEQ ID NO: 138914 - DNA, 30 bp, Artificial Sequence
  Synthetic oligonucleotide
ttgtagctggactcctttcccagtctcgac

SEQ ID NO: 138915 - DNA, 30 bp, Artificial Sequence
  Synthetic oligonucleotide
aagttggataccaatcgttcataagtcgac

SEQ ID NO: 138916 - DNA, 30 bp, Artificial Sequence
  Synthetic oligonucleotide
gactgttccctcgataagccatccgtcgac

SEQ ID NO: 138917 - DNA, 30 bp, Artificial Sequence
  Synthetic oligonucleotide
gtaacaacgtacattatctgaccattcgac

SEQ ID NO: 138918 - DNA, 30 bp, Artificial Sequence
  Synthetic oligonucleotide
tctgtagggtgaaggatcgacagattcgac

SEQ ID NO: 138919 - DNA, 30 bp, Artificial Sequence
  Synthetic oligonucleotide
agtcttgacaaggtctatcctcccttcgac

SEQ ID NO: 138920 - DNA, 30 bp, Artificial Sequence
  Synthetic oligonucleotide
aacgttctacccaactagcgtgtcttcgac

SEQ ID NO: 138921 - DNA, 30 bp, Artificial Sequence
  Synthetic oligonucleotide
cgtattggtatctaagatcaatcgttcgac

SEQ ID NO: 138922 - DNA, 30 bp, Artificial Sequence
  Synthetic oligonucleotide
atgcgtgatcgcattctctttaaaaaggac

SEQ ID NO: 138923 - DNA, 30 bp, Artificial Sequence
  Synthetic oligonucleotide
cacgacatcacgatcccatcatttaaggac

SEQ ID NO: 138924 - DNA, 30 bp, Artificial Sequence
  Synthetic oligonucleotide
gtgcgcctatgtgtaaggcactggcaggac

SEQ ID NO: 138925 - DNA, 30 bp, Artificial Sequence
  Synthetic oligonucleotide
taccggggaccaatactgttgtgctaggac

SEQ ID NO: 138926 - DNA, 30 bp, Artificial Sequence
  Synthetic oligonucleotide
gagcaggtggcgttaagcacggcaccggac

SEQ ID NO: 138927 - DNA, 30 bp, Artificial Sequence
  Synthetic oligonucleotide
caataagatcacgttccctaatggccggac

SEQ ID NO: 138928 - DNA, 30 bp, Artificial Sequence
  Synthetic oligonucleotide
gtggagccaagcgatcgacaggtgccggac

SEQ ID NO: 138929 - DNA, 30 bp, Artificial Sequence
  Synthetic oligonucleotide
aaagtcagctcgtgggcctgagctccggac

SEQ ID NO: 138930 - DNA, 30 bp, Artificial Sequence
  Synthetic oligonucleotide
ccccacgcaactctagaggacattccggac

SEQ ID NO: 138931 - DNA, 30 bp, Artificial Sequence
  Synthetic oligonucleotide
gagggagtcccgttgcaacgggtagcggac

SEQ ID NO: 138932 - DNA, 30 bp, Artificial Sequence
  Synthetic oligonucleotide
gtcgagtacgaatggtcaatccacagggac

SEQ ID NO: 138933 - DNA, 30 bp, Artificial Sequence
  Synthetic oligonucleotide
acgtgccttctggagtgcaatagcagggac

SEQ ID NO: 138934 - DNA, 30 bp, Artificial Sequence
  Synthetic oligonucleotide
ggaagctaatcacaagggggagtcagggac

SEQ ID NO: 138935 - DNA, 30 bp, Artificial Sequence
  Synthetic oligonucleotide
ggtactagtgtcgctactaaaagacgggac

SEQ ID NO: 138936 - DNA, 30 bp, Artificial Sequence
  Synthetic oligonucleotide
tcaggaagcgcacgatagcagaggcgggac

SEQ ID NO: 138937 - DNA, 30 bp, Artificial Sequence
  Synthetic oligonucleotide
acagcagaaaataacagataacggcgggac

SEQ ID NO: 138938 - DNA, 30 bp, Artificial Sequence
  Synthetic oligonucleotide
cgtgtctctaattagtacgtagtgcgggac

SEQ ID NO: 138939 - DNA, 30 bp, Artificial Sequence
  Synthetic oligonucleotide
gaatatcatatccgtctaatgggaggggac

SEQ ID NO: 138940 - DNA, 30 bp, Artificial Sequence
  Synthetic oligonucleotide
tagggcgcggtcgatctgggttcctgggac

SEQ ID NO: 138941 - DNA, 30 bp, Artificial Sequence
  Synthetic oligonucleotide
agtgtctaagcagggggatacggttgggac

SEQ ID NO: 138942 - DNA, 30 bp, Artificial Sequence
  Synthetic oligonucleotide
gggatgaggatgtaaggtgagggttgggac

SEQ ID NO: 138943 - DNA, 30 bp, Artificial Sequence
  Synthetic oligonucleotide
acatgtagtatgcgtgcaaaaataatggac

SEQ ID NO: 138944 - DNA, 31 bp, Artificial Sequence
  Synthetic oligonucleotide
taggatcaggagcgtcaccagtgatatggac

SEQ ID NO: 138945 - DNA, 30 bp, Artificial Sequence
  Synthetic oligonucleotide
tagcacaaaacggatgatcttgatatggac

SEQ ID NO: 138946 - DNA, 30 bp, Artificial Sequence
  Synthetic oligonucleotide
ctacgagggcataatattagctaactggac

SEQ ID NO: 138947 - DNA, 30 bp, Artificial Sequence
  Synthetic oligonucleotide
gcgtgtttggggtaatcttcaccactggac

SEQ ID NO: 138948 - DNA, 30 bp, Artificial Sequence
  Synthetic oligonucleotide
gtgggccgtcagtgtggcagttacctggac

SEQ ID NO: 138949 - DNA, 30 bp, Artificial Sequence
  Synthetic oligonucleotide
ccggtattgatggaagaattcagcgtggac

SEQ ID NO: 138950 - DNA, 30 bp, Artificial Sequence
  Synthetic oligonucleotide
taagcgttaacgttataaggctgggtggac

SEQ ID NO: 138951 - DNA, 30 bp, Artificial Sequence
  Synthetic oligonucleotide
tgagctcaaggagagctttcctttgtggac

SEQ ID NO: 138952 - DNA, 30 bp, Artificial Sequence
  Synthetic oligonucleotide
atgaggtgtacttgagctgctcagttggac

SEQ ID NO: 138953 - DNA, 30 bp, Artificial Sequence
  Synthetic oligonucleotide
acggctcccgcccagaacgttgtgttggac

SEQ ID NO: 138954 - DNA, 30 bp, Artificial Sequence
  Synthetic oligonucleotide
ttaacgccgactgtacgatgggcccatgac

SEQ ID NO: 138955 - DNA, 30 bp, Artificial Sequence
  Synthetic oligonucleotide
cccccgaagttagatctcatgaatcatgac

SEQ ID NO: 138956 - DNA, 30 bp, Artificial Sequence
  Synthetic oligonucleotide
aaggtgaaacgcgttcttaaataggatgac

SEQ ID NO: 138957 - DNA, 30 bp, Artificial Sequence
  Synthetic oligonucleotide
cgcacaactaatgccattggataggatgac

SEQ ID NO: 138958 - DNA, 30 bp, Artificial Sequence
  Synthetic oligonucleotide
gcaccaagattaccgcgtcgagtggatgac

SEQ ID NO: 138959 - DNA, 30 bp, Artificial Sequence
  Synthetic oligonucleotide
cagccttggagctcagtctgaccatatgac

SEQ ID NO: 138960 - DNA, 30 bp, Artificial Sequence
  Synthetic oligonucleotide
acctcacgtgttccggagcgcggctatgac

SEQ ID NO: 138961 - DNA, 30 bp, Artificial Sequence
  Synthetic oligonucleotide
cccaatacgagaattcagtaataacctgac

SEQ ID NO: 138962 - DNA, 30 bp, Artificial Sequence
  Synthetic oligonucleotide
agacagaccgtcgactgccagtaacctgac

SEQ ID NO: 138963 - DNA, 30 bp, Artificial Sequence
  Synthetic oligonucleotide
tccagatggacataagtacggatagctgac

SEQ ID NO: 138964 - DNA, 30 bp, Artificial Sequence
  Synthetic oligonucleotide
gtcagtcgacagaactgagtcagcagtgac

SEQ ID NO: 138965 - DNA, 30 bp, Artificial Sequence
  Synthetic oligonucleotide
gaggccgcgagtgtgagggcagaacgtgac

SEQ ID NO: 138966 - DNA, 30 bp, Artificial Sequence
  Synthetic oligonucleotide
ctcaatcggaacgagcaatccccacgtgac

SEQ ID NO: 138967 - DNA, 30 bp, Artificial Sequence
  Synthetic oligonucleotide
cagccgtatgatctcatcgatggacgtgac

SEQ ID NO: 138968 - DNA, 30 bp, Artificial Sequence
  Synthetic oligonucleotide
tctaggtcgaggaaattcgtcaaccgtgac

SEQ ID NO: 138969 - DNA, 30 bp, Artificial Sequence
  Synthetic oligonucleotide
cttccaaccctattccttgtggaccgtgac

SEQ ID NO: 138970 - DNA, 30 bp, Artificial Sequence
  Synthetic oligonucleotide
gacttaattaaaacaggagacaggcgtgac

SEQ ID NO: 138971 - DNA, 30 bp, Artificial Sequence
  Synthetic oligonucleotide
gtaatgcgtcgtctcgacgtaactcgtgac

SEQ ID NO: 138972 - DNA, 30 bp, Artificial Sequence
  Synthetic oligonucleotide
gctgattgatcggtacgcttgacatgtgac

SEQ ID NO: 138973 - DNA, 30 bp, Artificial Sequence
  Synthetic oligonucleotide
tacataataagcttagattgcaaaattgac

SEQ ID NO: 138974 - DNA, 30 bp, Artificial Sequence
  Synthetic oligonucleotide
caccccagggcattgacaaagtaaattgac

SEQ ID NO: 138975 - DNA, 30 bp, Artificial Sequence
  Synthetic oligonucleotide
cgtgtcgactcctagtcgcgttaaattgac

SEQ ID NO: 138976 - DNA, 30 bp, Artificial Sequence
  Synthetic oligonucleotide
gagatagcagcaagggctaggcgaattgac

SEQ ID NO: 138977 - DNA, 30 bp, Artificial Sequence
  Synthetic oligonucleotide
cgacccaggtatataaagtaactaattgac

SEQ ID NO: 138978 - DNA, 30 bp, Artificial Sequence
  Synthetic oligonucleotide
agcaaggataaagggaagagttccattgac

SEQ ID NO: 138979 - DNA, 30 bp, Artificial Sequence
  Synthetic oligonucleotide
caatctgtcaaatctctagccggcattgac

SEQ ID NO: 138980 - DNA, 30 bp, Artificial Sequence
  Synthetic oligonucleotide
tgatggcaattattttgcccagtcattgac

SEQ ID NO: 138981 - DNA, 30 bp, Artificial Sequence
  Synthetic oligonucleotide
ccgggttggtttgtgatcgcctcgattgac

SEQ ID NO: 138982 - DNA, 30 bp, Artificial Sequence
  Synthetic oligonucleotide
ggttacaagggccacaaggggaaacttgac

SEQ ID NO: 138983 - DNA, 30 bp, Artificial Sequence
  Synthetic oligonucleotide
gagtagggacggaggtgaatacaacttgac

SEQ ID NO: 138984 - DNA, 30 bp, Artificial Sequence
  Synthetic oligonucleotide
gcgagaactgaagaatgcctgacacttgac

SEQ ID NO: 138985 - DNA, 30 bp, Artificial Sequence
  Synthetic oligonucleotide
gcaaagagctctccgctcgagagtgttgac

SEQ ID NO: 138986 - DNA, 30 bp, Artificial Sequence
  Synthetic oligonucleotide
gtgcattaagaggctgggtaggcaaaatac

SEQ ID NO: 138987 - DNA, 30 bp, Artificial Sequence
  Synthetic oligonucleotide
agcgagaaaattaattgtaaaaacaaatac

SEQ ID NO: 138988 - DNA, 30 bp, Artificial Sequence
  Synthetic oligonucleotide
gtgacacaattaatggccgacggtaaatac

SEQ ID NO: 138989 - DNA, 30 bp, Artificial Sequence
  Synthetic oligonucleotide
cgaatggtaatgattcgaatcggtcaatac

SEQ ID NO: 138990 - DNA, 30 bp, Artificial Sequence
  Synthetic oligonucleotide
aggcgcatctgtggatgtatagcagaatac

SEQ ID NO: 138991 - DNA, 30 bp, Artificial Sequence
  Synthetic oligonucleotide
gagtcacatccttgaaggagaagagaatac

SEQ ID NO: 138992 - DNA, 30 bp, Artificial Sequence
  Synthetic oligonucleotide
acgactcctcgttagcgttaggattaatac

SEQ ID NO: 138993 - DNA, 30 bp, Artificial Sequence
  Synthetic oligonucleotide
taaggatcgcctcaattggcgtcaacatac

SEQ ID NO: 138994 - DNA, 30 bp, Artificial Sequence
  Synthetic oligonucleotide
cagggataaagatcgaggaaatcgacatac

SEQ ID NO: 138995 - DNA, 30 bp, Artificial Sequence
  Synthetic oligonucleotide
attagagttccgcaatgcgagtctacatac

SEQ ID NO: 138996 - DNA, 30 bp, Artificial Sequence
  Synthetic oligonucleotide
aggacacgcatgaatagtttgacaccatac

SEQ ID NO: 138997 - DNA, 30 bp, Artificial Sequence
  Synthetic oligonucleotide
ttggctgtgagcaaggggggatcaccatac

SEQ ID NO: 138998 - DNA, 30 bp, Artificial Sequence
  Synthetic oligonucleotide
aggcaaaatcaccaatggcgcccagcatac

SEQ ID NO: 138999 - DNA, 30 bp, Artificial Sequence
  Synthetic oligonucleotide
agggcagtgaggattgtgcttctagcatac

SEQ ID NO: 139000 - DNA, 30 bp, Artificial Sequence
  Synthetic oligonucleotide
taggattaattattagtcttgaaatcatac

SEQ ID NO: 139001 - DNA, 30 bp, Artificial Sequence
  Synthetic oligonucleotide
gatggtagcgtgttggttgttggctcatac

SEQ ID NO: 139002 - DNA, 30 bp, Artificial Sequence
  Synthetic oligonucleotide
gggctggatactggctctatatagagatac

SEQ ID NO: 139003 - DNA, 30 bp, Artificial Sequence
  Synthetic oligonucleotide
ttcacgtgggccgcgcttcacccacgatac

SEQ ID NO: 139004 - DNA, 30 bp, Artificial Sequence
  Synthetic oligonucleotide
aaaataacctggtttacgaaagaccgatac

SEQ ID NO: 139005 - DNA, 30 bp, Artificial Sequence
  Synthetic oligonucleotide
ccgacgtggggtggttgagcctttcgatac

SEQ ID NO: 139006 - DNA, 30 bp, Artificial Sequence
  Synthetic oligonucleotide
cgttcatgaagaccggagcaagccggatac

SEQ ID NO: 139007 - DNA, 30 bp, Artificial Sequence
  Synthetic oligonucleotide
ctcagcgctcaagtgagagtagagggatac

SEQ ID NO: 139008 - DNA, 30 bp, Artificial Sequence
  Synthetic oligonucleotide
taacggagtacgatgtaaactacatgatac

SEQ ID NO: 139009 - DNA, 30 bp, Artificial Sequence
  Synthetic oligonucleotide
tgttagcctagggaatcgacgctatgatac

SEQ ID NO: 139010 - DNA, 30 bp, Artificial Sequence
  Synthetic oligonucleotide
tcctgtagaggacggagggacatctgatac

SEQ ID NO: 139011 - DNA, 30 bp, Artificial Sequence
  Synthetic oligonucleotide
gcggcaattctgccgatacaacattgatac

SEQ ID NO: 139012 - DNA, 30 bp, Artificial Sequence
  Synthetic oligonucleotide
gcacgtcttctatgcacaccatgttgatac

SEQ ID NO: 139013 - DNA, 30 bp, Artificial Sequence
  Synthetic oligonucleotide
atggaagaggcaagacatatccaaatatac

SEQ ID NO: 139014 - DNA, 30 bp, Artificial Sequence
  Synthetic oligonucleotide
cccaaatcactaattgaaagcataatatac

SEQ ID NO: 139015 - DNA, 30 bp, Artificial Sequence
  Synthetic oligonucleotide
agatttctaaacggaatccagtaactatac

SEQ ID NO: 139016 - DNA, 30 bp, Artificial Sequence
  Synthetic oligonucleotide
tggcttacaacaaacagacaaccactatac

SEQ ID NO: 139017 - DNA, 30 bp, Artificial Sequence
  Synthetic oligonucleotide
gagaccgagagtgtcagagagacagtatac

SEQ ID NO: 139018 - DNA, 30 bp, Artificial Sequence
  Synthetic oligonucleotide
gggcaggtgctattatcctggcgcgtatac

SEQ ID NO: 139019 - DNA, 30 bp, Artificial Sequence
  Synthetic oligonucleotide
ttagggggtaagtggccgggaggggtatac

SEQ ID NO: 139020 - DNA, 30 bp, Artificial Sequence
  Synthetic oligonucleotide
acgggcggcatcggacgacgatgggtatac

SEQ ID NO: 139021 - DNA, 30 bp, Artificial Sequence
  Synthetic oligonucleotide
cccacgttcaattcaagaaatagattatac

SEQ ID NO: 139022 - DNA, 30 bp, Artificial Sequence
  Synthetic oligonucleotide
cgcgttgcatttgggactatccgattatac

SEQ ID NO: 139023 - DNA, 30 bp, Artificial Sequence
  Synthetic oligonucleotide
gcgtcgggcgaaacgctgaccatattatac

SEQ ID NO: 139024 - DNA, 30 bp, Artificial Sequence
  Synthetic oligonucleotide
gatggcttgcttaagaattcggatttatac

SEQ ID NO: 139025 - DNA, 30 bp, Artificial Sequence
  Synthetic oligonucleotide
aatgagagccgtggccaacctgcaaactac

SEQ ID NO: 139026 - DNA, 30 bp, Artificial Sequence
  Synthetic oligonucleotide
gaagccatcgggattgaagttgcaaactac

SEQ ID NO: 139027 - DNA, 30 bp, Artificial Sequence
  Synthetic oligonucleotide
ctacttacataatgaaatgattagcactac

SEQ ID NO: 139028 - DNA, 30 bp, Artificial Sequence
  Synthetic oligonucleotide
gattaggaaccatagctaatcgatcactac

SEQ ID NO: 139029 - DNA, 30 bp, Artificial Sequence
  Synthetic oligonucleotide
gcgtagaattaaccaacgagtttagactac

SEQ ID NO: 139030 - DNA, 30 bp, Artificial Sequence
  Synthetic oligonucleotide
acatgagaaatccgcgtacagcgggactac

SEQ ID NO: 139031 - DNA, 30 bp, Artificial Sequence
  Synthetic oligonucleotide
cacagatctccgccacgtatatgtgactac

SEQ ID NO: 139032 - DNA, 30 bp, Artificial Sequence
  Synthetic oligonucleotide
agcaggtgctgcaggggtgcgatttactac

SEQ ID NO: 139033 - DNA, 30 bp, Artificial Sequence
  Synthetic oligonucleotide
gatcgagcatgctggaattaacggacctac

SEQ ID NO: 139034 - DNA, 30 bp, Artificial Sequence
  Synthetic oligonucleotide
ggagccgcaacaagtctataaactacctac

SEQ ID NO: 139035 - DNA, 30 bp, Artificial Sequence
  Synthetic oligonucleotide
gtgtctggtatctctggcacaacaccctac

SEQ ID NO: 139036 - DNA, 30 bp, Artificial Sequence
  Synthetic oligonucleotide
ctaactctcaggaacatgggggagccctac

SEQ ID NO: 139037 - DNA, 30 bp, Artificial Sequence
  Synthetic oligonucleotide
cagggggcttctggcctgggtaatgcctac

SEQ ID NO: 139038 - DNA, 30 bp, Artificial Sequence
  Synthetic oligonucleotide
tgagcctagtgagcaagatttctcagctac

SEQ ID NO: 139039 - DNA, 30 bp, Artificial Sequence
  Synthetic oligonucleotide
ttacgaccgacatggagttctgtcagctac

SEQ ID NO: 139040 - DNA, 30 bp, Artificial Sequence
  Synthetic oligonucleotide
tcgtgtataaaggaaaacggttagagctac

SEQ ID NO: 139041 - DNA, 30 bp, Artificial Sequence
  Synthetic oligonucleotide
gggtgcacaccacggaatcaatgacgctac

SEQ ID NO: 139042 - DNA, 30 bp, Artificial Sequence
  Synthetic oligonucleotide
acgtcataatgtgggcctagaatatgctac

SEQ ID NO: 139043 - DNA, 30 bp, Artificial Sequence
  Synthetic oligonucleotide
acggaaaacagtgttggtttacactgctac

SEQ ID NO: 139044 - DNA, 30 bp, Artificial Sequence
  Synthetic oligonucleotide
tggggcaagtctcactgtgggccgtgctac

SEQ ID NO: 139045 - DNA, 30 bp, Artificial Sequence
  Synthetic oligonucleotide
aataggcggggtatgtgaggaacttgctac

SEQ ID NO: 139046 - DNA, 30 bp, Artificial Sequence
  Synthetic oligonucleotide
ttatcgtaagaaagaaggtgcacttgctac

SEQ ID NO: 139047 - DNA, 30 bp, Artificial Sequence
  Synthetic oligonucleotide
ccacatccacttcgtagtttaccttgctac

SEQ ID NO: 139048 - DNA, 30 bp, Artificial Sequence
  Synthetic oligonucleotide
cctaatgtcagtccacagtttgacatctac

SEQ ID NO: 139049 - DNA, 30 bp, Artificial Sequence
  Synthetic oligonucleotide
cgttccgtgacaccacaatgtatcatctac

SEQ ID NO: 139050 - DNA, 30 bp, Artificial Sequence
  Synthetic oligonucleotide
ccagccgggggtccgcgagatgtactctac

SEQ ID NO: 139051 - DNA, 30 bp, Artificial Sequence
  Synthetic oligonucleotide
aagggggcgatagccgaagtacagctctac

SEQ ID NO: 139052 - DNA, 30 bp, Artificial Sequence
  Synthetic oligonucleotide
cgcaattaagtcctgtggagtcagctctac

SEQ ID NO: 139053 - DNA, 30 bp, Artificial Sequence
  Synthetic oligonucleotide
cacatcccggaaccgaagagggtgctctac

SEQ ID NO: 139054 - DNA, 30 bp, Artificial Sequence
  Synthetic oligonucleotide
aagatcctacggctaattattgtagtctac

SEQ ID NO: 139055 - DNA, 30 bp, Artificial Sequence
  Synthetic oligonucleotide
agcacgctgcacacataccactacgtctac

SEQ ID NO: 139056 - DNA, 30 bp, Artificial Sequence
  Synthetic oligonucleotide
tggtgttagccagtagcacttggtgtctac

SEQ ID NO: 139057 - DNA, 30 bp, Artificial Sequence
  Synthetic oligonucleotide
acgcgctcacgcaactcgcttgaattctac

SEQ ID NO: 139058 - DNA, 30 bp, Artificial Sequence
  Synthetic oligonucleotide
ttgagggcggtattcaaccaatagttctac

SEQ ID NO: 139059 - DNA, 30 bp, Artificial Sequence
  Synthetic oligonucleotide
gcattccacaccggagagtgcgggaagtac

SEQ ID NO: 139060 - DNA, 30 bp, Artificial Sequence
  Synthetic oligonucleotide
agtcgtgtcgacacagcgaagccacagtac

SEQ ID NO: 139061 - DNA, 30 bp, Artificial Sequence
  Synthetic oligonucleotide
agagggaaatattcgctcgcacagcagtac

SEQ ID NO: 139062 - DNA, 30 bp, Artificial Sequence
  Synthetic oligonucleotide
cctacgggatttaaagggaagtagcagtac

SEQ ID NO: 139063 - DNA, 30 bp, Artificial Sequence
  Synthetic oligonucleotide
ggagggcgatacaggaaacggcggcagtac

SEQ ID NO: 139064 - DNA, 30 bp, Artificial Sequence
  Synthetic oligonucleotide
gagtccaggacaaactaaatcatggagtac

SEQ ID NO: 139065 - DNA, 29 bp, Artificial Sequence
  Synthetic oligonucleotide
aaggatcagtatggcgagttctgtagtac

SEQ ID NO: 139066 - DNA, 30 bp, Artificial Sequence
  Synthetic oligonucleotide
ctaatggagacataaaatgagggcacgtac

SEQ ID NO: 139067 - DNA, 30 bp, Artificial Sequence
  Synthetic oligonucleotide
agagcgggggcctctattccatctacgtac

SEQ ID NO: 139068 - DNA, 30 bp, Artificial Sequence
  Synthetic oligonucleotide
agagcgatactagtgaagctacacccgtac

SEQ ID NO: 139069 - DNA, 30 bp, Artificial Sequence
  Synthetic oligonucleotide
gcaaagggtcattatgaacggcacccgtac

SEQ ID NO: 139070 - DNA, 30 bp, Artificial Sequence
  Synthetic oligonucleotide
tagcggcaaaacccaaccgtacgtccgtac

SEQ ID NO: 139071 - DNA, 30 bp, Artificial Sequence
  Synthetic oligonucleotide
aggcatcgttgaggttttggcggtccgtac

SEQ ID NO: 139072 - DNA, 30 bp, Artificial Sequence
  Synthetic oligonucleotide
gaagcagggggcaaggctggcgtcgcgtac

SEQ ID NO: 139073 - DNA, 30 bp, Artificial Sequence
  Synthetic oligonucleotide
acgccctagaaggagccgtttggtgcgtac

SEQ ID NO: 139074 - DNA, 30 bp, Artificial Sequence
  Synthetic oligonucleotide
ggtacggtggagagtcatgaacaatcgtac

SEQ ID NO: 139075 - DNA, 30 bp, Artificial Sequence
  Synthetic oligonucleotide
gtaggtctgatgagccatcacagatcgtac

SEQ ID NO: 139076 - DNA, 30 bp, Artificial Sequence
  Synthetic oligonucleotide
gacgggagcccgcagagtggtcgttcgtac

SEQ ID NO: 139077 - DNA, 30 bp, Artificial Sequence
  Synthetic oligonucleotide
cagggggtacggggattaaccggcaggtac

SEQ ID NO: 139078 - DNA, 30 bp, Artificial Sequence
  Synthetic oligonucleotide
ggacgtcgaccatctccatagaagtggtac

SEQ ID NO: 139079 - DNA, 30 bp, Artificial Sequence
  Synthetic oligonucleotide
ccggcggagcctatactcgcatcaatgtac

SEQ ID NO: 139080 - DNA, 30 bp, Artificial Sequence
  Synthetic oligonucleotide
gccaacatgaaagagctaagtagaatgtac

SEQ ID NO: 139081 - DNA, 30 bp, Artificial Sequence
  Synthetic oligonucleotide
ttggtattgggaagtttaaggtgcatgtac

SEQ ID NO: 139082 - DNA, 30 bp, Artificial Sequence
  Synthetic oligonucleotide
caacatgtcccagtcgtatcccaactgtac

SEQ ID NO: 139083 - DNA, 30 bp, Artificial Sequence
  Synthetic oligonucleotide
aggtttacagccgaatgacctgcactgtac

SEQ ID NO: 139084 - DNA, 30 bp, Artificial Sequence
  Synthetic oligonucleotide
catctgcgtgtgctgatgaacctgctgtac

SEQ ID NO: 139085 - DNA, 30 bp, Artificial Sequence
  Synthetic oligonucleotide
ggcacacggattgtataggcattgctgtac

SEQ ID NO: 139086 - DNA, 30 bp, Artificial Sequence
  Synthetic oligonucleotide
atacgctgggccggcaaatcaacagtgtac

SEQ ID NO: 139087 - DNA, 30 bp, Artificial Sequence
  Synthetic oligonucleotide
ggctcaacgacaaaatagtgccgagtgtac

SEQ ID NO: 139088 - DNA, 30 bp, Artificial Sequence
  Synthetic oligonucleotide
gcaatgggtgaggtacatgtagacgtgtac

SEQ ID NO: 139089 - DNA, 30 bp, Artificial Sequence
  Synthetic oligonucleotide
atagtattgttaagagcatagagtgtgtac

SEQ ID NO: 139090 - DNA, 30 bp, Artificial Sequence
  Synthetic oligonucleotide
catcgctcctgaattcgtatgtctttgtac

SEQ ID NO: 139091 - DNA, 30 bp, Artificial Sequence
  Synthetic oligonucleotide
tcatacaacgccgtagatccttaacattac

SEQ ID NO: 139092 - DNA, 30 bp, Artificial Sequence
  Synthetic oligonucleotide
attggaaaatggtgcaattttgccgattac

SEQ ID NO: 139093 - DNA, 30 bp, Artificial Sequence
  Synthetic oligonucleotide
cagggctggagtaccccgagtggatattac

SEQ ID NO: 139094 - DNA, 30 bp, Artificial Sequence
  Synthetic oligonucleotide
gggttttccagaatgaacggtaggacttac

SEQ ID NO: 139095 - DNA, 30 bp, Artificial Sequence
  Synthetic oligonucleotide
aggtgcacttgtatcggctgaagtacttac

SEQ ID NO: 139096 - DNA, 30 bp, Artificial Sequence
  Synthetic oligonucleotide
aaggttttatcgccaactaatgcaccttac

SEQ ID NO: 139097 - DNA, 30 bp, Artificial Sequence
  Synthetic oligonucleotide
gaaggccattagggaacagcatcgccttac

SEQ ID NO: 139098 - DNA, 30 bp, Artificial Sequence
  Synthetic oligonucleotide
atgtgtatcttaagatacagtggggcttac

SEQ ID NO: 139099 - DNA, 30 bp, Artificial Sequence
  Synthetic oligonucleotide
cagagtgtagatcgcatcctagttgcttac

SEQ ID NO: 139100 - DNA, 30 bp, Artificial Sequence
  Synthetic oligonucleotide
cgggaacgaggctacatgccttcatcttac

SEQ ID NO: 139101 - DNA, 30 bp, Artificial Sequence
  Synthetic oligonucleotide
taggtagggaaaaaaggttatggctcttac

SEQ ID NO: 139102 - DNA, 30 bp, Artificial Sequence
  Synthetic oligonucleotide
cgcacctaacaatgatgaagtaagtcttac

SEQ ID NO: 139103 - DNA, 30 bp, Artificial Sequence
  Synthetic oligonucleotide
tagggacggattcaaagtatatcaagttac

SEQ ID NO: 139104 - DNA, 30 bp, Artificial Sequence
  Synthetic oligonucleotide
cacacttaaggggataaataacgcagttac

SEQ ID NO: 139105 - DNA, 30 bp, Artificial Sequence
  Synthetic oligonucleotide
gcactgtcgaagcgaggtagtctgagttac

SEQ ID NO: 139106 - DNA, 30 bp, Artificial Sequence
  Synthetic oligonucleotide
ctagaataactaatagggttgaatcgttac

SEQ ID NO: 139107 - DNA, 30 bp, Artificial Sequence
  Synthetic oligonucleotide
gggcgacttaaccccattgtgtatcgttac

SEQ ID NO: 139108 - DNA, 30 bp, Artificial Sequence
  Synthetic oligonucleotide
gggaggcatgcaagggaatatggtcgttac

SEQ ID NO: 139109 - DNA, 30 bp, Artificial Sequence
  Synthetic oligonucleotide
atgaaacgtgcagcgcgtgccattcgttac

SEQ ID NO: 139110 - DNA, 30 bp, Artificial Sequence
  Synthetic oligonucleotide
cacgccttgtaagggacgaaaagaggttac

SEQ ID NO: 139111 - DNA, 30 bp, Artificial Sequence
  Synthetic oligonucleotide
gctcggacgtttgggttgagtaagggttac

SEQ ID NO: 139112 - DNA, 30 bp, Artificial Sequence
  Synthetic oligonucleotide
ggtcgaagttaacaggctaaatagatttac

SEQ ID NO: 139113 - DNA, 30 bp, Artificial Sequence
  Synthetic oligonucleotide
gaggggacattgctacaattcccgatttac

SEQ ID NO: 139114 - DNA, 30 bp, Artificial Sequence
  Synthetic oligonucleotide
ctatgtgagctaggtgcattgcacttttac

SEQ ID NO: 139115 - DNA, 30 bp, Artificial Sequence
  Synthetic oligonucleotide
taagaggggccagaagtgatagtgaaaacc

SEQ ID NO: 139116 - DNA, 30 bp, Artificial Sequence
  Synthetic oligonucleotide
cgagcagataagggatactccattaaaacc

SEQ ID NO: 139117 - DNA, 30 bp, Artificial Sequence
  Synthetic oligonucleotide
atacaagaaaggtgttaaggaaggcaaacc

SEQ ID NO: 139118 - DNA, 30 bp, Artificial Sequence
  Synthetic oligonucleotide
cgatgcgatcctccctagatggatcaaacc

SEQ ID NO: 139119 - DNA, 30 bp, Artificial Sequence
  Synthetic oligonucleotide
aactgtgggaaacaaaagttgtatcaaacc

SEQ ID NO: 139120 - DNA, 30 bp, Artificial Sequence
  Synthetic oligonucleotide
tgagggatatgtcaactcgccaacgaaacc

SEQ ID NO: 139121 - DNA, 30 bp, Artificial Sequence
  Synthetic oligonucleotide
caaaattagacccgaaactaacccgaaacc

SEQ ID NO: 139122 - DNA, 30 bp, Artificial Sequence
  Synthetic oligonucleotide
tggagtagctaagccaggcgcgccgaaacc

SEQ ID NO: 139123 - DNA, 30 bp, Artificial Sequence
  Synthetic oligonucleotide
tgacgtataagtagggctaggtccgaaacc

SEQ ID NO: 139124 - DNA, 30 bp, Artificial Sequence
  Synthetic oligonucleotide
cagaatcctctatactcgtcgtgcgaaacc

SEQ ID NO: 139125 - DNA, 30 bp, Artificial Sequence
  Synthetic oligonucleotide
acgctaattcaggcagttaatttggaaacc

SEQ ID NO: 139126 - DNA, 30 bp, Artificial Sequence
  Synthetic oligonucleotide
agcgaggagcggcaaggccccctctaaacc

SEQ ID NO: 139127 - DNA, 30 bp, Artificial Sequence
  Synthetic oligonucleotide
gtaggttaagcacacaaaaaagcgtaaacc

SEQ ID NO: 139128 - DNA, 30 bp, Artificial Sequence
  Synthetic oligonucleotide
tgcataatgaagggataatacctgtaaacc

SEQ ID NO: 139129 - DNA, 30 bp, Artificial Sequence
  Synthetic oligonucleotide
gacatagacttcgaaaccaagtgaccaacc

SEQ ID NO: 139130 - DNA, 30 bp, Artificial Sequence
  Synthetic oligonucleotide
atgcgagtttggacacacgaatccccaacc

SEQ ID NO: 139131 - DNA, 30 bp, Artificial Sequence
  Synthetic oligonucleotide
agtgcgagcagaccgaagggcactccaacc

SEQ ID NO: 139132 - DNA, 30 bp, Artificial Sequence
  Synthetic oligonucleotide
gacattactatgagatgaactagctcaacc

SEQ ID NO: 139133 - DNA, 30 bp, Artificial Sequence
  Synthetic oligonucleotide
tacgttagtgtccttgcgagaagttcaacc

SEQ ID NO: 139134 - DNA, 30 bp, Artificial Sequence
  Synthetic oligonucleotide
tactgactagatctagagccttgaagaacc

SEQ ID NO: 139135 - DNA, 30 bp, Artificial Sequence
  Synthetic oligonucleotide
aaagtaggtcctcatagcggatacagaacc

SEQ ID NO: 139136 - DNA, 30 bp, Artificial Sequence
  Synthetic oligonucleotide
agcagcatcgtcaagatgggacggcgaacc

SEQ ID NO: 139137 - DNA, 30 bp, Artificial Sequence
  Synthetic oligonucleotide
gggctatcgattgatccatctcaaggaacc

SEQ ID NO: 139138 - DNA, 30 bp, Artificial Sequence
  Synthetic oligonucleotide
gataccgggggtggagtatagttcggaacc

SEQ ID NO: 139139 - DNA, 30 bp, Artificial Sequence
  Synthetic oligonucleotide
tgcgctcagcggcaaagattggatggaacc

SEQ ID NO: 139140 - DNA, 30 bp, Artificial Sequence
  Synthetic oligonucleotide
gggtagacatacgtatacgaagtatgaacc

SEQ ID NO: 139141 - DNA, 30 bp, Artificial Sequence
  Synthetic oligonucleotide
caaggctatgatgactatgggccctgaacc

SEQ ID NO: 139142 - DNA, 30 bp, Artificial Sequence
  Synthetic oligonucleotide
gctaagccgcgcgcgaaacaagattgaacc

SEQ ID NO: 139143 - DNA, 30 bp, Artificial Sequence
  Synthetic oligonucleotide
taggtgtcgacggagatgcggagaataacc

SEQ ID NO: 139144 - DNA, 30 bp, Artificial Sequence
  Synthetic oligonucleotide
tgggttcgaacacggaatggtctaataacc

SEQ ID NO: 139145 - DNA, 30 bp, Artificial Sequence
  Synthetic oligonucleotide
cactcaagaagaatgacgggcgggataacc

SEQ ID NO: 139146 - DNA, 30 bp, Artificial Sequence
  Synthetic oligonucleotide
cacgggagtaagtcgttaagacgcctaacc

SEQ ID NO: 139147 - DNA, 30 bp, Artificial Sequence
  Synthetic oligonucleotide
taagcgggaagtagacccgggttcctaacc

SEQ ID NO: 139148 - DNA, 30 bp, Artificial Sequence
  Synthetic oligonucleotide
atcgctagaacgcgatcagaacgtgtaacc

SEQ ID NO: 139149 - DNA, 30 bp, Artificial Sequence
  Synthetic oligonucleotide
gggaagacgtcgaggatcacaaacttaacc

SEQ ID NO: 139150 - DNA, 30 bp, Artificial Sequence
  Synthetic oligonucleotide
tagctcaggaaaagccacatctacttaacc

SEQ ID NO: 139151 - DNA, 30 bp, Artificial Sequence
  Synthetic oligonucleotide
cgtcgactaactggggaaagcgggttaacc

SEQ ID NO: 139152 - DNA, 30 bp, Artificial Sequence
  Synthetic oligonucleotide
ctggtaagttaatcattagtatataacacc

SEQ ID NO: 139153 - DNA, 30 bp, Artificial Sequence
  Synthetic oligonucleotide
acgctcccaaacgaaaatccacgtaacacc

SEQ ID NO: 139154 - DNA, 30 bp, Artificial Sequence
  Synthetic oligonucleotide
gcggtgattgccaatcagtctgttaacacc

SEQ ID NO: 139155 - DNA, 30 bp, Artificial Sequence
  Synthetic oligonucleotide
agaaaacggcactctacgtgagcgcacacc

SEQ ID NO: 139156 - DNA, 30 bp, Artificial Sequence
  Synthetic oligonucleotide
aactgggcaaactcttacaggtctcacacc

SEQ ID NO: 139157 - DNA, 30 bp, Artificial Sequence
  Synthetic oligonucleotide
tctaagtggtagcgtcaagaccgagacacc

SEQ ID NO: 139158 - DNA, 30 bp, Artificial Sequence
  Synthetic oligonucleotide
tagattgccacatataatacggacgacacc

SEQ ID NO: 139159 - DNA, 30 bp, Artificial Sequence
  Synthetic oligonucleotide
tacggtctgaggaaccatatagtcgacacc

SEQ ID NO: 139160 - DNA, 30 bp, Artificial Sequence
  Synthetic oligonucleotide
agtagggctgcctacctagcatgggacacc

SEQ ID NO: 139161 - DNA, 30 bp, Artificial Sequence
  Synthetic oligonucleotide
atgtagtagcaaagcacactcagatacacc

SEQ ID NO: 139162 - DNA, 30 bp, Artificial Sequence
  Synthetic oligonucleotide
tagtaatggctgaagtcggtattgtacacc

SEQ ID NO: 139163 - DNA, 30 bp, Artificial Sequence
  Synthetic oligonucleotide
atgttaatgaaggggggttacaccaccacc

SEQ ID NO: 139164 - DNA, 30 bp, Artificial Sequence
  Synthetic oligonucleotide
cgatatcgcaagtgtagaacgagcaccacc

SEQ ID NO: 139165 - DNA, 30 bp, Artificial Sequence
  Synthetic oligonucleotide
agacacgtcgtgaaataccaggtcaccacc

SEQ ID NO: 139166 - DNA, 30 bp, Artificial Sequence
  Synthetic oligonucleotide
aagcgaatctgataggtcccagagaccacc

SEQ ID NO: 139167 - DNA, 30 bp, Artificial Sequence
  Synthetic oligonucleotide
ccagctcgttaacgtgccgttaaggccacc

SEQ ID NO: 139168 - DNA, 30 bp, Artificial Sequence
  Synthetic oligonucleotide
atcggtaaaacattcactgcccaggccacc

SEQ ID NO: 139169 - DNA, 30 bp, Artificial Sequence
  Synthetic oligonucleotide
attacttccacatcgggaccagtgtccacc

SEQ ID NO: 139170 - DNA, 30 bp, Artificial Sequence
  Synthetic oligonucleotide
tgtacgggcggggtcccggaaagttccacc

SEQ ID NO: 139171 - DNA, 30 bp, Artificial Sequence
  Synthetic oligonucleotide
agcggtgtgcctaggactgcgtacagcacc

SEQ ID NO: 139172 - DNA, 30 bp, Artificial Sequence
  Synthetic oligonucleotide
atgtttccatggctaaagacaaccagcacc

SEQ ID NO: 139173 - DNA, 30 bp, Artificial Sequence
  Synthetic oligonucleotide
gagaggggtgtcacttaaaaaaatagcacc

SEQ ID NO: 139174 - DNA, 30 bp, Artificial Sequence
  Synthetic oligonucleotide
tccggatacttggaagtaaatggtagcacc

SEQ ID NO: 139175 - DNA, 30 bp, Artificial Sequence
  Synthetic oligonucleotide
ggtgtgtatcgacacttaaacgttagcacc

SEQ ID NO: 139176 - DNA, 30 bp, Artificial Sequence
  Synthetic oligonucleotide
agttaagcaatttaaaggacgtcccgcacc

SEQ ID NO: 139177 - DNA, 30 bp, Artificial Sequence
  Synthetic oligonucleotide
taacaataatctgtggacccgaagcgcacc

SEQ ID NO: 139178 - DNA, 30 bp, Artificial Sequence
  Synthetic oligonucleotide
cgtgtaatgtagttgacaagaatatgcacc

SEQ ID NO: 139179 - DNA, 30 bp, Artificial Sequence
  Synthetic oligonucleotide
agatgatggcagactccattcatcatcacc

SEQ ID NO: 139180 - DNA, 30 bp, Artificial Sequence
  Synthetic oligonucleotide
cctggaaattaggacaagggggcgatcacc

SEQ ID NO: 139181 - DNA, 30 bp, Artificial Sequence
  Synthetic oligonucleotide
acatgccgaaaatcaacggttcgtgtcacc

SEQ ID NO: 139182 - DNA, 30 bp, Artificial Sequence
  Synthetic oligonucleotide
ctacgggatacaactctgaatggattcacc

SEQ ID NO: 139183 - DNA, 30 bp, Artificial Sequence
  Synthetic oligonucleotide
ccatggaggctggggatctaagagttcacc

SEQ ID NO: 139184 - DNA, 30 bp, Artificial Sequence
  Synthetic oligonucleotide
acattccagactatagggcattaccagacc

SEQ ID NO: 139185 - DNA, 30 bp, Artificial Sequence
  Synthetic oligonucleotide
agggcagcgatttggctacggctgcagacc

SEQ ID NO: 139186 - DNA, 30 bp, Artificial Sequence
  Synthetic oligonucleotide
acgtaaaggctacctttagtgagtcagacc

SEQ ID NO: 139187 - DNA, 30 bp, Artificial Sequence
  Synthetic oligonucleotide
gagcacctcgtgtggggtctatgagagacc

SEQ ID NO: 139188 - DNA, 30 bp, Artificial Sequence
  Synthetic oligonucleotide
tgagattagggtgtttaggagttagagacc

SEQ ID NO: 139189 - DNA, 30 bp, Artificial Sequence
  Synthetic oligonucleotide
gcagatgggataaccattcgccccgagacc

SEQ ID NO: 139190 - DNA, 30 bp, Artificial Sequence
  Synthetic oligonucleotide
ataaagatacaaggctacagcgctgagacc

SEQ ID NO: 139191 - DNA, 30 bp, Artificial Sequence
  Synthetic oligonucleotide
aattaggaaaacgaggtcgggatatagacc

SEQ ID NO: 139192 - DNA, 30 bp, Artificial Sequence
  Synthetic oligonucleotide
tacttcgcggcgttagacaacaatacgacc

SEQ ID NO: 139193 - DNA, 30 bp, Artificial Sequence
  Synthetic oligonucleotide
tgggcctgccaggtacaatctatcccgacc

SEQ ID NO: 139194 - DNA, 30 bp, Artificial Sequence
  Synthetic oligonucleotide
aaagacgagcgttacgcgaagcgagcgacc

SEQ ID NO: 139195 - DNA, 30 bp, Artificial Sequence
  Synthetic oligonucleotide
tcagggcttgagcacgtaggctcggcgacc

SEQ ID NO: 139196 - DNA, 30 bp, Artificial Sequence
  Synthetic oligonucleotide
ctgttatgccggagctttaccgctgcgacc

SEQ ID NO: 139197 - DNA, 30 bp, Artificial Sequence
  Synthetic oligonucleotide
gaaacgaacgaacctgaaacactaaggacc

SEQ ID NO: 139198 - DNA, 30 bp, Artificial Sequence
  Synthetic oligonucleotide
tcataaaggtgtctaccgttgctaaggacc

SEQ ID NO: 139199 - DNA, 30 bp, Artificial Sequence
  Synthetic oligonucleotide
acaacaatcattgtggaccggcaccggacc

SEQ ID NO: 139200 - DNA, 30 bp, Artificial Sequence
  Synthetic oligonucleotide
cccgggagaagtttgtcgggagaggggacc

SEQ ID NO: 139201 - DNA, 30 bp, Artificial Sequence
  Synthetic oligonucleotide
gggcgccggcctgtcaaaatgtcatggacc

SEQ ID NO: 139202 - DNA, 30 bp, Artificial Sequence
  Synthetic oligonucleotide
aataaaggtaatgccaatggtacctggacc

SEQ ID NO: 139203 - DNA, 30 bp, Artificial Sequence
  Synthetic oligonucleotide
tagaactcgagaaattgggactcctggacc

SEQ ID NO: 139204 - DNA, 30 bp, Artificial Sequence
  Synthetic oligonucleotide
ctatacttgcagaaatagtacgggtggacc

SEQ ID NO: 139205 - DNA, 30 bp, Artificial Sequence
  Synthetic oligonucleotide
ggcaaatgctcaacgccgggctcaatgacc

SEQ ID NO: 139206 - DNA, 30 bp, Artificial Sequence
  Synthetic oligonucleotide
tgtcgatccgaccttgctgtgggaatgacc

SEQ ID NO: 139207 - DNA, 30 bp, Artificial Sequence
  Synthetic oligonucleotide
acaatggatgtaggtggcgtttgcatgacc

SEQ ID NO: 139208 - DNA, 30 bp, Artificial Sequence
  Synthetic oligonucleotide
cggtagggtaatagataccatcccctgacc

SEQ ID NO: 139209 - DNA, 30 bp, Artificial Sequence
  Synthetic oligonucleotide
ggaaggcgcgtcgtgcgcaagtgtctgacc

SEQ ID NO: 139210 - DNA, 30 bp, Artificial Sequence
  Synthetic oligonucleotide
cgaattacaagtggtacacgcggcgtgacc

SEQ ID NO: 139211 - DNA, 30 bp, Artificial Sequence
  Synthetic oligonucleotide
ccaattacttagtactcccgatgtgtgacc

SEQ ID NO: 139212 - DNA, 30 bp, Artificial Sequence
  Synthetic oligonucleotide
agtccgaagaaagttacaggactattgacc

SEQ ID NO: 139213 - DNA, 30 bp, Artificial Sequence
  Synthetic oligonucleotide
atcaacgatcgtgtatgatttacgaatacc

SEQ ID NO: 139214 - DNA, 30 bp, Artificial Sequence
  Synthetic oligonucleotide
gaagctagggagctttacgaatgcgatacc

SEQ ID NO: 139215 - DNA, 30 bp, Artificial Sequence
  Synthetic oligonucleotide
ccgtagcacctctaacacagtaagtatacc

SEQ ID NO: 139216 - DNA, 30 bp, Artificial Sequence
  Synthetic oligonucleotide
cacaagcttcgtcttgtcctaccgtatacc

SEQ ID NO: 139217 - DNA, 30 bp, Artificial Sequence
  Synthetic oligonucleotide
ggtctgctgaaacacaagtgattttatacc

SEQ ID NO: 139218 - DNA, 30 bp, Artificial Sequence
  Synthetic oligonucleotide
caggggcagtttgaagaggagtaaactacc

SEQ ID NO: 139219 - DNA, 30 bp, Artificial Sequence
  Synthetic oligonucleotide
cctagctccaccccaacttaggccactacc

SEQ ID NO: 139220 - DNA, 30 bp, Artificial Sequence
  Synthetic oligonucleotide
acaggcgcccccagcatcaatcagactacc

SEQ ID NO: 139221 - DNA, 30 bp, Artificial Sequence
  Synthetic oligonucleotide
aaagattagtatgttagtagagtgactacc

SEQ ID NO: 139222 - DNA, 30 bp, Artificial Sequence
  Synthetic oligonucleotide
gggacaagttaatccaccaagcctcctacc

SEQ ID NO: 139223 - DNA, 30 bp, Artificial Sequence
  Synthetic oligonucleotide
tttacaaggataatctcatgaaccgctacc

SEQ ID NO: 139224 - DNA, 30 bp, Artificial Sequence
  Synthetic oligonucleotide
cgccagcgtcggagaggtgatttggctacc

SEQ ID NO: 139225 - DNA, 30 bp, Artificial Sequence
  Synthetic oligonucleotide
cgacatcaagttcgtggttctgtctctacc

SEQ ID NO: 139226 - DNA, 30 bp, Artificial Sequence
  Synthetic oligonucleotide
ggtacgatactagctcagtgatggtctacc

SEQ ID NO: 139227 - DNA, 30 bp, Artificial Sequence
  Synthetic oligonucleotide
cagactatcagtataaggtattgtagtacc

SEQ ID NO: 139228 - DNA, 30 bp, Artificial Sequence
  Synthetic oligonucleotide
aacaaagtcagatatatagagtcgcgtacc

SEQ ID NO: 139229 - DNA, 30 bp, Artificial Sequence
  Synthetic oligonucleotide
acactatatgacgtccttgttttgcgtacc

SEQ ID NO: 139230 - DNA, 30 bp, Artificial Sequence
  Synthetic oligonucleotide
ggtgcgctcgcaacgtagtagccaggtacc

SEQ ID NO: 139231 - DNA, 30 bp, Artificial Sequence
  Synthetic oligonucleotide
ggaggtatgcacaggctgctggatggtacc

SEQ ID NO: 139232 - DNA, 30 bp, Artificial Sequence
  Synthetic oligonucleotide
tctcgtaccggcaactataccacatgtacc

SEQ ID NO: 139233 - DNA, 30 bp, Artificial Sequence
  Synthetic oligonucleotide
atagccaggagtaagacggatacatgtacc

SEQ ID NO: 139234 - DNA, 30 bp, Artificial Sequence
  Synthetic oligonucleotide
cggaaagtacgtagacacgtttcctgtacc

SEQ ID NO: 139235 - DNA, 30 bp, Artificial Sequence
  Synthetic oligonucleotide
aggggagcgggaccgctaagggtctgtacc

SEQ ID NO: 139236 - DNA, 30 bp, Artificial Sequence
  Synthetic oligonucleotide
atgccgccattaatcgaccacttctgtacc

SEQ ID NO: 139237 - DNA, 30 bp, Artificial Sequence
  Synthetic oligonucleotide
tagtaccttcggctagaactgcgcattacc

SEQ ID NO: 139238 - DNA, 30 bp, Artificial Sequence
  Synthetic oligonucleotide
gcacgacgacgagcgcaaggtcgtattacc

SEQ ID NO: 139239 - DNA, 30 bp, Artificial Sequence
  Synthetic oligonucleotide
cgacaacccaacggggcacgggagcttacc

SEQ ID NO: 139240 - DNA, 30 bp, Artificial Sequence
  Synthetic oligonucleotide
agtagagctgtcgatgcgcacgcgcttacc

SEQ ID NO: 139241 - DNA, 30 bp, Artificial Sequence
  Synthetic oligonucleotide
ggggaacacttctcaagttctctcgttacc

SEQ ID NO: 139242 - DNA, 30 bp, Artificial Sequence
  Synthetic oligonucleotide
tagaaagcggatacatatttgcctaaaccc

SEQ ID NO: 139243 - DNA, 30 bp, Artificial Sequence
  Synthetic oligonucleotide
agttcagtatggtggagcggaagtaaaccc

SEQ ID NO: 139244 - DNA, 30 bp, Artificial Sequence
  Synthetic oligonucleotide
aatgtccgtaggacgcgtggtacacaaccc

SEQ ID NO: 139245 - DNA, 30 bp, Artificial Sequence
  Synthetic oligonucleotide
cccaattgagttcaggatcacagtcaaccc

SEQ ID NO: 139246 - DNA, 30 bp, Artificial Sequence
  Synthetic oligonucleotide
atggccacgcaccacctcagcagttaaccc

SEQ ID NO: 139247 - DNA, 30 bp, Artificial Sequence
  Synthetic oligonucleotide
cggcatcagatcccgaatcgggtttaaccc

SEQ ID NO: 139248 - DNA, 30 bp, Artificial Sequence
  Synthetic oligonucleotide
tatgttggatgttactctcgtgacacaccc

SEQ ID NO: 139249 - DNA, 30 bp, Artificial Sequence
  Synthetic oligonucleotide
tggtatgcaagaattttttcagctccaccc

SEQ ID NO: 139250 - DNA, 30 bp, Artificial Sequence
  Synthetic oligonucleotide
gcaagaattagactaatgagggttccaccc

SEQ ID NO: 139251 - DNA, 30 bp, Artificial Sequence
  Synthetic oligonucleotide
gagctgcatcacgagtccacctaggcaccc

SEQ ID NO: 139252 - DNA, 30 bp, Artificial Sequence
  Synthetic oligonucleotide
agctaaatcggctgcgaggtattggcaccc

SEQ ID NO: 139253 - DNA, 30 bp, Artificial Sequence
  Synthetic oligonucleotide
ttaggtcaggaaggatatttgcagtcaccc

SEQ ID NO: 139254 - DNA, 30 bp, Artificial Sequence
  Synthetic oligonucleotide
tcggtcatgagacttaaattttggtcaccc

SEQ ID NO: 139255 - DNA, 30 bp, Artificial Sequence
  Synthetic oligonucleotide
caagggcagacccacgtaaagtattcaccc

SEQ ID NO: 139256 - DNA, 30 bp, Artificial Sequence
  Synthetic oligonucleotide
caaggtggtaaacccagcgcaacaagaccc

SEQ ID NO: 139257 - DNA, 30 bp, Artificial Sequence
  Synthetic oligonucleotide
aggctggccatacgccgtctctctagaccc

SEQ ID NO: 139258 - DNA, 30 bp, Artificial Sequence
  Synthetic oligonucleotide
acatttgcgatgcgttacatttgccgaccc

SEQ ID NO: 139259 - DNA, 30 bp, Artificial Sequence
  Synthetic oligonucleotide
aacagtagcacatgcgtaggcgggcgaccc

SEQ ID NO: 139260 - DNA, 30 bp, Artificial Sequence
  Synthetic oligonucleotide
accaggcgacctgtaaggagggtgcgaccc

SEQ ID NO: 139261 - DNA, 30 bp, Artificial Sequence
  Synthetic oligonucleotide
tgtggttgaccccataaccgtgatcgaccc

SEQ ID NO: 139262 - DNA, 30 bp, Artificial Sequence
  Synthetic oligonucleotide
gctatgttagaagcgtcaggcaacggaccc

SEQ ID NO: 139263 - DNA, 30 bp, Artificial Sequence
  Synthetic oligonucleotide
tgcgaacgaccgagtcagtcatccggaccc

SEQ ID NO: 139264 - DNA, 30 bp, Artificial Sequence
  Synthetic oligonucleotide
gggggcaaagtggctataagcgcgggaccc

SEQ ID NO: 139265 - DNA, 30 bp, Artificial Sequence
  Synthetic oligonucleotide
ggttaagacatatacgcttcttattgaccc

SEQ ID NO: 139266 - DNA, 30 bp, Artificial Sequence
  Synthetic oligonucleotide
acgtgtgttcagacaggccaataaataccc

SEQ ID NO: 139267 - DNA, 30 bp, Artificial Sequence
  Synthetic oligonucleotide
cacataagcgagacatgacaatatataccc

SEQ ID NO: 139268 - DNA, 30 bp, Artificial Sequence
  Synthetic oligonucleotide
aaggtggttccagtagtaggaatcgtaccc

SEQ ID NO: 139269 - DNA, 30 bp, Artificial Sequence
  Synthetic oligonucleotide
agaccgtggacgctatgcatacgtgtaccc

SEQ ID NO: 139270 - DNA, 30 bp, Artificial Sequence
  Synthetic oligonucleotide
acggtcgtccgatccacgttgattgtaccc

SEQ ID NO: 139271 - DNA, 30 bp, Artificial Sequence
  Synthetic oligonucleotide
aatgggctgcaatatagtccaacattaccc

SEQ ID NO: 139272 - DNA, 30 bp, Artificial Sequence
  Synthetic oligonucleotide
cggaacagcaggcctagaagtgctttaccc

SEQ ID NO: 139273 - DNA, 30 bp, Artificial Sequence
  Synthetic oligonucleotide
ttgcctgggccaaatgcacgaaaacacccc

SEQ ID NO: 139274 - DNA, 30 bp, Artificial Sequence
  Synthetic oligonucleotide
ctgtgaagcgcggaacgattaaatcacccc

SEQ ID NO: 139275 - DNA, 30 bp, Artificial Sequence
  Synthetic oligonucleotide
cgacacaaagacatcagatacaagtacccc

SEQ ID NO: 139276 - DNA, 30 bp, Artificial Sequence
  Synthetic oligonucleotide
taaccggaacggaggcgggggcagtacccc

SEQ ID NO: 139277 - DNA, 30 bp, Artificial Sequence
  Synthetic oligonucleotide
tagtagaccaggtgctggacgataaccccc

SEQ ID NO: 139278 - DNA, 30 bp, Artificial Sequence
  Synthetic oligonucleotide
agatgtactacggtaaattagattaccccc

SEQ ID NO: 139279 - DNA, 30 bp, Artificial Sequence
  Synthetic oligonucleotide
aggctattaagcaacttcggttcccccccc

SEQ ID NO: 139280 - DNA, 30 bp, Artificial Sequence
  Synthetic oligonucleotide
gttggcttaccacagaagacatcgcccccc

SEQ ID NO: 139281 - DNA, 30 bp, Artificial Sequence
  Synthetic oligonucleotide
agcggatccagagagggagcggatgccccc

SEQ ID NO: 139282 - DNA, 30 bp, Artificial Sequence
  Synthetic oligonucleotide
gaccccgtaaggacaacaatgccttccccc

SEQ ID NO: 139283 - DNA, 30 bp, Artificial Sequence
  Synthetic oligonucleotide
aaagtatcgaaaatccgccgtgaaagcccc

SEQ ID NO: 139284 - DNA, 30 bp, Artificial Sequence
  Synthetic oligonucleotide
gttacgagggtgcgcaagctcgaacgcccc

SEQ ID NO: 139285 - DNA, 30 bp, Artificial Sequence
  Synthetic oligonucleotide
aggaatagggtctaaaggacttaacgcccc

SEQ ID NO: 139286 - DNA, 30 bp, Artificial Sequence
  Synthetic oligonucleotide
gtcgtagcgcactattattgacctcgcccc

SEQ ID NO: 139287 - DNA, 30 bp, Artificial Sequence
  Synthetic oligonucleotide
caaatcatgaaaattgctaacagtcgcccc

SEQ ID NO: 139288 - DNA, 30 bp, Artificial Sequence
  Synthetic oligonucleotide
ataaacggttctatcgtatcggttcgcccc

SEQ ID NO: 139289 - DNA, 34 bp, Artificial Sequence
  Synthetic oligonucleotide
actaacgacgatccgagtaccaccaatcggcccc

SEQ ID NO: 139290 - DNA, 30 bp, Artificial Sequence
  Synthetic oligonucleotide
cggttcgggaatctttccgtagttggcccc

SEQ ID NO: 139291 - DNA, 30 bp, Artificial Sequence
  Synthetic oligonucleotide
gaatactaataacagcgaataagatgcccc

SEQ ID NO: 139292 - DNA, 30 bp, Artificial Sequence
  Synthetic oligonucleotide
acgaacaatggacgttactgagtatgcccc

SEQ ID NO: 139293 - DNA, 30 bp, Artificial Sequence
  Synthetic oligonucleotide
ttgatagtgataaatcgctaagggtgcccc

SEQ ID NO: 139294 - DNA, 30 bp, Artificial Sequence
  Synthetic oligonucleotide
gagcccttcgccaatacaaacatgatcccc

SEQ ID NO: 139295 - DNA, 30 bp, Artificial Sequence
  Synthetic oligonucleotide
ctccaccgtattgcatcgtgtcgtctcccc

SEQ ID NO: 139296 - DNA, 30 bp, Artificial Sequence
  Synthetic oligonucleotide
tgactgtagaggtgtccggagtgtctcccc

SEQ ID NO: 139297 - DNA, 31 bp, Artificial Sequence
  Synthetic oligonucleotide
ccgtagttacactcaggaattgttagtcccc

SEQ ID NO: 139298 - DNA, 30 bp, Artificial Sequence
  Synthetic oligonucleotide
cctgacgggggagaggtagagaaggtcccc

SEQ ID NO: 139299 - DNA, 30 bp, Artificial Sequence
  Synthetic oligonucleotide
cagcaaaagacgaagcatttctccaagccc

SEQ ID NO: 139300 - DNA, 30 bp, Artificial Sequence
  Synthetic oligonucleotide
atgatcgaggatctaaataatcgcaagccc

SEQ ID NO: 139301 - DNA, 30 bp, Artificial Sequence
  Synthetic oligonucleotide
cctcattagcaaattagtattagtaagccc

SEQ ID NO: 139302 - DNA, 30 bp, Artificial Sequence
  Synthetic oligonucleotide
gcgacacaaagaacttatttttggcagccc

SEQ ID NO: 139303 - DNA, 30 bp, Artificial Sequence
  Synthetic oligonucleotide
gcaacagcttctgacctaaccggagagccc

SEQ ID NO: 139304 - DNA, 30 bp, Artificial Sequence
  Synthetic oligonucleotide
acaacttaagatgtaggggcgatcgagccc

SEQ ID NO: 139305 - DNA, 30 bp, Artificial Sequence
  Synthetic oligonucleotide
tgcggtggtgcacatcgggtcaagtagccc

SEQ ID NO: 139306 - DNA, 30 bp, Artificial Sequence
  Synthetic oligonucleotide
gctatattgacttcaagatgtgggtagccc

SEQ ID NO: 139307 - DNA, 30 bp, Artificial Sequence
  Synthetic oligonucleotide
agataacaatctgcttgtaatcccacgccc

SEQ ID NO: 139308 - DNA, 30 bp, Artificial Sequence
  Synthetic oligonucleotide
cgaaggacagacgccggacttgtcacgccc

SEQ ID NO: 139309 - DNA, 30 bp, Artificial Sequence
  Synthetic oligonucleotide
tcggtgtccacagccactaatgacccgccc

SEQ ID NO: 139310 - DNA, 30 bp, Artificial Sequence
  Synthetic oligonucleotide
tccgttggtgcatggtgggttattgcgccc

SEQ ID NO: 139311 - DNA, 30 bp, Artificial Sequence
  Synthetic oligonucleotide
gtagtgtggttctgacggtcccgctcgccc

SEQ ID NO: 139312 - DNA, 30 bp, Artificial Sequence
  Synthetic oligonucleotide
agctcggtctgcaattgctttccgtcgccc

SEQ ID NO: 139313 - DNA, 30 bp, Artificial Sequence
  Synthetic oligonucleotide
cttgcacagccacgagtctagtcaaggccc

SEQ ID NO: 139314 - DNA, 30 bp, Artificial Sequence
  Synthetic oligonucleotide
agtaggggatagacatcaggtacacggccc

SEQ ID NO: 139315 - DNA, 30 bp, Artificial Sequence
  Synthetic oligonucleotide
tcagagtgaacttccaactctcagcggccc

SEQ ID NO: 139316 - DNA, 30 bp, Artificial Sequence
  Synthetic oligonucleotide
gtaattcgtaagcgcagaaatcagtggccc

SEQ ID NO: 139317 - DNA, 30 bp, Artificial Sequence
  Synthetic oligonucleotide
agatctcaagacagacgagggcattggccc

SEQ ID NO: 139318 - DNA, 30 bp, Artificial Sequence
  Synthetic oligonucleotide
aaaacatctctcacaatagtggaaatgccc

SEQ ID NO: 139319 - DNA, 30 bp, Artificial Sequence
  Synthetic oligonucleotide
tctgggacttgtggtactgggatgatgccc

SEQ ID NO: 139320 - DNA, 30 bp, Artificial Sequence
  Synthetic oligonucleotide
acctgggatccgcgcgtccagtagctgccc

SEQ ID NO: 139321 - DNA, 30 bp, Artificial Sequence
  Synthetic oligonucleotide
agtccaatttattatagaggtatcgtgccc

SEQ ID NO: 139322 - DNA, 30 bp, Artificial Sequence
  Synthetic oligonucleotide
tacaagctgcacagtagtagcaaggtgccc

SEQ ID NO: 139323 - DNA, 30 bp, Artificial Sequence
  Synthetic oligonucleotide
ccgaaccataaactaacctcgacattgccc

SEQ ID NO: 139324 - DNA, 30 bp, Artificial Sequence
  Synthetic oligonucleotide
ggagagaaaacagtctttccggggttgccc

SEQ ID NO: 139325 - DNA, 30 bp, Artificial Sequence
  Synthetic oligonucleotide
tacccgaagcattacgggttgccgaatccc

SEQ ID NO: 139326 - DNA, 30 bp, Artificial Sequence
  Synthetic oligonucleotide
atgaccgattaagcgtacaactgtaatccc

SEQ ID NO: 139327 - DNA, 30 bp, Artificial Sequence
  Synthetic oligonucleotide
tacggcataaattatggaaataaccatccc

SEQ ID NO: 139328 - DNA, 30 bp, Artificial Sequence
  Synthetic oligonucleotide
gggggccaaaatatttcggcggaccatccc

SEQ ID NO: 139329 - DNA, 30 bp, Artificial Sequence
  Synthetic oligonucleotide
agataacatagggggaacccatagcatccc

SEQ ID NO: 139330 - DNA, 30 bp, Artificial Sequence
  Synthetic oligonucleotide
agatcgcaaccctagatagggatgcatccc

SEQ ID NO: 139331 - DNA, 30 bp, Artificial Sequence
  Synthetic oligonucleotide
tggaaaaaccaacaggggccaaattatccc

SEQ ID NO: 139332 - DNA, 30 bp, Artificial Sequence
  Synthetic oligonucleotide
ccaagcctaaagcgtaaactatgcactccc

SEQ ID NO: 139333 - DNA, 30 bp, Artificial Sequence
  Synthetic oligonucleotide
cttcaaatagggacttgggagcggactccc

SEQ ID NO: 139334 - DNA, 30 bp, Artificial Sequence
  Synthetic oligonucleotide
cacaaataaccttcatttcgaatgcctccc

SEQ ID NO: 139335 - DNA, 30 bp, Artificial Sequence
  Synthetic oligonucleotide
ggactctaagataacgtcaatacgggtccc

SEQ ID NO: 139336 - DNA, 30 bp, Artificial Sequence
  Synthetic oligonucleotide
tactcgtgcctgcgtacgcatatgggtccc

SEQ ID NO: 139337 - DNA, 30 bp, Artificial Sequence
  Synthetic oligonucleotide
gggaagatggtaccgaagctggctggtccc

SEQ ID NO: 139338 - DNA, 30 bp, Artificial Sequence
  Synthetic oligonucleotide
gggcacgtgactctagtgcgtcttggtccc

SEQ ID NO: 139339 - DNA, 30 bp, Artificial Sequence
  Synthetic oligonucleotide
gctgagcggtcggcatttgggaaatgtccc

SEQ ID NO: 139340 - DNA, 30 bp, Artificial Sequence
  Synthetic oligonucleotide
attcgtgcttgtatcgaggagggatgtccc

SEQ ID NO: 139341 - DNA, 30 bp, Artificial Sequence
  Synthetic oligonucleotide
tgaggatgtagaatgtgcgaggtgattccc

SEQ ID NO: 139342 - DNA, 30 bp, Artificial Sequence
  Synthetic oligonucleotide
ggcaatacggggatctccgatcatattccc

SEQ ID NO: 139343 - DNA, 30 bp, Artificial Sequence
  Synthetic oligonucleotide
atgtcactgtcataagtctcccgccttccc

SEQ ID NO: 139344 - DNA, 30 bp, Artificial Sequence
  Synthetic oligonucleotide
gctgcgatcgtaaggacaatcgtgtttccc

SEQ ID NO: 139345 - DNA, 30 bp, Artificial Sequence
  Synthetic oligonucleotide
gcccaaagaaagtaaccgccgcatcaagcc

SEQ ID NO: 139346 - DNA, 30 bp, Artificial Sequence
  Synthetic oligonucleotide
gaagtcatccggtccggccaactagaagcc

SEQ ID NO: 139347 - DNA, 30 bp, Artificial Sequence
  Synthetic oligonucleotide
gtgatcaacacatactacgtacacgaagcc

SEQ ID NO: 139348 - DNA, 30 bp, Artificial Sequence
  Synthetic oligonucleotide
gcttggacatcggggcaattcttataagcc

SEQ ID NO: 139349 - DNA, 30 bp, Artificial Sequence
  Synthetic oligonucleotide
aaccttgcggcgactagctccaactaagcc

SEQ ID NO: 139350 - DNA, 30 bp, Artificial Sequence
  Synthetic oligonucleotide
ggcacccatgcagcgtaaaactcgtaagcc

SEQ ID NO: 139351 - DNA, 30 bp, Artificial Sequence
  Synthetic oligonucleotide
ttagaaggggcgaattctgaatcttaagcc

SEQ ID NO: 139352 - DNA, 30 bp, Artificial Sequence
  Synthetic oligonucleotide
ggagaagaagccatgcatctataaacagcc

SEQ ID NO: 139353 - DNA, 30 bp, Artificial Sequence
  Synthetic oligonucleotide
ccggtctgaggtagtcggacctgaacagcc

SEQ ID NO: 139354 - DNA, 30 bp, Artificial Sequence
  Synthetic oligonucleotide
ggagctgagacctacgtggaactcacagcc

SEQ ID NO: 139355 - DNA, 30 bp, Artificial Sequence
  Synthetic oligonucleotide
tggcgaaagtatgctcatccggggacagcc

SEQ ID NO: 139356 - DNA, 30 bp, Artificial Sequence
  Synthetic oligonucleotide
agctagaacagtgagctggtgctgacagcc

SEQ ID NO: 139357 - DNA, 30 bp, Artificial Sequence
  Synthetic oligonucleotide
tgtgtgaccatctgtggtgggagaccagcc

SEQ ID NO: 139358 - DNA, 30 bp, Artificial Sequence
  Synthetic oligonucleotide
aagggcggggtatccgcacacggaccagcc

SEQ ID NO: 139359 - DNA, 30 bp, Artificial Sequence
  Synthetic oligonucleotide
taaactcttggggcgaaatccggaccagcc

SEQ ID NO: 139360 - DNA, 30 bp, Artificial Sequence
  Synthetic oligonucleotide
atacgggccatagtggtcgcgggaccagcc

SEQ ID NO: 139361 - DNA, 30 bp, Artificial Sequence
  Synthetic oligonucleotide
ggggcatgtcaatagttcgttaagccagcc

SEQ ID NO: 139362 - DNA, 30 bp, Artificial Sequence
  Synthetic oligonucleotide
tcaaaggtgtgaggtgccgtcccgccagcc

SEQ ID NO: 139363 - DNA, 30 bp, Artificial Sequence
  Synthetic oligonucleotide
catcctggcatcgctcgtccgcttccagcc

SEQ ID NO: 139364 - DNA, 30 bp, Artificial Sequence
  Synthetic oligonucleotide
tcacttcaaacagagtttcaggccgcagcc

SEQ ID NO: 139365 - DNA, 30 bp, Artificial Sequence
  Synthetic oligonucleotide
taatggtgcgcaatgaatttcacttcagcc

SEQ ID NO: 139366 - DNA, 30 bp, Artificial Sequence
  Synthetic oligonucleotide
gctgcattaggtagctgtcggtacagagcc

SEQ ID NO: 139367 - DNA, 30 bp, Artificial Sequence
  Synthetic oligonucleotide
agcgacaaataagtaaaaactaaaggagcc

SEQ ID NO: 139368 - DNA, 30 bp, Artificial Sequence
  Synthetic oligonucleotide
agcgtgcgcgctaggaaccagcctggagcc

SEQ ID NO: 139369 - DNA, 30 bp, Artificial Sequence
  Synthetic oligonucleotide
taccccagcgagccttcgaaataatgagcc

SEQ ID NO: 139370 - DNA, 30 bp, Artificial Sequence
  Synthetic oligonucleotide
atcgcctggtggcaaactacaagatgagcc

SEQ ID NO: 139371 - DNA, 30 bp, Artificial Sequence
  Synthetic oligonucleotide
accagctcaccccgcgaatgattctgagcc

SEQ ID NO: 139372 - DNA, 30 bp, Artificial Sequence
  Synthetic oligonucleotide
ccgctgggcttctgaaatacagcttgagcc

SEQ ID NO: 139373 - DNA, 30 bp, Artificial Sequence
  Synthetic oligonucleotide
aaactagcaagcttaacgactggaatagcc

SEQ ID NO: 139374 - DNA, 30 bp, Artificial Sequence
  Synthetic oligonucleotide
cctgtaaataatacgggatcatagatagcc

SEQ ID NO: 139375 - DNA, 30 bp, Artificial Sequence
  Synthetic oligonucleotide
aaacaatacagcaccttacgaggtatagcc

SEQ ID NO: 139376 - DNA, 30 bp, Artificial Sequence
  Synthetic oligonucleotide
ctctaaagataagggattatgtgcctagcc

SEQ ID NO: 139377 - DNA, 30 bp, Artificial Sequence
  Synthetic oligonucleotide
cgtgagatagaagggtcgacaaagctagcc

SEQ ID NO: 139378 - DNA, 30 bp, Artificial Sequence
  Synthetic oligonucleotide
aactgagcgcaatctaggcgtgtcgtagcc

SEQ ID NO: 139379 - DNA, 30 bp, Artificial Sequence
  Synthetic oligonucleotide
tctgggagtcatcttgatagagcattagcc

SEQ ID NO: 139380 - DNA, 30 bp, Artificial Sequence
  Synthetic oligonucleotide
ggagcgtctcgcaccctatctctcttagcc

SEQ ID NO: 139381 - DNA, 30 bp, Artificial Sequence
  Synthetic oligonucleotide
ggctaagcgataatctaggctaggttagcc

SEQ ID NO: 139382 - DNA, 30 bp, Artificial Sequence
  Synthetic oligonucleotide
agggctactagctaccttatttacaacgcc

SEQ ID NO: 139383 - DNA, 30 bp, Artificial Sequence
  Synthetic oligonucleotide
acgccgtttagttagagtgccggacacgcc

SEQ ID NO: 139384 - DNA, 30 bp, Artificial Sequence
  Synthetic oligonucleotide
acttgtcgcataaaagagagtcagaccgcc

SEQ ID NO: 139385 - DNA, 30 bp, Artificial Sequence
  Synthetic oligonucleotide
cccaggacgttgggatgagaagataccgcc

SEQ ID NO: 139386 - DNA, 30 bp, Artificial Sequence
  Synthetic oligonucleotide
gagttcgaaacgacgaggactttccccgcc

SEQ ID NO: 139387 - DNA, 29 bp, Artificial Sequence
  Synthetic oligonucleotide
gttacataggctattacacaagcgccgcc

SEQ ID NO: 139388 - DNA, 30 bp, Artificial Sequence
  Synthetic oligonucleotide
gctgcagatgctcgtggagtgggggccgcc

SEQ ID NO: 139389 - DNA, 30 bp, Artificial Sequence
  Synthetic oligonucleotide
aaaccctcaataagcgagagcctacgcgcc

SEQ ID NO: 139390 - DNA, 30 bp, Artificial Sequence
  Synthetic oligonucleotide
atcaagctagtccagtctcagaacggcgcc

SEQ ID NO: 139391 - DNA, 30 bp, Artificial Sequence
  Synthetic oligonucleotide
cagggagtaccgcctcccggcaaatgcgcc

SEQ ID NO: 139392 - DNA, 30 bp, Artificial Sequence
  Synthetic oligonucleotide
atgccgtgtccgtgcacacactcatgcgcc

SEQ ID NO: 139393 - DNA, 30 bp, Artificial Sequence
  Synthetic oligonucleotide
gggacagtacaatatcattggctactcgcc

SEQ ID NO: 139394 - DNA, 30 bp, Artificial Sequence
  Synthetic oligonucleotide
taaaacggtgctagagtgtcaaatctcgcc

SEQ ID NO: 139395 - DNA, 30 bp, Artificial Sequence
  Synthetic oligonucleotide
tgcgtgaaggtataccggcaattcgtcgcc

SEQ ID NO: 139396 - DNA, 32 bp, Artificial Sequence
  Synthetic oligonucleotide
acgacggtgtgctaacgatatgttcggtcgcc

SEQ ID NO: 139397 - DNA, 30 bp, Artificial Sequence
  Synthetic oligonucleotide
ggtatgcacataactgcttcttacttcgcc

SEQ ID NO: 139398 - DNA, 30 bp, Artificial Sequence
  Synthetic oligonucleotide
acgccgtataacgactatgtggtaaaggcc

SEQ ID NO: 139399 - DNA, 30 bp, Artificial Sequence
  Synthetic oligonucleotide
tatgtacatagactcgcgcggagcaaggcc

SEQ ID NO: 139400 - DNA, 30 bp, Artificial Sequence
  Synthetic oligonucleotide
ataaggactcatgctgacccaccccaggcc

SEQ ID NO: 139401 - DNA, 30 bp, Artificial Sequence
  Synthetic oligonucleotide
taaccacccaacgtgccggaagtgcaggcc

SEQ ID NO: 139402 - DNA, 30 bp, Artificial Sequence
  Synthetic oligonucleotide
cccacatacgcgcctagaagagatcaggcc

SEQ ID NO: 139403 - DNA, 30 bp, Artificial Sequence
  Synthetic oligonucleotide
cggaatataaattgccgtatgatagaggcc

SEQ ID NO: 139404 - DNA, 30 bp, Artificial Sequence
  Synthetic oligonucleotide
ccccgaaagcatttgagtcgtaaggaggcc

SEQ ID NO: 139405 - DNA, 30 bp, Artificial Sequence
  Synthetic oligonucleotide
aggcagatgacagtgtataaacgggaggcc

SEQ ID NO: 139406 - DNA, 30 bp, Artificial Sequence
  Synthetic oligonucleotide
tgatggacagcatacatagcaatataggcc

SEQ ID NO: 139407 - DNA, 30 bp, Artificial Sequence
  Synthetic oligonucleotide
tagactaactgcactgttacatgtacggcc

SEQ ID NO: 139408 - DNA, 30 bp, Artificial Sequence
  Synthetic oligonucleotide
tagtcattctacagttagggcgtaccggcc

SEQ ID NO: 139409 - DNA, 30 bp, Artificial Sequence
  Synthetic oligonucleotide
cggaaacggcctggtcagaaccaagcggcc

SEQ ID NO: 139410 - DNA, 31 bp, Artificial Sequence
  Synthetic oligonucleotide
acggcgtcaaacgggggcaacatcatcggcc

SEQ ID NO: 139411 - DNA, 30 bp, Artificial Sequence
  Synthetic oligonucleotide
atatcaccgagagcaatccagagatcggcc

SEQ ID NO: 139412 - DNA, 30 bp, Artificial Sequence
  Synthetic oligonucleotide
gctactttgccggacaagggctgctcggcc

SEQ ID NO: 139413 - DNA, 30 bp, Artificial Sequence
  Synthetic oligonucleotide
tgaagggacagattcattagtgtttcggcc

SEQ ID NO: 139414 - DNA, 30 bp, Artificial Sequence
  Synthetic oligonucleotide
cacgcgtgtctgtttctataatccagggcc

SEQ ID NO: 139415 - DNA, 30 bp, Artificial Sequence
  Synthetic oligonucleotide
ggttgaaggtaagaatgatccgggcgggcc

SEQ ID NO: 139416 - DNA, 30 bp, Artificial Sequence
  Synthetic oligonucleotide
gtgaccgtaggtactagacagcaaggggcc

SEQ ID NO: 139417 - DNA, 30 bp, Artificial Sequence
  Synthetic oligonucleotide
tccagttaaacgaaacaatggataggggcc

SEQ ID NO: 139418 - DNA, 30 bp, Artificial Sequence
  Synthetic oligonucleotide
gacagcgtacactagggaggatccggggcc

SEQ ID NO: 139419 - DNA, 30 bp, Artificial Sequence
  Synthetic oligonucleotide
accatcacaatatagacataataatgggcc

SEQ ID NO: 139420 - DNA, 30 bp, Artificial Sequence
  Synthetic oligonucleotide
tcctggagcgtaagagtaaggggatgggcc

SEQ ID NO: 139421 - DNA, 30 bp, Artificial Sequence
  Synthetic oligonucleotide
taccctacaaaagacagtgcatgatgggcc

SEQ ID NO: 139422 - DNA, 30 bp, Artificial Sequence
  Synthetic oligonucleotide
tgtattagaccaaggagcaaaaactgggcc

SEQ ID NO: 139423 - DNA, 30 bp, Artificial Sequence
  Synthetic oligonucleotide
cagctatatagtgttcctgtcgagtgggcc

SEQ ID NO: 139424 - DNA, 30 bp, Artificial Sequence
  Synthetic oligonucleotide
tcgtgatctcgactctacataaagctggcc

SEQ ID NO: 139425 - DNA, 30 bp, Artificial Sequence
  Synthetic oligonucleotide
aaccggcgcacgcgacctacatgtgtggcc

SEQ ID NO: 139426 - DNA, 30 bp, Artificial Sequence
  Synthetic oligonucleotide
cggtgcactaagatcggaagcgatttggcc

SEQ ID NO: 139427 - DNA, 30 bp, Artificial Sequence
  Synthetic oligonucleotide
ccgacttggtgcaattacttatctttggcc

SEQ ID NO: 139428 - DNA, 30 bp, Artificial Sequence
  Synthetic oligonucleotide
acgatcgtaagatttcccttgtttttggcc

SEQ ID NO: 139429 - DNA, 30 bp, Artificial Sequence
  Synthetic oligonucleotide
gtctggtacaaaagaagttgggtaaatgcc

SEQ ID NO: 139430 - DNA, 30 bp, Artificial Sequence
  Synthetic oligonucleotide
gaggcaagcaaatcgcacctcaacaatgcc

SEQ ID NO: 139431 - DNA, 30 bp, Artificial Sequence
  Synthetic oligonucleotide
ttgtgatttacctgggacccgccgaatgcc

SEQ ID NO: 139432 - DNA, 30 bp, Artificial Sequence
  Synthetic oligonucleotide
ctgacactcctcttgcgtcaattgaatgcc

SEQ ID NO: 139433 - DNA, 30 bp, Artificial Sequence
  Synthetic oligonucleotide
ggaaagacgacttcgacatcgaataatgcc

SEQ ID NO: 139434 - DNA, 30 bp, Artificial Sequence
  Synthetic oligonucleotide
tgtcctcggttaggtcgggggttccatgcc

SEQ ID NO: 139435 - DNA, 29 bp, Artificial Sequence
  Synthetic oligonucleotide
gggggagggatgcgcaagcattgcatgcc

SEQ ID NO: 139436 - DNA, 30 bp, Artificial Sequence
  Synthetic oligonucleotide
tagtaaccagtgagattaaccatcgatgcc

SEQ ID NO: 139437 - DNA, 30 bp, Artificial Sequence
  Synthetic oligonucleotide
aaatatgggggttggggagatctatatgcc

SEQ ID NO: 139438 - DNA, 30 bp, Artificial Sequence
  Synthetic oligonucleotide
tgcattgttaagcgctaactgtcctatgcc

SEQ ID NO: 139439 - DNA, 30 bp, Artificial Sequence
  Synthetic oligonucleotide
ggcgggcttataagaccaggggaaactgcc

SEQ ID NO: 139440 - DNA, 30 bp, Artificial Sequence
  Synthetic oligonucleotide
ctgtctaggctagaagatgcgacaactgcc

SEQ ID NO: 139441 - DNA, 30 bp, Artificial Sequence
  Synthetic oligonucleotide
tctatgtatcgtcataccgctagcactgcc

SEQ ID NO: 139442 - DNA, 30 bp, Artificial Sequence
  Synthetic oligonucleotide
cctgacaccacgccgttagttgcgactgcc

SEQ ID NO: 139443 - DNA, 30 bp, Artificial Sequence
  Synthetic oligonucleotide
gggcgaaaactatggtcagtgtttcctgcc

SEQ ID NO: 139444 - DNA, 30 bp, Artificial Sequence
  Synthetic oligonucleotide
taccagcggtggggtgaaggtacggctgcc

SEQ ID NO: 139445 - DNA, 30 bp, Artificial Sequence
  Synthetic oligonucleotide
tcgtgtactgattcctgcgtgggatctgcc

SEQ ID NO: 139446 - DNA, 30 bp, Artificial Sequence
  Synthetic oligonucleotide
ctagaacgaatcagttctctgatatctgcc

SEQ ID NO: 139447 - DNA, 30 bp, Artificial Sequence
  Synthetic oligonucleotide
gcggcgtagaatcgatagcgtctttctgcc

SEQ ID NO: 139448 - DNA, 30 bp, Artificial Sequence
  Synthetic oligonucleotide
gtgtacaggtgggtagtgagtgaaagtgcc

SEQ ID NO: 139449 - DNA, 30 bp, Artificial Sequence
  Synthetic oligonucleotide
tagaacgaatatgtgtactaagagagtgcc

SEQ ID NO: 139450 - DNA, 30 bp, Artificial Sequence
  Synthetic oligonucleotide
gtagtaatcgaaatcaatgtctgtagtgcc

SEQ ID NO: 139451 - DNA, 30 bp, Artificial Sequence
  Synthetic oligonucleotide
agcagtattgtgggccgcctggagggtgcc

SEQ ID NO: 139452 - DNA, 30 bp, Artificial Sequence
  Synthetic oligonucleotide
gtacgacctctgtaatggtgcaattgtgcc

SEQ ID NO: 139453 - DNA, 30 bp, Artificial Sequence
  Synthetic oligonucleotide
aagcatcaagaacgtagcccttcctttgcc

SEQ ID NO: 139454 - DNA, 30 bp, Artificial Sequence
  Synthetic oligonucleotide
tgccggcgtcaattggtaaactagtttgcc

SEQ ID NO: 139455 - DNA, 30 bp, Artificial Sequence
  Synthetic oligonucleotide
gctgggacgttcacgaatgcgtagaaatcc

SEQ ID NO: 139456 - DNA, 30 bp, Artificial Sequence
  Synthetic oligonucleotide
tggatcgccgagggcccctgtgaacaatcc

SEQ ID NO: 139457 - DNA, 30 bp, Artificial Sequence
  Synthetic oligonucleotide
gacgtataagttggatcgacaggacaatcc

SEQ ID NO: 139458 - DNA, 30 bp, Artificial Sequence
  Synthetic oligonucleotide
cggagtatcacagtcgcatcttatcaatcc

SEQ ID NO: 139459 - DNA, 30 bp, Artificial Sequence
  Synthetic oligonucleotide
gtataacgatcgccgggcacacgcgaatcc

SEQ ID NO: 139460 - DNA, 30 bp, Artificial Sequence
  Synthetic oligonucleotide
ccgggagctcggctacggaacaaaacatcc

SEQ ID NO: 139461 - DNA, 30 bp, Artificial Sequence
  Synthetic oligonucleotide
acttgtggaatcggaagctgaggtccatcc

SEQ ID NO: 139462 - DNA, 30 bp, Artificial Sequence
  Synthetic oligonucleotide
cgctagagacgtgattgagctcttgcatcc

SEQ ID NO: 139463 - DNA, 30 bp, Artificial Sequence
  Synthetic oligonucleotide
cctcccacataacccttagaaggaagatcc

SEQ ID NO: 139464 - DNA, 30 bp, Artificial Sequence
  Synthetic oligonucleotide
gtatggcccacaacggtgaacgggagatcc

SEQ ID NO: 139465 - DNA, 30 bp, Artificial Sequence
  Synthetic oligonucleotide
tcgagttccaagcggatacgtgagcgatcc

SEQ ID NO: 139466 - DNA, 30 bp, Artificial Sequence
  Synthetic oligonucleotide
cgtgatcttaacaaagggcgaatgcgatcc

SEQ ID NO: 139467 - DNA, 30 bp, Artificial Sequence
  Synthetic oligonucleotide
aacacgacggcgtggggctcaggcggatcc

SEQ ID NO: 139468 - DNA, 30 bp, Artificial Sequence
  Synthetic oligonucleotide
aagaaatattgcgtaatgttggtcggatcc

SEQ ID NO: 139469 - DNA, 30 bp, Artificial Sequence
  Synthetic oligonucleotide
caggccggcctcacatagcaatcctgatcc

SEQ ID NO: 139470 - DNA, 30 bp, Artificial Sequence
  Synthetic oligonucleotide
gaccaaattctgagggggggaaagtgatcc

SEQ ID NO: 139471 - DNA, 30 bp, Artificial Sequence
  Synthetic oligonucleotide
taaagtcccaacgggtacagtgcgtgatcc

SEQ ID NO: 139472 - DNA, 30 bp, Artificial Sequence
  Synthetic oligonucleotide
cgcgttaaattgtgtatgctgtgaatatcc

SEQ ID NO: 139473 - DNA, 30 bp, Artificial Sequence
  Synthetic oligonucleotide
tctgtacagaccgtcaagctactaatatcc

SEQ ID NO: 139474 - DNA, 30 bp, Artificial Sequence
  Synthetic oligonucleotide
ctttaaaagagatggaagtagggactatcc

SEQ ID NO: 139475 - DNA, 30 bp, Artificial Sequence
  Synthetic oligonucleotide
acaacactggaggaatcgtgtcaagtatcc

SEQ ID NO: 139476 - DNA, 30 bp, Artificial Sequence
  Synthetic oligonucleotide
taccactgcgttgggtaccgaaccgtatcc

SEQ ID NO: 139477 - DNA, 30 bp, Artificial Sequence
  Synthetic oligonucleotide
cagctgactctaagaaataacagcgtatcc

SEQ ID NO: 139478 - DNA, 30 bp, Artificial Sequence
  Synthetic oligonucleotide
ttgagcaaccggcgagttacagtcgtatcc

SEQ ID NO: 139479 - DNA, 30 bp, Artificial Sequence
  Synthetic oligonucleotide
ggacgccaacaaaaagctaacgctgtatcc

SEQ ID NO: 139480 - DNA, 30 bp, Artificial Sequence
  Synthetic oligonucleotide
ttgggcaacaattcataccataaattatcc

SEQ ID NO: 139481 - DNA, 30 bp, Artificial Sequence
  Synthetic oligonucleotide
gggaacagtattcaccatactacgttatcc

SEQ ID NO: 139482 - DNA, 30 bp, Artificial Sequence
  Synthetic oligonucleotide
cggccctagaagagtcttttgcatttatcc

SEQ ID NO: 139483 - DNA, 30 bp, Artificial Sequence
  Synthetic oligonucleotide
agcacatgcggtatgctactaggtttatcc

SEQ ID NO: 139484 - DNA, 30 bp, Artificial Sequence
  Synthetic oligonucleotide
aacgaaagcacggactagtacaaaaactcc

SEQ ID NO: 139485 - DNA, 30 bp, Artificial Sequence
  Synthetic oligonucleotide
cacagtcgtgaaaaacggttacgtaactcc

SEQ ID NO: 139486 - DNA, 30 bp, Artificial Sequence
  Synthetic oligonucleotide
gttactggcagtgtcaagtagggtaactcc

SEQ ID NO: 139487 - DNA, 30 bp, Artificial Sequence
  Synthetic oligonucleotide
atgaggataaccactaagcgtagtcactcc

SEQ ID NO: 139488 - DNA, 30 bp, Artificial Sequence
  Synthetic oligonucleotide
aggtgacgcccgggccccaacatcgactcc

SEQ ID NO: 139489 - DNA, 30 bp, Artificial Sequence
  Synthetic oligonucleotide
aatcgtgtcgagggcacactcgagtactcc

SEQ ID NO: 139490 - DNA, 30 bp, Artificial Sequence
  Synthetic oligonucleotide
caatggatctaattcgactatcgttactcc

SEQ ID NO: 139491 - DNA, 30 bp, Artificial Sequence
  Synthetic oligonucleotide
cgaatcacctctgctaatggtcaaacctcc

SEQ ID NO: 139492 - DNA, 30 bp, Artificial Sequence
  Synthetic oligonucleotide
gcaataagaaccaagcagtagccaacctcc

SEQ ID NO: 139493 - DNA, 30 bp, Artificial Sequence
  Synthetic oligonucleotide
ctattgtcgcgtctcacaagaatcacctcc

SEQ ID NO: 139494 - DNA, 30 bp, Artificial Sequence
  Synthetic oligonucleotide
gtgagggaacgccaatgaggggtgacctcc

SEQ ID NO: 139495 - DNA, 30 bp, Artificial Sequence
  Synthetic oligonucleotide
tgtcatccgatagaagtcctacgaccctcc

SEQ ID NO: 139496 - DNA, 30 bp, Artificial Sequence
  Synthetic oligonucleotide
cgttgggaaccatgcgtgtcctgaccctcc

SEQ ID NO: 139497 - DNA, 30 bp, Artificial Sequence
  Synthetic oligonucleotide
aatgcatacttaaacactgtcgggccctcc

SEQ ID NO: 139498 - DNA, 30 bp, Artificial Sequence
  Synthetic oligonucleotide
tacacctaggaagcttgtaaacacgcctcc

SEQ ID NO: 139499 - DNA, 30 bp, Artificial Sequence
  Synthetic oligonucleotide
ggtgattcaggacaagctgacctctcctcc

SEQ ID NO: 139500 - DNA, 30 bp, Artificial Sequence
  Synthetic oligonucleotide
aggctccaaaatagtattgcgcggtcctcc

SEQ ID NO: 139501 - DNA, 30 bp, Artificial Sequence
  Synthetic oligonucleotide
cagacccagaggcgatcgcctgagagctcc

SEQ ID NO: 139502 - DNA, 30 bp, Artificial Sequence
  Synthetic oligonucleotide
tataaaggcaggacatgggttaggagctcc

SEQ ID NO: 139503 - DNA, 30 bp, Artificial Sequence
  Synthetic oligonucleotide
gttatgggccaaatccagagggtgagctcc

SEQ ID NO: 139504 - DNA, 30 bp, Artificial Sequence
  Synthetic oligonucleotide
gtggaaggtagccgtgattcgttcggctcc

SEQ ID NO: 139505 - DNA, 30 bp, Artificial Sequence
  Synthetic oligonucleotide
accggggcacagacactcggacagggctcc

SEQ ID NO: 139506 - DNA, 30 bp, Artificial Sequence
  Synthetic oligonucleotide
catcatatgtagaacaacaagattggctcc

SEQ ID NO: 139507 - DNA, 30 bp, Artificial Sequence
  Synthetic oligonucleotide
agggtgctggatcgtcctaatgagtgctcc

SEQ ID NO: 139508 - DNA, 30 bp, Artificial Sequence
  Synthetic oligonucleotide
agaagacccctatactggacccgaatctcc

SEQ ID NO: 139509 - DNA, 30 bp, Artificial Sequence
  Synthetic oligonucleotide
tactggggaccagacgtatgggcactctcc

SEQ ID NO: 139510 - DNA, 30 bp, Artificial Sequence
  Synthetic oligonucleotide
ggagggcgatcgtagccagccaacctctcc

SEQ ID NO: 139511 - DNA, 30 bp, Artificial Sequence
  Synthetic oligonucleotide
cagaaatcatatcacgaaacgcttctctcc

SEQ ID NO: 139512 - DNA, 30 bp, Artificial Sequence
  Synthetic oligonucleotide
acgagagtgatgagagtattaatcttctcc

SEQ ID NO: 139513 - DNA, 30 bp, Artificial Sequence
  Synthetic oligonucleotide
atcgaaagtcagcacggggagattttctcc

SEQ ID NO: 139514 - DNA, 30 bp, Artificial Sequence
  Synthetic oligonucleotide
cattctccggagaagagtagccttaagtcc

SEQ ID NO: 139515 - DNA, 30 bp, Artificial Sequence
  Synthetic oligonucleotide
ctcattaggaataagtcgcccgaccagtcc

SEQ ID NO: 139516 - DNA, 30 bp, Artificial Sequence
  Synthetic oligonucleotide
atattcggatggttttcggcgagtcagtcc

SEQ ID NO: 139517 - DNA, 30 bp, Artificial Sequence
  Synthetic oligonucleotide
gcgaattcagctgatcttcgatccgagtcc

SEQ ID NO: 139518 - DNA, 30 bp, Artificial Sequence
  Synthetic oligonucleotide
tgctaaccataataaagcggttcggagtcc

SEQ ID NO: 139519 - DNA, 30 bp, Artificial Sequence
  Synthetic oligonucleotide
ggcaaaacaccgctcctagcccgggagtcc

SEQ ID NO: 139520 - DNA, 30 bp, Artificial Sequence
  Synthetic oligonucleotide
cacactactccaagaggagacactgagtcc

SEQ ID NO: 139521 - DNA, 30 bp, Artificial Sequence
  Synthetic oligonucleotide
caaggtgggaagtgtaaaatacctgagtcc

SEQ ID NO: 139522 - DNA, 30 bp, Artificial Sequence
  Synthetic oligonucleotide
tactaccgaatccgaaggtccggctagtcc

SEQ ID NO: 139523 - DNA, 30 bp, Artificial Sequence
  Synthetic oligonucleotide
aggacagacgacggattcgtatcttagtcc

SEQ ID NO: 139524 - DNA, 30 bp, Artificial Sequence
  Synthetic oligonucleotide
tgtgctaaagtgaaatgttacctaacgtcc

SEQ ID NO: 139525 - DNA, 30 bp, Artificial Sequence
  Synthetic oligonucleotide
cggatgcatgagggttggatagacacgtcc

SEQ ID NO: 139526 - DNA, 30 bp, Artificial Sequence
  Synthetic oligonucleotide
gtgactgcaaaacgtcgatagagtacgtcc

SEQ ID NO: 139527 - DNA, 30 bp, Artificial Sequence
  Synthetic oligonucleotide
cgtgtgtcgaaggtgtgacctcgaccgtcc

SEQ ID NO: 139528 - DNA, 30 bp, Artificial Sequence
  Synthetic oligonucleotide
tgattacgacaaacgcgtggatcagcgtcc

SEQ ID NO: 139529 - DNA, 30 bp, Artificial Sequence
  Synthetic oligonucleotide
cttgggctagacgttgattcaaacgcgtcc

SEQ ID NO: 139530 - DNA, 30 bp, Artificial Sequence
  Synthetic oligonucleotide
tggtagctctagatttttatgaaggcgtcc

SEQ ID NO: 139531 - DNA, 30 bp, Artificial Sequence
  Synthetic oligonucleotide
tctcttaagtgtcagtgccttgcctcgtcc

SEQ ID NO: 139532 - DNA, 30 bp, Artificial Sequence
  Synthetic oligonucleotide
ttggcttagaggtgctgtgccagctcgtcc

SEQ ID NO: 139533 - DNA, 30 bp, Artificial Sequence
  Synthetic oligonucleotide
ggttgccggcgtctcagcccaacaaggtcc

SEQ ID NO: 139534 - DNA, 30 bp, Artificial Sequence
  Synthetic oligonucleotide
tcacatataagagatacagacgaccggtcc

SEQ ID NO: 139535 - DNA, 30 bp, Artificial Sequence
  Synthetic oligonucleotide
aaccggagccttacacaagaattgcggtcc

SEQ ID NO: 139536 - DNA, 30 bp, Artificial Sequence
  Synthetic oligonucleotide
tggaaggtcactgcgttcgttattcggtcc

SEQ ID NO: 139537 - DNA, 30 bp, Artificial Sequence
  Synthetic oligonucleotide
ggtgacgcccgaaacatcgaagcggggtcc

SEQ ID NO: 139538 - DNA, 30 bp, Artificial Sequence
  Synthetic oligonucleotide
ttggggtatcgatatactactatggggtcc

SEQ ID NO: 139539 - DNA, 30 bp, Artificial Sequence
  Synthetic oligonucleotide
gcgagcatctggatgtgtgtactggggtcc

SEQ ID NO: 139540 - DNA, 30 bp, Artificial Sequence
  Synthetic oligonucleotide
taatacacatgctagtgtaagtgatggtcc

SEQ ID NO: 139541 - DNA, 30 bp, Artificial Sequence
  Synthetic oligonucleotide
aagagaccggccagaaccaagagctggtcc

SEQ ID NO: 139542 - DNA, 30 bp, Artificial Sequence
  Synthetic oligonucleotide
ggcaaaccagcgcggcacctcgagtggtcc

SEQ ID NO: 139543 - DNA, 30 bp, Artificial Sequence
  Synthetic oligonucleotide
cgattaggatcgggtttcatcaggtggtcc

SEQ ID NO: 139544 - DNA, 30 bp, Artificial Sequence
  Synthetic oligonucleotide
gatgggcctaaagcggattttatgtggtcc

SEQ ID NO: 139545 - DNA, 30 bp, Artificial Sequence
  Synthetic oligonucleotide
ggcggtaagggaacggcgagacccatgtcc

SEQ ID NO: 139546 - DNA, 30 bp, Artificial Sequence
  Synthetic oligonucleotide
agaatctttaaagcataaacttctatgtcc

SEQ ID NO: 139547 - DNA, 30 bp, Artificial Sequence
  Synthetic oligonucleotide
gactttgagtgaactttataaatgctgtcc

SEQ ID NO: 139548 - DNA, 30 bp, Artificial Sequence
  Synthetic oligonucleotide
gcgagtgctaactctggattctatctgtcc

SEQ ID NO: 139549 - DNA, 30 bp, Artificial Sequence
  Synthetic oligonucleotide
agatcgagtgcaaaccctaaaattctgtcc

SEQ ID NO: 139550 - DNA, 30 bp, Artificial Sequence
  Synthetic oligonucleotide
gtgtcatggcgtacgtctaaggcagtgtcc

SEQ ID NO: 139551 - DNA, 30 bp, Artificial Sequence
  Synthetic oligonucleotide
tcacaacatacaccaaaacgtttagtgtcc

SEQ ID NO: 139552 - DNA, 30 bp, Artificial Sequence
  Synthetic oligonucleotide
cctgaccacttagttatcgaacatgtgtcc

SEQ ID NO: 139553 - DNA, 30 bp, Artificial Sequence
  Synthetic oligonucleotide
ccatgttcgtaaaacaagcctactgtgtcc

SEQ ID NO: 139554 - DNA, 30 bp, Artificial Sequence
  Synthetic oligonucleotide
ggtggaggaagacccattctcgcgttgtcc

SEQ ID NO: 139555 - DNA, 30 bp, Artificial Sequence
  Synthetic oligonucleotide
agaaggacggcccaagtgtagcgaaattcc

SEQ ID NO: 139556 - DNA, 30 bp, Artificial Sequence
  Synthetic oligonucleotide
atgtggaagagctcatgaacttgaaattcc

SEQ ID NO: 139557 - DNA, 30 bp, Artificial Sequence
  Synthetic oligonucleotide
ccaattgacaacagtcgttgtgaacattcc

SEQ ID NO: 139558 - DNA, 30 bp, Artificial Sequence
  Synthetic oligonucleotide
accgtcgttcagtgccagaaacgccattcc

SEQ ID NO: 139559 - DNA, 30 bp, Artificial Sequence
  Synthetic oligonucleotide
tgagataacccaagagatgaaggccattcc

SEQ ID NO: 139560 - DNA, 30 bp, Artificial Sequence
  Synthetic oligonucleotide
cactagagtgagtgagataaaccgcattcc

SEQ ID NO: 139561 - DNA, 30 bp, Artificial Sequence
  Synthetic oligonucleotide
caacgaattactcctgtttgcacagattcc

SEQ ID NO: 139562 - DNA, 30 bp, Artificial Sequence
  Synthetic oligonucleotide
atcaaggaacacccggcgatgttcgattcc

SEQ ID NO: 139563 - DNA, 30 bp, Artificial Sequence
  Synthetic oligonucleotide
acgcatcaaattgaaatagaaaaatattcc

SEQ ID NO: 139564 - DNA, 30 bp, Artificial Sequence
  Synthetic oligonucleotide
catcgggagaaattaaatgtgcctacttcc

SEQ ID NO: 139565 - DNA, 30 bp, Artificial Sequence
  Synthetic oligonucleotide
tggctgagtaatcggtccgtcgttccttcc

SEQ ID NO: 139566 - DNA, 30 bp, Artificial Sequence
  Synthetic oligonucleotide
cgcgcgataaggctccatttcagtgcttcc

SEQ ID NO: 139567 - DNA, 30 bp, Artificial Sequence
  Synthetic oligonucleotide
acgaacatgggtggctgcgaccgtgcttcc

SEQ ID NO: 139568 - DNA, 30 bp, Artificial Sequence
  Synthetic oligonucleotide
cttagatgtcgtggcacacatgcatcttcc

SEQ ID NO: 139569 - DNA, 30 bp, Artificial Sequence
  Synthetic oligonucleotide
cccgcatgctaaatgtgtttgccgagttcc

SEQ ID NO: 139570 - DNA, 30 bp, Artificial Sequence
  Synthetic oligonucleotide
tttgtccacgtagtgttgagtcggagttcc

SEQ ID NO: 139571 - DNA, 30 bp, Artificial Sequence
  Synthetic oligonucleotide
ggtgacatttcgcgtcttgatgatcgttcc

SEQ ID NO: 139572 - DNA, 30 bp, Artificial Sequence
  Synthetic oligonucleotide
attggaataaaccaggtctgcagaggttcc

SEQ ID NO: 139573 - DNA, 30 bp, Artificial Sequence
  Synthetic oligonucleotide
tggagtgacgtactataaaaaataggttcc

SEQ ID NO: 139574 - DNA, 30 bp, Artificial Sequence
  Synthetic oligonucleotide
tgtgacacccggatggagggaggcggttcc

SEQ ID NO: 139575 - DNA, 30 bp, Artificial Sequence
  Synthetic oligonucleotide
gcgtctgataaataagtggtgtatggttcc

SEQ ID NO: 139576 - DNA, 30 bp, Artificial Sequence
  Synthetic oligonucleotide
tgctaggatcggcacatactagaatgttcc

SEQ ID NO: 139577 - DNA, 30 bp, Artificial Sequence
  Synthetic oligonucleotide
aagtagactagagagagaggcgcgctttcc

SEQ ID NO: 139578 - DNA, 30 bp, Artificial Sequence
  Synthetic oligonucleotide
agaccaccagttacgttggccgctctttcc

SEQ ID NO: 139579 - DNA, 30 bp, Artificial Sequence
  Synthetic oligonucleotide
ttcatgtgaacaaggcggggactagtttcc

SEQ ID NO: 139580 - DNA, 30 bp, Artificial Sequence
  Synthetic oligonucleotide
ccactccatcatgggacgggggacgtttcc

SEQ ID NO: 139581 - DNA, 30 bp, Artificial Sequence
  Synthetic oligonucleotide
aggtcaagaaatattgcatgaacggtttcc

SEQ ID NO: 139582 - DNA, 30 bp, Artificial Sequence
  Synthetic oligonucleotide
acgcgatcgaagctacgtgtagatgtttcc

SEQ ID NO: 139583 - DNA, 30 bp, Artificial Sequence
  Synthetic oligonucleotide
tatcagaatgtatagtgtcgcgatgtttcc

SEQ ID NO: 139584 - DNA, 30 bp, Artificial Sequence
  Synthetic oligonucleotide
aagacgtcgttggtcgcgcgttacttttcc

SEQ ID NO: 139585 - DNA, 30 bp, Artificial Sequence
  Synthetic oligonucleotide
gctaacctccaggctcacgatatgttttcc

SEQ ID NO: 139586 - DNA, 30 bp, Artificial Sequence
  Synthetic oligonucleotide
gtcgtatttagggcaacataccgaaaaagc

SEQ ID NO: 139587 - DNA, 30 bp, Artificial Sequence
  Synthetic oligonucleotide
cggaacaattaattgtacgtgggccaaagc

SEQ ID NO: 139588 - DNA, 30 bp, Artificial Sequence
  Synthetic oligonucleotide
atgaaaagagatgacctctgcggtcaaagc

SEQ ID NO: 139589 - DNA, 30 bp, Artificial Sequence
  Synthetic oligonucleotide
gacgaccagtggagttcagtaagcgaaagc

SEQ ID NO: 139590 - DNA, 30 bp, Artificial Sequence
  Synthetic oligonucleotide
ttgggcagggtatcctcttgtagggaaagc

SEQ ID NO: 139591 - DNA, 30 bp, Artificial Sequence
  Synthetic oligonucleotide
ctcaaacagcggcaagaaaagtactaaagc

SEQ ID NO: 139592 - DNA, 30 bp, Artificial Sequence
  Synthetic oligonucleotide
cgatcgaccgggtgggactatcattaaagc

SEQ ID NO: 139593 - DNA, 30 bp, Artificial Sequence
  Synthetic oligonucleotide
ggtgagaatacaaggtaagcctcttaaagc

SEQ ID NO: 139594 - DNA, 29 bp, Artificial Sequence
  Synthetic oligonucleotide
ctccgtgatttgggagaagtgtcacaagc

SEQ ID NO: 139595 - DNA, 30 bp, Artificial Sequence
  Synthetic oligonucleotide
ggtaaacacccctggcgagcattgacaagc

SEQ ID NO: 139596 - DNA, 30 bp, Artificial Sequence
  Synthetic oligonucleotide
aatgttgacgcgattaaaagcggaccaagc

SEQ ID NO: 139597 - DNA, 30 bp, Artificial Sequence
  Synthetic oligonucleotide
cgtcagtccatggatgaagtacacccaagc

SEQ ID NO: 139598 - DNA, 29 bp, Artificial Sequence
  Synthetic oligonucleotide
aagtgtgtataaatcaaaacatcccaagc

SEQ ID NO: 139599 - DNA, 30 bp, Artificial Sequence
  Synthetic oligonucleotide
ttcggtctcaaggccggagtacatccaagc

SEQ ID NO: 139600 - DNA, 30 bp, Artificial Sequence
  Synthetic oligonucleotide
ggcctagatgtataaggacggttagcaagc

SEQ ID NO: 139601 - DNA, 30 bp, Artificial Sequence
  Synthetic oligonucleotide
acaccgtaagcgcgaggagttttcgcaagc

SEQ ID NO: 139602 - DNA, 30 bp, Artificial Sequence
  Synthetic oligonucleotide
ttaatatcgtagcgaattcccaatgcaagc

SEQ ID NO: 139603 - DNA, 30 bp, Artificial Sequence
  Synthetic oligonucleotide
cgccatgaaacggtagacctaactgcaagc

SEQ ID NO: 139604 - DNA, 30 bp, Artificial Sequence
  Synthetic oligonucleotide
tacaagccctgttttaggagctactcaagc

SEQ ID NO: 139605 - DNA, 30 bp, Artificial Sequence
  Synthetic oligonucleotide
aggcgaaaccctgggctgcacgccagaagc

SEQ ID NO: 139606 - DNA, 30 bp, Artificial Sequence
  Synthetic oligonucleotide
agcggatccacacctgaatgcaagagaagc

SEQ ID NO: 139607 - DNA, 29 bp, Artificial Sequence
  Synthetic oligonucleotide
attcaacccgggaaacaggtcagagaagc

SEQ ID NO: 139608 - DNA, 30 bp, Artificial Sequence
  Synthetic oligonucleotide
tgagccaattaactggtctggactagaagc

SEQ ID NO: 139609 - DNA, 30 bp, Artificial Sequence
  Synthetic oligonucleotide
gaagatacgtggggctccaaaacacgaagc

SEQ ID NO: 139610 - DNA, 30 bp, Artificial Sequence
  Synthetic oligonucleotide
agtaagcgaccgtaggaccagagacgaagc

SEQ ID NO: 139611 - DNA, 30 bp, Artificial Sequence
  Synthetic oligonucleotide
aacggaatcggcacaataatttaccgaagc

SEQ ID NO: 139612 - DNA, 30 bp, Artificial Sequence
  Synthetic oligonucleotide
gctggaatttacttgaagtagatccgaagc

SEQ ID NO: 139613 - DNA, 30 bp, Artificial Sequence
  Synthetic oligonucleotide
ggtcacagttggtcaaaaagaaatcgaagc

SEQ ID NO: 139614 - DNA, 30 bp, Artificial Sequence
  Synthetic oligonucleotide
ctacatatccaccgtgtgttagtgggaagc

SEQ ID NO: 139615 - DNA, 30 bp, Artificial Sequence
  Synthetic oligonucleotide
acgtaaatcggtcaaaacccatcatgaagc

SEQ ID NO: 139616 - DNA, 30 bp, Artificial Sequence
  Synthetic oligonucleotide
tgaggggcgtattctaagggtagatgaagc

SEQ ID NO: 139617 - DNA, 30 bp, Artificial Sequence
  Synthetic oligonucleotide
cgggcgggcgtaggagctgggagttgaagc

SEQ ID NO: 139618 - DNA, 30 bp, Artificial Sequence
  Synthetic oligonucleotide
ccaaacttttactgaaaatttcaaataagc

SEQ ID NO: 139619 - DNA, 30 bp, Artificial Sequence
  Synthetic oligonucleotide
taaatgctgtgtgcggaaagacgaataagc

SEQ ID NO: 139620 - DNA, 30 bp, Artificial Sequence
  Synthetic oligonucleotide
ggtctgcaggtagttgactatctcataagc

SEQ ID NO: 139621 - DNA, 30 bp, Artificial Sequence
  Synthetic oligonucleotide
aattacgtgagaatcccggtgaccctaagc

SEQ ID NO: 139622 - DNA, 30 bp, Artificial Sequence
  Synthetic oligonucleotide
gctaatcgggtcgcatgtatcaggctaagc

SEQ ID NO: 139623 - DNA, 30 bp, Artificial Sequence
  Synthetic oligonucleotide
caaagattaacttagacccaaaatctaagc

SEQ ID NO: 139624 - DNA, 30 bp, Artificial Sequence
  Synthetic oligonucleotide
tagtgcaacgcgggggcatagaaagtaagc

SEQ ID NO: 139625 - DNA, 30 bp, Artificial Sequence
  Synthetic oligonucleotide
gttaaggcaggctcgaacggaacggtaagc

SEQ ID NO: 139626 - DNA, 30 bp, Artificial Sequence
  Synthetic oligonucleotide
tgcggagatctccgaacttgggtggtaagc

SEQ ID NO: 139627 - DNA, 30 bp, Artificial Sequence
  Synthetic oligonucleotide
ccgagctaagtttaccccacacaattaagc

SEQ ID NO: 139628 - DNA, 30 bp, Artificial Sequence
  Synthetic oligonucleotide
cgggaggatttagagcgcctgatattaagc

SEQ ID NO: 139629 - DNA, 30 bp, Artificial Sequence
  Synthetic oligonucleotide
tacacacgccgaataggcttaacgttaagc

SEQ ID NO: 139630 - DNA, 30 bp, Artificial Sequence
  Synthetic oligonucleotide
cgaggatataggggcccctagtatttaagc

SEQ ID NO: 139631 - DNA, 30 bp, Artificial Sequence
  Synthetic oligonucleotide
ctgggtctgtgagagcgcgggagaaacagc

SEQ ID NO: 139632 - DNA, 30 bp, Artificial Sequence
  Synthetic oligonucleotide
acgtaatgcacaggtggcaaatccaacagc

SEQ ID NO: 139633 - DNA, 30 bp, Artificial Sequence
  Synthetic oligonucleotide
gggtcggggttatgagcgttagtcaacagc

SEQ ID NO: 139634 - DNA, 30 bp, Artificial Sequence
  Synthetic oligonucleotide
atgtccaggatatgatccgagcataacagc

SEQ ID NO: 139635 - DNA, 30 bp, Artificial Sequence
  Synthetic oligonucleotide
ttgggtggcggtacatgcaattttaacagc

SEQ ID NO: 139636 - DNA, 30 bp, Artificial Sequence
  Synthetic oligonucleotide
tgctcaacaaacccgtctggtgaacacagc

SEQ ID NO: 139637 - DNA, 30 bp, Artificial Sequence
  Synthetic oligonucleotide
ctaggatatggccacagtatataacacagc

SEQ ID NO: 139638 - DNA, 30 bp, Artificial Sequence
  Synthetic oligonucleotide
cgcgttcccgcgcctggtgacgtccacagc

SEQ ID NO: 139639 - DNA, 30 bp, Artificial Sequence
  Synthetic oligonucleotide
tatataaggcaaatccccattgagcacagc

SEQ ID NO: 139640 - DNA, 30 bp, Artificial Sequence
  Synthetic oligonucleotide
gatcagcctattttatgcgcaaggcacagc

SEQ ID NO: 139641 - DNA, 30 bp, Artificial Sequence
  Synthetic oligonucleotide
cagtataccgaagtgtaaaaacctcacagc

SEQ ID NO: 139642 - DNA, 30 bp, Artificial Sequence
  Synthetic oligonucleotide
ttcacaggttccgttgtcaataaggacagc

SEQ ID NO: 139643 - DNA, 30 bp, Artificial Sequence
  Synthetic oligonucleotide
aggcgagtacgctggatccaaagtgacagc

SEQ ID NO: 139644 - DNA, 30 bp, Artificial Sequence
  Synthetic oligonucleotide
caaacctggccagcaccactacgtgacagc

SEQ ID NO: 139645 - DNA, 30 bp, Artificial Sequence
  Synthetic oligonucleotide
cacagacgcgccgttcacgacgtcaccagc

SEQ ID NO: 139646 - DNA, 30 bp, Artificial Sequence
  Synthetic oligonucleotide
acggccaaccgcgtgtgttatccagccagc

SEQ ID NO: 139647 - DNA, 30 bp, Artificial Sequence
  Synthetic oligonucleotide
aacggtagcgtaaggtcccttaccgccagc

SEQ ID NO: 139648 - DNA, 30 bp, Artificial Sequence
  Synthetic oligonucleotide
taatctctcgtaagacttcgggaggccagc

SEQ ID NO: 139649 - DNA, 30 bp, Artificial Sequence
  Synthetic oligonucleotide
tcgcggacccaacggtgttctacttccagc

SEQ ID NO: 139650 - DNA, 30 bp, Artificial Sequence
  Synthetic oligonucleotide
ttgttcataagggaaactactatcagcagc

SEQ ID NO: 139651 - DNA, 30 bp, Artificial Sequence
  Synthetic oligonucleotide
gcagaacagattcatttagatttgagcagc

SEQ ID NO: 139652 - DNA, 30 bp, Artificial Sequence
  Synthetic oligonucleotide
ctatagtgtaacggtgcagattagcgcagc

SEQ ID NO: 139653 - DNA, 30 bp, Artificial Sequence
  Synthetic oligonucleotide
agcacaggcgactctctgacgattcgcagc

SEQ ID NO: 139654 - DNA, 30 bp, Artificial Sequence
  Synthetic oligonucleotide
tggtgacatttaggtcacaaaggcggcagc

SEQ ID NO: 139655 - DNA, 30 bp, Artificial Sequence
  Synthetic oligonucleotide
atcactatcttgaaagcgtggctcggcagc

SEQ ID NO: 139656 - DNA, 30 bp, Artificial Sequence
  Synthetic oligonucleotide
gcttcacaacaaaagcaaaaatagggcagc

SEQ ID NO: 139657 - DNA, 30 bp, Artificial Sequence
  Synthetic oligonucleotide
agcctgcggtacatctggacgtcgggcagc

SEQ ID NO: 139658 - DNA, 30 bp, Artificial Sequence
  Synthetic oligonucleotide
cctaacgcggtagacaagaaagtatgcagc

SEQ ID NO: 139659 - DNA, 30 bp, Artificial Sequence
  Synthetic oligonucleotide
ggatcatggccgaattaccagttgatcagc

SEQ ID NO: 139660 - DNA, 30 bp, Artificial Sequence
  Synthetic oligonucleotide
ggaattaggaaaggaaagccaagtatcagc

SEQ ID NO: 139661 - DNA, 30 bp, Artificial Sequence
  Synthetic oligonucleotide
aacctcctacgtttcaccgccggtatcagc

SEQ ID NO: 139662 - DNA, 30 bp, Artificial Sequence
  Synthetic oligonucleotide
gacactggttgtgggtgtacaagcctcagc

SEQ ID NO: 139663 - DNA, 30 bp, Artificial Sequence
  Synthetic oligonucleotide
ataccgcgattttacgtgccgttcctcagc

SEQ ID NO: 139664 - DNA, 30 bp, Artificial Sequence
  Synthetic oligonucleotide
aagtgacccggaacggggacctacgtcagc

SEQ ID NO: 139665 - DNA, 30 bp, Artificial Sequence
  Synthetic oligonucleotide
cagagctgtgtgactccgaatttcgtcagc

SEQ ID NO: 139666 - DNA, 30 bp, Artificial Sequence
  Synthetic oligonucleotide
attaggtcagcgaaggtatcgggtgtcagc

SEQ ID NO: 139667 - DNA, 30 bp, Artificial Sequence
  Synthetic oligonucleotide
aagttgcaaaaatgacagagccttgtcagc

SEQ ID NO: 139668 - DNA, 30 bp, Artificial Sequence
  Synthetic oligonucleotide
aacggaccggtcagaaacactcaattcagc

SEQ ID NO: 139669 - DNA, 30 bp, Artificial Sequence
  Synthetic oligonucleotide
ggaattcaaataacacaagccgacttcagc

SEQ ID NO: 139670 - DNA, 30 bp, Artificial Sequence
  Synthetic oligonucleotide
actattggacatcgcctatcgtagttcagc

SEQ ID NO: 139671 - DNA, 30 bp, Artificial Sequence
  Synthetic oligonucleotide
gaggcttgaggtggcgtgtacaaaaagagc

SEQ ID NO: 139672 - DNA, 30 bp, Artificial Sequence
  Synthetic oligonucleotide
agggccacgtgtcgactaaaccgaaagagc

SEQ ID NO: 139673 - DNA, 30 bp, Artificial Sequence
  Synthetic oligonucleotide
gctcataacttagggctgccgataaagagc

SEQ ID NO: 139674 - DNA, 30 bp, Artificial Sequence
  Synthetic oligonucleotide
tactgcgacaacttgcacatcatgaagagc

SEQ ID NO: 139675 - DNA, 30 bp, Artificial Sequence
  Synthetic oligonucleotide
agtgagtacgaccctcaacgaagccagagc

SEQ ID NO: 139676 - DNA, 30 bp, Artificial Sequence
  Synthetic oligonucleotide
actccgatgaaatccttcggaccgcagagc

SEQ ID NO: 139677 - DNA, 30 bp, Artificial Sequence
  Synthetic oligonucleotide
ggagcgaacggagctgagcgctctcagagc

SEQ ID NO: 139678 - DNA, 30 bp, Artificial Sequence
  Synthetic oligonucleotide
tatgcctgggcttgattgcagtctcagagc

SEQ ID NO: 139679 - DNA, 30 bp, Artificial Sequence
  Synthetic oligonucleotide
atcgtcctagttcagttacctaacgagagc

SEQ ID NO: 139680 - DNA, 30 bp, Artificial Sequence
  Synthetic oligonucleotide
tgtagcttggaggagcgagaataggagagc

SEQ ID NO: 139681 - DNA, 30 bp, Artificial Sequence
  Synthetic oligonucleotide
gcactaaagttgcttatccggggggagagc

SEQ ID NO: 139682 - DNA, 30 bp, Artificial Sequence
  Synthetic oligonucleotide
tcttgagaggaatcaacgaaccattagagc

SEQ ID NO: 139683 - DNA, 30 bp, Artificial Sequence
  Synthetic oligonucleotide
ggacggaacggacttaagatgttttagagc

SEQ ID NO: 139684 - DNA, 30 bp, Artificial Sequence
  Synthetic oligonucleotide
cgagacctgtggacgtataatataacgagc

SEQ ID NO: 139685 - DNA, 30 bp, Artificial Sequence
  Synthetic oligonucleotide
tcctaagcaggtttcacaagactaacgagc

SEQ ID NO: 139686 - DNA, 30 bp, Artificial Sequence
  Synthetic oligonucleotide
ggtcagcgtgttagtgaatatctcacgagc

SEQ ID NO: 139687 - DNA, 30 bp, Artificial Sequence
  Synthetic oligonucleotide
accctggattcaaagatgccggcgccgagc

SEQ ID NO: 139688 - DNA, 30 bp, Artificial Sequence
  Synthetic oligonucleotide
tgggaagtactatcgtgtagaaggccgagc

SEQ ID NO: 139689 - DNA, 30 bp, Artificial Sequence
  Synthetic oligonucleotide
acagtggaccggctgtctactcgtccgagc

SEQ ID NO: 139690 - DNA, 30 bp, Artificial Sequence
  Synthetic oligonucleotide
tctccggagaattagggagtcatagcgagc

SEQ ID NO: 139691 - DNA, 30 bp, Artificial Sequence
  Synthetic oligonucleotide
ggacgactaagtgattgcgcaaaggcgagc

SEQ ID NO: 139692 - DNA, 30 bp, Artificial Sequence
  Synthetic oligonucleotide
ccaacacaacgctcacagcgaacatcgagc

SEQ ID NO: 139693 - DNA, 30 bp, Artificial Sequence
  Synthetic oligonucleotide
tcgaagctgttccatatgacgtgatcgagc

SEQ ID NO: 139694 - DNA, 30 bp, Artificial Sequence
  Synthetic oligonucleotide
taaatcactcgttcgacgagattctcgagc

SEQ ID NO: 139695 - DNA, 30 bp, Artificial Sequence
  Synthetic oligonucleotide
ttcagggagggaagcattaagtggtcgagc

SEQ ID NO: 139696 - DNA, 30 bp, Artificial Sequence
  Synthetic oligonucleotide
gatgtgagttcattcgagtcagaacggagc

SEQ ID NO: 139697 - DNA, 30 bp, Artificial Sequence
  Synthetic oligonucleotide
cactaatactctctgtacgtctcacggagc

SEQ ID NO: 139698 - DNA, 30 bp, Artificial Sequence
  Synthetic oligonucleotide
ttgataataggcaataggagtagccggagc

SEQ ID NO: 139699 - DNA, 30 bp, Artificial Sequence
  Synthetic oligonucleotide
aggacatcctagccaaacttcgaatggagc

SEQ ID NO: 139700 - DNA, 30 bp, Artificial Sequence
  Synthetic oligonucleotide
accatgaagcactgacgactgtaatggagc

SEQ ID NO: 139701 - DNA, 30 bp, Artificial Sequence
  Synthetic oligonucleotide
ggtgattgtcacctgcaaattgtctggagc

SEQ ID NO: 139702 - DNA, 30 bp, Artificial Sequence
  Synthetic oligonucleotide
ataagccgtccgaagaagctagattggagc

SEQ ID NO: 139703 - DNA, 30 bp, Artificial Sequence
  Synthetic oligonucleotide
caagacagtatcgtcagcccatattggagc

SEQ ID NO: 139704 - DNA, 30 bp, Artificial Sequence
  Synthetic oligonucleotide
atgatttgaaataaaaggactcacatgagc

SEQ ID NO: 139705 - DNA, 30 bp, Artificial Sequence
  Synthetic oligonucleotide
gaacctcggcgtactgccaactggatgagc

SEQ ID NO: 139706 - DNA, 30 bp, Artificial Sequence
  Synthetic oligonucleotide
tcgcatcgctactgtctatcgaaggtgagc

SEQ ID NO: 139707 - DNA, 30 bp, Artificial Sequence
  Synthetic oligonucleotide
tacgccacaaattcgctccaatcggtgagc

SEQ ID NO: 139708 - DNA, 30 bp, Artificial Sequence
  Synthetic oligonucleotide
cgttattgtccagtagtgaatatggtgagc

SEQ ID NO: 139709 - DNA, 30 bp, Artificial Sequence
  Synthetic oligonucleotide
ggtcttgtatgtgaatgtaggcctgtgagc

SEQ ID NO: 139710 - DNA, 31 bp, Artificial Sequence
  Synthetic oligonucleotide
tgtgacgtctgagtcttacggttgattgagc

SEQ ID NO: 139711 - DNA, 30 bp, Artificial Sequence
  Synthetic oligonucleotide
ggtgatacccgaatgatagaacccttgagc

SEQ ID NO: 139712 - DNA, 30 bp, Artificial Sequence
  Synthetic oligonucleotide
ccacagtctatagtgattctgccgttgagc

SEQ ID NO: 139713 - DNA, 30 bp, Artificial Sequence
  Synthetic oligonucleotide
gaaaaggtgcaaaccgttgtgacgaatagc

SEQ ID NO: 139714 - DNA, 30 bp, Artificial Sequence
  Synthetic oligonucleotide
gtgaatagcgatgaaaaacaacataatagc

SEQ ID NO: 139715 - DNA, 30 bp, Artificial Sequence
  Synthetic oligonucleotide
actcaagtctgtttaagcagtattaatagc

SEQ ID NO: 139716 - DNA, 30 bp, Artificial Sequence
  Synthetic oligonucleotide
ggaggcatgacttttgtcaagtatcatagc

SEQ ID NO: 139717 - DNA, 30 bp, Artificial Sequence
  Synthetic oligonucleotide
gtcatacatttgagcgagaatggtcatagc

SEQ ID NO: 139718 - DNA, 30 bp, Artificial Sequence
  Synthetic oligonucleotide
cacttagtaaatgcgtcgctccccgatagc

SEQ ID NO: 139719 - DNA, 30 bp, Artificial Sequence
  Synthetic oligonucleotide
acaggtgtgttcgaatgttttgtcgatagc

SEQ ID NO: 139720 - DNA, 30 bp, Artificial Sequence
  Synthetic oligonucleotide
gcaagccagatggatgaacaaatggatagc

SEQ ID NO: 139721 - DNA, 30 bp, Artificial Sequence
  Synthetic oligonucleotide
gcaggaattaacaaacggctactggatagc

SEQ ID NO: 139722 - DNA, 30 bp, Artificial Sequence
  Synthetic oligonucleotide
ttctcagatcacggccagtagaaatatagc

SEQ ID NO: 139723 - DNA, 30 bp, Artificial Sequence
  Synthetic oligonucleotide
ggccggtacgaatgggaccgagaatatagc

SEQ ID NO: 139724 - DNA, 30 bp, Artificial Sequence
  Synthetic oligonucleotide
acggaaccggtttactaagtcatatatagc

SEQ ID NO: 139725 - DNA, 30 bp, Artificial Sequence
  Synthetic oligonucleotide
caatgcgtgcatgctccatcgcactatagc

SEQ ID NO: 139726 - DNA, 30 bp, Artificial Sequence
  Synthetic oligonucleotide
acaatgcgtcttcgtccattaggctatagc

SEQ ID NO: 139727 - DNA, 30 bp, Artificial Sequence
  Synthetic oligonucleotide
acgagaagacggtggcgacgacagtatagc

SEQ ID NO: 139728 - DNA, 30 bp, Artificial Sequence
  Synthetic oligonucleotide
aagtctaaaataaaggtacgttggtatagc

SEQ ID NO: 139729 - DNA, 30 bp, Artificial Sequence
  Synthetic oligonucleotide
gaggcattgattcgcgtaaggtattatagc

SEQ ID NO: 139730 - DNA, 30 bp, Artificial Sequence
  Synthetic oligonucleotide
taaacaaccggaggggtacgttgttatagc

SEQ ID NO: 139731 - DNA, 30 bp, Artificial Sequence
  Synthetic oligonucleotide
ctagcctgaacccaccgagctatttatagc

SEQ ID NO: 139732 - DNA, 30 bp, Artificial Sequence
  Synthetic oligonucleotide
ccgattccggaattgactattcaaactagc

SEQ ID NO: 139733 - DNA, 30 bp, Artificial Sequence
  Synthetic oligonucleotide
gctacatcgctccggtcgttcggcactagc

SEQ ID NO: 139734 - DNA, 30 bp, Artificial Sequence
  Synthetic oligonucleotide
gtgcacagccatcgaaagcgtcagactagc

SEQ ID NO: 139735 - DNA, 30 bp, Artificial Sequence
  Synthetic oligonucleotide
tgcgtatactcagcgtacgtccttactagc

SEQ ID NO: 139736 - DNA, 30 bp, Artificial Sequence
  Synthetic oligonucleotide
tgatcaaatacatatagtacgagacctagc

SEQ ID NO: 139737 - DNA, 30 bp, Artificial Sequence
  Synthetic oligonucleotide
gacgatggcgcgttttgtgccttagctagc

SEQ ID NO: 139738 - DNA, 30 bp, Artificial Sequence
  Synthetic oligonucleotide
gcggctggaaaagccaatcatttagctagc

SEQ ID NO: 139739 - DNA, 31 bp, Artificial Sequence
  Synthetic oligonucleotide
tcaaccaggagagggctcgatcgacgctagc

SEQ ID NO: 139740 - DNA, 30 bp, Artificial Sequence
  Synthetic oligonucleotide
gggtagtactaggggggcccgaccgctagc

SEQ ID NO: 139741 - DNA, 30 bp, Artificial Sequence
  Synthetic oligonucleotide
atagattactagggtgagctgagcgctagc

SEQ ID NO: 139742 - DNA, 30 bp, Artificial Sequence
  Synthetic oligonucleotide
gttacaacgtaaagcaaactgcgcgctagc

SEQ ID NO: 139743 - DNA, 31 bp, Artificial Sequence
  Synthetic oligonucleotide
ccccggacgagggcacgcctctactgctagc

SEQ ID NO: 139744 - DNA, 30 bp, Artificial Sequence
  Synthetic oligonucleotide
agctgagaggtaatgcgttgttcatctagc

SEQ ID NO: 139745 - DNA, 30 bp, Artificial Sequence
  Synthetic oligonucleotide
taagtattcatccaggcgtatttctctagc

SEQ ID NO: 139746 - DNA, 30 bp, Artificial Sequence
  Synthetic oligonucleotide
caagcacatgtgagatataccataagtagc

SEQ ID NO: 139747 - DNA, 30 bp, Artificial Sequence
  Synthetic oligonucleotide
cacgtttagggactgggggagacgagtagc

SEQ ID NO: 139748 - DNA, 30 bp, Artificial Sequence
  Synthetic oligonucleotide
gtaaccctaccagcaccatccattagtagc

SEQ ID NO: 139749 - DNA, 30 bp, Artificial Sequence
  Synthetic oligonucleotide
gtatcgaaatatggaaaccaagcgcgtagc

SEQ ID NO: 139750 - DNA, 30 bp, Artificial Sequence
  Synthetic oligonucleotide
gagaagtaccacctggattacggaggtagc

SEQ ID NO: 139751 - DNA, 30 bp, Artificial Sequence
  Synthetic oligonucleotide
gttacgcatattgcttagctgaggggtagc

SEQ ID NO: 139752 - DNA, 30 bp, Artificial Sequence
  Synthetic oligonucleotide
atcagaatggtagatgctgataggggtagc

SEQ ID NO: 139753 - DNA, 30 bp, Artificial Sequence
  Synthetic oligonucleotide
gcgggagaataatgttgtatacgtggtagc

SEQ ID NO: 139754 - DNA, 30 bp, Artificial Sequence
  Synthetic oligonucleotide
gtagccatccgtacgacaagtatatgtagc

SEQ ID NO: 139755 - DNA, 30 bp, Artificial Sequence
  Synthetic oligonucleotide
tcgtttttgaatgttcaagactactgtagc

SEQ ID NO: 139756 - DNA, 30 bp, Artificial Sequence
  Synthetic oligonucleotide
gacatagaatggtcgtgttcggattgtagc

SEQ ID NO: 139757 - DNA, 30 bp, Artificial Sequence
  Synthetic oligonucleotide
gcgagttgaaagtacagtgcttggattagc

SEQ ID NO: 139758 - DNA, 30 bp, Artificial Sequence
  Synthetic oligonucleotide
gtaagtaattgagcgagtaatagacttagc

SEQ ID NO: 139759 - DNA, 30 bp, Artificial Sequence
  Synthetic oligonucleotide
atgaaaataccattgagtaatcgacttagc

SEQ ID NO: 139760 - DNA, 30 bp, Artificial Sequence
  Synthetic oligonucleotide
ccggacaaaataggttaccaatcggttagc

SEQ ID NO: 139761 - DNA, 30 bp, Artificial Sequence
  Synthetic oligonucleotide
tgcgacatttacataatgtaacgatttagc

SEQ ID NO: 139762 - DNA, 30 bp, Artificial Sequence
  Synthetic oligonucleotide
cccaggtctgggatattatccgaaaaacgc

SEQ ID NO: 139763 - DNA, 30 bp, Artificial Sequence
  Synthetic oligonucleotide
taagtggtattatggaagggcagcaaacgc

SEQ ID NO: 139764 - DNA, 30 bp, Artificial Sequence
  Synthetic oligonucleotide
ttgccgtagagaaaggttcagcttaaacgc

SEQ ID NO: 139765 - DNA, 30 bp, Artificial Sequence
  Synthetic oligonucleotide
gaagtactactcatcacctcagatcaacgc

SEQ ID NO: 139766 - DNA, 29 bp, Artificial Sequence
  Synthetic oligonucleotide
cgatgcaaccccgcctgacggaagaacgc

SEQ ID NO: 139767 - DNA, 30 bp, Artificial Sequence
  Synthetic oligonucleotide
tatgtcagggatcatattctctcagaacgc

SEQ ID NO: 139768 - DNA, 30 bp, Artificial Sequence
  Synthetic oligonucleotide
ggcaaaatcacagctgcaacccgagaacgc

SEQ ID NO: 139769 - DNA, 30 bp, Artificial Sequence
  Synthetic oligonucleotide
gtcattgatatgtcaccacggtgcgaacgc

SEQ ID NO: 139770 - DNA, 30 bp, Artificial Sequence
  Synthetic oligonucleotide
caagagctagggctccgtcacgcaccacgc

SEQ ID NO: 139771 - DNA, 30 bp, Artificial Sequence
  Synthetic oligonucleotide
aatgtggggaggattcaacgaagcccacgc

SEQ ID NO: 139772 - DNA, 30 bp, Artificial Sequence
  Synthetic oligonucleotide
gttagacagtgttcgtcatctcggccacgc

SEQ ID NO: 139773 - DNA, 30 bp, Artificial Sequence
  Synthetic oligonucleotide
agccaatggtacttcggcattattccacgc

SEQ ID NO: 139774 - DNA, 30 bp, Artificial Sequence
  Synthetic oligonucleotide
gagatggaacgatcaacatctaaggcacgc

SEQ ID NO: 139775 - DNA, 30 bp, Artificial Sequence
  Synthetic oligonucleotide
tagaaaacgatatcgtgcttggcctcacgc

SEQ ID NO: 139776 - DNA, 30 bp, Artificial Sequence
  Synthetic oligonucleotide
aggggaccctaagatcaggtaagctcacgc

SEQ ID NO: 139777 - DNA, 30 bp, Artificial Sequence
  Synthetic oligonucleotide
gatcgaaaggaacttgtacgctcgtcacgc

SEQ ID NO: 139778 - DNA, 30 bp, Artificial Sequence
  Synthetic oligonucleotide
atggccaaggacaaaaccgttgtttcacgc

SEQ ID NO: 139779 - DNA, 30 bp, Artificial Sequence
  Synthetic oligonucleotide
ttgcgtcaatagaccgcacagaggcgacgc

SEQ ID NO: 139780 - DNA, 30 bp, Artificial Sequence
  Synthetic oligonucleotide
gctaagggagactcaagtgcaggaggacgc

SEQ ID NO: 139781 - DNA, 30 bp, Artificial Sequence
  Synthetic oligonucleotide
aagaacactcgacggagacctgaaatacgc

SEQ ID NO: 139782 - DNA, 30 bp, Artificial Sequence
  Synthetic oligonucleotide
cgaacttaggaagctttcgtagcaatacgc

SEQ ID NO: 139783 - DNA, 30 bp, Artificial Sequence
  Synthetic oligonucleotide
cgatccctacgagatgtggagcgaatacgc

SEQ ID NO: 139784 - DNA, 30 bp, Artificial Sequence
  Synthetic oligonucleotide
catggactagtaaactcgttattactacgc

SEQ ID NO: 139785 - DNA, 30 bp, Artificial Sequence
  Synthetic oligonucleotide
atcaaacggtaggatcgatggctgctacgc

SEQ ID NO: 139786 - DNA, 30 bp, Artificial Sequence
  Synthetic oligonucleotide
ataagcctccaatctatgtaccatctacgc

SEQ ID NO: 139787 - DNA, 30 bp, Artificial Sequence
  Synthetic oligonucleotide
caatatgccggttggagactaacggtacgc

SEQ ID NO: 139788 - DNA, 30 bp, Artificial Sequence
  Synthetic oligonucleotide
agtaccttagaactagacaccgatgtacgc

SEQ ID NO: 139789 - DNA, 30 bp, Artificial Sequence
  Synthetic oligonucleotide
aggagattgtatgtgtgatctagattacgc

SEQ ID NO: 139790 - DNA, 30 bp, Artificial Sequence
  Synthetic oligonucleotide
ctaggcattgcctggtggagtacgttacgc

SEQ ID NO: 139791 - DNA, 30 bp, Artificial Sequence
  Synthetic oligonucleotide
tatgggtccgtgagaggggcagaaaaccgc

SEQ ID NO: 139792 - DNA, 30 bp, Artificial Sequence
  Synthetic oligonucleotide
cgcccctactctatcggactcgaaaaccgc

SEQ ID NO: 139793 - DNA, 30 bp, Artificial Sequence
  Synthetic oligonucleotide
ggtcgtgcgactccaaatcggtaaaaccgc

SEQ ID NO: 139794 - DNA, 31 bp, Artificial Sequence
  Synthetic oligonucleotide
aatgcggataatcgctgatttcggcaaccgc

SEQ ID NO: 139795 - DNA, 30 bp, Artificial Sequence
  Synthetic oligonucleotide
tgtctgaagggtcttatgtgcacgaaccgc

SEQ ID NO: 139796 - DNA, 30 bp, Artificial Sequence
  Synthetic oligonucleotide
ggtaggtcactcccgatgtcccggaaccgc

SEQ ID NO: 139797 - DNA, 30 bp, Artificial Sequence
  Synthetic oligonucleotide
gttcgagaatcgaacattaaggataaccgc

SEQ ID NO: 139798 - DNA, 30 bp, Artificial Sequence
  Synthetic oligonucleotide
cgtaatggtctaaccttcggagtacaccgc

SEQ ID NO: 139799 - DNA, 30 bp, Artificial Sequence
  Synthetic oligonucleotide
gtaaagtccaaagctaaaagggttcaccgc

SEQ ID NO: 139800 - DNA, 30 bp, Artificial Sequence
  Synthetic oligonucleotide
ccggctaggcacatctttattagataccgc

SEQ ID NO: 139801 - DNA, 30 bp, Artificial Sequence
  Synthetic oligonucleotide
atcctaaggcaagttactcttggataccgc

SEQ ID NO: 139802 - DNA, 30 bp, Artificial Sequence
  Synthetic oligonucleotide
acaactaggtggtcgcaaggtatctaccgc

SEQ ID NO: 139803 - DNA, 30 bp, Artificial Sequence
  Synthetic oligonucleotide
atcttcatttgccgtacgatcgtttaccgc

SEQ ID NO: 139804 - DNA, 30 bp, Artificial Sequence
  Synthetic oligonucleotide
ctacgaaacgtgtaaacaacgggcacccgc

SEQ ID NO: 139805 - DNA, 30 bp, Artificial Sequence
  Synthetic oligonucleotide
aggttatcgacgaagaaaatacctacccgc

SEQ ID NO: 139806 - DNA, 30 bp, Artificial Sequence
  Synthetic oligonucleotide
cacaataaaaatcaaggtgaagactcccgc

SEQ ID NO: 139807 - DNA, 30 bp, Artificial Sequence
  Synthetic oligonucleotide
gccggaagatacctcaccaaggaaagccgc

SEQ ID NO: 139808 - DNA, 30 bp, Artificial Sequence
  Synthetic oligonucleotide
tccagggtcatcgtgtaataaccgagccgc

SEQ ID NO: 139809 - DNA, 30 bp, Artificial Sequence
  Synthetic oligonucleotide
aaaaagcaagtctcctgcaacattcgccgc

SEQ ID NO: 139810 - DNA, 30 bp, Artificial Sequence
  Synthetic oligonucleotide
tgtcacgccggtcgagctagtggcggccgc

SEQ ID NO: 139811 - DNA, 30 bp, Artificial Sequence
  Synthetic oligonucleotide
atgtgctcccaaggccaagatcactgccgc

SEQ ID NO: 139812 - DNA, 30 bp, Artificial Sequence
  Synthetic oligonucleotide
gttgacaatgccaccgatggcacgatccgc

SEQ ID NO: 139813 - DNA, 30 bp, Artificial Sequence
  Synthetic oligonucleotide
atatggcaggagtgtccgttgcggatccgc

SEQ ID NO: 139814 - DNA, 30 bp, Artificial Sequence
  Synthetic oligonucleotide
cataaagcaacacaactgagaaatatccgc

SEQ ID NO: 139815 - DNA, 30 bp, Artificial Sequence
  Synthetic oligonucleotide
cgcgtgggaaagtatctgctttcactccgc

SEQ ID NO: 139816 - DNA, 30 bp, Artificial Sequence
  Synthetic oligonucleotide
tagtcaatcgtcaccataaattgacagcgc

SEQ ID NO: 139817 - DNA, 30 bp, Artificial Sequence
  Synthetic oligonucleotide
cacaagcctgatctacatgaagcccagcgc

SEQ ID NO: 139818 - DNA, 30 bp, Artificial Sequence
  Synthetic oligonucleotide
gaataaagacaatacaaaggttagcagcgc

SEQ ID NO: 139819 - DNA, 30 bp, Artificial Sequence
  Synthetic oligonucleotide
tacatgtgtatcgtctaccccaatcagcgc

SEQ ID NO: 139820 - DNA, 30 bp, Artificial Sequence
  Synthetic oligonucleotide
ttcagtgtaaaaaagcgcagccttcagcgc

SEQ ID NO: 139821 - DNA, 30 bp, Artificial Sequence
  Synthetic oligonucleotide
ccatgcgtacgcatgggttaccaagagcgc

SEQ ID NO: 139822 - DNA, 30 bp, Artificial Sequence
  Synthetic oligonucleotide
aggccatacagggagtacatagtagagcgc

SEQ ID NO: 139823 - DNA, 30 bp, Artificial Sequence
  Synthetic oligonucleotide
aagctccgctgaagataggttgtagagcgc

SEQ ID NO: 139824 - DNA, 30 bp, Artificial Sequence
  Synthetic oligonucleotide
ctggcacattagaaatcgtcaacggagcgc

SEQ ID NO: 139825 - DNA, 30 bp, Artificial Sequence
  Synthetic oligonucleotide
aagttgtgaattagataagagaatgagcgc

SEQ ID NO: 139826 - DNA, 30 bp, Artificial Sequence
  Synthetic oligonucleotide
aagggacttagatccaacgacggtgagcgc

SEQ ID NO: 139827 - DNA, 32 bp, Artificial Sequence
  Synthetic oligonucleotide
tccggcgtgctgcaacacatatgaagtagcgc

SEQ ID NO: 139828 - DNA, 30 bp, Artificial Sequence
  Synthetic oligonucleotide
tccggaaagtcagaagttttccggtagcgc

SEQ ID NO: 139829 - DNA, 30 bp, Artificial Sequence
  Synthetic oligonucleotide
cgcctacggaggggtagaaacggttagcgc

SEQ ID NO: 139830 - DNA, 30 bp, Artificial Sequence
  Synthetic oligonucleotide
acggagatccgggtatcggtagttacgcgc

SEQ ID NO: 139831 - DNA, 30 bp, Artificial Sequence
  Synthetic oligonucleotide
tccgtcaaccaaccgtaccctcgtccgcgc

SEQ ID NO: 139832 - DNA, 30 bp, Artificial Sequence
  Synthetic oligonucleotide
aagatacctacttgccaagtgggggcgcgc

SEQ ID NO: 139833 - DNA, 30 bp, Artificial Sequence
  Synthetic oligonucleotide
ggaggcgatacctatagctactgttcgcgc

SEQ ID NO: 139834 - DNA, 30 bp, Artificial Sequence
  Synthetic oligonucleotide
taggtatcgccagaactcgtacgtaggcgc

SEQ ID NO: 139835 - DNA, 30 bp, Artificial Sequence
  Synthetic oligonucleotide
gtaaggggaaagaagtaccatgctcggcgc

SEQ ID NO: 139836 - DNA, 30 bp, Artificial Sequence
  Synthetic oligonucleotide
gcaaagagtggtaagcggtttaacgggcgc

SEQ ID NO: 139837 - DNA, 30 bp, Artificial Sequence
  Synthetic oligonucleotide
acgcactcatggagcgatgtgctcgggcgc

SEQ ID NO: 139838 - DNA, 30 bp, Artificial Sequence
  Synthetic oligonucleotide
aaactccggcagtagtctgtcgcatggcgc

SEQ ID NO: 139839 - DNA, 30 bp, Artificial Sequence
  Synthetic oligonucleotide
gagtaggagacctagattgggtgaatgcgc

SEQ ID NO: 139840 - DNA, 30 bp, Artificial Sequence
  Synthetic oligonucleotide
ggcctcctagaaacgcgcgggataatgcgc

SEQ ID NO: 139841 - DNA, 30 bp, Artificial Sequence
  Synthetic oligonucleotide
aaccgggaatactgggacattcagatgcgc

SEQ ID NO: 139842 - DNA, 30 bp, Artificial Sequence
  Synthetic oligonucleotide
gggagggggtatcaagcccgcaatatgcgc

SEQ ID NO: 139843 - DNA, 30 bp, Artificial Sequence
  Synthetic oligonucleotide
tgtgggcgttaattgccctggaatatgcgc

SEQ ID NO: 139844 - DNA, 30 bp, Artificial Sequence
  Synthetic oligonucleotide
agagtgtacgctggaatctaaggtatgcgc

SEQ ID NO: 139845 - DNA, 30 bp, Artificial Sequence
  Synthetic oligonucleotide
aaatcaaggcattggagacactcagtgcgc

SEQ ID NO: 139846 - DNA, 30 bp, Artificial Sequence
  Synthetic oligonucleotide
ctctcggataggctggtcataatcgtgcgc

SEQ ID NO: 139847 - DNA, 30 bp, Artificial Sequence
  Synthetic oligonucleotide
atcatccgtggacattcctattaattgcgc

SEQ ID NO: 139848 - DNA, 30 bp, Artificial Sequence
  Synthetic oligonucleotide
tccggactggcagtatttccgttattgcgc

SEQ ID NO: 139849 - DNA, 30 bp, Artificial Sequence
  Synthetic oligonucleotide
gggcgcgattatagcgggcgtgcaaatcgc

SEQ ID NO: 139850 - DNA, 30 bp, Artificial Sequence
  Synthetic oligonucleotide
agctgtctggactgtatcattcccaatcgc

SEQ ID NO: 139851 - DNA, 30 bp, Artificial Sequence
  Synthetic oligonucleotide
tagcgggtcttcgcctaatgtaaacatcgc

SEQ ID NO: 139852 - DNA, 30 bp, Artificial Sequence
  Synthetic oligonucleotide
gataccctaaccgccaaacatacgcatcgc

SEQ ID NO: 139853 - DNA, 30 bp, Artificial Sequence
  Synthetic oligonucleotide
ttaaagggagctggagcgcaaaggcatcgc

SEQ ID NO: 139854 - DNA, 30 bp, Artificial Sequence
  Synthetic oligonucleotide
cacgactaaatttgtggaattatgcatcgc

SEQ ID NO: 139855 - DNA, 30 bp, Artificial Sequence
  Synthetic oligonucleotide
catgggagcgctaggataactccagatcgc

SEQ ID NO: 139856 - DNA, 30 bp, Artificial Sequence
  Synthetic oligonucleotide
ggcgtaataccttgggatgtggagtatcgc

SEQ ID NO: 139857 - DNA, 30 bp, Artificial Sequence
  Synthetic oligonucleotide
gcgttattaggtgtggaagccgcgtatcgc

SEQ ID NO: 139858 - DNA, 30 bp, Artificial Sequence
  Synthetic oligonucleotide
gatagtgttaggagatagattgcgtatcgc

SEQ ID NO: 139859 - DNA, 30 bp, Artificial Sequence
  Synthetic oligonucleotide
ggaacactagcattggcagtggagactcgc

SEQ ID NO: 139860 - DNA, 30 bp, Artificial Sequence
  Synthetic oligonucleotide
ttcgacaacgtatgattgctacggcctcgc

SEQ ID NO: 139861 - DNA, 30 bp, Artificial Sequence
  Synthetic oligonucleotide
gcatgcatacccacggggacgaaagctcgc

SEQ ID NO: 139862 - DNA, 30 bp, Artificial Sequence
  Synthetic oligonucleotide
catactacttaatatatcatccgagctcgc

SEQ ID NO: 139863 - DNA, 30 bp, Artificial Sequence
  Synthetic oligonucleotide
aacgattcagaaagtgcgtctcgagctcgc

SEQ ID NO: 139864 - DNA, 30 bp, Artificial Sequence
  Synthetic oligonucleotide
cataaagggtggtcaattagtatcgctcgc

SEQ ID NO: 139865 - DNA, 30 bp, Artificial Sequence
  Synthetic oligonucleotide
cggctgctgggaatactaaccggggctcgc

SEQ ID NO: 139866 - DNA, 30 bp, Artificial Sequence
  Synthetic oligonucleotide
ttgtcgcctaaatcgagagacatgtctcgc

SEQ ID NO: 139867 - DNA, 30 bp, Artificial Sequence
  Synthetic oligonucleotide
gatcaggccagtttatgcttatcccgtcgc

SEQ ID NO: 139868 - DNA, 30 bp, Artificial Sequence
  Synthetic oligonucleotide
cgacaacagggtcatggagggcagcgtcgc

SEQ ID NO: 139869 - DNA, 30 bp, Artificial Sequence
  Synthetic oligonucleotide
gtaactggaatccgggagcattagcgtcgc

SEQ ID NO: 139870 - DNA, 30 bp, Artificial Sequence
  Synthetic oligonucleotide
cgtataatcgtttcacaaatacacggtcgc

SEQ ID NO: 139871 - DNA, 30 bp, Artificial Sequence
  Synthetic oligonucleotide
tcaacctattaatgggcactatacggtcgc

SEQ ID NO: 139872 - DNA, 30 bp, Artificial Sequence
  Synthetic oligonucleotide
aaacgagcgcgcagtggctcaaggggtcgc

SEQ ID NO: 139873 - DNA, 30 bp, Artificial Sequence
  Synthetic oligonucleotide
caaaatcagtcgtcgataggtatgtgtcgc

SEQ ID NO: 139874 - DNA, 30 bp, Artificial Sequence
  Synthetic oligonucleotide
cgaatcctagagcttaagtttcgttgtcgc

SEQ ID NO: 139875 - DNA, 30 bp, Artificial Sequence
  Synthetic oligonucleotide
tcttagtaagcggtacgggcacatattcgc

SEQ ID NO: 139876 - DNA, 30 bp, Artificial Sequence
  Synthetic oligonucleotide
ccgtcaaaattcagtccggattacgttcgc

SEQ ID NO: 139877 - DNA, 30 bp, Artificial Sequence
  Synthetic oligonucleotide
ggggtagtacctcaagtagatcgcgttcgc

SEQ ID NO: 139878 - DNA, 30 bp, Artificial Sequence
  Synthetic oligonucleotide
tcgcccccggctagaggacaggtatttcgc

SEQ ID NO: 139879 - DNA, 30 bp, Artificial Sequence
  Synthetic oligonucleotide
ttgtggcaactgccgccacgaaattttcgc

SEQ ID NO: 139880 - DNA, 30 bp, Artificial Sequence
  Synthetic oligonucleotide
ataccccagtatttttgcatagattttcgc

SEQ ID NO: 139881 - DNA, 30 bp, Artificial Sequence
  Synthetic oligonucleotide
aaaattcatcaatgtaaggagcccaaaggc

SEQ ID NO: 139882 - DNA, 30 bp, Artificial Sequence
  Synthetic oligonucleotide
taccttaaatcacaacgatctggacaaggc

SEQ ID NO: 139883 - DNA, 30 bp, Artificial Sequence
  Synthetic oligonucleotide
gagggggaataagtataagacaaccaaggc

SEQ ID NO: 139884 - DNA, 30 bp, Artificial Sequence
  Synthetic oligonucleotide
attatgatacgaaccaggtaaacgcaaggc

SEQ ID NO: 139885 - DNA, 30 bp, Artificial Sequence
  Synthetic oligonucleotide
gtctaaatgacgctgaaatggcggcaaggc

SEQ ID NO: 139886 - DNA, 30 bp, Artificial Sequence
  Synthetic oligonucleotide
gataccataccttatgttggggtgcaaggc

SEQ ID NO: 139887 - DNA, 30 bp, Artificial Sequence
  Synthetic oligonucleotide
gggctaaccagaatctgtcgattgcaaggc

SEQ ID NO: 139888 - DNA, 30 bp, Artificial Sequence
  Synthetic oligonucleotide
gtattgctgggtgaataagaactataaggc

SEQ ID NO: 139889 - DNA, 30 bp, Artificial Sequence
  Synthetic oligonucleotide
aagccgcaatttcactatccgacctaaggc

SEQ ID NO: 139890 - DNA, 30 bp, Artificial Sequence
  Synthetic oligonucleotide
gagccaaaacgaacttttgccgggtaaggc

SEQ ID NO: 139891 - DNA, 30 bp, Artificial Sequence
  Synthetic oligonucleotide
gtaggattgataccgaaccaatggtaaggc

SEQ ID NO: 139892 - DNA, 30 bp, Artificial Sequence
  Synthetic oligonucleotide
ggtagcgtcacccatccccagccgacaggc

SEQ ID NO: 139893 - DNA, 30 bp, Artificial Sequence
  Synthetic oligonucleotide
aacagtgtgtcattagtaaagttcccaggc

SEQ ID NO: 139894 - DNA, 30 bp, Artificial Sequence
  Synthetic oligonucleotide
ttatggggggatatggttggttcgccaggc

SEQ ID NO: 139895 - DNA, 30 bp, Artificial Sequence
  Synthetic oligonucleotide
atcaagtaacggatctattacccagcaggc

SEQ ID NO: 139896 - DNA, 30 bp, Artificial Sequence
  Synthetic oligonucleotide
atgcacttgggcaggacctctacatcaggc

SEQ ID NO: 139897 - DNA, 30 bp, Artificial Sequence
  Synthetic oligonucleotide
acttgcccgaaacatagagtttcatcaggc

SEQ ID NO: 139898 - DNA, 30 bp, Artificial Sequence
  Synthetic oligonucleotide
attatggtgatgacaacattaagatcaggc

SEQ ID NO: 139899 - DNA, 30 bp, Artificial Sequence
  Synthetic oligonucleotide
tcctgtatcaagaggcgtaccagatcaggc

SEQ ID NO: 139900 - DNA, 30 bp, Artificial Sequence
  Synthetic oligonucleotide
gcgagtaatattgtcctgttcgagtcaggc

SEQ ID NO: 139901 - DNA, 30 bp, Artificial Sequence
  Synthetic oligonucleotide
catgaaaccgttaggcacagtatgcgaggc

SEQ ID NO: 139902 - DNA, 30 bp, Artificial Sequence
  Synthetic oligonucleotide
ttaaccccagccaacccagaagtaggaggc

SEQ ID NO: 139903 - DNA, 30 bp, Artificial Sequence
  Synthetic oligonucleotide
atggcctaaatagtaacaaggttatgaggc

SEQ ID NO: 139904 - DNA, 30 bp, Artificial Sequence
  Synthetic oligonucleotide
tggaaacttctagtcttagggtggataggc

SEQ ID NO: 139905 - DNA, 30 bp, Artificial Sequence
  Synthetic oligonucleotide
agaatcgtggttggttaaggcgtgataggc

SEQ ID NO: 139906 - DNA, 30 bp, Artificial Sequence
  Synthetic oligonucleotide
ctattacgctgtaaggggcggagtataggc

SEQ ID NO: 139907 - DNA, 30 bp, Artificial Sequence
  Synthetic oligonucleotide
cagggcgtggatccattgtaacaactaggc

SEQ ID NO: 139908 - DNA, 30 bp, Artificial Sequence
  Synthetic oligonucleotide
attgttgagggcaccattaagctactaggc

SEQ ID NO: 139909 - DNA, 30 bp, Artificial Sequence
  Synthetic oligonucleotide
gagactggggggctaagctcaaatctaggc

SEQ ID NO: 139910 - DNA, 30 bp, Artificial Sequence
  Synthetic oligonucleotide
tgcatgggtttccagtcgagtaatctaggc

SEQ ID NO: 139911 - DNA, 30 bp, Artificial Sequence
  Synthetic oligonucleotide
ctcgaggtagacaatgggcgcacagtaggc

SEQ ID NO: 139912 - DNA, 30 bp, Artificial Sequence
  Synthetic oligonucleotide
cacgtggatcggtgtcgcggggtcgtaggc

SEQ ID NO: 139913 - DNA, 30 bp, Artificial Sequence
  Synthetic oligonucleotide
gcgaagggggcatagctcatggtggtaggc

SEQ ID NO: 139914 - DNA, 30 bp, Artificial Sequence
  Synthetic oligonucleotide
gcacccacgttgggtgatgacgcattaggc

SEQ ID NO: 139915 - DNA, 30 bp, Artificial Sequence
  Synthetic oligonucleotide
accatcatcgcggatggcaggcaaaacggc

SEQ ID NO: 139916 - DNA, 30 bp, Artificial Sequence
  Synthetic oligonucleotide
ccctgtagggacagtggtgtcgcaaacggc

SEQ ID NO: 139917 - DNA, 30 bp, Artificial Sequence
  Synthetic oligonucleotide
tgccagcttgccaacctctagtgaaacggc

SEQ ID NO: 139918 - DNA, 30 bp, Artificial Sequence
  Synthetic oligonucleotide
tgggatcatgtcgtaagaactgttgacggc

SEQ ID NO: 139919 - DNA, 30 bp, Artificial Sequence
  Synthetic oligonucleotide
aaagaataggacattcttattgcatacggc

SEQ ID NO: 139920 - DNA, 30 bp, Artificial Sequence
  Synthetic oligonucleotide
ctacgggccgatgtcgagagggaaaccggc

SEQ ID NO: 139921 - DNA, 30 bp, Artificial Sequence
  Synthetic oligonucleotide
taacacttggagagtctacgagtaaccggc

SEQ ID NO: 139922 - DNA, 30 bp, Artificial Sequence
  Synthetic oligonucleotide
tagtgtgaaagccatacggggctcaccggc

SEQ ID NO: 139923 - DNA, 30 bp, Artificial Sequence
  Synthetic oligonucleotide
acgcagtttatagaaagaggcgctaccggc

SEQ ID NO: 139924 - DNA, 30 bp, Artificial Sequence
  Synthetic oligonucleotide
gggataaacgccagtgaccactaacccggc

SEQ ID NO: 139925 - DNA, 30 bp, Artificial Sequence
  Synthetic oligonucleotide
tacgaaggctaggggagcatccgtcccggc

SEQ ID NO: 139926 - DNA, 30 bp, Artificial Sequence
  Synthetic oligonucleotide
ggcgtagagaccgacgataggagggccggc

SEQ ID NO: 139927 - DNA, 30 bp, Artificial Sequence
  Synthetic oligonucleotide
accctggaagttgccagtgccgatgccggc

SEQ ID NO: 139928 - DNA, 30 bp, Artificial Sequence
  Synthetic oligonucleotide
gaccagtgtcattaaagctgataatccggc

SEQ ID NO: 139929 - DNA, 30 bp, Artificial Sequence
  Synthetic oligonucleotide
acgtacctagcggggcgtctattatccggc

SEQ ID NO: 139930 - DNA, 30 bp, Artificial Sequence
  Synthetic oligonucleotide
gcggaagcggattttctggtcgtgtccggc

SEQ ID NO: 139931 - DNA, 30 bp, Artificial Sequence
  Synthetic oligonucleotide
aaacatgggtattgtacgacaatgagcggc

SEQ ID NO: 139932 - DNA, 30 bp, Artificial Sequence
  Synthetic oligonucleotide
taccgctaatgcgggcgagcgagtagcggc

SEQ ID NO: 139933 - DNA, 31 bp, Artificial Sequence
  Synthetic oligonucleotide
agtcaagaatgaccgtagacacgtgcgcggc

SEQ ID NO: 139934 - DNA, 30 bp, Artificial Sequence
  Synthetic oligonucleotide
ctatggggttgacataaacgccaaggcggc

SEQ ID NO: 139935 - DNA, 30 bp, Artificial Sequence
  Synthetic oligonucleotide
cgacatgcgtacccctttaattcatgcggc

SEQ ID NO: 139936 - DNA, 30 bp, Artificial Sequence
  Synthetic oligonucleotide
ctaagcaccggtcgtgtcactcattgcggc

SEQ ID NO: 139937 - DNA, 30 bp, Artificial Sequence
  Synthetic oligonucleotide
ggcctacgcgagagtgaaatacggatcggc

SEQ ID NO: 139938 - DNA, 30 bp, Artificial Sequence
  Synthetic oligonucleotide
tactagcgatgactctacaggtgactcggc

SEQ ID NO: 139939 - DNA, 30 bp, Artificial Sequence
  Synthetic oligonucleotide
aaacttcagaccgaagggctatatctcggc

SEQ ID NO: 139940 - DNA, 30 bp, Artificial Sequence
  Synthetic oligonucleotide
tccgcaagtataaatttgactggagtcggc

SEQ ID NO: 139941 - DNA, 30 bp, Artificial Sequence
  Synthetic oligonucleotide
gaagtaattagtaacgtacgatgtgtcggc

SEQ ID NO: 139942 - DNA, 30 bp, Artificial Sequence
  Synthetic oligonucleotide
cccacagcatcagacgtattacagttcggc

SEQ ID NO: 139943 - DNA, 30 bp, Artificial Sequence
  Synthetic oligonucleotide
ctaacagcaacggggtcaagtcctttcggc

SEQ ID NO: 139944 - DNA, 30 bp, Artificial Sequence
  Synthetic oligonucleotide
ctagtgcagacgagtctgtccaaaaagggc

SEQ ID NO: 139945 - DNA, 30 bp, Artificial Sequence
  Synthetic oligonucleotide
gtattactggtgactagactctagaagggc

SEQ ID NO: 139946 - DNA, 30 bp, Artificial Sequence
  Synthetic oligonucleotide
ataaattacgactgcggttgaggccagggc

SEQ ID NO: 139947 - DNA, 30 bp, Artificial Sequence
  Synthetic oligonucleotide
caagctaactgattaccagtacagcagggc

SEQ ID NO: 139948 - DNA, 30 bp, Artificial Sequence
  Synthetic oligonucleotide
atggcattgatgatacgagtaggatagggc

SEQ ID NO: 139949 - DNA, 30 bp, Artificial Sequence
  Synthetic oligonucleotide
ctctacgacccccagggagatgagtagggc

SEQ ID NO: 139950 - DNA, 30 bp, Artificial Sequence
  Synthetic oligonucleotide
agcatattcctctggggcacatcgtagggc

SEQ ID NO: 139951 - DNA, 30 bp, Artificial Sequence
  Synthetic oligonucleotide
gaacatcatgtcgcgaggtcgaggtagggc

SEQ ID NO: 139952 - DNA, 30 bp, Artificial Sequence
  Synthetic oligonucleotide
tctgctatcgttagcaacgaagggtagggc

SEQ ID NO: 139953 - DNA, 30 bp, Artificial Sequence
  Synthetic oligonucleotide
tactggaacaaccagtccgttgggtagggc

SEQ ID NO: 139954 - DNA, 30 bp, Artificial Sequence
  Synthetic oligonucleotide
aaaaaaaggggacttccagaggtgtagggc

SEQ ID NO: 139955 - DNA, 30 bp, Artificial Sequence
  Synthetic oligonucleotide
cagccgtaatcagaatagtcatgttagggc

SEQ ID NO: 139956 - DNA, 30 bp, Artificial Sequence
  Synthetic oligonucleotide
tgataggactatgtggaatgttacacgggc

SEQ ID NO: 139957 - DNA, 30 bp, Artificial Sequence
  Synthetic oligonucleotide
cctcattgccaacgggtaggtttcacgggc

SEQ ID NO: 139958 - DNA, 30 bp, Artificial Sequence
  Synthetic oligonucleotide
atggagtggattggtatgggtcggacgggc

SEQ ID NO: 139959 - DNA, 30 bp, Artificial Sequence
  Synthetic oligonucleotide
gcttgtggaattgaaatcgtagttccgggc

SEQ ID NO: 139960 - DNA, 30 bp, Artificial Sequence
  Synthetic oligonucleotide
gtagctaagacagcgtgtaaagcagcgggc

SEQ ID NO: 139961 - DNA, 30 bp, Artificial Sequence
  Synthetic oligonucleotide
ccggactggtcgtcgagtgcgctcgcgggc

SEQ ID NO: 139962 - DNA, 30 bp, Artificial Sequence
  Synthetic oligonucleotide
caggcggcagggaatttaggcggatcgggc

SEQ ID NO: 139963 - DNA, 30 bp, Artificial Sequence
  Synthetic oligonucleotide
cccgttcacacatacagatgctcgtcgggc

SEQ ID NO: 139964 - DNA, 30 bp, Artificial Sequence
  Synthetic oligonucleotide
gggtgatgaactgtatggacgaaaaggggc

SEQ ID NO: 139965 - DNA, 30 bp, Artificial Sequence
  Synthetic oligonucleotide
tgtcgagcgacacactttacgtacaggggc

SEQ ID NO: 139966 - DNA, 30 bp, Artificial Sequence
  Synthetic oligonucleotide
ctaacggattacggtcctattgggaggggc

SEQ ID NO: 139967 - DNA, 30 bp, Artificial Sequence
  Synthetic oligonucleotide
agttggcaaaaatgggtaaatctacggggc

SEQ ID NO: 139968 - DNA, 30 bp, Artificial Sequence
  Synthetic oligonucleotide
tgacagcggtcgcacttctcaccgcggggc

SEQ ID NO: 139969 - DNA, 30 bp, Artificial Sequence
  Synthetic oligonucleotide
atgggcgcagctatggtaaggtcgcggggc

SEQ ID NO: 139970 - DNA, 30 bp, Artificial Sequence
  Synthetic oligonucleotide
gacacccgagagaccaggattcaagggggc

SEQ ID NO: 139971 - DNA, 30 bp, Artificial Sequence
  Synthetic oligonucleotide
ctaaacaaaaagtagttgcgcgccgggggc

SEQ ID NO: 139972 - DNA, 30 bp, Artificial Sequence
  Synthetic oligonucleotide
agtgagtactacaaaccgtttgccgggggc

SEQ ID NO: 139973 - DNA, 30 bp, Artificial Sequence
  Synthetic oligonucleotide
gcaaagctcacgtggtgcgtgggggggggc

SEQ ID NO: 139974 - DNA, 30 bp, Artificial Sequence
  Synthetic oligonucleotide
atttcggccaatgataaaaagatggggggc

SEQ ID NO: 139975 - DNA, 30 bp, Artificial Sequence
  Synthetic oligonucleotide
taactcaggtcggatctttaggggtggggc

SEQ ID NO: 139976 - DNA, 30 bp, Artificial Sequence
  Synthetic oligonucleotide
ctaaaccagcagaaccgcaaccgttggggc

SEQ ID NO: 139977 - DNA, 30 bp, Artificial Sequence
  Synthetic oligonucleotide
agccaatgctcaggccggtccggttggggc

SEQ ID NO: 139978 - DNA, 30 bp, Artificial Sequence
  Synthetic oligonucleotide
cagcgaccaaccgtagactctaaaatgggc

SEQ ID NO: 139979 - DNA, 30 bp, Artificial Sequence
  Synthetic oligonucleotide
cgtaacccgggtttctgaccgactatgggc

SEQ ID NO: 139980 - DNA, 30 bp, Artificial Sequence
  Synthetic oligonucleotide
acactggcgaattaatgtataccagtgggc

SEQ ID NO: 139981 - DNA, 30 bp, Artificial Sequence
  Synthetic oligonucleotide
gaaaggaaattctgagaatagtgtgtgggc

SEQ ID NO: 139982 - DNA, 30 bp, Artificial Sequence
  Synthetic oligonucleotide
gattgaacttggtcagtgcccgtattgggc

SEQ ID NO: 139983 - DNA, 30 bp, Artificial Sequence
  Synthetic oligonucleotide
ccccgtatcaatacagcaattaacttgggc

SEQ ID NO: 139984 - DNA, 30 bp, Artificial Sequence
  Synthetic oligonucleotide
ggtacggatggcctctgcgaccagttgggc

SEQ ID NO: 139985 - DNA, 30 bp, Artificial Sequence
  Synthetic oligonucleotide
tcaccttgacgcgcgtgaaagagtaatggc

SEQ ID NO: 139986 - DNA, 30 bp, Artificial Sequence
  Synthetic oligonucleotide
agagttgctcagtcaggttccacgcatggc

SEQ ID NO: 139987 - DNA, 30 bp, Artificial Sequence
  Synthetic oligonucleotide
gacgaagtgcaactggtgccgtcgcatggc

SEQ ID NO: 139988 - DNA, 30 bp, Artificial Sequence
  Synthetic oligonucleotide
ccgatgacgtgagggttggaacggcatggc

SEQ ID NO: 139989 - DNA, 30 bp, Artificial Sequence
  Synthetic oligonucleotide
gtacggtgtcgaacgggaatatttcatggc

SEQ ID NO: 139990 - DNA, 29 bp, Artificial Sequence
  Synthetic oligonucleotide
gcgtgattcccaaaatagccacggatggc

SEQ ID NO: 139991 - DNA, 30 bp, Artificial Sequence
  Synthetic oligonucleotide
aggcgcgttcgggcatatggtgatgatggc

SEQ ID NO: 139992 - DNA, 30 bp, Artificial Sequence
  Synthetic oligonucleotide
gcgtcccgactggcacagaaccgtgatggc

SEQ ID NO: 139993 - DNA, 30 bp, Artificial Sequence
  Synthetic oligonucleotide
tgaattaacacgagggcataatgtgatggc

SEQ ID NO: 139994 - DNA, 30 bp, Artificial Sequence
  Synthetic oligonucleotide
actaattcaggctgtccgtattgatatggc

SEQ ID NO: 139995 - DNA, 30 bp, Artificial Sequence
  Synthetic oligonucleotide
cgtgtcgaacgccgagagcctcgctatggc

SEQ ID NO: 139996 - DNA, 30 bp, Artificial Sequence
  Synthetic oligonucleotide
cagtgttggtgcactagaggtcggtatggc

SEQ ID NO: 139997 - DNA, 30 bp, Artificial Sequence
  Synthetic oligonucleotide
aaagattcaccgggacaccggaaacctggc

SEQ ID NO: 139998 - DNA, 30 bp, Artificial Sequence
  Synthetic oligonucleotide
gagagaatagcatcatgaaaagaccctggc

SEQ ID NO: 139999 - DNA, 30 bp, Artificial Sequence
  Synthetic oligonucleotide
gctcgaagtcggagaaggaacaggcctggc

SEQ ID NO: 140000 - DNA, 30 bp, Artificial Sequence
  Synthetic oligonucleotide
tagcaaagggtcaggggaatgctatctggc

SEQ ID NO: 140001 - DNA, 30 bp, Artificial Sequence
  Synthetic oligonucleotide
aggtgtcaaatgttttgtgacgcctctggc

SEQ ID NO: 140002 - DNA, 31 bp, Artificial Sequence
  Synthetic oligonucleotide
aaggtgttctatgcatcgatctatctctggc

SEQ ID NO: 140003 - DNA, 30 bp, Artificial Sequence
  Synthetic oligonucleotide
ggtaagtgacggggagcatgatcgtctggc

SEQ ID NO: 140004 - DNA, 30 bp, Artificial Sequence
  Synthetic oligonucleotide
cgtagtatttcgattggagacgacagtggc

SEQ ID NO: 140005 - DNA, 30 bp, Artificial Sequence
  Synthetic oligonucleotide
aatgggacagggaaagtggtttcacgtggc

SEQ ID NO: 140006 - DNA, 30 bp, Artificial Sequence
  Synthetic oligonucleotide
tatagtagcactgttcaagcaggtcgtggc

SEQ ID NO: 140007 - DNA, 30 bp, Artificial Sequence
  Synthetic oligonucleotide
tgcgtagaaggatatgtcaaatctggtggc

SEQ ID NO: 140008 - DNA, 30 bp, Artificial Sequence
  Synthetic oligonucleotide
gaatgctgaattggacgtgactgtggtggc

SEQ ID NO: 140009 - DNA, 30 bp, Artificial Sequence
  Synthetic oligonucleotide
agcggtttggtatcgacggaacagtgtggc

SEQ ID NO: 140010 - DNA, 30 bp, Artificial Sequence
  Synthetic oligonucleotide
gttaggtcagggtgcggcgataaaattggc

SEQ ID NO: 140011 - DNA, 30 bp, Artificial Sequence
  Synthetic oligonucleotide
ggttttgcaaacgattctgattaagttggc

SEQ ID NO: 140012 - DNA, 30 bp, Artificial Sequence
  Synthetic oligonucleotide
tcgactcttgatttcttggagccggttggc

SEQ ID NO: 140013 - DNA, 30 bp, Artificial Sequence
  Synthetic oligonucleotide
gtcagttcaaatagagtgacaagggttggc

SEQ ID NO: 140014 - DNA, 30 bp, Artificial Sequence
  Synthetic oligonucleotide
actgcctatatctgcgactcgatggttggc

SEQ ID NO: 140015 - DNA, 30 bp, Artificial Sequence
  Synthetic oligonucleotide
cctggttattcgactaatccagaatttggc

SEQ ID NO: 140016 - DNA, 30 bp, Artificial Sequence
  Synthetic oligonucleotide
aagagttctacttgtatggaccattttggc

SEQ ID NO: 140017 - DNA, 30 bp, Artificial Sequence
  Synthetic oligonucleotide
cggataacggtagaatatgcgtgttttggc

SEQ ID NO: 140018 - DNA, 30 bp, Artificial Sequence
  Synthetic oligonucleotide
gcggagatagagcagcccggccaaaaatgc

SEQ ID NO: 140019 - DNA, 30 bp, Artificial Sequence
  Synthetic oligonucleotide
cgtttgtaaatataccagtctcggaaatgc

SEQ ID NO: 140020 - DNA, 30 bp, Artificial Sequence
  Synthetic oligonucleotide
ccaggtagctgcaggagaggtatccaatgc

SEQ ID NO: 140021 - DNA, 30 bp, Artificial Sequence
  Synthetic oligonucleotide
ccacctgggctaagattcggtaatcaatgc

SEQ ID NO: 140022 - DNA, 30 bp, Artificial Sequence
  Synthetic oligonucleotide
accaaattgccaaaagataataaagaatgc

SEQ ID NO: 140023 - DNA, 30 bp, Artificial Sequence
  Synthetic oligonucleotide
cgatgagttacacaaaggtccagcgaatgc

SEQ ID NO: 140024 - DNA, 30 bp, Artificial Sequence
  Synthetic oligonucleotide
cacagcggttcaaatgcctatagcgaatgc

SEQ ID NO: 140025 - DNA, 30 bp, Artificial Sequence
  Synthetic oligonucleotide
tattactgcgccgtcaagtgcctctaatgc

SEQ ID NO: 140026 - DNA, 30 bp, Artificial Sequence
  Synthetic oligonucleotide
ataagagagaaaatttggactaaaacatgc

SEQ ID NO: 140027 - DNA, 30 bp, Artificial Sequence
  Synthetic oligonucleotide
gagtcaactcctacaaagttaacaacatgc

SEQ ID NO: 140028 - DNA, 30 bp, Artificial Sequence
  Synthetic oligonucleotide
taatcgctggcacatcacacgggaacatgc

SEQ ID NO: 140029 - DNA, 30 bp, Artificial Sequence
  Synthetic oligonucleotide
agagataacaaacataagccgggaacatgc

SEQ ID NO: 140030 - DNA, 30 bp, Artificial Sequence
  Synthetic oligonucleotide
tcatctgtcaaataggcgtttggcacatgc

SEQ ID NO: 140031 - DNA, 30 bp, Artificial Sequence
  Synthetic oligonucleotide
aacaaaggaaggattgaaagtcctacatgc

SEQ ID NO: 140032 - DNA, 30 bp, Artificial Sequence
  Synthetic oligonucleotide
ttctgagggaatgaatcagcttcaccatgc

SEQ ID NO: 140033 - DNA, 30 bp, Artificial Sequence
  Synthetic oligonucleotide
tcaaaatagggccattctctattaccatgc

SEQ ID NO: 140034 - DNA, 30 bp, Artificial Sequence
  Synthetic oligonucleotide
gtgaagtagtcggacccctcccgagcatgc

SEQ ID NO: 140035 - DNA, 30 bp, Artificial Sequence
  Synthetic oligonucleotide
agataactaggaacaccagtttaggcatgc

SEQ ID NO: 140036 - DNA, 30 bp, Artificial Sequence
  Synthetic oligonucleotide
gcctcggatgagccacgaatgagtgcatgc

SEQ ID NO: 140037 - DNA, 30 bp, Artificial Sequence
  Synthetic oligonucleotide
gcgcaataccaatgtaaaggcggctcatgc

SEQ ID NO: 140038 - DNA, 30 bp, Artificial Sequence
  Synthetic oligonucleotide
agcgagataacttatcccttcgccagatgc

SEQ ID NO: 140039 - DNA, 30 bp, Artificial Sequence
  Synthetic oligonucleotide
cgagagtcctttgaacttaggttcagatgc

SEQ ID NO: 140040 - DNA, 30 bp, Artificial Sequence
  Synthetic oligonucleotide
tcggcatcgttgaggttaagctgtagatgc

SEQ ID NO: 140041 - DNA, 30 bp, Artificial Sequence
  Synthetic oligonucleotide
acgatgtgtctttcaccaatgcgccgatgc

SEQ ID NO: 140042 - DNA, 30 bp, Artificial Sequence
  Synthetic oligonucleotide
atcctgctagtaagagtaggcctccgatgc

SEQ ID NO: 140043 - DNA, 30 bp, Artificial Sequence
  Synthetic oligonucleotide
aggaggtcgttgacgcacacttcgcgatgc

SEQ ID NO: 140044 - DNA, 30 bp, Artificial Sequence
  Synthetic oligonucleotide
atcggtaaggtacgcgttctgtctcgatgc

SEQ ID NO: 140045 - DNA, 30 bp, Artificial Sequence
  Synthetic oligonucleotide
cttaaatcgccgttgggggaggtgggatgc

SEQ ID NO: 140046 - DNA, 30 bp, Artificial Sequence
  Synthetic oligonucleotide
gttcgatggcggtgggttcgaggtggatgc

SEQ ID NO: 140047 - DNA, 30 bp, Artificial Sequence
  Synthetic oligonucleotide
gagcatggtagcgagtaccgcgaatgatgc

SEQ ID NO: 140048 - DNA, 30 bp, Artificial Sequence
  Synthetic oligonucleotide
catcaacaagccgtctcggggagcatatgc

SEQ ID NO: 140049 - DNA, 30 bp, Artificial Sequence
  Synthetic oligonucleotide
ggcttagtagatgacccgggcatcctatgc

SEQ ID NO: 140050 - DNA, 30 bp, Artificial Sequence
  Synthetic oligonucleotide
ccacgccaggtccataaaagcggagtatgc

SEQ ID NO: 140051 - DNA, 30 bp, Artificial Sequence
  Synthetic oligonucleotide
actcgtgaggatcattcgtgaatcgtatgc

SEQ ID NO: 140052 - DNA, 31 bp, Artificial Sequence
  Synthetic oligonucleotide
cctcattcggtggggtacttcgttattatgc

SEQ ID NO: 140053 - DNA, 30 bp, Artificial Sequence
  Synthetic oligonucleotide
aggaaaggtgcttgttatttacgcttatgc

SEQ ID NO: 140054 - DNA, 30 bp, Artificial Sequence
  Synthetic oligonucleotide
tcggtttatagggcggctgacggcttatgc

SEQ ID NO: 140055 - DNA, 30 bp, Artificial Sequence
  Synthetic oligonucleotide
ccaatgagttatggtggtttagggttatgc

SEQ ID NO: 140056 - DNA, 30 bp, Artificial Sequence
  Synthetic oligonucleotide
tgaggattgtaatcgttatgtcttttatgc

SEQ ID NO: 140057 - DNA, 30 bp, Artificial Sequence
  Synthetic oligonucleotide
acgtctatttatgttagagcgcaaaactgc

SEQ ID NO: 140058 - DNA, 30 bp, Artificial Sequence
  Synthetic oligonucleotide
taattacgaggatgagccgaggtcaactgc

SEQ ID NO: 140059 - DNA, 30 bp, Artificial Sequence
  Synthetic oligonucleotide
ctactgctgtacaagtattttagccactgc

SEQ ID NO: 140060 - DNA, 30 bp, Artificial Sequence
  Synthetic oligonucleotide
tggacatggggctaagggtcatatcactgc

SEQ ID NO: 140061 - DNA, 30 bp, Artificial Sequence
  Synthetic oligonucleotide
cgtggacagcttgcgttgaattaagactgc

SEQ ID NO: 140062 - DNA, 30 bp, Artificial Sequence
  Synthetic oligonucleotide
cacatagggagatgtgtatctttcgactgc

SEQ ID NO: 140063 - DNA, 30 bp, Artificial Sequence
  Synthetic oligonucleotide
ctacaacaggtgctaaatctcgaggactgc

SEQ ID NO: 140064 - DNA, 30 bp, Artificial Sequence
  Synthetic oligonucleotide
ccgatccatccacgaccaggggttgactgc

SEQ ID NO: 140065 - DNA, 30 bp, Artificial Sequence
  Synthetic oligonucleotide
gaagcgcgatcaatatcgagggtaacctgc

SEQ ID NO: 140066 - DNA, 30 bp, Artificial Sequence
  Synthetic oligonucleotide
ggtgatcgtgagatctgcattatttcctgc

SEQ ID NO: 140067 - DNA, 30 bp, Artificial Sequence
  Synthetic oligonucleotide
aagagaagagtcatccacccgctcagctgc

SEQ ID NO: 140068 - DNA, 30 bp, Artificial Sequence
  Synthetic oligonucleotide
aaagaggcgacgcgtgttcggcagagctgc

SEQ ID NO: 140069 - DNA, 30 bp, Artificial Sequence
  Synthetic oligonucleotide
aggggcacctagtagcaatcttcccgctgc

SEQ ID NO: 140070 - DNA, 30 bp, Artificial Sequence
  Synthetic oligonucleotide
cgatgcgtcatgtgtccttcgtatcgctgc

SEQ ID NO: 140071 - DNA, 30 bp, Artificial Sequence
  Synthetic oligonucleotide
cagagtacgttgtctgattctcggggctgc

SEQ ID NO: 140072 - DNA, 30 bp, Artificial Sequence
  Synthetic oligonucleotide
gataatgatgttattcagatctgctgctgc

SEQ ID NO: 140073 - DNA, 30 bp, Artificial Sequence
  Synthetic oligonucleotide
acacggaggttagttctgagtaagtgctgc

SEQ ID NO: 140074 - DNA, 30 bp, Artificial Sequence
  Synthetic oligonucleotide
tcaacttacttttgagttaaagagtgctgc

SEQ ID NO: 140075 - DNA, 30 bp, Artificial Sequence
  Synthetic oligonucleotide
tctcgctattgcacgaaacggggtatctgc

SEQ ID NO: 140076 - DNA, 30 bp, Artificial Sequence
  Synthetic oligonucleotide
ccacaactcaaacaaaaataaatcctctgc

SEQ ID NO: 140077 - DNA, 30 bp, Artificial Sequence
  Synthetic oligonucleotide
ctagtgggctcgaatctcaaggggctctgc

SEQ ID NO: 140078 - DNA, 30 bp, Artificial Sequence
  Synthetic oligonucleotide
tggtgaagctcggctctgcttcggttctgc

SEQ ID NO: 140079 - DNA, 30 bp, Artificial Sequence
  Synthetic oligonucleotide
aacagtgtcgtccgttagcgaactttctgc

SEQ ID NO: 140080 - DNA, 30 bp, Artificial Sequence
  Synthetic oligonucleotide
tgggtggtcataatccgacttgaaaagtgc

SEQ ID NO: 140081 - DNA, 30 bp, Artificial Sequence
  Synthetic oligonucleotide
tacgttgttgtcaccggtcaaagcaagtgc

SEQ ID NO: 140082 - DNA, 30 bp, Artificial Sequence
  Synthetic oligonucleotide
agtagagggaagttaggtggttacgagtgc

SEQ ID NO: 140083 - DNA, 30 bp, Artificial Sequence
  Synthetic oligonucleotide
gtggcagacagtgtgtttaataaggagtgc

SEQ ID NO: 140084 - DNA, 30 bp, Artificial Sequence
  Synthetic oligonucleotide
ggccatacccctgagtgctagtcggagtgc

SEQ ID NO: 140085 - DNA, 30 bp, Artificial Sequence
  Synthetic oligonucleotide
ggtacagaattactagctaatatggagtgc

SEQ ID NO: 140086 - DNA, 30 bp, Artificial Sequence
  Synthetic oligonucleotide
gacacagagcaacattacaggcttgagtgc

SEQ ID NO: 140087 - DNA, 30 bp, Artificial Sequence
  Synthetic oligonucleotide
ataaaaataccgacctcgtagtgatagtgc

SEQ ID NO: 140088 - DNA, 30 bp, Artificial Sequence
  Synthetic oligonucleotide
ctcgaaccccggttcgtgcgtccgtagtgc

SEQ ID NO: 140089 - DNA, 30 bp, Artificial Sequence
  Synthetic oligonucleotide
atcgtacttgatgtctccgtggtaacgtgc

SEQ ID NO: 140090 - DNA, 30 bp, Artificial Sequence
  Synthetic oligonucleotide
aaagactctatggccccgtgaaagacgtgc

SEQ ID NO: 140091 - DNA, 30 bp, Artificial Sequence
  Synthetic oligonucleotide
ggattcacccaaacgactccaattacgtgc

SEQ ID NO: 140092 - DNA, 30 bp, Artificial Sequence
  Synthetic oligonucleotide
attgccatggggaactaccagttagcgtgc

SEQ ID NO: 140093 - DNA, 31 bp, Artificial Sequence
  Synthetic oligonucleotide
ggagtacggtatttcgtcagaaaaggcgtgc

SEQ ID NO: 140094 - DNA, 30 bp, Artificial Sequence
  Synthetic oligonucleotide
atagccaaaagcccaatcttgtcatcgtgc

SEQ ID NO: 140095 - DNA, 30 bp, Artificial Sequence
  Synthetic oligonucleotide
cttcgtcataggaccaagatggagcggtgc

SEQ ID NO: 140096 - DNA, 30 bp, Artificial Sequence
  Synthetic oligonucleotide
caaccggcactgtccagtgtgactcggtgc

SEQ ID NO: 140097 - DNA, 30 bp, Artificial Sequence
  Synthetic oligonucleotide
tgggctgctaagttcaaagtgcaagggtgc

SEQ ID NO: 140098 - DNA, 30 bp, Artificial Sequence
  Synthetic oligonucleotide
agtgcatgcgtattctgcaagcaggggtgc

SEQ ID NO: 140099 - DNA, 30 bp, Artificial Sequence
  Synthetic oligonucleotide
cggcgtaagtgttcgttggcggtaatgtgc

SEQ ID NO: 140100 - DNA, 30 bp, Artificial Sequence
  Synthetic oligonucleotide
ttactgctgcgtaaggtcacggggatgtgc

SEQ ID NO: 140101 - DNA, 30 bp, Artificial Sequence
  Synthetic oligonucleotide
tggtaagcaatagacgactatactatgtgc

SEQ ID NO: 140102 - DNA, 30 bp, Artificial Sequence
  Synthetic oligonucleotide
gctccttctatacagtgggtatatctgtgc

SEQ ID NO: 140103 - DNA, 30 bp, Artificial Sequence
  Synthetic oligonucleotide
gagtcggaggtagggtggtttgctctgtgc

SEQ ID NO: 140104 - DNA, 30 bp, Artificial Sequence
  Synthetic oligonucleotide
acaagtgggattaatcatagaacggtgtgc

SEQ ID NO: 140105 - DNA, 30 bp, Artificial Sequence
  Synthetic oligonucleotide
gggtaaattagtcagagaatgcatgtgtgc

SEQ ID NO: 140106 - DNA, 30 bp, Artificial Sequence
  Synthetic oligonucleotide
cgccacagggctaaccgcccatgcaattgc

SEQ ID NO: 140107 - DNA, 30 bp, Artificial Sequence
  Synthetic oligonucleotide
cttaaaagtggcaggatgatgaagaattgc

SEQ ID NO: 140108 - DNA, 30 bp, Artificial Sequence
  Synthetic oligonucleotide
actacaacagtcaacattcctttgaattgc

SEQ ID NO: 140109 - DNA, 30 bp, Artificial Sequence
  Synthetic oligonucleotide
atcgaaagaatcttaatgaaggctaattgc

SEQ ID NO: 140110 - DNA, 30 bp, Artificial Sequence
  Synthetic oligonucleotide
ctcgcttctatttccagtaatgtacattgc

SEQ ID NO: 140111 - DNA, 30 bp, Artificial Sequence
  Synthetic oligonucleotide
gtcgcagatctccggtaggttcggcattgc

SEQ ID NO: 140112 - DNA, 30 bp, Artificial Sequence
  Synthetic oligonucleotide
acctaatttaacccatctcgaagagattgc

SEQ ID NO: 140113 - DNA, 30 bp, Artificial Sequence
  Synthetic oligonucleotide
gtttggcaagctccaagttggtacgattgc

SEQ ID NO: 140114 - DNA, 30 bp, Artificial Sequence
  Synthetic oligonucleotide
cggggcagtgctcgatcagggtaggattgc

SEQ ID NO: 140115 - DNA, 30 bp, Artificial Sequence
  Synthetic oligonucleotide
tcggcgatgttattcgcgagaagggattgc

SEQ ID NO: 140116 - DNA, 30 bp, Artificial Sequence
  Synthetic oligonucleotide
catagaaatgtcgcttccatccgggattgc

SEQ ID NO: 140117 - DNA, 30 bp, Artificial Sequence
  Synthetic oligonucleotide
accttggaccaagtggggtcggtggattgc

SEQ ID NO: 140118 - DNA, 30 bp, Artificial Sequence
  Synthetic oligonucleotide
cgacaaaggtcctgagacccgagatattgc

SEQ ID NO: 140119 - DNA, 30 bp, Artificial Sequence
  Synthetic oligonucleotide
acgttacccccacgtgcaaaatgatattgc

SEQ ID NO: 140120 - DNA, 30 bp, Artificial Sequence
  Synthetic oligonucleotide
acggcagtattagagaggaaaacctattgc

SEQ ID NO: 140121 - DNA, 30 bp, Artificial Sequence
  Synthetic oligonucleotide
atcttatgttcagatacaaataagtattgc

SEQ ID NO: 140122 - DNA, 30 bp, Artificial Sequence
  Synthetic oligonucleotide
gcagcgaacgtaataccgttgttttattgc

SEQ ID NO: 140123 - DNA, 30 bp, Artificial Sequence
  Synthetic oligonucleotide
ggactcaatgcataccgccgaggaacttgc

SEQ ID NO: 140124 - DNA, 30 bp, Artificial Sequence
  Synthetic oligonucleotide
cgtacttagaccttacggggtccaccttgc

SEQ ID NO: 140125 - DNA, 30 bp, Artificial Sequence
  Synthetic oligonucleotide
tcactttagcacaaagcgagtccgccttgc

SEQ ID NO: 140126 - DNA, 30 bp, Artificial Sequence
  Synthetic oligonucleotide
tgatttgaaaagattataggcgaatcttgc

SEQ ID NO: 140127 - DNA, 30 bp, Artificial Sequence
  Synthetic oligonucleotide
agatggaatcaaccggcgagtgtgagttgc

SEQ ID NO: 140128 - DNA, 30 bp, Artificial Sequence
  Synthetic oligonucleotide
gcacgtaaggcaacatcaccgtgacgttgc

SEQ ID NO: 140129 - DNA, 30 bp, Artificial Sequence
  Synthetic oligonucleotide
gtgtgaggtatccaatcagccggaggttgc

SEQ ID NO: 140130 - DNA, 30 bp, Artificial Sequence
  Synthetic oligonucleotide
cacgacggtaaactccccatccacggttgc

SEQ ID NO: 140131 - DNA, 30 bp, Artificial Sequence
  Synthetic oligonucleotide
cgccccagatataaacgcccaagcggttgc

SEQ ID NO: 140132 - DNA, 30 bp, Artificial Sequence
  Synthetic oligonucleotide
tgccaagtcgtaagagtacaggcaatttgc

SEQ ID NO: 140133 - DNA, 30 bp, Artificial Sequence
  Synthetic oligonucleotide
ggggatgcggtgaatcatctacagatttgc

SEQ ID NO: 140134 - DNA, 30 bp, Artificial Sequence
  Synthetic oligonucleotide
ctaagataacgggctcgatttaatgtttgc

SEQ ID NO: 140135 - DNA, 30 bp, Artificial Sequence
  Synthetic oligonucleotide
tcattgaaacactatcgactgactgtttgc

SEQ ID NO: 140136 - DNA, 30 bp, Artificial Sequence
  Synthetic oligonucleotide
tacaatgcgatctaaactgtcgtaaaaatc

SEQ ID NO: 140137 - DNA, 30 bp, Artificial Sequence
  Synthetic oligonucleotide
gatctcatcaagcgcggtgcgaataaaatc

SEQ ID NO: 140138 - DNA, 30 bp, Artificial Sequence
  Synthetic oligonucleotide
cgggttagttggcttcaataagagcaaatc

SEQ ID NO: 140139 - DNA, 30 bp, Artificial Sequence
  Synthetic oligonucleotide
gttcctacacgacatccaggtgaagaaatc

SEQ ID NO: 140140 - DNA, 30 bp, Artificial Sequence
  Synthetic oligonucleotide
agggggccatagtcgttggcataagaaatc

SEQ ID NO: 140141 - DNA, 30 bp, Artificial Sequence
  Synthetic oligonucleotide
gtcgcgatcgcacgggaaggcaaggaaatc

SEQ ID NO: 140142 - DNA, 30 bp, Artificial Sequence
  Synthetic oligonucleotide
gccgtgtgctcaaaggaaaatggataaatc

SEQ ID NO: 140143 - DNA, 30 bp, Artificial Sequence
  Synthetic oligonucleotide
ctattgatcggtgtattagaagtgtaaatc

SEQ ID NO: 140144 - DNA, 30 bp, Artificial Sequence
  Synthetic oligonucleotide
aggaattgggctacgctggcgcgcacaatc

SEQ ID NO: 140145 - DNA, 30 bp, Artificial Sequence
  Synthetic oligonucleotide
cactgtgcgacgcacgaaagatcgacaatc

SEQ ID NO: 140146 - DNA, 30 bp, Artificial Sequence
  Synthetic oligonucleotide
gatcgtaaaccaaggagcaaattgacaatc

SEQ ID NO: 140147 - DNA, 30 bp, Artificial Sequence
  Synthetic oligonucleotide
tcataacacaacgatgacgggcatacaatc

SEQ ID NO: 140148 - DNA, 30 bp, Artificial Sequence
  Synthetic oligonucleotide
cctagaagttgaaccctgattcgtacaatc

SEQ ID NO: 140149 - DNA, 30 bp, Artificial Sequence
  Synthetic oligonucleotide
cgtaaacctcggcactcgcttccaccaatc

SEQ ID NO: 140150 - DNA, 30 bp, Artificial Sequence
  Synthetic oligonucleotide
taatgtaacaacgggatggaggcaccaatc

SEQ ID NO: 140151 - DNA, 30 bp, Artificial Sequence
  Synthetic oligonucleotide
ccagacaatcaatctatttcatgaccaatc

SEQ ID NO: 140152 - DNA, 30 bp, Artificial Sequence
  Synthetic oligonucleotide
ccattaggcgctcccaaatagtaagcaatc

SEQ ID NO: 140153 - DNA, 30 bp, Artificial Sequence
  Synthetic oligonucleotide
tacgtaacataaaggttacggaaggcaatc

SEQ ID NO: 140154 - DNA, 30 bp, Artificial Sequence
  Synthetic oligonucleotide
accaggactcggattaccatgcctgcaatc

SEQ ID NO: 140155 - DNA, 30 bp, Artificial Sequence
  Synthetic oligonucleotide
agctctgtaaccgacaaggcccgtgcaatc

SEQ ID NO: 140156 - DNA, 30 bp, Artificial Sequence
  Synthetic oligonucleotide
tggagataagagtgcgcaagttttgcaatc

SEQ ID NO: 140157 - DNA, 30 bp, Artificial Sequence
  Synthetic oligonucleotide
gaggcgacgatcgatgagtgggagcgaatc

SEQ ID NO: 140158 - DNA, 30 bp, Artificial Sequence
  Synthetic oligonucleotide
tgcactatagtcggttgacttggtcgaatc

SEQ ID NO: 140159 - DNA, 30 bp, Artificial Sequence
  Synthetic oligonucleotide
aatgaatcaacacaatgcgcatacggaatc

SEQ ID NO: 140160 - DNA, 30 bp, Artificial Sequence
  Synthetic oligonucleotide
ggaacagcgtattttggtcaatagggaatc

SEQ ID NO: 140161 - DNA, 30 bp, Artificial Sequence
  Synthetic oligonucleotide
ctaagcacttgccgacgagggggtggaatc

SEQ ID NO: 140162 - DNA, 30 bp, Artificial Sequence
  Synthetic oligonucleotide
ctaagaacggtgatcacctcataatgaatc

SEQ ID NO: 140163 - DNA, 30 bp, Artificial Sequence
  Synthetic oligonucleotide
acggatccggtgtactgactcaactgaatc

SEQ ID NO: 140164 - DNA, 30 bp, Artificial Sequence
  Synthetic oligonucleotide
cgctgatactcgagcgaggacacctgaatc

SEQ ID NO: 140165 - DNA, 30 bp, Artificial Sequence
  Synthetic oligonucleotide
acacgttcgacattacattgggtctgaatc

SEQ ID NO: 140166 - DNA, 30 bp, Artificial Sequence
  Synthetic oligonucleotide
tcaagctttgaagcaatagacggcataatc

SEQ ID NO: 140167 - DNA, 30 bp, Artificial Sequence
  Synthetic oligonucleotide
cacgcgatatcaaagactattcgactaatc

SEQ ID NO: 140168 - DNA, 30 bp, Artificial Sequence
  Synthetic oligonucleotide
atacggagacataatagaggctgtctaatc

SEQ ID NO: 140169 - DNA, 30 bp, Artificial Sequence
  Synthetic oligonucleotide
tttacgaatatcagattaaggttagtaatc

SEQ ID NO: 140170 - DNA, 30 bp, Artificial Sequence
  Synthetic oligonucleotide
gatgagggctttggatcctgcccggtaatc

SEQ ID NO: 140171 - DNA, 30 bp, Artificial Sequence
  Synthetic oligonucleotide
atcgtaagcaatgcatataggtcattaatc

SEQ ID NO: 140172 - DNA, 30 bp, Artificial Sequence
  Synthetic oligonucleotide
cagataatcctcgcttcaagacacttaatc

SEQ ID NO: 140173 - DNA, 30 bp, Artificial Sequence
  Synthetic oligonucleotide
cagactaatactgcgaaatgagagttaatc

SEQ ID NO: 140174 - DNA, 30 bp, Artificial Sequence
  Synthetic oligonucleotide
gggactagtgcagtggacaagcggttaatc

SEQ ID NO: 140175 - DNA, 30 bp, Artificial Sequence
  Synthetic oligonucleotide
tctcagatcgaaccctgacaacaaaacatc

SEQ ID NO: 140176 - DNA, 30 bp, Artificial Sequence
  Synthetic oligonucleotide
ctgttaagtggatggggtaaaaacaacatc

SEQ ID NO: 140177 - DNA, 30 bp, Artificial Sequence
  Synthetic oligonucleotide
tccgataacaaggtgggcgcacgcaacatc

SEQ ID NO: 140178 - DNA, 31 bp, Artificial Sequence
  Synthetic oligonucleotide
agggccccgccgagagagttaggcgcacatc

SEQ ID NO: 140179 - DNA, 31 bp, Artificial Sequence
  Synthetic oligonucleotide
acgcgttgtgtagcgacctcaaagtgacatc

SEQ ID NO: 140180 - DNA, 30 bp, Artificial Sequence
  Synthetic oligonucleotide
ggggcggtgcccaaacctccgctatacatc

SEQ ID NO: 140181 - DNA, 30 bp, Artificial Sequence
  Synthetic oligonucleotide
agcagcataccacaagtgcccaattacatc

SEQ ID NO: 140182 - DNA, 30 bp, Artificial Sequence
  Synthetic oligonucleotide
ccagaataaccccaagaatggctggccatc

SEQ ID NO: 140183 - DNA, 30 bp, Artificial Sequence
  Synthetic oligonucleotide
cctctaattgcgacaacctaattctccatc

SEQ ID NO: 140184 - DNA, 30 bp, Artificial Sequence
  Synthetic oligonucleotide
tgaggcaaaaattggtcactggaacgcatc

SEQ ID NO: 140185 - DNA, 30 bp, Artificial Sequence
  Synthetic oligonucleotide
agactattcgaaggatacggttgccgcatc

SEQ ID NO: 140186 - DNA, 30 bp, Artificial Sequence
  Synthetic oligonucleotide
gatggtaacgcgaacctcaattagcgcatc

SEQ ID NO: 140187 - DNA, 30 bp, Artificial Sequence
  Synthetic oligonucleotide
aaggggagcttgcgggcgggtttgcgcatc

SEQ ID NO: 140188 - DNA, 30 bp, Artificial Sequence
  Synthetic oligonucleotide
ctagtgaacgtttcatcgggaactcgcatc

SEQ ID NO: 140189 - DNA, 30 bp, Artificial Sequence
  Synthetic oligonucleotide
aatcgataattaaagcagtgcggaggcatc

SEQ ID NO: 140190 - DNA, 30 bp, Artificial Sequence
  Synthetic oligonucleotide
cgggagctcgggtcgcgcttggtcggcatc

SEQ ID NO: 140191 - DNA, 30 bp, Artificial Sequence
  Synthetic oligonucleotide
gatgaagagtcgattggactgccgggcatc

SEQ ID NO: 140192 - DNA, 30 bp, Artificial Sequence
  Synthetic oligonucleotide
ctagttgcacgaacatgtgcgcctggcatc

SEQ ID NO: 140193 - DNA, 30 bp, Artificial Sequence
  Synthetic oligonucleotide
tcaggtacgaggggagtcttgattggcatc

SEQ ID NO: 140194 - DNA, 30 bp, Artificial Sequence
  Synthetic oligonucleotide
tactgcttgcttgcaggctaagagtgcatc

SEQ ID NO: 140195 - DNA, 30 bp, Artificial Sequence
  Synthetic oligonucleotide
taagagatactcaggaacaccgagtgcatc

SEQ ID NO: 140196 - DNA, 30 bp, Artificial Sequence
  Synthetic oligonucleotide
atgtggtaagcggtgcgacaatgttgcatc

SEQ ID NO: 140197 - DNA, 30 bp, Artificial Sequence
  Synthetic oligonucleotide
tgagagttcctggcttgagaagaaatcatc

SEQ ID NO: 140198 - DNA, 30 bp, Artificial Sequence
  Synthetic oligonucleotide
gcctagatagagacactgaaagtcatcatc

SEQ ID NO: 140199 - DNA, 30 bp, Artificial Sequence
  Synthetic oligonucleotide
gcgggagactgtcaccggtgagttatcatc

SEQ ID NO: 140200 - DNA, 30 bp, Artificial Sequence
  Synthetic oligonucleotide
ccattttgccgaaggccttcaacactcatc

SEQ ID NO: 140201 - DNA, 30 bp, Artificial Sequence
  Synthetic oligonucleotide
tttagtcacaatcatcataggaacctcatc

SEQ ID NO: 140202 - DNA, 30 bp, Artificial Sequence
  Synthetic oligonucleotide
aagagggcccgagcatctagacctctcatc

SEQ ID NO: 140203 - DNA, 30 bp, Artificial Sequence
  Synthetic oligonucleotide
tcgagtccggacgatttcccaagcgtcatc

SEQ ID NO: 140204 - DNA, 30 bp, Artificial Sequence
  Synthetic oligonucleotide
gttagttcggatcggcagagggaggtcatc

SEQ ID NO: 140205 - DNA, 30 bp, Artificial Sequence
  Synthetic oligonucleotide
agaaatatcagtggcggatcgcatgtcatc

SEQ ID NO: 140206 - DNA, 30 bp, Artificial Sequence
  Synthetic oligonucleotide
gatggtagcctttacaagcttagattcatc

SEQ ID NO: 140207 - DNA, 30 bp, Artificial Sequence
  Synthetic oligonucleotide
aatcgtgatccagtcaatagaaaacagatc

SEQ ID NO: 140208 - DNA, 30 bp, Artificial Sequence
  Synthetic oligonucleotide
ccggggttgctgtccttcgaggagcagatc

SEQ ID NO: 140209 - DNA, 30 bp, Artificial Sequence
  Synthetic oligonucleotide
atgcggatcgggcgctgcacttagcagatc

SEQ ID NO: 140210 - DNA, 30 bp, Artificial Sequence
  Synthetic oligonucleotide
tccgagcaggtaaaagccctagtgcagatc

SEQ ID NO: 140211 - DNA, 30 bp, Artificial Sequence
  Synthetic oligonucleotide
accgagtactaactgcgagtaattcagatc

SEQ ID NO: 140212 - DNA, 30 bp, Artificial Sequence
  Synthetic oligonucleotide
acaacatatcatagtgtgtagtctgagatc

SEQ ID NO: 140213 - DNA, 30 bp, Artificial Sequence
  Synthetic oligonucleotide
ctctgtaaggtaaaccaagcgtcatagatc

SEQ ID NO: 140214 - DNA, 30 bp, Artificial Sequence
  Synthetic oligonucleotide
atagggggattagcgacgatcagatagatc

SEQ ID NO: 140215 - DNA, 30 bp, Artificial Sequence
  Synthetic oligonucleotide
tacaatcgttcaaacccaaacccctagatc

SEQ ID NO: 140216 - DNA, 30 bp, Artificial Sequence
  Synthetic oligonucleotide
acgctttgacagagggcgatgagctagatc

SEQ ID NO: 140217 - DNA, 30 bp, Artificial Sequence
  Synthetic oligonucleotide
ataggtgtttggccaaagccaaagacgatc

SEQ ID NO: 140218 - DNA, 30 bp, Artificial Sequence
  Synthetic oligonucleotide
gttcgtgctaactaggggcaagggacgatc

SEQ ID NO: 140219 - DNA, 30 bp, Artificial Sequence
  Synthetic oligonucleotide
atgggggaccttcgcccaggagctacgatc

SEQ ID NO: 140220 - DNA, 30 bp, Artificial Sequence
  Synthetic oligonucleotide
ggttaaggctcgagtgactacgcaccgatc

SEQ ID NO: 140221 - DNA, 30 bp, Artificial Sequence
  Synthetic oligonucleotide
cgtgaacaataaattcgcccgactccgatc

SEQ ID NO: 140222 - DNA, 30 bp, Artificial Sequence
  Synthetic oligonucleotide
gagagcgatgctatctaatatagggcgatc

SEQ ID NO: 140223 - DNA, 30 bp, Artificial Sequence
  Synthetic oligonucleotide
tctttgcttatgggtggctacattgcgatc

SEQ ID NO: 140224 - DNA, 30 bp, Artificial Sequence
  Synthetic oligonucleotide
gcatggtcactacgttggaactcatcgatc

SEQ ID NO: 140225 - DNA, 30 bp, Artificial Sequence
  Synthetic oligonucleotide
tggctctgacgtcgtgtaagagactcgatc

SEQ ID NO: 140226 - DNA, 30 bp, Artificial Sequence
  Synthetic oligonucleotide
tatccagaggggcaccatcaggagtcgatc

SEQ ID NO: 140227 - DNA, 30 bp, Artificial Sequence
  Synthetic oligonucleotide
ccttaatactgaaagaaccatgagtcgatc

SEQ ID NO: 140228 - DNA, 30 bp, Artificial Sequence
  Synthetic oligonucleotide
tagttggataatccctaattgcggtcgatc

SEQ ID NO: 140229 - DNA, 30 bp, Artificial Sequence
  Synthetic oligonucleotide
gcaccgacacccgtctaaggctaaaggatc

SEQ ID NO: 140230 - DNA, 30 bp, Artificial Sequence
  Synthetic oligonucleotide
tacgtgaattttacactcacgattaggatc

SEQ ID NO: 140231 - DNA, 30 bp, Artificial Sequence
  Synthetic oligonucleotide
atggcgggtgactatgcatgtgcacggatc

SEQ ID NO: 140232 - DNA, 30 bp, Artificial Sequence
  Synthetic oligonucleotide
gaacgagagattcattaccgaagccggatc

SEQ ID NO: 140233 - DNA, 30 bp, Artificial Sequence
  Synthetic oligonucleotide
ggtacgtctaatacgtggttaccagggatc

SEQ ID NO: 140234 - DNA, 30 bp, Artificial Sequence
  Synthetic oligonucleotide
ctggagcacacttatttgagaagagggatc

SEQ ID NO: 140235 - DNA, 30 bp, Artificial Sequence
  Synthetic oligonucleotide
caaaggaggaaggagtgggttcccgggatc

SEQ ID NO: 140236 - DNA, 30 bp, Artificial Sequence
  Synthetic oligonucleotide
gtagcttgtgtgcgtaaaaaggtcgggatc

SEQ ID NO: 140237 - DNA, 30 bp, Artificial Sequence
  Synthetic oligonucleotide
gcaaatggagggcgtctgcaggtcgggatc

SEQ ID NO: 140238 - DNA, 30 bp, Artificial Sequence
  Synthetic oligonucleotide
taactgaattaaatagctaaacatgggatc

SEQ ID NO: 140239 - DNA, 30 bp, Artificial Sequence
  Synthetic oligonucleotide
agcgagctgcagaataaagctagtgggatc

SEQ ID NO: 140240 - DNA, 30 bp, Artificial Sequence
  Synthetic oligonucleotide
gttacgaagtggcatagattagttgggatc

SEQ ID NO: 140241 - DNA, 30 bp, Artificial Sequence
  Synthetic oligonucleotide
cgttaccaggcaaacgctcctacctggatc

SEQ ID NO: 140242 - DNA, 30 bp, Artificial Sequence
  Synthetic oligonucleotide
caggtgtcgagggcgggccacagaatgatc

SEQ ID NO: 140243 - DNA, 30 bp, Artificial Sequence
  Synthetic oligonucleotide
gctgaatataatgaaggatgctgaatgatc

SEQ ID NO: 140244 - DNA, 30 bp, Artificial Sequence
  Synthetic oligonucleotide
cattcagtggagttattgtgaaagatgatc

SEQ ID NO: 140245 - DNA, 30 bp, Artificial Sequence
  Synthetic oligonucleotide
tgggaggcggttcactatgtctaggtgatc

SEQ ID NO: 140246 - DNA, 30 bp, Artificial Sequence
  Synthetic oligonucleotide
gagggtacctgtccatccttatatgtgatc

SEQ ID NO: 140247 - DNA, 30 bp, Artificial Sequence
  Synthetic oligonucleotide
cgatagaattcaacgaaaaagtcattgatc

SEQ ID NO: 140248 - DNA, 30 bp, Artificial Sequence
  Synthetic oligonucleotide
agggcaatggggattggcagggacttgatc

SEQ ID NO: 140249 - DNA, 30 bp, Artificial Sequence
  Synthetic oligonucleotide
gaggtgatcaaggattcggtagatttgatc

SEQ ID NO: 140250 - DNA, 30 bp, Artificial Sequence
  Synthetic oligonucleotide
ccttcactcggtccaatactagggaatatc

SEQ ID NO: 140251 - DNA, 30 bp, Artificial Sequence
  Synthetic oligonucleotide
aaacgtgcggatcgcatgtcgcgtaatatc

SEQ ID NO: 140252 - DNA, 30 bp, Artificial Sequence
  Synthetic oligonucleotide
tcggcacaacaaacgcgcgtaagacatatc

SEQ ID NO: 140253 - DNA, 30 bp, Artificial Sequence
  Synthetic oligonucleotide
aagcacgacgcactccattatgggcatatc

SEQ ID NO: 140254 - DNA, 30 bp, Artificial Sequence
  Synthetic oligonucleotide
gcaaagtagaccgaattccaggatcatatc

SEQ ID NO: 140255 - DNA, 30 bp, Artificial Sequence
  Synthetic oligonucleotide
gggtgtaccggctaccaagatatcgatatc

SEQ ID NO: 140256 - DNA, 30 bp, Artificial Sequence
  Synthetic oligonucleotide
tgagtgatcgctggcgtcaattaggatatc

SEQ ID NO: 140257 - DNA, 30 bp, Artificial Sequence
  Synthetic oligonucleotide
acggcaccacagaagtatgatttgtatatc

SEQ ID NO: 140258 - DNA, 30 bp, Artificial Sequence
  Synthetic oligonucleotide
gcaaaccgtggttgagcgcggagttatatc

SEQ ID NO: 140259 - DNA, 30 bp, Artificial Sequence
  Synthetic oligonucleotide
agtggctctagcaaataatttaccactatc

SEQ ID NO: 140260 - DNA, 30 bp, Artificial Sequence
  Synthetic oligonucleotide
accattgttccacaaacaaagcccactatc

SEQ ID NO: 140261 - DNA, 30 bp, Artificial Sequence
  Synthetic oligonucleotide
tgccatgcaaatatgtaaagatccactatc

SEQ ID NO: 140262 - DNA, 30 bp, Artificial Sequence
  Synthetic oligonucleotide
gctaagcacccgaattccgcgccgactatc

SEQ ID NO: 140263 - DNA, 30 bp, Artificial Sequence
  Synthetic oligonucleotide
aaatgagatttgccggcaccacatactatc

SEQ ID NO: 140264 - DNA, 30 bp, Artificial Sequence
  Synthetic oligonucleotide
accctggcttcgcgaggcattcctactatc

SEQ ID NO: 140265 - DNA, 30 bp, Artificial Sequence
  Synthetic oligonucleotide
ttcctgggtggaaggaagtgagaatctatc

SEQ ID NO: 140266 - DNA, 30 bp, Artificial Sequence
  Synthetic oligonucleotide
ggcatagcgtgaaaaagtttcgattctatc

SEQ ID NO: 140267 - DNA, 30 bp, Artificial Sequence
  Synthetic oligonucleotide
aagggttgaaatatgtggctgataagtatc

SEQ ID NO: 140268 - DNA, 30 bp, Artificial Sequence
  Synthetic oligonucleotide
aatcattaaaagcggggtctcggcagtatc

SEQ ID NO: 140269 - DNA, 30 bp, Artificial Sequence
  Synthetic oligonucleotide
acatgcagtaggtaaaggacaggtagtatc

SEQ ID NO: 140270 - DNA, 30 bp, Artificial Sequence
  Synthetic oligonucleotide
tatcgcactacatccacaaagaaacgtatc

SEQ ID NO: 140271 - DNA, 30 bp, Artificial Sequence
  Synthetic oligonucleotide
gtatgagatggggtatagagcacgcgtatc

SEQ ID NO: 140272 - DNA, 30 bp, Artificial Sequence
  Synthetic oligonucleotide
gagcgaagtgatggtgaaggtattcgtatc

SEQ ID NO: 140273 - DNA, 30 bp, Artificial Sequence
  Synthetic oligonucleotide
taactctgcccacacagactgtttcgtatc

SEQ ID NO: 140274 - DNA, 30 bp, Artificial Sequence
  Synthetic oligonucleotide
gcgactgcacgacatattagtgaaggtatc

SEQ ID NO: 140275 - DNA, 30 bp, Artificial Sequence
  Synthetic oligonucleotide
gcgtgctatcgcgcaaaggtaagaggtatc

SEQ ID NO: 140276 - DNA, 30 bp, Artificial Sequence
  Synthetic oligonucleotide
cacaccacttatcaaattgcgtacggtatc

SEQ ID NO: 140277 - DNA, 30 bp, Artificial Sequence
  Synthetic oligonucleotide
caggagagtgacagttactccaagggtatc

SEQ ID NO: 140278 - DNA, 30 bp, Artificial Sequence
  Synthetic oligonucleotide
gagcgtgctgacggcagaggaccatgtatc

SEQ ID NO: 140279 - DNA, 30 bp, Artificial Sequence
  Synthetic oligonucleotide
tccctattggcttggcacaatctgtgtatc

SEQ ID NO: 140280 - DNA, 30 bp, Artificial Sequence
  Synthetic oligonucleotide
gtgccagggggagctgggccctcttgtatc

SEQ ID NO: 140281 - DNA, 30 bp, Artificial Sequence
  Synthetic oligonucleotide
acacacttgaaaagtcattggtcaattatc

SEQ ID NO: 140282 - DNA, 30 bp, Artificial Sequence
  Synthetic oligonucleotide
tgacgccgcaaatgtatgacaagtattatc

SEQ ID NO: 140283 - DNA, 30 bp, Artificial Sequence
  Synthetic oligonucleotide
cgtactctatgtgagttaagccaccttatc

SEQ ID NO: 140284 - DNA, 30 bp, Artificial Sequence
  Synthetic oligonucleotide
gctaacgtgtggctgcatcaaggcgttatc

SEQ ID NO: 140285 - DNA, 30 bp, Artificial Sequence
  Synthetic oligonucleotide
cgctgctgcggatcgtggtgcttatttatc

SEQ ID NO: 140286 - DNA, 30 bp, Artificial Sequence
  Synthetic oligonucleotide
ggggtaaggagagacaagtgttatgaactc

SEQ ID NO: 140287 - DNA, 30 bp, Artificial Sequence
  Synthetic oligonucleotide
ggggcagggggccgctggtattaataactc

SEQ ID NO: 140288 - DNA, 30 bp, Artificial Sequence
  Synthetic oligonucleotide
ccaggagtaggattcatcgaatcgtaactc

SEQ ID NO: 140289 - DNA, 30 bp, Artificial Sequence
  Synthetic oligonucleotide
gccgtcggccacaacataaagacttaactc

SEQ ID NO: 140290 - DNA, 30 bp, Artificial Sequence
  Synthetic oligonucleotide
gtgcgtcggatggccgaattcaagacactc

SEQ ID NO: 140291 - DNA, 30 bp, Artificial Sequence
  Synthetic oligonucleotide
gcgggaaagaattagtggtcgttaccactc

SEQ ID NO: 140292 - DNA, 30 bp, Artificial Sequence
  Synthetic oligonucleotide
gtctatcggaatgggggaagtcctccactc

SEQ ID NO: 140293 - DNA, 30 bp, Artificial Sequence
  Synthetic oligonucleotide
agactattcctattacacatctgtccactc

SEQ ID NO: 140294 - DNA, 30 bp, Artificial Sequence
  Synthetic oligonucleotide
cgaatgactaataatcggcattatgcactc

SEQ ID NO: 140295 - DNA, 30 bp, Artificial Sequence
  Synthetic oligonucleotide
ggacggggcttgaagctttaagagtcactc

SEQ ID NO: 140296 - DNA, 30 bp, Artificial Sequence
  Synthetic oligonucleotide
gcgttatgattcatgggacggggaagactc

SEQ ID NO: 140297 - DNA, 30 bp, Artificial Sequence
  Synthetic oligonucleotide
ggacgcttagtaaacacatacataagactc

SEQ ID NO: 140298 - DNA, 29 bp, Artificial Sequence
  Synthetic oligonucleotide
ctccgtaaaagtagagtacgacacgactc

SEQ ID NO: 140299 - DNA, 30 bp, Artificial Sequence
  Synthetic oligonucleotide
aatgaatgctctcaacggggagtccgactc

SEQ ID NO: 140300 - DNA, 30 bp, Artificial Sequence
  Synthetic oligonucleotide
cgtgcggctgttgagaacgtcgcgcgactc

SEQ ID NO: 140301 - DNA, 30 bp, Artificial Sequence
  Synthetic oligonucleotide
agacggcgggatggaaggaagaacggactc

SEQ ID NO: 140302 - DNA, 30 bp, Artificial Sequence
  Synthetic oligonucleotide
actaggccgcatgaaggaccgtatggactc

SEQ ID NO: 140303 - DNA, 30 bp, Artificial Sequence
  Synthetic oligonucleotide
ttctgacggggtggaacacaccacctactc

SEQ ID NO: 140304 - DNA, 30 bp, Artificial Sequence
  Synthetic oligonucleotide
atcatgggagtactcaagattgccctactc

SEQ ID NO: 140305 - DNA, 30 bp, Artificial Sequence
  Synthetic oligonucleotide
catagcaccgccggcaatgaggatgtactc

SEQ ID NO: 140306 - DNA, 30 bp, Artificial Sequence
  Synthetic oligonucleotide
ttactcgacattgatcccaatcgattactc

SEQ ID NO: 140307 - DNA, 30 bp, Artificial Sequence
  Synthetic oligonucleotide
caagcatggcactggctatctgtgttactc

SEQ ID NO: 140308 - DNA, 30 bp, Artificial Sequence
  Synthetic oligonucleotide
aaaaaatctggccctaatgaaaagaacctc

SEQ ID NO: 140309 - DNA, 30 bp, Artificial Sequence
  Synthetic oligonucleotide
tgtggaagaatgtgtagcgactgacacctc

SEQ ID NO: 140310 - DNA, 30 bp, Artificial Sequence
  Synthetic oligonucleotide
aagacgtggaaagtctatcatatccacctc

SEQ ID NO: 140311 - DNA, 30 bp, Artificial Sequence
  Synthetic oligonucleotide
tggcctgaatggttgaagagtatgcacctc

SEQ ID NO: 140312 - DNA, 30 bp, Artificial Sequence
  Synthetic oligonucleotide
caagacgtaggtcagagcagttatcacctc

SEQ ID NO: 140313 - DNA, 30 bp, Artificial Sequence
  Synthetic oligonucleotide
catgcggaggtggggttacgatttgacctc

SEQ ID NO: 140314 - DNA, 30 bp, Artificial Sequence
  Synthetic oligonucleotide
ggggggcaacgtccaccgcaccactacctc

SEQ ID NO: 140315 - DNA, 30 bp, Artificial Sequence
  Synthetic oligonucleotide
cggagtctgaaatagatgacgcgaaccctc

SEQ ID NO: 140316 - DNA, 30 bp, Artificial Sequence
  Synthetic oligonucleotide
aacttgaggtacggtatggtggagaccctc

SEQ ID NO: 140317 - DNA, 30 bp, Artificial Sequence
  Synthetic oligonucleotide
gggtcgaagatgatacacggcatgaccctc

SEQ ID NO: 140318 - DNA, 30 bp, Artificial Sequence
  Synthetic oligonucleotide
tcctaccactgtgtgtagcgcggacccctc

SEQ ID NO: 140319 - DNA, 30 bp, Artificial Sequence
  Synthetic oligonucleotide
taagcataggaggtgcgggtcgagcccctc

SEQ ID NO: 140320 - DNA, 30 bp, Artificial Sequence
  Synthetic oligonucleotide
ataagggggcaaacgttagactgtcccctc

SEQ ID NO: 140321 - DNA, 30 bp, Artificial Sequence
  Synthetic oligonucleotide
cgacacctgacgccattttgtgtcgccctc

SEQ ID NO: 140322 - DNA, 30 bp, Artificial Sequence
  Synthetic oligonucleotide
aacgggccacctgaaaagtctcagtccctc

SEQ ID NO: 140323 - DNA, 30 bp, Artificial Sequence
  Synthetic oligonucleotide
ttcaaaacgctcggccgtgtaaagagcctc

SEQ ID NO: 140324 - DNA, 30 bp, Artificial Sequence
  Synthetic oligonucleotide
tgaagcgtgtgtaagaaaaggtggcgcctc

SEQ ID NO: 140325 - DNA, 30 bp, Artificial Sequence
  Synthetic oligonucleotide
aatgctagtcaccctcatttagaaggcctc

SEQ ID NO: 140326 - DNA, 30 bp, Artificial Sequence
  Synthetic oligonucleotide
aagacttgagcgcctgaaacgtacggcctc

SEQ ID NO: 140327 - DNA, 30 bp, Artificial Sequence
  Synthetic oligonucleotide
gtgaaccaacattaagcttccggatgcctc

SEQ ID NO: 140328 - DNA, 30 bp, Artificial Sequence
  Synthetic oligonucleotide
agtgaacaggatgatatggcaacgtgcctc

SEQ ID NO: 140329 - DNA, 30 bp, Artificial Sequence
  Synthetic oligonucleotide
acgagcaacaggacagggaaacccatcctc

SEQ ID NO: 140330 - DNA, 30 bp, Artificial Sequence
  Synthetic oligonucleotide
tgggtaatatgccagagtcgacgcatcctc

SEQ ID NO: 140331 - DNA, 30 bp, Artificial Sequence
  Synthetic oligonucleotide
aacagcgaagagtgagctgggctagtcctc

SEQ ID NO: 140332 - DNA, 30 bp, Artificial Sequence
  Synthetic oligonucleotide
tacaactctcgccgtcattctttcaagctc

SEQ ID NO: 140333 - DNA, 30 bp, Artificial Sequence
  Synthetic oligonucleotide
cgtagctaaacagttacaagcgagaagctc

SEQ ID NO: 140334 - DNA, 30 bp, Artificial Sequence
  Synthetic oligonucleotide
cttgtgcgggttcggaatcatggacagctc

SEQ ID NO: 140335 - DNA, 30 bp, Artificial Sequence
  Synthetic oligonucleotide
gctcatgtcttagacagtctatttgagctc

SEQ ID NO: 140336 - DNA, 30 bp, Artificial Sequence
  Synthetic oligonucleotide
tctaccggaacatgtaggagctcatagctc

SEQ ID NO: 140337 - DNA, 30 bp, Artificial Sequence
  Synthetic oligonucleotide
tgtgagaatagccgcgcgcgtacctagctc

SEQ ID NO: 140338 - DNA, 30 bp, Artificial Sequence
  Synthetic oligonucleotide
gtgataaaagtacttacgtaaatctagctc

SEQ ID NO: 140339 - DNA, 30 bp, Artificial Sequence
  Synthetic oligonucleotide
cgcccgagagggcccagtcgaatctagctc

SEQ ID NO: 140340 - DNA, 30 bp, Artificial Sequence
  Synthetic oligonucleotide
cggcccccgggaaggcaagttagaacgctc

SEQ ID NO: 140341 - DNA, 30 bp, Artificial Sequence
  Synthetic oligonucleotide
gtccagcgtgactctgtgatacgtacgctc

SEQ ID NO: 140342 - DNA, 30 bp, Artificial Sequence
  Synthetic oligonucleotide
ttgctcctttctataaccggagtcgcgctc

SEQ ID NO: 140343 - DNA, 30 bp, Artificial Sequence
  Synthetic oligonucleotide
accagtggccatatatcaggcgtatcgctc

SEQ ID NO: 140344 - DNA, 30 bp, Artificial Sequence
  Synthetic oligonucleotide
aactgagcccaatggcgccaattctcgctc

SEQ ID NO: 140345 - DNA, 30 bp, Artificial Sequence
  Synthetic oligonucleotide
caccgaacgtagctaagcaaggcacggctc

SEQ ID NO: 140346 - DNA, 30 bp, Artificial Sequence
  Synthetic oligonucleotide
tagcatggtaccactcttactggccggctc

SEQ ID NO: 140347 - DNA, 30 bp, Artificial Sequence
  Synthetic oligonucleotide
ggcaatggcccaaatcgagtgctccggctc

SEQ ID NO: 140348 - DNA, 30 bp, Artificial Sequence
  Synthetic oligonucleotide
tcgggatgaggtcattagaatggcgggctc

SEQ ID NO: 140349 - DNA, 30 bp, Artificial Sequence
  Synthetic oligonucleotide
ctgtagttcatgagcgtaagactcgggctc

SEQ ID NO: 140350 - DNA, 30 bp, Artificial Sequence
  Synthetic oligonucleotide
ccagagggcgggcgattggctaaggggctc

SEQ ID NO: 140351 - DNA, 30 bp, Artificial Sequence
  Synthetic oligonucleotide
acattatatcagtgacccaccgcggggctc

SEQ ID NO: 140352 - DNA, 30 bp, Artificial Sequence
  Synthetic oligonucleotide
caagtatgaacacaagcataactggggctc

SEQ ID NO: 140353 - DNA, 30 bp, Artificial Sequence
  Synthetic oligonucleotide
ctgaggaacaaaggcagcttgcgtgggctc

SEQ ID NO: 140354 - DNA, 30 bp, Artificial Sequence
  Synthetic oligonucleotide
ccgagaccgggtccttcttcgtaaatgctc

SEQ ID NO: 140355 - DNA, 30 bp, Artificial Sequence
  Synthetic oligonucleotide
ggatcacagcaggtggggtgtgacatgctc

SEQ ID NO: 140356 - DNA, 30 bp, Artificial Sequence
  Synthetic oligonucleotide
gaatgtgcaattcaatgttttcgagtgctc

SEQ ID NO: 140357 - DNA, 30 bp, Artificial Sequence
  Synthetic oligonucleotide
aggtggtaagtttgaccggcacgcgtgctc

SEQ ID NO: 140358 - DNA, 30 bp, Artificial Sequence
  Synthetic oligonucleotide
atcgctttgggccgtaattgcggggtgctc

SEQ ID NO: 140359 - DNA, 30 bp, Artificial Sequence
  Synthetic oligonucleotide
gtgcggatccggaccgataaccggaatctc

SEQ ID NO: 140360 - DNA, 30 bp, Artificial Sequence
  Synthetic oligonucleotide
gcgtgctcccggggcgtaatgcaacatctc

SEQ ID NO: 140361 - DNA, 30 bp, Artificial Sequence
  Synthetic oligonucleotide
cgactggataaaaacgcgcagggggatctc

SEQ ID NO: 140362 - DNA, 30 bp, Artificial Sequence
  Synthetic oligonucleotide
taatacttaagattcaaccgtttctatctc

SEQ ID NO: 140363 - DNA, 30 bp, Artificial Sequence
  Synthetic oligonucleotide
ctggcccttatccaagctgcatattatctc

SEQ ID NO: 140364 - DNA, 30 bp, Artificial Sequence
  Synthetic oligonucleotide
cataacggcggtacaccttccgtgactctc

SEQ ID NO: 140365 - DNA, 30 bp, Artificial Sequence
  Synthetic oligonucleotide
ggcgggtcaaacttcttaacagaccgtctc

SEQ ID NO: 140366 - DNA, 30 bp, Artificial Sequence
  Synthetic oligonucleotide
ccacgacggttacacgagctgtgtcgtctc

SEQ ID NO: 140367 - DNA, 30 bp, Artificial Sequence
  Synthetic oligonucleotide
agtaaagcgcaataccgtcttatcggtctc

SEQ ID NO: 140368 - DNA, 30 bp, Artificial Sequence
  Synthetic oligonucleotide
cgaaccgatggttaggtagggtggggtctc

SEQ ID NO: 140369 - DNA, 30 bp, Artificial Sequence
  Synthetic oligonucleotide
ttgaggggggatgttattggtcctggtctc

SEQ ID NO: 140370 - DNA, 30 bp, Artificial Sequence
  Synthetic oligonucleotide
tcaaggtacatcagttgccttcccgttctc

SEQ ID NO: 140371 - DNA, 30 bp, Artificial Sequence
  Synthetic oligonucleotide
ggggcgagtggggggaagagcagatttctc

SEQ ID NO: 140372 - DNA, 30 bp, Artificial Sequence
  Synthetic oligonucleotide
agctagctagctggggggtgcggctttctc

SEQ ID NO: 140373 - DNA, 30 bp, Artificial Sequence
  Synthetic oligonucleotide
gcgttgtacgagcgaagtttcaacaaagtc

SEQ ID NO: 140374 - DNA, 30 bp, Artificial Sequence
  Synthetic oligonucleotide
gatgcacgtgaggggccgataggcaaagtc

SEQ ID NO: 140375 - DNA, 30 bp, Artificial Sequence
  Synthetic oligonucleotide
tggacagtcagttaaccgtcagctaaagtc

SEQ ID NO: 140376 - DNA, 30 bp, Artificial Sequence
  Synthetic oligonucleotide
agaggaggggtcttaggtctagttaaagtc

SEQ ID NO: 140377 - DNA, 30 bp, Artificial Sequence
  Synthetic oligonucleotide
tgatatgagcctgagaatagcttccaagtc

SEQ ID NO: 140378 - DNA, 30 bp, Artificial Sequence
  Synthetic oligonucleotide
tcggaaagccggtgacgatggtggcaagtc

SEQ ID NO: 140379 - DNA, 30 bp, Artificial Sequence
  Synthetic oligonucleotide
ccatagaagggcgttagactaagtcaagtc

SEQ ID NO: 140380 - DNA, 30 bp, Artificial Sequence
  Synthetic oligonucleotide
aggcgtacccttgactacttagaggaagtc

SEQ ID NO: 140381 - DNA, 30 bp, Artificial Sequence
  Synthetic oligonucleotide
gaaaggccccagaggacccgcgtggaagtc

SEQ ID NO: 140382 - DNA, 30 bp, Artificial Sequence
  Synthetic oligonucleotide
acagcccactcgatattaggaagataagtc

SEQ ID NO: 140383 - DNA, 30 bp, Artificial Sequence
  Synthetic oligonucleotide
tgtcgatccagccatgagtacggataagtc

SEQ ID NO: 140384 - DNA, 30 bp, Artificial Sequence
  Synthetic oligonucleotide
ggttgtgaaggcacttctggtacgacagtc

SEQ ID NO: 140385 - DNA, 30 bp, Artificial Sequence
  Synthetic oligonucleotide
ctaacgtatacggtacttacacttacagtc

SEQ ID NO: 140386 - DNA, 30 bp, Artificial Sequence
  Synthetic oligonucleotide
tcaatgcttagtctaaggcaataaccagtc

SEQ ID NO: 140387 - DNA, 30 bp, Artificial Sequence
  Synthetic oligonucleotide
tctagtaccattcgcgggaccggaccagtc

SEQ ID NO: 140388 - DNA, 30 bp, Artificial Sequence
  Synthetic oligonucleotide
catcgcaacagggaactactatgcccagtc

SEQ ID NO: 140389 - DNA, 30 bp, Artificial Sequence
  Synthetic oligonucleotide
ctcagggataaggttcgatgaccgccagtc

SEQ ID NO: 140390 - DNA, 30 bp, Artificial Sequence
  Synthetic oligonucleotide
tacgcatagccgcgtaacgtagatccagtc

SEQ ID NO: 140391 - DNA, 30 bp, Artificial Sequence
  Synthetic oligonucleotide
aatcagcagatgtctcaggaaggggcagtc

SEQ ID NO: 140392 - DNA, 30 bp, Artificial Sequence
  Synthetic oligonucleotide
acccatgtgagcttcacaacctgtgcagtc

SEQ ID NO: 140393 - DNA, 30 bp, Artificial Sequence
  Synthetic oligonucleotide
acactgggtaccgcacgtgccgaatcagtc

SEQ ID NO: 140394 - DNA, 30 bp, Artificial Sequence
  Synthetic oligonucleotide
gctactagaggcgtaaacgctaattcagtc

SEQ ID NO: 140395 - DNA, 30 bp, Artificial Sequence
  Synthetic oligonucleotide
acgaaactacgtcggcatcaccgaagagtc

SEQ ID NO: 140396 - DNA, 30 bp, Artificial Sequence
  Synthetic oligonucleotide
cgtggttctgcgaaacgaacactgagagtc

SEQ ID NO: 140397 - DNA, 30 bp, Artificial Sequence
  Synthetic oligonucleotide
gttctcagatggtccggataaacacgagtc

SEQ ID NO: 140398 - DNA, 30 bp, Artificial Sequence
  Synthetic oligonucleotide
tgtacctgtaatcgccacttaagacgagtc

SEQ ID NO: 140399 - DNA, 30 bp, Artificial Sequence
  Synthetic oligonucleotide
ctggtggcggccgcccagcccgagcgagtc

SEQ ID NO: 140400 - DNA, 30 bp, Artificial Sequence
  Synthetic oligonucleotide
agcattcatagtggccatcgagggcgagtc

SEQ ID NO: 140401 - DNA, 30 bp, Artificial Sequence
  Synthetic oligonucleotide
gtacctttgaattgatggatgtgtcgagtc

SEQ ID NO: 140402 - DNA, 30 bp, Artificial Sequence
  Synthetic oligonucleotide
cggccggacgtagtgtaaggagggggagtc

SEQ ID NO: 140403 - DNA, 30 bp, Artificial Sequence
  Synthetic oligonucleotide
tcataatagtgttcgtgatccgatggagtc

SEQ ID NO: 140404 - DNA, 30 bp, Artificial Sequence
  Synthetic oligonucleotide
ggagcccagcgcgagcatcgtcctggagtc

SEQ ID NO: 140405 - DNA, 30 bp, Artificial Sequence
  Synthetic oligonucleotide
tggttattgcgatggatatcccagtgagtc

SEQ ID NO: 140406 - DNA, 30 bp, Artificial Sequence
  Synthetic oligonucleotide
tagcagaatggtcatgaattatattgagtc

SEQ ID NO: 140407 - DNA, 30 bp, Artificial Sequence
  Synthetic oligonucleotide
tagcgtaattaggtgggctgaaggatagtc

SEQ ID NO: 140408 - DNA, 30 bp, Artificial Sequence
  Synthetic oligonucleotide
gcctatgataggctacagtgcatgatagtc

SEQ ID NO: 140409 - DNA, 30 bp, Artificial Sequence
  Synthetic oligonucleotide
agaggataacatgaagatactaatatagtc

SEQ ID NO: 140410 - DNA, 30 bp, Artificial Sequence
  Synthetic oligonucleotide
tggggactgggccattcaacctatatagtc

SEQ ID NO: 140411 - DNA, 30 bp, Artificial Sequence
  Synthetic oligonucleotide
tcgggcacagattatatgtagagagtagtc

SEQ ID NO: 140412 - DNA, 30 bp, Artificial Sequence
  Synthetic oligonucleotide
tgggataaaaaggctagagaacaggtagtc

SEQ ID NO: 140413 - DNA, 30 bp, Artificial Sequence
  Synthetic oligonucleotide
ctgatcttgggttgcggggcgagattagtc

SEQ ID NO: 140414 - DNA, 30 bp, Artificial Sequence
  Synthetic oligonucleotide
catcgttcggcatatggtggaactttagtc

SEQ ID NO: 140415 - DNA, 30 bp, Artificial Sequence
  Synthetic oligonucleotide
gaaggcttttcaggtaggccgtgcaacgtc

SEQ ID NO: 140416 - DNA, 30 bp, Artificial Sequence
  Synthetic oligonucleotide
atgggtccatggcggacgggtaggcacgtc

SEQ ID NO: 140417 - DNA, 30 bp, Artificial Sequence
  Synthetic oligonucleotide
gaatgtatagcaggatgaaaactgcacgtc

SEQ ID NO: 140418 - DNA, 30 bp, Artificial Sequence
  Synthetic oligonucleotide
gatcatcacgtaacgacttgcccagacgtc

SEQ ID NO: 140419 - DNA, 30 bp, Artificial Sequence
  Synthetic oligonucleotide
agagacagcgaaacgtggcggatagacgtc

SEQ ID NO: 140420 - DNA, 30 bp, Artificial Sequence
  Synthetic oligonucleotide
gtgacaaccagttcccagtttgattacgtc

SEQ ID NO: 140421 - DNA, 30 bp, Artificial Sequence
  Synthetic oligonucleotide
ggggattattagccagggtcaatttacgtc

SEQ ID NO: 140422 - DNA, 30 bp, Artificial Sequence
  Synthetic oligonucleotide
taggctcatggctaagccgaactcaccgtc

SEQ ID NO: 140423 - DNA, 30 bp, Artificial Sequence
  Synthetic oligonucleotide
ggggttgcacgaaacaggtggtgtaccgtc

SEQ ID NO: 140424 - DNA, 30 bp, Artificial Sequence
  Synthetic oligonucleotide
actgaagaattgtgtgactgctaagccgtc

SEQ ID NO: 140425 - DNA, 30 bp, Artificial Sequence
  Synthetic oligonucleotide
gccacggagaaatttatatgttaggccgtc

SEQ ID NO: 140426 - DNA, 30 bp, Artificial Sequence
  Synthetic oligonucleotide
ggggtagcaaagttcctagccagtgccgtc

SEQ ID NO: 140427 - DNA, 30 bp, Artificial Sequence
  Synthetic oligonucleotide
gacaggtttgcaataatggaccatagcgtc

SEQ ID NO: 140428 - DNA, 30 bp, Artificial Sequence
  Synthetic oligonucleotide
tgaaatgtgtcccgggagcaattacgcgtc

SEQ ID NO: 140429 - DNA, 30 bp, Artificial Sequence
  Synthetic oligonucleotide
tttagcatgggaaatatctccgaaggcgtc

SEQ ID NO: 140430 - DNA, 30 bp, Artificial Sequence
  Synthetic oligonucleotide
aattgctggagtaattcaaagactggcgtc

SEQ ID NO: 140431 - DNA, 30 bp, Artificial Sequence
  Synthetic oligonucleotide
cggaccccaaagattcaccaagttggcgtc

SEQ ID NO: 140432 - DNA, 30 bp, Artificial Sequence
  Synthetic oligonucleotide
gtttagctacctaggccgaagaaatgcgtc

SEQ ID NO: 140433 - DNA, 30 bp, Artificial Sequence
  Synthetic oligonucleotide
ggcttaggtaatgtctgagggtaatgcgtc

SEQ ID NO: 140434 - DNA, 30 bp, Artificial Sequence
  Synthetic oligonucleotide
cagagagaaccctaccacatcaagtgcgtc

SEQ ID NO: 140435 - DNA, 30 bp, Artificial Sequence
  Synthetic oligonucleotide
tattgatcccaaggactgagagtttgcgtc

SEQ ID NO: 140436 - DNA, 30 bp, Artificial Sequence
  Synthetic oligonucleotide
ggcgggggtgtggcgtcatcgggcatcgtc

SEQ ID NO: 140437 - DNA, 30 bp, Artificial Sequence
  Synthetic oligonucleotide
gagcatacgttatcgcaaacccgtatcgtc

SEQ ID NO: 140438 - DNA, 30 bp, Artificial Sequence
  Synthetic oligonucleotide
acgcttacaagctgatttcaaagagtcgtc

SEQ ID NO: 140439 - DNA, 30 bp, Artificial Sequence
  Synthetic oligonucleotide
agaccgtaagagcgggttcgtctagtcgtc

SEQ ID NO: 140440 - DNA, 30 bp, Artificial Sequence
  Synthetic oligonucleotide
caatcaaatcctagcagcccagcggtcgtc

SEQ ID NO: 140441 - DNA, 30 bp, Artificial Sequence
  Synthetic oligonucleotide
cagtcacacgtgtcccgcatataattcgtc

SEQ ID NO: 140442 - DNA, 30 bp, Artificial Sequence
  Synthetic oligonucleotide
agcgcctagtagggccttaacctattcgtc

SEQ ID NO: 140443 - DNA, 30 bp, Artificial Sequence
  Synthetic oligonucleotide
ccgtggcagcactactaggttttattcgtc

SEQ ID NO: 140444 - DNA, 30 bp, Artificial Sequence
  Synthetic oligonucleotide
ggattgtgcttttaagggcttatcttcgtc

SEQ ID NO: 140445 - DNA, 30 bp, Artificial Sequence
  Synthetic oligonucleotide
aatgacgggtgatcgtaaagtcggttcgtc

SEQ ID NO: 140446 - DNA, 30 bp, Artificial Sequence
  Synthetic oligonucleotide
gccggtaaccgatttacctgctcaaaggtc

SEQ ID NO: 140447 - DNA, 30 bp, Artificial Sequence
  Synthetic oligonucleotide
aacgtcagggacagtaccgggcgaaaggtc

SEQ ID NO: 140448 - DNA, 30 bp, Artificial Sequence
  Synthetic oligonucleotide
cggacagggcccgacactagtagacaggtc

SEQ ID NO: 140449 - DNA, 30 bp, Artificial Sequence
  Synthetic oligonucleotide
ccacatgaggattgtggaaatgtgcaggtc

SEQ ID NO: 140450 - DNA, 30 bp, Artificial Sequence
  Synthetic oligonucleotide
aggatagctctgaaagaagaatctcaggtc

SEQ ID NO: 140451 - DNA, 30 bp, Artificial Sequence
  Synthetic oligonucleotide
taacgcctaacaaagacccaaattcaggtc

SEQ ID NO: 140452 - DNA, 30 bp, Artificial Sequence
  Synthetic oligonucleotide
aataccgaagtcctcggcgagcaagaggtc

SEQ ID NO: 140453 - DNA, 30 bp, Artificial Sequence
  Synthetic oligonucleotide
cgagggcaccggcacggcgtaggagaggtc

SEQ ID NO: 140454 - DNA, 30 bp, Artificial Sequence
  Synthetic oligonucleotide
gtacagagggaacttctaggaatctaggtc

SEQ ID NO: 140455 - DNA, 30 bp, Artificial Sequence
  Synthetic oligonucleotide
acgcagtggcattccaccaaaatgtaggtc

SEQ ID NO: 140456 - DNA, 30 bp, Artificial Sequence
  Synthetic oligonucleotide
caagaaccctacaaatatctcacaacggtc

SEQ ID NO: 140457 - DNA, 30 bp, Artificial Sequence
  Synthetic oligonucleotide
gtttaaactatacaaccagccaacacggtc

SEQ ID NO: 140458 - DNA, 30 bp, Artificial Sequence
  Synthetic oligonucleotide
ccagagataagtccacggaaatttacggtc

SEQ ID NO: 140459 - DNA, 30 bp, Artificial Sequence
  Synthetic oligonucleotide
tggcgctctggaggccaactgccgccggtc

SEQ ID NO: 140460 - DNA, 30 bp, Artificial Sequence
  Synthetic oligonucleotide
agttgcccccaacaattcgaaaggccggtc

SEQ ID NO: 140461 - DNA, 30 bp, Artificial Sequence
  Synthetic oligonucleotide
actgctatgttcgtgagtctgagagcggtc

SEQ ID NO: 140462 - DNA, 30 bp, Artificial Sequence
  Synthetic oligonucleotide
agaagtccacctggggaccgacgagcggtc

SEQ ID NO: 140463 - DNA, 30 bp, Artificial Sequence
  Synthetic oligonucleotide
acagaaacttgttggctcgtcaacgcggtc

SEQ ID NO: 140464 - DNA, 30 bp, Artificial Sequence
  Synthetic oligonucleotide
agtatggaaccgagaagcacgaactcggtc

SEQ ID NO: 140465 - DNA, 30 bp, Artificial Sequence
  Synthetic oligonucleotide
tagggaaacgcttaatctaggacctcggtc

SEQ ID NO: 140466 - DNA, 30 bp, Artificial Sequence
  Synthetic oligonucleotide
cgggggaacatcagaaggcaataaagggtc

SEQ ID NO: 140467 - DNA, 30 bp, Artificial Sequence
  Synthetic oligonucleotide
ggagggcatttgcaaacgtaactaagggtc

SEQ ID NO: 140468 - DNA, 30 bp, Artificial Sequence
  Synthetic oligonucleotide
acggcatagttcatagatcctctaagggtc

SEQ ID NO: 140469 - DNA, 30 bp, Artificial Sequence
  Synthetic oligonucleotide
tgatggtactttcacagcactgtaagggtc

SEQ ID NO: 140470 - DNA, 31 bp, Artificial Sequence
  Synthetic oligonucleotide
atttacggagtgaggtatcgtctcgagggtc

SEQ ID NO: 140471 - DNA, 30 bp, Artificial Sequence
  Synthetic oligonucleotide
tgatatagatcaggttgagcgatgagggtc

SEQ ID NO: 140472 - DNA, 30 bp, Artificial Sequence
  Synthetic oligonucleotide
tgtgaccccaagaaaggaacactacgggtc

SEQ ID NO: 140473 - DNA, 30 bp, Artificial Sequence
  Synthetic oligonucleotide
gcggggtgaattggatagctaaggcgggtc

SEQ ID NO: 140474 - DNA, 30 bp, Artificial Sequence
  Synthetic oligonucleotide
cgctagatgcgacgtttgaatcatcgggtc

SEQ ID NO: 140475 - DNA, 30 bp, Artificial Sequence
  Synthetic oligonucleotide
ctgaccttaaaaggccattacccaggggtc

SEQ ID NO: 140476 - DNA, 30 bp, Artificial Sequence
  Synthetic oligonucleotide
gtcgatgggcgtacctgcaaaaggggggtc

SEQ ID NO: 140477 - DNA, 30 bp, Artificial Sequence
  Synthetic oligonucleotide
tacgcgtaatttccgcacttcacctgggtc

SEQ ID NO: 140478 - DNA, 30 bp, Artificial Sequence
  Synthetic oligonucleotide
gcgagcagatacaatgataatccgtgggtc

SEQ ID NO: 140479 - DNA, 30 bp, Artificial Sequence
  Synthetic oligonucleotide
ctgcaatcattgtgagataccatttgggtc

SEQ ID NO: 140480 - DNA, 30 bp, Artificial Sequence
  Synthetic oligonucleotide
ggggaaattatacctctgttgaccatggtc

SEQ ID NO: 140481 - DNA, 30 bp, Artificial Sequence
  Synthetic oligonucleotide
tcgacgagcggatttaggtagttcatggtc

SEQ ID NO: 140482 - DNA, 30 bp, Artificial Sequence
  Synthetic oligonucleotide
ccagatgactgcggttctaatcatatggtc

SEQ ID NO: 140483 - DNA, 30 bp, Artificial Sequence
  Synthetic oligonucleotide
atccaagtgagtacaggactcgcgctggtc

SEQ ID NO: 140484 - DNA, 30 bp, Artificial Sequence
  Synthetic oligonucleotide
cggggaaatacaaactctgttctgctggtc

SEQ ID NO: 140485 - DNA, 30 bp, Artificial Sequence
  Synthetic oligonucleotide
gtctcgcattaaactggacatgtgctggtc

SEQ ID NO: 140486 - DNA, 30 bp, Artificial Sequence
  Synthetic oligonucleotide
catgacttggtggtttcacggatagtggtc

SEQ ID NO: 140487 - DNA, 30 bp, Artificial Sequence
  Synthetic oligonucleotide
tgtggcaacagcgccggatgccacgtggtc

SEQ ID NO: 140488 - DNA, 30 bp, Artificial Sequence
  Synthetic oligonucleotide
gtagcgctcgtcatggtgggacgattggtc

SEQ ID NO: 140489 - DNA, 30 bp, Artificial Sequence
  Synthetic oligonucleotide
aaggtgctcgccttctcgatcctcttggtc

SEQ ID NO: 140490 - DNA, 30 bp, Artificial Sequence
  Synthetic oligonucleotide
atcgaacatatataaaaaatattgttggtc

SEQ ID NO: 140491 - DNA, 30 bp, Artificial Sequence
  Synthetic oligonucleotide
cagaataaacaatcggtatcagttttggtc

SEQ ID NO: 140492 - DNA, 30 bp, Artificial Sequence
  Synthetic oligonucleotide
ttagtaatagggcgaaagtagaaaaatgtc

SEQ ID NO: 140493 - DNA, 30 bp, Artificial Sequence
  Synthetic oligonucleotide
ttctgcccctcgtgagaggaaaacaatgtc

SEQ ID NO: 140494 - DNA, 30 bp, Artificial Sequence
  Synthetic oligonucleotide
gcggcagttagataaagcgacatcaatgtc

SEQ ID NO: 140495 - DNA, 30 bp, Artificial Sequence
  Synthetic oligonucleotide
aacgggttggcaaagaaaagtatcaatgtc

SEQ ID NO: 140496 - DNA, 30 bp, Artificial Sequence
  Synthetic oligonucleotide
agtgagttgcacttctgtgcgcaacatgtc

SEQ ID NO: 140497 - DNA, 30 bp, Artificial Sequence
  Synthetic oligonucleotide
aggtccatgatggccgagtctgcatatgtc

SEQ ID NO: 140498 - DNA, 30 bp, Artificial Sequence
  Synthetic oligonucleotide
agaaactgtctaagtagtcgcgcctatgtc

SEQ ID NO: 140499 - DNA, 30 bp, Artificial Sequence
  Synthetic oligonucleotide
tagtcaagacttggtactggttagactgtc

SEQ ID NO: 140500 - DNA, 30 bp, Artificial Sequence
  Synthetic oligonucleotide
acgtacttggtatatcctttgaatactgtc

SEQ ID NO: 140501 - DNA, 30 bp, Artificial Sequence
  Synthetic oligonucleotide
aatgataatatccttacacggaaacctgtc

SEQ ID NO: 140502 - DNA, 30 bp, Artificial Sequence
  Synthetic oligonucleotide
gctccagccggagcaaatcgcgcacctgtc

SEQ ID NO: 140503 - DNA, 30 bp, Artificial Sequence
  Synthetic oligonucleotide
gaagtagtccgaatattggtggtacctgtc

SEQ ID NO: 140504 - DNA, 30 bp, Artificial Sequence
  Synthetic oligonucleotide
acacgaggacaaggatcttttcggcctgtc

SEQ ID NO: 140505 - DNA, 30 bp, Artificial Sequence
  Synthetic oligonucleotide
cttaattgaagacgtgaaccgagtcctgtc

SEQ ID NO: 140506 - DNA, 30 bp, Artificial Sequence
  Synthetic oligonucleotide
tcgttcaaggaaacgagtcgggcagctgtc

SEQ ID NO: 140507 - DNA, 30 bp, Artificial Sequence
  Synthetic oligonucleotide
cgaaaaattgataactgtcatccggctgtc

SEQ ID NO: 140508 - DNA, 30 bp, Artificial Sequence
  Synthetic oligonucleotide
agtgtccaattattagagccactatctgtc

SEQ ID NO: 140509 - DNA, 30 bp, Artificial Sequence
  Synthetic oligonucleotide
ttagttgatactgcacatagctcgtctgtc

SEQ ID NO: 140510 - DNA, 30 bp, Artificial Sequence
  Synthetic oligonucleotide
acagttcatgtggatctcggaacaagtgtc

SEQ ID NO: 140511 - DNA, 30 bp, Artificial Sequence
  Synthetic oligonucleotide
ttgacagcgagaggtaagatgttaagtgtc

SEQ ID NO: 140512 - DNA, 30 bp, Artificial Sequence
  Synthetic oligonucleotide
gggttgtagcgggctatcgcgacgagtgtc

SEQ ID NO: 140513 - DNA, 30 bp, Artificial Sequence
  Synthetic oligonucleotide
atgcaacgacaacgcatgcaactgagtgtc

SEQ ID NO: 140514 - DNA, 30 bp, Artificial Sequence
  Synthetic oligonucleotide
atatctcatgagttggattagggtagtgtc

SEQ ID NO: 140515 - DNA, 30 bp, Artificial Sequence
  Synthetic oligonucleotide
ggacagaggacgtcacagcactcacgtgtc

SEQ ID NO: 140516 - DNA, 30 bp, Artificial Sequence
  Synthetic oligonucleotide
ttaattgaggcgggtcggctatgacgtgtc

SEQ ID NO: 140517 - DNA, 30 bp, Artificial Sequence
  Synthetic oligonucleotide
tatcaagcttgggttaatggacgtcgtgtc

SEQ ID NO: 140518 - DNA, 30 bp, Artificial Sequence
  Synthetic oligonucleotide
ctgaaatcgcatgcaccatctagaggtgtc

SEQ ID NO: 140519 - DNA, 30 bp, Artificial Sequence
  Synthetic oligonucleotide
gaagatagggacacattcccagatggtgtc

SEQ ID NO: 140520 - DNA, 30 bp, Artificial Sequence
  Synthetic oligonucleotide
ttcagtcgtgtaccccgtgcggatggtgtc

SEQ ID NO: 140521 - DNA, 30 bp, Artificial Sequence
  Synthetic oligonucleotide
cgggtgcgttagccgggcaagaaaattgtc

SEQ ID NO: 140522 - DNA, 30 bp, Artificial Sequence
  Synthetic oligonucleotide
tacggctcaaattccaactccgtcattgtc

SEQ ID NO: 140523 - DNA, 30 bp, Artificial Sequence
  Synthetic oligonucleotide
tacaactggttgaatgaaggagtgattgtc

SEQ ID NO: 140524 - DNA, 30 bp, Artificial Sequence
  Synthetic oligonucleotide
acggctaaggtttgacgaacgtatattgtc

SEQ ID NO: 140525 - DNA, 30 bp, Artificial Sequence
  Synthetic oligonucleotide
taggaatcactaatcatggcaacacttgtc

SEQ ID NO: 140526 - DNA, 30 bp, Artificial Sequence
  Synthetic oligonucleotide
acgtgttggcacccgggcaactaccttgtc

SEQ ID NO: 140527 - DNA, 30 bp, Artificial Sequence
  Synthetic oligonucleotide
tgatccaaccagtatatgatggtccttgtc

SEQ ID NO: 140528 - DNA, 30 bp, Artificial Sequence
  Synthetic oligonucleotide
agcacttcagggcgggaagcggccgttgtc

SEQ ID NO: 140529 - DNA, 30 bp, Artificial Sequence
  Synthetic oligonucleotide
accagtggattcttatgtgtttgggttgtc

SEQ ID NO: 140530 - DNA, 30 bp, Artificial Sequence
  Synthetic oligonucleotide
aagtagatagagtcattgaatactgttgtc

SEQ ID NO: 140531 - DNA, 30 bp, Artificial Sequence
  Synthetic oligonucleotide
tcaagccaagctaacgagggaagttttgtc

SEQ ID NO: 140532 - DNA, 30 bp, Artificial Sequence
  Synthetic oligonucleotide
cgagattgtgcatctgattgcatttttgtc

SEQ ID NO: 140533 - DNA, 30 bp, Artificial Sequence
  Synthetic oligonucleotide
agaacccaccagttttcaggttggaaattc

SEQ ID NO: 140534 - DNA, 30 bp, Artificial Sequence
  Synthetic oligonucleotide
tcagggaatgcatatgacttttataaattc

SEQ ID NO: 140535 - DNA, 30 bp, Artificial Sequence
  Synthetic oligonucleotide
gcgcaacgttaatattcagcgcaacaattc

SEQ ID NO: 140536 - DNA, 30 bp, Artificial Sequence
  Synthetic oligonucleotide
atgttcaacccaattgagttgaggcaattc

SEQ ID NO: 140537 - DNA, 30 bp, Artificial Sequence
  Synthetic oligonucleotide
gcgcccaagaaccagacgaatcggcaattc

SEQ ID NO: 140538 - DNA, 30 bp, Artificial Sequence
  Synthetic oligonucleotide
cttaaaaagactgtgacagccctgcaattc

SEQ ID NO: 140539 - DNA, 30 bp, Artificial Sequence
  Synthetic oligonucleotide
ccacaaacggggcgactaaatcttcaattc

SEQ ID NO: 140540 - DNA, 30 bp, Artificial Sequence
  Synthetic oligonucleotide
agatctataagtgcgagacactcagaattc

SEQ ID NO: 140541 - DNA, 30 bp, Artificial Sequence
  Synthetic oligonucleotide
gcggaaggtagaatagtttctgccgaattc

SEQ ID NO: 140542 - DNA, 30 bp, Artificial Sequence
  Synthetic oligonucleotide
aagatccctaactatcacgatcatgaattc

SEQ ID NO: 140543 - DNA, 30 bp, Artificial Sequence
  Synthetic oligonucleotide
taggatgcgcacaactacgcaacctaattc

SEQ ID NO: 140544 - DNA, 30 bp, Artificial Sequence
  Synthetic oligonucleotide
cagggtgaccacagaccttgtggcacattc

SEQ ID NO: 140545 - DNA, 30 bp, Artificial Sequence
  Synthetic oligonucleotide
gacaggtcacaaatggttgcggctacattc

SEQ ID NO: 140546 - DNA, 30 bp, Artificial Sequence
  Synthetic oligonucleotide
aaagatggcgatgatacaaactttacattc

SEQ ID NO: 140547 - DNA, 30 bp, Artificial Sequence
  Synthetic oligonucleotide
gcgtcctcgcggagttatgacgaatcattc

SEQ ID NO: 140548 - DNA, 30 bp, Artificial Sequence
  Synthetic oligonucleotide
cacgaagctggttgctgtctcggctcattc

SEQ ID NO: 140549 - DNA, 30 bp, Artificial Sequence
  Synthetic oligonucleotide
gtgctacgtgcgtttccgatcgattcattc

SEQ ID NO: 140550 - DNA, 30 bp, Artificial Sequence
  Synthetic oligonucleotide
cgagtcggagacggcttattcgccagattc

SEQ ID NO: 140551 - DNA, 30 bp, Artificial Sequence
  Synthetic oligonucleotide
cgtcagacactcttgcgcgatggcagattc

SEQ ID NO: 140552 - DNA, 30 bp, Artificial Sequence
  Synthetic oligonucleotide
tctagcgtggagggactagaaaaacgattc

SEQ ID NO: 140553 - DNA, 30 bp, Artificial Sequence
  Synthetic oligonucleotide
gggataccataggatgacctatgccgattc

SEQ ID NO: 140554 - DNA, 30 bp, Artificial Sequence
  Synthetic oligonucleotide
agattcggcgtgattcttagggtgcgattc

SEQ ID NO: 140555 - DNA, 30 bp, Artificial Sequence
  Synthetic oligonucleotide
ggtgggatacatttgcggtgaaatggattc

SEQ ID NO: 140556 - DNA, 30 bp, Artificial Sequence
  Synthetic oligonucleotide
ctggcccggcaatcaccaagcacctgattc

SEQ ID NO: 140557 - DNA, 30 bp, Artificial Sequence
  Synthetic oligonucleotide
atgaaaacggtgccaacgcgcggaatattc

SEQ ID NO: 140558 - DNA, 30 bp, Artificial Sequence
  Synthetic oligonucleotide
aacggtgacaaccggaaaacaggtatattc

SEQ ID NO: 140559 - DNA, 30 bp, Artificial Sequence
  Synthetic oligonucleotide
gaccgggtccaaccgtcctgtccagtattc

SEQ ID NO: 140560 - DNA, 30 bp, Artificial Sequence
  Synthetic oligonucleotide
ggaaacgagcgggagctacagtgagtattc

SEQ ID NO: 140561 - DNA, 30 bp, Artificial Sequence
  Synthetic oligonucleotide
tggttgtatatgcgcggtgtagcggtattc

SEQ ID NO: 140562 - DNA, 30 bp, Artificial Sequence
  Synthetic oligonucleotide
gaacaccaactgcggcagagtcatgtattc

SEQ ID NO: 140563 - DNA, 30 bp, Artificial Sequence
  Synthetic oligonucleotide
gaaggtctgagaatggcgggagacttattc

SEQ ID NO: 140564 - DNA, 30 bp, Artificial Sequence
  Synthetic oligonucleotide
ttcgcgacacaacaagtctcagtaaacttc

SEQ ID NO: 140565 - DNA, 30 bp, Artificial Sequence
  Synthetic oligonucleotide
tgccgtgcgctccggcggggagggaacttc

SEQ ID NO: 140566 - DNA, 30 bp, Artificial Sequence
  Synthetic oligonucleotide
gaaggtacataacttgaggaccgtaacttc

SEQ ID NO: 140567 - DNA, 30 bp, Artificial Sequence
  Synthetic oligonucleotide
acgccaatagtagattgcctctttaacttc

SEQ ID NO: 140568 - DNA, 30 bp, Artificial Sequence
  Synthetic oligonucleotide
gacgggtgggcagcgatttcgtcccacttc

SEQ ID NO: 140569 - DNA, 30 bp, Artificial Sequence
  Synthetic oligonucleotide
tatcacggatccaaacttccagcagacttc

SEQ ID NO: 140570 - DNA, 30 bp, Artificial Sequence
  Synthetic oligonucleotide
aggagacgagagccgaagaactgagacttc

SEQ ID NO: 140571 - DNA, 30 bp, Artificial Sequence
  Synthetic oligonucleotide
ctagtaggtgcatcaattaagttggacttc

SEQ ID NO: 140572 - DNA, 30 bp, Artificial Sequence
  Synthetic oligonucleotide
tggccaataccccagcaacccggatacttc

SEQ ID NO: 140573 - DNA, 30 bp, Artificial Sequence
  Synthetic oligonucleotide
cggactgctttagatgtcgtcttgtacttc

SEQ ID NO: 140574 - DNA, 30 bp, Artificial Sequence
  Synthetic oligonucleotide
tcctcaaatgcgatgtgagactaaaccttc

SEQ ID NO: 140575 - DNA, 30 bp, Artificial Sequence
  Synthetic oligonucleotide
aagacaagcgggggcgggagttaccccttc

SEQ ID NO: 140576 - DNA, 30 bp, Artificial Sequence
  Synthetic oligonucleotide
agcaaggatacggatgctcggatagccttc

SEQ ID NO: 140577 - DNA, 30 bp, Artificial Sequence
  Synthetic oligonucleotide
cagctagtgaatgaacaaaggtctgccttc

SEQ ID NO: 140578 - DNA, 30 bp, Artificial Sequence
  Synthetic oligonucleotide
gtaatagtggaacatacgatctcatccttc

SEQ ID NO: 140579 - DNA, 30 bp, Artificial Sequence
  Synthetic oligonucleotide
ccgtgctgggtacgacttcaaaactccttc

SEQ ID NO: 140580 - DNA, 30 bp, Artificial Sequence
  Synthetic oligonucleotide
caccatacctgaaaatccgtaatctccttc

SEQ ID NO: 140581 - DNA, 30 bp, Artificial Sequence
  Synthetic oligonucleotide
gcacttccagccgaggtaaggttaagcttc

SEQ ID NO: 140582 - DNA, 30 bp, Artificial Sequence
  Synthetic oligonucleotide
atcgtaccttagggccacagaaacagcttc

SEQ ID NO: 140583 - DNA, 30 bp, Artificial Sequence
  Synthetic oligonucleotide
aacagttgtatgtgtaaaaatcctcgcttc

SEQ ID NO: 140584 - DNA, 30 bp, Artificial Sequence
  Synthetic oligonucleotide
gtcgcacataaactaaaaaattaaggcttc

SEQ ID NO: 140585 - DNA, 30 bp, Artificial Sequence
  Synthetic oligonucleotide
gctgatagaaactgcagtgccccgggcttc

SEQ ID NO: 140586 - DNA, 30 bp, Artificial Sequence
  Synthetic oligonucleotide
cggaatctacctgtagcccgccatggcttc

SEQ ID NO: 140587 - DNA, 30 bp, Artificial Sequence
  Synthetic oligonucleotide
gaatgcgtatgcgtcttcatctccatcttc

SEQ ID NO: 140588 - DNA, 30 bp, Artificial Sequence
  Synthetic oligonucleotide
aaggccgaaatatgccctcctgtcatcttc

SEQ ID NO: 140589 - DNA, 30 bp, Artificial Sequence
  Synthetic oligonucleotide
ttccgaagaggtatcggtcctgctatcttc

SEQ ID NO: 140590 - DNA, 30 bp, Artificial Sequence
  Synthetic oligonucleotide
ggctaaggcgtggggcgctaacgtatcttc

SEQ ID NO: 140591 - DNA, 30 bp, Artificial Sequence
  Synthetic oligonucleotide
aaacacaagtcattaattggcctactcttc

SEQ ID NO: 140592 - DNA, 30 bp, Artificial Sequence
  Synthetic oligonucleotide
agagagtgtagccagggcataaatctcttc

SEQ ID NO: 140593 - DNA, 30 bp, Artificial Sequence
  Synthetic oligonucleotide
actcgccacccgtctactcctgcagtcttc

SEQ ID NO: 140594 - DNA, 30 bp, Artificial Sequence
  Synthetic oligonucleotide
taccgcgatttctctgagtttgtagtcttc

SEQ ID NO: 140595 - DNA, 30 bp, Artificial Sequence
  Synthetic oligonucleotide
ctccaaggacgcaagtcgtgcgcattcttc

SEQ ID NO: 140596 - DNA, 30 bp, Artificial Sequence
  Synthetic oligonucleotide
tcacgacaagccttggacaaccgcaagttc

SEQ ID NO: 140597 - DNA, 30 bp, Artificial Sequence
  Synthetic oligonucleotide
gcgctagatggtgcgcatcgaccgaagttc

SEQ ID NO: 140598 - DNA, 30 bp, Artificial Sequence
  Synthetic oligonucleotide
agggatcgtctggaaccgtatgtgaagttc

SEQ ID NO: 140599 - DNA, 30 bp, Artificial Sequence
  Synthetic oligonucleotide
cggaataagcagacggttagcgaacagttc

SEQ ID NO: 140600 - DNA, 30 bp, Artificial Sequence
  Synthetic oligonucleotide
tgccaaaataacagcatactgatacagttc

SEQ ID NO: 140601 - DNA, 30 bp, Artificial Sequence
  Synthetic oligonucleotide
ctcgtaagggaagtctgagttccgcagttc

SEQ ID NO: 140602 - DNA, 30 bp, Artificial Sequence
  Synthetic oligonucleotide
tgcgaactggggcaagggtccgcgcagttc

SEQ ID NO: 140603 - DNA, 30 bp, Artificial Sequence
  Synthetic oligonucleotide
cgacaaacagcccatagaaagtcgcagttc

SEQ ID NO: 140604 - DNA, 30 bp, Artificial Sequence
  Synthetic oligonucleotide
cgacatcagttatcgcatgcccatcagttc

SEQ ID NO: 140605 - DNA, 30 bp, Artificial Sequence
  Synthetic oligonucleotide
tcaaccaattcgtatagccagggtcagttc

SEQ ID NO: 140606 - DNA, 30 bp, Artificial Sequence
  Synthetic oligonucleotide
tgaacgtaaacaaaggctagactagagttc

SEQ ID NO: 140607 - DNA, 30 bp, Artificial Sequence
  Synthetic oligonucleotide
tcgcgtcgccgtaacagtaggcttgagttc

SEQ ID NO: 140608 - DNA, 30 bp, Artificial Sequence
  Synthetic oligonucleotide
acgagtgtggtcaaggcagggtgctagttc

SEQ ID NO: 140609 - DNA, 30 bp, Artificial Sequence
  Synthetic oligonucleotide
atggggtctgaacgaaaatcatacacgttc

SEQ ID NO: 140610 - DNA, 30 bp, Artificial Sequence
  Synthetic oligonucleotide
ggacgttgcacgtcggacaatttgacgttc

SEQ ID NO: 140611 - DNA, 31 bp, Artificial Sequence
  Synthetic oligonucleotide
ttctagaggtaacaaatgtagattgccgttc

SEQ ID NO: 140612 - DNA, 30 bp, Artificial Sequence
  Synthetic oligonucleotide
ccttataggtgatgctacggtcacgcgttc

SEQ ID NO: 140613 - DNA, 30 bp, Artificial Sequence
  Synthetic oligonucleotide
caggtattatgtccaaaaaatgttgcgttc

SEQ ID NO: 140614 - DNA, 30 bp, Artificial Sequence
  Synthetic oligonucleotide
ctatcgaccctaagatctttcatttcgttc

SEQ ID NO: 140615 - DNA, 30 bp, Artificial Sequence
  Synthetic oligonucleotide
atctggggagggcgatatctcgggcggttc

SEQ ID NO: 140616 - DNA, 30 bp, Artificial Sequence
  Synthetic oligonucleotide
ggcgtcgagtattaaaccacatctcggttc

SEQ ID NO: 140617 - DNA, 30 bp, Artificial Sequence
  Synthetic oligonucleotide
gactgtccacttcctcgatagaccgggttc

SEQ ID NO: 140618 - DNA, 30 bp, Artificial Sequence
  Synthetic oligonucleotide
taaacataagggccaaccaacgactggttc

SEQ ID NO: 140619 - DNA, 30 bp, Artificial Sequence
  Synthetic oligonucleotide
gacatgtgtggcaacaactatacctggttc

SEQ ID NO: 140620 - DNA, 30 bp, Artificial Sequence
  Synthetic oligonucleotide
cgtggatacgcaaggtccgtcaattggttc

SEQ ID NO: 140621 - DNA, 30 bp, Artificial Sequence
  Synthetic oligonucleotide
acctaaccatgaagacaaagcggcatgttc

SEQ ID NO: 140622 - DNA, 30 bp, Artificial Sequence
  Synthetic oligonucleotide
tactccagagggcaagatgcaattatgttc

SEQ ID NO: 140623 - DNA, 30 bp, Artificial Sequence
  Synthetic oligonucleotide
aatacaagaaattaggaccgcgtcgtgttc

SEQ ID NO: 140624 - DNA, 31 bp, Artificial Sequence
  Synthetic oligonucleotide
aggactattggttgcctaaacgcgattgttc

SEQ ID NO: 140625 - DNA, 30 bp, Artificial Sequence
  Synthetic oligonucleotide
taggattgtctagtagaataccgcttgttc

SEQ ID NO: 140626 - DNA, 30 bp, Artificial Sequence
  Synthetic oligonucleotide
accggggggccagtctcgttgtgcttgttc

SEQ ID NO: 140627 - DNA, 30 bp, Artificial Sequence
  Synthetic oligonucleotide
cagattaattcagttgtagaacagttgttc

SEQ ID NO: 140628 - DNA, 30 bp, Artificial Sequence
  Synthetic oligonucleotide
atgacaaaggttcgcaccgggggaaatttc

SEQ ID NO: 140629 - DNA, 30 bp, Artificial Sequence
  Synthetic oligonucleotide
gctgcgtcgtactaaccagcaggcaatttc

SEQ ID NO: 140630 - DNA, 30 bp, Artificial Sequence
  Synthetic oligonucleotide
tgcgcaagtccggcgacctaggagaatttc

SEQ ID NO: 140631 - DNA, 30 bp, Artificial Sequence
  Synthetic oligonucleotide
acagatagcaaagagccgccctaacatttc

SEQ ID NO: 140632 - DNA, 30 bp, Artificial Sequence
  Synthetic oligonucleotide
tatcgcaaccctgtcgagcaacgggatttc

SEQ ID NO: 140633 - DNA, 30 bp, Artificial Sequence
  Synthetic oligonucleotide
catctgaacggcaatggtactttggatttc

SEQ ID NO: 140634 - DNA, 31 bp, Artificial Sequence
  Synthetic oligonucleotide
caagcctgtaacaaagtgtgaacgtcctttc

SEQ ID NO: 140635 - DNA, 30 bp, Artificial Sequence
  Synthetic oligonucleotide
cggccgagcttacgttaagggtacgctttc

SEQ ID NO: 140636 - DNA, 30 bp, Artificial Sequence
  Synthetic oligonucleotide
gtacgcgtacttggagatagtcatgctttc

SEQ ID NO: 140637 - DNA, 30 bp, Artificial Sequence
  Synthetic oligonucleotide
tcgggtcgggtaactgtgaaaaaatctttc

SEQ ID NO: 140638 - DNA, 30 bp, Artificial Sequence
  Synthetic oligonucleotide
ccgtttgaaggtatcaaaaagaactctttc

SEQ ID NO: 140639 - DNA, 30 bp, Artificial Sequence
  Synthetic oligonucleotide
gttagttgcgacaacttggattcgtctttc

SEQ ID NO: 140640 - DNA, 30 bp, Artificial Sequence
  Synthetic oligonucleotide
cggacatgtatgggaatcgcccaaagtttc

SEQ ID NO: 140641 - DNA, 30 bp, Artificial Sequence
  Synthetic oligonucleotide
tggcggaccaagaggtgtaaagaaagtttc

SEQ ID NO: 140642 - DNA, 30 bp, Artificial Sequence
  Synthetic oligonucleotide
ttggtgaggaaacgctaatccgggagtttc

SEQ ID NO: 140643 - DNA, 30 bp, Artificial Sequence
  Synthetic oligonucleotide
atgttaagggagggcgcattcttgagtttc

SEQ ID NO: 140644 - DNA, 30 bp, Artificial Sequence
  Synthetic oligonucleotide
cgtccgtggcccaggtcaggccaacgtttc

SEQ ID NO: 140645 - DNA, 30 bp, Artificial Sequence
  Synthetic oligonucleotide
aaggacttagccctagacattccacgtttc

SEQ ID NO: 140646 - DNA, 30 bp, Artificial Sequence
  Synthetic oligonucleotide
gagggcaaacttgcttgtggttttcgtttc

SEQ ID NO: 140647 - DNA, 30 bp, Artificial Sequence
  Synthetic oligonucleotide
aacgattgttgtggttaacggatgggtttc

SEQ ID NO: 140648 - DNA, 30 bp, Artificial Sequence
  Synthetic oligonucleotide
taaggggtggatcgtctctataatggtttc

SEQ ID NO: 140649 - DNA, 30 bp, Artificial Sequence
  Synthetic oligonucleotide
aagctagtgtaggcattagcggctggtttc

SEQ ID NO: 140650 - DNA, 30 bp, Artificial Sequence
  Synthetic oligonucleotide
acctgatcggtaaggaggaactacgttttc

SEQ ID NO: 140651 - DNA, 30 bp, Artificial Sequence
  Synthetic oligonucleotide
cgaatctaaacagcacataggaccgttttc

SEQ ID NO: 140652 - DNA, 30 bp, Artificial Sequence
  Synthetic oligonucleotide
tgcataggtggctcattctgccgatttttc

SEQ ID NO: 140653 - DNA, 30 bp, Artificial Sequence
  Synthetic oligonucleotide
tacaccacactaggcagggccgggtttttc

SEQ ID NO: 140654 - DNA, 30 bp, Artificial Sequence
  Synthetic oligonucleotide
actgagtaatctttgagcaagcagaaaaag

SEQ ID NO: 140655 - DNA, 30 bp, Artificial Sequence
  Synthetic oligonucleotide
caagatcttcattgtttgaagcaacaaaag

SEQ ID NO: 140656 - DNA, 30 bp, Artificial Sequence
  Synthetic oligonucleotide
gcactatccacaaacgcgttgcaacaaaag

SEQ ID NO: 140657 - DNA, 30 bp, Artificial Sequence
  Synthetic oligonucleotide
ggtgatagaaccctatcgagatgacaaaag

SEQ ID NO: 140658 - DNA, 30 bp, Artificial Sequence
  Synthetic oligonucleotide
ggcacatcattccaatggttaagccaaaag

SEQ ID NO: 140659 - DNA, 30 bp, Artificial Sequence
  Synthetic oligonucleotide
agacattggacctgcgtatttctccaaaag

SEQ ID NO: 140660 - DNA, 30 bp, Artificial Sequence
  Synthetic oligonucleotide
cacgatcgggtagccactttgacagaaaag

SEQ ID NO: 140661 - DNA, 30 bp, Artificial Sequence
  Synthetic oligonucleotide
atgtaacgaataaaatagagttcagaaaag

SEQ ID NO: 140662 - DNA, 30 bp, Artificial Sequence
  Synthetic oligonucleotide
ttagcgacatctgtcgcggtccacgaaaag

SEQ ID NO: 140663 - DNA, 30 bp, Artificial Sequence
  Synthetic oligonucleotide
gactactgagaatcactgggtaccgaaaag

SEQ ID NO: 140664 - DNA, 30 bp, Artificial Sequence
  Synthetic oligonucleotide
gaacaataagttctcacgacaaaataaaag

SEQ ID NO: 140665 - DNA, 30 bp, Artificial Sequence
  Synthetic oligonucleotide
aaccacccgagtcacagcaggtaataaaag

SEQ ID NO: 140666 - DNA, 30 bp, Artificial Sequence
  Synthetic oligonucleotide
gggcttacacgcgtgactccgaagtaaaag

SEQ ID NO: 140667 - DNA, 30 bp, Artificial Sequence
  Synthetic oligonucleotide
gtcggccaagcgaccccctcagcgtaaaag

SEQ ID NO: 140668 - DNA, 30 bp, Artificial Sequence
  Synthetic oligonucleotide
ataatagtccagagcagatcaaggtaaaag

SEQ ID NO: 140669 - DNA, 29 bp, Artificial Sequence
  Synthetic oligonucleotide
taccgagattgtttaaaggaaggtaaaag

SEQ ID NO: 140670 - DNA, 30 bp, Artificial Sequence
  Synthetic oligonucleotide
tatttagccacaaatcgtcaatcaacaaag

SEQ ID NO: 140671 - DNA, 30 bp, Artificial Sequence
  Synthetic oligonucleotide
ggtggacgcaaagaccctatcagaacaaag

SEQ ID NO: 140672 - DNA, 30 bp, Artificial Sequence
  Synthetic oligonucleotide
cactagatgtggatactgctgcccacaaag

SEQ ID NO: 140673 - DNA, 30 bp, Artificial Sequence
  Synthetic oligonucleotide
ggtggatcctcagatcgaaaagaaccaaag

SEQ ID NO: 140674 - DNA, 30 bp, Artificial Sequence
  Synthetic oligonucleotide
cgtttatcgagtagcggtgtgatcccaaag

SEQ ID NO: 140675 - DNA, 31 bp, Artificial Sequence
  Synthetic oligonucleotide
atgtaaaaaattcgttgctaaaacgccaaag

SEQ ID NO: 140676 - DNA, 30 bp, Artificial Sequence
  Synthetic oligonucleotide
tcaccgatgcgtagtataaacattccaaag

SEQ ID NO: 140677 - DNA, 30 bp, Artificial Sequence
  Synthetic oligonucleotide
ccgaaccaatgctataattacgatgcaaag

SEQ ID NO: 140678 - DNA, 30 bp, Artificial Sequence
  Synthetic oligonucleotide
caggccgtggagtgcattgatagtgcaaag

SEQ ID NO: 140679 - DNA, 30 bp, Artificial Sequence
  Synthetic oligonucleotide
ccctaggggacctcaacaagttttgcaaag

SEQ ID NO: 140680 - DNA, 30 bp, Artificial Sequence
  Synthetic oligonucleotide
tctaatggtgttagcgcattaatctcaaag

SEQ ID NO: 140681 - DNA, 30 bp, Artificial Sequence
  Synthetic oligonucleotide
ttcagagtgcggggcgatgtcttgtcaaag

SEQ ID NO: 140682 - DNA, 30 bp, Artificial Sequence
  Synthetic oligonucleotide
taggctacttgtctaacccggtaaagaaag

SEQ ID NO: 140683 - DNA, 30 bp, Artificial Sequence
  Synthetic oligonucleotide
ccagagtcactttgctgttcgccaagaaag

SEQ ID NO: 140684 - DNA, 30 bp, Artificial Sequence
  Synthetic oligonucleotide
agacagacgacggtaggggcgtccagaaag

SEQ ID NO: 140685 - DNA, 30 bp, Artificial Sequence
  Synthetic oligonucleotide
tgggctcaatgtaaatggggcggcagaaag

SEQ ID NO: 140686 - DNA, 30 bp, Artificial Sequence
  Synthetic oligonucleotide
tataatcagatcagtgtgaaagagagaaag

SEQ ID NO: 140687 - DNA, 30 bp, Artificial Sequence
  Synthetic oligonucleotide
gtagtaagttgcgccagtttggagagaaag

SEQ ID NO: 140688 - DNA, 30 bp, Artificial Sequence
  Synthetic oligonucleotide
atgcacacaagacctccggtttcgagaaag

SEQ ID NO: 140689 - DNA, 30 bp, Artificial Sequence
  Synthetic oligonucleotide
gaaagtagaatgcttccctgctttagaaag

SEQ ID NO: 140690 - DNA, 30 bp, Artificial Sequence
  Synthetic oligonucleotide
aggaacatgcgatagaatctgtatcgaaag

SEQ ID NO: 140691 - DNA, 30 bp, Artificial Sequence
  Synthetic oligonucleotide
gcgcgccaccgtgcggttaatactcgaaag

SEQ ID NO: 140692 - DNA, 30 bp, Artificial Sequence
  Synthetic oligonucleotide
atagactgtctctgatccccggctcgaaag

SEQ ID NO: 140693 - DNA, 30 bp, Artificial Sequence
  Synthetic oligonucleotide
tgtttgtaacaccaggcccagagcggaaag

SEQ ID NO: 140694 - DNA, 30 bp, Artificial Sequence
  Synthetic oligonucleotide
tgtgatttcccatatatgtggggcggaaag

SEQ ID NO: 140695 - DNA, 30 bp, Artificial Sequence
  Synthetic oligonucleotide
ccaagacaccaaagtgttcactagggaaag

SEQ ID NO: 140696 - DNA, 30 bp, Artificial Sequence
  Synthetic oligonucleotide
gccaccgcgaccaggatctgacctggaaag

SEQ ID NO: 140697 - DNA, 30 bp, Artificial Sequence
  Synthetic oligonucleotide
ataaaacacgtactaagtgggtgtggaaag

SEQ ID NO: 140698 - DNA, 30 bp, Artificial Sequence
  Synthetic oligonucleotide
taatccaatgggcatgataggggatgaaag

SEQ ID NO: 140699 - DNA, 30 bp, Artificial Sequence
  Synthetic oligonucleotide
caaggggcggcactgcattttgtatgaaag

SEQ ID NO: 140700 - DNA, 30 bp, Artificial Sequence
  Synthetic oligonucleotide
caatcagtcatgtctagtagtttatgaaag

SEQ ID NO: 140701 - DNA, 30 bp, Artificial Sequence
  Synthetic oligonucleotide
atggtgagcaatgaattgatactctgaaag

SEQ ID NO: 140702 - DNA, 30 bp, Artificial Sequence
  Synthetic oligonucleotide
gcttagtgcggtctaaatacccggtgaaag

SEQ ID NO: 140703 - DNA, 30 bp, Artificial Sequence
  Synthetic oligonucleotide
tcgccaatatgagccgcgacaagaataaag

SEQ ID NO: 140704 - DNA, 30 bp, Artificial Sequence
  Synthetic oligonucleotide
agttaatgtagctcttcggaaataataaag

SEQ ID NO: 140705 - DNA, 30 bp, Artificial Sequence
  Synthetic oligonucleotide
cgataatgtccaaagacggtatgcataaag

SEQ ID NO: 140706 - DNA, 30 bp, Artificial Sequence
  Synthetic oligonucleotide
cgtactcttagaacaacagctcggataaag

SEQ ID NO: 140707 - DNA, 30 bp, Artificial Sequence
  Synthetic oligonucleotide
tagtacaataccccctagtgaaatataaag

SEQ ID NO: 140708 - DNA, 30 bp, Artificial Sequence
  Synthetic oligonucleotide
actcatatagctacacgcctcaatataaag

SEQ ID NO: 140709 - DNA, 30 bp, Artificial Sequence
  Synthetic oligonucleotide
agtagcatggcgtatgcaaaaacactaaag

SEQ ID NO: 140710 - DNA, 30 bp, Artificial Sequence
  Synthetic oligonucleotide
ttcaataattgtgaaatactatgactaaag

SEQ ID NO: 140711 - DNA, 30 bp, Artificial Sequence
  Synthetic oligonucleotide
tcatacggcaagcaattgcgaaccctaaag

SEQ ID NO: 140712 - DNA, 30 bp, Artificial Sequence
  Synthetic oligonucleotide
ggatgacaccagaagtgagataatctaaag

SEQ ID NO: 140713 - DNA, 30 bp, Artificial Sequence
  Synthetic oligonucleotide
taagtagggtagggtattccaattctaaag

SEQ ID NO: 140714 - DNA, 31 bp, Artificial Sequence
  Synthetic oligonucleotide
ataaaggatgttttagctgttcgttctaaag

SEQ ID NO: 140715 - DNA, 30 bp, Artificial Sequence
  Synthetic oligonucleotide
aataggtaagaaaactccccggcagtaaag

SEQ ID NO: 140716 - DNA, 30 bp, Artificial Sequence
  Synthetic oligonucleotide
gggcgtaatttattcctcagtaacgtaaag

SEQ ID NO: 140717 - DNA, 30 bp, Artificial Sequence
  Synthetic oligonucleotide
aaggcagtgtggaacattgggtccgtaaag

SEQ ID NO: 140718 - DNA, 30 bp, Artificial Sequence
  Synthetic oligonucleotide
tgtaagaaccacactataacgaaggtaaag

SEQ ID NO: 140719 - DNA, 30 bp, Artificial Sequence
  Synthetic oligonucleotide
cgccaggtcgctgcgtggaggacggtaaag

SEQ ID NO: 140720 - DNA, 30 bp, Artificial Sequence
  Synthetic oligonucleotide
acccgtattcacactcattgtccggtaaag

SEQ ID NO: 140721 - DNA, 30 bp, Artificial Sequence
  Synthetic oligonucleotide
taagagctaatttaggacgttatggtaaag

SEQ ID NO: 140722 - DNA, 30 bp, Artificial Sequence
  Synthetic oligonucleotide
gacaaaaattcggggaagaccttggtaaag

SEQ ID NO: 140723 - DNA, 30 bp, Artificial Sequence
  Synthetic oligonucleotide
gggtttctacgcgtaatctgatctgtaaag

SEQ ID NO: 140724 - DNA, 30 bp, Artificial Sequence
  Synthetic oligonucleotide
agcgaacaaagcagagtgagtttattaaag

SEQ ID NO: 140725 - DNA, 30 bp, Artificial Sequence
  Synthetic oligonucleotide
acgtcgcggtctgtttaagaaccgttaaag

SEQ ID NO: 140726 - DNA, 30 bp, Artificial Sequence
  Synthetic oligonucleotide
cctgcaaaaggtgatacaagccatttaaag

SEQ ID NO: 140727 - DNA, 30 bp, Artificial Sequence
  Synthetic oligonucleotide
gctgtgacacaggattcggagtatttaaag

SEQ ID NO: 140728 - DNA, 30 bp, Artificial Sequence
  Synthetic oligonucleotide
cgtgcgatcttatccttaaaaagtaacaag

SEQ ID NO: 140729 - DNA, 30 bp, Artificial Sequence
  Synthetic oligonucleotide
tcgactcaactcattagcattgtccacaag

SEQ ID NO: 140730 - DNA, 30 bp, Artificial Sequence
  Synthetic oligonucleotide
aagagggtccacgagtagcgcacgcacaag

SEQ ID NO: 140731 - DNA, 30 bp, Artificial Sequence
  Synthetic oligonucleotide
tacgaggctaacagctgtcagagcgacaag

SEQ ID NO: 140732 - DNA, 30 bp, Artificial Sequence
  Synthetic oligonucleotide
ccctgtcgcaacatggggaactaggacaag

SEQ ID NO: 140733 - DNA, 30 bp, Artificial Sequence
  Synthetic oligonucleotide
ttcagataggtcacgggccaaatggacaag

SEQ ID NO: 140734 - DNA, 30 bp, Artificial Sequence
  Synthetic oligonucleotide
ataaaccccctaaccggtcgacatgacaag

SEQ ID NO: 140735 - DNA, 30 bp, Artificial Sequence
  Synthetic oligonucleotide
caccgcaagtaccttccgtaccctgacaag

SEQ ID NO: 140736 - DNA, 30 bp, Artificial Sequence
  Synthetic oligonucleotide
gcgtggtgtctgataggagacagtgacaag

SEQ ID NO: 140737 - DNA, 30 bp, Artificial Sequence
  Synthetic oligonucleotide
ttagcgaggacctgggtatctgttgacaag

SEQ ID NO: 140738 - DNA, 30 bp, Artificial Sequence
  Synthetic oligonucleotide
gtagggcgacatcgcagtatgtactacaag

SEQ ID NO: 140739 - DNA, 30 bp, Artificial Sequence
  Synthetic oligonucleotide
tactattcgcgagtggatggtgtcaccaag

SEQ ID NO: 140740 - DNA, 30 bp, Artificial Sequence
  Synthetic oligonucleotide
tttcgtaagacgagcctaggagggaccaag

SEQ ID NO: 140741 - DNA, 30 bp, Artificial Sequence
  Synthetic oligonucleotide
tcagatgttaaaatcgccaggctgaccaag

SEQ ID NO: 140742 - DNA, 30 bp, Artificial Sequence
  Synthetic oligonucleotide
gacgtagttctcataatgggtacgcccaag

SEQ ID NO: 140743 - DNA, 30 bp, Artificial Sequence
  Synthetic oligonucleotide
cattgaatagaggtacatatttatcccaag

SEQ ID NO: 140744 - DNA, 30 bp, Artificial Sequence
  Synthetic oligonucleotide
tctagtattcgaatatcgacttctcccaag

SEQ ID NO: 140745 - DNA, 30 bp, Artificial Sequence
  Synthetic oligonucleotide
tctcttatagtatggcaataacgtcccaag

SEQ ID NO: 140746 - DNA, 30 bp, Artificial Sequence
  Synthetic oligonucleotide
tgtgcagcatgtcgcagatgagttcccaag

SEQ ID NO: 140747 - DNA, 30 bp, Artificial Sequence
  Synthetic oligonucleotide
aaggtgttttcaatatcttcaggcgccaag

SEQ ID NO: 140748 - DNA, 30 bp, Artificial Sequence
  Synthetic oligonucleotide
ctgcattttacggtaggggcataggccaag

SEQ ID NO: 140749 - DNA, 30 bp, Artificial Sequence
  Synthetic oligonucleotide
agatagttatgctgtgacctcctggccaag

SEQ ID NO: 140750 - DNA, 30 bp, Artificial Sequence
  Synthetic oligonucleotide
catggattgactcagggcggtaagtccaag

SEQ ID NO: 140751 - DNA, 30 bp, Artificial Sequence
  Synthetic oligonucleotide
gtaccgacgtctctattgaatggtagcaag

SEQ ID NO: 140752 - DNA, 30 bp, Artificial Sequence
  Synthetic oligonucleotide
ggaccctaaacccggaataatgagcgcaag

SEQ ID NO: 140753 - DNA, 30 bp, Artificial Sequence
  Synthetic oligonucleotide
acaccgacctagccagaataccgtcgcaag

SEQ ID NO: 140754 - DNA, 30 bp, Artificial Sequence
  Synthetic oligonucleotide
aggtgtccggcattcataaactgtcgcaag

SEQ ID NO: 140755 - DNA, 30 bp, Artificial Sequence
  Synthetic oligonucleotide
ttactctgagaagatttctagtaaggcaag

SEQ ID NO: 140756 - DNA, 30 bp, Artificial Sequence
  Synthetic oligonucleotide
gccgttgactataacctgacaataggcaag

SEQ ID NO: 140757 - DNA, 30 bp, Artificial Sequence
  Synthetic oligonucleotide
catatacccgtaacacgtaatttaggcaag

SEQ ID NO: 140758 - DNA, 30 bp, Artificial Sequence
  Synthetic oligonucleotide
gagcctgtcaaaccaatcaccgacggcaag

SEQ ID NO: 140759 - DNA, 30 bp, Artificial Sequence
  Synthetic oligonucleotide
tcataaacggagcccatttacgggggcaag

SEQ ID NO: 140760 - DNA, 30 bp, Artificial Sequence
  Synthetic oligonucleotide
catatcttgagataatgcacatggggcaag

SEQ ID NO: 140761 - DNA, 30 bp, Artificial Sequence
  Synthetic oligonucleotide
ccacatggcccatacgttgctggtggcaag

SEQ ID NO: 140762 - DNA, 30 bp, Artificial Sequence
  Synthetic oligonucleotide
tacggtcctccttattactgtaaatgcaag

SEQ ID NO: 140763 - DNA, 30 bp, Artificial Sequence
  Synthetic oligonucleotide
gatcaaactgtcagactaatttagtgcaag

SEQ ID NO: 140764 - DNA, 30 bp, Artificial Sequence
  Synthetic oligonucleotide
acttgccttcccacttctaaaacgtgcaag

SEQ ID NO: 140765 - DNA, 30 bp, Artificial Sequence
  Synthetic oligonucleotide
ccaagtattatccctcgtgagttgtgcaag

SEQ ID NO: 140766 - DNA, 30 bp, Artificial Sequence
  Synthetic oligonucleotide
cgtacggacgttggccggtctggcatcaag

SEQ ID NO: 140767 - DNA, 30 bp, Artificial Sequence
  Synthetic oligonucleotide
gcgcgctcccagtgaaagtgctgcatcaag

SEQ ID NO: 140768 - DNA, 30 bp, Artificial Sequence
  Synthetic oligonucleotide
cagtaccatgggacttatgaacagatcaag

SEQ ID NO: 140769 - DNA, 30 bp, Artificial Sequence
  Synthetic oligonucleotide
gcctagccgtgactcagaagcttgatcaag

SEQ ID NO: 140770 - DNA, 30 bp, Artificial Sequence
  Synthetic oligonucleotide
cgagctttttactagggtttagatatcaag

SEQ ID NO: 140771 - DNA, 30 bp, Artificial Sequence
  Synthetic oligonucleotide
gctacaccctcggctcgatggtcactcaag

SEQ ID NO: 140772 - DNA, 30 bp, Artificial Sequence
  Synthetic oligonucleotide
atacctgatctaggtgtatttagactcaag

SEQ ID NO: 140773 - DNA, 30 bp, Artificial Sequence
  Synthetic oligonucleotide
aatgcaaaacaaaggcggttaaacctcaag

SEQ ID NO: 140774 - DNA, 30 bp, Artificial Sequence
  Synthetic oligonucleotide
actctaccccctacgtcccggaacctcaag

SEQ ID NO: 140775 - DNA, 29 bp, Artificial Sequence
  Synthetic oligonucleotide
ccgggcgttaaccataaaatccgctcaag

SEQ ID NO: 140776 - DNA, 30 bp, Artificial Sequence
  Synthetic oligonucleotide
tcatcgccttcgcaatccaagtaagtcaag

SEQ ID NO: 140777 - DNA, 30 bp, Artificial Sequence
  Synthetic oligonucleotide
cacagggaattcccagttgagagagtcaag

SEQ ID NO: 140778 - DNA, 31 bp, Artificial Sequence
  Synthetic oligonucleotide
gtcatatgcccgtacgttggaagaggtcaag

SEQ ID NO: 140779 - DNA, 30 bp, Artificial Sequence
  Synthetic oligonucleotide
gtagggctcacgtaggacctctatgtcaag

SEQ ID NO: 140780 - DNA, 30 bp, Artificial Sequence
  Synthetic oligonucleotide
gtgggacagtggctgacgtttactgtcaag

SEQ ID NO: 140781 - DNA, 30 bp, Artificial Sequence
  Synthetic oligonucleotide
cgtactaccttccacccgcactgtgtcaag

SEQ ID NO: 140782 - DNA, 30 bp, Artificial Sequence
  Synthetic oligonucleotide
ggcgtgcacaatagttgggactagttcaag

SEQ ID NO: 140783 - DNA, 30 bp, Artificial Sequence
  Synthetic oligonucleotide
acccgtggagctaatttgtaagcaaagaag

SEQ ID NO: 140784 - DNA, 30 bp, Artificial Sequence
  Synthetic oligonucleotide
cttaaagtacgcccgggaccatctaagaag

SEQ ID NO: 140785 - DNA, 30 bp, Artificial Sequence
  Synthetic oligonucleotide
tgctggtaagcatgctgctcggcacagaag

SEQ ID NO: 140786 - DNA, 30 bp, Artificial Sequence
  Synthetic oligonucleotide
cttagtatagacaggtcagagcgccagaag

SEQ ID NO: 140787 - DNA, 30 bp, Artificial Sequence
  Synthetic oligonucleotide
cgggaaatgatgtatgcatctccgcagaag

SEQ ID NO: 140788 - DNA, 30 bp, Artificial Sequence
  Synthetic oligonucleotide
actgggccgaatgaatctattaggcagaag

SEQ ID NO: 140789 - DNA, 30 bp, Artificial Sequence
  Synthetic oligonucleotide
taaaatcatcagttgttttgcaatcagaag

SEQ ID NO: 140790 - DNA, 30 bp, Artificial Sequence
  Synthetic oligonucleotide
aacttaggatacatgcttattcatcagaag

SEQ ID NO: 140791 - DNA, 30 bp, Artificial Sequence
  Synthetic oligonucleotide
gcttgcgcctgcaatacagtgtaagagaag

SEQ ID NO: 140792 - DNA, 30 bp, Artificial Sequence
  Synthetic oligonucleotide
ccacgtggtctacgaaggttctcggagaag

SEQ ID NO: 140793 - DNA, 30 bp, Artificial Sequence
  Synthetic oligonucleotide
ccccggtaatgattagtgaagagtgagaag

SEQ ID NO: 140794 - DNA, 30 bp, Artificial Sequence
  Synthetic oligonucleotide
taagtagaatgtgggctgcgctaatagaag

SEQ ID NO: 140795 - DNA, 30 bp, Artificial Sequence
  Synthetic oligonucleotide
tgttccctgcagacattaggaggctagaag

SEQ ID NO: 140796 - DNA, 30 bp, Artificial Sequence
  Synthetic oligonucleotide
tgcggggtttggcttgagtctaggtagaag

SEQ ID NO: 140797 - DNA, 30 bp, Artificial Sequence
  Synthetic oligonucleotide
ttagagccataacggtcacgggattagaag

SEQ ID NO: 140798 - DNA, 30 bp, Artificial Sequence
  Synthetic oligonucleotide
ttgcgcatgggtctgtatcactgttagaag

SEQ ID NO: 140799 - DNA, 30 bp, Artificial Sequence
  Synthetic oligonucleotide
ttgcgcataaaatacgaggggccgacgaag

SEQ ID NO: 140800 - DNA, 30 bp, Artificial Sequence
  Synthetic oligonucleotide
tcaaggaacttttaatgattcttgacgaag

SEQ ID NO: 140801 - DNA, 30 bp, Artificial Sequence
  Synthetic oligonucleotide
tgtaaacggggtgtgcggctccatacgaag

SEQ ID NO: 140802 - DNA, 30 bp, Artificial Sequence
  Synthetic oligonucleotide
gcagggccaaggtcaaattgacttacgaag

SEQ ID NO: 140803 - DNA, 30 bp, Artificial Sequence
  Synthetic oligonucleotide
atgttgtaatagaaaacaaactccccgaag

SEQ ID NO: 140804 - DNA, 30 bp, Artificial Sequence
  Synthetic oligonucleotide
tgcaacaataaatgatgaatcgttccgaag

SEQ ID NO: 140805 - DNA, 30 bp, Artificial Sequence
  Synthetic oligonucleotide
gcgaaccacgctaatgcgttgttagcgaag

SEQ ID NO: 140806 - DNA, 30 bp, Artificial Sequence
  Synthetic oligonucleotide
agtaggcgcttaccaacactgggcaggaag

SEQ ID NO: 140807 - DNA, 30 bp, Artificial Sequence
  Synthetic oligonucleotide
tctatagcgagggaataggggatcaggaag

SEQ ID NO: 140808 - DNA, 30 bp, Artificial Sequence
  Synthetic oligonucleotide
gatatatctcgccagtaaacgtagaggaag

SEQ ID NO: 140809 - DNA, 30 bp, Artificial Sequence
  Synthetic oligonucleotide
atccaggataagcgtcacggtgataggaag

SEQ ID NO: 140810 - DNA, 30 bp, Artificial Sequence
  Synthetic oligonucleotide
tcgtttagcgatcggctggtacaccggaag

SEQ ID NO: 140811 - DNA, 30 bp, Artificial Sequence
  Synthetic oligonucleotide
aatgaaagcattatacggactcttcggaag

SEQ ID NO: 140812 - DNA, 30 bp, Artificial Sequence
  Synthetic oligonucleotide
acaaacgactgcgtgaatgcgaaagggaag

SEQ ID NO: 140813 - DNA, 30 bp, Artificial Sequence
  Synthetic oligonucleotide
cggtatcgtcggggctgggataaagggaag

SEQ ID NO: 140814 - DNA, 30 bp, Artificial Sequence
  Synthetic oligonucleotide
gcacctggcagaaggcgtagcggagggaag

SEQ ID NO: 140815 - DNA, 30 bp, Artificial Sequence
  Synthetic oligonucleotide
aaaggatcgtggtagcatacttccgggaag

SEQ ID NO: 140816 - DNA, 30 bp, Artificial Sequence
  Synthetic oligonucleotide
atcgcctcgtactagtaatgattcgggaag

SEQ ID NO: 140817 - DNA, 30 bp, Artificial Sequence
  Synthetic oligonucleotide
gtaaggaggtgctggttcggtgaggggaag

SEQ ID NO: 140818 - DNA, 30 bp, Artificial Sequence
  Synthetic oligonucleotide
acggccgttgataaagccgctcgtgggaag

SEQ ID NO: 140819 - DNA, 30 bp, Artificial Sequence
  Synthetic oligonucleotide
tgaagtacgatggcctagggggaatggaag

SEQ ID NO: 140820 - DNA, 30 bp, Artificial Sequence
  Synthetic oligonucleotide
caacggtttgtctccaaaccataatggaag

SEQ ID NO: 140821 - DNA, 30 bp, Artificial Sequence
  Synthetic oligonucleotide
tgtataaaggacagatgcggtccatggaag

SEQ ID NO: 140822 - DNA, 29 bp, Artificial Sequence
  Synthetic oligonucleotide
ggtagctttactttgaggactagtggaag

SEQ ID NO: 140823 - DNA, 30 bp, Artificial Sequence
  Synthetic oligonucleotide
gggccggatgatacacgagggtgttggaag

SEQ ID NO: 140824 - DNA, 30 bp, Artificial Sequence
  Synthetic oligonucleotide
ctcattccgattaaagtcacaatttggaag

SEQ ID NO: 140825 - DNA, 30 bp, Artificial Sequence
  Synthetic oligonucleotide
ggcgttcaggggctcccaccattaatgaag

SEQ ID NO: 140826 - DNA, 30 bp, Artificial Sequence
  Synthetic oligonucleotide
actccactactaatcgtaaggtacatgaag

SEQ ID NO: 140827 - DNA, 30 bp, Artificial Sequence
  Synthetic oligonucleotide
agccgcctcgggattcttaaatgcatgaag

SEQ ID NO: 140828 - DNA, 30 bp, Artificial Sequence
  Synthetic oligonucleotide
catctcaggcgatgatcgatgaggatgaag

SEQ ID NO: 140829 - DNA, 30 bp, Artificial Sequence
  Synthetic oligonucleotide
aggatgcagtgcaacgtgtaagctatgaag

SEQ ID NO: 140830 - DNA, 30 bp, Artificial Sequence
  Synthetic oligonucleotide
gttagggccttgagcaagaccgcactgaag

SEQ ID NO: 140831 - DNA, 30 bp, Artificial Sequence
  Synthetic oligonucleotide
ttgcaaagggattatttctgctgactgaag

SEQ ID NO: 140832 - DNA, 30 bp, Artificial Sequence
  Synthetic oligonucleotide
tataggggggtagtatggatccaattgaag

SEQ ID NO: 140833 - DNA, 30 bp, Artificial Sequence
  Synthetic oligonucleotide
caagaatcgcgcagaaagtagacattgaag

SEQ ID NO: 140834 - DNA, 30 bp, Artificial Sequence
  Synthetic oligonucleotide
gcgtactaaactagaggactcacaaataag

SEQ ID NO: 140835 - DNA, 30 bp, Artificial Sequence
  Synthetic oligonucleotide
cacccatgtgctgcttcagcgagaaataag

SEQ ID NO: 140836 - DNA, 30 bp, Artificial Sequence
  Synthetic oligonucleotide
ctccattatctgcgggaaacgagcaataag

SEQ ID NO: 140837 - DNA, 30 bp, Artificial Sequence
  Synthetic oligonucleotide
acaattgagagtctcggttaaatgaataag

SEQ ID NO: 140838 - DNA, 30 bp, Artificial Sequence
  Synthetic oligonucleotide
aacacaaccagtgctaggctcaagcataag

SEQ ID NO: 140839 - DNA, 30 bp, Artificial Sequence
  Synthetic oligonucleotide
gtgactagtatacacgtgtcaagtcataag

SEQ ID NO: 140840 - DNA, 30 bp, Artificial Sequence
  Synthetic oligonucleotide
tagatgattatgcgtctggataaatataag

SEQ ID NO: 140841 - DNA, 30 bp, Artificial Sequence
  Synthetic oligonucleotide
caagttttagcattcccagaagtgtataag

SEQ ID NO: 140842 - DNA, 30 bp, Artificial Sequence
  Synthetic oligonucleotide
agtaggctaacaaatttgggatattataag

SEQ ID NO: 140843 - DNA, 30 bp, Artificial Sequence
  Synthetic oligonucleotide
atggaatcacgagcgaaacaattttataag

SEQ ID NO: 140844 - DNA, 30 bp, Artificial Sequence
  Synthetic oligonucleotide
tacgaagctctacagaccttggctcctaag

SEQ ID NO: 140845 - DNA, 30 bp, Artificial Sequence
  Synthetic oligonucleotide
tcagcgagcccaagctttaggaaggctaag

SEQ ID NO: 140846 - DNA, 30 bp, Artificial Sequence
  Synthetic oligonucleotide
agactcttttgaccgattgggcctgctaag

SEQ ID NO: 140847 - DNA, 30 bp, Artificial Sequence
  Synthetic oligonucleotide
gaggctgggtttgacgtgatggttgctaag

SEQ ID NO: 140848 - DNA, 30 bp, Artificial Sequence
  Synthetic oligonucleotide
caaccaggtatgcgcggactggcatctaag

SEQ ID NO: 140849 - DNA, 30 bp, Artificial Sequence
  Synthetic oligonucleotide
ttcatcgttgagtgcgatcaccagtctaag

SEQ ID NO: 140850 - DNA, 30 bp, Artificial Sequence
  Synthetic oligonucleotide
aagcgaaggatagcggagtcagagtctaag

SEQ ID NO: 140851 - DNA, 30 bp, Artificial Sequence
  Synthetic oligonucleotide
ccgtgcgacatgtaactagagcattctaag

SEQ ID NO: 140852 - DNA, 30 bp, Artificial Sequence
  Synthetic oligonucleotide
tctgtactacgtgcggttattacttctaag

SEQ ID NO: 140853 - DNA, 30 bp, Artificial Sequence
  Synthetic oligonucleotide
aactaaaaaaattgtgggcgaacaagtaag

SEQ ID NO: 140854 - DNA, 30 bp, Artificial Sequence
  Synthetic oligonucleotide
ttaacgccgcggagtcgcaaaaccagtaag

SEQ ID NO: 140855 - DNA, 30 bp, Artificial Sequence
  Synthetic oligonucleotide
tccttccagccgcctaaaaatcggagtaag

SEQ ID NO: 140856 - DNA, 30 bp, Artificial Sequence
  Synthetic oligonucleotide
gtgccggaggcctcacacattaatagtaag

SEQ ID NO: 140857 - DNA, 30 bp, Artificial Sequence
  Synthetic oligonucleotide
acaacaatagcaatagctaagtctagtaag

SEQ ID NO: 140858 - DNA, 30 bp, Artificial Sequence
  Synthetic oligonucleotide
gcgccttcgagtccggctgactaacgtaag

SEQ ID NO: 140859 - DNA, 30 bp, Artificial Sequence
  Synthetic oligonucleotide
gtgaaaataaccgtgtacagtgtgcgtaag

SEQ ID NO: 140860 - DNA, 30 bp, Artificial Sequence
  Synthetic oligonucleotide
gtcgtgccaacgtaacattgtcatcgtaag

SEQ ID NO: 140861 - DNA, 30 bp, Artificial Sequence
  Synthetic oligonucleotide
atgaagggggcatgggcgtgggttcgtaag

SEQ ID NO: 140862 - DNA, 30 bp, Artificial Sequence
  Synthetic oligonucleotide
ggcgtctggttctaggcatggcagggtaag

SEQ ID NO: 140863 - DNA, 30 bp, Artificial Sequence
  Synthetic oligonucleotide
ggggttcggaagtcatagttggagggtaag

SEQ ID NO: 140864 - DNA, 30 bp, Artificial Sequence
  Synthetic oligonucleotide
gtcggaggccatggtcgcatagggggtaag

SEQ ID NO: 140865 - DNA, 30 bp, Artificial Sequence
  Synthetic oligonucleotide
caaggacactttggtacaatttactgtaag

SEQ ID NO: 140866 - DNA, 30 bp, Artificial Sequence
  Synthetic oligonucleotide
ctcggtttccagtcaaaatctatgtgtaag

SEQ ID NO: 140867 - DNA, 30 bp, Artificial Sequence
  Synthetic oligonucleotide
ccaggccgttaatctgcgttaccaattaag

SEQ ID NO: 140868 - DNA, 30 bp, Artificial Sequence
  Synthetic oligonucleotide
tctgatttgctcaacggggtgggcattaag

SEQ ID NO: 140869 - DNA, 30 bp, Artificial Sequence
  Synthetic oligonucleotide
gccggcaagattgggaagattgtcattaag

SEQ ID NO: 140870 - DNA, 30 bp, Artificial Sequence
  Synthetic oligonucleotide
gtatacggtaaaaatgcacaagagattaag

SEQ ID NO: 140871 - DNA, 30 bp, Artificial Sequence
  Synthetic oligonucleotide
gctctaggtgcaagcaaaattcttattaag

SEQ ID NO: 140872 - DNA, 30 bp, Artificial Sequence
  Synthetic oligonucleotide
tagagtcctgtgcgatgttgaggccttaag

SEQ ID NO: 140873 - DNA, 30 bp, Artificial Sequence
  Synthetic oligonucleotide
gtgcgttcgcttctctagggaaagcttaag

SEQ ID NO: 140874 - DNA, 30 bp, Artificial Sequence
  Synthetic oligonucleotide
agcgaggccgaccccatttgggaagttaag

SEQ ID NO: 140875 - DNA, 30 bp, Artificial Sequence
  Synthetic oligonucleotide
atgtcaagtgtattaggcgtgacagttaag

SEQ ID NO: 140876 - DNA, 30 bp, Artificial Sequence
  Synthetic oligonucleotide
ggcccgggggcgttgcaggagatagttaag

SEQ ID NO: 140877 - DNA, 30 bp, Artificial Sequence
  Synthetic oligonucleotide
tgtgacaggcaactgaagcaggtagttaag

SEQ ID NO: 140878 - DNA, 30 bp, Artificial Sequence
  Synthetic oligonucleotide
gtccctaaatctggagagagtttcgttaag

SEQ ID NO: 140879 - DNA, 30 bp, Artificial Sequence
  Synthetic oligonucleotide
tggagggcgggaggtcaagcacatgttaag

SEQ ID NO: 140880 - DNA, 30 bp, Artificial Sequence
  Synthetic oligonucleotide
acaataccgtcctaaccttatctatttaag

SEQ ID NO: 140881 - DNA, 30 bp, Artificial Sequence
  Synthetic oligonucleotide
actacaggaggtagtacacatttatttaag

SEQ ID NO: 140882 - DNA, 30 bp, Artificial Sequence
  Synthetic oligonucleotide
tttgacttcgctaagctcgaccactttaag

SEQ ID NO: 140883 - DNA, 30 bp, Artificial Sequence
  Synthetic oligonucleotide
caagtcccctgtctctttatccgctttaag

SEQ ID NO: 140884 - DNA, 30 bp, Artificial Sequence
  Synthetic oligonucleotide
gataagagagttgaagatttacagtttaag

SEQ ID NO: 140885 - DNA, 30 bp, Artificial Sequence
  Synthetic oligonucleotide
ccctgcggattgtggtcaaaaatcaaacag

SEQ ID NO: 140886 - DNA, 30 bp, Artificial Sequence
  Synthetic oligonucleotide
tttgccttcgtacaagtggaaacgaaacag

SEQ ID NO: 140887 - DNA, 30 bp, Artificial Sequence
  Synthetic oligonucleotide
cactttaggagaggcaactacatgaaacag

SEQ ID NO: 140888 - DNA, 30 bp, Artificial Sequence
  Synthetic oligonucleotide
gttcggagctcaataagcagacctaaacag

SEQ ID NO: 140889 - DNA, 30 bp, Artificial Sequence
  Synthetic oligonucleotide
tagcatccgggcacacatggtgctaaacag

SEQ ID NO: 140890 - DNA, 30 bp, Artificial Sequence
  Synthetic oligonucleotide
aaaatcgccgtatcaagtagaggtaaacag

SEQ ID NO: 140891 - DNA, 30 bp, Artificial Sequence
  Synthetic oligonucleotide
aacttgaaatatagctagcaaggacaacag

SEQ ID NO: 140892 - DNA, 30 bp, Artificial Sequence
  Synthetic oligonucleotide
gcagcgctagcccatagcccggtccaacag

SEQ ID NO: 140893 - DNA, 30 bp, Artificial Sequence
  Synthetic oligonucleotide
tcaactcggggctgttggtccttgcaacag

SEQ ID NO: 140894 - DNA, 30 bp, Artificial Sequence
  Synthetic oligonucleotide
tccagatccaaaatcaggcttttgcaacag

SEQ ID NO: 140895 - DNA, 30 bp, Artificial Sequence
  Synthetic oligonucleotide
gcgggaatctgttggttcagtggggaacag

SEQ ID NO: 140896 - DNA, 30 bp, Artificial Sequence
  Synthetic oligonucleotide
aaaacagaaggtatcctccattatgaacag

SEQ ID NO: 140897 - DNA, 30 bp, Artificial Sequence
  Synthetic oligonucleotide
tggccatcatactcagtgtcataataacag

SEQ ID NO: 140898 - DNA, 30 bp, Artificial Sequence
  Synthetic oligonucleotide
tgggctgctttcaggaactgataaacacag

SEQ ID NO: 140899 - DNA, 30 bp, Artificial Sequence
  Synthetic oligonucleotide
catagacaggttttaaagatttgaacacag

SEQ ID NO: 140900 - DNA, 30 bp, Artificial Sequence
  Synthetic oligonucleotide
gtacgtcaaaggttatgtgggtacacacag

SEQ ID NO: 140901 - DNA, 30 bp, Artificial Sequence
  Synthetic oligonucleotide
cccgaaagggcatgtccattgggtccacag

SEQ ID NO: 140902 - DNA, 30 bp, Artificial Sequence
  Synthetic oligonucleotide
aacagtatggtttcctgttaagaatcacag

SEQ ID NO: 140903 - DNA, 30 bp, Artificial Sequence
  Synthetic oligonucleotide
tgcaactagctagacgtgtgtgactcacag

SEQ ID NO: 140904 - DNA, 30 bp, Artificial Sequence
  Synthetic oligonucleotide
ctggcgaactactgattgagacgaagacag

SEQ ID NO: 140905 - DNA, 30 bp, Artificial Sequence
  Synthetic oligonucleotide
tggaatccgtcactccaaagtggcagacag

SEQ ID NO: 140906 - DNA, 30 bp, Artificial Sequence
  Synthetic oligonucleotide
aggaaatatgtaaacctccctaagagacag

SEQ ID NO: 140907 - DNA, 30 bp, Artificial Sequence
  Synthetic oligonucleotide
tcactgtttgaggtctggtggctgagacag

SEQ ID NO: 140908 - DNA, 30 bp, Artificial Sequence
  Synthetic oligonucleotide
gtcaattgtgcccgattcgagcatagacag

SEQ ID NO: 140909 - DNA, 30 bp, Artificial Sequence
  Synthetic oligonucleotide
catcacaatcaccaagtttggatacgacag

SEQ ID NO: 140910 - DNA, 30 bp, Artificial Sequence
  Synthetic oligonucleotide
acggttcctacgtgtatgagcaggcgacag

SEQ ID NO: 140911 - DNA, 30 bp, Artificial Sequence
  Synthetic oligonucleotide
tgaccggccatccacgctgggcatcgacag

SEQ ID NO: 140912 - DNA, 30 bp, Artificial Sequence
  Synthetic oligonucleotide
gcagtgggccaaatttggaagtctcgacag

SEQ ID NO: 140913 - DNA, 30 bp, Artificial Sequence
  Synthetic oligonucleotide
ttggatactcccagttaagtaagtcgacag

SEQ ID NO: 140914 - DNA, 30 bp, Artificial Sequence
  Synthetic oligonucleotide
acgaatcgtataggttacactagtcgacag

SEQ ID NO: 140915 - DNA, 30 bp, Artificial Sequence
  Synthetic oligonucleotide
catccagatgcagtgatccaagttcgacag

SEQ ID NO: 140916 - DNA, 30 bp, Artificial Sequence
  Synthetic oligonucleotide
gatacgagcatatgcgtgagtaaaggacag

SEQ ID NO: 140917 - DNA, 30 bp, Artificial Sequence
  Synthetic oligonucleotide
gtaactacatatatacacactggaggacag

SEQ ID NO: 140918 - DNA, 30 bp, Artificial Sequence
  Synthetic oligonucleotide
agtggcagtatctgtctggagacatgacag

SEQ ID NO: 140919 - DNA, 30 bp, Artificial Sequence
  Synthetic oligonucleotide
actatatgtaaactccttgtatcctgacag

SEQ ID NO: 140920 - DNA, 30 bp, Artificial Sequence
  Synthetic oligonucleotide
ccacgtgaccgtaagtagaaattttgacag

SEQ ID NO: 140921 - DNA, 30 bp, Artificial Sequence
  Synthetic oligonucleotide
acgtaggactccacgagactatcgatacag

SEQ ID NO: 140922 - DNA, 30 bp, Artificial Sequence
  Synthetic oligonucleotide
gttgagcgtccagggacgtgccggatacag

SEQ ID NO: 140923 - DNA, 30 bp, Artificial Sequence
  Synthetic oligonucleotide
aacatgtggtgtaaagtccagcttatacag

SEQ ID NO: 140924 - DNA, 30 bp, Artificial Sequence
  Synthetic oligonucleotide
gattgggaaggtcaagtggctatactacag

SEQ ID NO: 140925 - DNA, 30 bp, Artificial Sequence
  Synthetic oligonucleotide
aactccgcaggagttaaccctcgggtacag

SEQ ID NO: 140926 - DNA, 30 bp, Artificial Sequence
  Synthetic oligonucleotide
gacaacgggtcgtactgacaaggggtacag

SEQ ID NO: 140927 - DNA, 30 bp, Artificial Sequence
  Synthetic oligonucleotide
cgagtaaggcatagcaacttactggtacag

SEQ ID NO: 140928 - DNA, 30 bp, Artificial Sequence
  Synthetic oligonucleotide
acataagtccggccgtgagctaatgtacag

SEQ ID NO: 140929 - DNA, 30 bp, Artificial Sequence
  Synthetic oligonucleotide
agacgatccaatagtgtcctgtttgtacag

SEQ ID NO: 140930 - DNA, 30 bp, Artificial Sequence
  Synthetic oligonucleotide
tcatacgtaactgcagagcaacaattacag

SEQ ID NO: 140931 - DNA, 30 bp, Artificial Sequence
  Synthetic oligonucleotide
tagccgtaaccatttacggagcgaaaccag

SEQ ID NO: 140932 - DNA, 30 bp, Artificial Sequence
  Synthetic oligonucleotide
cctttcagtactcgtatattaaacaaccag

SEQ ID NO: 140933 - DNA, 30 bp, Artificial Sequence
  Synthetic oligonucleotide
tagacacatagcgcgcagagggccaaccag

SEQ ID NO: 140934 - DNA, 30 bp, Artificial Sequence
  Synthetic oligonucleotide
aacggacaactgtcgctaggggccaaccag

SEQ ID NO: 140935 - DNA, 30 bp, Artificial Sequence
  Synthetic oligonucleotide
tcgtcccggaaaatagtctagctacaccag

SEQ ID NO: 140936 - DNA, 30 bp, Artificial Sequence
  Synthetic oligonucleotide
ctaagacggtggattgtcgcgttacaccag

SEQ ID NO: 140937 - DNA, 30 bp, Artificial Sequence
  Synthetic oligonucleotide
tactaactctgtcaggtgctgaaccaccag

SEQ ID NO: 140938 - DNA, 30 bp, Artificial Sequence
  Synthetic oligonucleotide
caggagggaccttaaaaccggtagcaccag

SEQ ID NO: 140939 - DNA, 30 bp, Artificial Sequence
  Synthetic oligonucleotide
gtacggtcccagtccagacagaatcaccag

SEQ ID NO: 140940 - DNA, 30 bp, Artificial Sequence
  Synthetic oligonucleotide
tgagtgtgagttacaatgacgtatcaccag

SEQ ID NO: 140941 - DNA, 30 bp, Artificial Sequence
  Synthetic oligonucleotide
cccgcttggggtatagggaatgttcaccag

SEQ ID NO: 140942 - DNA, 30 bp, Artificial Sequence
  Synthetic oligonucleotide
ggtctctctaccgtccggtgcaaagaccag

SEQ ID NO: 140943 - DNA, 30 bp, Artificial Sequence
  Synthetic oligonucleotide
gaccgttacccaaagcacaactacgaccag

SEQ ID NO: 140944 - DNA, 31 bp, Artificial Sequence
  Synthetic oligonucleotide
catgtcaaaaaacatattggtcccggaccag

SEQ ID NO: 140945 - DNA, 30 bp, Artificial Sequence
  Synthetic oligonucleotide
atgtataatcgacacgaacatcttgaccag

SEQ ID NO: 140946 - DNA, 30 bp, Artificial Sequence
  Synthetic oligonucleotide
agtcgcgctcaggagcaggacctgtaccag

SEQ ID NO: 140947 - DNA, 30 bp, Artificial Sequence
  Synthetic oligonucleotide
gtaatgatgcctgtgatactcggttaccag

SEQ ID NO: 140948 - DNA, 30 bp, Artificial Sequence
  Synthetic oligonucleotide
ttgggaggcgggaggcagccgaccccccag

SEQ ID NO: 140949 - DNA, 30 bp, Artificial Sequence
  Synthetic oligonucleotide
cgggcagggtaaacgagtttgccagcccag

SEQ ID NO: 140950 - DNA, 30 bp, Artificial Sequence
  Synthetic oligonucleotide
gacatgcgcatcgcgaagaatgaggcccag

SEQ ID NO: 140951 - DNA, 30 bp, Artificial Sequence
  Synthetic oligonucleotide
atgctgagctgccattgcagcgctgcccag

SEQ ID NO: 140952 - DNA, 30 bp, Artificial Sequence
  Synthetic oligonucleotide
ttggtacacgttcatatgtatcgtgcccag

SEQ ID NO: 140953 - DNA, 30 bp, Artificial Sequence
  Synthetic oligonucleotide
caaacgtagggacaagtgagaacatcccag

SEQ ID NO: 140954 - DNA, 30 bp, Artificial Sequence
  Synthetic oligonucleotide
tcaggcacacagctgcttgtagggtcccag

SEQ ID NO: 140955 - DNA, 30 bp, Artificial Sequence
  Synthetic oligonucleotide
tccacaacaatatttcaaaacgcttcccag

SEQ ID NO: 140956 - DNA, 30 bp, Artificial Sequence
  Synthetic oligonucleotide
gcaggacagataaactcattccgttcccag

SEQ ID NO: 140957 - DNA, 30 bp, Artificial Sequence
  Synthetic oligonucleotide
ctaaccaatctctgtgcgtacataagccag

SEQ ID NO: 140958 - DNA, 30 bp, Artificial Sequence
  Synthetic oligonucleotide
atgggcgtagaaatttgtggtgagagccag

SEQ ID NO: 140959 - DNA, 30 bp, Artificial Sequence
  Synthetic oligonucleotide
gcatcgatgtcctcgctgggaactagccag

SEQ ID NO: 140960 - DNA, 30 bp, Artificial Sequence
  Synthetic oligonucleotide
aacaatgtaatcctatgagggagtagccag

SEQ ID NO: 140961 - DNA, 30 bp, Artificial Sequence
  Synthetic oligonucleotide
tagctacgagaacgtgttgcgattagccag

SEQ ID NO: 140962 - DNA, 30 bp, Artificial Sequence
  Synthetic oligonucleotide
gcatccttataacccgaccatgtacgccag

SEQ ID NO: 140963 - DNA, 30 bp, Artificial Sequence
  Synthetic oligonucleotide
taacagaagctatttgcaggcacccgccag

SEQ ID NO: 140964 - DNA, 30 bp, Artificial Sequence
  Synthetic oligonucleotide
tggtctatagcccatggagttgtccgccag

SEQ ID NO: 140965 - DNA, 30 bp, Artificial Sequence
  Synthetic oligonucleotide
agagttagacggtttactgaagaaggccag

SEQ ID NO: 140966 - DNA, 31 bp, Artificial Sequence
  Synthetic oligonucleotide
ttgtgagcaaaaggtctatagtcgaggccag

SEQ ID NO: 140967 - DNA, 30 bp, Artificial Sequence
  Synthetic oligonucleotide
acgagaaattaaggggcccgcataggccag

SEQ ID NO: 140968 - DNA, 30 bp, Artificial Sequence
  Synthetic oligonucleotide
gcaaacgtagggcgtccgtcgcagggccag

SEQ ID NO: 140969 - DNA, 30 bp, Artificial Sequence
  Synthetic oligonucleotide
atattcaggtgttagaccaaaccatgccag

SEQ ID NO: 140970 - DNA, 30 bp, Artificial Sequence
  Synthetic oligonucleotide
aagattatactttaagcctactcatgccag

SEQ ID NO: 140971 - DNA, 30 bp, Artificial Sequence
  Synthetic oligonucleotide
gacaaataaagtacaatattattatgccag

SEQ ID NO: 140972 - DNA, 30 bp, Artificial Sequence
  Synthetic oligonucleotide
cacaaggaactgctataattctcgtgccag

SEQ ID NO: 140973 - DNA, 30 bp, Artificial Sequence
  Synthetic oligonucleotide
gggctcagtattgccgctagaatgtgccag

SEQ ID NO: 140974 - DNA, 30 bp, Artificial Sequence
  Synthetic oligonucleotide
tacactgagccgttgtttattaacatccag

SEQ ID NO: 140975 - DNA, 30 bp, Artificial Sequence
  Synthetic oligonucleotide
tacgaacatcgatagtttgtccccatccag

SEQ ID NO: 140976 - DNA, 30 bp, Artificial Sequence
  Synthetic oligonucleotide
cccgatagaccatggagtagcagcctccag

SEQ ID NO: 140977 - DNA, 30 bp, Artificial Sequence
  Synthetic oligonucleotide
ttcggtctatcactgctggtacgagtccag

SEQ ID NO: 140978 - DNA, 30 bp, Artificial Sequence
  Synthetic oligonucleotide
taacacgattcacacgtcaaccacgtccag

SEQ ID NO: 140979 - DNA, 30 bp, Artificial Sequence
  Synthetic oligonucleotide
ggcaaccgccgcagggcaatgtgggtccag

SEQ ID NO: 140980 - DNA, 30 bp, Artificial Sequence
  Synthetic oligonucleotide
gactgctgaagggataggatagctttccag

SEQ ID NO: 140981 - DNA, 30 bp, Artificial Sequence
  Synthetic oligonucleotide
ccggaggttcatcgaaatatgagtttccag

SEQ ID NO: 140982 - DNA, 30 bp, Artificial Sequence
  Synthetic oligonucleotide
agcgtcgcttacgtcgtaatacgtttccag

SEQ ID NO: 140983 - DNA, 30 bp, Artificial Sequence
  Synthetic oligonucleotide
gccaggtcaaaagagaagcgcttaaagcag

SEQ ID NO: 140984 - DNA, 30 bp, Artificial Sequence
  Synthetic oligonucleotide
attgatataccgaggcatgtctataagcag

SEQ ID NO: 140985 - DNA, 30 bp, Artificial Sequence
  Synthetic oligonucleotide
atacttactgtcgataaccgggtccagcag

SEQ ID NO: 140986 - DNA, 30 bp, Artificial Sequence
  Synthetic oligonucleotide
gtgcggtgtattctagggtgtgatcagcag

SEQ ID NO: 140987 - DNA, 30 bp, Artificial Sequence
  Synthetic oligonucleotide
ggaccgggatgcaggcggaaaactcagcag

SEQ ID NO: 140988 - DNA, 30 bp, Artificial Sequence
  Synthetic oligonucleotide
ctactcagcttaggtaatccacgtcagcag

SEQ ID NO: 140989 - DNA, 30 bp, Artificial Sequence
  Synthetic oligonucleotide
tctcattaaagctagaaattttgtcagcag

SEQ ID NO: 140990 - DNA, 30 bp, Artificial Sequence
  Synthetic oligonucleotide
taggagcctgaataaggatggtcagagcag

SEQ ID NO: 140991 - DNA, 30 bp, Artificial Sequence
  Synthetic oligonucleotide
tcctgaggtgctgcgaagtcccgagagcag

SEQ ID NO: 140992 - DNA, 30 bp, Artificial Sequence
  Synthetic oligonucleotide
atgtgagaatatcaaatacggatcgagcag

SEQ ID NO: 140993 - DNA, 30 bp, Artificial Sequence
  Synthetic oligonucleotide
tagatacagtaagtagattgtagggagcag

SEQ ID NO: 140994 - DNA, 30 bp, Artificial Sequence
  Synthetic oligonucleotide
ctacggacattcggtcgcgcagaatagcag

SEQ ID NO: 140995 - DNA, 30 bp, Artificial Sequence
  Synthetic oligonucleotide
agacaaggacgttcgcctagttcttagcag

SEQ ID NO: 140996 - DNA, 30 bp, Artificial Sequence
  Synthetic oligonucleotide
atgcagagtcacggagtcaagaaaacgcag

SEQ ID NO: 140997 - DNA, 30 bp, Artificial Sequence
  Synthetic oligonucleotide
agggacagctgtccaaccattgcaacgcag

SEQ ID NO: 140998 - DNA, 30 bp, Artificial Sequence
  Synthetic oligonucleotide
aggggcactcagcattaaattcatacgcag

SEQ ID NO: 140999 - DNA, 30 bp, Artificial Sequence
  Synthetic oligonucleotide
gcatcgctgtctccaaaaacaagcccgcag

SEQ ID NO: 141000 - DNA, 30 bp, Artificial Sequence
  Synthetic oligonucleotide
cccggggatatacatcaatgtcgcgcgcag

SEQ ID NO: 141001 - DNA, 30 bp, Artificial Sequence
  Synthetic oligonucleotide
gcgcttaggaatccaaatgcgggggcgcag

SEQ ID NO: 141002 - DNA, 30 bp, Artificial Sequence
  Synthetic oligonucleotide
tttgagattcaaagaccaggctcgtcgcag

SEQ ID NO: 141003 - DNA, 30 bp, Artificial Sequence
  Synthetic oligonucleotide
agacataactaatagttaacttaaaggcag

SEQ ID NO: 141004 - DNA, 30 bp, Artificial Sequence
  Synthetic oligonucleotide
ctggcctcagaacccacggtttaaaggcag

SEQ ID NO: 141005 - DNA, 30 bp, Artificial Sequence
  Synthetic oligonucleotide
cggaacactttatgcctacgtacaaggcag

SEQ ID NO: 141006 - DNA, 30 bp, Artificial Sequence
  Synthetic oligonucleotide
ctatatactatacatatagtacccaggcag

SEQ ID NO: 141007 - DNA, 30 bp, Artificial Sequence
  Synthetic oligonucleotide
ttaggaaacctcccaggtctaagtaggcag

SEQ ID NO: 141008 - DNA, 30 bp, Artificial Sequence
  Synthetic oligonucleotide
tatgaccaatggcactattcaacccggcag

SEQ ID NO: 141009 - DNA, 30 bp, Artificial Sequence
  Synthetic oligonucleotide
gcgtgatataagtgggttggtaaagggcag

SEQ ID NO: 141010 - DNA, 30 bp, Artificial Sequence
  Synthetic oligonucleotide
ttgttacttccagacagacatccagggcag

SEQ ID NO: 141011 - DNA, 30 bp, Artificial Sequence
  Synthetic oligonucleotide
cgagagagtcagggagggcatgacgggcag

SEQ ID NO: 141012 - DNA, 30 bp, Artificial Sequence
  Synthetic oligonucleotide
cagataacccggggtcagatgggcgggcag

SEQ ID NO: 141013 - DNA, 30 bp, Artificial Sequence
  Synthetic oligonucleotide
ggacaagaaacgactacataccgggggcag

SEQ ID NO: 141014 - DNA, 30 bp, Artificial Sequence
  Synthetic oligonucleotide
acccacaccgccgtctaaaatgcatggcag

SEQ ID NO: 141015 - DNA, 30 bp, Artificial Sequence
  Synthetic oligonucleotide
gcatagcgtcattcaaagactgcctggcag

SEQ ID NO: 141016 - DNA, 30 bp, Artificial Sequence
  Synthetic oligonucleotide
tactcatatggagttcatgcggtgtggcag

SEQ ID NO: 141017 - DNA, 30 bp, Artificial Sequence
  Synthetic oligonucleotide
cagacctacagttcggatatgtcaatgcag

SEQ ID NO: 141018 - DNA, 30 bp, Artificial Sequence
  Synthetic oligonucleotide
aaagggtataacattgtatacggaatgcag

SEQ ID NO: 141019 - DNA, 30 bp, Artificial Sequence
  Synthetic oligonucleotide
cggcttcattaattaagccgtttaatgcag

SEQ ID NO: 141020 - DNA, 30 bp, Artificial Sequence
  Synthetic oligonucleotide
ttacagcgaaaatgcacctcagagatgcag

SEQ ID NO: 141021 - DNA, 30 bp, Artificial Sequence
  Synthetic oligonucleotide
acactgaacgtatacggatgatggatgcag

SEQ ID NO: 141022 - DNA, 30 bp, Artificial Sequence
  Synthetic oligonucleotide
tccaagggaatgaagattgtcagcctgcag

SEQ ID NO: 141023 - DNA, 30 bp, Artificial Sequence
  Synthetic oligonucleotide
aggggttatgcatataagttgggggtgcag

SEQ ID NO: 141024 - DNA, 30 bp, Artificial Sequence
  Synthetic oligonucleotide
ggggggtagtaagaaactagtcttgtgcag

SEQ ID NO: 141025 - DNA, 30 bp, Artificial Sequence
  Synthetic oligonucleotide
aacaccactggcagttcactcagattgcag

SEQ ID NO: 141026 - DNA, 30 bp, Artificial Sequence
  Synthetic oligonucleotide
tcttaaacactattttattatgtccatcag

SEQ ID NO: 141027 - DNA, 30 bp, Artificial Sequence
  Synthetic oligonucleotide
aggtgaacgtatcagtccgcagggcatcag

SEQ ID NO: 141028 - DNA, 30 bp, Artificial Sequence
  Synthetic oligonucleotide
tgggttagcgcttgtaggcggcccgatcag

SEQ ID NO: 141029 - DNA, 30 bp, Artificial Sequence
  Synthetic oligonucleotide
gtagtatgaggtgccgttcgcggggatcag

SEQ ID NO: 141030 - DNA, 30 bp, Artificial Sequence
  Synthetic oligonucleotide
attatgagtaaatatgatttcgctgatcag

SEQ ID NO: 141031 - DNA, 30 bp, Artificial Sequence
  Synthetic oligonucleotide
ttgtgcttaacctgatctgcccagtatcag

SEQ ID NO: 141032 - DNA, 30 bp, Artificial Sequence
  Synthetic oligonucleotide
acatagggctttgcaatggaacggtatcag

SEQ ID NO: 141033 - DNA, 30 bp, Artificial Sequence
  Synthetic oligonucleotide
ctttgaacggttgagctgtagaaaactcag

SEQ ID NO: 141034 - DNA, 30 bp, Artificial Sequence
  Synthetic oligonucleotide
tcgttccgtcctgatgtaacgtgaactcag

SEQ ID NO: 141035 - DNA, 31 bp, Artificial Sequence
  Synthetic oligonucleotide
tacggtactaagatgtggccagaggactcag

SEQ ID NO: 141036 - DNA, 30 bp, Artificial Sequence
  Synthetic oligonucleotide
tattgtcagggtgcgtgtggaatgactcag

SEQ ID NO: 141037 - DNA, 30 bp, Artificial Sequence
  Synthetic oligonucleotide
ctacaggagctgaaccctccctgtactcag

SEQ ID NO: 141038 - DNA, 30 bp, Artificial Sequence
  Synthetic oligonucleotide
gtcgaggctcctgccgttgtttcacctcag

SEQ ID NO: 141039 - DNA, 30 bp, Artificial Sequence
  Synthetic oligonucleotide
gcggttagaaataacccgatgttacctcag

SEQ ID NO: 141040 - DNA, 30 bp, Artificial Sequence
  Synthetic oligonucleotide
cgaaaattgagcccgcctatcgcccctcag

SEQ ID NO: 141041 - DNA, 30 bp, Artificial Sequence
  Synthetic oligonucleotide
gagcacaggtctattatcgctaaagctcag

SEQ ID NO: 141042 - DNA, 30 bp, Artificial Sequence
  Synthetic oligonucleotide
gattgacaagcgtgtagtatgaccgctcag

SEQ ID NO: 141043 - DNA, 30 bp, Artificial Sequence
  Synthetic oligonucleotide
gacatgaatgcaaccttatatatcgctcag

SEQ ID NO: 141044 - DNA, 30 bp, Artificial Sequence
  Synthetic oligonucleotide
gtgtttaagaattggatagctactgctcag

SEQ ID NO: 141045 - DNA, 31 bp, Artificial Sequence
  Synthetic oligonucleotide
cggtatcgagggtaatagtcagtctgctcag

SEQ ID NO: 141046 - DNA, 30 bp, Artificial Sequence
  Synthetic oligonucleotide
tggagacattcgctacactctacgagtcag

SEQ ID NO: 141047 - DNA, 30 bp, Artificial Sequence
  Synthetic oligonucleotide
gacggttacaggggttggagacatagtcag

SEQ ID NO: 141048 - DNA, 30 bp, Artificial Sequence
  Synthetic oligonucleotide
actgaaagtgtccattaagtaccccgtcag

SEQ ID NO: 141049 - DNA, 30 bp, Artificial Sequence
  Synthetic oligonucleotide
ccggaggataatatgtgcagtgcgcgtcag

SEQ ID NO: 141050 - DNA, 30 bp, Artificial Sequence
  Synthetic oligonucleotide
gccgtatcgtaaacgaggtgtggtcgtcag

SEQ ID NO: 141051 - DNA, 30 bp, Artificial Sequence
  Synthetic oligonucleotide
cgcccacacgccattcgatctggaggtcag

SEQ ID NO: 141052 - DNA, 30 bp, Artificial Sequence
  Synthetic oligonucleotide
tactgctcattggtggggtgaacgggtcag

SEQ ID NO: 141053 - DNA, 30 bp, Artificial Sequence
  Synthetic oligonucleotide
cacagttcggaaaagaagtgtatgggtcag

SEQ ID NO: 141054 - DNA, 30 bp, Artificial Sequence
  Synthetic oligonucleotide
cgggaagggaggagcgccactttgggtcag

SEQ ID NO: 141055 - DNA, 30 bp, Artificial Sequence
  Synthetic oligonucleotide
ggtatgatgtacgggtaccttaactgtcag

SEQ ID NO: 141056 - DNA, 30 bp, Artificial Sequence
  Synthetic oligonucleotide
ttgtgccctctgcccttagaatcctgtcag

SEQ ID NO: 141057 - DNA, 30 bp, Artificial Sequence
  Synthetic oligonucleotide
gaatttcgggggataattagagagtgtcag

SEQ ID NO: 141058 - DNA, 30 bp, Artificial Sequence
  Synthetic oligonucleotide
caagcaagcacagctatgtagccgtgtcag

SEQ ID NO: 141059 - DNA, 30 bp, Artificial Sequence
  Synthetic oligonucleotide
aaagcaacacttcgttcgatgacaattcag

SEQ ID NO: 141060 - DNA, 30 bp, Artificial Sequence
  Synthetic oligonucleotide
ctctcatcacggtagtataatttaattcag

SEQ ID NO: 141061 - DNA, 30 bp, Artificial Sequence
  Synthetic oligonucleotide
tggtgtcctgtccgagaaaagtaacttcag

SEQ ID NO: 141062 - DNA, 30 bp, Artificial Sequence
  Synthetic oligonucleotide
ccgacaatcaatccactattatcacttcag

SEQ ID NO: 141063 - DNA, 30 bp, Artificial Sequence
  Synthetic oligonucleotide
aaaggcaactgttcggctgagcaagttcag

SEQ ID NO: 141064 - DNA, 30 bp, Artificial Sequence
  Synthetic oligonucleotide
ccgcacatttagtcacatagaatggttcag

SEQ ID NO: 141065 - DNA, 30 bp, Artificial Sequence
  Synthetic oligonucleotide
accactgaagccccttccgccttctttcag

SEQ ID NO: 141066 - DNA, 30 bp, Artificial Sequence
  Synthetic oligonucleotide
cctatagatctgtcgaattgatcgtttcag

SEQ ID NO: 141067 - DNA, 30 bp, Artificial Sequence
  Synthetic oligonucleotide
aagtgggaaagcgaggtgcgctaaaaagag

SEQ ID NO: 141068 - DNA, 30 bp, Artificial Sequence
  Synthetic oligonucleotide
gaatacacgaaatctatgaagatcaaagag

SEQ ID NO: 141069 - DNA, 30 bp, Artificial Sequence
  Synthetic oligonucleotide
taacgcttcgtaatggcgtagctcaaagag

SEQ ID NO: 141070 - DNA, 30 bp, Artificial Sequence
  Synthetic oligonucleotide
cggaagcgatttagggacaggtgtaaagag

SEQ ID NO: 141071 - DNA, 30 bp, Artificial Sequence
  Synthetic oligonucleotide
caggtgcggcagcagttctaatttaaagag

SEQ ID NO: 141072 - DNA, 30 bp, Artificial Sequence
  Synthetic oligonucleotide
ggctccgcggtgatagacaggccacaagag

SEQ ID NO: 141073 - DNA, 30 bp, Artificial Sequence
  Synthetic oligonucleotide
gcaataagggtatgttctacgtgacaagag

SEQ ID NO: 141074 - DNA, 30 bp, Artificial Sequence
  Synthetic oligonucleotide
atgctaagtaatctttaacgcagccaagag

SEQ ID NO: 141075 - DNA, 30 bp, Artificial Sequence
  Synthetic oligonucleotide
ggggtgtcaaagtagtcccccaagcaagag

SEQ ID NO: 141076 - DNA, 30 bp, Artificial Sequence
  Synthetic oligonucleotide
caagtccatatgcatccacggcagcaagag

SEQ ID NO: 141077 - DNA, 30 bp, Artificial Sequence
  Synthetic oligonucleotide
ttgatgcgactaggagaatgtagtcaagag

SEQ ID NO: 141078 - DNA, 30 bp, Artificial Sequence
  Synthetic oligonucleotide
acagagtgggtccatcacctctaagaagag

SEQ ID NO: 141079 - DNA, 30 bp, Artificial Sequence
  Synthetic oligonucleotide
atggcttgctgtttggcgagaagtgaagag

SEQ ID NO: 141080 - DNA, 30 bp, Artificial Sequence
  Synthetic oligonucleotide
catatccgcagcgggtgaaagaaataagag

SEQ ID NO: 141081 - DNA, 30 bp, Artificial Sequence
  Synthetic oligonucleotide
gggcctcgtggcctttttcacgaataagag

SEQ ID NO: 141082 - DNA, 30 bp, Artificial Sequence
  Synthetic oligonucleotide
gcatgctttcacaggaggctgagataagag

SEQ ID NO: 141083 - DNA, 30 bp, Artificial Sequence
  Synthetic oligonucleotide
gagttgtaccgatcccatcgctcctaagag

SEQ ID NO: 141084 - DNA, 30 bp, Artificial Sequence
  Synthetic oligonucleotide
gatgacggtcggccattgcatttctaagag

SEQ ID NO: 141085 - DNA, 30 bp, Artificial Sequence
  Synthetic oligonucleotide
tgcgcggttggactagcaaatcagtaagag

SEQ ID NO: 141086 - DNA, 30 bp, Artificial Sequence
  Synthetic oligonucleotide
ctctaggcgttagttaggagccattaagag

SEQ ID NO: 141087 - DNA, 30 bp, Artificial Sequence
  Synthetic oligonucleotide
cgcttgcataaacggcccgagatttaagag

SEQ ID NO: 141088 - DNA, 30 bp, Artificial Sequence
  Synthetic oligonucleotide
gaagtgtaggctcataaaattgtttaagag

SEQ ID NO: 141089 - DNA, 30 bp, Artificial Sequence
  Synthetic oligonucleotide
acgtcccaggttgtgtggattagaacagag

SEQ ID NO: 141090 - DNA, 30 bp, Artificial Sequence
  Synthetic oligonucleotide
ccgacgacactgtatttcggaaacacagag

SEQ ID NO: 141091 - DNA, 30 bp, Artificial Sequence
  Synthetic oligonucleotide
aagctgattggtaacttacgactgacagag

SEQ ID NO: 141092 - DNA, 30 bp, Artificial Sequence
  Synthetic oligonucleotide
tgaccgttatgtgcgctatgttttacagag

SEQ ID NO: 141093 - DNA, 30 bp, Artificial Sequence
  Synthetic oligonucleotide
ctcatacgagaaaagcgctgctgagcagag

SEQ ID NO: 141094 - DNA, 30 bp, Artificial Sequence
  Synthetic oligonucleotide
aatgctcgaattccgcgcaccgaatcagag

SEQ ID NO: 141095 - DNA, 30 bp, Artificial Sequence
  Synthetic oligonucleotide
gtcgggcagctagaacaggatccatcagag

SEQ ID NO: 141096 - DNA, 30 bp, Artificial Sequence
  Synthetic oligonucleotide
atcgtgtaatatggtaacgttcactcagag

SEQ ID NO: 141097 - DNA, 30 bp, Artificial Sequence
  Synthetic oligonucleotide
actcaatggggtacacgctagaggtcagag

SEQ ID NO: 141098 - DNA, 30 bp, Artificial Sequence
  Synthetic oligonucleotide
aatctgacaagggaaccgtgtcattcagag

SEQ ID NO: 141099 - DNA, 30 bp, Artificial Sequence
  Synthetic oligonucleotide
aggtatcgctgccgccgccaagattcagag

SEQ ID NO: 141100 - DNA, 30 bp, Artificial Sequence
  Synthetic oligonucleotide
aaaagtaacagcgtcgggaataaaagagag

SEQ ID NO: 141101 - DNA, 30 bp, Artificial Sequence
  Synthetic oligonucleotide
tgtacctcatctatttagctgagaagagag

SEQ ID NO: 141102 - DNA, 30 bp, Artificial Sequence
  Synthetic oligonucleotide
cgttttctctcgagatcccatagtagagag

SEQ ID NO: 141103 - DNA, 30 bp, Artificial Sequence
  Synthetic oligonucleotide
gagctcctgaggaccgcccggcttagagag

SEQ ID NO: 141104 - DNA, 30 bp, Artificial Sequence
  Synthetic oligonucleotide
agacccagggcggcgaaaacggttagagag

SEQ ID NO: 141105 - DNA, 30 bp, Artificial Sequence
  Synthetic oligonucleotide
tagcccacatgatgaatgaggagcggagag

SEQ ID NO: 141106 - DNA, 30 bp, Artificial Sequence
  Synthetic oligonucleotide
aagaaatccaattagggtaggatcggagag

SEQ ID NO: 141107 - DNA, 30 bp, Artificial Sequence
  Synthetic oligonucleotide
tacatgtttcgaaatagacgttcgggagag

SEQ ID NO: 141108 - DNA, 30 bp, Artificial Sequence
  Synthetic oligonucleotide
tataacggttgtaatataacgaggggagag

SEQ ID NO: 141109 - DNA, 30 bp, Artificial Sequence
  Synthetic oligonucleotide
actggctacggggcttcgaacttgggagag

SEQ ID NO: 141110 - DNA, 30 bp, Artificial Sequence
  Synthetic oligonucleotide
gatgcaggtgcggcagtggccgttggagag

SEQ ID NO: 141111 - DNA, 30 bp, Artificial Sequence
  Synthetic oligonucleotide
caaatcctcagtgagggctacaaatgagag

SEQ ID NO: 141112 - DNA, 30 bp, Artificial Sequence
  Synthetic oligonucleotide
tgaacaaatcacagtgtctaggtctgagag

SEQ ID NO: 141113 - DNA, 30 bp, Artificial Sequence
  Synthetic oligonucleotide
acgactcagagtttaagaattacgtgagag

SEQ ID NO: 141114 - DNA, 30 bp, Artificial Sequence
  Synthetic oligonucleotide
ctgtgggggttgtggacgatgcattgagag

SEQ ID NO: 141115 - DNA, 30 bp, Artificial Sequence
  Synthetic oligonucleotide
gaaataagggaacaccacgtgctttgagag

SEQ ID NO: 141116 - DNA, 30 bp, Artificial Sequence
  Synthetic oligonucleotide
tttcggataaaagcctacatggtaatagag

SEQ ID NO: 141117 - DNA, 30 bp, Artificial Sequence
  Synthetic oligonucleotide
agtgatgcaacccgaaatggccacatagag

SEQ ID NO: 141118 - DNA, 30 bp, Artificial Sequence
  Synthetic oligonucleotide
aagctgtgattgaggacctcgtccatagag

SEQ ID NO: 141119 - DNA, 30 bp, Artificial Sequence
  Synthetic oligonucleotide
ctggtgtaatatatcgttggtggcatagag

SEQ ID NO: 141120 - DNA, 30 bp, Artificial Sequence
  Synthetic oligonucleotide
cgggtgttgacattgtcctgatgcatagag

SEQ ID NO: 141121 - DNA, 31 bp, Artificial Sequence
  Synthetic oligonucleotide
cagcgtgattagaagtagcagatagatagag

SEQ ID NO: 141122 - DNA, 30 bp, Artificial Sequence
  Synthetic oligonucleotide
cgacagggtcccatgaaggcgaatatagag

SEQ ID NO: 141123 - DNA, 30 bp, Artificial Sequence
  Synthetic oligonucleotide
tgactattcgtatcaccagggagactagag

SEQ ID NO: 141124 - DNA, 30 bp, Artificial Sequence
  Synthetic oligonucleotide
gtttggctacgtggtgctacatagctagag

SEQ ID NO: 141125 - DNA, 30 bp, Artificial Sequence
  Synthetic oligonucleotide
tgtggctgtgttttcccgaatgggctagag

SEQ ID NO: 141126 - DNA, 30 bp, Artificial Sequence
  Synthetic oligonucleotide
cgtggggagtcacagggcagattgctagag

SEQ ID NO: 141127 - DNA, 30 bp, Artificial Sequence
  Synthetic oligonucleotide
tgaggatagactactacgcccgatgtagag

SEQ ID NO: 141128 - DNA, 30 bp, Artificial Sequence
  Synthetic oligonucleotide
cgaatagcacggatggcgtctaacttagag

SEQ ID NO: 141129 - DNA, 30 bp, Artificial Sequence
  Synthetic oligonucleotide
gtcagacttattatttggtctatgttagag

SEQ ID NO: 141130 - DNA, 30 bp, Artificial Sequence
  Synthetic oligonucleotide
ggagtttgatcatactatcgtctgttagag

SEQ ID NO: 141131 - DNA, 30 bp, Artificial Sequence
  Synthetic oligonucleotide
tgacagaagggtgtatgccagcaaaacgag

SEQ ID NO: 141132 - DNA, 30 bp, Artificial Sequence
  Synthetic oligonucleotide
cagttatggagttcgacgcttccgaacgag

SEQ ID NO: 141133 - DNA, 30 bp, Artificial Sequence
  Synthetic oligonucleotide
ataacaacgtgtaaccggcgtgcgaacgag

SEQ ID NO: 141134 - DNA, 30 bp, Artificial Sequence
  Synthetic oligonucleotide
cagtagttccaggacactggcgggaacgag

SEQ ID NO: 141135 - DNA, 30 bp, Artificial Sequence
  Synthetic oligonucleotide
accgcttaagcgcttacgcatggtaacgag

SEQ ID NO: 141136 - DNA, 30 bp, Artificial Sequence
  Synthetic oligonucleotide
cgactggtcgatggggccggccatcacgag

SEQ ID NO: 141137 - DNA, 30 bp, Artificial Sequence
  Synthetic oligonucleotide
gtttgtgaccaatcaagttattgtcacgag

SEQ ID NO: 141138 - DNA, 30 bp, Artificial Sequence
  Synthetic oligonucleotide
ctactgaaatggccgcaggatctagacgag

SEQ ID NO: 141139 - DNA, 30 bp, Artificial Sequence
  Synthetic oligonucleotide
atttcagaggagaactatcgtttagacgag

SEQ ID NO: 141140 - DNA, 30 bp, Artificial Sequence
  Synthetic oligonucleotide
tggataggaaatagtgtatacatggacgag

SEQ ID NO: 141141 - DNA, 30 bp, Artificial Sequence
  Synthetic oligonucleotide
ggaccctaacgtgtgtgcagaaggaccgag

SEQ ID NO: 141142 - DNA, 30 bp, Artificial Sequence
  Synthetic oligonucleotide
tccatgagtgggtgtaattagtcacccgag

SEQ ID NO: 141143 - DNA, 30 bp, Artificial Sequence
  Synthetic oligonucleotide
aatgccccgtggtggtgtaaagtagccgag

SEQ ID NO: 141144 - DNA, 30 bp, Artificial Sequence
  Synthetic oligonucleotide
gacgttaacgttaccagtcttgaggccgag

SEQ ID NO: 141145 - DNA, 30 bp, Artificial Sequence
  Synthetic oligonucleotide
ggactggagcgacaatattaggtggccgag

SEQ ID NO: 141146 - DNA, 30 bp, Artificial Sequence
  Synthetic oligonucleotide
cattcgccttgcaggcgccgttttgccgag

SEQ ID NO: 141147 - DNA, 30 bp, Artificial Sequence
  Synthetic oligonucleotide
ggtggcactagattggccgtaggatccgag

SEQ ID NO: 141148 - DNA, 30 bp, Artificial Sequence
  Synthetic oligonucleotide
cctctacccgagtgcctcatcatatccgag

SEQ ID NO: 141149 - DNA, 30 bp, Artificial Sequence
  Synthetic oligonucleotide
cattcgcgcctagataagaccgactccgag

SEQ ID NO: 141150 - DNA, 30 bp, Artificial Sequence
  Synthetic oligonucleotide
gcccgcgctgacttggcagaggcctccgag

SEQ ID NO: 141151 - DNA, 30 bp, Artificial Sequence
  Synthetic oligonucleotide
tgccggttggttcgcggagcaacttccgag

SEQ ID NO: 141152 - DNA, 30 bp, Artificial Sequence
  Synthetic oligonucleotide
atgacaagacgccacgggtggacaagcgag

SEQ ID NO: 141153 - DNA, 30 bp, Artificial Sequence
  Synthetic oligonucleotide
tcaaccccttcagtaaggtcaataagcgag

SEQ ID NO: 141154 - DNA, 30 bp, Artificial Sequence
  Synthetic oligonucleotide
gtctcgcgtcgtccgtttgtatccagcgag

SEQ ID NO: 141155 - DNA, 30 bp, Artificial Sequence
  Synthetic oligonucleotide
cggacattgcccggagtagcacggagcgag

SEQ ID NO: 141156 - DNA, 30 bp, Artificial Sequence
  Synthetic oligonucleotide
cacggtatctcttaagttccagatagcgag

SEQ ID NO: 141157 - DNA, 30 bp, Artificial Sequence
  Synthetic oligonucleotide
ggtcgcagaccctagggtgaaaatggcgag

SEQ ID NO: 141158 - DNA, 30 bp, Artificial Sequence
  Synthetic oligonucleotide
cagcgcttcacctgacagctgttatgcgag

SEQ ID NO: 141159 - DNA, 30 bp, Artificial Sequence
  Synthetic oligonucleotide
ttacgttgacgggcgctttgtaactgcgag

SEQ ID NO: 141160 - DNA, 30 bp, Artificial Sequence
  Synthetic oligonucleotide
tgagagacagggttaaggttagtctgcgag

SEQ ID NO: 141161 - DNA, 30 bp, Artificial Sequence
  Synthetic oligonucleotide
gtccagacgaaagtctcattatggtgcgag

SEQ ID NO: 141162 - DNA, 30 bp, Artificial Sequence
  Synthetic oligonucleotide
ggttacgttgtcaactgccagggttgcgag

SEQ ID NO: 141163 - DNA, 30 bp, Artificial Sequence
  Synthetic oligonucleotide
ctgtatgagccctaacagcttatttgcgag

SEQ ID NO: 141164 - DNA, 30 bp, Artificial Sequence
  Synthetic oligonucleotide
ctgtcatttgggaacaaatacataatcgag

SEQ ID NO: 141165 - DNA, 30 bp, Artificial Sequence
  Synthetic oligonucleotide
agccacagtaagagaaatgtgccactcgag

SEQ ID NO: 141166 - DNA, 30 bp, Artificial Sequence
  Synthetic oligonucleotide
aaagacaattagagattgatagcgctcgag

SEQ ID NO: 141167 - DNA, 30 bp, Artificial Sequence
  Synthetic oligonucleotide
atagggcattgctacttgaatgcgctcgag

SEQ ID NO: 141168 - DNA, 30 bp, Artificial Sequence
  Synthetic oligonucleotide
tgtcggctacattcggactccactctcgag

SEQ ID NO: 141169 - DNA, 30 bp, Artificial Sequence
  Synthetic oligonucleotide
ttccaagtcgtaacaaacctttttctcgag

SEQ ID NO: 141170 - DNA, 31 bp, Artificial Sequence
  Synthetic oligonucleotide
atattcttcgtaacgactcattaaggtcgag

SEQ ID NO: 141171 - DNA, 30 bp, Artificial Sequence
  Synthetic oligonucleotide
atgacaaagcatatggaggtctatgtcgag

SEQ ID NO: 141172 - DNA, 30 bp, Artificial Sequence
  Synthetic oligonucleotide
agctctatgacgggagcgaataaattcgag

SEQ ID NO: 141173 - DNA, 30 bp, Artificial Sequence
  Synthetic oligonucleotide
gcgcaggacgcgcatcagctcgcgttcgag

SEQ ID NO: 141174 - DNA, 30 bp, Artificial Sequence
  Synthetic oligonucleotide
gctggagctctcgacatgttttcaaaggag

SEQ ID NO: 141175 - DNA, 30 bp, Artificial Sequence
  Synthetic oligonucleotide
ttattactgaacatggaatgtaacaaggag

SEQ ID NO: 141176 - DNA, 30 bp, Artificial Sequence
  Synthetic oligonucleotide
aattgaaaagttcacaaattgtgcaaggag

SEQ ID NO: 141177 - DNA, 30 bp, Artificial Sequence
  Synthetic oligonucleotide
cgcccactagccccacgctgttggaaggag

SEQ ID NO: 141178 - DNA, 30 bp, Artificial Sequence
  Synthetic oligonucleotide
ttctgaactttcagcccataaatgaaggag

SEQ ID NO: 141179 - DNA, 30 bp, Artificial Sequence
  Synthetic oligonucleotide
gtctaagtaagttgccgccattataaggag

SEQ ID NO: 141180 - DNA, 30 bp, Artificial Sequence
  Synthetic oligonucleotide
tcaagcatatgggttggccttagtaaggag

SEQ ID NO: 141181 - DNA, 30 bp, Artificial Sequence
  Synthetic oligonucleotide
atcggtactacgttatgtgtggtgcaggag

SEQ ID NO: 141182 - DNA, 30 bp, Artificial Sequence
  Synthetic oligonucleotide
cggtgcgtcgggaagatgtgctatcaggag

SEQ ID NO: 141183 - DNA, 30 bp, Artificial Sequence
  Synthetic oligonucleotide
cattcacccacgtgtttgggaggtcaggag

SEQ ID NO: 141184 - DNA, 30 bp, Artificial Sequence
  Synthetic oligonucleotide
tgtttaccttaacaaggagcctcagaggag

SEQ ID NO: 141185 - DNA, 30 bp, Artificial Sequence
  Synthetic oligonucleotide
ctgatcgttaccatcactagtatagaggag

SEQ ID NO: 141186 - DNA, 30 bp, Artificial Sequence
  Synthetic oligonucleotide
tgtgcctatacgagctaccagtacgaggag

SEQ ID NO: 141187 - DNA, 30 bp, Artificial Sequence
  Synthetic oligonucleotide
aggctgccttcgaacggggcgtaggaggag

SEQ ID NO: 141188 - DNA, 30 bp, Artificial Sequence
  Synthetic oligonucleotide
ttgccatgtcttagctatttagcataggag

SEQ ID NO: 141189 - DNA, 30 bp, Artificial Sequence
  Synthetic oligonucleotide
atggagccagaaagtatccgatgataggag

SEQ ID NO: 141190 - DNA, 30 bp, Artificial Sequence
  Synthetic oligonucleotide
cagggtttatgagttccgtgtgcctaggag

SEQ ID NO: 141191 - DNA, 30 bp, Artificial Sequence
  Synthetic oligonucleotide
gacttcatcgcatcggtggtcgggtaggag

SEQ ID NO: 141192 - DNA, 30 bp, Artificial Sequence
  Synthetic oligonucleotide
aacagggtgccgacgcgacaagtttaggag

SEQ ID NO: 141193 - DNA, 30 bp, Artificial Sequence
  Synthetic oligonucleotide
cggagctgtaattaacagccgagcacggag

SEQ ID NO: 141194 - DNA, 30 bp, Artificial Sequence
  Synthetic oligonucleotide
ctgcgtaacgtatctggccatggaccggag

SEQ ID NO: 141195 - DNA, 30 bp, Artificial Sequence
  Synthetic oligonucleotide
aatggaccgtgcggacacttcataccggag

SEQ ID NO: 141196 - DNA, 30 bp, Artificial Sequence
  Synthetic oligonucleotide
aaaggagctaatattctgggataagcggag

SEQ ID NO: 141197 - DNA, 30 bp, Artificial Sequence
  Synthetic oligonucleotide
atccccaccctcggtcaggaaaatgcggag

SEQ ID NO: 141198 - DNA, 30 bp, Artificial Sequence
  Synthetic oligonucleotide
tggcattgtattgtagtgagcaatgcggag

SEQ ID NO: 141199 - DNA, 30 bp, Artificial Sequence
  Synthetic oligonucleotide
gattactcgacggggtacattcgtgcggag

SEQ ID NO: 141200 - DNA, 30 bp, Artificial Sequence
  Synthetic oligonucleotide
ctgtgaaatggcggcaaggtaattgcggag

SEQ ID NO: 141201 - DNA, 30 bp, Artificial Sequence
  Synthetic oligonucleotide
ggcattcatacttgctctgagcttgcggag

SEQ ID NO: 141202 - DNA, 30 bp, Artificial Sequence
  Synthetic oligonucleotide
aggatttacagggggccgtgccaatcggag

SEQ ID NO: 141203 - DNA, 30 bp, Artificial Sequence
  Synthetic oligonucleotide
ctatctatctggaattaccactcctcggag

SEQ ID NO: 141204 - DNA, 30 bp, Artificial Sequence
  Synthetic oligonucleotide
attccccatatttcataaaagtcgtcggag

SEQ ID NO: 141205 - DNA, 30 bp, Artificial Sequence
  Synthetic oligonucleotide
agagttatgccttttcatacagggtcggag

SEQ ID NO: 141206 - DNA, 31 bp, Artificial Sequence
  Synthetic oligonucleotide
atgagggtagggcaacatctatttaagggag

SEQ ID NO: 141207 - DNA, 30 bp, Artificial Sequence
  Synthetic oligonucleotide
actaatgtgggctgtatggtatacagggag

SEQ ID NO: 141208 - DNA, 30 bp, Artificial Sequence
  Synthetic oligonucleotide
cgagagacagtcggtttaatgaccagggag

SEQ ID NO: 141209 - DNA, 30 bp, Artificial Sequence
  Synthetic oligonucleotide
ataaagggcacgttggtaaatcgcagggag

SEQ ID NO: 141210 - DNA, 30 bp, Artificial Sequence
  Synthetic oligonucleotide
aagaggggttacgttcggattggcagggag

SEQ ID NO: 141211 - DNA, 30 bp, Artificial Sequence
  Synthetic oligonucleotide
cggggcccaatgccataaagccagagggag

SEQ ID NO: 141212 - DNA, 30 bp, Artificial Sequence
  Synthetic oligonucleotide
cgcgtctcggcttctcttgattagagggag

SEQ ID NO: 141213 - DNA, 30 bp, Artificial Sequence
  Synthetic oligonucleotide
caggttagagatggttagtgtctgagggag

SEQ ID NO: 141214 - DNA, 30 bp, Artificial Sequence
  Synthetic oligonucleotide
ccgtcacttgagcaattggcacatagggag

SEQ ID NO: 141215 - DNA, 30 bp, Artificial Sequence
  Synthetic oligonucleotide
cgtgcccgatcaacctgaggtgatagggag

SEQ ID NO: 141216 - DNA, 30 bp, Artificial Sequence
  Synthetic oligonucleotide
gagctgtgcgattgaagggagtatagggag

SEQ ID NO: 141217 - DNA, 30 bp, Artificial Sequence
  Synthetic oligonucleotide
tcattccacagatcgaagtattgtagggag

SEQ ID NO: 141218 - DNA, 30 bp, Artificial Sequence
  Synthetic oligonucleotide
cggaggagggatatttctaagttacgggag

SEQ ID NO: 141219 - DNA, 30 bp, Artificial Sequence
  Synthetic oligonucleotide
atgaaatttagcggcctaggttcccgggag

SEQ ID NO: 141220 - DNA, 30 bp, Artificial Sequence
  Synthetic oligonucleotide
ggtgtttaaggtaatgtttgcggccgggag

SEQ ID NO: 141221 - DNA, 30 bp, Artificial Sequence
  Synthetic oligonucleotide
ttgtgagaggtgcatcgacatctccgggag

SEQ ID NO: 141222 - DNA, 30 bp, Artificial Sequence
  Synthetic oligonucleotide
tctacgcgctcttttggtcatgtccgggag

SEQ ID NO: 141223 - DNA, 30 bp, Artificial Sequence
  Synthetic oligonucleotide
tttaaagcactatggttatcccagcgggag

SEQ ID NO: 141224 - DNA, 30 bp, Artificial Sequence
  Synthetic oligonucleotide
ctcatgtgctaccttacagcgcaaggggag

SEQ ID NO: 141225 - DNA, 30 bp, Artificial Sequence
  Synthetic oligonucleotide
aggttctatagagtttcctcctgaggggag

SEQ ID NO: 141226 - DNA, 30 bp, Artificial Sequence
  Synthetic oligonucleotide
ccagtaggttcgaatacaaggaccggggag

SEQ ID NO: 141227 - DNA, 30 bp, Artificial Sequence
  Synthetic oligonucleotide
gtgggtcagcgctaaaattatcccggggag

SEQ ID NO: 141228 - DNA, 30 bp, Artificial Sequence
  Synthetic oligonucleotide
atccgtatcccgttactgacactcggggag

SEQ ID NO: 141229 - DNA, 30 bp, Artificial Sequence
  Synthetic oligonucleotide
ccaataggtgcacgacagtgcgagggggag

SEQ ID NO: 141230 - DNA, 30 bp, Artificial Sequence
  Synthetic oligonucleotide
ggatcttgccgaaggtcctgaacgggggag

SEQ ID NO: 141231 - DNA, 30 bp, Artificial Sequence
  Synthetic oligonucleotide
tacagaaccgaagtggactgcgatggggag

SEQ ID NO: 141232 - DNA, 30 bp, Artificial Sequence
  Synthetic oligonucleotide
gttcgttctgtaacccgacatggtggggag

SEQ ID NO: 141233 - DNA, 30 bp, Artificial Sequence
  Synthetic oligonucleotide
cgacataatctcccagcggacggatgggag

SEQ ID NO: 141234 - DNA, 30 bp, Artificial Sequence
  Synthetic oligonucleotide
gttgtcaacactttatatgtctactgggag

SEQ ID NO: 141235 - DNA, 30 bp, Artificial Sequence
  Synthetic oligonucleotide
aattgcgatcaggggataattacgtgggag

SEQ ID NO: 141236 - DNA, 30 bp, Artificial Sequence
  Synthetic oligonucleotide
tggtctaattcctgtataactacttgggag

SEQ ID NO: 141237 - DNA, 30 bp, Artificial Sequence
  Synthetic oligonucleotide
cagcgcagtggtaagaaattgtgaatggag

SEQ ID NO: 141238 - DNA, 30 bp, Artificial Sequence
  Synthetic oligonucleotide
cgccgtatatcgatcataagacacatggag

SEQ ID NO: 141239 - DNA, 30 bp, Artificial Sequence
  Synthetic oligonucleotide
gtaatgtgactcgtgtgaaactcgatggag

SEQ ID NO: 141240 - DNA, 30 bp, Artificial Sequence
  Synthetic oligonucleotide
catcggtcgatgtgccgcactttgatggag

SEQ ID NO: 141241 - DNA, 30 bp, Artificial Sequence
  Synthetic oligonucleotide
tctcttccgtttacacaggccacactggag

SEQ ID NO: 141242 - DNA, 30 bp, Artificial Sequence
  Synthetic oligonucleotide
gcggtcacgacgcggtcttacggagtggag

SEQ ID NO: 141243 - DNA, 30 bp, Artificial Sequence
  Synthetic oligonucleotide
aagtcaggttgcgatctttgctaggtggag

SEQ ID NO: 141244 - DNA, 30 bp, Artificial Sequence
  Synthetic oligonucleotide
atagcaaaagatcgcgcgcctacggtggag

SEQ ID NO: 141245 - DNA, 30 bp, Artificial Sequence
  Synthetic oligonucleotide
ctgcgctaaagcaatataatatatgtggag

SEQ ID NO: 141246 - DNA, 30 bp, Artificial Sequence
  Synthetic oligonucleotide
gtccctgtcttagaaggtcggtctgtggag

SEQ ID NO: 141247 - DNA, 30 bp, Artificial Sequence
  Synthetic oligonucleotide
ggacgttccaatacacaatttcacttggag

SEQ ID NO: 141248 - DNA, 30 bp, Artificial Sequence
  Synthetic oligonucleotide
cacaacgccttcctacggatgcccttggag

SEQ ID NO: 141249 - DNA, 30 bp, Artificial Sequence
  Synthetic oligonucleotide
ttacgtcaatctgagaatcgtaggttggag

SEQ ID NO: 141250 - DNA, 30 bp, Artificial Sequence
  Synthetic oligonucleotide
agattttagggtgatcttctacaaaatgag

SEQ ID NO: 141251 - DNA, 30 bp, Artificial Sequence
  Synthetic oligonucleotide
tattacccgaggcacagtaacgcaaatgag

SEQ ID NO: 141252 - DNA, 30 bp, Artificial Sequence
  Synthetic oligonucleotide
gctttcaggtactgagtaatggccaatgag

SEQ ID NO: 141253 - DNA, 30 bp, Artificial Sequence
  Synthetic oligonucleotide
cacgcattaaaactggtaccgggcaatgag

SEQ ID NO: 141254 - DNA, 30 bp, Artificial Sequence
  Synthetic oligonucleotide
aacatcgcttggcagggtaggggcaatgag

SEQ ID NO: 141255 - DNA, 30 bp, Artificial Sequence
  Synthetic oligonucleotide
atcacgcaaccagggtcaacactgaatgag

SEQ ID NO: 141256 - DNA, 30 bp, Artificial Sequence
  Synthetic oligonucleotide
ggctgggtttaagtgtcggagctgaatgag

SEQ ID NO: 141257 - DNA, 30 bp, Artificial Sequence
  Synthetic oligonucleotide
tctttggaccgtccctttggcgcccatgag

SEQ ID NO: 141258 - DNA, 30 bp, Artificial Sequence
  Synthetic oligonucleotide
aggctattgaccttagtgccttgtcatgag

SEQ ID NO: 141259 - DNA, 30 bp, Artificial Sequence
  Synthetic oligonucleotide
agtaatttgcgggtgcaatccattcatgag

SEQ ID NO: 141260 - DNA, 30 bp, Artificial Sequence
  Synthetic oligonucleotide
tgaatgcgcacaggaactgaaacagatgag

SEQ ID NO: 141261 - DNA, 30 bp, Artificial Sequence
  Synthetic oligonucleotide
cacattaaacgactgggtggtaccgatgag

SEQ ID NO: 141262 - DNA, 30 bp, Artificial Sequence
  Synthetic oligonucleotide
ctgggtgtggttcctcactaagaatatgag

SEQ ID NO: 141263 - DNA, 30 bp, Artificial Sequence
  Synthetic oligonucleotide
gagtagggagggcattgtgaggactatgag

SEQ ID NO: 141264 - DNA, 30 bp, Artificial Sequence
  Synthetic oligonucleotide
caactcggtcacacgcttaagtactatgag

SEQ ID NO: 141265 - DNA, 30 bp, Artificial Sequence
  Synthetic oligonucleotide
aactatccctatcggcagtatcagtatgag

SEQ ID NO: 141266 - DNA, 30 bp, Artificial Sequence
  Synthetic oligonucleotide
cgcacataacttgaagccacgcattatgag

SEQ ID NO: 141267 - DNA, 30 bp, Artificial Sequence
  Synthetic oligonucleotide
ccacttcggcgtgaaatcatccaaactgag

SEQ ID NO: 141268 - DNA, 30 bp, Artificial Sequence
  Synthetic oligonucleotide
ccttgccgacaagatttcctccaaactgag

SEQ ID NO: 141269 - DNA, 30 bp, Artificial Sequence
  Synthetic oligonucleotide
gggtatgaagtttcgcgatattgaactgag

SEQ ID NO: 141270 - DNA, 30 bp, Artificial Sequence
  Synthetic oligonucleotide
tatgtggcaacaaacgatagattaactgag

SEQ ID NO: 141271 - DNA, 30 bp, Artificial Sequence
  Synthetic oligonucleotide
tcagctatgttaaactgttggaacactgag

SEQ ID NO: 141272 - DNA, 30 bp, Artificial Sequence
  Synthetic oligonucleotide
agccgccatgtccggccgggagacactgag

SEQ ID NO: 141273 - DNA, 30 bp, Artificial Sequence
  Synthetic oligonucleotide
cgcgttgggggaacttatcaatacactgag

SEQ ID NO: 141274 - DNA, 30 bp, Artificial Sequence
  Synthetic oligonucleotide
acttagcggatgttacgtcataaacctgag

SEQ ID NO: 141275 - DNA, 30 bp, Artificial Sequence
  Synthetic oligonucleotide
actattggaaagttggtaagtaaacctgag

SEQ ID NO: 141276 - DNA, 30 bp, Artificial Sequence
  Synthetic oligonucleotide
tcatataggtcgaacgtagtactgcctgag

SEQ ID NO: 141277 - DNA, 30 bp, Artificial Sequence
  Synthetic oligonucleotide
gggtacgacggtgtatgcatcagggctgag

SEQ ID NO: 141278 - DNA, 30 bp, Artificial Sequence
  Synthetic oligonucleotide
tgtagggaccaggacctggtgaatgctgag

SEQ ID NO: 141279 - DNA, 30 bp, Artificial Sequence
  Synthetic oligonucleotide
ccaaagaattcctctactggtgcatctgag

SEQ ID NO: 141280 - DNA, 30 bp, Artificial Sequence
  Synthetic oligonucleotide
gaacgggttttaaagacctgcgattctgag

SEQ ID NO: 141281 - DNA, 30 bp, Artificial Sequence
  Synthetic oligonucleotide
ggacgggtcaaattcattggccacagtgag

SEQ ID NO: 141282 - DNA, 30 bp, Artificial Sequence
  Synthetic oligonucleotide
gatgattacgaacatggcgctcacagtgag

SEQ ID NO: 141283 - DNA, 30 bp, Artificial Sequence
  Synthetic oligonucleotide
aaaggacaatgctctataacacagagtgag

SEQ ID NO: 141284 - DNA, 30 bp, Artificial Sequence
  Synthetic oligonucleotide
aggcgtctgaaaacgggcgtcagtagtgag

SEQ ID NO: 141285 - DNA, 30 bp, Artificial Sequence
  Synthetic oligonucleotide
aattaagttacggccatcgagaatcgtgag

SEQ ID NO: 141286 - DNA, 30 bp, Artificial Sequence
  Synthetic oligonucleotide
tcattcatgggtaacattgttgctcgtgag

SEQ ID NO: 141287 - DNA, 30 bp, Artificial Sequence
  Synthetic oligonucleotide
tgtaatcaatcaaatactgtaaaaggtgag

SEQ ID NO: 141288 - DNA, 30 bp, Artificial Sequence
  Synthetic oligonucleotide
gaaggcggcattggcaagagcttaggtgag

SEQ ID NO: 141289 - DNA, 30 bp, Artificial Sequence
  Synthetic oligonucleotide
gacccccgaccttctgaacataccggtgag

SEQ ID NO: 141290 - DNA, 30 bp, Artificial Sequence
  Synthetic oligonucleotide
cggacggacccgttagactgaaatggtgag

SEQ ID NO: 141291 - DNA, 30 bp, Artificial Sequence
  Synthetic oligonucleotide
aacacgtggtctggttcgaagagtggtgag

SEQ ID NO: 141292 - DNA, 30 bp, Artificial Sequence
  Synthetic oligonucleotide
tcaggagaacctgttgtggattttggtgag

SEQ ID NO: 141293 - DNA, 30 bp, Artificial Sequence
  Synthetic oligonucleotide
tgatgtaaggtttacgaccgtagttgtgag

SEQ ID NO: 141294 - DNA, 30 bp, Artificial Sequence
  Synthetic oligonucleotide
gggtttgggattttttgagtggcaattgag

SEQ ID NO: 141295 - DNA, 30 bp, Artificial Sequence
  Synthetic oligonucleotide
tgaaagcaggcctcttaaggtgtgattgag

SEQ ID NO: 141296 - DNA, 30 bp, Artificial Sequence
  Synthetic oligonucleotide
tatacccgaagcaaaatagacgcacttgag

SEQ ID NO: 141297 - DNA, 30 bp, Artificial Sequence
  Synthetic oligonucleotide
atcacaaaacaatgagatcgaagacttgag

SEQ ID NO: 141298 - DNA, 30 bp, Artificial Sequence
  Synthetic oligonucleotide
gcggttgtttgttgaaagcactagcttgag

SEQ ID NO: 141299 - DNA, 30 bp, Artificial Sequence
  Synthetic oligonucleotide
tcgcataccgatggatgtttgaatcttgag

SEQ ID NO: 141300 - DNA, 31 bp, Artificial Sequence
  Synthetic oligonucleotide
tggggcctttatcgttcacagtcgtcttgag

SEQ ID NO: 141301 - DNA, 30 bp, Artificial Sequence
  Synthetic oligonucleotide
aaacgagaaaccgcgcctcccgaggttgag

SEQ ID NO: 141302 - DNA, 30 bp, Artificial Sequence
  Synthetic oligonucleotide
gtcaatgtttccacaaaactgtgtgttgag

SEQ ID NO: 141303 - DNA, 30 bp, Artificial Sequence
  Synthetic oligonucleotide
accttaagtcgaccttcggtttttgttgag

SEQ ID NO: 141304 - DNA, 30 bp, Artificial Sequence
  Synthetic oligonucleotide
tccggattacggctcaaaggaccatttgag

SEQ ID NO: 141305 - DNA, 30 bp, Artificial Sequence
  Synthetic oligonucleotide
gatgaggggctacgggcaggggcatttgag

SEQ ID NO: 141306 - DNA, 30 bp, Artificial Sequence
  Synthetic oligonucleotide
cattctaaatagtaagcgcaattatttgag

SEQ ID NO: 141307 - DNA, 30 bp, Artificial Sequence
  Synthetic oligonucleotide
gttttaggggtcattcgttcgccgtttgag

SEQ ID NO: 141308 - DNA, 30 bp, Artificial Sequence
  Synthetic oligonucleotide
cttgaccctacgagatgtttccattttgag

SEQ ID NO: 141309 - DNA, 30 bp, Artificial Sequence
  Synthetic oligonucleotide
atgtaaacttcatggcacgctcattttgag

SEQ ID NO: 141310 - DNA, 30 bp, Artificial Sequence
  Synthetic oligonucleotide
gtagtctaggcctgaatcagtaaaaaatag

SEQ ID NO: 141311 - DNA, 30 bp, Artificial Sequence
  Synthetic oligonucleotide
caccaatgggtgcataggaaaacaaaatag

SEQ ID NO: 141312 - DNA, 30 bp, Artificial Sequence
  Synthetic oligonucleotide
catattttcagactgatcacgtagaaatag

SEQ ID NO: 141313 - DNA, 30 bp, Artificial Sequence
  Synthetic oligonucleotide
caggcgcgcgccgttggcgattcccaatag

SEQ ID NO: 141314 - DNA, 30 bp, Artificial Sequence
  Synthetic oligonucleotide
ctggccacggccacgtgatcctggcaatag

SEQ ID NO: 141315 - DNA, 30 bp, Artificial Sequence
  Synthetic oligonucleotide
aagattaacccagaaacttctcatgaatag

SEQ ID NO: 141316 - DNA, 30 bp, Artificial Sequence
  Synthetic oligonucleotide
acggctgcgcattcgtcatattcataatag

SEQ ID NO: 141317 - DNA, 30 bp, Artificial Sequence
  Synthetic oligonucleotide
gtggagagggtaaattcacaagtataatag

SEQ ID NO: 141318 - DNA, 30 bp, Artificial Sequence
  Synthetic oligonucleotide
ctgcaacatcaagcgccacgtaagtaatag

SEQ ID NO: 141319 - DNA, 30 bp, Artificial Sequence
  Synthetic oligonucleotide
ttcatcagtaccaaaaaacgaaattaatag

SEQ ID NO: 141320 - DNA, 30 bp, Artificial Sequence
  Synthetic oligonucleotide
attactataagggtcacccgttcaacatag

SEQ ID NO: 141321 - DNA, 30 bp, Artificial Sequence
  Synthetic oligonucleotide
agtggttacgtgtagtgtcgaatgacatag

SEQ ID NO: 141322 - DNA, 30 bp, Artificial Sequence
  Synthetic oligonucleotide
attagggtgccaggtgtgtctgtagcatag

SEQ ID NO: 141323 - DNA, 30 bp, Artificial Sequence
  Synthetic oligonucleotide
gggcaggagatgtgaaccgtgggggcatag

SEQ ID NO: 141324 - DNA, 30 bp, Artificial Sequence
  Synthetic oligonucleotide
cttctgggggttgtcgttagaaatgcatag

SEQ ID NO: 141325 - DNA, 30 bp, Artificial Sequence
  Synthetic oligonucleotide
ttacgatagatgtcttgtatctgtgcatag

SEQ ID NO: 141326 - DNA, 30 bp, Artificial Sequence
  Synthetic oligonucleotide
gggaacccaagtggtatgtgtatgtcatag

SEQ ID NO: 141327 - DNA, 30 bp, Artificial Sequence
  Synthetic oligonucleotide
tgcgatacactggctgaagaaacaagatag

SEQ ID NO: 141328 - DNA, 30 bp, Artificial Sequence
  Synthetic oligonucleotide
acaacaggttaggaggctttggtcagatag

SEQ ID NO: 141329 - DNA, 30 bp, Artificial Sequence
  Synthetic oligonucleotide
tgccttctgcggggaccttttgcgagatag

SEQ ID NO: 141330 - DNA, 30 bp, Artificial Sequence
  Synthetic oligonucleotide
gttggacaaagtggcaatttcgatagatag

SEQ ID NO: 141331 - DNA, 30 bp, Artificial Sequence
  Synthetic oligonucleotide
tgcgtagatactccgatccaaactagatag

SEQ ID NO: 141332 - DNA, 30 bp, Artificial Sequence
  Synthetic oligonucleotide
ccaggtcagtgccgttcacaggttagatag

SEQ ID NO: 141333 - DNA, 30 bp, Artificial Sequence
  Synthetic oligonucleotide
actcgtcctgattggatttcgggacgatag

SEQ ID NO: 141334 - DNA, 30 bp, Artificial Sequence
  Synthetic oligonucleotide
tgcaaaaaacgtgcaacacccctccgatag

SEQ ID NO: 141335 - DNA, 30 bp, Artificial Sequence
  Synthetic oligonucleotide
ggagctagacccctgattgactctcgatag

SEQ ID NO: 141336 - DNA, 30 bp, Artificial Sequence
  Synthetic oligonucleotide
cgccaattactgctttttagcaaaggatag

SEQ ID NO: 141337 - DNA, 30 bp, Artificial Sequence
  Synthetic oligonucleotide
agctaggctttcctgccgggcaaaggatag

SEQ ID NO: 141338 - DNA, 30 bp, Artificial Sequence
  Synthetic oligonucleotide
cctacaggagggagggtggttcggggatag

SEQ ID NO: 141339 - DNA, 30 bp, Artificial Sequence
  Synthetic oligonucleotide
cgtttccagaattcatcgaagaaaatatag

SEQ ID NO: 141340 - DNA, 30 bp, Artificial Sequence
  Synthetic oligonucleotide
gcggggcaattagctgcactagaaatatag

SEQ ID NO: 141341 - DNA, 30 bp, Artificial Sequence
  Synthetic oligonucleotide
gccgtgtgcatttccatgccttcaatatag

SEQ ID NO: 141342 - DNA, 30 bp, Artificial Sequence
  Synthetic oligonucleotide
tttaggggctcactagaggctcgcatatag

SEQ ID NO: 141343 - DNA, 30 bp, Artificial Sequence
  Synthetic oligonucleotide
ccgaacagctatagggctcgtacgatatag

SEQ ID NO: 141344 - DNA, 30 bp, Artificial Sequence
  Synthetic oligonucleotide
ttcggaggaccgataatatccaatatatag

SEQ ID NO: 141345 - DNA, 30 bp, Artificial Sequence
  Synthetic oligonucleotide
aaccgtctcgtatgtctgaaccctatatag

SEQ ID NO: 141346 - DNA, 30 bp, Artificial Sequence
  Synthetic oligonucleotide
aacccgaacatgacccacctagttatatag

SEQ ID NO: 141347 - DNA, 30 bp, Artificial Sequence
  Synthetic oligonucleotide
ggcgtcagctctggcatatccagactatag

SEQ ID NO: 141348 - DNA, 30 bp, Artificial Sequence
  Synthetic oligonucleotide
cgaaatcacacttctgtatgagtcctatag

SEQ ID NO: 141349 - DNA, 30 bp, Artificial Sequence
  Synthetic oligonucleotide
agctgaacaacatgtacaatcttgctatag

SEQ ID NO: 141350 - DNA, 30 bp, Artificial Sequence
  Synthetic oligonucleotide
ggaacccgacggatcggggttcaagtatag

SEQ ID NO: 141351 - DNA, 30 bp, Artificial Sequence
  Synthetic oligonucleotide
tgcacgattagggaagcgacctccgtatag

SEQ ID NO: 141352 - DNA, 30 bp, Artificial Sequence
  Synthetic oligonucleotide
gctcgagtaactttctaacgtatggtatag

SEQ ID NO: 141353 - DNA, 30 bp, Artificial Sequence
  Synthetic oligonucleotide
tttgcgcatgtctcgaatctgctattatag

SEQ ID NO: 141354 - DNA, 30 bp, Artificial Sequence
  Synthetic oligonucleotide
gagaatagttaagtcgcaatatgcttatag

SEQ ID NO: 141355 - DNA, 30 bp, Artificial Sequence
  Synthetic oligonucleotide
gtcgcgaatttgggagcttgcgggttatag

SEQ ID NO: 141356 - DNA, 30 bp, Artificial Sequence
  Synthetic oligonucleotide
gtgcggactgaatagctacggggaaactag

SEQ ID NO: 141357 - DNA, 30 bp, Artificial Sequence
  Synthetic oligonucleotide
atgtcggtcgctgagttcatcatcaactag

SEQ ID NO: 141358 - DNA, 30 bp, Artificial Sequence
  Synthetic oligonucleotide
aatcgggtagcgaaaagacggaagaactag

SEQ ID NO: 141359 - DNA, 30 bp, Artificial Sequence
  Synthetic oligonucleotide
cccctgtgctaacacattgcggagaactag

SEQ ID NO: 141360 - DNA, 30 bp, Artificial Sequence
  Synthetic oligonucleotide
acgcgaacagttcacgagccaacgaactag

SEQ ID NO: 141361 - DNA, 30 bp, Artificial Sequence
  Synthetic oligonucleotide
tcatcctcatcaaccgtgtcatcacactag

SEQ ID NO: 141362 - DNA, 30 bp, Artificial Sequence
  Synthetic oligonucleotide
acttggacggtcgatcctcacatacactag

SEQ ID NO: 141363 - DNA, 31 bp, Artificial Sequence
  Synthetic oligonucleotide
accttgagatgtcaccgaatttagccactag

SEQ ID NO: 141364 - DNA, 30 bp, Artificial Sequence
  Synthetic oligonucleotide
cagggggagcattagcacattttccactag

SEQ ID NO: 141365 - DNA, 30 bp, Artificial Sequence
  Synthetic oligonucleotide
taccagagagattatgcgaagttgtactag

SEQ ID NO: 141366 - DNA, 30 bp, Artificial Sequence
  Synthetic oligonucleotide
gagggcttgtagtctgtggtgaattactag

SEQ ID NO: 141367 - DNA, 30 bp, Artificial Sequence
  Synthetic oligonucleotide
ttaactaatttgatctataatggaacctag

SEQ ID NO: 141368 - DNA, 30 bp, Artificial Sequence
  Synthetic oligonucleotide
acttccgccgcgcgctaacaaatgacctag

SEQ ID NO: 141369 - DNA, 30 bp, Artificial Sequence
  Synthetic oligonucleotide
acagtctctccgacgaaattcgatacctag

SEQ ID NO: 141370 - DNA, 30 bp, Artificial Sequence
  Synthetic oligonucleotide
tggttgtttaagatgaaacgggcgccctag

SEQ ID NO: 141371 - DNA, 30 bp, Artificial Sequence
  Synthetic oligonucleotide
gaaagctcataacataaaggtctagcctag

SEQ ID NO: 141372 - DNA, 30 bp, Artificial Sequence
  Synthetic oligonucleotide
cgcccacgtgaggggtatagaaaggcctag

SEQ ID NO: 141373 - DNA, 30 bp, Artificial Sequence
  Synthetic oligonucleotide
agtccagtaaccacagctatgccggcctag

SEQ ID NO: 141374 - DNA, 30 bp, Artificial Sequence
  Synthetic oligonucleotide
ggcccgcgatagtgaggtcaatgggcctag

SEQ ID NO: 141375 - DNA, 30 bp, Artificial Sequence
  Synthetic oligonucleotide
ggatgggcgagaaaactgacgttggcctag

SEQ ID NO: 141376 - DNA, 30 bp, Artificial Sequence
  Synthetic oligonucleotide
cgatacaagggcgtgtgattctatgcctag

SEQ ID NO: 141377 - DNA, 30 bp, Artificial Sequence
  Synthetic oligonucleotide
gttaccttccggccatgctatcgtgcctag

SEQ ID NO: 141378 - DNA, 30 bp, Artificial Sequence
  Synthetic oligonucleotide
ccacggtccggttatgtagacgaatcctag

SEQ ID NO: 141379 - DNA, 30 bp, Artificial Sequence
  Synthetic oligonucleotide
tgtacatttcggacgtgcagacgttcctag

SEQ ID NO: 141380 - DNA, 30 bp, Artificial Sequence
  Synthetic oligonucleotide
tcaaaccatcttggtagtaatcgttcctag

SEQ ID NO: 141381 - DNA, 30 bp, Artificial Sequence
  Synthetic oligonucleotide
ggtgtatggcaacaagggtgagttagctag

SEQ ID NO: 141382 - DNA, 30 bp, Artificial Sequence
  Synthetic oligonucleotide
tcggggagggacgggcagagctcgcgctag

SEQ ID NO: 141383 - DNA, 30 bp, Artificial Sequence
  Synthetic oligonucleotide
taaggttagacttacaacgatgttcgctag

SEQ ID NO: 141384 - DNA, 30 bp, Artificial Sequence
  Synthetic oligonucleotide
gcggtattcttccgataggattaaggctag

SEQ ID NO: 141385 - DNA, 30 bp, Artificial Sequence
  Synthetic oligonucleotide
tgtactaccccaagagccttcagcggctag

SEQ ID NO: 141386 - DNA, 30 bp, Artificial Sequence
  Synthetic oligonucleotide
tagtatcgcgccttcaataccatcggctag

SEQ ID NO: 141387 - DNA, 30 bp, Artificial Sequence
  Synthetic oligonucleotide
ttcatcctcagcgcaacaaagttgggctag

SEQ ID NO: 141388 - DNA, 30 bp, Artificial Sequence
  Synthetic oligonucleotide
gcatcgagtgtgctgcaggtgccatgctag

SEQ ID NO: 141389 - DNA, 30 bp, Artificial Sequence
  Synthetic oligonucleotide
ggcgtatggtcgagttattatgtatgctag

SEQ ID NO: 141390 - DNA, 30 bp, Artificial Sequence
  Synthetic oligonucleotide
aaaggtcgccacaaccctacaaggtgctag

SEQ ID NO: 141391 - DNA, 30 bp, Artificial Sequence
  Synthetic oligonucleotide
tccgtaacgaacacgtcccgtcggtgctag

SEQ ID NO: 141392 - DNA, 30 bp, Artificial Sequence
  Synthetic oligonucleotide
ttggcgactcctcaaagacggtaaatctag

SEQ ID NO: 141393 - DNA, 30 bp, Artificial Sequence
  Synthetic oligonucleotide
catcattacggagtctttgaaatcatctag

SEQ ID NO: 141394 - DNA, 30 bp, Artificial Sequence
  Synthetic oligonucleotide
ggtcccactcccaattctaggctcatctag

SEQ ID NO: 141395 - DNA, 30 bp, Artificial Sequence
  Synthetic oligonucleotide
tcgatccttgcaacatacctgaacctctag

SEQ ID NO: 141396 - DNA, 30 bp, Artificial Sequence
  Synthetic oligonucleotide
gttcccaggtgcgctcagcgatatctctag

SEQ ID NO: 141397 - DNA, 30 bp, Artificial Sequence
  Synthetic oligonucleotide
ggtgactgttcgctgtcaatgaaagtctag

SEQ ID NO: 141398 - DNA, 30 bp, Artificial Sequence
  Synthetic oligonucleotide
gcgggcccacggtctaactgagacgtctag

SEQ ID NO: 141399 - DNA, 30 bp, Artificial Sequence
  Synthetic oligonucleotide
tacagtaatgggtgaatccacgctgtctag

SEQ ID NO: 141400 - DNA, 30 bp, Artificial Sequence
  Synthetic oligonucleotide
ctgaaggtcggcgttgaggtatccttctag

SEQ ID NO: 141401 - DNA, 30 bp, Artificial Sequence
  Synthetic oligonucleotide
taatagcgctcctcacgtcaataaaagtag

SEQ ID NO: 141402 - DNA, 30 bp, Artificial Sequence
  Synthetic oligonucleotide
tgtagctagtcgtaaccgaaaagcaagtag

SEQ ID NO: 141403 - DNA, 30 bp, Artificial Sequence
  Synthetic oligonucleotide
acagtattcgttacattccggcggaagtag

SEQ ID NO: 141404 - DNA, 30 bp, Artificial Sequence
  Synthetic oligonucleotide
cctgtctcacataggtgtcggcctaagtag

SEQ ID NO: 141405 - DNA, 30 bp, Artificial Sequence
  Synthetic oligonucleotide
cggcttatctcaactcctcagtgtaagtag

SEQ ID NO: 141406 - DNA, 30 bp, Artificial Sequence
  Synthetic oligonucleotide
cgctgcaaaggctgtttattgattaagtag

SEQ ID NO: 141407 - DNA, 29 bp, Artificial Sequence
  Synthetic oligonucleotide
gaccgctccaaaaattgtggacacagtag

SEQ ID NO: 141408 - DNA, 30 bp, Artificial Sequence
  Synthetic oligonucleotide
gcgcctacgattgagcctcattggcagtag

SEQ ID NO: 141409 - DNA, 30 bp, Artificial Sequence
  Synthetic oligonucleotide
tgcatatgaagtgtcattgctattcagtag

SEQ ID NO: 141410 - DNA, 30 bp, Artificial Sequence
  Synthetic oligonucleotide
ttacaccattacgttatttcctaagagtag

SEQ ID NO: 141411 - DNA, 30 bp, Artificial Sequence
  Synthetic oligonucleotide
ctgcccccttaaggtagactatacgagtag

SEQ ID NO: 141412 - DNA, 30 bp, Artificial Sequence
  Synthetic oligonucleotide
catggtctctgataatttgccagcgagtag

SEQ ID NO: 141413 - DNA, 30 bp, Artificial Sequence
  Synthetic oligonucleotide
ccaggcgcggagttctcagtattcgagtag

SEQ ID NO: 141414 - DNA, 30 bp, Artificial Sequence
  Synthetic oligonucleotide
aggaacgcaagcatgctgcatcaatagtag

SEQ ID NO: 141415 - DNA, 30 bp, Artificial Sequence
  Synthetic oligonucleotide
gtatctcaaggtcggttcgtgacatagtag

SEQ ID NO: 141416 - DNA, 30 bp, Artificial Sequence
  Synthetic oligonucleotide
cgtactgccaaggtgtggaacctatagtag

SEQ ID NO: 141417 - DNA, 30 bp, Artificial Sequence
  Synthetic oligonucleotide
tggctgtggacaattcgattccactagtag

SEQ ID NO: 141418 - DNA, 29 bp, Artificial Sequence
  Synthetic oligonucleotide
tgggacgaacggccttaatcgactagtag

SEQ ID NO: 141419 - DNA, 30 bp, Artificial Sequence
  Synthetic oligonucleotide
ttgttcacgagcgtcggtgacgcctagtag

SEQ ID NO: 141420 - DNA, 30 bp, Artificial Sequence
  Synthetic oligonucleotide
aaacgcctgggacaattatcgtcgtagtag

SEQ ID NO: 141421 - DNA, 30 bp, Artificial Sequence
  Synthetic oligonucleotide
gacttcggagattaatccacacggtagtag

SEQ ID NO: 141422 - DNA, 30 bp, Artificial Sequence
  Synthetic oligonucleotide
atgtaagggacaagagatacgccttagtag

SEQ ID NO: 141423 - DNA, 30 bp, Artificial Sequence
  Synthetic oligonucleotide
ggcatcaattgatgagccaaacccacgtag

SEQ ID NO: 141424 - DNA, 30 bp, Artificial Sequence
  Synthetic oligonucleotide
gggacgaccgtagcagccgcgatcacgtag

SEQ ID NO: 141425 - DNA, 30 bp, Artificial Sequence
  Synthetic oligonucleotide
catgaaaccaactttacgcctctcacgtag

SEQ ID NO: 141426 - DNA, 30 bp, Artificial Sequence
  Synthetic oligonucleotide
aaccagaaagataattagtattatacgtag

SEQ ID NO: 141427 - DNA, 30 bp, Artificial Sequence
  Synthetic oligonucleotide
ataagtacccgcgcgggaaactgaccgtag

SEQ ID NO: 141428 - DNA, 30 bp, Artificial Sequence
  Synthetic oligonucleotide
tcatctaatgtgttgcgaataagcccgtag

SEQ ID NO: 141429 - DNA, 30 bp, Artificial Sequence
  Synthetic oligonucleotide
gggctaaaagtatactatgagggcccgtag

SEQ ID NO: 141430 - DNA, 30 bp, Artificial Sequence
  Synthetic oligonucleotide
atgcgatgccattaaggcacgacgccgtag

SEQ ID NO: 141431 - DNA, 30 bp, Artificial Sequence
  Synthetic oligonucleotide
gtcgccggcgcaaaaacgagtagtccgtag

SEQ ID NO: 141432 - DNA, 30 bp, Artificial Sequence
  Synthetic oligonucleotide
gagggatggtctcatctcaggctcgcgtag

SEQ ID NO: 141433 - DNA, 30 bp, Artificial Sequence
  Synthetic oligonucleotide
aatataaacgaaggaaagataaaggcgtag

SEQ ID NO: 141434 - DNA, 30 bp, Artificial Sequence
  Synthetic oligonucleotide
gcttgactgtgccgcggttagggggcgtag

SEQ ID NO: 141435 - DNA, 30 bp, Artificial Sequence
  Synthetic oligonucleotide
tctggaagacactataacaatcgttcgtag

SEQ ID NO: 141436 - DNA, 30 bp, Artificial Sequence
  Synthetic oligonucleotide
tctcataatctagtaccggggaaaaggtag

SEQ ID NO: 141437 - DNA, 30 bp, Artificial Sequence
  Synthetic oligonucleotide
tggtatacacagtaaatccgggcgaggtag

SEQ ID NO: 141438 - DNA, 30 bp, Artificial Sequence
  Synthetic oligonucleotide
gaataggaacagcgcgcatatgtgaggtag

SEQ ID NO: 141439 - DNA, 30 bp, Artificial Sequence
  Synthetic oligonucleotide
tgtccgaaaaggcggtaatcgggtaggtag

SEQ ID NO: 141440 - DNA, 30 bp, Artificial Sequence
  Synthetic oligonucleotide
catttccactgatttagtaaacttcggtag

SEQ ID NO: 141441 - DNA, 30 bp, Artificial Sequence
  Synthetic oligonucleotide
tttaacgttccgtcaaggcgggacgggtag

SEQ ID NO: 141442 - DNA, 30 bp, Artificial Sequence
  Synthetic oligonucleotide
gaagaactcgtcattgccatctgtgggtag

SEQ ID NO: 141443 - DNA, 30 bp, Artificial Sequence
  Synthetic oligonucleotide
tccgtaagttggcgcggtatcgcatggtag

SEQ ID NO: 141444 - DNA, 30 bp, Artificial Sequence
  Synthetic oligonucleotide
tattcgtcataccttgtgcgaacctggtag

SEQ ID NO: 141445 - DNA, 30 bp, Artificial Sequence
  Synthetic oligonucleotide
catgcagcggctagatttatagcctggtag

SEQ ID NO: 141446 - DNA, 30 bp, Artificial Sequence
  Synthetic oligonucleotide
accgaaaattgaatatctttacggtggtag

SEQ ID NO: 141447 - DNA, 30 bp, Artificial Sequence
  Synthetic oligonucleotide
gtatgtgactcctacagttactggtggtag

SEQ ID NO: 141448 - DNA, 30 bp, Artificial Sequence
  Synthetic oligonucleotide
catttgtcctgctgcgttcaactgtggtag

SEQ ID NO: 141449 - DNA, 30 bp, Artificial Sequence
  Synthetic oligonucleotide
ccctacaatcccccgagttaggcttggtag

SEQ ID NO: 141450 - DNA, 30 bp, Artificial Sequence
  Synthetic oligonucleotide
aagcgatcataagctgctgatggttggtag

SEQ ID NO: 141451 - DNA, 30 bp, Artificial Sequence
  Synthetic oligonucleotide
gaattggagagcatagtgctggcgatgtag

SEQ ID NO: 141452 - DNA, 30 bp, Artificial Sequence
  Synthetic oligonucleotide
tcgtttccgccccaacagtccagtatgtag

SEQ ID NO: 141453 - DNA, 30 bp, Artificial Sequence
  Synthetic oligonucleotide
gaaacgtacagcttccgatatagtatgtag

SEQ ID NO: 141454 - DNA, 30 bp, Artificial Sequence
  Synthetic oligonucleotide
ccgtgggggtgagaccagcagtggctgtag

SEQ ID NO: 141455 - DNA, 30 bp, Artificial Sequence
  Synthetic oligonucleotide
tggtgatatgatgagtaacccacagtgtag

SEQ ID NO: 141456 - DNA, 30 bp, Artificial Sequence
  Synthetic oligonucleotide
ccacgacggctggcatagaaattagtgtag

SEQ ID NO: 141457 - DNA, 30 bp, Artificial Sequence
  Synthetic oligonucleotide
ggggtgttgaatatcagctttatcgtgtag

SEQ ID NO: 141458 - DNA, 30 bp, Artificial Sequence
  Synthetic oligonucleotide
gaataggcttaggacaaatcttcggtgtag

SEQ ID NO: 141459 - DNA, 30 bp, Artificial Sequence
  Synthetic oligonucleotide
tagccgagtctcgggtacatcgtggtgtag

SEQ ID NO: 141460 - DNA, 30 bp, Artificial Sequence
  Synthetic oligonucleotide
tcttatctgttgtgttttcctcttgtgtag

SEQ ID NO: 141461 - DNA, 30 bp, Artificial Sequence
  Synthetic oligonucleotide
tggtaaacggggaatctacggttcttgtag

SEQ ID NO: 141462 - DNA, 30 bp, Artificial Sequence
  Synthetic oligonucleotide
ggagacttgctatccgtgagtctaaattag

SEQ ID NO: 141463 - DNA, 30 bp, Artificial Sequence
  Synthetic oligonucleotide
acaacgcgtggacactaagcaatacattag

SEQ ID NO: 141464 - DNA, 30 bp, Artificial Sequence
  Synthetic oligonucleotide
tgctcggagccgtttatgaactgccattag

SEQ ID NO: 141465 - DNA, 30 bp, Artificial Sequence
  Synthetic oligonucleotide
gggtgtaaagtgcaaagtaactgccattag

SEQ ID NO: 141466 - DNA, 30 bp, Artificial Sequence
  Synthetic oligonucleotide
accgaacatggacatcccctatctcattag

SEQ ID NO: 141467 - DNA, 30 bp, Artificial Sequence
  Synthetic oligonucleotide
gctcacggtacgtctcaacaaggtcattag

SEQ ID NO: 141468 - DNA, 30 bp, Artificial Sequence
  Synthetic oligonucleotide
gcgtctgacttacagtcattcattcattag

SEQ ID NO: 141469 - DNA, 30 bp, Artificial Sequence
  Synthetic oligonucleotide
aagagaaatgttcgcactaacgaagattag

SEQ ID NO: 141470 - DNA, 30 bp, Artificial Sequence
  Synthetic oligonucleotide
tggagatggtggaataaaaatttagattag

SEQ ID NO: 141471 - DNA, 30 bp, Artificial Sequence
  Synthetic oligonucleotide
cggtgaaaaataataaaggccaccgattag

SEQ ID NO: 141472 - DNA, 30 bp, Artificial Sequence
  Synthetic oligonucleotide
agaggactttacaggaagctcgtatattag

SEQ ID NO: 141473 - DNA, 30 bp, Artificial Sequence
  Synthetic oligonucleotide
taaggggtaacaggaccgggggtatattag

SEQ ID NO: 141474 - DNA, 30 bp, Artificial Sequence
  Synthetic oligonucleotide
cgacttccgccggaacagaatgtatattag

SEQ ID NO: 141475 - DNA, 30 bp, Artificial Sequence
  Synthetic oligonucleotide
ctccggagtgctgggccactatcgtattag

SEQ ID NO: 141476 - DNA, 30 bp, Artificial Sequence
  Synthetic oligonucleotide
cagggaaagtggatccggtacgattattag

SEQ ID NO: 141477 - DNA, 30 bp, Artificial Sequence
  Synthetic oligonucleotide
agagctatgctggttaatgtaagttattag

SEQ ID NO: 141478 - DNA, 30 bp, Artificial Sequence
  Synthetic oligonucleotide
ggcgataagacaagaataccctgcacttag

SEQ ID NO: 141479 - DNA, 30 bp, Artificial Sequence
  Synthetic oligonucleotide
tagtggatccacactgagtaaatcacttag

SEQ ID NO: 141480 - DNA, 30 bp, Artificial Sequence
  Synthetic oligonucleotide
gcacaacgtagctaatgcacggagacttag

SEQ ID NO: 141481 - DNA, 30 bp, Artificial Sequence
  Synthetic oligonucleotide
agtgattcacgtcagggtgggtaaccttag

SEQ ID NO: 141482 - DNA, 30 bp, Artificial Sequence
  Synthetic oligonucleotide
tttgggcaatcaagtgaaggggtaccttag

SEQ ID NO: 141483 - DNA, 30 bp, Artificial Sequence
  Synthetic oligonucleotide
acgctcgggcttaaccagcattttccttag

SEQ ID NO: 141484 - DNA, 30 bp, Artificial Sequence
  Synthetic oligonucleotide
cggatacagtgtcattctgacaaagcttag

SEQ ID NO: 141485 - DNA, 30 bp, Artificial Sequence
  Synthetic oligonucleotide
taggatcgctagtcaacatgtctttcttag

SEQ ID NO: 141486 - DNA, 30 bp, Artificial Sequence
  Synthetic oligonucleotide
ccatgtgttggcggtgttaggacaagttag

SEQ ID NO: 141487 - DNA, 30 bp, Artificial Sequence
  Synthetic oligonucleotide
gtactggacatacgcgaaactgtaagttag

SEQ ID NO: 141488 - DNA, 30 bp, Artificial Sequence
  Synthetic oligonucleotide
cagttctgatgctatcagagtccgcgttag

SEQ ID NO: 141489 - DNA, 30 bp, Artificial Sequence
  Synthetic oligonucleotide
aggttagttctcactcggtggtatcgttag

SEQ ID NO: 141490 - DNA, 30 bp, Artificial Sequence
  Synthetic oligonucleotide
ccttacaactaggcttcactatacggttag

SEQ ID NO: 141491 - DNA, 30 bp, Artificial Sequence
  Synthetic oligonucleotide
actcaatctatagagtggaccaccggttag

SEQ ID NO: 141492 - DNA, 30 bp, Artificial Sequence
  Synthetic oligonucleotide
caatcttcaccatagactagggccggttag

SEQ ID NO: 141493 - DNA, 30 bp, Artificial Sequence
  Synthetic oligonucleotide
gccactaaaccgagaggtatgcagggttag

SEQ ID NO: 141494 - DNA, 30 bp, Artificial Sequence
  Synthetic oligonucleotide
gtcttctggcggcctagacgtgcgggttag

SEQ ID NO: 141495 - DNA, 30 bp, Artificial Sequence
  Synthetic oligonucleotide
caagtgtaacaggtatttgccagtggttag

SEQ ID NO: 141496 - DNA, 30 bp, Artificial Sequence
  Synthetic oligonucleotide
actgtaggctttaacgcgttgcgatgttag

SEQ ID NO: 141497 - DNA, 30 bp, Artificial Sequence
  Synthetic oligonucleotide
tcacggtcgagtgtgaccagaacctgttag

SEQ ID NO: 141498 - DNA, 30 bp, Artificial Sequence
  Synthetic oligonucleotide
aatagatgggatacatctagcgtgtgttag

SEQ ID NO: 141499 - DNA, 30 bp, Artificial Sequence
  Synthetic oligonucleotide
aaaggaaggggaccggtatctgattgttag

SEQ ID NO: 141500 - DNA, 30 bp, Artificial Sequence
  Synthetic oligonucleotide
atagtacgtgaaatcaacggaagttgttag

SEQ ID NO: 141501 - DNA, 30 bp, Artificial Sequence
  Synthetic oligonucleotide
tactagaccgtttaggggaaatgttgttag

SEQ ID NO: 141502 - DNA, 30 bp, Artificial Sequence
  Synthetic oligonucleotide
cgctgtaccggagtgtcgcttacaatttag

SEQ ID NO: 141503 - DNA, 30 bp, Artificial Sequence
  Synthetic oligonucleotide
ttgctggacaacctcgcgtaacatatttag

SEQ ID NO: 141504 - DNA, 30 bp, Artificial Sequence
  Synthetic oligonucleotide
acaccgccccgtacataacagtgtatttag

SEQ ID NO: 141505 - DNA, 30 bp, Artificial Sequence
  Synthetic oligonucleotide
acgtttataataacaacagacaaactttag

SEQ ID NO: 141506 - DNA, 30 bp, Artificial Sequence
  Synthetic oligonucleotide
gaccattgaccttgaggaactctgctttag

SEQ ID NO: 141507 - DNA, 30 bp, Artificial Sequence
  Synthetic oligonucleotide
ccttatcaccttcctttattagacgtttag

SEQ ID NO: 141508 - DNA, 30 bp, Artificial Sequence
  Synthetic oligonucleotide
gagaagaatgttgcgttcactagcgtttag

SEQ ID NO: 141509 - DNA, 30 bp, Artificial Sequence
  Synthetic oligonucleotide
agttctgggctgaaggcaacatgggtttag

SEQ ID NO: 141510 - DNA, 30 bp, Artificial Sequence
  Synthetic oligonucleotide
gcgcggccgctgggtcttaccactgtttag

SEQ ID NO: 141511 - DNA, 30 bp, Artificial Sequence
  Synthetic oligonucleotide
gtggtgtttagcgaatgcgcacctgtttag

SEQ ID NO: 141512 - DNA, 30 bp, Artificial Sequence
  Synthetic oligonucleotide
gtgtagggatttactatacgttctgtttag

SEQ ID NO: 141513 - DNA, 30 bp, Artificial Sequence
  Synthetic oligonucleotide
ctgacggtaagatcagtgttcacattttag

SEQ ID NO: 141514 - DNA, 30 bp, Artificial Sequence
  Synthetic oligonucleotide
ggccagaggcactccaaaaaaccgaaaacg

SEQ ID NO: 141515 - DNA, 30 bp, Artificial Sequence
  Synthetic oligonucleotide
gtcgcaactaatccgcatcatttacaaacg

SEQ ID NO: 141516 - DNA, 30 bp, Artificial Sequence
  Synthetic oligonucleotide
ctggtgcgctagtccatcgcaattcaaacg

SEQ ID NO: 141517 - DNA, 30 bp, Artificial Sequence
  Synthetic oligonucleotide
acagaatgtgggtccctaggctttcaaacg

SEQ ID NO: 141518 - DNA, 30 bp, Artificial Sequence
  Synthetic oligonucleotide
gaagagaaccgtcagagtcacgacgaaacg

SEQ ID NO: 141519 - DNA, 30 bp, Artificial Sequence
  Synthetic oligonucleotide
attacccgcaatcacatctagtgcgaaacg

SEQ ID NO: 141520 - DNA, 30 bp, Artificial Sequence
  Synthetic oligonucleotide
agagccataacaagcgatctaatggaaacg

SEQ ID NO: 141521 - DNA, 30 bp, Artificial Sequence
  Synthetic oligonucleotide
ctgtgctacaggaatttgcacttggaaacg

SEQ ID NO: 141522 - DNA, 30 bp, Artificial Sequence
  Synthetic oligonucleotide
tcaatatcctagagattgaagaatgaaacg

SEQ ID NO: 141523 - DNA, 30 bp, Artificial Sequence
  Synthetic oligonucleotide
gatatgtaacttgggacccaatatgaaacg

SEQ ID NO: 141524 - DNA, 30 bp, Artificial Sequence
  Synthetic oligonucleotide
atttgactcgagttcaaagcaaaataaacg

SEQ ID NO: 141525 - DNA, 30 bp, Artificial Sequence
  Synthetic oligonucleotide
gcattggtacctcatcggatcaaataaacg

SEQ ID NO: 141526 - DNA, 30 bp, Artificial Sequence
  Synthetic oligonucleotide
gagcggattagttccgacggcccataaacg

SEQ ID NO: 141527 - DNA, 30 bp, Artificial Sequence
  Synthetic oligonucleotide
tgacctaacaaacatgtaagtgtataaacg

SEQ ID NO: 141528 - DNA, 30 bp, Artificial Sequence
  Synthetic oligonucleotide
gtacaataccgaacaatgataagctaaacg

SEQ ID NO: 141529 - DNA, 30 bp, Artificial Sequence
  Synthetic oligonucleotide
caatgtacgtgtgtggggacagagtaaacg

SEQ ID NO: 141530 - DNA, 30 bp, Artificial Sequence
  Synthetic oligonucleotide
cgttgtgggacatacgactgtgggtaaacg

SEQ ID NO: 141531 - DNA, 30 bp, Artificial Sequence
  Synthetic oligonucleotide
agacacctatgtggcctactcaacacaacg

SEQ ID NO: 141532 - DNA, 30 bp, Artificial Sequence
  Synthetic oligonucleotide
agagattagtgactgcgatatatcacaacg

SEQ ID NO: 141533 - DNA, 30 bp, Artificial Sequence
  Synthetic oligonucleotide
gagaatggatctcaatacagagtcacaacg

SEQ ID NO: 141534 - DNA, 30 bp, Artificial Sequence
  Synthetic oligonucleotide
aaatggcgggacaacatgttgtctacaacg

SEQ ID NO: 141535 - DNA, 30 bp, Artificial Sequence
  Synthetic oligonucleotide
gtgcgtatgtagaccctactgattacaacg

SEQ ID NO: 141536 - DNA, 30 bp, Artificial Sequence
  Synthetic oligonucleotide
aacacctggagtcgactggccgtcccaacg

SEQ ID NO: 141537 - DNA, 30 bp, Artificial Sequence
  Synthetic oligonucleotide
tcttctttcccggagcgaaaaggtccaacg

SEQ ID NO: 141538 - DNA, 30 bp, Artificial Sequence
  Synthetic oligonucleotide
gacatccaagaggatatcgggaaggcaacg

SEQ ID NO: 141539 - DNA, 30 bp, Artificial Sequence
  Synthetic oligonucleotide
cgttttgttctggctctatacttggcaacg

SEQ ID NO: 141540 - DNA, 30 bp, Artificial Sequence
  Synthetic oligonucleotide
aggagcaaccatagtaggacgcttgcaacg

SEQ ID NO: 141541 - DNA, 30 bp, Artificial Sequence
  Synthetic oligonucleotide
gcctagtgcgctaactccacgcccagaacg

SEQ ID NO: 141542 - DNA, 30 bp, Artificial Sequence
  Synthetic oligonucleotide
cctcgctacacaattttggcaacgagaacg

SEQ ID NO: 141543 - DNA, 30 bp, Artificial Sequence
  Synthetic oligonucleotide
tgcaggttcgaggtcataagctatagaacg

SEQ ID NO: 141544 - DNA, 30 bp, Artificial Sequence
  Synthetic oligonucleotide
ctaaaagcatgacttgggttcctacgaacg

SEQ ID NO: 141545 - DNA, 30 bp, Artificial Sequence
  Synthetic oligonucleotide
taagtccgcgttacaaggatatcccgaacg

SEQ ID NO: 141546 - DNA, 30 bp, Artificial Sequence
  Synthetic oligonucleotide
ggtgtaatttgatggaagcggacaggaacg

SEQ ID NO: 141547 - DNA, 30 bp, Artificial Sequence
  Synthetic oligonucleotide
gccatacatagagtcgaatctccgggaacg

SEQ ID NO: 141548 - DNA, 30 bp, Artificial Sequence
  Synthetic oligonucleotide
atacaatgtaagaacagattgagtggaacg

SEQ ID NO: 141549 - DNA, 30 bp, Artificial Sequence
  Synthetic oligonucleotide
aagggccacacgtgatgggattcatgaacg

SEQ ID NO: 141550 - DNA, 30 bp, Artificial Sequence
  Synthetic oligonucleotide
ggagcattcaatatatacgagtgctgaacg

SEQ ID NO: 141551 - DNA, 30 bp, Artificial Sequence
  Synthetic oligonucleotide
gtaggtagaatatgtattgggtgctgaacg

SEQ ID NO: 141552 - DNA, 30 bp, Artificial Sequence
  Synthetic oligonucleotide
agaaataaggctattcgcaagaggtgaacg

SEQ ID NO: 141553 - DNA, 30 bp, Artificial Sequence
  Synthetic oligonucleotide
cggttaatagcatcacctgtttgaataacg

SEQ ID NO: 141554 - DNA, 30 bp, Artificial Sequence
  Synthetic oligonucleotide
gctgcttaaggggtctctgaaacgataacg

SEQ ID NO: 141555 - DNA, 30 bp, Artificial Sequence
  Synthetic oligonucleotide
gaaggatcagttaacttcagctggataacg

SEQ ID NO: 141556 - DNA, 30 bp, Artificial Sequence
  Synthetic oligonucleotide
cccatcaataagtgaagtaaacttctaacg

SEQ ID NO: 141557 - DNA, 30 bp, Artificial Sequence
  Synthetic oligonucleotide
ccgtcgatcgaacgtaggcgaggagtaacg

SEQ ID NO: 141558 - DNA, 30 bp, Artificial Sequence
  Synthetic oligonucleotide
tcggatccggtgacacttttataggtaacg

SEQ ID NO: 141559 - DNA, 30 bp, Artificial Sequence
  Synthetic oligonucleotide
cctgtctatcaatgataaagcgtggtaacg

SEQ ID NO: 141560 - DNA, 30 bp, Artificial Sequence
  Synthetic oligonucleotide
acattaggtaaggtgtccgtcatcttaacg

SEQ ID NO: 141561 - DNA, 30 bp, Artificial Sequence
  Synthetic oligonucleotide
ttggctaagggggagcggaaggtcttaacg

SEQ ID NO: 141562 - DNA, 30 bp, Artificial Sequence
  Synthetic oligonucleotide
accattttattctagatcggaaaccacacg

SEQ ID NO: 141563 - DNA, 30 bp, Artificial Sequence
  Synthetic oligonucleotide
tgtgtatgaagtcctaatacacctcacacg

SEQ ID NO: 141564 - DNA, 30 bp, Artificial Sequence
  Synthetic oligonucleotide
cataaagtactctaaaaacccatggacacg

SEQ ID NO: 141565 - DNA, 30 bp, Artificial Sequence
  Synthetic oligonucleotide
gccttgggaagaaccggatgccttgacacg

SEQ ID NO: 141566 - DNA, 30 bp, Artificial Sequence
  Synthetic oligonucleotide
gggcaccattgagtaaacatagtatacacg

SEQ ID NO: 141567 - DNA, 30 bp, Artificial Sequence
  Synthetic oligonucleotide
atccttaaagacgtcgatccatactacacg

SEQ ID NO: 141568 - DNA, 30 bp, Artificial Sequence
  Synthetic oligonucleotide
actggggatgtacgcgaattttagtacacg

SEQ ID NO: 141569 - DNA, 30 bp, Artificial Sequence
  Synthetic oligonucleotide
ggcatacttatcccagcccaaccgtacacg

SEQ ID NO: 141570 - DNA, 30 bp, Artificial Sequence
  Synthetic oligonucleotide
ctactaacaggttcctggtccgccaccacg

SEQ ID NO: 141571 - DNA, 30 bp, Artificial Sequence
  Synthetic oligonucleotide
gcttgatgaaggttgatcagttcgaccacg

SEQ ID NO: 141572 - DNA, 30 bp, Artificial Sequence
  Synthetic oligonucleotide
tgaactggcaatagcacttattcacccacg

SEQ ID NO: 141573 - DNA, 30 bp, Artificial Sequence
  Synthetic oligonucleotide
ttcaggtattgataaagtcccgaccccacg

SEQ ID NO: 141574 - DNA, 30 bp, Artificial Sequence
  Synthetic oligonucleotide
tctccacaggacaagattgaagtagccacg

SEQ ID NO: 141575 - DNA, 30 bp, Artificial Sequence
  Synthetic oligonucleotide
aagagcgaacgtcctcttaggtgcgccacg

SEQ ID NO: 141576 - DNA, 30 bp, Artificial Sequence
  Synthetic oligonucleotide
acagattgatgtgtagagggcaatgccacg

SEQ ID NO: 141577 - DNA, 30 bp, Artificial Sequence
  Synthetic oligonucleotide
tatagtatggggaagcaagctggctccacg

SEQ ID NO: 141578 - DNA, 30 bp, Artificial Sequence
  Synthetic oligonucleotide
ccattcgagtggggtaggtaggagtccacg

SEQ ID NO: 141579 - DNA, 30 bp, Artificial Sequence
  Synthetic oligonucleotide
cgacccaaggagagaatggtagtgtccacg

SEQ ID NO: 141580 - DNA, 30 bp, Artificial Sequence
  Synthetic oligonucleotide
cgcatatacaaagcccgggcagattccacg

SEQ ID NO: 141581 - DNA, 30 bp, Artificial Sequence
  Synthetic oligonucleotide
gatagcggtacgtatgaaaatacaagcacg

SEQ ID NO: 141582 - DNA, 30 bp, Artificial Sequence
  Synthetic oligonucleotide
gggtaaattccgcaccgtcccctaagcacg

SEQ ID NO: 141583 - DNA, 30 bp, Artificial Sequence
  Synthetic oligonucleotide
ccgaggagacccggccgtcgagggagcacg

SEQ ID NO: 141584 - DNA, 30 bp, Artificial Sequence
  Synthetic oligonucleotide
gatgattaaggtagtgagtgcgtgagcacg

SEQ ID NO: 141585 - DNA, 30 bp, Artificial Sequence
  Synthetic oligonucleotide
atctaagcctaatgacggcttgtgagcacg

SEQ ID NO: 141586 - DNA, 30 bp, Artificial Sequence
  Synthetic oligonucleotide
ctggcagatcagatgtccccaaatagcacg

SEQ ID NO: 141587 - DNA, 30 bp, Artificial Sequence
  Synthetic oligonucleotide
cgggacacctgaaacgggcatttccgcacg

SEQ ID NO: 141588 - DNA, 30 bp, Artificial Sequence
  Synthetic oligonucleotide
tatttgaaggggtaacagccatgaggcacg

SEQ ID NO: 141589 - DNA, 30 bp, Artificial Sequence
  Synthetic oligonucleotide
gaaaatcggaatggagaagtgtggggcacg

SEQ ID NO: 141590 - DNA, 30 bp, Artificial Sequence
  Synthetic oligonucleotide
aatagaggtcgcatgatgtcatgctgcacg

SEQ ID NO: 141591 - DNA, 30 bp, Artificial Sequence
  Synthetic oligonucleotide
aaggtagatcttgtccctatgccaatcacg

SEQ ID NO: 141592 - DNA, 30 bp, Artificial Sequence
  Synthetic oligonucleotide
gagcttcacgattacagggaacgcatcacg

SEQ ID NO: 141593 - DNA, 30 bp, Artificial Sequence
  Synthetic oligonucleotide
atcataataattgctctttatgcgatcacg

SEQ ID NO: 141594 - DNA, 30 bp, Artificial Sequence
  Synthetic oligonucleotide
ttgcctgccagggtgctgggaatgatcacg

SEQ ID NO: 141595 - DNA, 30 bp, Artificial Sequence
  Synthetic oligonucleotide
acggaaagatccggtagcttgtgactcacg

SEQ ID NO: 141596 - DNA, 30 bp, Artificial Sequence
  Synthetic oligonucleotide
ttacttcggcaagtaaaatatatactcacg

SEQ ID NO: 141597 - DNA, 30 bp, Artificial Sequence
  Synthetic oligonucleotide
ttagtcatgaccgattgattgggcctcacg

SEQ ID NO: 141598 - DNA, 30 bp, Artificial Sequence
  Synthetic oligonucleotide
ctttggaccaatctggaaaggcctctcacg

SEQ ID NO: 141599 - DNA, 30 bp, Artificial Sequence
  Synthetic oligonucleotide
gggagtccatggggaaacgaataagtcacg

SEQ ID NO: 141600 - DNA, 30 bp, Artificial Sequence
  Synthetic oligonucleotide
atacgtagggaatgggtacacgaggtcacg

SEQ ID NO: 141601 - DNA, 30 bp, Artificial Sequence
  Synthetic oligonucleotide
gagagtttgggcaaggtggcaaatgtcacg

SEQ ID NO: 141602 - DNA, 30 bp, Artificial Sequence
  Synthetic oligonucleotide
gcgtgggacctaatgggtacatttgtcacg

SEQ ID NO: 141603 - DNA, 30 bp, Artificial Sequence
  Synthetic oligonucleotide
gaacactacaaggcgtctattatattcacg

SEQ ID NO: 141604 - DNA, 30 bp, Artificial Sequence
  Synthetic oligonucleotide
ttgtaagggtatcgccaaaatgggttcacg

SEQ ID NO: 141605 - DNA, 30 bp, Artificial Sequence
  Synthetic oligonucleotide
tacttcccatccactctatgtattttcacg

SEQ ID NO: 141606 - DNA, 30 bp, Artificial Sequence
  Synthetic oligonucleotide
gaaagccatccaagcagcctaaccaagacg

SEQ ID NO: 141607 - DNA, 30 bp, Artificial Sequence
  Synthetic oligonucleotide
aaccccacggtttcgatagggaaacagacg

SEQ ID NO: 141608 - DNA, 30 bp, Artificial Sequence
  Synthetic oligonucleotide
cattaatgccaggctgcagagtcgcagacg

SEQ ID NO: 141609 - DNA, 30 bp, Artificial Sequence
  Synthetic oligonucleotide
tcccgctgaggggatgggcagctgcagacg

SEQ ID NO: 141610 - DNA, 30 bp, Artificial Sequence
  Synthetic oligonucleotide
gcaagggtgagcgtatcctcaatagagacg

SEQ ID NO: 141611 - DNA, 30 bp, Artificial Sequence
  Synthetic oligonucleotide
atactatgctcaggtaatctcggcgagacg

SEQ ID NO: 141612 - DNA, 30 bp, Artificial Sequence
  Synthetic oligonucleotide
ccgttagagaatggtgtggggaaggagacg

SEQ ID NO: 141613 - DNA, 30 bp, Artificial Sequence
  Synthetic oligonucleotide
tgagattttacggtatggaagtgtgagacg

SEQ ID NO: 141614 - DNA, 30 bp, Artificial Sequence
  Synthetic oligonucleotide
attggcctcagcgaagaggcacaatagacg

SEQ ID NO: 141615 - DNA, 30 bp, Artificial Sequence
  Synthetic oligonucleotide
taggataagtcctaggacgagtgctagacg

SEQ ID NO: 141616 - DNA, 30 bp, Artificial Sequence
  Synthetic oligonucleotide
aacgcgctatatagcgtgatgcgttagacg

SEQ ID NO: 141617 - DNA, 30 bp, Artificial Sequence
  Synthetic oligonucleotide
ttacgaatagaacaggtaccagtttagacg

SEQ ID NO: 141618 - DNA, 30 bp, Artificial Sequence
  Synthetic oligonucleotide
ccgtccgcccacgctcactcagaaacgacg

SEQ ID NO: 141619 - DNA, 30 bp, Artificial Sequence
  Synthetic oligonucleotide
acagcgaaatatcctagacatgagacgacg

SEQ ID NO: 141620 - DNA, 30 bp, Artificial Sequence
  Synthetic oligonucleotide
actgcacaaatttccaacggatagacgacg

SEQ ID NO: 141621 - DNA, 30 bp, Artificial Sequence
  Synthetic oligonucleotide
gatattactaaggtagagctgtatacgacg

SEQ ID NO: 141622 - DNA, 30 bp, Artificial Sequence
  Synthetic oligonucleotide
caatacataatgttgtgtatgcgaccgacg

SEQ ID NO: 141623 - DNA, 30 bp, Artificial Sequence
  Synthetic oligonucleotide
gccccggaaaaactacgcccctggccgacg

SEQ ID NO: 141624 - DNA, 30 bp, Artificial Sequence
  Synthetic oligonucleotide
gcgaaagatgatcatggtttccttccgacg

SEQ ID NO: 141625 - DNA, 30 bp, Artificial Sequence
  Synthetic oligonucleotide
agcggacgatagtggtagatatcagcgacg

SEQ ID NO: 141626 - DNA, 30 bp, Artificial Sequence
  Synthetic oligonucleotide
ggcatggctgttcaacttttattcgcgacg

SEQ ID NO: 141627 - DNA, 30 bp, Artificial Sequence
  Synthetic oligonucleotide
agtgcgttgggcctatccacgtaaaggacg

SEQ ID NO: 141628 - DNA, 30 bp, Artificial Sequence
  Synthetic oligonucleotide
cgcgcaaatctgtacctaggcgcaaggacg

SEQ ID NO: 141629 - DNA, 30 bp, Artificial Sequence
  Synthetic oligonucleotide
taagatacggtgtacgaacgccgtaggacg

SEQ ID NO: 141630 - DNA, 30 bp, Artificial Sequence
  Synthetic oligonucleotide
cccctaggattgatcatcggaaagcggacg

SEQ ID NO: 141631 - DNA, 30 bp, Artificial Sequence
  Synthetic oligonucleotide
acaactaatagggattcggacgtgcggacg

SEQ ID NO: 141632 - DNA, 30 bp, Artificial Sequence
  Synthetic oligonucleotide
aatacactgctcttaccattaccagggacg

SEQ ID NO: 141633 - DNA, 30 bp, Artificial Sequence
  Synthetic oligonucleotide
tgtaaatagataaatcggctgacggggacg

SEQ ID NO: 141634 - DNA, 30 bp, Artificial Sequence
  Synthetic oligonucleotide
tgtgggtcgactgagtagataaaatggacg

SEQ ID NO: 141635 - DNA, 30 bp, Artificial Sequence
  Synthetic oligonucleotide
ttagcaatagacaacaggtcaaggtggacg

SEQ ID NO: 141636 - DNA, 30 bp, Artificial Sequence
  Synthetic oligonucleotide
gtgcgtatcttgcagatacattccatgacg

SEQ ID NO: 141637 - DNA, 30 bp, Artificial Sequence
  Synthetic oligonucleotide
atgacgttaaaagaataaggaaagctgacg

SEQ ID NO: 141638 - DNA, 30 bp, Artificial Sequence
  Synthetic oligonucleotide
gtgccactcaggtgccgtttgaagctgacg

SEQ ID NO: 141639 - DNA, 30 bp, Artificial Sequence
  Synthetic oligonucleotide
acgaggacaaaagcagtcccaatagtgacg

SEQ ID NO: 141640 - DNA, 30 bp, Artificial Sequence
  Synthetic oligonucleotide
ccggatcttaagttacccatccgcgtgacg

SEQ ID NO: 141641 - DNA, 30 bp, Artificial Sequence
  Synthetic oligonucleotide
gggcctagtgtgtgataatcctaggtgacg

SEQ ID NO: 141642 - DNA, 30 bp, Artificial Sequence
  Synthetic oligonucleotide
gcggactgtgaagaatgtttagtggtgacg

SEQ ID NO: 141643 - DNA, 30 bp, Artificial Sequence
  Synthetic oligonucleotide
aacaatatccaggcaacagggcctgtgacg

SEQ ID NO: 141644 - DNA, 30 bp, Artificial Sequence
  Synthetic oligonucleotide
cctgacgcttgaagcgggtcgactttgacg

SEQ ID NO: 141645 - DNA, 30 bp, Artificial Sequence
  Synthetic oligonucleotide
catagtggaatacgttatgtcgctttgacg

SEQ ID NO: 141646 - DNA, 30 bp, Artificial Sequence
  Synthetic oligonucleotide
aggactgtccacaacgattccacaaatacg

SEQ ID NO: 141647 - DNA, 30 bp, Artificial Sequence
  Synthetic oligonucleotide
gtaccgccgacctgcagacaagcaaatacg

SEQ ID NO: 141648 - DNA, 30 bp, Artificial Sequence
  Synthetic oligonucleotide
gcatagctaacttagactgatcataatacg

SEQ ID NO: 141649 - DNA, 30 bp, Artificial Sequence
  Synthetic oligonucleotide
gcggtttcgacaacaagcagcattcatacg

SEQ ID NO: 141650 - DNA, 30 bp, Artificial Sequence
  Synthetic oligonucleotide
atttgaggttaagcctgcgagccagatacg

SEQ ID NO: 141651 - DNA, 30 bp, Artificial Sequence
  Synthetic oligonucleotide
tcccaaaggtctacgtcgttcaacgatacg

SEQ ID NO: 141652 - DNA, 30 bp, Artificial Sequence
  Synthetic oligonucleotide
tatcgtccgtgcattttaatcttggatacg

SEQ ID NO: 141653 - DNA, 30 bp, Artificial Sequence
  Synthetic oligonucleotide
tccctagcaaatgcgcttaagatctatacg

SEQ ID NO: 141654 - DNA, 30 bp, Artificial Sequence
  Synthetic oligonucleotide
acggttatccgctcaattgacctctatacg

SEQ ID NO: 141655 - DNA, 30 bp, Artificial Sequence
  Synthetic oligonucleotide
cgttcacagcttctgcgcttagccactacg

SEQ ID NO: 141656 - DNA, 30 bp, Artificial Sequence
  Synthetic oligonucleotide
gtaatggtagaagttcccataagcactacg

SEQ ID NO: 141657 - DNA, 30 bp, Artificial Sequence
  Synthetic oligonucleotide
aacagtctgggggatggtcgaggcactacg

SEQ ID NO: 141658 - DNA, 30 bp, Artificial Sequence
  Synthetic oligonucleotide
gtgccatggcgcggatgctgtactactacg

SEQ ID NO: 141659 - DNA, 30 bp, Artificial Sequence
  Synthetic oligonucleotide
gcatcggacaaagatgcacttacccctacg

SEQ ID NO: 141660 - DNA, 30 bp, Artificial Sequence
  Synthetic oligonucleotide
gccgagacggtcacgggaacgccgcctacg

SEQ ID NO: 141661 - DNA, 30 bp, Artificial Sequence
  Synthetic oligonucleotide
taagataaatccgtcaccaatgcgcctacg

SEQ ID NO: 141662 - DNA, 30 bp, Artificial Sequence
  Synthetic oligonucleotide
ggagagtaggctttgagcaaaccagctacg

SEQ ID NO: 141663 - DNA, 30 bp, Artificial Sequence
  Synthetic oligonucleotide
aagcggcatacctaagattaaaacgctacg

SEQ ID NO: 141664 - DNA, 30 bp, Artificial Sequence
  Synthetic oligonucleotide
ttagggaagttctcagtgggatctgctacg

SEQ ID NO: 141665 - DNA, 30 bp, Artificial Sequence
  Synthetic oligonucleotide
ttatcatcaccgggtccccatcagtctacg

SEQ ID NO: 141666 - DNA, 30 bp, Artificial Sequence
  Synthetic oligonucleotide
ggcaccgacttgcgccaaaaccattctacg

SEQ ID NO: 141667 - DNA, 30 bp, Artificial Sequence
  Synthetic oligonucleotide
atctatggacgatatcgactcaaaagtacg

SEQ ID NO: 141668 - DNA, 30 bp, Artificial Sequence
  Synthetic oligonucleotide
atgaacattaaggagttaagtgcaagtacg

SEQ ID NO: 141669 - DNA, 30 bp, Artificial Sequence
  Synthetic oligonucleotide
agccatggaaccggagaggtgaacagtacg

SEQ ID NO: 141670 - DNA, 30 bp, Artificial Sequence
  Synthetic oligonucleotide
ctaatcctctcgaagcaactcgggagtacg

SEQ ID NO: 141671 - DNA, 30 bp, Artificial Sequence
  Synthetic oligonucleotide
aagactacagatcaccactggattagtacg

SEQ ID NO: 141672 - DNA, 30 bp, Artificial Sequence
  Synthetic oligonucleotide
gtttcggacgtggagactgctgaccgtacg

SEQ ID NO: 141673 - DNA, 30 bp, Artificial Sequence
  Synthetic oligonucleotide
ttcgatggcctgtacatcatacgaggtacg

SEQ ID NO: 141674 - DNA, 30 bp, Artificial Sequence
  Synthetic oligonucleotide
tataggataggggagaccaatataggtacg

SEQ ID NO: 141675 - DNA, 30 bp, Artificial Sequence
  Synthetic oligonucleotide
ccctgacaatctgggtgaaagtgcggtacg

SEQ ID NO: 141676 - DNA, 30 bp, Artificial Sequence
  Synthetic oligonucleotide
atattacgaagtatacagctgcatggtacg

SEQ ID NO: 141677 - DNA, 30 bp, Artificial Sequence
  Synthetic oligonucleotide
cggaggaactacttgatgtaacagtgtacg

SEQ ID NO: 141678 - DNA, 30 bp, Artificial Sequence
  Synthetic oligonucleotide
atgacactcgctgctaggggcccgtgtacg

SEQ ID NO: 141679 - DNA, 30 bp, Artificial Sequence
  Synthetic oligonucleotide
ctgcagtgaaacggtctaccgctgtgtacg

SEQ ID NO: 141680 - DNA, 30 bp, Artificial Sequence
  Synthetic oligonucleotide
gagatgtaggctcaccatagcggttgtacg

SEQ ID NO: 141681 - DNA, 30 bp, Artificial Sequence
  Synthetic oligonucleotide
gcacgcgcccgcaggttgtacacaattacg

SEQ ID NO: 141682 - DNA, 30 bp, Artificial Sequence
  Synthetic oligonucleotide
tagtgactatcatgcaggtccgtcattacg

SEQ ID NO: 141683 - DNA, 30 bp, Artificial Sequence
  Synthetic oligonucleotide
caacggaggcgactgagagcttttgttacg

SEQ ID NO: 141684 - DNA, 30 bp, Artificial Sequence
  Synthetic oligonucleotide
aaaacaaagacatcccgggaccactttacg

SEQ ID NO: 141685 - DNA, 30 bp, Artificial Sequence
  Synthetic oligonucleotide
ctggcaggccgtagtcaagcccgaaaaccg

SEQ ID NO: 141686 - DNA, 29 bp, Artificial Sequence
  Synthetic oligonucleotide
ttacactagtaccataggcccgaaaaccg

SEQ ID NO: 141687 - DNA, 30 bp, Artificial Sequence
  Synthetic oligonucleotide
ggccaatccgtgagactctaagcgaaaccg

SEQ ID NO: 141688 - DNA, 30 bp, Artificial Sequence
  Synthetic oligonucleotide
gatggaacgggcttcaaagaggctaaaccg

SEQ ID NO: 141689 - DNA, 30 bp, Artificial Sequence
  Synthetic oligonucleotide
gtgattgtctcagtttgcgggggacaaccg

SEQ ID NO: 141690 - DNA, 30 bp, Artificial Sequence
  Synthetic oligonucleotide
tgtggatacgtgaatgtaatatcccaaccg

SEQ ID NO: 141691 - DNA, 30 bp, Artificial Sequence
  Synthetic oligonucleotide
caatgggcccgttgaatactgtcccaaccg

SEQ ID NO: 141692 - DNA, 30 bp, Artificial Sequence
  Synthetic oligonucleotide
catgggaggaggtcaaagaacacggaaccg

SEQ ID NO: 141693 - DNA, 30 bp, Artificial Sequence
  Synthetic oligonucleotide
aaccaaagatagttgattgtgtcggaaccg

SEQ ID NO: 141694 - DNA, 30 bp, Artificial Sequence
  Synthetic oligonucleotide
ggccatgaggctcgccgaagcggctaaccg

SEQ ID NO: 141695 - DNA, 30 bp, Artificial Sequence
  Synthetic oligonucleotide
gttctctcgagtgggactgtcgtctaaccg

SEQ ID NO: 141696 - DNA, 30 bp, Artificial Sequence
  Synthetic oligonucleotide
atttaagaagccctaaagggtacgtaaccg

SEQ ID NO: 141697 - DNA, 30 bp, Artificial Sequence
  Synthetic oligonucleotide
tcacccgaaatggttagcaaggcaacaccg

SEQ ID NO: 141698 - DNA, 30 bp, Artificial Sequence
  Synthetic oligonucleotide
aaaaagcatagacggtaagaaaacacaccg

SEQ ID NO: 141699 - DNA, 30 bp, Artificial Sequence
  Synthetic oligonucleotide
gggtaaccgtcactagatgcaaggacaccg

SEQ ID NO: 141700 - DNA, 30 bp, Artificial Sequence
  Synthetic oligonucleotide
cggctgcaagttgccgtctgtgcaccaccg

SEQ ID NO: 141701 - DNA, 30 bp, Artificial Sequence
  Synthetic oligonucleotide
taagcgaagaccgtatagactgtcccaccg

SEQ ID NO: 141702 - DNA, 30 bp, Artificial Sequence
  Synthetic oligonucleotide
agaacgtcgaccgaccgactggaggcaccg

SEQ ID NO: 141703 - DNA, 30 bp, Artificial Sequence
  Synthetic oligonucleotide
cctaatcgttaaaccgttaatagggcaccg

SEQ ID NO: 141704 - DNA, 30 bp, Artificial Sequence
  Synthetic oligonucleotide
agcgatgttgctcaccattaccctgcaccg

SEQ ID NO: 141705 - DNA, 30 bp, Artificial Sequence
  Synthetic oligonucleotide
ggtagttagctttgcggcggaaaatcaccg

SEQ ID NO: 141706 - DNA, 30 bp, Artificial Sequence
  Synthetic oligonucleotide
agttgacaattgtagtatcgcatatcaccg

SEQ ID NO: 141707 - DNA, 30 bp, Artificial Sequence
  Synthetic oligonucleotide
tacagaggcacggagcggtcactctcaccg

SEQ ID NO: 141708 - DNA, 30 bp, Artificial Sequence
  Synthetic oligonucleotide
gaactagtctcaaggaccaaggggtcaccg

SEQ ID NO: 141709 - DNA, 30 bp, Artificial Sequence
  Synthetic oligonucleotide
taatctagacagggctagattcgttcaccg

SEQ ID NO: 141710 - DNA, 30 bp, Artificial Sequence
  Synthetic oligonucleotide
cgactagagatacgaacatatatttcaccg

SEQ ID NO: 141711 - DNA, 30 bp, Artificial Sequence
  Synthetic oligonucleotide
gtgagtgcaacggacaaattattaagaccg

SEQ ID NO: 141712 - DNA, 30 bp, Artificial Sequence
  Synthetic oligonucleotide
aaggacgctacaggtacgtaatggagaccg

SEQ ID NO: 141713 - DNA, 30 bp, Artificial Sequence
  Synthetic oligonucleotide
attgagaaaacgtcattacccggacgaccg

SEQ ID NO: 141714 - DNA, 30 bp, Artificial Sequence
  Synthetic oligonucleotide
aaaccaaacagtctttatttaaagcgaccg

SEQ ID NO: 141715 - DNA, 30 bp, Artificial Sequence
  Synthetic oligonucleotide
agttcaacagcgttgcttcagagaggaccg

SEQ ID NO: 141716 - DNA, 30 bp, Artificial Sequence
  Synthetic oligonucleotide
tgttcgaagagatggcttaacataggaccg

SEQ ID NO: 141717 - DNA, 30 bp, Artificial Sequence
  Synthetic oligonucleotide
gggtcgctaagagagacggcgtacggaccg

SEQ ID NO: 141718 - DNA, 30 bp, Artificial Sequence
  Synthetic oligonucleotide
gatcagttatgggagctcagaccgggaccg

SEQ ID NO: 141719 - DNA, 30 bp, Artificial Sequence
  Synthetic oligonucleotide
atgtccggaagaatgctcaaggtgggaccg

SEQ ID NO: 141720 - DNA, 30 bp, Artificial Sequence
  Synthetic oligonucleotide
acggggcgccactaaattactcgttgaccg

SEQ ID NO: 141721 - DNA, 30 bp, Artificial Sequence
  Synthetic oligonucleotide
actctaggtgtgcgttcgggtcaaataccg

SEQ ID NO: 141722 - DNA, 30 bp, Artificial Sequence
  Synthetic oligonucleotide
agcaagttacgcattgcgggaacaataccg

SEQ ID NO: 141723 - DNA, 30 bp, Artificial Sequence
  Synthetic oligonucleotide
agagtttaaacgaggccatatgctataccg

SEQ ID NO: 141724 - DNA, 30 bp, Artificial Sequence
  Synthetic oligonucleotide
gtaggttagggcaaccgcaaacttataccg

SEQ ID NO: 141725 - DNA, 30 bp, Artificial Sequence
  Synthetic oligonucleotide
gagtcatcaacaccggggcgacaactaccg

SEQ ID NO: 141726 - DNA, 30 bp, Artificial Sequence
  Synthetic oligonucleotide
gcgggggcagacgcactcggaaatctaccg

SEQ ID NO: 141727 - DNA, 30 bp, Artificial Sequence
  Synthetic oligonucleotide
atggctcgcggcaaacgccatcgggtaccg

SEQ ID NO: 141728 - DNA, 30 bp, Artificial Sequence
  Synthetic oligonucleotide
ttcccgaatgcgcaacgtaagggggtaccg

SEQ ID NO: 141729 - DNA, 30 bp, Artificial Sequence
  Synthetic oligonucleotide
ccgggcccattgtacttttccgaattaccg

SEQ ID NO: 141730 - DNA, 30 bp, Artificial Sequence
  Synthetic oligonucleotide
cttgagactcgatcaggagattaaaacccg

SEQ ID NO: 141731 - DNA, 30 bp, Artificial Sequence
  Synthetic oligonucleotide
gactagtaaagctttgagcggccaaacccg

SEQ ID NO: 141732 - DNA, 30 bp, Artificial Sequence
  Synthetic oligonucleotide
ccgtgattgtacctaacggatcagaacccg

SEQ ID NO: 141733 - DNA, 30 bp, Artificial Sequence
  Synthetic oligonucleotide
ggccatcaagaatcgtactcctaccacccg

SEQ ID NO: 141734 - DNA, 30 bp, Artificial Sequence
  Synthetic oligonucleotide
aagggatgtacgtcgggaactttccacccg

SEQ ID NO: 141735 - DNA, 30 bp, Artificial Sequence
  Synthetic oligonucleotide
acctggcggtaaagaggtctggggcacccg

SEQ ID NO: 141736 - DNA, 30 bp, Artificial Sequence
  Synthetic oligonucleotide
tgggtgccacggattaggaacccagacccg

SEQ ID NO: 141737 - DNA, 30 bp, Artificial Sequence
  Synthetic oligonucleotide
ctaagtcgggagtagggctgtagagacccg

SEQ ID NO: 141738 - DNA, 30 bp, Artificial Sequence
  Synthetic oligonucleotide
cgtcgcaaagcagctcctttgctagacccg

SEQ ID NO: 141739 - DNA, 30 bp, Artificial Sequence
  Synthetic oligonucleotide
accaatcatcgtcccccccaagctgacccg

SEQ ID NO: 141740 - DNA, 30 bp, Artificial Sequence
  Synthetic oligonucleotide
gaccgttagggcttgcaaccataatacccg

SEQ ID NO: 141741 - DNA, 30 bp, Artificial Sequence
  Synthetic oligonucleotide
gtgcatgatgaaatgggagcgatgtacccg

SEQ ID NO: 141742 - DNA, 30 bp, Artificial Sequence
  Synthetic oligonucleotide
ggccatcctaatgaaataaaagtgtacccg

SEQ ID NO: 141743 - DNA, 30 bp, Artificial Sequence
  Synthetic oligonucleotide
gcaccctgcttgaacaggaagagttacccg

SEQ ID NO: 141744 - DNA, 30 bp, Artificial Sequence
  Synthetic oligonucleotide
atctgagattcagtctaccgcgaacccccg

SEQ ID NO: 141745 - DNA, 30 bp, Artificial Sequence
  Synthetic oligonucleotide
ctatatggagaaaacgcgacatcatccccg

SEQ ID NO: 141746 - DNA, 30 bp, Artificial Sequence
  Synthetic oligonucleotide
tgggatgttcattctgggctgatatccccg

SEQ ID NO: 141747 - DNA, 31 bp, Artificial Sequence
  Synthetic oligonucleotide
actacgatttgatggcctcagccagagcccg

SEQ ID NO: 141748 - DNA, 30 bp, Artificial Sequence
  Synthetic oligonucleotide
ggacgggtacaaccggtacaaccgagcccg

SEQ ID NO: 141749 - DNA, 30 bp, Artificial Sequence
  Synthetic oligonucleotide
ccccggcgtatggggattgggattagcccg

SEQ ID NO: 141750 - DNA, 30 bp, Artificial Sequence
  Synthetic oligonucleotide
cagatcattagcactcagaaataccgcccg

SEQ ID NO: 141751 - DNA, 30 bp, Artificial Sequence
  Synthetic oligonucleotide
cgtcctataaagagcgggtacacgcgcccg

SEQ ID NO: 141752 - DNA, 30 bp, Artificial Sequence
  Synthetic oligonucleotide
caggacttgtctttcagtccccagggcccg

SEQ ID NO: 141753 - DNA, 30 bp, Artificial Sequence
  Synthetic oligonucleotide
tagcagattatgcgatcgccggactgcccg

SEQ ID NO: 141754 - DNA, 30 bp, Artificial Sequence
  Synthetic oligonucleotide
ttatgaatgtgcacctagagcacttgcccg

SEQ ID NO: 141755 - DNA, 30 bp, Artificial Sequence
  Synthetic oligonucleotide
cttgcttcctaccgatacacgaaaatcccg

SEQ ID NO: 141756 - DNA, 30 bp, Artificial Sequence
  Synthetic oligonucleotide
tgtcctggctgtatgcgttgctatatcccg

SEQ ID NO: 141757 - DNA, 29 bp, Artificial Sequence
  Synthetic oligonucleotide
tagccaagtgataggaccatggtatcccg

SEQ ID NO: 141758 - DNA, 30 bp, Artificial Sequence
  Synthetic oligonucleotide
tggcagcgatctagccggcttgtcctcccg

SEQ ID NO: 141759 - DNA, 30 bp, Artificial Sequence
  Synthetic oligonucleotide
gcaggtcaatcataacaggtttggctcccg

SEQ ID NO: 141760 - DNA, 30 bp, Artificial Sequence
  Synthetic oligonucleotide
tcgaggaaccagtaggtaagtattctcccg

SEQ ID NO: 141761 - DNA, 30 bp, Artificial Sequence
  Synthetic oligonucleotide
agttggtgtagggcatgaatggaagtcccg

SEQ ID NO: 141762 - DNA, 30 bp, Artificial Sequence
  Synthetic oligonucleotide
acactaaaatgtaagtaggatttcgtcccg

SEQ ID NO: 141763 - DNA, 30 bp, Artificial Sequence
  Synthetic oligonucleotide
atagcattatgggcccaaatagtattcccg

SEQ ID NO: 141764 - DNA, 30 bp, Artificial Sequence
  Synthetic oligonucleotide
ccgggcctagtagctctcgtgtccttcccg

SEQ ID NO: 141765 - DNA, 30 bp, Artificial Sequence
  Synthetic oligonucleotide
tgggaagccattaccgatccttcgttcccg

SEQ ID NO: 141766 - DNA, 30 bp, Artificial Sequence
  Synthetic oligonucleotide
tgacgtcataatagatgagcctttttcccg

SEQ ID NO: 141767 - DNA, 30 bp, Artificial Sequence
  Synthetic oligonucleotide
ttactggatccaatcgtcgggcgaaagccg

SEQ ID NO: 141768 - DNA, 30 bp, Artificial Sequence
  Synthetic oligonucleotide
agcagagggcatgggtattgggagaagccg

SEQ ID NO: 141769 - DNA, 30 bp, Artificial Sequence
  Synthetic oligonucleotide
actagaaggccacaatactctattaagccg

SEQ ID NO: 141770 - DNA, 30 bp, Artificial Sequence
  Synthetic oligonucleotide
tccgcgtatgcggaatatgtccgccagccg

SEQ ID NO: 141771 - DNA, 30 bp, Artificial Sequence
  Synthetic oligonucleotide
ttacaaagaagttcacacgacgagcagccg

SEQ ID NO: 141772 - DNA, 30 bp, Artificial Sequence
  Synthetic oligonucleotide
cgggggcggatgtccttctgagcagagccg

SEQ ID NO: 141773 - DNA, 30 bp, Artificial Sequence
  Synthetic oligonucleotide
taaaagacatttgtgctggttcaaacgccg

SEQ ID NO: 141774 - DNA, 30 bp, Artificial Sequence
  Synthetic oligonucleotide
catgtaaaagggacccgggattacacgccg

SEQ ID NO: 141775 - DNA, 30 bp, Artificial Sequence
  Synthetic oligonucleotide
cgaacattgtgagttctgttctttacgccg

SEQ ID NO: 141776 - DNA, 30 bp, Artificial Sequence
  Synthetic oligonucleotide
aacagaagtgcggtttctcgggatccgccg

SEQ ID NO: 141777 - DNA, 30 bp, Artificial Sequence
  Synthetic oligonucleotide
tcactcataacccgcaacgcttttccgccg

SEQ ID NO: 141778 - DNA, 30 bp, Artificial Sequence
  Synthetic oligonucleotide
acagcaaggacgattcgccttagagcgccg

SEQ ID NO: 141779 - DNA, 30 bp, Artificial Sequence
  Synthetic oligonucleotide
cgtgttcgacttgttatgagcagttcgccg

SEQ ID NO: 141780 - DNA, 30 bp, Artificial Sequence
  Synthetic oligonucleotide
attacaaaatagggatggatgtaaaggccg

SEQ ID NO: 141781 - DNA, 30 bp, Artificial Sequence
  Synthetic oligonucleotide
acgtaactgtatgagatcttgacaaggccg

SEQ ID NO: 141782 - DNA, 30 bp, Artificial Sequence
  Synthetic oligonucleotide
cttttcgtcataacgttactgcgaaggccg

SEQ ID NO: 141783 - DNA, 30 bp, Artificial Sequence
  Synthetic oligonucleotide
tatagaagaaaatacagttaaatcaggccg

SEQ ID NO: 141784 - DNA, 30 bp, Artificial Sequence
  Synthetic oligonucleotide
gtacacgggttccggttgacattgaggccg

SEQ ID NO: 141785 - DNA, 30 bp, Artificial Sequence
  Synthetic oligonucleotide
gtacggtgtatacaacagaaaaataggccg

SEQ ID NO: 141786 - DNA, 30 bp, Artificial Sequence
  Synthetic oligonucleotide
acgaatctcgtgtatgttatggaccggccg

SEQ ID NO: 141787 - DNA, 30 bp, Artificial Sequence
  Synthetic oligonucleotide
acgggcgatagacttggtggtcgccggccg

SEQ ID NO: 141788 - DNA, 30 bp, Artificial Sequence
  Synthetic oligonucleotide
tatcctgcctctgctcaggagatagggccg

SEQ ID NO: 141789 - DNA, 30 bp, Artificial Sequence
  Synthetic oligonucleotide
gagagggcgtctggatacgtcaccgggccg

SEQ ID NO: 141790 - DNA, 30 bp, Artificial Sequence
  Synthetic oligonucleotide
caatcgtttggaacctagtccagatggccg

SEQ ID NO: 141791 - DNA, 30 bp, Artificial Sequence
  Synthetic oligonucleotide
aaacaaggaagaggtaaagaatattggccg

SEQ ID NO: 141792 - DNA, 30 bp, Artificial Sequence
  Synthetic oligonucleotide
tagagggccgttccccgaacgagaatgccg

SEQ ID NO: 141793 - DNA, 30 bp, Artificial Sequence
  Synthetic oligonucleotide
atgtggtaatggagtgtgacgtacatgccg

SEQ ID NO: 141794 - DNA, 30 bp, Artificial Sequence
  Synthetic oligonucleotide
ttctggccaactaagctggcttccatgccg

SEQ ID NO: 141795 - DNA, 30 bp, Artificial Sequence
  Synthetic oligonucleotide
gctgtgaatgatagcaagtaaggtatgccg

SEQ ID NO: 141796 - DNA, 30 bp, Artificial Sequence
  Synthetic oligonucleotide
atggcttctacaactcttgatgtactgccg

SEQ ID NO: 141797 - DNA, 30 bp, Artificial Sequence
  Synthetic oligonucleotide
gactagattcaaaccaacaaatggctgccg

SEQ ID NO: 141798 - DNA, 30 bp, Artificial Sequence
  Synthetic oligonucleotide
gtctatgtatgtccaacccgtgaagtgccg

SEQ ID NO: 141799 - DNA, 30 bp, Artificial Sequence
  Synthetic oligonucleotide
gtagcccgcatagaaaagttattagtgccg

SEQ ID NO: 141800 - DNA, 30 bp, Artificial Sequence
  Synthetic oligonucleotide
taacttgtgtccggatgggtagacgtgccg

SEQ ID NO: 141801 - DNA, 30 bp, Artificial Sequence
  Synthetic oligonucleotide
atggaaccgtgggtgtacaacgcggtgccg

SEQ ID NO: 141802 - DNA, 30 bp, Artificial Sequence
  Synthetic oligonucleotide
gactgatacatacaatcaggaatggtgccg

SEQ ID NO: 141803 - DNA, 30 bp, Artificial Sequence
  Synthetic oligonucleotide
ggtgagttcataaggtgccgggtggtgccg

SEQ ID NO: 141804 - DNA, 30 bp, Artificial Sequence
  Synthetic oligonucleotide
tggacactagtctgtcataaaatcttgccg

SEQ ID NO: 141805 - DNA, 30 bp, Artificial Sequence
  Synthetic oligonucleotide
gatatagcaaatggcactacgaagttgccg

SEQ ID NO: 141806 - DNA, 30 bp, Artificial Sequence
  Synthetic oligonucleotide
caccgtagtccactctgaaacgagttgccg

SEQ ID NO: 141807 - DNA, 30 bp, Artificial Sequence
  Synthetic oligonucleotide
ttgaagggtagtaagggtaatgtaaatccg

SEQ ID NO: 141808 - DNA, 30 bp, Artificial Sequence
  Synthetic oligonucleotide
cgcaaagtgccaatgggtcgtggcaatccg

SEQ ID NO: 141809 - DNA, 30 bp, Artificial Sequence
  Synthetic oligonucleotide
gaaacaggcgcttagtccttgtaacatccg

SEQ ID NO: 141810 - DNA, 30 bp, Artificial Sequence
  Synthetic oligonucleotide
ctataagacgttaactgaaggacacatccg

SEQ ID NO: 141811 - DNA, 30 bp, Artificial Sequence
  Synthetic oligonucleotide
gttggaaaccactgaatgccactgcatccg

SEQ ID NO: 141812 - DNA, 30 bp, Artificial Sequence
  Synthetic oligonucleotide
atagtcgaggtcggcctaatgtaagatccg

SEQ ID NO: 141813 - DNA, 30 bp, Artificial Sequence
  Synthetic oligonucleotide
tttgggcgtgaacattattggcgagatccg

SEQ ID NO: 141814 - DNA, 30 bp, Artificial Sequence
  Synthetic oligonucleotide
ctagccttgggttgtggcgcgctagatccg

SEQ ID NO: 141815 - DNA, 30 bp, Artificial Sequence
  Synthetic oligonucleotide
aagtcaaggtggattagacgcgtagatccg

SEQ ID NO: 141816 - DNA, 30 bp, Artificial Sequence
  Synthetic oligonucleotide
acaaagcttcgtgaaaactcccccgatccg

SEQ ID NO: 141817 - DNA, 30 bp, Artificial Sequence
  Synthetic oligonucleotide
agacgtaggttactcgcattagtggatccg

SEQ ID NO: 141818 - DNA, 30 bp, Artificial Sequence
  Synthetic oligonucleotide
aacggactcttccaatcgataacctatccg

SEQ ID NO: 141819 - DNA, 30 bp, Artificial Sequence
  Synthetic oligonucleotide
acgcagacagctaacctggctcttactccg

SEQ ID NO: 141820 - DNA, 30 bp, Artificial Sequence
  Synthetic oligonucleotide
tagtggcatttggacatccgagaacctccg

SEQ ID NO: 141821 - DNA, 30 bp, Artificial Sequence
  Synthetic oligonucleotide
agggggccaattacatacggtatacctccg

SEQ ID NO: 141822 - DNA, 30 bp, Artificial Sequence
  Synthetic oligonucleotide
aacagttcctgcccgagttaggctcctccg

SEQ ID NO: 141823 - DNA, 30 bp, Artificial Sequence
  Synthetic oligonucleotide
tatcaagggtgcaggattgtggatgctccg

SEQ ID NO: 141824 - DNA, 30 bp, Artificial Sequence
  Synthetic oligonucleotide
agcgggatagcgcgtcacctgagatctccg

SEQ ID NO: 141825 - DNA, 30 bp, Artificial Sequence
  Synthetic oligonucleotide
ggtcttcgtgataccacgtttacgtctccg

SEQ ID NO: 141826 - DNA, 30 bp, Artificial Sequence
  Synthetic oligonucleotide
cacgtgcgcggactggagactaattctccg

SEQ ID NO: 141827 - DNA, 30 bp, Artificial Sequence
  Synthetic oligonucleotide
ttgaacgcctcgttaagttgtgcttctccg

SEQ ID NO: 141828 - DNA, 30 bp, Artificial Sequence
  Synthetic oligonucleotide
agggagtaagttcggggttttaccagtccg

SEQ ID NO: 141829 - DNA, 30 bp, Artificial Sequence
  Synthetic oligonucleotide
aagtgcggtgctccctctcgaaagagtccg

SEQ ID NO: 141830 - DNA, 30 bp, Artificial Sequence
  Synthetic oligonucleotide
tgttcagggtcccctacacaccggagtccg

SEQ ID NO: 141831 - DNA, 30 bp, Artificial Sequence
  Synthetic oligonucleotide
ttgaaagaagcgaaactgaatggtagtccg

SEQ ID NO: 141832 - DNA, 30 bp, Artificial Sequence
  Synthetic oligonucleotide
tagtggtagaggaaaggaaatacacgtccg

SEQ ID NO: 141833 - DNA, 30 bp, Artificial Sequence
  Synthetic oligonucleotide
ttcaaatcgcttaccctctttaggcgtccg

SEQ ID NO: 141834 - DNA, 30 bp, Artificial Sequence
  Synthetic oligonucleotide
cagacgctaggagcgtaaaaagggcgtccg

SEQ ID NO: 141835 - DNA, 30 bp, Artificial Sequence
  Synthetic oligonucleotide
agttgtatgttggaacctacgttgcgtccg

SEQ ID NO: 141836 - DNA, 30 bp, Artificial Sequence
  Synthetic oligonucleotide
cattgagaagaagataatccataaggtccg

SEQ ID NO: 141837 - DNA, 30 bp, Artificial Sequence
  Synthetic oligonucleotide
gatggacatatctagcatcttagcggtccg

SEQ ID NO: 141838 - DNA, 30 bp, Artificial Sequence
  Synthetic oligonucleotide
tatagctccatgtaaaatgggtagtgtccg

SEQ ID NO: 141839 - DNA, 30 bp, Artificial Sequence
  Synthetic oligonucleotide
atggtaagaggagcgaggggtatttgtccg

SEQ ID NO: 141840 - DNA, 30 bp, Artificial Sequence
  Synthetic oligonucleotide
tagtgaaaacgttcaagggatgtaattccg

SEQ ID NO: 141841 - DNA, 30 bp, Artificial Sequence
  Synthetic oligonucleotide
ttaggagatggagtcggtggaaacattccg

SEQ ID NO: 141842 - DNA, 30 bp, Artificial Sequence
  Synthetic oligonucleotide
tcggttgactgcgggtccagctccattccg

SEQ ID NO: 141843 - DNA, 30 bp, Artificial Sequence
  Synthetic oligonucleotide
ccttcgtcgaattacaggatatcacttccg

SEQ ID NO: 141844 - DNA, 30 bp, Artificial Sequence
  Synthetic oligonucleotide
aacaaaaattggatagaggcttcacttccg

SEQ ID NO: 141845 - DNA, 30 bp, Artificial Sequence
  Synthetic oligonucleotide
taggcgatcaggcgaatccgaggccttccg

SEQ ID NO: 141846 - DNA, 30 bp, Artificial Sequence
  Synthetic oligonucleotide
atttaaggcggtagtgtttaatatcttccg

SEQ ID NO: 141847 - DNA, 30 bp, Artificial Sequence
  Synthetic oligonucleotide
atgagcgcataatgtaaatcttacgttccg

SEQ ID NO: 141848 - DNA, 30 bp, Artificial Sequence
  Synthetic oligonucleotide
tgaaacgtccggggctcacgcgtggttccg

SEQ ID NO: 141849 - DNA, 30 bp, Artificial Sequence
  Synthetic oligonucleotide
cctcatagtaaattttgtaaaaactttccg

SEQ ID NO: 141850 - DNA, 30 bp, Artificial Sequence
  Synthetic oligonucleotide
cgaattgttaggtcacgtcctaacaaagcg

SEQ ID NO: 141851 - DNA, 30 bp, Artificial Sequence
  Synthetic oligonucleotide
gtggccctaaatgggatattcaataaagcg

SEQ ID NO: 141852 - DNA, 30 bp, Artificial Sequence
  Synthetic oligonucleotide
ggctatcgacccattcaattcggtaaagcg

SEQ ID NO: 141853 - DNA, 30 bp, Artificial Sequence
  Synthetic oligonucleotide
tgagtgcggactgcgaaatgggatcaagcg

SEQ ID NO: 141854 - DNA, 30 bp, Artificial Sequence
  Synthetic oligonucleotide
gctttaatcaacacaatggattatcaagcg

SEQ ID NO: 141855 - DNA, 30 bp, Artificial Sequence
  Synthetic oligonucleotide
cctatggatatgagtgttatagaggaagcg

SEQ ID NO: 141856 - DNA, 30 bp, Artificial Sequence
  Synthetic oligonucleotide
tgccgagcccgaatgtttcgttaggaagcg

SEQ ID NO: 141857 - DNA, 30 bp, Artificial Sequence
  Synthetic oligonucleotide
tattggacggctgccgaggactagtaagcg

SEQ ID NO: 141858 - DNA, 30 bp, Artificial Sequence
  Synthetic oligonucleotide
cacaagaaactgtccggaacgccgtaagcg

SEQ ID NO: 141859 - DNA, 30 bp, Artificial Sequence
  Synthetic oligonucleotide
ggaattctgcctacgtcaatccggtaagcg

SEQ ID NO: 141860 - DNA, 30 bp, Artificial Sequence
  Synthetic oligonucleotide
gcttacccgagatgtcattaagtttaagcg

SEQ ID NO: 141861 - DNA, 30 bp, Artificial Sequence
  Synthetic oligonucleotide
gtaagatgatctcggacaattgggacagcg

SEQ ID NO: 141862 - DNA, 30 bp, Artificial Sequence
  Synthetic oligonucleotide
acggtgaatcaagcaacgtcgattacagcg

SEQ ID NO: 141863 - DNA, 30 bp, Artificial Sequence
  Synthetic oligonucleotide
gtagtactatctgcaagtgagcgaccagcg

SEQ ID NO: 141864 - DNA, 30 bp, Artificial Sequence
  Synthetic oligonucleotide
gatcgcgaagcgcggtctggtaaagcagcg

SEQ ID NO: 141865 - DNA, 30 bp, Artificial Sequence
  Synthetic oligonucleotide
tccgcttgccacaaagggggtaatgcagcg

SEQ ID NO: 141866 - DNA, 30 bp, Artificial Sequence
  Synthetic oligonucleotide
agagtaacgcgcagatcaaggtcatcagcg

SEQ ID NO: 141867 - DNA, 30 bp, Artificial Sequence
  Synthetic oligonucleotide
gcgctccacaaaaacgtattttcatcagcg

SEQ ID NO: 141868 - DNA, 30 bp, Artificial Sequence
  Synthetic oligonucleotide
gagaggaaaatcgtactccgaagatcagcg

SEQ ID NO: 141869 - DNA, 30 bp, Artificial Sequence
  Synthetic oligonucleotide
cttcgcccatgtgtaaggccgggctcagcg

SEQ ID NO: 141870 - DNA, 30 bp, Artificial Sequence
  Synthetic oligonucleotide
agagaaatacgtgaacaacggagttcagcg

SEQ ID NO: 141871 - DNA, 30 bp, Artificial Sequence
  Synthetic oligonucleotide
tcttcggcgaaaagcgtttgtttttcagcg

SEQ ID NO: 141872 - DNA, 30 bp, Artificial Sequence
  Synthetic oligonucleotide
atgtgaataggactggttatcagaagagcg

SEQ ID NO: 141873 - DNA, 30 bp, Artificial Sequence
  Synthetic oligonucleotide
tggcatatttggacaacacaatgaagagcg

SEQ ID NO: 141874 - DNA, 30 bp, Artificial Sequence
  Synthetic oligonucleotide
aaattcaaatgatatgcgtgtaccagagcg

SEQ ID NO: 141875 - DNA, 30 bp, Artificial Sequence
  Synthetic oligonucleotide
acgcaggaaatctcgacaggttgcagagcg

SEQ ID NO: 141876 - DNA, 30 bp, Artificial Sequence
  Synthetic oligonucleotide
tgatgctttacgtgaggaatcaatagagcg

SEQ ID NO: 141877 - DNA, 30 bp, Artificial Sequence
  Synthetic oligonucleotide
ggcgtggggtagagatttttcggacgagcg

SEQ ID NO: 141878 - DNA, 30 bp, Artificial Sequence
  Synthetic oligonucleotide
tcgtgcataggtcaccatggataccgagcg

SEQ ID NO: 141879 - DNA, 31 bp, Artificial Sequence
  Synthetic oligonucleotide
agcaagaggggagcgcaaaacgggcggagcg

SEQ ID NO: 141880 - DNA, 30 bp, Artificial Sequence
  Synthetic oligonucleotide
ttacgcgaatttcggacagatagaatagcg

SEQ ID NO: 141881 - DNA, 30 bp, Artificial Sequence
  Synthetic oligonucleotide
agctaagagggaaatatatcgcacatagcg

SEQ ID NO: 141882 - DNA, 30 bp, Artificial Sequence
  Synthetic oligonucleotide
tatacgttgaactcgggtctggaactagcg

SEQ ID NO: 141883 - DNA, 30 bp, Artificial Sequence
  Synthetic oligonucleotide
tcgtgatataagcaaccccggaccctagcg

SEQ ID NO: 141884 - DNA, 30 bp, Artificial Sequence
  Synthetic oligonucleotide
aggtaattcttcgtagacagacccctagcg

SEQ ID NO: 141885 - DNA, 30 bp, Artificial Sequence
  Synthetic oligonucleotide
tactgtccgctgtataaaaaggccctagcg

SEQ ID NO: 141886 - DNA, 30 bp, Artificial Sequence
  Synthetic oligonucleotide
actttatgcagtgtgagtaatgccgtagcg

SEQ ID NO: 141887 - DNA, 30 bp, Artificial Sequence
  Synthetic oligonucleotide
agtttagatagactacggccgaaggtagcg

SEQ ID NO: 141888 - DNA, 30 bp, Artificial Sequence
  Synthetic oligonucleotide
tctccgtagggtagtcgattatgggtagcg

SEQ ID NO: 141889 - DNA, 30 bp, Artificial Sequence
  Synthetic oligonucleotide
aatcgcggcacaatcagtgagtcattagcg

SEQ ID NO: 141890 - DNA, 30 bp, Artificial Sequence
  Synthetic oligonucleotide
ggctcggatcttccaggctgtaacttagcg

SEQ ID NO: 141891 - DNA, 30 bp, Artificial Sequence
  Synthetic oligonucleotide
taaggaaggggagcgcacggaactaacgcg

SEQ ID NO: 141892 - DNA, 30 bp, Artificial Sequence
  Synthetic oligonucleotide
caatcgctgataccatagcaactacacgcg

SEQ ID NO: 141893 - DNA, 30 bp, Artificial Sequence
  Synthetic oligonucleotide
gctcagcgaagtggcttaacgactcacgcg

SEQ ID NO: 141894 - DNA, 30 bp, Artificial Sequence
  Synthetic oligonucleotide
acgtagatcgtggcatggcatgaagacgcg

SEQ ID NO: 141895 - DNA, 30 bp, Artificial Sequence
  Synthetic oligonucleotide
tcacacgtgagcgtgatagctcgagacgcg

SEQ ID NO: 141896 - DNA, 30 bp, Artificial Sequence
  Synthetic oligonucleotide
gtgggatcagttgttcgacgtgcatacgcg

SEQ ID NO: 141897 - DNA, 30 bp, Artificial Sequence
  Synthetic oligonucleotide
cagatattcaaaagttggcggagatacgcg

SEQ ID NO: 141898 - DNA, 30 bp, Artificial Sequence
  Synthetic oligonucleotide
cactaagaagattttgcgtgaccctacgcg

SEQ ID NO: 141899 - DNA, 30 bp, Artificial Sequence
  Synthetic oligonucleotide
gacaccactagagccaattgaagtcccgcg

SEQ ID NO: 141900 - DNA, 30 bp, Artificial Sequence
  Synthetic oligonucleotide
aaccgtgcacgtcatgtagaatgtcccgcg

SEQ ID NO: 141901 - DNA, 30 bp, Artificial Sequence
  Synthetic oligonucleotide
ggagggaaccgattgattggcaacgccgcg

SEQ ID NO: 141902 - DNA, 30 bp, Artificial Sequence
  Synthetic oligonucleotide
tattgtgaaaggaatattgagatggccgcg

SEQ ID NO: 141903 - DNA, 30 bp, Artificial Sequence
  Synthetic oligonucleotide
gtcacgagtagttgactcgtatgctccgcg

SEQ ID NO: 141904 - DNA, 30 bp, Artificial Sequence
  Synthetic oligonucleotide
agggcccagagggctgagtatggttccgcg

SEQ ID NO: 141905 - DNA, 30 bp, Artificial Sequence
  Synthetic oligonucleotide
ttactgaggggatcaacctcgtaaagcgcg

SEQ ID NO: 141906 - DNA, 30 bp, Artificial Sequence
  Synthetic oligonucleotide
acgctgagaagtaccggcactgcaggcgcg

SEQ ID NO: 141907 - DNA, 30 bp, Artificial Sequence
  Synthetic oligonucleotide
tacagtcagtaggaattatataccggcgcg

SEQ ID NO: 141908 - DNA, 30 bp, Artificial Sequence
  Synthetic oligonucleotide
acaaatagccaccccgaggcgttgggcgcg

SEQ ID NO: 141909 - DNA, 30 bp, Artificial Sequence
  Synthetic oligonucleotide
ggagcgctacagcagtagtcaaatggcgcg

SEQ ID NO: 141910 - DNA, 30 bp, Artificial Sequence
  Synthetic oligonucleotide
gaaccggcgtaacgcaggttattatgcgcg

SEQ ID NO: 141911 - DNA, 30 bp, Artificial Sequence
  Synthetic oligonucleotide
tctcgtaggggcagggcacgtgggtgcgcg

SEQ ID NO: 141912 - DNA, 30 bp, Artificial Sequence
  Synthetic oligonucleotide
acgttattccgcatttgtttggcaatcgcg

SEQ ID NO: 141913 - DNA, 30 bp, Artificial Sequence
  Synthetic oligonucleotide
tgcattatcggaagctaaaggcgaatcgcg

SEQ ID NO: 141914 - DNA, 30 bp, Artificial Sequence
  Synthetic oligonucleotide
cgcattccgccaaactccttatccatcgcg

SEQ ID NO: 141915 - DNA, 30 bp, Artificial Sequence
  Synthetic oligonucleotide
aggtaactcgtctaaggggtttcgatcgcg

SEQ ID NO: 141916 - DNA, 30 bp, Artificial Sequence
  Synthetic oligonucleotide
cagttaataccgggggcgattgcactcgcg

SEQ ID NO: 141917 - DNA, 30 bp, Artificial Sequence
  Synthetic oligonucleotide
tcggagcgatctgtcacataatgactcgcg

SEQ ID NO: 141918 - DNA, 30 bp, Artificial Sequence
  Synthetic oligonucleotide
gcagatagcatgtgacgttgtgtcctcgcg

SEQ ID NO: 141919 - DNA, 30 bp, Artificial Sequence
  Synthetic oligonucleotide
cgatgttggagttgaaagtaatagctcgcg

SEQ ID NO: 141920 - DNA, 30 bp, Artificial Sequence
  Synthetic oligonucleotide
tcttgtaaaggatcttaacgggtagtcgcg

SEQ ID NO: 141921 - DNA, 30 bp, Artificial Sequence
  Synthetic oligonucleotide
gctctgttaagagtgaaggtgtacgtcgcg

SEQ ID NO: 141922 - DNA, 30 bp, Artificial Sequence
  Synthetic oligonucleotide
gctttgtgagacttgccctgaaaattcgcg

SEQ ID NO: 141923 - DNA, 30 bp, Artificial Sequence
  Synthetic oligonucleotide
aaagggtatttctagagggccgcattcgcg

SEQ ID NO: 141924 - DNA, 30 bp, Artificial Sequence
  Synthetic oligonucleotide
actggggggatggatttcaggtagaaggcg

SEQ ID NO: 141925 - DNA, 30 bp, Artificial Sequence
  Synthetic oligonucleotide
aggaaggagcgggctatttgctggaaggcg

SEQ ID NO: 141926 - DNA, 30 bp, Artificial Sequence
  Synthetic oligonucleotide
agttcatgtcatttattgcttggtcaggcg

SEQ ID NO: 141927 - DNA, 30 bp, Artificial Sequence
  Synthetic oligonucleotide
ggtgacgaccgctacttagattctgaggcg

SEQ ID NO: 141928 - DNA, 30 bp, Artificial Sequence
  Synthetic oligonucleotide
tacaatggaaacggcgaaccgagtgaggcg

SEQ ID NO: 141929 - DNA, 30 bp, Artificial Sequence
  Synthetic oligonucleotide
cacatggtaacgtttgtcgtccgataggcg

SEQ ID NO: 141930 - DNA, 30 bp, Artificial Sequence
  Synthetic oligonucleotide
agttattagaattgtatccatctctaggcg

SEQ ID NO: 141931 - DNA, 30 bp, Artificial Sequence
  Synthetic oligonucleotide
atctgcgttacaattgtccgtgcttaggcg

SEQ ID NO: 141932 - DNA, 30 bp, Artificial Sequence
  Synthetic oligonucleotide
ctgaaaccatgggagtatcagtgttaggcg

SEQ ID NO: 141933 - DNA, 30 bp, Artificial Sequence
  Synthetic oligonucleotide
cgcactatgggcgccgaagagagcacggcg

SEQ ID NO: 141934 - DNA, 30 bp, Artificial Sequence
  Synthetic oligonucleotide
gtgtagagtcgggcctccttggttacggcg

SEQ ID NO: 141935 - DNA, 30 bp, Artificial Sequence
  Synthetic oligonucleotide
ggatggacgacattctagaacagcccggcg

SEQ ID NO: 141936 - DNA, 30 bp, Artificial Sequence
  Synthetic oligonucleotide
gttggtctcgtccgtcaatctcagccggcg

SEQ ID NO: 141937 - DNA, 30 bp, Artificial Sequence
  Synthetic oligonucleotide
taaaggccctacagcaaccggacagcggcg

SEQ ID NO: 141938 - DNA, 30 bp, Artificial Sequence
  Synthetic oligonucleotide
ttacttaatcgatctgaccccaacgcggcg

SEQ ID NO: 141939 - DNA, 30 bp, Artificial Sequence
  Synthetic oligonucleotide
tgtatggaataagtgtcgtctggtgcggcg

SEQ ID NO: 141940 - DNA, 30 bp, Artificial Sequence
  Synthetic oligonucleotide
agggtgccatgagcggatgcgcaatcggcg

SEQ ID NO: 141941 - DNA, 30 bp, Artificial Sequence
  Synthetic oligonucleotide
aaacgccagtctcctttaccgacatcggcg

SEQ ID NO: 141942 - DNA, 30 bp, Artificial Sequence
  Synthetic oligonucleotide
gcttacgtgaccgaaacgttcatctcggcg

SEQ ID NO: 141943 - DNA, 30 bp, Artificial Sequence
  Synthetic oligonucleotide
aaggaccgcaatattcaagttttgtcggcg

SEQ ID NO: 141944 - DNA, 30 bp, Artificial Sequence
  Synthetic oligonucleotide
tgtagcgtgtagaatagagagcgaagggcg

SEQ ID NO: 141945 - DNA, 30 bp, Artificial Sequence
  Synthetic oligonucleotide
taaatgcgagtgtcaatcacagccagggcg

SEQ ID NO: 141946 - DNA, 30 bp, Artificial Sequence
  Synthetic oligonucleotide
tcaacccacactgattggttgggcagggcg

SEQ ID NO: 141947 - DNA, 30 bp, Artificial Sequence
  Synthetic oligonucleotide
catattcattacttcgagccgtgtagggcg

SEQ ID NO: 141948 - DNA, 30 bp, Artificial Sequence
  Synthetic oligonucleotide
acccgccgccatagaagaagaagacgggcg

SEQ ID NO: 141949 - DNA, 30 bp, Artificial Sequence
  Synthetic oligonucleotide
gctagggagatatcgtagaagcgccgggcg

SEQ ID NO: 141950 - DNA, 30 bp, Artificial Sequence
  Synthetic oligonucleotide
ttcggtcaagggtgagatgttgttcgggcg

SEQ ID NO: 141951 - DNA, 30 bp, Artificial Sequence
  Synthetic oligonucleotide
gcactcggggatctataacattgaggggcg

SEQ ID NO: 141952 - DNA, 30 bp, Artificial Sequence
  Synthetic oligonucleotide
tatattcacagttactcaaaagtgggggcg

SEQ ID NO: 141953 - DNA, 30 bp, Artificial Sequence
  Synthetic oligonucleotide
ctaggcacctcgcaatcggagtgtggggcg

SEQ ID NO: 141954 - DNA, 30 bp, Artificial Sequence
  Synthetic oligonucleotide
tgtactgtctagcagtgaaagtcatgggcg

SEQ ID NO: 141955 - DNA, 30 bp, Artificial Sequence
  Synthetic oligonucleotide
gctgtgttgcgctttgggtttaagtgggcg

SEQ ID NO: 141956 - DNA, 30 bp, Artificial Sequence
  Synthetic oligonucleotide
gctatggggtggtcgaggggtcggtgggcg

SEQ ID NO: 141957 - DNA, 30 bp, Artificial Sequence
  Synthetic oligonucleotide
cgaccctaggccttcatgtgaatgtgggcg

SEQ ID NO: 141958 - DNA, 30 bp, Artificial Sequence
  Synthetic oligonucleotide
tcccgcctcgaatgagggcaagtttgggcg

SEQ ID NO: 141959 - DNA, 30 bp, Artificial Sequence
  Synthetic oligonucleotide
gaacggttaggctcagacgttctaatggcg

SEQ ID NO: 141960 - DNA, 30 bp, Artificial Sequence
  Synthetic oligonucleotide
cgactgcggaacaaccggcaggccatggcg

SEQ ID NO: 141961 - DNA, 30 bp, Artificial Sequence
  Synthetic oligonucleotide
ttagtgcggttcgtgacgtttgccatggcg

SEQ ID NO: 141962 - DNA, 30 bp, Artificial Sequence
  Synthetic oligonucleotide
aagcacaacttcctattagataagatggcg

SEQ ID NO: 141963 - DNA, 30 bp, Artificial Sequence
  Synthetic oligonucleotide
cgttacttctcgtttatcccgccgatggcg

SEQ ID NO: 141964 - DNA, 30 bp, Artificial Sequence
  Synthetic oligonucleotide
tccgcggtcggtgcgagtctgtatatggcg

SEQ ID NO: 141965 - DNA, 30 bp, Artificial Sequence
  Synthetic oligonucleotide
tgggacgtgcggggtaacattgcactggcg

SEQ ID NO: 141966 - DNA, 30 bp, Artificial Sequence
  Synthetic oligonucleotide
tggaaaaattagatgcaatcaaagctggcg

SEQ ID NO: 141967 - DNA, 30 bp, Artificial Sequence
  Synthetic oligonucleotide
gagaaaccacggacagttcacgtgctggcg

SEQ ID NO: 141968 - DNA, 30 bp, Artificial Sequence
  Synthetic oligonucleotide
gataaatgtccaccaaagggaaaagtggcg

SEQ ID NO: 141969 - DNA, 30 bp, Artificial Sequence
  Synthetic oligonucleotide
ccagggggtggataggaaccattagtggcg

SEQ ID NO: 141970 - DNA, 30 bp, Artificial Sequence
  Synthetic oligonucleotide
gggactcgtattgcatagcttttcgtggcg

SEQ ID NO: 141971 - DNA, 30 bp, Artificial Sequence
  Synthetic oligonucleotide
tggacaacgcgcgctccccattcggtggcg

SEQ ID NO: 141972 - DNA, 30 bp, Artificial Sequence
  Synthetic oligonucleotide
gtacaccgttctcacttgggtatggtggcg

SEQ ID NO: 141973 - DNA, 30 bp, Artificial Sequence
  Synthetic oligonucleotide
ggacgacgtccctagaaacggtaattggcg

SEQ ID NO: 141974 - DNA, 30 bp, Artificial Sequence
  Synthetic oligonucleotide
ccttcggggggctccaatgctagcttggcg

SEQ ID NO: 141975 - DNA, 30 bp, Artificial Sequence
  Synthetic oligonucleotide
agctataagagcgtcgagacaatcttggcg

SEQ ID NO: 141976 - DNA, 30 bp, Artificial Sequence
  Synthetic oligonucleotide
accagggcccacaactcgcactagttggcg

SEQ ID NO: 141977 - DNA, 30 bp, Artificial Sequence
  Synthetic oligonucleotide
cggaggtagtcatgtgtattccatttggcg

SEQ ID NO: 141978 - DNA, 30 bp, Artificial Sequence
  Synthetic oligonucleotide
cctggtagatccgggcagggaaaaaatgcg

SEQ ID NO: 141979 - DNA, 30 bp, Artificial Sequence
  Synthetic oligonucleotide
acaagcccgcgagattgtggttaaaatgcg

SEQ ID NO: 141980 - DNA, 30 bp, Artificial Sequence
  Synthetic oligonucleotide
cgctgcatggcctagagtgccagaaatgcg

SEQ ID NO: 141981 - DNA, 30 bp, Artificial Sequence
  Synthetic oligonucleotide
ccagtgaattggagtaattcggccaatgcg

SEQ ID NO: 141982 - DNA, 30 bp, Artificial Sequence
  Synthetic oligonucleotide
tttgcagtggctcgcgtaattaaccatgcg

SEQ ID NO: 141983 - DNA, 30 bp, Artificial Sequence
  Synthetic oligonucleotide
aacactactatgggccacaaccaccatgcg

SEQ ID NO: 141984 - DNA, 30 bp, Artificial Sequence
  Synthetic oligonucleotide
ggaacaaccggatcttttagtgagcatgcg

SEQ ID NO: 141985 - DNA, 30 bp, Artificial Sequence
  Synthetic oligonucleotide
cctacattttaatcacggactacgcatgcg

SEQ ID NO: 141986 - DNA, 30 bp, Artificial Sequence
  Synthetic oligonucleotide
agacctagcagatattacggtcctcatgcg

SEQ ID NO: 141987 - DNA, 30 bp, Artificial Sequence
  Synthetic oligonucleotide
cgacggttgacactgagcgggtttcatgcg

SEQ ID NO: 141988 - DNA, 30 bp, Artificial Sequence
  Synthetic oligonucleotide
ggccacaagcgcaatggtcacaaagatgcg

SEQ ID NO: 141989 - DNA, 30 bp, Artificial Sequence
  Synthetic oligonucleotide
attacatccatctagtgctgtaaagatgcg

SEQ ID NO: 141990 - DNA, 30 bp, Artificial Sequence
  Synthetic oligonucleotide
tgaccttctacaacaatatagctagatgcg

SEQ ID NO: 141991 - DNA, 30 bp, Artificial Sequence
  Synthetic oligonucleotide
tgatttgaggtggaagccgttctagatgcg

SEQ ID NO: 141992 - DNA, 30 bp, Artificial Sequence
  Synthetic oligonucleotide
tggtctggtttcgtccgtaaagctgatgcg

SEQ ID NO: 141993 - DNA, 30 bp, Artificial Sequence
  Synthetic oligonucleotide
gtagcttacttacttatgagaagatatgcg

SEQ ID NO: 141994 - DNA, 30 bp, Artificial Sequence
  Synthetic oligonucleotide
ggaaggctgtctaactgggacgcctatgcg

SEQ ID NO: 141995 - DNA, 30 bp, Artificial Sequence
  Synthetic oligonucleotide
acgccgtacgacccggtgatgctctatgcg

SEQ ID NO: 141996 - DNA, 30 bp, Artificial Sequence
  Synthetic oligonucleotide
tcccagtgtgaagatgccgataagtatgcg

SEQ ID NO: 141997 - DNA, 30 bp, Artificial Sequence
  Synthetic oligonucleotide
ggccaaaatccggtgaaaacgccttatgcg

SEQ ID NO: 141998 - DNA, 30 bp, Artificial Sequence
  Synthetic oligonucleotide
cgatagaacgccttagtgccgaccactgcg

SEQ ID NO: 141999 - DNA, 30 bp, Artificial Sequence
  Synthetic oligonucleotide
cacgggtccgctcagggaatcttgactgcg

SEQ ID NO: 142000 - DNA, 30 bp, Artificial Sequence
  Synthetic oligonucleotide
gtcgctttcagaaacattctatttactgcg

SEQ ID NO: 142001 - DNA, 30 bp, Artificial Sequence
  Synthetic oligonucleotide
cacaatacactcaccggccccccacctgcg

SEQ ID NO: 142002 - DNA, 30 bp, Artificial Sequence
  Synthetic oligonucleotide
cagagatggcatagcagtaaagcacctgcg

SEQ ID NO: 142003 - DNA, 30 bp, Artificial Sequence
  Synthetic oligonucleotide
agtagcgattaggtgcccggcgcgcctgcg

SEQ ID NO: 142004 - DNA, 30 bp, Artificial Sequence
  Synthetic oligonucleotide
ctgcatgcattctacgtcatcgcgcctgcg

SEQ ID NO: 142005 - DNA, 30 bp, Artificial Sequence
  Synthetic oligonucleotide
tgatgattggaggactatgcgcggcctgcg

SEQ ID NO: 142006 - DNA, 30 bp, Artificial Sequence
  Synthetic oligonucleotide
ccctaagatctttatgcaagacgagctgcg

SEQ ID NO: 142007 - DNA, 30 bp, Artificial Sequence
  Synthetic oligonucleotide
gttgcgagcattatacagagtcgatctgcg

SEQ ID NO: 142008 - DNA, 31 bp, Artificial Sequence
  Synthetic oligonucleotide
ctacaaaagtcctgtaccgtagttctctgcg

SEQ ID NO: 142009 - DNA, 30 bp, Artificial Sequence
  Synthetic oligonucleotide
atacccgggcgtaacagggtaaggtctgcg

SEQ ID NO: 142010 - DNA, 30 bp, Artificial Sequence
  Synthetic oligonucleotide
cttccgcggtcgtctattcgcataagtgcg

SEQ ID NO: 142011 - DNA, 30 bp, Artificial Sequence
  Synthetic oligonucleotide
gtcacggggccgcttccgtacggcagtgcg

SEQ ID NO: 142012 - DNA, 30 bp, Artificial Sequence
  Synthetic oligonucleotide
taacgatgcgtaatattcggcatcagtgcg

SEQ ID NO: 142013 - DNA, 30 bp, Artificial Sequence
  Synthetic oligonucleotide
gagacaagacaagaacatggtcctagtgcg

SEQ ID NO: 142014 - DNA, 30 bp, Artificial Sequence
  Synthetic oligonucleotide
gcggtgaagacgtacctagagcttagtgcg

SEQ ID NO: 142015 - DNA, 30 bp, Artificial Sequence
  Synthetic oligonucleotide
tcggggaacttgaattcgtcttcacgtgcg

SEQ ID NO: 142016 - DNA, 30 bp, Artificial Sequence
  Synthetic oligonucleotide
cgtatcgggaggcacaacatctatcgtgcg

SEQ ID NO: 142017 - DNA, 30 bp, Artificial Sequence
  Synthetic oligonucleotide
gctcacatgcgagatgggaatgatattgcg

SEQ ID NO: 142018 - DNA, 30 bp, Artificial Sequence
  Synthetic oligonucleotide
tcctactgcacgcctggaagggaacttgcg

SEQ ID NO: 142019 - DNA, 30 bp, Artificial Sequence
  Synthetic oligonucleotide
gggagcaacaagatattagcatgtcttgcg

SEQ ID NO: 142020 - DNA, 30 bp, Artificial Sequence
  Synthetic oligonucleotide
aacatcgtgctccatcaaggagcagttgcg

SEQ ID NO: 142021 - DNA, 30 bp, Artificial Sequence
  Synthetic oligonucleotide
gtgcctaaggacccatttaatacggttgcg

SEQ ID NO: 142022 - DNA, 30 bp, Artificial Sequence
  Synthetic oligonucleotide
gggattgaacctatccggatcggtgttgcg

SEQ ID NO: 142023 - DNA, 30 bp, Artificial Sequence
  Synthetic oligonucleotide
gaagtacaaaaaatgaggcttgtatttgcg

SEQ ID NO: 142024 - DNA, 30 bp, Artificial Sequence
  Synthetic oligonucleotide
acacggccggcagacgtatatggaaaatcg

SEQ ID NO: 142025 - DNA, 30 bp, Artificial Sequence
  Synthetic oligonucleotide
cgatgtccgtacttaccgggcttaaaatcg

SEQ ID NO: 142026 - DNA, 30 bp, Artificial Sequence
  Synthetic oligonucleotide
ttgcaatgctacagggtatgtcgcaaatcg

SEQ ID NO: 142027 - DNA, 30 bp, Artificial Sequence
  Synthetic oligonucleotide
tggacgagtgattcgcacttgctcaaatcg

SEQ ID NO: 142028 - DNA, 30 bp, Artificial Sequence
  Synthetic oligonucleotide
accgcccagcagttcaaaggatcacaatcg

SEQ ID NO: 142029 - DNA, 30 bp, Artificial Sequence
  Synthetic oligonucleotide
taatggaagaggtggcatttaaaccaatcg

SEQ ID NO: 142030 - DNA, 30 bp, Artificial Sequence
  Synthetic oligonucleotide
cattattcaatgtgctcgtcggggcaatcg

SEQ ID NO: 142031 - DNA, 30 bp, Artificial Sequence
  Synthetic oligonucleotide
tacacaacactacttgcgtttgctcaatcg

SEQ ID NO: 142032 - DNA, 30 bp, Artificial Sequence
  Synthetic oligonucleotide
cggaatactgatcagtttgaaatagaatcg

SEQ ID NO: 142033 - DNA, 30 bp, Artificial Sequence
  Synthetic oligonucleotide
ggcgattgtggctcaagtagtccggaatcg

SEQ ID NO: 142034 - DNA, 30 bp, Artificial Sequence
  Synthetic oligonucleotide
tccctgtgtcgtgggatgtttcatgaatcg

SEQ ID NO: 142035 - DNA, 30 bp, Artificial Sequence
  Synthetic oligonucleotide
tcatcccgaaaagatgtgtacagctaatcg

SEQ ID NO: 142036 - DNA, 30 bp, Artificial Sequence
  Synthetic oligonucleotide
tggcaatcttcaaggacaataggctaatcg

SEQ ID NO: 142037 - DNA, 30 bp, Artificial Sequence
  Synthetic oligonucleotide
actccaagtcaaaagtgtcggaggtaatcg

SEQ ID NO: 142038 - DNA, 30 bp, Artificial Sequence
  Synthetic oligonucleotide
tcttccagattcctaaaaagcggttaatcg

SEQ ID NO: 142039 - DNA, 30 bp, Artificial Sequence
  Synthetic oligonucleotide
tcgacccaaccgctacaagtcaaaacatcg

SEQ ID NO: 142040 - DNA, 30 bp, Artificial Sequence
  Synthetic oligonucleotide
aatgggaagccaggccaggactgaacatcg

SEQ ID NO: 142041 - DNA, 30 bp, Artificial Sequence
  Synthetic oligonucleotide
cgctaacaactacaggggtggatcacatcg

SEQ ID NO: 142042 - DNA, 30 bp, Artificial Sequence
  Synthetic oligonucleotide
cggaggactgtgcacggacaatttacatcg

SEQ ID NO: 142043 - DNA, 30 bp, Artificial Sequence
  Synthetic oligonucleotide
gataggcctggatgagtggtggaaccatcg

SEQ ID NO: 142044 - DNA, 30 bp, Artificial Sequence
  Synthetic oligonucleotide
cgaagaagctttgtgactatatacccatcg

SEQ ID NO: 142045 - DNA, 30 bp, Artificial Sequence
  Synthetic oligonucleotide
gtagccggggccgtcccgtaagtcccatcg

SEQ ID NO: 142046 - DNA, 30 bp, Artificial Sequence
  Synthetic oligonucleotide
caaagaaaaataataccgccaccgccatcg

SEQ ID NO: 142047 - DNA, 30 bp, Artificial Sequence
  Synthetic oligonucleotide
taaaggcattataaaagctttgtgccatcg

SEQ ID NO: 142048 - DNA, 30 bp, Artificial Sequence
  Synthetic oligonucleotide
tatagtgaagtagaggtgatgaaagcatcg

SEQ ID NO: 142049 - DNA, 30 bp, Artificial Sequence
  Synthetic oligonucleotide
tgaagacaggatttacccaccacagcatcg

SEQ ID NO: 142050 - DNA, 30 bp, Artificial Sequence
  Synthetic oligonucleotide
ggtgtgtatcaaataaggcaccgcgcatcg

SEQ ID NO: 142051 - DNA, 30 bp, Artificial Sequence
  Synthetic oligonucleotide
ccctggtgttgtataaactcgacggcatcg

SEQ ID NO: 142052 - DNA, 30 bp, Artificial Sequence
  Synthetic oligonucleotide
gggcgcgcacaagactagaggcgggcatcg

SEQ ID NO: 142053 - DNA, 30 bp, Artificial Sequence
  Synthetic oligonucleotide
atgggcgagaagtcgcctgattatgcatcg

SEQ ID NO: 142054 - DNA, 30 bp, Artificial Sequence
  Synthetic oligonucleotide
taccagaatacaccttctagaccatcatcg

SEQ ID NO: 142055 - DNA, 30 bp, Artificial Sequence
  Synthetic oligonucleotide
gcgttcaatgtaattttggatttatcatcg

SEQ ID NO: 142056 - DNA, 30 bp, Artificial Sequence
  Synthetic oligonucleotide
attaaaccacggcaagggtaggcgtcatcg

SEQ ID NO: 142057 - DNA, 31 bp, Artificial Sequence
  Synthetic oligonucleotide
gagaaggcagtggcttgtgtgtaaaagatcg

SEQ ID NO: 142058 - DNA, 30 bp, Artificial Sequence
  Synthetic oligonucleotide
ttataaaacagcgatgcagggtaaagatcg

SEQ ID NO: 142059 - DNA, 30 bp, Artificial Sequence
  Synthetic oligonucleotide
ccactttgtccaaaagaactaaacagatcg

SEQ ID NO: 142060 - DNA, 30 bp, Artificial Sequence
  Synthetic oligonucleotide
agggtcacggcagggagtcgggttagatcg

SEQ ID NO: 142061 - DNA, 30 bp, Artificial Sequence
  Synthetic oligonucleotide
caagttccgcgagttttacggcgacgatcg

SEQ ID NO: 142062 - DNA, 30 bp, Artificial Sequence
  Synthetic oligonucleotide
cccaatcagtgtgccgcaaagagccgatcg

SEQ ID NO: 142063 - DNA, 30 bp, Artificial Sequence
  Synthetic oligonucleotide
atgcctatacgtgggtaacttgatcgatcg

SEQ ID NO: 142064 - DNA, 30 bp, Artificial Sequence
  Synthetic oligonucleotide
tgggacaacatatgtccaagtcgcggatcg

SEQ ID NO: 142065 - DNA, 30 bp, Artificial Sequence
  Synthetic oligonucleotide
gcggttacagaaccctgtggtgttggatcg

SEQ ID NO: 142066 - DNA, 30 bp, Artificial Sequence
  Synthetic oligonucleotide
cgcattcggagttatccgaatgcaatatcg

SEQ ID NO: 142067 - DNA, 30 bp, Artificial Sequence
  Synthetic oligonucleotide
gcttcggcgcaagttatatcttgcatatcg

SEQ ID NO: 142068 - DNA, 30 bp, Artificial Sequence
  Synthetic oligonucleotide
ggaggacatgagtggggtatcagactatcg

SEQ ID NO: 142069 - DNA, 30 bp, Artificial Sequence
  Synthetic oligonucleotide
ttgcccacatgatggatctgagtgctatcg

SEQ ID NO: 142070 - DNA, 30 bp, Artificial Sequence
  Synthetic oligonucleotide
aggatatcgcattaaaaaaggcgtctatcg

SEQ ID NO: 142071 - DNA, 30 bp, Artificial Sequence
  Synthetic oligonucleotide
cgttttcgtgaagtgcccgaaggagtatcg

SEQ ID NO: 142072 - DNA, 30 bp, Artificial Sequence
  Synthetic oligonucleotide
taatcagcgggaaatttggttggagtatcg

SEQ ID NO: 142073 - DNA, 30 bp, Artificial Sequence
  Synthetic oligonucleotide
tacgtctactcacgcctgtgtaaggtatcg

SEQ ID NO: 142074 - DNA, 30 bp, Artificial Sequence
  Synthetic oligonucleotide
aagtcaaccagtgagcccagaattgtatcg

SEQ ID NO: 142075 - DNA, 30 bp, Artificial Sequence
  Synthetic oligonucleotide
acgcataggtcgttttatttatcgttatcg

SEQ ID NO: 142076 - DNA, 30 bp, Artificial Sequence
  Synthetic oligonucleotide
gaaaattcaaggcccccaacgaaaaactcg

SEQ ID NO: 142077 - DNA, 30 bp, Artificial Sequence
  Synthetic oligonucleotide
atgagctttccttggctggcaccaaactcg

SEQ ID NO: 142078 - DNA, 30 bp, Artificial Sequence
  Synthetic oligonucleotide
agaggggacatggcgtttagagtcaactcg

SEQ ID NO: 142079 - DNA, 30 bp, Artificial Sequence
  Synthetic oligonucleotide
tagtcctaacctaggttgctcgtcaactcg

SEQ ID NO: 142080 - DNA, 30 bp, Artificial Sequence
  Synthetic oligonucleotide
gggttagacaattacgtaattaagcactcg

SEQ ID NO: 142081 - DNA, 30 bp, Artificial Sequence
  Synthetic oligonucleotide
aaacggcttaaagagtttgtacaagactcg

SEQ ID NO: 142082 - DNA, 30 bp, Artificial Sequence
  Synthetic oligonucleotide
ggcctacaggcaaaggactggcgcgactcg

SEQ ID NO: 142083 - DNA, 30 bp, Artificial Sequence
  Synthetic oligonucleotide
acgccggacagtgacccgcggaatgactcg

SEQ ID NO: 142084 - DNA, 30 bp, Artificial Sequence
  Synthetic oligonucleotide
gcaatgtacacatcacaattaagctactcg

SEQ ID NO: 142085 - DNA, 30 bp, Artificial Sequence
  Synthetic oligonucleotide
aatcggatgaactttgaacccggcacctcg

SEQ ID NO: 142086 - DNA, 30 bp, Artificial Sequence
  Synthetic oligonucleotide
atggcaaagccgaagtacactggcacctcg

SEQ ID NO: 142087 - DNA, 30 bp, Artificial Sequence
  Synthetic oligonucleotide
tacaataagtcattcagaaccgctacctcg

SEQ ID NO: 142088 - DNA, 30 bp, Artificial Sequence
  Synthetic oligonucleotide
taacggtcaagatataaaagatttacctcg

SEQ ID NO: 142089 - DNA, 30 bp, Artificial Sequence
  Synthetic oligonucleotide
acggtactggtggtttcaacacaaccctcg

SEQ ID NO: 142090 - DNA, 30 bp, Artificial Sequence
  Synthetic oligonucleotide
gctctacagactgtggccatgtccccctcg

SEQ ID NO: 142091 - DNA, 30 bp, Artificial Sequence
  Synthetic oligonucleotide
gggtgggcggctctaaacgccaatccctcg

SEQ ID NO: 142092 - DNA, 30 bp, Artificial Sequence
  Synthetic oligonucleotide
aactcggtagatttcggaaaaagtccctcg

SEQ ID NO: 142093 - DNA, 30 bp, Artificial Sequence
  Synthetic oligonucleotide
tgacctaaagggcgcttggtcggtccctcg

SEQ ID NO: 142094 - DNA, 31 bp, Artificial Sequence
  Synthetic oligonucleotide
tgcctaatgaaagcagtttcctattccctcg

SEQ ID NO: 142095 - DNA, 30 bp, Artificial Sequence
  Synthetic oligonucleotide
cacagggatccacgggctggggtggcctcg

SEQ ID NO: 142096 - DNA, 30 bp, Artificial Sequence
  Synthetic oligonucleotide
ttagacagaatgtctgcgtggtaatcctcg

SEQ ID NO: 142097 - DNA, 30 bp, Artificial Sequence
  Synthetic oligonucleotide
tactgatcacacctcatatagggatcctcg

SEQ ID NO: 142098 - DNA, 30 bp, Artificial Sequence
  Synthetic oligonucleotide
gggaacgcggtgtcacgtgtgatctcctcg

SEQ ID NO: 142099 - DNA, 30 bp, Artificial Sequence
  Synthetic oligonucleotide
aaacagcagtcccttacttacccttcctcg

SEQ ID NO: 142100 - DNA, 30 bp, Artificial Sequence
  Synthetic oligonucleotide
catcagcgggctggactatggagaagctcg

SEQ ID NO: 142101 - DNA, 30 bp, Artificial Sequence
  Synthetic oligonucleotide
acgtcgaggacgaatatgtttaaacgctcg

SEQ ID NO: 142102 - DNA, 30 bp, Artificial Sequence
  Synthetic oligonucleotide
tgcatacgtcgcgagtcccagcgccgctcg

SEQ ID NO: 142103 - DNA, 30 bp, Artificial Sequence
  Synthetic oligonucleotide
gcgttacttcatgccctgcgagaaggctcg

SEQ ID NO: 142104 - DNA, 30 bp, Artificial Sequence
  Synthetic oligonucleotide
cgtacctgccggttgtgaagagtaggctcg

SEQ ID NO: 142105 - DNA, 30 bp, Artificial Sequence
  Synthetic oligonucleotide
aaattgaaaacttgtgtgtccgagggctcg

SEQ ID NO: 142106 - DNA, 30 bp, Artificial Sequence
  Synthetic oligonucleotide
cggctttgatggccaggggtgtcgggctcg

SEQ ID NO: 142107 - DNA, 30 bp, Artificial Sequence
  Synthetic oligonucleotide
atgctctatcccagaaggcgacgtggctcg

SEQ ID NO: 142108 - DNA, 30 bp, Artificial Sequence
  Synthetic oligonucleotide
tggactccacaagtagaactgccctgctcg

SEQ ID NO: 142109 - DNA, 30 bp, Artificial Sequence
  Synthetic oligonucleotide
cccggtagatctgggttccaatgctgctcg

SEQ ID NO: 142110 - DNA, 30 bp, Artificial Sequence
  Synthetic oligonucleotide
catagtgtttaccccagatggctctgctcg

SEQ ID NO: 142111 - DNA, 30 bp, Artificial Sequence
  Synthetic oligonucleotide
atacatgaacttctctagcgcgtgtgctcg

SEQ ID NO: 142112 - DNA, 30 bp, Artificial Sequence
  Synthetic oligonucleotide
ccgagtttagcttgtgcccgttcaatctcg

SEQ ID NO: 142113 - DNA, 30 bp, Artificial Sequence
  Synthetic oligonucleotide
caattctagggtctagggtgaagtatctcg

SEQ ID NO: 142114 - DNA, 30 bp, Artificial Sequence
  Synthetic oligonucleotide
ctggtcggtaaaatgtgggttcttatctcg

SEQ ID NO: 142115 - DNA, 30 bp, Artificial Sequence
  Synthetic oligonucleotide
ccgtctcggtattaccataggcaactctcg

SEQ ID NO: 142116 - DNA, 30 bp, Artificial Sequence
  Synthetic oligonucleotide
ctcagcatagaccgcccgattgtactctcg

SEQ ID NO: 142117 - DNA, 30 bp, Artificial Sequence
  Synthetic oligonucleotide
gcccataagtaacgaaaaaatgtagtctcg

SEQ ID NO: 142118 - DNA, 30 bp, Artificial Sequence
  Synthetic oligonucleotide
tggaatccctactcgtgaaagcgcgtctcg

SEQ ID NO: 142119 - DNA, 30 bp, Artificial Sequence
  Synthetic oligonucleotide
ccagggtcagaaagcgttcaactcgtctcg

SEQ ID NO: 142120 - DNA, 30 bp, Artificial Sequence
  Synthetic oligonucleotide
ctcttatgcttaaaatgaaagatggtctcg

SEQ ID NO: 142121 - DNA, 30 bp, Artificial Sequence
  Synthetic oligonucleotide
cgtgatactatggatggagactttgtctcg

SEQ ID NO: 142122 - DNA, 30 bp, Artificial Sequence
  Synthetic oligonucleotide
atacgaaatctgtcttagtgtcctttctcg

SEQ ID NO: 142123 - DNA, 30 bp, Artificial Sequence
  Synthetic oligonucleotide
tgattacgcacctccggttaggcgaagtcg

SEQ ID NO: 142124 - DNA, 30 bp, Artificial Sequence
  Synthetic oligonucleotide
ggcgccgtacggagactcaacgggaagtcg

SEQ ID NO: 142125 - DNA, 30 bp, Artificial Sequence
  Synthetic oligonucleotide
agcaatagaacaatcttgtttggtaagtcg

SEQ ID NO: 142126 - DNA, 30 bp, Artificial Sequence
  Synthetic oligonucleotide
tttgcgcatgccctcctaatctatcagtcg

SEQ ID NO: 142127 - DNA, 30 bp, Artificial Sequence
  Synthetic oligonucleotide
ttgacctgcaatcccgggggagttcagtcg

SEQ ID NO: 142128 - DNA, 30 bp, Artificial Sequence
  Synthetic oligonucleotide
ccgattgggaataatagaggaatggagtcg

SEQ ID NO: 142129 - DNA, 30 bp, Artificial Sequence
  Synthetic oligonucleotide
gcaactaaggctgatgataagtttgagtcg

SEQ ID NO: 142130 - DNA, 31 bp, Artificial Sequence
  Synthetic oligonucleotide
aaccatgggtcctttgtgtaagcactagtcg

SEQ ID NO: 142131 - DNA, 30 bp, Artificial Sequence
  Synthetic oligonucleotide
ccgaagtgcggtgtgtacatatattagtcg

SEQ ID NO: 142132 - DNA, 30 bp, Artificial Sequence
  Synthetic oligonucleotide
ctgaccagggcgggccccgaaaccacgtcg

SEQ ID NO: 142133 - DNA, 30 bp, Artificial Sequence
  Synthetic oligonucleotide
ccagtatgtaaggtcggatggttcacgtcg

SEQ ID NO: 142134 - DNA, 30 bp, Artificial Sequence
  Synthetic oligonucleotide
ctcgatgacatggatattaaatagacgtcg

SEQ ID NO: 142135 - DNA, 30 bp, Artificial Sequence
  Synthetic oligonucleotide
tcataggtctctcacgtcagttggacgtcg

SEQ ID NO: 142136 - DNA, 30 bp, Artificial Sequence
  Synthetic oligonucleotide
agaaatcattgcttcggtgcaaatacgtcg

SEQ ID NO: 142137 - DNA, 30 bp, Artificial Sequence
  Synthetic oligonucleotide
tgatacaaagggaggcgcattaccgcgtcg

SEQ ID NO: 142138 - DNA, 30 bp, Artificial Sequence
  Synthetic oligonucleotide
ggtcttatagatcttaaggactaggcgtcg

SEQ ID NO: 142139 - DNA, 30 bp, Artificial Sequence
  Synthetic oligonucleotide
cgtgcggggcaggaggtgactggggcgtcg

SEQ ID NO: 142140 - DNA, 30 bp, Artificial Sequence
  Synthetic oligonucleotide
cgactccagatggcctataaggtatcgtcg

SEQ ID NO: 142141 - DNA, 30 bp, Artificial Sequence
  Synthetic oligonucleotide
gcgccgtctggtcatgtcatgggctcgtcg

SEQ ID NO: 142142 - DNA, 30 bp, Artificial Sequence
  Synthetic oligonucleotide
gcgctcgtcgtatagatgagcaccaggtcg

SEQ ID NO: 142143 - DNA, 31 bp, Artificial Sequence
  Synthetic oligonucleotide
tttaaggagataaacgagggtgcaacggtcg

SEQ ID NO: 142144 - DNA, 30 bp, Artificial Sequence
  Synthetic oligonucleotide
ccacaaacttttaagggccgaggtcggtcg

SEQ ID NO: 142145 - DNA, 30 bp, Artificial Sequence
  Synthetic oligonucleotide
tgcctgtgctactgtaataaatgagggtcg

SEQ ID NO: 142146 - DNA, 30 bp, Artificial Sequence
  Synthetic oligonucleotide
gaaacggtcggggtcgagtgcaacgggtcg

SEQ ID NO: 142147 - DNA, 30 bp, Artificial Sequence
  Synthetic oligonucleotide
gagttactcaagatagaatatcaggggtcg

SEQ ID NO: 142148 - DNA, 30 bp, Artificial Sequence
  Synthetic oligonucleotide
cttaggtaggtcaactttaaaagggggtcg

SEQ ID NO: 142149 - DNA, 30 bp, Artificial Sequence
  Synthetic oligonucleotide
agttaatgagacacgagttattattggtcg

SEQ ID NO: 142150 - DNA, 30 bp, Artificial Sequence
  Synthetic oligonucleotide
cccactgaaataggtaatgaatgaatgtcg

SEQ ID NO: 142151 - DNA, 30 bp, Artificial Sequence
  Synthetic oligonucleotide
cgcgactacggtccttcgccagagatgtcg

SEQ ID NO: 142152 - DNA, 30 bp, Artificial Sequence
  Synthetic oligonucleotide
tcaacgacatcggtgccaaaggagatgtcg

SEQ ID NO: 142153 - DNA, 30 bp, Artificial Sequence
  Synthetic oligonucleotide
taggatacgggaaccccaccgattatgtcg

SEQ ID NO: 142154 - DNA, 30 bp, Artificial Sequence
  Synthetic oligonucleotide
tatccttgttagtgaaggactcccctgtcg

SEQ ID NO: 142155 - DNA, 30 bp, Artificial Sequence
  Synthetic oligonucleotide
gcatggactcagtaatgctatttcctgtcg

SEQ ID NO: 142156 - DNA, 30 bp, Artificial Sequence
  Synthetic oligonucleotide
acctggtgcctcgggcatttggtcgtgtcg

SEQ ID NO: 142157 - DNA, 30 bp, Artificial Sequence
  Synthetic oligonucleotide
ccttcgggagtagggaaagcgggggtgtcg

SEQ ID NO: 142158 - DNA, 30 bp, Artificial Sequence
  Synthetic oligonucleotide
gttgagctcggaaaggcgtcaaaattgtcg

SEQ ID NO: 142159 - DNA, 30 bp, Artificial Sequence
  Synthetic oligonucleotide
aaggcgatatgctcggtgctcaacttgtcg

SEQ ID NO: 142160 - DNA, 30 bp, Artificial Sequence
  Synthetic oligonucleotide
gatatgtctacacagtaatcacatttgtcg

SEQ ID NO: 142161 - DNA, 30 bp, Artificial Sequence
  Synthetic oligonucleotide
gtgaggggagtgtatgatatacatttgtcg

SEQ ID NO: 142162 - DNA, 30 bp, Artificial Sequence
  Synthetic oligonucleotide
accggtaatctgacaggggaagatttgtcg

SEQ ID NO: 142163 - DNA, 30 bp, Artificial Sequence
  Synthetic oligonucleotide
gccagaaattcattctgtgtgctaaattcg

SEQ ID NO: 142164 - DNA, 30 bp, Artificial Sequence
  Synthetic oligonucleotide
ggtcggctagctcaaagcgttagcaattcg

SEQ ID NO: 142165 - DNA, 30 bp, Artificial Sequence
  Synthetic oligonucleotide
ccaaacaggggtacaaagcctctcaattcg

SEQ ID NO: 142166 - DNA, 30 bp, Artificial Sequence
  Synthetic oligonucleotide
agctcataaatatgagccgtagtcaattcg

SEQ ID NO: 142167 - DNA, 30 bp, Artificial Sequence
  Synthetic oligonucleotide
tgtccgtacatgaatcggctagctaattcg

SEQ ID NO: 142168 - DNA, 30 bp, Artificial Sequence
  Synthetic oligonucleotide
acttacagcgtttctccagcataacattcg

SEQ ID NO: 142169 - DNA, 30 bp, Artificial Sequence
  Synthetic oligonucleotide
gagctttgcggtaagaaggttcgccattcg

SEQ ID NO: 142170 - DNA, 30 bp, Artificial Sequence
  Synthetic oligonucleotide
gtcttactattagacagcggagtagattcg

SEQ ID NO: 142171 - DNA, 30 bp, Artificial Sequence
  Synthetic oligonucleotide
tccgtcctgtatgactccaaccgaacttcg

SEQ ID NO: 142172 - DNA, 30 bp, Artificial Sequence
  Synthetic oligonucleotide
gtgggcagcctctgatagtacggtacttcg

SEQ ID NO: 142173 - DNA, 30 bp, Artificial Sequence
  Synthetic oligonucleotide
gcgtctcgctctagggtatagttaccttcg

SEQ ID NO: 142174 - DNA, 30 bp, Artificial Sequence
  Synthetic oligonucleotide
aacgtcaatacatcgtaatttgtcccttcg

SEQ ID NO: 142175 - DNA, 30 bp, Artificial Sequence
  Synthetic oligonucleotide
gctagggcggtcgggagcgataggccttcg

SEQ ID NO: 142176 - DNA, 30 bp, Artificial Sequence
  Synthetic oligonucleotide
cccgtagacccatataggccttatccttcg

SEQ ID NO: 142177 - DNA, 30 bp, Artificial Sequence
  Synthetic oligonucleotide
acacaccgtgtgctgcatagcaattcttcg

SEQ ID NO: 142178 - DNA, 30 bp, Artificial Sequence
  Synthetic oligonucleotide
acgcggccacccctatcaattaaaagttcg

SEQ ID NO: 142179 - DNA, 30 bp, Artificial Sequence
  Synthetic oligonucleotide
gtatagaaagcatttatgttcgacagttcg

SEQ ID NO: 142180 - DNA, 30 bp, Artificial Sequence
  Synthetic oligonucleotide
gcgtatgaaaattgcgtctcgtgtcgttcg

SEQ ID NO: 142181 - DNA, 30 bp, Artificial Sequence
  Synthetic oligonucleotide
acataaaagggtcaagacattgacggttcg

SEQ ID NO: 142182 - DNA, 30 bp, Artificial Sequence
  Synthetic oligonucleotide
gttgcgtaagacggggggaactgcggttcg

SEQ ID NO: 142183 - DNA, 30 bp, Artificial Sequence
  Synthetic oligonucleotide
atcggaacgattctgggatcgtagggttcg

SEQ ID NO: 142184 - DNA, 30 bp, Artificial Sequence
  Synthetic oligonucleotide
acctcgctcgaccgcccagttaatggttcg

SEQ ID NO: 142185 - DNA, 30 bp, Artificial Sequence
  Synthetic oligonucleotide
cgtagagatttttgcgcggactatggttcg

SEQ ID NO: 142186 - DNA, 30 bp, Artificial Sequence
  Synthetic oligonucleotide
ttctcgaacgggctagcccatgaatgttcg

SEQ ID NO: 142187 - DNA, 30 bp, Artificial Sequence
  Synthetic oligonucleotide
cggattcgaatggtctcagggggttgttcg

SEQ ID NO: 142188 - DNA, 30 bp, Artificial Sequence
  Synthetic oligonucleotide
acgccttatcctccaacaaacagaatttcg

SEQ ID NO: 142189 - DNA, 30 bp, Artificial Sequence
  Synthetic oligonucleotide
ggagttacacgacaaacgcgtcatctttcg

SEQ ID NO: 142190 - DNA, 30 bp, Artificial Sequence
  Synthetic oligonucleotide
tgggagcctataacgtcttacggtctttcg

SEQ ID NO: 142191 - DNA, 30 bp, Artificial Sequence
  Synthetic oligonucleotide
ttgttcacaagtagagttctcgcattttcg

SEQ ID NO: 142192 - DNA, 30 bp, Artificial Sequence
  Synthetic oligonucleotide
acgggcagcctgaaacgggcaggattttcg

SEQ ID NO: 142193 - DNA, 29 bp, Artificial Sequence
  Synthetic oligonucleotide
ggcaacacatttaatggaatcaaaaaagg

SEQ ID NO: 142194 - DNA, 30 bp, Artificial Sequence
  Synthetic oligonucleotide
cacagaggctctggggccgcagacaaaagg

SEQ ID NO: 142195 - DNA, 30 bp, Artificial Sequence
  Synthetic oligonucleotide
gcccaatgaaaatgatccaaagcgaaaagg

SEQ ID NO: 142196 - DNA, 30 bp, Artificial Sequence
  Synthetic oligonucleotide
caggtatccatctattatcgcaaacaaagg

SEQ ID NO: 142197 - DNA, 30 bp, Artificial Sequence
  Synthetic oligonucleotide
attggggtagcagtcgatatcgggcaaagg

SEQ ID NO: 142198 - DNA, 30 bp, Artificial Sequence
  Synthetic oligonucleotide
aggttaagagttggagcacggtctcaaagg

SEQ ID NO: 142199 - DNA, 30 bp, Artificial Sequence
  Synthetic oligonucleotide
ttcgacggcccagccgagcggcttcaaagg

SEQ ID NO: 142200 - DNA, 30 bp, Artificial Sequence
  Synthetic oligonucleotide
ttgtcgccacgtagttacagatccgaaagg

SEQ ID NO: 142201 - DNA, 30 bp, Artificial Sequence
  Synthetic oligonucleotide
acgtgtagcacacgccgacacaaggaaagg

SEQ ID NO: 142202 - DNA, 30 bp, Artificial Sequence
  Synthetic oligonucleotide
cagggggcaggacgcgattggtatgaaagg

SEQ ID NO: 142203 - DNA, 30 bp, Artificial Sequence
  Synthetic oligonucleotide
gggtaaacctgggtgtaatccatataaagg

SEQ ID NO: 142204 - DNA, 30 bp, Artificial Sequence
  Synthetic oligonucleotide
gggtcgcgacctgctgttcacaactaaagg

SEQ ID NO: 142205 - DNA, 30 bp, Artificial Sequence
  Synthetic oligonucleotide
aggcagcgatgctacctggagggctaaagg

SEQ ID NO: 142206 - DNA, 30 bp, Artificial Sequence
  Synthetic oligonucleotide
tattgaataaatttgttcagcttctaaagg

SEQ ID NO: 142207 - DNA, 30 bp, Artificial Sequence
  Synthetic oligonucleotide
aggccttattgctccaaggtcaagacaagg

SEQ ID NO: 142208 - DNA, 30 bp, Artificial Sequence
  Synthetic oligonucleotide
ccgacacgctcactgaatctaatgacaagg

SEQ ID NO: 142209 - DNA, 30 bp, Artificial Sequence
  Synthetic oligonucleotide
tcataatgcagcggaaggggtgatacaagg

SEQ ID NO: 142210 - DNA, 30 bp, Artificial Sequence
  Synthetic oligonucleotide
agatggggatgcccgcatagaacaccaagg

SEQ ID NO: 142211 - DNA, 30 bp, Artificial Sequence
  Synthetic oligonucleotide
ctaaaggtcaaacagttccaccgaccaagg

SEQ ID NO: 142212 - DNA, 30 bp, Artificial Sequence
  Synthetic oligonucleotide
gagtctagtaagaggtatcagggaccaagg

SEQ ID NO: 142213 - DNA, 30 bp, Artificial Sequence
  Synthetic oligonucleotide
acactaacagacccagctaggtacccaagg

SEQ ID NO: 142214 - DNA, 30 bp, Artificial Sequence
  Synthetic oligonucleotide
cccttactatgctgatggggaatgccaagg

SEQ ID NO: 142215 - DNA, 30 bp, Artificial Sequence
  Synthetic oligonucleotide
ctgccaagtgacgttagggctacggcaagg

SEQ ID NO: 142216 - DNA, 30 bp, Artificial Sequence
  Synthetic oligonucleotide
caaacggtccaactcgaagtctcatcaagg

SEQ ID NO: 142217 - DNA, 30 bp, Artificial Sequence
  Synthetic oligonucleotide
gagcggcaaagctgtgtttagcgatcaagg

SEQ ID NO: 142218 - DNA, 30 bp, Artificial Sequence
  Synthetic oligonucleotide
tccgtagctttcggagcatggctatcaagg

SEQ ID NO: 142219 - DNA, 30 bp, Artificial Sequence
  Synthetic oligonucleotide
gcgggactcagtacttccatcaattcaagg

SEQ ID NO: 142220 - DNA, 30 bp, Artificial Sequence
  Synthetic oligonucleotide
tggcactcaacatgttcttatgtttcaagg

SEQ ID NO: 142221 - DNA, 30 bp, Artificial Sequence
  Synthetic oligonucleotide
atacatagaaggcgctaactaaacagaagg

SEQ ID NO: 142222 - DNA, 30 bp, Artificial Sequence
  Synthetic oligonucleotide
ctcggtgagacaagcatgagcttcagaagg

SEQ ID NO: 142223 - DNA, 30 bp, Artificial Sequence
  Synthetic oligonucleotide
cagttggtataaggacgttccgctagaagg

SEQ ID NO: 142224 - DNA, 30 bp, Artificial Sequence
  Synthetic oligonucleotide
atcgtccgaagctgcgcccgtctacgaagg

SEQ ID NO: 142225 - DNA, 30 bp, Artificial Sequence
  Synthetic oligonucleotide
gttgaacttcggaactaaaaccgccgaagg

SEQ ID NO: 142226 - DNA, 30 bp, Artificial Sequence
  Synthetic oligonucleotide
ccagaaccacgcaaggtggattcgcgaagg

SEQ ID NO: 142227 - DNA, 30 bp, Artificial Sequence
  Synthetic oligonucleotide
tccattaggctacaactagagtatcgaagg

SEQ ID NO: 142228 - DNA, 30 bp, Artificial Sequence
  Synthetic oligonucleotide
agaggttctacggctaagctgcctcgaagg

SEQ ID NO: 142229 - DNA, 30 bp, Artificial Sequence
  Synthetic oligonucleotide
cgttgtaggagggcgtggaaggctcgaagg

SEQ ID NO: 142230 - DNA, 30 bp, Artificial Sequence
  Synthetic oligonucleotide
cacgggatgtcacatgagtacgacggaagg

SEQ ID NO: 142231 - DNA, 30 bp, Artificial Sequence
  Synthetic oligonucleotide
agaattcaaggaccagattatcgcggaagg

SEQ ID NO: 142232 - DNA, 30 bp, Artificial Sequence
  Synthetic oligonucleotide
tagcgacatggctgaaagaaggtcggaagg

SEQ ID NO: 142233 - DNA, 30 bp, Artificial Sequence
  Synthetic oligonucleotide
atcgtcgccgagctattaatgaagggaagg

SEQ ID NO: 142234 - DNA, 30 bp, Artificial Sequence
  Synthetic oligonucleotide
attaccgtgataaaagccaattagggaagg

SEQ ID NO: 142235 - DNA, 30 bp, Artificial Sequence
  Synthetic oligonucleotide
cttagccgcttgctcgatggggcctgaagg

SEQ ID NO: 142236 - DNA, 30 bp, Artificial Sequence
  Synthetic oligonucleotide
ccccgagaaccattgcccgctacttgaagg

SEQ ID NO: 142237 - DNA, 30 bp, Artificial Sequence
  Synthetic oligonucleotide
tttcagcggaactagttggcgagttgaagg

SEQ ID NO: 142238 - DNA, 30 bp, Artificial Sequence
  Synthetic oligonucleotide
tgcaagcgttgaaaatccgatttttgaagg

SEQ ID NO: 142239 - DNA, 30 bp, Artificial Sequence
  Synthetic oligonucleotide
accgaggcatcagagtcatgtgcaataagg

SEQ ID NO: 142240 - DNA, 30 bp, Artificial Sequence
  Synthetic oligonucleotide
tgcataaaagcgtcgggtctaagaataagg

SEQ ID NO: 142241 - DNA, 30 bp, Artificial Sequence
  Synthetic oligonucleotide
atgtcagccaaaggggtactatgaataagg

SEQ ID NO: 142242 - DNA, 30 bp, Artificial Sequence
  Synthetic oligonucleotide
tcatctgcgcgctcgatctgcataataagg

SEQ ID NO: 142243 - DNA, 31 bp, Artificial Sequence
  Synthetic oligonucleotide
ccacagtaacggaggtacgctcaacataagg

SEQ ID NO: 142244 - DNA, 30 bp, Artificial Sequence
  Synthetic oligonucleotide
caacagcccctagacgaccctgccataagg

SEQ ID NO: 142245 - DNA, 30 bp, Artificial Sequence
  Synthetic oligonucleotide
tgaacatcgatctggaaaggattgataagg

SEQ ID NO: 142246 - DNA, 30 bp, Artificial Sequence
  Synthetic oligonucleotide
tcgtgtctatgtccacagggcactataagg

SEQ ID NO: 142247 - DNA, 30 bp, Artificial Sequence
  Synthetic oligonucleotide
aggctcgaaataccctggttaattataagg

SEQ ID NO: 142248 - DNA, 30 bp, Artificial Sequence
  Synthetic oligonucleotide
gcaaagggaatggagaaagggtacctaagg

SEQ ID NO: 142249 - DNA, 30 bp, Artificial Sequence
  Synthetic oligonucleotide
gtcagatgaatgtatctaaactagctaagg

SEQ ID NO: 142250 - DNA, 30 bp, Artificial Sequence
  Synthetic oligonucleotide
cagaggtgttatgaaatacgagcgctaagg

SEQ ID NO: 142251 - DNA, 30 bp, Artificial Sequence
  Synthetic oligonucleotide
cagggctaacgaccaattatacggctaagg

SEQ ID NO: 142252 - DNA, 30 bp, Artificial Sequence
  Synthetic oligonucleotide
cttggagtgtccgggtgaggttcagtaagg

SEQ ID NO: 142253 - DNA, 30 bp, Artificial Sequence
  Synthetic oligonucleotide
tatagtgcgaagtggcactgatacgtaagg

SEQ ID NO: 142254 - DNA, 30 bp, Artificial Sequence
  Synthetic oligonucleotide
atagggggatcattagagttattcgtaagg

SEQ ID NO: 142255 - DNA, 30 bp, Artificial Sequence
  Synthetic oligonucleotide
tcaataattttatgtgaatctcgggtaagg

SEQ ID NO: 142256 - DNA, 30 bp, Artificial Sequence
  Synthetic oligonucleotide
tacaataaggggccagatctgcctgtaagg

SEQ ID NO: 142257 - DNA, 30 bp, Artificial Sequence
  Synthetic oligonucleotide
aaagggctaaggcacttaacttttgtaagg

SEQ ID NO: 142258 - DNA, 30 bp, Artificial Sequence
  Synthetic oligonucleotide
agcgaaccgaatgtacggtgggaattaagg

SEQ ID NO: 142259 - DNA, 30 bp, Artificial Sequence
  Synthetic oligonucleotide
aatggcccaagtgttgggctttaattaagg

SEQ ID NO: 142260 - DNA, 30 bp, Artificial Sequence
  Synthetic oligonucleotide
gggaaccctgacgccattgaatgattaagg

SEQ ID NO: 142261 - DNA, 30 bp, Artificial Sequence
  Synthetic oligonucleotide
gaaagatttggaagggtgaccctattaagg

SEQ ID NO: 142262 - DNA, 30 bp, Artificial Sequence
  Synthetic oligonucleotide
ggaaacgacaatagaaacgcgttattaagg

SEQ ID NO: 142263 - DNA, 30 bp, Artificial Sequence
  Synthetic oligonucleotide
gtaaagtacgccggacagagggcaaacagg

SEQ ID NO: 142264 - DNA, 30 bp, Artificial Sequence
  Synthetic oligonucleotide
gagtcaggatagcaaagtcaccgaaacagg

SEQ ID NO: 142265 - DNA, 30 bp, Artificial Sequence
  Synthetic oligonucleotide
atggtataattccgcaatagagccaacagg

SEQ ID NO: 142266 - DNA, 30 bp, Artificial Sequence
  Synthetic oligonucleotide
taacttgcgtcggtcaccgcgtccaacagg

SEQ ID NO: 142267 - DNA, 30 bp, Artificial Sequence
  Synthetic oligonucleotide
agggaaagggattgtatctctctcaacagg

SEQ ID NO: 142268 - DNA, 30 bp, Artificial Sequence
  Synthetic oligonucleotide
ctctaacaattgatcatcaggtcgaacagg

SEQ ID NO: 142269 - DNA, 30 bp, Artificial Sequence
  Synthetic oligonucleotide
atttcgccagttggcatgggtccgcacagg

SEQ ID NO: 142270 - DNA, 30 bp, Artificial Sequence
  Synthetic oligonucleotide
gtccggcggcgagtcatgagagatcacagg

SEQ ID NO: 142271 - DNA, 30 bp, Artificial Sequence
  Synthetic oligonucleotide
actgcagttgtcctccgcggccgcgacagg

SEQ ID NO: 142272 - DNA, 30 bp, Artificial Sequence
  Synthetic oligonucleotide
ccgtatttgcctggctaagctcgcgacagg

SEQ ID NO: 142273 - DNA, 30 bp, Artificial Sequence
  Synthetic oligonucleotide
attgtagacacgaccggctctctcgacagg

SEQ ID NO: 142274 - DNA, 30 bp, Artificial Sequence
  Synthetic oligonucleotide
tgtcatcttaaagcgatgagtatggacagg

SEQ ID NO: 142275 - DNA, 30 bp, Artificial Sequence
  Synthetic oligonucleotide
aacgtaccgttgtctttggattaatacagg

SEQ ID NO: 142276 - DNA, 30 bp, Artificial Sequence
  Synthetic oligonucleotide
tcagatggggttgctgcgctttattacagg

SEQ ID NO: 142277 - DNA, 30 bp, Artificial Sequence
  Synthetic oligonucleotide
tcaccacgatgggttatagtactttacagg

SEQ ID NO: 142278 - DNA, 30 bp, Artificial Sequence
  Synthetic oligonucleotide
gagagaccgacagaaggcatggccaccagg

SEQ ID NO: 142279 - DNA, 30 bp, Artificial Sequence
  Synthetic oligonucleotide
tacagctgagggacgacatacagcaccagg

SEQ ID NO: 142280 - DNA, 30 bp, Artificial Sequence
  Synthetic oligonucleotide
ggaaatattttgtcaggccgaaagaccagg

SEQ ID NO: 142281 - DNA, 30 bp, Artificial Sequence
  Synthetic oligonucleotide
ataggggattgccggcagagggctaccagg

SEQ ID NO: 142282 - DNA, 30 bp, Artificial Sequence
  Synthetic oligonucleotide
gttggagtgggaggtgcgagtaaacccagg

SEQ ID NO: 142283 - DNA, 30 bp, Artificial Sequence
  Synthetic oligonucleotide
taagttagccgttttccttcacaacccagg

SEQ ID NO: 142284 - DNA, 30 bp, Artificial Sequence
  Synthetic oligonucleotide
attagaagcagatgatccgaggcacccagg

SEQ ID NO: 142285 - DNA, 30 bp, Artificial Sequence
  Synthetic oligonucleotide
agatgccgccaacttggaagctgacccagg

SEQ ID NO: 142286 - DNA, 30 bp, Artificial Sequence
  Synthetic oligonucleotide
cccttgacgtaacgacttgctgagcccagg

SEQ ID NO: 142287 - DNA, 30 bp, Artificial Sequence
  Synthetic oligonucleotide
gactctggaaaatatatgaggcgtcccagg

SEQ ID NO: 142288 - DNA, 30 bp, Artificial Sequence
  Synthetic oligonucleotide
tgtcacatatcaaaggaaaagaaagccagg

SEQ ID NO: 142289 - DNA, 30 bp, Artificial Sequence
  Synthetic oligonucleotide
cgatcagcccacggtcaacggacggccagg

SEQ ID NO: 142290 - DNA, 30 bp, Artificial Sequence
  Synthetic oligonucleotide
tacttcgaccgcagtagttagttctccagg

SEQ ID NO: 142291 - DNA, 30 bp, Artificial Sequence
  Synthetic oligonucleotide
ccagctgagtttggcgaaacccagtccagg

SEQ ID NO: 142292 - DNA, 30 bp, Artificial Sequence
  Synthetic oligonucleotide
aaatccagtctgtagtgtggaacgtccagg

SEQ ID NO: 142293 - DNA, 30 bp, Artificial Sequence
  Synthetic oligonucleotide
ccggattactactatcctaactcttccagg

SEQ ID NO: 142294 - DNA, 30 bp, Artificial Sequence
  Synthetic oligonucleotide
tcatctacttcggggcagaacaaaagcagg

SEQ ID NO: 142295 - DNA, 30 bp, Artificial Sequence
  Synthetic oligonucleotide
gtgacgcgcgggacatcaagggcaagcagg

SEQ ID NO: 142296 - DNA, 30 bp, Artificial Sequence
  Synthetic oligonucleotide
agaggtctgctgagcatgtaacgaggcagg

SEQ ID NO: 142297 - DNA, 30 bp, Artificial Sequence
  Synthetic oligonucleotide
agagtctaggggattcggaatccgggcagg

SEQ ID NO: 142298 - DNA, 30 bp, Artificial Sequence
  Synthetic oligonucleotide
tctaggatacaatgcatacaggatggcagg

SEQ ID NO: 142299 - DNA, 30 bp, Artificial Sequence
  Synthetic oligonucleotide
aaacggaccgatctgcaaacaagtggcagg

SEQ ID NO: 142300 - DNA, 30 bp, Artificial Sequence
  Synthetic oligonucleotide
acgaatgggtagaaaccgagctttggcagg

SEQ ID NO: 142301 - DNA, 30 bp, Artificial Sequence
  Synthetic oligonucleotide
aaacagtttgccgatccgagcacatgcagg

SEQ ID NO: 142302 - DNA, 30 bp, Artificial Sequence
  Synthetic oligonucleotide
agtctccaaggctgagtaatagcctgcagg

SEQ ID NO: 142303 - DNA, 30 bp, Artificial Sequence
  Synthetic oligonucleotide
ggcaagcattcacagtaatcggtctgcagg

SEQ ID NO: 142304 - DNA, 30 bp, Artificial Sequence
  Synthetic oligonucleotide
gcctttgagttgaacactgaatattgcagg

SEQ ID NO: 142305 - DNA, 30 bp, Artificial Sequence
  Synthetic oligonucleotide
tcaggaaagtctggccgctggttttgcagg

SEQ ID NO: 142306 - DNA, 30 bp, Artificial Sequence
  Synthetic oligonucleotide
taaaaaatgtacaaagaataccccatcagg

SEQ ID NO: 142307 - DNA, 30 bp, Artificial Sequence
  Synthetic oligonucleotide
ctatagtcgtttagaaagttccagatcagg

SEQ ID NO: 142308 - DNA, 30 bp, Artificial Sequence
  Synthetic oligonucleotide
caacaatagggatggggcgagacgatcagg

SEQ ID NO: 142309 - DNA, 30 bp, Artificial Sequence
  Synthetic oligonucleotide
aaggcatggtgacgagatttttaactcagg

SEQ ID NO: 142310 - DNA, 30 bp, Artificial Sequence
  Synthetic oligonucleotide
agtatggaaagctccttcttgcgagtcagg

SEQ ID NO: 142311 - DNA, 30 bp, Artificial Sequence
  Synthetic oligonucleotide
tcacggataatctggctttaaatagtcagg

SEQ ID NO: 142312 - DNA, 30 bp, Artificial Sequence
  Synthetic oligonucleotide
gggatccttaacagctcttctttcgtcagg

SEQ ID NO: 142313 - DNA, 30 bp, Artificial Sequence
  Synthetic oligonucleotide
gacttgtcaaaaacgtccactaaggtcagg

SEQ ID NO: 142314 - DNA, 30 bp, Artificial Sequence
  Synthetic oligonucleotide
cggcaacgcgcccgaagcaatctggtcagg

SEQ ID NO: 142315 - DNA, 30 bp, Artificial Sequence
  Synthetic oligonucleotide
cggatataaatttggacataccaattcagg

SEQ ID NO: 142316 - DNA, 30 bp, Artificial Sequence
  Synthetic oligonucleotide
cctcagcccagggtgttgggtcgattcagg

SEQ ID NO: 142317 - DNA, 30 bp, Artificial Sequence
  Synthetic oligonucleotide
ccgctgtgtattagccagaactggttcagg

SEQ ID NO: 142318 - DNA, 30 bp, Artificial Sequence
  Synthetic oligonucleotide
aaaaatataaccaccagatccataaagagg

SEQ ID NO: 142319 - DNA, 30 bp, Artificial Sequence
  Synthetic oligonucleotide
tagacacgcgaaaatatgttattaaagagg

SEQ ID NO: 142320 - DNA, 30 bp, Artificial Sequence
  Synthetic oligonucleotide
aacttcaaaaatacattggtttccaagagg

SEQ ID NO: 142321 - DNA, 30 bp, Artificial Sequence
  Synthetic oligonucleotide
tctaccagcgctacaatagaagcgaagagg

SEQ ID NO: 142322 - DNA, 30 bp, Artificial Sequence
  Synthetic oligonucleotide
gggagctgttaatacagtcacgggaagagg

SEQ ID NO: 142323 - DNA, 30 bp, Artificial Sequence
  Synthetic oligonucleotide
tcatcctggacaaggtatagcgttaagagg

SEQ ID NO: 142324 - DNA, 30 bp, Artificial Sequence
  Synthetic oligonucleotide
tggaatgacaatatggggcaatcacagagg

SEQ ID NO: 142325 - DNA, 30 bp, Artificial Sequence
  Synthetic oligonucleotide
tcgggggcagtaccccatggttcacagagg

SEQ ID NO: 142326 - DNA, 30 bp, Artificial Sequence
  Synthetic oligonucleotide
cccatccagcgcagccctaaaaagcagagg

SEQ ID NO: 142327 - DNA, 30 bp, Artificial Sequence
  Synthetic oligonucleotide
aagacaccgaatagtttatagaggcagagg

SEQ ID NO: 142328 - DNA, 30 bp, Artificial Sequence
  Synthetic oligonucleotide
tacgtatcagcgctgcgttccgggcagagg

SEQ ID NO: 142329 - DNA, 30 bp, Artificial Sequence
  Synthetic oligonucleotide
atggtgtataatggagcagagaccgagagg

SEQ ID NO: 142330 - DNA, 30 bp, Artificial Sequence
  Synthetic oligonucleotide
cggctgtcgtagcgctgtggaggcgagagg

SEQ ID NO: 142331 - DNA, 30 bp, Artificial Sequence
  Synthetic oligonucleotide
cgttgataataacacttaggtggatagagg

SEQ ID NO: 142332 - DNA, 30 bp, Artificial Sequence
  Synthetic oligonucleotide
cttcatctatatatccacaactactagagg

SEQ ID NO: 142333 - DNA, 30 bp, Artificial Sequence
  Synthetic oligonucleotide
gacaaggttggattttggcaaataacgagg

SEQ ID NO: 142334 - DNA, 30 bp, Artificial Sequence
  Synthetic oligonucleotide
taaacgagaatgtcttcatgtttcacgagg

SEQ ID NO: 142335 - DNA, 30 bp, Artificial Sequence
  Synthetic oligonucleotide
cgagattcgtcagatggtacagagacgagg

SEQ ID NO: 142336 - DNA, 30 bp, Artificial Sequence
  Synthetic oligonucleotide
aatgtgtcttcgcattggtgagggacgagg

SEQ ID NO: 142337 - DNA, 30 bp, Artificial Sequence
  Synthetic oligonucleotide
gacagtgagagcttccgtaaatgtacgagg

SEQ ID NO: 142338 - DNA, 30 bp, Artificial Sequence
  Synthetic oligonucleotide
cacgagttggatatgtgtcgaggcccgagg

SEQ ID NO: 142339 - DNA, 30 bp, Artificial Sequence
  Synthetic oligonucleotide
ccagccattagagcgagcagtcagccgagg

SEQ ID NO: 142340 - DNA, 30 bp, Artificial Sequence
  Synthetic oligonucleotide
tagtaaaagttccagaagcgtgatccgagg

SEQ ID NO: 142341 - DNA, 30 bp, Artificial Sequence
  Synthetic oligonucleotide
tggggcgcccctggtttccgaactccgagg

SEQ ID NO: 142342 - DNA, 30 bp, Artificial Sequence
  Synthetic oligonucleotide
cgacttcagttagtcctaatataagcgagg

SEQ ID NO: 142343 - DNA, 30 bp, Artificial Sequence
  Synthetic oligonucleotide
cgggggtcgcgtcctgagataagagcgagg

SEQ ID NO: 142344 - DNA, 30 bp, Artificial Sequence
  Synthetic oligonucleotide
gcggcaacttgggatcataaattcgcgagg

SEQ ID NO: 142345 - DNA, 30 bp, Artificial Sequence
  Synthetic oligonucleotide
aggtaagtcttgttggctcaaatggcgagg

SEQ ID NO: 142346 - DNA, 30 bp, Artificial Sequence
  Synthetic oligonucleotide
agcacaatcgaactgctaacaaatgcgagg

SEQ ID NO: 142347 - DNA, 30 bp, Artificial Sequence
  Synthetic oligonucleotide
ataggggtctggccaagttgataaaggagg

SEQ ID NO: 142348 - DNA, 30 bp, Artificial Sequence
  Synthetic oligonucleotide
ccttaccctttgaatggccctccaaggagg

SEQ ID NO: 142349 - DNA, 30 bp, Artificial Sequence
  Synthetic oligonucleotide
aggaagtagtaatcggccggacccaggagg

SEQ ID NO: 142350 - DNA, 30 bp, Artificial Sequence
  Synthetic oligonucleotide
tctatcatcgggcccacatagaagaggagg

SEQ ID NO: 142351 - DNA, 30 bp, Artificial Sequence
  Synthetic oligonucleotide
acgtacgcagaggagcttcttacgcggagg

SEQ ID NO: 142352 - DNA, 30 bp, Artificial Sequence
  Synthetic oligonucleotide
aataccgccagtacgttgcgcgggcggagg

SEQ ID NO: 142353 - DNA, 30 bp, Artificial Sequence
  Synthetic oligonucleotide
agttgccgtataaaaaagttaatagggagg

SEQ ID NO: 142354 - DNA, 30 bp, Artificial Sequence
  Synthetic oligonucleotide
ctatccagataggtaccagatcgcgggagg

SEQ ID NO: 142355 - DNA, 30 bp, Artificial Sequence
  Synthetic oligonucleotide
aggtaggaccgaagcaaggatatcgggagg

SEQ ID NO: 142356 - DNA, 30 bp, Artificial Sequence
  Synthetic oligonucleotide
agttgtatgtgattagcacggtatgggagg

SEQ ID NO: 142357 - DNA, 30 bp, Artificial Sequence
  Synthetic oligonucleotide
gaaagcggatctaacacctgggttgggagg

SEQ ID NO: 142358 - DNA, 30 bp, Artificial Sequence
  Synthetic oligonucleotide
agcatacagggctttccgtgccgatggagg

SEQ ID NO: 142359 - DNA, 30 bp, Artificial Sequence
  Synthetic oligonucleotide
atgtctgacgggagtgttcgtgtaatgagg

SEQ ID NO: 142360 - DNA, 30 bp, Artificial Sequence
  Synthetic oligonucleotide
gtctagtatagcaagtctaacatcatgagg

SEQ ID NO: 142361 - DNA, 30 bp, Artificial Sequence
  Synthetic oligonucleotide
aggtggggggacaaggctgggcgtatgagg

SEQ ID NO: 142362 - DNA, 30 bp, Artificial Sequence
  Synthetic oligonucleotide
caagtaaatagctttcttatcacactgagg

SEQ ID NO: 142363 - DNA, 30 bp, Artificial Sequence
  Synthetic oligonucleotide
agtcctagataaagcggactgctactgagg

SEQ ID NO: 142364 - DNA, 30 bp, Artificial Sequence
  Synthetic oligonucleotide
atagttggggttcgtgtcataattctgagg

SEQ ID NO: 142365 - DNA, 30 bp, Artificial Sequence
  Synthetic oligonucleotide
tcgggaggggattaccaggcgccagtgagg

SEQ ID NO: 142366 - DNA, 30 bp, Artificial Sequence
  Synthetic oligonucleotide
tgtgcggtcaattttcctatgttattgagg

SEQ ID NO: 142367 - DNA, 30 bp, Artificial Sequence
  Synthetic oligonucleotide
gaggtcatctttatggtaggtcagttgagg

SEQ ID NO: 142368 - DNA, 30 bp, Artificial Sequence
  Synthetic oligonucleotide
tcacggttaccgaacttggtcccaaatagg

SEQ ID NO: 142369 - DNA, 30 bp, Artificial Sequence
  Synthetic oligonucleotide
actggggagttacagtgcccactcaatagg

SEQ ID NO: 142370 - DNA, 30 bp, Artificial Sequence
  Synthetic oligonucleotide
taaaagagctacgcggtaaaaatgaatagg

SEQ ID NO: 142371 - DNA, 30 bp, Artificial Sequence
  Synthetic oligonucleotide
tcgagtcgtttcatgatggtggagcatagg

SEQ ID NO: 142372 - DNA, 30 bp, Artificial Sequence
  Synthetic oligonucleotide
cgttgtggaggagacggagaattgcatagg

SEQ ID NO: 142373 - DNA, 30 bp, Artificial Sequence
  Synthetic oligonucleotide
tggggctgtcggctaggtgattaagatagg

SEQ ID NO: 142374 - DNA, 30 bp, Artificial Sequence
  Synthetic oligonucleotide
actacgtattacatacaaagggccgatagg

SEQ ID NO: 142375 - DNA, 30 bp, Artificial Sequence
  Synthetic oligonucleotide
ttggcacagcgagcccatgccgaatatagg

SEQ ID NO: 142376 - DNA, 30 bp, Artificial Sequence
  Synthetic oligonucleotide
tgaaatgggcttatcttcgttcgatatagg

SEQ ID NO: 142377 - DNA, 30 bp, Artificial Sequence
  Synthetic oligonucleotide
gcgggaggtgaggctcacagtttatatagg

SEQ ID NO: 142378 - DNA, 30 bp, Artificial Sequence
  Synthetic oligonucleotide
gtgagtaatgatcatcgattggcctatagg

SEQ ID NO: 142379 - DNA, 30 bp, Artificial Sequence
  Synthetic oligonucleotide
tggagaggatcccacattggaatcactagg

SEQ ID NO: 142380 - DNA, 30 bp, Artificial Sequence
  Synthetic oligonucleotide
gataaggtttacggggcgaagtgacctagg

SEQ ID NO: 142381 - DNA, 30 bp, Artificial Sequence
  Synthetic oligonucleotide
aggtattttcaaagggaaagtacgcctagg

SEQ ID NO: 142382 - DNA, 30 bp, Artificial Sequence
  Synthetic oligonucleotide
tcggtccatggaaaaccacgtgacgctagg

SEQ ID NO: 142383 - DNA, 30 bp, Artificial Sequence
  Synthetic oligonucleotide
tggattgttcttctaagttgtattgctagg

SEQ ID NO: 142384 - DNA, 30 bp, Artificial Sequence
  Synthetic oligonucleotide
agtggtgaaccaagaattgagacctctagg

SEQ ID NO: 142385 - DNA, 30 bp, Artificial Sequence
  Synthetic oligonucleotide
ttgactatgggcagatttgtttggtctagg

SEQ ID NO: 142386 - DNA, 30 bp, Artificial Sequence
  Synthetic oligonucleotide
gccatagatacgagcgtgttaccaagtagg

SEQ ID NO: 142387 - DNA, 30 bp, Artificial Sequence
  Synthetic oligonucleotide
ttgacagggccttaacaccgctcaagtagg

SEQ ID NO: 142388 - DNA, 30 bp, Artificial Sequence
  Synthetic oligonucleotide
acagtatatatatgaagggtggtaagtagg

SEQ ID NO: 142389 - DNA, 30 bp, Artificial Sequence
  Synthetic oligonucleotide
cgagtaattgcggggagatggaacagtagg

SEQ ID NO: 142390 - DNA, 30 bp, Artificial Sequence
  Synthetic oligonucleotide
tgcatctagtgatgctcgactcagagtagg

SEQ ID NO: 142391 - DNA, 30 bp, Artificial Sequence
  Synthetic oligonucleotide
ttagagtggcttgtcagacccgtgagtagg

SEQ ID NO: 142392 - DNA, 30 bp, Artificial Sequence
  Synthetic oligonucleotide
cgcgagtcggtatcaaacggtttgagtagg

SEQ ID NO: 142393 - DNA, 30 bp, Artificial Sequence
  Synthetic oligonucleotide
ggtcaacaaaggccatgaggaatacgtagg

SEQ ID NO: 142394 - DNA, 30 bp, Artificial Sequence
  Synthetic oligonucleotide
gcgtcgaacttcgctgatatcagtcgtagg

SEQ ID NO: 142395 - DNA, 30 bp, Artificial Sequence
  Synthetic oligonucleotide
catttactaaatgtagtagtgagtcgtagg

SEQ ID NO: 142396 - DNA, 30 bp, Artificial Sequence
  Synthetic oligonucleotide
ggaatccttagaagcgatagcgcaggtagg

SEQ ID NO: 142397 - DNA, 30 bp, Artificial Sequence
  Synthetic oligonucleotide
ccgcaatgagagtcggaatatctgggtagg

SEQ ID NO: 142398 - DNA, 30 bp, Artificial Sequence
  Synthetic oligonucleotide
gcgcacgcgtaagccataactggatgtagg

SEQ ID NO: 142399 - DNA, 30 bp, Artificial Sequence
  Synthetic oligonucleotide
gcacataggaattaccagtcagggtgtagg

SEQ ID NO: 142400 - DNA, 30 bp, Artificial Sequence
  Synthetic oligonucleotide
tgtaaagcctcttgtaatgttatgtgtagg

SEQ ID NO: 142401 - DNA, 30 bp, Artificial Sequence
  Synthetic oligonucleotide
cagcattaattttggagaatggattgtagg

SEQ ID NO: 142402 - DNA, 30 bp, Artificial Sequence
  Synthetic oligonucleotide
ctacttaataacctgagaaaatcttgtagg

SEQ ID NO: 142403 - DNA, 30 bp, Artificial Sequence
  Synthetic oligonucleotide
catcgtatgtacttgagactctcttgtagg

SEQ ID NO: 142404 - DNA, 30 bp, Artificial Sequence
  Synthetic oligonucleotide
gaccggttattaaaaagctttaaaattagg

SEQ ID NO: 142405 - DNA, 29 bp, Artificial Sequence
  Synthetic oligonucleotide
gtacatgtcgatacgggcgacatattagg

SEQ ID NO: 142406 - DNA, 30 bp, Artificial Sequence
  Synthetic oligonucleotide
cgagctcaaagagtgatctataaatttagg

SEQ ID NO: 142407 - DNA, 30 bp, Artificial Sequence
  Synthetic oligonucleotide
ccacagatcaatattggacgagtctttagg

SEQ ID NO: 142408 - DNA, 30 bp, Artificial Sequence
  Synthetic oligonucleotide
gggatgctgcttgacgtgtaaacttttagg

SEQ ID NO: 142409 - DNA, 30 bp, Artificial Sequence
  Synthetic oligonucleotide
ccccaccaaatgcctctagctgcaaaacgg

SEQ ID NO: 142410 - DNA, 30 bp, Artificial Sequence
  Synthetic oligonucleotide
aaacaacgcctttgttagagcagaaaacgg

SEQ ID NO: 142411 - DNA, 30 bp, Artificial Sequence
  Synthetic oligonucleotide
aatgtatttcagatgtgccacctaaaacgg

SEQ ID NO: 142412 - DNA, 30 bp, Artificial Sequence
  Synthetic oligonucleotide
ctgcacgtcgggattgtgcgagctaaacgg

SEQ ID NO: 142413 - DNA, 30 bp, Artificial Sequence
  Synthetic oligonucleotide
tcattctgagggcgagcggtcgaacaacgg

SEQ ID NO: 142414 - DNA, 30 bp, Artificial Sequence
  Synthetic oligonucleotide
ataccgcacagaactaaccgcacgcaacgg

SEQ ID NO: 142415 - DNA, 30 bp, Artificial Sequence
  Synthetic oligonucleotide
atgtgctagtcacacagtaaacggcaacgg

SEQ ID NO: 142416 - DNA, 30 bp, Artificial Sequence
  Synthetic oligonucleotide
cggggcggaagtactcatgttggagaacgg

SEQ ID NO: 142417 - DNA, 30 bp, Artificial Sequence
  Synthetic oligonucleotide
agaataaggtagtgtgcaaaatgcgaacgg

SEQ ID NO: 142418 - DNA, 30 bp, Artificial Sequence
  Synthetic oligonucleotide
tatggtggaataataagtattcgggaacgg

SEQ ID NO: 142419 - DNA, 30 bp, Artificial Sequence
  Synthetic oligonucleotide
taacttaaaaacgagatattttgataacgg

SEQ ID NO: 142420 - DNA, 30 bp, Artificial Sequence
  Synthetic oligonucleotide
gcggccggaactgggcgccaatgctaacgg

SEQ ID NO: 142421 - DNA, 30 bp, Artificial Sequence
  Synthetic oligonucleotide
aagtgtgggggcaagttttcatgctaacgg

SEQ ID NO: 142422 - DNA, 30 bp, Artificial Sequence
  Synthetic oligonucleotide
ccgccagtggtgagggattgaaattaacgg

SEQ ID NO: 142423 - DNA, 30 bp, Artificial Sequence
  Synthetic oligonucleotide
atgagtaggtattcggcaaaattttaacgg

SEQ ID NO: 142424 - DNA, 30 bp, Artificial Sequence
  Synthetic oligonucleotide
tgctacgtcatgagaggatcatttacacgg

SEQ ID NO: 142425 - DNA, 30 bp, Artificial Sequence
  Synthetic oligonucleotide
tgatgcattggtgagcccctataaccacgg

SEQ ID NO: 142426 - DNA, 30 bp, Artificial Sequence
  Synthetic oligonucleotide
tagcctactcgactcgattggcgaccacgg

SEQ ID NO: 142427 - DNA, 30 bp, Artificial Sequence
  Synthetic oligonucleotide
aagagtgtatcggtggattacatgccacgg

SEQ ID NO: 142428 - DNA, 30 bp, Artificial Sequence
  Synthetic oligonucleotide
caacaagatcgcagatatacttttccacgg

SEQ ID NO: 142429 - DNA, 30 bp, Artificial Sequence
  Synthetic oligonucleotide
gagcaggaactgcaaggtgagtcagcacgg

SEQ ID NO: 142430 - DNA, 30 bp, Artificial Sequence
  Synthetic oligonucleotide
gggggagtagctttacacttaagcgcacgg

SEQ ID NO: 142431 - DNA, 30 bp, Artificial Sequence
  Synthetic oligonucleotide
cgtgtgcaaaaagttatcctcatggcacgg

SEQ ID NO: 142432 - DNA, 30 bp, Artificial Sequence
  Synthetic oligonucleotide
taatagatgagggacgagacgtcatcacgg

SEQ ID NO: 142433 - DNA, 30 bp, Artificial Sequence
  Synthetic oligonucleotide
taggcactgtccaaccggccaaactcacgg

SEQ ID NO: 142434 - DNA, 30 bp, Artificial Sequence
  Synthetic oligonucleotide
gcggggtattgaggggttgtagattcacgg

SEQ ID NO: 142435 - DNA, 30 bp, Artificial Sequence
  Synthetic oligonucleotide
gcgacaatagagtgctgagacacaagacgg

SEQ ID NO: 142436 - DNA, 30 bp, Artificial Sequence
  Synthetic oligonucleotide
gaaaggtccgatagatcagaccccagacgg

SEQ ID NO: 142437 - DNA, 31 bp, Artificial Sequence
  Synthetic oligonucleotide
agacagcgccttatcgatagtcgaacgacgg

SEQ ID NO: 142438 - DNA, 30 bp, Artificial Sequence
  Synthetic oligonucleotide
ggggattgccggaacagtgtgacacgacgg

SEQ ID NO: 142439 - DNA, 30 bp, Artificial Sequence
  Synthetic oligonucleotide
accgtgagctagtatgagacgagtcgacgg

SEQ ID NO: 142440 - DNA, 31 bp, Artificial Sequence
  Synthetic oligonucleotide
cacattacgaggtgtgagtatataaggacgg

SEQ ID NO: 142441 - DNA, 30 bp, Artificial Sequence
  Synthetic oligonucleotide
taacccctcagagaataaagaagcggacgg

SEQ ID NO: 142442 - DNA, 30 bp, Artificial Sequence
  Synthetic oligonucleotide
tgggataacctacgccactgcttcggacgg

SEQ ID NO: 142443 - DNA, 30 bp, Artificial Sequence
  Synthetic oligonucleotide
catgttaggaaagtgtgcaatgagggacgg

SEQ ID NO: 142444 - DNA, 30 bp, Artificial Sequence
  Synthetic oligonucleotide
cgttgtaaacaccggaccttctatggacgg

SEQ ID NO: 142445 - DNA, 30 bp, Artificial Sequence
  Synthetic oligonucleotide
cctacattagactagacccactagtgacgg

SEQ ID NO: 142446 - DNA, 30 bp, Artificial Sequence
  Synthetic oligonucleotide
accgcaaacgtatgtgcgtcttgaatacgg

SEQ ID NO: 142447 - DNA, 30 bp, Artificial Sequence
  Synthetic oligonucleotide
aaagtcgcggaaggcaaccgccacatacgg

SEQ ID NO: 142448 - DNA, 30 bp, Artificial Sequence
  Synthetic oligonucleotide
ttcgtcgtaatccaaaaattcgcactacgg

SEQ ID NO: 142449 - DNA, 30 bp, Artificial Sequence
  Synthetic oligonucleotide
atccgtactcctgtacaacgtcgactacgg

SEQ ID NO: 142450 - DNA, 30 bp, Artificial Sequence
  Synthetic oligonucleotide
agacaatttacaggaatatacaggctacgg

SEQ ID NO: 142451 - DNA, 30 bp, Artificial Sequence
  Synthetic oligonucleotide
ctacacagtatgagtaacgatcttctacgg

SEQ ID NO: 142452 - DNA, 30 bp, Artificial Sequence
  Synthetic oligonucleotide
ctatggtcaaaggccaggttgcaagtacgg

SEQ ID NO: 142453 - DNA, 29 bp, Artificial Sequence
  Synthetic oligonucleotide
ggagatatagcgcgacagggtaagtacgg

SEQ ID NO: 142454 - DNA, 30 bp, Artificial Sequence
  Synthetic oligonucleotide
cgactccagaattaaaggcgtatagtacgg

SEQ ID NO: 142455 - DNA, 30 bp, Artificial Sequence
  Synthetic oligonucleotide
ttggatgatgcaaacttgggacacgtacgg

SEQ ID NO: 142456 - DNA, 30 bp, Artificial Sequence
  Synthetic oligonucleotide
agagccaatgtacaaccatgtcccgtacgg

SEQ ID NO: 142457 - DNA, 30 bp, Artificial Sequence
  Synthetic oligonucleotide
tcgcgggcgcataacaggggaagcgtacgg

SEQ ID NO: 142458 - DNA, 30 bp, Artificial Sequence
  Synthetic oligonucleotide
gtggaaatgtataactgctgtagggtacgg

SEQ ID NO: 142459 - DNA, 30 bp, Artificial Sequence
  Synthetic oligonucleotide
gtcaagcagtgtgggtaggcgcaattacgg

SEQ ID NO: 142460 - DNA, 30 bp, Artificial Sequence
  Synthetic oligonucleotide
gagggatatgtcgtaagatcggaattacgg

SEQ ID NO: 142461 - DNA, 30 bp, Artificial Sequence
  Synthetic oligonucleotide
ggcagtcacttgcaagttacgagattacgg

SEQ ID NO: 142462 - DNA, 30 bp, Artificial Sequence
  Synthetic oligonucleotide
tcccgcgttaaagctctcaaaatattacgg

SEQ ID NO: 142463 - DNA, 30 bp, Artificial Sequence
  Synthetic oligonucleotide
cggagctactagtatagaggcgagttacgg

SEQ ID NO: 142464 - DNA, 30 bp, Artificial Sequence
  Synthetic oligonucleotide
ctgcaagaacttaaatagttgcatttacgg

SEQ ID NO: 142465 - DNA, 30 bp, Artificial Sequence
  Synthetic oligonucleotide
cttcgaactcgccacgatcccaacaaccgg

SEQ ID NO: 142466 - DNA, 30 bp, Artificial Sequence
  Synthetic oligonucleotide
actagattgccgtcatgtaatcgcaaccgg

SEQ ID NO: 142467 - DNA, 30 bp, Artificial Sequence
  Synthetic oligonucleotide
agagactaggtcgcatgcgtccgtaaccgg

SEQ ID NO: 142468 - DNA, 30 bp, Artificial Sequence
  Synthetic oligonucleotide
ttggcattacgaacggggtagctgcaccgg

SEQ ID NO: 142469 - DNA, 30 bp, Artificial Sequence
  Synthetic oligonucleotide
tgggataagcgtgggtgggggcctcaccgg

SEQ ID NO: 142470 - DNA, 30 bp, Artificial Sequence
  Synthetic oligonucleotide
tttagagcatgacggaaagcatcagaccgg

SEQ ID NO: 142471 - DNA, 30 bp, Artificial Sequence
  Synthetic oligonucleotide
taccatgactgaacacttggcagagaccgg

SEQ ID NO: 142472 - DNA, 30 bp, Artificial Sequence
  Synthetic oligonucleotide
cacattatagccgtaccctcgctagaccgg

SEQ ID NO: 142473 - DNA, 30 bp, Artificial Sequence
  Synthetic oligonucleotide
acaacttagaccggggaaatacacgaccgg

SEQ ID NO: 142474 - DNA, 30 bp, Artificial Sequence
  Synthetic oligonucleotide
tcttaccgttgcgaggacaacaaggaccgg

SEQ ID NO: 142475 - DNA, 30 bp, Artificial Sequence
  Synthetic oligonucleotide
tgaccacacagtgtcctacatacggaccgg

SEQ ID NO: 142476 - DNA, 30 bp, Artificial Sequence
  Synthetic oligonucleotide
tcggtcgaggggcatcgcaactcctaccgg

SEQ ID NO: 142477 - DNA, 30 bp, Artificial Sequence
  Synthetic oligonucleotide
atccgatcagcggtgaacatcggctaccgg

SEQ ID NO: 142478 - DNA, 30 bp, Artificial Sequence
  Synthetic oligonucleotide
tgtcggaacacttaagctcattcgtaccgg

SEQ ID NO: 142479 - DNA, 30 bp, Artificial Sequence
  Synthetic oligonucleotide
gtgctcagttcaagcctttaggggtaccgg

SEQ ID NO: 142480 - DNA, 30 bp, Artificial Sequence
  Synthetic oligonucleotide
agccatcaggggttgttgtccggttaccgg

SEQ ID NO: 142481 - DNA, 30 bp, Artificial Sequence
  Synthetic oligonucleotide
gcaaacagtatccattaagtgtagacccgg

SEQ ID NO: 142482 - DNA, 30 bp, Artificial Sequence
  Synthetic oligonucleotide
ccgtaaacttagtagcggacccggacccgg

SEQ ID NO: 142483 - DNA, 30 bp, Artificial Sequence
  Synthetic oligonucleotide
gccataacacagattggaaagtgcccccgg

SEQ ID NO: 142484 - DNA, 30 bp, Artificial Sequence
  Synthetic oligonucleotide
gtaagccgtcttgaaacaagactagcccgg

SEQ ID NO: 142485 - DNA, 30 bp, Artificial Sequence
  Synthetic oligonucleotide
atcgtggtgtgtctgtgtccaaccgcccgg

SEQ ID NO: 142486 - DNA, 30 bp, Artificial Sequence
  Synthetic oligonucleotide
aggatctatgtagcctgtctgtttgcccgg

SEQ ID NO: 142487 - DNA, 30 bp, Artificial Sequence
  Synthetic oligonucleotide
gtgtccaagtgtgtgtgtaccaacagccgg

SEQ ID NO: 142488 - DNA, 30 bp, Artificial Sequence
  Synthetic oligonucleotide
aagccttgggcgtgaatattatggagccgg

SEQ ID NO: 142489 - DNA, 30 bp, Artificial Sequence
  Synthetic oligonucleotide
acaccttatgaataacacacacctagccgg

SEQ ID NO: 142490 - DNA, 30 bp, Artificial Sequence
  Synthetic oligonucleotide
gcagaatggaggggatcactgttccgccgg

SEQ ID NO: 142491 - DNA, 30 bp, Artificial Sequence
  Synthetic oligonucleotide
ggaactcaaacatcgactttagttggccgg

SEQ ID NO: 142492 - DNA, 30 bp, Artificial Sequence
  Synthetic oligonucleotide
catggcaggggtaagttagacgcgatccgg

SEQ ID NO: 142493 - DNA, 30 bp, Artificial Sequence
  Synthetic oligonucleotide
aaactagctgagtgatgggctaggatccgg

SEQ ID NO: 142494 - DNA, 30 bp, Artificial Sequence
  Synthetic oligonucleotide
tgtgactgaacgctccatggacggatccgg

SEQ ID NO: 142495 - DNA, 30 bp, Artificial Sequence
  Synthetic oligonucleotide
tgggaaggttacgacccattttggatccgg

SEQ ID NO: 142496 - DNA, 30 bp, Artificial Sequence
  Synthetic oligonucleotide
tagtgtattgtactgcgagtattgatccgg

SEQ ID NO: 142497 - DNA, 30 bp, Artificial Sequence
  Synthetic oligonucleotide
tggtgtccgcttagggtaacagggctccgg

SEQ ID NO: 142498 - DNA, 30 bp, Artificial Sequence
  Synthetic oligonucleotide
caatggatttggcacagcctgtgcgtccgg

SEQ ID NO: 142499 - DNA, 30 bp, Artificial Sequence
  Synthetic oligonucleotide
ggtccgcagcgagaacagggtaacttccgg

SEQ ID NO: 142500 - DNA, 30 bp, Artificial Sequence
  Synthetic oligonucleotide
cgcatcgtgtgatttcgtttgagcttccgg

SEQ ID NO: 142501 - DNA, 30 bp, Artificial Sequence
  Synthetic oligonucleotide
ggagattggtcattgtgccaagagttccgg

SEQ ID NO: 142502 - DNA, 30 bp, Artificial Sequence
  Synthetic oligonucleotide
gatctgaccgctacatagggaactttccgg

SEQ ID NO: 142503 - DNA, 30 bp, Artificial Sequence
  Synthetic oligonucleotide
ccctcgaccgtcttggggaaaggaaagcgg

SEQ ID NO: 142504 - DNA, 30 bp, Artificial Sequence
  Synthetic oligonucleotide
agctgcgtgtggcgatgatatcttaagcgg

SEQ ID NO: 142505 - DNA, 30 bp, Artificial Sequence
  Synthetic oligonucleotide
agaacgttctgtgcagagttgcaccagcgg

SEQ ID NO: 142506 - DNA, 30 bp, Artificial Sequence
  Synthetic oligonucleotide
ctggcgacttagactatatattgggagcgg

SEQ ID NO: 142507 - DNA, 30 bp, Artificial Sequence
  Synthetic oligonucleotide
ggccgtagaaaaaagcctttgggatagcgg

SEQ ID NO: 142508 - DNA, 30 bp, Artificial Sequence
  Synthetic oligonucleotide
catgtgttcagttcaagatatgtgtagcgg

SEQ ID NO: 142509 - DNA, 30 bp, Artificial Sequence
  Synthetic oligonucleotide
gtggttcgtggttaaataggcccttagcgg

SEQ ID NO: 142510 - DNA, 30 bp, Artificial Sequence
  Synthetic oligonucleotide
ggatggctatcattccccaagacaacgcgg

SEQ ID NO: 142511 - DNA, 30 bp, Artificial Sequence
  Synthetic oligonucleotide
ggccctgactggcttgacgatgtaacgcgg

SEQ ID NO: 142512 - DNA, 30 bp, Artificial Sequence
  Synthetic oligonucleotide
ggaggggatgagtccagtgcgggcacgcgg

SEQ ID NO: 142513 - DNA, 30 bp, Artificial Sequence
  Synthetic oligonucleotide
agaaacatgctcgctcatcgtcagacgcgg

SEQ ID NO: 142514 - DNA, 30 bp, Artificial Sequence
  Synthetic oligonucleotide
ctaggatctaagatagctttaacaccgcgg

SEQ ID NO: 142515 - DNA, 30 bp, Artificial Sequence
  Synthetic oligonucleotide
agcacaaatatagttcataatttcccgcgg

SEQ ID NO: 142516 - DNA, 30 bp, Artificial Sequence
  Synthetic oligonucleotide
aaggtcaagtggaatggttcaaatccgcgg

SEQ ID NO: 142517 - DNA, 30 bp, Artificial Sequence
  Synthetic oligonucleotide
ggcaggcagggccattgggcagaagcgcgg

SEQ ID NO: 142518 - DNA, 30 bp, Artificial Sequence
  Synthetic oligonucleotide
agtcataggggtcaaagatttgtagcgcgg

SEQ ID NO: 142519 - DNA, 30 bp, Artificial Sequence
  Synthetic oligonucleotide
ggcaaatccgctttgtaacgataggcgcgg

SEQ ID NO: 142520 - DNA, 30 bp, Artificial Sequence
  Synthetic oligonucleotide
cgcgcgggtagtgattcgagtcatgcgcgg

SEQ ID NO: 142521 - DNA, 30 bp, Artificial Sequence
  Synthetic oligonucleotide
tgtcggcgatacgacgcggggggtgcgcgg

SEQ ID NO: 142522 - DNA, 30 bp, Artificial Sequence
  Synthetic oligonucleotide
gttagcccgtgacccctagcagtatcgcgg

SEQ ID NO: 142523 - DNA, 30 bp, Artificial Sequence
  Synthetic oligonucleotide
atgactgtcgccattagttctaggtcgcgg

SEQ ID NO: 142524 - DNA, 30 bp, Artificial Sequence
  Synthetic oligonucleotide
acatggtgacatcctagctatggaaggcgg

SEQ ID NO: 142525 - DNA, 30 bp, Artificial Sequence
  Synthetic oligonucleotide
attcggattattcattgggatgacaggcgg

SEQ ID NO: 142526 - DNA, 30 bp, Artificial Sequence
  Synthetic oligonucleotide
agtggcggactaggcaccaaaccgaggcgg

SEQ ID NO: 142527 - DNA, 30 bp, Artificial Sequence
  Synthetic oligonucleotide
cgtatccacttggatagtcctttacggcgg

SEQ ID NO: 142528 - DNA, 30 bp, Artificial Sequence
  Synthetic oligonucleotide
gagtcagggacttcggtgctggtgcggcgg

SEQ ID NO: 142529 - DNA, 30 bp, Artificial Sequence
  Synthetic oligonucleotide
caacgcattccctctggattggctcggcgg

SEQ ID NO: 142530 - DNA, 30 bp, Artificial Sequence
  Synthetic oligonucleotide
tgtataattggaacggccgacccagggcgg

SEQ ID NO: 142531 - DNA, 30 bp, Artificial Sequence
  Synthetic oligonucleotide
ttcggccagaggagtgcgggtggcgggcgg

SEQ ID NO: 142532 - DNA, 30 bp, Artificial Sequence
  Synthetic oligonucleotide
gggtgtttcgggaggcgagtgtgcgggcgg

SEQ ID NO: 142533 - DNA, 30 bp, Artificial Sequence
  Synthetic oligonucleotide
tcgttgttatgcacgtggaagatcgggcgg

SEQ ID NO: 142534 - DNA, 30 bp, Artificial Sequence
  Synthetic oligonucleotide
cgggttgtgcaaggcgtggtagtctggcgg

SEQ ID NO: 142535 - DNA, 30 bp, Artificial Sequence
  Synthetic oligonucleotide
cgccgaacaaggaccacccgtccgtggcgg

SEQ ID NO: 142536 - DNA, 30 bp, Artificial Sequence
  Synthetic oligonucleotide
aatgtccaatgactatcaagccggtggcgg

SEQ ID NO: 142537 - DNA, 30 bp, Artificial Sequence
  Synthetic oligonucleotide
acagtagagagcgcggatgacagaatgcgg

SEQ ID NO: 142538 - DNA, 30 bp, Artificial Sequence
  Synthetic oligonucleotide
gcgttgatagcaaccgggaatcgaatgcgg

SEQ ID NO: 142539 - DNA, 30 bp, Artificial Sequence
  Synthetic oligonucleotide
gcctgaggcaacgatgttggcctaatgcgg

SEQ ID NO: 142540 - DNA, 30 bp, Artificial Sequence
  Synthetic oligonucleotide
aagggagtcttgaaattaagtgctatgcgg

SEQ ID NO: 142541 - DNA, 30 bp, Artificial Sequence
  Synthetic oligonucleotide
aaaacaccatttctaacagaagcactgcgg

SEQ ID NO: 142542 - DNA, 30 bp, Artificial Sequence
  Synthetic oligonucleotide
gcacagcgttgtcaaattacaagactgcgg

SEQ ID NO: 142543 - DNA, 30 bp, Artificial Sequence
  Synthetic oligonucleotide
ccggaacggacacagtatgacgccgtgcgg

SEQ ID NO: 142544 - DNA, 30 bp, Artificial Sequence
  Synthetic oligonucleotide
cgagtagcaaaccgccccgtccgtgtgcgg

SEQ ID NO: 142545 - DNA, 30 bp, Artificial Sequence
  Synthetic oligonucleotide
cgatagaaattggtttagttgattgtgcgg

SEQ ID NO: 142546 - DNA, 30 bp, Artificial Sequence
  Synthetic oligonucleotide
gcgcattgacaaaagttaaagtttgtgcgg

SEQ ID NO: 142547 - DNA, 31 bp, Artificial Sequence
  Synthetic oligonucleotide
agacaaggatatccggcatcgcggattgcgg

SEQ ID NO: 142548 - DNA, 30 bp, Artificial Sequence
  Synthetic oligonucleotide
taattagctccaaataactgcatcttgcgg

SEQ ID NO: 142549 - DNA, 30 bp, Artificial Sequence
  Synthetic oligonucleotide
gtgtcgtgcggacaaagttgtctgttgcgg

SEQ ID NO: 142550 - DNA, 30 bp, Artificial Sequence
  Synthetic oligonucleotide
tggtttcgttcggtcttatgccagaatcgg

SEQ ID NO: 142551 - DNA, 30 bp, Artificial Sequence
  Synthetic oligonucleotide
cgctgcgatcttctaagccaatagaatcgg

SEQ ID NO: 142552 - DNA, 30 bp, Artificial Sequence
  Synthetic oligonucleotide
gcaacagcaatgttcaaacttgcgaatcgg

SEQ ID NO: 142553 - DNA, 32 bp, Artificial Sequence
  Synthetic oligonucleotide
gaatgaccctactctattaaagcgggaatcgg

SEQ ID NO: 142554 - DNA, 30 bp, Artificial Sequence
  Synthetic oligonucleotide
acatcggtcctttgttaaatgattaatcgg

SEQ ID NO: 142555 - DNA, 30 bp, Artificial Sequence
  Synthetic oligonucleotide
aggggccctatcgcttcattaagccatcgg

SEQ ID NO: 142556 - DNA, 30 bp, Artificial Sequence
  Synthetic oligonucleotide
ccatcattggcgaatacgacacatgatcgg

SEQ ID NO: 142557 - DNA, 30 bp, Artificial Sequence
  Synthetic oligonucleotide
tatacgtgtgcgtaactaaaaacatatcgg

SEQ ID NO: 142558 - DNA, 30 bp, Artificial Sequence
  Synthetic oligonucleotide
ccggtactacaaaaaagtgcaacatatcgg

SEQ ID NO: 142559 - DNA, 30 bp, Artificial Sequence
  Synthetic oligonucleotide
taagttccggtactatttggcacacctcgg

SEQ ID NO: 142560 - DNA, 30 bp, Artificial Sequence
  Synthetic oligonucleotide
gcgtcatttggatcaatgaagtaccctcgg

SEQ ID NO: 142561 - DNA, 30 bp, Artificial Sequence
  Synthetic oligonucleotide
gtggatgcgaatcttcatctgatccctcgg

SEQ ID NO: 142562 - DNA, 30 bp, Artificial Sequence
  Synthetic oligonucleotide
gccatgcctgcggaatgtgaggcttctcgg

SEQ ID NO: 142563 - DNA, 30 bp, Artificial Sequence
  Synthetic oligonucleotide
gcttggcaagtaatgtaagatcgaagtcgg

SEQ ID NO: 142564 - DNA, 30 bp, Artificial Sequence
  Synthetic oligonucleotide
ttaggagcccctaacgcgcatgtcagtcgg

SEQ ID NO: 142565 - DNA, 30 bp, Artificial Sequence
  Synthetic oligonucleotide
ggcctttgtgtgcggtgaagtgtgagtcgg

SEQ ID NO: 142566 - DNA, 30 bp, Artificial Sequence
  Synthetic oligonucleotide
gcagaaatgtaagaccttgttcaacgtcgg

SEQ ID NO: 142567 - DNA, 30 bp, Artificial Sequence
  Synthetic oligonucleotide
aaaggtctttgacgaaagtacgtacgtcgg

SEQ ID NO: 142568 - DNA, 30 bp, Artificial Sequence
  Synthetic oligonucleotide
aagtggaatacgtacctattctcccgtcgg

SEQ ID NO: 142569 - DNA, 30 bp, Artificial Sequence
  Synthetic oligonucleotide
caacactgccgaaaagttggtggccgtcgg

SEQ ID NO: 142570 - DNA, 30 bp, Artificial Sequence
  Synthetic oligonucleotide
ccaagttcttgccatcgtaacgtccgtcgg

SEQ ID NO: 142571 - DNA, 30 bp, Artificial Sequence
  Synthetic oligonucleotide
tgtaggcatcggcacgtaagtgagcgtcgg

SEQ ID NO: 142572 - DNA, 30 bp, Artificial Sequence
  Synthetic oligonucleotide
cgacgcagtgggtttggggggccgcgtcgg

SEQ ID NO: 142573 - DNA, 30 bp, Artificial Sequence
  Synthetic oligonucleotide
cccaaactgccgaaggtgtcccgaggtcgg

SEQ ID NO: 142574 - DNA, 30 bp, Artificial Sequence
  Synthetic oligonucleotide
atggttcagtactgaaattgcatgggtcgg

SEQ ID NO: 142575 - DNA, 30 bp, Artificial Sequence
  Synthetic oligonucleotide
gcacgtggtaattgccgacagaatggtcgg

SEQ ID NO: 142576 - DNA, 30 bp, Artificial Sequence
  Synthetic oligonucleotide
tatgtaattgtcgcatcctatgatggtcgg

SEQ ID NO: 142577 - DNA, 30 bp, Artificial Sequence
  Synthetic oligonucleotide
cgtggagttagtggaattgagtcatgtcgg

SEQ ID NO: 142578 - DNA, 30 bp, Artificial Sequence
  Synthetic oligonucleotide
cgggttcgctgaagcttcacactttgtcgg

SEQ ID NO: 142579 - DNA, 30 bp, Artificial Sequence
  Synthetic oligonucleotide
catggggtcttcactacgatgttttgtcgg

SEQ ID NO: 142580 - DNA, 30 bp, Artificial Sequence
  Synthetic oligonucleotide
taggtgatacagggtattacgcaaattcgg

SEQ ID NO: 142581 - DNA, 30 bp, Artificial Sequence
  Synthetic oligonucleotide
gtgccagcccccaatgcgcagggaattcgg

SEQ ID NO: 142582 - DNA, 30 bp, Artificial Sequence
  Synthetic oligonucleotide
cgaagtaggcaaacctttaagtgcattcgg

SEQ ID NO: 142583 - DNA, 30 bp, Artificial Sequence
  Synthetic oligonucleotide
catctttccaacaattgggacgagattcgg

SEQ ID NO: 142584 - DNA, 30 bp, Artificial Sequence
  Synthetic oligonucleotide
tccgaaagaaagggataaggatggattcgg

SEQ ID NO: 142585 - DNA, 30 bp, Artificial Sequence
  Synthetic oligonucleotide
tccggagtaagttacagaatcggtattcgg

SEQ ID NO: 142586 - DNA, 30 bp, Artificial Sequence
  Synthetic oligonucleotide
cgtagctaagatcgagggcacctgcttcgg

SEQ ID NO: 142587 - DNA, 30 bp, Artificial Sequence
  Synthetic oligonucleotide
taatgttgcaaacgttagtataaggttcgg

SEQ ID NO: 142588 - DNA, 30 bp, Artificial Sequence
  Synthetic oligonucleotide
gggctacggcgcgaatgggggtaggttcgg

SEQ ID NO: 142589 - DNA, 30 bp, Artificial Sequence
  Synthetic oligonucleotide
cgcgagagttcggtatagttccgtgttcgg

SEQ ID NO: 142590 - DNA, 30 bp, Artificial Sequence
  Synthetic oligonucleotide
catacttgtacatccataacactctttcgg

SEQ ID NO: 142591 - DNA, 30 bp, Artificial Sequence
  Synthetic oligonucleotide
atcgcgtgaaagaactactgttattttcgg

SEQ ID NO: 142592 - DNA, 30 bp, Artificial Sequence
  Synthetic oligonucleotide
agcgtgagataattaactcaaagttttcgg

SEQ ID NO: 142593 - DNA, 30 bp, Artificial Sequence
  Synthetic oligonucleotide
ggattccttgtactgaaagaagcaaaaggg

SEQ ID NO: 142594 - DNA, 30 bp, Artificial Sequence
  Synthetic oligonucleotide
acgtaggggggtctcggcgcgggaaaaggg

SEQ ID NO: 142595 - DNA, 30 bp, Artificial Sequence
  Synthetic oligonucleotide
gcagaccagcctcacgctccggtaaaaggg

SEQ ID NO: 142596 - DNA, 30 bp, Artificial Sequence
  Synthetic oligonucleotide
tgcgatgtagcataccgctcgtcgaaaggg

SEQ ID NO: 142597 - DNA, 30 bp, Artificial Sequence
  Synthetic oligonucleotide
cgagtttcccgatagcgatgaagacaaggg

SEQ ID NO: 142598 - DNA, 30 bp, Artificial Sequence
  Synthetic oligonucleotide
aagctccctgagtgcctctttttccaaggg

SEQ ID NO: 142599 - DNA, 30 bp, Artificial Sequence
  Synthetic oligonucleotide
cttaggaacgacatttatgggtatcaaggg

SEQ ID NO: 142600 - DNA, 30 bp, Artificial Sequence
  Synthetic oligonucleotide
accgcaaccaagacaaaactccgtcaaggg

SEQ ID NO: 142601 - DNA, 30 bp, Artificial Sequence
  Synthetic oligonucleotide
atttggttaacgtacggacgtcgtcaaggg

SEQ ID NO: 142602 - DNA, 30 bp, Artificial Sequence
  Synthetic oligonucleotide
ctcagcgtcgtggggttagtgtgtcaaggg

SEQ ID NO: 142603 - DNA, 30 bp, Artificial Sequence
  Synthetic oligonucleotide
aacaggtctgcggagatatgatcagaaggg

SEQ ID NO: 142604 - DNA, 30 bp, Artificial Sequence
  Synthetic oligonucleotide
aagatcgccaatggtcagtagtgagaaggg

SEQ ID NO: 142605 - DNA, 30 bp, Artificial Sequence
  Synthetic oligonucleotide
actgcacagctgaagggtagttgtgaaggg

SEQ ID NO: 142606 - DNA, 30 bp, Artificial Sequence
  Synthetic oligonucleotide
ataagaatatgctgccaaacaagataaggg

SEQ ID NO: 142607 - DNA, 30 bp, Artificial Sequence
  Synthetic oligonucleotide
cgtcagtaaggcttgtcaggatgataaggg

SEQ ID NO: 142608 - DNA, 30 bp, Artificial Sequence
  Synthetic oligonucleotide
aacccagaaaacgtatatgcgctctaaggg

SEQ ID NO: 142609 - DNA, 30 bp, Artificial Sequence
  Synthetic oligonucleotide
tggccatacgcaaagcggctagtgtaaggg

SEQ ID NO: 142610 - DNA, 30 bp, Artificial Sequence
  Synthetic oligonucleotide
tacacggctactcaggctagcgcttaaggg

SEQ ID NO: 142611 - DNA, 30 bp, Artificial Sequence
  Synthetic oligonucleotide
ctgtatcaacaatttaaggttgtaacaggg

SEQ ID NO: 142612 - DNA, 30 bp, Artificial Sequence
  Synthetic oligonucleotide
ccatttcttaggagtccccgtttaacaggg

SEQ ID NO: 142613 - DNA, 30 bp, Artificial Sequence
  Synthetic oligonucleotide
ttgataataacagtcgcgggctagacaggg

SEQ ID NO: 142614 - DNA, 30 bp, Artificial Sequence
  Synthetic oligonucleotide
aggttggaagtgatattccggttgacaggg

SEQ ID NO: 142615 - DNA, 30 bp, Artificial Sequence
  Synthetic oligonucleotide
tacacggactcggaatgctgttatacaggg

SEQ ID NO: 142616 - DNA, 30 bp, Artificial Sequence
  Synthetic oligonucleotide
tgtccagctatgagcctatattgtacaggg

SEQ ID NO: 142617 - DNA, 30 bp, Artificial Sequence
  Synthetic oligonucleotide
gactgacgtacagttatagagtcaccaggg

SEQ ID NO: 142618 - DNA, 30 bp, Artificial Sequence
  Synthetic oligonucleotide
atgccaaggtatgcataggtaacgccaggg

SEQ ID NO: 142619 - DNA, 30 bp, Artificial Sequence
  Synthetic oligonucleotide
cgcgggcgatcaggcatggtagcagcaggg

SEQ ID NO: 142620 - DNA, 30 bp, Artificial Sequence
  Synthetic oligonucleotide
agagtgttccactcagtcgacgatgcaggg

SEQ ID NO: 142621 - DNA, 30 bp, Artificial Sequence
  Synthetic oligonucleotide
cgctcgtgcgcacgaattcattgatcaggg

SEQ ID NO: 142622 - DNA, 30 bp, Artificial Sequence
  Synthetic oligonucleotide
gcattagttatatccgtagaggcctcaggg

SEQ ID NO: 142623 - DNA, 30 bp, Artificial Sequence
  Synthetic oligonucleotide
acccgattatgtacgctgtcgggttcaggg

SEQ ID NO: 142624 - DNA, 30 bp, Artificial Sequence
  Synthetic oligonucleotide
ggtgacggatatagcctagcgcgaagaggg

SEQ ID NO: 142625 - DNA, 30 bp, Artificial Sequence
  Synthetic oligonucleotide
agtcatgtggcaaagtcatctggcagaggg

SEQ ID NO: 142626 - DNA, 30 bp, Artificial Sequence
  Synthetic oligonucleotide
cagtcaggcgacaatcggtcgatcagaggg

SEQ ID NO: 142627 - DNA, 30 bp, Artificial Sequence
  Synthetic oligonucleotide
atgtcgccattaatttttctgagtagaggg

SEQ ID NO: 142628 - DNA, 30 bp, Artificial Sequence
  Synthetic oligonucleotide
ataaggaaggcctaggccgactcccgaggg

SEQ ID NO: 142629 - DNA, 30 bp, Artificial Sequence
  Synthetic oligonucleotide
ttgtgggtagtgcagtcagcagatcgaggg

SEQ ID NO: 142630 - DNA, 30 bp, Artificial Sequence
  Synthetic oligonucleotide
cggagggcaatccacgcgcggacaggaggg

SEQ ID NO: 142631 - DNA, 30 bp, Artificial Sequence
  Synthetic oligonucleotide
ctgctaaatccattaagcccacggggaggg

SEQ ID NO: 142632 - DNA, 30 bp, Artificial Sequence
  Synthetic oligonucleotide
gtaacgtcgaatgaacatgagtatggaggg

SEQ ID NO: 142633 - DNA, 30 bp, Artificial Sequence
  Synthetic oligonucleotide
tcgactctggctagggaaatatgtggaggg

SEQ ID NO: 142634 - DNA, 30 bp, Artificial Sequence
  Synthetic oligonucleotide
gctgcgtttcgctgctctcggagctgaggg

SEQ ID NO: 142635 - DNA, 29 bp, Artificial Sequence
  Synthetic oligonucleotide
ggacctcgtcacaaagtgagatttgaggg

SEQ ID NO: 142636 - DNA, 29 bp, Artificial Sequence
  Synthetic oligonucleotide
ttattaaaacaacttaagcctgcataggg

SEQ ID NO: 142637 - DNA, 30 bp, Artificial Sequence
  Synthetic oligonucleotide
ataacgctgcttgtttattatctcataggg

SEQ ID NO: 142638 - DNA, 30 bp, Artificial Sequence
  Synthetic oligonucleotide
agtaagaacagtcaggtagcaaaactaggg

SEQ ID NO: 142639 - DNA, 30 bp, Artificial Sequence
  Synthetic oligonucleotide
gaataagccttggtcccgctgatactaggg

SEQ ID NO: 142640 - DNA, 30 bp, Artificial Sequence
  Synthetic oligonucleotide
gcccacagagatgaacgtatgttgctaggg

SEQ ID NO: 142641 - DNA, 30 bp, Artificial Sequence
  Synthetic oligonucleotide
taattcatgtctgaatccgtgttgctaggg

SEQ ID NO: 142642 - DNA, 30 bp, Artificial Sequence
  Synthetic oligonucleotide
tgagctgagtacgatacagtcgctctaggg

SEQ ID NO: 142643 - DNA, 30 bp, Artificial Sequence
  Synthetic oligonucleotide
agccacttaccgtcataggacttggtaggg

SEQ ID NO: 142644 - DNA, 30 bp, Artificial Sequence
  Synthetic oligonucleotide
agataggtcgcgtattttagaccattaggg

SEQ ID NO: 142645 - DNA, 30 bp, Artificial Sequence
  Synthetic oligonucleotide
acaaatgtgtgaaggcaatattacttaggg

SEQ ID NO: 142646 - DNA, 30 bp, Artificial Sequence
  Synthetic oligonucleotide
aggcgacgggtctttgtggcgagtttaggg

SEQ ID NO: 142647 - DNA, 30 bp, Artificial Sequence
  Synthetic oligonucleotide
taagcgctacaagacaacaggggtttaggg

SEQ ID NO: 142648 - DNA, 30 bp, Artificial Sequence
  Synthetic oligonucleotide
tcgccctgtaattgatctctgggaaacggg

SEQ ID NO: 142649 - DNA, 30 bp, Artificial Sequence
  Synthetic oligonucleotide
tactgtcgtaagttggagtagtgaaacggg

SEQ ID NO: 142650 - DNA, 30 bp, Artificial Sequence
  Synthetic oligonucleotide
acgcacatcgggtctacctcagtaaacggg

SEQ ID NO: 142651 - DNA, 30 bp, Artificial Sequence
  Synthetic oligonucleotide
atcaacccacatgcgatggtttacaacggg

SEQ ID NO: 142652 - DNA, 30 bp, Artificial Sequence
  Synthetic oligonucleotide
tgcattgaaatggatacatggagtaacggg

SEQ ID NO: 142653 - DNA, 30 bp, Artificial Sequence
  Synthetic oligonucleotide
caacagtaattgtgcgaatgtttacacggg

SEQ ID NO: 142654 - DNA, 30 bp, Artificial Sequence
  Synthetic oligonucleotide
tcggtcattgacatgtattgccgccacggg

SEQ ID NO: 142655 - DNA, 30 bp, Artificial Sequence
  Synthetic oligonucleotide
acttcccacataaccttgcatcgtcacggg

SEQ ID NO: 142656 - DNA, 30 bp, Artificial Sequence
  Synthetic oligonucleotide
actgggctagtacgaatcgcaagagacggg

SEQ ID NO: 142657 - DNA, 30 bp, Artificial Sequence
  Synthetic oligonucleotide
acatcacgagcgttgcgctactgcgacggg

SEQ ID NO: 142658 - DNA, 30 bp, Artificial Sequence
  Synthetic oligonucleotide
cgcaatctcggcgtgagcatggctgacggg

SEQ ID NO: 142659 - DNA, 30 bp, Artificial Sequence
  Synthetic oligonucleotide
accgcttgtcccaaaagtacgttctacggg

SEQ ID NO: 142660 - DNA, 30 bp, Artificial Sequence
  Synthetic oligonucleotide
aaacagggatctggtaagtaaggcaccggg

SEQ ID NO: 142661 - DNA, 30 bp, Artificial Sequence
  Synthetic oligonucleotide
gcaaccctatggaagcgtcacaataccggg

SEQ ID NO: 142662 - DNA, 30 bp, Artificial Sequence
  Synthetic oligonucleotide
aggatggtgcgcaggtcaagaacacccggg

SEQ ID NO: 142663 - DNA, 30 bp, Artificial Sequence
  Synthetic oligonucleotide
acacccctcaacagggctccatcagccggg

SEQ ID NO: 142664 - DNA, 30 bp, Artificial Sequence
  Synthetic oligonucleotide
gcagtaggacaatttgcttcaaacgccggg

SEQ ID NO: 142665 - DNA, 30 bp, Artificial Sequence
  Synthetic oligonucleotide
gactattgagaaactggatctagatccggg

SEQ ID NO: 142666 - DNA, 30 bp, Artificial Sequence
  Synthetic oligonucleotide
atcgaagtcaatcgcagggctctatccggg

SEQ ID NO: 142667 - DNA, 30 bp, Artificial Sequence
  Synthetic oligonucleotide
aacgaaagcctgctacgcgcgaactccggg

SEQ ID NO: 142668 - DNA, 30 bp, Artificial Sequence
  Synthetic oligonucleotide
acctgggccatctgagatatttgctccggg

SEQ ID NO: 142669 - DNA, 30 bp, Artificial Sequence
  Synthetic oligonucleotide
agacagtgatatcaagtcggcaagtccggg

SEQ ID NO: 142670 - DNA, 30 bp, Artificial Sequence
  Synthetic oligonucleotide
ttgtcaaacataaacatgtcggggtccggg

SEQ ID NO: 142671 - DNA, 30 bp, Artificial Sequence
  Synthetic oligonucleotide
agcagcgcagggggatattcttggtccggg

SEQ ID NO: 142672 - DNA, 30 bp, Artificial Sequence
  Synthetic oligonucleotide
gtcttcaacgttccaacttgtaaaagcggg

SEQ ID NO: 142673 - DNA, 30 bp, Artificial Sequence
  Synthetic oligonucleotide
catgttacgtcgagacgatgaaacagcggg

SEQ ID NO: 142674 - DNA, 30 bp, Artificial Sequence
  Synthetic oligonucleotide
tggtctgaatagatcagattacttagcggg

SEQ ID NO: 142675 - DNA, 30 bp, Artificial Sequence
  Synthetic oligonucleotide
gagcttccgaaggcctagcccagccgcggg

SEQ ID NO: 142676 - DNA, 30 bp, Artificial Sequence
  Synthetic oligonucleotide
aagctgaaacacggaatgccggtccgcggg

SEQ ID NO: 142677 - DNA, 30 bp, Artificial Sequence
  Synthetic oligonucleotide
cggactataggtggaatagaggacggcggg

SEQ ID NO: 142678 - DNA, 30 bp, Artificial Sequence
  Synthetic oligonucleotide
ctggacattacaacaccagtcctcggcggg

SEQ ID NO: 142679 - DNA, 30 bp, Artificial Sequence
  Synthetic oligonucleotide
ttaacatcctagtctacatacttcggcggg

SEQ ID NO: 142680 - DNA, 30 bp, Artificial Sequence
  Synthetic oligonucleotide
cagtataggcggcccaaaaagaagggcggg

SEQ ID NO: 142681 - DNA, 30 bp, Artificial Sequence
  Synthetic oligonucleotide
acatggcggcacatcaacgtgagtggcggg

SEQ ID NO: 142682 - DNA, 30 bp, Artificial Sequence
  Synthetic oligonucleotide
agtcgcgtctgtaatgtgaattcatgcggg

SEQ ID NO: 142683 - DNA, 30 bp, Artificial Sequence
  Synthetic oligonucleotide
cgaaacagttttcggcgaactatatgcggg

SEQ ID NO: 142684 - DNA, 30 bp, Artificial Sequence
  Synthetic oligonucleotide
atagcagcagctggtcgtcttggttgcggg

SEQ ID NO: 142685 - DNA, 30 bp, Artificial Sequence
  Synthetic oligonucleotide
gtgtaagggcccggaagcagttaaatcggg

SEQ ID NO: 142686 - DNA, 30 bp, Artificial Sequence
  Synthetic oligonucleotide
aagtacgtacttcacagctacacaatcggg

SEQ ID NO: 142687 - DNA, 30 bp, Artificial Sequence
  Synthetic oligonucleotide
agacagagttagcaccacacatgtatcggg

SEQ ID NO: 142688 - DNA, 30 bp, Artificial Sequence
  Synthetic oligonucleotide
ctccacgggtggtctaagtttgtcctcggg

SEQ ID NO: 142689 - DNA, 30 bp, Artificial Sequence
  Synthetic oligonucleotide
tcttcattaacggtatagtggcctctcggg

SEQ ID NO: 142690 - DNA, 29 bp, Artificial Sequence
  Synthetic oligonucleotide
ttaaggttctgcacgatattggagtcggg

SEQ ID NO: 142691 - DNA, 30 bp, Artificial Sequence
  Synthetic oligonucleotide
aacaaacgttacacaaactaaaacgtcggg

SEQ ID NO: 142692 - DNA, 30 bp, Artificial Sequence
  Synthetic oligonucleotide
ctcattaaccacactacattcattgtcggg

SEQ ID NO: 142693 - DNA, 30 bp, Artificial Sequence
  Synthetic oligonucleotide
cgaagtgttaactgcgaggcattcttcggg

SEQ ID NO: 142694 - DNA, 30 bp, Artificial Sequence
  Synthetic oligonucleotide
ggacattttctaggcgcactttggttcggg

SEQ ID NO: 142695 - DNA, 30 bp, Artificial Sequence
  Synthetic oligonucleotide
agtacctatgaaaaccccgaaataaagggg

SEQ ID NO: 142696 - DNA, 30 bp, Artificial Sequence
  Synthetic oligonucleotide
tcgtgcatccgagtgcccatcgacaagggg

SEQ ID NO: 142697 - DNA, 30 bp, Artificial Sequence
  Synthetic oligonucleotide
tcgcttctgcacaattcgagagagaagggg

SEQ ID NO: 142698 - DNA, 30 bp, Artificial Sequence
  Synthetic oligonucleotide
atccaataaaacaacaacagggggaagggg

SEQ ID NO: 142699 - DNA, 30 bp, Artificial Sequence
  Synthetic oligonucleotide
agcagagtcacatgataagtccatcagggg

SEQ ID NO: 142700 - DNA, 30 bp, Artificial Sequence
  Synthetic oligonucleotide
cgagttccggttactagcaacctagagggg

SEQ ID NO: 142701 - DNA, 30 bp, Artificial Sequence
  Synthetic oligonucleotide
cactgattgctaaaaatggatatcgagggg

SEQ ID NO: 142702 - DNA, 30 bp, Artificial Sequence
  Synthetic oligonucleotide
atcaatatgctgttcgacccgagggagggg

SEQ ID NO: 142703 - DNA, 30 bp, Artificial Sequence
  Synthetic oligonucleotide
aaaatacacgcgtgctataaaggggagggg

SEQ ID NO: 142704 - DNA, 30 bp, Artificial Sequence
  Synthetic oligonucleotide
tagtggttggtaggagataattatgagggg

SEQ ID NO: 142705 - DNA, 30 bp, Artificial Sequence
  Synthetic oligonucleotide
cagaggaaaagtttgtaacgtggatagggg

SEQ ID NO: 142706 - DNA, 30 bp, Artificial Sequence
  Synthetic oligonucleotide
cgtatacactaatctacaagactatagggg

SEQ ID NO: 142707 - DNA, 30 bp, Artificial Sequence
  Synthetic oligonucleotide
gacgaatgactcaacaactccacgtagggg

SEQ ID NO: 142708 - DNA, 30 bp, Artificial Sequence
  Synthetic oligonucleotide
ggtgcttgagccaaagtggactaaacgggg

SEQ ID NO: 142709 - DNA, 30 bp, Artificial Sequence
  Synthetic oligonucleotide
ccgtacgaatgcgttctctcgttgacgggg

SEQ ID NO: 142710 - DNA, 30 bp, Artificial Sequence
  Synthetic oligonucleotide
agggttcgccaaatggcggagcctacgggg

SEQ ID NO: 142711 - DNA, 30 bp, Artificial Sequence
  Synthetic oligonucleotide
tcaggttagagtactcttgtaactccgggg

SEQ ID NO: 142712 - DNA, 30 bp, Artificial Sequence
  Synthetic oligonucleotide
acggatgaagcggatgcagtgatagcgggg

SEQ ID NO: 142713 - DNA, 30 bp, Artificial Sequence
  Synthetic oligonucleotide
acaggcgtcggtgcacagcgaaccgcgggg

SEQ ID NO: 142714 - DNA, 30 bp, Artificial Sequence
  Synthetic oligonucleotide
ctactgctgtcagttgctcccggcgcgggg

SEQ ID NO: 142715 - DNA, 30 bp, Artificial Sequence
  Synthetic oligonucleotide
gtgtaggtcttgcttgcgctatcatcgggg

SEQ ID NO: 142716 - DNA, 30 bp, Artificial Sequence
  Synthetic oligonucleotide
ctcatacgctcatagagaaactgctcgggg

SEQ ID NO: 142717 - DNA, 30 bp, Artificial Sequence
  Synthetic oligonucleotide
cttacaaccgagctgcaatccgcgtcgggg

SEQ ID NO: 142718 - DNA, 30 bp, Artificial Sequence
  Synthetic oligonucleotide
ggtgtggttgtaaacggtatatggtcgggg

SEQ ID NO: 142719 - DNA, 30 bp, Artificial Sequence
  Synthetic oligonucleotide
agagggggcgcgggccgcttgggttcgggg

SEQ ID NO: 142720 - DNA, 30 bp, Artificial Sequence
  Synthetic oligonucleotide
tccaactggtgattaaccggcgtttcgggg

SEQ ID NO: 142721 - DNA, 30 bp, Artificial Sequence
  Synthetic oligonucleotide
gtaaacatggctatgggatctcaaaggggg

SEQ ID NO: 142722 - DNA, 30 bp, Artificial Sequence
  Synthetic oligonucleotide
tacacttgtgttcctctaaagcgaaggggg

SEQ ID NO: 142723 - DNA, 30 bp, Artificial Sequence
  Synthetic oligonucleotide
gcttgggagacatttcagcaggcgaggggg

SEQ ID NO: 142724 - DNA, 30 bp, Artificial Sequence
  Synthetic oligonucleotide
aggttgcactcttcacgcaggcaacggggg

SEQ ID NO: 142725 - DNA, 30 bp, Artificial Sequence
  Synthetic oligonucleotide
cgctatggggaatcgtatcaaaaccggggg

SEQ ID NO: 142726 - DNA, 30 bp, Artificial Sequence
  Synthetic oligonucleotide
caaaaagcttaaatgtaaggttgccggggg

SEQ ID NO: 142727 - DNA, 30 bp, Artificial Sequence
  Synthetic oligonucleotide
tagttactccggttaggaacccagcggggg

SEQ ID NO: 142728 - DNA, 30 bp, Artificial Sequence
  Synthetic oligonucleotide
cgtatcaaatagaaagcatagattcggggg

SEQ ID NO: 142729 - DNA, 30 bp, Artificial Sequence
  Synthetic oligonucleotide
tcgtctgtgaatgcatcactgagagggggg

SEQ ID NO: 142730 - DNA, 30 bp, Artificial Sequence
  Synthetic oligonucleotide
actgtaagattcgaagattagtgcgggggg

SEQ ID NO: 142731 - DNA, 30 bp, Artificial Sequence
  Synthetic oligonucleotide
tcaccaaggtcacatggaatatcggggggg

SEQ ID NO: 142732 - DNA, 30 bp, Artificial Sequence
  Synthetic oligonucleotide
ttaaatagtcatgcctggatatctgggggg

SEQ ID NO: 142733 - DNA, 30 bp, Artificial Sequence
  Synthetic oligonucleotide
tcagttgaagaggatcgatctccatggggg

SEQ ID NO: 142734 - DNA, 30 bp, Artificial Sequence
  Synthetic oligonucleotide
agcataggatcagatatgccagtctggggg

SEQ ID NO: 142735 - DNA, 30 bp, Artificial Sequence
  Synthetic oligonucleotide
ggatgcccgtactcgtcggggccgtggggg

SEQ ID NO: 142736 - DNA, 30 bp, Artificial Sequence
  Synthetic oligonucleotide
aagcggcgggcccataaccaccccatgggg

SEQ ID NO: 142737 - DNA, 30 bp, Artificial Sequence
  Synthetic oligonucleotide
gatgagcagtcccgccgggaaagactgggg

SEQ ID NO: 142738 - DNA, 30 bp, Artificial Sequence
  Synthetic oligonucleotide
gccactcaggcagaggagtgatgactgggg

SEQ ID NO: 142739 - DNA, 30 bp, Artificial Sequence
  Synthetic oligonucleotide
agacgtttagttacgaagagttgcctgggg

SEQ ID NO: 142740 - DNA, 30 bp, Artificial Sequence
  Synthetic oligonucleotide
atagcgatccttttagaggtagcgctgggg

SEQ ID NO: 142741 - DNA, 30 bp, Artificial Sequence
  Synthetic oligonucleotide
tcacgggccgcagttcgtgtgatgctgggg

SEQ ID NO: 142742 - DNA, 30 bp, Artificial Sequence
  Synthetic oligonucleotide
ccaatcgttcggtgacatgctctgctgggg

SEQ ID NO: 142743 - DNA, 30 bp, Artificial Sequence
  Synthetic oligonucleotide
tcccgcataatctcttgagggtgagtgggg

SEQ ID NO: 142744 - DNA, 30 bp, Artificial Sequence
  Synthetic oligonucleotide
ttcaatgtaaaatgccatgtttgcgtgggg

SEQ ID NO: 142745 - DNA, 30 bp, Artificial Sequence
  Synthetic oligonucleotide
ggcatccgcgaagctaaacaagaggtgggg

SEQ ID NO: 142746 - DNA, 30 bp, Artificial Sequence
  Synthetic oligonucleotide
tggcgactgttggcgaatggaaggttgggg

SEQ ID NO: 142747 - DNA, 30 bp, Artificial Sequence
  Synthetic oligonucleotide
tatgtaggaaggggtttatgaaaaaatggg

SEQ ID NO: 142748 - DNA, 30 bp, Artificial Sequence
  Synthetic oligonucleotide
cgtctagttaaaatagtcgtgtcaaatggg

SEQ ID NO: 142749 - DNA, 30 bp, Artificial Sequence
  Synthetic oligonucleotide
ggcaaatataataaccacccacgaaatggg

SEQ ID NO: 142750 - DNA, 30 bp, Artificial Sequence
  Synthetic oligonucleotide
gataattgagaatatcgggcatacaatggg

SEQ ID NO: 142751 - DNA, 30 bp, Artificial Sequence
  Synthetic oligonucleotide
caaacgtcttcacaatacaagtataatggg

SEQ ID NO: 142752 - DNA, 30 bp, Artificial Sequence
  Synthetic oligonucleotide
atgaatcaccggagtcaatgtaaccatggg

SEQ ID NO: 142753 - DNA, 30 bp, Artificial Sequence
  Synthetic oligonucleotide
gcaaagttcgacatagctttgccccatggg

SEQ ID NO: 142754 - DNA, 30 bp, Artificial Sequence
  Synthetic oligonucleotide
tattggaagaaggttgtcgacgatcatggg

SEQ ID NO: 142755 - DNA, 30 bp, Artificial Sequence
  Synthetic oligonucleotide
tggggtctctgcctatccaattgtcatggg

SEQ ID NO: 142756 - DNA, 30 bp, Artificial Sequence
  Synthetic oligonucleotide
ctccttgggtacggtcgtaaagaggatggg

SEQ ID NO: 142757 - DNA, 30 bp, Artificial Sequence
  Synthetic oligonucleotide
tggtgtaaacgtaaacttattcatgatggg

SEQ ID NO: 142758 - DNA, 30 bp, Artificial Sequence
  Synthetic oligonucleotide
cgggcgccctcggataagggtagctatggg

SEQ ID NO: 142759 - DNA, 30 bp, Artificial Sequence
  Synthetic oligonucleotide
aggcacccgaacatgtctcggtcgtatggg

SEQ ID NO: 142760 - DNA, 30 bp, Artificial Sequence
  Synthetic oligonucleotide
accatgcgtaacatcaccactaggtatggg

SEQ ID NO: 142761 - DNA, 30 bp, Artificial Sequence
  Synthetic oligonucleotide
gcaagagagagcgtacggtggtaaactggg

SEQ ID NO: 142762 - DNA, 30 bp, Artificial Sequence
  Synthetic oligonucleotide
gactgcgtcaattcatcttcccagactggg

SEQ ID NO: 142763 - DNA, 30 bp, Artificial Sequence
  Synthetic oligonucleotide
ccctaaggtatgcgagtctaatagactggg

SEQ ID NO: 142764 - DNA, 30 bp, Artificial Sequence
  Synthetic oligonucleotide
tggacccgattggcttgagcaacgactggg

SEQ ID NO: 142765 - DNA, 30 bp, Artificial Sequence
  Synthetic oligonucleotide
ctgccaacgacgacacatacacggactggg

SEQ ID NO: 142766 - DNA, 30 bp, Artificial Sequence
  Synthetic oligonucleotide
tgcgggaccggaggtttctacctgactggg

SEQ ID NO: 142767 - DNA, 30 bp, Artificial Sequence
  Synthetic oligonucleotide
cagtccgctcgagattttagtgtacctggg

SEQ ID NO: 142768 - DNA, 30 bp, Artificial Sequence
  Synthetic oligonucleotide
gtatatccgaaccttccaggtaaccctggg

SEQ ID NO: 142769 - DNA, 30 bp, Artificial Sequence
  Synthetic oligonucleotide
aaggttgttcgaataatcggggaagctggg

SEQ ID NO: 142770 - DNA, 30 bp, Artificial Sequence
  Synthetic oligonucleotide
tcacgttaaagaggttacacatcggctggg

SEQ ID NO: 142771 - DNA, 30 bp, Artificial Sequence
  Synthetic oligonucleotide
atgtcgtggacgcttacatatgtggctggg

SEQ ID NO: 142772 - DNA, 30 bp, Artificial Sequence
  Synthetic oligonucleotide
caacttaggccctacgttgacgtatctggg

SEQ ID NO: 142773 - DNA, 30 bp, Artificial Sequence
  Synthetic oligonucleotide
tgaaaatttgaaagggtcaatcggtctggg

SEQ ID NO: 142774 - DNA, 30 bp, Artificial Sequence
  Synthetic oligonucleotide
agatatcatgtttgtggtaatcggtctggg

SEQ ID NO: 142775 - DNA, 30 bp, Artificial Sequence
  Synthetic oligonucleotide
tttggcgacttagtggtattgacaagtggg

SEQ ID NO: 142776 - DNA, 30 bp, Artificial Sequence
  Synthetic oligonucleotide
gcggaggcgccggataggtggatgcgtggg

SEQ ID NO: 142777 - DNA, 30 bp, Artificial Sequence
  Synthetic oligonucleotide
ttgggggaaggcggtctgatgcgtcgtggg

SEQ ID NO: 142778 - DNA, 30 bp, Artificial Sequence
  Synthetic oligonucleotide
tgatctcggtacaataggatcgaatgtggg

SEQ ID NO: 142779 - DNA, 30 bp, Artificial Sequence
  Synthetic oligonucleotide
tggtctaaaggcgtgcagcttgtatgtggg

SEQ ID NO: 142780 - DNA, 30 bp, Artificial Sequence
  Synthetic oligonucleotide
cgagtgcgattgctattacagacctgtggg

SEQ ID NO: 142781 - DNA, 30 bp, Artificial Sequence
  Synthetic oligonucleotide
taaagagtgctagaggctcgcagctgtggg

SEQ ID NO: 142782 - DNA, 30 bp, Artificial Sequence
  Synthetic oligonucleotide
cgtcctgttccaagggcgaaatattgtggg

SEQ ID NO: 142783 - DNA, 30 bp, Artificial Sequence
  Synthetic oligonucleotide
gggggaaggccgccaggaggcacaattggg

SEQ ID NO: 142784 - DNA, 30 bp, Artificial Sequence
  Synthetic oligonucleotide
gttaaacaaagttacacacgtcgaattggg

SEQ ID NO: 142785 - DNA, 30 bp, Artificial Sequence
  Synthetic oligonucleotide
ccagtcgaacttaggactagggtgattggg

SEQ ID NO: 142786 - DNA, 30 bp, Artificial Sequence
  Synthetic oligonucleotide
gacggttaggctatagcatcttgacttggg

SEQ ID NO: 142787 - DNA, 30 bp, Artificial Sequence
  Synthetic oligonucleotide
ggtaaaagtgtcaccgtatgctatgttggg

SEQ ID NO: 142788 - DNA, 30 bp, Artificial Sequence
  Synthetic oligonucleotide
gcccattgatatacgacatctgcaaaatgg

SEQ ID NO: 142789 - DNA, 30 bp, Artificial Sequence
  Synthetic oligonucleotide
tgtaggaccgtgccggttacaggaaaatgg

SEQ ID NO: 142790 - DNA, 30 bp, Artificial Sequence
  Synthetic oligonucleotide
cgacagcgtcgttgagcataacgcaaatgg

SEQ ID NO: 142791 - DNA, 30 bp, Artificial Sequence
  Synthetic oligonucleotide
aaataggaagacctaggtcgtttgaaatgg

SEQ ID NO: 142792 - DNA, 30 bp, Artificial Sequence
  Synthetic oligonucleotide
acgtcatggggagtagttggtattaaatgg

SEQ ID NO: 142793 - DNA, 30 bp, Artificial Sequence
  Synthetic oligonucleotide
aagactcaccagtcttacaacgagcaatgg

SEQ ID NO: 142794 - DNA, 30 bp, Artificial Sequence
  Synthetic oligonucleotide
tctaattgtgcggaagacatcaggcaatgg

SEQ ID NO: 142795 - DNA, 30 bp, Artificial Sequence
  Synthetic oligonucleotide
tgataacgtgcgaacactgacatgcaatgg

SEQ ID NO: 142796 - DNA, 30 bp, Artificial Sequence
  Synthetic oligonucleotide
atgacaggttactagtgtcatattcaatgg

SEQ ID NO: 142797 - DNA, 30 bp, Artificial Sequence
  Synthetic oligonucleotide
gaaagcacacgcctctttatgacagaatgg

SEQ ID NO: 142798 - DNA, 30 bp, Artificial Sequence
  Synthetic oligonucleotide
acggcgtgagggatcttgatcctagaatgg

SEQ ID NO: 142799 - DNA, 30 bp, Artificial Sequence
  Synthetic oligonucleotide
cgagtccgcattccagtaccggtagaatgg

SEQ ID NO: 142800 - DNA, 30 bp, Artificial Sequence
  Synthetic oligonucleotide
cgggctccccggtgatcattgagcgaatgg

SEQ ID NO: 142801 - DNA, 30 bp, Artificial Sequence
  Synthetic oligonucleotide
tgcagcaacttgaggcgaaacgtggaatgg

SEQ ID NO: 142802 - DNA, 30 bp, Artificial Sequence
  Synthetic oligonucleotide
aaccttgcgacacaatgacacgctgaatgg

SEQ ID NO: 142803 - DNA, 30 bp, Artificial Sequence
  Synthetic oligonucleotide
agccgtggagtacgccacaatggctaatgg

SEQ ID NO: 142804 - DNA, 30 bp, Artificial Sequence
  Synthetic oligonucleotide
ttgaactgctacccaaacttcgtctaatgg

SEQ ID NO: 142805 - DNA, 30 bp, Artificial Sequence
  Synthetic oligonucleotide
tcacaatttgggccatgttctacgtaatgg

SEQ ID NO: 142806 - DNA, 31 bp, Artificial Sequence
  Synthetic oligonucleotide
ctcgagcatatggagtgttcgatcgtaatgg

SEQ ID NO: 142807 - DNA, 30 bp, Artificial Sequence
  Synthetic oligonucleotide
tgtcgaacacgcttgaaaacagtttaatgg

SEQ ID NO: 142808 - DNA, 30 bp, Artificial Sequence
  Synthetic oligonucleotide
ccaatactcggctatgccacccagacatgg

SEQ ID NO: 142809 - DNA, 30 bp, Artificial Sequence
  Synthetic oligonucleotide
taaaccgtggcaggggtgctctttacatgg

SEQ ID NO: 142810 - DNA, 30 bp, Artificial Sequence
  Synthetic oligonucleotide
tctgggcacgggaaactgtatcaaccatgg

SEQ ID NO: 142811 - DNA, 30 bp, Artificial Sequence
  Synthetic oligonucleotide
agggtcggaaacctagctgaatagccatgg

SEQ ID NO: 142812 - DNA, 30 bp, Artificial Sequence
  Synthetic oligonucleotide
aaatcgatggcaggtggggcatccgcatgg

SEQ ID NO: 142813 - DNA, 29 bp, Artificial Sequence
  Synthetic oligonucleotide
accacctgtggataaacacgagggcatgg

SEQ ID NO: 142814 - DNA, 30 bp, Artificial Sequence
  Synthetic oligonucleotide
agaatcaagtctgtacgttttagatcatgg

SEQ ID NO: 142815 - DNA, 30 bp, Artificial Sequence
  Synthetic oligonucleotide
ggcgataggtacgaaggcgtccgatcatgg

SEQ ID NO: 142816 - DNA, 30 bp, Artificial Sequence
  Synthetic oligonucleotide
tcgcgataatagagaatagtttcaagatgg

SEQ ID NO: 142817 - DNA, 30 bp, Artificial Sequence
  Synthetic oligonucleotide
gtgtaccaaacagggtcgcacagaagatgg

SEQ ID NO: 142818 - DNA, 30 bp, Artificial Sequence
  Synthetic oligonucleotide
tttaggtattaaccgcctaggacgagatgg

SEQ ID NO: 142819 - DNA, 30 bp, Artificial Sequence
  Synthetic oligonucleotide
agaggggagtacccggtgctggtacgatgg

SEQ ID NO: 142820 - DNA, 27 bp, Artificial Sequence
  Synthetic oligonucleotide
ttctcaactggagaatacacgcgatgg

SEQ ID NO: 142821 - DNA, 30 bp, Artificial Sequence
  Synthetic oligonucleotide
cacctgggcgtacactacggaaaaggatgg

SEQ ID NO: 142822 - DNA, 30 bp, Artificial Sequence
  Synthetic oligonucleotide
ctcactatctatcaaacgctgtgcggatgg

SEQ ID NO: 142823 - DNA, 30 bp, Artificial Sequence
  Synthetic oligonucleotide
gaggtcatatggaataattaaggatgatgg

SEQ ID NO: 142824 - DNA, 30 bp, Artificial Sequence
  Synthetic oligonucleotide
aggctccaaggtgctgggaccatatgatgg

SEQ ID NO: 142825 - DNA, 30 bp, Artificial Sequence
  Synthetic oligonucleotide
ggacatgaccaagaacctaatatatgatgg

SEQ ID NO: 142826 - DNA, 30 bp, Artificial Sequence
  Synthetic oligonucleotide
aacgatagagataaagcgatatactgatgg

SEQ ID NO: 142827 - DNA, 30 bp, Artificial Sequence
  Synthetic oligonucleotide
gtgtactcgaacacgcattcggtttgatgg

SEQ ID NO: 142828 - DNA, 30 bp, Artificial Sequence
  Synthetic oligonucleotide
caatgcgtagaagcccggaatcccatatgg

SEQ ID NO: 142829 - DNA, 30 bp, Artificial Sequence
  Synthetic oligonucleotide
tccacaccggataaccgtaagcagatatgg

SEQ ID NO: 142830 - DNA, 30 bp, Artificial Sequence
  Synthetic oligonucleotide
tgaggagtcatcactggaagtctgatatgg

SEQ ID NO: 142831 - DNA, 30 bp, Artificial Sequence
  Synthetic oligonucleotide
cacgatcgattccggcggatatcactatgg

SEQ ID NO: 142832 - DNA, 30 bp, Artificial Sequence
  Synthetic oligonucleotide
gcgactgtatccctctgacaaccagtatgg

SEQ ID NO: 142833 - DNA, 30 bp, Artificial Sequence
  Synthetic oligonucleotide
atcccagccaccctgagttgatccgtatgg

SEQ ID NO: 142834 - DNA, 30 bp, Artificial Sequence
  Synthetic oligonucleotide
gcgttatgcgtaccgtcggtcagcgtatgg

SEQ ID NO: 142835 - DNA, 30 bp, Artificial Sequence
  Synthetic oligonucleotide
agaaccatctgaaccgacatgccggtatgg

SEQ ID NO: 142836 - DNA, 30 bp, Artificial Sequence
  Synthetic oligonucleotide
ggagccatagcgtcaatgagatcggtatgg

SEQ ID NO: 142837 - DNA, 30 bp, Artificial Sequence
  Synthetic oligonucleotide
catgtatccatgggaacttggcttgtatgg

SEQ ID NO: 142838 - DNA, 30 bp, Artificial Sequence
  Synthetic oligonucleotide
ggatcaactaagctcttgttccgattatgg

SEQ ID NO: 142839 - DNA, 30 bp, Artificial Sequence
  Synthetic oligonucleotide
tggcatacgtggggtatctggcccttatgg

SEQ ID NO: 142840 - DNA, 29 bp, Artificial Sequence
  Synthetic oligonucleotide
gctaacttgttgggagagtcagcttatgg

SEQ ID NO: 142841 - DNA, 30 bp, Artificial Sequence
  Synthetic oligonucleotide
tcttaatcatgaaaagagcatgtgttatgg

SEQ ID NO: 142842 - DNA, 30 bp, Artificial Sequence
  Synthetic oligonucleotide
cggaagattggtagtaggttattgttatgg

SEQ ID NO: 142843 - DNA, 30 bp, Artificial Sequence
  Synthetic oligonucleotide
cacgaatgtctggaggttgctcacaactgg

SEQ ID NO: 142844 - DNA, 30 bp, Artificial Sequence
  Synthetic oligonucleotide
aagtgggtagctatcatgcaatacaactgg

SEQ ID NO: 142845 - DNA, 30 bp, Artificial Sequence
  Synthetic oligonucleotide
ggagtcgacggtacaccccacgaagactgg

SEQ ID NO: 142846 - DNA, 30 bp, Artificial Sequence
  Synthetic oligonucleotide
gttactacggaactacttctccacgactgg

SEQ ID NO: 142847 - DNA, 30 bp, Artificial Sequence
  Synthetic oligonucleotide
ttagacaagggacctaaaatactcgactgg

SEQ ID NO: 142848 - DNA, 30 bp, Artificial Sequence
  Synthetic oligonucleotide
ttgtcagctggctaagccataaactactgg

SEQ ID NO: 142849 - DNA, 30 bp, Artificial Sequence
  Synthetic oligonucleotide
aggcagccaatctaggctatgatgtactgg

SEQ ID NO: 142850 - DNA, 30 bp, Artificial Sequence
  Synthetic oligonucleotide
aaacagcggacgagtcaagggggttactgg

SEQ ID NO: 142851 - DNA, 30 bp, Artificial Sequence
  Synthetic oligonucleotide
tgataacgggatgtcaacttcattacctgg

SEQ ID NO: 142852 - DNA, 30 bp, Artificial Sequence
  Synthetic oligonucleotide
cctaactatttccttcaacctgcaccctgg

SEQ ID NO: 142853 - DNA, 30 bp, Artificial Sequence
  Synthetic oligonucleotide
aggcgccaccggcgaaggtgaaacccctgg

SEQ ID NO: 142854 - DNA, 30 bp, Artificial Sequence
  Synthetic oligonucleotide
ggttgcggcgttgtgccatgacaagcctgg

SEQ ID NO: 142855 - DNA, 30 bp, Artificial Sequence
  Synthetic oligonucleotide
gagcacactcaactgcgagcaccagcctgg

SEQ ID NO: 142856 - DNA, 30 bp, Artificial Sequence
  Synthetic oligonucleotide
ctaaagacatgcaattgtttgatcgcctgg

SEQ ID NO: 142857 - DNA, 30 bp, Artificial Sequence
  Synthetic oligonucleotide
tccggcaattcaaacgaggcggaggcctgg

SEQ ID NO: 142858 - DNA, 30 bp, Artificial Sequence
  Synthetic oligonucleotide
cgtaagtggaaaggctcgtaataggcctgg

SEQ ID NO: 142859 - DNA, 31 bp, Artificial Sequence
  Synthetic oligonucleotide
aaaacatgacgtttcaatgcggattgcctgg

SEQ ID NO: 142860 - DNA, 30 bp, Artificial Sequence
  Synthetic oligonucleotide
gcctggtgtcgaacagacgatttatcctgg

SEQ ID NO: 142861 - DNA, 30 bp, Artificial Sequence
  Synthetic oligonucleotide
aaaatgccgattgaggaacgtatctcctgg

SEQ ID NO: 142862 - DNA, 30 bp, Artificial Sequence
  Synthetic oligonucleotide
aagttgacgtgacttgtcccggaaagctgg

SEQ ID NO: 142863 - DNA, 30 bp, Artificial Sequence
  Synthetic oligonucleotide
agcagtaggtatataccaactacaagctgg

SEQ ID NO: 142864 - DNA, 30 bp, Artificial Sequence
  Synthetic oligonucleotide
cttggtacgaccccatcgtcggccagctgg

SEQ ID NO: 142865 - DNA, 30 bp, Artificial Sequence
  Synthetic oligonucleotide
acccccacttgaacaagagaggcgagctgg

SEQ ID NO: 142866 - DNA, 30 bp, Artificial Sequence
  Synthetic oligonucleotide
ccttcgtccttaccatttaggtcgagctgg

SEQ ID NO: 142867 - DNA, 30 bp, Artificial Sequence
  Synthetic oligonucleotide
ttccgcaactcgggaagcaggatgagctgg

SEQ ID NO: 142868 - DNA, 30 bp, Artificial Sequence
  Synthetic oligonucleotide
cgttcattaatattatagtgtttgagctgg

SEQ ID NO: 142869 - DNA, 30 bp, Artificial Sequence
  Synthetic oligonucleotide
aatccgacgtgatcggctatctcccgctgg

SEQ ID NO: 142870 - DNA, 30 bp, Artificial Sequence
  Synthetic oligonucleotide
ggataaaggttttactgcgctctgcgctgg

SEQ ID NO: 142871 - DNA, 30 bp, Artificial Sequence
  Synthetic oligonucleotide
aaataaagggaaagatagcgcttaggctgg

SEQ ID NO: 142872 - DNA, 30 bp, Artificial Sequence
  Synthetic oligonucleotide
agagggatttcgaatcccagaggcggctgg

SEQ ID NO: 142873 - DNA, 30 bp, Artificial Sequence
  Synthetic oligonucleotide
actcaccctaattacgattgggctggctgg

SEQ ID NO: 142874 - DNA, 30 bp, Artificial Sequence
  Synthetic oligonucleotide
atcaggcggtgaaatccaaacctatgctgg

SEQ ID NO: 142875 - DNA, 30 bp, Artificial Sequence
  Synthetic oligonucleotide
tgccagcggatcgcgtagcgggggtgctgg

SEQ ID NO: 142876 - DNA, 30 bp, Artificial Sequence
  Synthetic oligonucleotide
tacgggacaggaactcgtaagcattgctgg

SEQ ID NO: 142877 - DNA, 30 bp, Artificial Sequence
  Synthetic oligonucleotide
ccataacgcgtgctcggaagacaaatctgg

SEQ ID NO: 142878 - DNA, 30 bp, Artificial Sequence
  Synthetic oligonucleotide
acatgccaagaacaaactgtagagatctgg

SEQ ID NO: 142879 - DNA, 30 bp, Artificial Sequence
  Synthetic oligonucleotide
gcactcgaaggaacatccttgtcgatctgg

SEQ ID NO: 142880 - DNA, 30 bp, Artificial Sequence
  Synthetic oligonucleotide
tccgaccttcaattatgaaatgggatctgg

SEQ ID NO: 142881 - DNA, 30 bp, Artificial Sequence
  Synthetic oligonucleotide
agtcttgatacctccgaaagtgggatctgg

SEQ ID NO: 142882 - DNA, 30 bp, Artificial Sequence
  Synthetic oligonucleotide
acaactaggttcatcgaatcgttgatctgg

SEQ ID NO: 142883 - DNA, 30 bp, Artificial Sequence
  Synthetic oligonucleotide
gttcggctggaccagtagaaccgactctgg

SEQ ID NO: 142884 - DNA, 30 bp, Artificial Sequence
  Synthetic oligonucleotide
tgggtagcgtggcgctacaatttcctctgg

SEQ ID NO: 142885 - DNA, 30 bp, Artificial Sequence
  Synthetic oligonucleotide
gccagtgccctcaaactaagtctgctctgg

SEQ ID NO: 142886 - DNA, 30 bp, Artificial Sequence
  Synthetic oligonucleotide
ccgcgacctgcttacggtaccgtgctctgg

SEQ ID NO: 142887 - DNA, 30 bp, Artificial Sequence
  Synthetic oligonucleotide
ggctggtgtactcgttagcttagagtctgg

SEQ ID NO: 142888 - DNA, 30 bp, Artificial Sequence
  Synthetic oligonucleotide
aaagattcggcgaggcgcattcgcgtctgg

SEQ ID NO: 142889 - DNA, 30 bp, Artificial Sequence
  Synthetic oligonucleotide
tcggtatgactgtgtggtgacagtgtctgg

SEQ ID NO: 142890 - DNA, 30 bp, Artificial Sequence
  Synthetic oligonucleotide
gcccaccaaacgtcaggacaaagtttctgg

SEQ ID NO: 142891 - DNA, 30 bp, Artificial Sequence
  Synthetic oligonucleotide
gcaaaactagggaacaatcgatttttctgg

SEQ ID NO: 142892 - DNA, 30 bp, Artificial Sequence
  Synthetic oligonucleotide
agaggcggtgtgttcggtggtggaaagtgg

SEQ ID NO: 142893 - DNA, 30 bp, Artificial Sequence
  Synthetic oligonucleotide
cagattaattatgcaggctcggacaagtgg

SEQ ID NO: 142894 - DNA, 30 bp, Artificial Sequence
  Synthetic oligonucleotide
gggccgtatgatcatctttacgccaagtgg

SEQ ID NO: 142895 - DNA, 30 bp, Artificial Sequence
  Synthetic oligonucleotide
ccgcgtatcacgagatgttttgagaagtgg

SEQ ID NO: 142896 - DNA, 30 bp, Artificial Sequence
  Synthetic oligonucleotide
cagattggatttaaactggtttggaagtgg

SEQ ID NO: 142897 - DNA, 30 bp, Artificial Sequence
  Synthetic oligonucleotide
gtgccgataggagttgatagcgaacagtgg

SEQ ID NO: 142898 - DNA, 30 bp, Artificial Sequence
  Synthetic oligonucleotide
acacacactctctaaagtagggcacagtgg

SEQ ID NO: 142899 - DNA, 30 bp, Artificial Sequence
  Synthetic oligonucleotide
tgcatcaatattttggcatgttgcgagtgg

SEQ ID NO: 142900 - DNA, 30 bp, Artificial Sequence
  Synthetic oligonucleotide
gagctagacatgatataacccctggagtgg

SEQ ID NO: 142901 - DNA, 30 bp, Artificial Sequence
  Synthetic oligonucleotide
taatatcatcacatggatgtttatgagtgg

SEQ ID NO: 142902 - DNA, 30 bp, Artificial Sequence
  Synthetic oligonucleotide
gcttctgagacggaatactttcaatagtgg

SEQ ID NO: 142903 - DNA, 30 bp, Artificial Sequence
  Synthetic oligonucleotide
cgcgttacgttgtaccttacgtgatagtgg

SEQ ID NO: 142904 - DNA, 30 bp, Artificial Sequence
  Synthetic oligonucleotide
ttataccaatactacacgtgaacctagtgg

SEQ ID NO: 142905 - DNA, 30 bp, Artificial Sequence
  Synthetic oligonucleotide
tgaccctatgaggctcgtcagatcacgtgg

SEQ ID NO: 142906 - DNA, 30 bp, Artificial Sequence
  Synthetic oligonucleotide
gctgtgggaacggtagtcgttcaagcgtgg

SEQ ID NO: 142907 - DNA, 30 bp, Artificial Sequence
  Synthetic oligonucleotide
agttagagtctcgccaacgtattatcgtgg

SEQ ID NO: 142908 - DNA, 30 bp, Artificial Sequence
  Synthetic oligonucleotide
ggttcactagacattaagccttgctcgtgg

SEQ ID NO: 142909 - DNA, 30 bp, Artificial Sequence
  Synthetic oligonucleotide
cgtattcgagggattccgataacttcgtgg

SEQ ID NO: 142910 - DNA, 30 bp, Artificial Sequence
  Synthetic oligonucleotide
ttgtcaatggggccgtgatgcacttcgtgg

SEQ ID NO: 142911 - DNA, 30 bp, Artificial Sequence
  Synthetic oligonucleotide
ttgatcctggatgtatgtagtcgttcgtgg

SEQ ID NO: 142912 - DNA, 30 bp, Artificial Sequence
  Synthetic oligonucleotide
gggctagatcgcgaggacttgttaaggtgg

SEQ ID NO: 142913 - DNA, 30 bp, Artificial Sequence
  Synthetic oligonucleotide
cacgaaataaactgttagaaggacaggtgg

SEQ ID NO: 142914 - DNA, 30 bp, Artificial Sequence
  Synthetic oligonucleotide
agtgaggaaccactgagcatccataggtgg

SEQ ID NO: 142915 - DNA, 30 bp, Artificial Sequence
  Synthetic oligonucleotide
atttgcatattcaagacagccactaggtgg

SEQ ID NO: 142916 - DNA, 30 bp, Artificial Sequence
  Synthetic oligonucleotide
gatgagaaattcgcatttgccggtaggtgg

SEQ ID NO: 142917 - DNA, 30 bp, Artificial Sequence
  Synthetic oligonucleotide
gctgaagtgcgaaggacttttaaacggtgg

SEQ ID NO: 142918 - DNA, 30 bp, Artificial Sequence
  Synthetic oligonucleotide
cagaatcagatgaacagaaaaatacggtgg

SEQ ID NO: 142919 - DNA, 30 bp, Artificial Sequence
  Synthetic oligonucleotide
tgcggtctcatccctttgagtactgggtgg

SEQ ID NO: 142920 - DNA, 30 bp, Artificial Sequence
  Synthetic oligonucleotide
agtctggcctaatatgttactgctgggtgg

SEQ ID NO: 142921 - DNA, 30 bp, Artificial Sequence
  Synthetic oligonucleotide
ataggctaaacacttaatggtcagtggtgg

SEQ ID NO: 142922 - DNA, 30 bp, Artificial Sequence
  Synthetic oligonucleotide
cttaggaatgtgttccccgatgtgtggtgg

SEQ ID NO: 142923 - DNA, 30 bp, Artificial Sequence
  Synthetic oligonucleotide
cgcattcggccgtcgctggtactttggtgg

SEQ ID NO: 142924 - DNA, 30 bp, Artificial Sequence
  Synthetic oligonucleotide
atcgtgtgtttcgattactgttcgatgtgg

SEQ ID NO: 142925 - DNA, 30 bp, Artificial Sequence
  Synthetic oligonucleotide
gacagattaacgctaatgtgtagtatgtgg

SEQ ID NO: 142926 - DNA, 30 bp, Artificial Sequence
  Synthetic oligonucleotide
tgataaatagttagggagggatccctgtgg

SEQ ID NO: 142927 - DNA, 30 bp, Artificial Sequence
  Synthetic oligonucleotide
ccgccgaaaaattaaagcaagctgctgtgg

SEQ ID NO: 142928 - DNA, 30 bp, Artificial Sequence
  Synthetic oligonucleotide
agaagaaacttaataggggcaaaggtgtgg

SEQ ID NO: 142929 - DNA, 30 bp, Artificial Sequence
  Synthetic oligonucleotide
gcatccgttctgcgtccgcgatcaaattgg

SEQ ID NO: 142930 - DNA, 30 bp, Artificial Sequence
  Synthetic oligonucleotide
cgttgagcctgaagctatagggcgaattgg

SEQ ID NO: 142931 - DNA, 30 bp, Artificial Sequence
  Synthetic oligonucleotide
cctcccgtcaatcaatataataggaattgg

SEQ ID NO: 142932 - DNA, 30 bp, Artificial Sequence
  Synthetic oligonucleotide
caggtgtcaacaggtaaagcggtgaattgg

SEQ ID NO: 142933 - DNA, 30 bp, Artificial Sequence
  Synthetic oligonucleotide
ctcactacatagagatcagcttataattgg

SEQ ID NO: 142934 - DNA, 30 bp, Artificial Sequence
  Synthetic oligonucleotide
gggctggttcaactgcccatgccacattgg

SEQ ID NO: 142935 - DNA, 30 bp, Artificial Sequence
  Synthetic oligonucleotide
agctgataactgccaccgtaaggtcattgg

SEQ ID NO: 142936 - DNA, 30 bp, Artificial Sequence
  Synthetic oligonucleotide
aggtatgcgtctgaggtacggcaagattgg

SEQ ID NO: 142937 - DNA, 30 bp, Artificial Sequence
  Synthetic oligonucleotide
aagtgaatgctcgaaaactacccagattgg

SEQ ID NO: 142938 - DNA, 30 bp, Artificial Sequence
  Synthetic oligonucleotide
gcttatagggggggttcgtgtccagattgg

SEQ ID NO: 142939 - DNA, 30 bp, Artificial Sequence
  Synthetic oligonucleotide
gccctacatatctggatccttcacgattgg

SEQ ID NO: 142940 - DNA, 30 bp, Artificial Sequence
  Synthetic oligonucleotide
cactgtttgagctcgtcctgataggattgg

SEQ ID NO: 142941 - DNA, 30 bp, Artificial Sequence
  Synthetic oligonucleotide
ttgcgcatgctcaccttgcgaagggattgg

SEQ ID NO: 142942 - DNA, 30 bp, Artificial Sequence
  Synthetic oligonucleotide
catgtgctgcgtagctccccgatatattgg

SEQ ID NO: 142943 - DNA, 30 bp, Artificial Sequence
  Synthetic oligonucleotide
gtcaacttcatcacataggggtcctattgg

SEQ ID NO: 142944 - DNA, 30 bp, Artificial Sequence
  Synthetic oligonucleotide
ttcgcgccgagctgtaagtgcgggtattgg

SEQ ID NO: 142945 - DNA, 30 bp, Artificial Sequence
  Synthetic oligonucleotide
tcggctgtacctttaagtggtcattattgg

SEQ ID NO: 142946 - DNA, 30 bp, Artificial Sequence
  Synthetic oligonucleotide
aaggcagccgcggcaggagcacaaacttgg

SEQ ID NO: 142947 - DNA, 30 bp, Artificial Sequence
  Synthetic oligonucleotide
ataggtctcgctcatcgtaagtcgacttgg

SEQ ID NO: 142948 - DNA, 30 bp, Artificial Sequence
  Synthetic oligonucleotide
catcgacttatctagtgcttgtcgacttgg

SEQ ID NO: 142949 - DNA, 30 bp, Artificial Sequence
  Synthetic oligonucleotide
cgataaagcatagagattacgggtacttgg

SEQ ID NO: 142950 - DNA, 30 bp, Artificial Sequence
  Synthetic oligonucleotide
gcacgcgggaagcatcattccgctccttgg

SEQ ID NO: 142951 - DNA, 30 bp, Artificial Sequence
  Synthetic oligonucleotide
agagcggatctatattaaaagggcgcttgg

SEQ ID NO: 142952 - DNA, 30 bp, Artificial Sequence
  Synthetic oligonucleotide
tgcatctaaacacagaagactattgcttgg

SEQ ID NO: 142953 - DNA, 30 bp, Artificial Sequence
  Synthetic oligonucleotide
catttaaggcgtaagagggggtaatcttgg

SEQ ID NO: 142954 - DNA, 30 bp, Artificial Sequence
  Synthetic oligonucleotide
cttggagacggtggggtttatgcatcttgg

SEQ ID NO: 142955 - DNA, 30 bp, Artificial Sequence
  Synthetic oligonucleotide
atatcgcactgggaagtcagagattcttgg

SEQ ID NO: 142956 - DNA, 30 bp, Artificial Sequence
  Synthetic oligonucleotide
ctcgcaacgttgatttaatctctttcttgg

SEQ ID NO: 142957 - DNA, 30 bp, Artificial Sequence
  Synthetic oligonucleotide
gcgcgtctaaatgggttacgaaaaagttgg

SEQ ID NO: 142958 - DNA, 30 bp, Artificial Sequence
  Synthetic oligonucleotide
tgggatctcttaagcactggggtaagttgg

SEQ ID NO: 142959 - DNA, 30 bp, Artificial Sequence
  Synthetic oligonucleotide
tacagctcgtgacgtccaggcctcagttgg

SEQ ID NO: 142960 - DNA, 30 bp, Artificial Sequence
  Synthetic oligonucleotide
tcgaggaaccttgaccgttacgggagttgg

SEQ ID NO: 142961 - DNA, 30 bp, Artificial Sequence
  Synthetic oligonucleotide
cattagtgaagaacgcgtgtcgatagttgg

SEQ ID NO: 142962 - DNA, 30 bp, Artificial Sequence
  Synthetic oligonucleotide
gcgtaagacttaccagtaaacattagttgg

SEQ ID NO: 142963 - DNA, 30 bp, Artificial Sequence
  Synthetic oligonucleotide
tagcgcttccagtacgagatggcgcgttgg

SEQ ID NO: 142964 - DNA, 30 bp, Artificial Sequence
  Synthetic oligonucleotide
tctaggggggtttcgctagatgacggttgg

SEQ ID NO: 142965 - DNA, 30 bp, Artificial Sequence
  Synthetic oligonucleotide
gctggattcatgccatgtgagcagggttgg

SEQ ID NO: 142966 - DNA, 30 bp, Artificial Sequence
  Synthetic oligonucleotide
tgtcggatcgctcaacgtatggttggttgg

SEQ ID NO: 142967 - DNA, 30 bp, Artificial Sequence
  Synthetic oligonucleotide
ttgccgaggataacgagatatgaatgttgg

SEQ ID NO: 142968 - DNA, 30 bp, Artificial Sequence
  Synthetic oligonucleotide
gcgccccaaagttggtgtaatgactgttgg

SEQ ID NO: 142969 - DNA, 30 bp, Artificial Sequence
  Synthetic oligonucleotide
agccaggcacgcgaatcgtcagaaatttgg

SEQ ID NO: 142970 - DNA, 30 bp, Artificial Sequence
  Synthetic oligonucleotide
ggcgtttaggagatcaacgcatttatttgg

SEQ ID NO: 142971 - DNA, 30 bp, Artificial Sequence
  Synthetic oligonucleotide
cctccggaaactgagcggtgtatgctttgg

SEQ ID NO: 142972 - DNA, 30 bp, Artificial Sequence
  Synthetic oligonucleotide
cgacgcatttgaaggcgtctaattctttgg

SEQ ID NO: 142973 - DNA, 30 bp, Artificial Sequence
  Synthetic oligonucleotide
gtgtgtacgtggtaggaaaatcttctttgg

SEQ ID NO: 142974 - DNA, 30 bp, Artificial Sequence
  Synthetic oligonucleotide
tgctaaacaaagccatccatgtaggtttgg

SEQ ID NO: 142975 - DNA, 30 bp, Artificial Sequence
  Synthetic oligonucleotide
agaacgagctcaccagtagaaggcttttgg

SEQ ID NO: 142976 - DNA, 30 bp, Artificial Sequence
  Synthetic oligonucleotide
agtatcgtaaggtttgtgggtaagttttgg

SEQ ID NO: 142977 - DNA, 30 bp, Artificial Sequence
  Synthetic oligonucleotide
aacggtcgtccacagatgggaactttttgg

SEQ ID NO: 142978 - DNA, 30 bp, Artificial Sequence
  Synthetic oligonucleotide
ccggaatgcctcactgaggacagtttttgg

SEQ ID NO: 142979 - DNA, 30 bp, Artificial Sequence
  Synthetic oligonucleotide
atactcaataaacaagagcgcggtttttgg

SEQ ID NO: 142980 - DNA, 30 bp, Artificial Sequence
  Synthetic oligonucleotide
gttgtttcaaaagatatgtgaacaaaaatg

SEQ ID NO: 142981 - DNA, 30 bp, Artificial Sequence
  Synthetic oligonucleotide
cactagtgtgaccattgcttcccaaaaatg

SEQ ID NO: 142982 - DNA, 30 bp, Artificial Sequence
  Synthetic oligonucleotide
tacggcagtgactacaactgtcgaaaaatg

SEQ ID NO: 142983 - DNA, 30 bp, Artificial Sequence
  Synthetic oligonucleotide
aacaggggtgcctttgcgcggctaaaaatg

SEQ ID NO: 142984 - DNA, 30 bp, Artificial Sequence
  Synthetic oligonucleotide
ggcttcctcaaagatttaagcgggaaaatg

SEQ ID NO: 142985 - DNA, 30 bp, Artificial Sequence
  Synthetic oligonucleotide
atgcaatgtcaccatacggcgtggaaaatg

SEQ ID NO: 142986 - DNA, 30 bp, Artificial Sequence
  Synthetic oligonucleotide
cgtacacgcctgaatttatattaacaaatg

SEQ ID NO: 142987 - DNA, 30 bp, Artificial Sequence
  Synthetic oligonucleotide
atggaagcgctaatagtacgttaacaaatg

SEQ ID NO: 142988 - DNA, 30 bp, Artificial Sequence
  Synthetic oligonucleotide
caaaggtgtggcgctcaatcaatacaaatg

SEQ ID NO: 142989 - DNA, 30 bp, Artificial Sequence
  Synthetic oligonucleotide
gcgccagtagatctcgggtatctacaaatg

SEQ ID NO: 142990 - DNA, 30 bp, Artificial Sequence
  Synthetic oligonucleotide
ctccaacgatgtcgcctggtctaccaaatg

SEQ ID NO: 142991 - DNA, 30 bp, Artificial Sequence
  Synthetic oligonucleotide
cggcttccataacggcttgcaaagcaaatg

SEQ ID NO: 142992 - DNA, 30 bp, Artificial Sequence
  Synthetic oligonucleotide
ctatttacgtgaagcggagtcctgcaaatg

SEQ ID NO: 142993 - DNA, 30 bp, Artificial Sequence
  Synthetic oligonucleotide
agtcatagcaatagccagtcctttcaaatg

SEQ ID NO: 142994 - DNA, 30 bp, Artificial Sequence
  Synthetic oligonucleotide
cctcactactgtactctttgtaaagaaatg

SEQ ID NO: 142995 - DNA, 30 bp, Artificial Sequence
  Synthetic oligonucleotide
tgcgaccaagtgcatccttgcggagaaatg

SEQ ID NO: 142996 - DNA, 29 bp, Artificial Sequence
  Synthetic oligonucleotide
caatattcagtgataagcatcccgaaatg

SEQ ID NO: 142997 - DNA, 30 bp, Artificial Sequence
  Synthetic oligonucleotide
agctggcggaagacatattaggtggaaatg

SEQ ID NO: 142998 - DNA, 30 bp, Artificial Sequence
  Synthetic oligonucleotide
tacacgctcttcggaaaaccttgctaaatg

SEQ ID NO: 142999 - DNA, 30 bp, Artificial Sequence
  Synthetic oligonucleotide
cgttcgaagaaacacgaaggttagtaaatg

SEQ ID NO: 143000 - DNA, 30 bp, Artificial Sequence
  Synthetic oligonucleotide
ggctcctaattaccagacttaacgtaaatg

SEQ ID NO: 143001 - DNA, 30 bp, Artificial Sequence
  Synthetic oligonucleotide
ctaagcgggccagagaacgacaattaaatg

SEQ ID NO: 143002 - DNA, 30 bp, Artificial Sequence
  Synthetic oligonucleotide
catcgttccctacagttaaaggtaacaatg

SEQ ID NO: 143003 - DNA, 30 bp, Artificial Sequence
  Synthetic oligonucleotide
aacttgtacatcactaagcgaatcacaatg

SEQ ID NO: 143004 - DNA, 30 bp, Artificial Sequence
  Synthetic oligonucleotide
cgtaagtctaatgaaaatacggtgacaatg

SEQ ID NO: 143005 - DNA, 30 bp, Artificial Sequence
  Synthetic oligonucleotide
gtgactgagtcggaataggattaaccaatg

SEQ ID NO: 143006 - DNA, 30 bp, Artificial Sequence
  Synthetic oligonucleotide
ggaggataacgcggtatggggctaccaatg

SEQ ID NO: 143007 - DNA, 30 bp, Artificial Sequence
  Synthetic oligonucleotide
ccgtaggctactatggtctcagtaccaatg

SEQ ID NO: 143008 - DNA, 30 bp, Artificial Sequence
  Synthetic oligonucleotide
atcgcaggaagcaatgttgacggtccaatg

SEQ ID NO: 143009 - DNA, 30 bp, Artificial Sequence
  Synthetic oligonucleotide
gaaagggatgaaggggtttgtagtgcaatg

SEQ ID NO: 143010 - DNA, 30 bp, Artificial Sequence
  Synthetic oligonucleotide
tgtgagcctaacgtacctgatgtatcaatg

SEQ ID NO: 143011 - DNA, 30 bp, Artificial Sequence
  Synthetic oligonucleotide
aaagcgtgttttcgccatattgcgtcaatg

SEQ ID NO: 143012 - DNA, 30 bp, Artificial Sequence
  Synthetic oligonucleotide
aacgtgcttacagctaaagtgttaagaatg

SEQ ID NO: 143013 - DNA, 30 bp, Artificial Sequence
  Synthetic oligonucleotide
ccgccaggctagggtcttcccaacagaatg

SEQ ID NO: 143014 - DNA, 30 bp, Artificial Sequence
  Synthetic oligonucleotide
gatgctcatagcataatgttaaccagaatg

SEQ ID NO: 143015 - DNA, 30 bp, Artificial Sequence
  Synthetic oligonucleotide
tgtgaccgggaaaattttggctccagaatg

SEQ ID NO: 143016 - DNA, 30 bp, Artificial Sequence
  Synthetic oligonucleotide
gctaatcctagatggtccgtagtcagaatg

SEQ ID NO: 143017 - DNA, 29 bp, Artificial Sequence
  Synthetic oligonucleotide
gcagtatcttgctgatactcacgagaatg

SEQ ID NO: 143018 - DNA, 30 bp, Artificial Sequence
  Synthetic oligonucleotide
tacttggctatccggttagtggcgagaatg

SEQ ID NO: 143019 - DNA, 30 bp, Artificial Sequence
  Synthetic oligonucleotide
ttccgccgaatgaaggatacccggagaatg

SEQ ID NO: 143020 - DNA, 30 bp, Artificial Sequence
  Synthetic oligonucleotide
attgatggggaatgcagagtcggacgaatg

SEQ ID NO: 143021 - DNA, 30 bp, Artificial Sequence
  Synthetic oligonucleotide
aaccaccgatcggagtcagggcgccgaatg

SEQ ID NO: 143022 - DNA, 30 bp, Artificial Sequence
  Synthetic oligonucleotide
gtgaagtcgggttggtacacgccaggaatg

SEQ ID NO: 143023 - DNA, 30 bp, Artificial Sequence
  Synthetic oligonucleotide
aggctcgaaagggggcaggaggccggaatg

SEQ ID NO: 143024 - DNA, 30 bp, Artificial Sequence
  Synthetic oligonucleotide
ggaatggaagttagtcaaaaaaatggaatg

SEQ ID NO: 143025 - DNA, 30 bp, Artificial Sequence
  Synthetic oligonucleotide
cctttgacccaaacggatgaaactggaatg

SEQ ID NO: 143026 - DNA, 30 bp, Artificial Sequence
  Synthetic oligonucleotide
cggtggggcaacaaactatccgttggaatg

SEQ ID NO: 143027 - DNA, 30 bp, Artificial Sequence
  Synthetic oligonucleotide
tcatggagcggaaacggccctccctgaatg

SEQ ID NO: 143028 - DNA, 30 bp, Artificial Sequence
  Synthetic oligonucleotide
acttgggcgggcaggaccctatagtgaatg

SEQ ID NO: 143029 - DNA, 30 bp, Artificial Sequence
  Synthetic oligonucleotide
ttatcgcgtcgtttgctgaccaggtgaatg

SEQ ID NO: 143030 - DNA, 30 bp, Artificial Sequence
  Synthetic oligonucleotide
ttacaacatccgggtttcgtgaattgaatg

SEQ ID NO: 143031 - DNA, 30 bp, Artificial Sequence
  Synthetic oligonucleotide
cgatataaagtaagcggttgtgtttgaatg

SEQ ID NO: 143032 - DNA, 30 bp, Artificial Sequence
  Synthetic oligonucleotide
tacgtacgcttccagcttatagaaataatg

SEQ ID NO: 143033 - DNA, 30 bp, Artificial Sequence
  Synthetic oligonucleotide
aaacacgccggggccccatactgaataatg

SEQ ID NO: 143034 - DNA, 30 bp, Artificial Sequence
  Synthetic oligonucleotide
cgggatacagtgggcttcctccccataatg

SEQ ID NO: 143035 - DNA, 30 bp, Artificial Sequence
  Synthetic oligonucleotide
gcggtcgtaggctggacgtatgtcataatg

SEQ ID NO: 143036 - DNA, 30 bp, Artificial Sequence
  Synthetic oligonucleotide
gttcgatccagaaccagcgaacagataatg

SEQ ID NO: 143037 - DNA, 30 bp, Artificial Sequence
  Synthetic oligonucleotide
ataggcatttatcggttggctatgataatg

SEQ ID NO: 143038 - DNA, 30 bp, Artificial Sequence
  Synthetic oligonucleotide
ccgcgtccaattatggaagagcgtataatg

SEQ ID NO: 143039 - DNA, 30 bp, Artificial Sequence
  Synthetic oligonucleotide
gaggcgatacctcaacagtaagcactaatg

SEQ ID NO: 143040 - DNA, 30 bp, Artificial Sequence
  Synthetic oligonucleotide
ggttgcggaaattgcactttacccctaatg

SEQ ID NO: 143041 - DNA, 30 bp, Artificial Sequence
  Synthetic oligonucleotide
atcgttgtgttcattgcttattccctaatg

SEQ ID NO: 143042 - DNA, 29 bp, Artificial Sequence
  Synthetic oligonucleotide
caaattagcgcgcgagataatagctaatg

SEQ ID NO: 143043 - DNA, 30 bp, Artificial Sequence
  Synthetic oligonucleotide
catagtaattgtgcagtagtaggcgtaatg

SEQ ID NO: 143044 - DNA, 30 bp, Artificial Sequence
  Synthetic oligonucleotide
gctacacagatcggatatgtctatgtaatg

SEQ ID NO: 143045 - DNA, 30 bp, Artificial Sequence
  Synthetic oligonucleotide
ctacagtcgaggaggcgaggtattgtaatg

SEQ ID NO: 143046 - DNA, 30 bp, Artificial Sequence
  Synthetic oligonucleotide
tataacaagatccggtcaacaggcttaatg

SEQ ID NO: 143047 - DNA, 30 bp, Artificial Sequence
  Synthetic oligonucleotide
tttaagtccacgtgctacccgtccaacatg

SEQ ID NO: 143048 - DNA, 30 bp, Artificial Sequence
  Synthetic oligonucleotide
aaacgaaaggatctgtaaagtgtgaacatg

SEQ ID NO: 143049 - DNA, 30 bp, Artificial Sequence
  Synthetic oligonucleotide
gtgtagctttcgccggctgggtctaacatg

SEQ ID NO: 143050 - DNA, 30 bp, Artificial Sequence
  Synthetic oligonucleotide
tctggccaggggttggcatagatacacatg

SEQ ID NO: 143051 - DNA, 30 bp, Artificial Sequence
  Synthetic oligonucleotide
cactaaggccctgcggttttcttgcacatg

SEQ ID NO: 143052 - DNA, 30 bp, Artificial Sequence
  Synthetic oligonucleotide
caggattctagtgaggttgatactcacatg

SEQ ID NO: 143053 - DNA, 30 bp, Artificial Sequence
  Synthetic oligonucleotide
tcagcgacgtaggacgttagaaaagacatg

SEQ ID NO: 143054 - DNA, 30 bp, Artificial Sequence
  Synthetic oligonucleotide
gtgcaccattaaaaaaccagggtagacatg

SEQ ID NO: 143055 - DNA, 30 bp, Artificial Sequence
  Synthetic oligonucleotide
tatatcatcagccggagtaatatcgacatg

SEQ ID NO: 143056 - DNA, 30 bp, Artificial Sequence
  Synthetic oligonucleotide
agggagttaaaagactggcctaatgacatg

SEQ ID NO: 143057 - DNA, 30 bp, Artificial Sequence
  Synthetic oligonucleotide
aagaccattcaagttaaatgaaagtacatg

SEQ ID NO: 143058 - DNA, 30 bp, Artificial Sequence
  Synthetic oligonucleotide
aaattcacagacgaggagggctaaaccatg

SEQ ID NO: 143059 - DNA, 30 bp, Artificial Sequence
  Synthetic oligonucleotide
ctaggaaattagaaaaagtcatgaaccatg

SEQ ID NO: 143060 - DNA, 30 bp, Artificial Sequence
  Synthetic oligonucleotide
tcgtaatagggcaacagtaataacaccatg

SEQ ID NO: 143061 - DNA, 30 bp, Artificial Sequence
  Synthetic oligonucleotide
caattaacgttcacccggagatgtaccatg

SEQ ID NO: 143062 - DNA, 30 bp, Artificial Sequence
  Synthetic oligonucleotide
ccaatgtaagaggcttaattcaaacccatg

SEQ ID NO: 143063 - DNA, 30 bp, Artificial Sequence
  Synthetic oligonucleotide
gcgtgattaggtcttaaaattatacccatg

SEQ ID NO: 143064 - DNA, 30 bp, Artificial Sequence
  Synthetic oligonucleotide
tgagttgggcagtgaaaaaacgagcccatg

SEQ ID NO: 143065 - DNA, 30 bp, Artificial Sequence
  Synthetic oligonucleotide
tagtgtggtattagaaggctcgtagccatg

SEQ ID NO: 143066 - DNA, 30 bp, Artificial Sequence
  Synthetic oligonucleotide
ttagagtcttgatttccgtcctcctccatg

SEQ ID NO: 143067 - DNA, 30 bp, Artificial Sequence
  Synthetic oligonucleotide
ggatctagtacggcaacgtttgcgtccatg

SEQ ID NO: 143068 - DNA, 30 bp, Artificial Sequence
  Synthetic oligonucleotide
catatcgttcttcccatgtgagcttccatg

SEQ ID NO: 143069 - DNA, 30 bp, Artificial Sequence
  Synthetic oligonucleotide
tcgggataccccattgtacgtaggagcatg

SEQ ID NO: 143070 - DNA, 30 bp, Artificial Sequence
  Synthetic oligonucleotide
acgatatccaagtgcaaatcaacacgcatg

SEQ ID NO: 143071 - DNA, 30 bp, Artificial Sequence
  Synthetic oligonucleotide
cgtgttcgtcaaccagtaattccacgcatg

SEQ ID NO: 143072 - DNA, 30 bp, Artificial Sequence
  Synthetic oligonucleotide
tgaaaagggtggttgttgttcaggcgcatg

SEQ ID NO: 143073 - DNA, 30 bp, Artificial Sequence
  Synthetic oligonucleotide
gtaaacataaacacgattgaagctcgcatg

SEQ ID NO: 143074 - DNA, 30 bp, Artificial Sequence
  Synthetic oligonucleotide
atagaatgtaagttcaaaagaagaggcatg

SEQ ID NO: 143075 - DNA, 30 bp, Artificial Sequence
  Synthetic oligonucleotide
tcggatgacgctgtctaaaaatacggcatg

SEQ ID NO: 143076 - DNA, 30 bp, Artificial Sequence
  Synthetic oligonucleotide
tctcaaccttacctgtcacgtccgggcatg

SEQ ID NO: 143077 - DNA, 30 bp, Artificial Sequence
  Synthetic oligonucleotide
atcgatgtatgttagggcgtcactggcatg

SEQ ID NO: 143078 - DNA, 30 bp, Artificial Sequence
  Synthetic oligonucleotide
tcccgagggttatagagagtatgttgcatg

SEQ ID NO: 143079 - DNA, 30 bp, Artificial Sequence
  Synthetic oligonucleotide
gtggggcagtaaagacccatcttttgcatg

SEQ ID NO: 143080 - DNA, 30 bp, Artificial Sequence
  Synthetic oligonucleotide
ttcctggtacatgaggcactccagatcatg

SEQ ID NO: 143081 - DNA, 30 bp, Artificial Sequence
  Synthetic oligonucleotide
atgtaccaagtaaaattgtgggagatcatg

SEQ ID NO: 143082 - DNA, 30 bp, Artificial Sequence
  Synthetic oligonucleotide
ccttgaggtcttggagttccatagatcatg

SEQ ID NO: 143083 - DNA, 30 bp, Artificial Sequence
  Synthetic oligonucleotide
ctgctaagagtaatgtaaggacatatcatg

SEQ ID NO: 143084 - DNA, 30 bp, Artificial Sequence
  Synthetic oligonucleotide
cttttcatcccaaaaacgccaggtatcatg

SEQ ID NO: 143085 - DNA, 30 bp, Artificial Sequence
  Synthetic oligonucleotide
aaggcctgacaaaggtggcaatcactcatg

SEQ ID NO: 143086 - DNA, 30 bp, Artificial Sequence
  Synthetic oligonucleotide
aaagcatcgcgcgtataattacccctcatg

SEQ ID NO: 143087 - DNA, 30 bp, Artificial Sequence
  Synthetic oligonucleotide
agagtgcacaccacacacgcgactctcatg

SEQ ID NO: 143088 - DNA, 30 bp, Artificial Sequence
  Synthetic oligonucleotide
caacagacccccgcacagcagaaggtcatg

SEQ ID NO: 143089 - DNA, 30 bp, Artificial Sequence
  Synthetic oligonucleotide
acgggaaatatatagtagcaaccggtcatg

SEQ ID NO: 143090 - DNA, 30 bp, Artificial Sequence
  Synthetic oligonucleotide
actgggaagccgtgatgcagtgaattcatg

SEQ ID NO: 143091 - DNA, 30 bp, Artificial Sequence
  Synthetic oligonucleotide
acagggctaaacgaatcgagtccattcatg

SEQ ID NO: 143092 - DNA, 30 bp, Artificial Sequence
  Synthetic oligonucleotide
tcgagtgtaaaaaaagtggtttggttcatg

SEQ ID NO: 143093 - DNA, 30 bp, Artificial Sequence
  Synthetic oligonucleotide
cggcaccgcagggttatcgtgggtttcatg

SEQ ID NO: 143094 - DNA, 30 bp, Artificial Sequence
  Synthetic oligonucleotide
actgtattaatgggtatccgattcaagatg

SEQ ID NO: 143095 - DNA, 30 bp, Artificial Sequence
  Synthetic oligonucleotide
ctgtattacgtgttcaagcgacagaagatg

SEQ ID NO: 143096 - DNA, 30 bp, Artificial Sequence
  Synthetic oligonucleotide
ttgaactggaaccggtaacacaataagatg

SEQ ID NO: 143097 - DNA, 30 bp, Artificial Sequence
  Synthetic oligonucleotide
cgaccaggccctaggcccgttgctaagatg

SEQ ID NO: 143098 - DNA, 30 bp, Artificial Sequence
  Synthetic oligonucleotide
aacattcgttggaagctgtacatccagatg

SEQ ID NO: 143099 - DNA, 30 bp, Artificial Sequence
  Synthetic oligonucleotide
ttagtgaccttgaatttccgtcgagagatg

SEQ ID NO: 143100 - DNA, 30 bp, Artificial Sequence
  Synthetic oligonucleotide
actcatataaattgaaaacgtaaggagatg

SEQ ID NO: 143101 - DNA, 30 bp, Artificial Sequence
  Synthetic oligonucleotide
aaagggaggaactacttccgctaggagatg

SEQ ID NO: 143102 - DNA, 30 bp, Artificial Sequence
  Synthetic oligonucleotide
gccacgaatttattgaacaccggtgagatg

SEQ ID NO: 143103 - DNA, 30 bp, Artificial Sequence
  Synthetic oligonucleotide
agatacggtacatgattaacacttgagatg

SEQ ID NO: 143104 - DNA, 30 bp, Artificial Sequence
  Synthetic oligonucleotide
tataggcacgactgagatatttttgagatg

SEQ ID NO: 143105 - DNA, 30 bp, Artificial Sequence
  Synthetic oligonucleotide
aagatcagtaacgcgatttggaagtagatg

SEQ ID NO: 143106 - DNA, 31 bp, Artificial Sequence
  Synthetic oligonucleotide
gtcttattgcgggcgtatcattaagtagatg

SEQ ID NO: 143107 - DNA, 30 bp, Artificial Sequence
  Synthetic oligonucleotide
ggcgtatacgagtcggctttattttagatg

SEQ ID NO: 143108 - DNA, 30 bp, Artificial Sequence
  Synthetic oligonucleotide
cgtgcctctggaggtcggacggggacgatg

SEQ ID NO: 143109 - DNA, 30 bp, Artificial Sequence
  Synthetic oligonucleotide
tgcgtgtctcgactcgtggagtggacgatg

SEQ ID NO: 143110 - DNA, 30 bp, Artificial Sequence
  Synthetic oligonucleotide
ggtattctatagtaggaacacggcccgatg

SEQ ID NO: 143111 - DNA, 30 bp, Artificial Sequence
  Synthetic oligonucleotide
tacagatagaaatagaataagcgcgcgatg

SEQ ID NO: 143112 - DNA, 30 bp, Artificial Sequence
  Synthetic oligonucleotide
ccctcgggtcagaaacaatagttcgcgatg

SEQ ID NO: 143113 - DNA, 30 bp, Artificial Sequence
  Synthetic oligonucleotide
tcggctggaatttaaccatacggtgcgatg

SEQ ID NO: 143114 - DNA, 30 bp, Artificial Sequence
  Synthetic oligonucleotide
atttcctgtactacaagtagaagatcgatg

SEQ ID NO: 143115 - DNA, 30 bp, Artificial Sequence
  Synthetic oligonucleotide
tcatacgggcgagcgtaggtccactcgatg

SEQ ID NO: 143116 - DNA, 30 bp, Artificial Sequence
  Synthetic oligonucleotide
attaaaggaggactattctgtacctcgatg

SEQ ID NO: 143117 - DNA, 31 bp, Artificial Sequence
  Synthetic oligonucleotide
tcccgttgagcctgagaaacgtgcaaggatg

SEQ ID NO: 143118 - DNA, 30 bp, Artificial Sequence
  Synthetic oligonucleotide
gtcccagcgggaatggttttaccgaggatg

SEQ ID NO: 143119 - DNA, 30 bp, Artificial Sequence
  Synthetic oligonucleotide
tagaacgtaccctagacagccccgaggatg

SEQ ID NO: 143120 - DNA, 30 bp, Artificial Sequence
  Synthetic oligonucleotide
gataagcgtaaatccgaggtgattaggatg

SEQ ID NO: 143121 - DNA, 30 bp, Artificial Sequence
  Synthetic oligonucleotide
gtatccgtgctaaaaacgggggttaggatg

SEQ ID NO: 143122 - DNA, 30 bp, Artificial Sequence
  Synthetic oligonucleotide
ccgattgagaaataagtttctggacggatg

SEQ ID NO: 143123 - DNA, 30 bp, Artificial Sequence
  Synthetic oligonucleotide
aagcatctgagacatcccctctaccggatg

SEQ ID NO: 143124 - DNA, 30 bp, Artificial Sequence
  Synthetic oligonucleotide
ccccagagtccactatatggaacccggatg

SEQ ID NO: 143125 - DNA, 30 bp, Artificial Sequence
  Synthetic oligonucleotide
ttgccggggaacatgtaagctatagggatg

SEQ ID NO: 143126 - DNA, 30 bp, Artificial Sequence
  Synthetic oligonucleotide
gatgcggcggcaacggcggcataatggatg

SEQ ID NO: 143127 - DNA, 30 bp, Artificial Sequence
  Synthetic oligonucleotide
aagaaagattcttacagtttgaactggatg

SEQ ID NO: 143128 - DNA, 30 bp, Artificial Sequence
  Synthetic oligonucleotide
gtataatccgccgggagtgcacagtggatg

SEQ ID NO: 143129 - DNA, 30 bp, Artificial Sequence
  Synthetic oligonucleotide
gtcactactaagagtgaaagctagtggatg

SEQ ID NO: 143130 - DNA, 30 bp, Artificial Sequence
  Synthetic oligonucleotide
ggggaacacgcatattgagtacaaatgatg

SEQ ID NO: 143131 - DNA, 30 bp, Artificial Sequence
  Synthetic oligonucleotide
cactataatgctcagatagtataaatgatg

SEQ ID NO: 143132 - DNA, 30 bp, Artificial Sequence
  Synthetic oligonucleotide
aatgctgaaactgagtttgattctatgatg

SEQ ID NO: 143133 - DNA, 30 bp, Artificial Sequence
  Synthetic oligonucleotide
cgctactacggagagtggcaatgactgatg

SEQ ID NO: 143134 - DNA, 30 bp, Artificial Sequence
  Synthetic oligonucleotide
tttggccaaaatgattggttgtgcctgatg

SEQ ID NO: 143135 - DNA, 30 bp, Artificial Sequence
  Synthetic oligonucleotide
tacgccacgaagtgacgtctaattctgatg

SEQ ID NO: 143136 - DNA, 30 bp, Artificial Sequence
  Synthetic oligonucleotide
cggggacaatgctcggctgcaacggtgatg

SEQ ID NO: 143137 - DNA, 30 bp, Artificial Sequence
  Synthetic oligonucleotide
cacatcggataaaggtcggtcggggtgatg

SEQ ID NO: 143138 - DNA, 30 bp, Artificial Sequence
  Synthetic oligonucleotide
gacgcgtactagcgacggtgcgccttgatg

SEQ ID NO: 143139 - DNA, 30 bp, Artificial Sequence
  Synthetic oligonucleotide
atgggctgacgactaagtccagaaaatatg

SEQ ID NO: 143140 - DNA, 30 bp, Artificial Sequence
  Synthetic oligonucleotide
gcaccatctacattcaactgcgcaaatatg

SEQ ID NO: 143141 - DNA, 30 bp, Artificial Sequence
  Synthetic oligonucleotide
gcacacttataactgtggtctcgaaatatg

SEQ ID NO: 143142 - DNA, 30 bp, Artificial Sequence
  Synthetic oligonucleotide
atcacgtctcgttagctctaggccaatatg

SEQ ID NO: 143143 - DNA, 30 bp, Artificial Sequence
  Synthetic oligonucleotide
cgcggtatgagctcactgggtactaatatg

SEQ ID NO: 143144 - DNA, 30 bp, Artificial Sequence
  Synthetic oligonucleotide
cacattcagacaaatttaccttaggatatg

SEQ ID NO: 143145 - DNA, 30 bp, Artificial Sequence
  Synthetic oligonucleotide
cacatggtaaccctacaccggtcatatatg

SEQ ID NO: 143146 - DNA, 30 bp, Artificial Sequence
  Synthetic oligonucleotide
gcgtagatctacgcctcacttggatatatg

SEQ ID NO: 143147 - DNA, 30 bp, Artificial Sequence
  Synthetic oligonucleotide
gctacagtaactgactaaaattagtatatg

SEQ ID NO: 143148 - DNA, 30 bp, Artificial Sequence
  Synthetic oligonucleotide
gggacttagtgcggtctattacgttatatg

SEQ ID NO: 143149 - DNA, 30 bp, Artificial Sequence
  Synthetic oligonucleotide
aatgctgaaagcccaggtcagtgttatatg

SEQ ID NO: 143150 - DNA, 30 bp, Artificial Sequence
  Synthetic oligonucleotide
gaagagtggaagtccggtgctaaaactatg

SEQ ID NO: 143151 - DNA, 30 bp, Artificial Sequence
  Synthetic oligonucleotide
caggaggccgtatcatcgtccccaactatg

SEQ ID NO: 143152 - DNA, 30 bp, Artificial Sequence
  Synthetic oligonucleotide
tggagcgcgcgtctgactcaatgaactatg

SEQ ID NO: 143153 - DNA, 30 bp, Artificial Sequence
  Synthetic oligonucleotide
ggcctagacctctagtgctcacagactatg

SEQ ID NO: 143154 - DNA, 30 bp, Artificial Sequence
  Synthetic oligonucleotide
ggagagcgcttcatcttagggcgggctatg

SEQ ID NO: 143155 - DNA, 30 bp, Artificial Sequence
  Synthetic oligonucleotide
gtactgatcgggcactgttcatttgctatg

SEQ ID NO: 143156 - DNA, 30 bp, Artificial Sequence
  Synthetic oligonucleotide
ttcgcgtgaagaagcgttcgtgtatctatg

SEQ ID NO: 143157 - DNA, 30 bp, Artificial Sequence
  Synthetic oligonucleotide
gccgcggtaggaacacaggttctctctatg

SEQ ID NO: 143158 - DNA, 30 bp, Artificial Sequence
  Synthetic oligonucleotide
tctccggagatcgcctgagggttgtctatg

SEQ ID NO: 143159 - DNA, 30 bp, Artificial Sequence
  Synthetic oligonucleotide
tggtgtcgctatgatatgagatacagtatg

SEQ ID NO: 143160 - DNA, 29 bp, Artificial Sequence
  Synthetic oligonucleotide
tacggagaactgctttgccgtgacgtatg

SEQ ID NO: 143161 - DNA, 30 bp, Artificial Sequence
  Synthetic oligonucleotide
agaatcggtaaataaggagaactacgtatg

SEQ ID NO: 143162 - DNA, 30 bp, Artificial Sequence
  Synthetic oligonucleotide
actatccattgacactaagtggcccgtatg

SEQ ID NO: 143163 - DNA, 30 bp, Artificial Sequence
  Synthetic oligonucleotide
gcctgatcgtggatgaaagccttgcgtatg

SEQ ID NO: 143164 - DNA, 30 bp, Artificial Sequence
  Synthetic oligonucleotide
gtgagctaatccaactgttgtataggtatg

SEQ ID NO: 143165 - DNA, 30 bp, Artificial Sequence
  Synthetic oligonucleotide
ctcgggagtgtcagaattcgtaggggtatg

SEQ ID NO: 143166 - DNA, 30 bp, Artificial Sequence
  Synthetic oligonucleotide
gtatatgagagtgtgcgtatgaaatgtatg

SEQ ID NO: 143167 - DNA, 30 bp, Artificial Sequence
  Synthetic oligonucleotide
ctgaagcgattctcatgaaaccactgtatg

SEQ ID NO: 143168 - DNA, 30 bp, Artificial Sequence
  Synthetic oligonucleotide
gaaacacatttcgaagttcgtacaattatg

SEQ ID NO: 143169 - DNA, 40 bp, Artificial Sequence
  Synthetic oligonucleotide
ttatgcgtctaccgagacgtatatatcgcccataattatg

SEQ ID NO: 143170 - DNA, 30 bp, Artificial Sequence
  Synthetic oligonucleotide
ggtaaaagaatggtgtcagtttccattatg

SEQ ID NO: 143171 - DNA, 30 bp, Artificial Sequence
  Synthetic oligonucleotide
ttttctgcacgtaaagatagactgattatg

SEQ ID NO: 143172 - DNA, 30 bp, Artificial Sequence
  Synthetic oligonucleotide
gtgacaagagtgtgtgagctcttgattatg

SEQ ID NO: 143173 - DNA, 30 bp, Artificial Sequence
  Synthetic oligonucleotide
cttaatgtctttgctagaccgaatattatg

SEQ ID NO: 143174 - DNA, 30 bp, Artificial Sequence
  Synthetic oligonucleotide
ggttcgaccgcatctggcaccagtattatg

SEQ ID NO: 143175 - DNA, 30 bp, Artificial Sequence
  Synthetic oligonucleotide
atggcagaagtgagctataacagacttatg

SEQ ID NO: 143176 - DNA, 30 bp, Artificial Sequence
  Synthetic oligonucleotide
ctcatcccggcaagttcacgacatcttatg

SEQ ID NO: 143177 - DNA, 30 bp, Artificial Sequence
  Synthetic oligonucleotide
ttcgaggggggggggtagtatcgcgttatg

SEQ ID NO: 143178 - DNA, 30 bp, Artificial Sequence
  Synthetic oligonucleotide
actgcaacagagatgcgttctgcatttatg

SEQ ID NO: 143179 - DNA, 30 bp, Artificial Sequence
  Synthetic oligonucleotide
tgctagtccagatcatcatattcgtttatg

SEQ ID NO: 143180 - DNA, 30 bp, Artificial Sequence
  Synthetic oligonucleotide
ggtggtttctcggataatgcgggacaactg

SEQ ID NO: 143181 - DNA, 30 bp, Artificial Sequence
  Synthetic oligonucleotide
ctaccgtcgggacgcgttaaactacaactg

SEQ ID NO: 143182 - DNA, 30 bp, Artificial Sequence
  Synthetic oligonucleotide
cccaggcagtctcaagactccaaccaactg

SEQ ID NO: 143183 - DNA, 30 bp, Artificial Sequence
  Synthetic oligonucleotide
aggaaagggttctagtagattatagaactg

SEQ ID NO: 143184 - DNA, 30 bp, Artificial Sequence
  Synthetic oligonucleotide
ggatggtggtgagtatctatttacgaactg

SEQ ID NO: 143185 - DNA, 30 bp, Artificial Sequence
  Synthetic oligonucleotide
tgctggttcaggccggagttattataactg

SEQ ID NO: 143186 - DNA, 30 bp, Artificial Sequence
  Synthetic oligonucleotide
cgtcgtacactggtgtgtctcaactaactg

SEQ ID NO: 143187 - DNA, 30 bp, Artificial Sequence
  Synthetic oligonucleotide
gtcatgcgagtcaatgcgggtgactaactg

SEQ ID NO: 143188 - DNA, 30 bp, Artificial Sequence
  Synthetic oligonucleotide
taacacgcatgaacgtactcaaggtaactg

SEQ ID NO: 143189 - DNA, 30 bp, Artificial Sequence
  Synthetic oligonucleotide
tccagccatgacataccagtgttgtaactg

SEQ ID NO: 143190 - DNA, 30 bp, Artificial Sequence
  Synthetic oligonucleotide
tcgcaggatcaactcgcatattgttaactg

SEQ ID NO: 143191 - DNA, 30 bp, Artificial Sequence
  Synthetic oligonucleotide
actctacatgtgaaacgtgtatacacactg

SEQ ID NO: 143192 - DNA, 30 bp, Artificial Sequence
  Synthetic oligonucleotide
caagtagcgggcaacaaaaccagaccactg

SEQ ID NO: 143193 - DNA, 30 bp, Artificial Sequence
  Synthetic oligonucleotide
gaaggggtttaggcgttaactcacccactg

SEQ ID NO: 143194 - DNA, 30 bp, Artificial Sequence
  Synthetic oligonucleotide
ggcaactgtgcatattgcgttggcccactg

SEQ ID NO: 143195 - DNA, 30 bp, Artificial Sequence
  Synthetic oligonucleotide
tcaccaaacgtgtaatcacacatcccactg

SEQ ID NO: 143196 - DNA, 30 bp, Artificial Sequence
  Synthetic oligonucleotide
gcgcaagcgatgtcagtatctgcgccactg

SEQ ID NO: 143197 - DNA, 30 bp, Artificial Sequence
  Synthetic oligonucleotide
aacacatgaagattgataagtcaagcactg

SEQ ID NO: 143198 - DNA, 30 bp, Artificial Sequence
  Synthetic oligonucleotide
gtagatggatcatatcacagcagagcactg

SEQ ID NO: 143199 - DNA, 30 bp, Artificial Sequence
  Synthetic oligonucleotide
ggggctatcaatgtagctttaggagcactg

SEQ ID NO: 143200 - DNA, 30 bp, Artificial Sequence
  Synthetic oligonucleotide
cggcaaagtggcaatcgaccctgcgcactg

SEQ ID NO: 143201 - DNA, 30 bp, Artificial Sequence
  Synthetic oligonucleotide
atgcgagcccaagctactaaatgggcactg

SEQ ID NO: 143202 - DNA, 30 bp, Artificial Sequence
  Synthetic oligonucleotide
cggagcgtcaaaggagatttcagtgcactg

SEQ ID NO: 143203 - DNA, 30 bp, Artificial Sequence
  Synthetic oligonucleotide
tagtcgcaacgacgaactccggcgtcactg

SEQ ID NO: 143204 - DNA, 30 bp, Artificial Sequence
  Synthetic oligonucleotide
tacgcaaatcgggaaagggtaataagactg

SEQ ID NO: 143205 - DNA, 30 bp, Artificial Sequence
  Synthetic oligonucleotide
acagattaatagtgatgggtgagacgactg

SEQ ID NO: 143206 - DNA, 30 bp, Artificial Sequence
  Synthetic oligonucleotide
gtgtcggactggcatgcctaaggacgactg

SEQ ID NO: 143207 - DNA, 30 bp, Artificial Sequence
  Synthetic oligonucleotide
aagtctcgaaagtcgacagagtcccgactg

SEQ ID NO: 143208 - DNA, 30 bp, Artificial Sequence
  Synthetic oligonucleotide
gtacataagtaggttcttgaggaaggactg

SEQ ID NO: 143209 - DNA, 30 bp, Artificial Sequence
  Synthetic oligonucleotide
gaacaggataatcgaccctgatcaggactg

SEQ ID NO: 143210 - DNA, 30 bp, Artificial Sequence
  Synthetic oligonucleotide
gggtatgattgcggaccgacgctaggactg

SEQ ID NO: 143211 - DNA, 30 bp, Artificial Sequence
  Synthetic oligonucleotide
cttaaagtctacagggaaactgacggactg

SEQ ID NO: 143212 - DNA, 30 bp, Artificial Sequence
  Synthetic oligonucleotide
aatgtaggggcctcacccttggtcggactg

SEQ ID NO: 143213 - DNA, 30 bp, Artificial Sequence
  Synthetic oligonucleotide
tagcacatgaagcgccatgataagggactg

SEQ ID NO: 143214 - DNA, 30 bp, Artificial Sequence
  Synthetic oligonucleotide
ttatgtgagtacgtgaatcccgtgggactg

SEQ ID NO: 143215 - DNA, 30 bp, Artificial Sequence
  Synthetic oligonucleotide
ggagatcaagaattattagggcctggactg

SEQ ID NO: 143216 - DNA, 30 bp, Artificial Sequence
  Synthetic oligonucleotide
aggaggacgttggagtggcgtccatgactg

SEQ ID NO: 143217 - DNA, 30 bp, Artificial Sequence
  Synthetic oligonucleotide
gcgcaccaacatagtggctagatatgactg

SEQ ID NO: 143218 - DNA, 30 bp, Artificial Sequence
  Synthetic oligonucleotide
ctttcaggattcaccaggcgtgtatgactg

SEQ ID NO: 143219 - DNA, 30 bp, Artificial Sequence
  Synthetic oligonucleotide
aagcctatcctacccaaggtcgggtgactg

SEQ ID NO: 143220 - DNA, 30 bp, Artificial Sequence
  Synthetic oligonucleotide
cgagccggctatggttagacaggttgactg

SEQ ID NO: 143221 - DNA, 30 bp, Artificial Sequence
  Synthetic oligonucleotide
agcttgaggattagagcgtggtcaatactg

SEQ ID NO: 143222 - DNA, 30 bp, Artificial Sequence
  Synthetic oligonucleotide
ttgatactgggtaggcacaatagaatactg

SEQ ID NO: 143223 - DNA, 30 bp, Artificial Sequence
  Synthetic oligonucleotide
cacaaggtcgacgtcagatacctgatactg

SEQ ID NO: 143224 - DNA, 30 bp, Artificial Sequence
  Synthetic oligonucleotide
atgttaggtcgacaggagactgtgatactg

SEQ ID NO: 143225 - DNA, 30 bp, Artificial Sequence
  Synthetic oligonucleotide
gccagcacccaagctgccatattgatactg

SEQ ID NO: 143226 - DNA, 30 bp, Artificial Sequence
  Synthetic oligonucleotide
gtgtaaatacaaagcagtaatgatatactg

SEQ ID NO: 143227 - DNA, 30 bp, Artificial Sequence
  Synthetic oligonucleotide
caagtatcaaacactcgatgtttcctactg

SEQ ID NO: 143228 - DNA, 30 bp, Artificial Sequence
  Synthetic oligonucleotide
acttgatggattgtggtgggaaagctactg

SEQ ID NO: 143229 - DNA, 30 bp, Artificial Sequence
  Synthetic oligonucleotide
ccgtcatgaattttgcgctcaccgctactg

SEQ ID NO: 143230 - DNA, 30 bp, Artificial Sequence
  Synthetic oligonucleotide
gacgtgcgccggataactcagcgagtactg

SEQ ID NO: 143231 - DNA, 30 bp, Artificial Sequence
  Synthetic oligonucleotide
aacgggcaccatgctagacttcaggtactg

SEQ ID NO: 143232 - DNA, 30 bp, Artificial Sequence
  Synthetic oligonucleotide
ttagattgtgcggaccatcgaatggtactg

SEQ ID NO: 143233 - DNA, 30 bp, Artificial Sequence
  Synthetic oligonucleotide
taagtgcctgaagcatccataggattactg

SEQ ID NO: 143234 - DNA, 30 bp, Artificial Sequence
  Synthetic oligonucleotide
aaagggccccaccgcactaatatattactg

SEQ ID NO: 143235 - DNA, 30 bp, Artificial Sequence
  Synthetic oligonucleotide
cactgttgttagtgaatgtttatattactg

SEQ ID NO: 143236 - DNA, 30 bp, Artificial Sequence
  Synthetic oligonucleotide
gcaacagcggctttgatcgggactttactg

SEQ ID NO: 143237 - DNA, 30 bp, Artificial Sequence
  Synthetic oligonucleotide
tcccgcacaagacgcacgaagaacaacctg

SEQ ID NO: 143238 - DNA, 31 bp, Artificial Sequence
  Synthetic oligonucleotide
accgacagattcaaatacggtattcaacctg

SEQ ID NO: 143239 - DNA, 30 bp, Artificial Sequence
  Synthetic oligonucleotide
tacatatggggggggtatcatacgaacctg

SEQ ID NO: 143240 - DNA, 30 bp, Artificial Sequence
  Synthetic oligonucleotide
ctaatgtgaggggacgtttgactgaacctg

SEQ ID NO: 143241 - DNA, 30 bp, Artificial Sequence
  Synthetic oligonucleotide
tggttggataaatcacacttccataacctg

SEQ ID NO: 143242 - DNA, 30 bp, Artificial Sequence
  Synthetic oligonucleotide
tagctaataattcgtcaaggtcttaacctg

SEQ ID NO: 143243 - DNA, 30 bp, Artificial Sequence
  Synthetic oligonucleotide
cactgtcaaagggtgtcctcagttaacctg

SEQ ID NO: 143244 - DNA, 30 bp, Artificial Sequence
  Synthetic oligonucleotide
ctggctacattgatcttcgagcaccacctg

SEQ ID NO: 143245 - DNA, 30 bp, Artificial Sequence
  Synthetic oligonucleotide
aaggaacggctgtggttggcactccacctg

SEQ ID NO: 143246 - DNA, 30 bp, Artificial Sequence
  Synthetic oligonucleotide
aatggcctaacaaaacttaacaaggacctg

SEQ ID NO: 143247 - DNA, 31 bp, Artificial Sequence
  Synthetic oligonucleotide
tgactaatctcctccttatactggggacctg

SEQ ID NO: 143248 - DNA, 30 bp, Artificial Sequence
  Synthetic oligonucleotide
tgaaacggaagtctcctctcatactacctg

SEQ ID NO: 143249 - DNA, 30 bp, Artificial Sequence
  Synthetic oligonucleotide
ccggggactcagggatcggatcataccctg

SEQ ID NO: 143250 - DNA, 30 bp, Artificial Sequence
  Synthetic oligonucleotide
ctgacaccgttttgcagggttggtaccctg

SEQ ID NO: 143251 - DNA, 30 bp, Artificial Sequence
  Synthetic oligonucleotide
taaatggcaaagtcgggttcacgacccctg

SEQ ID NO: 143252 - DNA, 30 bp, Artificial Sequence
  Synthetic oligonucleotide
ttgtccaactcggctggcacgtaccccctg

SEQ ID NO: 143253 - DNA, 30 bp, Artificial Sequence
  Synthetic oligonucleotide
taactacgtacgacctgttctgtgcccctg

SEQ ID NO: 143254 - DNA, 30 bp, Artificial Sequence
  Synthetic oligonucleotide
cgcgcagtggctccaacgacagttcccctg

SEQ ID NO: 143255 - DNA, 30 bp, Artificial Sequence
  Synthetic oligonucleotide
actcgcccacaaaccagggatcgcgccctg

SEQ ID NO: 143256 - DNA, 30 bp, Artificial Sequence
  Synthetic oligonucleotide
tcacgtaggcacgacgcatatccggccctg

SEQ ID NO: 143257 - DNA, 30 bp, Artificial Sequence
  Synthetic oligonucleotide
ataatggtagttgtcactagaattgccctg

SEQ ID NO: 143258 - DNA, 30 bp, Artificial Sequence
  Synthetic oligonucleotide
tgcaatcgctaggcttccggcattgccctg

SEQ ID NO: 143259 - DNA, 30 bp, Artificial Sequence
  Synthetic oligonucleotide
caaaaagaaagtgtggagcacaaaagcctg

SEQ ID NO: 143260 - DNA, 30 bp, Artificial Sequence
  Synthetic oligonucleotide
gccagtggccgatggcatgaaccaagcctg

SEQ ID NO: 143261 - DNA, 30 bp, Artificial Sequence
  Synthetic oligonucleotide
tacgcggctatgcctcccacccccagcctg

SEQ ID NO: 143262 - DNA, 30 bp, Artificial Sequence
  Synthetic oligonucleotide
gcgtaccccgcgccagctgtaggcagcctg

SEQ ID NO: 143263 - DNA, 30 bp, Artificial Sequence
  Synthetic oligonucleotide
agggttttccaattgaggaccccgagcctg

SEQ ID NO: 143264 - DNA, 30 bp, Artificial Sequence
  Synthetic oligonucleotide
agagactattacacagaagtcatgcgcctg

SEQ ID NO: 143265 - DNA, 30 bp, Artificial Sequence
  Synthetic oligonucleotide
gcgagattataaaatagatgaagatgcctg

SEQ ID NO: 143266 - DNA, 30 bp, Artificial Sequence
  Synthetic oligonucleotide
caaacgagcggcctgacctgagcttgcctg

SEQ ID NO: 143267 - DNA, 30 bp, Artificial Sequence
  Synthetic oligonucleotide
gatacagatgaggagctcacgggaatcctg

SEQ ID NO: 143268 - DNA, 30 bp, Artificial Sequence
  Synthetic oligonucleotide
gattcgaaagcttaaattcagagcatcctg

SEQ ID NO: 143269 - DNA, 30 bp, Artificial Sequence
  Synthetic oligonucleotide
ttgaaagagctgcatatgggcctcatcctg

SEQ ID NO: 143270 - DNA, 30 bp, Artificial Sequence
  Synthetic oligonucleotide
gtgatggccggtaggagtgtcactctcctg

SEQ ID NO: 143271 - DNA, 30 bp, Artificial Sequence
  Synthetic oligonucleotide
gggaactcacttcagaatccgtgtctcctg

SEQ ID NO: 143272 - DNA, 40 bp, Artificial Sequence
  Synthetic oligonucleotide
cccatttcgaaataagagaggactcacacaaactgtcctg

SEQ ID NO: 143273 - DNA, 30 bp, Artificial Sequence
  Synthetic oligonucleotide
cgacgggattaatatataacgctattcctg

SEQ ID NO: 143274 - DNA, 30 bp, Artificial Sequence
  Synthetic oligonucleotide
aagggggagtaagggggccaggagttcctg

SEQ ID NO: 143275 - DNA, 30 bp, Artificial Sequence
  Synthetic oligonucleotide
atctacccgaagccaagacaaactttcctg

SEQ ID NO: 143276 - DNA, 30 bp, Artificial Sequence
  Synthetic oligonucleotide
acatgtctctgccttggactggccaagctg

SEQ ID NO: 143277 - DNA, 30 bp, Artificial Sequence
  Synthetic oligonucleotide
tgcccaaggcatagtcccccactacagctg

SEQ ID NO: 143278 - DNA, 30 bp, Artificial Sequence
  Synthetic oligonucleotide
gaccgctaagaggatgcgctgcgtcagctg

SEQ ID NO: 143279 - DNA, 30 bp, Artificial Sequence
  Synthetic oligonucleotide
gcggcgcaaatagatgggggggattagctg

SEQ ID NO: 143280 - DNA, 30 bp, Artificial Sequence
  Synthetic oligonucleotide
ctcggtactttagatggaaacagttagctg

SEQ ID NO: 143281 - DNA, 30 bp, Artificial Sequence
  Synthetic oligonucleotide
tagagcatgtgcagaggagcggtaacgctg

SEQ ID NO: 143282 - DNA, 30 bp, Artificial Sequence
  Synthetic oligonucleotide
ttatccatggactacacctgaactacgctg

SEQ ID NO: 143283 - DNA, 30 bp, Artificial Sequence
  Synthetic oligonucleotide
gcattgttaagcgcgaaatgttctacgctg

SEQ ID NO: 143284 - DNA, 30 bp, Artificial Sequence
  Synthetic oligonucleotide
tcgggcgacgatattagaaaaattacgctg

SEQ ID NO: 143285 - DNA, 30 bp, Artificial Sequence
  Synthetic oligonucleotide
agttgggccttcaataaaactaacccgctg

SEQ ID NO: 143286 - DNA, 30 bp, Artificial Sequence
  Synthetic oligonucleotide
gatgatacgatttctacactcagtccgctg

SEQ ID NO: 143287 - DNA, 30 bp, Artificial Sequence
  Synthetic oligonucleotide
cagtatggcttttaaaatatgaaggcgctg

SEQ ID NO: 143288 - DNA, 30 bp, Artificial Sequence
  Synthetic oligonucleotide
attatgcagagtgatccacgtacggcgctg

SEQ ID NO: 143289 - DNA, 30 bp, Artificial Sequence
  Synthetic oligonucleotide
cgcaaagtctctgaaatcgagaagtcgctg

SEQ ID NO: 143290 - DNA, 30 bp, Artificial Sequence
  Synthetic oligonucleotide
ggttgagagtaatggtaaccagaaaggctg

SEQ ID NO: 143291 - DNA, 30 bp, Artificial Sequence
  Synthetic oligonucleotide
agctcaacttacgaagccatgcccaggctg

SEQ ID NO: 143292 - DNA, 30 bp, Artificial Sequence
  Synthetic oligonucleotide
caactgaaatagtgtgggatgttcaggctg

SEQ ID NO: 143293 - DNA, 30 bp, Artificial Sequence
  Synthetic oligonucleotide
ccctacctggtgacacacaaagtgaggctg

SEQ ID NO: 143294 - DNA, 30 bp, Artificial Sequence
  Synthetic oligonucleotide
gcgactcgtaaaaaccctcggtgtaggctg

SEQ ID NO: 143295 - DNA, 30 bp, Artificial Sequence
  Synthetic oligonucleotide
agggggtcggctaccagccgaatacggctg

SEQ ID NO: 143296 - DNA, 30 bp, Artificial Sequence
  Synthetic oligonucleotide
tgcaaagcgcaatattgactgctacggctg

SEQ ID NO: 143297 - DNA, 30 bp, Artificial Sequence
  Synthetic oligonucleotide
cgcgtaaaaaccagacattggaatcggctg

SEQ ID NO: 143298 - DNA, 30 bp, Artificial Sequence
  Synthetic oligonucleotide
acggttaaaatatcaaagactcatcggctg

SEQ ID NO: 143299 - DNA, 30 bp, Artificial Sequence
  Synthetic oligonucleotide
ctggtgggagtacgctgcgtggttcggctg

SEQ ID NO: 143300 - DNA, 30 bp, Artificial Sequence
  Synthetic oligonucleotide
aacatgcatacagggcatatggcagggctg

SEQ ID NO: 143301 - DNA, 30 bp, Artificial Sequence
  Synthetic oligonucleotide
ggcaccgttttatcgatattcctatggctg

SEQ ID NO: 143302 - DNA, 30 bp, Artificial Sequence
  Synthetic oligonucleotide
cccttagctatactaattagtaagtggctg

SEQ ID NO: 143303 - DNA, 30 bp, Artificial Sequence
  Synthetic oligonucleotide
agatgtgaatgtcggctaagagatatgctg

SEQ ID NO: 143304 - DNA, 30 bp, Artificial Sequence
  Synthetic oligonucleotide
tgcacgtccttctgggcaatttgtatgctg

SEQ ID NO: 143305 - DNA, 30 bp, Artificial Sequence
  Synthetic oligonucleotide
ctaagcggaagtgaaaatgtaaagctgctg

SEQ ID NO: 143306 - DNA, 30 bp, Artificial Sequence
  Synthetic oligonucleotide
cacacaatcaatacgaggagctgtctgctg

SEQ ID NO: 143307 - DNA, 30 bp, Artificial Sequence
  Synthetic oligonucleotide
tggcgctgattcataaagtgtgaagtgctg

SEQ ID NO: 143308 - DNA, 30 bp, Artificial Sequence
  Synthetic oligonucleotide
tgggcagagatcgtgacttatagggtgctg

SEQ ID NO: 143309 - DNA, 30 bp, Artificial Sequence
  Synthetic oligonucleotide
gcacgtaatctgtatatgtaatgggtgctg

SEQ ID NO: 143310 - DNA, 30 bp, Artificial Sequence
  Synthetic oligonucleotide
aaatgatagggggaaggaacatacttgctg

SEQ ID NO: 143311 - DNA, 30 bp, Artificial Sequence
  Synthetic oligonucleotide
gaatagcccaactatcaactggcaaatctg

SEQ ID NO: 143312 - DNA, 30 bp, Artificial Sequence
  Synthetic oligonucleotide
tctgaggacgccgtcagcaaagggaatctg

SEQ ID NO: 143313 - DNA, 30 bp, Artificial Sequence
  Synthetic oligonucleotide
atgctgtgctttagtggttaagggaatctg

SEQ ID NO: 143314 - DNA, 30 bp, Artificial Sequence
  Synthetic oligonucleotide
attggtaggggtcttaacacgttgaatctg

SEQ ID NO: 143315 - DNA, 30 bp, Artificial Sequence
  Synthetic oligonucleotide
caagtaacactgtgtcgatttatacatctg

SEQ ID NO: 143316 - DNA, 30 bp, Artificial Sequence
  Synthetic oligonucleotide
tgaccgagaagtctaaaacgattacatctg

SEQ ID NO: 143317 - DNA, 30 bp, Artificial Sequence
  Synthetic oligonucleotide
ccaactaaagattccgttacatcccatctg

SEQ ID NO: 143318 - DNA, 30 bp, Artificial Sequence
  Synthetic oligonucleotide
tgataagagctttgtgacgagaatcatctg

SEQ ID NO: 143319 - DNA, 30 bp, Artificial Sequence
  Synthetic oligonucleotide
cgatgtatcactgagcggcctactcatctg

SEQ ID NO: 143320 - DNA, 30 bp, Artificial Sequence
  Synthetic oligonucleotide
tgcatcgcccagcaaggcactccagatctg

SEQ ID NO: 143321 - DNA, 30 bp, Artificial Sequence
  Synthetic oligonucleotide
ttgactgggtgttcatcggagagtgatctg

SEQ ID NO: 143322 - DNA, 30 bp, Artificial Sequence
  Synthetic oligonucleotide
atcatcataatgacggggtcgtgtgatctg

SEQ ID NO: 143323 - DNA, 30 bp, Artificial Sequence
  Synthetic oligonucleotide
tgtcgcaggatttggggggagaaatatctg

SEQ ID NO: 143324 - DNA, 30 bp, Artificial Sequence
  Synthetic oligonucleotide
gccaactgacgactgcacgtagaatatctg

SEQ ID NO: 143325 - DNA, 30 bp, Artificial Sequence
  Synthetic oligonucleotide
tcaagtcgttaagcgaaaagcacatatctg

SEQ ID NO: 143326 - DNA, 30 bp, Artificial Sequence
  Synthetic oligonucleotide
aaacatggagggattccatgtcgatatctg

SEQ ID NO: 143327 - DNA, 30 bp, Artificial Sequence
  Synthetic oligonucleotide
gacaaaagtttctaaaaggtaacttatctg

SEQ ID NO: 143328 - DNA, 30 bp, Artificial Sequence
  Synthetic oligonucleotide
ggctgcagataatgctaggcgttttatctg

SEQ ID NO: 143329 - DNA, 30 bp, Artificial Sequence
  Synthetic oligonucleotide
atcacgtagtgacaagtgcccatgactctg

SEQ ID NO: 143330 - DNA, 30 bp, Artificial Sequence
  Synthetic oligonucleotide
cgacccttgcggctaggccatgcgcctctg

SEQ ID NO: 143331 - DNA, 30 bp, Artificial Sequence
  Synthetic oligonucleotide
ccagattgagtgggcggatatgaagctctg

SEQ ID NO: 143332 - DNA, 30 bp, Artificial Sequence
  Synthetic oligonucleotide
gattagtgggtcggttaaactagagctctg

SEQ ID NO: 143333 - DNA, 30 bp, Artificial Sequence
  Synthetic oligonucleotide
gatcagggtcggatgtctagagcggctctg

SEQ ID NO: 143334 - DNA, 30 bp, Artificial Sequence
  Synthetic oligonucleotide
tacattgggccattgtgacgacatgctctg

SEQ ID NO: 143335 - DNA, 30 bp, Artificial Sequence
  Synthetic oligonucleotide
cctggggggcagaaggcatagtatgctctg

SEQ ID NO: 143336 - DNA, 30 bp, Artificial Sequence
  Synthetic oligonucleotide
tcaaatgtagcataccctcggtaatctctg

SEQ ID NO: 143337 - DNA, 30 bp, Artificial Sequence
  Synthetic oligonucleotide
tatgcctcggatcctagctaagcatctctg

SEQ ID NO: 143338 - DNA, 30 bp, Artificial Sequence
  Synthetic oligonucleotide
agaaaaaatgtagagatcgattaaagtctg

SEQ ID NO: 143339 - DNA, 30 bp, Artificial Sequence
  Synthetic oligonucleotide
gcttaaggagtacacgtacaaagaagtctg

SEQ ID NO: 143340 - DNA, 30 bp, Artificial Sequence
  Synthetic oligonucleotide
ctaaggattgcatgtgtccgaggaagtctg

SEQ ID NO: 143341 - DNA, 30 bp, Artificial Sequence
  Synthetic oligonucleotide
gcggtcctgctataactgtttatcagtctg

SEQ ID NO: 143342 - DNA, 30 bp, Artificial Sequence
  Synthetic oligonucleotide
tcagaccagtgaaccgcagtgtttagtctg

SEQ ID NO: 143343 - DNA, 30 bp, Artificial Sequence
  Synthetic oligonucleotide
agcaggccagttttcaccctcgcacgtctg

SEQ ID NO: 143344 - DNA, 30 bp, Artificial Sequence
  Synthetic oligonucleotide
gtacccccttccaaagccttggtccgtctg

SEQ ID NO: 143345 - DNA, 30 bp, Artificial Sequence
  Synthetic oligonucleotide
gtggccctgatccctaggagtccgcgtctg

SEQ ID NO: 143346 - DNA, 30 bp, Artificial Sequence
  Synthetic oligonucleotide
tgtacggaataccttccacaagggcgtctg

SEQ ID NO: 143347 - DNA, 30 bp, Artificial Sequence
  Synthetic oligonucleotide
atgatactccgtttcataagatggggtctg

SEQ ID NO: 143348 - DNA, 30 bp, Artificial Sequence
  Synthetic oligonucleotide
cactccgcccgttggtatgatatgggtctg

SEQ ID NO: 143349 - DNA, 30 bp, Artificial Sequence
  Synthetic oligonucleotide
tgtcttctgaggatacaacctgcatgtctg

SEQ ID NO: 143350 - DNA, 30 bp, Artificial Sequence
  Synthetic oligonucleotide
ggttagggagcggaccgtgagaactgtctg

SEQ ID NO: 143351 - DNA, 30 bp, Artificial Sequence
  Synthetic oligonucleotide
atgcgcgctattggattaagtggaattctg

SEQ ID NO: 143352 - DNA, 30 bp, Artificial Sequence
  Synthetic oligonucleotide
gctgtctaagcgcacgcgccgacgattctg

SEQ ID NO: 143353 - DNA, 30 bp, Artificial Sequence
  Synthetic oligonucleotide
ttaggcggatgttataattgcgtgattctg

SEQ ID NO: 143354 - DNA, 30 bp, Artificial Sequence
  Synthetic oligonucleotide
aatggacccaactggatgagagttattctg

SEQ ID NO: 143355 - DNA, 30 bp, Artificial Sequence
  Synthetic oligonucleotide
tagaaccggagaggagcggtttcacttctg

SEQ ID NO: 143356 - DNA, 30 bp, Artificial Sequence
  Synthetic oligonucleotide
aagggcgcgaagtgcacgacatcgcttctg

SEQ ID NO: 143357 - DNA, 30 bp, Artificial Sequence
  Synthetic oligonucleotide
catcacgagcgtgggtctcatgcagttctg

SEQ ID NO: 143358 - DNA, 30 bp, Artificial Sequence
  Synthetic oligonucleotide
caccgtacatcctaaagtggctgagttctg

SEQ ID NO: 143359 - DNA, 30 bp, Artificial Sequence
  Synthetic oligonucleotide
ggtacacaatgggtcttactcaccgttctg

SEQ ID NO: 143360 - DNA, 30 bp, Artificial Sequence
  Synthetic oligonucleotide
ctgatacgcctccgcgttagcttcgttctg

SEQ ID NO: 143361 - DNA, 30 bp, Artificial Sequence
  Synthetic oligonucleotide
ctaagttaagtgcgatctcgcggggttctg

SEQ ID NO: 143362 - DNA, 30 bp, Artificial Sequence
  Synthetic oligonucleotide
gcgctaatgttgtgactccatccatttctg

SEQ ID NO: 143363 - DNA, 30 bp, Artificial Sequence
  Synthetic oligonucleotide
ctcacattgactcgtcactatgtatttctg

SEQ ID NO: 143364 - DNA, 30 bp, Artificial Sequence
  Synthetic oligonucleotide
gaggtaatggaatcccagacgaactttctg

SEQ ID NO: 143365 - DNA, 30 bp, Artificial Sequence
  Synthetic oligonucleotide
gactagtgaactcacacgttacgctttctg

SEQ ID NO: 143366 - DNA, 30 bp, Artificial Sequence
  Synthetic oligonucleotide
gagatcctgaggtggggtagcgtctttctg

SEQ ID NO: 143367 - DNA, 30 bp, Artificial Sequence
  Synthetic oligonucleotide
ggatgggaggcaatttaagacatgtttctg

SEQ ID NO: 143368 - DNA, 30 bp, Artificial Sequence
  Synthetic oligonucleotide
gcctacacgcaaccaatgccggcttttctg

SEQ ID NO: 143369 - DNA, 30 bp, Artificial Sequence
  Synthetic oligonucleotide
aggaggaactggtctgtcgattttaaagtg

SEQ ID NO: 143370 - DNA, 30 bp, Artificial Sequence
  Synthetic oligonucleotide
gattatcccacagttcgattacggcaagtg

SEQ ID NO: 143371 - DNA, 30 bp, Artificial Sequence
  Synthetic oligonucleotide
tgctagtcagggtcgtagaacgtagaagtg

SEQ ID NO: 143372 - DNA, 30 bp, Artificial Sequence
  Synthetic oligonucleotide
ggcccgccgctgcggtagcggttagaagtg

SEQ ID NO: 143373 - DNA, 30 bp, Artificial Sequence
  Synthetic oligonucleotide
atgtcaagggttggtggcgtgggataagtg

SEQ ID NO: 143374 - DNA, 30 bp, Artificial Sequence
  Synthetic oligonucleotide
agccaactaccgtgaaactgacagtaagtg

SEQ ID NO: 143375 - DNA, 30 bp, Artificial Sequence
  Synthetic oligonucleotide
tcgcgattgcccgatgggattatcacagtg

SEQ ID NO: 143376 - DNA, 30 bp, Artificial Sequence
  Synthetic oligonucleotide
gctcgacatacacaaggtctcatgacagtg

SEQ ID NO: 143377 - DNA, 30 bp, Artificial Sequence
  Synthetic oligonucleotide
tataaatagttacaaatagaatatacagtg

SEQ ID NO: 143378 - DNA, 30 bp, Artificial Sequence
  Synthetic oligonucleotide
tgccacgtcgtcggatttttgggcccagtg

SEQ ID NO: 143379 - DNA, 30 bp, Artificial Sequence
  Synthetic oligonucleotide
cacactgaaaaaggcggattattcccagtg

SEQ ID NO: 143380 - DNA, 30 bp, Artificial Sequence
  Synthetic oligonucleotide
gagagtgctactcggtgcatttatccagtg

SEQ ID NO: 143381 - DNA, 30 bp, Artificial Sequence
  Synthetic oligonucleotide
acggatacctccgtgatatgatgagcagtg

SEQ ID NO: 143382 - DNA, 30 bp, Artificial Sequence
  Synthetic oligonucleotide
cttgcgcagattcctcggcgcgaggcagtg

SEQ ID NO: 143383 - DNA, 30 bp, Artificial Sequence
  Synthetic oligonucleotide
cagctgatctactaacattctccggcagtg

SEQ ID NO: 143384 - DNA, 30 bp, Artificial Sequence
  Synthetic oligonucleotide
aatataagaggttgcctagctagggcagtg

SEQ ID NO: 143385 - DNA, 30 bp, Artificial Sequence
  Synthetic oligonucleotide
gacggaagataccgtatacctggggcagtg

SEQ ID NO: 143386 - DNA, 30 bp, Artificial Sequence
  Synthetic oligonucleotide
tcggagatatgtcaggtgttcatggcagtg

SEQ ID NO: 143387 - DNA, 30 bp, Artificial Sequence
  Synthetic oligonucleotide
ggcaatagcacaaaccagacgagtgcagtg

SEQ ID NO: 143388 - DNA, 30 bp, Artificial Sequence
  Synthetic oligonucleotide
cgccagctaatcatgccactcaaatcagtg

SEQ ID NO: 143389 - DNA, 30 bp, Artificial Sequence
  Synthetic oligonucleotide
ggatcttagtaatgaaacctcggatcagtg

SEQ ID NO: 143390 - DNA, 30 bp, Artificial Sequence
  Synthetic oligonucleotide
taggctgggggacgtggcggttgatcagtg

SEQ ID NO: 143391 - DNA, 30 bp, Artificial Sequence
  Synthetic oligonucleotide
tcgacccggacaaaagtcgtcagctcagtg

SEQ ID NO: 143392 - DNA, 30 bp, Artificial Sequence
  Synthetic oligonucleotide
cctgctgcgatgtgtagtatcatgtcagtg

SEQ ID NO: 143393 - DNA, 30 bp, Artificial Sequence
  Synthetic oligonucleotide
ataaggacatttaggaggagtgcttcagtg

SEQ ID NO: 143394 - DNA, 30 bp, Artificial Sequence
  Synthetic oligonucleotide
aaagataggtaatctggttcgtaaagagtg

SEQ ID NO: 143395 - DNA, 30 bp, Artificial Sequence
  Synthetic oligonucleotide
tggaagcatggactgtcgcgcaatagagtg

SEQ ID NO: 143396 - DNA, 30 bp, Artificial Sequence
  Synthetic oligonucleotide
acacagaagctagagacagcacctagagtg

SEQ ID NO: 143397 - DNA, 30 bp, Artificial Sequence
  Synthetic oligonucleotide
cgttataatacggttagttcttaacgagtg

SEQ ID NO: 143398 - DNA, 30 bp, Artificial Sequence
  Synthetic oligonucleotide
caccgaatttactcctggtctcgacgagtg

SEQ ID NO: 143399 - DNA, 30 bp, Artificial Sequence
  Synthetic oligonucleotide
aggcttatgtgccctattttttgccgagtg

SEQ ID NO: 143400 - DNA, 30 bp, Artificial Sequence
  Synthetic oligonucleotide
cctaatgctgcacaagtaccgcgcggagtg

SEQ ID NO: 143401 - DNA, 30 bp, Artificial Sequence
  Synthetic oligonucleotide
taagtattaactatagaggctcggggagtg

SEQ ID NO: 143402 - DNA, 30 bp, Artificial Sequence
  Synthetic oligonucleotide
cggatgtccagggtgtcttccgggggagtg

SEQ ID NO: 143403 - DNA, 30 bp, Artificial Sequence
  Synthetic oligonucleotide
gtctaaaggatccctcccagccgtggagtg

SEQ ID NO: 143404 - DNA, 30 bp, Artificial Sequence
  Synthetic oligonucleotide
ccaccataacctttgtcctgaaggtgagtg

SEQ ID NO: 143405 - DNA, 30 bp, Artificial Sequence
  Synthetic oligonucleotide
taagaatcagttagtgctagtatgtgagtg

SEQ ID NO: 143406 - DNA, 30 bp, Artificial Sequence
  Synthetic oligonucleotide
tttggtgagctgaattgatagctgtgagtg

SEQ ID NO: 143407 - DNA, 30 bp, Artificial Sequence
  Synthetic oligonucleotide
acagcagtcttgaaaaacacagtgtgagtg

SEQ ID NO: 143408 - DNA, 30 bp, Artificial Sequence
  Synthetic oligonucleotide
cggagttgttccaacgttcctagcatagtg

SEQ ID NO: 143409 - DNA, 30 bp, Artificial Sequence
  Synthetic oligonucleotide
aaccgtccccgaccgggtggcatcatagtg

SEQ ID NO: 143410 - DNA, 30 bp, Artificial Sequence
  Synthetic oligonucleotide
ggctgccagggtacagccgtccgtatagtg

SEQ ID NO: 143411 - DNA, 30 bp, Artificial Sequence
  Synthetic oligonucleotide
tataccaggttgaatggtgcttgcctagtg

SEQ ID NO: 143412 - DNA, 30 bp, Artificial Sequence
  Synthetic oligonucleotide
gctcacagttacgttccagagcagctagtg

SEQ ID NO: 143413 - DNA, 30 bp, Artificial Sequence
  Synthetic oligonucleotide
tgtagttagttgtctgcgaagagtctagtg

SEQ ID NO: 143414 - DNA, 30 bp, Artificial Sequence
  Synthetic oligonucleotide
gaagatttagctagtcgtgcaacagtagtg

SEQ ID NO: 143415 - DNA, 30 bp, Artificial Sequence
  Synthetic oligonucleotide
tttcgtcaaccgatgtgtaccccagtagtg

SEQ ID NO: 143416 - DNA, 30 bp, Artificial Sequence
  Synthetic oligonucleotide
taagcgatgtatcaggatcccttagtagtg

SEQ ID NO: 143417 - DNA, 30 bp, Artificial Sequence
  Synthetic oligonucleotide
ccctacataagggacataaactccgtagtg

SEQ ID NO: 143418 - DNA, 30 bp, Artificial Sequence
  Synthetic oligonucleotide
agcaagctcattcgtgaagtaggcgtagtg

SEQ ID NO: 143419 - DNA, 30 bp, Artificial Sequence
  Synthetic oligonucleotide
gtcaacctgaaacgtatcaggatgttagtg

SEQ ID NO: 143420 - DNA, 31 bp, Artificial Sequence
  Synthetic oligonucleotide
tgtagtgtcacaagtttgacaagttaacgtg

SEQ ID NO: 143421 - DNA, 30 bp, Artificial Sequence
  Synthetic oligonucleotide
tttgagggattcgaggtcatacggcacgtg

SEQ ID NO: 143422 - DNA, 30 bp, Artificial Sequence
  Synthetic oligonucleotide
gtcacaccgacaggtgagccgattcacgtg

SEQ ID NO: 143423 - DNA, 30 bp, Artificial Sequence
  Synthetic oligonucleotide
atacagaagaccctgcaacagtacgacgtg

SEQ ID NO: 143424 - DNA, 30 bp, Artificial Sequence
  Synthetic oligonucleotide
tgtattgggctctcgggaaaaagctacgtg

SEQ ID NO: 143425 - DNA, 30 bp, Artificial Sequence
  Synthetic oligonucleotide
gtggtcacgcctttattcactagctacgtg

SEQ ID NO: 143426 - DNA, 30 bp, Artificial Sequence
  Synthetic oligonucleotide
cccttattgtagttggggaatatgtacgtg

SEQ ID NO: 143427 - DNA, 30 bp, Artificial Sequence
  Synthetic oligonucleotide
gcagacgaccgcgcccgaatgtaaaccgtg

SEQ ID NO: 143428 - DNA, 30 bp, Artificial Sequence
  Synthetic oligonucleotide
cctaactctatgtattgcgtgtacaccgtg

SEQ ID NO: 143429 - DNA, 30 bp, Artificial Sequence
  Synthetic oligonucleotide
accctccatacaaagccggcacccaccgtg

SEQ ID NO: 143430 - DNA, 30 bp, Artificial Sequence
  Synthetic oligonucleotide
tgctgactagaggcctgtcgtctgaccgtg

SEQ ID NO: 143431 - DNA, 30 bp, Artificial Sequence
  Synthetic oligonucleotide
gcagttacatgatgagtggagccccccgtg

SEQ ID NO: 143432 - DNA, 30 bp, Artificial Sequence
  Synthetic oligonucleotide
tggggacgttgtgagtaaaggattcccgtg

SEQ ID NO: 143433 - DNA, 30 bp, Artificial Sequence
  Synthetic oligonucleotide
ggataggacaaggtaacgcgcgaagccgtg

SEQ ID NO: 143434 - DNA, 30 bp, Artificial Sequence
  Synthetic oligonucleotide
gcagggcacgtgtaaatgactggagccgtg

SEQ ID NO: 143435 - DNA, 30 bp, Artificial Sequence
  Synthetic oligonucleotide
acactctcgcgccatagcggagaggccgtg

SEQ ID NO: 143436 - DNA, 30 bp, Artificial Sequence
  Synthetic oligonucleotide
tgcacatagaacgtacgtataacggccgtg

SEQ ID NO: 143437 - DNA, 30 bp, Artificial Sequence
  Synthetic oligonucleotide
cgtatgaacgacggtctgttcgctgccgtg

SEQ ID NO: 143438 - DNA, 30 bp, Artificial Sequence
  Synthetic oligonucleotide
aggataggaaagccaagtgatcaatccgtg

SEQ ID NO: 143439 - DNA, 30 bp, Artificial Sequence
  Synthetic oligonucleotide
ccaggaacgcggcttgggtggatatccgtg

SEQ ID NO: 143440 - DNA, 30 bp, Artificial Sequence
  Synthetic oligonucleotide
cctggcgcgaccttacaaattgtatccgtg

SEQ ID NO: 143441 - DNA, 30 bp, Artificial Sequence
  Synthetic oligonucleotide
agcgcaatacgtcaaaacatagcttccgtg

SEQ ID NO: 143442 - DNA, 30 bp, Artificial Sequence
  Synthetic oligonucleotide
tcctacacttcactccccacaggttccgtg

SEQ ID NO: 143443 - DNA, 30 bp, Artificial Sequence
  Synthetic oligonucleotide
ccttggggaaatggtgagtggtcaagcgtg

SEQ ID NO: 143444 - DNA, 30 bp, Artificial Sequence
  Synthetic oligonucleotide
atgctgtgggattatgggaatgacagcgtg

SEQ ID NO: 143445 - DNA, 30 bp, Artificial Sequence
  Synthetic oligonucleotide
cggacgcggtgcttgtctagcgaacgcgtg

SEQ ID NO: 143446 - DNA, 30 bp, Artificial Sequence
  Synthetic oligonucleotide
acagaaaaaggttagaatatttttcgcgtg

SEQ ID NO: 143447 - DNA, 30 bp, Artificial Sequence
  Synthetic oligonucleotide
cagattggcaaagacgtgaggcacggcgtg

SEQ ID NO: 143448 - DNA, 30 bp, Artificial Sequence
  Synthetic oligonucleotide
ttggtaggcatatagaacagagacggcgtg

SEQ ID NO: 143449 - DNA, 30 bp, Artificial Sequence
  Synthetic oligonucleotide
cttgcgcatcagagattcgaggagggcgtg

SEQ ID NO: 143450 - DNA, 30 bp, Artificial Sequence
  Synthetic oligonucleotide
actaaaaggtaccctagttatacatgcgtg

SEQ ID NO: 143451 - DNA, 30 bp, Artificial Sequence
  Synthetic oligonucleotide
tcgaccgacgcgggaatcgatatttgcgtg

SEQ ID NO: 143452 - DNA, 30 bp, Artificial Sequence
  Synthetic oligonucleotide
gaagcatagcgactgacatccgacatcgtg

SEQ ID NO: 143453 - DNA, 31 bp, Artificial Sequence
  Synthetic oligonucleotide
tggttctaaaaatcgtcctcatcgactcgtg

SEQ ID NO: 143454 - DNA, 30 bp, Artificial Sequence
  Synthetic oligonucleotide
gtcaaggatatagcgtgtgctcacctcgtg

SEQ ID NO: 143455 - DNA, 30 bp, Artificial Sequence
  Synthetic oligonucleotide
gaaattgctctcgatagaactgacctcgtg

SEQ ID NO: 143456 - DNA, 30 bp, Artificial Sequence
  Synthetic oligonucleotide
aagtggcaaaccagacgctacaagctcgtg

SEQ ID NO: 143457 - DNA, 30 bp, Artificial Sequence
  Synthetic oligonucleotide
cgtaaaggtaaaagcagcagatgtctcgtg

SEQ ID NO: 143458 - DNA, 30 bp, Artificial Sequence
  Synthetic oligonucleotide
ataaagtctacatgcagagtgcaagtcgtg

SEQ ID NO: 143459 - DNA, 30 bp, Artificial Sequence
  Synthetic oligonucleotide
gaaagaaacctatcagagcactgagtcgtg

SEQ ID NO: 143460 - DNA, 30 bp, Artificial Sequence
  Synthetic oligonucleotide
acgcgtatagtctgctcgttgaacgtcgtg

SEQ ID NO: 143461 - DNA, 30 bp, Artificial Sequence
  Synthetic oligonucleotide
gatggtcgagcgccccagtttgacgtcgtg

SEQ ID NO: 143462 - DNA, 30 bp, Artificial Sequence
  Synthetic oligonucleotide
aaccgtgtcggaacctagatctacgtcgtg

SEQ ID NO: 143463 - DNA, 30 bp, Artificial Sequence
  Synthetic oligonucleotide
aggaagattctaaaggtcaaccttgtcgtg

SEQ ID NO: 143464 - DNA, 30 bp, Artificial Sequence
  Synthetic oligonucleotide
ctagtgatataaatggggatgatcttcgtg

SEQ ID NO: 143465 - DNA, 30 bp, Artificial Sequence
  Synthetic oligonucleotide
gtgtgtcggttgctgggaggaccgttcgtg

SEQ ID NO: 143466 - DNA, 30 bp, Artificial Sequence
  Synthetic oligonucleotide
atccgaatcattgtacgtgcagggttcgtg

SEQ ID NO: 143467 - DNA, 30 bp, Artificial Sequence
  Synthetic oligonucleotide
tgttaataaaatataactaatacaaaggtg

SEQ ID NO: 143468 - DNA, 30 bp, Artificial Sequence
  Synthetic oligonucleotide
gaaaacatgaagggcgtgacgaacaaggtg

SEQ ID NO: 143469 - DNA, 30 bp, Artificial Sequence
  Synthetic oligonucleotide
cgatactcaggagtactggggaacaaggtg

SEQ ID NO: 143470 - DNA, 30 bp, Artificial Sequence
  Synthetic oligonucleotide
gtactgatgtgacatccatcgtataaggtg

SEQ ID NO: 143471 - DNA, 30 bp, Artificial Sequence
  Synthetic oligonucleotide
cggcttaagtggtatcgataagtacaggtg

SEQ ID NO: 143472 - DNA, 30 bp, Artificial Sequence
  Synthetic oligonucleotide
ttggcaatggttttatgtgtgtaccaggtg

SEQ ID NO: 143473 - DNA, 30 bp, Artificial Sequence
  Synthetic oligonucleotide
tggaccgttggattccgcgacaatcaggtg

SEQ ID NO: 143474 - DNA, 30 bp, Artificial Sequence
  Synthetic oligonucleotide
acgacacgaaggtacgtgagtgtagaggtg

SEQ ID NO: 143475 - DNA, 30 bp, Artificial Sequence
  Synthetic oligonucleotide
gatccagcccatgtttgtttaatcgaggtg

SEQ ID NO: 143476 - DNA, 30 bp, Artificial Sequence
  Synthetic oligonucleotide
aggggagtaaaatatgcaagataataggtg

SEQ ID NO: 143477 - DNA, 30 bp, Artificial Sequence
  Synthetic oligonucleotide
ggtcaatcgtactagcggaattcataggtg

SEQ ID NO: 143478 - DNA, 30 bp, Artificial Sequence
  Synthetic oligonucleotide
gcgatctgttcgcacgcgtaaaactaggtg

SEQ ID NO: 143479 - DNA, 30 bp, Artificial Sequence
  Synthetic oligonucleotide
ctaggtagccgcataccgccgggctaggtg

SEQ ID NO: 143480 - DNA, 30 bp, Artificial Sequence
  Synthetic oligonucleotide
gatccagatcaccgaagttgtaagtaggtg

SEQ ID NO: 143481 - DNA, 30 bp, Artificial Sequence
  Synthetic oligonucleotide
tgcgcaactagcctttagtcgcattaggtg

SEQ ID NO: 143482 - DNA, 30 bp, Artificial Sequence
  Synthetic oligonucleotide
gtttaaggaggaatgcaacccataacggtg

SEQ ID NO: 143483 - DNA, 30 bp, Artificial Sequence
  Synthetic oligonucleotide
catcaaaccaatagatattcaaccccggtg

SEQ ID NO: 143484 - DNA, 30 bp, Artificial Sequence
  Synthetic oligonucleotide
ggcggagcgcaatgccgaaacgtgccggtg

SEQ ID NO: 143485 - DNA, 30 bp, Artificial Sequence
  Synthetic oligonucleotide
taaggactacactaccaattgctcgcggtg

SEQ ID NO: 143486 - DNA, 30 bp, Artificial Sequence
  Synthetic oligonucleotide
atgatccgatcttgcgaatacacggcggtg

SEQ ID NO: 143487 - DNA, 25 bp, Artificial Sequence
  Synthetic oligonucleotide
cacaagatttgaaaagaatgcggtg

SEQ ID NO: 143488 - DNA, 30 bp, Artificial Sequence
  Synthetic oligonucleotide
tgttgattggtcaggttcagtcaatcggtg

SEQ ID NO: 143489 - DNA, 30 bp, Artificial Sequence
  Synthetic oligonucleotide
ttgatagcgcccattgagaccgtgtcggtg

SEQ ID NO: 143490 - DNA, 30 bp, Artificial Sequence
  Synthetic oligonucleotide
tgcgcgaagagggttccaccacgttcggtg

SEQ ID NO: 143491 - DNA, 30 bp, Artificial Sequence
  Synthetic oligonucleotide
tcttccgagccccggtaagccggttcggtg

SEQ ID NO: 143492 - DNA, 30 bp, Artificial Sequence
  Synthetic oligonucleotide
accttgtaatagcgttacaatcaaagggtg

SEQ ID NO: 143493 - DNA, 30 bp, Artificial Sequence
  Synthetic oligonucleotide
cgcaattgtaatcggaactttgagcgggtg

SEQ ID NO: 143494 - DNA, 30 bp, Artificial Sequence
  Synthetic oligonucleotide
acgtacacactggtcgtaggatactgggtg

SEQ ID NO: 143495 - DNA, 30 bp, Artificial Sequence
  Synthetic oligonucleotide
cttgccagagatgtggtgatactgtgggtg

SEQ ID NO: 143496 - DNA, 30 bp, Artificial Sequence
  Synthetic oligonucleotide
ttgcgttcacgaagtaaggccaaaatggtg

SEQ ID NO: 143497 - DNA, 30 bp, Artificial Sequence
  Synthetic oligonucleotide
ggggactttgccaaagttgtctaaatggtg

SEQ ID NO: 143498 - DNA, 30 bp, Artificial Sequence
  Synthetic oligonucleotide
agtcaccctggcacgggatttgcaatggtg

SEQ ID NO: 143499 - DNA, 30 bp, Artificial Sequence
  Synthetic oligonucleotide
tgagcgaggttctcgtcgttatcgatggtg

SEQ ID NO: 143500 - DNA, 30 bp, Artificial Sequence
  Synthetic oligonucleotide
tatgccgatttgctggtcacattgatggtg

SEQ ID NO: 143501 - DNA, 30 bp, Artificial Sequence
  Synthetic oligonucleotide
tccgtgaggctaatataaatatcagtggtg

SEQ ID NO: 143502 - DNA, 29 bp, Artificial Sequence
  Synthetic oligonucleotide
cgcggaatcaagaactgggatgcttggtg

SEQ ID NO: 143503 - DNA, 30 bp, Artificial Sequence
  Synthetic oligonucleotide
aggaagttccgagcgctggacataaatgtg

SEQ ID NO: 143504 - DNA, 30 bp, Artificial Sequence
  Synthetic oligonucleotide
aggtgagtttaaatcaatacattaaatgtg

SEQ ID NO: 143505 - DNA, 30 bp, Artificial Sequence
  Synthetic oligonucleotide
aacaatgctagacatagagatggcaatgtg

SEQ ID NO: 143506 - DNA, 30 bp, Artificial Sequence
  Synthetic oligonucleotide
gacatctgttgtgattctaacatcaatgtg

SEQ ID NO: 143507 - DNA, 30 bp, Artificial Sequence
  Synthetic oligonucleotide
gtcaattttacggttacgtctgggaatgtg

SEQ ID NO: 143508 - DNA, 30 bp, Artificial Sequence
  Synthetic oligonucleotide
cctctacgttacaccttaaagccccatgtg

SEQ ID NO: 143509 - DNA, 30 bp, Artificial Sequence
  Synthetic oligonucleotide
tgtaatttcgagttagatttcgagcatgtg

SEQ ID NO: 143510 - DNA, 30 bp, Artificial Sequence
  Synthetic oligonucleotide
atgctttgtacgcggaagtgtgcgcatgtg

SEQ ID NO: 143511 - DNA, 30 bp, Artificial Sequence
  Synthetic oligonucleotide
tcatagctgaattatgtgtaggttcatgtg

SEQ ID NO: 143512 - DNA, 30 bp, Artificial Sequence
  Synthetic oligonucleotide
aatcatgatcgcgagtaaccagcagatgtg

SEQ ID NO: 143513 - DNA, 30 bp, Artificial Sequence
  Synthetic oligonucleotide
agctgcactgcgcgggaggttcgagatgtg

SEQ ID NO: 143514 - DNA, 30 bp, Artificial Sequence
  Synthetic oligonucleotide
gaaagacagaccgaacagacttacgatgtg

SEQ ID NO: 143515 - DNA, 30 bp, Artificial Sequence
  Synthetic oligonucleotide
ttgtaaaaattgatgcaaccttagtatgtg

SEQ ID NO: 143516 - DNA, 30 bp, Artificial Sequence
  Synthetic oligonucleotide
tcaaaggcaatgagaagaggcacttatgtg

SEQ ID NO: 143517 - DNA, 30 bp, Artificial Sequence
  Synthetic oligonucleotide
taacacagcctctaacaatagcacactgtg

SEQ ID NO: 143518 - DNA, 30 bp, Artificial Sequence
  Synthetic oligonucleotide
cgcgaagttggtccggcggtaagacctgtg

SEQ ID NO: 143519 - DNA, 30 bp, Artificial Sequence
  Synthetic oligonucleotide
tcattaagggctggaggtggcgaccctgtg

SEQ ID NO: 143520 - DNA, 30 bp, Artificial Sequence
  Synthetic oligonucleotide
cctgcgaaaatcgaatgaaccgcccctgtg

SEQ ID NO: 143521 - DNA, 30 bp, Artificial Sequence
  Synthetic oligonucleotide
agaccgaataaaccggcactacgccctgtg

SEQ ID NO: 143522 - DNA, 30 bp, Artificial Sequence
  Synthetic oligonucleotide
agaccgaaagctgtagtgcagtcgcctgtg

SEQ ID NO: 143523 - DNA, 30 bp, Artificial Sequence
  Synthetic oligonucleotide
cactataccaccatagctgcatgtcctgtg

SEQ ID NO: 143524 - DNA, 30 bp, Artificial Sequence
  Synthetic oligonucleotide
gagaaggcaaacatatctcgacacgctgtg

SEQ ID NO: 143525 - DNA, 30 bp, Artificial Sequence
  Synthetic oligonucleotide
aggggttccaggagaatggtcaaggctgtg

SEQ ID NO: 143526 - DNA, 30 bp, Artificial Sequence
  Synthetic oligonucleotide
aattatgtaacgtagaaaggtgctgctgtg

SEQ ID NO: 143527 - DNA, 30 bp, Artificial Sequence
  Synthetic oligonucleotide
atttgagggacacatactggtcgtgctgtg

SEQ ID NO: 143528 - DNA, 30 bp, Artificial Sequence
  Synthetic oligonucleotide
cttagatccctaaccccgaagagatctgtg

SEQ ID NO: 143529 - DNA, 30 bp, Artificial Sequence
  Synthetic oligonucleotide
ctatgaccaatttggttctttcggtctgtg

SEQ ID NO: 143530 - DNA, 30 bp, Artificial Sequence
  Synthetic oligonucleotide
cgggcaacgaggcagaccttccaaagtgtg

SEQ ID NO: 143531 - DNA, 30 bp, Artificial Sequence
  Synthetic oligonucleotide
gaggacttatcaatgtgagtttcgagtgtg

SEQ ID NO: 143532 - DNA, 30 bp, Artificial Sequence
  Synthetic oligonucleotide
acgaaacttacaacggggtgggatagtgtg

SEQ ID NO: 143533 - DNA, 30 bp, Artificial Sequence
  Synthetic oligonucleotide
cagttagtaaaaggaatactggctagtgtg

SEQ ID NO: 143534 - DNA, 30 bp, Artificial Sequence
  Synthetic oligonucleotide
cagcgcctttcgccactttaaattagtgtg

SEQ ID NO: 143535 - DNA, 30 bp, Artificial Sequence
  Synthetic oligonucleotide
catgccgccgatcgtctccgctttagtgtg

SEQ ID NO: 143536 - DNA, 30 bp, Artificial Sequence
  Synthetic oligonucleotide
gaagaagctataatcaccaagtttagtgtg

SEQ ID NO: 143537 - DNA, 30 bp, Artificial Sequence
  Synthetic oligonucleotide
ggcgagtattcgtgccgatttcaacgtgtg

SEQ ID NO: 143538 - DNA, 30 bp, Artificial Sequence
  Synthetic oligonucleotide
agctcctaacgtgagctatgaatccgtgtg

SEQ ID NO: 143539 - DNA, 30 bp, Artificial Sequence
  Synthetic oligonucleotide
taacatcaagacctgacatacgtccgtgtg

SEQ ID NO: 143540 - DNA, 30 bp, Artificial Sequence
  Synthetic oligonucleotide
cgtatcgggagtctatctaaggggcgtgtg

SEQ ID NO: 143541 - DNA, 30 bp, Artificial Sequence
  Synthetic oligonucleotide
ccaattaatttagctagggtctaaggtgtg

SEQ ID NO: 143542 - DNA, 30 bp, Artificial Sequence
  Synthetic oligonucleotide
gtatgctccgaatcaggtcgctggggtgtg

SEQ ID NO: 143543 - DNA, 30 bp, Artificial Sequence
  Synthetic oligonucleotide
aaaaggggaaggcatgtgggttcgtgtgtg

SEQ ID NO: 143544 - DNA, 30 bp, Artificial Sequence
  Synthetic oligonucleotide
aagggaacaaagtaatgaacggtgtgtgtg

SEQ ID NO: 143545 - DNA, 30 bp, Artificial Sequence
  Synthetic oligonucleotide
gttggtatgccgaacctgacatcttgtgtg

SEQ ID NO: 143546 - DNA, 30 bp, Artificial Sequence
  Synthetic oligonucleotide
tttcaggatgcccatatagatcaaattgtg

SEQ ID NO: 143547 - DNA, 30 bp, Artificial Sequence
  Synthetic oligonucleotide
aaggatattgcgattgaatcaccaattgtg

SEQ ID NO: 143548 - DNA, 30 bp, Artificial Sequence
  Synthetic oligonucleotide
catggcttaaaacaaaagtggggaattgtg

SEQ ID NO: 143549 - DNA, 30 bp, Artificial Sequence
  Synthetic oligonucleotide
agagaagagtgagacccatttttcattgtg

SEQ ID NO: 143550 - DNA, 30 bp, Artificial Sequence
  Synthetic oligonucleotide
ttcgaggcctgcagatgaaaagaacttgtg

SEQ ID NO: 143551 - DNA, 30 bp, Artificial Sequence
  Synthetic oligonucleotide
gtagtgcaaaccagataatagtgggttgtg

SEQ ID NO: 143552 - DNA, 30 bp, Artificial Sequence
  Synthetic oligonucleotide
gtgtgattaggagatagggtgaactttgtg

SEQ ID NO: 143553 - DNA, 30 bp, Artificial Sequence
  Synthetic oligonucleotide
ggacaaagagtccctgagcaaaattttgtg

SEQ ID NO: 143554 - DNA, 30 bp, Artificial Sequence
  Synthetic oligonucleotide
tggttagtcgagtcctgatccgtaaaattg

SEQ ID NO: 143555 - DNA, 30 bp, Artificial Sequence
  Synthetic oligonucleotide
gctacttcctaagagcccaaggacaaattg

SEQ ID NO: 143556 - DNA, 30 bp, Artificial Sequence
  Synthetic oligonucleotide
gtaagccctcaaggaaagttaatcaaattg

SEQ ID NO: 143557 - DNA, 30 bp, Artificial Sequence
  Synthetic oligonucleotide
agtaggatcgtgtgagagctgacgaaattg

SEQ ID NO: 143558 - DNA, 30 bp, Artificial Sequence
  Synthetic oligonucleotide
cgccagggtaacatcggctacgttaaattg

SEQ ID NO: 143559 - DNA, 30 bp, Artificial Sequence
  Synthetic oligonucleotide
caaatatagaggttccccagtctacaattg

SEQ ID NO: 143560 - DNA, 30 bp, Artificial Sequence
  Synthetic oligonucleotide
catatgcacataattaaataggaggaattg

SEQ ID NO: 143561 - DNA, 30 bp, Artificial Sequence
  Synthetic oligonucleotide
atgtgataacttgcggattaataggaattg

SEQ ID NO: 143562 - DNA, 30 bp, Artificial Sequence
  Synthetic oligonucleotide
gcttacatacaattaggaagcactgaattg

SEQ ID NO: 143563 - DNA, 30 bp, Artificial Sequence
  Synthetic oligonucleotide
tcgggtcgtgcacgggcccgttctgaattg

SEQ ID NO: 143564 - DNA, 30 bp, Artificial Sequence
  Synthetic oligonucleotide
ctataaacatatgccgctaccggtgaattg

SEQ ID NO: 143565 - DNA, 30 bp, Artificial Sequence
  Synthetic oligonucleotide
gccatacaaacgtaagaagtagattaattg

SEQ ID NO: 143566 - DNA, 30 bp, Artificial Sequence
  Synthetic oligonucleotide
tgacctcgtgtgcgcgtcaggccttaattg

SEQ ID NO: 143567 - DNA, 30 bp, Artificial Sequence
  Synthetic oligonucleotide
ggttagcagggcatcccattgtcttaattg

SEQ ID NO: 143568 - DNA, 31 bp, Artificial Sequence
  Synthetic oligonucleotide
catctcgaattactatgcaaacagcacattg

SEQ ID NO: 143569 - DNA, 30 bp, Artificial Sequence
  Synthetic oligonucleotide
cacagatcgaagatgaattcagagacattg

SEQ ID NO: 143570 - DNA, 30 bp, Artificial Sequence
  Synthetic oligonucleotide
cgtctttgctgcctatcactcacaccattg

SEQ ID NO: 143571 - DNA, 30 bp, Artificial Sequence
  Synthetic oligonucleotide
caacggccgggtaatgttaatattccattg

SEQ ID NO: 143572 - DNA, 30 bp, Artificial Sequence
  Synthetic oligonucleotide
cggtgtatattaagtatcgcaccggcattg

SEQ ID NO: 143573 - DNA, 30 bp, Artificial Sequence
  Synthetic oligonucleotide
cattggcgactaaaccaacattcggcattg

SEQ ID NO: 143574 - DNA, 30 bp, Artificial Sequence
  Synthetic oligonucleotide
tggtacaacgtttggattgaacgggcattg

SEQ ID NO: 143575 - DNA, 30 bp, Artificial Sequence
  Synthetic oligonucleotide
catccgtgctacgtaacaacttaatcattg

SEQ ID NO: 143576 - DNA, 30 bp, Artificial Sequence
  Synthetic oligonucleotide
cagaggccggcgaatgtaaccctatcattg

SEQ ID NO: 143577 - DNA, 30 bp, Artificial Sequence
  Synthetic oligonucleotide
agaatagggtagtatagatcgtgttcattg

SEQ ID NO: 143578 - DNA, 30 bp, Artificial Sequence
  Synthetic oligonucleotide
ggccgccactggactctatttatttcattg

SEQ ID NO: 143579 - DNA, 30 bp, Artificial Sequence
  Synthetic oligonucleotide
ctgcggaaagtttgatcgagtgtaagattg

SEQ ID NO: 143580 - DNA, 30 bp, Artificial Sequence
  Synthetic oligonucleotide
aacgcccgactggcacataatgcgagattg

SEQ ID NO: 143581 - DNA, 30 bp, Artificial Sequence
  Synthetic oligonucleotide
tttggaaacagacagtcttggtatagattg

SEQ ID NO: 143582 - DNA, 30 bp, Artificial Sequence
  Synthetic oligonucleotide
atgggtataaaaacatagcgggtccgattg

SEQ ID NO: 143583 - DNA, 30 bp, Artificial Sequence
  Synthetic oligonucleotide
cgctttacctcataaggtagggatcgattg

SEQ ID NO: 143584 - DNA, 30 bp, Artificial Sequence
  Synthetic oligonucleotide
tgacgttcggcacccattggcgctcgattg

SEQ ID NO: 143585 - DNA, 30 bp, Artificial Sequence
  Synthetic oligonucleotide
tgaatcatgccggaagtagaggttcgattg

SEQ ID NO: 143586 - DNA, 30 bp, Artificial Sequence
  Synthetic oligonucleotide
gagtcatcgatttcgataggattcggattg

SEQ ID NO: 143587 - DNA, 30 bp, Artificial Sequence
  Synthetic oligonucleotide
atgccgtgaatacatggatatgttggattg

SEQ ID NO: 143588 - DNA, 30 bp, Artificial Sequence
  Synthetic oligonucleotide
gtatgaagtggcagagggccgtttggattg

SEQ ID NO: 143589 - DNA, 30 bp, Artificial Sequence
  Synthetic oligonucleotide
tcgatacggccgaaatacgcataatgattg

SEQ ID NO: 143590 - DNA, 30 bp, Artificial Sequence
  Synthetic oligonucleotide
aagattcaatgagtgtggtatgcgtgattg

SEQ ID NO: 143591 - DNA, 30 bp, Artificial Sequence
  Synthetic oligonucleotide
acgcttgagattcgctcaataatttgattg

SEQ ID NO: 143592 - DNA, 30 bp, Artificial Sequence
  Synthetic oligonucleotide
gtacctaggcagtataggtttcacatattg

SEQ ID NO: 143593 - DNA, 30 bp, Artificial Sequence
  Synthetic oligonucleotide
ccatgacggtggttcacctcttcgatattg

SEQ ID NO: 143594 - DNA, 30 bp, Artificial Sequence
  Synthetic oligonucleotide
gccttagtcttgagatgcttcgctatattg

SEQ ID NO: 143595 - DNA, 30 bp, Artificial Sequence
  Synthetic oligonucleotide
ccggcaactttacgacgggtcagagtattg

SEQ ID NO: 143596 - DNA, 30 bp, Artificial Sequence
  Synthetic oligonucleotide
tgccctcccgccacaggtctccacgtattg

SEQ ID NO: 143597 - DNA, 30 bp, Artificial Sequence
  Synthetic oligonucleotide
ctcagcagcggaataaagttagccgtattg

SEQ ID NO: 143598 - DNA, 30 bp, Artificial Sequence
  Synthetic oligonucleotide
taggtttaaccccctaccacagtcgtattg

SEQ ID NO: 143599 - DNA, 30 bp, Artificial Sequence
  Synthetic oligonucleotide
aatcgcactaaggtttatgaggtggtattg

SEQ ID NO: 143600 - DNA, 30 bp, Artificial Sequence
  Synthetic oligonucleotide
agaacaatcactattgacagtactgtattg

SEQ ID NO: 143601 - DNA, 30 bp, Artificial Sequence
  Synthetic oligonucleotide
tcatccagaaaacgtgcgagcgctgtattg

SEQ ID NO: 143602 - DNA, 30 bp, Artificial Sequence
  Synthetic oligonucleotide
gatgtggacaaccaacgaaaacgtttattg

SEQ ID NO: 143603 - DNA, 30 bp, Artificial Sequence
  Synthetic oligonucleotide
ggtacttagttccatgacactacaaacttg

SEQ ID NO: 143604 - DNA, 30 bp, Artificial Sequence
  Synthetic oligonucleotide
caaaagcaccagagaatgttggcaaacttg

SEQ ID NO: 143605 - DNA, 30 bp, Artificial Sequence
  Synthetic oligonucleotide
tggtaccgatacgggtaaattgacaacttg

SEQ ID NO: 143606 - DNA, 30 bp, Artificial Sequence
  Synthetic oligonucleotide
tatcactaacttatcaaaaagtctaacttg

SEQ ID NO: 143607 - DNA, 30 bp, Artificial Sequence
  Synthetic oligonucleotide
ttactggtgtcaccatcaaggacccacttg

SEQ ID NO: 143608 - DNA, 30 bp, Artificial Sequence
  Synthetic oligonucleotide
gggtgtttatgcagatgtacgcttcacttg

SEQ ID NO: 143609 - DNA, 30 bp, Artificial Sequence
  Synthetic oligonucleotide
tcgacggaaacaccgcgcttgtaggacttg

SEQ ID NO: 143610 - DNA, 30 bp, Artificial Sequence
  Synthetic oligonucleotide
cctcattataaagaacctaacaatgacttg

SEQ ID NO: 143611 - DNA, 30 bp, Artificial Sequence
  Synthetic oligonucleotide
gtgcggtctttaccggctcggaaatacttg

SEQ ID NO: 143612 - DNA, 30 bp, Artificial Sequence
  Synthetic oligonucleotide
gaaaaacttcgaaggcatactagatacttg

SEQ ID NO: 143613 - DNA, 30 bp, Artificial Sequence
  Synthetic oligonucleotide
ggtcaccaggatttgccgatgctctacttg

SEQ ID NO: 143614 - DNA, 30 bp, Artificial Sequence
  Synthetic oligonucleotide
gtggtagtgatctcaagtgcatccaccttg

SEQ ID NO: 143615 - DNA, 30 bp, Artificial Sequence
  Synthetic oligonucleotide
taataggagacaatgtacttcgagcccttg

SEQ ID NO: 143616 - DNA, 30 bp, Artificial Sequence
  Synthetic oligonucleotide
tgctcggaacttgtaaatatcgccgccttg

SEQ ID NO: 143617 - DNA, 30 bp, Artificial Sequence
  Synthetic oligonucleotide
taagtggacggttatgcgagtggtgccttg

SEQ ID NO: 143618 - DNA, 30 bp, Artificial Sequence
  Synthetic oligonucleotide
gtgtaatgctcttaggttgatacatccttg

SEQ ID NO: 143619 - DNA, 30 bp, Artificial Sequence
  Synthetic oligonucleotide
ggcacagtagtacctgatcaggcctccttg

SEQ ID NO: 143620 - DNA, 30 bp, Artificial Sequence
  Synthetic oligonucleotide
gccgatccttagttaagtaggaaaagcttg

SEQ ID NO: 143621 - DNA, 30 bp, Artificial Sequence
  Synthetic oligonucleotide
gtttgggagaaagggtaattgagaagcttg

SEQ ID NO: 143622 - DNA, 30 bp, Artificial Sequence
  Synthetic oligonucleotide
agcaacaagtacgttcatcaattaagcttg

SEQ ID NO: 143623 - DNA, 30 bp, Artificial Sequence
  Synthetic oligonucleotide
aacggtaaactgaaagcattgacgagcttg

SEQ ID NO: 143624 - DNA, 30 bp, Artificial Sequence
  Synthetic oligonucleotide
cagcgggacctcccatattcgctgagcttg

SEQ ID NO: 143625 - DNA, 30 bp, Artificial Sequence
  Synthetic oligonucleotide
cgcccctgtgcagaatcaaatgatcgcttg

SEQ ID NO: 143626 - DNA, 30 bp, Artificial Sequence
  Synthetic oligonucleotide
attgcggtttggctcgaagattatcgcttg

SEQ ID NO: 143627 - DNA, 30 bp, Artificial Sequence
  Synthetic oligonucleotide
cgtcgacacatgcagaccgctgtgggcttg

SEQ ID NO: 143628 - DNA, 30 bp, Artificial Sequence
  Synthetic oligonucleotide
atgaccagatcatgatcctacatctgcttg

SEQ ID NO: 143629 - DNA, 30 bp, Artificial Sequence
  Synthetic oligonucleotide
agtacaggtttcgagggtagagagtgcttg

SEQ ID NO: 143630 - DNA, 30 bp, Artificial Sequence
  Synthetic oligonucleotide
agagaaccgtagagggagtaagtgtgcttg

SEQ ID NO: 143631 - DNA, 30 bp, Artificial Sequence
  Synthetic oligonucleotide
cgagcctgtctgccggtctcttgaatcttg

SEQ ID NO: 143632 - DNA, 30 bp, Artificial Sequence
  Synthetic oligonucleotide
ttaaggataatagaatgaaggcccatcttg

SEQ ID NO: 143633 - DNA, 30 bp, Artificial Sequence
  Synthetic oligonucleotide
tctagtgttgatagcggagaactactcttg

SEQ ID NO: 143634 - DNA, 30 bp, Artificial Sequence
  Synthetic oligonucleotide
gtcactattgaactccagaagaccgtcttg

SEQ ID NO: 143635 - DNA, 30 bp, Artificial Sequence
  Synthetic oligonucleotide
aagtctacttgatcgagaaacaggttcttg

SEQ ID NO: 143636 - DNA, 30 bp, Artificial Sequence
  Synthetic oligonucleotide
ctgatacgccaggattgctggacaaagttg

SEQ ID NO: 143637 - DNA, 30 bp, Artificial Sequence
  Synthetic oligonucleotide
aggtgccataagaggacccgtcgaaagttg

SEQ ID NO: 143638 - DNA, 30 bp, Artificial Sequence
  Synthetic oligonucleotide
aaggctcggcgccggtatgagaagaagttg

SEQ ID NO: 143639 - DNA, 30 bp, Artificial Sequence
  Synthetic oligonucleotide
actcgggtaggtgggaaatctcagaagttg

SEQ ID NO: 143640 - DNA, 30 bp, Artificial Sequence
  Synthetic oligonucleotide
ccacgtattgtcgaagagaccgagaagttg

SEQ ID NO: 143641 - DNA, 30 bp, Artificial Sequence
  Synthetic oligonucleotide
tctaggctgggaccatctgccctgaagttg

SEQ ID NO: 143642 - DNA, 30 bp, Artificial Sequence
  Synthetic oligonucleotide
aaaataaacgagatgcacctattgaagttg

SEQ ID NO: 143643 - DNA, 30 bp, Artificial Sequence
  Synthetic oligonucleotide
ttacacttacagaccccatcgcggcagttg

SEQ ID NO: 143644 - DNA, 30 bp, Artificial Sequence
  Synthetic oligonucleotide
aatgatcaggaaggcaacaactctcagttg

SEQ ID NO: 143645 - DNA, 30 bp, Artificial Sequence
  Synthetic oligonucleotide
gcagaagcaggcaaccaactgcgagagttg

SEQ ID NO: 143646 - DNA, 30 bp, Artificial Sequence
  Synthetic oligonucleotide
cacgaatcaagctcaattttaaacgagttg

SEQ ID NO: 143647 - DNA, 30 bp, Artificial Sequence
  Synthetic oligonucleotide
gattaaggtcgagtccttgcgtccgagttg

SEQ ID NO: 143648 - DNA, 30 bp, Artificial Sequence
  Synthetic oligonucleotide
ttgcggcaagagagatacgccgaggagttg

SEQ ID NO: 143649 - DNA, 30 bp, Artificial Sequence
  Synthetic oligonucleotide
gtgacctcttaatatcaggggctggagttg

SEQ ID NO: 143650 - DNA, 30 bp, Artificial Sequence
  Synthetic oligonucleotide
ggaatacacgaaattgtcggatcatagttg

SEQ ID NO: 143651 - DNA, 30 bp, Artificial Sequence
  Synthetic oligonucleotide
aacgctagtctggcttccaccatgtagttg

SEQ ID NO: 143652 - DNA, 30 bp, Artificial Sequence
  Synthetic oligonucleotide
cacatcgtggccacaacaaaaggaacgttg

SEQ ID NO: 143653 - DNA, 30 bp, Artificial Sequence
  Synthetic oligonucleotide
ccttaccttctccgcaagttcggaacgttg

SEQ ID NO: 143654 - DNA, 30 bp, Artificial Sequence
  Synthetic oligonucleotide
ttcgcgggtgtgaaggatgcactaacgttg

SEQ ID NO: 143655 - DNA, 30 bp, Artificial Sequence
  Synthetic oligonucleotide
atgagagccgttaagagaaactccacgttg

SEQ ID NO: 143656 - DNA, 30 bp, Artificial Sequence
  Synthetic oligonucleotide
atcagtcatataaggtcaaactcgacgttg

SEQ ID NO: 143657 - DNA, 30 bp, Artificial Sequence
  Synthetic oligonucleotide
ttccactcttaagattgaagtcgtacgttg

SEQ ID NO: 143658 - DNA, 30 bp, Artificial Sequence
  Synthetic oligonucleotide
gtaaggtgcgcgtcttcgtaaggcgcgttg

SEQ ID NO: 143659 - DNA, 30 bp, Artificial Sequence
  Synthetic oligonucleotide
ccgaaggggggcgaagggtcaggggcgttg

SEQ ID NO: 143660 - DNA, 30 bp, Artificial Sequence
  Synthetic oligonucleotide
tccctccaatgttataactactcctcgttg

SEQ ID NO: 143661 - DNA, 30 bp, Artificial Sequence
  Synthetic oligonucleotide
agctcgtagagtccccgggctaggaggttg

SEQ ID NO: 143662 - DNA, 30 bp, Artificial Sequence
  Synthetic oligonucleotide
ttggtttgcttgaatgccaagatgaggttg

SEQ ID NO: 143663 - DNA, 30 bp, Artificial Sequence
  Synthetic oligonucleotide
ccgaaatctccattctgatgattgaggttg

SEQ ID NO: 143664 - DNA, 30 bp, Artificial Sequence
  Synthetic oligonucleotide
aggccacggaccactctgaccactaggttg

SEQ ID NO: 143665 - DNA, 30 bp, Artificial Sequence
  Synthetic oligonucleotide
gctagcccatttgattatcggggtaggttg

SEQ ID NO: 143666 - DNA, 30 bp, Artificial Sequence
  Synthetic oligonucleotide
ttaggtccaatggcacggacactacggttg

SEQ ID NO: 143667 - DNA, 30 bp, Artificial Sequence
  Synthetic oligonucleotide
ttcaggacggttataatgtacgtccggttg

SEQ ID NO: 143668 - DNA, 30 bp, Artificial Sequence
  Synthetic oligonucleotide
atgtgaagtggggagctgtactaagggttg

SEQ ID NO: 143669 - DNA, 30 bp, Artificial Sequence
  Synthetic oligonucleotide
aacgctcatgttcaagcgctcacagggttg

SEQ ID NO: 143670 - DNA, 30 bp, Artificial Sequence
  Synthetic oligonucleotide
gttatagaacacaattacgagacagggttg

SEQ ID NO: 143671 - DNA, 30 bp, Artificial Sequence
  Synthetic oligonucleotide
atgcgtacgccaaagaccggcagggggttg

SEQ ID NO: 143672 - DNA, 30 bp, Artificial Sequence
  Synthetic oligonucleotide
agtatgcttacgtttcggtttaggtggttg

SEQ ID NO: 143673 - DNA, 30 bp, Artificial Sequence
  Synthetic oligonucleotide
ccgcctattggggaacctctcgaaatgttg

SEQ ID NO: 143674 - DNA, 30 bp, Artificial Sequence
  Synthetic oligonucleotide
ctcacaacaagtagtcagggagatatgttg

SEQ ID NO: 143675 - DNA, 30 bp, Artificial Sequence
  Synthetic oligonucleotide
aatgtaggaatatgtgtcaaaagcctgttg

SEQ ID NO: 143676 - DNA, 30 bp, Artificial Sequence
  Synthetic oligonucleotide
cacgctattccgacagtccgtattctgttg

SEQ ID NO: 143677 - DNA, 30 bp, Artificial Sequence
  Synthetic oligonucleotide
aattggccatctgcagggatcgttctgttg

SEQ ID NO: 143678 - DNA, 30 bp, Artificial Sequence
  Synthetic oligonucleotide
ctgtattctacaacgattcctcaagtgttg

SEQ ID NO: 143679 - DNA, 30 bp, Artificial Sequence
  Synthetic oligonucleotide
tgcgtcctagcgactacttctcctgtgttg

SEQ ID NO: 143680 - DNA, 30 bp, Artificial Sequence
  Synthetic oligonucleotide
gggacgggctggagttctcgtcgtgtgttg

SEQ ID NO: 143681 - DNA, 30 bp, Artificial Sequence
  Synthetic oligonucleotide
gctagccgaacggaccatgtgtcattgttg

SEQ ID NO: 143682 - DNA, 30 bp, Artificial Sequence
  Synthetic oligonucleotide
tcacgagaacgcatctggggtccaaatttg

SEQ ID NO: 143683 - DNA, 30 bp, Artificial Sequence
  Synthetic oligonucleotide
cagcccggagtcccgagattgtacaatttg

SEQ ID NO: 143684 - DNA, 30 bp, Artificial Sequence
  Synthetic oligonucleotide
ggcggggggctgccgtaaccaaagaatttg

SEQ ID NO: 143685 - DNA, 30 bp, Artificial Sequence
  Synthetic oligonucleotide
tcgggggtccaatgtgacgttatgaatttg

SEQ ID NO: 143686 - DNA, 30 bp, Artificial Sequence
  Synthetic oligonucleotide
gcgaagtcaaagactcctcgtaaacatttg

SEQ ID NO: 143687 - DNA, 30 bp, Artificial Sequence
  Synthetic oligonucleotide
tcgaatcgcgctctgcctatattgcatttg

SEQ ID NO: 143688 - DNA, 31 bp, Artificial Sequence
  Synthetic oligonucleotide
cttacccatgctggagaaaaggactcatttg

SEQ ID NO: 143689 - DNA, 30 bp, Artificial Sequence
  Synthetic oligonucleotide
cacggacgatggtggtttttaggggatttg

SEQ ID NO: 143690 - DNA, 30 bp, Artificial Sequence
  Synthetic oligonucleotide
gttaagctccgtctgcgtccagactatttg

SEQ ID NO: 143691 - DNA, 30 bp, Artificial Sequence
  Synthetic oligonucleotide
gagcgagttgtttgtgatgaggactatttg

SEQ ID NO: 143692 - DNA, 30 bp, Artificial Sequence
  Synthetic oligonucleotide
cacgaaggacagtgatgggaggccgctttg

SEQ ID NO: 143693 - DNA, 30 bp, Artificial Sequence
  Synthetic oligonucleotide
gttatcaatgcaaggaattaattgtctttg

SEQ ID NO: 143694 - DNA, 30 bp, Artificial Sequence
  Synthetic oligonucleotide
actctcactgctgggaggggatgttctttg

SEQ ID NO: 143695 - DNA, 30 bp, Artificial Sequence
  Synthetic oligonucleotide
caagttgcaaacgccgatatgtaaagtttg

SEQ ID NO: 143696 - DNA, 30 bp, Artificial Sequence
  Synthetic oligonucleotide
gtgtgcatcgtgtgctctccaataagtttg

SEQ ID NO: 143697 - DNA, 30 bp, Artificial Sequence
  Synthetic oligonucleotide
ctgtgagatgaacgcgtgagtattagtttg

SEQ ID NO: 143698 - DNA, 30 bp, Artificial Sequence
  Synthetic oligonucleotide
tctaatcagaattcacgttaaaaccgtttg

SEQ ID NO: 143699 - DNA, 30 bp, Artificial Sequence
  Synthetic oligonucleotide
aaggccgaatgggtgtccggtgcgcgtttg

SEQ ID NO: 143700 - DNA, 30 bp, Artificial Sequence
  Synthetic oligonucleotide
agtgtacggtcccatccgggaaagggtttg

SEQ ID NO: 143701 - DNA, 30 bp, Artificial Sequence
  Synthetic oligonucleotide
cgtacgtcagacgagaatctagcgggtttg

SEQ ID NO: 143702 - DNA, 30 bp, Artificial Sequence
  Synthetic oligonucleotide
atccaatcgacagggtctttcaaatgtttg

SEQ ID NO: 143703 - DNA, 30 bp, Artificial Sequence
  Synthetic oligonucleotide
ggtgctcgacacgtccgtaatagctgtttg

SEQ ID NO: 143704 - DNA, 30 bp, Artificial Sequence
  Synthetic oligonucleotide
cccaatataaaggaccctgggccaattttg

SEQ ID NO: 143705 - DNA, 30 bp, Artificial Sequence
  Synthetic oligonucleotide
agatccggtgtaccgttcatctgaattttg

SEQ ID NO: 143706 - DNA, 30 bp, Artificial Sequence
  Synthetic oligonucleotide
taatagaccaatggtctgacttgcattttg

SEQ ID NO: 143707 - DNA, 30 bp, Artificial Sequence
  Synthetic oligonucleotide
ggtaccttgcaggtagaccattcacttttg

SEQ ID NO: 143708 - DNA, 30 bp, Artificial Sequence
  Synthetic oligonucleotide
ccgatgggcgctagacgaataggccttttg

SEQ ID NO: 143709 - DNA, 30 bp, Artificial Sequence
  Synthetic oligonucleotide
aagcgtcacgcaatggttattgagcttttg

SEQ ID NO: 143710 - DNA, 30 bp, Artificial Sequence
  Synthetic oligonucleotide
aaacgacttcacgttccacgacgtcttttg

SEQ ID NO: 143711 - DNA, 30 bp, Artificial Sequence
  Synthetic oligonucleotide
gtcgattgcgaacaagggtcgacagttttg

SEQ ID NO: 143712 - DNA, 30 bp, Artificial Sequence
  Synthetic oligonucleotide
caagctggatcccataagggagtcgttttg

SEQ ID NO: 143713 - DNA, 30 bp, Artificial Sequence
  Synthetic oligonucleotide
aggtgcataggaccggatgcctatgttttg

SEQ ID NO: 143714 - DNA, 30 bp, Artificial Sequence
  Synthetic oligonucleotide
caagaaatgggaggctctcgtcttgttttg

SEQ ID NO: 143715 - DNA, 30 bp, Artificial Sequence
  Synthetic oligonucleotide
taggagtaaagcacattgatccaatttttg

SEQ ID NO: 143716 - DNA, 30 bp, Artificial Sequence
  Synthetic oligonucleotide
atgctatggcagattagaacaccctttttg

SEQ ID NO: 143717 - DNA, 30 bp, Artificial Sequence
  Synthetic oligonucleotide
aggaagaaaactaacatcggtcaaaaaaat

SEQ ID NO: 143718 - DNA, 30 bp, Artificial Sequence
  Synthetic oligonucleotide
ttggagcatcgcgttggagatagcaaaaat

SEQ ID NO: 143719 - DNA, 30 bp, Artificial Sequence
  Synthetic oligonucleotide
gtctgagaactgccacttactgcgaaaaat

SEQ ID NO: 143720 - DNA, 30 bp, Artificial Sequence
  Synthetic oligonucleotide
ggagatacaattcataagaagttgaaaaat

SEQ ID NO: 143721 - DNA, 30 bp, Artificial Sequence
  Synthetic oligonucleotide
cgtcgtgatttcgtcagtaagggtaaaaat

SEQ ID NO: 143722 - DNA, 30 bp, Artificial Sequence
  Synthetic oligonucleotide
tatggacgctatgacccagacttccaaaat

SEQ ID NO: 143723 - DNA, 30 bp, Artificial Sequence
  Synthetic oligonucleotide
taggacaactgaaccccaagcacagaaaat

SEQ ID NO: 143724 - DNA, 30 bp, Artificial Sequence
  Synthetic oligonucleotide
ggttcatctcagggtaggagggacgaaaat

SEQ ID NO: 143725 - DNA, 30 bp, Artificial Sequence
  Synthetic oligonucleotide
gcaagcccgatgttgtttaacggggaaaat

SEQ ID NO: 143726 - DNA, 30 bp, Artificial Sequence
  Synthetic oligonucleotide
cacggagtgatgaaatacgtcggctaaaat

SEQ ID NO: 143727 - DNA, 30 bp, Artificial Sequence
  Synthetic oligonucleotide
gtcaagtaccgttaggaacctatttaaaat

SEQ ID NO: 143728 - DNA, 30 bp, Artificial Sequence
  Synthetic oligonucleotide
aggtgacacggagatgtgaccgaaacaaat

SEQ ID NO: 143729 - DNA, 30 bp, Artificial Sequence
  Synthetic oligonucleotide
ctgggctgaacgaaagagtgaccgacaaat

SEQ ID NO: 143730 - DNA, 30 bp, Artificial Sequence
  Synthetic oligonucleotide
gctctcgcggacagcgaaccagatacaaat

SEQ ID NO: 143731 - DNA, 30 bp, Artificial Sequence
  Synthetic oligonucleotide
atcgcccgctggaagcccatgtgtacaaat

SEQ ID NO: 143732 - DNA, 30 bp, Artificial Sequence
  Synthetic oligonucleotide
gtctaaagagggtggtttacaacaccaaat

SEQ ID NO: 143733 - DNA, 30 bp, Artificial Sequence
  Synthetic oligonucleotide
cgacttctcaggtattgtactacaccaaat

SEQ ID NO: 143734 - DNA, 30 bp, Artificial Sequence
  Synthetic oligonucleotide
tatagtcatcacaagggtacacaagcaaat

SEQ ID NO: 143735 - DNA, 25 bp, Artificial Sequence
  Synthetic oligonucleotide
taaaacgtggggacgattggcaaat

SEQ ID NO: 143736 - DNA, 30 bp, Artificial Sequence
  Synthetic oligonucleotide
acacctaccataataggccacttggcaaat

SEQ ID NO: 143737 - DNA, 30 bp, Artificial Sequence
  Synthetic oligonucleotide
cagggcgcgtcagtctgagtcattgcaaat

SEQ ID NO: 143738 - DNA, 30 bp, Artificial Sequence
  Synthetic oligonucleotide
agccaagatgttgacaatgccccatcaaat

SEQ ID NO: 143739 - DNA, 30 bp, Artificial Sequence
  Synthetic oligonucleotide
ggagaacgcgtaacttctccatagtcaaat

SEQ ID NO: 143740 - DNA, 30 bp, Artificial Sequence
  Synthetic oligonucleotide
ttcgggtgacattcacctcactcaagaaat

SEQ ID NO: 143741 - DNA, 30 bp, Artificial Sequence
  Synthetic oligonucleotide
taaggggctatcacgaatctttgaagaaat

SEQ ID NO: 143742 - DNA, 30 bp, Artificial Sequence
  Synthetic oligonucleotide
gccgaaagcacgagttgaacattcagaaat

SEQ ID NO: 143743 - DNA, 30 bp, Artificial Sequence
  Synthetic oligonucleotide
catagtggcggtatattctacaggagaaat

SEQ ID NO: 143744 - DNA, 30 bp, Artificial Sequence
  Synthetic oligonucleotide
cgggaactccagtgctaagccgggagaaat

SEQ ID NO: 143745 - DNA, 30 bp, Artificial Sequence
  Synthetic oligonucleotide
cgtcaaggcagatgtttgagtggtcgaaat

SEQ ID NO: 143746 - DNA, 30 bp, Artificial Sequence
  Synthetic oligonucleotide
cacatcagtccgagcaattgcgcaggaaat

SEQ ID NO: 143747 - DNA, 30 bp, Artificial Sequence
  Synthetic oligonucleotide
gttaggggactgagcaacggggtaggaaat

SEQ ID NO: 143748 - DNA, 30 bp, Artificial Sequence
  Synthetic oligonucleotide
gtgtctgactggctatccactcacggaaat

SEQ ID NO: 143749 - DNA, 30 bp, Artificial Sequence
  Synthetic oligonucleotide
tgttaaagaatagatgtttctcccggaaat

SEQ ID NO: 143750 - DNA, 30 bp, Artificial Sequence
  Synthetic oligonucleotide
gcagggtaaattgggaagtactgtggaaat

SEQ ID NO: 143751 - DNA, 30 bp, Artificial Sequence
  Synthetic oligonucleotide
caaagcgatcagagtcctggagttggaaat

SEQ ID NO: 143752 - DNA, 30 bp, Artificial Sequence
  Synthetic oligonucleotide
aatggagcaagggaagacgcgatctgaaat

SEQ ID NO: 143753 - DNA, 30 bp, Artificial Sequence
  Synthetic oligonucleotide
cgcaaggggctaacgcctattggcataaat

SEQ ID NO: 143754 - DNA, 30 bp, Artificial Sequence
  Synthetic oligonucleotide
ttggtctcggaacaataggcaatcataaat

SEQ ID NO: 143755 - DNA, 30 bp, Artificial Sequence
  Synthetic oligonucleotide
ggtgactggtatcacgctcgagcgataaat

SEQ ID NO: 143756 - DNA, 30 bp, Artificial Sequence
  Synthetic oligonucleotide
ccctccaaacggctcgcgcgtatgataaat

SEQ ID NO: 143757 - DNA, 30 bp, Artificial Sequence
  Synthetic oligonucleotide
ggccgaacctactgtggtcctaatataaat

SEQ ID NO: 143758 - DNA, 30 bp, Artificial Sequence
  Synthetic oligonucleotide
cgtatcatgtgccaaggctgtagtataaat

SEQ ID NO: 143759 - DNA, 30 bp, Artificial Sequence
  Synthetic oligonucleotide
atccaagatctactaccacaggcactaaat

SEQ ID NO: 143760 - DNA, 30 bp, Artificial Sequence
  Synthetic oligonucleotide
ctcatggcagcacgatatgtgtggctaaat

SEQ ID NO: 143761 - DNA, 30 bp, Artificial Sequence
  Synthetic oligonucleotide
acctttgtgcgtgtactccgagcagtaaat

SEQ ID NO: 143762 - DNA, 30 bp, Artificial Sequence
  Synthetic oligonucleotide
cgttagccagtattatcagcttgagtaaat

SEQ ID NO: 143763 - DNA, 30 bp, Artificial Sequence
  Synthetic oligonucleotide
gtcattatcgcaggagggacgccggtaaat

SEQ ID NO: 143764 - DNA, 30 bp, Artificial Sequence
  Synthetic oligonucleotide
ctcgggagcggagttgctgaatcggtaaat

SEQ ID NO: 143765 - DNA, 30 bp, Artificial Sequence
  Synthetic oligonucleotide
aagtgctatgctcgtggaacgcgggtaaat

SEQ ID NO: 143766 - DNA, 30 bp, Artificial Sequence
  Synthetic oligonucleotide
gccacagtacttgggcacaaagtggtaaat

SEQ ID NO: 143767 - DNA, 30 bp, Artificial Sequence
  Synthetic oligonucleotide
cggagggagaccctgcgagagagcttaaat

SEQ ID NO: 143768 - DNA, 30 bp, Artificial Sequence
  Synthetic oligonucleotide
tagtgcaactaaacagtccgggggttaaat

SEQ ID NO: 143769 - DNA, 30 bp, Artificial Sequence
  Synthetic oligonucleotide
ggctatggaaatatactcccttatttaaat

SEQ ID NO: 143770 - DNA, 30 bp, Artificial Sequence
  Synthetic oligonucleotide
gggcagaaccgctgtagcatcataaacaat

SEQ ID NO: 143771 - DNA, 30 bp, Artificial Sequence
  Synthetic oligonucleotide
attgcttacaatattagccttccgaacaat

SEQ ID NO: 143772 - DNA, 30 bp, Artificial Sequence
  Synthetic oligonucleotide
ttaatcccctacattagagcggcgaacaat

SEQ ID NO: 143773 - DNA, 30 bp, Artificial Sequence
  Synthetic oligonucleotide
aaatcgagaaatatttcggcaactaacaat

SEQ ID NO: 143774 - DNA, 30 bp, Artificial Sequence
  Synthetic oligonucleotide
actgaatcaatagagggcgatccccacaat

SEQ ID NO: 143775 - DNA, 30 bp, Artificial Sequence
  Synthetic oligonucleotide
ctacgcgttcaagaggagtgactagacaat

SEQ ID NO: 143776 - DNA, 30 bp, Artificial Sequence
  Synthetic oligonucleotide
taggccttcttgaagacggcaaaggacaat

SEQ ID NO: 143777 - DNA, 30 bp, Artificial Sequence
  Synthetic oligonucleotide
tatcgacacctccttcccgtaagggacaat

SEQ ID NO: 143778 - DNA, 30 bp, Artificial Sequence
  Synthetic oligonucleotide
aacgaattccgactcacttgttgtgacaat

SEQ ID NO: 143779 - DNA, 30 bp, Artificial Sequence
  Synthetic oligonucleotide
ttgagccaagacgctcagggggtctacaat

SEQ ID NO: 143780 - DNA, 30 bp, Artificial Sequence
  Synthetic oligonucleotide
cgtgattgcgccgttttgattgcgaccaat

SEQ ID NO: 143781 - DNA, 30 bp, Artificial Sequence
  Synthetic oligonucleotide
gcatgcggaagaccagaccgggttaccaat

SEQ ID NO: 143782 - DNA, 30 bp, Artificial Sequence
  Synthetic oligonucleotide
cgtccttaccagagatgtcaacggcccaat

SEQ ID NO: 143783 - DNA, 30 bp, Artificial Sequence
  Synthetic oligonucleotide
caagccatcttcgggatacccgatcccaat

SEQ ID NO: 143784 - DNA, 30 bp, Artificial Sequence
  Synthetic oligonucleotide
tgttgagggccattaaaattaactgccaat

SEQ ID NO: 143785 - DNA, 30 bp, Artificial Sequence
  Synthetic oligonucleotide
gacagaaacatcattagacagccgtccaat

SEQ ID NO: 143786 - DNA, 30 bp, Artificial Sequence
  Synthetic oligonucleotide
acgctagcaagaggtgcaggtacttccaat

SEQ ID NO: 143787 - DNA, 30 bp, Artificial Sequence
  Synthetic oligonucleotide
aggcgctagcatactcggctcggttccaat

SEQ ID NO: 143788 - DNA, 30 bp, Artificial Sequence
  Synthetic oligonucleotide
gctctctacaccagatcagggggaagcaat

SEQ ID NO: 143789 - DNA, 30 bp, Artificial Sequence
  Synthetic oligonucleotide
gacggcgacaaaaggcgtgcctcgagcaat

SEQ ID NO: 143790 - DNA, 30 bp, Artificial Sequence
  Synthetic oligonucleotide
cctcattagatggaggacgcgttgagcaat

SEQ ID NO: 143791 - DNA, 30 bp, Artificial Sequence
  Synthetic oligonucleotide
tattaaatgggtcggtaaaggagtagcaat

SEQ ID NO: 143792 - DNA, 30 bp, Artificial Sequence
  Synthetic oligonucleotide
accacagcccgcagcgaccccaaacgcaat

SEQ ID NO: 143793 - DNA, 30 bp, Artificial Sequence
  Synthetic oligonucleotide
agttagatgggctaagacataactcgcaat

SEQ ID NO: 143794 - DNA, 30 bp, Artificial Sequence
  Synthetic oligonucleotide
aaacggctacccgcacgaattattggcaat

SEQ ID NO: 143795 - DNA, 30 bp, Artificial Sequence
  Synthetic oligonucleotide
gcacaagaaccggaaacgtcctggtgcaat

SEQ ID NO: 143796 - DNA, 30 bp, Artificial Sequence
  Synthetic oligonucleotide
tggtatacgaatagctaggcctgttgcaat

SEQ ID NO: 143797 - DNA, 30 bp, Artificial Sequence
  Synthetic oligonucleotide
actgaaaaagaaggtgccatgttaatcaat

SEQ ID NO: 143798 - DNA, 30 bp, Artificial Sequence
  Synthetic oligonucleotide
caacaccaaacctgatactcccggatcaat

SEQ ID NO: 143799 - DNA, 30 bp, Artificial Sequence
  Synthetic oligonucleotide
agatgttcaaagctatctcatatgatcaat

SEQ ID NO: 143800 - DNA, 30 bp, Artificial Sequence
  Synthetic oligonucleotide
gttaatacacacactagaaactaactcaat

SEQ ID NO: 143801 - DNA, 30 bp, Artificial Sequence
  Synthetic oligonucleotide
ttggactcgagtaaaatggtgccactcaat

SEQ ID NO: 143802 - DNA, 30 bp, Artificial Sequence
  Synthetic oligonucleotide
ggatctgcaccgtttatctaggtcctcaat

SEQ ID NO: 143803 - DNA, 30 bp, Artificial Sequence
  Synthetic oligonucleotide
tcatacaaaatcgttgctcaacaggtcaat

SEQ ID NO: 143804 - DNA, 30 bp, Artificial Sequence
  Synthetic oligonucleotide
agacgacctgtcaaggctagatcggtcaat

SEQ ID NO: 143805 - DNA, 30 bp, Artificial Sequence
  Synthetic oligonucleotide
acgccacgttttatagcacgaagggtcaat

SEQ ID NO: 143806 - DNA, 30 bp, Artificial Sequence
  Synthetic oligonucleotide
aggcctccggtcatgccaatggcattcaat

SEQ ID NO: 143807 - DNA, 30 bp, Artificial Sequence
  Synthetic oligonucleotide
cacgagatggttcgggtctcagtgttcaat

SEQ ID NO: 143808 - DNA, 30 bp, Artificial Sequence
  Synthetic oligonucleotide
ccgggcatggaatgcaaattctaaaagaat

SEQ ID NO: 143809 - DNA, 31 bp, Artificial Sequence
  Synthetic oligonucleotide
cctgaaatcgtgattcggtattaacaagaat

SEQ ID NO: 143810 - DNA, 30 bp, Artificial Sequence
  Synthetic oligonucleotide
gagaatcactgtcaggcgctacggaagaat

SEQ ID NO: 143811 - DNA, 30 bp, Artificial Sequence
  Synthetic oligonucleotide
tacgcgatacaacctcggcattggcagaat

SEQ ID NO: 143812 - DNA, 30 bp, Artificial Sequence
  Synthetic oligonucleotide
tcacggtagggtaagtttagacgtcagaat

SEQ ID NO: 143813 - DNA, 30 bp, Artificial Sequence
  Synthetic oligonucleotide
ttgccaggaatattagactgcctggagaat

SEQ ID NO: 143814 - DNA, 30 bp, Artificial Sequence
  Synthetic oligonucleotide
taatcaccatgggacagcataagtgagaat

SEQ ID NO: 143815 - DNA, 30 bp, Artificial Sequence
  Synthetic oligonucleotide
acgtaatcatgcgtgggctctacctagaat

SEQ ID NO: 143816 - DNA, 30 bp, Artificial Sequence
  Synthetic oligonucleotide
ctgcaacaatcgttagaaccccagtagaat

SEQ ID NO: 143817 - DNA, 30 bp, Artificial Sequence
  Synthetic oligonucleotide
tgacatggttctagactacatcacacgaat

SEQ ID NO: 143818 - DNA, 30 bp, Artificial Sequence
  Synthetic oligonucleotide
gcagtttgagcgactttctacggtacgaat

SEQ ID NO: 143819 - DNA, 30 bp, Artificial Sequence
  Synthetic oligonucleotide
tgagaattcgtggcgagaggttgtacgaat

SEQ ID NO: 143820 - DNA, 30 bp, Artificial Sequence
  Synthetic oligonucleotide
ggattagcgtattggctggcacacccgaat

SEQ ID NO: 143821 - DNA, 30 bp, Artificial Sequence
  Synthetic oligonucleotide
tagaaaggaagaagaggcatacttccgaat

SEQ ID NO: 143822 - DNA, 30 bp, Artificial Sequence
  Synthetic oligonucleotide
gcgtaatgtatttggatgggaatctcgaat

SEQ ID NO: 143823 - DNA, 30 bp, Artificial Sequence
  Synthetic oligonucleotide
gacgtcacatattgatgcaagtgaaggaat

SEQ ID NO: 143824 - DNA, 30 bp, Artificial Sequence
  Synthetic oligonucleotide
tagaagtactcgatcaagcaaagtaggaat

SEQ ID NO: 143825 - DNA, 30 bp, Artificial Sequence
  Synthetic oligonucleotide
taaaacatgcaggcttgctgtcgacggaat

SEQ ID NO: 143826 - DNA, 31 bp, Artificial Sequence
  Synthetic oligonucleotide
cagttaggaggtagcttgctaattacggaat

SEQ ID NO: 143827 - DNA, 30 bp, Artificial Sequence
  Synthetic oligonucleotide
gaccggggaggtgccctactcgtccggaat

SEQ ID NO: 143828 - DNA, 30 bp, Artificial Sequence
  Synthetic oligonucleotide
cgacagtaaggttaacgcgcagcgcggaat

SEQ ID NO: 143829 - DNA, 30 bp, Artificial Sequence
  Synthetic oligonucleotide
gtgactttcatgggcgatttcgaggggaat

SEQ ID NO: 143830 - DNA, 30 bp, Artificial Sequence
  Synthetic oligonucleotide
tcgtaaattttcggtaaggttgatgggaat

SEQ ID NO: 143831 - DNA, 30 bp, Artificial Sequence
  Synthetic oligonucleotide
agtcgcaactaggaaataatcatgtggaat

SEQ ID NO: 143832 - DNA, 30 bp, Artificial Sequence
  Synthetic oligonucleotide
gttactaaacgggatcagggaaagatgaat

SEQ ID NO: 143833 - DNA, 29 bp, Artificial Sequence
  Synthetic oligonucleotide
tggataatactacaatcagcgctatgaat

SEQ ID NO: 143834 - DNA, 30 bp, Artificial Sequence
  Synthetic oligonucleotide
tacgacactgggggcctaattggcctgaat

SEQ ID NO: 143835 - DNA, 30 bp, Artificial Sequence
  Synthetic oligonucleotide
gaggtgtacgtgcaccgctggagagtgaat

SEQ ID NO: 143836 - DNA, 30 bp, Artificial Sequence
  Synthetic oligonucleotide
cgtaggtgatacttaactatgccggtgaat

SEQ ID NO: 143837 - DNA, 30 bp, Artificial Sequence
  Synthetic oligonucleotide
cgtgcttgatttaagcattacctattgaat

SEQ ID NO: 143838 - DNA, 30 bp, Artificial Sequence
  Synthetic oligonucleotide
atgcgtcggccattcgaggaaacgttgaat

SEQ ID NO: 143839 - DNA, 30 bp, Artificial Sequence
  Synthetic oligonucleotide
atgtgaggcaaagggtctgcgaaaaataat

SEQ ID NO: 143840 - DNA, 30 bp, Artificial Sequence
  Synthetic oligonucleotide
ttgtaagcagataacttgtactcaaataat

SEQ ID NO: 143841 - DNA, 30 bp, Artificial Sequence
  Synthetic oligonucleotide
taacccagcgaggcaacagagttgaataat

SEQ ID NO: 143842 - DNA, 30 bp, Artificial Sequence
  Synthetic oligonucleotide
agcgcaggacgggcagaccacgcacataat

SEQ ID NO: 143843 - DNA, 30 bp, Artificial Sequence
  Synthetic oligonucleotide
gagcagatagcacatatttgatcccataat

SEQ ID NO: 143844 - DNA, 30 bp, Artificial Sequence
  Synthetic oligonucleotide
atatctataaggattggggggctgcataat

SEQ ID NO: 143845 - DNA, 30 bp, Artificial Sequence
  Synthetic oligonucleotide
gtagtaggtccaacaatacgctaagataat

SEQ ID NO: 143846 - DNA, 30 bp, Artificial Sequence
  Synthetic oligonucleotide
ccaaagctagcctacccggtgttagataat

SEQ ID NO: 143847 - DNA, 30 bp, Artificial Sequence
  Synthetic oligonucleotide
gacggtgattatattcgattgtgggataat

SEQ ID NO: 143848 - DNA, 30 bp, Artificial Sequence
  Synthetic oligonucleotide
ggagaactcgaaggatgattaagctataat

SEQ ID NO: 143849 - DNA, 30 bp, Artificial Sequence
  Synthetic oligonucleotide
ggcgctaggatggggcgagattgttataat

SEQ ID NO: 143850 - DNA, 30 bp, Artificial Sequence
  Synthetic oligonucleotide
agggcgccttaacaccactgtttgactaat

SEQ ID NO: 143851 - DNA, 30 bp, Artificial Sequence
  Synthetic oligonucleotide
gggtatgattacggactgtacggacctaat

SEQ ID NO: 143852 - DNA, 30 bp, Artificial Sequence
  Synthetic oligonucleotide
tgtaaggatcatggagatcttgtccctaat

SEQ ID NO: 143853 - DNA, 30 bp, Artificial Sequence
  Synthetic oligonucleotide
tcaccaacatcgttatgcggtttgcctaat

SEQ ID NO: 143854 - DNA, 30 bp, Artificial Sequence
  Synthetic oligonucleotide
ttagcaacgggtctaggaagacacgctaat

SEQ ID NO: 143855 - DNA, 30 bp, Artificial Sequence
  Synthetic oligonucleotide
cagacactcaaaggttcttatagatctaat

SEQ ID NO: 143856 - DNA, 30 bp, Artificial Sequence
  Synthetic oligonucleotide
aacctaaatgagccacttcatggatctaat

SEQ ID NO: 143857 - DNA, 30 bp, Artificial Sequence
  Synthetic oligonucleotide
cgcattgaccaatgaaatttcgcgtctaat

SEQ ID NO: 143858 - DNA, 30 bp, Artificial Sequence
  Synthetic oligonucleotide
gtgtaactgacaggagcgggttaaagtaat

SEQ ID NO: 143859 - DNA, 30 bp, Artificial Sequence
  Synthetic oligonucleotide
ccgtaaactgccaaggggattagaagtaat

SEQ ID NO: 143860 - DNA, 30 bp, Artificial Sequence
  Synthetic oligonucleotide
taaccgcactaaacagtcgtgtgaagtaat

SEQ ID NO: 143861 - DNA, 30 bp, Artificial Sequence
  Synthetic oligonucleotide
cctttcatcgccttgaaaatcaacagtaat

SEQ ID NO: 143862 - DNA, 30 bp, Artificial Sequence
  Synthetic oligonucleotide
cgtgaataaacattacggcgtcatagtaat

SEQ ID NO: 143863 - DNA, 30 bp, Artificial Sequence
  Synthetic oligonucleotide
taggtgtggaggtagggttggactagtaat

SEQ ID NO: 143864 - DNA, 30 bp, Artificial Sequence
  Synthetic oligonucleotide
ccaagaattgcgtgaactaacagccgtaat

SEQ ID NO: 143865 - DNA, 30 bp, Artificial Sequence
  Synthetic oligonucleotide
ctgaagccatggtattggatagcgcgtaat

SEQ ID NO: 143866 - DNA, 31 bp, Artificial Sequence
  Synthetic oligonucleotide
aacgttgccactccaatttagcgtgcgtaat

SEQ ID NO: 143867 - DNA, 30 bp, Artificial Sequence
  Synthetic oligonucleotide
ggaatttgcccatgagccaagggaggtaat

SEQ ID NO: 143868 - DNA, 30 bp, Artificial Sequence
  Synthetic oligonucleotide
tgtcggaaactacagctttgaataggtaat

SEQ ID NO: 143869 - DNA, 30 bp, Artificial Sequence
  Synthetic oligonucleotide
tgatgccgatccggccaggacgggggtaat

SEQ ID NO: 143870 - DNA, 30 bp, Artificial Sequence
  Synthetic oligonucleotide
ggagcagagatacgagaggccgggggtaat

SEQ ID NO: 143871 - DNA, 30 bp, Artificial Sequence
  Synthetic oligonucleotide
aggggcaagaggcaaggaggttggggtaat

SEQ ID NO: 143872 - DNA, 30 bp, Artificial Sequence
  Synthetic oligonucleotide
ggggcgcgcgcatggtgaaatactggtaat

SEQ ID NO: 143873 - DNA, 30 bp, Artificial Sequence
  Synthetic oligonucleotide
gctcaaaggagacgtcaatgacaatgtaat

SEQ ID NO: 143874 - DNA, 30 bp, Artificial Sequence
  Synthetic oligonucleotide
acatgtggttgcatagcgcaaggttgtaat

SEQ ID NO: 143875 - DNA, 30 bp, Artificial Sequence
  Synthetic oligonucleotide
agaacactaggactggatgctatttgtaat

SEQ ID NO: 143876 - DNA, 30 bp, Artificial Sequence
  Synthetic oligonucleotide
atgacacatgagaagagtgacctttgtaat

SEQ ID NO: 143877 - DNA, 30 bp, Artificial Sequence
  Synthetic oligonucleotide
gaaggacgtcggcgtccattggcaattaat

SEQ ID NO: 143878 - DNA, 30 bp, Artificial Sequence
  Synthetic oligonucleotide
ctcacaacagcagcaagtgatggtattaat

SEQ ID NO: 143879 - DNA, 30 bp, Artificial Sequence
  Synthetic oligonucleotide
tgtagcgaaaatgcgcacgggaggcttaat

SEQ ID NO: 143880 - DNA, 30 bp, Artificial Sequence
  Synthetic oligonucleotide
agggtgaacgagccggtccggtatcttaat

SEQ ID NO: 143881 - DNA, 30 bp, Artificial Sequence
  Synthetic oligonucleotide
agtcaagctcgtcaatcagccgcctttaat

SEQ ID NO: 143882 - DNA, 30 bp, Artificial Sequence
  Synthetic oligonucleotide
ggaagtaggaggaattcgtgtacaaaacat

SEQ ID NO: 143883 - DNA, 30 bp, Artificial Sequence
  Synthetic oligonucleotide
aatcgacacaccttcgaagtaaacaaacat

SEQ ID NO: 143884 - DNA, 30 bp, Artificial Sequence
  Synthetic oligonucleotide
atggtaggagtttatacagaggagaaacat

SEQ ID NO: 143885 - DNA, 30 bp, Artificial Sequence
  Synthetic oligonucleotide
gcgtagggcgttcactttgcttgacaacat

SEQ ID NO: 143886 - DNA, 30 bp, Artificial Sequence
  Synthetic oligonucleotide
aaacaacgcgcactaccagggctacaacat

SEQ ID NO: 143887 - DNA, 30 bp, Artificial Sequence
  Synthetic oligonucleotide
caagtccgaccagcagacataacccaacat

SEQ ID NO: 143888 - DNA, 30 bp, Artificial Sequence
  Synthetic oligonucleotide
tacgacgccccagagtatgcggatcaacat

SEQ ID NO: 143889 - DNA, 30 bp, Artificial Sequence
  Synthetic oligonucleotide
tggaggaataatagggtactgtgtcaacat

SEQ ID NO: 143890 - DNA, 30 bp, Artificial Sequence
  Synthetic oligonucleotide
gatgcgggtctccgttcaaaagttcaacat

SEQ ID NO: 143891 - DNA, 30 bp, Artificial Sequence
  Synthetic oligonucleotide
tacaattaagcagagtgtctacgagaacat

SEQ ID NO: 143892 - DNA, 30 bp, Artificial Sequence
  Synthetic oligonucleotide
ctggatagcaagtgcacgttacgagaacat

SEQ ID NO: 143893 - DNA, 30 bp, Artificial Sequence
  Synthetic oligonucleotide
taagattcccgttaccggtaagtcgaacat

SEQ ID NO: 143894 - DNA, 30 bp, Artificial Sequence
  Synthetic oligonucleotide
tgttcagattggcagtaactgtaggaacat

SEQ ID NO: 143895 - DNA, 30 bp, Artificial Sequence
  Synthetic oligonucleotide
cattagaacgctatgttatccggggaacat

SEQ ID NO: 143896 - DNA, 30 bp, Artificial Sequence
  Synthetic oligonucleotide
gagcgctcctagcattccgggggggaacat

SEQ ID NO: 143897 - DNA, 30 bp, Artificial Sequence
  Synthetic oligonucleotide
gttgggtcatgaaaagacggagtctaacat

SEQ ID NO: 143898 - DNA, 30 bp, Artificial Sequence
  Synthetic oligonucleotide
agcccttgagtcacagcgcgagtcacacat

SEQ ID NO: 143899 - DNA, 30 bp, Artificial Sequence
  Synthetic oligonucleotide
agctacgacctgtcaagaggatatacacat

SEQ ID NO: 143900 - DNA, 30 bp, Artificial Sequence
  Synthetic oligonucleotide
ggcgtgagtgaaggtaacgacgttacacat

SEQ ID NO: 143901 - DNA, 30 bp, Artificial Sequence
  Synthetic oligonucleotide
ctaagcaagagtcgtcataattagccacat

SEQ ID NO: 143902 - DNA, 30 bp, Artificial Sequence
  Synthetic oligonucleotide
gacagtccccagttctcgcgtcctccacat

SEQ ID NO: 143903 - DNA, 30 bp, Artificial Sequence
  Synthetic oligonucleotide
gttaaaaaggcatatcgaacgggtccacat

SEQ ID NO: 143904 - DNA, 30 bp, Artificial Sequence
  Synthetic oligonucleotide
ttaggttaccgtcaaaattgcgcatcacat

SEQ ID NO: 143905 - DNA, 30 bp, Artificial Sequence
  Synthetic oligonucleotide
gtgaagattaagcgaggtggaggatcacat

SEQ ID NO: 143906 - DNA, 30 bp, Artificial Sequence
  Synthetic oligonucleotide
caaaaaatgtgcgtgctagtcaagtcacat

SEQ ID NO: 143907 - DNA, 30 bp, Artificial Sequence
  Synthetic oligonucleotide
cttgacataattctacagtaatggtcacat

SEQ ID NO: 143908 - DNA, 30 bp, Artificial Sequence
  Synthetic oligonucleotide
gaccgaagtgtttcacatgtcggttcacat

SEQ ID NO: 143909 - DNA, 30 bp, Artificial Sequence
  Synthetic oligonucleotide
aacgactttgtactactagcggagagacat

SEQ ID NO: 143910 - DNA, 30 bp, Artificial Sequence
  Synthetic oligonucleotide
cgcagttcggaacggcgcatgaggagacat

SEQ ID NO: 143911 - DNA, 30 bp, Artificial Sequence
  Synthetic oligonucleotide
ccataggatgggcgtagcctgattagacat

SEQ ID NO: 143912 - DNA, 30 bp, Artificial Sequence
  Synthetic oligonucleotide
gtgcgtggagtagcttgacaactaggacat

SEQ ID NO: 143913 - DNA, 30 bp, Artificial Sequence
  Synthetic oligonucleotide
tacagacttacttcgacccgacacggacat

SEQ ID NO: 143914 - DNA, 30 bp, Artificial Sequence
  Synthetic oligonucleotide
ggagcagccctgacagggggaatcggacat

SEQ ID NO: 143915 - DNA, 31 bp, Artificial Sequence
  Synthetic oligonucleotide
cgcgatgtctttcagtgcgacctggggacat

SEQ ID NO: 143916 - DNA, 30 bp, Artificial Sequence
  Synthetic oligonucleotide
caatccaggatgactattgcaacttgacat

SEQ ID NO: 143917 - DNA, 30 bp, Artificial Sequence
  Synthetic oligonucleotide
tgacggtgtatggatagggcataaatacat

SEQ ID NO: 143918 - DNA, 30 bp, Artificial Sequence
  Synthetic oligonucleotide
ggactgcagccggggcaaggtcacatacat

SEQ ID NO: 143919 - DNA, 30 bp, Artificial Sequence
  Synthetic oligonucleotide
gggcaaggtctaagggtgttgtgtatacat

SEQ ID NO: 143920 - DNA, 30 bp, Artificial Sequence
  Synthetic oligonucleotide
gcgatccggctaccagcatttagactacat

SEQ ID NO: 143921 - DNA, 30 bp, Artificial Sequence
  Synthetic oligonucleotide
gggaataaatgagttacatgacttctacat

SEQ ID NO: 143922 - DNA, 30 bp, Artificial Sequence
  Synthetic oligonucleotide
cctgagacacgcgcagagcggtgagtacat

SEQ ID NO: 143923 - DNA, 30 bp, Artificial Sequence
  Synthetic oligonucleotide
aaagggctgataacggatctatgcttacat

SEQ ID NO: 143924 - DNA, 30 bp, Artificial Sequence
  Synthetic oligonucleotide
gaggacggaattaacgggggtgagttacat

SEQ ID NO: 143925 - DNA, 30 bp, Artificial Sequence
  Synthetic oligonucleotide
tggacataatgaatgcggtcaattttacat

SEQ ID NO: 143926 - DNA, 30 bp, Artificial Sequence
  Synthetic oligonucleotide
ggtagggcatgacccgcggtatgaaaccat

SEQ ID NO: 143927 - DNA, 30 bp, Artificial Sequence
  Synthetic oligonucleotide
aggaagcgcgagtgttacgtgatgaaccat

SEQ ID NO: 143928 - DNA, 30 bp, Artificial Sequence
  Synthetic oligonucleotide
tgagcaatacaaactgttactcaacaccat

SEQ ID NO: 143929 - DNA, 30 bp, Artificial Sequence
  Synthetic oligonucleotide
cgtagaggggcgctgtggggttaggaccat

SEQ ID NO: 143930 - DNA, 30 bp, Artificial Sequence
  Synthetic oligonucleotide
cggggttagtcagagaactgcactgaccat

SEQ ID NO: 143931 - DNA, 30 bp, Artificial Sequence
  Synthetic oligonucleotide
gtcaacgggggtgaatagtttggtgaccat

SEQ ID NO: 143932 - DNA, 30 bp, Artificial Sequence
  Synthetic oligonucleotide
agtaaccctcagaacaacggttcataccat

SEQ ID NO: 143933 - DNA, 30 bp, Artificial Sequence
  Synthetic oligonucleotide
cacgaccagacctgtgtttcgtagtaccat

SEQ ID NO: 143934 - DNA, 30 bp, Artificial Sequence
  Synthetic oligonucleotide
ggttcagatataaattcgagccaaacccat

SEQ ID NO: 143935 - DNA, 30 bp, Artificial Sequence
  Synthetic oligonucleotide
caaaaccgcccacagaattcaggaacccat

SEQ ID NO: 143936 - DNA, 30 bp, Artificial Sequence
  Synthetic oligonucleotide
aacaggtgctgccgacagcggaatacccat

SEQ ID NO: 143937 - DNA, 30 bp, Artificial Sequence
  Synthetic oligonucleotide
acgaattagtaggtgcaatggtgaccccat

SEQ ID NO: 143938 - DNA, 30 bp, Artificial Sequence
  Synthetic oligonucleotide
gacgtggattccggtttacccgttccccat

SEQ ID NO: 143939 - DNA, 30 bp, Artificial Sequence
  Synthetic oligonucleotide
accactgcactaaatactaccgacgcccat

SEQ ID NO: 143940 - DNA, 30 bp, Artificial Sequence
  Synthetic oligonucleotide
ggtgtggaagggctcagtacttaggcccat

SEQ ID NO: 143941 - DNA, 30 bp, Artificial Sequence
  Synthetic oligonucleotide
tcctgccgtcggtgcgattaacgggcccat

SEQ ID NO: 143942 - DNA, 30 bp, Artificial Sequence
  Synthetic oligonucleotide
gtgggattcctgaaaaatggagaatcccat

SEQ ID NO: 143943 - DNA, 30 bp, Artificial Sequence
  Synthetic oligonucleotide
ctaaggacggtactaggcatcgcaagccat

SEQ ID NO: 143944 - DNA, 30 bp, Artificial Sequence
  Synthetic oligonucleotide
tgctcaccgaatagtttccaagcgcgccat

SEQ ID NO: 143945 - DNA, 30 bp, Artificial Sequence
  Synthetic oligonucleotide
ctgatggatcgtgaggacctcagtcgccat

SEQ ID NO: 143946 - DNA, 30 bp, Artificial Sequence
  Synthetic oligonucleotide
aattagattttagcaaacacagatggccat

SEQ ID NO: 143947 - DNA, 30 bp, Artificial Sequence
  Synthetic oligonucleotide
cacatagcatcaagttagggtacatgccat

SEQ ID NO: 143948 - DNA, 30 bp, Artificial Sequence
  Synthetic oligonucleotide
atacagatgaccccatgtttgctctgccat

SEQ ID NO: 143949 - DNA, 30 bp, Artificial Sequence
  Synthetic oligonucleotide
aaacccaggcacagaccgcgcacttgccat

SEQ ID NO: 143950 - DNA, 30 bp, Artificial Sequence
  Synthetic oligonucleotide
atactagaccctgccctccaaggactccat

SEQ ID NO: 143951 - DNA, 31 bp, Artificial Sequence
  Synthetic oligonucleotide
gcaaccgaagctgccgaactagttactccat

SEQ ID NO: 143952 - DNA, 30 bp, Artificial Sequence
  Synthetic oligonucleotide
ttggttggttcaacgtaggacggcctccat

SEQ ID NO: 143953 - DNA, 30 bp, Artificial Sequence
  Synthetic oligonucleotide
atatcgaagtcatcacaagggcagctccat

SEQ ID NO: 143954 - DNA, 30 bp, Artificial Sequence
  Synthetic oligonucleotide
gacacactacgccatttgggaaaagtccat

SEQ ID NO: 143955 - DNA, 30 bp, Artificial Sequence
  Synthetic oligonucleotide
agaggtagcgggtgactgagtctagtccat

SEQ ID NO: 143956 - DNA, 30 bp, Artificial Sequence
  Synthetic oligonucleotide
gcatacgaaccacaactctttacggtccat

SEQ ID NO: 143957 - DNA, 30 bp, Artificial Sequence
  Synthetic oligonucleotide
gtagggtataacagctcccggccggtccat

SEQ ID NO: 143958 - DNA, 30 bp, Artificial Sequence
  Synthetic oligonucleotide
aggagtgatggtcgagaattgcctgtccat

SEQ ID NO: 143959 - DNA, 30 bp, Artificial Sequence
  Synthetic oligonucleotide
gttggctaaccaatcggcggcttgttccat

SEQ ID NO: 143960 - DNA, 30 bp, Artificial Sequence
  Synthetic oligonucleotide
ggagccggagaagaaggttacaatttccat

SEQ ID NO: 143961 - DNA, 30 bp, Artificial Sequence
  Synthetic oligonucleotide
gctgcaccgggcatcgactcgcaaaagcat

SEQ ID NO: 143962 - DNA, 30 bp, Artificial Sequence
  Synthetic oligonucleotide
ggcgtggtgactggggatcataaacagcat

SEQ ID NO: 143963 - DNA, 30 bp, Artificial Sequence
  Synthetic oligonucleotide
ataaccattttaatacatgcgccacagcat

SEQ ID NO: 143964 - DNA, 30 bp, Artificial Sequence
  Synthetic oligonucleotide
gtgacgggtaggggtgcgacaggccagcat

SEQ ID NO: 143965 - DNA, 30 bp, Artificial Sequence
  Synthetic oligonucleotide
acaggaacgacattactcgtttgccagcat

SEQ ID NO: 143966 - DNA, 30 bp, Artificial Sequence
  Synthetic oligonucleotide
tctgcctggttcggtacgggtaagcagcat

SEQ ID NO: 143967 - DNA, 30 bp, Artificial Sequence
  Synthetic oligonucleotide
taatgctgtatgtgagtcggcgatcagcat

SEQ ID NO: 143968 - DNA, 30 bp, Artificial Sequence
  Synthetic oligonucleotide
ggagtcggttcaaaaggggggcaggagcat

SEQ ID NO: 143969 - DNA, 30 bp, Artificial Sequence
  Synthetic oligonucleotide
agggaactacaagtcaggttttcggagcat

SEQ ID NO: 143970 - DNA, 30 bp, Artificial Sequence
  Synthetic oligonucleotide
ggggggtagagcacgtgggcgtgtgagcat

SEQ ID NO: 143971 - DNA, 30 bp, Artificial Sequence
  Synthetic oligonucleotide
attggacgcgatacgtccccaaagtagcat

SEQ ID NO: 143972 - DNA, 30 bp, Artificial Sequence
  Synthetic oligonucleotide
actgtataatcagattataagcagtagcat

SEQ ID NO: 143973 - DNA, 30 bp, Artificial Sequence
  Synthetic oligonucleotide
tctcagccctggcgatacactgattagcat

SEQ ID NO: 143974 - DNA, 30 bp, Artificial Sequence
  Synthetic oligonucleotide
acgaagctcacggagcgagacttttagcat

SEQ ID NO: 143975 - DNA, 30 bp, Artificial Sequence
  Synthetic oligonucleotide
attgaaaacccacagaatcaagcaacgcat

SEQ ID NO: 143976 - DNA, 30 bp, Artificial Sequence
  Synthetic oligonucleotide
gttgaggtcaaagggggcctaggaacgcat

SEQ ID NO: 143977 - DNA, 30 bp, Artificial Sequence
  Synthetic oligonucleotide
gttgtacaaatgagtcgcctaaacacgcat

SEQ ID NO: 143978 - DNA, 30 bp, Artificial Sequence
  Synthetic oligonucleotide
atccaccggatcatccattgatccacgcat

SEQ ID NO: 143979 - DNA, 30 bp, Artificial Sequence
  Synthetic oligonucleotide
acttgtctgctgacatgggggtctacgcat

SEQ ID NO: 143980 - DNA, 30 bp, Artificial Sequence
  Synthetic oligonucleotide
catcgaagtctacggaacgctagtacgcat

SEQ ID NO: 143981 - DNA, 30 bp, Artificial Sequence
  Synthetic oligonucleotide
aagggattgagcccggagtgagaaccgcat

SEQ ID NO: 143982 - DNA, 30 bp, Artificial Sequence
  Synthetic oligonucleotide
ttaagagggtgtgtaattgtcgctccgcat

SEQ ID NO: 143983 - DNA, 30 bp, Artificial Sequence
  Synthetic oligonucleotide
aggtattgtctgtgagctagaggagcgcat

SEQ ID NO: 143984 - DNA, 30 bp, Artificial Sequence
  Synthetic oligonucleotide
gtcgtcggactattggcgtaagccgcgcat

SEQ ID NO: 143985 - DNA, 30 bp, Artificial Sequence
  Synthetic oligonucleotide
caggaaaggttcgcaggctgacaggcgcat

SEQ ID NO: 143986 - DNA, 30 bp, Artificial Sequence
  Synthetic oligonucleotide
tatggtggtgaaacctcgatcctggcgcat

SEQ ID NO: 143987 - DNA, 30 bp, Artificial Sequence
  Synthetic oligonucleotide
cgcggattctcagtcaagggagatgcgcat

SEQ ID NO: 143988 - DNA, 30 bp, Artificial Sequence
  Synthetic oligonucleotide
atggttgtcaaagtgcccactcacaggcat

SEQ ID NO: 143989 - DNA, 30 bp, Artificial Sequence
  Synthetic oligonucleotide
tcgattaatatgcgtaggtgcgttaggcat

SEQ ID NO: 143990 - DNA, 30 bp, Artificial Sequence
  Synthetic oligonucleotide
gcctaggctattctgctgagattccggcat

SEQ ID NO: 143991 - DNA, 30 bp, Artificial Sequence
  Synthetic oligonucleotide
tacggcgtctcaggagtacaggtagggcat

SEQ ID NO: 143992 - DNA, 31 bp, Artificial Sequence
  Synthetic oligonucleotide
caacaaaacatctctttcaagcaccgggcat

SEQ ID NO: 143993 - DNA, 30 bp, Artificial Sequence
  Synthetic oligonucleotide
aatgacagaggaggcgctgggagcgggcat

SEQ ID NO: 143994 - DNA, 30 bp, Artificial Sequence
  Synthetic oligonucleotide
gagattagagttacatagcgttctgggcat

SEQ ID NO: 143995 - DNA, 30 bp, Artificial Sequence
  Synthetic oligonucleotide
tgaacatatcggaccattcacttctggcat

SEQ ID NO: 143996 - DNA, 30 bp, Artificial Sequence
  Synthetic oligonucleotide
ttgagcactcgaggaaagaaggattggcat

SEQ ID NO: 143997 - DNA, 30 bp, Artificial Sequence
  Synthetic oligonucleotide
agctatgcgcaatctacgattaaaatgcat

SEQ ID NO: 143998 - DNA, 30 bp, Artificial Sequence
  Synthetic oligonucleotide
ctgagtgtgaccacaggtgttgatatgcat

SEQ ID NO: 143999 - DNA, 30 bp, Artificial Sequence
  Synthetic oligonucleotide
ggcgaaattttaaggtgacggtgtatgcat

SEQ ID NO: 144000 - DNA, 30 bp, Artificial Sequence
  Synthetic oligonucleotide
aactatcagatcggtaaacaagtactgcat

SEQ ID NO: 144001 - DNA, 30 bp, Artificial Sequence
  Synthetic oligonucleotide
gggcggatttagtgtacatatctcctgcat

SEQ ID NO: 144002 - DNA, 30 bp, Artificial Sequence
  Synthetic oligonucleotide
tcgaggtaggtttgctagccctgagtgcat

SEQ ID NO: 144003 - DNA, 30 bp, Artificial Sequence
  Synthetic oligonucleotide
ggctcttcgtcacttacgaacaacttgcat

SEQ ID NO: 144004 - DNA, 30 bp, Artificial Sequence
  Synthetic oligonucleotide
agctggaagccctacgatcttaacttgcat

SEQ ID NO: 144005 - DNA, 30 bp, Artificial Sequence
  Synthetic oligonucleotide
gggagaaggttatattgaatggtgttgcat

SEQ ID NO: 144006 - DNA, 30 bp, Artificial Sequence
  Synthetic oligonucleotide
gccgaggtagcgatagagcgtgtgttgcat

SEQ ID NO: 144007 - DNA, 30 bp, Artificial Sequence
  Synthetic oligonucleotide
tatcgtgagatatcactgaaggatttgcat

SEQ ID NO: 144008 - DNA, 30 bp, Artificial Sequence
  Synthetic oligonucleotide
aaatccctgccagagctagacccaaatcat

SEQ ID NO: 144009 - DNA, 30 bp, Artificial Sequence
  Synthetic oligonucleotide
gaggcctaaaaggccaaagtatgcaatcat

SEQ ID NO: 144010 - DNA, 30 bp, Artificial Sequence
  Synthetic oligonucleotide
cacatcccaggcctataaactctcaatcat

SEQ ID NO: 144011 - DNA, 30 bp, Artificial Sequence
  Synthetic oligonucleotide
aagacgatccagacactgatcactaatcat

SEQ ID NO: 144012 - DNA, 30 bp, Artificial Sequence
  Synthetic oligonucleotide
tctaatcgagtgcgtagtatcaaacatcat

SEQ ID NO: 144013 - DNA, 30 bp, Artificial Sequence
  Synthetic oligonucleotide
tcataatctcaactagtgtctggacatcat

SEQ ID NO: 144014 - DNA, 30 bp, Artificial Sequence
  Synthetic oligonucleotide
acgtactaacgtgtatagagtaaccatcat

SEQ ID NO: 144015 - DNA, 30 bp, Artificial Sequence
  Synthetic oligonucleotide
tgcaatgcacgttgttgtcagtgccatcat

SEQ ID NO: 144016 - DNA, 30 bp, Artificial Sequence
  Synthetic oligonucleotide
catgttgccatcaaaggaccctcgcatcat

SEQ ID NO: 144017 - DNA, 30 bp, Artificial Sequence
  Synthetic oligonucleotide
cgtctgatatgtggcgcgatctgagatcat

SEQ ID NO: 144018 - DNA, 30 bp, Artificial Sequence
  Synthetic oligonucleotide
taacgccagtcactacaaataaaggatcat

SEQ ID NO: 144019 - DNA, 30 bp, Artificial Sequence
  Synthetic oligonucleotide
agagcgacatgacgaggttttacggatcat

SEQ ID NO: 144020 - DNA, 30 bp, Artificial Sequence
  Synthetic oligonucleotide
aggggtgaagtcacatgtggggatgatcat

SEQ ID NO: 144021 - DNA, 30 bp, Artificial Sequence
  Synthetic oligonucleotide
gagggttagtaattgcggacatgatatcat

SEQ ID NO: 144022 - DNA, 30 bp, Artificial Sequence
  Synthetic oligonucleotide
ccggtcaaaacgggtgggtatgtaactcat

SEQ ID NO: 144023 - DNA, 30 bp, Artificial Sequence
  Synthetic oligonucleotide
cgtaaccaattgtcgaccctgtggcctcat

SEQ ID NO: 144024 - DNA, 30 bp, Artificial Sequence
  Synthetic oligonucleotide
acgtgttccaaaataaagttacaagctcat

SEQ ID NO: 144025 - DNA, 30 bp, Artificial Sequence
  Synthetic oligonucleotide
atataagggaagtgacgaggtcaagctcat

SEQ ID NO: 144026 - DNA, 30 bp, Artificial Sequence
  Synthetic oligonucleotide
aaatcgggtaatcggaatccgtattctcat

SEQ ID NO: 144027 - DNA, 30 bp, Artificial Sequence
  Synthetic oligonucleotide
acctaaacaaacccttctgtcgcgagtcat

SEQ ID NO: 144028 - DNA, 30 bp, Artificial Sequence
  Synthetic oligonucleotide
acccagctgctgaaggaaggaggacgtcat

SEQ ID NO: 144029 - DNA, 30 bp, Artificial Sequence
  Synthetic oligonucleotide
tctggcaccacgagacttggaggccgtcat

SEQ ID NO: 144030 - DNA, 30 bp, Artificial Sequence
  Synthetic oligonucleotide
tgggacctattgtttctatctactcgtcat

SEQ ID NO: 144031 - DNA, 30 bp, Artificial Sequence
  Synthetic oligonucleotide
gctcggacgtataggaagaggcttcgtcat

SEQ ID NO: 144032 - DNA, 30 bp, Artificial Sequence
  Synthetic oligonucleotide
attagggcgtccacttactcgcaaggtcat

SEQ ID NO: 144033 - DNA, 30 bp, Artificial Sequence
  Synthetic oligonucleotide
ggatcagcgagtccaacaaggatcggtcat

SEQ ID NO: 144034 - DNA, 30 bp, Artificial Sequence
  Synthetic oligonucleotide
aacaaagtatcgagcatctatgtgggtcat

SEQ ID NO: 144035 - DNA, 30 bp, Artificial Sequence
  Synthetic oligonucleotide
ttcggcatctctgaacaactacactgtcat

SEQ ID NO: 144036 - DNA, 30 bp, Artificial Sequence
  Synthetic oligonucleotide
gcagggaacgtgcatgggatggggtgtcat

SEQ ID NO: 144037 - DNA, 30 bp, Artificial Sequence
  Synthetic oligonucleotide
taccgtcatcaatcgccgactgcaattcat

SEQ ID NO: 144038 - DNA, 30 bp, Artificial Sequence
  Synthetic oligonucleotide
gccttgaggtacaccagatgtgtcattcat

SEQ ID NO: 144039 - DNA, 30 bp, Artificial Sequence
  Synthetic oligonucleotide
gccaatggtttctgcgaataaaaagttcat

SEQ ID NO: 144040 - DNA, 30 bp, Artificial Sequence
  Synthetic oligonucleotide
cacatgcatgctttcgcgatccaagttcat

SEQ ID NO: 144041 - DNA, 30 bp, Artificial Sequence
  Synthetic oligonucleotide
ctaccttgtagacacaccagcccagttcat

SEQ ID NO: 144042 - DNA, 30 bp, Artificial Sequence
  Synthetic oligonucleotide
cagtattatgaggacaaccaagcggttcat

SEQ ID NO: 144043 - DNA, 30 bp, Artificial Sequence
  Synthetic oligonucleotide
cggttcggtaggggttgatagactgttcat

SEQ ID NO: 144044 - DNA, 30 bp, Artificial Sequence
  Synthetic oligonucleotide
cgaaacgtgatggaggttttagctgttcat

SEQ ID NO: 144045 - DNA, 30 bp, Artificial Sequence
  Synthetic oligonucleotide
aacgagtggctgcccaaacgacgtgttcat

SEQ ID NO: 144046 - DNA, 30 bp, Artificial Sequence
  Synthetic oligonucleotide
tagaggtagttgagttcactccaatttcat

SEQ ID NO: 144047 - DNA, 30 bp, Artificial Sequence
  Synthetic oligonucleotide
ggaacccatgaagaattcgtataatttcat

SEQ ID NO: 144048 - DNA, 30 bp, Artificial Sequence
  Synthetic oligonucleotide
agtctcgggttagtaccagtataaaaagat

SEQ ID NO: 144049 - DNA, 30 bp, Artificial Sequence
  Synthetic oligonucleotide
ccgcgcctatttccatccaggagacaagat

SEQ ID NO: 144050 - DNA, 30 bp, Artificial Sequence
  Synthetic oligonucleotide
ctatggcgagagtatacttgaccccaagat

SEQ ID NO: 144051 - DNA, 30 bp, Artificial Sequence
  Synthetic oligonucleotide
gtgaatgactgcgctgggacatagcaagat

SEQ ID NO: 144052 - DNA, 30 bp, Artificial Sequence
  Synthetic oligonucleotide
gcatcgcgtttacggcgtagtaggcaagat

SEQ ID NO: 144053 - DNA, 30 bp, Artificial Sequence
  Synthetic oligonucleotide
ccgcgtgacgggtggagccacttgcaagat

SEQ ID NO: 144054 - DNA, 30 bp, Artificial Sequence
  Synthetic oligonucleotide
agtcaccaatttagagcatggtcggaagat

SEQ ID NO: 144055 - DNA, 30 bp, Artificial Sequence
  Synthetic oligonucleotide
gaaagtgtaacggaagcagtcggggaagat

SEQ ID NO: 144056 - DNA, 30 bp, Artificial Sequence
  Synthetic oligonucleotide
atcggtaggttataagccaatatggaagat

SEQ ID NO: 144057 - DNA, 30 bp, Artificial Sequence
  Synthetic oligonucleotide
gtgtagagctcgcaattcgtaggtgaagat

SEQ ID NO: 144058 - DNA, 30 bp, Artificial Sequence
  Synthetic oligonucleotide
cgggaaaggcaccttaccagagcgtaagat

SEQ ID NO: 144059 - DNA, 30 bp, Artificial Sequence
  Synthetic oligonucleotide
cggctgtggaagggtaaagatcttacagat

SEQ ID NO: 144060 - DNA, 30 bp, Artificial Sequence
  Synthetic oligonucleotide
taagaatcttataaggaagtatcgccagat

SEQ ID NO: 144061 - DNA, 30 bp, Artificial Sequence
  Synthetic oligonucleotide
aatgaagcgaaagcctcgttagatccagat

SEQ ID NO: 144062 - DNA, 30 bp, Artificial Sequence
  Synthetic oligonucleotide
gaggacgggaactcgatggggcaagcagat

SEQ ID NO: 144063 - DNA, 30 bp, Artificial Sequence
  Synthetic oligonucleotide
taggcagggcatactgtttgctcagcagat

SEQ ID NO: 144064 - DNA, 30 bp, Artificial Sequence
  Synthetic oligonucleotide
ctcagtgtttgtcaaccgagtcgagcagat

SEQ ID NO: 144065 - DNA, 30 bp, Artificial Sequence
  Synthetic oligonucleotide
ataatagcgaagaagcccgtgccggcagat

SEQ ID NO: 144066 - DNA, 30 bp, Artificial Sequence
  Synthetic oligonucleotide
tgcttgacggctggtagaaggagtgcagat

SEQ ID NO: 144067 - DNA, 30 bp, Artificial Sequence
  Synthetic oligonucleotide
ggactcggggtatggtaacagtgatcagat

SEQ ID NO: 144068 - DNA, 30 bp, Artificial Sequence
  Synthetic oligonucleotide
cacatgccatttacaaagaacggctcagat

SEQ ID NO: 144069 - DNA, 30 bp, Artificial Sequence
  Synthetic oligonucleotide
aacctactgcgttttgaaagtatgtcagat

SEQ ID NO: 144070 - DNA, 30 bp, Artificial Sequence
  Synthetic oligonucleotide
actggattcgatgattatatgctgtcagat

SEQ ID NO: 144071 - DNA, 30 bp, Artificial Sequence
  Synthetic oligonucleotide
cgtagattaatccaacagtggaaaagagat

SEQ ID NO: 144072 - DNA, 30 bp, Artificial Sequence
  Synthetic oligonucleotide
gaccaaaaacgcgaccgcgtaaacagagat

SEQ ID NO: 144073 - DNA, 30 bp, Artificial Sequence
  Synthetic oligonucleotide
acactacgttaacaacacggctacagagat

SEQ ID NO: 144074 - DNA, 30 bp, Artificial Sequence
  Synthetic oligonucleotide
ttgttcaggttttgagaccactggagagat

SEQ ID NO: 144075 - DNA, 30 bp, Artificial Sequence
  Synthetic oligonucleotide
tgagcaccgttagacctcacactccgagat

SEQ ID NO: 144076 - DNA, 30 bp, Artificial Sequence
  Synthetic oligonucleotide
gataacagaataaatagtctgaagcgagat

SEQ ID NO: 144077 - DNA, 30 bp, Artificial Sequence
  Synthetic oligonucleotide
ggggagttgttcttggcagccaccggagat

SEQ ID NO: 144078 - DNA, 30 bp, Artificial Sequence
  Synthetic oligonucleotide
ggtggacaatcataatcccgcacgggagat

SEQ ID NO: 144079 - DNA, 30 bp, Artificial Sequence
  Synthetic oligonucleotide
aagtcaacttggccgggtacatcttgagat

SEQ ID NO: 144080 - DNA, 30 bp, Artificial Sequence
  Synthetic oligonucleotide
gacccagtccgggccgaatccaacatagat

SEQ ID NO: 144081 - DNA, 30 bp, Artificial Sequence
  Synthetic oligonucleotide
gtagaggaggtgtcaagcgagggtatagat

SEQ ID NO: 144082 - DNA, 30 bp, Artificial Sequence
  Synthetic oligonucleotide
accctattccatctaagaggtaaactagat

SEQ ID NO: 144083 - DNA, 30 bp, Artificial Sequence
  Synthetic oligonucleotide
taaatccaatgtagggccagcatactagat

SEQ ID NO: 144084 - DNA, 30 bp, Artificial Sequence
  Synthetic oligonucleotide
caggccctccaatcgtgggaggaggtagat

SEQ ID NO: 144085 - DNA, 30 bp, Artificial Sequence
  Synthetic oligonucleotide
ggcagaagtaaggttattctgtctgtagat

SEQ ID NO: 144086 - DNA, 30 bp, Artificial Sequence
  Synthetic oligonucleotide
tcaaaagggcaaacttccaccagtgtagat

SEQ ID NO: 144087 - DNA, 30 bp, Artificial Sequence
  Synthetic oligonucleotide
gtgaaatttactagcatgtttcccttagat

SEQ ID NO: 144088 - DNA, 30 bp, Artificial Sequence
  Synthetic oligonucleotide
gacgagttttggagggaatacctcttagat

SEQ ID NO: 144089 - DNA, 30 bp, Artificial Sequence
  Synthetic oligonucleotide
tggataaggatcgaaaagtgacttttagat

SEQ ID NO: 144090 - DNA, 30 bp, Artificial Sequence
  Synthetic oligonucleotide
gaaggaacggggctcaggtagcataacgat

SEQ ID NO: 144091 - DNA, 30 bp, Artificial Sequence
  Synthetic oligonucleotide
tatcacgggctcgtctacgattaccacgat

SEQ ID NO: 144092 - DNA, 30 bp, Artificial Sequence
  Synthetic oligonucleotide
atagtgaactggtatcattccccccacgat

SEQ ID NO: 144093 - DNA, 30 bp, Artificial Sequence
  Synthetic oligonucleotide
tacctacgggtagtcattctactccacgat

SEQ ID NO: 144094 - DNA, 30 bp, Artificial Sequence
  Synthetic oligonucleotide
accaagttgccttagtagtgtgagcacgat

SEQ ID NO: 144095 - DNA, 30 bp, Artificial Sequence
  Synthetic oligonucleotide
tctaccgaggatagcgctctcttgcacgat

SEQ ID NO: 144096 - DNA, 30 bp, Artificial Sequence
  Synthetic oligonucleotide
gcacaaaaccggagacagatacaagacgat

SEQ ID NO: 144097 - DNA, 30 bp, Artificial Sequence
  Synthetic oligonucleotide
agagtttggaatgggagctgaagggacgat

SEQ ID NO: 144098 - DNA, 30 bp, Artificial Sequence
  Synthetic oligonucleotide
aggctgcagttgcaaatatactcctacgat

SEQ ID NO: 144099 - DNA, 30 bp, Artificial Sequence
  Synthetic oligonucleotide
attgcttacatccgacatagctgctacgat

SEQ ID NO: 144100 - DNA, 30 bp, Artificial Sequence
  Synthetic oligonucleotide
caaggtcttaaagcccgggagacgtacgat

SEQ ID NO: 144101 - DNA, 30 bp, Artificial Sequence
  Synthetic oligonucleotide
tcggatcgtggtgtacaaagaatttacgat

SEQ ID NO: 144102 - DNA, 30 bp, Artificial Sequence
  Synthetic oligonucleotide
gctaacacaatattctcctagtgaaccgat

SEQ ID NO: 144103 - DNA, 30 bp, Artificial Sequence
  Synthetic oligonucleotide
agttcgtagtatgttaaagctaccaccgat

SEQ ID NO: 144104 - DNA, 30 bp, Artificial Sequence
  Synthetic oligonucleotide
gcgatatgtaccgctcagaacccgaccgat

SEQ ID NO: 144105 - DNA, 30 bp, Artificial Sequence
  Synthetic oligonucleotide
cgtttacagaaggttcggtcgcctaccgat

SEQ ID NO: 144106 - DNA, 30 bp, Artificial Sequence
  Synthetic oligonucleotide
ccatacgggctccactatatgctacccgat

SEQ ID NO: 144107 - DNA, 30 bp, Artificial Sequence
  Synthetic oligonucleotide
agaccggcactactcagaaacaggcccgat

SEQ ID NO: 144108 - DNA, 30 bp, Artificial Sequence
  Synthetic oligonucleotide
accgtctgtggcatttcgcaatgtcccgat

SEQ ID NO: 144109 - DNA, 30 bp, Artificial Sequence
  Synthetic oligonucleotide
tacccaaagaaactcgaaattcgagccgat

SEQ ID NO: 144110 - DNA, 30 bp, Artificial Sequence
  Synthetic oligonucleotide
agcacctggagaaggcgcaactacgccgat

SEQ ID NO: 144111 - DNA, 30 bp, Artificial Sequence
  Synthetic oligonucleotide
ggacttgcgcagaagatggtaatcgccgat

SEQ ID NO: 144112 - DNA, 30 bp, Artificial Sequence
  Synthetic oligonucleotide
acttgggtatcttcggctacgctatccgat

SEQ ID NO: 144113 - DNA, 30 bp, Artificial Sequence
  Synthetic oligonucleotide
aacgaagaacgagccactagtatctccgat

SEQ ID NO: 144114 - DNA, 30 bp, Artificial Sequence
  Synthetic oligonucleotide
gaaccccagtagacgattgtgcgttccgat

SEQ ID NO: 144115 - DNA, 30 bp, Artificial Sequence
  Synthetic oligonucleotide
cttcatgtgattacgaataagtgttccgat

SEQ ID NO: 144116 - DNA, 30 bp, Artificial Sequence
  Synthetic oligonucleotide
catcctgggcatgactgttcgaacagcgat

SEQ ID NO: 144117 - DNA, 30 bp, Artificial Sequence
  Synthetic oligonucleotide
tggtgatgtctgcgatgagcaaagagcgat

SEQ ID NO: 144118 - DNA, 30 bp, Artificial Sequence
  Synthetic oligonucleotide
caaagcattccgtacggggagattagcgat

SEQ ID NO: 144119 - DNA, 30 bp, Artificial Sequence
  Synthetic oligonucleotide
gtaacttctaaagggtctgaccggcgcgat

SEQ ID NO: 144120 - DNA, 30 bp, Artificial Sequence
  Synthetic oligonucleotide
ctcaaagctgacatcatgttgtggcgcgat

SEQ ID NO: 144121 - DNA, 30 bp, Artificial Sequence
  Synthetic oligonucleotide
atggagatgcgaagcgtataccgtcgcgat

SEQ ID NO: 144122 - DNA, 30 bp, Artificial Sequence
  Synthetic oligonucleotide
gtttcgaagttcagaccatagacaggcgat

SEQ ID NO: 144123 - DNA, 30 bp, Artificial Sequence
  Synthetic oligonucleotide
gttacggggtgccgctgccagaaatgcgat

SEQ ID NO: 144124 - DNA, 30 bp, Artificial Sequence
  Synthetic oligonucleotide
agctatttgtacatcttactgagctgcgat

SEQ ID NO: 144125 - DNA, 30 bp, Artificial Sequence
  Synthetic oligonucleotide
ggagtacgacgcgtgatacaaacttgcgat

SEQ ID NO: 144126 - DNA, 30 bp, Artificial Sequence
  Synthetic oligonucleotide
tggcccatgaggctagggttgagcgtcgat

SEQ ID NO: 144127 - DNA, 30 bp, Artificial Sequence
  Synthetic oligonucleotide
ggccttactggatgatagaaaacggtcgat

SEQ ID NO: 144128 - DNA, 30 bp, Artificial Sequence
  Synthetic oligonucleotide
aaatcaggcagggaagatacaagtgtcgat

SEQ ID NO: 144129 - DNA, 30 bp, Artificial Sequence
  Synthetic oligonucleotide
cacaaaggactatggtttggaatattcgat

SEQ ID NO: 144130 - DNA, 30 bp, Artificial Sequence
  Synthetic oligonucleotide
ttgcttggaaatgccaagtattcgaaggat

SEQ ID NO: 144131 - DNA, 30 bp, Artificial Sequence
  Synthetic oligonucleotide
gggtcacaattttaacggtgtaataaggat

SEQ ID NO: 144132 - DNA, 30 bp, Artificial Sequence
  Synthetic oligonucleotide
ggacaaactcacgtcgcgaactataaggat

SEQ ID NO: 144133 - DNA, 30 bp, Artificial Sequence
  Synthetic oligonucleotide
gtagtttcggggaacacgatatctcaggat

SEQ ID NO: 144134 - DNA, 30 bp, Artificial Sequence
  Synthetic oligonucleotide
tgcggcagttataggttgagtcgagaggat

SEQ ID NO: 144135 - DNA, 30 bp, Artificial Sequence
  Synthetic oligonucleotide
ctggtagtttgttgaccgatgtgcgaggat

SEQ ID NO: 144136 - DNA, 30 bp, Artificial Sequence
  Synthetic oligonucleotide
ggaaatcacagggtaaacgggccataggat

SEQ ID NO: 144137 - DNA, 30 bp, Artificial Sequence
  Synthetic oligonucleotide
gcgtaagattaacgaaatgtaatataggat

SEQ ID NO: 144138 - DNA, 30 bp, Artificial Sequence
  Synthetic oligonucleotide
tggtcactaggatatgggcgggtctaggat

SEQ ID NO: 144139 - DNA, 30 bp, Artificial Sequence
  Synthetic oligonucleotide
gcgtaatggagccaccatcgtacgtaggat

SEQ ID NO: 144140 - DNA, 30 bp, Artificial Sequence
  Synthetic oligonucleotide
cgtacgcttcatgttatgacctaaacggat

SEQ ID NO: 144141 - DNA, 30 bp, Artificial Sequence
  Synthetic oligonucleotide
taatcgtgtccaatcattaaggcaacggat

SEQ ID NO: 144142 - DNA, 30 bp, Artificial Sequence
  Synthetic oligonucleotide
gtgtacggccagtgaaacatagccacggat

SEQ ID NO: 144143 - DNA, 30 bp, Artificial Sequence
  Synthetic oligonucleotide
ggttgaaggagaccgattgcaatgacggat

SEQ ID NO: 144144 - DNA, 30 bp, Artificial Sequence
  Synthetic oligonucleotide
accaattaacacaatccgtgctaagcggat

SEQ ID NO: 144145 - DNA, 30 bp, Artificial Sequence
  Synthetic oligonucleotide
agcaagtcactggacatcaatagagcggat

SEQ ID NO: 144146 - DNA, 30 bp, Artificial Sequence
  Synthetic oligonucleotide
atctaactccggaatggggtgcgagcggat

SEQ ID NO: 144147 - DNA, 30 bp, Artificial Sequence
  Synthetic oligonucleotide
tgagggacgggtcgatgcgcaacggcggat

SEQ ID NO: 144148 - DNA, 30 bp, Artificial Sequence
  Synthetic oligonucleotide
ggggtagagagggctgcagttcagtcggat

SEQ ID NO: 144149 - DNA, 30 bp, Artificial Sequence
  Synthetic oligonucleotide
tcaaggtcgtcatacagcgtggggtcggat

SEQ ID NO: 144150 - DNA, 30 bp, Artificial Sequence
  Synthetic oligonucleotide
gccaacgatggggagtattcgtagagggat

SEQ ID NO: 144151 - DNA, 30 bp, Artificial Sequence
  Synthetic oligonucleotide
atctgcgaggtgtcaagccgtacgagggat

SEQ ID NO: 144152 - DNA, 30 bp, Artificial Sequence
  Synthetic oligonucleotide
tgcgccgtagcacgaccaagagggagggat

SEQ ID NO: 144153 - DNA, 30 bp, Artificial Sequence
  Synthetic oligonucleotide
tgagaggatctgcgcttaattttgagggat

SEQ ID NO: 144154 - DNA, 30 bp, Artificial Sequence
  Synthetic oligonucleotide
gccaaaaaactggatcgacaggcccgggat

SEQ ID NO: 144155 - DNA, 30 bp, Artificial Sequence
  Synthetic oligonucleotide
gcatctggacctgaaagtaaaggccgggat

SEQ ID NO: 144156 - DNA, 30 bp, Artificial Sequence
  Synthetic oligonucleotide
gatacgggctgcaaggccataacgcgggat

SEQ ID NO: 144157 - DNA, 30 bp, Artificial Sequence
  Synthetic oligonucleotide
gtaggagtgtgacaggggtgtacgcgggat

SEQ ID NO: 144158 - DNA, 30 bp, Artificial Sequence
  Synthetic oligonucleotide
catcgacgtccgaagcagtttctgcgggat

SEQ ID NO: 144159 - DNA, 30 bp, Artificial Sequence
  Synthetic oligonucleotide
aaaccgaatttcggtagccattatcgggat

SEQ ID NO: 144160 - DNA, 30 bp, Artificial Sequence
  Synthetic oligonucleotide
tgcatttgcgggctaacggtagcaggggat

SEQ ID NO: 144161 - DNA, 30 bp, Artificial Sequence
  Synthetic oligonucleotide
ttagcaacagactctagcccaataggggat

SEQ ID NO: 144162 - DNA, 30 bp, Artificial Sequence
  Synthetic oligonucleotide
agctagtttgccggtcggaacaggggggat

SEQ ID NO: 144163 - DNA, 30 bp, Artificial Sequence
  Synthetic oligonucleotide
ggtcgcctaagttatttccgtatgggggat

SEQ ID NO: 144164 - DNA, 30 bp, Artificial Sequence
  Synthetic oligonucleotide
tgcataatgcgggggtagccagtatgggat

SEQ ID NO: 144165 - DNA, 30 bp, Artificial Sequence
  Synthetic oligonucleotide
attggctatgctgtcctgctgtgctgggat

SEQ ID NO: 144166 - DNA, 30 bp, Artificial Sequence
  Synthetic oligonucleotide
accttcgtaggcgatcggatagggtgggat

SEQ ID NO: 144167 - DNA, 30 bp, Artificial Sequence
  Synthetic oligonucleotide
caacgacgtgtgctccttaggccaatggat

SEQ ID NO: 144168 - DNA, 30 bp, Artificial Sequence
  Synthetic oligonucleotide
ataatgtacgtcgatggagacgggatggat

SEQ ID NO: 144169 - DNA, 30 bp, Artificial Sequence
  Synthetic oligonucleotide
acggcgagcccgaggactatgtccgtggat

SEQ ID NO: 144170 - DNA, 30 bp, Artificial Sequence
  Synthetic oligonucleotide
ggtcgagtcgcgcggaacatggccttggat

SEQ ID NO: 144171 - DNA, 30 bp, Artificial Sequence
  Synthetic oligonucleotide
cgctagtcagggacggctgtcggcttggat

SEQ ID NO: 144172 - DNA, 30 bp, Artificial Sequence
  Synthetic oligonucleotide
cgaatgccagatcacgggttgagtttggat

SEQ ID NO: 144173 - DNA, 30 bp, Artificial Sequence
  Synthetic oligonucleotide
gactgaccgaagcccactcggggcaatgat

SEQ ID NO: 144174 - DNA, 30 bp, Artificial Sequence
  Synthetic oligonucleotide
tcactgaacagcctcctgaaggttaatgat

SEQ ID NO: 144175 - DNA, 30 bp, Artificial Sequence
  Synthetic oligonucleotide
cctgtgcggttccgccactaaagacatgat

SEQ ID NO: 144176 - DNA, 30 bp, Artificial Sequence
  Synthetic oligonucleotide
gccttacactgacaacattatcgacatgat

SEQ ID NO: 144177 - DNA, 30 bp, Artificial Sequence
  Synthetic oligonucleotide
ggttggtgaaaacattataagggccatgat

SEQ ID NO: 144178 - DNA, 30 bp, Artificial Sequence
  Synthetic oligonucleotide
ctcggtaagagtgggtctgtataagatgat

SEQ ID NO: 144179 - DNA, 30 bp, Artificial Sequence
  Synthetic oligonucleotide
acacgtacacttgcgtttagataggatgat

SEQ ID NO: 144180 - DNA, 30 bp, Artificial Sequence
  Synthetic oligonucleotide
ggccgattccgggttatacatctggatgat

SEQ ID NO: 144181 - DNA, 30 bp, Artificial Sequence
  Synthetic oligonucleotide
cgacatgccggcgagatttacgcaactgat

SEQ ID NO: 144182 - DNA, 30 bp, Artificial Sequence
  Synthetic oligonucleotide
aaatgggagagagtactgaactcgactgat

SEQ ID NO: 144183 - DNA, 30 bp, Artificial Sequence
  Synthetic oligonucleotide
aatgagaaaaagtggatcgaaatacctgat

SEQ ID NO: 144184 - DNA, 30 bp, Artificial Sequence
  Synthetic oligonucleotide
gcgtcagttgacactggtgagacggctgat

SEQ ID NO: 144185 - DNA, 30 bp, Artificial Sequence
  Synthetic oligonucleotide
ctaacttgggggtcatgaggacatgctgat

SEQ ID NO: 144186 - DNA, 30 bp, Artificial Sequence
  Synthetic oligonucleotide
aaaccgtgctggccgagaaggtgatctgat

SEQ ID NO: 144187 - DNA, 30 bp, Artificial Sequence
  Synthetic oligonucleotide
aatcacactgtacaggacaagtgaagtgat

SEQ ID NO: 144188 - DNA, 30 bp, Artificial Sequence
  Synthetic oligonucleotide
gtcatccatggcaactgtccgcccagtgat

SEQ ID NO: 144189 - DNA, 30 bp, Artificial Sequence
  Synthetic oligonucleotide
atgtcaatgcaaggatgcacgacgagtgat

SEQ ID NO: 144190 - DNA, 30 bp, Artificial Sequence
  Synthetic oligonucleotide
aatgaggcgggggcccacaggggacgtgat

SEQ ID NO: 144191 - DNA, 30 bp, Artificial Sequence
  Synthetic oligonucleotide
agcaaaacggtatgggtgattgtacgtgat

SEQ ID NO: 144192 - DNA, 30 bp, Artificial Sequence
  Synthetic oligonucleotide
catctgacatctactggtgacaagcgtgat

SEQ ID NO: 144193 - DNA, 30 bp, Artificial Sequence
  Synthetic oligonucleotide
ttgaaaaacaacgagtagacacaaggtgat

SEQ ID NO: 144194 - DNA, 30 bp, Artificial Sequence
  Synthetic oligonucleotide
ggaaaggcatagtaggatggagtaggtgat

SEQ ID NO: 144195 - DNA, 30 bp, Artificial Sequence
  Synthetic oligonucleotide
tgcgccccgacaaggggtcgattaggtgat

SEQ ID NO: 144196 - DNA, 30 bp, Artificial Sequence
  Synthetic oligonucleotide
catgacataaaaaagcaatggcacggtgat

SEQ ID NO: 144197 - DNA, 30 bp, Artificial Sequence
  Synthetic oligonucleotide
cggaagatcccgaagctgcggttgggtgat

SEQ ID NO: 144198 - DNA, 30 bp, Artificial Sequence
  Synthetic oligonucleotide
accctcattactgatattagaaaatgtgat

SEQ ID NO: 144199 - DNA, 30 bp, Artificial Sequence
  Synthetic oligonucleotide
cgccagaagttagggttagaggcatgtgat

SEQ ID NO: 144200 - DNA, 30 bp, Artificial Sequence
  Synthetic oligonucleotide
cgcacaactattagagtgactagatgtgat

SEQ ID NO: 144201 - DNA, 30 bp, Artificial Sequence
  Synthetic oligonucleotide
tcgcaatgcagaacatacatcgagtgtgat

SEQ ID NO: 144202 - DNA, 30 bp, Artificial Sequence
  Synthetic oligonucleotide
gctcgggctgaagcttggataagaattgat

SEQ ID NO: 144203 - DNA, 30 bp, Artificial Sequence
  Synthetic oligonucleotide
gcgttcccctcgggagggctgctccttgat

SEQ ID NO: 144204 - DNA, 30 bp, Artificial Sequence
  Synthetic oligonucleotide
agcgatacaaccacacattcgccgcttgat

SEQ ID NO: 144205 - DNA, 30 bp, Artificial Sequence
  Synthetic oligonucleotide
tcggcatatgtagctggcaagatgcttgat

SEQ ID NO: 144206 - DNA, 30 bp, Artificial Sequence
  Synthetic oligonucleotide
ctaatgcgataatggctggaaacagttgat

SEQ ID NO: 144207 - DNA, 30 bp, Artificial Sequence
  Synthetic oligonucleotide
cacgtttccagggaagtacttagcgttgat

SEQ ID NO: 144208 - DNA, 30 bp, Artificial Sequence
  Synthetic oligonucleotide
atggggaattatggatttgaaggggttgat

SEQ ID NO: 144209 - DNA, 30 bp, Artificial Sequence
  Synthetic oligonucleotide
tattcatgaaatcgatacgtcgagaaatat

SEQ ID NO: 144210 - DNA, 30 bp, Artificial Sequence
  Synthetic oligonucleotide
ttggtggtaaaaagggatgcatgtaaatat

SEQ ID NO: 144211 - DNA, 30 bp, Artificial Sequence
  Synthetic oligonucleotide
gacctgaagagggcaaagctctcacaatat

SEQ ID NO: 144212 - DNA, 30 bp, Artificial Sequence
  Synthetic oligonucleotide
tgccggagccacccacgtaaaccccaatat

SEQ ID NO: 144213 - DNA, 30 bp, Artificial Sequence
  Synthetic oligonucleotide
cggaaggttcgacggctattgtagcaatat

SEQ ID NO: 144214 - DNA, 30 bp, Artificial Sequence
  Synthetic oligonucleotide
gaggaattaccggttataatagttcaatat

SEQ ID NO: 144215 - DNA, 30 bp, Artificial Sequence
  Synthetic oligonucleotide
catactccggcactggaactaatggaatat

SEQ ID NO: 144216 - DNA, 30 bp, Artificial Sequence
  Synthetic oligonucleotide
caggatagtgcttccatgttcgatgaatat

SEQ ID NO: 144217 - DNA, 30 bp, Artificial Sequence
  Synthetic oligonucleotide
gcgagttcaaggccctctggcaggtaatat

SEQ ID NO: 144218 - DNA, 30 bp, Artificial Sequence
  Synthetic oligonucleotide
gcggtgttcccgggaaatggtgagacatat

SEQ ID NO: 144219 - DNA, 30 bp, Artificial Sequence
  Synthetic oligonucleotide
acgtggtctcagtgaaggcagactacatat

SEQ ID NO: 144220 - DNA, 30 bp, Artificial Sequence
  Synthetic oligonucleotide
tggataaaactagattggcgcggaccatat

SEQ ID NO: 144221 - DNA, 30 bp, Artificial Sequence
  Synthetic oligonucleotide
agctggagtgacttaatggacgtcccatat

SEQ ID NO: 144222 - DNA, 30 bp, Artificial Sequence
  Synthetic oligonucleotide
ctgcagtggccgtttgcacttatagcatat

SEQ ID NO: 144223 - DNA, 30 bp, Artificial Sequence
  Synthetic oligonucleotide
cccagtgtccgtcggtgaccaggcgcatat

SEQ ID NO: 144224 - DNA, 30 bp, Artificial Sequence
  Synthetic oligonucleotide
aggtcaactagtgggcactgcctcgcatat

SEQ ID NO: 144225 - DNA, 30 bp, Artificial Sequence
  Synthetic oligonucleotide
tacaccggcatatgaataacgagggcatat

SEQ ID NO: 144226 - DNA, 30 bp, Artificial Sequence
  Synthetic oligonucleotide
tccacacgacagaagaatgttttggcatat

SEQ ID NO: 144227 - DNA, 30 bp, Artificial Sequence
  Synthetic oligonucleotide
cttattcagtatgggaatccatgtgcatat

SEQ ID NO: 144228 - DNA, 30 bp, Artificial Sequence
  Synthetic oligonucleotide
gtgacgaacggggtcattaccgttgcatat

SEQ ID NO: 144229 - DNA, 30 bp, Artificial Sequence
  Synthetic oligonucleotide
tggacactccgacaacagggcctctcatat

SEQ ID NO: 144230 - DNA, 30 bp, Artificial Sequence
  Synthetic oligonucleotide
gaccgtgacgataaagacatgccaagatat

SEQ ID NO: 144231 - DNA, 30 bp, Artificial Sequence
  Synthetic oligonucleotide
atggagtagacgagccctcttttaagatat

SEQ ID NO: 144232 - DNA, 30 bp, Artificial Sequence
  Synthetic oligonucleotide
actgtaaaagtgcagaaatggatcagatat

SEQ ID NO: 144233 - DNA, 30 bp, Artificial Sequence
  Synthetic oligonucleotide
cctaattgacagatgctgaaagagagatat

SEQ ID NO: 144234 - DNA, 30 bp, Artificial Sequence
  Synthetic oligonucleotide
gggatcgcagaggcttgtgtgcatagatat

SEQ ID NO: 144235 - DNA, 30 bp, Artificial Sequence
  Synthetic oligonucleotide
cgggcagaccgcaccctcacttctagatat

SEQ ID NO: 144236 - DNA, 30 bp, Artificial Sequence
  Synthetic oligonucleotide
tgaggtcatcgagtacggaaagatcgatat

SEQ ID NO: 144237 - DNA, 31 bp, Artificial Sequence
  Synthetic oligonucleotide
tgtcgcgcccaatgtatgacccgctcgatat

SEQ ID NO: 144238 - DNA, 30 bp, Artificial Sequence
  Synthetic oligonucleotide
cctcgatgaaagttgtaggtacttcgatat

SEQ ID NO: 144239 - DNA, 30 bp, Artificial Sequence
  Synthetic oligonucleotide
cagaaagtggaagagatggcgtccggatat

SEQ ID NO: 144240 - DNA, 30 bp, Artificial Sequence
  Synthetic oligonucleotide
gtagagccatcgcggaggaaacagggatat

SEQ ID NO: 144241 - DNA, 30 bp, Artificial Sequence
  Synthetic oligonucleotide
acaatgaagcgttgtcatttgaaatgatat

SEQ ID NO: 144242 - DNA, 30 bp, Artificial Sequence
  Synthetic oligonucleotide
ccattgaggaatcttcgagagacatgatat

SEQ ID NO: 144243 - DNA, 30 bp, Artificial Sequence
  Synthetic oligonucleotide
caccttggcatacaatcacactggtgatat

SEQ ID NO: 144244 - DNA, 30 bp, Artificial Sequence
  Synthetic oligonucleotide
gacacatgccagaggactggagcgatatat

SEQ ID NO: 144245 - DNA, 30 bp, Artificial Sequence
  Synthetic oligonucleotide
ggctaaaagggtcggcagagttgactatat

SEQ ID NO: 144246 - DNA, 30 bp, Artificial Sequence
  Synthetic oligonucleotide
aacgacaaaaagacaagcccgctcctatat

SEQ ID NO: 144247 - DNA, 30 bp, Artificial Sequence
  Synthetic oligonucleotide
gtaagtcttaagaagaccagagtgctatat

SEQ ID NO: 144248 - DNA, 31 bp, Artificial Sequence
  Synthetic oligonucleotide
catgaatgtaaagcattgtatggtgctatat

SEQ ID NO: 144249 - DNA, 30 bp, Artificial Sequence
  Synthetic oligonucleotide
gaaaggacctatccgtgtggcaatctatat

SEQ ID NO: 144250 - DNA, 30 bp, Artificial Sequence
  Synthetic oligonucleotide
tggcgagatgcgtccttagataatctatat

SEQ ID NO: 144251 - DNA, 30 bp, Artificial Sequence
  Synthetic oligonucleotide
gtaacaggctatggcatgagttcggtatat

SEQ ID NO: 144252 - DNA, 30 bp, Artificial Sequence
  Synthetic oligonucleotide
atgtgacaatataacgtgcgtggggtatat

SEQ ID NO: 144253 - DNA, 30 bp, Artificial Sequence
  Synthetic oligonucleotide
tgattggtggggacgacgcgagttgtatat

SEQ ID NO: 144254 - DNA, 30 bp, Artificial Sequence
  Synthetic oligonucleotide
gaatgatcaggtgggtcctcgtttgtatat

SEQ ID NO: 144255 - DNA, 30 bp, Artificial Sequence
  Synthetic oligonucleotide
atcctagcgagaaaggacgtgagcttatat

SEQ ID NO: 144256 - DNA, 30 bp, Artificial Sequence
  Synthetic oligonucleotide
tgtaaagagtactagacacactagttatat

SEQ ID NO: 144257 - DNA, 30 bp, Artificial Sequence
  Synthetic oligonucleotide
gagcacggtacttggtcgcgaaacaactat

SEQ ID NO: 144258 - DNA, 30 bp, Artificial Sequence
  Synthetic oligonucleotide
ggccgctcaacggtgtaaacatgcaactat

SEQ ID NO: 144259 - DNA, 30 bp, Artificial Sequence
  Synthetic oligonucleotide
gcctctttgcgtaggagagagcggaactat

SEQ ID NO: 144260 - DNA, 30 bp, Artificial Sequence
  Synthetic oligonucleotide
atactggtaaggctacggaacctgaactat

SEQ ID NO: 144261 - DNA, 30 bp, Artificial Sequence
  Synthetic oligonucleotide
tcataacgcacatctcatcatcgccactat

SEQ ID NO: 144262 - DNA, 30 bp, Artificial Sequence
  Synthetic oligonucleotide
acgagttcaataggaagctatctgcactat

SEQ ID NO: 144263 - DNA, 30 bp, Artificial Sequence
  Synthetic oligonucleotide
atcacgatatactgctatgctgatcactat

SEQ ID NO: 144264 - DNA, 30 bp, Artificial Sequence
  Synthetic oligonucleotide
cagcaaaaacggaggtagggacaagactat

SEQ ID NO: 144265 - DNA, 30 bp, Artificial Sequence
  Synthetic oligonucleotide
cgacaccccgatagaactgtgcccgactat

SEQ ID NO: 144266 - DNA, 30 bp, Artificial Sequence
  Synthetic oligonucleotide
gtgaactccggcacgaaagagagctactat

SEQ ID NO: 144267 - DNA, 30 bp, Artificial Sequence
  Synthetic oligonucleotide
agcatggcctctggaagggtcacgtactat

SEQ ID NO: 144268 - DNA, 30 bp, Artificial Sequence
  Synthetic oligonucleotide
tggggtttagtagtgcgaggcctgtactat

SEQ ID NO: 144269 - DNA, 30 bp, Artificial Sequence
  Synthetic oligonucleotide
cgtaccggtgctgtagcgcgcagttactat

SEQ ID NO: 144270 - DNA, 30 bp, Artificial Sequence
  Synthetic oligonucleotide
ctcctgggtcaaagggcaccgaagacctat

SEQ ID NO: 144271 - DNA, 30 bp, Artificial Sequence
  Synthetic oligonucleotide
acatatctgcgcgaaatcgcaacgacctat

SEQ ID NO: 144272 - DNA, 30 bp, Artificial Sequence
  Synthetic oligonucleotide
tatcgtgagttgtggatacactctgcctat

SEQ ID NO: 144273 - DNA, 30 bp, Artificial Sequence
  Synthetic oligonucleotide
tgaaagcggaatgcgccagacttatcctat

SEQ ID NO: 144274 - DNA, 30 bp, Artificial Sequence
  Synthetic oligonucleotide
tttgaagatgggaaacgagtccagtcctat

SEQ ID NO: 144275 - DNA, 30 bp, Artificial Sequence
  Synthetic oligonucleotide
atagcaagtgccagatctcagcagtcctat

SEQ ID NO: 144276 - DNA, 30 bp, Artificial Sequence
  Synthetic oligonucleotide
tgtgttgggtgggtccgccgaacgtcctat

SEQ ID NO: 144277 - DNA, 30 bp, Artificial Sequence
  Synthetic oligonucleotide
gtgttgtgttctctttttgtgttttcctat

SEQ ID NO: 144278 - DNA, 30 bp, Artificial Sequence
  Synthetic oligonucleotide
ttgttgtgttctctttttgttttttcctat

SEQ ID NO: 144279 - DNA, 30 bp, Artificial Sequence
  Synthetic oligonucleotide
cgttcgctagtcctcagatgcgtaagctat

SEQ ID NO: 144280 - DNA, 30 bp, Artificial Sequence
  Synthetic oligonucleotide
gtacagagggtgtagctgcgcatcagctat

SEQ ID NO: 144281 - DNA, 30 bp, Artificial Sequence
  Synthetic oligonucleotide
tggtcggagcggacatcggttctacgctat

SEQ ID NO: 144282 - DNA, 30 bp, Artificial Sequence
  Synthetic oligonucleotide
actgtgtaggcatggacccgtgttcgctat

SEQ ID NO: 144283 - DNA, 30 bp, Artificial Sequence
  Synthetic oligonucleotide
tagcaacccgtgcggcgatgggaaggctat

SEQ ID NO: 144284 - DNA, 30 bp, Artificial Sequence
  Synthetic oligonucleotide
aagcaaaatacgatgaacatacgaggctat

SEQ ID NO: 144285 - DNA, 30 bp, Artificial Sequence
  Synthetic oligonucleotide
gacagtgagataataaggagacctggctat

SEQ ID NO: 144286 - DNA, 30 bp, Artificial Sequence
  Synthetic oligonucleotide
cgaaaatgggaaagtgaaaagctttgctat

SEQ ID NO: 144287 - DNA, 30 bp, Artificial Sequence
  Synthetic oligonucleotide
gatggaatcagatatcgcacttaaatctat

SEQ ID NO: 144288 - DNA, 30 bp, Artificial Sequence
  Synthetic oligonucleotide
ctgtggcctacgcgctaagcttgcatctat

SEQ ID NO: 144289 - DNA, 30 bp, Artificial Sequence
  Synthetic oligonucleotide
gatatcaacagaaagtaaaaccggatctat

SEQ ID NO: 144290 - DNA, 30 bp, Artificial Sequence
  Synthetic oligonucleotide
gtactcgggccgtagggcaagagtctctat

SEQ ID NO: 144291 - DNA, 30 bp, Artificial Sequence
  Synthetic oligonucleotide
acctgggccatgagcgtgcttcaagtctat

SEQ ID NO: 144292 - DNA, 30 bp, Artificial Sequence
  Synthetic oligonucleotide
agaaggagaacacaacaacgtttcgtctat

SEQ ID NO: 144293 - DNA, 30 bp, Artificial Sequence
  Synthetic oligonucleotide
taacatatataatgacattggcgattctat

SEQ ID NO: 144294 - DNA, 30 bp, Artificial Sequence
  Synthetic oligonucleotide
tatcagactcatatcatttgtgcaaagtat

SEQ ID NO: 144295 - DNA, 30 bp, Artificial Sequence
  Synthetic oligonucleotide
tcatcggcataaaagagcactgggaagtat

SEQ ID NO: 144296 - DNA, 30 bp, Artificial Sequence
  Synthetic oligonucleotide
cgggaatggcgagcaattcggactaagtat

SEQ ID NO: 144297 - DNA, 30 bp, Artificial Sequence
  Synthetic oligonucleotide
aagtcggaaatgaactatcgaagccagtat

SEQ ID NO: 144298 - DNA, 30 bp, Artificial Sequence
  Synthetic oligonucleotide
cacgatctcgtaaaatgtgggttgcagtat

SEQ ID NO: 144299 - DNA, 30 bp, Artificial Sequence
  Synthetic oligonucleotide
tcgtcctccaatggagtgaccaccgagtat

SEQ ID NO: 144300 - DNA, 30 bp, Artificial Sequence
  Synthetic oligonucleotide
gtcaagccggtcaaatatttatccgagtat

SEQ ID NO: 144301 - DNA, 30 bp, Artificial Sequence
  Synthetic oligonucleotide
ggtgcatattaagtacgccctgtcgagtat

SEQ ID NO: 144302 - DNA, 30 bp, Artificial Sequence
  Synthetic oligonucleotide
aagtctagttaaaaatgaaaagtggagtat

SEQ ID NO: 144303 - DNA, 30 bp, Artificial Sequence
  Synthetic oligonucleotide
agggaccctggggaatggtcgggtgagtat

SEQ ID NO: 144304 - DNA, 30 bp, Artificial Sequence
  Synthetic oligonucleotide
acgactatctgcgtgctgaccgcatagtat

SEQ ID NO: 144305 - DNA, 30 bp, Artificial Sequence
  Synthetic oligonucleotide
acgtggctcgggtggtcgttgtgatagtat

SEQ ID NO: 144306 - DNA, 30 bp, Artificial Sequence
  Synthetic oligonucleotide
gcgtatgacgtacaatgaccataaacgtat

SEQ ID NO: 144307 - DNA, 30 bp, Artificial Sequence
  Synthetic oligonucleotide
cggtcaggcagggggaaccgttccacgtat

SEQ ID NO: 144308 - DNA, 30 bp, Artificial Sequence
  Synthetic oligonucleotide
cggggaactatctgccaccataagacgtat

SEQ ID NO: 144309 - DNA, 30 bp, Artificial Sequence
  Synthetic oligonucleotide
cgtcacagctttgctggaccaacgacgtat

SEQ ID NO: 144310 - DNA, 30 bp, Artificial Sequence
  Synthetic oligonucleotide
gtacgcgtgtgtagggagtgacaaccgtat

SEQ ID NO: 144311 - DNA, 30 bp, Artificial Sequence
  Synthetic oligonucleotide
actgaaggcacctgaaggctccacccgtat

SEQ ID NO: 144312 - DNA, 30 bp, Artificial Sequence
  Synthetic oligonucleotide
cgctgtaagtactacggaaggaaagcgtat

SEQ ID NO: 144313 - DNA, 30 bp, Artificial Sequence
  Synthetic oligonucleotide
gaccgtgaggcccttaatttagcggcgtat

SEQ ID NO: 144314 - DNA, 30 bp, Artificial Sequence
  Synthetic oligonucleotide
agcatggcgtttaatgtaaagaatgcgtat

SEQ ID NO: 144315 - DNA, 30 bp, Artificial Sequence
  Synthetic oligonucleotide
gtggcaaccacttggatgacaccatcgtat

SEQ ID NO: 144316 - DNA, 30 bp, Artificial Sequence
  Synthetic oligonucleotide
cgaagcttttgcagctgtatatgatcgtat

SEQ ID NO: 144317 - DNA, 30 bp, Artificial Sequence
  Synthetic oligonucleotide
ggtagacacctgtcgtaccgatactcgtat

SEQ ID NO: 144318 - DNA, 30 bp, Artificial Sequence
  Synthetic oligonucleotide
ttcactcgtataagtcgggttgggtcgtat

SEQ ID NO: 144319 - DNA, 30 bp, Artificial Sequence
  Synthetic oligonucleotide
tttaaggtggagtcagaacggtaaaggtat

SEQ ID NO: 144320 - DNA, 30 bp, Artificial Sequence
  Synthetic oligonucleotide
cccgcgagggctgaactagcactaaggtat

SEQ ID NO: 144321 - DNA, 30 bp, Artificial Sequence
  Synthetic oligonucleotide
ttaagccagaaccttgggtggcgtaggtat

SEQ ID NO: 144322 - DNA, 30 bp, Artificial Sequence
  Synthetic oligonucleotide
tacaatcggtgcaatgcaacgggtaggtat

SEQ ID NO: 144323 - DNA, 30 bp, Artificial Sequence
  Synthetic oligonucleotide
aagttcaatcgcgcagaacgggcacggtat

SEQ ID NO: 144324 - DNA, 30 bp, Artificial Sequence
  Synthetic oligonucleotide
agggggaaaagggtcggatgaaagcggtat

SEQ ID NO: 144325 - DNA, 30 bp, Artificial Sequence
  Synthetic oligonucleotide
aaacggaatagctgtaatcaggcagggtat

SEQ ID NO: 144326 - DNA, 30 bp, Artificial Sequence
  Synthetic oligonucleotide
acgacgggcaggatagtcttatgagggtat

SEQ ID NO: 144327 - DNA, 30 bp, Artificial Sequence
  Synthetic oligonucleotide
tcccgcggcaagacagtaaggagcgggtat

SEQ ID NO: 144328 - DNA, 30 bp, Artificial Sequence
  Synthetic oligonucleotide
atgtggcacaagtagcaaacgggttggtat

SEQ ID NO: 144329 - DNA, 30 bp, Artificial Sequence
  Synthetic oligonucleotide
cacaaaacaatgcaatagcatagaatgtat

SEQ ID NO: 144330 - DNA, 30 bp, Artificial Sequence
  Synthetic oligonucleotide
gcagttcgggagcatgttgatggcatgtat

SEQ ID NO: 144331 - DNA, 30 bp, Artificial Sequence
  Synthetic oligonucleotide
acttgttacacgcggaggccaaggatgtat

SEQ ID NO: 144332 - DNA, 30 bp, Artificial Sequence
  Synthetic oligonucleotide
cctcaacgaaatatatgtagaacagtgtat

SEQ ID NO: 144333 - DNA, 30 bp, Artificial Sequence
  Synthetic oligonucleotide
atagtaaagattgggtatactaaggtgtat

SEQ ID NO: 144334 - DNA, 30 bp, Artificial Sequence
  Synthetic oligonucleotide
gcttatctgttgtgttttcctcttgtgtat

SEQ ID NO: 144335 - DNA, 30 bp, Artificial Sequence
  Synthetic oligonucleotide
aatcgccgccggacaggcaagatcttgtat

SEQ ID NO: 144336 - DNA, 30 bp, Artificial Sequence
  Synthetic oligonucleotide
aaatgcgaatgccaaagcttgccaaattat

SEQ ID NO: 144337 - DNA, 30 bp, Artificial Sequence
  Synthetic oligonucleotide
ctacacaacggaactccgcaggtgaattat

SEQ ID NO: 144338 - DNA, 30 bp, Artificial Sequence
  Synthetic oligonucleotide
catgcaaagtcgatcagcatcgataattat

SEQ ID NO: 144339 - DNA, 30 bp, Artificial Sequence
  Synthetic oligonucleotide
tggaaatgagggtcgtattaaacatattat

SEQ ID NO: 144340 - DNA, 30 bp, Artificial Sequence
  Synthetic oligonucleotide
aagctcggacccgccgaagaaagatattat

SEQ ID NO: 144341 - DNA, 30 bp, Artificial Sequence
  Synthetic oligonucleotide
gacgaacagctcacttgaagaccctattat

SEQ ID NO: 144342 - DNA, 30 bp, Artificial Sequence
  Synthetic oligonucleotide
tagagattacagcagaggtctagctattat

SEQ ID NO: 144343 - DNA, 30 bp, Artificial Sequence
  Synthetic oligonucleotide
agcgacgtacttgggattacaaagacttat

SEQ ID NO: 144344 - DNA, 30 bp, Artificial Sequence
  Synthetic oligonucleotide
tcaatcactgaaaatgttgtaagaccttat

SEQ ID NO: 144345 - DNA, 30 bp, Artificial Sequence
  Synthetic oligonucleotide
gcgtgtgcttggaccatgagcggaccttat

SEQ ID NO: 144346 - DNA, 30 bp, Artificial Sequence
  Synthetic oligonucleotide
attagaagagacgggacatgcactccttat

SEQ ID NO: 144347 - DNA, 30 bp, Artificial Sequence
  Synthetic oligonucleotide
cgcggaaaatggcataatctaattccttat

SEQ ID NO: 144348 - DNA, 30 bp, Artificial Sequence
  Synthetic oligonucleotide
tcacaggacagcaaagcacatgtcgcttat

SEQ ID NO: 144349 - DNA, 31 bp, Artificial Sequence
  Synthetic oligonucleotide
ttcagtgtgtaaattcaaggccacaagttat

SEQ ID NO: 144350 - DNA, 30 bp, Artificial Sequence
  Synthetic oligonucleotide
gggacaagcattacaaccagttctagttat

SEQ ID NO: 144351 - DNA, 30 bp, Artificial Sequence
  Synthetic oligonucleotide
ccagagcgtaaaaaactagaggaccgttat

SEQ ID NO: 144352 - DNA, 30 bp, Artificial Sequence
  Synthetic oligonucleotide
cacttagaatatatcgttctggcccgttat

SEQ ID NO: 144353 - DNA, 30 bp, Artificial Sequence
  Synthetic oligonucleotide
gactccttaccaggtgggcaatgccgttat

SEQ ID NO: 144354 - DNA, 30 bp, Artificial Sequence
  Synthetic oligonucleotide
tcgtgcagagagtcgttgatatgccgttat

SEQ ID NO: 144355 - DNA, 30 bp, Artificial Sequence
  Synthetic oligonucleotide
agccatacgccgcgacatcgtttgggttat

SEQ ID NO: 144356 - DNA, 30 bp, Artificial Sequence
  Synthetic oligonucleotide
cggcggtacgcgcggaaggttgcatgttat

SEQ ID NO: 144357 - DNA, 30 bp, Artificial Sequence
  Synthetic oligonucleotide
cagggaagagcgccttctctgaagtgttat

SEQ ID NO: 144358 - DNA, 30 bp, Artificial Sequence
  Synthetic oligonucleotide
gtagctctggtcaggtcgtgattgtgttat

SEQ ID NO: 144359 - DNA, 35 bp, Artificial Sequence
  Synthetic oligonucleotide
ggggacagagtagccctgaagattcttaactttat

SEQ ID NO: 144360 - DNA, 30 bp, Artificial Sequence
  Synthetic oligonucleotide
agaccgtaatgctaaggtgtgacagtttat

SEQ ID NO: 144361 - DNA, 30 bp, Artificial Sequence
  Synthetic oligonucleotide
aggcatcagcgtcggagggattgtgtttat

SEQ ID NO: 144362 - DNA, 30 bp, Artificial Sequence
  Synthetic oligonucleotide
tgtcagttgcgcgttcgtgactgtaaaact

SEQ ID NO: 144363 - DNA, 30 bp, Artificial Sequence
  Synthetic oligonucleotide
gaagtattaaacacgaacttgacacaaact

SEQ ID NO: 144364 - DNA, 30 bp, Artificial Sequence
  Synthetic oligonucleotide
tgcaagcgactcatgaatcagtcacaaact

SEQ ID NO: 144365 - DNA, 30 bp, Artificial Sequence
  Synthetic oligonucleotide
atcatggccgctgtatagcgccgacaaact

SEQ ID NO: 144366 - DNA, 30 bp, Artificial Sequence
  Synthetic oligonucleotide
cacgcaaatcctacggaaaaccaccaaact

SEQ ID NO: 144367 - DNA, 30 bp, Artificial Sequence
  Synthetic oligonucleotide
taaatctcggtactatatcagttgcaaact

SEQ ID NO: 144368 - DNA, 30 bp, Artificial Sequence
  Synthetic oligonucleotide
tataataaatggaaaacacagcatcaaact

SEQ ID NO: 144369 - DNA, 30 bp, Artificial Sequence
  Synthetic oligonucleotide
atatcagttcgtgagaaaacgcaggaaact

SEQ ID NO: 144370 - DNA, 30 bp, Artificial Sequence
  Synthetic oligonucleotide
tgctaatctggaacatagtagtcggaaact

SEQ ID NO: 144371 - DNA, 30 bp, Artificial Sequence
  Synthetic oligonucleotide
atcatcgattacaataggtggtaataaact

SEQ ID NO: 144372 - DNA, 30 bp, Artificial Sequence
  Synthetic oligonucleotide
ccgttcaagtacccaatgaaagtgtaaact

SEQ ID NO: 144373 - DNA, 30 bp, Artificial Sequence
  Synthetic oligonucleotide
gaggcaactagagatgtgtatgtgtaaact

SEQ ID NO: 144374 - DNA, 30 bp, Artificial Sequence
  Synthetic oligonucleotide
caagatctaatggactggtgagtaacaact

SEQ ID NO: 144375 - DNA, 30 bp, Artificial Sequence
  Synthetic oligonucleotide
ccaaacaagagagtaccgtcccatacaact

SEQ ID NO: 144376 - DNA, 30 bp, Artificial Sequence
  Synthetic oligonucleotide
gtagcggttgcgaaaggattaggtacaact

SEQ ID NO: 144377 - DNA, 30 bp, Artificial Sequence
  Synthetic oligonucleotide
cgtgatcagataatatagcatgaaccaact

SEQ ID NO: 144378 - DNA, 30 bp, Artificial Sequence
  Synthetic oligonucleotide
gacgcgagtcgcgaagaatattttccaact

SEQ ID NO: 144379 - DNA, 30 bp, Artificial Sequence
  Synthetic oligonucleotide
gggtgttcggccttagtaaccacagcaact

SEQ ID NO: 144380 - DNA, 30 bp, Artificial Sequence
  Synthetic oligonucleotide
gcgctccatatgcatgtaggggtggcaact

SEQ ID NO: 144381 - DNA, 30 bp, Artificial Sequence
  Synthetic oligonucleotide
tgggtgtgacttacgatacgcgactcaact

SEQ ID NO: 144382 - DNA, 30 bp, Artificial Sequence
  Synthetic oligonucleotide
gagagtaatacagcagatttggcgtcaact

SEQ ID NO: 144383 - DNA, 30 bp, Artificial Sequence
  Synthetic oligonucleotide
cggtatctcccgcacagcacccgaagaact

SEQ ID NO: 144384 - DNA, 30 bp, Artificial Sequence
  Synthetic oligonucleotide
caagaagagagcacaaactgccagagaact

SEQ ID NO: 144385 - DNA, 30 bp, Artificial Sequence
  Synthetic oligonucleotide
gaggtaccgcaaagataagaagtgagaact

SEQ ID NO: 144386 - DNA, 30 bp, Artificial Sequence
  Synthetic oligonucleotide
ttatactgggggcgtatcagcgatagaact

SEQ ID NO: 144387 - DNA, 30 bp, Artificial Sequence
  Synthetic oligonucleotide
tcgactaaagtagggactcattctagaact

SEQ ID NO: 144388 - DNA, 30 bp, Artificial Sequence
  Synthetic oligonucleotide
ttcatccggggacgcctacgaggacgaact

SEQ ID NO: 144389 - DNA, 30 bp, Artificial Sequence
  Synthetic oligonucleotide
tcgtagttccccgacaatatgtagcgaact

SEQ ID NO: 144390 - DNA, 30 bp, Artificial Sequence
  Synthetic oligonucleotide
ccgggacggtccaagttaactgtgcgaact

SEQ ID NO: 144391 - DNA, 30 bp, Artificial Sequence
  Synthetic oligonucleotide
taaagggacaattgtgatcacgtaggaact

SEQ ID NO: 144392 - DNA, 30 bp, Artificial Sequence
  Synthetic oligonucleotide
taaggcaggcatcacggaggggcgggaact

SEQ ID NO: 144393 - DNA, 30 bp, Artificial Sequence
  Synthetic oligonucleotide
caggataggggctaccctaagaaatgaact

SEQ ID NO: 144394 - DNA, 31 bp, Artificial Sequence
  Synthetic oligonucleotide
tgttagctttgaacggtggtgtacatgaact

SEQ ID NO: 144395 - DNA, 30 bp, Artificial Sequence
  Synthetic oligonucleotide
taacgaacgatttaaaagcgaatatgaact

SEQ ID NO: 144396 - DNA, 30 bp, Artificial Sequence
  Synthetic oligonucleotide
ttcaatggctaagcgtggaggtaaataact

SEQ ID NO: 144397 - DNA, 30 bp, Artificial Sequence
  Synthetic oligonucleotide
cgattgccgtgtgatcgagtacccataact

SEQ ID NO: 144398 - DNA, 30 bp, Artificial Sequence
  Synthetic oligonucleotide
ggaccaaggagatgtttcataggcataact

SEQ ID NO: 144399 - DNA, 30 bp, Artificial Sequence
  Synthetic oligonucleotide
gaataaagcgtgcaacagggaatcataact

SEQ ID NO: 144400 - DNA, 30 bp, Artificial Sequence
  Synthetic oligonucleotide
ccgacttttacggacattgtgctcataact

SEQ ID NO: 144401 - DNA, 30 bp, Artificial Sequence
  Synthetic oligonucleotide
gatgtcgaagggcgaagccgcaagataact

SEQ ID NO: 144402 - DNA, 30 bp, Artificial Sequence
  Synthetic oligonucleotide
tagtctagccagccgtagactcatgtaact

SEQ ID NO: 144403 - DNA, 30 bp, Artificial Sequence
  Synthetic oligonucleotide
tctagcaatagatgtgggtgtcatgtaact

SEQ ID NO: 144404 - DNA, 29 bp, Artificial Sequence
  Synthetic oligonucleotide
atggtgttgaaagcaatatctatgtaact

SEQ ID NO: 144405 - DNA, 30 bp, Artificial Sequence
  Synthetic oligonucleotide
gcatacatggtagaccaagagattgtaact

SEQ ID NO: 144406 - DNA, 30 bp, Artificial Sequence
  Synthetic oligonucleotide
aagacattcaccggacatgaagacttaact

SEQ ID NO: 144407 - DNA, 30 bp, Artificial Sequence
  Synthetic oligonucleotide
cgtaaggatggtcagaaggcctaaaacact

SEQ ID NO: 144408 - DNA, 30 bp, Artificial Sequence
  Synthetic oligonucleotide
ttaatgtgctgcacagcaccagtaaacact

SEQ ID NO: 144409 - DNA, 30 bp, Artificial Sequence
  Synthetic oligonucleotide
cccacgcgtacgcgctccagcaacaacact

SEQ ID NO: 144410 - DNA, 30 bp, Artificial Sequence
  Synthetic oligonucleotide
aagattagcttcggtactcagagcaacact

SEQ ID NO: 144411 - DNA, 30 bp, Artificial Sequence
  Synthetic oligonucleotide
gtgtgccatcactgtgcgcaggtgaacact

SEQ ID NO: 144412 - DNA, 30 bp, Artificial Sequence
  Synthetic oligonucleotide
aggactacccgaaaaggtaaatcacacact

SEQ ID NO: 144413 - DNA, 30 bp, Artificial Sequence
  Synthetic oligonucleotide
tcatgaccagtttacgacacattagacact

SEQ ID NO: 144414 - DNA, 30 bp, Artificial Sequence
  Synthetic oligonucleotide
cgtgccgaggctaccggacactgtgacact

SEQ ID NO: 144415 - DNA, 30 bp, Artificial Sequence
  Synthetic oligonucleotide
tgcaaacacaagtaacccctgaaatacact

SEQ ID NO: 144416 - DNA, 30 bp, Artificial Sequence
  Synthetic oligonucleotide
aaacaaacccagcaaaaaggaggaaccact

SEQ ID NO: 144417 - DNA, 30 bp, Artificial Sequence
  Synthetic oligonucleotide
tgttcgtagaacggacagggctgaaccact

SEQ ID NO: 144418 - DNA, 30 bp, Artificial Sequence
  Synthetic oligonucleotide
cccgttgtggagggatatgcaggcaccact

SEQ ID NO: 144419 - DNA, 30 bp, Artificial Sequence
  Synthetic oligonucleotide
tcattgcaaatctaaatcccaggtaccact

SEQ ID NO: 144420 - DNA, 30 bp, Artificial Sequence
  Synthetic oligonucleotide
cctgggcctgaatgtacataggaacccact

SEQ ID NO: 144421 - DNA, 30 bp, Artificial Sequence
  Synthetic oligonucleotide
aggcggaggcgagggagcacaccgcccact

SEQ ID NO: 144422 - DNA, 30 bp, Artificial Sequence
  Synthetic oligonucleotide
ccatagaggtcactgggcaaaaaagccact

SEQ ID NO: 144423 - DNA, 30 bp, Artificial Sequence
  Synthetic oligonucleotide
tttgaagcgaggtaagtcttgagagccact

SEQ ID NO: 144424 - DNA, 30 bp, Artificial Sequence
  Synthetic oligonucleotide
aacgaacccagtattgctagtagttccact

SEQ ID NO: 144425 - DNA, 30 bp, Artificial Sequence
  Synthetic oligonucleotide
ggcatagtgttggtcaaataggcgagcact

SEQ ID NO: 144426 - DNA, 30 bp, Artificial Sequence
  Synthetic oligonucleotide
cgtttgcgaacatccccgccgaggagcact

SEQ ID NO: 144427 - DNA, 30 bp, Artificial Sequence
  Synthetic oligonucleotide
ttaggtgggggtaaacatacagatggcact

SEQ ID NO: 144428 - DNA, 30 bp, Artificial Sequence
  Synthetic oligonucleotide
tgatcacgaggtatctgaccgtgatgcact

SEQ ID NO: 144429 - DNA, 30 bp, Artificial Sequence
  Synthetic oligonucleotide
tagtattcaaaggctattcctcagtgcact

SEQ ID NO: 144430 - DNA, 30 bp, Artificial Sequence
  Synthetic oligonucleotide
ggagtaggttgccagtcactccacatcact

SEQ ID NO: 144431 - DNA, 30 bp, Artificial Sequence
  Synthetic oligonucleotide
agtatggtgcatccggttgtacttatcact

SEQ ID NO: 144432 - DNA, 30 bp, Artificial Sequence
  Synthetic oligonucleotide
aacggtccgaaagggtggacatcactcact

SEQ ID NO: 144433 - DNA, 30 bp, Artificial Sequence
  Synthetic oligonucleotide
gctggatcggggggcctaaggaggctcact

SEQ ID NO: 144434 - DNA, 30 bp, Artificial Sequence
  Synthetic oligonucleotide
ctgacccatagccggaaagctgttctcact

SEQ ID NO: 144435 - DNA, 30 bp, Artificial Sequence
  Synthetic oligonucleotide
tgtaaaaggcctatggcttgggacgtcact

SEQ ID NO: 144436 - DNA, 30 bp, Artificial Sequence
  Synthetic oligonucleotide
cgtgatcgtacacaccggtgccgtgtcact

SEQ ID NO: 144437 - DNA, 30 bp, Artificial Sequence
  Synthetic oligonucleotide
cggacgccaggagaatggctcacattcact

SEQ ID NO: 144438 - DNA, 30 bp, Artificial Sequence
  Synthetic oligonucleotide
agatatggccgagacattctttgattcact

SEQ ID NO: 144439 - DNA, 30 bp, Artificial Sequence
  Synthetic oligonucleotide
tcaatatgcagaccttataacgaaaagact

SEQ ID NO: 144440 - DNA, 30 bp, Artificial Sequence
  Synthetic oligonucleotide
gcttcgcattagaattcaacagcaaagact

SEQ ID NO: 144441 - DNA, 30 bp, Artificial Sequence
  Synthetic oligonucleotide
gacaagttttgtaattcacgaaagaagact

SEQ ID NO: 144442 - DNA, 30 bp, Artificial Sequence
  Synthetic oligonucleotide
ctaatgggtaggagggttcgcagtcagact

SEQ ID NO: 144443 - DNA, 30 bp, Artificial Sequence
  Synthetic oligonucleotide
aaaggtggggggtatggtgaatgcgagact

SEQ ID NO: 144444 - DNA, 30 bp, Artificial Sequence
  Synthetic oligonucleotide
tcaacaagccgtaagcctgtgagggagact

SEQ ID NO: 144445 - DNA, 30 bp, Artificial Sequence
  Synthetic oligonucleotide
acccacagagcggatcgtatatagtagact

SEQ ID NO: 144446 - DNA, 30 bp, Artificial Sequence
  Synthetic oligonucleotide
cctacgtgctacccgtgaaggacttagact

SEQ ID NO: 144447 - DNA, 30 bp, Artificial Sequence
  Synthetic oligonucleotide
acaaaaggcgtcagaatatctagaacgact

SEQ ID NO: 144448 - DNA, 30 bp, Artificial Sequence
  Synthetic oligonucleotide
cggataccatagtatgtttacctaacgact

SEQ ID NO: 144449 - DNA, 30 bp, Artificial Sequence
  Synthetic oligonucleotide
tggaatgcagtagaggccacgcccacgact

SEQ ID NO: 144450 - DNA, 30 bp, Artificial Sequence
  Synthetic oligonucleotide
gagaatgaaatgcctggtacggcaccgact

SEQ ID NO: 144451 - DNA, 30 bp, Artificial Sequence
  Synthetic oligonucleotide
gtccgatcgacatcgcgtgataatccgact

SEQ ID NO: 144452 - DNA, 30 bp, Artificial Sequence
  Synthetic oligonucleotide
gtcacccaacgaacagcgtagtaagcgact

SEQ ID NO: 144453 - DNA, 30 bp, Artificial Sequence
  Synthetic oligonucleotide
cctcgtttttaccggaagtcgaaggcgact

SEQ ID NO: 144454 - DNA, 30 bp, Artificial Sequence
  Synthetic oligonucleotide
ccggacttctaaatcggatttcgtgcgact

SEQ ID NO: 144455 - DNA, 30 bp, Artificial Sequence
  Synthetic oligonucleotide
caaggttgaagcaatcgtagcctatcgact

SEQ ID NO: 144456 - DNA, 30 bp, Artificial Sequence
  Synthetic oligonucleotide
caaattgaggtatatgggtagtgaaggact

SEQ ID NO: 144457 - DNA, 30 bp, Artificial Sequence
  Synthetic oligonucleotide
ggtaattcagggctatacacccataggact

SEQ ID NO: 144458 - DNA, 30 bp, Artificial Sequence
  Synthetic oligonucleotide
tgaccacaggcacatggtgacttacggact

SEQ ID NO: 144459 - DNA, 30 bp, Artificial Sequence
  Synthetic oligonucleotide
tgacaacatgatactggctctcgttggact

SEQ ID NO: 144460 - DNA, 30 bp, Artificial Sequence
  Synthetic oligonucleotide
tggagcgtggctgcatgtctcctttggact

SEQ ID NO: 144461 - DNA, 30 bp, Artificial Sequence
  Synthetic oligonucleotide
gatcgcatgagatttagaggaccaatgact

SEQ ID NO: 144462 - DNA, 30 bp, Artificial Sequence
  Synthetic oligonucleotide
gtaccggaacgtgcgtctcggggaatgact

SEQ ID NO: 144463 - DNA, 30 bp, Artificial Sequence
  Synthetic oligonucleotide
tgagcggtgagtcgttagggcctcatgact

SEQ ID NO: 144464 - DNA, 30 bp, Artificial Sequence
  Synthetic oligonucleotide
atcttgcgtatacgaactgccctactgact

SEQ ID NO: 144465 - DNA, 30 bp, Artificial Sequence
  Synthetic oligonucleotide
aagagacgtgtgtaatgcattgacctgact

SEQ ID NO: 144466 - DNA, 30 bp, Artificial Sequence
  Synthetic oligonucleotide
taaacaaatacaagcagcccaggcctgact

SEQ ID NO: 144467 - DNA, 30 bp, Artificial Sequence
  Synthetic oligonucleotide
gatgacttgatcgagagtccagtgctgact

SEQ ID NO: 144468 - DNA, 30 bp, Artificial Sequence
  Synthetic oligonucleotide
cttacactgagcgtaaaggggactctgact

SEQ ID NO: 144469 - DNA, 31 bp, Artificial Sequence
  Synthetic oligonucleotide
gcacggctgactatgcttacgtcacgtgact

SEQ ID NO: 144470 - DNA, 30 bp, Artificial Sequence
  Synthetic oligonucleotide
ggtaacgccaatatggcaaggcgggtgact

SEQ ID NO: 144471 - DNA, 30 bp, Artificial Sequence
  Synthetic oligonucleotide
tacgcagacgatagtcttgaggttgtgact

SEQ ID NO: 144472 - DNA, 30 bp, Artificial Sequence
  Synthetic oligonucleotide
acattcgggacgaccgtattcacattgact

SEQ ID NO: 144473 - DNA, 30 bp, Artificial Sequence
  Synthetic oligonucleotide
tgtcgatacgagaaataatacgtattgact

SEQ ID NO: 144474 - DNA, 30 bp, Artificial Sequence
  Synthetic oligonucleotide
gatgagatcccgcgaagatgtgcgaatact

SEQ ID NO: 144475 - DNA, 30 bp, Artificial Sequence
  Synthetic oligonucleotide
gctagactaatgagacaggatacacatact

SEQ ID NO: 144476 - DNA, 30 bp, Artificial Sequence
  Synthetic oligonucleotide
tagagggtgggaaataggcaaaggcatact

SEQ ID NO: 144477 - DNA, 30 bp, Artificial Sequence
  Synthetic oligonucleotide
tcacgaaccccagaactcagaatgcatact

SEQ ID NO: 144478 - DNA, 30 bp, Artificial Sequence
  Synthetic oligonucleotide
cggggaaattatgcatcccattatgatact

SEQ ID NO: 144479 - DNA, 30 bp, Artificial Sequence
  Synthetic oligonucleotide
gcgagcagaccaaatccggtctgttatact

SEQ ID NO: 144480 - DNA, 30 bp, Artificial Sequence
  Synthetic oligonucleotide
tgtagggatccaaatattctaggcactact

SEQ ID NO: 144481 - DNA, 30 bp, Artificial Sequence
  Synthetic oligonucleotide
tacgattggtgtcgattacgcattactact

SEQ ID NO: 144482 - DNA, 30 bp, Artificial Sequence
  Synthetic oligonucleotide
tagtcgttatcaaatacacgacgacctact

SEQ ID NO: 144483 - DNA, 30 bp, Artificial Sequence
  Synthetic oligonucleotide
tacctgaaaatgcttgttaagaaccctact

SEQ ID NO: 144484 - DNA, 30 bp, Artificial Sequence
  Synthetic oligonucleotide
acaagggccgagtcttcccgccgtcctact

SEQ ID NO: 144485 - DNA, 30 bp, Artificial Sequence
  Synthetic oligonucleotide
tgcctgcggcgtacaatggtccgagctact

SEQ ID NO: 144486 - DNA, 30 bp, Artificial Sequence
  Synthetic oligonucleotide
ttatgcagttactggaccattctatctact

SEQ ID NO: 144487 - DNA, 30 bp, Artificial Sequence
  Synthetic oligonucleotide
gtggctgttgacaagcccaatgggtctact

SEQ ID NO: 144488 - DNA, 30 bp, Artificial Sequence
  Synthetic oligonucleotide
ctgacaggataccgtctacacgtaagtact

SEQ ID NO: 144489 - DNA, 30 bp, Artificial Sequence
  Synthetic oligonucleotide
ccgcggaaaattgataggaacttcagtact

SEQ ID NO: 144490 - DNA, 30 bp, Artificial Sequence
  Synthetic oligonucleotide
ccgtcaaatccccttgtgcgttctcgtact

SEQ ID NO: 144491 - DNA, 30 bp, Artificial Sequence
  Synthetic oligonucleotide
gcaggggccattatttcaaaaaccggtact

SEQ ID NO: 144492 - DNA, 30 bp, Artificial Sequence
  Synthetic oligonucleotide
aatgccaagggggtttaggcgacgggtact

SEQ ID NO: 144493 - DNA, 30 bp, Artificial Sequence
  Synthetic oligonucleotide
ggcccgtttgggtgagtgtaaaaatgtact

SEQ ID NO: 144494 - DNA, 30 bp, Artificial Sequence
  Synthetic oligonucleotide
agccgttagtgcgtccatacttgttgtact

SEQ ID NO: 144495 - DNA, 30 bp, Artificial Sequence
  Synthetic oligonucleotide
tcagtgaaactttcaatggatctcattact

SEQ ID NO: 144496 - DNA, 30 bp, Artificial Sequence
  Synthetic oligonucleotide
tgagcgcaaacgcgaacgggggtcattact

SEQ ID NO: 144497 - DNA, 30 bp, Artificial Sequence
  Synthetic oligonucleotide
gatgctactagcatcggtcggaatattact

SEQ ID NO: 144498 - DNA, 30 bp, Artificial Sequence
  Synthetic oligonucleotide
acacaatgaaagcgagttacggcgcttact

SEQ ID NO: 144499 - DNA, 30 bp, Artificial Sequence
  Synthetic oligonucleotide
aaaggtgaactaattatccgcagtcttact

SEQ ID NO: 144500 - DNA, 30 bp, Artificial Sequence
  Synthetic oligonucleotide
agaccttttataacaggggcgcgtgttact

SEQ ID NO: 144501 - DNA, 30 bp, Artificial Sequence
  Synthetic oligonucleotide
acgagcatagcacaggagtatcttgttact

SEQ ID NO: 144502 - DNA, 30 bp, Artificial Sequence
  Synthetic oligonucleotide
tgacgatcgatgaacccagactaatttact

SEQ ID NO: 144503 - DNA, 30 bp, Artificial Sequence
  Synthetic oligonucleotide
actgggttgtatgttagggcgacttttact

SEQ ID NO: 144504 - DNA, 30 bp, Artificial Sequence
  Synthetic oligonucleotide
ggaagtgaccatcgcaagttggctaaacct

SEQ ID NO: 144505 - DNA, 30 bp, Artificial Sequence
  Synthetic oligonucleotide
agttactcaggttatctagccgttaaacct

SEQ ID NO: 144506 - DNA, 30 bp, Artificial Sequence
  Synthetic oligonucleotide
caatacacgttttacacaagcagtcaacct

SEQ ID NO: 144507 - DNA, 30 bp, Artificial Sequence
  Synthetic oligonucleotide
caaggcgggtgtagacgctagtaagaacct

SEQ ID NO: 144508 - DNA, 30 bp, Artificial Sequence
  Synthetic oligonucleotide
gcggcatgagtattcgataaatacgaacct

SEQ ID NO: 144509 - DNA, 30 bp, Artificial Sequence
  Synthetic oligonucleotide
tgattcagggggcttttgcaaccgacacct

SEQ ID NO: 144510 - DNA, 30 bp, Artificial Sequence
  Synthetic oligonucleotide
tcatggccctcggcttagattgaaccacct

SEQ ID NO: 144511 - DNA, 30 bp, Artificial Sequence
  Synthetic oligonucleotide
acgtacatacgggtgcgcgaggcaccacct

SEQ ID NO: 144512 - DNA, 30 bp, Artificial Sequence
  Synthetic oligonucleotide
ctctacgcaggagagcgctaacgaccacct

SEQ ID NO: 144513 - DNA, 30 bp, Artificial Sequence
  Synthetic oligonucleotide
ctaaccacgtcattaataaccagcccacct

SEQ ID NO: 144514 - DNA, 30 bp, Artificial Sequence
  Synthetic oligonucleotide
tcgaattattcctggaagaatcatccacct

SEQ ID NO: 144515 - DNA, 30 bp, Artificial Sequence
  Synthetic oligonucleotide
catagcaacgacccaattatgtgagcacct

SEQ ID NO: 144516 - DNA, 30 bp, Artificial Sequence
  Synthetic oligonucleotide
acgagcataattgtgggtccctccgcacct

SEQ ID NO: 144517 - DNA, 30 bp, Artificial Sequence
  Synthetic oligonucleotide
cgggattctcaatgatttcttcaggcacct

SEQ ID NO: 144518 - DNA, 30 bp, Artificial Sequence
  Synthetic oligonucleotide
tggagggtaggacttgactataccagacct

SEQ ID NO: 144519 - DNA, 30 bp, Artificial Sequence
  Synthetic oligonucleotide
cgctatacggaaggggaaaatcatagacct

SEQ ID NO: 144520 - DNA, 30 bp, Artificial Sequence
  Synthetic oligonucleotide
gtacatgataggccatgaaaatttggacct

SEQ ID NO: 144521 - DNA, 30 bp, Artificial Sequence
  Synthetic oligonucleotide
cataaatccaaaagtatctcatggtgacct

SEQ ID NO: 144522 - DNA, 30 bp, Artificial Sequence
  Synthetic oligonucleotide
acgtatacgggaataacataacaagtacct

SEQ ID NO: 144523 - DNA, 30 bp, Artificial Sequence
  Synthetic oligonucleotide
ttaaaccgaaggcgacctcaacggttacct

SEQ ID NO: 144524 - DNA, 30 bp, Artificial Sequence
  Synthetic oligonucleotide
gtcgttgaggcttacgaggcaactttacct

SEQ ID NO: 144525 - DNA, 30 bp, Artificial Sequence
  Synthetic oligonucleotide
ttgggcgaaggcattttcagtactttacct

SEQ ID NO: 144526 - DNA, 30 bp, Artificial Sequence
  Synthetic oligonucleotide
gtaatacaacgatattgaggagaacaccct

SEQ ID NO: 144527 - DNA, 30 bp, Artificial Sequence
  Synthetic oligonucleotide
aacagtttgagatttaagacaatacaccct

SEQ ID NO: 144528 - DNA, 30 bp, Artificial Sequence
  Synthetic oligonucleotide
taaagtgcggtaatttaggcgctacaccct

SEQ ID NO: 144529 - DNA, 30 bp, Artificial Sequence
  Synthetic oligonucleotide
aaataagtataacaacgaggcgaccaccct

SEQ ID NO: 144530 - DNA, 30 bp, Artificial Sequence
  Synthetic oligonucleotide
gaggacagattcccacagctgctccaccct

SEQ ID NO: 144531 - DNA, 30 bp, Artificial Sequence
  Synthetic oligonucleotide
gtgcctaatgcgttctgaataacggaccct

SEQ ID NO: 144532 - DNA, 30 bp, Artificial Sequence
  Synthetic oligonucleotide
acgattacttctttcggtagtacataccct

SEQ ID NO: 144533 - DNA, 30 bp, Artificial Sequence
  Synthetic oligonucleotide
cggagacatccatatactgtaagttaccct

SEQ ID NO: 144534 - DNA, 30 bp, Artificial Sequence
  Synthetic oligonucleotide
tcaggcggactatacaacagattaacccct

SEQ ID NO: 144535 - DNA, 30 bp, Artificial Sequence
  Synthetic oligonucleotide
ggaattacaataggagaaagaccgccccct

SEQ ID NO: 144536 - DNA, 30 bp, Artificial Sequence
  Synthetic oligonucleotide
atgaggagtttgcttggcaacgtcgcccct

SEQ ID NO: 144537 - DNA, 30 bp, Artificial Sequence
  Synthetic oligonucleotide
gtactggggtgagggtacatcaaatcccct

SEQ ID NO: 144538 - DNA, 30 bp, Artificial Sequence
  Synthetic oligonucleotide
cataaggactgccgtagagggtccagccct

SEQ ID NO: 144539 - DNA, 30 bp, Artificial Sequence
  Synthetic oligonucleotide
tagttaacaagaaccgcaaagtgcagccct

SEQ ID NO: 144540 - DNA, 30 bp, Artificial Sequence
  Synthetic oligonucleotide
gggcaatcgtactcggccaagcgacgccct

SEQ ID NO: 144541 - DNA, 30 bp, Artificial Sequence
  Synthetic oligonucleotide
tatctaagggataaaagtcatacgcgccct

SEQ ID NO: 144542 - DNA, 30 bp, Artificial Sequence
  Synthetic oligonucleotide
tcatgtactgagagaatacaggtaggccct

SEQ ID NO: 144543 - DNA, 30 bp, Artificial Sequence
  Synthetic oligonucleotide
atgcgtattcgagtcgacatgtctggccct

SEQ ID NO: 144544 - DNA, 30 bp, Artificial Sequence
  Synthetic oligonucleotide
tgaacactgctgtcgcggaacagtggccct

SEQ ID NO: 144545 - DNA, 30 bp, Artificial Sequence
  Synthetic oligonucleotide
cggtacatagaacaccgtaccaactgccct

SEQ ID NO: 144546 - DNA, 30 bp, Artificial Sequence
  Synthetic oligonucleotide
tccatgcacgatcgtgacggctcaatccct

SEQ ID NO: 144547 - DNA, 30 bp, Artificial Sequence
  Synthetic oligonucleotide
gtgtcaacatcgttttcgatcggaatccct

SEQ ID NO: 144548 - DNA, 30 bp, Artificial Sequence
  Synthetic oligonucleotide
tggaggcttacgtgacgaacgactatccct

SEQ ID NO: 144549 - DNA, 30 bp, Artificial Sequence
  Synthetic oligonucleotide
cggagggcagcacacggataattcctccct

SEQ ID NO: 144550 - DNA, 30 bp, Artificial Sequence
  Synthetic oligonucleotide
aagtttggataactaagaaggtaggtccct

SEQ ID NO: 144551 - DNA, 28 bp, Artificial Sequence
  Synthetic oligonucleotide
taaacgccgtccagactcgaaattccct

SEQ ID NO: 144552 - DNA, 30 bp, Artificial Sequence
  Synthetic oligonucleotide
tcgcaaagcgacggtgtcagttcgttccct

SEQ ID NO: 144553 - DNA, 30 bp, Artificial Sequence
  Synthetic oligonucleotide
gtcattctgcaattcgaactaaaaaagcct

SEQ ID NO: 144554 - DNA, 30 bp, Artificial Sequence
  Synthetic oligonucleotide
gacgacttgtgaaataggcagtgcaagcct

SEQ ID NO: 144555 - DNA, 30 bp, Artificial Sequence
  Synthetic oligonucleotide
aatggagatggtttttacgggtagaagcct

SEQ ID NO: 144556 - DNA, 30 bp, Artificial Sequence
  Synthetic oligonucleotide
cgtaggtcccagtgccccaatcggaagcct

SEQ ID NO: 144557 - DNA, 30 bp, Artificial Sequence
  Synthetic oligonucleotide
cggcaactggagaagagctcgcagcagcct

SEQ ID NO: 144558 - DNA, 30 bp, Artificial Sequence
  Synthetic oligonucleotide
gaggtcaagtgaaaacaagcctggcagcct

SEQ ID NO: 144559 - DNA, 30 bp, Artificial Sequence
  Synthetic oligonucleotide
ccaaatctgtaaccaggactgtcatagcct

SEQ ID NO: 144560 - DNA, 30 bp, Artificial Sequence
  Synthetic oligonucleotide
ctgcgtagtaaacaggtttacgggtagcct

SEQ ID NO: 144561 - DNA, 30 bp, Artificial Sequence
  Synthetic oligonucleotide
tactaggatacgttttagactaaaccgcct

SEQ ID NO: 144562 - DNA, 30 bp, Artificial Sequence
  Synthetic oligonucleotide
gaacgttaaggcaatcaagggatcgcgcct

SEQ ID NO: 144563 - DNA, 30 bp, Artificial Sequence
  Synthetic oligonucleotide
ggactagttttcaggagcactgtggcgcct

SEQ ID NO: 144564 - DNA, 30 bp, Artificial Sequence
  Synthetic oligonucleotide
taaatcactcctatggcgtaaacatcgcct

SEQ ID NO: 144565 - DNA, 30 bp, Artificial Sequence
  Synthetic oligonucleotide
tcgggcaccttgactaaggcacaaaggcct

SEQ ID NO: 144566 - DNA, 30 bp, Artificial Sequence
  Synthetic oligonucleotide
gctaggataaaccttttgttccaaaggcct

SEQ ID NO: 144567 - DNA, 30 bp, Artificial Sequence
  Synthetic oligonucleotide
gatgaagcttatgaatatatgtctcggcct

SEQ ID NO: 144568 - DNA, 30 bp, Artificial Sequence
  Synthetic oligonucleotide
gcggacaccgcgttctgttgctgagggcct

SEQ ID NO: 144569 - DNA, 30 bp, Artificial Sequence
  Synthetic oligonucleotide
cattagtacaagcgtgcggtaaacgggcct

SEQ ID NO: 144570 - DNA, 30 bp, Artificial Sequence
  Synthetic oligonucleotide
tgagtgcgggtgtcttttcccagggggcct

SEQ ID NO: 144571 - DNA, 30 bp, Artificial Sequence
  Synthetic oligonucleotide
ccgatcgaacattaaggcaactactggcct

SEQ ID NO: 144572 - DNA, 30 bp, Artificial Sequence
  Synthetic oligonucleotide
gcgaggcaggtccaagaagtagagatgcct

SEQ ID NO: 144573 - DNA, 30 bp, Artificial Sequence
  Synthetic oligonucleotide
tacgaagtttgctgggcacgaaggctgcct

SEQ ID NO: 144574 - DNA, 30 bp, Artificial Sequence
  Synthetic oligonucleotide
cgataggaatgaaattacgatgccaatcct

SEQ ID NO: 144575 - DNA, 30 bp, Artificial Sequence
  Synthetic oligonucleotide
agaggaagtagtctgcaaaacaagaatcct

SEQ ID NO: 144576 - DNA, 30 bp, Artificial Sequence
  Synthetic oligonucleotide
atggacttgattggttcagtgactaatcct

SEQ ID NO: 144577 - DNA, 30 bp, Artificial Sequence
  Synthetic oligonucleotide
catcaggtgggtccgtaggccgcacatcct

SEQ ID NO: 144578 - DNA, 30 bp, Artificial Sequence
  Synthetic oligonucleotide
gagccagtatcattttatcgctctcatcct

SEQ ID NO: 144579 - DNA, 30 bp, Artificial Sequence
  Synthetic oligonucleotide
cagcggggtcgatgttagaacccagatcct

SEQ ID NO: 144580 - DNA, 30 bp, Artificial Sequence
  Synthetic oligonucleotide
aatagcgttgggcgtcgtagtgggtatcct

SEQ ID NO: 144581 - DNA, 30 bp, Artificial Sequence
  Synthetic oligonucleotide
actggagataccggtagcaatgcaactcct

SEQ ID NO: 144582 - DNA, 30 bp, Artificial Sequence
  Synthetic oligonucleotide
catgaagcgagaccaatcgtcttgcctcct

SEQ ID NO: 144583 - DNA, 30 bp, Artificial Sequence
  Synthetic oligonucleotide
gaggtgttggatacgggtacacatcctcct

SEQ ID NO: 144584 - DNA, 30 bp, Artificial Sequence
  Synthetic oligonucleotide
cggtgcgaagaaaatataaaaaacgctcct

SEQ ID NO: 144585 - DNA, 30 bp, Artificial Sequence
  Synthetic oligonucleotide
tgcaagaacatctgctgtggtgtggctcct

SEQ ID NO: 144586 - DNA, 30 bp, Artificial Sequence
  Synthetic oligonucleotide
cgctgcttccaaaccgtgatggtaagtcct

SEQ ID NO: 144587 - DNA, 30 bp, Artificial Sequence
  Synthetic oligonucleotide
actgcgtcatgcggattcggaaggagtcct

SEQ ID NO: 144588 - DNA, 30 bp, Artificial Sequence
  Synthetic oligonucleotide
gtgcggctagtcatcgaatgagtacgtcct

SEQ ID NO: 144589 - DNA, 30 bp, Artificial Sequence
  Synthetic oligonucleotide
ggcagaacgatgagagtagctctaggtcct

SEQ ID NO: 144590 - DNA, 30 bp, Artificial Sequence
  Synthetic oligonucleotide
agagccagctgggcacaccaacggggtcct

SEQ ID NO: 144591 - DNA, 30 bp, Artificial Sequence
  Synthetic oligonucleotide
ccagggttgcatatacgcgagagtggtcct

SEQ ID NO: 144592 - DNA, 30 bp, Artificial Sequence
  Synthetic oligonucleotide
gaacaatgttaatggacgaaccgatgtcct

SEQ ID NO: 144593 - DNA, 30 bp, Artificial Sequence
  Synthetic oligonucleotide
agacgggctggagggtcttgtttatgtcct

SEQ ID NO: 144594 - DNA, 30 bp, Artificial Sequence
  Synthetic oligonucleotide
accgggtgtttacacttatccacctgtcct

SEQ ID NO: 144595 - DNA, 30 bp, Artificial Sequence
  Synthetic oligonucleotide
tcgaagaaacagtataactaacccattcct

SEQ ID NO: 144596 - DNA, 30 bp, Artificial Sequence
  Synthetic oligonucleotide
gcgacaattggagctggaccattgattcct

SEQ ID NO: 144597 - DNA, 30 bp, Artificial Sequence
  Synthetic oligonucleotide
gggcgaagaggcgctatagtttctattcct

SEQ ID NO: 144598 - DNA, 30 bp, Artificial Sequence
  Synthetic oligonucleotide
aagctgcgggtgcatattggagtccttcct

SEQ ID NO: 144599 - DNA, 30 bp, Artificial Sequence
  Synthetic oligonucleotide
gactaccgcgagtgagcgataaggtttcct

SEQ ID NO: 144600 - DNA, 30 bp, Artificial Sequence
  Synthetic oligonucleotide
attgcaacacggggagattgcgattttcct

SEQ ID NO: 144601 - DNA, 30 bp, Artificial Sequence
  Synthetic oligonucleotide
gcgagcgcactgtcaagattacgttttcct

SEQ ID NO: 144602 - DNA, 30 bp, Artificial Sequence
  Synthetic oligonucleotide
tagatgtaagatcgtactggtcgttttcct

SEQ ID NO: 144603 - DNA, 30 bp, Artificial Sequence
  Synthetic oligonucleotide
taagtcgtgaggaggggttacaagaaagct

SEQ ID NO: 144604 - DNA, 30 bp, Artificial Sequence
  Synthetic oligonucleotide
gcaacgctgtggactgcactgattaaagct

SEQ ID NO: 144605 - DNA, 30 bp, Artificial Sequence
  Synthetic oligonucleotide
gcaggtgtaaagctgcatctgagacaagct

SEQ ID NO: 144606 - DNA, 30 bp, Artificial Sequence
  Synthetic oligonucleotide
ggttggtgataatcgcattacccgcaagct

SEQ ID NO: 144607 - DNA, 30 bp, Artificial Sequence
  Synthetic oligonucleotide
gacggacgtatgatttcgcgcgcggaagct

SEQ ID NO: 144608 - DNA, 30 bp, Artificial Sequence
  Synthetic oligonucleotide
caaggtaaagtcgcattagtgacctaagct

SEQ ID NO: 144609 - DNA, 30 bp, Artificial Sequence
  Synthetic oligonucleotide
acggtggggtagcggttgttctcgtaagct

SEQ ID NO: 144610 - DNA, 30 bp, Artificial Sequence
  Synthetic oligonucleotide
gtagtgagccgttatttggcggattaagct

SEQ ID NO: 144611 - DNA, 30 bp, Artificial Sequence
  Synthetic oligonucleotide
ggtctgatctgggcaagatgcctttaagct

SEQ ID NO: 144612 - DNA, 30 bp, Artificial Sequence
  Synthetic oligonucleotide
gacccacacctagagggacaaccaacagct

SEQ ID NO: 144613 - DNA, 30 bp, Artificial Sequence
  Synthetic oligonucleotide
cactcaagttccggttggatccagacagct

SEQ ID NO: 144614 - DNA, 30 bp, Artificial Sequence
  Synthetic oligonucleotide
atattgaaacagccaaatctggtgacagct

SEQ ID NO: 144615 - DNA, 30 bp, Artificial Sequence
  Synthetic oligonucleotide
cggcattttgatggggtggtcacaccagct

SEQ ID NO: 144616 - DNA, 30 bp, Artificial Sequence
  Synthetic oligonucleotide
tggttacatcaagatccgccggtgccagct

SEQ ID NO: 144617 - DNA, 30 bp, Artificial Sequence
  Synthetic oligonucleotide
cggacctgcctaaacagaagccctccagct

SEQ ID NO: 144618 - DNA, 30 bp, Artificial Sequence
  Synthetic oligonucleotide
tcgaagcatctcgattacttaatagcagct

SEQ ID NO: 144619 - DNA, 30 bp, Artificial Sequence
  Synthetic oligonucleotide
ctgagaaaggggcgcgatgatggatcagct

SEQ ID NO: 144620 - DNA, 30 bp, Artificial Sequence
  Synthetic oligonucleotide
aggagtcaccgccagtggataccgtcagct

SEQ ID NO: 144621 - DNA, 30 bp, Artificial Sequence
  Synthetic oligonucleotide
gcgactaactattataactcttagcgagct

SEQ ID NO: 144622 - DNA, 30 bp, Artificial Sequence
  Synthetic oligonucleotide
accaaaatacatgaagtcgtaacgcgagct

SEQ ID NO: 144623 - DNA, 30 bp, Artificial Sequence
  Synthetic oligonucleotide
cattaagcctgtatataagacatcggagct

SEQ ID NO: 144624 - DNA, 30 bp, Artificial Sequence
  Synthetic oligonucleotide
cggcgcctaccagggtcactgtgtggagct

SEQ ID NO: 144625 - DNA, 30 bp, Artificial Sequence
  Synthetic oligonucleotide
ctgtgggaataaacgactaccagatgagct

SEQ ID NO: 144626 - DNA, 30 bp, Artificial Sequence
  Synthetic oligonucleotide
tgggatacatcagatgttatattatgagct

SEQ ID NO: 144627 - DNA, 30 bp, Artificial Sequence
  Synthetic oligonucleotide
tagcggggtgcagtcatggactagtgagct

SEQ ID NO: 144628 - DNA, 30 bp, Artificial Sequence
  Synthetic oligonucleotide
ataacggcgtcaacaaaaatggacatagct

SEQ ID NO: 144629 - DNA, 30 bp, Artificial Sequence
  Synthetic oligonucleotide
agagcggcgacatagttcttgctcctagct

SEQ ID NO: 144630 - DNA, 30 bp, Artificial Sequence
  Synthetic oligonucleotide
cttggactcaggctgcacactcaggtagct

SEQ ID NO: 144631 - DNA, 30 bp, Artificial Sequence
  Synthetic oligonucleotide
actcgcgtgtcatgaggtaatactgtagct

SEQ ID NO: 144632 - DNA, 30 bp, Artificial Sequence
  Synthetic oligonucleotide
gtggtatcttgggtgagtcacaaattagct

SEQ ID NO: 144633 - DNA, 30 bp, Artificial Sequence
  Synthetic oligonucleotide
taggcaaccgctatggtcttcagattagct

SEQ ID NO: 144634 - DNA, 30 bp, Artificial Sequence
  Synthetic oligonucleotide
cgtcggaaaagaaacaacgcgcctttagct

SEQ ID NO: 144635 - DNA, 30 bp, Artificial Sequence
  Synthetic oligonucleotide
tgaacaagtattgaagagcccgataacgct

SEQ ID NO: 144636 - DNA, 30 bp, Artificial Sequence
  Synthetic oligonucleotide
tgggtcgaggtatctgggctggataacgct

SEQ ID NO: 144637 - DNA, 30 bp, Artificial Sequence
  Synthetic oligonucleotide
ttggcgactccggatgcagacgaacacgct

SEQ ID NO: 144638 - DNA, 30 bp, Artificial Sequence
  Synthetic oligonucleotide
atccgggaatagatcatggtaattcacgct

SEQ ID NO: 144639 - DNA, 30 bp, Artificial Sequence
  Synthetic oligonucleotide
agtaggagcctaagtctcgagcagtacgct

SEQ ID NO: 144640 - DNA, 30 bp, Artificial Sequence
  Synthetic oligonucleotide
accgcaacgaggcccaggggggagtacgct

SEQ ID NO: 144641 - DNA, 30 bp, Artificial Sequence
  Synthetic oligonucleotide
caagattagccttaagttatgacgaccgct

SEQ ID NO: 144642 - DNA, 30 bp, Artificial Sequence
  Synthetic oligonucleotide
gttatcgcgtcgaagtctagattagccgct

SEQ ID NO: 144643 - DNA, 30 bp, Artificial Sequence
  Synthetic oligonucleotide
acattacgtacattaaactcgcgtgccgct

SEQ ID NO: 144644 - DNA, 30 bp, Artificial Sequence
  Synthetic oligonucleotide
atgagtgcgaaatcccaccaagagtccgct

SEQ ID NO: 144645 - DNA, 30 bp, Artificial Sequence
  Synthetic oligonucleotide
aaaagcggatttcccgaagacccgtccgct

SEQ ID NO: 144646 - DNA, 30 bp, Artificial Sequence
  Synthetic oligonucleotide
tataaggcaaatcatagagtgttgagcgct

SEQ ID NO: 144647 - DNA, 30 bp, Artificial Sequence
  Synthetic oligonucleotide
ttcaccggaaaggcgcaaaaacttagcgct

SEQ ID NO: 144648 - DNA, 30 bp, Artificial Sequence
  Synthetic oligonucleotide
gaatgaaccgcgtttaacccgtagggcgct

SEQ ID NO: 144649 - DNA, 30 bp, Artificial Sequence
  Synthetic oligonucleotide
ccagaatcgtaaaacccgcatccatgcgct

SEQ ID NO: 144650 - DNA, 30 bp, Artificial Sequence
  Synthetic oligonucleotide
tcgtagaataaatgactcgtataaatcgct

SEQ ID NO: 144651 - DNA, 30 bp, Artificial Sequence
  Synthetic oligonucleotide
acatactagaacgactagagaacaatcgct

SEQ ID NO: 144652 - DNA, 30 bp, Artificial Sequence
  Synthetic oligonucleotide
tatcggcgtatgataaaagtctcgatcgct

SEQ ID NO: 144653 - DNA, 30 bp, Artificial Sequence
  Synthetic oligonucleotide
catgccaacgtcaagtccaaatgactcgct

SEQ ID NO: 144654 - DNA, 30 bp, Artificial Sequence
  Synthetic oligonucleotide
accgaaggtttccgaggtaaccacctcgct

SEQ ID NO: 144655 - DNA, 30 bp, Artificial Sequence
  Synthetic oligonucleotide
gcaggtggacaacaggtgagctaagtcgct

SEQ ID NO: 144656 - DNA, 30 bp, Artificial Sequence
  Synthetic oligonucleotide
cactcccgccataatagtaaatgtgtcgct

SEQ ID NO: 144657 - DNA, 30 bp, Artificial Sequence
  Synthetic oligonucleotide
acgcttcctcacctgcggaagtgtgtcgct

SEQ ID NO: 144658 - DNA, 30 bp, Artificial Sequence
  Synthetic oligonucleotide
ctagccagcacagggtcatcagtattcgct

SEQ ID NO: 144659 - DNA, 30 bp, Artificial Sequence
  Synthetic oligonucleotide
acatatagcggtacgaatgttcctttcgct

SEQ ID NO: 144660 - DNA, 30 bp, Artificial Sequence
  Synthetic oligonucleotide
gagaggctatgagtggagtgtagaaaggct

SEQ ID NO: 144661 - DNA, 30 bp, Artificial Sequence
  Synthetic oligonucleotide
gcgatgtaagatccagctcgcgtcaaggct

SEQ ID NO: 144662 - DNA, 30 bp, Artificial Sequence
  Synthetic oligonucleotide
tattgttagcgtacccaaagaggtaaggct

SEQ ID NO: 144663 - DNA, 30 bp, Artificial Sequence
  Synthetic oligonucleotide
cagctatagaatgttgcgtagtgtaaggct

SEQ ID NO: 144664 - DNA, 30 bp, Artificial Sequence
  Synthetic oligonucleotide
gttaaacctcatgtgccaaacatacaggct

SEQ ID NO: 144665 - DNA, 30 bp, Artificial Sequence
  Synthetic oligonucleotide
gcgcaacttaaggtaggcgacaaccaggct

SEQ ID NO: 144666 - DNA, 30 bp, Artificial Sequence
  Synthetic oligonucleotide
taggtagaaccgaggcgggtggcccaggct

SEQ ID NO: 144667 - DNA, 30 bp, Artificial Sequence
  Synthetic oligonucleotide
aactgaacaagaataggtgtgatccaggct

SEQ ID NO: 144668 - DNA, 30 bp, Artificial Sequence
  Synthetic oligonucleotide
taatacccggtcgaacgtaaggtccaggct

SEQ ID NO: 144669 - DNA, 30 bp, Artificial Sequence
  Synthetic oligonucleotide
accagtgattaacccctaagagctcaggct

SEQ ID NO: 144670 - DNA, 30 bp, Artificial Sequence
  Synthetic oligonucleotide
gtgcacggatgagtcgtcaggtgagaggct

SEQ ID NO: 144671 - DNA, 30 bp, Artificial Sequence
  Synthetic oligonucleotide
gccaaagacggatcctcgaagagcgaggct

SEQ ID NO: 144672 - DNA, 30 bp, Artificial Sequence
  Synthetic oligonucleotide
tacatcggcgaatcagtcaagggcgaggct

SEQ ID NO: 144673 - DNA, 31 bp, Artificial Sequence
  Synthetic oligonucleotide
agtggattgaaccagctaagcgccataggct

SEQ ID NO: 144674 - DNA, 30 bp, Artificial Sequence
  Synthetic oligonucleotide
ctaaagccctgtcgggaaggcgcctaggct

SEQ ID NO: 144675 - DNA, 30 bp, Artificial Sequence
  Synthetic oligonucleotide
cacaggccgttcagtaaaatcatgtaggct

SEQ ID NO: 144676 - DNA, 30 bp, Artificial Sequence
  Synthetic oligonucleotide
ctactcgggaaaggaatgagcaccacggct

SEQ ID NO: 144677 - DNA, 30 bp, Artificial Sequence
  Synthetic oligonucleotide
aaccctgtaagcgaaactagttagacggct

SEQ ID NO: 144678 - DNA, 30 bp, Artificial Sequence
  Synthetic oligonucleotide
cctctttgacgaattcgtcctttgccggct

SEQ ID NO: 144679 - DNA, 30 bp, Artificial Sequence
  Synthetic oligonucleotide
tgcgcgcgagttctgaggatgaaagcggct

SEQ ID NO: 144680 - DNA, 30 bp, Artificial Sequence
  Synthetic oligonucleotide
ctagtacgccctacggaaccttatgcggct

SEQ ID NO: 144681 - DNA, 30 bp, Artificial Sequence
  Synthetic oligonucleotide
ggtagcaaagggttcgatcacatgtcggct

SEQ ID NO: 144682 - DNA, 30 bp, Artificial Sequence
  Synthetic oligonucleotide
caacgaatacgtctcccatcgcattcggct

SEQ ID NO: 144683 - DNA, 30 bp, Artificial Sequence
  Synthetic oligonucleotide
tgacattgtgaatctgcagaaaatagggct

SEQ ID NO: 144684 - DNA, 30 bp, Artificial Sequence
  Synthetic oligonucleotide
cggaatgaattgaagtggctaattagggct

SEQ ID NO: 144685 - DNA, 30 bp, Artificial Sequence
  Synthetic oligonucleotide
cccctgaaccgggatgatcgagtgcgggct

SEQ ID NO: 144686 - DNA, 30 bp, Artificial Sequence
  Synthetic oligonucleotide
gtgataggacgtcatacgcgcggtcgggct

SEQ ID NO: 144687 - DNA, 30 bp, Artificial Sequence
  Synthetic oligonucleotide
cctacgccagcgacgaaacggactggggct

SEQ ID NO: 144688 - DNA, 30 bp, Artificial Sequence
  Synthetic oligonucleotide
ggtaggtcaattattagtacgcgtggggct

SEQ ID NO: 144689 - DNA, 30 bp, Artificial Sequence
  Synthetic oligonucleotide
gaggaaaaaatcaatctatgtattggggct

SEQ ID NO: 144690 - DNA, 30 bp, Artificial Sequence
  Synthetic oligonucleotide
acggtatcgagcgtacgagcaacctgggct

SEQ ID NO: 144691 - DNA, 30 bp, Artificial Sequence
  Synthetic oligonucleotide
ctaactaagggtgctggtttgaagtgggct

SEQ ID NO: 144692 - DNA, 30 bp, Artificial Sequence
  Synthetic oligonucleotide
aagcctcaataaagagatgaatcaatggct

SEQ ID NO: 144693 - DNA, 30 bp, Artificial Sequence
  Synthetic oligonucleotide
cgggatgtgcaattcagccacaagatggct

SEQ ID NO: 144694 - DNA, 30 bp, Artificial Sequence
  Synthetic oligonucleotide
tattaccggcaaggcaaggtctcgatggct

SEQ ID NO: 144695 - DNA, 30 bp, Artificial Sequence
  Synthetic oligonucleotide
acattcaagaacccaggtacacaagtggct

SEQ ID NO: 144696 - DNA, 30 bp, Artificial Sequence
  Synthetic oligonucleotide
attgacaattgaaacgctgggcgggtggct

SEQ ID NO: 144697 - DNA, 30 bp, Artificial Sequence
  Synthetic oligonucleotide
tcgacctaggggccaaaattgcgtgtggct

SEQ ID NO: 144698 - DNA, 30 bp, Artificial Sequence
  Synthetic oligonucleotide
tggcatgcctcaaataactaatgcttggct

SEQ ID NO: 144699 - DNA, 30 bp, Artificial Sequence
  Synthetic oligonucleotide
tcgaatataggtttcggcgatgagttggct

SEQ ID NO: 144700 - DNA, 30 bp, Artificial Sequence
  Synthetic oligonucleotide
agctaaacacggactaaactggacaatgct

SEQ ID NO: 144701 - DNA, 30 bp, Artificial Sequence
  Synthetic oligonucleotide
tatgttggtctagtcagagatgggcatgct

SEQ ID NO: 144702 - DNA, 30 bp, Artificial Sequence
  Synthetic oligonucleotide
tacgcgggcttattggtaggtcgagatgct

SEQ ID NO: 144703 - DNA, 30 bp, Artificial Sequence
  Synthetic oligonucleotide
accacgttgatacaaaaggggtctgatgct

SEQ ID NO: 144704 - DNA, 30 bp, Artificial Sequence
  Synthetic oligonucleotide
aataaaagttaatggcccgatcactatgct

SEQ ID NO: 144705 - DNA, 30 bp, Artificial Sequence
  Synthetic oligonucleotide
aactttgaaatcaagtacattaagtatgct

SEQ ID NO: 144706 - DNA, 30 bp, Artificial Sequence
  Synthetic oligonucleotide
cagggagattttatgcgctttgtgtatgct

SEQ ID NO: 144707 - DNA, 30 bp, Artificial Sequence
  Synthetic oligonucleotide
gggtttaagaaggcattgagccattatgct

SEQ ID NO: 144708 - DNA, 30 bp, Artificial Sequence
  Synthetic oligonucleotide
aacaatcgggctgaggtcgctacccctgct

SEQ ID NO: 144709 - DNA, 30 bp, Artificial Sequence
  Synthetic oligonucleotide
ccggccaggctacgcgccagacgtcctgct

SEQ ID NO: 144710 - DNA, 30 bp, Artificial Sequence
  Synthetic oligonucleotide
aggtgtaacaacatgaagcagtggtctgct

SEQ ID NO: 144711 - DNA, 30 bp, Artificial Sequence
  Synthetic oligonucleotide
aagctaactgcatggaggtgaacacgtgct

SEQ ID NO: 144712 - DNA, 30 bp, Artificial Sequence
  Synthetic oligonucleotide
ctatcgttcttatattaacgttagcgtgct

SEQ ID NO: 144713 - DNA, 30 bp, Artificial Sequence
  Synthetic oligonucleotide
ctttacagagaagttaaattcgggcgtgct

SEQ ID NO: 144714 - DNA, 30 bp, Artificial Sequence
  Synthetic oligonucleotide
aaaggaattgtgtatatctggcttcgtgct

SEQ ID NO: 144715 - DNA, 30 bp, Artificial Sequence
  Synthetic oligonucleotide
taagagagaaagcaaacaacgcaaggtgct

SEQ ID NO: 144716 - DNA, 30 bp, Artificial Sequence
  Synthetic oligonucleotide
ccgttagtaatgcgtattatgtcgggtgct

SEQ ID NO: 144717 - DNA, 30 bp, Artificial Sequence
  Synthetic oligonucleotide
ccgatactcggggattaacggaggggtgct

SEQ ID NO: 144718 - DNA, 30 bp, Artificial Sequence
  Synthetic oligonucleotide
ggacactgatcgtccagtgtcttgggtgct

SEQ ID NO: 144719 - DNA, 30 bp, Artificial Sequence
  Synthetic oligonucleotide
cagtagcgtagggggtaagtggcctgtgct

SEQ ID NO: 144720 - DNA, 30 bp, Artificial Sequence
  Synthetic oligonucleotide
aggacgcgtcatgtcttctttctctgtgct

SEQ ID NO: 144721 - DNA, 30 bp, Artificial Sequence
  Synthetic oligonucleotide
gctgagatgaacaaattgctcgcgtgtgct

SEQ ID NO: 144722 - DNA, 30 bp, Artificial Sequence
  Synthetic oligonucleotide
agcgatgaatcaagaatgtaaaaaattgct

SEQ ID NO: 144723 - DNA, 30 bp, Artificial Sequence
  Synthetic oligonucleotide
gcttaatgttgacagtatgactgcattgct

SEQ ID NO: 144724 - DNA, 30 bp, Artificial Sequence
  Synthetic oligonucleotide
cgactatccagaagtatttacaagattgct

SEQ ID NO: 144725 - DNA, 30 bp, Artificial Sequence
  Synthetic oligonucleotide
cggcaccttagcacaaccgggatacttgct

SEQ ID NO: 144726 - DNA, 31 bp, Artificial Sequence
  Synthetic oligonucleotide
tggatctgggcgaatcccccactaccttgct

SEQ ID NO: 144727 - DNA, 30 bp, Artificial Sequence
  Synthetic oligonucleotide
aaaggactcgaagcggacgaaaagcttgct

SEQ ID NO: 144728 - DNA, 30 bp, Artificial Sequence
  Synthetic oligonucleotide
ccttgggtagggagggttatcttagttgct

SEQ ID NO: 144729 - DNA, 30 bp, Artificial Sequence
  Synthetic oligonucleotide
tagggaggtcccgtgaccacacccgttgct

SEQ ID NO: 144730 - DNA, 30 bp, Artificial Sequence
  Synthetic oligonucleotide
ccaaacccttaactgcgccaattcgttgct

SEQ ID NO: 144731 - DNA, 30 bp, Artificial Sequence
  Synthetic oligonucleotide
ccacgtttcagttcgacattcgtggttgct

SEQ ID NO: 144732 - DNA, 30 bp, Artificial Sequence
  Synthetic oligonucleotide
atgtgtgtatccatatcgttcgtggttgct

SEQ ID NO: 144733 - DNA, 30 bp, Artificial Sequence
  Synthetic oligonucleotide
acgcgtatagtaactacgtgtacttttgct

SEQ ID NO: 144734 - DNA, 30 bp, Artificial Sequence
  Synthetic oligonucleotide
atgaggtagggtaacggacagtcaaaatct

SEQ ID NO: 144735 - DNA, 30 bp, Artificial Sequence
  Synthetic oligonucleotide
aatcaagcacttgttataggagccaaatct

SEQ ID NO: 144736 - DNA, 30 bp, Artificial Sequence
  Synthetic oligonucleotide
aatgtgccgcggaaggaaatcgcgcaatct

SEQ ID NO: 144737 - DNA, 30 bp, Artificial Sequence
  Synthetic oligonucleotide
aactgccacagtggtgtagactctcaatct

SEQ ID NO: 144738 - DNA, 30 bp, Artificial Sequence
  Synthetic oligonucleotide
atgggttcaaattatgcatgatcgtaatct

SEQ ID NO: 144739 - DNA, 30 bp, Artificial Sequence
  Synthetic oligonucleotide
tgcgcattcccgtgaggtagtgggtaatct

SEQ ID NO: 144740 - DNA, 30 bp, Artificial Sequence
  Synthetic oligonucleotide
acataaagttgctgtgggacacacacatct

SEQ ID NO: 144741 - DNA, 30 bp, Artificial Sequence
  Synthetic oligonucleotide
gattccgaacgttcaaggagtgagacatct

SEQ ID NO: 144742 - DNA, 30 bp, Artificial Sequence
  Synthetic oligonucleotide
acggtgctcatgggaaagggaggtacatct

SEQ ID NO: 144743 - DNA, 30 bp, Artificial Sequence
  Synthetic oligonucleotide
cggagcacggggttagtctggtcaccatct

SEQ ID NO: 144744 - DNA, 30 bp, Artificial Sequence
  Synthetic oligonucleotide
gagaaacgttacgtacgccacatgccatct

SEQ ID NO: 144745 - DNA, 30 bp, Artificial Sequence
  Synthetic oligonucleotide
agccgtgatcacacggcaacgttgccatct

SEQ ID NO: 144746 - DNA, 30 bp, Artificial Sequence
  Synthetic oligonucleotide
cgcgccgtagttttaggttgaatagcatct

SEQ ID NO: 144747 - DNA, 30 bp, Artificial Sequence
  Synthetic oligonucleotide
ctcagggagaaatgggcacgtgtagcatct

SEQ ID NO: 144748 - DNA, 30 bp, Artificial Sequence
  Synthetic oligonucleotide
tcggtacgccagtaatgcatcacctcatct

SEQ ID NO: 144749 - DNA, 30 bp, Artificial Sequence
  Synthetic oligonucleotide
catgctaaaaacactaacaggcgctcatct

SEQ ID NO: 144750 - DNA, 30 bp, Artificial Sequence
  Synthetic oligonucleotide
aactcagctccgacacaaaccgatagatct

SEQ ID NO: 144751 - DNA, 30 bp, Artificial Sequence
  Synthetic oligonucleotide
atatcaagccgatccccggaaatccgatct

SEQ ID NO: 144752 - DNA, 30 bp, Artificial Sequence
  Synthetic oligonucleotide
gccaacccgtagcacacacataagcgatct

SEQ ID NO: 144753 - DNA, 30 bp, Artificial Sequence
  Synthetic oligonucleotide
tttaggacgttgattcatcgtgacggatct

SEQ ID NO: 144754 - DNA, 30 bp, Artificial Sequence
  Synthetic oligonucleotide
agtcaacgcacccatggcacgttcggatct

SEQ ID NO: 144755 - DNA, 30 bp, Artificial Sequence
  Synthetic oligonucleotide
gccctggaacactgtgtactggcgggatct

SEQ ID NO: 144756 - DNA, 30 bp, Artificial Sequence
  Synthetic oligonucleotide
aacacaaataggacgagagatcctggatct

SEQ ID NO: 144757 - DNA, 31 bp, Artificial Sequence
  Synthetic oligonucleotide
acccaatgcgttgtggtaggcttctggatct

SEQ ID NO: 144758 - DNA, 31 bp, Artificial Sequence
  Synthetic oligonucleotide
gacacacggacgtcaaggatatagctgatct

SEQ ID NO: 144759 - DNA, 30 bp, Artificial Sequence
  Synthetic oligonucleotide
gtagactggagaatatgtctaaccatatct

SEQ ID NO: 144760 - DNA, 30 bp, Artificial Sequence
  Synthetic oligonucleotide
ttcacgaatcattctagagctggactatct

SEQ ID NO: 144761 - DNA, 30 bp, Artificial Sequence
  Synthetic oligonucleotide
tgcaaggttcaacaagtatcaatactatct

SEQ ID NO: 144762 - DNA, 30 bp, Artificial Sequence
  Synthetic oligonucleotide
aggaatgcgccattaaggtctagtctatct

SEQ ID NO: 144763 - DNA, 30 bp, Artificial Sequence
  Synthetic oligonucleotide
gaatcccagcacacgacaacagcagtatct

SEQ ID NO: 144764 - DNA, 30 bp, Artificial Sequence
  Synthetic oligonucleotide
cagggtgcaatcccacggaagtgggtatct

SEQ ID NO: 144765 - DNA, 30 bp, Artificial Sequence
  Synthetic oligonucleotide
aaggtaaggggaaaatgagaattcttatct

SEQ ID NO: 144766 - DNA, 30 bp, Artificial Sequence
  Synthetic oligonucleotide
gtcgtagcagggacgtctatcaggttatct

SEQ ID NO: 144767 - DNA, 30 bp, Artificial Sequence
  Synthetic oligonucleotide
agcacattcgatactttggcgttgaactct

SEQ ID NO: 144768 - DNA, 30 bp, Artificial Sequence
  Synthetic oligonucleotide
tgggttggtgctctaaagacggtccactct

SEQ ID NO: 144769 - DNA, 30 bp, Artificial Sequence
  Synthetic oligonucleotide
ccggcgtgtaaacggaggcgtgccgactct

SEQ ID NO: 144770 - DNA, 30 bp, Artificial Sequence
  Synthetic oligonucleotide
ctgattcataacactctcgcccgcgactct

SEQ ID NO: 144771 - DNA, 30 bp, Artificial Sequence
  Synthetic oligonucleotide
gtggatgactggcaatggcacccgtactct

SEQ ID NO: 144772 - DNA, 30 bp, Artificial Sequence
  Synthetic oligonucleotide
gataaacttgtcgtggaaaaaaattactct

SEQ ID NO: 144773 - DNA, 30 bp, Artificial Sequence
  Synthetic oligonucleotide
cgttccaggtgtaccaatattctcacctct

SEQ ID NO: 144774 - DNA, 30 bp, Artificial Sequence
  Synthetic oligonucleotide
ttaacgtatatcctttgaagtgagacctct

SEQ ID NO: 144775 - DNA, 30 bp, Artificial Sequence
  Synthetic oligonucleotide
cgagatgaagacactcgcagctggacctct

SEQ ID NO: 144776 - DNA, 30 bp, Artificial Sequence
  Synthetic oligonucleotide
gccgtcaaatgaagatccggtatcgcctct

SEQ ID NO: 144777 - DNA, 30 bp, Artificial Sequence
  Synthetic oligonucleotide
tagtctaaattggtcgagtgtagtgcctct

SEQ ID NO: 144778 - DNA, 30 bp, Artificial Sequence
  Synthetic oligonucleotide
aaggtatcacggttagagcgttgaagctct

SEQ ID NO: 144779 - DNA, 30 bp, Artificial Sequence
  Synthetic oligonucleotide
tcactgagatattaaaccgcccccagctct

SEQ ID NO: 144780 - DNA, 30 bp, Artificial Sequence
  Synthetic oligonucleotide
tcgcgcttttacaatacactcgagagctct

SEQ ID NO: 144781 - DNA, 30 bp, Artificial Sequence
  Synthetic oligonucleotide
tgagaaggacatgaccgttttatgagctct

SEQ ID NO: 144782 - DNA, 30 bp, Artificial Sequence
  Synthetic oligonucleotide
tagataacagtgaccttcctgcatagctct

SEQ ID NO: 144783 - DNA, 30 bp, Artificial Sequence
  Synthetic oligonucleotide
gagcataaatatggtggcgatgtgcgctct

SEQ ID NO: 144784 - DNA, 30 bp, Artificial Sequence
  Synthetic oligonucleotide
tacgtgtatcagcgtgcacagaatcgctct

SEQ ID NO: 144785 - DNA, 30 bp, Artificial Sequence
  Synthetic oligonucleotide
catgaaacacttggcagtgctgatcgctct

SEQ ID NO: 144786 - DNA, 30 bp, Artificial Sequence
  Synthetic oligonucleotide
gaagtcacacaacgttgcggctgtcgctct

SEQ ID NO: 144787 - DNA, 30 bp, Artificial Sequence
  Synthetic oligonucleotide
gcacttagtcgatgaacatttgaatgctct

SEQ ID NO: 144788 - DNA, 30 bp, Artificial Sequence
  Synthetic oligonucleotide
tgcgcccaaaacctccggattccatgctct

SEQ ID NO: 144789 - DNA, 30 bp, Artificial Sequence
  Synthetic oligonucleotide
tccggcaacgtgtgacctcgacgatgctct

SEQ ID NO: 144790 - DNA, 30 bp, Artificial Sequence
  Synthetic oligonucleotide
tcagacatggccgaccattcaatgtgctct

SEQ ID NO: 144791 - DNA, 30 bp, Artificial Sequence
  Synthetic oligonucleotide
attgaggtgtacaaatccaacagttgctct

SEQ ID NO: 144792 - DNA, 30 bp, Artificial Sequence
  Synthetic oligonucleotide
acgtcgatctgtaagcgcacgcaaatctct

SEQ ID NO: 144793 - DNA, 30 bp, Artificial Sequence
  Synthetic oligonucleotide
actgggcctcaggttcaatacggaatctct

SEQ ID NO: 144794 - DNA, 30 bp, Artificial Sequence
  Synthetic oligonucleotide
aggaatatagggcatccgatacacatctct

SEQ ID NO: 144795 - DNA, 30 bp, Artificial Sequence
  Synthetic oligonucleotide
tcgaataggtaagatgcgaaagagctctct

SEQ ID NO: 144796 - DNA, 30 bp, Artificial Sequence
  Synthetic oligonucleotide
gcatgaataacggatgagctcctcgtctct

SEQ ID NO: 144797 - DNA, 30 bp, Artificial Sequence
  Synthetic oligonucleotide
gcgggtcagggtgcttagctagttgtctct

SEQ ID NO: 144798 - DNA, 30 bp, Artificial Sequence
  Synthetic oligonucleotide
atagttaggcaaataacctcgatgttctct

SEQ ID NO: 144799 - DNA, 30 bp, Artificial Sequence
  Synthetic oligonucleotide
taacttcaggaacccgcagagtgtaagtct

SEQ ID NO: 144800 - DNA, 30 bp, Artificial Sequence
  Synthetic oligonucleotide
tgtaccaggctcaatgatttaggacagtct

SEQ ID NO: 144801 - DNA, 30 bp, Artificial Sequence
  Synthetic oligonucleotide
ggacagacggaaggcttgcgagcagagtct

SEQ ID NO: 144802 - DNA, 30 bp, Artificial Sequence
  Synthetic oligonucleotide
acatcgaataacacataagcgggagagtct

SEQ ID NO: 144803 - DNA, 30 bp, Artificial Sequence
  Synthetic oligonucleotide
atcagacccagaaataggtcaggggagtct

SEQ ID NO: 144804 - DNA, 30 bp, Artificial Sequence
  Synthetic oligonucleotide
gcgcgggtgctccttacaaccgtggagtct

SEQ ID NO: 144805 - DNA, 30 bp, Artificial Sequence
  Synthetic oligonucleotide
ccgctggtagcaatttttacacgtgagtct

SEQ ID NO: 144806 - DNA, 30 bp, Artificial Sequence
  Synthetic oligonucleotide
tgtatacaagcaatgtggaaagttgagtct

SEQ ID NO: 144807 - DNA, 30 bp, Artificial Sequence
  Synthetic oligonucleotide
aacataatcgggatgtatagcgcctagtct

SEQ ID NO: 144808 - DNA, 30 bp, Artificial Sequence
  Synthetic oligonucleotide
tcgccaagataagataagaaaggctagtct

SEQ ID NO: 144809 - DNA, 30 bp, Artificial Sequence
  Synthetic oligonucleotide
agaaatgttagttgcgaatggcggtagtct

SEQ ID NO: 144810 - DNA, 31 bp, Artificial Sequence
  Synthetic oligonucleotide
cgccaaatatttgggtgatatcagaacgtct

SEQ ID NO: 144811 - DNA, 30 bp, Artificial Sequence
  Synthetic oligonucleotide
gtaagatagggtgtggagattcacacgtct

SEQ ID NO: 144812 - DNA, 30 bp, Artificial Sequence
  Synthetic oligonucleotide
tttcgccacatacgctcgatcagcccgtct

SEQ ID NO: 144813 - DNA, 30 bp, Artificial Sequence
  Synthetic oligonucleotide
catgtgtggatggacctggcattgccgtct

SEQ ID NO: 144814 - DNA, 30 bp, Artificial Sequence
  Synthetic oligonucleotide
cctcgctgcagtgataagttcattgcgtct

SEQ ID NO: 144815 - DNA, 30 bp, Artificial Sequence
  Synthetic oligonucleotide
aatgggacgcggaatggcaacgaatcgtct

SEQ ID NO: 144816 - DNA, 30 bp, Artificial Sequence
  Synthetic oligonucleotide
tgagtaaaaaattttgtgggcgcctcgtct

SEQ ID NO: 144817 - DNA, 30 bp, Artificial Sequence
  Synthetic oligonucleotide
aagttagctagtgactggaagaagtcgtct

SEQ ID NO: 144818 - DNA, 30 bp, Artificial Sequence
  Synthetic oligonucleotide
gggacgaatatgtaaggtggaaattcgtct

SEQ ID NO: 144819 - DNA, 30 bp, Artificial Sequence
  Synthetic oligonucleotide
caaagctcgtccaggcggatatgaaggtct

SEQ ID NO: 144820 - DNA, 30 bp, Artificial Sequence
  Synthetic oligonucleotide
taaccccacagggtagggggcctaaggtct

SEQ ID NO: 144821 - DNA, 30 bp, Artificial Sequence
  Synthetic oligonucleotide
accgacgagagagtattcacatcccggtct

SEQ ID NO: 144822 - DNA, 30 bp, Artificial Sequence
  Synthetic oligonucleotide
caggccatatcgcgctggttagggcggtct

SEQ ID NO: 144823 - DNA, 30 bp, Artificial Sequence
  Synthetic oligonucleotide
cgcggtaaacgccaaacgactattcggtct

SEQ ID NO: 144824 - DNA, 30 bp, Artificial Sequence
  Synthetic oligonucleotide
cgtcaacggacctacgtatgctttcggtct

SEQ ID NO: 144825 - DNA, 30 bp, Artificial Sequence
  Synthetic oligonucleotide
tgtcagcgagagattcccggcgaagggtct

SEQ ID NO: 144826 - DNA, 30 bp, Artificial Sequence
  Synthetic oligonucleotide
gtagaccaataacgagaaaaacgagggtct

SEQ ID NO: 144827 - DNA, 30 bp, Artificial Sequence
  Synthetic oligonucleotide
gtaaaacgtgagaactagacgggagggtct

SEQ ID NO: 144828 - DNA, 30 bp, Artificial Sequence
  Synthetic oligonucleotide
ttaccagagagtggaaccgaatccatgtct

SEQ ID NO: 144829 - DNA, 30 bp, Artificial Sequence
  Synthetic oligonucleotide
ggacgaccaaacactgacgacttgatgtct

SEQ ID NO: 144830 - DNA, 30 bp, Artificial Sequence
  Synthetic oligonucleotide
ctgcgagctacacggaaaggaatcctgtct

SEQ ID NO: 144831 - DNA, 30 bp, Artificial Sequence
  Synthetic oligonucleotide
taaataacatgcgaaggatctagagtgtct

SEQ ID NO: 144832 - DNA, 30 bp, Artificial Sequence
  Synthetic oligonucleotide
aggcatgcgttaggtacgctcttagtgtct

SEQ ID NO: 144833 - DNA, 30 bp, Artificial Sequence
  Synthetic oligonucleotide
actgatgacggcctatccgtagacttgtct

SEQ ID NO: 144834 - DNA, 30 bp, Artificial Sequence
  Synthetic oligonucleotide
tcgggagattatggggagcacagcttgtct

SEQ ID NO: 144835 - DNA, 30 bp, Artificial Sequence
  Synthetic oligonucleotide
tgatggtaaaaagtgtgatgaacaaattct

SEQ ID NO: 144836 - DNA, 30 bp, Artificial Sequence
  Synthetic oligonucleotide
gcaatcggcttgaaaactcgggcgaattct

SEQ ID NO: 144837 - DNA, 30 bp, Artificial Sequence
  Synthetic oligonucleotide
ggagtatacatgggtcggaaaacgcattct

SEQ ID NO: 144838 - DNA, 30 bp, Artificial Sequence
  Synthetic oligonucleotide
agaggatgggtacagtctctattagattct

SEQ ID NO: 144839 - DNA, 30 bp, Artificial Sequence
  Synthetic oligonucleotide
taaagtgcgtggcgaaggaatcgatattct

SEQ ID NO: 144840 - DNA, 30 bp, Artificial Sequence
  Synthetic oligonucleotide
tacagattgctacggcaggtacagccttct

SEQ ID NO: 144841 - DNA, 30 bp, Artificial Sequence
  Synthetic oligonucleotide
gacctagccataccgtgcccagagccttct

SEQ ID NO: 144842 - DNA, 30 bp, Artificial Sequence
  Synthetic oligonucleotide
aacataagcgaggatacgagttgagcttct

SEQ ID NO: 144843 - DNA, 30 bp, Artificial Sequence
  Synthetic oligonucleotide
tactgtagaataaactgactatctgcttct

SEQ ID NO: 144844 - DNA, 30 bp, Artificial Sequence
  Synthetic oligonucleotide
tgagagagggcagagactcggatatcttct

SEQ ID NO: 144845 - DNA, 30 bp, Artificial Sequence
  Synthetic oligonucleotide
gtacggccgacgcaagttggatcgagttct

SEQ ID NO: 144846 - DNA, 30 bp, Artificial Sequence
  Synthetic oligonucleotide
aggtcgatgtgtgatgctcctggtcgttct

SEQ ID NO: 144847 - DNA, 30 bp, Artificial Sequence
  Synthetic oligonucleotide
ctcgttacataccgcctattctttcgttct

SEQ ID NO: 144848 - DNA, 30 bp, Artificial Sequence
  Synthetic oligonucleotide
tttgtccgacgggaacgaggaacgggttct

SEQ ID NO: 144849 - DNA, 30 bp, Artificial Sequence
  Synthetic oligonucleotide
acgactgtggttatcctggccatctgttct

SEQ ID NO: 144850 - DNA, 30 bp, Artificial Sequence
  Synthetic oligonucleotide
agcgggagcggtgccaggagcgatatttct

SEQ ID NO: 144851 - DNA, 30 bp, Artificial Sequence
  Synthetic oligonucleotide
gactactctagccctaacattgaacaaagt

SEQ ID NO: 144852 - DNA, 30 bp, Artificial Sequence
  Synthetic oligonucleotide
caagagttctctcgcggcgattgacaaagt

SEQ ID NO: 144853 - DNA, 30 bp, Artificial Sequence
  Synthetic oligonucleotide
actgactgtaggtatatataggtacaaagt

SEQ ID NO: 144854 - DNA, 30 bp, Artificial Sequence
  Synthetic oligonucleotide
gggatctcgcacatgtcttaacggcaaagt

SEQ ID NO: 144855 - DNA, 30 bp, Artificial Sequence
  Synthetic oligonucleotide
tgcctgggaacacctgataaacgtcaaagt

SEQ ID NO: 144856 - DNA, 30 bp, Artificial Sequence
  Synthetic oligonucleotide
ggaggtcgtcggctatctacaatagaaagt

SEQ ID NO: 144857 - DNA, 30 bp, Artificial Sequence
  Synthetic oligonucleotide
tacagatcagggcgtcagaacctagaaagt

SEQ ID NO: 144858 - DNA, 30 bp, Artificial Sequence
  Synthetic oligonucleotide
tgaacgatgcttagttttggtaccgaaagt

SEQ ID NO: 144859 - DNA, 30 bp, Artificial Sequence
  Synthetic oligonucleotide
agaggtacacaaagccatagtttggaaagt

SEQ ID NO: 144860 - DNA, 30 bp, Artificial Sequence
  Synthetic oligonucleotide
agccatcaaacaccggggcccacttaaagt

SEQ ID NO: 144861 - DNA, 30 bp, Artificial Sequence
  Synthetic oligonucleotide
taagcgaattaaaggggcaatcgcacaagt

SEQ ID NO: 144862 - DNA, 30 bp, Artificial Sequence
  Synthetic oligonucleotide
acctcactctctcgtacccctcagacaagt

SEQ ID NO: 144863 - DNA, 30 bp, Artificial Sequence
  Synthetic oligonucleotide
tcgaccctgggcgcccgtgtaccgacaagt

SEQ ID NO: 144864 - DNA, 30 bp, Artificial Sequence
  Synthetic oligonucleotide
aagcatgccgccaatcctgcaccaccaagt

SEQ ID NO: 144865 - DNA, 30 bp, Artificial Sequence
  Synthetic oligonucleotide
accgaggtaaggtacaaaaaacccccaagt

SEQ ID NO: 144866 - DNA, 30 bp, Artificial Sequence
  Synthetic oligonucleotide
tgccatgaccaggaggctgtgtacgcaagt

SEQ ID NO: 144867 - DNA, 30 bp, Artificial Sequence
  Synthetic oligonucleotide
cgtgatggtaggggttccccccggtcaagt

SEQ ID NO: 144868 - DNA, 30 bp, Artificial Sequence
  Synthetic oligonucleotide
gtcttgagcagtatgaataaagtgtcaagt

SEQ ID NO: 144869 - DNA, 30 bp, Artificial Sequence
  Synthetic oligonucleotide
caggtgactagcgtgcaaattggcagaagt

SEQ ID NO: 144870 - DNA, 30 bp, Artificial Sequence
  Synthetic oligonucleotide
tgcaagacttgcggagggcgcctgagaagt

SEQ ID NO: 144871 - DNA, 30 bp, Artificial Sequence
  Synthetic oligonucleotide
taaagcttgggtgctaggcaagatagaagt

SEQ ID NO: 144872 - DNA, 30 bp, Artificial Sequence
  Synthetic oligonucleotide
aaggaccagttgcttgggatccctagaagt

SEQ ID NO: 144873 - DNA, 30 bp, Artificial Sequence
  Synthetic oligonucleotide
tatacaaatatacctccaatcacacgaagt

SEQ ID NO: 144874 - DNA, 30 bp, Artificial Sequence
  Synthetic oligonucleotide
cggggtgtggcttttcgcatcgtacgaagt

SEQ ID NO: 144875 - DNA, 30 bp, Artificial Sequence
  Synthetic oligonucleotide
gacatcattatatgatataaaccccgaagt

SEQ ID NO: 144876 - DNA, 30 bp, Artificial Sequence
  Synthetic oligonucleotide
gtggggccgcaacccactggcataggaagt

SEQ ID NO: 144877 - DNA, 30 bp, Artificial Sequence
  Synthetic oligonucleotide
agagggctgggaaaatctgtaaccggaagt

SEQ ID NO: 144878 - DNA, 30 bp, Artificial Sequence
  Synthetic oligonucleotide
gcaaaagcctgcgaagcggggtggggaagt

SEQ ID NO: 144879 - DNA, 30 bp, Artificial Sequence
  Synthetic oligonucleotide
agacagaatgggaaatctcgtgtgggaagt

SEQ ID NO: 144880 - DNA, 30 bp, Artificial Sequence
  Synthetic oligonucleotide
cggcttgggagtttaataatcctgtgaagt

SEQ ID NO: 144881 - DNA, 30 bp, Artificial Sequence
  Synthetic oligonucleotide
ctacaatcagcaagtgaaggttacataagt

SEQ ID NO: 144882 - DNA, 30 bp, Artificial Sequence
  Synthetic oligonucleotide
gcgagtccgtgttgagcagggaaactaagt

SEQ ID NO: 144883 - DNA, 30 bp, Artificial Sequence
  Synthetic oligonucleotide
gaacggttgcggcacaacgtgacactaagt

SEQ ID NO: 144884 - DNA, 30 bp, Artificial Sequence
  Synthetic oligonucleotide
cgagtctgataggctttaaaaatactaagt

SEQ ID NO: 144885 - DNA, 30 bp, Artificial Sequence
  Synthetic oligonucleotide
aatagtaagttagtagcgaagttactaagt

SEQ ID NO: 144886 - DNA, 30 bp, Artificial Sequence
  Synthetic oligonucleotide
ggacggccagctgcccttcgctccctaagt

SEQ ID NO: 144887 - DNA, 30 bp, Artificial Sequence
  Synthetic oligonucleotide
ctggatcgcaaaaacggggcgggcctaagt

SEQ ID NO: 144888 - DNA, 30 bp, Artificial Sequence
  Synthetic oligonucleotide
cgatgacactgtcgggctatactcctaagt

SEQ ID NO: 144889 - DNA, 30 bp, Artificial Sequence
  Synthetic oligonucleotide
tcaccaagcggtaagcatgcactattaagt

SEQ ID NO: 144890 - DNA, 30 bp, Artificial Sequence
  Synthetic oligonucleotide
agaaaagtgttgtgctgattagtattaagt

SEQ ID NO: 144891 - DNA, 30 bp, Artificial Sequence
  Synthetic oligonucleotide
taggaaaccccgctacataacaccttaagt

SEQ ID NO: 144892 - DNA, 30 bp, Artificial Sequence
  Synthetic oligonucleotide
aggggctgatgtgattggcgatcgttaagt

SEQ ID NO: 144893 - DNA, 30 bp, Artificial Sequence
  Synthetic oligonucleotide
gtaggcaatattgaggagcgttcgttaagt

SEQ ID NO: 144894 - DNA, 30 bp, Artificial Sequence
  Synthetic oligonucleotide
aataacgagaagggtagaacgcttttaagt

SEQ ID NO: 144895 - DNA, 30 bp, Artificial Sequence
  Synthetic oligonucleotide
ctgaggaaagttaagccttgggaacacagt

SEQ ID NO: 144896 - DNA, 30 bp, Artificial Sequence
  Synthetic oligonucleotide
atcaacagactctgatcctgacacgacagt

SEQ ID NO: 144897 - DNA, 30 bp, Artificial Sequence
  Synthetic oligonucleotide
tgttgcgggataaactgctgcgcatacagt

SEQ ID NO: 144898 - DNA, 30 bp, Artificial Sequence
  Synthetic oligonucleotide
gttgaacttcctcgccttcgtgacaccagt

SEQ ID NO: 144899 - DNA, 30 bp, Artificial Sequence
  Synthetic oligonucleotide
tgatacacagaagaggcagtgcgcaccagt

SEQ ID NO: 144900 - DNA, 30 bp, Artificial Sequence
  Synthetic oligonucleotide
acatgagtactcggacatctagggaccagt

SEQ ID NO: 144901 - DNA, 31 bp, Artificial Sequence
  Synthetic oligonucleotide
cggggaagtaggccgtataatactgaccagt

SEQ ID NO: 144902 - DNA, 30 bp, Artificial Sequence
  Synthetic oligonucleotide
cgctgcgggatacggggatgttgacccagt

SEQ ID NO: 144903 - DNA, 30 bp, Artificial Sequence
  Synthetic oligonucleotide
gagaggatacgtatgtcccaaaagcccagt

SEQ ID NO: 144904 - DNA, 30 bp, Artificial Sequence
  Synthetic oligonucleotide
gtcggtcgcgaagatttgttaaagcccagt

SEQ ID NO: 144905 - DNA, 30 bp, Artificial Sequence
  Synthetic oligonucleotide
aatggtgcgccaagtcgatcggcagccagt

SEQ ID NO: 144906 - DNA, 30 bp, Artificial Sequence
  Synthetic oligonucleotide
ggtgcaagttcaaccaggagggccgccagt

SEQ ID NO: 144907 - DNA, 30 bp, Artificial Sequence
  Synthetic oligonucleotide
accataagcagtcgcattggtatcgccagt

SEQ ID NO: 144908 - DNA, 30 bp, Artificial Sequence
  Synthetic oligonucleotide
tggtaggaggtgacgatttaacttgccagt

SEQ ID NO: 144909 - DNA, 30 bp, Artificial Sequence
  Synthetic oligonucleotide
tactacagtgttatgttctcgtggtccagt

SEQ ID NO: 144910 - DNA, 30 bp, Artificial Sequence
  Synthetic oligonucleotide
caaatgataattggtttagagacttccagt

SEQ ID NO: 144911 - DNA, 30 bp, Artificial Sequence
  Synthetic oligonucleotide
tggctaactacctagggacatgcccgcagt

SEQ ID NO: 144912 - DNA, 30 bp, Artificial Sequence
  Synthetic oligonucleotide
ccatggcatacgttatacatgatccgcagt

SEQ ID NO: 144913 - DNA, 30 bp, Artificial Sequence
  Synthetic oligonucleotide
gatttaagggatggcgagggacaaggcagt

SEQ ID NO: 144914 - DNA, 30 bp, Artificial Sequence
  Synthetic oligonucleotide
caacgtgtgaggataagcccgggcggcagt

SEQ ID NO: 144915 - DNA, 30 bp, Artificial Sequence
  Synthetic oligonucleotide
ttcagatccacgatatgtgatacatgcagt

SEQ ID NO: 144916 - DNA, 30 bp, Artificial Sequence
  Synthetic oligonucleotide
gcgactcaccattgagactagataatcagt

SEQ ID NO: 144917 - DNA, 30 bp, Artificial Sequence
  Synthetic oligonucleotide
cggagtcttaacactatacgatccatcagt

SEQ ID NO: 144918 - DNA, 30 bp, Artificial Sequence
  Synthetic oligonucleotide
cctatgtgcgaacggtgaaggcttatcagt

SEQ ID NO: 144919 - DNA, 30 bp, Artificial Sequence
  Synthetic oligonucleotide
taaatattaagacttacaccccgagtcagt

SEQ ID NO: 144920 - DNA, 30 bp, Artificial Sequence
  Synthetic oligonucleotide
gcacaggaaatatgggaacgccagttcagt

SEQ ID NO: 144921 - DNA, 30 bp, Artificial Sequence
  Synthetic oligonucleotide
gtagaaatgtctcgtaaggaatggttcagt

SEQ ID NO: 144922 - DNA, 30 bp, Artificial Sequence
  Synthetic oligonucleotide
aggcgtatatcgagtacggtcggaaagagt

SEQ ID NO: 144923 - DNA, 30 bp, Artificial Sequence
  Synthetic oligonucleotide
tattatcgagtatcttcccgcgcgaagagt

SEQ ID NO: 144924 - DNA, 30 bp, Artificial Sequence
  Synthetic oligonucleotide
gtctaaagagcgtcatgtcaattgaagagt

SEQ ID NO: 144925 - DNA, 30 bp, Artificial Sequence
  Synthetic oligonucleotide
aatgatgcggttcgggggctaagtaagagt

SEQ ID NO: 144926 - DNA, 30 bp, Artificial Sequence
  Synthetic oligonucleotide
tacatacttttaggtaacgttcgacagagt

SEQ ID NO: 144927 - DNA, 30 bp, Artificial Sequence
  Synthetic oligonucleotide
acggcgacgcataatcaagtctggcagagt

SEQ ID NO: 144928 - DNA, 30 bp, Artificial Sequence
  Synthetic oligonucleotide
tgatttaagggacaaagaacataagagagt

SEQ ID NO: 144929 - DNA, 30 bp, Artificial Sequence
  Synthetic oligonucleotide
tgtcgagttgaaaaacagaggcggtagagt

SEQ ID NO: 144930 - DNA, 30 bp, Artificial Sequence
  Synthetic oligonucleotide
cgggagatgcccgagtccagtaagacgagt

SEQ ID NO: 144931 - DNA, 30 bp, Artificial Sequence
  Synthetic oligonucleotide
tctataagaggaggggaaaagcgtacgagt

SEQ ID NO: 144932 - DNA, 30 bp, Artificial Sequence
  Synthetic oligonucleotide
atcagtgtcaattatattagtccaccgagt

SEQ ID NO: 144933 - DNA, 30 bp, Artificial Sequence
  Synthetic oligonucleotide
ctccaggttagcgggagaagcggcccgagt

SEQ ID NO: 144934 - DNA, 31 bp, Artificial Sequence
  Synthetic oligonucleotide
gatgatcctgacgacctcatactgtccgagt

SEQ ID NO: 144935 - DNA, 30 bp, Artificial Sequence
  Synthetic oligonucleotide
tgggccaatgcagtcggacaaggggcgagt

SEQ ID NO: 144936 - DNA, 30 bp, Artificial Sequence
  Synthetic oligonucleotide
gatagccggactgcgtgagacgatgcgagt

SEQ ID NO: 144937 - DNA, 30 bp, Artificial Sequence
  Synthetic oligonucleotide
gtagaaagatgctgtcccaggaactcgagt

SEQ ID NO: 144938 - DNA, 30 bp, Artificial Sequence
  Synthetic oligonucleotide
gcgaacagtacaactctcgggtactcgagt

SEQ ID NO: 144939 - DNA, 30 bp, Artificial Sequence
  Synthetic oligonucleotide
acgccgaacaatagtcgtcctcgctcgagt

SEQ ID NO: 144940 - DNA, 30 bp, Artificial Sequence
  Synthetic oligonucleotide
agcgggagatcgaaccatgctgtgtcgagt

SEQ ID NO: 144941 - DNA, 30 bp, Artificial Sequence
  Synthetic oligonucleotide
atgaagccccgaaggttccaggcttcgagt

SEQ ID NO: 144942 - DNA, 30 bp, Artificial Sequence
  Synthetic oligonucleotide
gcaaataagcgtgtaactttgcgaaggagt

SEQ ID NO: 144943 - DNA, 30 bp, Artificial Sequence
  Synthetic oligonucleotide
atggatctatctaggaactatgtaaggagt

SEQ ID NO: 144944 - DNA, 30 bp, Artificial Sequence
  Synthetic oligonucleotide
caaatcggcaatgattcgtcggacaggagt

SEQ ID NO: 144945 - DNA, 30 bp, Artificial Sequence
  Synthetic oligonucleotide
gaaggtcgtatattacgagctagcaggagt

SEQ ID NO: 144946 - DNA, 30 bp, Artificial Sequence
  Synthetic oligonucleotide
acggccttgggagttcgtcggctcaggagt

SEQ ID NO: 144947 - DNA, 30 bp, Artificial Sequence
  Synthetic oligonucleotide
cctacgtgcgtgggcttccaagcgaggagt

SEQ ID NO: 144948 - DNA, 30 bp, Artificial Sequence
  Synthetic oligonucleotide
tatgcgtgtaccctaagagcgcataggagt

SEQ ID NO: 144949 - DNA, 30 bp, Artificial Sequence
  Synthetic oligonucleotide
aggtcctcatttacactttatcgtaggagt

SEQ ID NO: 144950 - DNA, 30 bp, Artificial Sequence
  Synthetic oligonucleotide
ctatcaggagatatgagtcaggaacggagt

SEQ ID NO: 144951 - DNA, 30 bp, Artificial Sequence
  Synthetic oligonucleotide
taaaggtgcgtcaagtaacaagtccggagt

SEQ ID NO: 144952 - DNA, 30 bp, Artificial Sequence
  Synthetic oligonucleotide
ctcaacgagactatcttgtttagagggagt

SEQ ID NO: 144953 - DNA, 30 bp, Artificial Sequence
  Synthetic oligonucleotide
tctaatacatcgtctgatttagatgggagt

SEQ ID NO: 144954 - DNA, 30 bp, Artificial Sequence
  Synthetic oligonucleotide
atgatggaactcaaagagacgtctgggagt

SEQ ID NO: 144955 - DNA, 30 bp, Artificial Sequence
  Synthetic oligonucleotide
tagcggtaactcgctagcataacatggagt

SEQ ID NO: 144956 - DNA, 31 bp, Artificial Sequence
  Synthetic oligonucleotide
ttctgcccatgcaagaggaagcgcatggagt

SEQ ID NO: 144957 - DNA, 30 bp, Artificial Sequence
  Synthetic oligonucleotide
tcctcccgtctaaccacatggatatggagt

SEQ ID NO: 144958 - DNA, 30 bp, Artificial Sequence
  Synthetic oligonucleotide
atacttgacatgttcttacatgcctggagt

SEQ ID NO: 144959 - DNA, 30 bp, Artificial Sequence
  Synthetic oligonucleotide
gagaacagcattatctcgatggtgatgagt

SEQ ID NO: 144960 - DNA, 30 bp, Artificial Sequence
  Synthetic oligonucleotide
gctatcgctagtggcgagaggaaactgagt

SEQ ID NO: 144961 - DNA, 30 bp, Artificial Sequence
  Synthetic oligonucleotide
tatatgagactcgcgtgcgatacactgagt

SEQ ID NO: 144962 - DNA, 30 bp, Artificial Sequence
  Synthetic oligonucleotide
gcgagacgcggatgcgatcgagtactgagt

SEQ ID NO: 144963 - DNA, 30 bp, Artificial Sequence
  Synthetic oligonucleotide
tgaacggactataacgttgtccacctgagt

SEQ ID NO: 144964 - DNA, 30 bp, Artificial Sequence
  Synthetic oligonucleotide
tcaataacctggcgttcagatcagctgagt

SEQ ID NO: 144965 - DNA, 30 bp, Artificial Sequence
  Synthetic oligonucleotide
ggctagataagtatgataatgatgctgagt

SEQ ID NO: 144966 - DNA, 30 bp, Artificial Sequence
  Synthetic oligonucleotide
gcaaacggtgggttgcatcttcgtctgagt

SEQ ID NO: 144967 - DNA, 30 bp, Artificial Sequence
  Synthetic oligonucleotide
gatgtgcggagagacaattcgcttctgagt

SEQ ID NO: 144968 - DNA, 30 bp, Artificial Sequence
  Synthetic oligonucleotide
tatgtaatgagacgtagagtcgccgtgagt

SEQ ID NO: 144969 - DNA, 30 bp, Artificial Sequence
  Synthetic oligonucleotide
ggattatggtgaccttgaaaacgcgtgagt

SEQ ID NO: 144970 - DNA, 31 bp, Artificial Sequence
  Synthetic oligonucleotide
accggcgtcgtggcgtcccagccgggtgagt

SEQ ID NO: 144971 - DNA, 30 bp, Artificial Sequence
  Synthetic oligonucleotide
tgagccctaaggccgctcaaacttgtgagt

SEQ ID NO: 144972 - DNA, 30 bp, Artificial Sequence
  Synthetic oligonucleotide
tttggaaacggaattctcacgtccttgagt

SEQ ID NO: 144973 - DNA, 30 bp, Artificial Sequence
  Synthetic oligonucleotide
taggaataaaaacaaaggagacggttgagt

SEQ ID NO: 144974 - DNA, 30 bp, Artificial Sequence
  Synthetic oligonucleotide
gcgagctatgccgaatatgtgcgtttgagt

SEQ ID NO: 144975 - DNA, 30 bp, Artificial Sequence
  Synthetic oligonucleotide
gtgcagcgtgcaccatccagcaggcatagt

SEQ ID NO: 144976 - DNA, 30 bp, Artificial Sequence
  Synthetic oligonucleotide
taatcatcgttaacatttaccaaagatagt

SEQ ID NO: 144977 - DNA, 30 bp, Artificial Sequence
  Synthetic oligonucleotide
tagtcttgagggcacagctgggtcgatagt

SEQ ID NO: 144978 - DNA, 30 bp, Artificial Sequence
  Synthetic oligonucleotide
tgtcatggagcgcgttgccctgctgatagt

SEQ ID NO: 144979 - DNA, 30 bp, Artificial Sequence
  Synthetic oligonucleotide
gggctcggtaattgcactccggactatagt

SEQ ID NO: 144980 - DNA, 30 bp, Artificial Sequence
  Synthetic oligonucleotide
acagcaaggagtgccagttcaggctatagt

SEQ ID NO: 144981 - DNA, 30 bp, Artificial Sequence
  Synthetic oligonucleotide
gatagatcgaagtaattttcaaacactagt

SEQ ID NO: 144982 - DNA, 30 bp, Artificial Sequence
  Synthetic oligonucleotide
cgtggtgtatcggacgtttggcacactagt

SEQ ID NO: 144983 - DNA, 30 bp, Artificial Sequence
  Synthetic oligonucleotide
gcggtgtcctgatgtagaggacttgctagt

SEQ ID NO: 144984 - DNA, 30 bp, Artificial Sequence
  Synthetic oligonucleotide
gagggcaaaagtgtattacgaaaaagtagt

SEQ ID NO: 144985 - DNA, 30 bp, Artificial Sequence
  Synthetic oligonucleotide
tgatggagatgccaggagaaatctagtagt

SEQ ID NO: 144986 - DNA, 30 bp, Artificial Sequence
  Synthetic oligonucleotide
ccctatacagtacagatacctcttcgtagt

SEQ ID NO: 144987 - DNA, 30 bp, Artificial Sequence
  Synthetic oligonucleotide
gtatctgatcacaaaggtcgacagggtagt

SEQ ID NO: 144988 - DNA, 30 bp, Artificial Sequence
  Synthetic oligonucleotide
gaatacgccgacgtcccaggacagggtagt

SEQ ID NO: 144989 - DNA, 30 bp, Artificial Sequence
  Synthetic oligonucleotide
cgagaggtagaacttggcgattcctgtagt

SEQ ID NO: 144990 - DNA, 30 bp, Artificial Sequence
  Synthetic oligonucleotide
tacgggagctgatgcatcgtatcgtgtagt

SEQ ID NO: 144991 - DNA, 30 bp, Artificial Sequence
  Synthetic oligonucleotide
aataagttgtaccgccatcaggtgtgtagt

SEQ ID NO: 144992 - DNA, 30 bp, Artificial Sequence
  Synthetic oligonucleotide
gactaggagctcctaaggactaattgtagt

SEQ ID NO: 144993 - DNA, 30 bp, Artificial Sequence
  Synthetic oligonucleotide
aaggcctccctgaacaaccgaaaaattagt

SEQ ID NO: 144994 - DNA, 30 bp, Artificial Sequence
  Synthetic oligonucleotide
ccgtcacagtcaaaaatatggcgaattagt

SEQ ID NO: 144995 - DNA, 30 bp, Artificial Sequence
  Synthetic oligonucleotide
gcattgaatgggtataacgtgttaattagt

SEQ ID NO: 144996 - DNA, 30 bp, Artificial Sequence
  Synthetic oligonucleotide
acggaaagatgcgcttctttgactattagt

SEQ ID NO: 144997 - DNA, 30 bp, Artificial Sequence
  Synthetic oligonucleotide
acaatctagagacctatgcccgaccttagt

SEQ ID NO: 144998 - DNA, 30 bp, Artificial Sequence
  Synthetic oligonucleotide
gggcagcccacagttatcggcggggttagt

SEQ ID NO: 144999 - DNA, 30 bp, Artificial Sequence
  Synthetic oligonucleotide
gtgcgtgtgtacagtaggactggggttagt

SEQ ID NO: 145000 - DNA, 30 bp, Artificial Sequence
  Synthetic oligonucleotide
ttggcagctcacgactagtgactggttagt

SEQ ID NO: 145001 - DNA, 30 bp, Artificial Sequence
  Synthetic oligonucleotide
taactcgcagcggggagtcgatgtgttagt

SEQ ID NO: 145002 - DNA, 30 bp, Artificial Sequence
  Synthetic oligonucleotide
gcgtctgtgcacgaaactggcttatttagt

SEQ ID NO: 145003 - DNA, 30 bp, Artificial Sequence
  Synthetic oligonucleotide
acagagatagggagtgtattgagttttagt

SEQ ID NO: 145004 - DNA, 30 bp, Artificial Sequence
  Synthetic oligonucleotide
gctcgaccctatgtcaattccgaacaacgt

SEQ ID NO: 145005 - DNA, 30 bp, Artificial Sequence
  Synthetic oligonucleotide
ataccagtgtccaaggcgggtgaacaacgt

SEQ ID NO: 145006 - DNA, 30 bp, Artificial Sequence
  Synthetic oligonucleotide
tgcaaccgggttaaggctgtctaacaacgt

SEQ ID NO: 145007 - DNA, 30 bp, Artificial Sequence
  Synthetic oligonucleotide
gggggagctcacgacaacaaaggacaacgt

SEQ ID NO: 145008 - DNA, 30 bp, Artificial Sequence
  Synthetic oligonucleotide
ggaaggcacgcttgtatgtggtatcaacgt

SEQ ID NO: 145009 - DNA, 30 bp, Artificial Sequence
  Synthetic oligonucleotide
gcacattgagaacgctcatggacagaacgt

SEQ ID NO: 145010 - DNA, 30 bp, Artificial Sequence
  Synthetic oligonucleotide
tacagcgaagacaatacaacaggagaacgt

SEQ ID NO: 145011 - DNA, 30 bp, Artificial Sequence
  Synthetic oligonucleotide
cgggtcgtagaaccgagggttgaggaacgt

SEQ ID NO: 145012 - DNA, 30 bp, Artificial Sequence
  Synthetic oligonucleotide
ggatatgaacttacgtcctcattctaacgt

SEQ ID NO: 145013 - DNA, 30 bp, Artificial Sequence
  Synthetic oligonucleotide
gtagtcgttaggggtaaacaagtgtaacgt

SEQ ID NO: 145014 - DNA, 30 bp, Artificial Sequence
  Synthetic oligonucleotide
cgagtggaaggctcggaacatagttaacgt

SEQ ID NO: 145015 - DNA, 30 bp, Artificial Sequence
  Synthetic oligonucleotide
cagacatgagtacggaagcccgacacacgt

SEQ ID NO: 145016 - DNA, 30 bp, Artificial Sequence
  Synthetic oligonucleotide
ccaacactcaagtacggccccagtacacgt

SEQ ID NO: 145017 - DNA, 30 bp, Artificial Sequence
  Synthetic oligonucleotide
acgcatggaggatctcgatctaacccacgt

SEQ ID NO: 145018 - DNA, 30 bp, Artificial Sequence
  Synthetic oligonucleotide
taagccagacgtcgaggcaactaagcacgt

SEQ ID NO: 145019 - DNA, 30 bp, Artificial Sequence
  Synthetic oligonucleotide
cactgtcagcctaggaccacaatagcacgt

SEQ ID NO: 145020 - DNA, 30 bp, Artificial Sequence
  Synthetic oligonucleotide
aaaagaacacatgctaagtagcccgcacgt

SEQ ID NO: 145021 - DNA, 30 bp, Artificial Sequence
  Synthetic oligonucleotide
caatgttttgtggaatgtgagagggcacgt

SEQ ID NO: 145022 - DNA, 30 bp, Artificial Sequence
  Synthetic oligonucleotide
atccggtttgggttggagaagattgcacgt

SEQ ID NO: 145023 - DNA, 30 bp, Artificial Sequence
  Synthetic oligonucleotide
cacttagcaggaacatcgctgtgttcacgt

SEQ ID NO: 145024 - DNA, 30 bp, Artificial Sequence
  Synthetic oligonucleotide
tggggaagcacggagggggatctaagacgt

SEQ ID NO: 145025 - DNA, 30 bp, Artificial Sequence
  Synthetic oligonucleotide
tagaggggcgaatgtccgataatgagacgt

SEQ ID NO: 145026 - DNA, 30 bp, Artificial Sequence
  Synthetic oligonucleotide
catttcatagaaccagtggcccaacgacgt

SEQ ID NO: 145027 - DNA, 30 bp, Artificial Sequence
  Synthetic oligonucleotide
ccaacgaagttgtccatctcggtccgacgt

SEQ ID NO: 145028 - DNA, 30 bp, Artificial Sequence
  Synthetic oligonucleotide
ttgacagttgtatatagcgagtctcgacgt

SEQ ID NO: 145029 - DNA, 30 bp, Artificial Sequence
  Synthetic oligonucleotide
gcagggtggacaaacaccaagttatgacgt

SEQ ID NO: 145030 - DNA, 30 bp, Artificial Sequence
  Synthetic oligonucleotide
tgtccgaaagactcgtgtcagcgcctacgt

SEQ ID NO: 145031 - DNA, 30 bp, Artificial Sequence
  Synthetic oligonucleotide
gaggtgttcgtggtgggataagggctacgt

SEQ ID NO: 145032 - DNA, 30 bp, Artificial Sequence
  Synthetic oligonucleotide
cacattcctggaacaatagtgtgggtacgt

SEQ ID NO: 145033 - DNA, 30 bp, Artificial Sequence
  Synthetic oligonucleotide
aggtatgcgtattgttataggcacttacgt

SEQ ID NO: 145034 - DNA, 30 bp, Artificial Sequence
  Synthetic oligonucleotide
ctgaacatagagtccagcccttccttacgt

SEQ ID NO: 145035 - DNA, 30 bp, Artificial Sequence
  Synthetic oligonucleotide
gcgccgcgggatcagggatagctgttacgt

SEQ ID NO: 145036 - DNA, 30 bp, Artificial Sequence
  Synthetic oligonucleotide
tcgaatttacacccaccagtgacgaaccgt

SEQ ID NO: 145037 - DNA, 30 bp, Artificial Sequence
  Synthetic oligonucleotide
aggcccagaatggaacttgcgcggaaccgt

SEQ ID NO: 145038 - DNA, 30 bp, Artificial Sequence
  Synthetic oligonucleotide
agtaaggacagtctaaagtaggataaccgt

SEQ ID NO: 145039 - DNA, 30 bp, Artificial Sequence
  Synthetic oligonucleotide
tggagatgtagtaccttgtcgattaaccgt

SEQ ID NO: 145040 - DNA, 30 bp, Artificial Sequence
  Synthetic oligonucleotide
acgagtgtcgcaaccatggatttgcaccgt

SEQ ID NO: 145041 - DNA, 30 bp, Artificial Sequence
  Synthetic oligonucleotide
caatccgttcgcatattaataaaagaccgt

SEQ ID NO: 145042 - DNA, 30 bp, Artificial Sequence
  Synthetic oligonucleotide
cgaaaaatggagacaaatatgtgagaccgt

SEQ ID NO: 145043 - DNA, 30 bp, Artificial Sequence
  Synthetic oligonucleotide
tcaattatagggaatgacgaaagggaccgt

SEQ ID NO: 145044 - DNA, 30 bp, Artificial Sequence
  Synthetic oligonucleotide
gcaagtggccatcttagtctcctataccgt

SEQ ID NO: 145045 - DNA, 30 bp, Artificial Sequence
  Synthetic oligonucleotide
tcccatagggattgagatagattctaccgt

SEQ ID NO: 145046 - DNA, 30 bp, Artificial Sequence
  Synthetic oligonucleotide
atggcggatcactaaatcacttacacccgt

SEQ ID NO: 145047 - DNA, 30 bp, Artificial Sequence
  Synthetic oligonucleotide
tccaggggtagtggattagaactcacccgt

SEQ ID NO: 145048 - DNA, 30 bp, Artificial Sequence
  Synthetic oligonucleotide
agaaggtttacggctactagcttaccccgt

SEQ ID NO: 145049 - DNA, 30 bp, Artificial Sequence
  Synthetic oligonucleotide
cgagactcttataaagaaggtaaggcccgt

SEQ ID NO: 145050 - DNA, 30 bp, Artificial Sequence
  Synthetic oligonucleotide
atgagttcctattaccgggcggaatcccgt

SEQ ID NO: 145051 - DNA, 30 bp, Artificial Sequence
  Synthetic oligonucleotide
actaggtgtagtctggtcagtggatcccgt

SEQ ID NO: 145052 - DNA, 30 bp, Artificial Sequence
  Synthetic oligonucleotide
cacaatgggttaaactcgcttaccagccgt

SEQ ID NO: 145053 - DNA, 30 bp, Artificial Sequence
  Synthetic oligonucleotide
cagtactctgccatggggcaaatgagccgt

SEQ ID NO: 145054 - DNA, 30 bp, Artificial Sequence
  Synthetic oligonucleotide
tggctggtaacgcctcgattcatgggccgt

SEQ ID NO: 145055 - DNA, 30 bp, Artificial Sequence
  Synthetic oligonucleotide
gaaggtgtccgagggttacggacatgccgt

SEQ ID NO: 145056 - DNA, 30 bp, Artificial Sequence
  Synthetic oligonucleotide
taaccgcatcttgcgaagacacgttgccgt

SEQ ID NO: 145057 - DNA, 30 bp, Artificial Sequence
  Synthetic oligonucleotide
cggttatattgtgagcgaatggtttgccgt

SEQ ID NO: 145058 - DNA, 30 bp, Artificial Sequence
  Synthetic oligonucleotide
accagctgcagagagaatcgtgttatccgt

SEQ ID NO: 145059 - DNA, 30 bp, Artificial Sequence
  Synthetic oligonucleotide
acgaagaacaaattacggtatacactccgt

SEQ ID NO: 145060 - DNA, 30 bp, Artificial Sequence
  Synthetic oligonucleotide
gagaagcggactggaaggcccgtactccgt

SEQ ID NO: 145061 - DNA, 30 bp, Artificial Sequence
  Synthetic oligonucleotide
tgagcgacctgccatattttcgtcctccgt

SEQ ID NO: 145062 - DNA, 30 bp, Artificial Sequence
  Synthetic oligonucleotide
atcgaatgccgacgtcaaggatttctccgt

SEQ ID NO: 145063 - DNA, 30 bp, Artificial Sequence
  Synthetic oligonucleotide
gtacagagaaaaataaccgagctggtccgt

SEQ ID NO: 145064 - DNA, 30 bp, Artificial Sequence
  Synthetic oligonucleotide
ggtgtgtgcctgatccaataggctgtccgt

SEQ ID NO: 145065 - DNA, 30 bp, Artificial Sequence
  Synthetic oligonucleotide
gagtaaaggatcacagtcgacctgttccgt

SEQ ID NO: 145066 - DNA, 30 bp, Artificial Sequence
  Synthetic oligonucleotide
aggggttaagctcgagtcttgctggagcgt

SEQ ID NO: 145067 - DNA, 30 bp, Artificial Sequence
  Synthetic oligonucleotide
gcatactaacaccaaagctttagtgagcgt

SEQ ID NO: 145068 - DNA, 30 bp, Artificial Sequence
  Synthetic oligonucleotide
agctgcatggggtaaggtaatatctagcgt

SEQ ID NO: 145069 - DNA, 30 bp, Artificial Sequence
  Synthetic oligonucleotide
cgctcccgtaatgacatcacagcgccgcgt

SEQ ID NO: 145070 - DNA, 30 bp, Artificial Sequence
  Synthetic oligonucleotide
cacgtgtggattctggagtcatccgcgcgt

SEQ ID NO: 145071 - DNA, 30 bp, Artificial Sequence
  Synthetic oligonucleotide
actaatcatcccagctcatcattatcgcgt

SEQ ID NO: 145072 - DNA, 30 bp, Artificial Sequence
  Synthetic oligonucleotide
gatggggtttagcgaagaggatcaaggcgt

SEQ ID NO: 145073 - DNA, 30 bp, Artificial Sequence
  Synthetic oligonucleotide
taaccatgcctatacggccatagaaggcgt

SEQ ID NO: 145074 - DNA, 30 bp, Artificial Sequence
  Synthetic oligonucleotide
aatgcgataaatagagaataacgaaggcgt

SEQ ID NO: 145075 - DNA, 30 bp, Artificial Sequence
  Synthetic oligonucleotide
acataacttgtaggatagctggtaaggcgt

SEQ ID NO: 145076 - DNA, 30 bp, Artificial Sequence
  Synthetic oligonucleotide
ggtgtatgttcaaacggcagtaacaggcgt

SEQ ID NO: 145077 - DNA, 30 bp, Artificial Sequence
  Synthetic oligonucleotide
cgcacccgaactaggtaagtagcgcggcgt

SEQ ID NO: 145078 - DNA, 30 bp, Artificial Sequence
  Synthetic oligonucleotide
ttctcggccatgcgaagccatatgcggcgt

SEQ ID NO: 145079 - DNA, 30 bp, Artificial Sequence
  Synthetic oligonucleotide
acgggggattagagccagttacgctggcgt

SEQ ID NO: 145080 - DNA, 30 bp, Artificial Sequence
  Synthetic oligonucleotide
gacatccccagtggtagaaggatgtggcgt

SEQ ID NO: 145081 - DNA, 30 bp, Artificial Sequence
  Synthetic oligonucleotide
aacactaacttcgacgtgaggatgatgcgt

SEQ ID NO: 145082 - DNA, 30 bp, Artificial Sequence
  Synthetic oligonucleotide
gggctgtacgcttagctgtgacctatgcgt

SEQ ID NO: 145083 - DNA, 30 bp, Artificial Sequence
  Synthetic oligonucleotide
agttgagaaatgttgcgttaactgctgcgt

SEQ ID NO: 145084 - DNA, 30 bp, Artificial Sequence
  Synthetic oligonucleotide
gcacgtgtgttagagggagtcgccttgcgt

SEQ ID NO: 145085 - DNA, 30 bp, Artificial Sequence
  Synthetic oligonucleotide
gttgagcattaaatacgtgattagttgcgt

SEQ ID NO: 145086 - DNA, 30 bp, Artificial Sequence
  Synthetic oligonucleotide
gaggtatagcgtccctgatcgcggttgcgt

SEQ ID NO: 145087 - DNA, 30 bp, Artificial Sequence
  Synthetic oligonucleotide
aagagcgagcatatcttttgctcaaatcgt

SEQ ID NO: 145088 - DNA, 30 bp, Artificial Sequence
  Synthetic oligonucleotide
gtcaatactcataaaaactctacgaatcgt

SEQ ID NO: 145089 - DNA, 30 bp, Artificial Sequence
  Synthetic oligonucleotide
ctacgtggatatactaacaaacggaatcgt

SEQ ID NO: 145090 - DNA, 30 bp, Artificial Sequence
  Synthetic oligonucleotide
ctgcggggcgacaacaatactgttaatcgt

SEQ ID NO: 145091 - DNA, 30 bp, Artificial Sequence
  Synthetic oligonucleotide
aggaattcgcacaacagagggacacatcgt

SEQ ID NO: 145092 - DNA, 30 bp, Artificial Sequence
  Synthetic oligonucleotide
gaaaagtgaaggcatgtacacctgcatcgt

SEQ ID NO: 145093 - DNA, 30 bp, Artificial Sequence
  Synthetic oligonucleotide
ttgtgaggctagggtgttaatcatcatcgt

SEQ ID NO: 145094 - DNA, 30 bp, Artificial Sequence
  Synthetic oligonucleotide
catgggcgaaagactagacgtcatcatcgt

SEQ ID NO: 145095 - DNA, 28 bp, Artificial Sequence
  Synthetic oligonucleotide
tcaaccgagttaaatcaccgaagatcgt

SEQ ID NO: 145096 - DNA, 30 bp, Artificial Sequence
  Synthetic oligonucleotide
tagtgccgtttatgaaagatcatagatcgt

SEQ ID NO: 145097 - DNA, 30 bp, Artificial Sequence
  Synthetic oligonucleotide
gcagaggatatatgtagggcattagatcgt

SEQ ID NO: 145098 - DNA, 30 bp, Artificial Sequence
  Synthetic oligonucleotide
agaccggcgtacggttgagggggcgatcgt

SEQ ID NO: 145099 - DNA, 30 bp, Artificial Sequence
  Synthetic oligonucleotide
ttaatgtgagggtcgtgtgttatggatcgt

SEQ ID NO: 145100 - DNA, 30 bp, Artificial Sequence
  Synthetic oligonucleotide
ggtgaatttaacgcacaatggtatgatcgt

SEQ ID NO: 145101 - DNA, 30 bp, Artificial Sequence
  Synthetic oligonucleotide
cgaacatcgtctaggtatttacgttatcgt

SEQ ID NO: 145102 - DNA, 30 bp, Artificial Sequence
  Synthetic oligonucleotide
ttgtcagcctaataatcaggacaaactcgt

SEQ ID NO: 145103 - DNA, 30 bp, Artificial Sequence
  Synthetic oligonucleotide
tctgcacaaaacactctaacgacaactcgt

SEQ ID NO: 145104 - DNA, 30 bp, Artificial Sequence
  Synthetic oligonucleotide
actgtgcaaactgtagtgggtaacactcgt

SEQ ID NO: 145105 - DNA, 30 bp, Artificial Sequence
  Synthetic oligonucleotide
gcgttggtgtaataacgttcacccactcgt

SEQ ID NO: 145106 - DNA, 30 bp, Artificial Sequence
  Synthetic oligonucleotide
aggaattatccccctcaaggacggactcgt

SEQ ID NO: 145107 - DNA, 30 bp, Artificial Sequence
  Synthetic oligonucleotide
gcgtgaatttagatttgtgggatacctcgt

SEQ ID NO: 145108 - DNA, 30 bp, Artificial Sequence
  Synthetic oligonucleotide
ggaacaaatgcggacgattcgttccctcgt

SEQ ID NO: 145109 - DNA, 30 bp, Artificial Sequence
  Synthetic oligonucleotide
taccgtgagggaaagccccagctagctcgt

SEQ ID NO: 145110 - DNA, 30 bp, Artificial Sequence
  Synthetic oligonucleotide
tgaagatatagccccgcccgggaggctcgt

SEQ ID NO: 145111 - DNA, 30 bp, Artificial Sequence
  Synthetic oligonucleotide
tctctaccgcgagttgactcccaatctcgt

SEQ ID NO: 145112 - DNA, 30 bp, Artificial Sequence
  Synthetic oligonucleotide
tccgatagtggtctccaaagcgtaagtcgt

SEQ ID NO: 145113 - DNA, 30 bp, Artificial Sequence
  Synthetic oligonucleotide
gggcgcagttagccgaatgccgatagtcgt

SEQ ID NO: 145114 - DNA, 30 bp, Artificial Sequence
  Synthetic oligonucleotide
gatcccgacaaattaactttagaacgtcgt

SEQ ID NO: 145115 - DNA, 30 bp, Artificial Sequence
  Synthetic oligonucleotide
gggcacaggattagttcagtcatacgtcgt

SEQ ID NO: 145116 - DNA, 30 bp, Artificial Sequence
  Synthetic oligonucleotide
gccttgaagaattcagaaactgtacgtcgt

SEQ ID NO: 145117 - DNA, 31 bp, Artificial Sequence
  Synthetic oligonucleotide
aggttggggagggtaaagtggcggtcgtcgt

SEQ ID NO: 145118 - DNA, 30 bp, Artificial Sequence
  Synthetic oligonucleotide
ccaagttggatcctcaatacacacggtcgt

SEQ ID NO: 145119 - DNA, 30 bp, Artificial Sequence
  Synthetic oligonucleotide
tgatcgcgcgtgcgtaatcaatcctgtcgt

SEQ ID NO: 145120 - DNA, 30 bp, Artificial Sequence
  Synthetic oligonucleotide
atacgttaggtatgccattgaaggtgtcgt

SEQ ID NO: 145121 - DNA, 30 bp, Artificial Sequence
  Synthetic oligonucleotide
gcgaagtcaaatccgatgtatctcattcgt

SEQ ID NO: 145122 - DNA, 30 bp, Artificial Sequence
  Synthetic oligonucleotide
gtcccagggaagggaaatagagggattcgt

SEQ ID NO: 145123 - DNA, 30 bp, Artificial Sequence
  Synthetic oligonucleotide
taggaacgtcgcattaggaacgcgcttcgt

SEQ ID NO: 145124 - DNA, 30 bp, Artificial Sequence
  Synthetic oligonucleotide
tccgtgggccatgacattcgccggcttcgt

SEQ ID NO: 145125 - DNA, 30 bp, Artificial Sequence
  Synthetic oligonucleotide
cgttcgtcatttttaagcatacgagttcgt

SEQ ID NO: 145126 - DNA, 30 bp, Artificial Sequence
  Synthetic oligonucleotide
gctagttcacgtctacttcaccgcgttcgt

SEQ ID NO: 145127 - DNA, 30 bp, Artificial Sequence
  Synthetic oligonucleotide
taacgctacaaacgtcaagtccaggttcgt

SEQ ID NO: 145128 - DNA, 30 bp, Artificial Sequence
  Synthetic oligonucleotide
gctggcatagtgatcttgggtagggttcgt

SEQ ID NO: 145129 - DNA, 30 bp, Artificial Sequence
  Synthetic oligonucleotide
gcgtagctacctagattgtgctgctttcgt

SEQ ID NO: 145130 - DNA, 30 bp, Artificial Sequence
  Synthetic oligonucleotide
ccatgggaagcgatattcgctctgtttcgt

SEQ ID NO: 145131 - DNA, 30 bp, Artificial Sequence
  Synthetic oligonucleotide
gtgctcgaactcgtttagatcggttttcgt

SEQ ID NO: 145132 - DNA, 30 bp, Artificial Sequence
  Synthetic oligonucleotide
gatcgtagcagtcaggccgtcggaaaaggt

SEQ ID NO: 145133 - DNA, 30 bp, Artificial Sequence
  Synthetic oligonucleotide
ggcgtcaatggtttcaggagtaccaaaggt

SEQ ID NO: 145134 - DNA, 30 bp, Artificial Sequence
  Synthetic oligonucleotide
ccatgcaagcccaagacatggcgcaaaggt

SEQ ID NO: 145135 - DNA, 30 bp, Artificial Sequence
  Synthetic oligonucleotide
ggataaataaaagtcgagcgacagaaaggt

SEQ ID NO: 145136 - DNA, 30 bp, Artificial Sequence
  Synthetic oligonucleotide
tcagttggaaagtgataagattgtaaaggt

SEQ ID NO: 145137 - DNA, 30 bp, Artificial Sequence
  Synthetic oligonucleotide
agcgaaacatatgttgaaggtcaacaaggt

SEQ ID NO: 145138 - DNA, 30 bp, Artificial Sequence
  Synthetic oligonucleotide
tatcaccagactcgagagaacaaccaaggt

SEQ ID NO: 145139 - DNA, 30 bp, Artificial Sequence
  Synthetic oligonucleotide
aagagacaagatgctagttcgtgccaaggt

SEQ ID NO: 145140 - DNA, 30 bp, Artificial Sequence
  Synthetic oligonucleotide
aagcacgctttccccttccaaaagcaaggt

SEQ ID NO: 145141 - DNA, 30 bp, Artificial Sequence
  Synthetic oligonucleotide
ctcaacgattatctaacaagccagcaaggt

SEQ ID NO: 145142 - DNA, 30 bp, Artificial Sequence
  Synthetic oligonucleotide
tgcgtcggcactaccagagatagtcaaggt

SEQ ID NO: 145143 - DNA, 30 bp, Artificial Sequence
  Synthetic oligonucleotide
taacgaggaggatccatggtacgtcaaggt

SEQ ID NO: 145144 - DNA, 30 bp, Artificial Sequence
  Synthetic oligonucleotide
tcgatctattctaagaacaagatagaaggt

SEQ ID NO: 145145 - DNA, 30 bp, Artificial Sequence
  Synthetic oligonucleotide
cacgacttgataccatcacatatcgaaggt

SEQ ID NO: 145146 - DNA, 30 bp, Artificial Sequence
  Synthetic oligonucleotide
agactccaaggttcgagttagtgggaaggt

SEQ ID NO: 145147 - DNA, 30 bp, Artificial Sequence
  Synthetic oligonucleotide
gtaaaggactacctgagagcattggaaggt

SEQ ID NO: 145148 - DNA, 30 bp, Artificial Sequence
  Synthetic oligonucleotide
taatgaggtcaagcatccgatgaataaggt

SEQ ID NO: 145149 - DNA, 30 bp, Artificial Sequence
  Synthetic oligonucleotide
agttgtggtgcctacgttgggtcctaaggt

SEQ ID NO: 145150 - DNA, 30 bp, Artificial Sequence
  Synthetic oligonucleotide
taggtgactaacaacaaaatcaagtaaggt

SEQ ID NO: 145151 - DNA, 30 bp, Artificial Sequence
  Synthetic oligonucleotide
cggaagaggtcagtccataagccgtaaggt

SEQ ID NO: 145152 - DNA, 30 bp, Artificial Sequence
  Synthetic oligonucleotide
acatgaccaaacacgcctaactattaaggt

SEQ ID NO: 145153 - DNA, 30 bp, Artificial Sequence
  Synthetic oligonucleotide
tgtgacttacggaaaaaaagggtttaaggt

SEQ ID NO: 145154 - DNA, 30 bp, Artificial Sequence
  Synthetic oligonucleotide
tgattccgggtcgaagtgtgaaaaacaggt

SEQ ID NO: 145155 - DNA, 30 bp, Artificial Sequence
  Synthetic oligonucleotide
ggcgaggtgtgccgcatgccggaaacaggt

SEQ ID NO: 145156 - DNA, 30 bp, Artificial Sequence
  Synthetic oligonucleotide
gtccatggatagggtctcatccacacaggt

SEQ ID NO: 145157 - DNA, 30 bp, Artificial Sequence
  Synthetic oligonucleotide
gagccttatcccgctgcataatacacaggt

SEQ ID NO: 145158 - DNA, 30 bp, Artificial Sequence
  Synthetic oligonucleotide
ctatcaggacttatgtaagcttcgacaggt

SEQ ID NO: 145159 - DNA, 30 bp, Artificial Sequence
  Synthetic oligonucleotide
atctaggctcacatgaggagagaaccaggt

SEQ ID NO: 145160 - DNA, 30 bp, Artificial Sequence
  Synthetic oligonucleotide
ggatagggcaatcaccgtgctccaccaggt

SEQ ID NO: 145161 - DNA, 30 bp, Artificial Sequence
  Synthetic oligonucleotide
atggcagggacccgaactgaggtaccaggt

SEQ ID NO: 145162 - DNA, 30 bp, Artificial Sequence
  Synthetic oligonucleotide
gcccatctaagataaaaacgacacccaggt

SEQ ID NO: 145163 - DNA, 29 bp, Artificial Sequence
  Synthetic oligonucleotide
tcggaatccccagcatctattcgccaggt

SEQ ID NO: 145164 - DNA, 30 bp, Artificial Sequence
  Synthetic oligonucleotide
gacctacatatcaagccatcaaaagcaggt

SEQ ID NO: 145165 - DNA, 30 bp, Artificial Sequence
  Synthetic oligonucleotide
gaacaggtaggctgctctttcccggcaggt

SEQ ID NO: 145166 - DNA, 30 bp, Artificial Sequence
  Synthetic oligonucleotide
tgaaaccgggcgagtgtcatcactgcaggt

SEQ ID NO: 145167 - DNA, 30 bp, Artificial Sequence
  Synthetic oligonucleotide
gtgcaccatcatgctttggccagttcaggt

SEQ ID NO: 145168 - DNA, 30 bp, Artificial Sequence
  Synthetic oligonucleotide
gtaacctggtaagcgaaatgtaaaagaggt

SEQ ID NO: 145169 - DNA, 30 bp, Artificial Sequence
  Synthetic oligonucleotide
aaggtttagatacgctaggtgttaagaggt

SEQ ID NO: 145170 - DNA, 30 bp, Artificial Sequence
  Synthetic oligonucleotide
taaccaaaagaaatccataaccgcagaggt

SEQ ID NO: 145171 - DNA, 30 bp, Artificial Sequence
  Synthetic oligonucleotide
tagaaagtgtaattgctagatacgagaggt

SEQ ID NO: 145172 - DNA, 30 bp, Artificial Sequence
  Synthetic oligonucleotide
agttgaccggtggtgaaggtctctagaggt

SEQ ID NO: 145173 - DNA, 30 bp, Artificial Sequence
  Synthetic oligonucleotide
cgctgttcacaaaccgcctaaattagaggt

SEQ ID NO: 145174 - DNA, 30 bp, Artificial Sequence
  Synthetic oligonucleotide
atttgagggtatcttggagttggccgaggt

SEQ ID NO: 145175 - DNA, 30 bp, Artificial Sequence
  Synthetic oligonucleotide
ggcgtctcaaaataatcattgtatcgaggt

SEQ ID NO: 145176 - DNA, 30 bp, Artificial Sequence
  Synthetic oligonucleotide
aattgcagttaggtaatggcgattcgaggt

SEQ ID NO: 145177 - DNA, 30 bp, Artificial Sequence
  Synthetic oligonucleotide
tttggcaaaatggcatagaatgccggaggt

SEQ ID NO: 145178 - DNA, 30 bp, Artificial Sequence
  Synthetic oligonucleotide
gaaggccatcggcccaatgacattggaggt

SEQ ID NO: 145179 - DNA, 30 bp, Artificial Sequence
  Synthetic oligonucleotide
gggatcccgttagaccatctactgtgaggt

SEQ ID NO: 145180 - DNA, 30 bp, Artificial Sequence
  Synthetic oligonucleotide
ccattggctgtaacataatctccttgaggt

SEQ ID NO: 145181 - DNA, 30 bp, Artificial Sequence
  Synthetic oligonucleotide
actccaggctatagatcatctacgataggt

SEQ ID NO: 145182 - DNA, 30 bp, Artificial Sequence
  Synthetic oligonucleotide
aaggaatcctcatttgggacttgtataggt

SEQ ID NO: 145183 - DNA, 30 bp, Artificial Sequence
  Synthetic oligonucleotide
gtggaattaagacttgcccgcaaactaggt

SEQ ID NO: 145184 - DNA, 30 bp, Artificial Sequence
  Synthetic oligonucleotide
cttgaacccgagggagatatcaagctaggt

SEQ ID NO: 145185 - DNA, 30 bp, Artificial Sequence
  Synthetic oligonucleotide
cgcccaaggttaaatggggtaccagtaggt

SEQ ID NO: 145186 - DNA, 30 bp, Artificial Sequence
  Synthetic oligonucleotide
gtataagctccattgagcggaactgtaggt

SEQ ID NO: 145187 - DNA, 30 bp, Artificial Sequence
  Synthetic oligonucleotide
gtacgcgcggtgctgctacgacggttaggt

SEQ ID NO: 145188 - DNA, 30 bp, Artificial Sequence
  Synthetic oligonucleotide
ggtctcgcgtggcaaaacggcagtttaggt

SEQ ID NO: 145189 - DNA, 30 bp, Artificial Sequence
  Synthetic oligonucleotide
tgatgtgacgtcccataaaggatccacggt

SEQ ID NO: 145190 - DNA, 30 bp, Artificial Sequence
  Synthetic oligonucleotide
ttagatgtgtagagcagcgcgatgcacggt

SEQ ID NO: 145191 - DNA, 30 bp, Artificial Sequence
  Synthetic oligonucleotide
aaaacggtacacgatgaggttgtgcacggt

SEQ ID NO: 145192 - DNA, 30 bp, Artificial Sequence
  Synthetic oligonucleotide
cggtaaatgtctcatgtccaagtggacggt

SEQ ID NO: 145193 - DNA, 30 bp, Artificial Sequence
  Synthetic oligonucleotide
gaagagatcatgtagataagtagtgacggt

SEQ ID NO: 145194 - DNA, 30 bp, Artificial Sequence
  Synthetic oligonucleotide
acattaacggctcaaacataaccatacggt

SEQ ID NO: 145195 - DNA, 30 bp, Artificial Sequence
  Synthetic oligonucleotide
atcgtaccatgtcaaagttggtgatacggt

SEQ ID NO: 145196 - DNA, 30 bp, Artificial Sequence
  Synthetic oligonucleotide
gaacgggtaaactgttcacctaactacggt

SEQ ID NO: 145197 - DNA, 30 bp, Artificial Sequence
  Synthetic oligonucleotide
agagaagaatggcatccctatgggtacggt

SEQ ID NO: 145198 - DNA, 30 bp, Artificial Sequence
  Synthetic oligonucleotide
cgaaagagcttattctctgttttatccggt

SEQ ID NO: 145199 - DNA, 30 bp, Artificial Sequence
  Synthetic oligonucleotide
ccaccgaggtcactcgagtaacaaagcggt

SEQ ID NO: 145200 - DNA, 30 bp, Artificial Sequence
  Synthetic oligonucleotide
cggtagtcgttgaggatcaataaacgcggt

SEQ ID NO: 145201 - DNA, 30 bp, Artificial Sequence
  Synthetic oligonucleotide
ccgcaggcatgtggaagcgtaagccgcggt

SEQ ID NO: 145202 - DNA, 30 bp, Artificial Sequence
  Synthetic oligonucleotide
cggtcacacacttgaatgcttacaggcggt

SEQ ID NO: 145203 - DNA, 30 bp, Artificial Sequence
  Synthetic oligonucleotide
cgcacctgtaggatgagatagcgaggcggt

SEQ ID NO: 145204 - DNA, 30 bp, Artificial Sequence
  Synthetic oligonucleotide
tactaaagcgtatgcattaataagggcggt

SEQ ID NO: 145205 - DNA, 30 bp, Artificial Sequence
  Synthetic oligonucleotide
aagggcgagaaaacgggcgtatcgggcggt

SEQ ID NO: 145206 - DNA, 30 bp, Artificial Sequence
  Synthetic oligonucleotide
tcaaaattcgtggacaacgaggaaatcggt

SEQ ID NO: 145207 - DNA, 30 bp, Artificial Sequence
  Synthetic oligonucleotide
gagttaacaatagccatcaaatacatcggt

SEQ ID NO: 145208 - DNA, 30 bp, Artificial Sequence
  Synthetic oligonucleotide
attgttgaaatggacagtcatctactcggt

SEQ ID NO: 145209 - DNA, 30 bp, Artificial Sequence
  Synthetic oligonucleotide
gaggtcgatgatgctacaggagtactcggt

SEQ ID NO: 145210 - DNA, 30 bp, Artificial Sequence
  Synthetic oligonucleotide
gtactactctaaatcacgggcggcctcggt

SEQ ID NO: 145211 - DNA, 30 bp, Artificial Sequence
  Synthetic oligonucleotide
ttggcaaaattcgctcttatactcctcggt

SEQ ID NO: 145212 - DNA, 30 bp, Artificial Sequence
  Synthetic oligonucleotide
ctctaattgcatctggcgggcagtctcggt

SEQ ID NO: 145213 - DNA, 30 bp, Artificial Sequence
  Synthetic oligonucleotide
agccgctgggtgatggaaaaagaggtcggt

SEQ ID NO: 145214 - DNA, 30 bp, Artificial Sequence
  Synthetic oligonucleotide
atgagagggatattgtatgttggtgtcggt

SEQ ID NO: 145215 - DNA, 30 bp, Artificial Sequence
  Synthetic oligonucleotide
tccaggctttatggtaccgtacagttcggt

SEQ ID NO: 145216 - DNA, 30 bp, Artificial Sequence
  Synthetic oligonucleotide
ctgattgggcaacaagtcccaacgttcggt

SEQ ID NO: 145217 - DNA, 30 bp, Artificial Sequence
  Synthetic oligonucleotide
tctaccgacagcattttaagtcggttcggt

SEQ ID NO: 145218 - DNA, 30 bp, Artificial Sequence
  Synthetic oligonucleotide
tgatgatctgcgtttcccacaattttcggt

SEQ ID NO: 145219 - DNA, 30 bp, Artificial Sequence
  Synthetic oligonucleotide
tgggcacccgaccacctgttctttttcggt

SEQ ID NO: 145220 - DNA, 30 bp, Artificial Sequence
  Synthetic oligonucleotide
ctgtgaatcgctcgaatgttaacaaagggt

SEQ ID NO: 145221 - DNA, 30 bp, Artificial Sequence
  Synthetic oligonucleotide
gtggtggtgaaggaaactagcgtaaagggt

SEQ ID NO: 145222 - DNA, 30 bp, Artificial Sequence
  Synthetic oligonucleotide
agatgcgatctacagataagaattaagggt

SEQ ID NO: 145223 - DNA, 30 bp, Artificial Sequence
  Synthetic oligonucleotide
cgttgttgtagcggactataatcacagggt

SEQ ID NO: 145224 - DNA, 30 bp, Artificial Sequence
  Synthetic oligonucleotide
tccgatcgagaagtagactttagacagggt

SEQ ID NO: 145225 - DNA, 30 bp, Artificial Sequence
  Synthetic oligonucleotide
ggtcgagttggatacattatagcagagggt

SEQ ID NO: 145226 - DNA, 30 bp, Artificial Sequence
  Synthetic oligonucleotide
ggaaattaatgaggaagcttcaacgagggt

SEQ ID NO: 145227 - DNA, 30 bp, Artificial Sequence
  Synthetic oligonucleotide
accataagttggcgagtctaaggcgagggt

SEQ ID NO: 145228 - DNA, 30 bp, Artificial Sequence
  Synthetic oligonucleotide
gacgggaattcctcgagggagcaggagggt

SEQ ID NO: 145229 - DNA, 30 bp, Artificial Sequence
  Synthetic oligonucleotide
gtggtggtacatctgttgtagcatgagggt

SEQ ID NO: 145230 - DNA, 30 bp, Artificial Sequence
  Synthetic oligonucleotide
gggcctagtacctgaggatgccaatagggt

SEQ ID NO: 145231 - DNA, 30 bp, Artificial Sequence
  Synthetic oligonucleotide
ggggaggaaagcgaactgccttgttagggt

SEQ ID NO: 145232 - DNA, 30 bp, Artificial Sequence
  Synthetic oligonucleotide
ctttcgcgacctaacatttgggaaacgggt

SEQ ID NO: 145233 - DNA, 30 bp, Artificial Sequence
  Synthetic oligonucleotide
gggtgcatgaggacatttcctccaacgggt

SEQ ID NO: 145234 - DNA, 30 bp, Artificial Sequence
  Synthetic oligonucleotide
ctacataatggcaggaatccaaaaccgggt

SEQ ID NO: 145235 - DNA, 30 bp, Artificial Sequence
  Synthetic oligonucleotide
gcgcttgggcagagtgtctttaagccgggt

SEQ ID NO: 145236 - DNA, 30 bp, Artificial Sequence
  Synthetic oligonucleotide
atggctgtagttatccgaggaagtccgggt

SEQ ID NO: 145237 - DNA, 30 bp, Artificial Sequence
  Synthetic oligonucleotide
gggacgcgtgaacaaacggtcactgcgggt

SEQ ID NO: 145238 - DNA, 30 bp, Artificial Sequence
  Synthetic oligonucleotide
gattgggtgaaaactattcgctcatcgggt

SEQ ID NO: 145239 - DNA, 30 bp, Artificial Sequence
  Synthetic oligonucleotide
cagttctacttgggaaaagtctactcgggt

SEQ ID NO: 145240 - DNA, 30 bp, Artificial Sequence
  Synthetic oligonucleotide
acgtctgcatacagcgatgagacgtcgggt

SEQ ID NO: 145241 - DNA, 30 bp, Artificial Sequence
  Synthetic oligonucleotide
gtgtgtgagggttatcacggctcgtcgggt

SEQ ID NO: 145242 - DNA, 30 bp, Artificial Sequence
  Synthetic oligonucleotide
tggcgctcaaacgtcaacattcaaaggggt

SEQ ID NO: 145243 - DNA, 30 bp, Artificial Sequence
  Synthetic oligonucleotide
gctaaagaatttcaggtcgagctcaggggt

SEQ ID NO: 145244 - DNA, 30 bp, Artificial Sequence
  Synthetic oligonucleotide
ttcacgtctaaaggtttgcccgagaggggt

SEQ ID NO: 145245 - DNA, 30 bp, Artificial Sequence
  Synthetic oligonucleotide
aatgctgcattagtagtaggtattaggggt

SEQ ID NO: 145246 - DNA, 30 bp, Artificial Sequence
  Synthetic oligonucleotide
cagttcgagtttagaaagtaaaagcggggt

SEQ ID NO: 145247 - DNA, 30 bp, Artificial Sequence
  Synthetic oligonucleotide
taacaagaaggctaaatcgtaccgcggggt

SEQ ID NO: 145248 - DNA, 30 bp, Artificial Sequence
  Synthetic oligonucleotide
tccaaaaagtgtcaaaggaagcaagggggt

SEQ ID NO: 145249 - DNA, 30 bp, Artificial Sequence
  Synthetic oligonucleotide
cgacttaggaactcaagcgttcatgggggt

SEQ ID NO: 145250 - DNA, 30 bp, Artificial Sequence
  Synthetic oligonucleotide
ccaatcgccagcgaatacaaagctgggggt

SEQ ID NO: 145251 - DNA, 30 bp, Artificial Sequence
  Synthetic oligonucleotide
tcagagccttgcttaacttcggagtggggt

SEQ ID NO: 145252 - DNA, 30 bp, Artificial Sequence
  Synthetic oligonucleotide
cgtatacggcaagcacttctggagtggggt

SEQ ID NO: 145253 - DNA, 30 bp, Artificial Sequence
  Synthetic oligonucleotide
taagacccacgtacatatggacattggggt

SEQ ID NO: 145254 - DNA, 30 bp, Artificial Sequence
  Synthetic oligonucleotide
gggtgtcgataactggctgtcacaatgggt

SEQ ID NO: 145255 - DNA, 30 bp, Artificial Sequence
  Synthetic oligonucleotide
aggctgctcgaagaagaatatagaatgggt

SEQ ID NO: 145256 - DNA, 30 bp, Artificial Sequence
  Synthetic oligonucleotide
agcaaaaacaacaaatttttatacatgggt

SEQ ID NO: 145257 - DNA, 30 bp, Artificial Sequence
  Synthetic oligonucleotide
aagcaccacagaccacaagggcgagtgggt

SEQ ID NO: 145258 - DNA, 30 bp, Artificial Sequence
  Synthetic oligonucleotide
gggtatatgctacgcgaacgattagtgggt

SEQ ID NO: 145259 - DNA, 30 bp, Artificial Sequence
  Synthetic oligonucleotide
acgagaatatataagactattatggtgggt

SEQ ID NO: 145260 - DNA, 30 bp, Artificial Sequence
  Synthetic oligonucleotide
tccgacaagctgatagactacattgtgggt

SEQ ID NO: 145261 - DNA, 30 bp, Artificial Sequence
  Synthetic oligonucleotide
aggccgtaccacaagaacggcacattgggt

SEQ ID NO: 145262 - DNA, 30 bp, Artificial Sequence
  Synthetic oligonucleotide
cgtcactgagactgatcaccaggattgggt

SEQ ID NO: 145263 - DNA, 30 bp, Artificial Sequence
  Synthetic oligonucleotide
gcctcgttacgtagtagggcgggattgggt

SEQ ID NO: 145264 - DNA, 30 bp, Artificial Sequence
  Synthetic oligonucleotide
tccagtaatcttcaaaagggatccttgggt

SEQ ID NO: 145265 - DNA, 30 bp, Artificial Sequence
  Synthetic oligonucleotide
tacatgttacgggaatgaacaaggttgggt

SEQ ID NO: 145266 - DNA, 30 bp, Artificial Sequence
  Synthetic oligonucleotide
tgacaatagaggcattttaggttgaatggt

SEQ ID NO: 145267 - DNA, 30 bp, Artificial Sequence
  Synthetic oligonucleotide
tgcaggggctaggggcgcgctgctcatggt

SEQ ID NO: 145268 - DNA, 30 bp, Artificial Sequence
  Synthetic oligonucleotide
accaggttgaaaccataaaaacgagatggt

SEQ ID NO: 145269 - DNA, 30 bp, Artificial Sequence
  Synthetic oligonucleotide
gctaggctcgagaaccaaaattgtgatggt

SEQ ID NO: 145270 - DNA, 30 bp, Artificial Sequence
  Synthetic oligonucleotide
gtaacgttgagccgtggacagttaactggt

SEQ ID NO: 145271 - DNA, 30 bp, Artificial Sequence
  Synthetic oligonucleotide
acaaaataattacccgtaagacctactggt

SEQ ID NO: 145272 - DNA, 30 bp, Artificial Sequence
  Synthetic oligonucleotide
aacatgtcatatgtactgtatgatcctggt

SEQ ID NO: 145273 - DNA, 30 bp, Artificial Sequence
  Synthetic oligonucleotide
gtgtctggtatagtccaagatatcgctggt

SEQ ID NO: 145274 - DNA, 29 bp, Artificial Sequence
  Synthetic oligonucleotide
tataccattggagcgtgagagtcgctggt

SEQ ID NO: 145275 - DNA, 30 bp, Artificial Sequence
  Synthetic oligonucleotide
caaacagcagatatccattacaaggctggt

SEQ ID NO: 145276 - DNA, 30 bp, Artificial Sequence
  Synthetic oligonucleotide
ggacgaatagggaacggaagaggggctggt

SEQ ID NO: 145277 - DNA, 30 bp, Artificial Sequence
  Synthetic oligonucleotide
tcaaagcgtacagcaaaccaaaatgctggt

SEQ ID NO: 145278 - DNA, 30 bp, Artificial Sequence
  Synthetic oligonucleotide
ctatcgcggtttgtagagaatctaagtggt

SEQ ID NO: 145279 - DNA, 30 bp, Artificial Sequence
  Synthetic oligonucleotide
tgggtacggacaattgaaggtctaagtggt

SEQ ID NO: 145280 - DNA, 30 bp, Artificial Sequence
  Synthetic oligonucleotide
cgctgtcaaagaacttggagcaggagtggt

SEQ ID NO: 145281 - DNA, 30 bp, Artificial Sequence
  Synthetic oligonucleotide
gcggttgcttggcctaccggctatcgtggt

SEQ ID NO: 145282 - DNA, 30 bp, Artificial Sequence
  Synthetic oligonucleotide
agggggtagtgagtgcaagctcctcgtggt

SEQ ID NO: 145283 - DNA, 30 bp, Artificial Sequence
  Synthetic oligonucleotide
gaggtcgtaacgaggaacggacttcgtggt

SEQ ID NO: 145284 - DNA, 30 bp, Artificial Sequence
  Synthetic oligonucleotide
tgacggcctactcggtaggatacaggtggt

SEQ ID NO: 145285 - DNA, 30 bp, Artificial Sequence
  Synthetic oligonucleotide
cgatgtgtcttgtgtgtcatattgggtggt

SEQ ID NO: 145286 - DNA, 30 bp, Artificial Sequence
  Synthetic oligonucleotide
ccggcagctagccattaaaagcactgtggt

SEQ ID NO: 145287 - DNA, 30 bp, Artificial Sequence
  Synthetic oligonucleotide
aacagacaggccgtgtattcaaggtgtggt

SEQ ID NO: 145288 - DNA, 30 bp, Artificial Sequence
  Synthetic oligonucleotide
accgtgagtaattcagaccagcgaattggt

SEQ ID NO: 145289 - DNA, 30 bp, Artificial Sequence
  Synthetic oligonucleotide
tgtcaggcaatcttcggagcagagattggt

SEQ ID NO: 145290 - DNA, 30 bp, Artificial Sequence
  Synthetic oligonucleotide
atgaccggtagtgcgtcgattattattggt

SEQ ID NO: 145291 - DNA, 30 bp, Artificial Sequence
  Synthetic oligonucleotide
tgcacactggatcaaaatattctccttggt

SEQ ID NO: 145292 - DNA, 30 bp, Artificial Sequence
  Synthetic oligonucleotide
gacgtacaggagctaagaaagctgcttggt

SEQ ID NO: 145293 - DNA, 30 bp, Artificial Sequence
  Synthetic oligonucleotide
aggcctaaatagatttgccgcaacgttggt

SEQ ID NO: 145294 - DNA, 30 bp, Artificial Sequence
  Synthetic oligonucleotide
gagattcccagaggttcgacaaccgttggt

SEQ ID NO: 145295 - DNA, 30 bp, Artificial Sequence
  Synthetic oligonucleotide
ccctagcgataggattgtgcgtgcgttggt

SEQ ID NO: 145296 - DNA, 30 bp, Artificial Sequence
  Synthetic oligonucleotide
tgggcgaatatggactgatttcgggttggt

SEQ ID NO: 145297 - DNA, 30 bp, Artificial Sequence
  Synthetic oligonucleotide
tggcccccacgagggaattcttaaaaatgt

SEQ ID NO: 145298 - DNA, 30 bp, Artificial Sequence
  Synthetic oligonucleotide
acgcaagatgtgttttagtgggacaaatgt

SEQ ID NO: 145299 - DNA, 30 bp, Artificial Sequence
  Synthetic oligonucleotide
cacgagtataataacagtaagaaccaatgt

SEQ ID NO: 145300 - DNA, 30 bp, Artificial Sequence
  Synthetic oligonucleotide
ttgacaagatttaaagagtccagccaatgt

SEQ ID NO: 145301 - DNA, 30 bp, Artificial Sequence
  Synthetic oligonucleotide
atgagagccatatgtcgtcagggccaatgt

SEQ ID NO: 145302 - DNA, 30 bp, Artificial Sequence
  Synthetic oligonucleotide
ggaaggggccagccaaaggtacagcaatgt

SEQ ID NO: 145303 - DNA, 30 bp, Artificial Sequence
  Synthetic oligonucleotide
aaggcaacacgtttcgttttcaaagaatgt

SEQ ID NO: 145304 - DNA, 30 bp, Artificial Sequence
  Synthetic oligonucleotide
gacctagctacgaagaacgcgatagaatgt

SEQ ID NO: 145305 - DNA, 30 bp, Artificial Sequence
  Synthetic oligonucleotide
agcaacgtaggggaaggtgacgacgaatgt

SEQ ID NO: 145306 - DNA, 30 bp, Artificial Sequence
  Synthetic oligonucleotide
aacaccttcccaactcccaaaagataatgt

SEQ ID NO: 145307 - DNA, 30 bp, Artificial Sequence
  Synthetic oligonucleotide
taggacgggcatcattacgctcactaatgt

SEQ ID NO: 145308 - DNA, 30 bp, Artificial Sequence
  Synthetic oligonucleotide
ttggtgggaagctcgcggggtgtctaatgt

SEQ ID NO: 145309 - DNA, 30 bp, Artificial Sequence
  Synthetic oligonucleotide
tcggcataacaatatccagttcgttaatgt

SEQ ID NO: 145310 - DNA, 30 bp, Artificial Sequence
  Synthetic oligonucleotide
aagggtgcggttctatactgaataacatgt

SEQ ID NO: 145311 - DNA, 30 bp, Artificial Sequence
  Synthetic oligonucleotide
taacggctagcgtggtcgaatagaccatgt

SEQ ID NO: 145312 - DNA, 30 bp, Artificial Sequence
  Synthetic oligonucleotide
cgaccgacgtcagatttgaaaaaagcatgt

SEQ ID NO: 145313 - DNA, 30 bp, Artificial Sequence
  Synthetic oligonucleotide
gctggagccgtgatcttgaaataggcatgt

SEQ ID NO: 145314 - DNA, 30 bp, Artificial Sequence
  Synthetic oligonucleotide
cattggtcagattggataggaggtgcatgt

SEQ ID NO: 145315 - DNA, 30 bp, Artificial Sequence
  Synthetic oligonucleotide
cgtctataagctgaacttatgtcatcatgt

SEQ ID NO: 145316 - DNA, 30 bp, Artificial Sequence
  Synthetic oligonucleotide
ggtgctaagtgctacttaaatgagtcatgt

SEQ ID NO: 145317 - DNA, 30 bp, Artificial Sequence
  Synthetic oligonucleotide
ttagagggctactgtacgatacggtcatgt

SEQ ID NO: 145318 - DNA, 30 bp, Artificial Sequence
  Synthetic oligonucleotide
ttgagatgtaaccaccggtacttacgatgt

SEQ ID NO: 145319 - DNA, 30 bp, Artificial Sequence
  Synthetic oligonucleotide
caataggcacacctgattgttcggggatgt

SEQ ID NO: 145320 - DNA, 30 bp, Artificial Sequence
  Synthetic oligonucleotide
aaggtctaatcaaatgactaaatgggatgt

SEQ ID NO: 145321 - DNA, 30 bp, Artificial Sequence
  Synthetic oligonucleotide
atgcaagggacggcaagccccctgggatgt

SEQ ID NO: 145322 - DNA, 30 bp, Artificial Sequence
  Synthetic oligonucleotide
tgtagacaatccaaccaactcagctgatgt

SEQ ID NO: 145323 - DNA, 30 bp, Artificial Sequence
  Synthetic oligonucleotide
gaggtagctatagttagcgaggggtgatgt

SEQ ID NO: 145324 - DNA, 30 bp, Artificial Sequence
  Synthetic oligonucleotide
tgaagtctattgccatttattgggtgatgt

SEQ ID NO: 145325 - DNA, 30 bp, Artificial Sequence
  Synthetic oligonucleotide
tgctcgtgctcccgacctaaataaatatgt

SEQ ID NO: 145326 - DNA, 30 bp, Artificial Sequence
  Synthetic oligonucleotide
atggagcggacagctggagagcaactatgt

SEQ ID NO: 145327 - DNA, 30 bp, Artificial Sequence
  Synthetic oligonucleotide
actagggtagactacaccaattagctatgt

SEQ ID NO: 145328 - DNA, 30 bp, Artificial Sequence
  Synthetic oligonucleotide
aatgagaatgtcggtagcactacgctatgt

SEQ ID NO: 145329 - DNA, 30 bp, Artificial Sequence
  Synthetic oligonucleotide
ggaacatctagacgagcattgcgagtatgt

SEQ ID NO: 145330 - DNA, 30 bp, Artificial Sequence
  Synthetic oligonucleotide
cgtaaaggccttgggaacaacgacgtatgt

SEQ ID NO: 145331 - DNA, 30 bp, Artificial Sequence
  Synthetic oligonucleotide
tagggagtttgggtgatcaataaggtatgt

SEQ ID NO: 145332 - DNA, 30 bp, Artificial Sequence
  Synthetic oligonucleotide
tcctgcagcaggtgggcaaccggggtatgt

SEQ ID NO: 145333 - DNA, 30 bp, Artificial Sequence
  Synthetic oligonucleotide
gacgattaaagctacgtggacgatgtatgt

SEQ ID NO: 145334 - DNA, 30 bp, Artificial Sequence
  Synthetic oligonucleotide
agtctctaggccgtcggtgaccgtgtatgt

SEQ ID NO: 145335 - DNA, 30 bp, Artificial Sequence
  Synthetic oligonucleotide
gcggaccacaactccaccaacattttatgt

SEQ ID NO: 145336 - DNA, 30 bp, Artificial Sequence
  Synthetic oligonucleotide
ccaagctggcccaacaaacattgaaactgt

SEQ ID NO: 145337 - DNA, 30 bp, Artificial Sequence
  Synthetic oligonucleotide
tgcagccatatgaccagcaataataactgt

SEQ ID NO: 145338 - DNA, 30 bp, Artificial Sequence
  Synthetic oligonucleotide
cctgatgatccagagacggaagccgactgt

SEQ ID NO: 145339 - DNA, 30 bp, Artificial Sequence
  Synthetic oligonucleotide
cgattggaagtccaaacggcaagggactgt

SEQ ID NO: 145340 - DNA, 30 bp, Artificial Sequence
  Synthetic oligonucleotide
agccggacggacatgacacgtgcaacctgt

SEQ ID NO: 145341 - DNA, 30 bp, Artificial Sequence
  Synthetic oligonucleotide
tggaggccactccgcactgcgatcacctgt

SEQ ID NO: 145342 - DNA, 30 bp, Artificial Sequence
  Synthetic oligonucleotide
gaccgagaccaggttgagtgaccgacctgt

SEQ ID NO: 145343 - DNA, 30 bp, Artificial Sequence
  Synthetic oligonucleotide
ggggcggccattgtgccaaatgctacctgt

SEQ ID NO: 145344 - DNA, 30 bp, Artificial Sequence
  Synthetic oligonucleotide
gggaaacgggtgatccgtgtgtaaccctgt

SEQ ID NO: 145345 - DNA, 30 bp, Artificial Sequence
  Synthetic oligonucleotide
gtcactggtatgcccatcaagccaccctgt

SEQ ID NO: 145346 - DNA, 30 bp, Artificial Sequence
  Synthetic oligonucleotide
gagtacttgccggggaggactccagcctgt

SEQ ID NO: 145347 - DNA, 30 bp, Artificial Sequence
  Synthetic oligonucleotide
tgggtccacaccaaaaacaattgtagctgt

SEQ ID NO: 145348 - DNA, 30 bp, Artificial Sequence
  Synthetic oligonucleotide
ccatcgaagtgtactatgtccaaccgctgt

SEQ ID NO: 145349 - DNA, 30 bp, Artificial Sequence
  Synthetic oligonucleotide
cgatttaacgtcaactcaagtgtccgctgt

SEQ ID NO: 145350 - DNA, 30 bp, Artificial Sequence
  Synthetic oligonucleotide
gagcttacaggcgtttgtgaggatcgctgt

SEQ ID NO: 145351 - DNA, 30 bp, Artificial Sequence
  Synthetic oligonucleotide
atacatctgaaagtaaccgtgtatcgctgt

SEQ ID NO: 145352 - DNA, 30 bp, Artificial Sequence
  Synthetic oligonucleotide
aacaacggtagtggaattcgtaagggctgt

SEQ ID NO: 145353 - DNA, 30 bp, Artificial Sequence
  Synthetic oligonucleotide
tgtattcaaccgtaccgtaaagatggctgt

SEQ ID NO: 145354 - DNA, 30 bp, Artificial Sequence
  Synthetic oligonucleotide
cgcgtgcattgtaagagaagcagctgctgt

SEQ ID NO: 145355 - DNA, 30 bp, Artificial Sequence
  Synthetic oligonucleotide
aaggatggacgcatcgggcactggtgctgt

SEQ ID NO: 145356 - DNA, 30 bp, Artificial Sequence
  Synthetic oligonucleotide
gtcgatatgtcttgagttaggttgtgctgt

SEQ ID NO: 145357 - DNA, 30 bp, Artificial Sequence
  Synthetic oligonucleotide
ttagacaaaacgagtagtgcaccttgctgt

SEQ ID NO: 145358 - DNA, 30 bp, Artificial Sequence
  Synthetic oligonucleotide
gggcgatttcgaggcggtctccggatctgt

SEQ ID NO: 145359 - DNA, 30 bp, Artificial Sequence
  Synthetic oligonucleotide
gcgtggtctccctctggaaagtcactctgt

SEQ ID NO: 145360 - DNA, 30 bp, Artificial Sequence
  Synthetic oligonucleotide
aactggtccccactaagaacaaccctctgt

SEQ ID NO: 145361 - DNA, 30 bp, Artificial Sequence
  Synthetic oligonucleotide
aggccgaaggcatgactgagaaccgtctgt

SEQ ID NO: 145362 - DNA, 30 bp, Artificial Sequence
  Synthetic oligonucleotide
caaccaacccgctataaaagataggtctgt

SEQ ID NO: 145363 - DNA, 30 bp, Artificial Sequence
  Synthetic oligonucleotide
acagtaaaaacgcagcgaggccatgtctgt

SEQ ID NO: 145364 - DNA, 30 bp, Artificial Sequence
  Synthetic oligonucleotide
ctggtaggattttacgggggtgatgtctgt

SEQ ID NO: 145365 - DNA, 30 bp, Artificial Sequence
  Synthetic oligonucleotide
gatcaaagcgacctcgcggaatataagtgt

SEQ ID NO: 145366 - DNA, 30 bp, Artificial Sequence
  Synthetic oligonucleotide
tccagggtgcgaggatataggattaagtgt

SEQ ID NO: 145367 - DNA, 30 bp, Artificial Sequence
  Synthetic oligonucleotide
ggatgctatgtatgactagtaaaacagtgt

SEQ ID NO: 145368 - DNA, 30 bp, Artificial Sequence
  Synthetic oligonucleotide
acatcggttgcatgtagtcactaacagtgt

SEQ ID NO: 145369 - DNA, 30 bp, Artificial Sequence
  Synthetic oligonucleotide
ttcgaaaaacacaggggacttgtacagtgt

SEQ ID NO: 145370 - DNA, 30 bp, Artificial Sequence
  Synthetic oligonucleotide
ttcgtcacgcctgggcggaatgccgagtgt

SEQ ID NO: 145371 - DNA, 30 bp, Artificial Sequence
  Synthetic oligonucleotide
ggagtttcgtaagctttgcgtaaggagtgt

SEQ ID NO: 145372 - DNA, 30 bp, Artificial Sequence
  Synthetic oligonucleotide
cggggcagctgaaaaaaagcgacgtagtgt

SEQ ID NO: 145373 - DNA, 30 bp, Artificial Sequence
  Synthetic oligonucleotide
gctcctagaatgtagatagaggggtagtgt

SEQ ID NO: 145374 - DNA, 30 bp, Artificial Sequence
  Synthetic oligonucleotide
tactgtggtactcatggttagatcacgtgt

SEQ ID NO: 145375 - DNA, 30 bp, Artificial Sequence
  Synthetic oligonucleotide
aggtaatatcaccaaaaagaaattacgtgt

SEQ ID NO: 145376 - DNA, 30 bp, Artificial Sequence
  Synthetic oligonucleotide
gatcatcagaggacgagaaaaattccgtgt

SEQ ID NO: 145377 - DNA, 30 bp, Artificial Sequence
  Synthetic oligonucleotide
ataaccgacacataataagtgggttcgtgt

SEQ ID NO: 145378 - DNA, 30 bp, Artificial Sequence
  Synthetic oligonucleotide
agatggagcaattcggaaccagagaggtgt

SEQ ID NO: 145379 - DNA, 30 bp, Artificial Sequence
  Synthetic oligonucleotide
cagagacccgtgaagttagctgctaggtgt

SEQ ID NO: 145380 - DNA, 30 bp, Artificial Sequence
  Synthetic oligonucleotide
aagggactgagttagtaaccgggtaggtgt

SEQ ID NO: 145381 - DNA, 30 bp, Artificial Sequence
  Synthetic oligonucleotide
aggcagacggctatacctttaaaacggtgt

SEQ ID NO: 145382 - DNA, 30 bp, Artificial Sequence
  Synthetic oligonucleotide
agtataagaagactctagggagatcggtgt

SEQ ID NO: 145383 - DNA, 30 bp, Artificial Sequence
  Synthetic oligonucleotide
gcagtctgcgaacaggtttcataagggtgt

SEQ ID NO: 145384 - DNA, 31 bp, Artificial Sequence
  Synthetic oligonucleotide
cgggggttgtctagcttcaatataggggtgt

SEQ ID NO: 145385 - DNA, 30 bp, Artificial Sequence
  Synthetic oligonucleotide
cttaaatcctggatcgcctcgcgggggtgt

SEQ ID NO: 145386 - DNA, 30 bp, Artificial Sequence
  Synthetic oligonucleotide
cacccagccaatgcgaataggttggggtgt

SEQ ID NO: 145387 - DNA, 30 bp, Artificial Sequence
  Synthetic oligonucleotide
cactgggcaagacttttttgtggttggtgt

SEQ ID NO: 145388 - DNA, 30 bp, Artificial Sequence
  Synthetic oligonucleotide
agtggtcgaagatgcattatgagtatgtgt

SEQ ID NO: 145389 - DNA, 30 bp, Artificial Sequence
  Synthetic oligonucleotide
atggataaacgggagacctctgtactgtgt

SEQ ID NO: 145390 - DNA, 30 bp, Artificial Sequence
  Synthetic oligonucleotide
tcactctaatcggagagccgaaacctgtgt

SEQ ID NO: 145391 - DNA, 30 bp, Artificial Sequence
  Synthetic oligonucleotide
ggctaacgatgtaattggcaatccctgtgt

SEQ ID NO: 145392 - DNA, 30 bp, Artificial Sequence
  Synthetic oligonucleotide
aagagtgacagtatatcgctgtccctgtgt

SEQ ID NO: 145393 - DNA, 30 bp, Artificial Sequence
  Synthetic oligonucleotide
gtatagtacgtccgactaggaaacgtgtgt

SEQ ID NO: 145394 - DNA, 30 bp, Artificial Sequence
  Synthetic oligonucleotide
ggcaaaaaggtcttgttacggaccgtgtgt

SEQ ID NO: 145395 - DNA, 30 bp, Artificial Sequence
  Synthetic oligonucleotide
cacacaaaaagacctagcaaaaccttgtgt

SEQ ID NO: 145396 - DNA, 30 bp, Artificial Sequence
  Synthetic oligonucleotide
gaaaaacgataggcgatgagggctttgtgt

SEQ ID NO: 145397 - DNA, 30 bp, Artificial Sequence
  Synthetic oligonucleotide
gctcacatcctaagatacgggttgaattgt

SEQ ID NO: 145398 - DNA, 30 bp, Artificial Sequence
  Synthetic oligonucleotide
gagatcaggcaatcaataagataccattgt

SEQ ID NO: 145399 - DNA, 30 bp, Artificial Sequence
  Synthetic oligonucleotide
cgtggtagactgtcgcaaggtctccattgt

SEQ ID NO: 145400 - DNA, 30 bp, Artificial Sequence
  Synthetic oligonucleotide
cgccgtcttaaattctgcaaaaagcattgt

SEQ ID NO: 145401 - DNA, 30 bp, Artificial Sequence
  Synthetic oligonucleotide
catcctacaccgtcggccggataagattgt

SEQ ID NO: 145402 - DNA, 30 bp, Artificial Sequence
  Synthetic oligonucleotide
ggcaaggccggcttatgagtcagagattgt

SEQ ID NO: 145403 - DNA, 30 bp, Artificial Sequence
  Synthetic oligonucleotide
cactttactagcagatggtgggtagattgt

SEQ ID NO: 145404 - DNA, 30 bp, Artificial Sequence
  Synthetic oligonucleotide
gtggattgaaatacgtgtttggtagattgt

SEQ ID NO: 145405 - DNA, 30 bp, Artificial Sequence
  Synthetic oligonucleotide
gcgtgtaatgcgggcagccactgcgattgt

SEQ ID NO: 145406 - DNA, 30 bp, Artificial Sequence
  Synthetic oligonucleotide
cccagatccgaatgtcgcgtctgggattgt

SEQ ID NO: 145407 - DNA, 30 bp, Artificial Sequence
  Synthetic oligonucleotide
tccagacaatgtacatcctatgcatattgt

SEQ ID NO: 145408 - DNA, 30 bp, Artificial Sequence
  Synthetic oligonucleotide
ccatacgggcaagtgcactttgagtattgt

SEQ ID NO: 145409 - DNA, 30 bp, Artificial Sequence
  Synthetic oligonucleotide
aagtccaggcaagacattagcaatacttgt

SEQ ID NO: 145410 - DNA, 31 bp, Artificial Sequence
  Synthetic oligonucleotide
ggtgggagttcagggtttgagtagtacttgt

SEQ ID NO: 145411 - DNA, 30 bp, Artificial Sequence
  Synthetic oligonucleotide
cgagatctctcgggtacaccatgcccttgt

SEQ ID NO: 145412 - DNA, 30 bp, Artificial Sequence
  Synthetic oligonucleotide
ttgtaatactcgcgataatgtcttccttgt

SEQ ID NO: 145413 - DNA, 30 bp, Artificial Sequence
  Synthetic oligonucleotide
tggagagaaattgctcccctaatagcttgt

SEQ ID NO: 145414 - DNA, 30 bp, Artificial Sequence
  Synthetic oligonucleotide
tggatataaactcatggattagttgcttgt

SEQ ID NO: 145415 - DNA, 30 bp, Artificial Sequence
  Synthetic oligonucleotide
aatgcgataatgatgactacttcttcttgt

SEQ ID NO: 145416 - DNA, 30 bp, Artificial Sequence
  Synthetic oligonucleotide
aagagaggttcgggacaccgagcgagttgt

SEQ ID NO: 145417 - DNA, 30 bp, Artificial Sequence
  Synthetic oligonucleotide
tgtcccgttctacaaatgtgcttgagttgt

SEQ ID NO: 145418 - DNA, 30 bp, Artificial Sequence
  Synthetic oligonucleotide
acgatttgtcccaagggccctgcgcgttgt

SEQ ID NO: 145419 - DNA, 30 bp, Artificial Sequence
  Synthetic oligonucleotide
cgtgatatataatttaaggatcatcgttgt

SEQ ID NO: 145420 - DNA, 30 bp, Artificial Sequence
  Synthetic oligonucleotide
ggtagtatgcaactgtagtacctaggttgt

SEQ ID NO: 145421 - DNA, 30 bp, Artificial Sequence
  Synthetic oligonucleotide
ggcgtacctgtagatggaatcgaatgttgt

SEQ ID NO: 145422 - DNA, 30 bp, Artificial Sequence
  Synthetic oligonucleotide
gttactgctgacttgctaccggtgtgttgt

SEQ ID NO: 145423 - DNA, 30 bp, Artificial Sequence
  Synthetic oligonucleotide
catttgacatccaacatactagcaatttgt

SEQ ID NO: 145424 - DNA, 30 bp, Artificial Sequence
  Synthetic oligonucleotide
gctgactgccaggttgaacgatgcatttgt

SEQ ID NO: 145425 - DNA, 30 bp, Artificial Sequence
  Synthetic oligonucleotide
tcgggtacaagcgtgttcaagagactttgt

SEQ ID NO: 145426 - DNA, 30 bp, Artificial Sequence
  Synthetic oligonucleotide
atagcacggaacgccgaagacaggctttgt

SEQ ID NO: 145427 - DNA, 30 bp, Artificial Sequence
  Synthetic oligonucleotide
cagggtcgaaaaaggtgagaaatgctttgt

SEQ ID NO: 145428 - DNA, 30 bp, Artificial Sequence
  Synthetic oligonucleotide
ggaagcgtcataattaccataactctttgt

SEQ ID NO: 145429 - DNA, 30 bp, Artificial Sequence
  Synthetic oligonucleotide
attggcgccattatcgtaggacgtctttgt

SEQ ID NO: 145430 - DNA, 30 bp, Artificial Sequence
  Synthetic oligonucleotide
gggaatatgtcccaggcggtggaagtttgt

SEQ ID NO: 145431 - DNA, 30 bp, Artificial Sequence
  Synthetic oligonucleotide
aggggggcaaagcctaaaattaaattttgt

SEQ ID NO: 145432 - DNA, 30 bp, Artificial Sequence
  Synthetic oligonucleotide
gtccctggcatgctgtgagaggaattttgt

SEQ ID NO: 145433 - DNA, 30 bp, Artificial Sequence
  Synthetic oligonucleotide
ggtgcattcgtggcgggtgaaagtttttgt

SEQ ID NO: 145434 - DNA, 30 bp, Artificial Sequence
  Synthetic oligonucleotide
cataaatagggaacggagggtggtttttgt

SEQ ID NO: 145435 - DNA, 30 bp, Artificial Sequence
  Synthetic oligonucleotide
agctggtggcactttatatggccaaaaatt

SEQ ID NO: 145436 - DNA, 30 bp, Artificial Sequence
  Synthetic oligonucleotide
cacttgcagtaggatcatacgcgtcaaatt

SEQ ID NO: 145437 - DNA, 30 bp, Artificial Sequence
  Synthetic oligonucleotide
attacacgcccagataatgccaaggaaatt

SEQ ID NO: 145438 - DNA, 30 bp, Artificial Sequence
  Synthetic oligonucleotide
caagtacggacatacgagtggaactaaatt

SEQ ID NO: 145439 - DNA, 30 bp, Artificial Sequence
  Synthetic oligonucleotide
ggtatccgtcaaaataggacccactaaatt

SEQ ID NO: 145440 - DNA, 30 bp, Artificial Sequence
  Synthetic oligonucleotide
cagttacagaacggaacccagaagtaaatt

SEQ ID NO: 145441 - DNA, 30 bp, Artificial Sequence
  Synthetic oligonucleotide
gagataatagcaatcggctgcacgtaaatt

SEQ ID NO: 145442 - DNA, 30 bp, Artificial Sequence
  Synthetic oligonucleotide
cgaactgtcttgccgtgtaggggttaaatt

SEQ ID NO: 145443 - DNA, 30 bp, Artificial Sequence
  Synthetic oligonucleotide
gtgtcaacaatcattcagcttacaacaatt

SEQ ID NO: 145444 - DNA, 30 bp, Artificial Sequence
  Synthetic oligonucleotide
cgacgagtagtgacagctttcccaacaatt

SEQ ID NO: 145445 - DNA, 30 bp, Artificial Sequence
  Synthetic oligonucleotide
ggacaatgtgtcgataccggagtaacaatt

SEQ ID NO: 145446 - DNA, 30 bp, Artificial Sequence
  Synthetic oligonucleotide
ccgcatggtcagagaataacacaagcaatt

SEQ ID NO: 145447 - DNA, 30 bp, Artificial Sequence
  Synthetic oligonucleotide
taggttccagggcgagactttgcggcaatt

SEQ ID NO: 145448 - DNA, 30 bp, Artificial Sequence
  Synthetic oligonucleotide
ttaagatggcagaggtgctgactggcaatt

SEQ ID NO: 145449 - DNA, 30 bp, Artificial Sequence
  Synthetic oligonucleotide
gttgaggtcagtgcggcagggcgtgcaatt

SEQ ID NO: 145450 - DNA, 30 bp, Artificial Sequence
  Synthetic oligonucleotide
tgaggctatcggcctaaagccattgcaatt

SEQ ID NO: 145451 - DNA, 30 bp, Artificial Sequence
  Synthetic oligonucleotide
atatgtagatcagacatgcctgcttcaatt

SEQ ID NO: 145452 - DNA, 30 bp, Artificial Sequence
  Synthetic oligonucleotide
ctagggcggatagagcagaccggcagaatt

SEQ ID NO: 145453 - DNA, 30 bp, Artificial Sequence
  Synthetic oligonucleotide
tcctggaaagtgtggataaaagaacgaatt

SEQ ID NO: 145454 - DNA, 30 bp, Artificial Sequence
  Synthetic oligonucleotide
agaggatacacactgttggtcgaacgaatt

SEQ ID NO: 145455 - DNA, 30 bp, Artificial Sequence
  Synthetic oligonucleotide
ctgccttggcgggcaggaaactgacgaatt

SEQ ID NO: 145456 - DNA, 30 bp, Artificial Sequence
  Synthetic oligonucleotide
aggttaaaacattacgtatgcgatcgaatt

SEQ ID NO: 145457 - DNA, 30 bp, Artificial Sequence
  Synthetic oligonucleotide
gcggtagggtcacgtctggaaagcggaatt

SEQ ID NO: 145458 - DNA, 30 bp, Artificial Sequence
  Synthetic oligonucleotide
atatcgagctggcggcaggattttggaatt

SEQ ID NO: 145459 - DNA, 30 bp, Artificial Sequence
  Synthetic oligonucleotide
aaggagtacgctcgtgaccattaatgaatt

SEQ ID NO: 145460 - DNA, 30 bp, Artificial Sequence
  Synthetic oligonucleotide
cgtccagctgcaacattcttgtcttgaatt

SEQ ID NO: 145461 - DNA, 30 bp, Artificial Sequence
  Synthetic oligonucleotide
tagcgtaaattgtgtgcgaacgccataatt

SEQ ID NO: 145462 - DNA, 30 bp, Artificial Sequence
  Synthetic oligonucleotide
gcagggaaaaaattataaagcctcataatt

SEQ ID NO: 145463 - DNA, 30 bp, Artificial Sequence
  Synthetic oligonucleotide
gacctcgatgaatagaatgtgagactaatt

SEQ ID NO: 145464 - DNA, 30 bp, Artificial Sequence
  Synthetic oligonucleotide
cgtaaatacagggccggactacacctaatt

SEQ ID NO: 145465 - DNA, 30 bp, Artificial Sequence
  Synthetic oligonucleotide
caagtatattacactagaagatagctaatt

SEQ ID NO: 145466 - DNA, 30 bp, Artificial Sequence
  Synthetic oligonucleotide
gagaggcgagggtaccagttagatctaatt

SEQ ID NO: 145467 - DNA, 31 bp, Artificial Sequence
  Synthetic oligonucleotide
tgaatacttcgaatccgaagagaacttaatt

SEQ ID NO: 145468 - DNA, 30 bp, Artificial Sequence
  Synthetic oligonucleotide
gagaatgtatacgaagagcggtcgcacatt

SEQ ID NO: 145469 - DNA, 30 bp, Artificial Sequence
  Synthetic oligonucleotide
atatcaggtatggcaatactcactcacatt

SEQ ID NO: 145470 - DNA, 30 bp, Artificial Sequence
  Synthetic oligonucleotide
tagagactaacctgctacaggacagacatt

SEQ ID NO: 145471 - DNA, 30 bp, Artificial Sequence
  Synthetic oligonucleotide
atatgcgcgtggagcggggacggagacatt

SEQ ID NO: 145472 - DNA, 30 bp, Artificial Sequence
  Synthetic oligonucleotide
tgtgaccggaaatacaggctagttgacatt

SEQ ID NO: 145473 - DNA, 30 bp, Artificial Sequence
  Synthetic oligonucleotide
cgcttgcgacgattagcgaaaccttacatt

SEQ ID NO: 145474 - DNA, 30 bp, Artificial Sequence
  Synthetic oligonucleotide
tcaccagagtttcagacggttccaaccatt

SEQ ID NO: 145475 - DNA, 30 bp, Artificial Sequence
  Synthetic oligonucleotide
tgtacatgtcgcatgtagacacgaaccatt

SEQ ID NO: 145476 - DNA, 30 bp, Artificial Sequence
  Synthetic oligonucleotide
aggacttggacgtaagaccgggaacccatt

SEQ ID NO: 145477 - DNA, 30 bp, Artificial Sequence
  Synthetic oligonucleotide
ctcgagatattggctcggcaaggccccatt

SEQ ID NO: 145478 - DNA, 30 bp, Artificial Sequence
  Synthetic oligonucleotide
agaccgacatagcgcaagacataagccatt

SEQ ID NO: 145479 - DNA, 30 bp, Artificial Sequence
  Synthetic oligonucleotide
gtacgttctcgatacccgatcagcgccatt

SEQ ID NO: 145480 - DNA, 30 bp, Artificial Sequence
  Synthetic oligonucleotide
atcatgcgcatgcctaaccagggcgccatt

SEQ ID NO: 145481 - DNA, 30 bp, Artificial Sequence
  Synthetic oligonucleotide
cgtctacatggctgataaggagtcgccatt

SEQ ID NO: 145482 - DNA, 30 bp, Artificial Sequence
  Synthetic oligonucleotide
ataactatgaacgacgatagtgaggccatt

SEQ ID NO: 145483 - DNA, 30 bp, Artificial Sequence
  Synthetic oligonucleotide
tagatccaactgtctctgatttgggccatt

SEQ ID NO: 145484 - DNA, 30 bp, Artificial Sequence
  Synthetic oligonucleotide
gaaggccgccgcccttgaaatgactccatt

SEQ ID NO: 145485 - DNA, 30 bp, Artificial Sequence
  Synthetic oligonucleotide
tgcacctagattgcccgaagttcgtccatt

SEQ ID NO: 145486 - DNA, 30 bp, Artificial Sequence
  Synthetic oligonucleotide
gtttaaaactatagtacatgcgtcagcatt

SEQ ID NO: 145487 - DNA, 30 bp, Artificial Sequence
  Synthetic oligonucleotide
gtatgtcgtggatgattgaaaactagcatt

SEQ ID NO: 145488 - DNA, 30 bp, Artificial Sequence
  Synthetic oligonucleotide
gacaggcttaaggtacaaagggctggcatt

SEQ ID NO: 145489 - DNA, 30 bp, Artificial Sequence
  Synthetic oligonucleotide
ttaagacaagttagcacacggaaaatcatt

SEQ ID NO: 145490 - DNA, 30 bp, Artificial Sequence
  Synthetic oligonucleotide
tgcggtcgtgtcgtttagtgtccaatcatt

SEQ ID NO: 145491 - DNA, 30 bp, Artificial Sequence
  Synthetic oligonucleotide
atgcagacgaattggaaaggtgtaatcatt

SEQ ID NO: 145492 - DNA, 30 bp, Artificial Sequence
  Synthetic oligonucleotide
gggagtcgcgatcatatgtttgccatcatt

SEQ ID NO: 145493 - DNA, 30 bp, Artificial Sequence
  Synthetic oligonucleotide
taaaaaacgaaccgcattagcgggatcatt

SEQ ID NO: 145494 - DNA, 30 bp, Artificial Sequence
  Synthetic oligonucleotide
ctaacaatttgtaaaaccgccatgctcatt

SEQ ID NO: 145495 - DNA, 31 bp, Artificial Sequence
  Synthetic oligonucleotide
ccgggcgaggggactagggcacatagtcatt

SEQ ID NO: 145496 - DNA, 30 bp, Artificial Sequence
  Synthetic oligonucleotide
taaaccgctccaggtaacaagatagtcatt

SEQ ID NO: 145497 - DNA, 30 bp, Artificial Sequence
  Synthetic oligonucleotide
aacaccagtagctcaacgggagtgttcatt

SEQ ID NO: 145498 - DNA, 30 bp, Artificial Sequence
  Synthetic oligonucleotide
acgcgaacggcgccagctcgtaaaaagatt

SEQ ID NO: 145499 - DNA, 30 bp, Artificial Sequence
  Synthetic oligonucleotide
cggccggcctgagagctagagataaagatt

SEQ ID NO: 145500 - DNA, 30 bp, Artificial Sequence
  Synthetic oligonucleotide
ccattataagcggaaacgggagccaagatt

SEQ ID NO: 145501 - DNA, 30 bp, Artificial Sequence
  Synthetic oligonucleotide
cacatgccgcgtgcgcaggaatgcaagatt

SEQ ID NO: 145502 - DNA, 30 bp, Artificial Sequence
  Synthetic oligonucleotide
gcttacatgacaggccccgtaacgaagatt

SEQ ID NO: 145503 - DNA, 30 bp, Artificial Sequence
  Synthetic oligonucleotide
gaggggttaagtcaacgcctcccgaagatt

SEQ ID NO: 145504 - DNA, 30 bp, Artificial Sequence
  Synthetic oligonucleotide
ggttatcactcaagtggcagcaggaagatt

SEQ ID NO: 145505 - DNA, 30 bp, Artificial Sequence
  Synthetic oligonucleotide
gacactactgggtaaaagcgctggaagatt

SEQ ID NO: 145506 - DNA, 30 bp, Artificial Sequence
  Synthetic oligonucleotide
tctgggctgtcgacatggttgtaacagatt

SEQ ID NO: 145507 - DNA, 30 bp, Artificial Sequence
  Synthetic oligonucleotide
tgctagacggcgagtgaatgacgacagatt

SEQ ID NO: 145508 - DNA, 30 bp, Artificial Sequence
  Synthetic oligonucleotide
acccgacaagcaagaaatgttcttgagatt

SEQ ID NO: 145509 - DNA, 30 bp, Artificial Sequence
  Synthetic oligonucleotide
gtagaggacttgagacgatattagtagatt

SEQ ID NO: 145510 - DNA, 30 bp, Artificial Sequence
  Synthetic oligonucleotide
tcggttcgaagggcactcgcaggttagatt

SEQ ID NO: 145511 - DNA, 30 bp, Artificial Sequence
  Synthetic oligonucleotide
aagggagtcactgagcacccgtcaacgatt

SEQ ID NO: 145512 - DNA, 30 bp, Artificial Sequence
  Synthetic oligonucleotide
ttgtgccagggaaggagcattataacgatt

SEQ ID NO: 145513 - DNA, 30 bp, Artificial Sequence
  Synthetic oligonucleotide
cgacgcaccgtcgaaatcataatgacgatt

SEQ ID NO: 145514 - DNA, 30 bp, Artificial Sequence
  Synthetic oligonucleotide
agagcaaagtctcgtaaaacagtgacgatt

SEQ ID NO: 145515 - DNA, 30 bp, Artificial Sequence
  Synthetic oligonucleotide
cccgcgatgcataagcatagcaaaccgatt

SEQ ID NO: 145516 - DNA, 30 bp, Artificial Sequence
  Synthetic oligonucleotide
gggatatttataatattactaacaccgatt

SEQ ID NO: 145517 - DNA, 30 bp, Artificial Sequence
  Synthetic oligonucleotide
gaacgaaaaatctacgtgactcgaccgatt

SEQ ID NO: 145518 - DNA, 30 bp, Artificial Sequence
  Synthetic oligonucleotide
tgcttctaatcaccaccgaggagagcgatt

SEQ ID NO: 145519 - DNA, 29 bp, Artificial Sequence
  Synthetic oligonucleotide
caatcgagatcccaagatcccgagcgatt

SEQ ID NO: 145520 - DNA, 30 bp, Artificial Sequence
  Synthetic oligonucleotide
ttgctccaagtacaggtcgaagtctcgatt

SEQ ID NO: 145521 - DNA, 30 bp, Artificial Sequence
  Synthetic oligonucleotide
gcgttcgtgtgctaggctacagtctcgatt

SEQ ID NO: 145522 - DNA, 30 bp, Artificial Sequence
  Synthetic oligonucleotide
ttctcagctagctgaggatcggcttcgatt

SEQ ID NO: 145523 - DNA, 30 bp, Artificial Sequence
  Synthetic oligonucleotide
tgccggattgatctaagcgcgcctaggatt

SEQ ID NO: 145524 - DNA, 30 bp, Artificial Sequence
  Synthetic oligonucleotide
gcgcgaccggaaagcattcgcaaacggatt

SEQ ID NO: 145525 - DNA, 30 bp, Artificial Sequence
  Synthetic oligonucleotide
cagtcgtgtgcttggcacttgtcagggatt

SEQ ID NO: 145526 - DNA, 31 bp, Artificial Sequence
  Synthetic oligonucleotide
tacgctgagggcattatgcgccggatggatt

SEQ ID NO: 145527 - DNA, 30 bp, Artificial Sequence
  Synthetic oligonucleotide
gcgagcattcgtaagttgcttctatggatt

SEQ ID NO: 145528 - DNA, 30 bp, Artificial Sequence
  Synthetic oligonucleotide
ccgtatacattgagttgcaatccctggatt

SEQ ID NO: 145529 - DNA, 30 bp, Artificial Sequence
  Synthetic oligonucleotide
cgtgatggatactagtcctaacgctggatt

SEQ ID NO: 145530 - DNA, 30 bp, Artificial Sequence
  Synthetic oligonucleotide
ctccattgcgaatgtgaagtgaagtggatt

SEQ ID NO: 145531 - DNA, 30 bp, Artificial Sequence
  Synthetic oligonucleotide
aaccactcgaactgcacatcctcaatgatt

SEQ ID NO: 145532 - DNA, 30 bp, Artificial Sequence
  Synthetic oligonucleotide
cgtccataagtgcctttgtggaccatgatt

SEQ ID NO: 145533 - DNA, 30 bp, Artificial Sequence
  Synthetic oligonucleotide
tggtcctagatcacgtttctgcccctgatt

SEQ ID NO: 145534 - DNA, 30 bp, Artificial Sequence
  Synthetic oligonucleotide
aaaaggattgagtccgtattttagctgatt

SEQ ID NO: 145535 - DNA, 30 bp, Artificial Sequence
  Synthetic oligonucleotide
ccctccatcgttagtagtgtataagtgatt

SEQ ID NO: 145536 - DNA, 30 bp, Artificial Sequence
  Synthetic oligonucleotide
ggttgcttatgggcttgagcacatgtgatt

SEQ ID NO: 145537 - DNA, 30 bp, Artificial Sequence
  Synthetic oligonucleotide
cttgaaaagttgcggtagccgggcaatatt

SEQ ID NO: 145538 - DNA, 30 bp, Artificial Sequence
  Synthetic oligonucleotide
gtcaggtatgggctcccacgtctgaatatt

SEQ ID NO: 145539 - DNA, 30 bp, Artificial Sequence
  Synthetic oligonucleotide
acaggctgcacgaaagaagggtttaatatt

SEQ ID NO: 145540 - DNA, 30 bp, Artificial Sequence
  Synthetic oligonucleotide
tcagaataattcggctagcccatccatatt

SEQ ID NO: 145541 - DNA, 30 bp, Artificial Sequence
  Synthetic oligonucleotide
gccgacaagaaatggaccttggcatatatt

SEQ ID NO: 145542 - DNA, 30 bp, Artificial Sequence
  Synthetic oligonucleotide
agccaaagaggaatagccatcgagtatatt

SEQ ID NO: 145543 - DNA, 30 bp, Artificial Sequence
  Synthetic oligonucleotide
gaaccggtaataagtagaggccggactatt

SEQ ID NO: 145544 - DNA, 30 bp, Artificial Sequence
  Synthetic oligonucleotide
tcggtaaacagtcagagtcgctaacctatt

SEQ ID NO: 145545 - DNA, 30 bp, Artificial Sequence
  Synthetic oligonucleotide
tatcgtgtcgtagcacaagcgcttcctatt

SEQ ID NO: 145546 - DNA, 30 bp, Artificial Sequence
  Synthetic oligonucleotide
atatgacggtgtatgagagtggaagctatt

SEQ ID NO: 145547 - DNA, 30 bp, Artificial Sequence
  Synthetic oligonucleotide
gaaatgcggatcaatcagagaaacagtatt

SEQ ID NO: 145548 - DNA, 30 bp, Artificial Sequence
  Synthetic oligonucleotide
tcggcggaactgtagaagtcagacagtatt

SEQ ID NO: 145549 - DNA, 30 bp, Artificial Sequence
  Synthetic oligonucleotide
taaatgcaggtcgcctctgagtggagtatt

SEQ ID NO: 145550 - DNA, 30 bp, Artificial Sequence
  Synthetic oligonucleotide
gtaccggaacctacaatcggaagtagtatt

SEQ ID NO: 145551 - DNA, 30 bp, Artificial Sequence
  Synthetic oligonucleotide
acaggatcactccccgacaggaaacgtatt

SEQ ID NO: 145552 - DNA, 30 bp, Artificial Sequence
  Synthetic oligonucleotide
ggacgggcgtcctggggtgaaattcgtatt

SEQ ID NO: 145553 - DNA, 30 bp, Artificial Sequence
  Synthetic oligonucleotide
gggccccaattcatgcttaataacggtatt

SEQ ID NO: 145554 - DNA, 30 bp, Artificial Sequence
  Synthetic oligonucleotide
agggaaagcccggagcaagcacggggtatt

SEQ ID NO: 145555 - DNA, 30 bp, Artificial Sequence
  Synthetic oligonucleotide
ctaaaatcaaagatcttaatctgtggtatt

SEQ ID NO: 145556 - DNA, 30 bp, Artificial Sequence
  Synthetic oligonucleotide
ccagataacaagcaaacaatctcgtgtatt

SEQ ID NO: 145557 - DNA, 30 bp, Artificial Sequence
  Synthetic oligonucleotide
aatcaaccagaagtacagacactaattatt

SEQ ID NO: 145558 - DNA, 30 bp, Artificial Sequence
  Synthetic oligonucleotide
gatcagtacgtttgggggtagaccattatt

SEQ ID NO: 145559 - DNA, 30 bp, Artificial Sequence
  Synthetic oligonucleotide
aggattcgcattacagcaggttaccttatt

SEQ ID NO: 145560 - DNA, 30 bp, Artificial Sequence
  Synthetic oligonucleotide
caaccaaggcgagcgaggcgcaagcttatt

SEQ ID NO: 145561 - DNA, 31 bp, Artificial Sequence
  Synthetic oligonucleotide
tgaaaagataaagagaccgaaaccgcttatt

SEQ ID NO: 145562 - DNA, 30 bp, Artificial Sequence
  Synthetic oligonucleotide
atacaaaaatcgaggcgttgagtgcttatt

SEQ ID NO: 145563 - DNA, 30 bp, Artificial Sequence
  Synthetic oligonucleotide
acggagctcccttcgattaggggtgttatt

SEQ ID NO: 145564 - DNA, 30 bp, Artificial Sequence
  Synthetic oligonucleotide
agtaccgagaatcgggatacgtgctttatt

SEQ ID NO: 145565 - DNA, 30 bp, Artificial Sequence
  Synthetic oligonucleotide
gtgatctacacgatcaagacaacgtttatt

SEQ ID NO: 145566 - DNA, 30 bp, Artificial Sequence
  Synthetic oligonucleotide
gaaggcgcgccaagaaggatagccaaactt

SEQ ID NO: 145567 - DNA, 30 bp, Artificial Sequence
  Synthetic oligonucleotide
ggtttaaaacgatcaaacaaaaaccaactt

SEQ ID NO: 145568 - DNA, 30 bp, Artificial Sequence
  Synthetic oligonucleotide
gccaagggtagaagtacccttctcgaactt

SEQ ID NO: 145569 - DNA, 30 bp, Artificial Sequence
  Synthetic oligonucleotide
cgttgcataacaatcacgtcaaaataactt

SEQ ID NO: 145570 - DNA, 30 bp, Artificial Sequence
  Synthetic oligonucleotide
acgcgtgtaggttgaaaagggagataactt

SEQ ID NO: 145571 - DNA, 30 bp, Artificial Sequence
  Synthetic oligonucleotide
acgggcatgccataataataatactaactt

SEQ ID NO: 145572 - DNA, 30 bp, Artificial Sequence
  Synthetic oligonucleotide
ggtaaacagagatgctaacgagcttaactt

SEQ ID NO: 145573 - DNA, 30 bp, Artificial Sequence
  Synthetic oligonucleotide
tgctcatcaaatgaatcgcgatcttaactt

SEQ ID NO: 145574 - DNA, 30 bp, Artificial Sequence
  Synthetic oligonucleotide
tatgaagggtaggccaattggctttaactt

SEQ ID NO: 145575 - DNA, 30 bp, Artificial Sequence
  Synthetic oligonucleotide
taaggagcagtgggctggagaggaacactt

SEQ ID NO: 145576 - DNA, 30 bp, Artificial Sequence
  Synthetic oligonucleotide
gtgagaggttatcgtcaagggtgtccactt

SEQ ID NO: 145577 - DNA, 30 bp, Artificial Sequence
  Synthetic oligonucleotide
tcgtccgaactgtcataagatggcgcactt

SEQ ID NO: 145578 - DNA, 30 bp, Artificial Sequence
  Synthetic oligonucleotide
cgagccgaaggtgtcgcagagttggcactt

SEQ ID NO: 145579 - DNA, 30 bp, Artificial Sequence
  Synthetic oligonucleotide
agtcgtgccaacgcctgtaatgctgcactt

SEQ ID NO: 145580 - DNA, 30 bp, Artificial Sequence
  Synthetic oligonucleotide
agctacattgcgagtcacggggtatcactt

SEQ ID NO: 145581 - DNA, 30 bp, Artificial Sequence
  Synthetic oligonucleotide
agagaagtatctaagagtaccaactcactt

SEQ ID NO: 145582 - DNA, 30 bp, Artificial Sequence
  Synthetic oligonucleotide
cacgcatgtcttgacgaggttggctcactt

SEQ ID NO: 145583 - DNA, 30 bp, Artificial Sequence
  Synthetic oligonucleotide
taataaccctatcggcagtaatacagactt

SEQ ID NO: 145584 - DNA, 30 bp, Artificial Sequence
  Synthetic oligonucleotide
tgacccaaataagagttaactcagagactt

SEQ ID NO: 145585 - DNA, 30 bp, Artificial Sequence
  Synthetic oligonucleotide
acgacgctatcaaataggttaagccgactt

SEQ ID NO: 145586 - DNA, 30 bp, Artificial Sequence
  Synthetic oligonucleotide
tcaagaataggtagtgggactcctcgactt

SEQ ID NO: 145587 - DNA, 30 bp, Artificial Sequence
  Synthetic oligonucleotide
cctctgtgaagccacaaaagtatgggactt

SEQ ID NO: 145588 - DNA, 30 bp, Artificial Sequence
  Synthetic oligonucleotide
caacctaagagcaacaaaactagctgactt

SEQ ID NO: 145589 - DNA, 30 bp, Artificial Sequence
  Synthetic oligonucleotide
cgtcgtcgtgggtggaataccggttgactt

SEQ ID NO: 145590 - DNA, 30 bp, Artificial Sequence
  Synthetic oligonucleotide
ggccgagctacccagtacctgataatactt

SEQ ID NO: 145591 - DNA, 30 bp, Artificial Sequence
  Synthetic oligonucleotide
ccacactgtagccaacagttaaacatactt

SEQ ID NO: 145592 - DNA, 30 bp, Artificial Sequence
  Synthetic oligonucleotide
gtcaaatagtggcacaccctctcactactt

SEQ ID NO: 145593 - DNA, 30 bp, Artificial Sequence
  Synthetic oligonucleotide
cagaggctctgagctgagttcagactactt

SEQ ID NO: 145594 - DNA, 30 bp, Artificial Sequence
  Synthetic oligonucleotide
agaagagaatgtaaagcaaatgccgtactt

SEQ ID NO: 145595 - DNA, 30 bp, Artificial Sequence
  Synthetic oligonucleotide
acgtgtgaattggcaagacggggtgtactt

SEQ ID NO: 145596 - DNA, 30 bp, Artificial Sequence
  Synthetic oligonucleotide
taccatacgagtatatacacaagattactt

SEQ ID NO: 145597 - DNA, 31 bp, Artificial Sequence
  Synthetic oligonucleotide
ctaggtggtcgggttccatagacggttactt

SEQ ID NO: 145598 - DNA, 30 bp, Artificial Sequence
  Synthetic oligonucleotide
ccgccgaacctcttaggctcactaaacctt

SEQ ID NO: 145599 - DNA, 30 bp, Artificial Sequence
  Synthetic oligonucleotide
aggagcccgtgctatgccatatacaacctt

SEQ ID NO: 145600 - DNA, 30 bp, Artificial Sequence
  Synthetic oligonucleotide
ggcggagcagtcgaagtgatcagcaacctt

SEQ ID NO: 145601 - DNA, 30 bp, Artificial Sequence
  Synthetic oligonucleotide
agccgattgtcactcaaggggaggaacctt

SEQ ID NO: 145602 - DNA, 30 bp, Artificial Sequence
  Synthetic oligonucleotide
tagcactgcatacgcgagacatctaacctt

SEQ ID NO: 145603 - DNA, 30 bp, Artificial Sequence
  Synthetic oligonucleotide
agagtggacgatatttgctgtcatcacctt

SEQ ID NO: 145604 - DNA, 30 bp, Artificial Sequence
  Synthetic oligonucleotide
gggaacgaacggcatattgtgacggacctt

SEQ ID NO: 145605 - DNA, 30 bp, Artificial Sequence
  Synthetic oligonucleotide
cgaaggtttaaaagtgatagggattacctt

SEQ ID NO: 145606 - DNA, 30 bp, Artificial Sequence
  Synthetic oligonucleotide
attggggtgcgatagtctgactgttacctt

SEQ ID NO: 145607 - DNA, 30 bp, Artificial Sequence
  Synthetic oligonucleotide
agggtcaatttgattcttaaaggcaccctt

SEQ ID NO: 145608 - DNA, 30 bp, Artificial Sequence
  Synthetic oligonucleotide
cggggagataacccgagtatttcgcccctt

SEQ ID NO: 145609 - DNA, 30 bp, Artificial Sequence
  Synthetic oligonucleotide
gctgttaggctaacaaccgagcttgccctt

SEQ ID NO: 145610 - DNA, 31 bp, Artificial Sequence
  Synthetic oligonucleotide
tcactgttaaacatcactttcagtttccctt

SEQ ID NO: 145611 - DNA, 30 bp, Artificial Sequence
  Synthetic oligonucleotide
cgaatacagcgaaccggaagaaccagcctt

SEQ ID NO: 145612 - DNA, 30 bp, Artificial Sequence
  Synthetic oligonucleotide
accggacgtatgcccaaacgttctcgcctt

SEQ ID NO: 145613 - DNA, 30 bp, Artificial Sequence
  Synthetic oligonucleotide
acagacggtgcttaggcagatcgtcgcctt

SEQ ID NO: 145614 - DNA, 30 bp, Artificial Sequence
  Synthetic oligonucleotide
cgtaaacaagccacgggcatttttggcctt

SEQ ID NO: 145615 - DNA, 30 bp, Artificial Sequence
  Synthetic oligonucleotide
cagcgggtgaccccgttagttagctgcctt

SEQ ID NO: 145616 - DNA, 30 bp, Artificial Sequence
  Synthetic oligonucleotide
gggggatcattcgtagggtcattctgcctt

SEQ ID NO: 145617 - DNA, 30 bp, Artificial Sequence
  Synthetic oligonucleotide
tcaggttgactgcggaccggataaatcctt

SEQ ID NO: 145618 - DNA, 30 bp, Artificial Sequence
  Synthetic oligonucleotide
tcagacggaatgcagaaaaacagtgtcctt

SEQ ID NO: 145619 - DNA, 30 bp, Artificial Sequence
  Synthetic oligonucleotide
aggccgactctagggtccgaaaccttcctt

SEQ ID NO: 145620 - DNA, 30 bp, Artificial Sequence
  Synthetic oligonucleotide
aacaacagggagatccacggtgtgttcctt

SEQ ID NO: 145621 - DNA, 30 bp, Artificial Sequence
  Synthetic oligonucleotide
tcttatgcaacacgggctgtgggtaagctt

SEQ ID NO: 145622 - DNA, 30 bp, Artificial Sequence
  Synthetic oligonucleotide
gcggagcataatcgtggcgggcgagagctt

SEQ ID NO: 145623 - DNA, 30 bp, Artificial Sequence
  Synthetic oligonucleotide
gactgcttcagaagactagagtaatagctt

SEQ ID NO: 145624 - DNA, 30 bp, Artificial Sequence
  Synthetic oligonucleotide
tgagactgtcgagggcgcaaggcaacgctt

SEQ ID NO: 145625 - DNA, 30 bp, Artificial Sequence
  Synthetic oligonucleotide
aatcgatgtagtttgaaacctcctacgctt

SEQ ID NO: 145626 - DNA, 30 bp, Artificial Sequence
  Synthetic oligonucleotide
agaaggtcacgagaaaccccgcaaccgctt

SEQ ID NO: 145627 - DNA, 30 bp, Artificial Sequence
  Synthetic oligonucleotide
cacgtgtagctgtgggtcacaactccgctt

SEQ ID NO: 145628 - DNA, 30 bp, Artificial Sequence
  Synthetic oligonucleotide
tattgcgatctcacataacgtcaagcgctt

SEQ ID NO: 145629 - DNA, 30 bp, Artificial Sequence
  Synthetic oligonucleotide
gtagactggcaagaaactctttgcgcgctt

SEQ ID NO: 145630 - DNA, 30 bp, Artificial Sequence
  Synthetic oligonucleotide
aatggatcgcccacctagaggagcaggctt

SEQ ID NO: 145631 - DNA, 30 bp, Artificial Sequence
  Synthetic oligonucleotide
ataagtatcaccactcaactcaggaggctt

SEQ ID NO: 145632 - DNA, 30 bp, Artificial Sequence
  Synthetic oligonucleotide
gaaacgcggatttcgagatctcttcggctt

SEQ ID NO: 145633 - DNA, 30 bp, Artificial Sequence
  Synthetic oligonucleotide
catgtgtaatgtgaagggagtgtagggctt

SEQ ID NO: 145634 - DNA, 30 bp, Artificial Sequence
  Synthetic oligonucleotide
atgcaatcaggaaggagctgaaaggggctt

SEQ ID NO: 145635 - DNA, 30 bp, Artificial Sequence
  Synthetic oligonucleotide
ggaaacaaatcagccgaaggataggggctt

SEQ ID NO: 145636 - DNA, 30 bp, Artificial Sequence
  Synthetic oligonucleotide
gtagtagtaacgactgcttcctgggggctt

SEQ ID NO: 145637 - DNA, 30 bp, Artificial Sequence
  Synthetic oligonucleotide
ctaagggtgtgtaaacaatagtgtgggctt

SEQ ID NO: 145638 - DNA, 30 bp, Artificial Sequence
  Synthetic oligonucleotide
ggcacggataccggcggcatcaacatgctt

SEQ ID NO: 145639 - DNA, 30 bp, Artificial Sequence
  Synthetic oligonucleotide
aggtaggagcccgatatagaggacatgctt

SEQ ID NO: 145640 - DNA, 30 bp, Artificial Sequence
  Synthetic oligonucleotide
tcagaacggtccctcgctatacgtatgctt

SEQ ID NO: 145641 - DNA, 30 bp, Artificial Sequence
  Synthetic oligonucleotide
taatgggacaaagggaagatggggctgctt

SEQ ID NO: 145642 - DNA, 30 bp, Artificial Sequence
  Synthetic oligonucleotide
agcagaatcaaggagtctacattgctgctt

SEQ ID NO: 145643 - DNA, 30 bp, Artificial Sequence
  Synthetic oligonucleotide
ttgagcgggctgggacgcaagactctgctt

SEQ ID NO: 145644 - DNA, 30 bp, Artificial Sequence
  Synthetic oligonucleotide
cgcctgtgtaagtggtggtggtgtctgctt

SEQ ID NO: 145645 - DNA, 30 bp, Artificial Sequence
  Synthetic oligonucleotide
tacttccgaactgaacgttaccttctgctt

SEQ ID NO: 145646 - DNA, 31 bp, Artificial Sequence
  Synthetic oligonucleotide
accgtatagtcagtgaagagcgcatttgctt

SEQ ID NO: 145647 - DNA, 30 bp, Artificial Sequence
  Synthetic oligonucleotide
agtgtagggagagtagtgtaacgtcatctt

SEQ ID NO: 145648 - DNA, 30 bp, Artificial Sequence
  Synthetic oligonucleotide
gtcatgcgtaggccaggagccgatgatctt

SEQ ID NO: 145649 - DNA, 30 bp, Artificial Sequence
  Synthetic oligonucleotide
agacctcggaggtactctggaggtgatctt

SEQ ID NO: 145650 - DNA, 30 bp, Artificial Sequence
  Synthetic oligonucleotide
cttgtgggacgttacgaaacataatatctt

SEQ ID NO: 145651 - DNA, 30 bp, Artificial Sequence
  Synthetic oligonucleotide
aatcccgagtaactaatcgccaagtatctt

SEQ ID NO: 145652 - DNA, 30 bp, Artificial Sequence
  Synthetic oligonucleotide
ggctggatcccgaaaccggttgaaactctt

SEQ ID NO: 145653 - DNA, 30 bp, Artificial Sequence
  Synthetic oligonucleotide
tacgaacggatgataattcgagatagtctt

SEQ ID NO: 145654 - DNA, 30 bp, Artificial Sequence
  Synthetic oligonucleotide
gtcaaggtgtgatatagccgatgtcgtctt

SEQ ID NO: 145655 - DNA, 30 bp, Artificial Sequence
  Synthetic oligonucleotide
ctacaagcgtagaggaagcatctcggtctt

SEQ ID NO: 145656 - DNA, 30 bp, Artificial Sequence
  Synthetic oligonucleotide
tgacgtacgagtagactggggcctggtctt

SEQ ID NO: 145657 - DNA, 30 bp, Artificial Sequence
  Synthetic oligonucleotide
gtaggccgagtgtggaaacagtaatgtctt

SEQ ID NO: 145658 - DNA, 30 bp, Artificial Sequence
  Synthetic oligonucleotide
atgggtaatggtcaatgattactatgtctt

SEQ ID NO: 145659 - DNA, 30 bp, Artificial Sequence
  Synthetic oligonucleotide
aaaccgggggtcgggagttcgagacttctt

SEQ ID NO: 145660 - DNA, 30 bp, Artificial Sequence
  Synthetic oligonucleotide
aagtacgtgaaataatcgaaaagtcttctt

SEQ ID NO: 145661 - DNA, 30 bp, Artificial Sequence
  Synthetic oligonucleotide
catcacttgagggacgaccgtatggttctt

SEQ ID NO: 145662 - DNA, 30 bp, Artificial Sequence
  Synthetic oligonucleotide
gtgtaacggcgctcttcaaatcagtttctt

SEQ ID NO: 145663 - DNA, 30 bp, Artificial Sequence
  Synthetic oligonucleotide
gcggatttgcggtattgttaggcaaaagtt

SEQ ID NO: 145664 - DNA, 30 bp, Artificial Sequence
  Synthetic oligonucleotide
gcacgggaactgctataatcccagcaagtt

SEQ ID NO: 145665 - DNA, 30 bp, Artificial Sequence
  Synthetic oligonucleotide
gtaacgaggggcattcgacgtggtcaagtt

SEQ ID NO: 145666 - DNA, 30 bp, Artificial Sequence
  Synthetic oligonucleotide
ccacgacattgtttgcaacgttcagaagtt

SEQ ID NO: 145667 - DNA, 30 bp, Artificial Sequence
  Synthetic oligonucleotide
cgggaaaacgtggggcacactctagaagtt

SEQ ID NO: 145668 - DNA, 30 bp, Artificial Sequence
  Synthetic oligonucleotide
actaaaagaacctgaggaaaaaaggaagtt

SEQ ID NO: 145669 - DNA, 30 bp, Artificial Sequence
  Synthetic oligonucleotide
ctgggcttctacaggcgccgtccggaagtt

SEQ ID NO: 145670 - DNA, 30 bp, Artificial Sequence
  Synthetic oligonucleotide
agagagaggcacgaacagggtccggaagtt

SEQ ID NO: 145671 - DNA, 30 bp, Artificial Sequence
  Synthetic oligonucleotide
ctcactaagtggagagcgtaggcggaagtt

SEQ ID NO: 145672 - DNA, 30 bp, Artificial Sequence
  Synthetic oligonucleotide
ggtacaaaaacccacggaaacgaataagtt

SEQ ID NO: 145673 - DNA, 30 bp, Artificial Sequence
  Synthetic oligonucleotide
acccataagcaacgatttctgcggtaagtt

SEQ ID NO: 145674 - DNA, 30 bp, Artificial Sequence
  Synthetic oligonucleotide
atgctgtcttatgcacgctagtggacagtt

SEQ ID NO: 145675 - DNA, 30 bp, Artificial Sequence
  Synthetic oligonucleotide
cagtaggccgacacatgtgaagccccagtt

SEQ ID NO: 145676 - DNA, 30 bp, Artificial Sequence
  Synthetic oligonucleotide
cggcactgattaagtgaaaacgtagcagtt

SEQ ID NO: 145677 - DNA, 30 bp, Artificial Sequence
  Synthetic oligonucleotide
ctgcgctccaacccataactaatggcagtt

SEQ ID NO: 145678 - DNA, 30 bp, Artificial Sequence
  Synthetic oligonucleotide
gaacaccggggtgggggtcgtcttgcagtt

SEQ ID NO: 145679 - DNA, 30 bp, Artificial Sequence
  Synthetic oligonucleotide
acggtcggctatatgcgccctcgatcagtt

SEQ ID NO: 145680 - DNA, 30 bp, Artificial Sequence
  Synthetic oligonucleotide
ctcgacaaggaagccagtgttgactcagtt

SEQ ID NO: 145681 - DNA, 30 bp, Artificial Sequence
  Synthetic oligonucleotide
gatatgggtgaatggcgaaagtactcagtt

SEQ ID NO: 145682 - DNA, 30 bp, Artificial Sequence
  Synthetic oligonucleotide
gcggttctggcttaggcagacaagtcagtt

SEQ ID NO: 145683 - DNA, 30 bp, Artificial Sequence
  Synthetic oligonucleotide
gctgagatcaaaccgacactggagagagtt

SEQ ID NO: 145684 - DNA, 30 bp, Artificial Sequence
  Synthetic oligonucleotide
aacaaaattggtggaggcacgtgaggagtt

SEQ ID NO: 145685 - DNA, 30 bp, Artificial Sequence
  Synthetic oligonucleotide
aggaacagagtatgagtttcggtaggagtt

SEQ ID NO: 145686 - DNA, 30 bp, Artificial Sequence
  Synthetic oligonucleotide
cgtgttcatcaggtaggagagtacggagtt

SEQ ID NO: 145687 - DNA, 30 bp, Artificial Sequence
  Synthetic oligonucleotide
tgcaggagggctcaatttgatatcggagtt

SEQ ID NO: 145688 - DNA, 30 bp, Artificial Sequence
  Synthetic oligonucleotide
ggactaagctcattagggaatgagggagtt

SEQ ID NO: 145689 - DNA, 30 bp, Artificial Sequence
  Synthetic oligonucleotide
ccccgaagcaagggtcaggagcggggagtt

SEQ ID NO: 145690 - DNA, 30 bp, Artificial Sequence
  Synthetic oligonucleotide
ggaaaccacgtaattcctacaatgggagtt

SEQ ID NO: 145691 - DNA, 30 bp, Artificial Sequence
  Synthetic oligonucleotide
gggtcgagtacggtgcagggataatgagtt

SEQ ID NO: 145692 - DNA, 30 bp, Artificial Sequence
  Synthetic oligonucleotide
ccccaaaggatctgtatatcgtacatagtt

SEQ ID NO: 145693 - DNA, 30 bp, Artificial Sequence
  Synthetic oligonucleotide
cgggggacgaaccgaattgggccgatagtt

SEQ ID NO: 145694 - DNA, 30 bp, Artificial Sequence
  Synthetic oligonucleotide
gcgtgctattgcacaatgcctcaactagtt

SEQ ID NO: 145695 - DNA, 30 bp, Artificial Sequence
  Synthetic oligonucleotide
aagggtaaaattaaggctatagcactagtt

SEQ ID NO: 145696 - DNA, 30 bp, Artificial Sequence
  Synthetic oligonucleotide
gacaacgtgacccagtcatttcaggtagtt

SEQ ID NO: 145697 - DNA, 30 bp, Artificial Sequence
  Synthetic oligonucleotide
gaatcgatctaggaatctatcggattagtt

SEQ ID NO: 145698 - DNA, 30 bp, Artificial Sequence
  Synthetic oligonucleotide
taccctaggtctgtcttaaaagccaacgtt

SEQ ID NO: 145699 - DNA, 30 bp, Artificial Sequence
  Synthetic oligonucleotide
acctcacggtgaaggagctctcgtaacgtt

SEQ ID NO: 145700 - DNA, 30 bp, Artificial Sequence
  Synthetic oligonucleotide
gaagcagaagccaaacactaagctcacgtt

SEQ ID NO: 145701 - DNA, 30 bp, Artificial Sequence
  Synthetic oligonucleotide
gaaaaaccagctcctgcgactgtggacgtt

SEQ ID NO: 145702 - DNA, 30 bp, Artificial Sequence
  Synthetic oligonucleotide
tgtctgtccgtggtaggtatgcctgacgtt

SEQ ID NO: 145703 - DNA, 30 bp, Artificial Sequence
  Synthetic oligonucleotide
atacaagcgtgaccgcaggcggtatacgtt

SEQ ID NO: 145704 - DNA, 30 bp, Artificial Sequence
  Synthetic oligonucleotide
tagcggtaagggcgaaagcttggctacgtt

SEQ ID NO: 145705 - DNA, 30 bp, Artificial Sequence
  Synthetic oligonucleotide
cgagcgggaatcgttcgaggatattacgtt

SEQ ID NO: 145706 - DNA, 30 bp, Artificial Sequence
  Synthetic oligonucleotide
acagggcatgttcgcatttttgttaccgtt

SEQ ID NO: 145707 - DNA, 30 bp, Artificial Sequence
  Synthetic oligonucleotide
tccaaccacgccgcaagtaaggaacccgtt

SEQ ID NO: 145708 - DNA, 30 bp, Artificial Sequence
  Synthetic oligonucleotide
tacgttggcgctacagcattaccacccgtt

SEQ ID NO: 145709 - DNA, 30 bp, Artificial Sequence
  Synthetic oligonucleotide
gtaatttaagacgagactgcgttgcccgtt

SEQ ID NO: 145710 - DNA, 30 bp, Artificial Sequence
  Synthetic oligonucleotide
cctggtaggcgctcacatacacatcccgtt

SEQ ID NO: 145711 - DNA, 30 bp, Artificial Sequence
  Synthetic oligonucleotide
agtcgacgaaggaattgcgtgaaagccgtt

SEQ ID NO: 145712 - DNA, 30 bp, Artificial Sequence
  Synthetic oligonucleotide
ggctatgcgaaattgtcccagtgcgccgtt

SEQ ID NO: 145713 - DNA, 30 bp, Artificial Sequence
  Synthetic oligonucleotide
gggcatcaaatcacatttttaggggccgtt

SEQ ID NO: 145714 - DNA, 30 bp, Artificial Sequence
  Synthetic oligonucleotide
acgcgagcctaccgttatgagagctccgtt

SEQ ID NO: 145715 - DNA, 30 bp, Artificial Sequence
  Synthetic oligonucleotide
gaaggggtcggatcaccgcataagtccgtt

SEQ ID NO: 145716 - DNA, 30 bp, Artificial Sequence
  Synthetic oligonucleotide
cgaatcccggcgacctcaactcgttccgtt

SEQ ID NO: 145717 - DNA, 30 bp, Artificial Sequence
  Synthetic oligonucleotide
cagatagtacctagccggtacagaagcgtt

SEQ ID NO: 145718 - DNA, 30 bp, Artificial Sequence
  Synthetic oligonucleotide
gctaccggggggtactggtaagagagcgtt

SEQ ID NO: 145719 - DNA, 30 bp, Artificial Sequence
  Synthetic oligonucleotide
tgtcaattggagtagatcagccgtagcgtt

SEQ ID NO: 145720 - DNA, 30 bp, Artificial Sequence
  Synthetic oligonucleotide
atgattcaatggtgaggcatgtaacgcgtt

SEQ ID NO: 145721 - DNA, 30 bp, Artificial Sequence
  Synthetic oligonucleotide
taagcaccaacattgtcgtttaaccgcgtt

SEQ ID NO: 145722 - DNA, 30 bp, Artificial Sequence
  Synthetic oligonucleotide
gctgggagtgtacgaccatcccggggcgtt

SEQ ID NO: 145723 - DNA, 30 bp, Artificial Sequence
  Synthetic oligonucleotide
gatcaggtagggatcagccgttggggcgtt

SEQ ID NO: 145724 - DNA, 30 bp, Artificial Sequence
  Synthetic oligonucleotide
tggatcctgcgataatccccggtctgcgtt

SEQ ID NO: 145725 - DNA, 30 bp, Artificial Sequence
  Synthetic oligonucleotide
cagtgaatcagcctgttccgcgtaatcgtt

SEQ ID NO: 145726 - DNA, 30 bp, Artificial Sequence
  Synthetic oligonucleotide
gcgatagaggaaaattgatgttaactcgtt

SEQ ID NO: 145727 - DNA, 30 bp, Artificial Sequence
  Synthetic oligonucleotide
ccaaggcaagtgagactatacctgctcgtt

SEQ ID NO: 145728 - DNA, 30 bp, Artificial Sequence
  Synthetic oligonucleotide
gggtgatccgcgtatacatgtgctctcgtt

SEQ ID NO: 145729 - DNA, 30 bp, Artificial Sequence
  Synthetic oligonucleotide
acaacagggtccgtgacttcgggagtcgtt

SEQ ID NO: 145730 - DNA, 30 bp, Artificial Sequence
  Synthetic oligonucleotide
gtacgattcgacagtaggtaggaggtcgtt

SEQ ID NO: 145731 - DNA, 30 bp, Artificial Sequence
  Synthetic oligonucleotide
acatatggagacacggaccagcgattcgtt

SEQ ID NO: 145732 - DNA, 30 bp, Artificial Sequence
  Synthetic oligonucleotide
acacagtgggtcgaacggaggggcttcgtt

SEQ ID NO: 145733 - DNA, 30 bp, Artificial Sequence
  Synthetic oligonucleotide
cattgctcttaacacacgtaacggttcgtt

SEQ ID NO: 145734 - DNA, 30 bp, Artificial Sequence
  Synthetic oligonucleotide
gacgtgtcgtctaagtattactatttcgtt

SEQ ID NO: 145735 - DNA, 30 bp, Artificial Sequence
  Synthetic oligonucleotide
atggctgcaataaagcctgtgatcaaggtt

SEQ ID NO: 145736 - DNA, 30 bp, Artificial Sequence
  Synthetic oligonucleotide
aggcaagcaggccctatcgggcggaaggtt

SEQ ID NO: 145737 - DNA, 30 bp, Artificial Sequence
  Synthetic oligonucleotide
atcgataaaagttacacaaaggggaaggtt

SEQ ID NO: 145738 - DNA, 30 bp, Artificial Sequence
  Synthetic oligonucleotide
ctgcggtgagatgagcgcagaatgaaggtt

SEQ ID NO: 145739 - DNA, 30 bp, Artificial Sequence
  Synthetic oligonucleotide
acaggtcaaataaaagttttgagtaaggtt

SEQ ID NO: 145740 - DNA, 30 bp, Artificial Sequence
  Synthetic oligonucleotide
actcgtgggatgagggcatgtcaacaggtt

SEQ ID NO: 145741 - DNA, 30 bp, Artificial Sequence
  Synthetic oligonucleotide
caagaatattttggaacaaatgctgaggtt

SEQ ID NO: 145742 - DNA, 30 bp, Artificial Sequence
  Synthetic oligonucleotide
agagtaggtggagcagcggaagttgaggtt

SEQ ID NO: 145743 - DNA, 30 bp, Artificial Sequence
  Synthetic oligonucleotide
aggaagtacttatcaattcgtaaataggtt

SEQ ID NO: 145744 - DNA, 30 bp, Artificial Sequence
  Synthetic oligonucleotide
tacccacggagggtttggtcacactaggtt

SEQ ID NO: 145745 - DNA, 30 bp, Artificial Sequence
  Synthetic oligonucleotide
cgtggtgcctgtacagggtctcattaggtt

SEQ ID NO: 145746 - DNA, 30 bp, Artificial Sequence
  Synthetic oligonucleotide
ggtggacgcctggcggaacatcgttaggtt

SEQ ID NO: 145747 - DNA, 30 bp, Artificial Sequence
  Synthetic oligonucleotide
gcgaaggaattcacaaccgttatttaggtt

SEQ ID NO: 145748 - DNA, 30 bp, Artificial Sequence
  Synthetic oligonucleotide
gtaggtaggtgcatgttgttgtcaacggtt

SEQ ID NO: 145749 - DNA, 30 bp, Artificial Sequence
  Synthetic oligonucleotide
taagacccagtggtcaaggattgcccggtt

SEQ ID NO: 145750 - DNA, 30 bp, Artificial Sequence
  Synthetic oligonucleotide
tacgccgagggtgtgaatggcattccggtt

SEQ ID NO: 145751 - DNA, 30 bp, Artificial Sequence
  Synthetic oligonucleotide
atctccaagtataggattgcgatctcggtt

SEQ ID NO: 145752 - DNA, 30 bp, Artificial Sequence
  Synthetic oligonucleotide
catcgttctgggtaatagcgtcttagggtt

SEQ ID NO: 145753 - DNA, 30 bp, Artificial Sequence
  Synthetic oligonucleotide
cacaaagtggcgtagcgtaacatgcgggtt

SEQ ID NO: 145754 - DNA, 30 bp, Artificial Sequence
  Synthetic oligonucleotide
aactgaacgagaaaaactcgatatcgggtt

SEQ ID NO: 145755 - DNA, 30 bp, Artificial Sequence
  Synthetic oligonucleotide
cggaactgtgatttcaaaaggcacggggtt

SEQ ID NO: 145756 - DNA, 30 bp, Artificial Sequence
  Synthetic oligonucleotide
ctgcatgtcaagtaggatcgtaagggggtt

SEQ ID NO: 145757 - DNA, 30 bp, Artificial Sequence
  Synthetic oligonucleotide
cagattggtaacggagtggttaatggggtt

SEQ ID NO: 145758 - DNA, 30 bp, Artificial Sequence
  Synthetic oligonucleotide
tcttagaggtccactaaggcagttggggtt

SEQ ID NO: 145759 - DNA, 30 bp, Artificial Sequence
  Synthetic oligonucleotide
gtgagtggagtgaattgtgtttgatgggtt

SEQ ID NO: 145760 - DNA, 30 bp, Artificial Sequence
  Synthetic oligonucleotide
aacagaccgagtgtatcagtataaatggtt

SEQ ID NO: 145761 - DNA, 30 bp, Artificial Sequence
  Synthetic oligonucleotide
acgcctgtgcttactcgagacagaatggtt

SEQ ID NO: 145762 - DNA, 30 bp, Artificial Sequence
  Synthetic oligonucleotide
aatcgttagaggtagctgtgagacatggtt

SEQ ID NO: 145763 - DNA, 30 bp, Artificial Sequence
  Synthetic oligonucleotide
ttgggggtaggtccgaccgtagacatggtt

SEQ ID NO: 145764 - DNA, 30 bp, Artificial Sequence
  Synthetic oligonucleotide
ttgtatgtaataagagcgaagagtatggtt

SEQ ID NO: 145765 - DNA, 30 bp, Artificial Sequence
  Synthetic oligonucleotide
cagcatgcaaaggggaaagttggtatggtt

SEQ ID NO: 145766 - DNA, 30 bp, Artificial Sequence
  Synthetic oligonucleotide
cgcgtgtggggacaatttactgaactggtt

SEQ ID NO: 145767 - DNA, 30 bp, Artificial Sequence
  Synthetic oligonucleotide
gtactagatagtccagcgcgaccactggtt

SEQ ID NO: 145768 - DNA, 30 bp, Artificial Sequence
  Synthetic oligonucleotide
cataggaatcgaggctcatatgggctggtt

SEQ ID NO: 145769 - DNA, 30 bp, Artificial Sequence
  Synthetic oligonucleotide
aacaaggccactacaaggcggcatctggtt

SEQ ID NO: 145770 - DNA, 30 bp, Artificial Sequence
  Synthetic oligonucleotide
cctaatgcttctgtggcgggtcccgtggtt

SEQ ID NO: 145771 - DNA, 30 bp, Artificial Sequence
  Synthetic oligonucleotide
tcgtatccttggtcgacatttacattggtt

SEQ ID NO: 145772 - DNA, 30 bp, Artificial Sequence
  Synthetic oligonucleotide
aactcgatacaccgcccgcatccgaatgtt

SEQ ID NO: 145773 - DNA, 30 bp, Artificial Sequence
  Synthetic oligonucleotide
acgacagatgtctggctacggtcgaatgtt

SEQ ID NO: 145774 - DNA, 30 bp, Artificial Sequence
  Synthetic oligonucleotide
aagcacacacatcgtggcatcaataatgtt

SEQ ID NO: 145775 - DNA, 30 bp, Artificial Sequence
  Synthetic oligonucleotide
tggcatacacgggcgcaatagatacatgtt

SEQ ID NO: 145776 - DNA, 30 bp, Artificial Sequence
  Synthetic oligonucleotide
ccttggaacgtgcgatggaacaagcatgtt

SEQ ID NO: 145777 - DNA, 30 bp, Artificial Sequence
  Synthetic oligonucleotide
gtagaaagccttgtacacgtgaagcatgtt

SEQ ID NO: 145778 - DNA, 30 bp, Artificial Sequence
  Synthetic oligonucleotide
gaggaaagaaccacctctctttaagatgtt

SEQ ID NO: 145779 - DNA, 30 bp, Artificial Sequence
  Synthetic oligonucleotide
tcacccgagtagattcacacagtcgatgtt

SEQ ID NO: 145780 - DNA, 30 bp, Artificial Sequence
  Synthetic oligonucleotide
ctcagggcattcatctagtcgtcggatgtt

SEQ ID NO: 145781 - DNA, 30 bp, Artificial Sequence
  Synthetic oligonucleotide
gcacaataagcagtcgtacctttggatgtt

SEQ ID NO: 145782 - DNA, 30 bp, Artificial Sequence
  Synthetic oligonucleotide
ggcgatagtatgtaggtcaataaatatgtt

SEQ ID NO: 145783 - DNA, 30 bp, Artificial Sequence
  Synthetic oligonucleotide
gacgcctccgacggatgaggaaagtatgtt

SEQ ID NO: 145784 - DNA, 30 bp, Artificial Sequence
  Synthetic oligonucleotide
caaacagattcgaaatcgagtaggtatgtt

SEQ ID NO: 145785 - DNA, 30 bp, Artificial Sequence
  Synthetic oligonucleotide
gtgcataggctacaactagcatggtatgtt

SEQ ID NO: 145786 - DNA, 30 bp, Artificial Sequence
  Synthetic oligonucleotide
aaacgttcagggtaagatcggttaactgtt

SEQ ID NO: 145787 - DNA, 30 bp, Artificial Sequence
  Synthetic oligonucleotide
cgattatgaaggatgaaaacgacacctgtt

SEQ ID NO: 145788 - DNA, 30 bp, Artificial Sequence
  Synthetic oligonucleotide
gggtagcgtgagagcaaattcatagctgtt

SEQ ID NO: 145789 - DNA, 30 bp, Artificial Sequence
  Synthetic oligonucleotide
gatgttatcttggtgtgagctggggctgtt

SEQ ID NO: 145790 - DNA, 30 bp, Artificial Sequence
  Synthetic oligonucleotide
gcgtttccgacagtgacgtcatcaagtgtt

SEQ ID NO: 145791 - DNA, 30 bp, Artificial Sequence
  Synthetic oligonucleotide
gtgagtaacctatgtgtggtggggggtgtt

SEQ ID NO: 145792 - DNA, 30 bp, Artificial Sequence
  Synthetic oligonucleotide
taagcttgaaggtccatggtaggcattgtt

SEQ ID NO: 145793 - DNA, 30 bp, Artificial Sequence
  Synthetic oligonucleotide
ctggagggcgaagaaggagtacgccttgtt

SEQ ID NO: 145794 - DNA, 29 bp, Artificial Sequence
  Synthetic oligonucleotide
ctccagaaagtacaagtgaagagcttgtt

SEQ ID NO: 145795 - DNA, 30 bp, Artificial Sequence
  Synthetic oligonucleotide
tctcgctagtgacaaagcatgtcctttgtt

SEQ ID NO: 145796 - DNA, 30 bp, Artificial Sequence
  Synthetic oligonucleotide
atcggcttgaattcaatcactgaaaaattt

SEQ ID NO: 145797 - DNA, 30 bp, Artificial Sequence
  Synthetic oligonucleotide
atcggtggtgaaagtgcagagtgaaaattt

SEQ ID NO: 145798 - DNA, 30 bp, Artificial Sequence
  Synthetic oligonucleotide
ccatcgtggataagagggtatgggcaattt

SEQ ID NO: 145799 - DNA, 30 bp, Artificial Sequence
  Synthetic oligonucleotide
taacgtcgagtggtgagagttaccgaattt

SEQ ID NO: 145800 - DNA, 30 bp, Artificial Sequence
  Synthetic oligonucleotide
ggggatatacgctttcgagggatcgaattt

SEQ ID NO: 145801 - DNA, 30 bp, Artificial Sequence
  Synthetic oligonucleotide
agacactttgaccaggatcgttgggaattt

SEQ ID NO: 145802 - DNA, 30 bp, Artificial Sequence
  Synthetic oligonucleotide
tggcgtcggggcgttgacgtaaatgaattt

SEQ ID NO: 145803 - DNA, 30 bp, Artificial Sequence
  Synthetic oligonucleotide
tgaacctgaaggccagcgtgtggtgaattt

SEQ ID NO: 145804 - DNA, 30 bp, Artificial Sequence
  Synthetic oligonucleotide
gcttgaatgcgtaagctatgactataattt

SEQ ID NO: 145805 - DNA, 30 bp, Artificial Sequence
  Synthetic oligonucleotide
tgaaatggttgtggccgcaaacggtaattt

SEQ ID NO: 145806 - DNA, 30 bp, Artificial Sequence
  Synthetic oligonucleotide
gtcgagccaacgtctaaatgtcggtaattt

SEQ ID NO: 145807 - DNA, 30 bp, Artificial Sequence
  Synthetic oligonucleotide
atggaaggggtcgcccgttgattgtaattt

SEQ ID NO: 145808 - DNA, 30 bp, Artificial Sequence
  Synthetic oligonucleotide
acatgaccgccagggaaaaggtattaattt

SEQ ID NO: 145809 - DNA, 30 bp, Artificial Sequence
  Synthetic oligonucleotide
ggctaccagtagtaagccaatgcagcattt

SEQ ID NO: 145810 - DNA, 30 bp, Artificial Sequence
  Synthetic oligonucleotide
gggaaagaagtttagaaaacccgagcattt

SEQ ID NO: 145811 - DNA, 30 bp, Artificial Sequence
  Synthetic oligonucleotide
cgcgttgctaggccaacgatgtgagcattt

SEQ ID NO: 145812 - DNA, 30 bp, Artificial Sequence
  Synthetic oligonucleotide
ggtgaggattggtaaagcgatttttcattt

SEQ ID NO: 145813 - DNA, 30 bp, Artificial Sequence
  Synthetic oligonucleotide
aagtcacttccaaaggggcaatgaagattt

SEQ ID NO: 145814 - DNA, 30 bp, Artificial Sequence
  Synthetic oligonucleotide
agaaattaaaggtaggcataatcgcgattt

SEQ ID NO: 145815 - DNA, 30 bp, Artificial Sequence
  Synthetic oligonucleotide
ccgaggagaggtccagctcggcgaggattt

SEQ ID NO: 145816 - DNA, 30 bp, Artificial Sequence
  Synthetic oligonucleotide
aatcgatacgccaaggcagtccacggattt

SEQ ID NO: 145817 - DNA, 30 bp, Artificial Sequence
  Synthetic oligonucleotide
taggggaagaggtaatcgatccgcggattt

SEQ ID NO: 145818 - DNA, 30 bp, Artificial Sequence
  Synthetic oligonucleotide
cccaccaccggtgaactcgacttttgattt

SEQ ID NO: 145819 - DNA, 30 bp, Artificial Sequence
  Synthetic oligonucleotide
cacgtttagaaccatgaaatcgagatattt

SEQ ID NO: 145820 - DNA, 30 bp, Artificial Sequence
  Synthetic oligonucleotide
agggtaacgatagaagcgacttctatattt

SEQ ID NO: 145821 - DNA, 30 bp, Artificial Sequence
  Synthetic oligonucleotide
gagaggcacacgtaggtaagcactctattt

SEQ ID NO: 145822 - DNA, 30 bp, Artificial Sequence
  Synthetic oligonucleotide
agcccgggagtacatttagcctgagtattt

SEQ ID NO: 145823 - DNA, 30 bp, Artificial Sequence
  Synthetic oligonucleotide
caccagttagggggctcgcgtcccgtattt

SEQ ID NO: 145824 - DNA, 30 bp, Artificial Sequence
  Synthetic oligonucleotide
aagtgagcgagaatgcaattttccgtattt

SEQ ID NO: 145825 - DNA, 30 bp, Artificial Sequence
  Synthetic oligonucleotide
cgttcccgaaccgaattaaggaaggtattt

SEQ ID NO: 145826 - DNA, 31 bp, Artificial Sequence
  Synthetic oligonucleotide
ggaccgggactgatcgaccctgatattattt

SEQ ID NO: 145827 - DNA, 30 bp, Artificial Sequence
  Synthetic oligonucleotide
gcgactgtgcaggtagggctagtcttattt

SEQ ID NO: 145828 - DNA, 30 bp, Artificial Sequence
  Synthetic oligonucleotide
tctatgctgtagagaatagctgtaaacttt

SEQ ID NO: 145829 - DNA, 30 bp, Artificial Sequence
  Synthetic oligonucleotide
caagcgcgggggacgggtatacgcaacttt

SEQ ID NO: 145830 - DNA, 30 bp, Artificial Sequence
  Synthetic oligonucleotide
gcctaggggactaaatagctcgcgaacttt

SEQ ID NO: 145831 - DNA, 30 bp, Artificial Sequence
  Synthetic oligonucleotide
tcgtgactggtcgtgggaaacctggacttt

SEQ ID NO: 145832 - DNA, 30 bp, Artificial Sequence
  Synthetic oligonucleotide
agtcctatcaagaaggttcccgcctacttt

SEQ ID NO: 145833 - DNA, 30 bp, Artificial Sequence
  Synthetic oligonucleotide
caagagcagcgcgtttcggggttcaccttt

SEQ ID NO: 145834 - DNA, 30 bp, Artificial Sequence
  Synthetic oligonucleotide
atggtaaaaaacggcgatcaatagcccttt

SEQ ID NO: 145835 - DNA, 30 bp, Artificial Sequence
  Synthetic oligonucleotide
agcgtcagatctatacgagggctttccttt

SEQ ID NO: 145836 - DNA, 30 bp, Artificial Sequence
  Synthetic oligonucleotide
acgcgggcggcccccgcaagataaagcttt

SEQ ID NO: 145837 - DNA, 30 bp, Artificial Sequence
  Synthetic oligonucleotide
gcgacgggattgttgcaagaatcgagcttt

SEQ ID NO: 145838 - DNA, 30 bp, Artificial Sequence
  Synthetic oligonucleotide
caggcaccatagcaaacgagcaggagcttt

SEQ ID NO: 145839 - DNA, 30 bp, Artificial Sequence
  Synthetic oligonucleotide
gtatgaagttgaagattgagagttagcttt

SEQ ID NO: 145840 - DNA, 30 bp, Artificial Sequence
  Synthetic oligonucleotide
aaaggccccaggggacgttagtatcgcttt

SEQ ID NO: 145841 - DNA, 30 bp, Artificial Sequence
  Synthetic oligonucleotide
ggatgcagttcagagtgtaacttcggcttt

SEQ ID NO: 145842 - DNA, 30 bp, Artificial Sequence
  Synthetic oligonucleotide
ccgtgatatggaacgagttattaatgcttt

SEQ ID NO: 145843 - DNA, 30 bp, Artificial Sequence
  Synthetic oligonucleotide
gatcaggtagtgacgggatccagttgcttt

SEQ ID NO: 145844 - DNA, 30 bp, Artificial Sequence
  Synthetic oligonucleotide
cgatgaagctataacgtaaacagaatcttt

SEQ ID NO: 145845 - DNA, 30 bp, Artificial Sequence
  Synthetic oligonucleotide
agcttgggtggcgttaaagccatcatcttt

SEQ ID NO: 145846 - DNA, 30 bp, Artificial Sequence
  Synthetic oligonucleotide
agggcactcaggggcaattcgatgatcttt

SEQ ID NO: 145847 - DNA, 30 bp, Artificial Sequence
  Synthetic oligonucleotide
caacgaccataccagatttggattatcttt

SEQ ID NO: 145848 - DNA, 30 bp, Artificial Sequence
  Synthetic oligonucleotide
acataactttgacgggggcgcaccctcttt

SEQ ID NO: 145849 - DNA, 30 bp, Artificial Sequence
  Synthetic oligonucleotide
tcggcaatcttgaggcgaatggagctcttt

SEQ ID NO: 145850 - DNA, 30 bp, Artificial Sequence
  Synthetic oligonucleotide
acggatgctccttggtagtataggctcttt

SEQ ID NO: 145851 - DNA, 30 bp, Artificial Sequence
  Synthetic oligonucleotide
gtagttgaactaagaggtaacttgctcttt

SEQ ID NO: 145852 - DNA, 30 bp, Artificial Sequence
  Synthetic oligonucleotide
aaggcgggaagaaacaggccaactctcttt

SEQ ID NO: 145853 - DNA, 31 bp, Artificial Sequence
  Synthetic oligonucleotide
ccgatctgaatattacagcttgggagtcttt

SEQ ID NO: 145854 - DNA, 30 bp, Artificial Sequence
  Synthetic oligonucleotide
ccgtcggcaacacacggttaacaattcttt

SEQ ID NO: 145855 - DNA, 30 bp, Artificial Sequence
  Synthetic oligonucleotide
gttgggcgtagacgagcagcggggttcttt

SEQ ID NO: 145856 - DNA, 30 bp, Artificial Sequence
  Synthetic oligonucleotide
aagacatgggaacgctcaagcagccagttt

SEQ ID NO: 145857 - DNA, 30 bp, Artificial Sequence
  Synthetic oligonucleotide
ctgcgtactgagcggggcttgtgggagttt

SEQ ID NO: 145858 - DNA, 30 bp, Artificial Sequence
  Synthetic oligonucleotide
acgcattcaacatgcagtcacgagacgttt

SEQ ID NO: 145859 - DNA, 30 bp, Artificial Sequence
  Synthetic oligonucleotide
gactgatgggcgcgatccatgaccgcgttt

SEQ ID NO: 145860 - DNA, 30 bp, Artificial Sequence
  Synthetic oligonucleotide
aggactggtccagctgttgtgcaatcgttt

SEQ ID NO: 145861 - DNA, 30 bp, Artificial Sequence
  Synthetic oligonucleotide
atactacgaggaaactaggtgggatcgttt

SEQ ID NO: 145862 - DNA, 30 bp, Artificial Sequence
  Synthetic oligonucleotide
agatgcgcgtaggccgttaaatgatcgttt

SEQ ID NO: 145863 - DNA, 30 bp, Artificial Sequence
  Synthetic oligonucleotide
tgcgacttggagttccatctaatatcgttt

SEQ ID NO: 145864 - DNA, 30 bp, Artificial Sequence
  Synthetic oligonucleotide
gggactgatagtggtttaaggatctcgttt

SEQ ID NO: 145865 - DNA, 30 bp, Artificial Sequence
  Synthetic oligonucleotide
tagtagggaaggcttacaaaacggtcgttt

SEQ ID NO: 145866 - DNA, 30 bp, Artificial Sequence
  Synthetic oligonucleotide
ccgcgtgttagaaatcaaaggataaggttt

SEQ ID NO: 145867 - DNA, 30 bp, Artificial Sequence
  Synthetic oligonucleotide
tgtaggatgtaaatgtaggtaatcaggttt

SEQ ID NO: 145868 - DNA, 30 bp, Artificial Sequence
  Synthetic oligonucleotide
gtcgactggatgtaacgtcggaggaggttt

SEQ ID NO: 145869 - DNA, 30 bp, Artificial Sequence
  Synthetic oligonucleotide
cggacttaaggaagccactgtgataggttt

SEQ ID NO: 145870 - DNA, 30 bp, Artificial Sequence
  Synthetic oligonucleotide
cggcaggcggataggttggcatttaggttt

SEQ ID NO: 145871 - DNA, 30 bp, Artificial Sequence
  Synthetic oligonucleotide
cgcaaggtgtctcagacccgaaaacggttt

SEQ ID NO: 145872 - DNA, 30 bp, Artificial Sequence
  Synthetic oligonucleotide
gtgaaaaatacataggtctaggcacggttt

SEQ ID NO: 145873 - DNA, 30 bp, Artificial Sequence
  Synthetic oligonucleotide
atacggcaatcctaactgttcttacggttt

SEQ ID NO: 145874 - DNA, 30 bp, Artificial Sequence
  Synthetic oligonucleotide
cgttagggtagcacaggccgttcgcggttt

SEQ ID NO: 145875 - DNA, 30 bp, Artificial Sequence
  Synthetic oligonucleotide
ttcgcagtacaaagacaagaaaggcggttt

SEQ ID NO: 145876 - DNA, 30 bp, Artificial Sequence
  Synthetic oligonucleotide
acctacaagggtcgatgatacggggggttt

SEQ ID NO: 145877 - DNA, 30 bp, Artificial Sequence
  Synthetic oligonucleotide
gtgtgggtagaaaagacacagtcctggttt

SEQ ID NO: 145878 - DNA, 30 bp, Artificial Sequence
  Synthetic oligonucleotide
gaaggaagataacagggaacattctggttt

SEQ ID NO: 145879 - DNA, 30 bp, Artificial Sequence
  Synthetic oligonucleotide
tcagacggggagcggacagctatgtggttt

SEQ ID NO: 145880 - DNA, 27 bp, Artificial Sequence
  Synthetic oligonucleotide
gtataagaaaggggactttgaatgttt

SEQ ID NO: 145881 - DNA, 30 bp, Artificial Sequence
  Synthetic oligonucleotide
ccgctccagagaactagcgtgctaatgttt

SEQ ID NO: 145882 - DNA, 30 bp, Artificial Sequence
  Synthetic oligonucleotide
agtttccggttgtaccgacatgccatgttt

SEQ ID NO: 145883 - DNA, 30 bp, Artificial Sequence
  Synthetic oligonucleotide
tgaaccgtacggtatttgttatccatgttt

SEQ ID NO: 145884 - DNA, 30 bp, Artificial Sequence
  Synthetic oligonucleotide
tcaaaagtatgacttctctcctgagtgttt

SEQ ID NO: 145885 - DNA, 30 bp, Artificial Sequence
  Synthetic oligonucleotide
aggtcacattggtacctggcgatcgtgttt

SEQ ID NO: 145886 - DNA, 30 bp, Artificial Sequence
  Synthetic oligonucleotide
gaaaggcttatgcatggcgtgaatgtgttt

SEQ ID NO: 145887 - DNA, 30 bp, Artificial Sequence
  Synthetic oligonucleotide
aacgccgtacagtatctggtattgttgttt

SEQ ID NO: 145888 - DNA, 30 bp, Artificial Sequence
  Synthetic oligonucleotide
cccgtaggcgtaagaccaatgaacaatttt

SEQ ID NO: 145889 - DNA, 30 bp, Artificial Sequence
  Synthetic oligonucleotide
ccgaaagcgtgtggggcggagcacaatttt

SEQ ID NO: 145890 - DNA, 30 bp, Artificial Sequence
  Synthetic oligonucleotide
aggtcgcatctcatgttggcggcccatttt

SEQ ID NO: 145891 - DNA, 30 bp, Artificial Sequence
  Synthetic oligonucleotide
agtctcgaagaactcccaataattcatttt

SEQ ID NO: 145892 - DNA, 30 bp, Artificial Sequence
  Synthetic oligonucleotide
ttaggcggacgggataagcggtttcatttt

SEQ ID NO: 145893 - DNA, 30 bp, Artificial Sequence
  Synthetic oligonucleotide
gtgcttagctagggtgctggagctgatttt

SEQ ID NO: 145894 - DNA, 30 bp, Artificial Sequence
  Synthetic oligonucleotide
cgagattctttgaactcggatgctgatttt

SEQ ID NO: 145895 - DNA, 30 bp, Artificial Sequence
  Synthetic oligonucleotide
agcaagcaaccttagtccaggaactatttt

SEQ ID NO: 145896 - DNA, 30 bp, Artificial Sequence
  Synthetic oligonucleotide
tggcgacggagtccgcaatgtacctatttt

SEQ ID NO: 145897 - DNA, 30 bp, Artificial Sequence
  Synthetic oligonucleotide
gccacacagaactccaaatcggtgtatttt

SEQ ID NO: 145898 - DNA, 30 bp, Artificial Sequence
  Synthetic oligonucleotide
ggagtttgcgtgttacgagggtcgactttt

SEQ ID NO: 145899 - DNA, 30 bp, Artificial Sequence
  Synthetic oligonucleotide
ctgtatgaacaggagaactgccttactttt

SEQ ID NO: 145900 - DNA, 30 bp, Artificial Sequence
  Synthetic oligonucleotide
tagtacaggcgcgggacatatccccctttt

SEQ ID NO: 145901 - DNA, 30 bp, Artificial Sequence
  Synthetic oligonucleotide
aaaagtggacgtgataagtgacttgctttt

SEQ ID NO: 145902 - DNA, 30 bp, Artificial Sequence
  Synthetic oligonucleotide
cggccgattccaagagggagtacatctttt

SEQ ID NO: 145903 - DNA, 30 bp, Artificial Sequence
  Synthetic oligonucleotide
gatacagtgctcatccagtattcatctttt

SEQ ID NO: 145904 - DNA, 30 bp, Artificial Sequence
  Synthetic oligonucleotide
tacggtaaggttgaagacgttggcagtttt

SEQ ID NO: 145905 - DNA, 30 bp, Artificial Sequence
  Synthetic oligonucleotide
taccaaccaggtcgagtctcatttagtttt

SEQ ID NO: 145906 - DNA, 30 bp, Artificial Sequence
  Synthetic oligonucleotide
gctcagtctcaaggtaatgatacacgtttt

SEQ ID NO: 145907 - DNA, 30 bp, Artificial Sequence
  Synthetic oligonucleotide
actgactgacatttagaaaacttgcgtttt

SEQ ID NO: 145908 - DNA, 30 bp, Artificial Sequence
  Synthetic oligonucleotide
ctggtccgcacgtgtgcataggcaattttt

SEQ ID NO: 145909 - DNA, 30 bp, Artificial Sequence
  Synthetic oligonucleotide
tagaatctcatgccggactacctacttttt

SEQ ID NO: 145910 - DNA, 30 bp, Artificial Sequence
  Synthetic oligonucleotide
cacgctcaaaccgcgagcgtaacagttttt

SEQ ID NO: 145911 - DNA, 30 bp, Artificial Sequence
  Synthetic oligonucleotide
ctgaaagcaggtgggaactcgagagttttt

SEQ ID NO: 145912 - DNA, 30 bp, Artificial Sequence
  Synthetic oligonucleotide
acggtaaactaaaaaaacatcgtagttttt

SEQ ID NO: 145913 - DNA, 30 bp, Artificial Sequence
  Synthetic oligonucleotide
accgcaatgacacctgtatcttccgttttt

SEQ ID NO: 145914 - DNA, 30 bp, Artificial Sequence
  Synthetic oligonucleotide
cgatgaaagcgaattcgtgttccaaaaaaa

SEQ ID NO: 145915 - DNA, 30 bp, Artificial Sequence
  Synthetic oligonucleotide
aactgccacagtaccaagttactcaaaaaa

SEQ ID NO: 145916 - DNA, 30 bp, Artificial Sequence
  Synthetic oligonucleotide
ggcctaatgcaaacgttttgagcgaaaaaa

SEQ ID NO: 145917 - DNA, 30 bp, Artificial Sequence
  Synthetic oligonucleotide
tggcaaaatcccccagtgctagtgaaaaaa

SEQ ID NO: 145918 - DNA, 30 bp, Artificial Sequence
  Synthetic oligonucleotide
aacgaattccactgtggaccggaacaaaaa

SEQ ID NO: 145919 - DNA, 30 bp, Artificial Sequence
  Synthetic oligonucleotide
ttatgaaaacatcatgggcggtgacaaaaa

SEQ ID NO: 145920 - DNA, 30 bp, Artificial Sequence
  Synthetic oligonucleotide
cttcacgtgcgccctctgatgacccaaaaa

SEQ ID NO: 145921 - DNA, 30 bp, Artificial Sequence
  Synthetic oligonucleotide
catgtattctagaagataccatatcaaaaa

SEQ ID NO: 145922 - DNA, 30 bp, Artificial Sequence
  Synthetic oligonucleotide
acactatgtctaagtaccggcagggaaaaa

SEQ ID NO: 145923 - DNA, 30 bp, Artificial Sequence
  Synthetic oligonucleotide
ttgctccagtccgggtcgtctagggaaaaa

SEQ ID NO: 145924 - DNA, 30 bp, Artificial Sequence
  Synthetic oligonucleotide
tgtcgggagtatcagcgataccctgaaaaa

SEQ ID NO: 145925 - DNA, 30 bp, Artificial Sequence
  Synthetic oligonucleotide
tgcatagatcagggctccaaaagtgaaaaa

SEQ ID NO: 145926 - DNA, 30 bp, Artificial Sequence
  Synthetic oligonucleotide
agagacggccagtggggtacgcttgaaaaa

SEQ ID NO: 145927 - DNA, 30 bp, Artificial Sequence
  Synthetic oligonucleotide
atcgtatccagatagtccgatcgataaaaa

SEQ ID NO: 145928 - DNA, 30 bp, Artificial Sequence
  Synthetic oligonucleotide
agaacacactcaccttatgcgtactaaaaa

SEQ ID NO: 145929 - DNA, 30 bp, Artificial Sequence
  Synthetic oligonucleotide
gttgacatctagaaccttctgtactaaaaa

SEQ ID NO: 145930 - DNA, 30 bp, Artificial Sequence
  Synthetic oligonucleotide
tatagtatcaaataccatctcgtctaaaaa

SEQ ID NO: 145931 - DNA, 30 bp, Artificial Sequence
  Synthetic oligonucleotide
ctacacgtttcactctcatcctcgtaaaaa

SEQ ID NO: 145932 - DNA, 30 bp, Artificial Sequence
  Synthetic oligonucleotide
tggctagggggaatgggccacgtttaaaaa

SEQ ID NO: 145933 - DNA, 30 bp, Artificial Sequence
  Synthetic oligonucleotide
cagataagagtgaggtaattgttaacaaaa

SEQ ID NO: 145934 - DNA, 30 bp, Artificial Sequence
  Synthetic oligonucleotide
ccacggtcccccgtcgtactagtgacaaaa

SEQ ID NO: 145935 - DNA, 30 bp, Artificial Sequence
  Synthetic oligonucleotide
atataacttcgctagactactcaaccaaaa

SEQ ID NO: 145936 - DNA, 30 bp, Artificial Sequence
  Synthetic oligonucleotide
ggcagcaagttccataacctaataccaaaa

SEQ ID NO: 145937 - DNA, 30 bp, Artificial Sequence
  Synthetic oligonucleotide
ctgactagtgcttgcccatcctgcccaaaa

SEQ ID NO: 145938 - DNA, 30 bp, Artificial Sequence
  Synthetic oligonucleotide
tgtaggtgctacacactaaaggggccaaaa

SEQ ID NO: 145939 - DNA, 30 bp, Artificial Sequence
  Synthetic oligonucleotide
cgtggtgtaggcttatgtcgaagcgcaaaa

SEQ ID NO: 145940 - DNA, 30 bp, Artificial Sequence
  Synthetic oligonucleotide
agatgatacaataccctttagagggcaaaa

SEQ ID NO: 145941 - DNA, 30 bp, Artificial Sequence
  Synthetic oligonucleotide
ttaataataaatcaatgttcgatggcaaaa

SEQ ID NO: 145942 - DNA, 30 bp, Artificial Sequence
  Synthetic oligonucleotide
tccaaccgtaatcctgtggaagtatcaaaa

SEQ ID NO: 145943 - DNA, 30 bp, Artificial Sequence
  Synthetic oligonucleotide
gtcactagcacattaattcatggaagaaaa

SEQ ID NO: 145944 - DNA, 30 bp, Artificial Sequence
  Synthetic oligonucleotide
tgccaggggtcacatttctcgaccggaaaa

SEQ ID NO: 145945 - DNA, 28 bp, Artificial Sequence
  Synthetic oligonucleotide
aggccaagctcgacacccatatggaaaa

SEQ ID NO: 145946 - DNA, 30 bp, Artificial Sequence
  Synthetic oligonucleotide
acttatactcctcgtacggtcggtggaaaa

SEQ ID NO: 145947 - DNA, 30 bp, Artificial Sequence
  Synthetic oligonucleotide
cgggtaacaggcaaggccctataatgaaaa

SEQ ID NO: 145948 - DNA, 30 bp, Artificial Sequence
  Synthetic oligonucleotide
gtactcgaaatgcaatttccagactgaaaa

SEQ ID NO: 145949 - DNA, 30 bp, Artificial Sequence
  Synthetic oligonucleotide
aagagtcagaacctcagtttggagtgaaaa

SEQ ID NO: 145950 - DNA, 31 bp, Artificial Sequence
  Synthetic oligonucleotide
gcaagacgattacaagctgcccgggtgaaaa

SEQ ID NO: 145951 - DNA, 30 bp, Artificial Sequence
  Synthetic oligonucleotide
taagaaggtgaggggcgctaacattgaaaa

SEQ ID NO: 145952 - DNA, 30 bp, Artificial Sequence
  Synthetic oligonucleotide
gaacggattaaagtcttcttaacttgaaaa

SEQ ID NO: 145953 - DNA, 30 bp, Artificial Sequence
  Synthetic oligonucleotide
catgcatcccatgaaatgagggcaataaaa

SEQ ID NO: 145954 - DNA, 30 bp, Artificial Sequence
  Synthetic oligonucleotide
aaacgcttaggcacatcaacagacataaaa

SEQ ID NO: 145955 - DNA, 30 bp, Artificial Sequence
  Synthetic oligonucleotide
gcgtggttgtcacgggcttggcggctaaaa

SEQ ID NO: 145956 - DNA, 30 bp, Artificial Sequence
  Synthetic oligonucleotide
caaaggatatcgtgccacccgatgctaaaa

SEQ ID NO: 145957 - DNA, 30 bp, Artificial Sequence
  Synthetic oligonucleotide
acaactgacccatctacatgaagtctaaaa

SEQ ID NO: 145958 - DNA, 30 bp, Artificial Sequence
  Synthetic oligonucleotide
ctggcgtgacagctaagaacatttctaaaa

SEQ ID NO: 145959 - DNA, 30 bp, Artificial Sequence
  Synthetic oligonucleotide
gtatgcagggtcacgtaggtgagagtaaaa

SEQ ID NO: 145960 - DNA, 30 bp, Artificial Sequence
  Synthetic oligonucleotide
ccgacattgaaaattcatccgtacgtaaaa

SEQ ID NO: 145961 - DNA, 30 bp, Artificial Sequence
  Synthetic oligonucleotide
gaaccacgcgagcactatagtggattaaaa

SEQ ID NO: 145962 - DNA, 30 bp, Artificial Sequence
  Synthetic oligonucleotide
atcgcgcccaaacatcgccattatttaaaa

SEQ ID NO: 145963 - DNA, 29 bp, Artificial Sequence
  Synthetic oligonucleotide
tttccgagaaggtagttccaaacaacaaa

SEQ ID NO: 145964 - DNA, 30 bp, Artificial Sequence
  Synthetic oligonucleotide
aactggatgagtattgaatacaccaacaaa

SEQ ID NO: 145965 - DNA, 30 bp, Artificial Sequence
  Synthetic oligonucleotide
atgaacaaattcacggtctacgccaacaaa

SEQ ID NO: 145966 - DNA, 30 bp, Artificial Sequence
  Synthetic oligonucleotide
aagatatacctacttcgtttagcgaacaaa

SEQ ID NO: 145967 - DNA, 30 bp, Artificial Sequence
  Synthetic oligonucleotide
ggtgccttgccgcattccatacctaacaaa

SEQ ID NO: 145968 - DNA, 30 bp, Artificial Sequence
  Synthetic oligonucleotide
aaggctatcagcgatctagagcgccacaaa

SEQ ID NO: 145969 - DNA, 30 bp, Artificial Sequence
  Synthetic oligonucleotide
agttagaacaaggcctgacgcttccacaaa

SEQ ID NO: 145970 - DNA, 30 bp, Artificial Sequence
  Synthetic oligonucleotide
gctagctaaaggcgaatatctaagcacaaa

SEQ ID NO: 145971 - DNA, 29 bp, Artificial Sequence
  Synthetic oligonucleotide
atgcacatttcggggggaccgagcacaaa

SEQ ID NO: 145972 - DNA, 30 bp, Artificial Sequence
  Synthetic oligonucleotide
agagacctagcacgtctctatgtgcacaaa

SEQ ID NO: 145973 - DNA, 30 bp, Artificial Sequence
  Synthetic oligonucleotide
agtcgttaaacaggggtgtaagcatacaaa

SEQ ID NO: 145974 - DNA, 30 bp, Artificial Sequence
  Synthetic oligonucleotide
attacaatgcttcagaaaccacgatacaaa

SEQ ID NO: 145975 - DNA, 30 bp, Artificial Sequence
  Synthetic oligonucleotide
acgtccggtcaatagcgtttacgctacaaa

SEQ ID NO: 145976 - DNA, 30 bp, Artificial Sequence
  Synthetic oligonucleotide
taacgtgcgattcacaaccaactctacaaa

SEQ ID NO: 145977 - DNA, 30 bp, Artificial Sequence
  Synthetic oligonucleotide
gtaccgcccgtgagaatcaaagtgtacaaa

SEQ ID NO: 145978 - DNA, 30 bp, Artificial Sequence
  Synthetic oligonucleotide
tgcacgactgcactggaatagaattacaaa

SEQ ID NO: 145979 - DNA, 30 bp, Artificial Sequence
  Synthetic oligonucleotide
agcaatgtaaattgagagggtttgaccaaa

SEQ ID NO: 145980 - DNA, 30 bp, Artificial Sequence
  Synthetic oligonucleotide
ggaaactgatagttactcagaaataccaaa

SEQ ID NO: 145981 - DNA, 30 bp, Artificial Sequence
  Synthetic oligonucleotide
ccacttaactgcgttaaacaacgtaccaaa

SEQ ID NO: 145982 - DNA, 30 bp, Artificial Sequence
  Synthetic oligonucleotide
gagggctaataatggtccgaaattaccaaa

SEQ ID NO: 145983 - DNA, 30 bp, Artificial Sequence
  Synthetic oligonucleotide
tacaagtgctgcatgagtcagggacccaaa

SEQ ID NO: 145984 - DNA, 30 bp, Artificial Sequence
  Synthetic oligonucleotide
aatacagtaaacataggttagtgacccaaa

SEQ ID NO: 145985 - DNA, 30 bp, Artificial Sequence
  Synthetic oligonucleotide
taaccaggccccaccgatgttttacccaaa

SEQ ID NO: 145986 - DNA, 30 bp, Artificial Sequence
  Synthetic oligonucleotide
tatggcagtcccacagtaagagaccccaaa

SEQ ID NO: 145987 - DNA, 30 bp, Artificial Sequence
  Synthetic oligonucleotide
ggttgcacaatggcgatgttgccgcccaaa

SEQ ID NO: 145988 - DNA, 30 bp, Artificial Sequence
  Synthetic oligonucleotide
ttccctcggggcatggatgtccgagccaaa

SEQ ID NO: 145989 - DNA, 30 bp, Artificial Sequence
  Synthetic oligonucleotide
tcggactacaggacgagcgctttagccaaa

SEQ ID NO: 145990 - DNA, 30 bp, Artificial Sequence
  Synthetic oligonucleotide
gtacacgattcagtagtcccatcggccaaa

SEQ ID NO: 145991 - DNA, 30 bp, Artificial Sequence
  Synthetic oligonucleotide
ctcgatccagggtgtacccgccttgccaaa

SEQ ID NO: 145992 - DNA, 30 bp, Artificial Sequence
  Synthetic oligonucleotide
ataagaataatctcccctcgcagaagcaaa

SEQ ID NO: 145993 - DNA, 30 bp, Artificial Sequence
  Synthetic oligonucleotide
tctgagccctatgcaattgttttcagcaaa

SEQ ID NO: 145994 - DNA, 30 bp, Artificial Sequence
  Synthetic oligonucleotide
cctgaagactgacggtaagttaatagcaaa

SEQ ID NO: 145995 - DNA, 30 bp, Artificial Sequence
  Synthetic oligonucleotide
tgattaggtcgtaacatgtcagttagcaaa

SEQ ID NO: 145996 - DNA, 30 bp, Artificial Sequence
  Synthetic oligonucleotide
acgcaagttagggcgttcgcggttagcaaa

SEQ ID NO: 145997 - DNA, 30 bp, Artificial Sequence
  Synthetic oligonucleotide
tcggtattgatgctggtgacttttagcaaa

SEQ ID NO: 145998 - DNA, 30 bp, Artificial Sequence
  Synthetic oligonucleotide
cgttgtggaactatggcatcttaacgcaaa

SEQ ID NO: 145999 - DNA, 30 bp, Artificial Sequence
  Synthetic oligonucleotide
aactgatatttctgtcaggagaaccgcaaa

SEQ ID NO: 146000 - DNA, 30 bp, Artificial Sequence
  Synthetic oligonucleotide
aaatgcttgtagctacgatcataccgcaaa

SEQ ID NO: 146001 - DNA, 30 bp, Artificial Sequence
  Synthetic oligonucleotide
actccaggaaagatcgtcgcggcaggcaaa

SEQ ID NO: 146002 - DNA, 30 bp, Artificial Sequence
  Synthetic oligonucleotide
ccttagcacaggcaccgagtgggcggcaaa

SEQ ID NO: 146003 - DNA, 30 bp, Artificial Sequence
  Synthetic oligonucleotide
catggctcccaagatgcttcccggggcaaa

SEQ ID NO: 146004 - DNA, 30 bp, Artificial Sequence
  Synthetic oligonucleotide
ttgatctcgtttccgattggcgggggcaaa

SEQ ID NO: 146005 - DNA, 30 bp, Artificial Sequence
  Synthetic oligonucleotide
taggctgcttaattaaatggaggtggcaaa

SEQ ID NO: 146006 - DNA, 30 bp, Artificial Sequence
  Synthetic oligonucleotide
caagggggctattagggattatgtggcaaa

SEQ ID NO: 146007 - DNA, 30 bp, Artificial Sequence
  Synthetic oligonucleotide
agcgataataactcccaaaggtgatgcaaa

SEQ ID NO: 146008 - DNA, 30 bp, Artificial Sequence
  Synthetic oligonucleotide
ttactcaaggatacgaagacggagtgcaaa

SEQ ID NO: 146009 - DNA, 30 bp, Artificial Sequence
  Synthetic oligonucleotide
tagccgaggcggaagatagacaacatcaaa

SEQ ID NO: 146010 - DNA, 30 bp, Artificial Sequence
  Synthetic oligonucleotide
gtggcttaagagatatggtactcgatcaaa

SEQ ID NO: 146011 - DNA, 30 bp, Artificial Sequence
  Synthetic oligonucleotide
cattcatgtattaattaaaaagggatcaaa

SEQ ID NO: 146012 - DNA, 30 bp, Artificial Sequence
  Synthetic oligonucleotide
tgcacatataagtgacatgcaatgatcaaa

SEQ ID NO: 146013 - DNA, 30 bp, Artificial Sequence
  Synthetic oligonucleotide
tgtgcgcatgaagaagttgcaagtatcaaa

SEQ ID NO: 146014 - DNA, 30 bp, Artificial Sequence
  Synthetic oligonucleotide
tgccaatggccgggcaaacgcactctcaaa

SEQ ID NO: 146015 - DNA, 30 bp, Artificial Sequence
  Synthetic oligonucleotide
gatgccaggagcgcgcaactggaggtcaaa

SEQ ID NO: 146016 - DNA, 30 bp, Artificial Sequence
  Synthetic oligonucleotide
tggcaccacagctgacgtgctatggtcaaa

SEQ ID NO: 146017 - DNA, 30 bp, Artificial Sequence
  Synthetic oligonucleotide
ttaaccgtaccaggccaaagcgggttcaaa

SEQ ID NO: 146018 - DNA, 30 bp, Artificial Sequence
  Synthetic oligonucleotide
cgggtcgacgcataccagggaggaaagaaa

SEQ ID NO: 146019 - DNA, 30 bp, Artificial Sequence
  Synthetic oligonucleotide
acgctgacggaggtacacaagtccaagaaa

SEQ ID NO: 146020 - DNA, 30 bp, Artificial Sequence
  Synthetic oligonucleotide
gtgtcagtggatcaggggaaatataagaaa

SEQ ID NO: 146021 - DNA, 30 bp, Artificial Sequence
  Synthetic oligonucleotide
ccgtaaacgtaagtagccataattaagaaa

SEQ ID NO: 146022 - DNA, 30 bp, Artificial Sequence
  Synthetic oligonucleotide
gtacgggtcgggtaagtaaaggggcagaaa

SEQ ID NO: 146023 - DNA, 30 bp, Artificial Sequence
  Synthetic oligonucleotide
acatactcagaatgactaccggggcagaaa

SEQ ID NO: 146024 - DNA, 30 bp, Artificial Sequence
  Synthetic oligonucleotide
agcatctgcgatcatttgaaccatcagaaa

SEQ ID NO: 146025 - DNA, 30 bp, Artificial Sequence
  Synthetic oligonucleotide
gacaccacagtatcggctaaagaagagaaa

SEQ ID NO: 146026 - DNA, 30 bp, Artificial Sequence
  Synthetic oligonucleotide
gctcgtaaatatccagcctatgacgagaaa

SEQ ID NO: 146027 - DNA, 30 bp, Artificial Sequence
  Synthetic oligonucleotide
agatgaccgtagataggatgggaggagaaa

SEQ ID NO: 146028 - DNA, 30 bp, Artificial Sequence
  Synthetic oligonucleotide
aaacacattcctcaaggactgtgtgagaaa

SEQ ID NO: 146029 - DNA, 30 bp, Artificial Sequence
  Synthetic oligonucleotide
ctaaaacctaacaattagaggaaaacgaaa

SEQ ID NO: 146030 - DNA, 30 bp, Artificial Sequence
  Synthetic oligonucleotide
catgggtgttcagttgagagctctacgaaa

SEQ ID NO: 146031 - DNA, 30 bp, Artificial Sequence
  Synthetic oligonucleotide
gtggggccgaagcataaattgcgtacgaaa

SEQ ID NO: 146032 - DNA, 30 bp, Artificial Sequence
  Synthetic oligonucleotide
tagtaaacctgtatatcattggccccgaaa

SEQ ID NO: 146033 - DNA, 30 bp, Artificial Sequence
  Synthetic oligonucleotide
aattgggggccacctttcaacacgccgaaa

SEQ ID NO: 146034 - DNA, 30 bp, Artificial Sequence
  Synthetic oligonucleotide
cgacgtactttaaccagctatccgccgaaa

SEQ ID NO: 146035 - DNA, 30 bp, Artificial Sequence
  Synthetic oligonucleotide
tcggggatatgccacacctgagacgcgaaa

SEQ ID NO: 146036 - DNA, 30 bp, Artificial Sequence
  Synthetic oligonucleotide
gcaaacacaaagcatccaatggctgcgaaa

SEQ ID NO: 146037 - DNA, 30 bp, Artificial Sequence
  Synthetic oligonucleotide
gacctcatgagcatctagaaggcatcgaaa

SEQ ID NO: 146038 - DNA, 30 bp, Artificial Sequence
  Synthetic oligonucleotide
actactctcagagaagccatttagtcgaaa

SEQ ID NO: 146039 - DNA, 30 bp, Artificial Sequence
  Synthetic oligonucleotide
cgatagagggacgcctactcttcgtcgaaa

SEQ ID NO: 146040 - DNA, 30 bp, Artificial Sequence
  Synthetic oligonucleotide
gtacctgatctgcagctggaggggtcgaaa

SEQ ID NO: 146041 - DNA, 30 bp, Artificial Sequence
  Synthetic oligonucleotide
gaggtcattcgggctacagtggattcgaaa

SEQ ID NO: 146042 - DNA, 30 bp, Artificial Sequence
  Synthetic oligonucleotide
aagtccaaattcattaaagaatgttcgaaa

SEQ ID NO: 146043 - DNA, 30 bp, Artificial Sequence
  Synthetic oligonucleotide
tgccaatttgattacagaaagaaaaggaaa

SEQ ID NO: 146044 - DNA, 30 bp, Artificial Sequence
  Synthetic oligonucleotide
gccatggtacatcgtctgcgtccaaggaaa

SEQ ID NO: 146045 - DNA, 30 bp, Artificial Sequence
  Synthetic oligonucleotide
cgtgcaacagtacgggccgcatgaaggaaa

SEQ ID NO: 146046 - DNA, 30 bp, Artificial Sequence
  Synthetic oligonucleotide
ccgattacaatcgttgaatctgtaaggaaa

SEQ ID NO: 146047 - DNA, 30 bp, Artificial Sequence
  Synthetic oligonucleotide
gcagtacgacaaagcgtattaggcaggaaa

SEQ ID NO: 146048 - DNA, 30 bp, Artificial Sequence
  Synthetic oligonucleotide
agtccgaacaataagggactctgcaggaaa

SEQ ID NO: 146049 - DNA, 30 bp, Artificial Sequence
  Synthetic oligonucleotide
acgttaaatatgagtcgttcagtcaggaaa

SEQ ID NO: 146050 - DNA, 30 bp, Artificial Sequence
  Synthetic oligonucleotide
aagctatgcaacggcacgtaaccccggaaa

SEQ ID NO: 146051 - DNA, 30 bp, Artificial Sequence
  Synthetic oligonucleotide
cactcaggtggagatatttgtgggcggaaa

SEQ ID NO: 146052 - DNA, 30 bp, Artificial Sequence
  Synthetic oligonucleotide
gtcgcaacacgggggctatggcatcggaaa

SEQ ID NO: 146053 - DNA, 30 bp, Artificial Sequence
  Synthetic oligonucleotide
taaaataggaaaataagcgctgaagggaaa

SEQ ID NO: 146054 - DNA, 30 bp, Artificial Sequence
  Synthetic oligonucleotide
tgacgaccgggcagtctggggtcagggaaa

SEQ ID NO: 146055 - DNA, 30 bp, Artificial Sequence
  Synthetic oligonucleotide
aagcgaaacatattggaattgctagggaaa

SEQ ID NO: 146056 - DNA, 30 bp, Artificial Sequence
  Synthetic oligonucleotide
ttgcactcaagacgctgccggaacgggaaa

SEQ ID NO: 146057 - DNA, 30 bp, Artificial Sequence
  Synthetic oligonucleotide
actggagacgttgctcaaggcgtggggaaa

SEQ ID NO: 146058 - DNA, 30 bp, Artificial Sequence
  Synthetic oligonucleotide
caggtcacaatcatagctcagttggggaaa

SEQ ID NO: 146059 - DNA, 30 bp, Artificial Sequence
  Synthetic oligonucleotide
accaggtggggaaaatccggtgatgggaaa

SEQ ID NO: 146060 - DNA, 30 bp, Artificial Sequence
  Synthetic oligonucleotide
gatatcgcaatggaatgcacgactgggaaa

SEQ ID NO: 146061 - DNA, 30 bp, Artificial Sequence
  Synthetic oligonucleotide
tggctcacatattacgagtctcctgggaaa

SEQ ID NO: 146062 - DNA, 30 bp, Artificial Sequence
  Synthetic oligonucleotide
ccagaatgcagtaacggagaaagtgggaaa

SEQ ID NO: 146063 - DNA, 30 bp, Artificial Sequence
  Synthetic oligonucleotide
aatggcctgagaaaaccgacttaatggaaa

SEQ ID NO: 146064 - DNA, 30 bp, Artificial Sequence
  Synthetic oligonucleotide
tgtgaatatagaaacgtatgatgctggaaa

SEQ ID NO: 146065 - DNA, 30 bp, Artificial Sequence
  Synthetic oligonucleotide
cattgaagtggagtcattgagccactgaaa

SEQ ID NO: 146066 - DNA, 30 bp, Artificial Sequence
  Synthetic oligonucleotide
aggctccattgagggtagtggtcactgaaa

SEQ ID NO: 146067 - DNA, 30 bp, Artificial Sequence
  Synthetic oligonucleotide
tcgggggctatgcagaagatcaatctgaaa

SEQ ID NO: 146068 - DNA, 30 bp, Artificial Sequence
  Synthetic oligonucleotide
ggtgaaatatctataaagcccggtctgaaa

SEQ ID NO: 146069 - DNA, 30 bp, Artificial Sequence
  Synthetic oligonucleotide
atgtgtggtgaaaaaaaaagcctagtgaaa

SEQ ID NO: 146070 - DNA, 30 bp, Artificial Sequence
  Synthetic oligonucleotide
agaacaccctgaaatagcaccagcgtgaaa

SEQ ID NO: 146071 - DNA, 30 bp, Artificial Sequence
  Synthetic oligonucleotide
aatcaatcattaatggagaagctcgtgaaa

SEQ ID NO: 146072 - DNA, 30 bp, Artificial Sequence
  Synthetic oligonucleotide
actgctacggattatctaaatatggtgaaa

SEQ ID NO: 146073 - DNA, 30 bp, Artificial Sequence
  Synthetic oligonucleotide
gcggaaaatctgaagcctagaaaattgaaa

SEQ ID NO: 146074 - DNA, 30 bp, Artificial Sequence
  Synthetic oligonucleotide
ggttaaattagcaaccttatgaggttgaaa

SEQ ID NO: 146075 - DNA, 30 bp, Artificial Sequence
  Synthetic oligonucleotide
tgaaccgtaatacactgtatcgctttgaaa

SEQ ID NO: 146076 - DNA, 30 bp, Artificial Sequence
  Synthetic oligonucleotide
tcaggccatgattgagggcggattttgaaa

SEQ ID NO: 146077 - DNA, 30 bp, Artificial Sequence
  Synthetic oligonucleotide
gcctgcttgtaaatgggtacatcaaataaa

SEQ ID NO: 146078 - DNA, 30 bp, Artificial Sequence
  Synthetic oligonucleotide
gagccgccattccacacctgggcgaataaa

SEQ ID NO: 146079 - DNA, 30 bp, Artificial Sequence
  Synthetic oligonucleotide
ggcggatgtctcaacaatgtaaataataaa

SEQ ID NO: 146080 - DNA, 30 bp, Artificial Sequence
  Synthetic oligonucleotide
gggggccgatgtgtgtctggtgctaataaa

SEQ ID NO: 146081 - DNA, 30 bp, Artificial Sequence
  Synthetic oligonucleotide
caaggtgtaacatgcagctcaggccataaa

SEQ ID NO: 146082 - DNA, 30 bp, Artificial Sequence
  Synthetic oligonucleotide
ggtcgatagtacttcacgaagtagcataaa

SEQ ID NO: 146083 - DNA, 30 bp, Artificial Sequence
  Synthetic oligonucleotide
ggagggcggacgtcgtctgcagctcataaa

SEQ ID NO: 146084 - DNA, 30 bp, Artificial Sequence
  Synthetic oligonucleotide
aatgcagcccaaggagtcagataagataaa

SEQ ID NO: 146085 - DNA, 30 bp, Artificial Sequence
  Synthetic oligonucleotide
tgggaacaatgcgatccgataacagataaa

SEQ ID NO: 146086 - DNA, 30 bp, Artificial Sequence
  Synthetic oligonucleotide
ccgtgcatgcatcgtgggtggctagataaa

SEQ ID NO: 146087 - DNA, 30 bp, Artificial Sequence
  Synthetic oligonucleotide
agtaacggtctccatatactgttagataaa

SEQ ID NO: 146088 - DNA, 30 bp, Artificial Sequence
  Synthetic oligonucleotide
cagctacaaatgggagtgggtatcgataaa

SEQ ID NO: 146089 - DNA, 30 bp, Artificial Sequence
  Synthetic oligonucleotide
tcagacttacggctttcgttgtaggataaa

SEQ ID NO: 146090 - DNA, 30 bp, Artificial Sequence
  Synthetic oligonucleotide
ccgacacggagcgacatggcggactataaa

SEQ ID NO: 146091 - DNA, 30 bp, Artificial Sequence
  Synthetic oligonucleotide
ttggactgtgcgaaactgcacacgtataaa

SEQ ID NO: 146092 - DNA, 27 bp, Artificial Sequence
  Synthetic oligonucleotide
ttatgtgtaggttcactcccgtataaa

SEQ ID NO: 146093 - DNA, 30 bp, Artificial Sequence
  Synthetic oligonucleotide
cgtcaaattacacttcgctaagattataaa

SEQ ID NO: 146094 - DNA, 30 bp, Artificial Sequence
  Synthetic oligonucleotide
ccgtagtggtgagagtagggtgaaactaaa

SEQ ID NO: 146095 - DNA, 30 bp, Artificial Sequence
  Synthetic oligonucleotide
gagttccagggaatagagcagacgactaaa

SEQ ID NO: 146096 - DNA, 30 bp, Artificial Sequence
  Synthetic oligonucleotide
tggtcagctacgggacagattcctactaaa

SEQ ID NO: 146097 - DNA, 30 bp, Artificial Sequence
  Synthetic oligonucleotide
tacattcccaggcagagctgaagtactaaa

SEQ ID NO: 146098 - DNA, 30 bp, Artificial Sequence
  Synthetic oligonucleotide
agtggatattatccccgtaaggttactaaa

SEQ ID NO: 146099 - DNA, 30 bp, Artificial Sequence
  Synthetic oligonucleotide
ttgacatggagacccctacaacgacctaaa

SEQ ID NO: 146100 - DNA, 30 bp, Artificial Sequence
  Synthetic oligonucleotide
tccggacaaaagtacgccgcggcgcctaaa

SEQ ID NO: 146101 - DNA, 30 bp, Artificial Sequence
  Synthetic oligonucleotide
aggctgctctacgtgcaaaaagtgcctaaa

SEQ ID NO: 146102 - DNA, 30 bp, Artificial Sequence
  Synthetic oligonucleotide
cctgggagctgccatccgtggcgtcctaaa

SEQ ID NO: 146103 - DNA, 30 bp, Artificial Sequence
  Synthetic oligonucleotide
accattggccagctggttcgattcgctaaa

SEQ ID NO: 146104 - DNA, 30 bp, Artificial Sequence
  Synthetic oligonucleotide
cgtctttggagaacggacagaaaggctaaa

SEQ ID NO: 146105 - DNA, 30 bp, Artificial Sequence
  Synthetic oligonucleotide
taggcatgtcgagacgaagggtggtctaaa

SEQ ID NO: 146106 - DNA, 30 bp, Artificial Sequence
  Synthetic oligonucleotide
gctagcaactgtcagggcatgccaagtaaa

SEQ ID NO: 146107 - DNA, 30 bp, Artificial Sequence
  Synthetic oligonucleotide
gctcggtcttaggggcgatctagcagtaaa

SEQ ID NO: 146108 - DNA, 30 bp, Artificial Sequence
  Synthetic oligonucleotide
ttagcccatttcacaaagatgcgcagtaaa

SEQ ID NO: 146109 - DNA, 30 bp, Artificial Sequence
  Synthetic oligonucleotide
gcgcgactaatagggaccgacatacgtaaa

SEQ ID NO: 146110 - DNA, 30 bp, Artificial Sequence
  Synthetic oligonucleotide
aatgggagtttacgaagatgacggcgtaaa

SEQ ID NO: 146111 - DNA, 30 bp, Artificial Sequence
  Synthetic oligonucleotide
gtccagggttccaaaggttaaactcgtaaa

SEQ ID NO: 146112 - DNA, 30 bp, Artificial Sequence
  Synthetic oligonucleotide
tgagtaataaacttccggccagaaggtaaa

SEQ ID NO: 146113 - DNA, 30 bp, Artificial Sequence
  Synthetic oligonucleotide
gaagaaactaaaacttacctcggtggtaaa

SEQ ID NO: 146114 - DNA, 30 bp, Artificial Sequence
  Synthetic oligonucleotide
ctgcgctttcaggtaggcctcgactgtaaa

SEQ ID NO: 146115 - DNA, 30 bp, Artificial Sequence
  Synthetic oligonucleotide
aagagcatatttatcgagcagatttgtaaa

SEQ ID NO: 146116 - DNA, 30 bp, Artificial Sequence
  Synthetic oligonucleotide
agtaatggctccacgaaagcaggaattaaa

SEQ ID NO: 146117 - DNA, 30 bp, Artificial Sequence
  Synthetic oligonucleotide
cgccgtcgccagaactttccaccgattaaa

SEQ ID NO: 146118 - DNA, 30 bp, Artificial Sequence
  Synthetic oligonucleotide
acctagataggtcggcgcgcggatattaaa

SEQ ID NO: 146119 - DNA, 30 bp, Artificial Sequence
  Synthetic oligonucleotide
gaacgttaaggaatgtcactacaccttaaa

SEQ ID NO: 146120 - DNA, 30 bp, Artificial Sequence
  Synthetic oligonucleotide
catgttcaaaccaggattcggccccttaaa

SEQ ID NO: 146121 - DNA, 30 bp, Artificial Sequence
  Synthetic oligonucleotide
ggaccgcgctgtgattattaatttcttaaa

SEQ ID NO: 146122 - DNA, 30 bp, Artificial Sequence
  Synthetic oligonucleotide
caggcactcggctctgacagacacgttaaa

SEQ ID NO: 146123 - DNA, 30 bp, Artificial Sequence
  Synthetic oligonucleotide
gcactcgtacacaatgaactctgggttaaa

SEQ ID NO: 146124 - DNA, 30 bp, Artificial Sequence
  Synthetic oligonucleotide
acagcaaagtatgcaaaaaatcatgttaaa

SEQ ID NO: 146125 - DNA, 30 bp, Artificial Sequence
  Synthetic oligonucleotide
aggcgtgttcgtagaagcttggaatttaaa

SEQ ID NO: 146126 - DNA, 30 bp, Artificial Sequence
  Synthetic oligonucleotide
cacggctaaggatgcaagtttgcatttaaa

SEQ ID NO: 146127 - DNA, 30 bp, Artificial Sequence
  Synthetic oligonucleotide
tgttatcgcgatgagtgcgcgctatttaaa

SEQ ID NO: 146128 - DNA, 30 bp, Artificial Sequence
  Synthetic oligonucleotide
ctgagcgtatgtacagggcttgtctttaaa

SEQ ID NO: 146129 - DNA, 30 bp, Artificial Sequence
  Synthetic oligonucleotide
cgccacgcgcacgttgtaagaccgtttaaa

SEQ ID NO: 146130 - DNA, 30 bp, Artificial Sequence
  Synthetic oligonucleotide
cttcagaactagtccgtcggggggtttaaa

SEQ ID NO: 146131 - DNA, 30 bp, Artificial Sequence
  Synthetic oligonucleotide
catcagtgatatgcctggtctaattttaaa

SEQ ID NO: 146132 - DNA, 30 bp, Artificial Sequence
  Synthetic oligonucleotide
gtccgatccgaactgtataaacgaaaacaa

SEQ ID NO: 146133 - DNA, 30 bp, Artificial Sequence
  Synthetic oligonucleotide
taatggggactgttctatcacctaaaacaa

SEQ ID NO: 146134 - DNA, 35 bp, Artificial Sequence
  Synthetic oligonucleotide
ccatctggggggatgatttcgctcgtggcaaacaa

SEQ ID NO: 146135 - DNA, 30 bp, Artificial Sequence
  Synthetic oligonucleotide
gctaacatcattattgcttcagcgaaacaa

SEQ ID NO: 146136 - DNA, 30 bp, Artificial Sequence
  Synthetic oligonucleotide
tcttgttagagtagtcccctgatgaaacaa

SEQ ID NO: 146137 - DNA, 30 bp, Artificial Sequence
  Synthetic oligonucleotide
aaaggacactaatgaaatactaataaacaa

SEQ ID NO: 146138 - DNA, 30 bp, Artificial Sequence
  Synthetic oligonucleotide
tgtttatgtggagccactaggcaacaacaa

SEQ ID NO: 146139 - DNA, 30 bp, Artificial Sequence
  Synthetic oligonucleotide
ccaggtgagcgatatcaataataccaacaa

SEQ ID NO: 146140 - DNA, 30 bp, Artificial Sequence
  Synthetic oligonucleotide
agacatatgtccgaatgatcatgccaacaa

SEQ ID NO: 146141 - DNA, 30 bp, Artificial Sequence
  Synthetic oligonucleotide
gcagccgaaatacgtgatttgatagaacaa

SEQ ID NO: 146142 - DNA, 30 bp, Artificial Sequence
  Synthetic oligonucleotide
aatagggtgtgaatctattatctagaacaa

SEQ ID NO: 146143 - DNA, 30 bp, Artificial Sequence
  Synthetic oligonucleotide
tcgtcaggctatcatcagggaactgaacaa

SEQ ID NO: 146144 - DNA, 30 bp, Artificial Sequence
  Synthetic oligonucleotide
tcatacgatgtcctttctgcgacataacaa

SEQ ID NO: 146145 - DNA, 30 bp, Artificial Sequence
  Synthetic oligonucleotide
cgacacagtcgcgctaaaagccgataacaa

SEQ ID NO: 146146 - DNA, 30 bp, Artificial Sequence
  Synthetic oligonucleotide
taagctccggaggaattctaaatgtaacaa

SEQ ID NO: 146147 - DNA, 30 bp, Artificial Sequence
  Synthetic oligonucleotide
tagatcacccgcgcacacttgaattaacaa

SEQ ID NO: 146148 - DNA, 30 bp, Artificial Sequence
  Synthetic oligonucleotide
caaaaagagtctaccgatcatcgaacacaa

SEQ ID NO: 146149 - DNA, 30 bp, Artificial Sequence
  Synthetic oligonucleotide
gtgctgagataggtggtatagggcacacaa

SEQ ID NO: 146150 - DNA, 30 bp, Artificial Sequence
  Synthetic oligonucleotide
tggtgatgtctgaagacctctcaaccacaa

SEQ ID NO: 146151 - DNA, 30 bp, Artificial Sequence
  Synthetic oligonucleotide
gtaattgatcgtacttaagaggaaccacaa

SEQ ID NO: 146152 - DNA, 30 bp, Artificial Sequence
  Synthetic oligonucleotide
gctcagtcaacaaacgcgcataatccacaa

SEQ ID NO: 146153 - DNA, 30 bp, Artificial Sequence
  Synthetic oligonucleotide
tgctgtgggtgaacagtacggtatccacaa

SEQ ID NO: 146154 - DNA, 30 bp, Artificial Sequence
  Synthetic oligonucleotide
cccgacagtcaccactagtactctgcacaa

SEQ ID NO: 146155 - DNA, 30 bp, Artificial Sequence
  Synthetic oligonucleotide
cgttttaagagaaccgcgcaaattgcacaa

SEQ ID NO: 146156 - DNA, 30 bp, Artificial Sequence
  Synthetic oligonucleotide
taccaaaatcgcatgggtgagcttgcacaa

SEQ ID NO: 146157 - DNA, 30 bp, Artificial Sequence
  Synthetic oligonucleotide
taagagatcagggatctcagcgtgtcacaa

SEQ ID NO: 146158 - DNA, 30 bp, Artificial Sequence
  Synthetic oligonucleotide
acggccacaggtaagtcctacggcagacaa

SEQ ID NO: 146159 - DNA, 30 bp, Artificial Sequence
  Synthetic oligonucleotide
ctcagcaccgcgttatacgcttagagacaa

SEQ ID NO: 146160 - DNA, 30 bp, Artificial Sequence
  Synthetic oligonucleotide
ggcagtcccgagatccctcccacgagacaa

SEQ ID NO: 146161 - DNA, 30 bp, Artificial Sequence
  Synthetic oligonucleotide
tcgtcgtagccataagcggctactagacaa

SEQ ID NO: 146162 - DNA, 30 bp, Artificial Sequence
  Synthetic oligonucleotide
acaaacgcagaatgcagctcgcgccgacaa

SEQ ID NO: 146163 - DNA, 30 bp, Artificial Sequence
  Synthetic oligonucleotide
aggtaagtcacaatgggcgaaaatcgacaa

SEQ ID NO: 146164 - DNA, 30 bp, Artificial Sequence
  Synthetic oligonucleotide
cataagggtccgatccactaagttcgacaa

SEQ ID NO: 146165 - DNA, 30 bp, Artificial Sequence
  Synthetic oligonucleotide
taagggtgtggtgctaaagcacaaggacaa

SEQ ID NO: 146166 - DNA, 30 bp, Artificial Sequence
  Synthetic oligonucleotide
caatcggttcgcgggaggaccctaggacaa

SEQ ID NO: 146167 - DNA, 30 bp, Artificial Sequence
  Synthetic oligonucleotide
atcggagagcatgtagtcgttatcggacaa

SEQ ID NO: 146168 - DNA, 30 bp, Artificial Sequence
  Synthetic oligonucleotide
actaagccccgatagatgcgacagggacaa

SEQ ID NO: 146169 - DNA, 30 bp, Artificial Sequence
  Synthetic oligonucleotide
gctcgcggctactcgactacgcgatgacaa

SEQ ID NO: 146170 - DNA, 30 bp, Artificial Sequence
  Synthetic oligonucleotide
tagatgactgacattaacgcgcgctgacaa

SEQ ID NO: 146171 - DNA, 30 bp, Artificial Sequence
  Synthetic oligonucleotide
aatcgggtcaagtagaggtgtatctgacaa

SEQ ID NO: 146172 - DNA, 30 bp, Artificial Sequence
  Synthetic oligonucleotide
cacagtgtcttaccgaatcgtgtctgacaa

SEQ ID NO: 146173 - DNA, 30 bp, Artificial Sequence
  Synthetic oligonucleotide
gctagtccgatgaggacgctcttctgacaa

SEQ ID NO: 146174 - DNA, 30 bp, Artificial Sequence
  Synthetic oligonucleotide
cttgggagggcgtcaccggtcctaatacaa

SEQ ID NO: 146175 - DNA, 30 bp, Artificial Sequence
  Synthetic oligonucleotide
tggcgcggattgcaatttaagctaatacaa

SEQ ID NO: 146176 - DNA, 30 bp, Artificial Sequence
  Synthetic oligonucleotide
cgggactgtaagattcttagttttctacaa

SEQ ID NO: 146177 - DNA, 30 bp, Artificial Sequence
  Synthetic oligonucleotide
actccagaaacttcataagcgccagtacaa

SEQ ID NO: 146178 - DNA, 30 bp, Artificial Sequence
  Synthetic oligonucleotide
aacaccgccaaggtcatcactcgagtacaa

SEQ ID NO: 146179 - DNA, 30 bp, Artificial Sequence
  Synthetic oligonucleotide
gctgggtacattaggtagcttaacgtacaa

SEQ ID NO: 146180 - DNA, 30 bp, Artificial Sequence
  Synthetic oligonucleotide
ccttgtggcagagaaagttcctgcgtacaa

SEQ ID NO: 146181 - DNA, 31 bp, Artificial Sequence
  Synthetic oligonucleotide
gctcgatggcggctgcttccccactgtacaa

SEQ ID NO: 146182 - DNA, 30 bp, Artificial Sequence
  Synthetic oligonucleotide
gcgacaaattacattacgtttgctgtacaa

SEQ ID NO: 146183 - DNA, 30 bp, Artificial Sequence
  Synthetic oligonucleotide
agttgccggtgaaagaagagagttgtacaa

SEQ ID NO: 146184 - DNA, 30 bp, Artificial Sequence
  Synthetic oligonucleotide
ctaggggaccggtccacctagtgattacaa

SEQ ID NO: 146185 - DNA, 30 bp, Artificial Sequence
  Synthetic oligonucleotide
gtacgggccgcgagcacaacacagttacaa

SEQ ID NO: 146186 - DNA, 30 bp, Artificial Sequence
  Synthetic oligonucleotide
gccttaagatctccgttaataccgttacaa

SEQ ID NO: 146187 - DNA, 30 bp, Artificial Sequence
  Synthetic oligonucleotide
gtgcccaagtgtcaaccaagagcaaaccaa

SEQ ID NO: 146188 - DNA, 30 bp, Artificial Sequence
  Synthetic oligonucleotide
cggaagcgcttaaaggccgaccagaaccaa

SEQ ID NO: 146189 - DNA, 30 bp, Artificial Sequence
  Synthetic oligonucleotide
cgttagttgtgtagccaacgagagaaccaa

SEQ ID NO: 146190 - DNA, 30 bp, Artificial Sequence
  Synthetic oligonucleotide
gcatgggggtcaaaataattgcgccaccaa

SEQ ID NO: 146191 - DNA, 30 bp, Artificial Sequence
  Synthetic oligonucleotide
tggcaccaatgctttggaatcaagcaccaa

SEQ ID NO: 146192 - DNA, 30 bp, Artificial Sequence
  Synthetic oligonucleotide
attggcacacataccaagggcgaagaccaa

SEQ ID NO: 146193 - DNA, 30 bp, Artificial Sequence
  Synthetic oligonucleotide
acagattacgattcgagacctttagaccaa

SEQ ID NO: 146194 - DNA, 30 bp, Artificial Sequence
  Synthetic oligonucleotide
tgtcgaggattaacagatagataggaccaa

SEQ ID NO: 146195 - DNA, 30 bp, Artificial Sequence
  Synthetic oligonucleotide
ctctagagtggtaagtttcactatgaccaa

SEQ ID NO: 146196 - DNA, 30 bp, Artificial Sequence
  Synthetic oligonucleotide
cactgaaccgccctgctttaatactaccaa

SEQ ID NO: 146197 - DNA, 30 bp, Artificial Sequence
  Synthetic oligonucleotide
gtgataacaaaacctaaattccggtaccaa

SEQ ID NO: 146198 - DNA, 30 bp, Artificial Sequence
  Synthetic oligonucleotide
tataatacctagttcacctgaaattaccaa

SEQ ID NO: 146199 - DNA, 30 bp, Artificial Sequence
  Synthetic oligonucleotide
ctcaaccttgatggcaaagttacaacccaa

SEQ ID NO: 146200 - DNA, 30 bp, Artificial Sequence
  Synthetic oligonucleotide
aacagactgagattaacgatggacacccaa

SEQ ID NO: 146201 - DNA, 30 bp, Artificial Sequence
  Synthetic oligonucleotide
tgattccgtagttgaggacaatggacccaa

SEQ ID NO: 146202 - DNA, 30 bp, Artificial Sequence
  Synthetic oligonucleotide
ggctgccaacagcgatcggctttgacccaa

SEQ ID NO: 146203 - DNA, 30 bp, Artificial Sequence
  Synthetic oligonucleotide
taggggaacggttcctgatcttgtacccaa

SEQ ID NO: 146204 - DNA, 30 bp, Artificial Sequence
  Synthetic oligonucleotide
aatacgaactatttgataggaaaagcccaa

SEQ ID NO: 146205 - DNA, 30 bp, Artificial Sequence
  Synthetic oligonucleotide
cctatcgaaaggtctgtaagccaagcccaa

SEQ ID NO: 146206 - DNA, 30 bp, Artificial Sequence
  Synthetic oligonucleotide
tgaccctgccgacgcgggaatatcgcccaa

SEQ ID NO: 146207 - DNA, 30 bp, Artificial Sequence
  Synthetic oligonucleotide
ggggtataccgtaagttgtacctggcccaa

SEQ ID NO: 146208 - DNA, 30 bp, Artificial Sequence
  Synthetic oligonucleotide
taccggaatgacatttagtgttctgcccaa

SEQ ID NO: 146209 - DNA, 30 bp, Artificial Sequence
  Synthetic oligonucleotide
cgtctaatctcaagttttaatggatcccaa

SEQ ID NO: 146210 - DNA, 29 bp, Artificial Sequence
  Synthetic oligonucleotide
tctccgctacgactcacaacgtatcccaa

SEQ ID NO: 146211 - DNA, 30 bp, Artificial Sequence
  Synthetic oligonucleotide
tacgatgaacgatccatcatacattcccaa

SEQ ID NO: 146212 - DNA, 31 bp, Artificial Sequence
  Synthetic oligonucleotide
tcctcatgtcaactgttcctacacttcccaa

SEQ ID NO: 146213 - DNA, 30 bp, Artificial Sequence
  Synthetic oligonucleotide
cggaaggcattaacacgctcgcaaagccaa

SEQ ID NO: 146214 - DNA, 30 bp, Artificial Sequence
  Synthetic oligonucleotide
gcagacactctaatggaacgtttgagccaa

SEQ ID NO: 146215 - DNA, 30 bp, Artificial Sequence
  Synthetic oligonucleotide
cctcgtcaacatacctcacataaacgccaa

SEQ ID NO: 146216 - DNA, 30 bp, Artificial Sequence
  Synthetic oligonucleotide
tatcgggccaatatatcgccgctacgccaa

SEQ ID NO: 146217 - DNA, 30 bp, Artificial Sequence
  Synthetic oligonucleotide
tgtaatcatggggttcgggagaagcgccaa

SEQ ID NO: 146218 - DNA, 30 bp, Artificial Sequence
  Synthetic oligonucleotide
gcttcatattcaacaagacgtgtaggccaa

SEQ ID NO: 146219 - DNA, 30 bp, Artificial Sequence
  Synthetic oligonucleotide
gtaacgagttaggtactgaggtacggccaa

SEQ ID NO: 146220 - DNA, 30 bp, Artificial Sequence
  Synthetic oligonucleotide
cagggtgtatcatgtacctaagccggccaa

SEQ ID NO: 146221 - DNA, 30 bp, Artificial Sequence
  Synthetic oligonucleotide
ttgtatccattatgagggttgcggtgccaa

SEQ ID NO: 146222 - DNA, 30 bp, Artificial Sequence
  Synthetic oligonucleotide
cgtcaccaaaaagtcctactcctgtgccaa

SEQ ID NO: 146223 - DNA, 30 bp, Artificial Sequence
  Synthetic oligonucleotide
gcggaatgtcggtttcgtaatcattgccaa

SEQ ID NO: 146224 - DNA, 30 bp, Artificial Sequence
  Synthetic oligonucleotide
cttacgactttacaccgggatgtcatccaa

SEQ ID NO: 146225 - DNA, 30 bp, Artificial Sequence
  Synthetic oligonucleotide
gctcacacgaaatgcctatggcgcctccaa

SEQ ID NO: 146226 - DNA, 30 bp, Artificial Sequence
  Synthetic oligonucleotide
ctgtagagaggtccgaatgggtttctccaa

SEQ ID NO: 146227 - DNA, 30 bp, Artificial Sequence
  Synthetic oligonucleotide
ccttgaacggagccgaatctgtgagtccaa

SEQ ID NO: 146228 - DNA, 30 bp, Artificial Sequence
  Synthetic oligonucleotide
ctttcggttggacaacatcaaatcgtccaa

SEQ ID NO: 146229 - DNA, 30 bp, Artificial Sequence
  Synthetic oligonucleotide
tgacgcggttaggtctcagctcaggtccaa

SEQ ID NO: 146230 - DNA, 30 bp, Artificial Sequence
  Synthetic oligonucleotide
ctgttattaatagtacattgattcaagcaa

SEQ ID NO: 146231 - DNA, 30 bp, Artificial Sequence
  Synthetic oligonucleotide
tcaggtatcaggtccgcacacaggaagcaa

SEQ ID NO: 146232 - DNA, 30 bp, Artificial Sequence
  Synthetic oligonucleotide
gacatagtactagctatatggcaacagcaa

SEQ ID NO: 146233 - DNA, 30 bp, Artificial Sequence
  Synthetic oligonucleotide
gtgaatcgaagcaccctggaagaacagcaa

SEQ ID NO: 146234 - DNA, 30 bp, Artificial Sequence
  Synthetic oligonucleotide
aggagggcacgtaaattcacctcacagcaa

SEQ ID NO: 146235 - DNA, 30 bp, Artificial Sequence
  Synthetic oligonucleotide
cttcataagggttgcacggagtcacagcaa

SEQ ID NO: 146236 - DNA, 30 bp, Artificial Sequence
  Synthetic oligonucleotide
aactccgcgggcgggtacagcagacagcaa

SEQ ID NO: 146237 - DNA, 30 bp, Artificial Sequence
  Synthetic oligonucleotide
tgaattttggcgagcctccgattacagcaa

SEQ ID NO: 146238 - DNA, 30 bp, Artificial Sequence
  Synthetic oligonucleotide
atcttactctgtcgctcaaagagccagcaa

SEQ ID NO: 146239 - DNA, 30 bp, Artificial Sequence
  Synthetic oligonucleotide
aggaggaagaaacaggtatttaggcagcaa

SEQ ID NO: 146240 - DNA, 30 bp, Artificial Sequence
  Synthetic oligonucleotide
agggcctaaagcgtgttacacggtcagcaa

SEQ ID NO: 146241 - DNA, 30 bp, Artificial Sequence
  Synthetic oligonucleotide
ccatagaggggggaaacattcgaagagcaa

SEQ ID NO: 146242 - DNA, 30 bp, Artificial Sequence
  Synthetic oligonucleotide
tacttagccggtccctagtagtgagagcaa

SEQ ID NO: 146243 - DNA, 30 bp, Artificial Sequence
  Synthetic oligonucleotide
gtgtgtctgtcgacagggggaaccgagcaa

SEQ ID NO: 146244 - DNA, 30 bp, Artificial Sequence
  Synthetic oligonucleotide
cgcttgctcgttattcagaaaatctagcaa

SEQ ID NO: 146245 - DNA, 30 bp, Artificial Sequence
  Synthetic oligonucleotide
acaaatactggctaagatcgtgggtagcaa

SEQ ID NO: 146246 - DNA, 30 bp, Artificial Sequence
  Synthetic oligonucleotide
gcactcaaattcgaggtactcagaacgcaa

SEQ ID NO: 146247 - DNA, 30 bp, Artificial Sequence
  Synthetic oligonucleotide
ggcacgacggtcgtgggattccgtacgcaa

SEQ ID NO: 146248 - DNA, 30 bp, Artificial Sequence
  Synthetic oligonucleotide
aaccttgcatggatgaactggttaccgcaa

SEQ ID NO: 146249 - DNA, 30 bp, Artificial Sequence
  Synthetic oligonucleotide
ttgcatcgggagctacctcagtacccgcaa

SEQ ID NO: 146250 - DNA, 30 bp, Artificial Sequence
  Synthetic oligonucleotide
caaaagggggcgggacaggatagcgcgcaa

SEQ ID NO: 146251 - DNA, 30 bp, Artificial Sequence
  Synthetic oligonucleotide
ccaccacgaagtagtcaagcattcgcgcaa

SEQ ID NO: 146252 - DNA, 30 bp, Artificial Sequence
  Synthetic oligonucleotide
cgacgggcgacacacgtatcttaggcgcaa

SEQ ID NO: 146253 - DNA, 30 bp, Artificial Sequence
  Synthetic oligonucleotide
ccaatacggcaggtcggaacccgtgcgcaa

SEQ ID NO: 146254 - DNA, 30 bp, Artificial Sequence
  Synthetic oligonucleotide
tgggatcggcgcgatttgaatgcatcgcaa

SEQ ID NO: 146255 - DNA, 30 bp, Artificial Sequence
  Synthetic oligonucleotide
ttttgcgaatctataacttagaccaggcaa

SEQ ID NO: 146256 - DNA, 30 bp, Artificial Sequence
  Synthetic oligonucleotide
acaggtctggacttccaatccggtaggcaa

SEQ ID NO: 146257 - DNA, 30 bp, Artificial Sequence
  Synthetic oligonucleotide
taactgggtagttagcggataatacggcaa

SEQ ID NO: 146258 - DNA, 30 bp, Artificial Sequence
  Synthetic oligonucleotide
tgtaaaaaggggcgaagcgggaagcggcaa

SEQ ID NO: 146259 - DNA, 30 bp, Artificial Sequence
  Synthetic oligonucleotide
cgtggagccgatcttccatcgaatcggcaa

SEQ ID NO: 146260 - DNA, 30 bp, Artificial Sequence
  Synthetic oligonucleotide
ctagatacggaggtactgggggctcggcaa

SEQ ID NO: 146261 - DNA, 30 bp, Artificial Sequence
  Synthetic oligonucleotide
aaacagagtaaccgcttgcttaacgggcaa

SEQ ID NO: 146262 - DNA, 30 bp, Artificial Sequence
  Synthetic oligonucleotide
acgatcggagcctttcggtcataggggcaa

SEQ ID NO: 146263 - DNA, 30 bp, Artificial Sequence
  Synthetic oligonucleotide
gtgatgtccatggacaacgatgtctggcaa

SEQ ID NO: 146264 - DNA, 30 bp, Artificial Sequence
  Synthetic oligonucleotide
aaaggacctttagtctgtaccgggtggcaa

SEQ ID NO: 146265 - DNA, 30 bp, Artificial Sequence
  Synthetic oligonucleotide
agttagtcctcataggccaccaaaatgcaa

SEQ ID NO: 146266 - DNA, 30 bp, Artificial Sequence
  Synthetic oligonucleotide
gggtgtgtaaccacgggaggtctcatgcaa

SEQ ID NO: 146267 - DNA, 30 bp, Artificial Sequence
  Synthetic oligonucleotide
ggccagttccagaagattggagttatgcaa

SEQ ID NO: 146268 - DNA, 30 bp, Artificial Sequence
  Synthetic oligonucleotide
ctgggctgtgacttacaactgaaactgcaa

SEQ ID NO: 146269 - DNA, 30 bp, Artificial Sequence
  Synthetic oligonucleotide
cctcattgcttccgatcccgtgacctgcaa

SEQ ID NO: 146270 - DNA, 30 bp, Artificial Sequence
  Synthetic oligonucleotide
catatagcttcacatccatgctgcctgcaa

SEQ ID NO: 146271 - DNA, 30 bp, Artificial Sequence
  Synthetic oligonucleotide
ccgaacggccggtagattcaagtgctgcaa

SEQ ID NO: 146272 - DNA, 31 bp, Artificial Sequence
  Synthetic oligonucleotide
ttcagtaggtcaaaagggaattaacgtgcaa

SEQ ID NO: 146273 - DNA, 30 bp, Artificial Sequence
  Synthetic oligonucleotide
ttgaaagatccatcccgccacttggtgcaa

SEQ ID NO: 146274 - DNA, 30 bp, Artificial Sequence
  Synthetic oligonucleotide
tctgagatactgctatacgcccatgtgcaa

SEQ ID NO: 146275 - DNA, 30 bp, Artificial Sequence
  Synthetic oligonucleotide
tcgcatatacggataatgtcccaattgcaa

SEQ ID NO: 146276 - DNA, 30 bp, Artificial Sequence
  Synthetic oligonucleotide
tttctcccgaataaggtcaaaacgttgcaa

SEQ ID NO: 146277 - DNA, 30 bp, Artificial Sequence
  Synthetic oligonucleotide
tgcgtaggcatataactggacctgttgcaa

SEQ ID NO: 146278 - DNA, 30 bp, Artificial Sequence
  Synthetic oligonucleotide
acggaagatgttcagaaccggcttttgcaa

SEQ ID NO: 146279 - DNA, 30 bp, Artificial Sequence
  Synthetic oligonucleotide
cgaatgcgagacaaggggcccacaaatcaa

SEQ ID NO: 146280 - DNA, 30 bp, Artificial Sequence
  Synthetic oligonucleotide
gcaacctaccgcgtgccaccaacgaatcaa

SEQ ID NO: 146281 - DNA, 30 bp, Artificial Sequence
  Synthetic oligonucleotide
agcacggagtcacccataggtaggaatcaa

SEQ ID NO: 146282 - DNA, 30 bp, Artificial Sequence
  Synthetic oligonucleotide
gacttcgtgtacggatggtctgtgaatcaa

SEQ ID NO: 146283 - DNA, 30 bp, Artificial Sequence
  Synthetic oligonucleotide
cagttgtaagtagtaagtccctttaatcaa

SEQ ID NO: 146284 - DNA, 30 bp, Artificial Sequence
  Synthetic oligonucleotide
tgccgaacgggagttccggtagaccatcaa

SEQ ID NO: 146285 - DNA, 30 bp, Artificial Sequence
  Synthetic oligonucleotide
aaagtcaggttagcctagtcagttcatcaa

SEQ ID NO: 146286 - DNA, 30 bp, Artificial Sequence
  Synthetic oligonucleotide
atgctatcagtgacgagctctccagatcaa

SEQ ID NO: 146287 - DNA, 30 bp, Artificial Sequence
  Synthetic oligonucleotide
ggaccatcctgctgactgcgtcgcgatcaa

SEQ ID NO: 146288 - DNA, 30 bp, Artificial Sequence
  Synthetic oligonucleotide
cgggacaccggcgtgttagtatcggatcaa

SEQ ID NO: 146289 - DNA, 30 bp, Artificial Sequence
  Synthetic oligonucleotide
ttgcgtaatcactaaaagcaatatgatcaa

SEQ ID NO: 146290 - DNA, 30 bp, Artificial Sequence
  Synthetic oligonucleotide
ctatcagttgtcttgccatacagtgatcaa

SEQ ID NO: 146291 - DNA, 30 bp, Artificial Sequence
  Synthetic oligonucleotide
cgttaacgtaagctcaacaataaatatcaa

SEQ ID NO: 146292 - DNA, 30 bp, Artificial Sequence
  Synthetic oligonucleotide
gcgttccctgtgtcaactaacagatatcaa

SEQ ID NO: 146293 - DNA, 30 bp, Artificial Sequence
  Synthetic oligonucleotide
gtaaaaggcacgtggatatcgagaactcaa

SEQ ID NO: 146294 - DNA, 30 bp, Artificial Sequence
  Synthetic oligonucleotide
cgcccccaaggtatcaaggatgtaactcaa

SEQ ID NO: 146295 - DNA, 30 bp, Artificial Sequence
  Synthetic oligonucleotide
gagccggcataaacgagctccttaactcaa

SEQ ID NO: 146296 - DNA, 30 bp, Artificial Sequence
  Synthetic oligonucleotide
ccacgaaacttgggcaactttaaccctcaa

SEQ ID NO: 146297 - DNA, 30 bp, Artificial Sequence
  Synthetic oligonucleotide
tggggtagagtctgctttatttaccctcaa

SEQ ID NO: 146298 - DNA, 30 bp, Artificial Sequence
  Synthetic oligonucleotide
gcagtgtgccctaaactctatcacgctcaa

SEQ ID NO: 146299 - DNA, 30 bp, Artificial Sequence
  Synthetic oligonucleotide
agcgtaggcgccttactcttcgccgctcaa

SEQ ID NO: 146300 - DNA, 30 bp, Artificial Sequence
  Synthetic oligonucleotide
tggttggttcgagtaatggggtaggctcaa

SEQ ID NO: 146301 - DNA, 30 bp, Artificial Sequence
  Synthetic oligonucleotide
gagcccgttcatataggaaaggtggctcaa

SEQ ID NO: 146302 - DNA, 30 bp, Artificial Sequence
  Synthetic oligonucleotide
cctagtctacccactttcgaacatgctcaa

SEQ ID NO: 146303 - DNA, 30 bp, Artificial Sequence
  Synthetic oligonucleotide
atcaaagtaaggactaacactcatgctcaa

SEQ ID NO: 146304 - DNA, 30 bp, Artificial Sequence
  Synthetic oligonucleotide
tcggagacttcatctgatacaagtgctcaa

SEQ ID NO: 146305 - DNA, 30 bp, Artificial Sequence
  Synthetic oligonucleotide
ggggtaggcacgaaaggtcaatgtgctcaa

SEQ ID NO: 146306 - DNA, 30 bp, Artificial Sequence
  Synthetic oligonucleotide
ttcatgtacacgcgaagtcgtagctctcaa

SEQ ID NO: 146307 - DNA, 30 bp, Artificial Sequence
  Synthetic oligonucleotide
gtacggatgaagcacgctttgatgtctcaa

SEQ ID NO: 146308 - DNA, 31 bp, Artificial Sequence
  Synthetic oligonucleotide
gagcagacaacgtaacttagatgaaagtcaa

SEQ ID NO: 146309 - DNA, 30 bp, Artificial Sequence
  Synthetic oligonucleotide
gtagtagttcagattgtgtagccgagtcaa

SEQ ID NO: 146310 - DNA, 30 bp, Artificial Sequence
  Synthetic oligonucleotide
taataccggctgggtcttaggaatagtcaa

SEQ ID NO: 146311 - DNA, 30 bp, Artificial Sequence
  Synthetic oligonucleotide
acccgagatacggctgatagcgctagtcaa

SEQ ID NO: 146312 - DNA, 30 bp, Artificial Sequence
  Synthetic oligonucleotide
gtccgataggaagcttatgcttaacgtcaa

SEQ ID NO: 146313 - DNA, 30 bp, Artificial Sequence
  Synthetic oligonucleotide
gtggagggagcgcctacctccgcacgtcaa

SEQ ID NO: 146314 - DNA, 30 bp, Artificial Sequence
  Synthetic oligonucleotide
aaatagcgtacgaacatcactaggcgtcaa

SEQ ID NO: 146315 - DNA, 29 bp, Artificial Sequence
  Synthetic oligonucleotide
gtaggaaactcgcactagtccggcgtcaa

SEQ ID NO: 146316 - DNA, 30 bp, Artificial Sequence
  Synthetic oligonucleotide
gggtccgaagcgaggtgacggtctcgtcaa

SEQ ID NO: 146317 - DNA, 30 bp, Artificial Sequence
  Synthetic oligonucleotide
gacattacccttctaaaacactgtcgtcaa

SEQ ID NO: 146318 - DNA, 30 bp, Artificial Sequence
  Synthetic oligonucleotide
tgaacaatggaatgtaagcagagaggtcaa

SEQ ID NO: 146319 - DNA, 30 bp, Artificial Sequence
  Synthetic oligonucleotide
ggatcgagcaggttatctcacctaggtcaa

SEQ ID NO: 146320 - DNA, 30 bp, Artificial Sequence
  Synthetic oligonucleotide
gtcacgaacacaggcgagtacctgggtcaa

SEQ ID NO: 146321 - DNA, 30 bp, Artificial Sequence
  Synthetic oligonucleotide
gcaattaatcagatgtctcatggtggtcaa

SEQ ID NO: 146322 - DNA, 30 bp, Artificial Sequence
  Synthetic oligonucleotide
agctagcactttgttaggcctctatgtcaa

SEQ ID NO: 146323 - DNA, 30 bp, Artificial Sequence
  Synthetic oligonucleotide
atgctacatcttatgcgtatgggttgtcaa

SEQ ID NO: 146324 - DNA, 30 bp, Artificial Sequence
  Synthetic oligonucleotide
taagtaggccggacacacgtcatttgtcaa

SEQ ID NO: 146325 - DNA, 30 bp, Artificial Sequence
  Synthetic oligonucleotide
gcatcaagagttgatcccccgcacattcaa

SEQ ID NO: 146326 - DNA, 30 bp, Artificial Sequence
  Synthetic oligonucleotide
actgacgtgactcaaaaggtcgggattcaa

SEQ ID NO: 146327 - DNA, 30 bp, Artificial Sequence
  Synthetic oligonucleotide
tgacagcgtctcgcatcggatagccttcaa

SEQ ID NO: 146328 - DNA, 30 bp, Artificial Sequence
  Synthetic oligonucleotide
cttggcgtcccaaggcgagaagaatttcaa

SEQ ID NO: 146329 - DNA, 30 bp, Artificial Sequence
  Synthetic oligonucleotide
atgttacaacatttaataagtgcatttcaa

SEQ ID NO: 146330 - DNA, 30 bp, Artificial Sequence
  Synthetic oligonucleotide
tgtatcgtagtgtacggctaacgctttcaa

SEQ ID NO: 146331 - DNA, 30 bp, Artificial Sequence
  Synthetic oligonucleotide
caagaaaggacatcaggaggggcttttcaa

SEQ ID NO: 146332 - DNA, 30 bp, Artificial Sequence
  Synthetic oligonucleotide
gcggtcgcaactacaaatcgaagttttcaa

SEQ ID NO: 146333 - DNA, 30 bp, Artificial Sequence
  Synthetic oligonucleotide
aaagtacctggggtatggtaggacaaagaa

SEQ ID NO: 146334 - DNA, 30 bp, Artificial Sequence
  Synthetic oligonucleotide
attatgggtagatatgaagagtacaaagaa

SEQ ID NO: 146335 - DNA, 30 bp, Artificial Sequence
  Synthetic oligonucleotide
ggggattggagactctgcgcgggtaaagaa

SEQ ID NO: 146336 - DNA, 30 bp, Artificial Sequence
  Synthetic oligonucleotide
accatgcaattggactgaggtttacaagaa

SEQ ID NO: 146337 - DNA, 30 bp, Artificial Sequence
  Synthetic oligonucleotide
gaagatttaccctgtgggaggacccaagaa

SEQ ID NO: 146338 - DNA, 30 bp, Artificial Sequence
  Synthetic oligonucleotide
cgaacatctaggcgttatccagtccaagaa

SEQ ID NO: 146339 - DNA, 30 bp, Artificial Sequence
  Synthetic oligonucleotide
ggtatcttgataggcttaattaggcaagaa

SEQ ID NO: 146340 - DNA, 31 bp, Artificial Sequence
  Synthetic oligonucleotide
gggggaactagtgctataagctgatcaagaa

SEQ ID NO: 146341 - DNA, 30 bp, Artificial Sequence
  Synthetic oligonucleotide
actacgatggccgcgatccgtgttcaagaa

SEQ ID NO: 146342 - DNA, 30 bp, Artificial Sequence
  Synthetic oligonucleotide
tgattcacccccgctgcgtctacagaagaa

SEQ ID NO: 146343 - DNA, 30 bp, Artificial Sequence
  Synthetic oligonucleotide
ctgtagataatgtttcggtctgcagaagaa

SEQ ID NO: 146344 - DNA, 29 bp, Artificial Sequence
  Synthetic oligonucleotide
tagttacaactactgaagataacgaagaa

SEQ ID NO: 146345 - DNA, 30 bp, Artificial Sequence
  Synthetic oligonucleotide
gcttaaactttcggcatattaaaggaagaa

SEQ ID NO: 146346 - DNA, 30 bp, Artificial Sequence
  Synthetic oligonucleotide
ggggaagcgtaatcatctactcgggaagaa

SEQ ID NO: 146347 - DNA, 30 bp, Artificial Sequence
  Synthetic oligonucleotide
tcaaaattagcttgaggagtcttggaagaa

SEQ ID NO: 146348 - DNA, 30 bp, Artificial Sequence
  Synthetic oligonucleotide
acacgaatttggcgctgtgatgcataagaa

SEQ ID NO: 146349 - DNA, 30 bp, Artificial Sequence
  Synthetic oligonucleotide
acggggggtaattctgggatatcataagaa

SEQ ID NO: 146350 - DNA, 30 bp, Artificial Sequence
  Synthetic oligonucleotide
ggcgacatgttccgtgcgtagtcataagaa

SEQ ID NO: 146351 - DNA, 30 bp, Artificial Sequence
  Synthetic oligonucleotide
accatagtaatattgatttcgatataagaa

SEQ ID NO: 146352 - DNA, 30 bp, Artificial Sequence
  Synthetic oligonucleotide
tctcatttggaagtgctacgtgactaagaa

SEQ ID NO: 146353 - DNA, 30 bp, Artificial Sequence
  Synthetic oligonucleotide
tccccgccgagagttactgtttcctaagaa

SEQ ID NO: 146354 - DNA, 30 bp, Artificial Sequence
  Synthetic oligonucleotide
gcggtcgactggacggcattgggctaagaa

SEQ ID NO: 146355 - DNA, 30 bp, Artificial Sequence
  Synthetic oligonucleotide
agctttaactagccacccacactgtaagaa

SEQ ID NO: 146356 - DNA, 30 bp, Artificial Sequence
  Synthetic oligonucleotide
catggccaacgaaagacggtcggttaagaa

SEQ ID NO: 146357 - DNA, 30 bp, Artificial Sequence
  Synthetic oligonucleotide
taactcactgaacagtatatgggcacagaa

SEQ ID NO: 146358 - DNA, 30 bp, Artificial Sequence
  Synthetic oligonucleotide
tagattcatcgcaaagtttgacgtacagaa

SEQ ID NO: 146359 - DNA, 30 bp, Artificial Sequence
  Synthetic oligonucleotide
cagctcacaaggtgtttgtgttaaccagaa

SEQ ID NO: 146360 - DNA, 30 bp, Artificial Sequence
  Synthetic oligonucleotide
acaagtgttagcgaaaggtggcgtccagaa

SEQ ID NO: 146361 - DNA, 30 bp, Artificial Sequence
  Synthetic oligonucleotide
agggcttttacgcagccaacgagcgcagaa

SEQ ID NO: 146362 - DNA, 30 bp, Artificial Sequence
  Synthetic oligonucleotide
aaagaccagtactgaatgtacctggcagaa

SEQ ID NO: 146363 - DNA, 30 bp, Artificial Sequence
  Synthetic oligonucleotide
ctggccatctacgaggatcctgagtcagaa

SEQ ID NO: 146364 - DNA, 30 bp, Artificial Sequence
  Synthetic oligonucleotide
gctcgagtagcgtccctggaccattcagaa

SEQ ID NO: 146365 - DNA, 30 bp, Artificial Sequence
  Synthetic oligonucleotide
ttggacaaatccgagacaagatattcagaa

SEQ ID NO: 146366 - DNA, 30 bp, Artificial Sequence
  Synthetic oligonucleotide
tcacgtcgagtgatccctggatcttcagaa

SEQ ID NO: 146367 - DNA, 30 bp, Artificial Sequence
  Synthetic oligonucleotide
tcttggtgccgataagtacatatcagagaa

SEQ ID NO: 146368 - DNA, 30 bp, Artificial Sequence
  Synthetic oligonucleotide
acgaatctcactaaggcccatatccgagaa

SEQ ID NO: 146369 - DNA, 30 bp, Artificial Sequence
  Synthetic oligonucleotide
aggaatacgtgtactattgcaagtcgagaa

SEQ ID NO: 146370 - DNA, 30 bp, Artificial Sequence
  Synthetic oligonucleotide
atattaaggacagattggtagggtcgagaa

SEQ ID NO: 146371 - DNA, 30 bp, Artificial Sequence
  Synthetic oligonucleotide
atcccccgcgcgaggtagagattaggagaa

SEQ ID NO: 146372 - DNA, 30 bp, Artificial Sequence
  Synthetic oligonucleotide
tgttaaggggatctcggctcatgtggagaa

SEQ ID NO: 146373 - DNA, 30 bp, Artificial Sequence
  Synthetic oligonucleotide
attggtggaaatagacgagaggcatgagaa

SEQ ID NO: 146374 - DNA, 30 bp, Artificial Sequence
  Synthetic oligonucleotide
gataaaggccggtcggaaatctgctgagaa

SEQ ID NO: 146375 - DNA, 30 bp, Artificial Sequence
  Synthetic oligonucleotide
cgagtaggtatagttagaacaatctgagaa

SEQ ID NO: 146376 - DNA, 30 bp, Artificial Sequence
  Synthetic oligonucleotide
gggttgtgttaccgatatgtgaggtgagaa

SEQ ID NO: 146377 - DNA, 30 bp, Artificial Sequence
  Synthetic oligonucleotide
agacgggccttacggaccggcttttgagaa

SEQ ID NO: 146378 - DNA, 30 bp, Artificial Sequence
  Synthetic oligonucleotide
acactgtatctaggccgatcgcaaatagaa

SEQ ID NO: 146379 - DNA, 30 bp, Artificial Sequence
  Synthetic oligonucleotide
aggcttagtggcaaagatagtgcaatagaa

SEQ ID NO: 146380 - DNA, 30 bp, Artificial Sequence
  Synthetic oligonucleotide
ggtagtgagcttgaccgtacgttaatagaa

SEQ ID NO: 146381 - DNA, 30 bp, Artificial Sequence
  Synthetic oligonucleotide
tgacaaggagatctcgtaaggttgatagaa

SEQ ID NO: 146382 - DNA, 30 bp, Artificial Sequence
  Synthetic oligonucleotide
gaacaaatagaattaaattgcatactagaa

SEQ ID NO: 146383 - DNA, 30 bp, Artificial Sequence
  Synthetic oligonucleotide
gcaaatccggctaaggcatctgtactagaa

SEQ ID NO: 146384 - DNA, 30 bp, Artificial Sequence
  Synthetic oligonucleotide
ggacttcagctcacgagtaggacgctagaa

SEQ ID NO: 146385 - DNA, 30 bp, Artificial Sequence
  Synthetic oligonucleotide
agtgtcacgaggaacatacttcgggtagaa

SEQ ID NO: 146386 - DNA, 30 bp, Artificial Sequence
  Synthetic oligonucleotide
aagttggcccgtctagatagactggtagaa

SEQ ID NO: 146387 - DNA, 30 bp, Artificial Sequence
  Synthetic oligonucleotide
cattcggcgcgcgttaggtcatttgtagaa

SEQ ID NO: 146388 - DNA, 30 bp, Artificial Sequence
  Synthetic oligonucleotide
gctttaggtcgggagtgatcgacattagaa

SEQ ID NO: 146389 - DNA, 30 bp, Artificial Sequence
  Synthetic oligonucleotide
agagtacgctgctcacctcaaaggttagaa

SEQ ID NO: 146390 - DNA, 30 bp, Artificial Sequence
  Synthetic oligonucleotide
attaatgaactcagtaacagccaaaacgaa

SEQ ID NO: 146391 - DNA, 30 bp, Artificial Sequence
  Synthetic oligonucleotide
gggaggaacggggggtataattcaaacgaa

SEQ ID NO: 146392 - DNA, 30 bp, Artificial Sequence
  Synthetic oligonucleotide
tatataggggtaggagcagagctcaacgaa

SEQ ID NO: 146393 - DNA, 30 bp, Artificial Sequence
  Synthetic oligonucleotide
ctactggtccaaggcgagggttagaacgaa

SEQ ID NO: 146394 - DNA, 30 bp, Artificial Sequence
  Synthetic oligonucleotide
ggcttctggaccacgtaaccctttaacgaa

SEQ ID NO: 146395 - DNA, 30 bp, Artificial Sequence
  Synthetic oligonucleotide
gaagctagttcccgtttgaggaaacacgaa

SEQ ID NO: 146396 - DNA, 30 bp, Artificial Sequence
  Synthetic oligonucleotide
gaacagatatatcgcatgaccagacacgaa

SEQ ID NO: 146397 - DNA, 30 bp, Artificial Sequence
  Synthetic oligonucleotide
actaacatgtcgggcctgcccactgacgaa

SEQ ID NO: 146398 - DNA, 30 bp, Artificial Sequence
  Synthetic oligonucleotide
gtatcacctacacattgaaggcctgacgaa

SEQ ID NO: 146399 - DNA, 30 bp, Artificial Sequence
  Synthetic oligonucleotide
tggactaacgcccccccaatagaatacgaa

SEQ ID NO: 146400 - DNA, 30 bp, Artificial Sequence
  Synthetic oligonucleotide
ttgatacgagacatgctggtggaatacgaa

SEQ ID NO: 146401 - DNA, 30 bp, Artificial Sequence
  Synthetic oligonucleotide
cgttaacggccacgtcagtcttagtacgaa

SEQ ID NO: 146402 - DNA, 30 bp, Artificial Sequence
  Synthetic oligonucleotide
agccaccctatcgctgtaagcaggtacgaa

SEQ ID NO: 146403 - DNA, 30 bp, Artificial Sequence
  Synthetic oligonucleotide
atattggatcacatgtctcacctgtacgaa

SEQ ID NO: 146404 - DNA, 30 bp, Artificial Sequence
  Synthetic oligonucleotide
ttaatcactcggaaggcacctgaaaccgaa

SEQ ID NO: 146405 - DNA, 30 bp, Artificial Sequence
  Synthetic oligonucleotide
agggtcatggtacgccacaacaacaccgaa

SEQ ID NO: 146406 - DNA, 30 bp, Artificial Sequence
  Synthetic oligonucleotide
ggtagctaacaaaatgtgaaagggaccgaa

SEQ ID NO: 146407 - DNA, 30 bp, Artificial Sequence
  Synthetic oligonucleotide
tacgtagagtctatccgttttcgtaccgaa

SEQ ID NO: 146408 - DNA, 30 bp, Artificial Sequence
  Synthetic oligonucleotide
tgggaattgtcaaacgaagagctacccgaa

SEQ ID NO: 146409 - DNA, 30 bp, Artificial Sequence
  Synthetic oligonucleotide
atgggttacattgccattcagagccccgaa

SEQ ID NO: 146410 - DNA, 30 bp, Artificial Sequence
  Synthetic oligonucleotide
ctagcttcaactggaaccagtgatcccgaa

SEQ ID NO: 146411 - DNA, 30 bp, Artificial Sequence
  Synthetic oligonucleotide
atgcatttagcctcaaatcaccgcgccgaa

SEQ ID NO: 146412 - DNA, 30 bp, Artificial Sequence
  Synthetic oligonucleotide
cttcggtatgcgaactgacgatcggccgaa

SEQ ID NO: 146413 - DNA, 30 bp, Artificial Sequence
  Synthetic oligonucleotide
ctgccatgcgatcagagattatcggccgaa

SEQ ID NO: 146414 - DNA, 30 bp, Artificial Sequence
  Synthetic oligonucleotide
ggttggctacagaggtaactattggccgaa

SEQ ID NO: 146415 - DNA, 30 bp, Artificial Sequence
  Synthetic oligonucleotide
gttgtgatacggaatggcaagtctgccgaa

SEQ ID NO: 146416 - DNA, 30 bp, Artificial Sequence
  Synthetic oligonucleotide
ttccggaacgaacggagtgggtttgccgaa

SEQ ID NO: 146417 - DNA, 30 bp, Artificial Sequence
  Synthetic oligonucleotide
ggaacctaaatgggagagacaaattccgaa

SEQ ID NO: 146418 - DNA, 30 bp, Artificial Sequence
  Synthetic oligonucleotide
agctcccaagggcgctggctattttccgaa

SEQ ID NO: 146419 - DNA, 30 bp, Artificial Sequence
  Synthetic oligonucleotide
cctggcaccaataaaaacccagcaagcgaa

SEQ ID NO: 146420 - DNA, 30 bp, Artificial Sequence
  Synthetic oligonucleotide
cgaggatgtacctccaatgtcgtaagcgaa

SEQ ID NO: 146421 - DNA, 30 bp, Artificial Sequence
  Synthetic oligonucleotide
cgatgcttagacacggattataagagcgaa

SEQ ID NO: 146422 - DNA, 30 bp, Artificial Sequence
  Synthetic oligonucleotide
actttcccatcgtgtgcacttcagagcgaa

SEQ ID NO: 146423 - DNA, 30 bp, Artificial Sequence
  Synthetic oligonucleotide
aggcaggaatttcgcataaatgggagcgaa

SEQ ID NO: 146424 - DNA, 30 bp, Artificial Sequence
  Synthetic oligonucleotide
ctgtctgcttagcaagggtcctctagcgaa

SEQ ID NO: 146425 - DNA, 30 bp, Artificial Sequence
  Synthetic oligonucleotide
ggcaaagaggtacgacgagtctgtagcgaa

SEQ ID NO: 146426 - DNA, 30 bp, Artificial Sequence
  Synthetic oligonucleotide
gacacttactaggcgtcactggttagcgaa

SEQ ID NO: 146427 - DNA, 30 bp, Artificial Sequence
  Synthetic oligonucleotide
agatagttagagctcaaaactcgccgcgaa

SEQ ID NO: 146428 - DNA, 30 bp, Artificial Sequence
  Synthetic oligonucleotide
cgccgatcgggtaacggtcttggtcgcgaa

SEQ ID NO: 146429 - DNA, 30 bp, Artificial Sequence
  Synthetic oligonucleotide
acattaggatgcatcttatctggaggcgaa

SEQ ID NO: 146430 - DNA, 30 bp, Artificial Sequence
  Synthetic oligonucleotide
tgtaccagaccccgccgtcatgtgggcgaa

SEQ ID NO: 146431 - DNA, 30 bp, Artificial Sequence
  Synthetic oligonucleotide
ccttaatcaggttgaactgaacatggcgaa

SEQ ID NO: 146432 - DNA, 30 bp, Artificial Sequence
  Synthetic oligonucleotide
gctagcagactgactgccacatcgtgcgaa

SEQ ID NO: 146433 - DNA, 30 bp, Artificial Sequence
  Synthetic oligonucleotide
catgtgtgataagacttatccacttgcgaa

SEQ ID NO: 146434 - DNA, 30 bp, Artificial Sequence
  Synthetic oligonucleotide
acaaactcatccggtaagagaatttgcgaa

SEQ ID NO: 146435 - DNA, 30 bp, Artificial Sequence
  Synthetic oligonucleotide
gtaaaagttctccaccaccaaccgatcgaa

SEQ ID NO: 146436 - DNA, 30 bp, Artificial Sequence
  Synthetic oligonucleotide
tagtgttgagagtctggctcacggatcgaa

SEQ ID NO: 146437 - DNA, 30 bp, Artificial Sequence
  Synthetic oligonucleotide
atatatgaggctaatgcttctcggatcgaa

SEQ ID NO: 146438 - DNA, 30 bp, Artificial Sequence
  Synthetic oligonucleotide
gaaccgacgcaatgcgcaccactagtcgaa

SEQ ID NO: 146439 - DNA, 30 bp, Artificial Sequence
  Synthetic oligonucleotide
ctagcatccggatgcttgggataggtcgaa

SEQ ID NO: 146440 - DNA, 30 bp, Artificial Sequence
  Synthetic oligonucleotide
ttcaactcaagtagaggcggaagggtcgaa

SEQ ID NO: 146441 - DNA, 30 bp, Artificial Sequence
  Synthetic oligonucleotide
agacgttcaattaatacaggaggtgtcgaa

SEQ ID NO: 146442 - DNA, 30 bp, Artificial Sequence
  Synthetic oligonucleotide
gtgggatggtcgccgggcaagcttgtcgaa

SEQ ID NO: 146443 - DNA, 30 bp, Artificial Sequence
  Synthetic oligonucleotide
ctatattgtctcagacaaacttaattcgaa

SEQ ID NO: 146444 - DNA, 30 bp, Artificial Sequence
  Synthetic oligonucleotide
caacccccatctagctgccggatattcgaa

SEQ ID NO: 146445 - DNA, 30 bp, Artificial Sequence
  Synthetic oligonucleotide
gcgattgttcgtgactaagatctattcgaa

SEQ ID NO: 146446 - DNA, 30 bp, Artificial Sequence
  Synthetic oligonucleotide
ccatgtgcaaacttacttcaaagtttcgaa

SEQ ID NO: 146447 - DNA, 30 bp, Artificial Sequence
  Synthetic oligonucleotide
gcataggatgaagttacatatgttttcgaa

SEQ ID NO: 146448 - DNA, 30 bp, Artificial Sequence
  Synthetic oligonucleotide
atgatttgatgttttgcaaggtcgaaggaa

SEQ ID NO: 146449 - DNA, 30 bp, Artificial Sequence
  Synthetic oligonucleotide
cacgacttacatcacggtgtagcccaggaa

SEQ ID NO: 146450 - DNA, 30 bp, Artificial Sequence
  Synthetic oligonucleotide
tggtcatagtgtaaaagaaacgcccaggaa

SEQ ID NO: 146451 - DNA, 30 bp, Artificial Sequence
  Synthetic oligonucleotide
ggtcctaacgtagtagtacatgggcaggaa

SEQ ID NO: 146452 - DNA, 30 bp, Artificial Sequence
  Synthetic oligonucleotide
tgccggtgtgatgtattgacagccgaggaa

SEQ ID NO: 146453 - DNA, 30 bp, Artificial Sequence
  Synthetic oligonucleotide
atctttcattaagaatgcctctgcgaggaa

SEQ ID NO: 146454 - DNA, 30 bp, Artificial Sequence
  Synthetic oligonucleotide
ctaattatggatgttaatcgagaggaggaa

SEQ ID NO: 146455 - DNA, 30 bp, Artificial Sequence
  Synthetic oligonucleotide
ttcatgagcaaactgtcgtcgagggaggaa

SEQ ID NO: 146456 - DNA, 30 bp, Artificial Sequence
  Synthetic oligonucleotide
ccaaggcagcggacctaggggggataggaa

SEQ ID NO: 146457 - DNA, 30 bp, Artificial Sequence
  Synthetic oligonucleotide
gataacattactaaaggatagtgataggaa

SEQ ID NO: 146458 - DNA, 30 bp, Artificial Sequence
  Synthetic oligonucleotide
tttggacgcgccggtagaattagctaggaa

SEQ ID NO: 146459 - DNA, 30 bp, Artificial Sequence
  Synthetic oligonucleotide
ataaatcgtagttgggcatggggctaggaa

SEQ ID NO: 146460 - DNA, 30 bp, Artificial Sequence
  Synthetic oligonucleotide
catgcactacactcggaaccgttaccggaa

SEQ ID NO: 146461 - DNA, 30 bp, Artificial Sequence
  Synthetic oligonucleotide
acgtaggctgggaccaatacatacccggaa

SEQ ID NO: 146462 - DNA, 30 bp, Artificial Sequence
  Synthetic oligonucleotide
gtcggtaaaacgcggtgaagtactccggaa

SEQ ID NO: 146463 - DNA, 30 bp, Artificial Sequence
  Synthetic oligonucleotide
ttataagacctttggcatcaacttccggaa

SEQ ID NO: 146464 - DNA, 30 bp, Artificial Sequence
  Synthetic oligonucleotide
tacgcatcaacttagagcatggccgcggaa

SEQ ID NO: 146465 - DNA, 30 bp, Artificial Sequence
  Synthetic oligonucleotide
cgaacataaatgaattagacgggcgcggaa

SEQ ID NO: 146466 - DNA, 30 bp, Artificial Sequence
  Synthetic oligonucleotide
aatcccggggaaggggatcagagggcggaa

SEQ ID NO: 146467 - DNA, 30 bp, Artificial Sequence
  Synthetic oligonucleotide
agaatcaccgccgcttcaatggggtcggaa

SEQ ID NO: 146468 - DNA, 30 bp, Artificial Sequence
  Synthetic oligonucleotide
gtagagagaaaacgtcctctagccagggaa

SEQ ID NO: 146469 - DNA, 30 bp, Artificial Sequence
  Synthetic oligonucleotide
tcgcggcaatgcatgcgggtattgagggaa

SEQ ID NO: 146470 - DNA, 30 bp, Artificial Sequence
  Synthetic oligonucleotide
tacaagaatacactcaccgggcatagggaa

SEQ ID NO: 146471 - DNA, 30 bp, Artificial Sequence
  Synthetic oligonucleotide
gttgtcggacgtacgaggatttttagggaa

SEQ ID NO: 146472 - DNA, 30 bp, Artificial Sequence
  Synthetic oligonucleotide
cagtcgaggcttaatcgtcagacacgggaa

SEQ ID NO: 146473 - DNA, 30 bp, Artificial Sequence
  Synthetic oligonucleotide
tgatgacggttcatatgaatatgacgggaa

SEQ ID NO: 146474 - DNA, 30 bp, Artificial Sequence
  Synthetic oligonucleotide
aaaccatggtccagggagccaaaccgggaa

SEQ ID NO: 146475 - DNA, 30 bp, Artificial Sequence
  Synthetic oligonucleotide
aaagggtgatagggatgttaagtgcgggaa

SEQ ID NO: 146476 - DNA, 30 bp, Artificial Sequence
  Synthetic oligonucleotide
acactaagaacacaggatgcgacaggggaa

SEQ ID NO: 146477 - DNA, 30 bp, Artificial Sequence
  Synthetic oligonucleotide
cataagtcgtccaccgtacggtcaggggaa

SEQ ID NO: 146478 - DNA, 30 bp, Artificial Sequence
  Synthetic oligonucleotide
gtgaacggacgagcgttgccaaacggggaa

SEQ ID NO: 146479 - DNA, 30 bp, Artificial Sequence
  Synthetic oligonucleotide
cccttgccggtcgggcaggagcggggggaa

SEQ ID NO: 146480 - DNA, 30 bp, Artificial Sequence
  Synthetic oligonucleotide
ttgcgccgcgtgttgcgcggttggggggaa

SEQ ID NO: 146481 - DNA, 30 bp, Artificial Sequence
  Synthetic oligonucleotide
tccggcccgcgtggatttaaagcatgggaa

SEQ ID NO: 146482 - DNA, 30 bp, Artificial Sequence
  Synthetic oligonucleotide
aggagaacggagcccttcgacacctgggaa

SEQ ID NO: 146483 - DNA, 30 bp, Artificial Sequence
  Synthetic oligonucleotide
ctatactagttgaggggccaacgctgggaa

SEQ ID NO: 146484 - DNA, 30 bp, Artificial Sequence
  Synthetic oligonucleotide
cgactgagacgaatataacttccgtgggaa

SEQ ID NO: 146485 - DNA, 30 bp, Artificial Sequence
  Synthetic oligonucleotide
gggcaacatcattgagacacaatttgggaa

SEQ ID NO: 146486 - DNA, 30 bp, Artificial Sequence
  Synthetic oligonucleotide
ctagcataactacgggttgggttttgggaa

SEQ ID NO: 146487 - DNA, 30 bp, Artificial Sequence
  Synthetic oligonucleotide
agtaaagactattgtgagcggagaatggaa

SEQ ID NO: 146488 - DNA, 30 bp, Artificial Sequence
  Synthetic oligonucleotide
aacgatggcgggttccgtccgaccatggaa

SEQ ID NO: 146489 - DNA, 30 bp, Artificial Sequence
  Synthetic oligonucleotide
tcgaagggcgcttcagggtggtgcatggaa

SEQ ID NO: 146490 - DNA, 30 bp, Artificial Sequence
  Synthetic oligonucleotide
ataccgtagatctgtattggcgtcatggaa

SEQ ID NO: 146491 - DNA, 30 bp, Artificial Sequence
  Synthetic oligonucleotide
ctacgtttcacaaaataacgaaggatggaa

SEQ ID NO: 146492 - DNA, 30 bp, Artificial Sequence
  Synthetic oligonucleotide
aggcctcccctctaatcaataaacctggaa

SEQ ID NO: 146493 - DNA, 30 bp, Artificial Sequence
  Synthetic oligonucleotide
tggagggtctagtcaagcgttctgctggaa

SEQ ID NO: 146494 - DNA, 30 bp, Artificial Sequence
  Synthetic oligonucleotide
aggggggcgtggggtgatctgacagtggaa

SEQ ID NO: 146495 - DNA, 30 bp, Artificial Sequence
  Synthetic oligonucleotide
ctcggcccaggcccagactgcctagtggaa

SEQ ID NO: 146496 - DNA, 30 bp, Artificial Sequence
  Synthetic oligonucleotide
atccagtagagtagcgaacgcatcgtggaa

SEQ ID NO: 146497 - DNA, 30 bp, Artificial Sequence
  Synthetic oligonucleotide
acgaataccttgatcctccgggcggtggaa

SEQ ID NO: 146498 - DNA, 30 bp, Artificial Sequence
  Synthetic oligonucleotide
tctgggagttgaattatgagtatggtggaa

SEQ ID NO: 146499 - DNA, 30 bp, Artificial Sequence
  Synthetic oligonucleotide
cagatgatgtgcgagacatgtagtgtggaa

SEQ ID NO: 146500 - DNA, 30 bp, Artificial Sequence
  Synthetic oligonucleotide
acccggccaaccgtcgccctacacttggaa

SEQ ID NO: 146501 - DNA, 30 bp, Artificial Sequence
  Synthetic oligonucleotide
taggccagaccatagcaatgggccttggaa

SEQ ID NO: 146502 - DNA, 30 bp, Artificial Sequence
  Synthetic oligonucleotide
aacgtgtctcccagtgggatgtgcttggaa

SEQ ID NO: 146503 - DNA, 30 bp, Artificial Sequence
  Synthetic oligonucleotide
gcggagaattcgcgctcggccacaaatgaa

SEQ ID NO: 146504 - DNA, 30 bp, Artificial Sequence
  Synthetic oligonucleotide
ggtgggtttacaacaaccgataacaatgaa

SEQ ID NO: 146505 - DNA, 30 bp, Artificial Sequence
  Synthetic oligonucleotide
taatgcccgggcgaggcctctaggaatgaa

SEQ ID NO: 146506 - DNA, 30 bp, Artificial Sequence
  Synthetic oligonucleotide
cccagatgctcatagtatccaccacatgaa

SEQ ID NO: 146507 - DNA, 30 bp, Artificial Sequence
  Synthetic oligonucleotide
acacagctgtcactgcgacttggacatgaa

SEQ ID NO: 146508 - DNA, 30 bp, Artificial Sequence
  Synthetic oligonucleotide
caaggagtgcttataaagcgacgccatgaa

SEQ ID NO: 146509 - DNA, 30 bp, Artificial Sequence
  Synthetic oligonucleotide
gcattgggctaatggcatattgagcatgaa

SEQ ID NO: 146510 - DNA, 30 bp, Artificial Sequence
  Synthetic oligonucleotide
ctggtcctgtacgttaaataaggagatgaa

SEQ ID NO: 146511 - DNA, 30 bp, Artificial Sequence
  Synthetic oligonucleotide
caggaccgtttgatagagggatgcgatgaa

SEQ ID NO: 146512 - DNA, 30 bp, Artificial Sequence
  Synthetic oligonucleotide
atttgtacggcaatggcaaatctggatgaa

SEQ ID NO: 146513 - DNA, 30 bp, Artificial Sequence
  Synthetic oligonucleotide
gcaatcttgcccggcttggctattgatgaa

SEQ ID NO: 146514 - DNA, 30 bp, Artificial Sequence
  Synthetic oligonucleotide
ggatgggcacaaattgttgatccatatgaa

SEQ ID NO: 146515 - DNA, 30 bp, Artificial Sequence
  Synthetic oligonucleotide
agcagagtcggtcaacagacctcatatgaa

SEQ ID NO: 146516 - DNA, 30 bp, Artificial Sequence
  Synthetic oligonucleotide
atagctggcacaactccccaggtatatgaa

SEQ ID NO: 146517 - DNA, 30 bp, Artificial Sequence
  Synthetic oligonucleotide
taatggcaaagaaaatagtacatctatgaa

SEQ ID NO: 146518 - DNA, 30 bp, Artificial Sequence
  Synthetic oligonucleotide
agtgaaacgtaccgcaagagggcgtatgaa

SEQ ID NO: 146519 - DNA, 30 bp, Artificial Sequence
  Synthetic oligonucleotide
tcatagtcgaataactgataatattatgaa

SEQ ID NO: 146520 - DNA, 30 bp, Artificial Sequence
  Synthetic oligonucleotide
gaagtggagtccatgcttgaaccaactgaa

SEQ ID NO: 146521 - DNA, 30 bp, Artificial Sequence
  Synthetic oligonucleotide
ccagcgggcacattcctaagcaccactgaa

SEQ ID NO: 146522 - DNA, 30 bp, Artificial Sequence
  Synthetic oligonucleotide
agctaaatttataccacaagccccactgaa

SEQ ID NO: 146523 - DNA, 30 bp, Artificial Sequence
  Synthetic oligonucleotide
gacgggaaaacaagttcccaagagactgaa

SEQ ID NO: 146524 - DNA, 30 bp, Artificial Sequence
  Synthetic oligonucleotide
atgacgggtttggtgacgatcgctactgaa

SEQ ID NO: 146525 - DNA, 30 bp, Artificial Sequence
  Synthetic oligonucleotide
tagactagaatcggagagtgttccgctgaa

SEQ ID NO: 146526 - DNA, 30 bp, Artificial Sequence
  Synthetic oligonucleotide
tcggatacttttgtggaggcttcggctgaa

SEQ ID NO: 146527 - DNA, 30 bp, Artificial Sequence
  Synthetic oligonucleotide
gttactagaagtaaggccactattgctgaa

SEQ ID NO: 146528 - DNA, 30 bp, Artificial Sequence
  Synthetic oligonucleotide
accgaagtatggtgcacgcatatatctgaa

SEQ ID NO: 146529 - DNA, 30 bp, Artificial Sequence
  Synthetic oligonucleotide
tatcaatgggtcacaggagactgctctgaa

SEQ ID NO: 146530 - DNA, 30 bp, Artificial Sequence
  Synthetic oligonucleotide
gcaacaaacagaggaacgtattggtctgaa

SEQ ID NO: 146531 - DNA, 30 bp, Artificial Sequence
  Synthetic oligonucleotide
ttgcaactattgactcaccgggaaagtgaa

SEQ ID NO: 146532 - DNA, 30 bp, Artificial Sequence
  Synthetic oligonucleotide
gccaaatctttggcgcacgtgctcagtgaa

SEQ ID NO: 146533 - DNA, 30 bp, Artificial Sequence
  Synthetic oligonucleotide
gtgtgggtcggcaaggtagagaatagtgaa

SEQ ID NO: 146534 - DNA, 30 bp, Artificial Sequence
  Synthetic oligonucleotide
aatacggtgaccaagcgccatgggcgtgaa

SEQ ID NO: 146535 - DNA, 30 bp, Artificial Sequence
  Synthetic oligonucleotide
gatacttgaacccacaagatcatgcgtgaa

SEQ ID NO: 146536 - DNA, 30 bp, Artificial Sequence
  Synthetic oligonucleotide
atcatacatcaaatagctgagggtcgtgaa

SEQ ID NO: 146537 - DNA, 30 bp, Artificial Sequence
  Synthetic oligonucleotide
ggggcactagggaactacgtttgtcgtgaa

SEQ ID NO: 146538 - DNA, 30 bp, Artificial Sequence
  Synthetic oligonucleotide
gggcgtagtggcggcggggaacaaggtgaa

SEQ ID NO: 146539 - DNA, 30 bp, Artificial Sequence
  Synthetic oligonucleotide
gactggcagtcagggcttatgtaaggtgaa

SEQ ID NO: 146540 - DNA, 30 bp, Artificial Sequence
  Synthetic oligonucleotide
tagaaaatggcggaactgctaacaggtgaa

SEQ ID NO: 146541 - DNA, 30 bp, Artificial Sequence
  Synthetic oligonucleotide
ggcccccgaactatgtgatcagggggtgaa

SEQ ID NO: 146542 - DNA, 30 bp, Artificial Sequence
  Synthetic oligonucleotide
tcaaccgttctgccattctagagtggtgaa

SEQ ID NO: 146543 - DNA, 30 bp, Artificial Sequence
  Synthetic oligonucleotide
caacagggtgtactttccgtacgatgtgaa

SEQ ID NO: 146544 - DNA, 30 bp, Artificial Sequence
  Synthetic oligonucleotide
cgcccaacatatctgtggtgatactgtgaa

SEQ ID NO: 146545 - DNA, 30 bp, Artificial Sequence
  Synthetic oligonucleotide
caaactctactcagtaataaatgcattgaa

SEQ ID NO: 146546 - DNA, 30 bp, Artificial Sequence
  Synthetic oligonucleotide
atactcgtcaaccggactattacgattgaa

SEQ ID NO: 146547 - DNA, 30 bp, Artificial Sequence
  Synthetic oligonucleotide
ctacccaggcacgcacaaagacggattgaa

SEQ ID NO: 146548 - DNA, 30 bp, Artificial Sequence
  Synthetic oligonucleotide
ttcgcccaaatacgtggatagaatattgaa

SEQ ID NO: 146549 - DNA, 30 bp, Artificial Sequence
  Synthetic oligonucleotide
cggttgcgaactgttgcgtagagtattgaa

SEQ ID NO: 146550 - DNA, 30 bp, Artificial Sequence
  Synthetic oligonucleotide
tccggccccaccattatgggaaaccttgaa

SEQ ID NO: 146551 - DNA, 30 bp, Artificial Sequence
  Synthetic oligonucleotide
ggcgatcggggggagcgaaccgatcttgaa

SEQ ID NO: 146552 - DNA, 30 bp, Artificial Sequence
  Synthetic oligonucleotide
tgacgatcgcattagtaaatcgaggttgaa

SEQ ID NO: 146553 - DNA, 30 bp, Artificial Sequence
  Synthetic oligonucleotide
gacaacatcagcacgtgtagagtggttgaa

SEQ ID NO: 146554 - DNA, 30 bp, Artificial Sequence
  Synthetic oligonucleotide
tgtctcatgtaatggcgagtaaaatttgaa

SEQ ID NO: 146555 - DNA, 30 bp, Artificial Sequence
  Synthetic oligonucleotide
cgagtaccgtgaaaaattgacacatttgaa

SEQ ID NO: 146556 - DNA, 30 bp, Artificial Sequence
  Synthetic oligonucleotide
gcccgcaaaagacgtagaccagactttgaa

SEQ ID NO: 146557 - DNA, 30 bp, Artificial Sequence
  Synthetic oligonucleotide
tactgggagggcacctaatggatctttgaa

SEQ ID NO: 146558 - DNA, 30 bp, Artificial Sequence
  Synthetic oligonucleotide
ggtgaaggatgaggcatgaggtaaaaataa

SEQ ID NO: 146559 - DNA, 30 bp, Artificial Sequence
  Synthetic oligonucleotide
acgtaaaccaggtgtgacagtgccaaataa

SEQ ID NO: 146560 - DNA, 30 bp, Artificial Sequence
  Synthetic oligonucleotide
agggtggtaacatactcaacagagaaataa

SEQ ID NO: 146561 - DNA, 30 bp, Artificial Sequence
  Synthetic oligonucleotide
gggtaatgtgccccactttactggaaataa

SEQ ID NO: 146562 - DNA, 30 bp, Artificial Sequence
  Synthetic oligonucleotide
taccctcgaagtcacgatctgagtaaataa

SEQ ID NO: 146563 - DNA, 30 bp, Artificial Sequence
  Synthetic oligonucleotide
agtaattcggacaataagtaatgtaaataa

SEQ ID NO: 146564 - DNA, 30 bp, Artificial Sequence
  Synthetic oligonucleotide
ggtcacgaaaagttcgtataacaacaataa

SEQ ID NO: 146565 - DNA, 30 bp, Artificial Sequence
  Synthetic oligonucleotide
cgggctgccgctgtcgagcttagagaataa

SEQ ID NO: 146566 - DNA, 30 bp, Artificial Sequence
  Synthetic oligonucleotide
gcggagccgagtcttaatcctcgagaataa

SEQ ID NO: 146567 - DNA, 30 bp, Artificial Sequence
  Synthetic oligonucleotide
cctcggacttttccgacatttaacgaataa

SEQ ID NO: 146568 - DNA, 30 bp, Artificial Sequence
  Synthetic oligonucleotide
ttgacgatcagcctgaggaggcccgaataa

SEQ ID NO: 146569 - DNA, 30 bp, Artificial Sequence
  Synthetic oligonucleotide
ggttaaatggtgacttctataaaggaataa

SEQ ID NO: 146570 - DNA, 30 bp, Artificial Sequence
  Synthetic oligonucleotide
ggcggatgctgggccaaacatagggaataa

SEQ ID NO: 146571 - DNA, 30 bp, Artificial Sequence
  Synthetic oligonucleotide
cgagacctggaaatggtactccctgaataa

SEQ ID NO: 146572 - DNA, 30 bp, Artificial Sequence
  Synthetic oligonucleotide
ctgccggaactgtccggtctatcataataa

SEQ ID NO: 146573 - DNA, 30 bp, Artificial Sequence
  Synthetic oligonucleotide
tagggagtaggcacgagaagcgtataataa

SEQ ID NO: 146574 - DNA, 30 bp, Artificial Sequence
  Synthetic oligonucleotide
gtgcaccgtgaggggtaagtgtcctaataa

SEQ ID NO: 146575 - DNA, 30 bp, Artificial Sequence
  Synthetic oligonucleotide
gcataatagtctgcgagtagaataacataa

SEQ ID NO: 146576 - DNA, 30 bp, Artificial Sequence
  Synthetic oligonucleotide
tcctcaacagggagccattccaagacataa

SEQ ID NO: 146577 - DNA, 30 bp, Artificial Sequence
  Synthetic oligonucleotide
ggataccaaaatagctggccacagacataa

SEQ ID NO: 146578 - DNA, 30 bp, Artificial Sequence
  Synthetic oligonucleotide
gacataggtaggtgttagagtattacataa

SEQ ID NO: 146579 - DNA, 30 bp, Artificial Sequence
  Synthetic oligonucleotide
aagatcgtcgaataatcatcggttacataa

SEQ ID NO: 146580 - DNA, 30 bp, Artificial Sequence
  Synthetic oligonucleotide
ctaaattctgaatggcgtcgtaaaccataa

SEQ ID NO: 146581 - DNA, 30 bp, Artificial Sequence
  Synthetic oligonucleotide
tctacgtatactccgggaaataccccataa

SEQ ID NO: 146582 - DNA, 30 bp, Artificial Sequence
  Synthetic oligonucleotide
tcgtatggagggtttcttctgagtccataa

SEQ ID NO: 146583 - DNA, 30 bp, Artificial Sequence
  Synthetic oligonucleotide
gggtatgctcgatactgtctgggtccataa

SEQ ID NO: 146584 - DNA, 30 bp, Artificial Sequence
  Synthetic oligonucleotide
ttaccgagagcatagcgactataagcataa

SEQ ID NO: 146585 - DNA, 30 bp, Artificial Sequence
  Synthetic oligonucleotide
aattcgccaccgtaacaaactacagcataa

SEQ ID NO: 146586 - DNA, 30 bp, Artificial Sequence
  Synthetic oligonucleotide
tttcgcgttcacactcccagtagagcataa

SEQ ID NO: 146587 - DNA, 30 bp, Artificial Sequence
  Synthetic oligonucleotide
acaatgcaatatataatgagtgcatcataa

SEQ ID NO: 146588 - DNA, 30 bp, Artificial Sequence
  Synthetic oligonucleotide
cagcgcccaacaatatcaaaaaatagataa

SEQ ID NO: 146589 - DNA, 30 bp, Artificial Sequence
  Synthetic oligonucleotide
agggggacagccaaagcagctcctagataa

SEQ ID NO: 146590 - DNA, 30 bp, Artificial Sequence
  Synthetic oligonucleotide
ctaactatagaaccaagaactcgacgataa

SEQ ID NO: 146591 - DNA, 30 bp, Artificial Sequence
  Synthetic oligonucleotide
ggatataccaatggcagctcgaacggataa

SEQ ID NO: 146592 - DNA, 30 bp, Artificial Sequence
  Synthetic oligonucleotide
aggttaggcgaggaacactgctcgggataa

SEQ ID NO: 146593 - DNA, 30 bp, Artificial Sequence
  Synthetic oligonucleotide
gtaaacaattctcaccgacaggctggataa

SEQ ID NO: 146594 - DNA, 30 bp, Artificial Sequence
  Synthetic oligonucleotide
catgactatcgtttatagtttgttggataa

SEQ ID NO: 146595 - DNA, 30 bp, Artificial Sequence
  Synthetic oligonucleotide
gtgaaacgaagcgagtgctaatgatgataa

SEQ ID NO: 146596 - DNA, 30 bp, Artificial Sequence
  Synthetic oligonucleotide
attacaacagggtaggaataaaactgataa

SEQ ID NO: 146597 - DNA, 30 bp, Artificial Sequence
  Synthetic oligonucleotide
catatgtagagctagagtaggacttgataa

SEQ ID NO: 146598 - DNA, 30 bp, Artificial Sequence
  Synthetic oligonucleotide
gggtgtatactacaggtcaagcacatataa

SEQ ID NO: 146599 - DNA, 30 bp, Artificial Sequence
  Synthetic oligonucleotide
gtcaaaagcgccggaaccttgtccatataa

SEQ ID NO: 146600 - DNA, 30 bp, Artificial Sequence
  Synthetic oligonucleotide
cgctagggctacggcaggatacatatataa

SEQ ID NO: 146601 - DNA, 30 bp, Artificial Sequence
  Synthetic oligonucleotide
cttggtggtgtcgttttggcccgcctataa

SEQ ID NO: 146602 - DNA, 30 bp, Artificial Sequence
  Synthetic oligonucleotide
atagtatcagtagtgaagtttgcgctataa

SEQ ID NO: 146603 - DNA, 30 bp, Artificial Sequence
  Synthetic oligonucleotide
gtcggatgcggccaattcacacttctataa

SEQ ID NO: 146604 - DNA, 30 bp, Artificial Sequence
  Synthetic oligonucleotide
gacaagtggttggcaagcgggaccttataa

SEQ ID NO: 146605 - DNA, 30 bp, Artificial Sequence
  Synthetic oligonucleotide
gtaatcgactaaaaagtgtttagcttataa

SEQ ID NO: 146606 - DNA, 30 bp, Artificial Sequence
  Synthetic oligonucleotide
gggagtgcaaaagtactgaactcgttataa

SEQ ID NO: 146607 - DNA, 30 bp, Artificial Sequence
  Synthetic oligonucleotide
gcaatcgtagtcggtcatgcctcaaactaa

SEQ ID NO: 146608 - DNA, 30 bp, Artificial Sequence
  Synthetic oligonucleotide
tgcatcagttataagaagccatcgaactaa

SEQ ID NO: 146609 - DNA, 30 bp, Artificial Sequence
  Synthetic oligonucleotide
agttcgcttgtgccatacatcaggaactaa

SEQ ID NO: 146610 - DNA, 30 bp, Artificial Sequence
  Synthetic oligonucleotide
gcgggtataagtttatccggagtgcactaa

SEQ ID NO: 146611 - DNA, 30 bp, Artificial Sequence
  Synthetic oligonucleotide
ctgggctgagatggtaaagtcgttcactaa

SEQ ID NO: 146612 - DNA, 30 bp, Artificial Sequence
  Synthetic oligonucleotide
gcatccgaccgctaattacctacagactaa

SEQ ID NO: 146613 - DNA, 30 bp, Artificial Sequence
  Synthetic oligonucleotide
ggtaggatgttccgtcaaacagcagactaa

SEQ ID NO: 146614 - DNA, 30 bp, Artificial Sequence
  Synthetic oligonucleotide
tagaaaacccgcaaagtagagatagactaa

SEQ ID NO: 146615 - DNA, 30 bp, Artificial Sequence
  Synthetic oligonucleotide
ggcaacgatcccgcaccaccttgcgactaa

SEQ ID NO: 146616 - DNA, 30 bp, Artificial Sequence
  Synthetic oligonucleotide
gtggaaatggcaacagttgccaaggactaa

SEQ ID NO: 146617 - DNA, 30 bp, Artificial Sequence
  Synthetic oligonucleotide
gaacagctcctgagtcaattttgggactaa

SEQ ID NO: 146618 - DNA, 30 bp, Artificial Sequence
  Synthetic oligonucleotide
ttgagatcgatatggaaagtaaatgactaa

SEQ ID NO: 146619 - DNA, 30 bp, Artificial Sequence
  Synthetic oligonucleotide
tcctatagtacaccgaccttcagttactaa

SEQ ID NO: 146620 - DNA, 30 bp, Artificial Sequence
  Synthetic oligonucleotide
aatccacgaggagatgttaaaaaaacctaa

SEQ ID NO: 146621 - DNA, 30 bp, Artificial Sequence
  Synthetic oligonucleotide
tactcattaaagcaggatatctcaacctaa

SEQ ID NO: 146622 - DNA, 30 bp, Artificial Sequence
  Synthetic oligonucleotide
ttggggaacaccccgaggccctgcacctaa

SEQ ID NO: 146623 - DNA, 30 bp, Artificial Sequence
  Synthetic oligonucleotide
ctggaagggacggtacggtgcaagacctaa

SEQ ID NO: 146624 - DNA, 30 bp, Artificial Sequence
  Synthetic oligonucleotide
gtccacgcacacggggatttaattacctaa

SEQ ID NO: 146625 - DNA, 30 bp, Artificial Sequence
  Synthetic oligonucleotide
gtatgcacttcaagctagttcagcccctaa

SEQ ID NO: 146626 - DNA, 30 bp, Artificial Sequence
  Synthetic oligonucleotide
gcagcggcgacgccttgtaaaaactcctaa

SEQ ID NO: 146627 - DNA, 30 bp, Artificial Sequence
  Synthetic oligonucleotide
agcaattcattacagcgtgtggactcctaa

SEQ ID NO: 146628 - DNA, 30 bp, Artificial Sequence
  Synthetic oligonucleotide
ctaacacgatccgtaagcgaggcttcctaa

SEQ ID NO: 146629 - DNA, 30 bp, Artificial Sequence
  Synthetic oligonucleotide
atgtatttagtgggtggattatgttcctaa

SEQ ID NO: 146630 - DNA, 30 bp, Artificial Sequence
  Synthetic oligonucleotide
cactgtatgataagatgtcgttgttcctaa

SEQ ID NO: 146631 - DNA, 30 bp, Artificial Sequence
  Synthetic oligonucleotide
agagctgccaggataacttgtgcgagctaa

SEQ ID NO: 146632 - DNA, 30 bp, Artificial Sequence
  Synthetic oligonucleotide
cgaggggttttaaccgaacatctgagctaa

SEQ ID NO: 146633 - DNA, 30 bp, Artificial Sequence
  Synthetic oligonucleotide
aagcaggtgcgagtacatctaggtagctaa

SEQ ID NO: 146634 - DNA, 30 bp, Artificial Sequence
  Synthetic oligonucleotide
gtgtctgtcgtgggataaaggagacgctaa

SEQ ID NO: 146635 - DNA, 30 bp, Artificial Sequence
  Synthetic oligonucleotide
gagagggattgctgctaatcgctacgctaa

SEQ ID NO: 146636 - DNA, 30 bp, Artificial Sequence
  Synthetic oligonucleotide
cgttacgaaagagttgttagtgagcgctaa

SEQ ID NO: 146637 - DNA, 30 bp, Artificial Sequence
  Synthetic oligonucleotide
gtgaaccggatcagttgatggggtcgctaa

SEQ ID NO: 146638 - DNA, 30 bp, Artificial Sequence
  Synthetic oligonucleotide
acccaaaagatggttctactccctggctaa

SEQ ID NO: 146639 - DNA, 30 bp, Artificial Sequence
  Synthetic oligonucleotide
ctagcctctagcgaacaggagagatgctaa

SEQ ID NO: 146640 - DNA, 30 bp, Artificial Sequence
  Synthetic oligonucleotide
gtcggcgactttgtagatttcccaatctaa

SEQ ID NO: 146641 - DNA, 30 bp, Artificial Sequence
  Synthetic oligonucleotide
gtcacgacctctgtcagtaaatacgtctaa

SEQ ID NO: 146642 - DNA, 30 bp, Artificial Sequence
  Synthetic oligonucleotide
tctgagtcggaatcgagacaagccgtctaa

SEQ ID NO: 146643 - DNA, 30 bp, Artificial Sequence
  Synthetic oligonucleotide
gaaagacggaggggtgagaaggtcgtctaa

SEQ ID NO: 146644 - DNA, 30 bp, Artificial Sequence
  Synthetic oligonucleotide
aaggagaccagtccacgagctagggtctaa

SEQ ID NO: 146645 - DNA, 30 bp, Artificial Sequence
  Synthetic oligonucleotide
tgtgctggtctacagtgttgtcgggtctaa

SEQ ID NO: 146646 - DNA, 30 bp, Artificial Sequence
  Synthetic oligonucleotide
gaataggaccgcgatgcaagtgtattctaa

SEQ ID NO: 146647 - DNA, 30 bp, Artificial Sequence
  Synthetic oligonucleotide
ccggcggcggtgtagctggacaagttctaa

SEQ ID NO: 146648 - DNA, 30 bp, Artificial Sequence
  Synthetic oligonucleotide
agcatctaacttaaaaaacagacaaagtaa

SEQ ID NO: 146649 - DNA, 30 bp, Artificial Sequence
  Synthetic oligonucleotide
cgacgcataggttagggcaaggcaaagtaa

SEQ ID NO: 146650 - DNA, 30 bp, Artificial Sequence
  Synthetic oligonucleotide
agaccatgttgtgccgtacgccgaaagtaa

SEQ ID NO: 146651 - DNA, 30 bp, Artificial Sequence
  Synthetic oligonucleotide
taatttggcgaaatagttcaaatcaagtaa

SEQ ID NO: 146652 - DNA, 30 bp, Artificial Sequence
  Synthetic oligonucleotide
gtcctagatcatacctttgtagtcaagtaa

SEQ ID NO: 146653 - DNA, 30 bp, Artificial Sequence
  Synthetic oligonucleotide
tacgcctaacttaagtcccttaggaagtaa

SEQ ID NO: 146654 - DNA, 30 bp, Artificial Sequence
  Synthetic oligonucleotide
agacatagtctcagcgagttaatccagtaa

SEQ ID NO: 146655 - DNA, 30 bp, Artificial Sequence
  Synthetic oligonucleotide
cgggcaatcggggtgggtccggtccagtaa

SEQ ID NO: 146656 - DNA, 30 bp, Artificial Sequence
  Synthetic oligonucleotide
tacgagatttcggatataggggccgagtaa

SEQ ID NO: 146657 - DNA, 30 bp, Artificial Sequence
  Synthetic oligonucleotide
ccaaggtagtcgacggacaatggcgagtaa

SEQ ID NO: 146658 - DNA, 30 bp, Artificial Sequence
  Synthetic oligonucleotide
catacaattgctagaagaagcatcgagtaa

SEQ ID NO: 146659 - DNA, 30 bp, Artificial Sequence
  Synthetic oligonucleotide
tttcggaaagtgtaagcacggcaggagtaa

SEQ ID NO: 146660 - DNA, 30 bp, Artificial Sequence
  Synthetic oligonucleotide
ggggcgaaggaggctctaacccatgagtaa

SEQ ID NO: 146661 - DNA, 30 bp, Artificial Sequence
  Synthetic oligonucleotide
acactcgctccacaagtttgctaatagtaa

SEQ ID NO: 146662 - DNA, 30 bp, Artificial Sequence
  Synthetic oligonucleotide
gcaaaacatcagagacattaatcatagtaa

SEQ ID NO: 146663 - DNA, 30 bp, Artificial Sequence
  Synthetic oligonucleotide
gagaaaagctagtgtggtaaaacctagtaa

SEQ ID NO: 146664 - DNA, 30 bp, Artificial Sequence
  Synthetic oligonucleotide
aaactatgataagcgtgtaatcagtagtaa

SEQ ID NO: 146665 - DNA, 30 bp, Artificial Sequence
  Synthetic oligonucleotide
tacggtcgaatacgtggtgtgtagtagtaa

SEQ ID NO: 146666 - DNA, 30 bp, Artificial Sequence
  Synthetic oligonucleotide
ttcgtcagagaattcatcatggcgtagtaa

SEQ ID NO: 146667 - DNA, 30 bp, Artificial Sequence
  Synthetic oligonucleotide
tagagcccccggaacagacggtattagtaa

SEQ ID NO: 146668 - DNA, 30 bp, Artificial Sequence
  Synthetic oligonucleotide
ctgactctgtgcgattagcagataacgtaa

SEQ ID NO: 146669 - DNA, 30 bp, Artificial Sequence
  Synthetic oligonucleotide
ttctgctgggacaggctcactgtaacgtaa

SEQ ID NO: 146670 - DNA, 30 bp, Artificial Sequence
  Synthetic oligonucleotide
tttgcccgctcaagatcacaaggcacgtaa

SEQ ID NO: 146671 - DNA, 30 bp, Artificial Sequence
  Synthetic oligonucleotide
gtcaggaaactgtcaaaaagcctcacgtaa

SEQ ID NO: 146672 - DNA, 30 bp, Artificial Sequence
  Synthetic oligonucleotide
ccgtagttaacagaagagcagtcgacgtaa

SEQ ID NO: 146673 - DNA, 30 bp, Artificial Sequence
  Synthetic oligonucleotide
atgcacgcaagggccactacggggacgtaa

SEQ ID NO: 146674 - DNA, 30 bp, Artificial Sequence
  Synthetic oligonucleotide
agggccctcggttaagattaattgacgtaa

SEQ ID NO: 146675 - DNA, 30 bp, Artificial Sequence
  Synthetic oligonucleotide
cgtccaggagatccgaagcgttatacgtaa

SEQ ID NO: 146676 - DNA, 30 bp, Artificial Sequence
  Synthetic oligonucleotide
cggtaaccgagttcgcgaaattaaccgtaa

SEQ ID NO: 146677 - DNA, 30 bp, Artificial Sequence
  Synthetic oligonucleotide
ccaccccgtggaacgatcgcatctccgtaa

SEQ ID NO: 146678 - DNA, 30 bp, Artificial Sequence
  Synthetic oligonucleotide
ctcgaaacacagcggggagcggttccgtaa

SEQ ID NO: 146679 - DNA, 30 bp, Artificial Sequence
  Synthetic oligonucleotide
gatcaggttgatactatggtgtaagcgtaa

SEQ ID NO: 146680 - DNA, 30 bp, Artificial Sequence
  Synthetic oligonucleotide
tgtgcacggagccacgggaggagagcgtaa

SEQ ID NO: 146681 - DNA, 30 bp, Artificial Sequence
  Synthetic oligonucleotide
cctggacttttatggggcctagaggcgtaa

SEQ ID NO: 146682 - DNA, 30 bp, Artificial Sequence
  Synthetic oligonucleotide
gcattaataagtcgtacgagattggcgtaa

SEQ ID NO: 146683 - DNA, 30 bp, Artificial Sequence
  Synthetic oligonucleotide
ttggctggcgagctcaacgtaagtgcgtaa

SEQ ID NO: 146684 - DNA, 30 bp, Artificial Sequence
  Synthetic oligonucleotide
ggattatcagagaagtacgtacgtgcgtaa

SEQ ID NO: 146685 - DNA, 30 bp, Artificial Sequence
  Synthetic oligonucleotide
ctattccattggggaataaaacttgcgtaa

SEQ ID NO: 146686 - DNA, 30 bp, Artificial Sequence
  Synthetic oligonucleotide
gaaaaaaaacaggagtaactaagctcgtaa

SEQ ID NO: 146687 - DNA, 30 bp, Artificial Sequence
  Synthetic oligonucleotide
cgaggattacgcctcagacctcgctcgtaa

SEQ ID NO: 146688 - DNA, 30 bp, Artificial Sequence
  Synthetic oligonucleotide
tcatttgccggcattattggtacttcgtaa

SEQ ID NO: 146689 - DNA, 30 bp, Artificial Sequence
  Synthetic oligonucleotide
ggtaagcgtctaaccaaaattaggaggtaa

SEQ ID NO: 146690 - DNA, 30 bp, Artificial Sequence
  Synthetic oligonucleotide
atgaaccgaacggagtctaaatggaggtaa

SEQ ID NO: 146691 - DNA, 30 bp, Artificial Sequence
  Synthetic oligonucleotide
gaatacagtggtaaacggaaccataggtaa

SEQ ID NO: 146692 - DNA, 30 bp, Artificial Sequence
  Synthetic oligonucleotide
gaaggcggtattttgtgtacgaaacggtaa

SEQ ID NO: 146693 - DNA, 30 bp, Artificial Sequence
  Synthetic oligonucleotide
ggtaggtgccgtcggggtgggtgcgggtaa

SEQ ID NO: 146694 - DNA, 30 bp, Artificial Sequence
  Synthetic oligonucleotide
gtcaaggaggagcccctggtttgtgggtaa

SEQ ID NO: 146695 - DNA, 30 bp, Artificial Sequence
  Synthetic oligonucleotide
acgggctccaacattagttacgtatggtaa

SEQ ID NO: 146696 - DNA, 30 bp, Artificial Sequence
  Synthetic oligonucleotide
ttggtgcagatttggctgtccggctggtaa

SEQ ID NO: 146697 - DNA, 30 bp, Artificial Sequence
  Synthetic oligonucleotide
tccggtacgctgggatggtaagcaatgtaa

SEQ ID NO: 146698 - DNA, 30 bp, Artificial Sequence
  Synthetic oligonucleotide
atgatgagaacatgtgagcaatgcatgtaa

SEQ ID NO: 146699 - DNA, 30 bp, Artificial Sequence
  Synthetic oligonucleotide
tcgtgaatttgcataattaggtcgatgtaa

SEQ ID NO: 146700 - DNA, 30 bp, Artificial Sequence
  Synthetic oligonucleotide
gggtcataatgtatgagtcagggtatgtaa

SEQ ID NO: 146701 - DNA, 30 bp, Artificial Sequence
  Synthetic oligonucleotide
acccgcatccaaccaccctacccactgtaa

SEQ ID NO: 146702 - DNA, 30 bp, Artificial Sequence
  Synthetic oligonucleotide
acgagggccaggtacgcgtgaatactgtaa

SEQ ID NO: 146703 - DNA, 30 bp, Artificial Sequence
  Synthetic oligonucleotide
agacgagagtatagatgagaaaaagtgtaa

SEQ ID NO: 146704 - DNA, 30 bp, Artificial Sequence
  Synthetic oligonucleotide
tccgccgcccaaatctgctggacagtgtaa

SEQ ID NO: 146705 - DNA, 30 bp, Artificial Sequence
  Synthetic oligonucleotide
accgctatacgaagagtgagaccggtgtaa

SEQ ID NO: 146706 - DNA, 30 bp, Artificial Sequence
  Synthetic oligonucleotide
taacaatcctgagttatcataatcttgtaa

SEQ ID NO: 146707 - DNA, 30 bp, Artificial Sequence
  Synthetic oligonucleotide
ggctttctaaacgggacaaaggtgttgtaa

SEQ ID NO: 146708 - DNA, 30 bp, Artificial Sequence
  Synthetic oligonucleotide
gtggaataggtcgtaagccctggaaattaa

SEQ ID NO: 146709 - DNA, 30 bp, Artificial Sequence
  Synthetic oligonucleotide
aaggagacactagcacaaatgataaattaa

SEQ ID NO: 146710 - DNA, 30 bp, Artificial Sequence
  Synthetic oligonucleotide
aggcggtttcagataggactgatgaattaa

SEQ ID NO: 146711 - DNA, 30 bp, Artificial Sequence
  Synthetic oligonucleotide
ggtagaatgaaaaacgtcgtatataattaa

SEQ ID NO: 146712 - DNA, 30 bp, Artificial Sequence
  Synthetic oligonucleotide
cgctctgcgtcacggacggtagaacattaa

SEQ ID NO: 146713 - DNA, 30 bp, Artificial Sequence
  Synthetic oligonucleotide
gagccactcgggatgatgtaaatccattaa

SEQ ID NO: 146714 - DNA, 30 bp, Artificial Sequence
  Synthetic oligonucleotide
gtgcagaatgcattctccgggcctcattaa

SEQ ID NO: 146715 - DNA, 30 bp, Artificial Sequence
  Synthetic oligonucleotide
agctgaggtctcacaatacaccgagattaa

SEQ ID NO: 146716 - DNA, 30 bp, Artificial Sequence
  Synthetic oligonucleotide
gttagatgaaggaaaatgaacgtagattaa

SEQ ID NO: 146717 - DNA, 30 bp, Artificial Sequence
  Synthetic oligonucleotide
atcttcgaatcaaatggctgtaccgattaa

SEQ ID NO: 146718 - DNA, 30 bp, Artificial Sequence
  Synthetic oligonucleotide
acactaggccctacagagtgcggcgattaa

SEQ ID NO: 146719 - DNA, 30 bp, Artificial Sequence
  Synthetic oligonucleotide
tgaaaggtgacaaaacccgagcgggattaa

SEQ ID NO: 146720 - DNA, 30 bp, Artificial Sequence
  Synthetic oligonucleotide
gttggaacatcgggcacaaatccatattaa

SEQ ID NO: 146721 - DNA, 30 bp, Artificial Sequence
  Synthetic oligonucleotide
gatcagacacctaggcacgtgcagtattaa

SEQ ID NO: 146722 - DNA, 30 bp, Artificial Sequence
  Synthetic oligonucleotide
gcactaagtcgttccagtctaaggtattaa

SEQ ID NO: 146723 - DNA, 30 bp, Artificial Sequence
  Synthetic oligonucleotide
gaaaacttcacacattcaagaaacacttaa

SEQ ID NO: 146724 - DNA, 30 bp, Artificial Sequence
  Synthetic oligonucleotide
aatgggacgcgaacatagcgctggacttaa

SEQ ID NO: 146725 - DNA, 30 bp, Artificial Sequence
  Synthetic oligonucleotide
cagtcacgcctgtgggtgactcctacttaa

SEQ ID NO: 146726 - DNA, 30 bp, Artificial Sequence
  Synthetic oligonucleotide
caattaatggctcagagggtgcagccttaa

SEQ ID NO: 146727 - DNA, 30 bp, Artificial Sequence
  Synthetic oligonucleotide
gcccgagcgtcagtaagagctagagcttaa

SEQ ID NO: 146728 - DNA, 30 bp, Artificial Sequence
  Synthetic oligonucleotide
caaggaagaaacaccgggggtggagcttaa

SEQ ID NO: 146729 - DNA, 30 bp, Artificial Sequence
  Synthetic oligonucleotide
cgagcgtggttcttgaattactgcgcttaa

SEQ ID NO: 146730 - DNA, 30 bp, Artificial Sequence
  Synthetic oligonucleotide
cttaaaaatgcggtattagtttcggcttaa

SEQ ID NO: 146731 - DNA, 30 bp, Artificial Sequence
  Synthetic oligonucleotide
agagacagtccagcaagcggggctgcttaa

SEQ ID NO: 146732 - DNA, 30 bp, Artificial Sequence
  Synthetic oligonucleotide
gcggggcgggtggataataagtggtcttaa

SEQ ID NO: 146733 - DNA, 30 bp, Artificial Sequence
  Synthetic oligonucleotide
tgtatgatgcacagtgcgaccagaagttaa

SEQ ID NO: 146734 - DNA, 30 bp, Artificial Sequence
  Synthetic oligonucleotide
acacaattcaagtcatgaacagacagttaa

SEQ ID NO: 146735 - DNA, 30 bp, Artificial Sequence
  Synthetic oligonucleotide
atcgtaccgatatgaccaggggatagttaa

SEQ ID NO: 146736 - DNA, 30 bp, Artificial Sequence
  Synthetic oligonucleotide
cgccatcacactagcatccctacacgttaa

SEQ ID NO: 146737 - DNA, 30 bp, Artificial Sequence
  Synthetic oligonucleotide
aacctacatcctctagcaataagtcgttaa

SEQ ID NO: 146738 - DNA, 30 bp, Artificial Sequence
  Synthetic oligonucleotide
atcacagcacaggatatgggcagtcgttaa

SEQ ID NO: 146739 - DNA, 30 bp, Artificial Sequence
  Synthetic oligonucleotide
cgattctatgaacggggtgtaagaggttaa

SEQ ID NO: 146740 - DNA, 30 bp, Artificial Sequence
  Synthetic oligonucleotide
ggtttagtgtcgcaaacggaggagggttaa

SEQ ID NO: 146741 - DNA, 30 bp, Artificial Sequence
  Synthetic oligonucleotide
ttatcatttcactggctgggggtgggttaa

SEQ ID NO: 146742 - DNA, 30 bp, Artificial Sequence
  Synthetic oligonucleotide
ggtcggcgcttcaatcgtatgccatgttaa

SEQ ID NO: 146743 - DNA, 30 bp, Artificial Sequence
  Synthetic oligonucleotide
tgggactggtcgacaaccagttcatgttaa

SEQ ID NO: 146744 - DNA, 30 bp, Artificial Sequence
  Synthetic oligonucleotide
gaagggacattgccagcaacgaactgttaa

SEQ ID NO: 146745 - DNA, 30 bp, Artificial Sequence
  Synthetic oligonucleotide
ccggaggcgaccggatgaaggtactgttaa

SEQ ID NO: 146746 - DNA, 30 bp, Artificial Sequence
  Synthetic oligonucleotide
agaggcttgaacctgcaaggatgctgttaa

SEQ ID NO: 146747 - DNA, 30 bp, Artificial Sequence
  Synthetic oligonucleotide
cagaacccaaattagggggtgaattgttaa

SEQ ID NO: 146748 - DNA, 30 bp, Artificial Sequence
  Synthetic oligonucleotide
agagggtaggctattatgaagagcatttaa

SEQ ID NO: 146749 - DNA, 30 bp, Artificial Sequence
  Synthetic oligonucleotide
agaagcaagacaagtacgaggttgatttaa

SEQ ID NO: 146750 - DNA, 30 bp, Artificial Sequence
  Synthetic oligonucleotide
tctagacaccagttagcacttgaactttaa

SEQ ID NO: 146751 - DNA, 30 bp, Artificial Sequence
  Synthetic oligonucleotide
gttgccatggtgattagcgtcttgctttaa

SEQ ID NO: 146752 - DNA, 30 bp, Artificial Sequence
  Synthetic oligonucleotide
gggaggtcaactggaatttggttcgtttaa

SEQ ID NO: 146753 - DNA, 30 bp, Artificial Sequence
  Synthetic oligonucleotide
cgaacagccgagaagctccttaacttttaa

SEQ ID NO: 146754 - DNA, 30 bp, Artificial Sequence
  Synthetic oligonucleotide
ggtgccccagtgggcatcccgcggaaaaca

SEQ ID NO: 146755 - DNA, 30 bp, Artificial Sequence
  Synthetic oligonucleotide
ccgtgtagtgagaagggggctttgaaaaca

SEQ ID NO: 146756 - DNA, 30 bp, Artificial Sequence
  Synthetic oligonucleotide
cgtggtgctcctcacgtgaccaataaaaca

SEQ ID NO: 146757 - DNA, 30 bp, Artificial Sequence
  Synthetic oligonucleotide
gtgatgtaaactcttaatgaagctaaaaca

SEQ ID NO: 146758 - DNA, 30 bp, Artificial Sequence
  Synthetic oligonucleotide
ttaacaagtggtatatcattagctaaaaca

SEQ ID NO: 146759 - DNA, 30 bp, Artificial Sequence
  Synthetic oligonucleotide
tggctaacacagcctataagcgcacaaaca

SEQ ID NO: 146760 - DNA, 30 bp, Artificial Sequence
  Synthetic oligonucleotide
actataggtccaaacgataatgtacaaaca

SEQ ID NO: 146761 - DNA, 30 bp, Artificial Sequence
  Synthetic oligonucleotide
atggatagggtacattggaggtggcaaaca

SEQ ID NO: 146762 - DNA, 30 bp, Artificial Sequence
  Synthetic oligonucleotide
agattcacgtgcgcgaaaatacaagaaaca

SEQ ID NO: 146763 - DNA, 30 bp, Artificial Sequence
  Synthetic oligonucleotide
actaaagataattagcggcaaagagaaaca

SEQ ID NO: 146764 - DNA, 30 bp, Artificial Sequence
  Synthetic oligonucleotide
cgggcctggacgactcctgaacacgaaaca

SEQ ID NO: 146765 - DNA, 30 bp, Artificial Sequence
  Synthetic oligonucleotide
atactcgacgtaatcggattctgcgaaaca

SEQ ID NO: 146766 - DNA, 30 bp, Artificial Sequence
  Synthetic oligonucleotide
acggtcgatggattgtactttcatgaaaca

SEQ ID NO: 146767 - DNA, 30 bp, Artificial Sequence
  Synthetic oligonucleotide
tgtacttcgagggtagtcggtattgaaaca

SEQ ID NO: 146768 - DNA, 30 bp, Artificial Sequence
  Synthetic oligonucleotide
cactctaattagaatatcattattgaaaca

SEQ ID NO: 146769 - DNA, 30 bp, Artificial Sequence
  Synthetic oligonucleotide
tgtatggccaggcaaaaaaacatataaaca

SEQ ID NO: 146770 - DNA, 30 bp, Artificial Sequence
  Synthetic oligonucleotide
tcttacgcgggtcgccaaatggcttaaaca

SEQ ID NO: 146771 - DNA, 30 bp, Artificial Sequence
  Synthetic oligonucleotide
cttcaaccgggacttgagctatcaacaaca

SEQ ID NO: 146772 - DNA, 30 bp, Artificial Sequence
  Synthetic oligonucleotide
ccgcgctgtgaggcactcccgaccacaaca

SEQ ID NO: 146773 - DNA, 30 bp, Artificial Sequence
  Synthetic oligonucleotide
gaaaatcaaccaaatactgacaagacaaca

SEQ ID NO: 146774 - DNA, 30 bp, Artificial Sequence
  Synthetic oligonucleotide
caaacgtcagtacaggcatagcgtacaaca

SEQ ID NO: 146775 - DNA, 30 bp, Artificial Sequence
  Synthetic oligonucleotide
cagtgaagcgtgtggatccatggtacaaca

SEQ ID NO: 146776 - DNA, 30 bp, Artificial Sequence
  Synthetic oligonucleotide
ggcaacgccgtctatcagacgattacaaca

SEQ ID NO: 146777 - DNA, 30 bp, Artificial Sequence
  Synthetic oligonucleotide
cgggcattagtgtcgacgttgctcccaaca

SEQ ID NO: 146778 - DNA, 30 bp, Artificial Sequence
  Synthetic oligonucleotide
aaagtaggctgttaaaacaggttcccaaca

SEQ ID NO: 146779 - DNA, 30 bp, Artificial Sequence
  Synthetic oligonucleotide
atcacttgaacttgaacgtagtgagcaaca

SEQ ID NO: 146780 - DNA, 30 bp, Artificial Sequence
  Synthetic oligonucleotide
ggatgctggggaaatacgcccctagcaaca

SEQ ID NO: 146781 - DNA, 30 bp, Artificial Sequence
  Synthetic oligonucleotide
caggtgttgataatgccgactctcgcaaca

SEQ ID NO: 146782 - DNA, 30 bp, Artificial Sequence
  Synthetic oligonucleotide
ctcataaagagttagttacggcgatcaaca

SEQ ID NO: 146783 - DNA, 30 bp, Artificial Sequence
  Synthetic oligonucleotide
gagcacatgcttgaagatgcatggtcaaca

SEQ ID NO: 146784 - DNA, 30 bp, Artificial Sequence
  Synthetic oligonucleotide
tggacaagcttgtatatggtgccttcaaca

SEQ ID NO: 146785 - DNA, 30 bp, Artificial Sequence
  Synthetic oligonucleotide
taaatttcctcagtagtgcatgcttcaaca

SEQ ID NO: 146786 - DNA, 30 bp, Artificial Sequence
  Synthetic oligonucleotide
cgcgtttcggtggtgtaaaactgttcaaca

SEQ ID NO: 146787 - DNA, 30 bp, Artificial Sequence
  Synthetic oligonucleotide
gagcgaaaggacaccggaagttccagaaca

SEQ ID NO: 146788 - DNA, 30 bp, Artificial Sequence
  Synthetic oligonucleotide
aggggcaaggagtccgtcgcccagagaaca

SEQ ID NO: 146789 - DNA, 30 bp, Artificial Sequence
  Synthetic oligonucleotide
tataccctcttcaatcaggtccagagaaca

SEQ ID NO: 146790 - DNA, 30 bp, Artificial Sequence
  Synthetic oligonucleotide
gcatgcttaccggttcaaagggcgagaaca

SEQ ID NO: 146791 - DNA, 30 bp, Artificial Sequence
  Synthetic oligonucleotide
atcaacgccgtgatcgtgaatgtgagaaca

SEQ ID NO: 146792 - DNA, 30 bp, Artificial Sequence
  Synthetic oligonucleotide
actgaggtagggactaagcgggatagaaca

SEQ ID NO: 146793 - DNA, 30 bp, Artificial Sequence
  Synthetic oligonucleotide
ggtgtggtccaggtttaaagcgctagaaca

SEQ ID NO: 146794 - DNA, 30 bp, Artificial Sequence
  Synthetic oligonucleotide
gaggaccgcgttggcgccatagaccgaaca

SEQ ID NO: 146795 - DNA, 30 bp, Artificial Sequence
  Synthetic oligonucleotide
agaaaaaaaagaatagttgcgcggcgaaca

SEQ ID NO: 146796 - DNA, 30 bp, Artificial Sequence
  Synthetic oligonucleotide
cattcggtgttacccggatgaatgcgaaca

SEQ ID NO: 146797 - DNA, 30 bp, Artificial Sequence
  Synthetic oligonucleotide
agtcgaactgttcttgatatgtctcgaaca

SEQ ID NO: 146798 - DNA, 30 bp, Artificial Sequence
  Synthetic oligonucleotide
tcatggaacttcccggatcaacttcgaaca

SEQ ID NO: 146799 - DNA, 30 bp, Artificial Sequence
  Synthetic oligonucleotide
gttcccgaccccttctaaacctaaggaaca

SEQ ID NO: 146800 - DNA, 30 bp, Artificial Sequence
  Synthetic oligonucleotide
atataaatcatctttacatgcgtcggaaca

SEQ ID NO: 146801 - DNA, 30 bp, Artificial Sequence
  Synthetic oligonucleotide
gcttccacctatagggctaggaagggaaca

SEQ ID NO: 146802 - DNA, 30 bp, Artificial Sequence
  Synthetic oligonucleotide
tagtgtagccgcgccacttcgaatggaaca

SEQ ID NO: 146803 - DNA, 30 bp, Artificial Sequence
  Synthetic oligonucleotide
gactccgcggtcttgactaggggctgaaca

SEQ ID NO: 146804 - DNA, 30 bp, Artificial Sequence
  Synthetic oligonucleotide
ggacgatcgctctagtagacaggcataaca

SEQ ID NO: 146805 - DNA, 30 bp, Artificial Sequence
  Synthetic oligonucleotide
cggacaccacctgaagatttcgatataaca

SEQ ID NO: 146806 - DNA, 30 bp, Artificial Sequence
  Synthetic oligonucleotide
ctagtcctaagacgttaggaaagtataaca

SEQ ID NO: 146807 - DNA, 30 bp, Artificial Sequence
  Synthetic oligonucleotide
acattggataatagagagatgcaactaaca

SEQ ID NO: 146808 - DNA, 30 bp, Artificial Sequence
  Synthetic oligonucleotide
gacccgactggagtccggccggcactaaca

SEQ ID NO: 146809 - DNA, 30 bp, Artificial Sequence
  Synthetic oligonucleotide
gaacttccataacgtctccagagactaaca

SEQ ID NO: 146810 - DNA, 30 bp, Artificial Sequence
  Synthetic oligonucleotide
aggtctatcgaagaagacgtgggactaaca

SEQ ID NO: 146811 - DNA, 30 bp, Artificial Sequence
  Synthetic oligonucleotide
cgcgactcgccatcgtcgatcgttctaaca

SEQ ID NO: 146812 - DNA, 30 bp, Artificial Sequence
  Synthetic oligonucleotide
atctacccctaaccgatccagaaagtaaca

SEQ ID NO: 146813 - DNA, 30 bp, Artificial Sequence
  Synthetic oligonucleotide
cctgaaggtactgacacgtcccaagtaaca

SEQ ID NO: 146814 - DNA, 30 bp, Artificial Sequence
  Synthetic oligonucleotide
atgactgcggaacagctgatgagagtaaca

SEQ ID NO: 146815 - DNA, 30 bp, Artificial Sequence
  Synthetic oligonucleotide
gatagctgaccatcataggaaggagtaaca

SEQ ID NO: 146816 - DNA, 30 bp, Artificial Sequence
  Synthetic oligonucleotide
aatagtgaagtttggggaaggacggtaaca

SEQ ID NO: 146817 - DNA, 30 bp, Artificial Sequence
  Synthetic oligonucleotide
tcaatgatatagggctaaccacttgtaaca

SEQ ID NO: 146818 - DNA, 30 bp, Artificial Sequence
  Synthetic oligonucleotide
cccgttatacaataaggtcatcgattaaca

SEQ ID NO: 146819 - DNA, 30 bp, Artificial Sequence
  Synthetic oligonucleotide
cccataggcagtggtacaattatattaaca

SEQ ID NO: 146820 - DNA, 30 bp, Artificial Sequence
  Synthetic oligonucleotide
caactcggcccggttatcactttgttaaca

SEQ ID NO: 146821 - DNA, 30 bp, Artificial Sequence
  Synthetic oligonucleotide
gtaagtctattagtaggagcatgaaacaca

SEQ ID NO: 146822 - DNA, 30 bp, Artificial Sequence
  Synthetic oligonucleotide
agatgttttgacaagagattaccgaacaca

SEQ ID NO: 146823 - DNA, 30 bp, Artificial Sequence
  Synthetic oligonucleotide
aacagtaaagcgggtctacatcataacaca

SEQ ID NO: 146824 - DNA, 30 bp, Artificial Sequence
  Synthetic oligonucleotide
aactccccgctccgtgacggcaaacacaca

SEQ ID NO: 146825 - DNA, 30 bp, Artificial Sequence
  Synthetic oligonucleotide
cgtcacataccggagcggtatcatcacaca

SEQ ID NO: 146826 - DNA, 30 bp, Artificial Sequence
  Synthetic oligonucleotide
gtagcgaaatcaagccaaatacaagacaca

SEQ ID NO: 146827 - DNA, 30 bp, Artificial Sequence
  Synthetic oligonucleotide
ctgcatggcccggtactaggaatagacaca

SEQ ID NO: 146828 - DNA, 30 bp, Artificial Sequence
  Synthetic oligonucleotide
aaaaagcgaccagctggagaactagacaca

SEQ ID NO: 146829 - DNA, 30 bp, Artificial Sequence
  Synthetic oligonucleotide
gccgatacactcgaggagtaccaggacaca

SEQ ID NO: 146830 - DNA, 30 bp, Artificial Sequence
  Synthetic oligonucleotide
cgggatgtagtacatggggtgattgacaca

SEQ ID NO: 146831 - DNA, 30 bp, Artificial Sequence
  Synthetic oligonucleotide
ttacacgaaagcaacacgtggcaatacaca

SEQ ID NO: 146832 - DNA, 30 bp, Artificial Sequence
  Synthetic oligonucleotide
acttgagaatataataatagaggatacaca

SEQ ID NO: 146833 - DNA, 30 bp, Artificial Sequence
  Synthetic oligonucleotide
ggataccactctttgggccgggattacaca

SEQ ID NO: 146834 - DNA, 30 bp, Artificial Sequence
  Synthetic oligonucleotide
atatcgcaaatcaggacaatatgttacaca

SEQ ID NO: 146835 - DNA, 30 bp, Artificial Sequence
  Synthetic oligonucleotide
agaaagtctaggatgccccagctttacaca

SEQ ID NO: 146836 - DNA, 30 bp, Artificial Sequence
  Synthetic oligonucleotide
ccaatcgataaccttccagccggaaccaca

SEQ ID NO: 146837 - DNA, 30 bp, Artificial Sequence
  Synthetic oligonucleotide
taaggtcaaattcacgcatgtgccaccaca

SEQ ID NO: 146838 - DNA, 30 bp, Artificial Sequence
  Synthetic oligonucleotide
accttgcaatgatatatggggctcaccaca

SEQ ID NO: 146839 - DNA, 30 bp, Artificial Sequence
  Synthetic oligonucleotide
ctgtctagtggtagtacgtccattgccaca

SEQ ID NO: 146840 - DNA, 30 bp, Artificial Sequence
  Synthetic oligonucleotide
agcttaaatcagcgatgtgcagaatccaca

SEQ ID NO: 146841 - DNA, 30 bp, Artificial Sequence
  Synthetic oligonucleotide
gcgaagatcaattcgagatagctatccaca

SEQ ID NO: 146842 - DNA, 30 bp, Artificial Sequence
  Synthetic oligonucleotide
gccatcctccccgattaatgcataagcaca

SEQ ID NO: 146843 - DNA, 30 bp, Artificial Sequence
  Synthetic oligonucleotide
agaatagctttcctcattagactaagcaca

SEQ ID NO: 146844 - DNA, 30 bp, Artificial Sequence
  Synthetic oligonucleotide
gttagtggtatagagggtacggtaagcaca

SEQ ID NO: 146845 - DNA, 30 bp, Artificial Sequence
  Synthetic oligonucleotide
ggtgcccaacatcgctgggtagtcagcaca

SEQ ID NO: 146846 - DNA, 30 bp, Artificial Sequence
  Synthetic oligonucleotide
aagcgactatggaaatctagcctgagcaca

SEQ ID NO: 146847 - DNA, 30 bp, Artificial Sequence
  Synthetic oligonucleotide
ggctcaatgatagggccgggcttgagcaca

SEQ ID NO: 146848 - DNA, 30 bp, Artificial Sequence
  Synthetic oligonucleotide
ccggggcatgccgtaaacctagatagcaca

SEQ ID NO: 146849 - DNA, 30 bp, Artificial Sequence
  Synthetic oligonucleotide
atccggcgaccccactttagccttagcaca

SEQ ID NO: 146850 - DNA, 30 bp, Artificial Sequence
  Synthetic oligonucleotide
cctacgtgcaaataacgagaaccacgcaca

SEQ ID NO: 146851 - DNA, 30 bp, Artificial Sequence
  Synthetic oligonucleotide
gggacagcaaggtatacatcgatacgcaca

SEQ ID NO: 146852 - DNA, 30 bp, Artificial Sequence
  Synthetic oligonucleotide
tcaatattcaaactgttgaaagctcgcaca

SEQ ID NO: 146853 - DNA, 30 bp, Artificial Sequence
  Synthetic oligonucleotide
gtgcgtgtattgggggcttaggctcgcaca

SEQ ID NO: 146854 - DNA, 30 bp, Artificial Sequence
  Synthetic oligonucleotide
acaggaaagagttaactaagtccaggcaca

SEQ ID NO: 146855 - DNA, 30 bp, Artificial Sequence
  Synthetic oligonucleotide
aaacaaacgtgaatcttgagactaggcaca

SEQ ID NO: 146856 - DNA, 30 bp, Artificial Sequence
  Synthetic oligonucleotide
tacgctttcctcacgcccccctccggcaca

SEQ ID NO: 146857 - DNA, 30 bp, Artificial Sequence
  Synthetic oligonucleotide
cagcgcatatcgcatggtgcaagcggcaca

SEQ ID NO: 146858 - DNA, 30 bp, Artificial Sequence
  Synthetic oligonucleotide
aaacaattaggtatgttgtgagggggcaca

SEQ ID NO: 146859 - DNA, 30 bp, Artificial Sequence
  Synthetic oligonucleotide
gctgagcaatgcaggcagggcgctggcaca

SEQ ID NO: 146860 - DNA, 30 bp, Artificial Sequence
  Synthetic oligonucleotide
tggacaatatgattatcccttgctggcaca

SEQ ID NO: 146861 - DNA, 30 bp, Artificial Sequence
  Synthetic oligonucleotide
caacggactctgtcaaattatcttggcaca

SEQ ID NO: 146862 - DNA, 30 bp, Artificial Sequence
  Synthetic oligonucleotide
cagggaagctgtcgaatcggctttggcaca

SEQ ID NO: 146863 - DNA, 30 bp, Artificial Sequence
  Synthetic oligonucleotide
acccgaacatcattgattactggatgcaca

SEQ ID NO: 146864 - DNA, 30 bp, Artificial Sequence
  Synthetic oligonucleotide
agagcttaaaactgggtcctcaggtgcaca

SEQ ID NO: 146865 - DNA, 30 bp, Artificial Sequence
  Synthetic oligonucleotide
tcacaacggcgacacaagccgtcaatcaca

SEQ ID NO: 146866 - DNA, 30 bp, Artificial Sequence
  Synthetic oligonucleotide
atcgatatgaactaacatgtccacatcaca

SEQ ID NO: 146867 - DNA, 30 bp, Artificial Sequence
  Synthetic oligonucleotide
ctaaataaagcgttacggcgtaggatcaca

SEQ ID NO: 146868 - DNA, 30 bp, Artificial Sequence
  Synthetic oligonucleotide
ggggtagcgtcaaccgcgggcgggatcaca

SEQ ID NO: 146869 - DNA, 30 bp, Artificial Sequence
  Synthetic oligonucleotide
gtcacctgaagcgcgacagatcgtatcaca

SEQ ID NO: 146870 - DNA, 30 bp, Artificial Sequence
  Synthetic oligonucleotide
gctaagagcttctagacattttgtatcaca

SEQ ID NO: 146871 - DNA, 30 bp, Artificial Sequence
  Synthetic oligonucleotide
atggatcatcaagtgtcacataacctcaca

SEQ ID NO: 146872 - DNA, 30 bp, Artificial Sequence
  Synthetic oligonucleotide
tctatactgccaccaagtgggcgcctcaca

SEQ ID NO: 146873 - DNA, 30 bp, Artificial Sequence
  Synthetic oligonucleotide
aataaattggcggctaaacttaatctcaca

SEQ ID NO: 146874 - DNA, 30 bp, Artificial Sequence
  Synthetic oligonucleotide
aaattggtcttaaggcaccctgatctcaca

SEQ ID NO: 146875 - DNA, 30 bp, Artificial Sequence
  Synthetic oligonucleotide
ataagtgtggcccggactctgccagtcaca

SEQ ID NO: 146876 - DNA, 30 bp, Artificial Sequence
  Synthetic oligonucleotide
tgtctccagacttatacggacggggtcaca

SEQ ID NO: 146877 - DNA, 30 bp, Artificial Sequence
  Synthetic oligonucleotide
cgaatataatgtgacgggctaatggtcaca

SEQ ID NO: 146878 - DNA, 30 bp, Artificial Sequence
  Synthetic oligonucleotide
agaacaacctaagatagaggtgttgtcaca

SEQ ID NO: 146879 - DNA, 30 bp, Artificial Sequence
  Synthetic oligonucleotide
aggtggcgggtcagttatagatagttcaca

SEQ ID NO: 146880 - DNA, 30 bp, Artificial Sequence
  Synthetic oligonucleotide
catagaatcgaggctctcgagacaaagaca

SEQ ID NO: 146881 - DNA, 30 bp, Artificial Sequence
  Synthetic oligonucleotide
gccagcgcagctagaggcactttaaagaca

SEQ ID NO: 146882 - DNA, 30 bp, Artificial Sequence
  Synthetic oligonucleotide
cgtatccagttggagcggagtgacaagaca

SEQ ID NO: 146883 - DNA, 30 bp, Artificial Sequence
  Synthetic oligonucleotide
agagaaatgatagcgacggccgggaagaca

SEQ ID NO: 146884 - DNA, 30 bp, Artificial Sequence
  Synthetic oligonucleotide
atgtcgaattggagggcgaggtgtaagaca

SEQ ID NO: 146885 - DNA, 30 bp, Artificial Sequence
  Synthetic oligonucleotide
gaccggtttatcagttatatactacagaca

SEQ ID NO: 146886 - DNA, 30 bp, Artificial Sequence
  Synthetic oligonucleotide
agatacaggggggatacatgccaccagaca

SEQ ID NO: 146887 - DNA, 30 bp, Artificial Sequence
  Synthetic oligonucleotide
catccagacacgtacatccatcgtcagaca

SEQ ID NO: 146888 - DNA, 30 bp, Artificial Sequence
  Synthetic oligonucleotide
aaagtgacatgtagaggtatgccagagaca

SEQ ID NO: 146889 - DNA, 30 bp, Artificial Sequence
  Synthetic oligonucleotide
ccatactagtagatgcggatcgacgagaca

SEQ ID NO: 146890 - DNA, 30 bp, Artificial Sequence
  Synthetic oligonucleotide
tctgttatacagggatcggcaaccgagaca

SEQ ID NO: 146891 - DNA, 31 bp, Artificial Sequence
  Synthetic oligonucleotide
tacacacaatctcagatcttatacggagaca

SEQ ID NO: 146892 - DNA, 30 bp, Artificial Sequence
  Synthetic oligonucleotide
gtacaactgcatatctgtggaggtgagaca

SEQ ID NO: 146893 - DNA, 30 bp, Artificial Sequence
  Synthetic oligonucleotide
atccatagaggattaaatgcaacctagaca

SEQ ID NO: 146894 - DNA, 30 bp, Artificial Sequence
  Synthetic oligonucleotide
tacaatccgcgtagccgcatccggtagaca

SEQ ID NO: 146895 - DNA, 30 bp, Artificial Sequence
  Synthetic oligonucleotide
cagtgacgacgcccctgtaacggaacgaca

SEQ ID NO: 146896 - DNA, 30 bp, Artificial Sequence
  Synthetic oligonucleotide
accgtcccgcggcggaaaggctacacgaca

SEQ ID NO: 146897 - DNA, 30 bp, Artificial Sequence
  Synthetic oligonucleotide
tcatatgtcaatgagcagagggacccgaca

SEQ ID NO: 146898 - DNA, 30 bp, Artificial Sequence
  Synthetic oligonucleotide
gtgtgctgtatgggcaagttcaatccgaca

SEQ ID NO: 146899 - DNA, 30 bp, Artificial Sequence
  Synthetic oligonucleotide
caagcgttagtccatagatctagtccgaca

SEQ ID NO: 146900 - DNA, 30 bp, Artificial Sequence
  Synthetic oligonucleotide
gcctcagcaccgtaagtatagggtccgaca

SEQ ID NO: 146901 - DNA, 30 bp, Artificial Sequence
  Synthetic oligonucleotide
gaggacgacatttgcggccacaaagcgaca

SEQ ID NO: 146902 - DNA, 30 bp, Artificial Sequence
  Synthetic oligonucleotide
taaaccaatcaccagaggtcgagtgcgaca

SEQ ID NO: 146903 - DNA, 30 bp, Artificial Sequence
  Synthetic oligonucleotide
aagaatatggtaccgtcatttattgcgaca

SEQ ID NO: 146904 - DNA, 30 bp, Artificial Sequence
  Synthetic oligonucleotide
gtacacgagatctggctagctggatcgaca

SEQ ID NO: 146905 - DNA, 30 bp, Artificial Sequence
  Synthetic oligonucleotide
tggtagttgagtatcgtcgtgtgatcgaca

SEQ ID NO: 146906 - DNA, 31 bp, Artificial Sequence
  Synthetic oligonucleotide
ccgcctgggagtaataccaagtcaaaggaca

SEQ ID NO: 146907 - DNA, 30 bp, Artificial Sequence
  Synthetic oligonucleotide
tcattcgagaatactcgtcgaataaggaca

SEQ ID NO: 146908 - DNA, 30 bp, Artificial Sequence
  Synthetic oligonucleotide
tctgctaaagacccgatatgtgtaaggaca

SEQ ID NO: 146909 - DNA, 30 bp, Artificial Sequence
  Synthetic oligonucleotide
ctgttcgcgccgaataataaagataggaca

SEQ ID NO: 146910 - DNA, 30 bp, Artificial Sequence
  Synthetic oligonucleotide
ttcatttaaaagcctgaagagagtaggaca

SEQ ID NO: 146911 - DNA, 30 bp, Artificial Sequence
  Synthetic oligonucleotide
ggggaatctgggttgaaataacaacggaca

SEQ ID NO: 146912 - DNA, 30 bp, Artificial Sequence
  Synthetic oligonucleotide
gtgaataaccgaaattaaaattaacggaca

SEQ ID NO: 146913 - DNA, 30 bp, Artificial Sequence
  Synthetic oligonucleotide
attactacaactctgagacttacacggaca

SEQ ID NO: 146914 - DNA, 30 bp, Artificial Sequence
  Synthetic oligonucleotide
ctatagctgcgaggagatggagcacggaca

SEQ ID NO: 146915 - DNA, 30 bp, Artificial Sequence
  Synthetic oligonucleotide
cttcaaactggaacacctcaatgacggaca

SEQ ID NO: 146916 - DNA, 30 bp, Artificial Sequence
  Synthetic oligonucleotide
atattttgggcatgctgatagtgtcggaca

SEQ ID NO: 146917 - DNA, 30 bp, Artificial Sequence
  Synthetic oligonucleotide
tgacctgcgacatcccggtttaaagggaca

SEQ ID NO: 146918 - DNA, 30 bp, Artificial Sequence
  Synthetic oligonucleotide
ataccagctatattcacttgcctagggaca

SEQ ID NO: 146919 - DNA, 30 bp, Artificial Sequence
  Synthetic oligonucleotide
cggttacttgccaagtagcctgtagggaca

SEQ ID NO: 146920 - DNA, 30 bp, Artificial Sequence
  Synthetic oligonucleotide
ggggagtgcctcaaaacataccgggggaca

SEQ ID NO: 146921 - DNA, 30 bp, Artificial Sequence
  Synthetic oligonucleotide
cgagaagtagagatccttaaatgggggaca

SEQ ID NO: 146922 - DNA, 30 bp, Artificial Sequence
  Synthetic oligonucleotide
gaagagatctacgacctacgcactgggaca

SEQ ID NO: 146923 - DNA, 30 bp, Artificial Sequence
  Synthetic oligonucleotide
atcaacacaggctgtttatagaagtggaca

SEQ ID NO: 146924 - DNA, 30 bp, Artificial Sequence
  Synthetic oligonucleotide
ccggcaacgcagtgtggaccgaagtggaca

SEQ ID NO: 146925 - DNA, 30 bp, Artificial Sequence
  Synthetic oligonucleotide
gctattgcaggatgagctgataggtggaca

SEQ ID NO: 146926 - DNA, 30 bp, Artificial Sequence
  Synthetic oligonucleotide
tcgaagatggattacgaaactttttggaca

SEQ ID NO: 146927 - DNA, 31 bp, Artificial Sequence
  Synthetic oligonucleotide
acccggacgaacttttacaagtaccatgaca

SEQ ID NO: 146928 - DNA, 30 bp, Artificial Sequence
  Synthetic oligonucleotide
gtgcctggacgccatggtaaagtcatgaca

SEQ ID NO: 146929 - DNA, 30 bp, Artificial Sequence
  Synthetic oligonucleotide
cttcggatcctaacagcttgtcggatgaca

SEQ ID NO: 146930 - DNA, 30 bp, Artificial Sequence
  Synthetic oligonucleotide
aaagaaatagctgcggggacgacactgaca

SEQ ID NO: 146931 - DNA, 30 bp, Artificial Sequence
  Synthetic oligonucleotide
gaaacccgtgtgtgcttaaacctactgaca

SEQ ID NO: 146932 - DNA, 30 bp, Artificial Sequence
  Synthetic oligonucleotide
taacatcgcgtgaggggcggctacctgaca

SEQ ID NO: 146933 - DNA, 30 bp, Artificial Sequence
  Synthetic oligonucleotide
ccaccgtcacaccgagacccgtgcctgaca

SEQ ID NO: 146934 - DNA, 30 bp, Artificial Sequence
  Synthetic oligonucleotide
ataggttgataagtcaagtggatcgtgaca

SEQ ID NO: 146935 - DNA, 30 bp, Artificial Sequence
  Synthetic oligonucleotide
ggcgtccttgtacgtctcgtgacggtgaca

SEQ ID NO: 146936 - DNA, 30 bp, Artificial Sequence
  Synthetic oligonucleotide
gactcggagcatagaatatcctctgtgaca

SEQ ID NO: 146937 - DNA, 31 bp, Artificial Sequence
  Synthetic oligonucleotide
ttggtgtctaaacagacacatataattgaca

SEQ ID NO: 146938 - DNA, 30 bp, Artificial Sequence
  Synthetic oligonucleotide
tgaaagtctaatatgagacatcgattgaca

SEQ ID NO: 146939 - DNA, 30 bp, Artificial Sequence
  Synthetic oligonucleotide
tcagtggaaactggagatctcctcttgaca

SEQ ID NO: 146940 - DNA, 30 bp, Artificial Sequence
  Synthetic oligonucleotide
ttcatattgtgggtgtgaatgaagttgaca

SEQ ID NO: 146941 - DNA, 30 bp, Artificial Sequence
  Synthetic oligonucleotide
tcctgtggggacctagcaaactagttgaca

SEQ ID NO: 146942 - DNA, 30 bp, Artificial Sequence
  Synthetic oligonucleotide
agtctgtaatagtaggaaggtaggttgaca

SEQ ID NO: 146943 - DNA, 30 bp, Artificial Sequence
  Synthetic oligonucleotide
ggggtatgtcgaaggggcatcggaaataca

SEQ ID NO: 146944 - DNA, 30 bp, Artificial Sequence
  Synthetic oligonucleotide
ctaacaggcttgggttgcatctgcaataca

SEQ ID NO: 146945 - DNA, 31 bp, Artificial Sequence
  Synthetic oligonucleotide
aagttgaatacaccggcgtccagtgaataca

SEQ ID NO: 146946 - DNA, 30 bp, Artificial Sequence
  Synthetic oligonucleotide
tgcagctactggattggacactgtaataca

SEQ ID NO: 146947 - DNA, 30 bp, Artificial Sequence
  Synthetic oligonucleotide
gctaattccgaagctctctggaaacataca

SEQ ID NO: 146948 - DNA, 31 bp, Artificial Sequence
  Synthetic oligonucleotide
caacagcggtccgtcagggatagaacataca

SEQ ID NO: 146949 - DNA, 30 bp, Artificial Sequence
  Synthetic oligonucleotide
cagcagcgagtcggacctcccgaacataca

SEQ ID NO: 146950 - DNA, 30 bp, Artificial Sequence
  Synthetic oligonucleotide
tcaaggaaacatagatgaccttcacataca

SEQ ID NO: 146951 - DNA, 30 bp, Artificial Sequence
  Synthetic oligonucleotide
cgtcctggggggaagtaggagagacataca

SEQ ID NO: 146952 - DNA, 30 bp, Artificial Sequence
  Synthetic oligonucleotide
cggcattcgtggaggccgcttgaccataca

SEQ ID NO: 146953 - DNA, 30 bp, Artificial Sequence
  Synthetic oligonucleotide
taaattcgctgatcaattcctcgccataca

SEQ ID NO: 146954 - DNA, 30 bp, Artificial Sequence
  Synthetic oligonucleotide
aaagaggcgaccagcaactcggcgcataca

SEQ ID NO: 146955 - DNA, 30 bp, Artificial Sequence
  Synthetic oligonucleotide
gcccaagtaagccatgacggagttcataca

SEQ ID NO: 146956 - DNA, 30 bp, Artificial Sequence
  Synthetic oligonucleotide
caggggtaagaatattatgtaatagataca

SEQ ID NO: 146957 - DNA, 30 bp, Artificial Sequence
  Synthetic oligonucleotide
ggtgatcctattgcaaatgtccaatataca

SEQ ID NO: 146958 - DNA, 30 bp, Artificial Sequence
  Synthetic oligonucleotide
ttcgctaggattcaaagggctcaatataca

SEQ ID NO: 146959 - DNA, 30 bp, Artificial Sequence
  Synthetic oligonucleotide
tcgttgactgagcgactgaagctctataca

SEQ ID NO: 146960 - DNA, 30 bp, Artificial Sequence
  Synthetic oligonucleotide
ccctaaggtcgcggtccctatcgttataca

SEQ ID NO: 146961 - DNA, 30 bp, Artificial Sequence
  Synthetic oligonucleotide
gaacttcgattcatattagtccaaactaca

SEQ ID NO: 146962 - DNA, 30 bp, Artificial Sequence
  Synthetic oligonucleotide
ttgtaaaaagatattctatagctgactaca

SEQ ID NO: 146963 - DNA, 30 bp, Artificial Sequence
  Synthetic oligonucleotide
ggcaagaacgtacagacgtttagtactaca

SEQ ID NO: 146964 - DNA, 30 bp, Artificial Sequence
  Synthetic oligonucleotide
cagtcaagaactggatccggtggtactaca

SEQ ID NO: 146965 - DNA, 30 bp, Artificial Sequence
  Synthetic oligonucleotide
ttatcacttaatccagatcttacacctaca

SEQ ID NO: 146966 - DNA, 30 bp, Artificial Sequence
  Synthetic oligonucleotide
gctgtaagcggtcaatacacgatccctaca

SEQ ID NO: 146967 - DNA, 30 bp, Artificial Sequence
  Synthetic oligonucleotide
cgcaagtccgcgcgactaggactgcctaca

SEQ ID NO: 146968 - DNA, 30 bp, Artificial Sequence
  Synthetic oligonucleotide
cggcctgtaaatagcggaaaacatcctaca

SEQ ID NO: 146969 - DNA, 30 bp, Artificial Sequence
  Synthetic oligonucleotide
caaacagaaggtatattgttaagcgctaca

SEQ ID NO: 146970 - DNA, 30 bp, Artificial Sequence
  Synthetic oligonucleotide
gtttacgaacagtataatacatttgctaca

SEQ ID NO: 146971 - DNA, 30 bp, Artificial Sequence
  Synthetic oligonucleotide
tggatagcagagccgaaagttgacagtaca

SEQ ID NO: 146972 - DNA, 30 bp, Artificial Sequence
  Synthetic oligonucleotide
ctatccagaggagcgacattgcagagtaca

SEQ ID NO: 146973 - DNA, 30 bp, Artificial Sequence
  Synthetic oligonucleotide
tcgcccactagagtgtctgtagcccgtaca

SEQ ID NO: 146974 - DNA, 30 bp, Artificial Sequence
  Synthetic oligonucleotide
atggctgagatagctggtatgttgcgtaca

SEQ ID NO: 146975 - DNA, 30 bp, Artificial Sequence
  Synthetic oligonucleotide
catcagaagacgaaggcaacggttcgtaca

SEQ ID NO: 146976 - DNA, 30 bp, Artificial Sequence
  Synthetic oligonucleotide
cgccaatacgctagggatcataaaggtaca

SEQ ID NO: 146977 - DNA, 30 bp, Artificial Sequence
  Synthetic oligonucleotide
atgtgtgcggttcgtagctcatgcggtaca

SEQ ID NO: 146978 - DNA, 30 bp, Artificial Sequence
  Synthetic oligonucleotide
ccgaatatgcgcttttatgcccagggtaca

SEQ ID NO: 146979 - DNA, 30 bp, Artificial Sequence
  Synthetic oligonucleotide
aaataccagttaagcgatagcgtgggtaca

SEQ ID NO: 146980 - DNA, 30 bp, Artificial Sequence
  Synthetic oligonucleotide
agtacacgtcggtcgatagactctggtaca

SEQ ID NO: 146981 - DNA, 30 bp, Artificial Sequence
  Synthetic oligonucleotide
gtaggcgcaattagtgtggctacatgtaca

SEQ ID NO: 146982 - DNA, 30 bp, Artificial Sequence
  Synthetic oligonucleotide
acgcgctatgccttggcaaccatctgtaca

SEQ ID NO: 146983 - DNA, 30 bp, Artificial Sequence
  Synthetic oligonucleotide
tctgctaagtggaacagtgtcatgtgtaca

SEQ ID NO: 146984 - DNA, 30 bp, Artificial Sequence
  Synthetic oligonucleotide
tcggacggcgtcttgttatgtatgtgtaca

SEQ ID NO: 146985 - DNA, 30 bp, Artificial Sequence
  Synthetic oligonucleotide
ttagatgcgttctcccctcggacttgtaca

SEQ ID NO: 146986 - DNA, 30 bp, Artificial Sequence
  Synthetic oligonucleotide
ggaagaatcggatgcagtcaatcaattaca

SEQ ID NO: 146987 - DNA, 30 bp, Artificial Sequence
  Synthetic oligonucleotide
cagaaacatacttggaaaggaggaattaca

SEQ ID NO: 146988 - DNA, 30 bp, Artificial Sequence
  Synthetic oligonucleotide
cgatcccaactgaaatgaacagtaattaca

SEQ ID NO: 146989 - DNA, 30 bp, Artificial Sequence
  Synthetic oligonucleotide
aggtaccggttgggaaggttagtacttaca

SEQ ID NO: 146990 - DNA, 30 bp, Artificial Sequence
  Synthetic oligonucleotide
tcaccatgggaatggttgccatagcttaca

SEQ ID NO: 146991 - DNA, 30 bp, Artificial Sequence
  Synthetic oligonucleotide
tggggacctgggggcgtccccacgcttaca

SEQ ID NO: 146992 - DNA, 30 bp, Artificial Sequence
  Synthetic oligonucleotide
aaccgtaggatcatacaacgttaagttaca

SEQ ID NO: 146993 - DNA, 30 bp, Artificial Sequence
  Synthetic oligonucleotide
ccgagcattccttgcggggtgacagttaca

SEQ ID NO: 146994 - DNA, 30 bp, Artificial Sequence
  Synthetic oligonucleotide
gtagcagggtaaaccgtaagtggagttaca

SEQ ID NO: 146995 - DNA, 30 bp, Artificial Sequence
  Synthetic oligonucleotide
aaggcagattgggcgctacgcaacgttaca

SEQ ID NO: 146996 - DNA, 30 bp, Artificial Sequence
  Synthetic oligonucleotide
gggattggggcttgcgaatttatggttaca

SEQ ID NO: 146997 - DNA, 30 bp, Artificial Sequence
  Synthetic oligonucleotide
cgaccgttttggcaccaaactcttgttaca

SEQ ID NO: 146998 - DNA, 30 bp, Artificial Sequence
  Synthetic oligonucleotide
aacccaaactggagagagaattcatttaca

SEQ ID NO: 146999 - DNA, 30 bp, Artificial Sequence
  Synthetic oligonucleotide
aagaggggcagtgatccacggggctttaca

SEQ ID NO: 147000 - DNA, 30 bp, Artificial Sequence
  Synthetic oligonucleotide
gtggggacattagttgtttgagcgtttaca

SEQ ID NO: 147001 - DNA, 30 bp, Artificial Sequence
  Synthetic oligonucleotide
cgggcgggaagcgtcaggggagtgtttaca

SEQ ID NO: 147002 - DNA, 30 bp, Artificial Sequence
  Synthetic oligonucleotide
ggaacgtgtcggtcaatgtcattgtttaca

SEQ ID NO: 147003 - DNA, 30 bp, Artificial Sequence
  Synthetic oligonucleotide
aatcgcaggtgagctttggattttaaacca

SEQ ID NO: 147004 - DNA, 30 bp, Artificial Sequence
  Synthetic oligonucleotide
tggatagacaacctgtgatctacacaacca

SEQ ID NO: 147005 - DNA, 30 bp, Artificial Sequence
  Synthetic oligonucleotide
tcccgtcgaagactgtgcttattacaacca

SEQ ID NO: 147006 - DNA, 30 bp, Artificial Sequence
  Synthetic oligonucleotide
tttaggggtagttgagagtggaggcaacca

SEQ ID NO: 147007 - DNA, 30 bp, Artificial Sequence
  Synthetic oligonucleotide
ttgcgaaatccggtcagccgagtgcaacca

SEQ ID NO: 147008 - DNA, 30 bp, Artificial Sequence
  Synthetic oligonucleotide
aacatgaatgagcctaggtgatatgaacca

SEQ ID NO: 147009 - DNA, 30 bp, Artificial Sequence
  Synthetic oligonucleotide
gatggggggcaactcaagttatagacacca

SEQ ID NO: 147010 - DNA, 30 bp, Artificial Sequence
  Synthetic oligonucleotide
tttaaatagacataacaaatactgacacca

SEQ ID NO: 147011 - DNA, 30 bp, Artificial Sequence
  Synthetic oligonucleotide
ttgcggtaccatctgggatcatctacacca

SEQ ID NO: 147012 - DNA, 30 bp, Artificial Sequence
  Synthetic oligonucleotide
cacagctcgattcttccgggtcttacacca

SEQ ID NO: 147013 - DNA, 30 bp, Artificial Sequence
  Synthetic oligonucleotide
tctgagattgcgtgcgaataatgggcacca

SEQ ID NO: 147014 - DNA, 30 bp, Artificial Sequence
  Synthetic oligonucleotide
tatcgaagagaatgaaaaatcgctgcacca

SEQ ID NO: 147015 - DNA, 30 bp, Artificial Sequence
  Synthetic oligonucleotide
aagggcgctcggtaagatgatagctcacca

SEQ ID NO: 147016 - DNA, 30 bp, Artificial Sequence
  Synthetic oligonucleotide
tcgacctgatgaagaaatctaggctcacca

SEQ ID NO: 147017 - DNA, 30 bp, Artificial Sequence
  Synthetic oligonucleotide
cacatgcggatctcttagataatgtcacca

SEQ ID NO: 147018 - DNA, 30 bp, Artificial Sequence
  Synthetic oligonucleotide
atgtccctcccccagtcctgggtaagacca

SEQ ID NO: 147019 - DNA, 30 bp, Artificial Sequence
  Synthetic oligonucleotide
tcggtggggtgcgtgaggggccccagacca

SEQ ID NO: 147020 - DNA, 30 bp, Artificial Sequence
  Synthetic oligonucleotide
tacagtgcaggcgtaagcctggtcagacca

SEQ ID NO: 147021 - DNA, 30 bp, Artificial Sequence
  Synthetic oligonucleotide
cccaatggataacggccctaagagagacca

SEQ ID NO: 147022 - DNA, 30 bp, Artificial Sequence
  Synthetic oligonucleotide
aagactcggctctgcgcttacccgagacca

SEQ ID NO: 147023 - DNA, 30 bp, Artificial Sequence
  Synthetic oligonucleotide
tctacagaactaggacaattctcacgacca

SEQ ID NO: 147024 - DNA, 30 bp, Artificial Sequence
  Synthetic oligonucleotide
accttgcgacacggcttatgtagacgacca

SEQ ID NO: 147025 - DNA, 30 bp, Artificial Sequence
  Synthetic oligonucleotide
tcacctgtagggcctctgacccaccgacca

SEQ ID NO: 147026 - DNA, 30 bp, Artificial Sequence
  Synthetic oligonucleotide
acacattctgcgaaacggggacggcgacca

SEQ ID NO: 147027 - DNA, 30 bp, Artificial Sequence
  Synthetic oligonucleotide
gggtcattgacaggtcgtgtggatcgacca

SEQ ID NO: 147028 - DNA, 30 bp, Artificial Sequence
  Synthetic oligonucleotide
atgcacggctaaggggaggagcctcgacca

SEQ ID NO: 147029 - DNA, 30 bp, Artificial Sequence
  Synthetic oligonucleotide
cgatcgttcgattctcagatccagggacca

SEQ ID NO: 147030 - DNA, 30 bp, Artificial Sequence
  Synthetic oligonucleotide
tgtgagctatcaccaaaagggtcgggacca

SEQ ID NO: 147031 - DNA, 30 bp, Artificial Sequence
  Synthetic oligonucleotide
aaggtgttatccagtatcatttcgggacca

SEQ ID NO: 147032 - DNA, 30 bp, Artificial Sequence
  Synthetic oligonucleotide
aacaatttcggacacataagatcctgacca

SEQ ID NO: 147033 - DNA, 30 bp, Artificial Sequence
  Synthetic oligonucleotide
attatggacgcccgaattcgtcagtgacca

SEQ ID NO: 147034 - DNA, 30 bp, Artificial Sequence
  Synthetic oligonucleotide
atctgcataactatggcggagggttgacca

SEQ ID NO: 147035 - DNA, 30 bp, Artificial Sequence
  Synthetic oligonucleotide
ggatacatcgtaccaacggctggttgacca

SEQ ID NO: 147036 - DNA, 30 bp, Artificial Sequence
  Synthetic oligonucleotide
ccacgtttcaccagcgtctcctgaatacca

SEQ ID NO: 147037 - DNA, 30 bp, Artificial Sequence
  Synthetic oligonucleotide
cccgtgaacaggttggctccatagatacca

SEQ ID NO: 147038 - DNA, 30 bp, Artificial Sequence
  Synthetic oligonucleotide
gacacaaactggggtcaaagatcgctacca

SEQ ID NO: 147039 - DNA, 30 bp, Artificial Sequence
  Synthetic oligonucleotide
cgatttaaccagatttaggtctcgctacca

SEQ ID NO: 147040 - DNA, 30 bp, Artificial Sequence
  Synthetic oligonucleotide
tgggcatcgccacggtaggagatgctacca

SEQ ID NO: 147041 - DNA, 30 bp, Artificial Sequence
  Synthetic oligonucleotide
cgtcatttatcgaggctcacgaaagtacca

SEQ ID NO: 147042 - DNA, 30 bp, Artificial Sequence
  Synthetic oligonucleotide
cctgttcttactactacaagataagtacca

SEQ ID NO: 147043 - DNA, 30 bp, Artificial Sequence
  Synthetic oligonucleotide
acccacggcatttcaccgagatacgtacca

SEQ ID NO: 147044 - DNA, 30 bp, Artificial Sequence
  Synthetic oligonucleotide
gatcggatctactgggctacaagcgtacca

SEQ ID NO: 147045 - DNA, 30 bp, Artificial Sequence
  Synthetic oligonucleotide
tgcactctgaatggtgcgggggtcgtacca

SEQ ID NO: 147046 - DNA, 30 bp, Artificial Sequence
  Synthetic oligonucleotide
atgagaagttccgtctgccgtacggtacca

SEQ ID NO: 147047 - DNA, 30 bp, Artificial Sequence
  Synthetic oligonucleotide
gcaccgcgaaccacgttcttgcgggtacca

SEQ ID NO: 147048 - DNA, 30 bp, Artificial Sequence
  Synthetic oligonucleotide
gcgacattgccccttaggggtttggtacca

SEQ ID NO: 147049 - DNA, 30 bp, Artificial Sequence
  Synthetic oligonucleotide
tgtagggctcagacaaagggaactgtacca

SEQ ID NO: 147050 - DNA, 30 bp, Artificial Sequence
  Synthetic oligonucleotide
catgcgtaacctcgtcaacactctttacca

SEQ ID NO: 147051 - DNA, 30 bp, Artificial Sequence
  Synthetic oligonucleotide
cggagattatgttctgcccggtcaaaccca

SEQ ID NO: 147052 - DNA, 30 bp, Artificial Sequence
  Synthetic oligonucleotide
tcagtacgggcaaagctatactccaaccca

SEQ ID NO: 147053 - DNA, 30 bp, Artificial Sequence
  Synthetic oligonucleotide
tgtgcaagcggactgcgagtgcggaaccca

SEQ ID NO: 147054 - DNA, 30 bp, Artificial Sequence
  Synthetic oligonucleotide
gcgttaagtacaggtgggataatgaaccca

SEQ ID NO: 147055 - DNA, 30 bp, Artificial Sequence
  Synthetic oligonucleotide
catttcgctgttcagtcaataagtaaccca

SEQ ID NO: 147056 - DNA, 30 bp, Artificial Sequence
  Synthetic oligonucleotide
cgatagcagtagaattcttttatagaccca

SEQ ID NO: 147057 - DNA, 30 bp, Artificial Sequence
  Synthetic oligonucleotide
ctgtcacctaacaccactaatcgctaccca

SEQ ID NO: 147058 - DNA, 30 bp, Artificial Sequence
  Synthetic oligonucleotide
gtaggtattgtgtgcaaccaacccacccca

SEQ ID NO: 147059 - DNA, 30 bp, Artificial Sequence
  Synthetic oligonucleotide
aaagaggagtgtcaataggtgatgacccca

SEQ ID NO: 147060 - DNA, 30 bp, Artificial Sequence
  Synthetic oligonucleotide
ccggtatcaaattgcagctcgataccccca

SEQ ID NO: 147061 - DNA, 30 bp, Artificial Sequence
  Synthetic oligonucleotide
cagctgaacaccgtgcggcctcacccccca

SEQ ID NO: 147062 - DNA, 30 bp, Artificial Sequence
  Synthetic oligonucleotide
acaaggttgcaccagcggggtggagcccca

SEQ ID NO: 147063 - DNA, 30 bp, Artificial Sequence
  Synthetic oligonucleotide
gtatcgtactgctgggctaaccccgcccca

SEQ ID NO: 147064 - DNA, 30 bp, Artificial Sequence
  Synthetic oligonucleotide
acggccctacttgatactgatgtaagccca

SEQ ID NO: 147065 - DNA, 30 bp, Artificial Sequence
  Synthetic oligonucleotide
gacagggtagtgagaagtgtaatgagccca

SEQ ID NO: 147066 - DNA, 30 bp, Artificial Sequence
  Synthetic oligonucleotide
taagggcgggaaggtttgggcaaacgccca

SEQ ID NO: 147067 - DNA, 30 bp, Artificial Sequence
  Synthetic oligonucleotide
cacccccgcaaacataggacacaccgccca

SEQ ID NO: 147068 - DNA, 30 bp, Artificial Sequence
  Synthetic oligonucleotide
taggaacttatctgcgataagaggcgccca

SEQ ID NO: 147069 - DNA, 30 bp, Artificial Sequence
  Synthetic oligonucleotide
atgggctaaaggtttcaatagaagggccca

SEQ ID NO: 147070 - DNA, 30 bp, Artificial Sequence
  Synthetic oligonucleotide
tgacataggggacccgcgtgatgaatccca

SEQ ID NO: 147071 - DNA, 30 bp, Artificial Sequence
  Synthetic oligonucleotide
aggagatgactacgcctgcgtaacatccca

SEQ ID NO: 147072 - DNA, 30 bp, Artificial Sequence
  Synthetic oligonucleotide
aggtgctgatcagatcttgtccacatccca

SEQ ID NO: 147073 - DNA, 30 bp, Artificial Sequence
  Synthetic oligonucleotide
gagaagaaccgacatacgattaagatccca

SEQ ID NO: 147074 - DNA, 30 bp, Artificial Sequence
  Synthetic oligonucleotide
agctgtataggaatcgaaagtgctatccca

SEQ ID NO: 147075 - DNA, 30 bp, Artificial Sequence
  Synthetic oligonucleotide
tgagggacatgtgtattaaagcgactccca

SEQ ID NO: 147076 - DNA, 30 bp, Artificial Sequence
  Synthetic oligonucleotide
ctggatattcgccggggcgccagagtccca

SEQ ID NO: 147077 - DNA, 30 bp, Artificial Sequence
  Synthetic oligonucleotide
ctggccgatgatctccaggaaccggtccca

SEQ ID NO: 147078 - DNA, 30 bp, Artificial Sequence
  Synthetic oligonucleotide
agggtccacccggagataaaacgtgtccca

SEQ ID NO: 147079 - DNA, 30 bp, Artificial Sequence
  Synthetic oligonucleotide
ctccatcacacgtaagaagctattgtccca

SEQ ID NO: 147080 - DNA, 30 bp, Artificial Sequence
  Synthetic oligonucleotide
acgatcgttgctcaagacccacaaaagcca

SEQ ID NO: 147081 - DNA, 30 bp, Artificial Sequence
  Synthetic oligonucleotide
actgctctctgcagtaccggtataaagcca

SEQ ID NO: 147082 - DNA, 30 bp, Artificial Sequence
  Synthetic oligonucleotide
taacatccccagactacactcaataagcca

SEQ ID NO: 147083 - DNA, 30 bp, Artificial Sequence
  Synthetic oligonucleotide
ttggtaggcgtgacaagtgtacataagcca

SEQ ID NO: 147084 - DNA, 30 bp, Artificial Sequence
  Synthetic oligonucleotide
tcacagtaagacggggagacccaacagcca

SEQ ID NO: 147085 - DNA, 30 bp, Artificial Sequence
  Synthetic oligonucleotide
gtaatttggaaataggcgtaaggacagcca

SEQ ID NO: 147086 - DNA, 30 bp, Artificial Sequence
  Synthetic oligonucleotide
tcaacttgcatgggacctatgagccagcca

SEQ ID NO: 147087 - DNA, 30 bp, Artificial Sequence
  Synthetic oligonucleotide
tctgttggttattcaaaagtatgccagcca

SEQ ID NO: 147088 - DNA, 30 bp, Artificial Sequence
  Synthetic oligonucleotide
tgggcgcgagctctaggggccgaatagcca

SEQ ID NO: 147089 - DNA, 30 bp, Artificial Sequence
  Synthetic oligonucleotide
cttaacagcggggttcccgcgggttagcca

SEQ ID NO: 147090 - DNA, 30 bp, Artificial Sequence
  Synthetic oligonucleotide
gcctcgtgcgcggactctaggaaaacgcca

SEQ ID NO: 147091 - DNA, 30 bp, Artificial Sequence
  Synthetic oligonucleotide
ggaccggttttacaggaatacaacacgcca

SEQ ID NO: 147092 - DNA, 30 bp, Artificial Sequence
  Synthetic oligonucleotide
ccctgattcacgtatgtaagcgggacgcca

SEQ ID NO: 147093 - DNA, 30 bp, Artificial Sequence
  Synthetic oligonucleotide
cggtatgaaggaaggggctaatgaccgcca

SEQ ID NO: 147094 - DNA, 30 bp, Artificial Sequence
  Synthetic oligonucleotide
taagatgaggggtcaatcagaataccgcca

SEQ ID NO: 147095 - DNA, 30 bp, Artificial Sequence
  Synthetic oligonucleotide
ataagacgttatactgcagaatcgccgcca

SEQ ID NO: 147096 - DNA, 30 bp, Artificial Sequence
  Synthetic oligonucleotide
tgcaacaattgtgccatatagttgccgcca

SEQ ID NO: 147097 - DNA, 30 bp, Artificial Sequence
  Synthetic oligonucleotide
aggtagaaccgcgaagcgtactcatcgcca

SEQ ID NO: 147098 - DNA, 30 bp, Artificial Sequence
  Synthetic oligonucleotide
cggctgccatctccaactccttcatcgcca

SEQ ID NO: 147099 - DNA, 30 bp, Artificial Sequence
  Synthetic oligonucleotide
gaccgcgcactaaagctgagtccctcgcca

SEQ ID NO: 147100 - DNA, 30 bp, Artificial Sequence
  Synthetic oligonucleotide
cggggaaagagcccactatggtcctcgcca

SEQ ID NO: 147101 - DNA, 30 bp, Artificial Sequence
  Synthetic oligonucleotide
cgagtggtcacaccaaacatccagaggcca

SEQ ID NO: 147102 - DNA, 30 bp, Artificial Sequence
  Synthetic oligonucleotide
cagtcgctggagttaacgtgttagaggcca

SEQ ID NO: 147103 - DNA, 30 bp, Artificial Sequence
  Synthetic oligonucleotide
cataatgacaggatggaacgaacgaggcca

SEQ ID NO: 147104 - DNA, 30 bp, Artificial Sequence
  Synthetic oligonucleotide
acctgctgttcggatatcgagctgaggcca

SEQ ID NO: 147105 - DNA, 30 bp, Artificial Sequence
  Synthetic oligonucleotide
ctgctggcggggtggttgacaaaacggcca

SEQ ID NO: 147106 - DNA, 30 bp, Artificial Sequence
  Synthetic oligonucleotide
aatgtacaaattcagaatgatttccggcca

SEQ ID NO: 147107 - DNA, 30 bp, Artificial Sequence
  Synthetic oligonucleotide
ttacaggcggacttttggcgaaaagggcca

SEQ ID NO: 147108 - DNA, 30 bp, Artificial Sequence
  Synthetic oligonucleotide
ggccaaggagatagccagacttccgggcca

SEQ ID NO: 147109 - DNA, 30 bp, Artificial Sequence
  Synthetic oligonucleotide
caaatagctgaaaataaaagaagcgggcca

SEQ ID NO: 147110 - DNA, 30 bp, Artificial Sequence
  Synthetic oligonucleotide
gaactaaggtccagccatcctactgggcca

SEQ ID NO: 147111 - DNA, 30 bp, Artificial Sequence
  Synthetic oligonucleotide
aaaaagctagcgccggacgatcttgggcca

SEQ ID NO: 147112 - DNA, 30 bp, Artificial Sequence
  Synthetic oligonucleotide
acagttacgtagagaggtaaagggtggcca

SEQ ID NO: 147113 - DNA, 30 bp, Artificial Sequence
  Synthetic oligonucleotide
catgaacctatggtgcctgcatggtggcca

SEQ ID NO: 147114 - DNA, 30 bp, Artificial Sequence
  Synthetic oligonucleotide
cacaggtatatggagagtatggaaatgcca

SEQ ID NO: 147115 - DNA, 30 bp, Artificial Sequence
  Synthetic oligonucleotide
attcgatactgtaagattgaggcgatgcca

SEQ ID NO: 147116 - DNA, 30 bp, Artificial Sequence
  Synthetic oligonucleotide
ccgtcgtatggccgtcgagatcggatgcca

SEQ ID NO: 147117 - DNA, 30 bp, Artificial Sequence
  Synthetic oligonucleotide
tcgagaactggttaataaggtaatatgcca

SEQ ID NO: 147118 - DNA, 31 bp, Artificial Sequence
  Synthetic oligonucleotide
tacttctgcaagtcaacgagcgattatgcca

SEQ ID NO: 147119 - DNA, 30 bp, Artificial Sequence
  Synthetic oligonucleotide
agtagtgataaccgtggtgcaaaagtgcca

SEQ ID NO: 147120 - DNA, 31 bp, Artificial Sequence
  Synthetic oligonucleotide
ggctataggtcataacgtgcgtatagtgcca

SEQ ID NO: 147121 - DNA, 30 bp, Artificial Sequence
  Synthetic oligonucleotide
gtaagaaatcgcccaatgagagacgtgcca

SEQ ID NO: 147122 - DNA, 30 bp, Artificial Sequence
  Synthetic oligonucleotide
gaaaatggcctgtgaaccccgaccgtgcca

SEQ ID NO: 147123 - DNA, 30 bp, Artificial Sequence
  Synthetic oligonucleotide
ggtcctatagactaaacagtcaaggtgcca

SEQ ID NO: 147124 - DNA, 30 bp, Artificial Sequence
  Synthetic oligonucleotide
gactatccccttaagatgacttgggtgcca

SEQ ID NO: 147125 - DNA, 30 bp, Artificial Sequence
  Synthetic oligonucleotide
aagtgtgcccggtatctaaaaaagttgcca

SEQ ID NO: 147126 - DNA, 30 bp, Artificial Sequence
  Synthetic oligonucleotide
actcctcttacgtgaagtgttacgttgcca

SEQ ID NO: 147127 - DNA, 30 bp, Artificial Sequence
  Synthetic oligonucleotide
agtctaaccttcgtcacgtcaccaaatcca

SEQ ID NO: 147128 - DNA, 30 bp, Artificial Sequence
  Synthetic oligonucleotide
actgctcaggagcggccatggccaaatcca

SEQ ID NO: 147129 - DNA, 30 bp, Artificial Sequence
  Synthetic oligonucleotide
gcgactagtatgagttacggcataaatcca

SEQ ID NO: 147130 - DNA, 30 bp, Artificial Sequence
  Synthetic oligonucleotide
cacgaataacgattatatgaacccaatcca

SEQ ID NO: 147131 - DNA, 31 bp, Artificial Sequence
  Synthetic oligonucleotide
tgcactgcatagtgaattaggggcgcatcca

SEQ ID NO: 147132 - DNA, 30 bp, Artificial Sequence
  Synthetic oligonucleotide
tgctggtcacagaggaaacgtggtgatcca

SEQ ID NO: 147133 - DNA, 30 bp, Artificial Sequence
  Synthetic oligonucleotide
caactgatggcccatggtcaagtatatcca

SEQ ID NO: 147134 - DNA, 30 bp, Artificial Sequence
  Synthetic oligonucleotide
ttagaacacgggtctccaatacgaactcca

SEQ ID NO: 147135 - DNA, 31 bp, Artificial Sequence
  Synthetic oligonucleotide
ccacggactaaatgaggcgggctaacctcca

SEQ ID NO: 147136 - DNA, 30 bp, Artificial Sequence
  Synthetic oligonucleotide
aagagggcgcgaaggcacgggcgtcctcca

SEQ ID NO: 147137 - DNA, 30 bp, Artificial Sequence
  Synthetic oligonucleotide
gtgtacaaactcgattttttcgtcgctcca

SEQ ID NO: 147138 - DNA, 30 bp, Artificial Sequence
  Synthetic oligonucleotide
ggataatccgtatgctcgatatgggctcca

SEQ ID NO: 147139 - DNA, 30 bp, Artificial Sequence
  Synthetic oligonucleotide
gctgtaggactgaggtaggcaatggctcca

SEQ ID NO: 147140 - DNA, 30 bp, Artificial Sequence
  Synthetic oligonucleotide
cctcaagctccccggagattggctgctcca

SEQ ID NO: 147141 - DNA, 30 bp, Artificial Sequence
  Synthetic oligonucleotide
atctgaggtacgcaataacttgtctctcca

SEQ ID NO: 147142 - DNA, 30 bp, Artificial Sequence
  Synthetic oligonucleotide
gagtaaagtccgaatgagacgatgtctcca

SEQ ID NO: 147143 - DNA, 30 bp, Artificial Sequence
  Synthetic oligonucleotide
ggaagattcccgcgacgcgaagaacgtcca

SEQ ID NO: 147144 - DNA, 30 bp, Artificial Sequence
  Synthetic oligonucleotide
tacacattgcattctcggaaggtacgtcca

SEQ ID NO: 147145 - DNA, 30 bp, Artificial Sequence
  Synthetic oligonucleotide
cgacaaggtgttatgattcatacgcgtcca

SEQ ID NO: 147146 - DNA, 30 bp, Artificial Sequence
  Synthetic oligonucleotide
aatcggcctcaggactctacaacaggtcca

SEQ ID NO: 147147 - DNA, 30 bp, Artificial Sequence
  Synthetic oligonucleotide
aaagggggacgagcattagtctccggtcca

SEQ ID NO: 147148 - DNA, 30 bp, Artificial Sequence
  Synthetic oligonucleotide
gtagtctgtgctttaatattgtgtggtcca

SEQ ID NO: 147149 - DNA, 30 bp, Artificial Sequence
  Synthetic oligonucleotide
cagggagacagttgacgttaaaaatgtcca

SEQ ID NO: 147150 - DNA, 30 bp, Artificial Sequence
  Synthetic oligonucleotide
gctggcattagctaggggagcaaaattcca

SEQ ID NO: 147151 - DNA, 30 bp, Artificial Sequence
  Synthetic oligonucleotide
ctcgttggagcgcctctcaaacaaattcca

SEQ ID NO: 147152 - DNA, 30 bp, Artificial Sequence
  Synthetic oligonucleotide
tagaactcttccacactgagaatcattcca

SEQ ID NO: 147153 - DNA, 30 bp, Artificial Sequence
  Synthetic oligonucleotide
tctcggaggaacctagtggaagttattcca

SEQ ID NO: 147154 - DNA, 30 bp, Artificial Sequence
  Synthetic oligonucleotide
caatggtactcacgttaaccctcacttcca

SEQ ID NO: 147155 - DNA, 30 bp, Artificial Sequence
  Synthetic oligonucleotide
tagagaatacaagtgctgtggatgcttcca

SEQ ID NO: 147156 - DNA, 30 bp, Artificial Sequence
  Synthetic oligonucleotide
taagcagtcccgattcaggaacgggttcca

SEQ ID NO: 147157 - DNA, 30 bp, Artificial Sequence
  Synthetic oligonucleotide
tctggttatgataagatatggcatgttcca

SEQ ID NO: 147158 - DNA, 30 bp, Artificial Sequence
  Synthetic oligonucleotide
gtacagttgtcattcggataaagtgttcca

SEQ ID NO: 147159 - DNA, 30 bp, Artificial Sequence
  Synthetic oligonucleotide
cgacttgagatagaccagggcacctttcca

SEQ ID NO: 147160 - DNA, 30 bp, Artificial Sequence
  Synthetic oligonucleotide
ccaagaaaggataagtcaccactgtttcca

SEQ ID NO: 147161 - DNA, 30 bp, Artificial Sequence
  Synthetic oligonucleotide
caggctttgcactatgtacgttaaaaagca

SEQ ID NO: 147162 - DNA, 30 bp, Artificial Sequence
  Synthetic oligonucleotide
gtcaaggcgtacccggtatgcataaaagca

SEQ ID NO: 147163 - DNA, 30 bp, Artificial Sequence
  Synthetic oligonucleotide
cggggcttggctgatacgaatataaaagca

SEQ ID NO: 147164 - DNA, 30 bp, Artificial Sequence
  Synthetic oligonucleotide
atatcacaaatctacgtaatcgtaaaagca

SEQ ID NO: 147165 - DNA, 30 bp, Artificial Sequence
  Synthetic oligonucleotide
actagcaaagggggccagcgtttaaaagca

SEQ ID NO: 147166 - DNA, 30 bp, Artificial Sequence
  Synthetic oligonucleotide
gagagctaattggccttcacccacaaagca

SEQ ID NO: 147167 - DNA, 30 bp, Artificial Sequence
  Synthetic oligonucleotide
gacgaacagcgagagggtcaccgcaaagca

SEQ ID NO: 147168 - DNA, 30 bp, Artificial Sequence
  Synthetic oligonucleotide
tgctcaataaaggtgctttacgcgaaagca

SEQ ID NO: 147169 - DNA, 30 bp, Artificial Sequence
  Synthetic oligonucleotide
aaagcttaacgccaaccctagaataaagca

SEQ ID NO: 147170 - DNA, 30 bp, Artificial Sequence
  Synthetic oligonucleotide
gtacccgactgagcacgcgttgctaaagca

SEQ ID NO: 147171 - DNA, 30 bp, Artificial Sequence
  Synthetic oligonucleotide
taagtagttagggcggtgactaaacaagca

SEQ ID NO: 147172 - DNA, 30 bp, Artificial Sequence
  Synthetic oligonucleotide
gcggggggtcgtgggcacacgtaacaagca

SEQ ID NO: 147173 - DNA, 30 bp, Artificial Sequence
  Synthetic oligonucleotide
gttcccacaataagatccgcaaagcaagca

SEQ ID NO: 147174 - DNA, 30 bp, Artificial Sequence
  Synthetic oligonucleotide
attatcactacgtggtaatacaggcaagca

SEQ ID NO: 147175 - DNA, 30 bp, Artificial Sequence
  Synthetic oligonucleotide
ccaatttggattgaagaagggtttcaagca

SEQ ID NO: 147176 - DNA, 30 bp, Artificial Sequence
  Synthetic oligonucleotide
ggatgtattgcactgtggatcggggaagca

SEQ ID NO: 147177 - DNA, 30 bp, Artificial Sequence
  Synthetic oligonucleotide
aaatgcgaggctttagaaacaaatgaagca

SEQ ID NO: 147178 - DNA, 30 bp, Artificial Sequence
  Synthetic oligonucleotide
agaggggcgtacttttttggcaatgaagca

SEQ ID NO: 147179 - DNA, 30 bp, Artificial Sequence
  Synthetic oligonucleotide
cacaaatcgcggtcccaccatgctgaagca

SEQ ID NO: 147180 - DNA, 30 bp, Artificial Sequence
  Synthetic oligonucleotide
ttccaaccggaacaagtactaagtgaagca

SEQ ID NO: 147181 - DNA, 30 bp, Artificial Sequence
  Synthetic oligonucleotide
gctccgaaatcattggtgaattcataagca

SEQ ID NO: 147182 - DNA, 30 bp, Artificial Sequence
  Synthetic oligonucleotide
acaagctttcgttttatccagcagtaagca

SEQ ID NO: 147183 - DNA, 30 bp, Artificial Sequence
  Synthetic oligonucleotide
cagaaggtttttttggaatgaatgtaagca

SEQ ID NO: 147184 - DNA, 30 bp, Artificial Sequence
  Synthetic oligonucleotide
ccgggcataaaaggcctcggctaaacagca

SEQ ID NO: 147185 - DNA, 30 bp, Artificial Sequence
  Synthetic oligonucleotide
aataaataacgtacctatagtacaacagca

SEQ ID NO: 147186 - DNA, 30 bp, Artificial Sequence
  Synthetic oligonucleotide
aggggaacatagctatttgatatcacagca

SEQ ID NO: 147187 - DNA, 30 bp, Artificial Sequence
  Synthetic oligonucleotide
ccgcaatcatttgagcgaactgcaccagca

SEQ ID NO: 147188 - DNA, 30 bp, Artificial Sequence
  Synthetic oligonucleotide
gcagaatagaatagcacgcacgccccagca

SEQ ID NO: 147189 - DNA, 30 bp, Artificial Sequence
  Synthetic oligonucleotide
taggcacggcaataagggtttaggccagca

SEQ ID NO: 147190 - DNA, 30 bp, Artificial Sequence
  Synthetic oligonucleotide
gaagtgatacaaataacctcttggccagca

SEQ ID NO: 147191 - DNA, 30 bp, Artificial Sequence
  Synthetic oligonucleotide
tgcgaggggtcagccggccaatgtccagca

SEQ ID NO: 147192 - DNA, 30 bp, Artificial Sequence
  Synthetic oligonucleotide
tgatatgtccgaaaggtctgcaaagcagca

SEQ ID NO: 147193 - DNA, 30 bp, Artificial Sequence
  Synthetic oligonucleotide
cagtgtgatatgccaaagtctggagcagca

SEQ ID NO: 147194 - DNA, 30 bp, Artificial Sequence
  Synthetic oligonucleotide
ccaacgccttatcaatcgaagctagcagca

SEQ ID NO: 147195 - DNA, 30 bp, Artificial Sequence
  Synthetic oligonucleotide
agtcggacctgaaggatgcggttcgcagca

SEQ ID NO: 147196 - DNA, 30 bp, Artificial Sequence
  Synthetic oligonucleotide
tagtccgccacgctccttacatcatcagca

SEQ ID NO: 147197 - DNA, 30 bp, Artificial Sequence
  Synthetic oligonucleotide
gagggcggagacagtggctatagctcagca

SEQ ID NO: 147198 - DNA, 30 bp, Artificial Sequence
  Synthetic oligonucleotide
gctggagtaaggacagggcctcggtcagca

SEQ ID NO: 147199 - DNA, 30 bp, Artificial Sequence
  Synthetic oligonucleotide
gaatcagcacacgctaacatctggtcagca

SEQ ID NO: 147200 - DNA, 30 bp, Artificial Sequence
  Synthetic oligonucleotide
cagtttgggggggtgaagcggaattcagca

SEQ ID NO: 147201 - DNA, 30 bp, Artificial Sequence
  Synthetic oligonucleotide
gagctctgaggaaattttccggatagagca

SEQ ID NO: 147202 - DNA, 30 bp, Artificial Sequence
  Synthetic oligonucleotide
ataattcatttcaagtaacggattagagca

SEQ ID NO: 147203 - DNA, 30 bp, Artificial Sequence
  Synthetic oligonucleotide
atatacttcaaatctaagagagcgcgagca

SEQ ID NO: 147204 - DNA, 30 bp, Artificial Sequence
  Synthetic oligonucleotide
gacttatccaggcaatcttattcgcgagca

SEQ ID NO: 147205 - DNA, 30 bp, Artificial Sequence
  Synthetic oligonucleotide
gacgccagtatcaccgttacgggaggagca

SEQ ID NO: 147206 - DNA, 30 bp, Artificial Sequence
  Synthetic oligonucleotide
agttaaagaattaggggctcattgggagca

SEQ ID NO: 147207 - DNA, 30 bp, Artificial Sequence
  Synthetic oligonucleotide
acagtaggctaattgcccagttcatgagca

SEQ ID NO: 147208 - DNA, 30 bp, Artificial Sequence
  Synthetic oligonucleotide
ggcattaggaggatttcgatgggatgagca

SEQ ID NO: 147209 - DNA, 30 bp, Artificial Sequence
  Synthetic oligonucleotide
aagaatttgtatcaaacacactgctgagca

SEQ ID NO: 147210 - DNA, 30 bp, Artificial Sequence
  Synthetic oligonucleotide
agcgatactcaactggtgctgttgtgagca

SEQ ID NO: 147211 - DNA, 30 bp, Artificial Sequence
  Synthetic oligonucleotide
agcgcggaatttgaagaatagtctatagca

SEQ ID NO: 147212 - DNA, 30 bp, Artificial Sequence
  Synthetic oligonucleotide
tgagtaggcatgtgacggaggaaactagca

SEQ ID NO: 147213 - DNA, 30 bp, Artificial Sequence
  Synthetic oligonucleotide
aagacatactaaaagctgaagatactagca

SEQ ID NO: 147214 - DNA, 30 bp, Artificial Sequence
  Synthetic oligonucleotide
cattctgtgggcaaaacgggattactagca

SEQ ID NO: 147215 - DNA, 30 bp, Artificial Sequence
  Synthetic oligonucleotide
gctccttaatcaaagcagataagcctagca

SEQ ID NO: 147216 - DNA, 30 bp, Artificial Sequence
  Synthetic oligonucleotide
aacgactgtatcatatcaccgttgctagca

SEQ ID NO: 147217 - DNA, 30 bp, Artificial Sequence
  Synthetic oligonucleotide
atagtggaggacatacatcaggccgtagca

SEQ ID NO: 147218 - DNA, 30 bp, Artificial Sequence
  Synthetic oligonucleotide
tagtaggcttgccagagcgtaatcgtagca

SEQ ID NO: 147219 - DNA, 30 bp, Artificial Sequence
  Synthetic oligonucleotide
gataaaggcttatacactgatcagttagca

SEQ ID NO: 147220 - DNA, 30 bp, Artificial Sequence
  Synthetic oligonucleotide
gaggtattcccaagttccagctggttagca

SEQ ID NO: 147221 - DNA, 30 bp, Artificial Sequence
  Synthetic oligonucleotide
cccaacacgctatcaatgtccatcaacgca

SEQ ID NO: 147222 - DNA, 30 bp, Artificial Sequence
  Synthetic oligonucleotide
tggggtattcggacaaacccggtcaacgca

SEQ ID NO: 147223 - DNA, 30 bp, Artificial Sequence
  Synthetic oligonucleotide
ataaggtggcgcctgatataagagaacgca

SEQ ID NO: 147224 - DNA, 30 bp, Artificial Sequence
  Synthetic oligonucleotide
ctgccaaagcactagctgcttgagaacgca

SEQ ID NO: 147225 - DNA, 30 bp, Artificial Sequence
  Synthetic oligonucleotide
gacgcttcggtagatgcgagatagaacgca

SEQ ID NO: 147226 - DNA, 30 bp, Artificial Sequence
  Synthetic oligonucleotide
gaaacggattccctaggcataaggaacgca

SEQ ID NO: 147227 - DNA, 30 bp, Artificial Sequence
  Synthetic oligonucleotide
ctacctttcgtgggctgaaacaataacgca

SEQ ID NO: 147228 - DNA, 30 bp, Artificial Sequence
  Synthetic oligonucleotide
tttagccgaatgcaaagaattcgctacgca

SEQ ID NO: 147229 - DNA, 30 bp, Artificial Sequence
  Synthetic oligonucleotide
aggtcccatattcgtctagagaaaaccgca

SEQ ID NO: 147230 - DNA, 30 bp, Artificial Sequence
  Synthetic oligonucleotide
ccacgagtctctgcacccccacgaaccgca

SEQ ID NO: 147231 - DNA, 30 bp, Artificial Sequence
  Synthetic oligonucleotide
aggcagattgtgactggctggcccaccgca

SEQ ID NO: 147232 - DNA, 30 bp, Artificial Sequence
  Synthetic oligonucleotide
ctgcccgtccatacgatgttacaacccgca

SEQ ID NO: 147233 - DNA, 30 bp, Artificial Sequence
  Synthetic oligonucleotide
aaacacgcattggttttcagtacccccgca

SEQ ID NO: 147234 - DNA, 30 bp, Artificial Sequence
  Synthetic oligonucleotide
gattgcagacacatgaatcgtcgtcccgca

SEQ ID NO: 147235 - DNA, 30 bp, Artificial Sequence
  Synthetic oligonucleotide
aggtgtccacttcagtaggcggaagccgca

SEQ ID NO: 147236 - DNA, 30 bp, Artificial Sequence
  Synthetic oligonucleotide
taaagaacgatggcactgttgtacgccgca

SEQ ID NO: 147237 - DNA, 30 bp, Artificial Sequence
  Synthetic oligonucleotide
aagatctaaggacacactcaacggtccgca

SEQ ID NO: 147238 - DNA, 30 bp, Artificial Sequence
  Synthetic oligonucleotide
ccgggaaatggttactgagactcaagcgca

SEQ ID NO: 147239 - DNA, 30 bp, Artificial Sequence
  Synthetic oligonucleotide
gcggacgggctctaagtacacataagcgca

SEQ ID NO: 147240 - DNA, 30 bp, Artificial Sequence
  Synthetic oligonucleotide
gaccagtgggctgactattaacacagcgca

SEQ ID NO: 147241 - DNA, 30 bp, Artificial Sequence
  Synthetic oligonucleotide
taacaaagtcatattacccggagcagcgca

SEQ ID NO: 147242 - DNA, 30 bp, Artificial Sequence
  Synthetic oligonucleotide
ggtagcacgtgggggccataagtgagcgca

SEQ ID NO: 147243 - DNA, 30 bp, Artificial Sequence
  Synthetic oligonucleotide
cagacgcgaggtcccgtaggtattagcgca

SEQ ID NO: 147244 - DNA, 30 bp, Artificial Sequence
  Synthetic oligonucleotide
agagtcaagtcattcagcgcccatcgcgca

SEQ ID NO: 147245 - DNA, 30 bp, Artificial Sequence
  Synthetic oligonucleotide
ctagccgcgtggcgtgactgtgcaggcgca

SEQ ID NO: 147246 - DNA, 30 bp, Artificial Sequence
  Synthetic oligonucleotide
ttggacgtaatgggacgcaacgtaggcgca

SEQ ID NO: 147247 - DNA, 30 bp, Artificial Sequence
  Synthetic oligonucleotide
cgtactgaggttaacaactttcccggcgca

SEQ ID NO: 147248 - DNA, 30 bp, Artificial Sequence
  Synthetic oligonucleotide
taccatcgagtcagacgactgttcggcgca

SEQ ID NO: 147249 - DNA, 30 bp, Artificial Sequence
  Synthetic oligonucleotide
tatagaaaaaaggaaaaagtttcgggcgca

SEQ ID NO: 147250 - DNA, 30 bp, Artificial Sequence
  Synthetic oligonucleotide
tctgaactaggacgttctctgactggcgca

SEQ ID NO: 147251 - DNA, 30 bp, Artificial Sequence
  Synthetic oligonucleotide
ctgagcatccttataaccaaatctggcgca

SEQ ID NO: 147252 - DNA, 30 bp, Artificial Sequence
  Synthetic oligonucleotide
tagcaaggcatgggtcaaggggttggcgca

SEQ ID NO: 147253 - DNA, 30 bp, Artificial Sequence
  Synthetic oligonucleotide
tatcggacagaatgggagccccgctgcgca

SEQ ID NO: 147254 - DNA, 30 bp, Artificial Sequence
  Synthetic oligonucleotide
cattaatgagacccggaggagttgtgcgca

SEQ ID NO: 147255 - DNA, 30 bp, Artificial Sequence
  Synthetic oligonucleotide
ctacacctcgaacctaataagtgttgcgca

SEQ ID NO: 147256 - DNA, 30 bp, Artificial Sequence
  Synthetic oligonucleotide
ggagtgtaaaacggtttaaaacgcatcgca

SEQ ID NO: 147257 - DNA, 30 bp, Artificial Sequence
  Synthetic oligonucleotide
caaacaaagatgagaggttcgaaagtcgca

SEQ ID NO: 147258 - DNA, 30 bp, Artificial Sequence
  Synthetic oligonucleotide
cttaatagcatgaggcctactcaagtcgca

SEQ ID NO: 147259 - DNA, 30 bp, Artificial Sequence
  Synthetic oligonucleotide
cacagttgcaggtgtgacatacgtgtcgca

SEQ ID NO: 147260 - DNA, 30 bp, Artificial Sequence
  Synthetic oligonucleotide
catggtagtatttcaacgcacgtcaaggca

SEQ ID NO: 147261 - DNA, 30 bp, Artificial Sequence
  Synthetic oligonucleotide
ggttctcatacagattatgtcgttaaggca

SEQ ID NO: 147262 - DNA, 30 bp, Artificial Sequence
  Synthetic oligonucleotide
taatagtcgatagaatagggttttaaggca

SEQ ID NO: 147263 - DNA, 30 bp, Artificial Sequence
  Synthetic oligonucleotide
ggccaagtgatccgtgcacgcacacaggca

SEQ ID NO: 147264 - DNA, 30 bp, Artificial Sequence
  Synthetic oligonucleotide
tttaggcgtaaagcagatttcgcgcaggca

SEQ ID NO: 147265 - DNA, 30 bp, Artificial Sequence
  Synthetic oligonucleotide
atattcgaacaagtagtaccccggcaggca

SEQ ID NO: 147266 - DNA, 30 bp, Artificial Sequence
  Synthetic oligonucleotide
aggtccctcgcttataaggtgaatcaggca

SEQ ID NO: 147267 - DNA, 30 bp, Artificial Sequence
  Synthetic oligonucleotide
tagaggcggaaccagcctatgtgtcaggca

SEQ ID NO: 147268 - DNA, 30 bp, Artificial Sequence
  Synthetic oligonucleotide
tggtgaccgttatacttatgcaaagaggca

SEQ ID NO: 147269 - DNA, 30 bp, Artificial Sequence
  Synthetic oligonucleotide
tcttagatgtctcataaataagaagaggca

SEQ ID NO: 147270 - DNA, 30 bp, Artificial Sequence
  Synthetic oligonucleotide
ggcatgtagaattacatagtccccgaggca

SEQ ID NO: 147271 - DNA, 30 bp, Artificial Sequence
  Synthetic oligonucleotide
gtctaatcacttcagcacgctcccgaggca

SEQ ID NO: 147272 - DNA, 30 bp, Artificial Sequence
  Synthetic oligonucleotide
gtccgtagggttcacaactaactcgaggca

SEQ ID NO: 147273 - DNA, 30 bp, Artificial Sequence
  Synthetic oligonucleotide
ctcagaattggtgtgtcacgtctcgaggca

SEQ ID NO: 147274 - DNA, 30 bp, Artificial Sequence
  Synthetic oligonucleotide
tgtgaatcacatttttgggacctaacggca

SEQ ID NO: 147275 - DNA, 30 bp, Artificial Sequence
  Synthetic oligonucleotide
aaacagtcttcgtagtggttgaggacggca

SEQ ID NO: 147276 - DNA, 30 bp, Artificial Sequence
  Synthetic oligonucleotide
ctaaggaaactggtgtgggaaagaccggca

SEQ ID NO: 147277 - DNA, 30 bp, Artificial Sequence
  Synthetic oligonucleotide
gacgcttgatgaaggtagacgggaccggca

SEQ ID NO: 147278 - DNA, 30 bp, Artificial Sequence
  Synthetic oligonucleotide
actcacgttttcatagagaaaatgccggca

SEQ ID NO: 147279 - DNA, 30 bp, Artificial Sequence
  Synthetic oligonucleotide
atacaatgggataatgggtggcgtccggca

SEQ ID NO: 147280 - DNA, 30 bp, Artificial Sequence
  Synthetic oligonucleotide
cgtcagaccccagggacacgtcgtccggca

SEQ ID NO: 147281 - DNA, 30 bp, Artificial Sequence
  Synthetic oligonucleotide
gtggtgtcaggtacacccatggcagcggca

SEQ ID NO: 147282 - DNA, 30 bp, Artificial Sequence
  Synthetic oligonucleotide
agtgttttccagatgagaaaggtggcggca

SEQ ID NO: 147283 - DNA, 30 bp, Artificial Sequence
  Synthetic oligonucleotide
attctgaaagatcaagatacggggtcggca

SEQ ID NO: 147284 - DNA, 30 bp, Artificial Sequence
  Synthetic oligonucleotide
cgagctgaaaagcaatagctgtaaagggca

SEQ ID NO: 147285 - DNA, 30 bp, Artificial Sequence
  Synthetic oligonucleotide
gttggaactctatgtcggaaacgaagggca

SEQ ID NO: 147286 - DNA, 30 bp, Artificial Sequence
  Synthetic oligonucleotide
tttcgtaaccgtgcgctgattgagagggca

SEQ ID NO: 147287 - DNA, 30 bp, Artificial Sequence
  Synthetic oligonucleotide
ggtcactgaacgactcacgataaacgggca

SEQ ID NO: 147288 - DNA, 30 bp, Artificial Sequence
  Synthetic oligonucleotide
tcaagttttagcgagtgagtgcaccgggca

SEQ ID NO: 147289 - DNA, 30 bp, Artificial Sequence
  Synthetic oligonucleotide
tgacgattcattgcaatgcctcagggggca

SEQ ID NO: 147290 - DNA, 30 bp, Artificial Sequence
  Synthetic oligonucleotide
gtacgacactgcaagaatagtgagggggca

SEQ ID NO: 147291 - DNA, 30 bp, Artificial Sequence
  Synthetic oligonucleotide
agtccaggaacactcgtactgactggggca

SEQ ID NO: 147292 - DNA, 30 bp, Artificial Sequence
  Synthetic oligonucleotide
gagctcgaaggttgtggggttcaatgggca

SEQ ID NO: 147293 - DNA, 30 bp, Artificial Sequence
  Synthetic oligonucleotide
ctgacgcggagggggttaggccgatgggca

SEQ ID NO: 147294 - DNA, 30 bp, Artificial Sequence
  Synthetic oligonucleotide
tccataggatacactatgtatatttgggca

SEQ ID NO: 147295 - DNA, 30 bp, Artificial Sequence
  Synthetic oligonucleotide
acaggccttacaacttggcagtaaatggca

SEQ ID NO: 147296 - DNA, 30 bp, Artificial Sequence
  Synthetic oligonucleotide
ggaaaatcggtttgggataaaataatggca

SEQ ID NO: 147297 - DNA, 30 bp, Artificial Sequence
  Synthetic oligonucleotide
accatactcactaacctcgtgcctatggca

SEQ ID NO: 147298 - DNA, 30 bp, Artificial Sequence
  Synthetic oligonucleotide
gcgaactaatatcgaatagactaactggca

SEQ ID NO: 147299 - DNA, 30 bp, Artificial Sequence
  Synthetic oligonucleotide
agagccggatcgtagatagagcgactggca

SEQ ID NO: 147300 - DNA, 30 bp, Artificial Sequence
  Synthetic oligonucleotide
gcgaagggtagcataattatgcgtctggca

SEQ ID NO: 147301 - DNA, 30 bp, Artificial Sequence
  Synthetic oligonucleotide
cgtttaccaatggaaaaatgcgcagtggca

SEQ ID NO: 147302 - DNA, 30 bp, Artificial Sequence
  Synthetic oligonucleotide
aggctttcgatgcatagtccgtaggtggca

SEQ ID NO: 147303 - DNA, 30 bp, Artificial Sequence
  Synthetic oligonucleotide
aggcatgatgggcaagtaaggtcggtggca

SEQ ID NO: 147304 - DNA, 30 bp, Artificial Sequence
  Synthetic oligonucleotide
ccggacacagtaacctaggtgatggtggca

SEQ ID NO: 147305 - DNA, 30 bp, Artificial Sequence
  Synthetic oligonucleotide
catgccatgaccgtacgattgattgtggca

SEQ ID NO: 147306 - DNA, 30 bp, Artificial Sequence
  Synthetic oligonucleotide
acgggaggctgacaaagtactacattggca

SEQ ID NO: 147307 - DNA, 30 bp, Artificial Sequence
  Synthetic oligonucleotide
ccgtgggcgctaccgtcaacgccattggca

SEQ ID NO: 147308 - DNA, 30 bp, Artificial Sequence
  Synthetic oligonucleotide
acataccatatcactggatgaggcaatgca

SEQ ID NO: 147309 - DNA, 30 bp, Artificial Sequence
  Synthetic oligonucleotide
tggcaacgtataggctcacaagcgaatgca

SEQ ID NO: 147310 - DNA, 30 bp, Artificial Sequence
  Synthetic oligonucleotide
tgatcactataccatcctgttcaacatgca

SEQ ID NO: 147311 - DNA, 30 bp, Artificial Sequence
  Synthetic oligonucleotide
aatacaaatgtcacgaacaggacccatgca

SEQ ID NO: 147312 - DNA, 30 bp, Artificial Sequence
  Synthetic oligonucleotide
tgggtgttaacagcggacggaggccatgca

SEQ ID NO: 147313 - DNA, 30 bp, Artificial Sequence
  Synthetic oligonucleotide
ggcgtacattcaccgaaccggaagcatgca

SEQ ID NO: 147314 - DNA, 30 bp, Artificial Sequence
  Synthetic oligonucleotide
tgtcaagccggtaaacacgctatgcatgca

SEQ ID NO: 147315 - DNA, 30 bp, Artificial Sequence
  Synthetic oligonucleotide
aaattggctatggaacggtagaatcatgca

SEQ ID NO: 147316 - DNA, 30 bp, Artificial Sequence
  Synthetic oligonucleotide
acttcggttcaccaagtttagactcatgca

SEQ ID NO: 147317 - DNA, 30 bp, Artificial Sequence
  Synthetic oligonucleotide
tatgcgaccaggcattgatacgctcatgca

SEQ ID NO: 147318 - DNA, 30 bp, Artificial Sequence
  Synthetic oligonucleotide
taaaaggggaaataacaggttagcgatgca

SEQ ID NO: 147319 - DNA, 30 bp, Artificial Sequence
  Synthetic oligonucleotide
taactcaaggtttacaaattggaggatgca

SEQ ID NO: 147320 - DNA, 30 bp, Artificial Sequence
  Synthetic oligonucleotide
cgaggttagtgcaccagggaaattgatgca

SEQ ID NO: 147321 - DNA, 30 bp, Artificial Sequence
  Synthetic oligonucleotide
cgataggagtttgcatcacaagaaactgca

SEQ ID NO: 147322 - DNA, 30 bp, Artificial Sequence
  Synthetic oligonucleotide
agcaggcaggacctaacacaagacactgca

SEQ ID NO: 147323 - DNA, 30 bp, Artificial Sequence
  Synthetic oligonucleotide
gcgcatgagcgtccggaaatgatgactgca

SEQ ID NO: 147324 - DNA, 30 bp, Artificial Sequence
  Synthetic oligonucleotide
ccagccaagagaagaagtgatccgcctgca

SEQ ID NO: 147325 - DNA, 30 bp, Artificial Sequence
  Synthetic oligonucleotide
acgagctgcgccttcagccaaatgcctgca

SEQ ID NO: 147326 - DNA, 30 bp, Artificial Sequence
  Synthetic oligonucleotide
aacacaagacaaccggcgaacctgcctgca

SEQ ID NO: 147327 - DNA, 30 bp, Artificial Sequence
  Synthetic oligonucleotide
cccaaatgcgtgaccccagccagtcctgca

SEQ ID NO: 147328 - DNA, 30 bp, Artificial Sequence
  Synthetic oligonucleotide
actcctatgggatggcgcaaatttgctgca

SEQ ID NO: 147329 - DNA, 30 bp, Artificial Sequence
  Synthetic oligonucleotide
accctggctgcccagagcgccatgtctgca

SEQ ID NO: 147330 - DNA, 30 bp, Artificial Sequence
  Synthetic oligonucleotide
aaaggtgatgttcggtagtgtatgtctgca

SEQ ID NO: 147331 - DNA, 31 bp, Artificial Sequence
  Synthetic oligonucleotide
agacctctgcccatcattgtccaaaagtgca

SEQ ID NO: 147332 - DNA, 30 bp, Artificial Sequence
  Synthetic oligonucleotide
ctagttcgtacactctaacccgacagtgca

SEQ ID NO: 147333 - DNA, 30 bp, Artificial Sequence
  Synthetic oligonucleotide
aaggatggtaaccgcacgattcccagtgca

SEQ ID NO: 147334 - DNA, 30 bp, Artificial Sequence
  Synthetic oligonucleotide
tctgtcgggagctgttgctagagcagtgca

SEQ ID NO: 147335 - DNA, 30 bp, Artificial Sequence
  Synthetic oligonucleotide
aatctcgcaagacttatatctgagagtgca

SEQ ID NO: 147336 - DNA, 30 bp, Artificial Sequence
  Synthetic oligonucleotide
ggcagccaattgaaggagacctggagtgca

SEQ ID NO: 147337 - DNA, 30 bp, Artificial Sequence
  Synthetic oligonucleotide
atggggagaaacaggtgcccgtggagtgca

SEQ ID NO: 147338 - DNA, 30 bp, Artificial Sequence
  Synthetic oligonucleotide
actggcaagcgagtgttaggtttgagtgca

SEQ ID NO: 147339 - DNA, 30 bp, Artificial Sequence
  Synthetic oligonucleotide
tgcataaggcttgaggcttagcgtagtgca

SEQ ID NO: 147340 - DNA, 30 bp, Artificial Sequence
  Synthetic oligonucleotide
ctgggaccgaggaaataacttggccgtgca

SEQ ID NO: 147341 - DNA, 30 bp, Artificial Sequence
  Synthetic oligonucleotide
atcaactactgtgtaggtagccgtcgtgca

SEQ ID NO: 147342 - DNA, 30 bp, Artificial Sequence
  Synthetic oligonucleotide
cgtggatgatgtggagcgtgtgttcgtgca

SEQ ID NO: 147343 - DNA, 30 bp, Artificial Sequence
  Synthetic oligonucleotide
acactaaccatgtacccggcgtagggtgca

SEQ ID NO: 147344 - DNA, 30 bp, Artificial Sequence
  Synthetic oligonucleotide
aacaatacacacctgctactagggggtgca

SEQ ID NO: 147345 - DNA, 30 bp, Artificial Sequence
  Synthetic oligonucleotide
acgaacgccatcacacggaattttggtgca

SEQ ID NO: 147346 - DNA, 30 bp, Artificial Sequence
  Synthetic oligonucleotide
tgggttaccgcacatctggtcatatgtgca

SEQ ID NO: 147347 - DNA, 30 bp, Artificial Sequence
  Synthetic oligonucleotide
cacagcggtttcccgtaattatactgtgca

SEQ ID NO: 147348 - DNA, 30 bp, Artificial Sequence
  Synthetic oligonucleotide
aagcaaacgtgagtgtgattttattgtgca

SEQ ID NO: 147349 - DNA, 30 bp, Artificial Sequence
  Synthetic oligonucleotide
acaaacaagaagcttatacgcttttgtgca

SEQ ID NO: 147350 - DNA, 30 bp, Artificial Sequence
  Synthetic oligonucleotide
cggagctacacttcacttgaataaattgca

SEQ ID NO: 147351 - DNA, 30 bp, Artificial Sequence
  Synthetic oligonucleotide
tcaacggcctctattaactccaacattgca

SEQ ID NO: 147352 - DNA, 30 bp, Artificial Sequence
  Synthetic oligonucleotide
ctaagtaaatggagcacgaggagcattgca

SEQ ID NO: 147353 - DNA, 30 bp, Artificial Sequence
  Synthetic oligonucleotide
cggggatacgcaatcagttagcgacttgca

SEQ ID NO: 147354 - DNA, 30 bp, Artificial Sequence
  Synthetic oligonucleotide
ggggagaaaggcgtttagacagcccttgca

SEQ ID NO: 147355 - DNA, 30 bp, Artificial Sequence
  Synthetic oligonucleotide
ggaaacccgagcgccgatgaatgtcttgca

SEQ ID NO: 147356 - DNA, 30 bp, Artificial Sequence
  Synthetic oligonucleotide
ttggtaagcagcacgatgaaaccagttgca

SEQ ID NO: 147357 - DNA, 30 bp, Artificial Sequence
  Synthetic oligonucleotide
atgtgcctccctattacggatatagttgca

SEQ ID NO: 147358 - DNA, 30 bp, Artificial Sequence
  Synthetic oligonucleotide
cttgctatttaggataagagaccctttgca

SEQ ID NO: 147359 - DNA, 30 bp, Artificial Sequence
  Synthetic oligonucleotide
ctggctgtatacgacaagacagcctttgca

SEQ ID NO: 147360 - DNA, 30 bp, Artificial Sequence
  Synthetic oligonucleotide
tgtcgccttgaagggggtgcaccaaaatca

SEQ ID NO: 147361 - DNA, 30 bp, Artificial Sequence
  Synthetic oligonucleotide
ggggttaattggggatgtcggtacaaatca

SEQ ID NO: 147362 - DNA, 30 bp, Artificial Sequence
  Synthetic oligonucleotide
ttcgtgggtagagtcgcgaccgtcaaatca

SEQ ID NO: 147363 - DNA, 30 bp, Artificial Sequence
  Synthetic oligonucleotide
tgccagctcgtctcgaaggatcagaaatca

SEQ ID NO: 147364 - DNA, 30 bp, Artificial Sequence
  Synthetic oligonucleotide
accaatgggtaattgtgaggagagaaatca

SEQ ID NO: 147365 - DNA, 30 bp, Artificial Sequence
  Synthetic oligonucleotide
cctagtattgtaaaaccgcgtgggaaatca

SEQ ID NO: 147366 - DNA, 30 bp, Artificial Sequence
  Synthetic oligonucleotide
atcggtacggctcctgcgtagatgaaatca

SEQ ID NO: 147367 - DNA, 30 bp, Artificial Sequence
  Synthetic oligonucleotide
tgggataatggtcttcggtggtttaaatca

SEQ ID NO: 147368 - DNA, 30 bp, Artificial Sequence
  Synthetic oligonucleotide
atctaaaaggggcgtcttgactaacaatca

SEQ ID NO: 147369 - DNA, 30 bp, Artificial Sequence
  Synthetic oligonucleotide
caacaaatgctgaattataccgtacaatca

SEQ ID NO: 147370 - DNA, 30 bp, Artificial Sequence
  Synthetic oligonucleotide
aaagagtagagcgagagtgaccaccaatca

SEQ ID NO: 147371 - DNA, 30 bp, Artificial Sequence
  Synthetic oligonucleotide
ttatagacgggcacttctccggggcaatca

SEQ ID NO: 147372 - DNA, 30 bp, Artificial Sequence
  Synthetic oligonucleotide
caggtcagagattaaggctgttgtcaatca

SEQ ID NO: 147373 - DNA, 30 bp, Artificial Sequence
  Synthetic oligonucleotide
ttgccagcacacagcggggagatagaatca

SEQ ID NO: 147374 - DNA, 30 bp, Artificial Sequence
  Synthetic oligonucleotide
aaggtaaaggagataggttcaccggaatca

SEQ ID NO: 147375 - DNA, 30 bp, Artificial Sequence
  Synthetic oligonucleotide
gcatgcataagggtcattaataactaatca

SEQ ID NO: 147376 - DNA, 30 bp, Artificial Sequence
  Synthetic oligonucleotide
gaatcaccattcgtatgatcagagtaatca

SEQ ID NO: 147377 - DNA, 30 bp, Artificial Sequence
  Synthetic oligonucleotide
acgtcgggaatctcgtcgcagacgtaatca

SEQ ID NO: 147378 - DNA, 30 bp, Artificial Sequence
  Synthetic oligonucleotide
atccagagattggtttgatacccttaatca

SEQ ID NO: 147379 - DNA, 30 bp, Artificial Sequence
  Synthetic oligonucleotide
aaacaacggccaaaacatagtccttaatca

SEQ ID NO: 147380 - DNA, 30 bp, Artificial Sequence
  Synthetic oligonucleotide
gaacctgtgcagagtcagagattaacatca

SEQ ID NO: 147381 - DNA, 30 bp, Artificial Sequence
  Synthetic oligonucleotide
gctacgaatttgtcacgtttcaagacatca

SEQ ID NO: 147382 - DNA, 30 bp, Artificial Sequence
  Synthetic oligonucleotide
cagggtcggctgggctgaatgaatacatca

SEQ ID NO: 147383 - DNA, 30 bp, Artificial Sequence
  Synthetic oligonucleotide
ggggtaggcacacgataagacggcccatca

SEQ ID NO: 147384 - DNA, 30 bp, Artificial Sequence
  Synthetic oligonucleotide
cgatgggtggtgcgacgggtgcgtccatca

SEQ ID NO: 147385 - DNA, 30 bp, Artificial Sequence
  Synthetic oligonucleotide
cgttacaaccgtcttagcttaggtccatca

SEQ ID NO: 147386 - DNA, 30 bp, Artificial Sequence
  Synthetic oligonucleotide
ccgtacgtataagatcgagtcgaggcatca

SEQ ID NO: 147387 - DNA, 30 bp, Artificial Sequence
  Synthetic oligonucleotide
ccacatgttaaagaactttttagatcatca

SEQ ID NO: 147388 - DNA, 30 bp, Artificial Sequence
  Synthetic oligonucleotide
attacgataggggggtaggagctatcatca

SEQ ID NO: 147389 - DNA, 30 bp, Artificial Sequence
  Synthetic oligonucleotide
cattacgcttctattcccgtttgctcatca

SEQ ID NO: 147390 - DNA, 30 bp, Artificial Sequence
  Synthetic oligonucleotide
ggatactaaaatcgagcacgagtgtcatca

SEQ ID NO: 147391 - DNA, 30 bp, Artificial Sequence
  Synthetic oligonucleotide
ggaccgtgaattactgggtccagttcatca

SEQ ID NO: 147392 - DNA, 30 bp, Artificial Sequence
  Synthetic oligonucleotide
gtaaaaatatcgaaatgtcagacaagatca

SEQ ID NO: 147393 - DNA, 30 bp, Artificial Sequence
  Synthetic oligonucleotide
gaagatccatagaagggtgcttacagatca

SEQ ID NO: 147394 - DNA, 30 bp, Artificial Sequence
  Synthetic oligonucleotide
acgtgataatagcggaggctccggagatca

SEQ ID NO: 147395 - DNA, 30 bp, Artificial Sequence
  Synthetic oligonucleotide
atgatcatgccttcggtggacgatagatca

SEQ ID NO: 147396 - DNA, 30 bp, Artificial Sequence
  Synthetic oligonucleotide
actcagtgcatacctctatgatatagatca

SEQ ID NO: 147397 - DNA, 30 bp, Artificial Sequence
  Synthetic oligonucleotide
gatacgtggaccgggcgagcgtatagatca

SEQ ID NO: 147398 - DNA, 30 bp, Artificial Sequence
  Synthetic oligonucleotide
cgcctaaggatggtgttattttaccgatca

SEQ ID NO: 147399 - DNA, 30 bp, Artificial Sequence
  Synthetic oligonucleotide
gaatcaagggtcaatactgcatgccgatca

SEQ ID NO: 147400 - DNA, 30 bp, Artificial Sequence
  Synthetic oligonucleotide
gtggtttcgggaaaactcggtaatcgatca

SEQ ID NO: 147401 - DNA, 30 bp, Artificial Sequence
  Synthetic oligonucleotide
ggacaactttgggcgatacgatcaggatca

SEQ ID NO: 147402 - DNA, 30 bp, Artificial Sequence
  Synthetic oligonucleotide
gcatgaatggcgcactccggtagtggatca

SEQ ID NO: 147403 - DNA, 30 bp, Artificial Sequence
  Synthetic oligonucleotide
gacagatacaatttaacatctgcgtgatca

SEQ ID NO: 147404 - DNA, 30 bp, Artificial Sequence
  Synthetic oligonucleotide
tcgggatagaaagggcgcgatccaatatca

SEQ ID NO: 147405 - DNA, 30 bp, Artificial Sequence
  Synthetic oligonucleotide
gatcattcatcgatcagtggtggaatatca

SEQ ID NO: 147406 - DNA, 30 bp, Artificial Sequence
  Synthetic oligonucleotide
caaaattgcagtctcgtagagcttatatca

SEQ ID NO: 147407 - DNA, 30 bp, Artificial Sequence
  Synthetic oligonucleotide
taagcaggtattagggggtcggttatatca

SEQ ID NO: 147408 - DNA, 30 bp, Artificial Sequence
  Synthetic oligonucleotide
gatcaaacatttgagtcaaaccggctatca

SEQ ID NO: 147409 - DNA, 30 bp, Artificial Sequence
  Synthetic oligonucleotide
gcatgtgccgaattagggctgaatctatca

SEQ ID NO: 147410 - DNA, 30 bp, Artificial Sequence
  Synthetic oligonucleotide
taatcgttaaaaggatggatcactctatca

SEQ ID NO: 147411 - DNA, 30 bp, Artificial Sequence
  Synthetic oligonucleotide
ggcccctaggtgatcggcgatatcgtatca

SEQ ID NO: 147412 - DNA, 30 bp, Artificial Sequence
  Synthetic oligonucleotide
ctgaggcgcataacacagtaaaacttatca

SEQ ID NO: 147413 - DNA, 30 bp, Artificial Sequence
  Synthetic oligonucleotide
tccttggctagtacctttgttcacttatca

SEQ ID NO: 147414 - DNA, 30 bp, Artificial Sequence
  Synthetic oligonucleotide
ccatggtaggagaagaggctagtcttatca

SEQ ID NO: 147415 - DNA, 30 bp, Artificial Sequence
  Synthetic oligonucleotide
aagatcggacatttccgaaactaaaactca

SEQ ID NO: 147416 - DNA, 30 bp, Artificial Sequence
  Synthetic oligonucleotide
tggtaggtatcttgggcggtacgaaactca

SEQ ID NO: 147417 - DNA, 30 bp, Artificial Sequence
  Synthetic oligonucleotide
catccaaaagagaatacctaattaaactca

SEQ ID NO: 147418 - DNA, 30 bp, Artificial Sequence
  Synthetic oligonucleotide
gaccacagcgaaccgttaaagaacaactca

SEQ ID NO: 147419 - DNA, 30 bp, Artificial Sequence
  Synthetic oligonucleotide
ccctagccaggacacagttcatacaactca

SEQ ID NO: 147420 - DNA, 30 bp, Artificial Sequence
  Synthetic oligonucleotide
atgcatgacacgagcgctcccagtaactca

SEQ ID NO: 147421 - DNA, 30 bp, Artificial Sequence
  Synthetic oligonucleotide
gacgtctgattagtgtcgcccttacactca

SEQ ID NO: 147422 - DNA, 30 bp, Artificial Sequence
  Synthetic oligonucleotide
agcctggttaagaaagcagccaagcactca

SEQ ID NO: 147423 - DNA, 30 bp, Artificial Sequence
  Synthetic oligonucleotide
tggccgacaatggcggcataccagcactca

SEQ ID NO: 147424 - DNA, 30 bp, Artificial Sequence
  Synthetic oligonucleotide
gggacaactatttgatcatgcgcgcactca

SEQ ID NO: 147425 - DNA, 30 bp, Artificial Sequence
  Synthetic oligonucleotide
ccaaatggcagggagggggaaatgcactca

SEQ ID NO: 147426 - DNA, 30 bp, Artificial Sequence
  Synthetic oligonucleotide
aaccacggaattcattaagcgtgtcactca

SEQ ID NO: 147427 - DNA, 30 bp, Artificial Sequence
  Synthetic oligonucleotide
tctgcgccgggactcgctcaaattcactca

SEQ ID NO: 147428 - DNA, 30 bp, Artificial Sequence
  Synthetic oligonucleotide
cgagcttgcagtgtattaagcggagactca

SEQ ID NO: 147429 - DNA, 30 bp, Artificial Sequence
  Synthetic oligonucleotide
actacacgccgtcccccctccacggactca

SEQ ID NO: 147430 - DNA, 30 bp, Artificial Sequence
  Synthetic oligonucleotide
gatccagaatagactgaggcaacatactca

SEQ ID NO: 147431 - DNA, 30 bp, Artificial Sequence
  Synthetic oligonucleotide
atcgtcagcttcaataagcaaggatactca

SEQ ID NO: 147432 - DNA, 30 bp, Artificial Sequence
  Synthetic oligonucleotide
cgttccgacacgagagcatgctgttactca

SEQ ID NO: 147433 - DNA, 30 bp, Artificial Sequence
  Synthetic oligonucleotide
tgtaaaccaggtgttcaacgggcaacctca

SEQ ID NO: 147434 - DNA, 30 bp, Artificial Sequence
  Synthetic oligonucleotide
tcaggatcttaaagtgggttcacgccctca

SEQ ID NO: 147435 - DNA, 30 bp, Artificial Sequence
  Synthetic oligonucleotide
aatagagtaaggagatggatcgtagcctca

SEQ ID NO: 147436 - DNA, 30 bp, Artificial Sequence
  Synthetic oligonucleotide
tgtcaaatgggacgccgtgtgtcatcctca

SEQ ID NO: 147437 - DNA, 30 bp, Artificial Sequence
  Synthetic oligonucleotide
tactaaaccttgcgaacttgaagatcctca

SEQ ID NO: 147438 - DNA, 30 bp, Artificial Sequence
  Synthetic oligonucleotide
cccgttcgaaggttactcgggagctcctca

SEQ ID NO: 147439 - DNA, 30 bp, Artificial Sequence
  Synthetic oligonucleotide
gggcagaggggctggcgaagtcggtcctca

SEQ ID NO: 147440 - DNA, 30 bp, Artificial Sequence
  Synthetic oligonucleotide
actaaaagtctggcaggggacttaagctca

SEQ ID NO: 147441 - DNA, 30 bp, Artificial Sequence
  Synthetic oligonucleotide
acttggtctagggaacagcggtccagctca

SEQ ID NO: 147442 - DNA, 30 bp, Artificial Sequence
  Synthetic oligonucleotide
aactcccataactatagctcacagagctca

SEQ ID NO: 147443 - DNA, 30 bp, Artificial Sequence
  Synthetic oligonucleotide
tggagacccgtggtctccgcgcatagctca

SEQ ID NO: 147444 - DNA, 30 bp, Artificial Sequence
  Synthetic oligonucleotide
cacgtgaacgtcagatgataccttagctca

SEQ ID NO: 147445 - DNA, 30 bp, Artificial Sequence
  Synthetic oligonucleotide
agcaatggtatttgtattggcaaccgctca

SEQ ID NO: 147446 - DNA, 30 bp, Artificial Sequence
  Synthetic oligonucleotide
gctattcataatggaacgagaacccgctca

SEQ ID NO: 147447 - DNA, 30 bp, Artificial Sequence
  Synthetic oligonucleotide
atgcggattagttaagtaggcaaaggctca

SEQ ID NO: 147448 - DNA, 30 bp, Artificial Sequence
  Synthetic oligonucleotide
ggttgtgtgcggtgaaagagtgcaggctca

SEQ ID NO: 147449 - DNA, 30 bp, Artificial Sequence
  Synthetic oligonucleotide
ccgagagccggataggtaccgccgggctca

SEQ ID NO: 147450 - DNA, 30 bp, Artificial Sequence
  Synthetic oligonucleotide
attgattatctattcggagtgggtggctca

SEQ ID NO: 147451 - DNA, 30 bp, Artificial Sequence
  Synthetic oligonucleotide
ccacgggactagggagtgaacgcgtgctca

SEQ ID NO: 147452 - DNA, 30 bp, Artificial Sequence
  Synthetic oligonucleotide
cttttgttccgttggggaaacgggatctca

SEQ ID NO: 147453 - DNA, 30 bp, Artificial Sequence
  Synthetic oligonucleotide
gacggtgcgacctcttctttggctatctca

SEQ ID NO: 147454 - DNA, 30 bp, Artificial Sequence
  Synthetic oligonucleotide
gtgaaaatagcaattcctacaacagtctca

SEQ ID NO: 147455 - DNA, 30 bp, Artificial Sequence
  Synthetic oligonucleotide
acacagttatctgatcatccgacagtctca

SEQ ID NO: 147456 - DNA, 30 bp, Artificial Sequence
  Synthetic oligonucleotide
tacattccggacagtgggcatatcgtctca

SEQ ID NO: 147457 - DNA, 30 bp, Artificial Sequence
  Synthetic oligonucleotide
gcatgcctgtaaagacatcgagaggtctca

SEQ ID NO: 147458 - DNA, 30 bp, Artificial Sequence
  Synthetic oligonucleotide
agactgtccagccccccacccatcttctca

SEQ ID NO: 147459 - DNA, 30 bp, Artificial Sequence
  Synthetic oligonucleotide
cgggtgggtaatgtcgcagagggaaagtca

SEQ ID NO: 147460 - DNA, 30 bp, Artificial Sequence
  Synthetic oligonucleotide
ggactaggactggacgatctgtgaaagtca

SEQ ID NO: 147461 - DNA, 30 bp, Artificial Sequence
  Synthetic oligonucleotide
gcgtaccgaataagctccgcgttaaagtca

SEQ ID NO: 147462 - DNA, 30 bp, Artificial Sequence
  Synthetic oligonucleotide
aactacttaggaaggattgcctagaagtca

SEQ ID NO: 147463 - DNA, 30 bp, Artificial Sequence
  Synthetic oligonucleotide
gtgaggctaatatggatggtttagaagtca

SEQ ID NO: 147464 - DNA, 30 bp, Artificial Sequence
  Synthetic oligonucleotide
tagaggcttagttgtaaatgtctgaagtca

SEQ ID NO: 147465 - DNA, 30 bp, Artificial Sequence
  Synthetic oligonucleotide
ccgggcgttccgagcgcggataaccagtca

SEQ ID NO: 147466 - DNA, 31 bp, Artificial Sequence
  Synthetic oligonucleotide
caacgacaactatcacgcgcttggccagtca

SEQ ID NO: 147467 - DNA, 30 bp, Artificial Sequence
  Synthetic oligonucleotide
ccgtgatataatagaactcatatggagtca

SEQ ID NO: 147468 - DNA, 30 bp, Artificial Sequence
  Synthetic oligonucleotide
cagaactgagatcagcgtacagactagtca

SEQ ID NO: 147469 - DNA, 30 bp, Artificial Sequence
  Synthetic oligonucleotide
aggttgccacaggccgccagaacctagtca

SEQ ID NO: 147470 - DNA, 30 bp, Artificial Sequence
  Synthetic oligonucleotide
tacggattttgattctttggtgcctagtca

SEQ ID NO: 147471 - DNA, 30 bp, Artificial Sequence
  Synthetic oligonucleotide
tgcatgatgcctaatacaccacagtagtca

SEQ ID NO: 147472 - DNA, 30 bp, Artificial Sequence
  Synthetic oligonucleotide
tgcgaaaagagttttgtctgtaattagtca

SEQ ID NO: 147473 - DNA, 30 bp, Artificial Sequence
  Synthetic oligonucleotide
aaagaccaaggcccagggctgaaaacgtca

SEQ ID NO: 147474 - DNA, 29 bp, Artificial Sequence
  Synthetic oligonucleotide
ttagtcgggccagagagagccaaacgtca

SEQ ID NO: 147475 - DNA, 30 bp, Artificial Sequence
  Synthetic oligonucleotide
tgcgctacacctcccgtcaccgtcacgtca

SEQ ID NO: 147476 - DNA, 30 bp, Artificial Sequence
  Synthetic oligonucleotide
ccacgagtgaacggtgatgccccaccgtca

SEQ ID NO: 147477 - DNA, 30 bp, Artificial Sequence
  Synthetic oligonucleotide
gttcgtggtaacggtgacttcggcccgtca

SEQ ID NO: 147478 - DNA, 30 bp, Artificial Sequence
  Synthetic oligonucleotide
aagggtcagacagctagggtccagccgtca

SEQ ID NO: 147479 - DNA, 30 bp, Artificial Sequence
  Synthetic oligonucleotide
acagactagcgacaccatacaatgccgtca

SEQ ID NO: 147480 - DNA, 30 bp, Artificial Sequence
  Synthetic oligonucleotide
gtggacacgaataagtttgttggtccgtca

SEQ ID NO: 147481 - DNA, 31 bp, Artificial Sequence
  Synthetic oligonucleotide
cacgatattacctcactatcctcaggcgtca

SEQ ID NO: 147482 - DNA, 30 bp, Artificial Sequence
  Synthetic oligonucleotide
ttgtgaggaaatcactgcgggagtgcgtca

SEQ ID NO: 147483 - DNA, 30 bp, Artificial Sequence
  Synthetic oligonucleotide
atagaatggtctgacacctattgatcgtca

SEQ ID NO: 147484 - DNA, 30 bp, Artificial Sequence
  Synthetic oligonucleotide
atagtatccggataggaaggaaactcgtca

SEQ ID NO: 147485 - DNA, 30 bp, Artificial Sequence
  Synthetic oligonucleotide
ggagctccacgtagcttccttccttcgtca

SEQ ID NO: 147486 - DNA, 30 bp, Artificial Sequence
  Synthetic oligonucleotide
cttgatcgaaacaacgagtgaatttcgtca

SEQ ID NO: 147487 - DNA, 30 bp, Artificial Sequence
  Synthetic oligonucleotide
cacaaagaataaaaatacaataacaggtca

SEQ ID NO: 147488 - DNA, 30 bp, Artificial Sequence
  Synthetic oligonucleotide
agtgctgtcagcgtcgaggaacgcaggtca

SEQ ID NO: 147489 - DNA, 30 bp, Artificial Sequence
  Synthetic oligonucleotide
ggccatagtgctaagattggcgagaggtca

SEQ ID NO: 147490 - DNA, 30 bp, Artificial Sequence
  Synthetic oligonucleotide
tggagacaccctgaatgtattgatcggtca

SEQ ID NO: 147491 - DNA, 30 bp, Artificial Sequence
  Synthetic oligonucleotide
agctggatctaggcttcatgggcagggtca

SEQ ID NO: 147492 - DNA, 30 bp, Artificial Sequence
  Synthetic oligonucleotide
catgtttgtacatatccattgttagggtca

SEQ ID NO: 147493 - DNA, 30 bp, Artificial Sequence
  Synthetic oligonucleotide
tgtgggagactgcgaatccgttcatggtca

SEQ ID NO: 147494 - DNA, 30 bp, Artificial Sequence
  Synthetic oligonucleotide
accgtagatgataaaggtgggaactggtca

SEQ ID NO: 147495 - DNA, 30 bp, Artificial Sequence
  Synthetic oligonucleotide
ctgctgttaagcataggtgagggctggtca

SEQ ID NO: 147496 - DNA, 30 bp, Artificial Sequence
  Synthetic oligonucleotide
acctcgggacaacactatgatgattggtca

SEQ ID NO: 147497 - DNA, 30 bp, Artificial Sequence
  Synthetic oligonucleotide
tattgtcaacgtatgagcacaagttggtca

SEQ ID NO: 147498 - DNA, 30 bp, Artificial Sequence
  Synthetic oligonucleotide
acgtgatgtcctgctgacaagtccatgtca

SEQ ID NO: 147499 - DNA, 30 bp, Artificial Sequence
  Synthetic oligonucleotide
gacggtaactgatttcagataagcatgtca

SEQ ID NO: 147500 - DNA, 30 bp, Artificial Sequence
  Synthetic oligonucleotide
agtacgattatccacagtttacagatgtca

SEQ ID NO: 147501 - DNA, 30 bp, Artificial Sequence
  Synthetic oligonucleotide
taaggagaagacaattgtaaaagtatgtca

SEQ ID NO: 147502 - DNA, 30 bp, Artificial Sequence
  Synthetic oligonucleotide
acatttgttacaggcacggggagtatgtca

SEQ ID NO: 147503 - DNA, 30 bp, Artificial Sequence
  Synthetic oligonucleotide
tagaccacaagacttgtgtggatactgtca

SEQ ID NO: 147504 - DNA, 30 bp, Artificial Sequence
  Synthetic oligonucleotide
tatgtgcagagagatccatgggacctgtca

SEQ ID NO: 147505 - DNA, 30 bp, Artificial Sequence
  Synthetic oligonucleotide
catgtcaatggctgaatatggacgctgtca

SEQ ID NO: 147506 - DNA, 30 bp, Artificial Sequence
  Synthetic oligonucleotide
gctagttatggggtttcaaaaaaagtgtca

SEQ ID NO: 147507 - DNA, 30 bp, Artificial Sequence
  Synthetic oligonucleotide
gcacgacaggtggaaaaatgacaagtgtca

SEQ ID NO: 147508 - DNA, 30 bp, Artificial Sequence
  Synthetic oligonucleotide
caagttgagatagagaaggctagggtgtca

SEQ ID NO: 147509 - DNA, 30 bp, Artificial Sequence
  Synthetic oligonucleotide
ccggagatcaatcgtgcgcgaacattgtca

SEQ ID NO: 147510 - DNA, 30 bp, Artificial Sequence
  Synthetic oligonucleotide
tccatcggcgctagctcgtctgtcttgtca

SEQ ID NO: 147511 - DNA, 30 bp, Artificial Sequence
  Synthetic oligonucleotide
gcgggttataaggttagataaagaaattca

SEQ ID NO: 147512 - DNA, 30 bp, Artificial Sequence
  Synthetic oligonucleotide
ccagtgtacggctcacacgccctaaattca

SEQ ID NO: 147513 - DNA, 30 bp, Artificial Sequence
  Synthetic oligonucleotide
cggagccagtgtgaaaacgccttaaattca

SEQ ID NO: 147514 - DNA, 30 bp, Artificial Sequence
  Synthetic oligonucleotide
ttaacacaggactgcgagcacaataattca

SEQ ID NO: 147515 - DNA, 30 bp, Artificial Sequence
  Synthetic oligonucleotide
cgtaaaaaatgtggcggcagggctaattca

SEQ ID NO: 147516 - DNA, 30 bp, Artificial Sequence
  Synthetic oligonucleotide
tcgcgcacgtaacgctacataagtaattca

SEQ ID NO: 147517 - DNA, 30 bp, Artificial Sequence
  Synthetic oligonucleotide
ttgctataacggaaagcggtacatcattca

SEQ ID NO: 147518 - DNA, 30 bp, Artificial Sequence
  Synthetic oligonucleotide
ctgagtatatgtagacagttttgagattca

SEQ ID NO: 147519 - DNA, 31 bp, Artificial Sequence
  Synthetic oligonucleotide
agacaagcaatccgagaagttataggattca

SEQ ID NO: 147520 - DNA, 30 bp, Artificial Sequence
  Synthetic oligonucleotide
atcgtgagacgtttggctaaagcctattca

SEQ ID NO: 147521 - DNA, 30 bp, Artificial Sequence
  Synthetic oligonucleotide
gtaaggcctagatcagtttcatggtattca

SEQ ID NO: 147522 - DNA, 30 bp, Artificial Sequence
  Synthetic oligonucleotide
ctacagattgtcatacgctacacttattca

SEQ ID NO: 147523 - DNA, 30 bp, Artificial Sequence
  Synthetic oligonucleotide
agctatggggctacgagattgtcgacttca

SEQ ID NO: 147524 - DNA, 30 bp, Artificial Sequence
  Synthetic oligonucleotide
gcgctatgcgagtatgtgcagaatacttca

SEQ ID NO: 147525 - DNA, 30 bp, Artificial Sequence
  Synthetic oligonucleotide
gctcgcgctacacgctccaactctacttca

SEQ ID NO: 147526 - DNA, 30 bp, Artificial Sequence
  Synthetic oligonucleotide
acaagtggaagactttttatcagcgcttca

SEQ ID NO: 147527 - DNA, 30 bp, Artificial Sequence
  Synthetic oligonucleotide
ggtgtgctttccgcaccgtcaatttcttca

SEQ ID NO: 147528 - DNA, 30 bp, Artificial Sequence
  Synthetic oligonucleotide
ctgcgcaaaacccgacatagtacaagttca

SEQ ID NO: 147529 - DNA, 30 bp, Artificial Sequence
  Synthetic oligonucleotide
caagcataggatcctacaagcggaagttca

SEQ ID NO: 147530 - DNA, 30 bp, Artificial Sequence
  Synthetic oligonucleotide
aggtatcccaggcagcaacatcggagttca

SEQ ID NO: 147531 - DNA, 30 bp, Artificial Sequence
  Synthetic oligonucleotide
taattaacggtaatgggtcagtgccgttca

SEQ ID NO: 147532 - DNA, 30 bp, Artificial Sequence
  Synthetic oligonucleotide
gatgggtcgtagaacgagacgacaggttca

SEQ ID NO: 147533 - DNA, 30 bp, Artificial Sequence
  Synthetic oligonucleotide
ggaggaacggtagccgcttctcacggttca

SEQ ID NO: 147534 - DNA, 30 bp, Artificial Sequence
  Synthetic oligonucleotide
acagtaagtatgcgaaaaggccggggttca

SEQ ID NO: 147535 - DNA, 30 bp, Artificial Sequence
  Synthetic oligonucleotide
cgcgtgctcttccaccggctatgctgttca

SEQ ID NO: 147536 - DNA, 39 bp, Artificial Sequence
  Synthetic oligonucleotide
aagaaacttccaaggtataacgataataattacatttca

SEQ ID NO: 147537 - DNA, 30 bp, Artificial Sequence
  Synthetic oligonucleotide
gtggttgcataggaaccacctgtcatttca

SEQ ID NO: 147538 - DNA, 30 bp, Artificial Sequence
  Synthetic oligonucleotide
tcgggtgattggcccatgtgtgaactttca

SEQ ID NO: 147539 - DNA, 30 bp, Artificial Sequence
  Synthetic oligonucleotide
ggcagtgatcaatcccgtcgtgtactttca

SEQ ID NO: 147540 - DNA, 30 bp, Artificial Sequence
  Synthetic oligonucleotide
cgcgttaacctctctggaagagtcctttca

SEQ ID NO: 147541 - DNA, 30 bp, Artificial Sequence
  Synthetic oligonucleotide
tgttagacttaaccccgacaagagctttca

SEQ ID NO: 147542 - DNA, 30 bp, Artificial Sequence
  Synthetic oligonucleotide
ttgaggccggtgaggttattcagtctttca

SEQ ID NO: 147543 - DNA, 30 bp, Artificial Sequence
  Synthetic oligonucleotide
acctgccaggtgagataaacgggagtttca

SEQ ID NO: 147544 - DNA, 30 bp, Artificial Sequence
  Synthetic oligonucleotide
gcagaccgacggatggcaacataaaaaaga

SEQ ID NO: 147545 - DNA, 30 bp, Artificial Sequence
  Synthetic oligonucleotide
caatatgcatgggaagacctcacaaaaaga

SEQ ID NO: 147546 - DNA, 30 bp, Artificial Sequence
  Synthetic oligonucleotide
gtcgcctctaattacccataaagcaaaaga

SEQ ID NO: 147547 - DNA, 30 bp, Artificial Sequence
  Synthetic oligonucleotide
tcaggatcccaacaagcatataataaaaga

SEQ ID NO: 147548 - DNA, 30 bp, Artificial Sequence
  Synthetic oligonucleotide
cgccattgatctaactacatgcataaaaga

SEQ ID NO: 147549 - DNA, 30 bp, Artificial Sequence
  Synthetic oligonucleotide
cgtaagccgaggtggctcacttctaaaaga

SEQ ID NO: 147550 - DNA, 30 bp, Artificial Sequence
  Synthetic oligonucleotide
aacgagcatgaatcacaggaagttaaaaga

SEQ ID NO: 147551 - DNA, 30 bp, Artificial Sequence
  Synthetic oligonucleotide
gggctcacgatcctgggcaagaaacaaaga

SEQ ID NO: 147552 - DNA, 30 bp, Artificial Sequence
  Synthetic oligonucleotide
agaattataagtcttgcgaaccgacaaaga

SEQ ID NO: 147553 - DNA, 30 bp, Artificial Sequence
  Synthetic oligonucleotide
ggatcccaaatcgggaggcaatgacaaaga

SEQ ID NO: 147554 - DNA, 30 bp, Artificial Sequence
  Synthetic oligonucleotide
ccgtctccaggtaggtcaagcatgcaaaga

SEQ ID NO: 147555 - DNA, 30 bp, Artificial Sequence
  Synthetic oligonucleotide
atgcgcaggacgggccatcgatgtcaaaga

SEQ ID NO: 147556 - DNA, 30 bp, Artificial Sequence
  Synthetic oligonucleotide
ggcgggaagcgtcatgcaacggcagaaaga

SEQ ID NO: 147557 - DNA, 30 bp, Artificial Sequence
  Synthetic oligonucleotide
gacctcaacgggaaggtttggatggaaaga

SEQ ID NO: 147558 - DNA, 30 bp, Artificial Sequence
  Synthetic oligonucleotide
gatctacctcgggagaagtccagataaaga

SEQ ID NO: 147559 - DNA, 30 bp, Artificial Sequence
  Synthetic oligonucleotide
tgaccggaataagctttaagcgcttaaaga

SEQ ID NO: 147560 - DNA, 30 bp, Artificial Sequence
  Synthetic oligonucleotide
agagaaggtacaaaacgtctcatttaaaga

SEQ ID NO: 147561 - DNA, 30 bp, Artificial Sequence
  Synthetic oligonucleotide
agacatacggtgtatctacgctaaacaaga

SEQ ID NO: 147562 - DNA, 30 bp, Artificial Sequence
  Synthetic oligonucleotide
tgagtaaccttggcaactcatgtaacaaga

SEQ ID NO: 147563 - DNA, 30 bp, Artificial Sequence
  Synthetic oligonucleotide
gaccgggttgttcggtcagttaagacaaga

SEQ ID NO: 147564 - DNA, 30 bp, Artificial Sequence
  Synthetic oligonucleotide
tacgcctagaggccagccggtagtacaaga

SEQ ID NO: 147565 - DNA, 31 bp, Artificial Sequence
  Synthetic oligonucleotide
ctagtttttgtgcaaatggacgggtacaaga

SEQ ID NO: 147566 - DNA, 29 bp, Artificial Sequence
  Synthetic oligonucleotide
tttgctacccactacatgcctaaccaaga

SEQ ID NO: 147567 - DNA, 30 bp, Artificial Sequence
  Synthetic oligonucleotide
ttcgatgcataatgcttcggcagcccaaga

SEQ ID NO: 147568 - DNA, 30 bp, Artificial Sequence
  Synthetic oligonucleotide
gagtctcaggagcgggagccacctccaaga

SEQ ID NO: 147569 - DNA, 31 bp, Artificial Sequence
  Synthetic oligonucleotide
atctatcccttcgcatacgggaagagcaaga

SEQ ID NO: 147570 - DNA, 30 bp, Artificial Sequence
  Synthetic oligonucleotide
caggggcattaacggaccttaagagcaaga

SEQ ID NO: 147571 - DNA, 30 bp, Artificial Sequence
  Synthetic oligonucleotide
attaccaccagttcctataccagggcaaga

SEQ ID NO: 147572 - DNA, 30 bp, Artificial Sequence
  Synthetic oligonucleotide
acagacttggctcccatacctgatgcaaga

SEQ ID NO: 147573 - DNA, 30 bp, Artificial Sequence
  Synthetic oligonucleotide
gtgggattagcataaattgttgtgtcaaga

SEQ ID NO: 147574 - DNA, 30 bp, Artificial Sequence
  Synthetic oligonucleotide
aagtgtcccatcaagaaacggatttcaaga

SEQ ID NO: 147575 - DNA, 30 bp, Artificial Sequence
  Synthetic oligonucleotide
tcacctgtagaacggtaggtgggcagaaga

SEQ ID NO: 147576 - DNA, 30 bp, Artificial Sequence
  Synthetic oligonucleotide
ggaataacggcagagacaggcccgagaaga

SEQ ID NO: 147577 - DNA, 30 bp, Artificial Sequence
  Synthetic oligonucleotide
tcacctggcgtccatattatgtcgagaaga

SEQ ID NO: 147578 - DNA, 30 bp, Artificial Sequence
  Synthetic oligonucleotide
tgcaaagaagtagactctacacaccgaaga

SEQ ID NO: 147579 - DNA, 30 bp, Artificial Sequence
  Synthetic oligonucleotide
ctccaatacatggcgacttattgccgaaga

SEQ ID NO: 147580 - DNA, 30 bp, Artificial Sequence
  Synthetic oligonucleotide
acaggaaaatctaaagcgtataggcgaaga

SEQ ID NO: 147581 - DNA, 30 bp, Artificial Sequence
  Synthetic oligonucleotide
cggttaccgggggttgttctagggcgaaga

SEQ ID NO: 147582 - DNA, 30 bp, Artificial Sequence
  Synthetic oligonucleotide
gcctacgcgtcgttacgaacagttcgaaga

SEQ ID NO: 147583 - DNA, 30 bp, Artificial Sequence
  Synthetic oligonucleotide
aactgcggcgtgtctcaatcaaagggaaga

SEQ ID NO: 147584 - DNA, 30 bp, Artificial Sequence
  Synthetic oligonucleotide
tacggtgttgatagtgtttattcatgaaga

SEQ ID NO: 147585 - DNA, 30 bp, Artificial Sequence
  Synthetic oligonucleotide
cgcacgtcaaataatagcttaatcataaga

SEQ ID NO: 147586 - DNA, 30 bp, Artificial Sequence
  Synthetic oligonucleotide
cctacgcctgaggccgtgttcgcgataaga

SEQ ID NO: 147587 - DNA, 30 bp, Artificial Sequence
  Synthetic oligonucleotide
gattcaaaacagttgctaacggaactaaga

SEQ ID NO: 147588 - DNA, 30 bp, Artificial Sequence
  Synthetic oligonucleotide
gggaacggtatgtaatcataaccactaaga

SEQ ID NO: 147589 - DNA, 30 bp, Artificial Sequence
  Synthetic oligonucleotide
tccgaagtaaatgtaaatgcggcactaaga

SEQ ID NO: 147590 - DNA, 30 bp, Artificial Sequence
  Synthetic oligonucleotide
tcggctgacctgcgtcactggggactaaga

SEQ ID NO: 147591 - DNA, 30 bp, Artificial Sequence
  Synthetic oligonucleotide
gatcgaggcgtatacaacctaatactaaga

SEQ ID NO: 147592 - DNA, 30 bp, Artificial Sequence
  Synthetic oligonucleotide
cgtggaacatggagtcaccctgagctaaga

SEQ ID NO: 147593 - DNA, 30 bp, Artificial Sequence
  Synthetic oligonucleotide
gcgccgacgattccatccggacctctaaga

SEQ ID NO: 147594 - DNA, 30 bp, Artificial Sequence
  Synthetic oligonucleotide
ggaaaatatagtgattctctagaagtaaga

SEQ ID NO: 147595 - DNA, 30 bp, Artificial Sequence
  Synthetic oligonucleotide
ttgctggtacgtgcaagggaggatgtaaga

SEQ ID NO: 147596 - DNA, 30 bp, Artificial Sequence
  Synthetic oligonucleotide
ctaggacactacgcctggcaaactgtaaga

SEQ ID NO: 147597 - DNA, 30 bp, Artificial Sequence
  Synthetic oligonucleotide
tgatagtcaatgattggactaagtgtaaga

SEQ ID NO: 147598 - DNA, 30 bp, Artificial Sequence
  Synthetic oligonucleotide
gaagtttggataaaagggtacagtgtaaga

SEQ ID NO: 147599 - DNA, 30 bp, Artificial Sequence
  Synthetic oligonucleotide
gcagggatctcaagaaggtcggtgttaaga

SEQ ID NO: 147600 - DNA, 30 bp, Artificial Sequence
  Synthetic oligonucleotide
aacctcaaactctgtggtccacgtttaaga

SEQ ID NO: 147601 - DNA, 30 bp, Artificial Sequence
  Synthetic oligonucleotide
ccaaggatcaacaattccttatttttaaga

SEQ ID NO: 147602 - DNA, 30 bp, Artificial Sequence
  Synthetic oligonucleotide
gatccgaccgaagcaaggttggcgaacaga

SEQ ID NO: 147603 - DNA, 30 bp, Artificial Sequence
  Synthetic oligonucleotide
catcggtgaggttaaactacctggaacaga

SEQ ID NO: 147604 - DNA, 30 bp, Artificial Sequence
  Synthetic oligonucleotide
cgcgtccaccttacaaccgtccctaacaga

SEQ ID NO: 147605 - DNA, 30 bp, Artificial Sequence
  Synthetic oligonucleotide
ggattgccctatcttctgtcccttaacaga

SEQ ID NO: 147606 - DNA, 30 bp, Artificial Sequence
  Synthetic oligonucleotide
taacacagtgcacccgggcaatcacacaga

SEQ ID NO: 147607 - DNA, 30 bp, Artificial Sequence
  Synthetic oligonucleotide
ctgtcacactcatacaccctgtcacacaga

SEQ ID NO: 147608 - DNA, 30 bp, Artificial Sequence
  Synthetic oligonucleotide
tttaagtcactaccggtagcgagccacaga

SEQ ID NO: 147609 - DNA, 30 bp, Artificial Sequence
  Synthetic oligonucleotide
cgtattcagccctctgcgcggcggcacaga

SEQ ID NO: 147610 - DNA, 30 bp, Artificial Sequence
  Synthetic oligonucleotide
tccgataagagacttgtctttttgcacaga

SEQ ID NO: 147611 - DNA, 30 bp, Artificial Sequence
  Synthetic oligonucleotide
gggaaacagggagaattcgctggtcacaga

SEQ ID NO: 147612 - DNA, 30 bp, Artificial Sequence
  Synthetic oligonucleotide
acaagctgaattctggggtattgtcacaga

SEQ ID NO: 147613 - DNA, 30 bp, Artificial Sequence
  Synthetic oligonucleotide
atataccaggaaacctgggagatagacaga

SEQ ID NO: 147614 - DNA, 30 bp, Artificial Sequence
  Synthetic oligonucleotide
tcaaatgtaacgggcgttcctgccgacaga

SEQ ID NO: 147615 - DNA, 30 bp, Artificial Sequence
  Synthetic oligonucleotide
gactggctcggttataaagggaaggacaga

SEQ ID NO: 147616 - DNA, 30 bp, Artificial Sequence
  Synthetic oligonucleotide
gtattaccgcaggtgatggaagaggacaga

SEQ ID NO: 147617 - DNA, 30 bp, Artificial Sequence
  Synthetic oligonucleotide
ggagtgttagtataacatacgcctgacaga

SEQ ID NO: 147618 - DNA, 30 bp, Artificial Sequence
  Synthetic oligonucleotide
ccattctgcgagctatagcctcctgacaga

SEQ ID NO: 147619 - DNA, 30 bp, Artificial Sequence
  Synthetic oligonucleotide
taagcgagtttgttagcagtagcgtacaga

SEQ ID NO: 147620 - DNA, 30 bp, Artificial Sequence
  Synthetic oligonucleotide
gttgatggatacaagcacgatgcgtacaga

SEQ ID NO: 147621 - DNA, 30 bp, Artificial Sequence
  Synthetic oligonucleotide
actgcgacccttctagtaagctcttacaga

SEQ ID NO: 147622 - DNA, 30 bp, Artificial Sequence
  Synthetic oligonucleotide
atttagctcggatagttgaagtaaaccaga

SEQ ID NO: 147623 - DNA, 30 bp, Artificial Sequence
  Synthetic oligonucleotide
gctggatcacgccgcgttaagtaaaccaga

SEQ ID NO: 147624 - DNA, 30 bp, Artificial Sequence
  Synthetic oligonucleotide
aatgcgtcatcagctttcgctataaccaga

SEQ ID NO: 147625 - DNA, 30 bp, Artificial Sequence
  Synthetic oligonucleotide
ctgcagtcaagcatagtaaccttaaccaga

SEQ ID NO: 147626 - DNA, 30 bp, Artificial Sequence
  Synthetic oligonucleotide
tgaattaggtgacaagcggagctgaccaga

SEQ ID NO: 147627 - DNA, 30 bp, Artificial Sequence
  Synthetic oligonucleotide
acacaccacgtccggacatggttgaccaga

SEQ ID NO: 147628 - DNA, 30 bp, Artificial Sequence
  Synthetic oligonucleotide
agtaacttttgcttgtgacgaggtaccaga

SEQ ID NO: 147629 - DNA, 30 bp, Artificial Sequence
  Synthetic oligonucleotide
ggccacccccccgtacacgattcacccaga

SEQ ID NO: 147630 - DNA, 30 bp, Artificial Sequence
  Synthetic oligonucleotide
gcgggaggcttcaccaatgtgacccccaga

SEQ ID NO: 147631 - DNA, 30 bp, Artificial Sequence
  Synthetic oligonucleotide
ctcttaacgtttggagggcaagtgcccaga

SEQ ID NO: 147632 - DNA, 29 bp, Artificial Sequence
  Synthetic oligonucleotide
ctggagaacaacatggtagttgtcccaga

SEQ ID NO: 147633 - DNA, 30 bp, Artificial Sequence
  Synthetic oligonucleotide
ctggtaatcccatgaggttcacgagccaga

SEQ ID NO: 147634 - DNA, 30 bp, Artificial Sequence
  Synthetic oligonucleotide
tcctcctacactttcaggaccttcgccaga

SEQ ID NO: 147635 - DNA, 30 bp, Artificial Sequence
  Synthetic oligonucleotide
tgcgcgttcagatccaggggcgaggccaga

SEQ ID NO: 147636 - DNA, 30 bp, Artificial Sequence
  Synthetic oligonucleotide
tgggaaaacattggaccttgaaattccaga

SEQ ID NO: 147637 - DNA, 30 bp, Artificial Sequence
  Synthetic oligonucleotide
ccaatggcctttgagggcgtacagagcaga

SEQ ID NO: 147638 - DNA, 30 bp, Artificial Sequence
  Synthetic oligonucleotide
tgttagcccgagcggtcccacgttagcaga

SEQ ID NO: 147639 - DNA, 30 bp, Artificial Sequence
  Synthetic oligonucleotide
gcgcaaaatttaccggacaggacaggcaga

SEQ ID NO: 147640 - DNA, 30 bp, Artificial Sequence
  Synthetic oligonucleotide
agaacttctttgtatctgtgaccaggcaga

SEQ ID NO: 147641 - DNA, 30 bp, Artificial Sequence
  Synthetic oligonucleotide
ggcacccgtgtcaactgtagaggaggcaga

SEQ ID NO: 147642 - DNA, 30 bp, Artificial Sequence
  Synthetic oligonucleotide
tgatcaggtggttacacatctttaggcaga

SEQ ID NO: 147643 - DNA, 30 bp, Artificial Sequence
  Synthetic oligonucleotide
gtcggctgttaagatgaccactagggcaga

SEQ ID NO: 147644 - DNA, 30 bp, Artificial Sequence
  Synthetic oligonucleotide
gcacggcatttagacggttatcttggcaga

SEQ ID NO: 147645 - DNA, 30 bp, Artificial Sequence
  Synthetic oligonucleotide
tagcggcttcaatcgtgcggtatgtgcaga

SEQ ID NO: 147646 - DNA, 30 bp, Artificial Sequence
  Synthetic oligonucleotide
agtacgagacgccacgggaattcaatcaga

SEQ ID NO: 147647 - DNA, 30 bp, Artificial Sequence
  Synthetic oligonucleotide
aacgtacgaagagtgacgttacgaatcaga

SEQ ID NO: 147648 - DNA, 30 bp, Artificial Sequence
  Synthetic oligonucleotide
acagggaagcgacttttgtcattaatcaga

SEQ ID NO: 147649 - DNA, 30 bp, Artificial Sequence
  Synthetic oligonucleotide
tagagacgaatttaggtcgtgttaatcaga

SEQ ID NO: 147650 - DNA, 30 bp, Artificial Sequence
  Synthetic oligonucleotide
tatggctgtcctacttctcagcacatcaga

SEQ ID NO: 147651 - DNA, 30 bp, Artificial Sequence
  Synthetic oligonucleotide
ctactataatacatgtgaaatcccatcaga

SEQ ID NO: 147652 - DNA, 30 bp, Artificial Sequence
  Synthetic oligonucleotide
atttgttgcacaaggtccacctaactcaga

SEQ ID NO: 147653 - DNA, 30 bp, Artificial Sequence
  Synthetic oligonucleotide
ccgggaaaagccgactcctattgactcaga

SEQ ID NO: 147654 - DNA, 30 bp, Artificial Sequence
  Synthetic oligonucleotide
ggctatgttatatatatgatatacctcaga

SEQ ID NO: 147655 - DNA, 30 bp, Artificial Sequence
  Synthetic oligonucleotide
atagaaactcatcaattatacgtgctcaga

SEQ ID NO: 147656 - DNA, 30 bp, Artificial Sequence
  Synthetic oligonucleotide
tgccattgcggaatagaccttgttctcaga

SEQ ID NO: 147657 - DNA, 30 bp, Artificial Sequence
  Synthetic oligonucleotide
attgcagagcaacggcatcgcccagtcaga

SEQ ID NO: 147658 - DNA, 30 bp, Artificial Sequence
  Synthetic oligonucleotide
gtggccggaagtcttccatgtcacgtcaga

SEQ ID NO: 147659 - DNA, 30 bp, Artificial Sequence
  Synthetic oligonucleotide
gaggggacagtgcacgatcgaaccgtcaga

SEQ ID NO: 147660 - DNA, 30 bp, Artificial Sequence
  Synthetic oligonucleotide
attggacgtcattaggcaactcgcgtcaga

SEQ ID NO: 147661 - DNA, 30 bp, Artificial Sequence
  Synthetic oligonucleotide
acgtcttagtatcaacgaaatagtgtcaga

SEQ ID NO: 147662 - DNA, 30 bp, Artificial Sequence
  Synthetic oligonucleotide
atcaatccggatcagtggcaagaattcaga

SEQ ID NO: 147663 - DNA, 30 bp, Artificial Sequence
  Synthetic oligonucleotide
gaatagccgtacgaatcacaccccttcaga

SEQ ID NO: 147664 - DNA, 30 bp, Artificial Sequence
  Synthetic oligonucleotide
cagggcatcttcattggccttccgttcaga

SEQ ID NO: 147665 - DNA, 30 bp, Artificial Sequence
  Synthetic oligonucleotide
gtcgacgcagaacagctaggcaaaaagaga

SEQ ID NO: 147666 - DNA, 30 bp, Artificial Sequence
  Synthetic oligonucleotide
ccccctgtaccaccacagcaatgcaagaga

SEQ ID NO: 147667 - DNA, 30 bp, Artificial Sequence
  Synthetic oligonucleotide
gctacgaatttgtggctgacatggaagaga

SEQ ID NO: 147668 - DNA, 30 bp, Artificial Sequence
  Synthetic oligonucleotide
agactgtgtttacactacacgagtaagaga

SEQ ID NO: 147669 - DNA, 30 bp, Artificial Sequence
  Synthetic oligonucleotide
ccatcacgaataggactaactagtaagaga

SEQ ID NO: 147670 - DNA, 31 bp, Artificial Sequence
  Synthetic oligonucleotide
acagctagatcctacccgtatgaaacagaga

SEQ ID NO: 147671 - DNA, 30 bp, Artificial Sequence
  Synthetic oligonucleotide
gtcatgcagtttgaagtatgacaacagaga

SEQ ID NO: 147672 - DNA, 30 bp, Artificial Sequence
  Synthetic oligonucleotide
agatgaatttgaaagtgtaaggcacagaga

SEQ ID NO: 147673 - DNA, 29 bp, Artificial Sequence
  Synthetic oligonucleotide
tctcacaattcagcggactattacagaga

SEQ ID NO: 147674 - DNA, 30 bp, Artificial Sequence
  Synthetic oligonucleotide
aaagcaacccaacgaataaataatcagaga

SEQ ID NO: 147675 - DNA, 30 bp, Artificial Sequence
  Synthetic oligonucleotide
catggatcggcaagaggccagggtcagaga

SEQ ID NO: 147676 - DNA, 30 bp, Artificial Sequence
  Synthetic oligonucleotide
ctggagggtagcatcaaagattaggagaga

SEQ ID NO: 147677 - DNA, 30 bp, Artificial Sequence
  Synthetic oligonucleotide
gctgcgattgtggatcgatgagtggagaga

SEQ ID NO: 147678 - DNA, 30 bp, Artificial Sequence
  Synthetic oligonucleotide
cgacgagtggatgcgttgtaatttgagaga

SEQ ID NO: 147679 - DNA, 30 bp, Artificial Sequence
  Synthetic oligonucleotide
ctacggcccgcgcaagtaaaaatatagaga

SEQ ID NO: 147680 - DNA, 30 bp, Artificial Sequence
  Synthetic oligonucleotide
gctatggtatgagcaactaaactatagaga

SEQ ID NO: 147681 - DNA, 30 bp, Artificial Sequence
  Synthetic oligonucleotide
ctaggcatacgttgattgtgttcctagaga

SEQ ID NO: 147682 - DNA, 30 bp, Artificial Sequence
  Synthetic oligonucleotide
gtgaaatagcgtaccgttttgggctagaga

SEQ ID NO: 147683 - DNA, 30 bp, Artificial Sequence
  Synthetic oligonucleotide
gcgacggctacgccctgggtgtagtagaga

SEQ ID NO: 147684 - DNA, 30 bp, Artificial Sequence
  Synthetic oligonucleotide
atagtaaataggataacggatttttagaga

SEQ ID NO: 147685 - DNA, 30 bp, Artificial Sequence
  Synthetic oligonucleotide
caggcatatatgtatctactctaaacgaga

SEQ ID NO: 147686 - DNA, 30 bp, Artificial Sequence
  Synthetic oligonucleotide
ggcgccacagttggcctaagtgctacgaga

SEQ ID NO: 147687 - DNA, 30 bp, Artificial Sequence
  Synthetic oligonucleotide
cgagtagatgcacgtcccgataaaccgaga

SEQ ID NO: 147688 - DNA, 30 bp, Artificial Sequence
  Synthetic oligonucleotide
gccaaccgtgatcaactacaaaacccgaga

SEQ ID NO: 147689 - DNA, 30 bp, Artificial Sequence
  Synthetic oligonucleotide
gcgtctgggcctatcgttcactccccgaga

SEQ ID NO: 147690 - DNA, 30 bp, Artificial Sequence
  Synthetic oligonucleotide
tatcaacaagggatagccgattgcccgaga

SEQ ID NO: 147691 - DNA, 30 bp, Artificial Sequence
  Synthetic oligonucleotide
ctaacagtcataatcccaacatttccgaga

SEQ ID NO: 147692 - DNA, 30 bp, Artificial Sequence
  Synthetic oligonucleotide
aagatgaataaccgataggagactgcgaga

SEQ ID NO: 147693 - DNA, 30 bp, Artificial Sequence
  Synthetic oligonucleotide
accttgatgtctgtcgcgtacggtgcgaga

SEQ ID NO: 147694 - DNA, 30 bp, Artificial Sequence
  Synthetic oligonucleotide
tggatggctctggctctgtgaccatcgaga

SEQ ID NO: 147695 - DNA, 30 bp, Artificial Sequence
  Synthetic oligonucleotide
ttgaggtcaggcgcctacgcgagctcgaga

SEQ ID NO: 147696 - DNA, 30 bp, Artificial Sequence
  Synthetic oligonucleotide
agttccagaaccgagaagtgctacaggaga

SEQ ID NO: 147697 - DNA, 30 bp, Artificial Sequence
  Synthetic oligonucleotide
gaatggtgtgccttctgcagatcgaggaga

SEQ ID NO: 147698 - DNA, 30 bp, Artificial Sequence
  Synthetic oligonucleotide
agactacgccacgcttagaatggtaggaga

SEQ ID NO: 147699 - DNA, 30 bp, Artificial Sequence
  Synthetic oligonucleotide
atcaatagcacccactatgttcaacggaga

SEQ ID NO: 147700 - DNA, 30 bp, Artificial Sequence
  Synthetic oligonucleotide
acacgcaggacggcaatgcagacgcggaga

SEQ ID NO: 147701 - DNA, 29 bp, Artificial Sequence
  Synthetic oligonucleotide
gtcgctgttaaatatatccttaagggaga

SEQ ID NO: 147702 - DNA, 30 bp, Artificial Sequence
  Synthetic oligonucleotide
atggcacacgcgcttgattctgcagggaga

SEQ ID NO: 147703 - DNA, 30 bp, Artificial Sequence
  Synthetic oligonucleotide
catcgtatccaaaagactatgggagggaga

SEQ ID NO: 147704 - DNA, 30 bp, Artificial Sequence
  Synthetic oligonucleotide
tcttcgggtctcgaccaagttatcgggaga

SEQ ID NO: 147705 - DNA, 30 bp, Artificial Sequence
  Synthetic oligonucleotide
gggtccgtagtctaaggtggagatgggaga

SEQ ID NO: 147706 - DNA, 30 bp, Artificial Sequence
  Synthetic oligonucleotide
atgcagaaaaccatacgatttactgggaga

SEQ ID NO: 147707 - DNA, 30 bp, Artificial Sequence
  Synthetic oligonucleotide
gattaaccacaggccagtgtaagatggaga

SEQ ID NO: 147708 - DNA, 30 bp, Artificial Sequence
  Synthetic oligonucleotide
ctcggccggaaccatgcgcggtactggaga

SEQ ID NO: 147709 - DNA, 30 bp, Artificial Sequence
  Synthetic oligonucleotide
aaaggtctagtaatcccgttttcgtggaga

SEQ ID NO: 147710 - DNA, 30 bp, Artificial Sequence
  Synthetic oligonucleotide
tcttgaaatcaaatctctgccatttggaga

SEQ ID NO: 147711 - DNA, 30 bp, Artificial Sequence
  Synthetic oligonucleotide
gcgaattcaacaagctggaaccacatgaga

SEQ ID NO: 147712 - DNA, 30 bp, Artificial Sequence
  Synthetic oligonucleotide
aacagtacacttaactagttagccatgaga

SEQ ID NO: 147713 - DNA, 30 bp, Artificial Sequence
  Synthetic oligonucleotide
ttaccagccgcggcaggatgggagatgaga

SEQ ID NO: 147714 - DNA, 30 bp, Artificial Sequence
  Synthetic oligonucleotide
tacactaaacaccggctaggcctgatgaga

SEQ ID NO: 147715 - DNA, 26 bp, Artificial Sequence
  Synthetic oligonucleotide
ggaggttaactgtgtgttttatgaga

SEQ ID NO: 147716 - DNA, 30 bp, Artificial Sequence
  Synthetic oligonucleotide
tgataactcggtcgtgaatatattctgaga

SEQ ID NO: 147717 - DNA, 30 bp, Artificial Sequence
  Synthetic oligonucleotide
gatgctatgcggaatgccagccccgtgaga

SEQ ID NO: 147718 - DNA, 30 bp, Artificial Sequence
  Synthetic oligonucleotide
tgccattatgagaaacggctacgcgtgaga

SEQ ID NO: 147719 - DNA, 30 bp, Artificial Sequence
  Synthetic oligonucleotide
agtggttagagtttgttaaggcaggtgaga

SEQ ID NO: 147720 - DNA, 30 bp, Artificial Sequence
  Synthetic oligonucleotide
gtcaggccgtaggtctgaatcgcattgaga

SEQ ID NO: 147721 - DNA, 30 bp, Artificial Sequence
  Synthetic oligonucleotide
agatggatcactgacaaatttgcattgaga

SEQ ID NO: 147722 - DNA, 30 bp, Artificial Sequence
  Synthetic oligonucleotide
agacgatggaaaacttcccctagattgaga

SEQ ID NO: 147723 - DNA, 30 bp, Artificial Sequence
  Synthetic oligonucleotide
tgaaggtaatgtttcgaccttcgattgaga

SEQ ID NO: 147724 - DNA, 30 bp, Artificial Sequence
  Synthetic oligonucleotide
ggcaattatcggcgccgatgtaccttgaga

SEQ ID NO: 147725 - DNA, 30 bp, Artificial Sequence
  Synthetic oligonucleotide
gtcgaagcctccaggcctgtaaaaaataga

SEQ ID NO: 147726 - DNA, 30 bp, Artificial Sequence
  Synthetic oligonucleotide
ggagatagagtgcattcctaacaaaataga

SEQ ID NO: 147727 - DNA, 30 bp, Artificial Sequence
  Synthetic oligonucleotide
gagtgttgaaggttatgtaagggaaataga

SEQ ID NO: 147728 - DNA, 30 bp, Artificial Sequence
  Synthetic oligonucleotide
tagaactaatggaaaaggcaatccaataga

SEQ ID NO: 147729 - DNA, 30 bp, Artificial Sequence
  Synthetic oligonucleotide
ttattacctcacggccaaccaggcaataga

SEQ ID NO: 147730 - DNA, 30 bp, Artificial Sequence
  Synthetic oligonucleotide
agccgtcatcctggaagcgaatcacataga

SEQ ID NO: 147731 - DNA, 30 bp, Artificial Sequence
  Synthetic oligonucleotide
agaacaactagttagttaattggacataga

SEQ ID NO: 147732 - DNA, 30 bp, Artificial Sequence
  Synthetic oligonucleotide
ggtaaagccctcaaacaagagatacataga

SEQ ID NO: 147733 - DNA, 30 bp, Artificial Sequence
  Synthetic oligonucleotide
ttcagaactgagcctttacatatacataga

SEQ ID NO: 147734 - DNA, 30 bp, Artificial Sequence
  Synthetic oligonucleotide
gctatgctaatgggaatctcagaagataga

SEQ ID NO: 147735 - DNA, 30 bp, Artificial Sequence
  Synthetic oligonucleotide
cgtgaccgcagggtactgtaaccagataga

SEQ ID NO: 147736 - DNA, 30 bp, Artificial Sequence
  Synthetic oligonucleotide
gagttaagagttggctgccaataatataga

SEQ ID NO: 147737 - DNA, 30 bp, Artificial Sequence
  Synthetic oligonucleotide
ccggctcaggaatttacaggctcatataga

SEQ ID NO: 147738 - DNA, 30 bp, Artificial Sequence
  Synthetic oligonucleotide
agaatgtctgtgcgtgcttcaggatataga

SEQ ID NO: 147739 - DNA, 30 bp, Artificial Sequence
  Synthetic oligonucleotide
ggtaaggatacatactgtcgaggctataga

SEQ ID NO: 147740 - DNA, 30 bp, Artificial Sequence
  Synthetic oligonucleotide
tccttcgattgaggttttgcgtgctataga

SEQ ID NO: 147741 - DNA, 30 bp, Artificial Sequence
  Synthetic oligonucleotide
cgtggattaggcacctcgtccagaactaga

SEQ ID NO: 147742 - DNA, 30 bp, Artificial Sequence
  Synthetic oligonucleotide
tagcctcgaaacgatattccaataactaga

SEQ ID NO: 147743 - DNA, 30 bp, Artificial Sequence
  Synthetic oligonucleotide
gatcaaatagtagaacttctaaagactaga

SEQ ID NO: 147744 - DNA, 30 bp, Artificial Sequence
  Synthetic oligonucleotide
ctggagcttgtcgcatgacatcagactaga

SEQ ID NO: 147745 - DNA, 30 bp, Artificial Sequence
  Synthetic oligonucleotide
ggtaagacctgcgcttagaacacgactaga

SEQ ID NO: 147746 - DNA, 30 bp, Artificial Sequence
  Synthetic oligonucleotide
cagagtataaatccttgaagacatactaga

SEQ ID NO: 147747 - DNA, 30 bp, Artificial Sequence
  Synthetic oligonucleotide
gttgaaacagggaaagagttccgacctaga

SEQ ID NO: 147748 - DNA, 30 bp, Artificial Sequence
  Synthetic oligonucleotide
aggcttgcaccggctaccgatgagcctaga

SEQ ID NO: 147749 - DNA, 30 bp, Artificial Sequence
  Synthetic oligonucleotide
tgacatggaccgattaacgttcggcctaga

SEQ ID NO: 147750 - DNA, 30 bp, Artificial Sequence
  Synthetic oligonucleotide
ttaagggttctatggaaattacaggctaga

SEQ ID NO: 147751 - DNA, 30 bp, Artificial Sequence
  Synthetic oligonucleotide
tgacactttttccagcgtaacatatctaga

SEQ ID NO: 147752 - DNA, 30 bp, Artificial Sequence
  Synthetic oligonucleotide
taatcaatgttaccgagaaattggtctaga

SEQ ID NO: 147753 - DNA, 30 bp, Artificial Sequence
  Synthetic oligonucleotide
tcggaacgggttcacacagacattagtaga

SEQ ID NO: 147754 - DNA, 30 bp, Artificial Sequence
  Synthetic oligonucleotide
gtagcgtaatcattcgctggcgttagtaga

SEQ ID NO: 147755 - DNA, 30 bp, Artificial Sequence
  Synthetic oligonucleotide
tggacggagattcaatgggccaaccgtaga

SEQ ID NO: 147756 - DNA, 30 bp, Artificial Sequence
  Synthetic oligonucleotide
ggataaaaacgcgcgtcgcggtaccgtaga

SEQ ID NO: 147757 - DNA, 30 bp, Artificial Sequence
  Synthetic oligonucleotide
gtccgatcgtatgggtggagcaagggtaga

SEQ ID NO: 147758 - DNA, 30 bp, Artificial Sequence
  Synthetic oligonucleotide
gtgacttgcgatgcaagcctgtcgggtaga

SEQ ID NO: 147759 - DNA, 30 bp, Artificial Sequence
  Synthetic oligonucleotide
ctattcaacccttggtcacgtttgggtaga

SEQ ID NO: 147760 - DNA, 30 bp, Artificial Sequence
  Synthetic oligonucleotide
tgctatattacatcccgagagacctgtaga

SEQ ID NO: 147761 - DNA, 30 bp, Artificial Sequence
  Synthetic oligonucleotide
ctgaaacccaggcgggaaaagagctgtaga

SEQ ID NO: 147762 - DNA, 30 bp, Artificial Sequence
  Synthetic oligonucleotide
actgtaccaacggaaaaccacatctgtaga

SEQ ID NO: 147763 - DNA, 30 bp, Artificial Sequence
  Synthetic oligonucleotide
ctagataatcccggagatgggttctgtaga

SEQ ID NO: 147764 - DNA, 30 bp, Artificial Sequence
  Synthetic oligonucleotide
ttgcaaaatgcatcgaaggcactaattaga

SEQ ID NO: 147765 - DNA, 30 bp, Artificial Sequence
  Synthetic oligonucleotide
ctgatcatacttggtgcggtgcacattaga

SEQ ID NO: 147766 - DNA, 30 bp, Artificial Sequence
  Synthetic oligonucleotide
ccataaaggttacgggacgaatagattaga

SEQ ID NO: 147767 - DNA, 30 bp, Artificial Sequence
  Synthetic oligonucleotide
ccatacactacgacagtagcatagattaga

SEQ ID NO: 147768 - DNA, 30 bp, Artificial Sequence
  Synthetic oligonucleotide
aagggcaagtagggaaagaggtatattaga

SEQ ID NO: 147769 - DNA, 30 bp, Artificial Sequence
  Synthetic oligonucleotide
taaacgaactgccttggggaagaccttaga

SEQ ID NO: 147770 - DNA, 30 bp, Artificial Sequence
  Synthetic oligonucleotide
tcttcgacatgtaatattgcgattcttaga

SEQ ID NO: 147771 - DNA, 30 bp, Artificial Sequence
  Synthetic oligonucleotide
gcgcatggggaaaagcgctgcgcagttaga

SEQ ID NO: 147772 - DNA, 30 bp, Artificial Sequence
  Synthetic oligonucleotide
aaagaggatataggggcgtggcatgttaga

SEQ ID NO: 147773 - DNA, 30 bp, Artificial Sequence
  Synthetic oligonucleotide
acggtcgctaggccggaaagatctgttaga

SEQ ID NO: 147774 - DNA, 30 bp, Artificial Sequence
  Synthetic oligonucleotide
agtcgccggtaaataatgagatagaaacga

SEQ ID NO: 147775 - DNA, 30 bp, Artificial Sequence
  Synthetic oligonucleotide
gagcaagcgcacctccaagagattaaacga

SEQ ID NO: 147776 - DNA, 30 bp, Artificial Sequence
  Synthetic oligonucleotide
tagaagatgcttttttagaaaggcgaacga

SEQ ID NO: 147777 - DNA, 30 bp, Artificial Sequence
  Synthetic oligonucleotide
acagcatgagggccgtggaggtgataacga

SEQ ID NO: 147778 - DNA, 30 bp, Artificial Sequence
  Synthetic oligonucleotide
catcgacacgccgagatatggtgctaacga

SEQ ID NO: 147779 - DNA, 30 bp, Artificial Sequence
  Synthetic oligonucleotide
tccgggcgaaaacagtctccacagtaacga

SEQ ID NO: 147780 - DNA, 30 bp, Artificial Sequence
  Synthetic oligonucleotide
gcctatgagcaaaggtaggttgcgtaacga

SEQ ID NO: 147781 - DNA, 30 bp, Artificial Sequence
  Synthetic oligonucleotide
ggcgtaaattataacagcggagtttaacga

SEQ ID NO: 147782 - DNA, 30 bp, Artificial Sequence
  Synthetic oligonucleotide
cgatagcgacagtggggcctaggcacacga

SEQ ID NO: 147783 - DNA, 30 bp, Artificial Sequence
  Synthetic oligonucleotide
tcaccggtttgagaatgatcaaagacacga

SEQ ID NO: 147784 - DNA, 30 bp, Artificial Sequence
  Synthetic oligonucleotide
gcggcactaatttgcgggtagcggacacga

SEQ ID NO: 147785 - DNA, 30 bp, Artificial Sequence
  Synthetic oligonucleotide
gcactagttgccgttgcaggggcgccacga

SEQ ID NO: 147786 - DNA, 30 bp, Artificial Sequence
  Synthetic oligonucleotide
ctgggcttagatacaaccccaaatccacga

SEQ ID NO: 147787 - DNA, 30 bp, Artificial Sequence
  Synthetic oligonucleotide
agatcgaattttcagtcgaccaatccacga

SEQ ID NO: 147788 - DNA, 30 bp, Artificial Sequence
  Synthetic oligonucleotide
tgcacaagcagactcaggggccgtccacga

SEQ ID NO: 147789 - DNA, 30 bp, Artificial Sequence
  Synthetic oligonucleotide
ccgtatttaggggcgttagattttccacga

SEQ ID NO: 147790 - DNA, 30 bp, Artificial Sequence
  Synthetic oligonucleotide
ccttggttacgcaatgggaaacaagcacga

SEQ ID NO: 147791 - DNA, 30 bp, Artificial Sequence
  Synthetic oligonucleotide
ggtatctaactaaataatatccaagcacga

SEQ ID NO: 147792 - DNA, 30 bp, Artificial Sequence
  Synthetic oligonucleotide
taacttgtaaagcggctgatttgagcacga

SEQ ID NO: 147793 - DNA, 30 bp, Artificial Sequence
  Synthetic oligonucleotide
gttcactcaggcgacccaagtgccgcacga

SEQ ID NO: 147794 - DNA, 30 bp, Artificial Sequence
  Synthetic oligonucleotide
ctccgatggatagaagtacatagaagacga

SEQ ID NO: 147795 - DNA, 30 bp, Artificial Sequence
  Synthetic oligonucleotide
gaagcgtaagaggaaataaatccacgacga

SEQ ID NO: 147796 - DNA, 30 bp, Artificial Sequence
  Synthetic oligonucleotide
cggcaggtatttactgttacccgaggacga

SEQ ID NO: 147797 - DNA, 30 bp, Artificial Sequence
  Synthetic oligonucleotide
agactgggagctatagggtctcgaggacga

SEQ ID NO: 147798 - DNA, 30 bp, Artificial Sequence
  Synthetic oligonucleotide
gtcgaacttcgatacgaaactgacggacga

SEQ ID NO: 147799 - DNA, 30 bp, Artificial Sequence
  Synthetic oligonucleotide
tgggccacttaaattcggtctgcgggacga

SEQ ID NO: 147800 - DNA, 30 bp, Artificial Sequence
  Synthetic oligonucleotide
tgagagcgttggcatacgactaggggacga

SEQ ID NO: 147801 - DNA, 30 bp, Artificial Sequence
  Synthetic oligonucleotide
gttgatcgagaaggcctaatgtaaatacga

SEQ ID NO: 147802 - DNA, 30 bp, Artificial Sequence
  Synthetic oligonucleotide
gaggatctttgataactccgcccaatacga

SEQ ID NO: 147803 - DNA, 30 bp, Artificial Sequence
  Synthetic oligonucleotide
tcccatgtgagagatgcgatgagcatacga

SEQ ID NO: 147804 - DNA, 30 bp, Artificial Sequence
  Synthetic oligonucleotide
cgttacgtgatttcctctatatgcatacga

SEQ ID NO: 147805 - DNA, 30 bp, Artificial Sequence
  Synthetic oligonucleotide
caggtcgggtttactcgcgcagtgatacga

SEQ ID NO: 147806 - DNA, 30 bp, Artificial Sequence
  Synthetic oligonucleotide
cggacacatacggtcaagtttcgtatacga

SEQ ID NO: 147807 - DNA, 30 bp, Artificial Sequence
  Synthetic oligonucleotide
acacgcgtttatcctggcgtctttatacga

SEQ ID NO: 147808 - DNA, 30 bp, Artificial Sequence
  Synthetic oligonucleotide
acgcacctgatcatacgcacggaactacga

SEQ ID NO: 147809 - DNA, 30 bp, Artificial Sequence
  Synthetic oligonucleotide
tatcaaccggtggaattataaagcctacga

SEQ ID NO: 147810 - DNA, 30 bp, Artificial Sequence
  Synthetic oligonucleotide
acagaatggtcggggttttgctgtctacga

SEQ ID NO: 147811 - DNA, 30 bp, Artificial Sequence
  Synthetic oligonucleotide
cggaaagaattaagcagtaacgcagtacga

SEQ ID NO: 147812 - DNA, 30 bp, Artificial Sequence
  Synthetic oligonucleotide
taaccctggataaagtaaagcgttgtacga

SEQ ID NO: 147813 - DNA, 30 bp, Artificial Sequence
  Synthetic oligonucleotide
cacgaccacggtatgcgtggctgattacga

SEQ ID NO: 147814 - DNA, 30 bp, Artificial Sequence
  Synthetic oligonucleotide
aacttcgtggaggaagtggtggacttacga

SEQ ID NO: 147815 - DNA, 30 bp, Artificial Sequence
  Synthetic oligonucleotide
cactgccgatagctttggaaggctttacga

SEQ ID NO: 147816 - DNA, 30 bp, Artificial Sequence
  Synthetic oligonucleotide
gacactaactttcctcccatgagaaaccga

SEQ ID NO: 147817 - DNA, 30 bp, Artificial Sequence
  Synthetic oligonucleotide
aggagagcctctagtacgggattaaaccga

SEQ ID NO: 147818 - DNA, 30 bp, Artificial Sequence
  Synthetic oligonucleotide
gcataggcagtggctgcgtgaaccaaccga

SEQ ID NO: 147819 - DNA, 30 bp, Artificial Sequence
  Synthetic oligonucleotide
ggagcgtgtgaaggacttttttgccaccga

SEQ ID NO: 147820 - DNA, 30 bp, Artificial Sequence
  Synthetic oligonucleotide
gtgcgtatccaatagatacggaggcaccga

SEQ ID NO: 147821 - DNA, 30 bp, Artificial Sequence
  Synthetic oligonucleotide
gtcattggagacgtgaacatgaggcaccga

SEQ ID NO: 147822 - DNA, 30 bp, Artificial Sequence
  Synthetic oligonucleotide
gatgatgaattgcactgtaaactgcaccga

SEQ ID NO: 147823 - DNA, 30 bp, Artificial Sequence
  Synthetic oligonucleotide
gcgcctgtctatttagtcagaggtcaccga

SEQ ID NO: 147824 - DNA, 30 bp, Artificial Sequence
  Synthetic oligonucleotide
atgagggccatgcgtcgcacaatagaccga

SEQ ID NO: 147825 - DNA, 30 bp, Artificial Sequence
  Synthetic oligonucleotide
cattaccggtgaaacattctggacgaccga

SEQ ID NO: 147826 - DNA, 30 bp, Artificial Sequence
  Synthetic oligonucleotide
acaagtaagggacatgacatttcgtaccga

SEQ ID NO: 147827 - DNA, 30 bp, Artificial Sequence
  Synthetic oligonucleotide
agttgcataatttcacgcgcggattaccga

SEQ ID NO: 147828 - DNA, 30 bp, Artificial Sequence
  Synthetic oligonucleotide
ctatacaaagtgcaactacatcgttaccga

SEQ ID NO: 147829 - DNA, 30 bp, Artificial Sequence
  Synthetic oligonucleotide
ggcggagactctgattgacacctttaccga

SEQ ID NO: 147830 - DNA, 30 bp, Artificial Sequence
  Synthetic oligonucleotide
gtaactgagcatcttgcaaagggaccccga

SEQ ID NO: 147831 - DNA, 30 bp, Artificial Sequence
  Synthetic oligonucleotide
ttctatgctggaaggacgaaaacggcccga

SEQ ID NO: 147832 - DNA, 30 bp, Artificial Sequence
  Synthetic oligonucleotide
gggagacactatagtaccgggtattcccga

SEQ ID NO: 147833 - DNA, 30 bp, Artificial Sequence
  Synthetic oligonucleotide
taccttaccacgcgtacactagcaagccga

SEQ ID NO: 147834 - DNA, 30 bp, Artificial Sequence
  Synthetic oligonucleotide
cttatcggggtagcccgccgtcagagccga

SEQ ID NO: 147835 - DNA, 30 bp, Artificial Sequence
  Synthetic oligonucleotide
cctttgtaggggtcacgtcaggcgagccga

SEQ ID NO: 147836 - DNA, 30 bp, Artificial Sequence
  Synthetic oligonucleotide
aagattacgagtcgacactgttggagccga

SEQ ID NO: 147837 - DNA, 30 bp, Artificial Sequence
  Synthetic oligonucleotide
tagttcccacatacacgaatattgagccga

SEQ ID NO: 147838 - DNA, 30 bp, Artificial Sequence
  Synthetic oligonucleotide
ggagagggacacgatcccatacttagccga

SEQ ID NO: 147839 - DNA, 30 bp, Artificial Sequence
  Synthetic oligonucleotide
ctccaggacactcgaagcacacaccgccga

SEQ ID NO: 147840 - DNA, 30 bp, Artificial Sequence
  Synthetic oligonucleotide
taacgcaaactacgacgtcgagagcgccga

SEQ ID NO: 147841 - DNA, 30 bp, Artificial Sequence
  Synthetic oligonucleotide
ggggagggtcactacgccggggtgcgccga

SEQ ID NO: 147842 - DNA, 30 bp, Artificial Sequence
  Synthetic oligonucleotide
cgatctattaagatgaacagcatcggccga

SEQ ID NO: 147843 - DNA, 30 bp, Artificial Sequence
  Synthetic oligonucleotide
ctaaaggtaggccgcccgcgagatggccga

SEQ ID NO: 147844 - DNA, 30 bp, Artificial Sequence
  Synthetic oligonucleotide
acatatgcttgaccgtctgaaggctgccga

SEQ ID NO: 147845 - DNA, 30 bp, Artificial Sequence
  Synthetic oligonucleotide
taccgccagcgcgcacagccggattgccga

SEQ ID NO: 147846 - DNA, 30 bp, Artificial Sequence
  Synthetic oligonucleotide
ggtataaacacgcgaccactagaaatccga

SEQ ID NO: 147847 - DNA, 30 bp, Artificial Sequence
  Synthetic oligonucleotide
ttgtgcattcgattatagtgaggcatccga

SEQ ID NO: 147848 - DNA, 31 bp, Artificial Sequence
  Synthetic oligonucleotide
cggggggtgtataggtctcctaacgatccga

SEQ ID NO: 147849 - DNA, 30 bp, Artificial Sequence
  Synthetic oligonucleotide
aaggaggagtagccgaccttggaactccga

SEQ ID NO: 147850 - DNA, 30 bp, Artificial Sequence
  Synthetic oligonucleotide
cgcaatattaaaagtttcctgggtctccga

SEQ ID NO: 147851 - DNA, 30 bp, Artificial Sequence
  Synthetic oligonucleotide
cggagctgagaatccggaaagacggtccga

SEQ ID NO: 147852 - DNA, 30 bp, Artificial Sequence
  Synthetic oligonucleotide
tgcgaatagagaccgatgtaaggggtccga

SEQ ID NO: 147853 - DNA, 30 bp, Artificial Sequence
  Synthetic oligonucleotide
tcatgagatacagatgttgtcagcttccga

SEQ ID NO: 147854 - DNA, 30 bp, Artificial Sequence
  Synthetic oligonucleotide
ggccggggtataccaaatctgttcaagcga

SEQ ID NO: 147855 - DNA, 30 bp, Artificial Sequence
  Synthetic oligonucleotide
caccggggtcaccaaagggtctagaagcga

SEQ ID NO: 147856 - DNA, 30 bp, Artificial Sequence
  Synthetic oligonucleotide
taaagtccttgggcagtccatgggaagcga

SEQ ID NO: 147857 - DNA, 30 bp, Artificial Sequence
  Synthetic oligonucleotide
aaatatggtagccatgaaccgagtaagcga

SEQ ID NO: 147858 - DNA, 30 bp, Artificial Sequence
  Synthetic oligonucleotide
tgcgatgggaatgcgacatataaacagcga

SEQ ID NO: 147859 - DNA, 30 bp, Artificial Sequence
  Synthetic oligonucleotide
ggggcgcgggggctcgtctgacgacagcga

SEQ ID NO: 147860 - DNA, 30 bp, Artificial Sequence
  Synthetic oligonucleotide
gttcgagacagggcaacataacgccagcga

SEQ ID NO: 147861 - DNA, 30 bp, Artificial Sequence
  Synthetic oligonucleotide
catcgtttacaatggactcctggccagcga

SEQ ID NO: 147862 - DNA, 30 bp, Artificial Sequence
  Synthetic oligonucleotide
acgaggcttaaatgacgatgtcagcagcga

SEQ ID NO: 147863 - DNA, 30 bp, Artificial Sequence
  Synthetic oligonucleotide
aagcgcgctctaattcacacctgtcagcga

SEQ ID NO: 147864 - DNA, 30 bp, Artificial Sequence
  Synthetic oligonucleotide
atgattaatatgtccgcccataaagagcga

SEQ ID NO: 147865 - DNA, 30 bp, Artificial Sequence
  Synthetic oligonucleotide
atggatactgtcaagccccaaggagagcga

SEQ ID NO: 147866 - DNA, 30 bp, Artificial Sequence
  Synthetic oligonucleotide
acttggacgagggttatctcgtacgagcga

SEQ ID NO: 147867 - DNA, 30 bp, Artificial Sequence
  Synthetic oligonucleotide
ccgtcgatacgtgcgcaatccgtttagcga

SEQ ID NO: 147868 - DNA, 30 bp, Artificial Sequence
  Synthetic oligonucleotide
cagggcagagccttgacgcaaaaaacgcga

SEQ ID NO: 147869 - DNA, 30 bp, Artificial Sequence
  Synthetic oligonucleotide
cggctaacggccatgacaaagacaacgcga

SEQ ID NO: 147870 - DNA, 30 bp, Artificial Sequence
  Synthetic oligonucleotide
cggacgtattctttgtcatgtggaacgcga

SEQ ID NO: 147871 - DNA, 30 bp, Artificial Sequence
  Synthetic oligonucleotide
gaggcgtaagcacacccacggcaaccgcga

SEQ ID NO: 147872 - DNA, 30 bp, Artificial Sequence
  Synthetic oligonucleotide
actggttaggattcaagatcaagcccgcga

SEQ ID NO: 147873 - DNA, 30 bp, Artificial Sequence
  Synthetic oligonucleotide
gagtagcgagcccgaacacattcagcgcga

SEQ ID NO: 147874 - DNA, 30 bp, Artificial Sequence
  Synthetic oligonucleotide
acgctagtgagcgacgacagggccgcgcga

SEQ ID NO: 147875 - DNA, 30 bp, Artificial Sequence
  Synthetic oligonucleotide
tcgtatacttctggaagaaattatgcgcga

SEQ ID NO: 147876 - DNA, 30 bp, Artificial Sequence
  Synthetic oligonucleotide
ggacctaaaagtccggtattacaatcgcga

SEQ ID NO: 147877 - DNA, 30 bp, Artificial Sequence
  Synthetic oligonucleotide
attacttgaacaggaggataaacgtcgcga

SEQ ID NO: 147878 - DNA, 30 bp, Artificial Sequence
  Synthetic oligonucleotide
tagatcgcctaagattagagggaaaggcga

SEQ ID NO: 147879 - DNA, 30 bp, Artificial Sequence
  Synthetic oligonucleotide
cgtatctgtggtccatctaatgataggcga

SEQ ID NO: 147880 - DNA, 30 bp, Artificial Sequence
  Synthetic oligonucleotide
cggagctcctacacgatctataaacggcga

SEQ ID NO: 147881 - DNA, 30 bp, Artificial Sequence
  Synthetic oligonucleotide
gtacactaagtcgaaagaaacgcgcggcga

SEQ ID NO: 147882 - DNA, 30 bp, Artificial Sequence
  Synthetic oligonucleotide
gaacgctaaactggaagagagtgcgggcga

SEQ ID NO: 147883 - DNA, 30 bp, Artificial Sequence
  Synthetic oligonucleotide
gtactcctctgcggtataaataaggggcga

SEQ ID NO: 147884 - DNA, 30 bp, Artificial Sequence
  Synthetic oligonucleotide
ggcgggatgttccgagggtctagctggcga

SEQ ID NO: 147885 - DNA, 30 bp, Artificial Sequence
  Synthetic oligonucleotide
gggtaaccgttccggataacgctcatgcga

SEQ ID NO: 147886 - DNA, 30 bp, Artificial Sequence
  Synthetic oligonucleotide
gtggagccttaacaagattgtttcatgcga

SEQ ID NO: 147887 - DNA, 30 bp, Artificial Sequence
  Synthetic oligonucleotide
cgcaggaaatgaagcgggggtcaactgcga

SEQ ID NO: 147888 - DNA, 30 bp, Artificial Sequence
  Synthetic oligonucleotide
tgcaaaggaatatgtacaaggggtctgcga

SEQ ID NO: 147889 - DNA, 30 bp, Artificial Sequence
  Synthetic oligonucleotide
cggcctaaacgtactgttttccttctgcga

SEQ ID NO: 147890 - DNA, 30 bp, Artificial Sequence
  Synthetic oligonucleotide
gaagctggtacgaaatttacataggtgcga

SEQ ID NO: 147891 - DNA, 30 bp, Artificial Sequence
  Synthetic oligonucleotide
agactgatagcacaattcttataggtgcga

SEQ ID NO: 147892 - DNA, 30 bp, Artificial Sequence
  Synthetic oligonucleotide
attggagctatacgataaccgcgggtgcga

SEQ ID NO: 147893 - DNA, 30 bp, Artificial Sequence
  Synthetic oligonucleotide
aagaaagggatgcaagcaccgatggtgcga

SEQ ID NO: 147894 - DNA, 30 bp, Artificial Sequence
  Synthetic oligonucleotide
tggcctgggccaagtctaacagctgtgcga

SEQ ID NO: 147895 - DNA, 30 bp, Artificial Sequence
  Synthetic oligonucleotide
ggaataattaggagggtctcgcgtgtgcga

SEQ ID NO: 147896 - DNA, 30 bp, Artificial Sequence
  Synthetic oligonucleotide
cccctgtgggaagtacgagtaattgtgcga

SEQ ID NO: 147897 - DNA, 30 bp, Artificial Sequence
  Synthetic oligonucleotide
attgaacaacatggtgccgcacttgtgcga

SEQ ID NO: 147898 - DNA, 30 bp, Artificial Sequence
  Synthetic oligonucleotide
tgaaccaacgtgggatgccccatattgcga

SEQ ID NO: 147899 - DNA, 30 bp, Artificial Sequence
  Synthetic oligonucleotide
acggggggtgacgcgtggggaaacttgcga

SEQ ID NO: 147900 - DNA, 30 bp, Artificial Sequence
  Synthetic oligonucleotide
ctggcgtagcttgtgagatagcacttgcga

SEQ ID NO: 147901 - DNA, 30 bp, Artificial Sequence
  Synthetic oligonucleotide
cctacaatatgtggggtaaagggtttgcga

SEQ ID NO: 147902 - DNA, 30 bp, Artificial Sequence
  Synthetic oligonucleotide
ctaccaacgacgaaacgcaatgaaaatcga

SEQ ID NO: 147903 - DNA, 30 bp, Artificial Sequence
  Synthetic oligonucleotide
acatgcgtataatcgaaattacagaatcga

SEQ ID NO: 147904 - DNA, 30 bp, Artificial Sequence
  Synthetic oligonucleotide
gaataataatcaaagagttcgggacatcga

SEQ ID NO: 147905 - DNA, 30 bp, Artificial Sequence
  Synthetic oligonucleotide
gcccgggaatgtactggaataaaagatcga

SEQ ID NO: 147906 - DNA, 30 bp, Artificial Sequence
  Synthetic oligonucleotide
gggaatcatgacctcatccgtcaagatcga

SEQ ID NO: 147907 - DNA, 30 bp, Artificial Sequence
  Synthetic oligonucleotide
cgttcattgggtgaacttggcgtagatcga

SEQ ID NO: 147908 - DNA, 29 bp, Artificial Sequence
  Synthetic oligonucleotide
caggatcgcattaaagcgagcgtgatcga

SEQ ID NO: 147909 - DNA, 30 bp, Artificial Sequence
  Synthetic oligonucleotide
acgtattggaaagggttactcgaatatcga

SEQ ID NO: 147910 - DNA, 30 bp, Artificial Sequence
  Synthetic oligonucleotide
cagcggcgacaagaagtacacaactatcga

SEQ ID NO: 147911 - DNA, 30 bp, Artificial Sequence
  Synthetic oligonucleotide
gaagcgtgacactagaggatgcagactcga

SEQ ID NO: 147912 - DNA, 30 bp, Artificial Sequence
  Synthetic oligonucleotide
ccgggggtctgaaccgtccgtacgactcga

SEQ ID NO: 147913 - DNA, 30 bp, Artificial Sequence
  Synthetic oligonucleotide
taacaaatacggagcggacctatacctcga

SEQ ID NO: 147914 - DNA, 30 bp, Artificial Sequence
  Synthetic oligonucleotide
tcgtagcatataaattccggctaccctcga

SEQ ID NO: 147915 - DNA, 30 bp, Artificial Sequence
  Synthetic oligonucleotide
gacctagtgtgactagatatgagtcctcga

SEQ ID NO: 147916 - DNA, 30 bp, Artificial Sequence
  Synthetic oligonucleotide
ccttgtactcgtttgcgagattcagctcga

SEQ ID NO: 147917 - DNA, 30 bp, Artificial Sequence
  Synthetic oligonucleotide
tcgacgtcagttacacttcggagcgctcga

SEQ ID NO: 147918 - DNA, 30 bp, Artificial Sequence
  Synthetic oligonucleotide
atggtctcggtccgaggtataatcgctcga

SEQ ID NO: 147919 - DNA, 30 bp, Artificial Sequence
  Synthetic oligonucleotide
aatgattcaaaacttgactttcaggctcga

SEQ ID NO: 147920 - DNA, 30 bp, Artificial Sequence
  Synthetic oligonucleotide
cgtacgcgtagaggcactggcggctctcga

SEQ ID NO: 147921 - DNA, 30 bp, Artificial Sequence
  Synthetic oligonucleotide
acgtgcgtcctaaggatcgttacgtctcga

SEQ ID NO: 147922 - DNA, 30 bp, Artificial Sequence
  Synthetic oligonucleotide
agcttctgcaaaaagcattgcgaaagtcga

SEQ ID NO: 147923 - DNA, 30 bp, Artificial Sequence
  Synthetic oligonucleotide
atgtcgtaagtgtatcaaatcaccagtcga

SEQ ID NO: 147924 - DNA, 30 bp, Artificial Sequence
  Synthetic oligonucleotide
gaggaccagaagtagctagcaggcagtcga

SEQ ID NO: 147925 - DNA, 30 bp, Artificial Sequence
  Synthetic oligonucleotide
atcgtatacatcccttgattaagtagtcga

SEQ ID NO: 147926 - DNA, 30 bp, Artificial Sequence
  Synthetic oligonucleotide
cccacgattcggaaagtaaatcggcgtcga

SEQ ID NO: 147927 - DNA, 30 bp, Artificial Sequence
  Synthetic oligonucleotide
ttctgatcgttccactagaatgtgcgtcga

SEQ ID NO: 147928 - DNA, 30 bp, Artificial Sequence
  Synthetic oligonucleotide
gataagttccgggatggctggattcgtcga

SEQ ID NO: 147929 - DNA, 30 bp, Artificial Sequence
  Synthetic oligonucleotide
gctcaggaattgttaccaagttgaggtcga

SEQ ID NO: 147930 - DNA, 30 bp, Artificial Sequence
  Synthetic oligonucleotide
gaacaggcccctataaataccacgggtcga

SEQ ID NO: 147931 - DNA, 30 bp, Artificial Sequence
  Synthetic oligonucleotide
agatcgggttccactagcatacaatgtcga

SEQ ID NO: 147932 - DNA, 30 bp, Artificial Sequence
  Synthetic oligonucleotide
tcatccgggctcaacggacagggaattcga

SEQ ID NO: 147933 - DNA, 30 bp, Artificial Sequence
  Synthetic oligonucleotide
atgcctggtttagcgttgataacgattcga

SEQ ID NO: 147934 - DNA, 31 bp, Artificial Sequence
  Synthetic oligonucleotide
atctaatacaagatagcatgatagccttcga

SEQ ID NO: 147935 - DNA, 30 bp, Artificial Sequence
  Synthetic oligonucleotide
ccgggcatgtaaagacaagagtaatttcga

SEQ ID NO: 147936 - DNA, 30 bp, Artificial Sequence
  Synthetic oligonucleotide
ctgattatttgaagtggagcgcactttcga

SEQ ID NO: 147937 - DNA, 30 bp, Artificial Sequence
  Synthetic oligonucleotide
tcgcggtattggcctgcagatgagtttcga

SEQ ID NO: 147938 - DNA, 30 bp, Artificial Sequence
  Synthetic oligonucleotide
tagggtgggggttgatagaatggttttcga

SEQ ID NO: 147939 - DNA, 30 bp, Artificial Sequence
  Synthetic oligonucleotide
gacgagctccatcgctatttacgaaaagga

SEQ ID NO: 147940 - DNA, 30 bp, Artificial Sequence
  Synthetic oligonucleotide
gacgcgcgaagtcgcacaacttcgaaagga

SEQ ID NO: 147941 - DNA, 30 bp, Artificial Sequence
  Synthetic oligonucleotide
actcgggatattaactaatacgtgaaagga

SEQ ID NO: 147942 - DNA, 31 bp, Artificial Sequence
  Synthetic oligonucleotide
tccgaagctagccgtggtgaagtgtaaagga

SEQ ID NO: 147943 - DNA, 30 bp, Artificial Sequence
  Synthetic oligonucleotide
aaggaatcggttatattattggcccaagga

SEQ ID NO: 147944 - DNA, 30 bp, Artificial Sequence
  Synthetic oligonucleotide
gtaacaacatgttggtttctacggcaagga

SEQ ID NO: 147945 - DNA, 30 bp, Artificial Sequence
  Synthetic oligonucleotide
aatgcatgcttattaacgtctatgcaagga

SEQ ID NO: 147946 - DNA, 30 bp, Artificial Sequence
  Synthetic oligonucleotide
cagcgcagtgagaggcacttccaagaagga

SEQ ID NO: 147947 - DNA, 30 bp, Artificial Sequence
  Synthetic oligonucleotide
gttctcggtgtgggaaagattgaagaagga

SEQ ID NO: 147948 - DNA, 30 bp, Artificial Sequence
  Synthetic oligonucleotide
ccggtaaaaagtcgtctctatctagaagga

SEQ ID NO: 147949 - DNA, 30 bp, Artificial Sequence
  Synthetic oligonucleotide
ccgaattttgccctcggtgctagcgaagga

SEQ ID NO: 147950 - DNA, 30 bp, Artificial Sequence
  Synthetic oligonucleotide
aaaggcgtgagggacctgtctcgggaagga

SEQ ID NO: 147951 - DNA, 30 bp, Artificial Sequence
  Synthetic oligonucleotide
tgagatagccagaatatccggggggaagga

SEQ ID NO: 147952 - DNA, 30 bp, Artificial Sequence
  Synthetic oligonucleotide
caggtagagtcggaaaatcctcctgaagga

SEQ ID NO: 147953 - DNA, 30 bp, Artificial Sequence
  Synthetic oligonucleotide
tgctcaagataaccgaattggaaataagga

SEQ ID NO: 147954 - DNA, 30 bp, Artificial Sequence
  Synthetic oligonucleotide
gcctaacagacctaggcgcaacagacagga

SEQ ID NO: 147955 - DNA, 30 bp, Artificial Sequence
  Synthetic oligonucleotide
tcgcgtcaatgacccgagattttgacagga

SEQ ID NO: 147956 - DNA, 30 bp, Artificial Sequence
  Synthetic oligonucleotide
ccggcccgcgtgaacacaacatttacagga

SEQ ID NO: 147957 - DNA, 30 bp, Artificial Sequence
  Synthetic oligonucleotide
aaacggataaacgaccttgcggagccagga

SEQ ID NO: 147958 - DNA, 30 bp, Artificial Sequence
  Synthetic oligonucleotide
cgtcaagcgaaagcgcggactaatccagga

SEQ ID NO: 147959 - DNA, 30 bp, Artificial Sequence
  Synthetic oligonucleotide
ctgcgcttgtgggcagggtactatccagga

SEQ ID NO: 147960 - DNA, 30 bp, Artificial Sequence
  Synthetic oligonucleotide
taagttacttccgagtcacctcttccagga

SEQ ID NO: 147961 - DNA, 30 bp, Artificial Sequence
  Synthetic oligonucleotide
acttgtcaaacgaaggtagttgaatcagga

SEQ ID NO: 147962 - DNA, 30 bp, Artificial Sequence
  Synthetic oligonucleotide
tgtaattctaactcctattactaatcagga

SEQ ID NO: 147963 - DNA, 30 bp, Artificial Sequence
  Synthetic oligonucleotide
tgtgaacgccattttggaataatatcagga

SEQ ID NO: 147964 - DNA, 30 bp, Artificial Sequence
  Synthetic oligonucleotide
caagatttactcagtaaagaaagctcagga

SEQ ID NO: 147965 - DNA, 30 bp, Artificial Sequence
  Synthetic oligonucleotide
gaaacgccgaagtcggggatagtgtcagga

SEQ ID NO: 147966 - DNA, 30 bp, Artificial Sequence
  Synthetic oligonucleotide
ggtcaaagaaggcctgaagggagttcagga

SEQ ID NO: 147967 - DNA, 30 bp, Artificial Sequence
  Synthetic oligonucleotide
cagaactatcacaagccggtcgaaagagga

SEQ ID NO: 147968 - DNA, 30 bp, Artificial Sequence
  Synthetic oligonucleotide
gttcgcggttgtacgggggcacgaagagga

SEQ ID NO: 147969 - DNA, 30 bp, Artificial Sequence
  Synthetic oligonucleotide
acagtaaccgtgagctgggccaggagagga

SEQ ID NO: 147970 - DNA, 30 bp, Artificial Sequence
  Synthetic oligonucleotide
tcgctacccgcgcgattggccaaacgagga

SEQ ID NO: 147971 - DNA, 30 bp, Artificial Sequence
  Synthetic oligonucleotide
tccaaaattgttgcgaatctagcacgagga

SEQ ID NO: 147972 - DNA, 30 bp, Artificial Sequence
  Synthetic oligonucleotide
gcgatcagtctggtcaggacaaagcgagga

SEQ ID NO: 147973 - DNA, 30 bp, Artificial Sequence
  Synthetic oligonucleotide
gtggacacatgaccatgatcccagcgagga

SEQ ID NO: 147974 - DNA, 30 bp, Artificial Sequence
  Synthetic oligonucleotide
gctaggcgggcatcagagaacccgcgagga

SEQ ID NO: 147975 - DNA, 30 bp, Artificial Sequence
  Synthetic oligonucleotide
aggacacgcctggagtggtagcaaggagga

SEQ ID NO: 147976 - DNA, 30 bp, Artificial Sequence
  Synthetic oligonucleotide
tcggtaacgccgtcctggcaacgaggagga

SEQ ID NO: 147977 - DNA, 30 bp, Artificial Sequence
  Synthetic oligonucleotide
tcaaaaataggattcgaacacatgggagga

SEQ ID NO: 147978 - DNA, 30 bp, Artificial Sequence
  Synthetic oligonucleotide
cctcgaaatgaagggtaccgaggtggagga

SEQ ID NO: 147979 - DNA, 30 bp, Artificial Sequence
  Synthetic oligonucleotide
taagcatattaagattcgaagtttggagga

SEQ ID NO: 147980 - DNA, 30 bp, Artificial Sequence
  Synthetic oligonucleotide
gcaatggacgcaactctagagtaatgagga

SEQ ID NO: 147981 - DNA, 30 bp, Artificial Sequence
  Synthetic oligonucleotide
catccttctccggcacccgtttactgagga

SEQ ID NO: 147982 - DNA, 30 bp, Artificial Sequence
  Synthetic oligonucleotide
tacagtcacgatggttcaggtgagtgagga

SEQ ID NO: 147983 - DNA, 30 bp, Artificial Sequence
  Synthetic oligonucleotide
cggtccacagaaggtgcgaccccgtgagga

SEQ ID NO: 147984 - DNA, 30 bp, Artificial Sequence
  Synthetic oligonucleotide
ctatacgagaaggcttaattaagttgagga

SEQ ID NO: 147985 - DNA, 30 bp, Artificial Sequence
  Synthetic oligonucleotide
gacttgcgtaatcactggggctacatagga

SEQ ID NO: 147986 - DNA, 30 bp, Artificial Sequence
  Synthetic oligonucleotide
tcggccgccgaatcgctcggccgcatagga

SEQ ID NO: 147987 - DNA, 30 bp, Artificial Sequence
  Synthetic oligonucleotide
cggagattggggaacacctctgggatagga

SEQ ID NO: 147988 - DNA, 30 bp, Artificial Sequence
  Synthetic oligonucleotide
caatgaaatgggtttaccgctgaactagga

SEQ ID NO: 147989 - DNA, 31 bp, Artificial Sequence
  Synthetic oligonucleotide
cccagtccacaacatcacggtgagcctagga

SEQ ID NO: 147990 - DNA, 30 bp, Artificial Sequence
  Synthetic oligonucleotide
tttcgagtcgcatacggcaagtctctagga

SEQ ID NO: 147991 - DNA, 30 bp, Artificial Sequence
  Synthetic oligonucleotide
ggctattcgaatcggatggctgcggtagga

SEQ ID NO: 147992 - DNA, 30 bp, Artificial Sequence
  Synthetic oligonucleotide
tcgatcctcgttgactaatataatgtagga

SEQ ID NO: 147993 - DNA, 30 bp, Artificial Sequence
  Synthetic oligonucleotide
aaacgataacgggtgaacaaaggtgtagga

SEQ ID NO: 147994 - DNA, 30 bp, Artificial Sequence
  Synthetic oligonucleotide
tatgagatggtcaatatgaaaaatcacgga

SEQ ID NO: 147995 - DNA, 30 bp, Artificial Sequence
  Synthetic oligonucleotide
taagccctctacttgagatagcccgacgga

SEQ ID NO: 147996 - DNA, 30 bp, Artificial Sequence
  Synthetic oligonucleotide
gtgacagaaggcctaaactggaaatacgga

SEQ ID NO: 147997 - DNA, 30 bp, Artificial Sequence
  Synthetic oligonucleotide
aacaagctcgtcgtgccgcgtctctacgga

SEQ ID NO: 147998 - DNA, 30 bp, Artificial Sequence
  Synthetic oligonucleotide
gcagggaaacagcgtatgccgagttacgga

SEQ ID NO: 147999 - DNA, 30 bp, Artificial Sequence
  Synthetic oligonucleotide
cgaattcctaacgtggcggatagcaccgga

SEQ ID NO: 148000 - DNA, 31 bp, Artificial Sequence
  Synthetic oligonucleotide
tacgctcgaacagccgagaaacaataccgga

SEQ ID NO: 148001 - DNA, 30 bp, Artificial Sequence
  Synthetic oligonucleotide
aaactgtgtaagctgggaatcaataccgga

SEQ ID NO: 148002 - DNA, 30 bp, Artificial Sequence
  Synthetic oligonucleotide
cgtgatgactcccgaaacagtgaacccgga

SEQ ID NO: 148003 - DNA, 30 bp, Artificial Sequence
  Synthetic oligonucleotide
aaatcgaccttcgttatccacacagccgga

SEQ ID NO: 148004 - DNA, 30 bp, Artificial Sequence
  Synthetic oligonucleotide
ttggagggacccgcgcttctgatcgccgga

SEQ ID NO: 148005 - DNA, 30 bp, Artificial Sequence
  Synthetic oligonucleotide
atggaccaacgactgagagacgatgccgga

SEQ ID NO: 148006 - DNA, 30 bp, Artificial Sequence
  Synthetic oligonucleotide
cagaactgggcacaggtgccgaactccgga

SEQ ID NO: 148007 - DNA, 30 bp, Artificial Sequence
  Synthetic oligonucleotide
gtaagttgagtggaacgcgggttaagcgga

SEQ ID NO: 148008 - DNA, 30 bp, Artificial Sequence
  Synthetic oligonucleotide
tttaagccattacgtgatgcgaacagcgga

SEQ ID NO: 148009 - DNA, 30 bp, Artificial Sequence
  Synthetic oligonucleotide
ggcaagctgtctaggtcaatcttgagcgga

SEQ ID NO: 148010 - DNA, 30 bp, Artificial Sequence
  Synthetic oligonucleotide
cattgagttaaactggaggccgatagcgga

SEQ ID NO: 148011 - DNA, 30 bp, Artificial Sequence
  Synthetic oligonucleotide
tacgtgttctattgaccgtccattagcgga

SEQ ID NO: 148012 - DNA, 30 bp, Artificial Sequence
  Synthetic oligonucleotide
caccgctctcgagagtcgacggttagcgga

SEQ ID NO: 148013 - DNA, 30 bp, Artificial Sequence
  Synthetic oligonucleotide
gcgggctatgtgtcttatagttcccgcgga

SEQ ID NO: 148014 - DNA, 30 bp, Artificial Sequence
  Synthetic oligonucleotide
tacggaaaagccttagtagtcggccgcgga

SEQ ID NO: 148015 - DNA, 30 bp, Artificial Sequence
  Synthetic oligonucleotide
actaaccaggcaatggcctaaaagcgcgga

SEQ ID NO: 148016 - DNA, 30 bp, Artificial Sequence
  Synthetic oligonucleotide
cgtgaggtaaaaatagttagaacgcgcgga

SEQ ID NO: 148017 - DNA, 30 bp, Artificial Sequence
  Synthetic oligonucleotide
gttaagataaataactacggcccgcgcgga

SEQ ID NO: 148018 - DNA, 30 bp, Artificial Sequence
  Synthetic oligonucleotide
caaaccgggtcccaatacggtccgcgcgga

SEQ ID NO: 148019 - DNA, 30 bp, Artificial Sequence
  Synthetic oligonucleotide
tgcatgcaggatcaattgggagtgcgcgga

SEQ ID NO: 148020 - DNA, 30 bp, Artificial Sequence
  Synthetic oligonucleotide
tgccggaaacaatttgtcttaaatcgcgga

SEQ ID NO: 148021 - DNA, 30 bp, Artificial Sequence
  Synthetic oligonucleotide
ttcagttacggaatgccggtaagaggcgga

SEQ ID NO: 148022 - DNA, 30 bp, Artificial Sequence
  Synthetic oligonucleotide
ctgcgatcgtgcggtactagctggggcgga

SEQ ID NO: 148023 - DNA, 30 bp, Artificial Sequence
  Synthetic oligonucleotide
gtttaggcattcaacgagtacaatggcgga

SEQ ID NO: 148024 - DNA, 30 bp, Artificial Sequence
  Synthetic oligonucleotide
cgtcatactcacgcaacacttgaatgcgga

SEQ ID NO: 148025 - DNA, 30 bp, Artificial Sequence
  Synthetic oligonucleotide
aacagggaattgcattgggctcgatgcgga

SEQ ID NO: 148026 - DNA, 30 bp, Artificial Sequence
  Synthetic oligonucleotide
accggtaaccttacaagttgatcgtgcgga

SEQ ID NO: 148027 - DNA, 30 bp, Artificial Sequence
  Synthetic oligonucleotide
tcccatcaaacctcttagtgcgccatcgga

SEQ ID NO: 148028 - DNA, 30 bp, Artificial Sequence
  Synthetic oligonucleotide
ttgaatcatatgggccagtcgttgctcgga

SEQ ID NO: 148029 - DNA, 30 bp, Artificial Sequence
  Synthetic oligonucleotide
caacggggctgagtatggacgggtctcgga

SEQ ID NO: 148030 - DNA, 30 bp, Artificial Sequence
  Synthetic oligonucleotide
atacatattgataaatggggcttagtcgga

SEQ ID NO: 148031 - DNA, 30 bp, Artificial Sequence
  Synthetic oligonucleotide
gcaggattcacagttgacatagcggtcgga

SEQ ID NO: 148032 - DNA, 29 bp, Artificial Sequence
  Synthetic oligonucleotide
tgagcagggtcgtctgaggcccattcgga

SEQ ID NO: 148033 - DNA, 30 bp, Artificial Sequence
  Synthetic oligonucleotide
ggtaagagtctggagggacataacttcgga

SEQ ID NO: 148034 - DNA, 30 bp, Artificial Sequence
  Synthetic oligonucleotide
ccataaacaatgtcctgccaaagcttcgga

SEQ ID NO: 148035 - DNA, 30 bp, Artificial Sequence
  Synthetic oligonucleotide
taggactgcgtccgaattgtaccgttcgga

SEQ ID NO: 148036 - DNA, 30 bp, Artificial Sequence
  Synthetic oligonucleotide
ggtggcagggctgggtaaggacggttcgga

SEQ ID NO: 148037 - DNA, 30 bp, Artificial Sequence
  Synthetic oligonucleotide
tatagtgtgcagatgaggacctgaaaggga

SEQ ID NO: 148038 - DNA, 30 bp, Artificial Sequence
  Synthetic oligonucleotide
gtttcacaaggagcatgaggtatcaaggga

SEQ ID NO: 148039 - DNA, 30 bp, Artificial Sequence
  Synthetic oligonucleotide
actgttctggaccgctcccaaatgaaggga

SEQ ID NO: 148040 - DNA, 30 bp, Artificial Sequence
  Synthetic oligonucleotide
atcccgcggtatgcctggcaggtgaaggga

SEQ ID NO: 148041 - DNA, 30 bp, Artificial Sequence
  Synthetic oligonucleotide
aagcgccgcaaagccaagaggcgtaaggga

SEQ ID NO: 148042 - DNA, 30 bp, Artificial Sequence
  Synthetic oligonucleotide
cgaaatgcgacattggggtgcatgcaggga

SEQ ID NO: 148043 - DNA, 30 bp, Artificial Sequence
  Synthetic oligonucleotide
caaccgggggcgggctccaccacagaggga

SEQ ID NO: 148044 - DNA, 30 bp, Artificial Sequence
  Synthetic oligonucleotide
ataagaatcctatgagggcttagggaggga

SEQ ID NO: 148045 - DNA, 30 bp, Artificial Sequence
  Synthetic oligonucleotide
ggcgcaaggagcggagtgatataataggga

SEQ ID NO: 148046 - DNA, 30 bp, Artificial Sequence
  Synthetic oligonucleotide
agctagcagagcctagggaaattataggga

SEQ ID NO: 148047 - DNA, 30 bp, Artificial Sequence
  Synthetic oligonucleotide
cagatatgccgcaaggaagacctctaggga

SEQ ID NO: 148048 - DNA, 30 bp, Artificial Sequence
  Synthetic oligonucleotide
gtcaatttgccatgaaggaacacgtaggga

SEQ ID NO: 148049 - DNA, 30 bp, Artificial Sequence
  Synthetic oligonucleotide
agactccggaggacgaccccaaggtaggga

SEQ ID NO: 148050 - DNA, 30 bp, Artificial Sequence
  Synthetic oligonucleotide
gaggttaggataatgagactcgaaacggga

SEQ ID NO: 148051 - DNA, 30 bp, Artificial Sequence
  Synthetic oligonucleotide
tcagtgatatggaggatggaatcaacggga

SEQ ID NO: 148052 - DNA, 30 bp, Artificial Sequence
  Synthetic oligonucleotide
tagatcgtgagctacagcgggggcacggga

SEQ ID NO: 148053 - DNA, 30 bp, Artificial Sequence
  Synthetic oligonucleotide
accctccgcagggcttagaccgggacggga

SEQ ID NO: 148054 - DNA, 30 bp, Artificial Sequence
  Synthetic oligonucleotide
agtcaggtgaacacaatttataatacggga

SEQ ID NO: 148055 - DNA, 30 bp, Artificial Sequence
  Synthetic oligonucleotide
agtgattatttgcagaagtatgtaccggga

SEQ ID NO: 148056 - DNA, 30 bp, Artificial Sequence
  Synthetic oligonucleotide
atcagttcgtggctacgaaaagcgccggga

SEQ ID NO: 148057 - DNA, 30 bp, Artificial Sequence
  Synthetic oligonucleotide
gtgagttaacgggattacgaatatccggga

SEQ ID NO: 148058 - DNA, 30 bp, Artificial Sequence
  Synthetic oligonucleotide
cgtcccagaaataatgtctctaacgcggga

SEQ ID NO: 148059 - DNA, 30 bp, Artificial Sequence
  Synthetic oligonucleotide
gcagacgaggtaacactaagttacgcggga

SEQ ID NO: 148060 - DNA, 30 bp, Artificial Sequence
  Synthetic oligonucleotide
gatcgtaagctaccgggttgccgcgcggga

SEQ ID NO: 148061 - DNA, 30 bp, Artificial Sequence
  Synthetic oligonucleotide
ttcggtagatatttgcgggacgcgtcggga

SEQ ID NO: 148062 - DNA, 30 bp, Artificial Sequence
  Synthetic oligonucleotide
atattatcaagcgggaacgatacttcggga

SEQ ID NO: 148063 - DNA, 30 bp, Artificial Sequence
  Synthetic oligonucleotide
tcgaacagaagggagggaccctaaagggga

SEQ ID NO: 148064 - DNA, 30 bp, Artificial Sequence
  Synthetic oligonucleotide
atagagtcgccgatagggtatgagagggga

SEQ ID NO: 148065 - DNA, 30 bp, Artificial Sequence
  Synthetic oligonucleotide
gcaagccctactgacggggaagatagggga

SEQ ID NO: 148066 - DNA, 30 bp, Artificial Sequence
  Synthetic oligonucleotide
ttgcaatcagtattcacatgcactagggga

SEQ ID NO: 148067 - DNA, 30 bp, Artificial Sequence
  Synthetic oligonucleotide
cgtgtcgagaggtgatggctgccccgggga

SEQ ID NO: 148068 - DNA, 30 bp, Artificial Sequence
  Synthetic oligonucleotide
caatggggaaaatatggtgtcgatcgggga

SEQ ID NO: 148069 - DNA, 30 bp, Artificial Sequence
  Synthetic oligonucleotide
ccacgtacttagggaagcatctttcgggga

SEQ ID NO: 148070 - DNA, 30 bp, Artificial Sequence
  Synthetic oligonucleotide
acaaaacacaaaatcaatgctaacggggga

SEQ ID NO: 148071 - DNA, 30 bp, Artificial Sequence
  Synthetic oligonucleotide
ccaatacgaaacaatatttggaggggggga

SEQ ID NO: 148072 - DNA, 40 bp, Artificial Sequence
  Synthetic oligonucleotide
aagataatacattcatggtatggtcggggctcggggggga

SEQ ID NO: 148073 - DNA, 30 bp, Artificial Sequence
  Synthetic oligonucleotide
ccagttggcgcacgcaaggtgtcatgggga

SEQ ID NO: 148074 - DNA, 30 bp, Artificial Sequence
  Synthetic oligonucleotide
cataggtatttgcacataaggatatgggga

SEQ ID NO: 148075 - DNA, 30 bp, Artificial Sequence
  Synthetic oligonucleotide
ttacctggactgtaatccaggctatgggga

SEQ ID NO: 148076 - DNA, 30 bp, Artificial Sequence
  Synthetic oligonucleotide
taaaccatatccgacagaaaaccgtgggga

SEQ ID NO: 148077 - DNA, 30 bp, Artificial Sequence
  Synthetic oligonucleotide
tatcaaggtccaacgatataccagatggga

SEQ ID NO: 148078 - DNA, 30 bp, Artificial Sequence
  Synthetic oligonucleotide
gacgggtaaataaccgacggtattctggga

SEQ ID NO: 148079 - DNA, 30 bp, Artificial Sequence
  Synthetic oligonucleotide
tcatacgagggttggaactgagacgtggga

SEQ ID NO: 148080 - DNA, 30 bp, Artificial Sequence
  Synthetic oligonucleotide
tcgagcggccaatttcgtaacgacgtggga

SEQ ID NO: 148081 - DNA, 30 bp, Artificial Sequence
  Synthetic oligonucleotide
tgctacgagccatgcaatcgtctcgtggga

SEQ ID NO: 148082 - DNA, 30 bp, Artificial Sequence
  Synthetic oligonucleotide
tgagtcaaatctgcttccaatatggtggga

SEQ ID NO: 148083 - DNA, 30 bp, Artificial Sequence
  Synthetic oligonucleotide
atgaagtgtgtaattcccctgtttgtggga

SEQ ID NO: 148084 - DNA, 30 bp, Artificial Sequence
  Synthetic oligonucleotide
gggtatggatataagcaacaggtcttggga

SEQ ID NO: 148085 - DNA, 30 bp, Artificial Sequence
  Synthetic oligonucleotide
gtttgccgagggacagacatttagttggga

SEQ ID NO: 148086 - DNA, 30 bp, Artificial Sequence
  Synthetic oligonucleotide
acggaatgaacgtccgggacagggttggga

SEQ ID NO: 148087 - DNA, 30 bp, Artificial Sequence
  Synthetic oligonucleotide
caagagtaacttgaaataaccactttggga

SEQ ID NO: 148088 - DNA, 30 bp, Artificial Sequence
  Synthetic oligonucleotide
atctggataaggtaggaatcagaaaatgga

SEQ ID NO: 148089 - DNA, 30 bp, Artificial Sequence
  Synthetic oligonucleotide
tgaacggtaattacagccataataaatgga

SEQ ID NO: 148090 - DNA, 29 bp, Artificial Sequence
  Synthetic oligonucleotide
aaagggctgttggcagcagcctaaatgga

SEQ ID NO: 148091 - DNA, 30 bp, Artificial Sequence
  Synthetic oligonucleotide
tccgagtgtataacctgtcccagtaatgga

SEQ ID NO: 148092 - DNA, 30 bp, Artificial Sequence
  Synthetic oligonucleotide
ccaccgcactcgttgcatgtaggacatgga

SEQ ID NO: 148093 - DNA, 30 bp, Artificial Sequence
  Synthetic oligonucleotide
ttgaatcacgccgacctaggttgacatgga

SEQ ID NO: 148094 - DNA, 30 bp, Artificial Sequence
  Synthetic oligonucleotide
aaaggggttatttatcaatgctagcatgga

SEQ ID NO: 148095 - DNA, 30 bp, Artificial Sequence
  Synthetic oligonucleotide
taaccgggtaatcgttagcgtctcgatgga

SEQ ID NO: 148096 - DNA, 30 bp, Artificial Sequence
  Synthetic oligonucleotide
ggtcgctacaggacttctaatttcgatgga

SEQ ID NO: 148097 - DNA, 30 bp, Artificial Sequence
  Synthetic oligonucleotide
tgcaatccataaggtgtaacccatgatgga

SEQ ID NO: 148098 - DNA, 30 bp, Artificial Sequence
  Synthetic oligonucleotide
agaggtccgagtcaatctgcctctgatgga

SEQ ID NO: 148099 - DNA, 30 bp, Artificial Sequence
  Synthetic oligonucleotide
ccgttctatagatctccgattcaatatgga

SEQ ID NO: 148100 - DNA, 30 bp, Artificial Sequence
  Synthetic oligonucleotide
aacacacttgtgcgttcaactgcatatgga

SEQ ID NO: 148101 - DNA, 30 bp, Artificial Sequence
  Synthetic oligonucleotide
gtaacgttccacaagaggaccatctatgga

SEQ ID NO: 148102 - DNA, 30 bp, Artificial Sequence
  Synthetic oligonucleotide
ttcgaggctgctagcgtcgtgaagtatgga

SEQ ID NO: 148103 - DNA, 30 bp, Artificial Sequence
  Synthetic oligonucleotide
ttcagccgctgctcgtagaggtagtatgga

SEQ ID NO: 148104 - DNA, 30 bp, Artificial Sequence
  Synthetic oligonucleotide
aagatcaatgaattccgtcggcggtatgga

SEQ ID NO: 148105 - DNA, 30 bp, Artificial Sequence
  Synthetic oligonucleotide
gcacggcttgaggcgtacccctcaactgga

SEQ ID NO: 148106 - DNA, 30 bp, Artificial Sequence
  Synthetic oligonucleotide
aagcaggtgggtagtgtcccgatgactgga

SEQ ID NO: 148107 - DNA, 30 bp, Artificial Sequence
  Synthetic oligonucleotide
ccatgtgaacggcgtatggactatactgga

SEQ ID NO: 148108 - DNA, 30 bp, Artificial Sequence
  Synthetic oligonucleotide
ggacaggctttctcccaattgaaccctgga

SEQ ID NO: 148109 - DNA, 30 bp, Artificial Sequence
  Synthetic oligonucleotide
ggataacattggtccatcccctaccctgga

SEQ ID NO: 148110 - DNA, 30 bp, Artificial Sequence
  Synthetic oligonucleotide
gtagggacaaggccggagttgacccctgga

SEQ ID NO: 148111 - DNA, 30 bp, Artificial Sequence
  Synthetic oligonucleotide
agagagaaacgtcaaaatttgtaagctgga

SEQ ID NO: 148112 - DNA, 30 bp, Artificial Sequence
  Synthetic oligonucleotide
atggattgaataatctatcctgaggctgga

SEQ ID NO: 148113 - DNA, 30 bp, Artificial Sequence
  Synthetic oligonucleotide
aactcgcactagtaacacgaggcggctgga

SEQ ID NO: 148114 - DNA, 30 bp, Artificial Sequence
  Synthetic oligonucleotide
attggcagggatcatagtaagtcggctgga

SEQ ID NO: 148115 - DNA, 30 bp, Artificial Sequence
  Synthetic oligonucleotide
aacaagtgcccgtagactggtcttgctgga

SEQ ID NO: 148116 - DNA, 30 bp, Artificial Sequence
  Synthetic oligonucleotide
ctattccaaccatgaaacgtctgctctgga

SEQ ID NO: 148117 - DNA, 30 bp, Artificial Sequence
  Synthetic oligonucleotide
ataaaagcaatagacagggtaatttctgga

SEQ ID NO: 148118 - DNA, 30 bp, Artificial Sequence
  Synthetic oligonucleotide
tcgacggaagcgacggatcgagcacgtgga

SEQ ID NO: 148119 - DNA, 30 bp, Artificial Sequence
  Synthetic oligonucleotide
atgagtggtctggattgtgcgggacgtgga

SEQ ID NO: 148120 - DNA, 30 bp, Artificial Sequence
  Synthetic oligonucleotide
cataagtacaaactgcaaatcgaccgtgga

SEQ ID NO: 148121 - DNA, 30 bp, Artificial Sequence
  Synthetic oligonucleotide
gaagagattatgcagttgatataccgtgga

SEQ ID NO: 148122 - DNA, 30 bp, Artificial Sequence
  Synthetic oligonucleotide
gccgggaagcacacaattaggaagcgtgga

SEQ ID NO: 148123 - DNA, 30 bp, Artificial Sequence
  Synthetic oligonucleotide
cgggacaaacggcttaatttgaatcgtgga

SEQ ID NO: 148124 - DNA, 30 bp, Artificial Sequence
  Synthetic oligonucleotide
ggaactgttgaaaacaaaattaatcgtgga

SEQ ID NO: 148125 - DNA, 30 bp, Artificial Sequence
  Synthetic oligonucleotide
tgtactgctcatacagtatgtggtcgtgga

SEQ ID NO: 148126 - DNA, 30 bp, Artificial Sequence
  Synthetic oligonucleotide
gcaggattgctcgccggcacgtccggtgga

SEQ ID NO: 148127 - DNA, 30 bp, Artificial Sequence
  Synthetic oligonucleotide
gtaagggtgcaagtggtaagtagcggtgga

SEQ ID NO: 148128 - DNA, 30 bp, Artificial Sequence
  Synthetic oligonucleotide
ttggattatatagaagttagtggtggtgga

SEQ ID NO: 148129 - DNA, 30 bp, Artificial Sequence
  Synthetic oligonucleotide
gtcagataccaaggctttggagaatgtgga

SEQ ID NO: 148130 - DNA, 30 bp, Artificial Sequence
  Synthetic oligonucleotide
ctgaccgatatacagggacgtagctgtgga

SEQ ID NO: 148131 - DNA, 30 bp, Artificial Sequence
  Synthetic oligonucleotide
tgcgactgtgaccgtgaatatttctgtgga

SEQ ID NO: 148132 - DNA, 30 bp, Artificial Sequence
  Synthetic oligonucleotide
aacagaaggttcggcacaaataggtgtgga

SEQ ID NO: 148133 - DNA, 30 bp, Artificial Sequence
  Synthetic oligonucleotide
aaaatggaaaggaacataaagcgttgtgga

SEQ ID NO: 148134 - DNA, 30 bp, Artificial Sequence
  Synthetic oligonucleotide
ccaagctagtaagagtatgttggttgtgga

SEQ ID NO: 148135 - DNA, 30 bp, Artificial Sequence
  Synthetic oligonucleotide
aaacaggattcggtgcatgggccaattgga

SEQ ID NO: 148136 - DNA, 30 bp, Artificial Sequence
  Synthetic oligonucleotide
gcacgacatcgctcgggtcagcccattgga

SEQ ID NO: 148137 - DNA, 30 bp, Artificial Sequence
  Synthetic oligonucleotide
tatagacggataggcgatagctcgattgga

SEQ ID NO: 148138 - DNA, 30 bp, Artificial Sequence
  Synthetic oligonucleotide
cagacattaacatggttggcttctattgga

SEQ ID NO: 148139 - DNA, 30 bp, Artificial Sequence
  Synthetic oligonucleotide
cgtgacccgtgtagtggaggaagtattgga

SEQ ID NO: 148140 - DNA, 30 bp, Artificial Sequence
  Synthetic oligonucleotide
tccagaggttagctatacgatgttattgga

SEQ ID NO: 148141 - DNA, 30 bp, Artificial Sequence
  Synthetic oligonucleotide
tactgactcgacaaagagaatatacttgga

SEQ ID NO: 148142 - DNA, 30 bp, Artificial Sequence
  Synthetic oligonucleotide
gcgcctgttggtgcacctgtataccttgga

SEQ ID NO: 148143 - DNA, 30 bp, Artificial Sequence
  Synthetic oligonucleotide
aggcgcctcaaaacgcgtatgttccttgga

SEQ ID NO: 148144 - DNA, 30 bp, Artificial Sequence
  Synthetic oligonucleotide
gacggatatttcgcggtgtaatagcttgga

SEQ ID NO: 148145 - DNA, 30 bp, Artificial Sequence
  Synthetic oligonucleotide
tactcgcctaaataggaggttcggcttgga

SEQ ID NO: 148146 - DNA, 30 bp, Artificial Sequence
  Synthetic oligonucleotide
cctgagctggaagcgaagcctgatcttgga

SEQ ID NO: 148147 - DNA, 30 bp, Artificial Sequence
  Synthetic oligonucleotide
caaattcgtcgctcaaagtatgaagttgga

SEQ ID NO: 148148 - DNA, 30 bp, Artificial Sequence
  Synthetic oligonucleotide
tcgattgcacgatttcaggtaggcgttgga

SEQ ID NO: 148149 - DNA, 30 bp, Artificial Sequence
  Synthetic oligonucleotide
gacacagggcgtaggacggcggaggttgga

SEQ ID NO: 148150 - DNA, 30 bp, Artificial Sequence
  Synthetic oligonucleotide
cataggtacccactttttggccaatttgga

SEQ ID NO: 148151 - DNA, 30 bp, Artificial Sequence
  Synthetic oligonucleotide
ccatttggtgcatctcggccatcatttgga

SEQ ID NO: 148152 - DNA, 30 bp, Artificial Sequence
  Synthetic oligonucleotide
agccaccagacaaaaaagcatcgctttgga

SEQ ID NO: 148153 - DNA, 30 bp, Artificial Sequence
  Synthetic oligonucleotide
aacaagcaaggtcatacaatactctttgga

SEQ ID NO: 148154 - DNA, 30 bp, Artificial Sequence
  Synthetic oligonucleotide
cagaaagggagcccccaggacagaaaatga

SEQ ID NO: 148155 - DNA, 30 bp, Artificial Sequence
  Synthetic oligonucleotide
gagtagatgaccaatccatcggtcaaatga

SEQ ID NO: 148156 - DNA, 30 bp, Artificial Sequence
  Synthetic oligonucleotide
tttgtataaaagaaaaacttatcacaatga

SEQ ID NO: 148157 - DNA, 31 bp, Artificial Sequence
  Synthetic oligonucleotide
cagcaagagatgcaaaacacacgtacaatga

SEQ ID NO: 148158 - DNA, 30 bp, Artificial Sequence
  Synthetic oligonucleotide
aagtgtaagaatatcaggggaatgcaatga

SEQ ID NO: 148159 - DNA, 30 bp, Artificial Sequence
  Synthetic oligonucleotide
agcaacgagataaaaccaggatttcaatga

SEQ ID NO: 148160 - DNA, 30 bp, Artificial Sequence
  Synthetic oligonucleotide
aagaaacataggttatgggatcaagaatga

SEQ ID NO: 148161 - DNA, 30 bp, Artificial Sequence
  Synthetic oligonucleotide
gccggaccaagaacggaatggtgcgaatga

SEQ ID NO: 148162 - DNA, 30 bp, Artificial Sequence
  Synthetic oligonucleotide
gaggcaggatcctacgaaccgtatgaatga

SEQ ID NO: 148163 - DNA, 30 bp, Artificial Sequence
  Synthetic oligonucleotide
taggtgttgcaacattgacaaggtgaatga

SEQ ID NO: 148164 - DNA, 30 bp, Artificial Sequence
  Synthetic oligonucleotide
gatctaaatggggaggatgcgtagtaatga

SEQ ID NO: 148165 - DNA, 30 bp, Artificial Sequence
  Synthetic oligonucleotide
gggtgagtgtcagtctgcttgcaaacatga

SEQ ID NO: 148166 - DNA, 30 bp, Artificial Sequence
  Synthetic oligonucleotide
ctcaccaggcgagccttgctaaacacatga

SEQ ID NO: 148167 - DNA, 30 bp, Artificial Sequence
  Synthetic oligonucleotide
gacccgtaagcagtaggatttatcacatga

SEQ ID NO: 148168 - DNA, 30 bp, Artificial Sequence
  Synthetic oligonucleotide
tctagtatacctgggcgtgtcgggacatga

SEQ ID NO: 148169 - DNA, 30 bp, Artificial Sequence
  Synthetic oligonucleotide
caacgcacaagtctaatggtgatgacatga

SEQ ID NO: 148170 - DNA, 29 bp, Artificial Sequence
  Synthetic oligonucleotide
caaataaaaaggaatatcaatatacatga

SEQ ID NO: 148171 - DNA, 30 bp, Artificial Sequence
  Synthetic oligonucleotide
taccttccaaaagtaggcggttgtacatga

SEQ ID NO: 148172 - DNA, 30 bp, Artificial Sequence
  Synthetic oligonucleotide
ggcttctatgcaaaaaaaatccttacatga

SEQ ID NO: 148173 - DNA, 30 bp, Artificial Sequence
  Synthetic oligonucleotide
taattgctgtgcttgtattagtcaccatga

SEQ ID NO: 148174 - DNA, 30 bp, Artificial Sequence
  Synthetic oligonucleotide
ctaactcgggagcccatagttccgccatga

SEQ ID NO: 148175 - DNA, 30 bp, Artificial Sequence
  Synthetic oligonucleotide
tagctctatcgaggccgagggcggccatga

SEQ ID NO: 148176 - DNA, 30 bp, Artificial Sequence
  Synthetic oligonucleotide
aagttcgttgtggcgtttggcaatccatga

SEQ ID NO: 148177 - DNA, 30 bp, Artificial Sequence
  Synthetic oligonucleotide
cagaaaaatcaggccgttcaggttccatga

SEQ ID NO: 148178 - DNA, 30 bp, Artificial Sequence
  Synthetic oligonucleotide
cacttgttcagtatcccggcggaagcatga

SEQ ID NO: 148179 - DNA, 30 bp, Artificial Sequence
  Synthetic oligonucleotide
aatcgagatcattggtcagcttgagcatga

SEQ ID NO: 148180 - DNA, 30 bp, Artificial Sequence
  Synthetic oligonucleotide
atggatgagacagagtacatgtaggcatga

SEQ ID NO: 148181 - DNA, 30 bp, Artificial Sequence
  Synthetic oligonucleotide
gccatatgccctacaactcactatgcatga

SEQ ID NO: 148182 - DNA, 30 bp, Artificial Sequence
  Synthetic oligonucleotide
acgaacgactatcggctgagcgttgcatga

SEQ ID NO: 148183 - DNA, 30 bp, Artificial Sequence
  Synthetic oligonucleotide
atcgtactacttaacctcggccactcatga

SEQ ID NO: 148184 - DNA, 30 bp, Artificial Sequence
  Synthetic oligonucleotide
ccgctaatgaatttcccgccgtcttcatga

SEQ ID NO: 148185 - DNA, 30 bp, Artificial Sequence
  Synthetic oligonucleotide
actgatcggacgttaggctaaataagatga

SEQ ID NO: 148186 - DNA, 30 bp, Artificial Sequence
  Synthetic oligonucleotide
tagacaaacttaatgcaggatataagatga

SEQ ID NO: 148187 - DNA, 30 bp, Artificial Sequence
  Synthetic oligonucleotide
ggtgattaagggtcaattgttgagagatga

SEQ ID NO: 148188 - DNA, 30 bp, Artificial Sequence
  Synthetic oligonucleotide
gcatcagatattcagataccccgtagatga

SEQ ID NO: 148189 - DNA, 30 bp, Artificial Sequence
  Synthetic oligonucleotide
aaagcaatgagctgcgaggcaattagatga

SEQ ID NO: 148190 - DNA, 30 bp, Artificial Sequence
  Synthetic oligonucleotide
aattgcatgatccccgtaaaagcacgatga

SEQ ID NO: 148191 - DNA, 30 bp, Artificial Sequence
  Synthetic oligonucleotide
ttcttatgttacaaatgatgccgacgatga

SEQ ID NO: 148192 - DNA, 30 bp, Artificial Sequence
  Synthetic oligonucleotide
acacctgtttgcacttaagctaggcgatga

SEQ ID NO: 148193 - DNA, 30 bp, Artificial Sequence
  Synthetic oligonucleotide
cgaatccactggagaagcatcagaggatga

SEQ ID NO: 148194 - DNA, 30 bp, Artificial Sequence
  Synthetic oligonucleotide
cgtgtttgataactcagaaagacgggatga

SEQ ID NO: 148195 - DNA, 30 bp, Artificial Sequence
  Synthetic oligonucleotide
caaggagaggagtagtttgttgatggatga

SEQ ID NO: 148196 - DNA, 30 bp, Artificial Sequence
  Synthetic oligonucleotide
tcatgtagccgtgagggaggcacatgatga

SEQ ID NO: 148197 - DNA, 30 bp, Artificial Sequence
  Synthetic oligonucleotide
ggccaagagggagcgccggttgtgtgatga

SEQ ID NO: 148198 - DNA, 30 bp, Artificial Sequence
  Synthetic oligonucleotide
ctacgacacagaagataagtgatttgatga

SEQ ID NO: 148199 - DNA, 30 bp, Artificial Sequence
  Synthetic oligonucleotide
attaatcgtccaccgatagtcgaaatatga

SEQ ID NO: 148200 - DNA, 30 bp, Artificial Sequence
  Synthetic oligonucleotide
attgccaaaaggggactcatcttaatatga

SEQ ID NO: 148201 - DNA, 30 bp, Artificial Sequence
  Synthetic oligonucleotide
aagtggatgaaatcttcaaatacgatatga

SEQ ID NO: 148202 - DNA, 30 bp, Artificial Sequence
  Synthetic oligonucleotide
caagcacacgccacggattaagcgctatga

SEQ ID NO: 148203 - DNA, 30 bp, Artificial Sequence
  Synthetic oligonucleotide
ctaatgtactagcttaggataaatctatga

SEQ ID NO: 148204 - DNA, 30 bp, Artificial Sequence
  Synthetic oligonucleotide
cataataaggtggaaatcccgtacgtatga

SEQ ID NO: 148205 - DNA, 30 bp, Artificial Sequence
  Synthetic oligonucleotide
agggtgggactgctgataagtgccgtatga

SEQ ID NO: 148206 - DNA, 30 bp, Artificial Sequence
  Synthetic oligonucleotide
ttgtggcctagggctggacctagcgtatga

SEQ ID NO: 148207 - DNA, 30 bp, Artificial Sequence
  Synthetic oligonucleotide
ctaagcctcagtgtgtcgtgtggcgtatga

SEQ ID NO: 148208 - DNA, 30 bp, Artificial Sequence
  Synthetic oligonucleotide
ttgagtgggtaagaagttttaatcgtatga

SEQ ID NO: 148209 - DNA, 30 bp, Artificial Sequence
  Synthetic oligonucleotide
ctatactgtattgttcactccgtcgtatga

SEQ ID NO: 148210 - DNA, 30 bp, Artificial Sequence
  Synthetic oligonucleotide
aaacagtaggggttacggcaacgtgtatga

SEQ ID NO: 148211 - DNA, 30 bp, Artificial Sequence
  Synthetic oligonucleotide
gaccgtaacgataagagcgcaacattatga

SEQ ID NO: 148212 - DNA, 30 bp, Artificial Sequence
  Synthetic oligonucleotide
acagctacgagtgcaactaacgcattatga

SEQ ID NO: 148213 - DNA, 30 bp, Artificial Sequence
  Synthetic oligonucleotide
tgtcaggggcgcctaggcgtcaatttatga

SEQ ID NO: 148214 - DNA, 30 bp, Artificial Sequence
  Synthetic oligonucleotide
gtagcttcgcaataacgtatcgaaaactga

SEQ ID NO: 148215 - DNA, 30 bp, Artificial Sequence
  Synthetic oligonucleotide
ttacggaaaaagtttcatgcggaaaactga

SEQ ID NO: 148216 - DNA, 30 bp, Artificial Sequence
  Synthetic oligonucleotide
ttaaagtatcagaggaaagcatcgaactga

SEQ ID NO: 148217 - DNA, 30 bp, Artificial Sequence
  Synthetic oligonucleotide
tgacgagtaaaaatgtaaaaaaataactga

SEQ ID NO: 148218 - DNA, 30 bp, Artificial Sequence
  Synthetic oligonucleotide
tgatcggagaatcataccccccctaactga

SEQ ID NO: 148219 - DNA, 30 bp, Artificial Sequence
  Synthetic oligonucleotide
ggttacgagtccgtttcaacaatccactga

SEQ ID NO: 148220 - DNA, 30 bp, Artificial Sequence
  Synthetic oligonucleotide
tgcgttagctatgtcacacatgtgcactga

SEQ ID NO: 148221 - DNA, 30 bp, Artificial Sequence
  Synthetic oligonucleotide
ggacgtagttaatagagagtggatcactga

SEQ ID NO: 148222 - DNA, 30 bp, Artificial Sequence
  Synthetic oligonucleotide
aaaagctgccgtactaaaacaatagactga

SEQ ID NO: 148223 - DNA, 30 bp, Artificial Sequence
  Synthetic oligonucleotide
gcgtcatcacgttgtgcattcctagactga

SEQ ID NO: 148224 - DNA, 30 bp, Artificial Sequence
  Synthetic oligonucleotide
gggggtatccttgaagcgcaatcaacctga

SEQ ID NO: 148225 - DNA, 30 bp, Artificial Sequence
  Synthetic oligonucleotide
gtgaatcgtggcgtatgcaagaccccctga

SEQ ID NO: 148226 - DNA, 30 bp, Artificial Sequence
  Synthetic oligonucleotide
ccttaatcggtcacggaggacgtcgcctga

SEQ ID NO: 148227 - DNA, 30 bp, Artificial Sequence
  Synthetic oligonucleotide
tctaaactcaagcatcaaatttgggcctga

SEQ ID NO: 148228 - DNA, 30 bp, Artificial Sequence
  Synthetic oligonucleotide
caacggaaacatcaaggcattcactcctga

SEQ ID NO: 148229 - DNA, 30 bp, Artificial Sequence
  Synthetic oligonucleotide
agcattggcgttcgggagcctccctcctga

SEQ ID NO: 148230 - DNA, 30 bp, Artificial Sequence
  Synthetic oligonucleotide
ctgggcttaggagatataggagaaagctga

SEQ ID NO: 148231 - DNA, 30 bp, Artificial Sequence
  Synthetic oligonucleotide
gggacattacgcacgtccggatggagctga

SEQ ID NO: 148232 - DNA, 30 bp, Artificial Sequence
  Synthetic oligonucleotide
acacttccggtacacctagttatgagctga

SEQ ID NO: 148233 - DNA, 30 bp, Artificial Sequence
  Synthetic oligonucleotide
ccaggtcggacagtggataggcttagctga

SEQ ID NO: 148234 - DNA, 30 bp, Artificial Sequence
  Synthetic oligonucleotide
catcatgtataccccccagccataggctga

SEQ ID NO: 148235 - DNA, 30 bp, Artificial Sequence
  Synthetic oligonucleotide
gacttatagtccgacaaacctccgggctga

SEQ ID NO: 148236 - DNA, 30 bp, Artificial Sequence
  Synthetic oligonucleotide
accgtttggcgtgcatttaggtatggctga

SEQ ID NO: 148237 - DNA, 30 bp, Artificial Sequence
  Synthetic oligonucleotide
cgcaacttgcaataaagtgcaattggctga

SEQ ID NO: 148238 - DNA, 30 bp, Artificial Sequence
  Synthetic oligonucleotide
tgacagcgtggtaggggacataagtgctga

SEQ ID NO: 148239 - DNA, 30 bp, Artificial Sequence
  Synthetic oligonucleotide
cgcttaatgaggataggatgtagaatctga

SEQ ID NO: 148240 - DNA, 30 bp, Artificial Sequence
  Synthetic oligonucleotide
gataaaataagtaccagaactcgcatctga

SEQ ID NO: 148241 - DNA, 30 bp, Artificial Sequence
  Synthetic oligonucleotide
cggccgaagcgtgtgggcgacgcgatctga

SEQ ID NO: 148242 - DNA, 30 bp, Artificial Sequence
  Synthetic oligonucleotide
agctaacagttatggtcagcattgatctga

SEQ ID NO: 148243 - DNA, 30 bp, Artificial Sequence
  Synthetic oligonucleotide
cacccaagaatgcgccgaatcaacctctga

SEQ ID NO: 148244 - DNA, 30 bp, Artificial Sequence
  Synthetic oligonucleotide
ctccattctagagacaattgggcgctctga

SEQ ID NO: 148245 - DNA, 30 bp, Artificial Sequence
  Synthetic oligonucleotide
ggggttgcacgccccgatgtcgcagtctga

SEQ ID NO: 148246 - DNA, 30 bp, Artificial Sequence
  Synthetic oligonucleotide
gaaagcgataacaatgtaatatcagtctga

SEQ ID NO: 148247 - DNA, 30 bp, Artificial Sequence
  Synthetic oligonucleotide
ttcaaggggtaagtaagaattaacgtctga

SEQ ID NO: 148248 - DNA, 30 bp, Artificial Sequence
  Synthetic oligonucleotide
tccgaaaaggacaaggcctaagccgtctga

SEQ ID NO: 148249 - DNA, 30 bp, Artificial Sequence
  Synthetic oligonucleotide
gccaaaaagatcgttgaaacgctggtctga

SEQ ID NO: 148250 - DNA, 30 bp, Artificial Sequence
  Synthetic oligonucleotide
gatggctaatatcactcgagatctgtctga

SEQ ID NO: 148251 - DNA, 30 bp, Artificial Sequence
  Synthetic oligonucleotide
gatgagccagtgtagagtcgaggcttctga

SEQ ID NO: 148252 - DNA, 30 bp, Artificial Sequence
  Synthetic oligonucleotide
ggctggtctctcctacaatttacgttctga

SEQ ID NO: 148253 - DNA, 30 bp, Artificial Sequence
  Synthetic oligonucleotide
tacgttctatagagagtgatgttgaagtga

SEQ ID NO: 148254 - DNA, 30 bp, Artificial Sequence
  Synthetic oligonucleotide
tagacccatagcttgaatgaaggacagtga

SEQ ID NO: 148255 - DNA, 30 bp, Artificial Sequence
  Synthetic oligonucleotide
catgcaaccctacggtcaaaaatacagtga

SEQ ID NO: 148256 - DNA, 30 bp, Artificial Sequence
  Synthetic oligonucleotide
cagggcgcatactttttgaaggaccagtga

SEQ ID NO: 148257 - DNA, 30 bp, Artificial Sequence
  Synthetic oligonucleotide
ccgctaccgggcaagttgacgtaccagtga

SEQ ID NO: 148258 - DNA, 30 bp, Artificial Sequence
  Synthetic oligonucleotide
ccggttgcaaaaaggcaactattccagtga

SEQ ID NO: 148259 - DNA, 30 bp, Artificial Sequence
  Synthetic oligonucleotide
caagctcttaaccctagctcctcggagtga

SEQ ID NO: 148260 - DNA, 30 bp, Artificial Sequence
  Synthetic oligonucleotide
acattcccataagctgtaagttcggagtga

SEQ ID NO: 148261 - DNA, 30 bp, Artificial Sequence
  Synthetic oligonucleotide
aataacaccgaccaaaaatgcagggagtga

SEQ ID NO: 148262 - DNA, 30 bp, Artificial Sequence
  Synthetic oligonucleotide
taaagggcgcaacagatctacactgagtga

SEQ ID NO: 148263 - DNA, 30 bp, Artificial Sequence
  Synthetic oligonucleotide
tctcgcgaacggacacaagtgggatagtga

SEQ ID NO: 148264 - DNA, 30 bp, Artificial Sequence
  Synthetic oligonucleotide
tataaggaactgtgggttgacccgtagtga

SEQ ID NO: 148265 - DNA, 30 bp, Artificial Sequence
  Synthetic oligonucleotide
acatgggtataagggtcctggggttagtga

SEQ ID NO: 148266 - DNA, 30 bp, Artificial Sequence
  Synthetic oligonucleotide
gtataagggagggtaagccgaatttagtga

SEQ ID NO: 148267 - DNA, 30 bp, Artificial Sequence
  Synthetic oligonucleotide
gcagtacgcaaaggccatagtcaaacgtga

SEQ ID NO: 148268 - DNA, 30 bp, Artificial Sequence
  Synthetic oligonucleotide
accatacatacgcggataagaggaacgtga

SEQ ID NO: 148269 - DNA, 30 bp, Artificial Sequence
  Synthetic oligonucleotide
tgatcattaaatcgtgggtggagcacgtga

SEQ ID NO: 148270 - DNA, 30 bp, Artificial Sequence
  Synthetic oligonucleotide
gaagtgccaggcgaggtagttcgcacgtga

SEQ ID NO: 148271 - DNA, 30 bp, Artificial Sequence
  Synthetic oligonucleotide
agaccgggactggattatcatgtcacgtga

SEQ ID NO: 148272 - DNA, 30 bp, Artificial Sequence
  Synthetic oligonucleotide
tcctccgttagaaccgtgtcgcagacgtga

SEQ ID NO: 148273 - DNA, 30 bp, Artificial Sequence
  Synthetic oligonucleotide
caaaattccgaaactaggatcgttccgtga

SEQ ID NO: 148274 - DNA, 30 bp, Artificial Sequence
  Synthetic oligonucleotide
tggtatcgtaagagagttctaaacgcgtga

SEQ ID NO: 148275 - DNA, 30 bp, Artificial Sequence
  Synthetic oligonucleotide
tggatgtggcacctttagtttcccgcgtga

SEQ ID NO: 148276 - DNA, 30 bp, Artificial Sequence
  Synthetic oligonucleotide
cctgtcatctctggagccccgcgcgcgtga

SEQ ID NO: 148277 - DNA, 30 bp, Artificial Sequence
  Synthetic oligonucleotide
gaatgcgggaaagctccgcttagggcgtga

SEQ ID NO: 148278 - DNA, 30 bp, Artificial Sequence
  Synthetic oligonucleotide
atgcgagaacagtttcgcaaggtctcgtga

SEQ ID NO: 148279 - DNA, 30 bp, Artificial Sequence
  Synthetic oligonucleotide
gtagggttaggaaatgatgccctcaggtga

SEQ ID NO: 148280 - DNA, 30 bp, Artificial Sequence
  Synthetic oligonucleotide
tggaccgacataaacgatttgttgaggtga

SEQ ID NO: 148281 - DNA, 30 bp, Artificial Sequence
  Synthetic oligonucleotide
aagtagctccctgggtaactacgtaggtga

SEQ ID NO: 148282 - DNA, 30 bp, Artificial Sequence
  Synthetic oligonucleotide
cgagatttaaggtcagggatgtttaggtga

SEQ ID NO: 148283 - DNA, 30 bp, Artificial Sequence
  Synthetic oligonucleotide
ccactctgcaagagagctagacaacggtga

SEQ ID NO: 148284 - DNA, 30 bp, Artificial Sequence
  Synthetic oligonucleotide
ccacatgatagtatcctgtgctaacggtga

SEQ ID NO: 148285 - DNA, 30 bp, Artificial Sequence
  Synthetic oligonucleotide
gtgagcttgtctaggcaacgggtacggtga

SEQ ID NO: 148286 - DNA, 30 bp, Artificial Sequence
  Synthetic oligonucleotide
cgataacaataggaggtccggtgccggtga

SEQ ID NO: 148287 - DNA, 30 bp, Artificial Sequence
  Synthetic oligonucleotide
gtcagcgcacgctgaagggaactgcggtga

SEQ ID NO: 148288 - DNA, 30 bp, Artificial Sequence
  Synthetic oligonucleotide
tttggcgcgcttaacagagctcaagggtga

SEQ ID NO: 148289 - DNA, 30 bp, Artificial Sequence
  Synthetic oligonucleotide
ggaatgggaaagtattttggataagggtga

SEQ ID NO: 148290 - DNA, 30 bp, Artificial Sequence
  Synthetic oligonucleotide
taggaccgacggcaagccctcttagggtga

SEQ ID NO: 148291 - DNA, 31 bp, Artificial Sequence
  Synthetic oligonucleotide
gccacatactactactgactcgggcgggtga

SEQ ID NO: 148292 - DNA, 30 bp, Artificial Sequence
  Synthetic oligonucleotide
tcgaattacagctactctcatttggggtga

SEQ ID NO: 148293 - DNA, 30 bp, Artificial Sequence
  Synthetic oligonucleotide
tgtacatgaccagcgggatgacgatggtga

SEQ ID NO: 148294 - DNA, 30 bp, Artificial Sequence
  Synthetic oligonucleotide
tgtaccaggggaagcgatctcgattggtga

SEQ ID NO: 148295 - DNA, 30 bp, Artificial Sequence
  Synthetic oligonucleotide
ccggagaggaataaggcgggctggatgtga

SEQ ID NO: 148296 - DNA, 30 bp, Artificial Sequence
  Synthetic oligonucleotide
tccttgaggtcaatccacagtgaactgtga

SEQ ID NO: 148297 - DNA, 30 bp, Artificial Sequence
  Synthetic oligonucleotide
cgtcggggagatttgctaagataactgtga

SEQ ID NO: 148298 - DNA, 30 bp, Artificial Sequence
  Synthetic oligonucleotide
aacgtctgttaaagcgtgtatgtactgtga

SEQ ID NO: 148299 - DNA, 30 bp, Artificial Sequence
  Synthetic oligonucleotide
agcggcacaggggaaagagaccgcctgtga

SEQ ID NO: 148300 - DNA, 30 bp, Artificial Sequence
  Synthetic oligonucleotide
ccaaagaggaagactaggaaactcctgtga

SEQ ID NO: 148301 - DNA, 30 bp, Artificial Sequence
  Synthetic oligonucleotide
gtaaaatgcccatcgaaagacctgctgtga

SEQ ID NO: 148302 - DNA, 30 bp, Artificial Sequence
  Synthetic oligonucleotide
tgtagacgagtttcaaggcctggagtgtga

SEQ ID NO: 148303 - DNA, 30 bp, Artificial Sequence
  Synthetic oligonucleotide
gaacgacgagtcaggcagaatcgcgtgtga

SEQ ID NO: 148304 - DNA, 30 bp, Artificial Sequence
  Synthetic oligonucleotide
gcttcgaaattgggttaggcattcgtgtga

SEQ ID NO: 148305 - DNA, 30 bp, Artificial Sequence
  Synthetic oligonucleotide
agagtagtaacgaaccggtagtcgttgtga

SEQ ID NO: 148306 - DNA, 30 bp, Artificial Sequence
  Synthetic oligonucleotide
atcagaggcatgagatgacgcccaaattga

SEQ ID NO: 148307 - DNA, 30 bp, Artificial Sequence
  Synthetic oligonucleotide
agtgggggtaaacctagaggagccaattga

SEQ ID NO: 148308 - DNA, 30 bp, Artificial Sequence
  Synthetic oligonucleotide
agacggacgtccaacaacgatgccaattga

SEQ ID NO: 148309 - DNA, 30 bp, Artificial Sequence
  Synthetic oligonucleotide
gataggaccaagggtacataggtgaattga

SEQ ID NO: 148310 - DNA, 30 bp, Artificial Sequence
  Synthetic oligonucleotide
gtgcaacgtttgactcctaggaataattga

SEQ ID NO: 148311 - DNA, 30 bp, Artificial Sequence
  Synthetic oligonucleotide
agtgctatatgcttaatccagcgacattga

SEQ ID NO: 148312 - DNA, 30 bp, Artificial Sequence
  Synthetic oligonucleotide
gtggtaatcgaacgctcaagttaccattga

SEQ ID NO: 148313 - DNA, 30 bp, Artificial Sequence
  Synthetic oligonucleotide
cggaattgagcagtcgagtgttagcattga

SEQ ID NO: 148314 - DNA, 30 bp, Artificial Sequence
  Synthetic oligonucleotide
agggcctaactttacggagtttggcattga

SEQ ID NO: 148315 - DNA, 30 bp, Artificial Sequence
  Synthetic oligonucleotide
tcaagggtgatggttaagaacacagattga

SEQ ID NO: 148316 - DNA, 30 bp, Artificial Sequence
  Synthetic oligonucleotide
aggattattacaacgaccgaccgagattga

SEQ ID NO: 148317 - DNA, 30 bp, Artificial Sequence
  Synthetic oligonucleotide
cagtggcagggttcgtatttgaccgattga

SEQ ID NO: 148318 - DNA, 30 bp, Artificial Sequence
  Synthetic oligonucleotide
ggccatagcgctacatatatacgtgattga

SEQ ID NO: 148319 - DNA, 30 bp, Artificial Sequence
  Synthetic oligonucleotide
gggcgctcgcacgatttacccggctattga

SEQ ID NO: 148320 - DNA, 30 bp, Artificial Sequence
  Synthetic oligonucleotide
aaggtcatcctttaattggctccttattga

SEQ ID NO: 148321 - DNA, 30 bp, Artificial Sequence
  Synthetic oligonucleotide
tgtgcatatgccgtccacaaagaaacttga

SEQ ID NO: 148322 - DNA, 30 bp, Artificial Sequence
  Synthetic oligonucleotide
gctgccaatcagcaggacacatacacttga

SEQ ID NO: 148323 - DNA, 30 bp, Artificial Sequence
  Synthetic oligonucleotide
tccctgactaagtatgcctaccagacttga

SEQ ID NO: 148324 - DNA, 30 bp, Artificial Sequence
  Synthetic oligonucleotide
acgatagaacgtatgtagactgcgccttga

SEQ ID NO: 148325 - DNA, 30 bp, Artificial Sequence
  Synthetic oligonucleotide
cctatgtagaaggtccctgctacagcttga

SEQ ID NO: 148326 - DNA, 30 bp, Artificial Sequence
  Synthetic oligonucleotide
atgcattaatactctctcgtagcagcttga

SEQ ID NO: 148327 - DNA, 30 bp, Artificial Sequence
  Synthetic oligonucleotide
cgtatagcacttaaggaattgggagcttga

SEQ ID NO: 148328 - DNA, 30 bp, Artificial Sequence
  Synthetic oligonucleotide
ggtctgttaatctgccttcgtctagcttga

SEQ ID NO: 148329 - DNA, 30 bp, Artificial Sequence
  Synthetic oligonucleotide
tcttgccgtcgagtttacagagctgcttga

SEQ ID NO: 148330 - DNA, 30 bp, Artificial Sequence
  Synthetic oligonucleotide
tcagcagcggttgatggctattgtgcttga

SEQ ID NO: 148331 - DNA, 30 bp, Artificial Sequence
  Synthetic oligonucleotide
tcgagccgcccagtctgacagacatcttga

SEQ ID NO: 148332 - DNA, 30 bp, Artificial Sequence
  Synthetic oligonucleotide
gctggtctcaagtgaatgttggacagttga

SEQ ID NO: 148333 - DNA, 30 bp, Artificial Sequence
  Synthetic oligonucleotide
agaggaagactgactccagacgccagttga

SEQ ID NO: 148334 - DNA, 30 bp, Artificial Sequence
  Synthetic oligonucleotide
gtccacctcgaagacgacaccgcgagttga

SEQ ID NO: 148335 - DNA, 30 bp, Artificial Sequence
  Synthetic oligonucleotide
cagccgaatgtactgtgcggaattagttga

SEQ ID NO: 148336 - DNA, 30 bp, Artificial Sequence
  Synthetic oligonucleotide
gatacactgagtatagataaagttagttga

SEQ ID NO: 148337 - DNA, 30 bp, Artificial Sequence
  Synthetic oligonucleotide
aaggcgagtgttatcccagaaccacgttga

SEQ ID NO: 148338 - DNA, 30 bp, Artificial Sequence
  Synthetic oligonucleotide
agcaggggaacagatggtgccggtcgttga

SEQ ID NO: 148339 - DNA, 30 bp, Artificial Sequence
  Synthetic oligonucleotide
tatcaaaagcccaagtatactccaggttga

SEQ ID NO: 148340 - DNA, 30 bp, Artificial Sequence
  Synthetic oligonucleotide
ggttgcgccattgttgggtctaagggttga

SEQ ID NO: 148341 - DNA, 30 bp, Artificial Sequence
  Synthetic oligonucleotide
aatcaggcgaacgagaacaacatgggttga

SEQ ID NO: 148342 - DNA, 30 bp, Artificial Sequence
  Synthetic oligonucleotide
aacgagtccggataccacggttatggttga

SEQ ID NO: 148343 - DNA, 30 bp, Artificial Sequence
  Synthetic oligonucleotide
agtggaactccaattcaggtatactgttga

SEQ ID NO: 148344 - DNA, 30 bp, Artificial Sequence
  Synthetic oligonucleotide
gcggagtagaaaaacgtatttaggtgttga

SEQ ID NO: 148345 - DNA, 30 bp, Artificial Sequence
  Synthetic oligonucleotide
cacccaatatggttggtatgtcattgttga

SEQ ID NO: 148346 - DNA, 30 bp, Artificial Sequence
  Synthetic oligonucleotide
tcaaatgttggtggaatcgtagtttgttga

SEQ ID NO: 148347 - DNA, 30 bp, Artificial Sequence
  Synthetic oligonucleotide
aggtgactccagccgatatcggaaatttga

SEQ ID NO: 148348 - DNA, 30 bp, Artificial Sequence
  Synthetic oligonucleotide
tacggacgcgaagggcgtttgccaatttga

SEQ ID NO: 148349 - DNA, 30 bp, Artificial Sequence
  Synthetic oligonucleotide
cggaaccttaaatttcggccaaacatttga

SEQ ID NO: 148350 - DNA, 30 bp, Artificial Sequence
  Synthetic oligonucleotide
gagcgcccgatacctgagatgcatatttga

SEQ ID NO: 148351 - DNA, 30 bp, Artificial Sequence
  Synthetic oligonucleotide
gtgggcagtgtactggagggtgatatttga

SEQ ID NO: 148352 - DNA, 30 bp, Artificial Sequence
  Synthetic oligonucleotide
ataaaataccattattggggacatctttga

SEQ ID NO: 148353 - DNA, 30 bp, Artificial Sequence
  Synthetic oligonucleotide
ctggtagaaggtaggggtatgcttctttga

SEQ ID NO: 148354 - DNA, 30 bp, Artificial Sequence
  Synthetic oligonucleotide
atgcactggagagacgggaaggcagtttga

SEQ ID NO: 148355 - DNA, 30 bp, Artificial Sequence
  Synthetic oligonucleotide
gtttaaaagtcgaaggtgttaatagtttga

SEQ ID NO: 148356 - DNA, 30 bp, Artificial Sequence
  Synthetic oligonucleotide
gaggcaaaactcggagaaagactagtttga

SEQ ID NO: 148357 - DNA, 30 bp, Artificial Sequence
  Synthetic oligonucleotide
tacgtagtcacggcttcgccaaaggtttga

SEQ ID NO: 148358 - DNA, 30 bp, Artificial Sequence
  Synthetic oligonucleotide
gttggtcgccgagatggatcggaaaaaata

SEQ ID NO: 148359 - DNA, 30 bp, Artificial Sequence
  Synthetic oligonucleotide
atggacacaatcgggaggggtaacaaaata

SEQ ID NO: 148360 - DNA, 30 bp, Artificial Sequence
  Synthetic oligonucleotide
gcacgataaatgagtttaccagggaaaata

SEQ ID NO: 148361 - DNA, 30 bp, Artificial Sequence
  Synthetic oligonucleotide
cccgtataggacgattccctagtgaaaata

SEQ ID NO: 148362 - DNA, 30 bp, Artificial Sequence
  Synthetic oligonucleotide
aggtgctggtctttcgtcgtgggtaaaata

SEQ ID NO: 148363 - DNA, 30 bp, Artificial Sequence
  Synthetic oligonucleotide
ccattgagcgactcgaacagatgtaaaata

SEQ ID NO: 148364 - DNA, 30 bp, Artificial Sequence
  Synthetic oligonucleotide
agggtcgatggcattgcaggttcccaaata

SEQ ID NO: 148365 - DNA, 30 bp, Artificial Sequence
  Synthetic oligonucleotide
aggtgtcaacggatagcactctcgcaaata

SEQ ID NO: 148366 - DNA, 30 bp, Artificial Sequence
  Synthetic oligonucleotide
agtcctcaggcacacgaccccatagaaata

SEQ ID NO: 148367 - DNA, 30 bp, Artificial Sequence
  Synthetic oligonucleotide
cattcaatccgctgtaggggtgccgaaata

SEQ ID NO: 148368 - DNA, 30 bp, Artificial Sequence
  Synthetic oligonucleotide
gaagtacgatgagccatacgaagcgaaata

SEQ ID NO: 148369 - DNA, 30 bp, Artificial Sequence
  Synthetic oligonucleotide
cgcgagagggagggaaatggatgcgaaata

SEQ ID NO: 148370 - DNA, 30 bp, Artificial Sequence
  Synthetic oligonucleotide
gtagaatacatggcgaatttctgggaaata

SEQ ID NO: 148371 - DNA, 30 bp, Artificial Sequence
  Synthetic oligonucleotide
agtcccaccaaaacaggattgctggaaata

SEQ ID NO: 148372 - DNA, 30 bp, Artificial Sequence
  Synthetic oligonucleotide
aacggttgatagagttagctacactaaata

SEQ ID NO: 148373 - DNA, 30 bp, Artificial Sequence
  Synthetic oligonucleotide
ggtggggtgcaggaacgctaagactaaata

SEQ ID NO: 148374 - DNA, 30 bp, Artificial Sequence
  Synthetic oligonucleotide
ggacaatcttgaagtgactgcacctaaata

SEQ ID NO: 148375 - DNA, 30 bp, Artificial Sequence
  Synthetic oligonucleotide
ccgcgctaacaaggcccagttttgtaaata

SEQ ID NO: 148376 - DNA, 30 bp, Artificial Sequence
  Synthetic oligonucleotide
tcaagcgcgtggattgcgggcacttaaata

SEQ ID NO: 148377 - DNA, 30 bp, Artificial Sequence
  Synthetic oligonucleotide
cggcgcgagaactaagttcgagtttaaata

SEQ ID NO: 148378 - DNA, 30 bp, Artificial Sequence
  Synthetic oligonucleotide
tcctctttaaataatcgtaaggtgacaata

SEQ ID NO: 148379 - DNA, 30 bp, Artificial Sequence
  Synthetic oligonucleotide
tgtgcgcaattttgccgtcctactacaata

SEQ ID NO: 148380 - DNA, 30 bp, Artificial Sequence
  Synthetic oligonucleotide
gttacgcgtggctaagtaaaaagtacaata

SEQ ID NO: 148381 - DNA, 30 bp, Artificial Sequence
  Synthetic oligonucleotide
ctagggcagtaccatacagtaggcccaata

SEQ ID NO: 148382 - DNA, 30 bp, Artificial Sequence
  Synthetic oligonucleotide
aaggacaggacccaataacccactccaata

SEQ ID NO: 148383 - DNA, 30 bp, Artificial Sequence
  Synthetic oligonucleotide
cactggtaattgaaggagcgcagagcaata

SEQ ID NO: 148384 - DNA, 30 bp, Artificial Sequence
  Synthetic oligonucleotide
cgcgttgtcattgtgtaactccaggcaata

SEQ ID NO: 148385 - DNA, 30 bp, Artificial Sequence
  Synthetic oligonucleotide
gaaatcggtcaccgagtactacgggcaata

SEQ ID NO: 148386 - DNA, 30 bp, Artificial Sequence
  Synthetic oligonucleotide
gttaggggcggatgggagtaatgggcaata

SEQ ID NO: 148387 - DNA, 30 bp, Artificial Sequence
  Synthetic oligonucleotide
cgacatttcgctgggtcgtagcgatcaata

SEQ ID NO: 148388 - DNA, 30 bp, Artificial Sequence
  Synthetic oligonucleotide
ggtatgaaatcgtgtatagacatatcaata

SEQ ID NO: 148389 - DNA, 30 bp, Artificial Sequence
  Synthetic oligonucleotide
gcgccagtgtttaattagaatagctcaata

SEQ ID NO: 148390 - DNA, 30 bp, Artificial Sequence
  Synthetic oligonucleotide
cgtcattataggcgacctggaggctcaata

SEQ ID NO: 148391 - DNA, 30 bp, Artificial Sequence
  Synthetic oligonucleotide
gcgatgcgtaggctatcgattatttcaata

SEQ ID NO: 148392 - DNA, 30 bp, Artificial Sequence
  Synthetic oligonucleotide
gtgtagcgggacacggcttacgtgagaata

SEQ ID NO: 148393 - DNA, 30 bp, Artificial Sequence
  Synthetic oligonucleotide
tgtggagccacaggggcggacgatcgaata

SEQ ID NO: 148394 - DNA, 30 bp, Artificial Sequence
  Synthetic oligonucleotide
tagagggacagattggatccagcaggaata

SEQ ID NO: 148395 - DNA, 30 bp, Artificial Sequence
  Synthetic oligonucleotide
attaaggggatatcaacaatcttcggaata

SEQ ID NO: 148396 - DNA, 30 bp, Artificial Sequence
  Synthetic oligonucleotide
ctcgggcacctgaggatacaagtgggaata

SEQ ID NO: 148397 - DNA, 30 bp, Artificial Sequence
  Synthetic oligonucleotide
aagttttgaacgtgggaaatggtgggaata

SEQ ID NO: 148398 - DNA, 30 bp, Artificial Sequence
  Synthetic oligonucleotide
atataggtaggccgaaggctggctggaata

SEQ ID NO: 148399 - DNA, 30 bp, Artificial Sequence
  Synthetic oligonucleotide
ccgcttcgagggtgccagcactctggaata

SEQ ID NO: 148400 - DNA, 30 bp, Artificial Sequence
  Synthetic oligonucleotide
gaaagggttagatttatagtgtgctgaata

SEQ ID NO: 148401 - DNA, 30 bp, Artificial Sequence
  Synthetic oligonucleotide
cgggaatctgagttacaagtgtgaataata

SEQ ID NO: 148402 - DNA, 30 bp, Artificial Sequence
  Synthetic oligonucleotide
cagtttccagaagcttaccagcgcataata

SEQ ID NO: 148403 - DNA, 30 bp, Artificial Sequence
  Synthetic oligonucleotide
agggtagaatgcgttaaggtattcataata

SEQ ID NO: 148404 - DNA, 30 bp, Artificial Sequence
  Synthetic oligonucleotide
tacagcaaattcaggattgcaaagataata

SEQ ID NO: 148405 - DNA, 30 bp, Artificial Sequence
  Synthetic oligonucleotide
cctatactggacatcggtacggagataata

SEQ ID NO: 148406 - DNA, 30 bp, Artificial Sequence
  Synthetic oligonucleotide
tacactccggagagttatggttcactaata

SEQ ID NO: 148407 - DNA, 30 bp, Artificial Sequence
  Synthetic oligonucleotide
tcgcaacacaattgaaggcaaagactaata

SEQ ID NO: 148408 - DNA, 30 bp, Artificial Sequence
  Synthetic oligonucleotide
atgaatacgaagacaagttaatgcctaata

SEQ ID NO: 148409 - DNA, 30 bp, Artificial Sequence
  Synthetic oligonucleotide
cagaacacccttggacacacgcaagtaata

SEQ ID NO: 148410 - DNA, 29 bp, Artificial Sequence
  Synthetic oligonucleotide
aacgccatggtagctactcacgcgtaata

SEQ ID NO: 148411 - DNA, 30 bp, Artificial Sequence
  Synthetic oligonucleotide
tcgagtcgtcgcacgccaattgaggtaata

SEQ ID NO: 148412 - DNA, 30 bp, Artificial Sequence
  Synthetic oligonucleotide
agtgtgataacgccactggggaatgtaata

SEQ ID NO: 148413 - DNA, 29 bp, Artificial Sequence
  Synthetic oligonucleotide
atgtgtgatgacagaacacgcaattaata

SEQ ID NO: 148414 - DNA, 30 bp, Artificial Sequence
  Synthetic oligonucleotide
ctatgcggcgtgtggaactaacgaaacata

SEQ ID NO: 148415 - DNA, 30 bp, Artificial Sequence
  Synthetic oligonucleotide
ttaaaatgacattgtaattcgtgcaacata

SEQ ID NO: 148416 - DNA, 30 bp, Artificial Sequence
  Synthetic oligonucleotide
cacgtgtaagataataaaatcgttaacata

SEQ ID NO: 148417 - DNA, 30 bp, Artificial Sequence
  Synthetic oligonucleotide
tcactcgggctacccgcccagctccacata

SEQ ID NO: 148418 - DNA, 30 bp, Artificial Sequence
  Synthetic oligonucleotide
cgttgagctttgtttaagctaatgcacata

SEQ ID NO: 148419 - DNA, 30 bp, Artificial Sequence
  Synthetic oligonucleotide
gctggttatagcaaagattacgatcacata

SEQ ID NO: 148420 - DNA, 30 bp, Artificial Sequence
  Synthetic oligonucleotide
tgaaaatccagtctgattagagttcacata

SEQ ID NO: 148421 - DNA, 30 bp, Artificial Sequence
  Synthetic oligonucleotide
gataacttcagtctgtgaagtaaagacata

SEQ ID NO: 148422 - DNA, 30 bp, Artificial Sequence
  Synthetic oligonucleotide
ccttcggggcggcgcctctatccagacata

SEQ ID NO: 148423 - DNA, 30 bp, Artificial Sequence
  Synthetic oligonucleotide
cagacaaaattcacgatgccgttagacata

SEQ ID NO: 148424 - DNA, 28 bp, Artificial Sequence
  Synthetic oligonucleotide
gcggaaaataaaagtaataggcgacata

SEQ ID NO: 148425 - DNA, 30 bp, Artificial Sequence
  Synthetic oligonucleotide
catacccgatggtctctatcgtatgacata

SEQ ID NO: 148426 - DNA, 30 bp, Artificial Sequence
  Synthetic oligonucleotide
cgtgccgttgtcctataatattctgacata

SEQ ID NO: 148427 - DNA, 30 bp, Artificial Sequence
  Synthetic oligonucleotide
tttacccgcctaagcagcgacccttacata

SEQ ID NO: 148428 - DNA, 30 bp, Artificial Sequence
  Synthetic oligonucleotide
cggggtaagggtggtttatggtccaccata

SEQ ID NO: 148429 - DNA, 30 bp, Artificial Sequence
  Synthetic oligonucleotide
cctgtgcgcggtctgtcaaaaggcaccata

SEQ ID NO: 148430 - DNA, 30 bp, Artificial Sequence
  Synthetic oligonucleotide
taagtcaagcattagtttgtgccgaccata

SEQ ID NO: 148431 - DNA, 30 bp, Artificial Sequence
  Synthetic oligonucleotide
atgaacgaatagattttttagaggaccata

SEQ ID NO: 148432 - DNA, 30 bp, Artificial Sequence
  Synthetic oligonucleotide
ggggggataccccgcacaaacattaccata

SEQ ID NO: 148433 - DNA, 30 bp, Artificial Sequence
  Synthetic oligonucleotide
cgacgtatcgcctaatgaagagcacccata

SEQ ID NO: 148434 - DNA, 30 bp, Artificial Sequence
  Synthetic oligonucleotide
agtaggagcccttacagaaacgcccccata

SEQ ID NO: 148435 - DNA, 30 bp, Artificial Sequence
  Synthetic oligonucleotide
gaatgtctgaaagcaataacgcgccccata

SEQ ID NO: 148436 - DNA, 30 bp, Artificial Sequence
  Synthetic oligonucleotide
aaaacaatatgccatagccctagagccata

SEQ ID NO: 148437 - DNA, 30 bp, Artificial Sequence
  Synthetic oligonucleotide
ggtacgtggtgacgttcagaggtagccata

SEQ ID NO: 148438 - DNA, 30 bp, Artificial Sequence
  Synthetic oligonucleotide
aatactgatctacatggtcaggaggccata

SEQ ID NO: 148439 - DNA, 30 bp, Artificial Sequence
  Synthetic oligonucleotide
gttagcctcgcgtaagaacgcactgccata

SEQ ID NO: 148440 - DNA, 30 bp, Artificial Sequence
  Synthetic oligonucleotide
ggaccaaagacggcaatgtgggtatccata

SEQ ID NO: 148441 - DNA, 30 bp, Artificial Sequence
  Synthetic oligonucleotide
gggagttgcctaagaacagtaaggagcata

SEQ ID NO: 148442 - DNA, 30 bp, Artificial Sequence
  Synthetic oligonucleotide
tatgcggaccgaattattttcaggagcata

SEQ ID NO: 148443 - DNA, 30 bp, Artificial Sequence
  Synthetic oligonucleotide
gaaataactgtgccgtctaccccacgcata

SEQ ID NO: 148444 - DNA, 30 bp, Artificial Sequence
  Synthetic oligonucleotide
tgaatcgtcacacgggcaacgcgccgcata

SEQ ID NO: 148445 - DNA, 30 bp, Artificial Sequence
  Synthetic oligonucleotide
aggtccattacgatacatttgaggcgcata

SEQ ID NO: 148446 - DNA, 40 bp, Artificial Sequence
  Synthetic oligonucleotide
cggtacaccccgatgctataaacgccttaccctgcgcata

SEQ ID NO: 148447 - DNA, 30 bp, Artificial Sequence
  Synthetic oligonucleotide
attacatcaatcacttagggccctcgcata

SEQ ID NO: 148448 - DNA, 30 bp, Artificial Sequence
  Synthetic oligonucleotide
aggaacatctggaagggcgtaattcgcata

SEQ ID NO: 148449 - DNA, 30 bp, Artificial Sequence
  Synthetic oligonucleotide
aggcaggtgagaagctggggcgttggcata

SEQ ID NO: 148450 - DNA, 30 bp, Artificial Sequence
  Synthetic oligonucleotide
ctgggggaacacggctaagcccacatcata

SEQ ID NO: 148451 - DNA, 30 bp, Artificial Sequence
  Synthetic oligonucleotide
gccggagggtggccgaacgtcaggatcata

SEQ ID NO: 148452 - DNA, 30 bp, Artificial Sequence
  Synthetic oligonucleotide
ctaaggcatggtaatcagcatagactcata

SEQ ID NO: 148453 - DNA, 30 bp, Artificial Sequence
  Synthetic oligonucleotide
gaccattgatctttcgactctaacctcata

SEQ ID NO: 148454 - DNA, 30 bp, Artificial Sequence
  Synthetic oligonucleotide
atagtctgtaactagttagagggcctcata

SEQ ID NO: 148455 - DNA, 30 bp, Artificial Sequence
  Synthetic oligonucleotide
ataccaaagtcatatcagtccaatctcata

SEQ ID NO: 148456 - DNA, 30 bp, Artificial Sequence
  Synthetic oligonucleotide
gtatgggcttagcggattacggctctcata

SEQ ID NO: 148457 - DNA, 30 bp, Artificial Sequence
  Synthetic oligonucleotide
tacgtcccctgcggatgtaggttagtcata

SEQ ID NO: 148458 - DNA, 30 bp, Artificial Sequence
  Synthetic oligonucleotide
actcagacgactggctcggcaaccgtcata

SEQ ID NO: 148459 - DNA, 30 bp, Artificial Sequence
  Synthetic oligonucleotide
tcccggcacggcctcaatctcttggtcata

SEQ ID NO: 148460 - DNA, 30 bp, Artificial Sequence
  Synthetic oligonucleotide
acgaatttcggttacctgtggttgttcata

SEQ ID NO: 148461 - DNA, 30 bp, Artificial Sequence
  Synthetic oligonucleotide
ggataaaactggggtaaattgttaaagata

SEQ ID NO: 148462 - DNA, 30 bp, Artificial Sequence
  Synthetic oligonucleotide
atagtgcggaagctgggtttcaacaagata

SEQ ID NO: 148463 - DNA, 30 bp, Artificial Sequence
  Synthetic oligonucleotide
cactgttcggatagacgatggcgcaagata

SEQ ID NO: 148464 - DNA, 30 bp, Artificial Sequence
  Synthetic oligonucleotide
caaaccttggtggtcgtcaaatggaagata

SEQ ID NO: 148465 - DNA, 30 bp, Artificial Sequence
  Synthetic oligonucleotide
catcatgctctgtaaatcacaggacagata

SEQ ID NO: 148466 - DNA, 30 bp, Artificial Sequence
  Synthetic oligonucleotide
acatagtgtgcacccatgcggctacagata

SEQ ID NO: 148467 - DNA, 30 bp, Artificial Sequence
  Synthetic oligonucleotide
tggttcacagagctagatcttgagcagata

SEQ ID NO: 148468 - DNA, 30 bp, Artificial Sequence
  Synthetic oligonucleotide
gtcaaaaggcaagttagcaccacgcagata

SEQ ID NO: 148469 - DNA, 30 bp, Artificial Sequence
  Synthetic oligonucleotide
ccctcaaatgccaggttccgctttcagata

SEQ ID NO: 148470 - DNA, 30 bp, Artificial Sequence
  Synthetic oligonucleotide
caaagtggaagagaccggagttgagagata

SEQ ID NO: 148471 - DNA, 30 bp, Artificial Sequence
  Synthetic oligonucleotide
ttccgtaggagcgaagatagatccgagata

SEQ ID NO: 148472 - DNA, 30 bp, Artificial Sequence
  Synthetic oligonucleotide
ggctaggtgcaaggcagaggaacggagata

SEQ ID NO: 148473 - DNA, 30 bp, Artificial Sequence
  Synthetic oligonucleotide
aggccacctcggtcagaggaatgtgagata

SEQ ID NO: 148474 - DNA, 30 bp, Artificial Sequence
  Synthetic oligonucleotide
gcatacaaatatagtgtctatacatagata

SEQ ID NO: 148475 - DNA, 30 bp, Artificial Sequence
  Synthetic oligonucleotide
actggtgcaccagcgagagacgcttagata

SEQ ID NO: 148476 - DNA, 30 bp, Artificial Sequence
  Synthetic oligonucleotide
aataggaagtcgtcgcgcgatgtttagata

SEQ ID NO: 148477 - DNA, 30 bp, Artificial Sequence
  Synthetic oligonucleotide
gccgagattaggacacgcccataaacgata

SEQ ID NO: 148478 - DNA, 30 bp, Artificial Sequence
  Synthetic oligonucleotide
tcaccgccaaaccggtaacgctcaacgata

SEQ ID NO: 148479 - DNA, 30 bp, Artificial Sequence
  Synthetic oligonucleotide
tctccgatttattacggttcgaccacgata

SEQ ID NO: 148480 - DNA, 30 bp, Artificial Sequence
  Synthetic oligonucleotide
tggcaaggtacggacgatagcgtcacgata

SEQ ID NO: 148481 - DNA, 30 bp, Artificial Sequence
  Synthetic oligonucleotide
ttcgcggatcgaccggggagcgtgacgata

SEQ ID NO: 148482 - DNA, 30 bp, Artificial Sequence
  Synthetic oligonucleotide
agactgtaaagtagacatgtcagtacgata

SEQ ID NO: 148483 - DNA, 30 bp, Artificial Sequence
  Synthetic oligonucleotide
gtgagcaaacttagcggagagtggccgata

SEQ ID NO: 148484 - DNA, 30 bp, Artificial Sequence
  Synthetic oligonucleotide
cttatacgcctgcggttcaagaatccgata

SEQ ID NO: 148485 - DNA, 30 bp, Artificial Sequence
  Synthetic oligonucleotide
agtcgacgaactcgttataattttccgata

SEQ ID NO: 148486 - DNA, 25 bp, Artificial Sequence
  Synthetic oligonucleotide
gccacaaaagggactataggcgata

SEQ ID NO: 148487 - DNA, 30 bp, Artificial Sequence
  Synthetic oligonucleotide
agatatatctcaagtcagaatgcggcgata

SEQ ID NO: 148488 - DNA, 30 bp, Artificial Sequence
  Synthetic oligonucleotide
gtcaaagtggggttataattagtgtcgata

SEQ ID NO: 148489 - DNA, 30 bp, Artificial Sequence
  Synthetic oligonucleotide
gcaaacgcccagacatgatgctcttcgata

SEQ ID NO: 148490 - DNA, 30 bp, Artificial Sequence
  Synthetic oligonucleotide
gtgaatcaacactagatgacgttcaggata

SEQ ID NO: 148491 - DNA, 30 bp, Artificial Sequence
  Synthetic oligonucleotide
gaaatgcgtaccaagggctcggaagggata

SEQ ID NO: 148492 - DNA, 30 bp, Artificial Sequence
  Synthetic oligonucleotide
tgcgcaacgggggatggcatattagggata

SEQ ID NO: 148493 - DNA, 30 bp, Artificial Sequence
  Synthetic oligonucleotide
cagacgttataatgaaggagaggcgggata

SEQ ID NO: 148494 - DNA, 30 bp, Artificial Sequence
  Synthetic oligonucleotide
aggccgagtgcgaagaactctttggggata

SEQ ID NO: 148495 - DNA, 30 bp, Artificial Sequence
  Synthetic oligonucleotide
tgaactgacttgaacgtagaaggtgggata

SEQ ID NO: 148496 - DNA, 30 bp, Artificial Sequence
  Synthetic oligonucleotide
cccatgaggtgagagaaggcccaatggata

SEQ ID NO: 148497 - DNA, 30 bp, Artificial Sequence
  Synthetic oligonucleotide
ctcacacgatagtcctgcattgcctggata

SEQ ID NO: 148498 - DNA, 30 bp, Artificial Sequence
  Synthetic oligonucleotide
tgggtgtgacagcattgcggtaattggata

SEQ ID NO: 148499 - DNA, 30 bp, Artificial Sequence
  Synthetic oligonucleotide
ctaatgtctcgggatgaacagctttggata

SEQ ID NO: 148500 - DNA, 30 bp, Artificial Sequence
  Synthetic oligonucleotide
ataggccaaagagtctgtttggtttggata

SEQ ID NO: 148501 - DNA, 30 bp, Artificial Sequence
  Synthetic oligonucleotide
ggtgcatggtaccataattccataatgata

SEQ ID NO: 148502 - DNA, 30 bp, Artificial Sequence
  Synthetic oligonucleotide
cacgtagttcaaaccgcatagttgatgata

SEQ ID NO: 148503 - DNA, 30 bp, Artificial Sequence
  Synthetic oligonucleotide
atatgaaagatggatagggagaagctgata

SEQ ID NO: 148504 - DNA, 30 bp, Artificial Sequence
  Synthetic oligonucleotide
agctagtgaggcgactcagtcacgctgata

SEQ ID NO: 148505 - DNA, 30 bp, Artificial Sequence
  Synthetic oligonucleotide
ctggacggacaaaatcctggaatgctgata

SEQ ID NO: 148506 - DNA, 30 bp, Artificial Sequence
  Synthetic oligonucleotide
ctagcaaccaattcggaacagtaggtgata

SEQ ID NO: 148507 - DNA, 30 bp, Artificial Sequence
  Synthetic oligonucleotide
agggagtgtaaatccctaatgattgtgata

SEQ ID NO: 148508 - DNA, 30 bp, Artificial Sequence
  Synthetic oligonucleotide
ttgtgtcggagaagctccgatcacaatata

SEQ ID NO: 148509 - DNA, 30 bp, Artificial Sequence
  Synthetic oligonucleotide
agccactgggcggacgtaattcgtaatata

SEQ ID NO: 148510 - DNA, 30 bp, Artificial Sequence
  Synthetic oligonucleotide
atcctaactcgggaaaacggctgtaatata

SEQ ID NO: 148511 - DNA, 30 bp, Artificial Sequence
  Synthetic oligonucleotide
gcctgatggtccggccagggggttaatata

SEQ ID NO: 148512 - DNA, 30 bp, Artificial Sequence
  Synthetic oligonucleotide
tggatgataaaccataaaggggtacatata

SEQ ID NO: 148513 - DNA, 30 bp, Artificial Sequence
  Synthetic oligonucleotide
tcactcacacaatgaaaactggtacatata

SEQ ID NO: 148514 - DNA, 30 bp, Artificial Sequence
  Synthetic oligonucleotide
caagatccgataatccaggtggcagatata

SEQ ID NO: 148515 - DNA, 30 bp, Artificial Sequence
  Synthetic oligonucleotide
atgccccgattatggtattagcatgatata

SEQ ID NO: 148516 - DNA, 30 bp, Artificial Sequence
  Synthetic oligonucleotide
gcccaaagtagagattaaatagctgatata

SEQ ID NO: 148517 - DNA, 30 bp, Artificial Sequence
  Synthetic oligonucleotide
atacggcgagccttactggaaccttatata

SEQ ID NO: 148518 - DNA, 30 bp, Artificial Sequence
  Synthetic oligonucleotide
acgggtcccgccatcaatgttccaactata

SEQ ID NO: 148519 - DNA, 30 bp, Artificial Sequence
  Synthetic oligonucleotide
caagacgtttaggacattgtgcgaactata

SEQ ID NO: 148520 - DNA, 30 bp, Artificial Sequence
  Synthetic oligonucleotide
atcgaaacaatcacatgcgacaacactata

SEQ ID NO: 148521 - DNA, 30 bp, Artificial Sequence
  Synthetic oligonucleotide
tcctaccctaagtataaggcggtcactata

SEQ ID NO: 148522 - DNA, 30 bp, Artificial Sequence
  Synthetic oligonucleotide
ccggggcacgtaggttagcgataccctata

SEQ ID NO: 148523 - DNA, 30 bp, Artificial Sequence
  Synthetic oligonucleotide
gcgggtccatgaaacgcttaaatccctata

SEQ ID NO: 148524 - DNA, 30 bp, Artificial Sequence
  Synthetic oligonucleotide
tagtaccgtggttctcactgggtagctata

SEQ ID NO: 148525 - DNA, 30 bp, Artificial Sequence
  Synthetic oligonucleotide
ggagaaaaggctgtggccaatttggctata

SEQ ID NO: 148526 - DNA, 30 bp, Artificial Sequence
  Synthetic oligonucleotide
cacttacattatgggtggactcctgctata

SEQ ID NO: 148527 - DNA, 30 bp, Artificial Sequence
  Synthetic oligonucleotide
catgtggtgttaactacactacaatctata

SEQ ID NO: 148528 - DNA, 30 bp, Artificial Sequence
  Synthetic oligonucleotide
acctcatagcatgggtgaactagatctata

SEQ ID NO: 148529 - DNA, 30 bp, Artificial Sequence
  Synthetic oligonucleotide
aacggtatgtccaagctagtgtcttctata

SEQ ID NO: 148530 - DNA, 30 bp, Artificial Sequence
  Synthetic oligonucleotide
gtaacgccggggtttgttggtgaaagtata

SEQ ID NO: 148531 - DNA, 30 bp, Artificial Sequence
  Synthetic oligonucleotide
gtcgtattggaattcataggtggaagtata

SEQ ID NO: 148532 - DNA, 30 bp, Artificial Sequence
  Synthetic oligonucleotide
cgacaattcctataagctcgcaccagtata

SEQ ID NO: 148533 - DNA, 30 bp, Artificial Sequence
  Synthetic oligonucleotide
gccgcgcgacgaagctgggaagaccgtata

SEQ ID NO: 148534 - DNA, 30 bp, Artificial Sequence
  Synthetic oligonucleotide
aaaggaattcggtttggcacaagccgtata

SEQ ID NO: 148535 - DNA, 30 bp, Artificial Sequence
  Synthetic oligonucleotide
taaaggtcaaggtaggtggatggccgtata

SEQ ID NO: 148536 - DNA, 30 bp, Artificial Sequence
  Synthetic oligonucleotide
caagccttcggctaggcttatcagcgtata

SEQ ID NO: 148537 - DNA, 30 bp, Artificial Sequence
  Synthetic oligonucleotide
tccctgacacaacataattgagtgcgtata

SEQ ID NO: 148538 - DNA, 30 bp, Artificial Sequence
  Synthetic oligonucleotide
ctggcggttctcgctgggactaggggtata

SEQ ID NO: 148539 - DNA, 30 bp, Artificial Sequence
  Synthetic oligonucleotide
tcgtccctaacccggacctggtggggtata

SEQ ID NO: 148540 - DNA, 30 bp, Artificial Sequence
  Synthetic oligonucleotide
ctagacggctcgatcactagtaaatgtata

SEQ ID NO: 148541 - DNA, 30 bp, Artificial Sequence
  Synthetic oligonucleotide
taggagtatgccgttctacgtgaatgtata

SEQ ID NO: 148542 - DNA, 30 bp, Artificial Sequence
  Synthetic oligonucleotide
cagtcactcgcactccgtcactgatgtata

SEQ ID NO: 148543 - DNA, 30 bp, Artificial Sequence
  Synthetic oligonucleotide
agagtactcttggaggaagctgcttgtata

SEQ ID NO: 148544 - DNA, 30 bp, Artificial Sequence
  Synthetic oligonucleotide
cagtgcctaatcagaaggggacacattata

SEQ ID NO: 148545 - DNA, 30 bp, Artificial Sequence
  Synthetic oligonucleotide
gtctcgaaatgtaaacgaacatccattata

SEQ ID NO: 148546 - DNA, 30 bp, Artificial Sequence
  Synthetic oligonucleotide
gagattaaagggaggtgagcgtcgcttata

SEQ ID NO: 148547 - DNA, 30 bp, Artificial Sequence
  Synthetic oligonucleotide
tcagatgtaaagtcatgcccaggagttata

SEQ ID NO: 148548 - DNA, 30 bp, Artificial Sequence
  Synthetic oligonucleotide
agggccaacgaatagcaaccttatgttata

SEQ ID NO: 148549 - DNA, 30 bp, Artificial Sequence
  Synthetic oligonucleotide
ctaggcaagaacacatgtccttgatttata

SEQ ID NO: 148550 - DNA, 30 bp, Artificial Sequence
  Synthetic oligonucleotide
ataaacagagttcgctacgtggaaaaacta

SEQ ID NO: 148551 - DNA, 30 bp, Artificial Sequence
  Synthetic oligonucleotide
ccaggtcacagtcaaggattcggcaaacta

SEQ ID NO: 148552 - DNA, 30 bp, Artificial Sequence
  Synthetic oligonucleotide
tcgcaactgttgtataacaaatagaaacta

SEQ ID NO: 148553 - DNA, 30 bp, Artificial Sequence
  Synthetic oligonucleotide
ctggttcacgggtacattggctcgaaacta

SEQ ID NO: 148554 - DNA, 30 bp, Artificial Sequence
  Synthetic oligonucleotide
tagaagtaccagtctgtctccgtgaaacta

SEQ ID NO: 148555 - DNA, 30 bp, Artificial Sequence
  Synthetic oligonucleotide
gcgaggagcatttcaggaaacgataaacta

SEQ ID NO: 148556 - DNA, 30 bp, Artificial Sequence
  Synthetic oligonucleotide
caggtcatgactttattagtgtaccaacta

SEQ ID NO: 148557 - DNA, 30 bp, Artificial Sequence
  Synthetic oligonucleotide
taaagggaccagcatcaacctagtcaacta

SEQ ID NO: 148558 - DNA, 30 bp, Artificial Sequence
  Synthetic oligonucleotide
attgatattattaggagggccatcgaacta

SEQ ID NO: 148559 - DNA, 30 bp, Artificial Sequence
  Synthetic oligonucleotide
ttcgcatgattacggtcacccggggaacta

SEQ ID NO: 148560 - DNA, 30 bp, Artificial Sequence
  Synthetic oligonucleotide
acattgtgaatagctggtgattatgaacta

SEQ ID NO: 148561 - DNA, 30 bp, Artificial Sequence
  Synthetic oligonucleotide
ggacgtactctctatcatcggtaataacta

SEQ ID NO: 148562 - DNA, 30 bp, Artificial Sequence
  Synthetic oligonucleotide
ttgcgcagaaaaaaggggggttagtaacta

SEQ ID NO: 148563 - DNA, 30 bp, Artificial Sequence
  Synthetic oligonucleotide
caatgtagaggagctggataacgaacacta

SEQ ID NO: 148564 - DNA, 30 bp, Artificial Sequence
  Synthetic oligonucleotide
cttgtgacagagacttgaccgctaacacta

SEQ ID NO: 148565 - DNA, 30 bp, Artificial Sequence
  Synthetic oligonucleotide
agctacgaacttttaacgtgcgtaacacta

SEQ ID NO: 148566 - DNA, 30 bp, Artificial Sequence
  Synthetic oligonucleotide
gatgacttaagcggagacagaaacacacta

SEQ ID NO: 148567 - DNA, 30 bp, Artificial Sequence
  Synthetic oligonucleotide
gctagctacctggttagttccaagacacta

SEQ ID NO: 148568 - DNA, 30 bp, Artificial Sequence
  Synthetic oligonucleotide
atacagcacaaggatggctcatgaccacta

SEQ ID NO: 148569 - DNA, 30 bp, Artificial Sequence
  Synthetic oligonucleotide
gctggtcatatagctcggagattaccacta

SEQ ID NO: 148570 - DNA, 30 bp, Artificial Sequence
  Synthetic oligonucleotide
atccgtggcgtcgggagaagcaacccacta

SEQ ID NO: 148571 - DNA, 30 bp, Artificial Sequence
  Synthetic oligonucleotide
cttgcgtgacccaggagacctactccacta

SEQ ID NO: 148572 - DNA, 30 bp, Artificial Sequence
  Synthetic oligonucleotide
agaatcggagcaggtaaggtggttccacta

SEQ ID NO: 148573 - DNA, 30 bp, Artificial Sequence
  Synthetic oligonucleotide
cgcaattgatcatgaactacgtcagcacta

SEQ ID NO: 148574 - DNA, 30 bp, Artificial Sequence
  Synthetic oligonucleotide
ccactggacaccacgcgtcagggcgcacta

SEQ ID NO: 148575 - DNA, 30 bp, Artificial Sequence
  Synthetic oligonucleotide
gacagtgatgcggtgttcagatgcgcacta

SEQ ID NO: 148576 - DNA, 30 bp, Artificial Sequence
  Synthetic oligonucleotide
tagacgggccgtggcatataagtcgcacta

SEQ ID NO: 148577 - DNA, 30 bp, Artificial Sequence
  Synthetic oligonucleotide
ggcatacagttatgtagatagcgggcacta

SEQ ID NO: 148578 - DNA, 30 bp, Artificial Sequence
  Synthetic oligonucleotide
cgtccccggtgattagattagcatgcacta

SEQ ID NO: 148579 - DNA, 30 bp, Artificial Sequence
  Synthetic oligonucleotide
aggcggcgatacgttcgtctacgatcacta

SEQ ID NO: 148580 - DNA, 30 bp, Artificial Sequence
  Synthetic oligonucleotide
acgcccattgtagcatggtgcagttcacta

SEQ ID NO: 148581 - DNA, 30 bp, Artificial Sequence
  Synthetic oligonucleotide
tggggtacagataaaatcggagcaagacta

SEQ ID NO: 148582 - DNA, 30 bp, Artificial Sequence
  Synthetic oligonucleotide
cccgcgccttaagcaaggggatccagacta

SEQ ID NO: 148583 - DNA, 30 bp, Artificial Sequence
  Synthetic oligonucleotide
atgttaaggcgacagtcaatgttcagacta

SEQ ID NO: 148584 - DNA, 30 bp, Artificial Sequence
  Synthetic oligonucleotide
cacttaagaccgagatttgcacagagacta

SEQ ID NO: 148585 - DNA, 30 bp, Artificial Sequence
  Synthetic oligonucleotide
tacgcttgaggggccatgagtcgtagacta

SEQ ID NO: 148586 - DNA, 30 bp, Artificial Sequence
  Synthetic oligonucleotide
taggcatcctatatcttgctatgtagacta

SEQ ID NO: 148587 - DNA, 30 bp, Artificial Sequence
  Synthetic oligonucleotide
cgactgcagtcagcgcggtataatcgacta

SEQ ID NO: 148588 - DNA, 31 bp, Artificial Sequence
  Synthetic oligonucleotide
tcttgtgacaagactgcgaaggtcaggacta

SEQ ID NO: 148589 - DNA, 30 bp, Artificial Sequence
  Synthetic oligonucleotide
cattacgggtgaagaaaatttcgaggacta

SEQ ID NO: 148590 - DNA, 30 bp, Artificial Sequence
  Synthetic oligonucleotide
caagcatcaaccgagattactggaggacta

SEQ ID NO: 148591 - DNA, 30 bp, Artificial Sequence
  Synthetic oligonucleotide
ggagcccccgtgatcgaatttaacggacta

SEQ ID NO: 148592 - DNA, 30 bp, Artificial Sequence
  Synthetic oligonucleotide
gacgacattgggacaggactatccggacta

SEQ ID NO: 148593 - DNA, 30 bp, Artificial Sequence
  Synthetic oligonucleotide
acatccatgttgtgaataggggcgggacta

SEQ ID NO: 148594 - DNA, 30 bp, Artificial Sequence
  Synthetic oligonucleotide
atatagacggagggtcgggcatggggacta

SEQ ID NO: 148595 - DNA, 30 bp, Artificial Sequence
  Synthetic oligonucleotide
gctaagttcgaatcgctcgttttgggacta

SEQ ID NO: 148596 - DNA, 30 bp, Artificial Sequence
  Synthetic oligonucleotide
agggtccaatacgaattagaaggttgacta

SEQ ID NO: 148597 - DNA, 30 bp, Artificial Sequence
  Synthetic oligonucleotide
acggtgcatcgtaccgtgagcggttgacta

SEQ ID NO: 148598 - DNA, 30 bp, Artificial Sequence
  Synthetic oligonucleotide
tcgttagtaaatgttaaggccgtttgacta

SEQ ID NO: 148599 - DNA, 30 bp, Artificial Sequence
  Synthetic oligonucleotide
tctatcacgtggataggtatcgctatacta

SEQ ID NO: 148600 - DNA, 30 bp, Artificial Sequence
  Synthetic oligonucleotide
gaccatggcgaggaaatcggtcgtatacta

SEQ ID NO: 148601 - DNA, 30 bp, Artificial Sequence
  Synthetic oligonucleotide
caccatcgtgcgtgggataggctcctacta

SEQ ID NO: 148602 - DNA, 30 bp, Artificial Sequence
  Synthetic oligonucleotide
gcgacatgcaacttcacctcgtcgctacta

SEQ ID NO: 148603 - DNA, 30 bp, Artificial Sequence
  Synthetic oligonucleotide
ctcgtaagcgaaaacatcgagcgagtacta

SEQ ID NO: 148604 - DNA, 30 bp, Artificial Sequence
  Synthetic oligonucleotide
caatatgcctcaattgaagtagccgtacta

SEQ ID NO: 148605 - DNA, 30 bp, Artificial Sequence
  Synthetic oligonucleotide
actgccagtgtccttccgtagagcgtacta

SEQ ID NO: 148606 - DNA, 30 bp, Artificial Sequence
  Synthetic oligonucleotide
taggcgggagcgtgggggttgggcgtacta

SEQ ID NO: 148607 - DNA, 30 bp, Artificial Sequence
  Synthetic oligonucleotide
ctagagagcagtttttgctcataggtacta

SEQ ID NO: 148608 - DNA, 30 bp, Artificial Sequence
  Synthetic oligonucleotide
atcataggaaagtataatcccatattacta

SEQ ID NO: 148609 - DNA, 30 bp, Artificial Sequence
  Synthetic oligonucleotide
gagcctaaccgaacaaggggtctcttacta

SEQ ID NO: 148610 - DNA, 30 bp, Artificial Sequence
  Synthetic oligonucleotide
tggtagcgagtactggggcgtccgttacta

SEQ ID NO: 148611 - DNA, 30 bp, Artificial Sequence
  Synthetic oligonucleotide
actaagaaagtcccggctttatgaaaccta

SEQ ID NO: 148612 - DNA, 30 bp, Artificial Sequence
  Synthetic oligonucleotide
ctaggatatcacaagctgcacgacaaccta

SEQ ID NO: 148613 - DNA, 30 bp, Artificial Sequence
  Synthetic oligonucleotide
tcgtactccgagtcgcgcactggcaaccta

SEQ ID NO: 148614 - DNA, 30 bp, Artificial Sequence
  Synthetic oligonucleotide
cggctaaaacctagtcactccacgaaccta

SEQ ID NO: 148615 - DNA, 30 bp, Artificial Sequence
  Synthetic oligonucleotide
tccacgttgcgccatctcgagacgaaccta

SEQ ID NO: 148616 - DNA, 30 bp, Artificial Sequence
  Synthetic oligonucleotide
gagaacacttaattttgcataccgaaccta

SEQ ID NO: 148617 - DNA, 30 bp, Artificial Sequence
  Synthetic oligonucleotide
tcatcaaacacacgagatttttggaaccta

SEQ ID NO: 148618 - DNA, 30 bp, Artificial Sequence
  Synthetic oligonucleotide
gttaagacagggattgtcagggaacaccta

SEQ ID NO: 148619 - DNA, 30 bp, Artificial Sequence
  Synthetic oligonucleotide
tgatctccgtacatgtcagggtaccaccta

SEQ ID NO: 148620 - DNA, 30 bp, Artificial Sequence
  Synthetic oligonucleotide
gaggtcgctaacaaatctaaacgccaccta

SEQ ID NO: 148621 - DNA, 30 bp, Artificial Sequence
  Synthetic oligonucleotide
atgggaacaagagcgatgagattccaccta

SEQ ID NO: 148622 - DNA, 30 bp, Artificial Sequence
  Synthetic oligonucleotide
cgtctaaccaaatctctaagcattgaccta

SEQ ID NO: 148623 - DNA, 30 bp, Artificial Sequence
  Synthetic oligonucleotide
agattacctcccgtggaactatactaccta

SEQ ID NO: 148624 - DNA, 30 bp, Artificial Sequence
  Synthetic oligonucleotide
agcatcggagaccaggtctatctctaccta

SEQ ID NO: 148625 - DNA, 30 bp, Artificial Sequence
  Synthetic oligonucleotide
ggacatcgaggtgtttacgagccttaccta

SEQ ID NO: 148626 - DNA, 30 bp, Artificial Sequence
  Synthetic oligonucleotide
gcatgagggtacttgcaatggccttaccta

SEQ ID NO: 148627 - DNA, 30 bp, Artificial Sequence
  Synthetic oligonucleotide
aggctcacgcccggcctaaggtccacccta

SEQ ID NO: 148628 - DNA, 30 bp, Artificial Sequence
  Synthetic oligonucleotide
ggatctaggattggtaaaattcgcccccta

SEQ ID NO: 148629 - DNA, 30 bp, Artificial Sequence
  Synthetic oligonucleotide
caaaaccaatgtactcctggtagggcccta

SEQ ID NO: 148630 - DNA, 30 bp, Artificial Sequence
  Synthetic oligonucleotide
gactgctggaaacaatatagcgtaagccta

SEQ ID NO: 148631 - DNA, 30 bp, Artificial Sequence
  Synthetic oligonucleotide
gtttccggatcgaacggtgagaatagccta

SEQ ID NO: 148632 - DNA, 30 bp, Artificial Sequence
  Synthetic oligonucleotide
ttacgaacttacaggccgtccagtagccta

SEQ ID NO: 148633 - DNA, 30 bp, Artificial Sequence
  Synthetic oligonucleotide
gagcgggacggtgatcaccggggacgccta

SEQ ID NO: 148634 - DNA, 30 bp, Artificial Sequence
  Synthetic oligonucleotide
ttgttatctggacatcaccagtgaggccta

SEQ ID NO: 148635 - DNA, 30 bp, Artificial Sequence
  Synthetic oligonucleotide
aagtgttagggacgagctctccccggccta

SEQ ID NO: 148636 - DNA, 30 bp, Artificial Sequence
  Synthetic oligonucleotide
tatcctgaggctaccgagctgggcggccta

SEQ ID NO: 148637 - DNA, 30 bp, Artificial Sequence
  Synthetic oligonucleotide
ggaatggacaagcaggctcccgagggccta

SEQ ID NO: 148638 - DNA, 30 bp, Artificial Sequence
  Synthetic oligonucleotide
tagtacgaatggtcgaatatggctggccta

SEQ ID NO: 148639 - DNA, 30 bp, Artificial Sequence
  Synthetic oligonucleotide
tcatgggtcaaacgcaacagttcgtgccta

SEQ ID NO: 148640 - DNA, 30 bp, Artificial Sequence
  Synthetic oligonucleotide
gtaacgatctggcttggagagactatccta

SEQ ID NO: 148641 - DNA, 30 bp, Artificial Sequence
  Synthetic oligonucleotide
tcctatgcgcgtaagccaatcgggctccta

SEQ ID NO: 148642 - DNA, 30 bp, Artificial Sequence
  Synthetic oligonucleotide
agtgatgacattaatggcagcgacgtccta

SEQ ID NO: 148643 - DNA, 30 bp, Artificial Sequence
  Synthetic oligonucleotide
caatctagagggcgtagactggcgttccta

SEQ ID NO: 148644 - DNA, 29 bp, Artificial Sequence
  Synthetic oligonucleotide
ccacgagaccagaggggctcggaaagcta

SEQ ID NO: 148645 - DNA, 30 bp, Artificial Sequence
  Synthetic oligonucleotide
agatagcgtcggcattatactggaaagcta

SEQ ID NO: 148646 - DNA, 30 bp, Artificial Sequence
  Synthetic oligonucleotide
ctcgggttttgagtgtaaccaataaagcta

SEQ ID NO: 148647 - DNA, 30 bp, Artificial Sequence
  Synthetic oligonucleotide
aatatgagtttgtttacacaatccaagcta

SEQ ID NO: 148648 - DNA, 30 bp, Artificial Sequence
  Synthetic oligonucleotide
agctgagcaacatgtatgcaccataagcta

SEQ ID NO: 148649 - DNA, 30 bp, Artificial Sequence
  Synthetic oligonucleotide
tgaaaccgcaacattgcggtgggtaagcta

SEQ ID NO: 148650 - DNA, 30 bp, Artificial Sequence
  Synthetic oligonucleotide
tgaactagcaaagaattaggtgttaagcta

SEQ ID NO: 148651 - DNA, 30 bp, Artificial Sequence
  Synthetic oligonucleotide
tgtcgatcattgggtgtcattaaccagcta

SEQ ID NO: 148652 - DNA, 30 bp, Artificial Sequence
  Synthetic oligonucleotide
accagcgcacagaccccggaggagcagcta

SEQ ID NO: 148653 - DNA, 30 bp, Artificial Sequence
  Synthetic oligonucleotide
tatgggtgggttaagggaagctgtcagcta

SEQ ID NO: 148654 - DNA, 30 bp, Artificial Sequence
  Synthetic oligonucleotide
acgttgctatccctggacaacatagagcta

SEQ ID NO: 148655 - DNA, 30 bp, Artificial Sequence
  Synthetic oligonucleotide
aaagatatccagtaagggaccctagagcta

SEQ ID NO: 148656 - DNA, 30 bp, Artificial Sequence
  Synthetic oligonucleotide
ataggcgtgtactgagcgctctaggagcta

SEQ ID NO: 148657 - DNA, 30 bp, Artificial Sequence
  Synthetic oligonucleotide
aggcttatcggggcactacacgatgagcta

SEQ ID NO: 148658 - DNA, 30 bp, Artificial Sequence
  Synthetic oligonucleotide
tagtgagttccacaaatctattatgagcta

SEQ ID NO: 148659 - DNA, 30 bp, Artificial Sequence
  Synthetic oligonucleotide
aaatggcttgattcgtgtaagagtgagcta

SEQ ID NO: 148660 - DNA, 30 bp, Artificial Sequence
  Synthetic oligonucleotide
agactcgactttttaagccaatgatagcta

SEQ ID NO: 148661 - DNA, 30 bp, Artificial Sequence
  Synthetic oligonucleotide
aattgattacaagatggtacaacgtagcta

SEQ ID NO: 148662 - DNA, 30 bp, Artificial Sequence
  Synthetic oligonucleotide
tcggtcactttattactgccggaaacgcta

SEQ ID NO: 148663 - DNA, 30 bp, Artificial Sequence
  Synthetic oligonucleotide
taactagctccgtctgcgcggacgacgcta

SEQ ID NO: 148664 - DNA, 30 bp, Artificial Sequence
  Synthetic oligonucleotide
gtgagacacgagatcaaggggcgtacgcta

SEQ ID NO: 148665 - DNA, 30 bp, Artificial Sequence
  Synthetic oligonucleotide
gcgaaatacagcgcacggatataggcgcta

SEQ ID NO: 148666 - DNA, 30 bp, Artificial Sequence
  Synthetic oligonucleotide
atattgacctaaggcaagctctgggcgcta

SEQ ID NO: 148667 - DNA, 30 bp, Artificial Sequence
  Synthetic oligonucleotide
acctgggttgcgtacacgagagtgtcgcta

SEQ ID NO: 148668 - DNA, 30 bp, Artificial Sequence
  Synthetic oligonucleotide
aagactcgataaactcgacacttgtcgcta

SEQ ID NO: 148669 - DNA, 30 bp, Artificial Sequence
  Synthetic oligonucleotide
aacaccgtccctcgttggaaaagttcgcta

SEQ ID NO: 148670 - DNA, 30 bp, Artificial Sequence
  Synthetic oligonucleotide
gcctcgtcccgggaacacgcattaaggcta

SEQ ID NO: 148671 - DNA, 30 bp, Artificial Sequence
  Synthetic oligonucleotide
cagattgaactagttaaagatggtaggcta

SEQ ID NO: 148672 - DNA, 30 bp, Artificial Sequence
  Synthetic oligonucleotide
ggaatcatacaaaaatgcggcattaggcta

SEQ ID NO: 148673 - DNA, 30 bp, Artificial Sequence
  Synthetic oligonucleotide
cataagtatccggataagtgtacacggcta

SEQ ID NO: 148674 - DNA, 30 bp, Artificial Sequence
  Synthetic oligonucleotide
gaggtccaatccagcggagcgtcacggcta

SEQ ID NO: 148675 - DNA, 30 bp, Artificial Sequence
  Synthetic oligonucleotide
ccgcgcgcgtagtgattctaccagcggcta

SEQ ID NO: 148676 - DNA, 30 bp, Artificial Sequence
  Synthetic oligonucleotide
tttaagaccaacagtaggagatcgcggcta

SEQ ID NO: 148677 - DNA, 30 bp, Artificial Sequence
  Synthetic oligonucleotide
ttcttggtattgcctacgttagctcggcta

SEQ ID NO: 148678 - DNA, 30 bp, Artificial Sequence
  Synthetic oligonucleotide
gatagcggattacgttttcatggtcggcta

SEQ ID NO: 148679 - DNA, 30 bp, Artificial Sequence
  Synthetic oligonucleotide
gtcgtgaagggcttacttccatgtcggcta

SEQ ID NO: 148680 - DNA, 30 bp, Artificial Sequence
  Synthetic oligonucleotide
gccaaaagtgaattagataaggttcggcta

SEQ ID NO: 148681 - DNA, 30 bp, Artificial Sequence
  Synthetic oligonucleotide
ggtagtcagagctatgaggaattagggcta

SEQ ID NO: 148682 - DNA, 30 bp, Artificial Sequence
  Synthetic oligonucleotide
gctaggacgcacaggcagtacaccgggcta

SEQ ID NO: 148683 - DNA, 30 bp, Artificial Sequence
  Synthetic oligonucleotide
gtactaggtaccggttgggtctgatggcta

SEQ ID NO: 148684 - DNA, 30 bp, Artificial Sequence
  Synthetic oligonucleotide
aatggatacataaagcggcacaattggcta

SEQ ID NO: 148685 - DNA, 30 bp, Artificial Sequence
  Synthetic oligonucleotide
gttgtgataaaaaggtccaagaaaatgcta

SEQ ID NO: 148686 - DNA, 31 bp, Artificial Sequence
  Synthetic oligonucleotide
gctaagttgaattagtccgtcgagaatgcta

SEQ ID NO: 148687 - DNA, 30 bp, Artificial Sequence
  Synthetic oligonucleotide
ggtctaccaggtgccacgggagagatgcta

SEQ ID NO: 148688 - DNA, 30 bp, Artificial Sequence
  Synthetic oligonucleotide
cataagacggggcgaatagtgtcactgcta

SEQ ID NO: 148689 - DNA, 30 bp, Artificial Sequence
  Synthetic oligonucleotide
cgtgagcttacgttgaaacgtgtactgcta

SEQ ID NO: 148690 - DNA, 30 bp, Artificial Sequence
  Synthetic oligonucleotide
aactggcgacgtaaagatcgtccgctgcta

SEQ ID NO: 148691 - DNA, 30 bp, Artificial Sequence
  Synthetic oligonucleotide
tgaagggaccgagtggcatgcgggctgcta

SEQ ID NO: 148692 - DNA, 30 bp, Artificial Sequence
  Synthetic oligonucleotide
actttagatggaaatgttttggttctgcta

SEQ ID NO: 148693 - DNA, 30 bp, Artificial Sequence
  Synthetic oligonucleotide
tggttgcaccgatacgaccgcagagtgcta

SEQ ID NO: 148694 - DNA, 30 bp, Artificial Sequence
  Synthetic oligonucleotide
gcaggaaaccttgatgttttaatcgtgcta

SEQ ID NO: 148695 - DNA, 30 bp, Artificial Sequence
  Synthetic oligonucleotide
agaacacgtggactcggaaacacggtgcta

SEQ ID NO: 148696 - DNA, 30 bp, Artificial Sequence
  Synthetic oligonucleotide
gtgccgccatctggagtagcggtcttgcta

SEQ ID NO: 148697 - DNA, 30 bp, Artificial Sequence
  Synthetic oligonucleotide
ggaacagatgattgggccttacttttgcta

SEQ ID NO: 148698 - DNA, 30 bp, Artificial Sequence
  Synthetic oligonucleotide
tgaggaatacggggacaaagataaaatcta

SEQ ID NO: 148699 - DNA, 30 bp, Artificial Sequence
  Synthetic oligonucleotide
gatacagggtcaagtgttcgctgaaatcta

SEQ ID NO: 148700 - DNA, 30 bp, Artificial Sequence
  Synthetic oligonucleotide
aacacttgtaaaggttacagcaccaatcta

SEQ ID NO: 148701 - DNA, 30 bp, Artificial Sequence
  Synthetic oligonucleotide
ctgccatttcatgcgcgggcacaagatcta

SEQ ID NO: 148702 - DNA, 30 bp, Artificial Sequence
  Synthetic oligonucleotide
acggagatcgaacctgaaacgttggatcta

SEQ ID NO: 148703 - DNA, 30 bp, Artificial Sequence
  Synthetic oligonucleotide
gtcagagtacaacttatgattatatatcta

SEQ ID NO: 148704 - DNA, 30 bp, Artificial Sequence
  Synthetic oligonucleotide
tccaggagtccagtggaaatacattatcta

SEQ ID NO: 148705 - DNA, 30 bp, Artificial Sequence
  Synthetic oligonucleotide
caaggataagcacggggatgtagttatcta

SEQ ID NO: 148706 - DNA, 30 bp, Artificial Sequence
  Synthetic oligonucleotide
gacggaatttgatccagacatcacactcta

SEQ ID NO: 148707 - DNA, 30 bp, Artificial Sequence
  Synthetic oligonucleotide
gagactcgacatatggcgaggtggactcta

SEQ ID NO: 148708 - DNA, 30 bp, Artificial Sequence
  Synthetic oligonucleotide
gaacgaaaaaacagcaccaatagtactcta

SEQ ID NO: 148709 - DNA, 30 bp, Artificial Sequence
  Synthetic oligonucleotide
gtgcgagtataaattggacagtcacctcta

SEQ ID NO: 148710 - DNA, 30 bp, Artificial Sequence
  Synthetic oligonucleotide
gataagatctgacatcaaaggggacctcta

SEQ ID NO: 148711 - DNA, 30 bp, Artificial Sequence
  Synthetic oligonucleotide
gcgttaatcggctgtgggagattacctcta

SEQ ID NO: 148712 - DNA, 30 bp, Artificial Sequence
  Synthetic oligonucleotide
agcagcggacgggagggtgtgttgcctcta

SEQ ID NO: 148713 - DNA, 30 bp, Artificial Sequence
  Synthetic oligonucleotide
ctagaatctgtcacctatcgttaagctcta

SEQ ID NO: 148714 - DNA, 30 bp, Artificial Sequence
  Synthetic oligonucleotide
gagcgttcggacactatcgcatgcgctcta

SEQ ID NO: 148715 - DNA, 30 bp, Artificial Sequence
  Synthetic oligonucleotide
cgaacaccacccgtttccctaccgtctcta

SEQ ID NO: 148716 - DNA, 30 bp, Artificial Sequence
  Synthetic oligonucleotide
tgtatacccaaacgaaagaagacaagtcta

SEQ ID NO: 148717 - DNA, 30 bp, Artificial Sequence
  Synthetic oligonucleotide
ggtgggtgaaggaaaacgcgctagagtcta

SEQ ID NO: 148718 - DNA, 30 bp, Artificial Sequence
  Synthetic oligonucleotide
tccaacgtcatgggaaaggaggcgagtcta

SEQ ID NO: 148719 - DNA, 30 bp, Artificial Sequence
  Synthetic oligonucleotide
aagtccatctcattagtgtagttgagtcta

SEQ ID NO: 148720 - DNA, 30 bp, Artificial Sequence
  Synthetic oligonucleotide
tgcctacgacgaactagcgggtaacgtcta

SEQ ID NO: 148721 - DNA, 30 bp, Artificial Sequence
  Synthetic oligonucleotide
actaggtcaagaagatacgaaggaggtcta

SEQ ID NO: 148722 - DNA, 30 bp, Artificial Sequence
  Synthetic oligonucleotide
tggtccggggcacccaaatttctaggtcta

SEQ ID NO: 148723 - DNA, 30 bp, Artificial Sequence
  Synthetic oligonucleotide
ggggagctgcacagtaccagttagggtcta

SEQ ID NO: 148724 - DNA, 30 bp, Artificial Sequence
  Synthetic oligonucleotide
ccagaactgactgggaaggcgtcgggtcta

SEQ ID NO: 148725 - DNA, 30 bp, Artificial Sequence
  Synthetic oligonucleotide
ggagttaaaagcaactcgactaattgtcta

SEQ ID NO: 148726 - DNA, 30 bp, Artificial Sequence
  Synthetic oligonucleotide
ctggaatttatttcaaacaagcattgtcta

SEQ ID NO: 148727 - DNA, 30 bp, Artificial Sequence
  Synthetic oligonucleotide
cttgcgactaggaaggctgtgggtattcta

SEQ ID NO: 148728 - DNA, 30 bp, Artificial Sequence
  Synthetic oligonucleotide
cgttcacccatacggcaaccgtgacttcta

SEQ ID NO: 148729 - DNA, 30 bp, Artificial Sequence
  Synthetic oligonucleotide
acgtataagcttactacgtcatgagttcta

SEQ ID NO: 148730 - DNA, 30 bp, Artificial Sequence
  Synthetic oligonucleotide
gaaacgggcaaataggcaagtcgctttcta

SEQ ID NO: 148731 - DNA, 30 bp, Artificial Sequence
  Synthetic oligonucleotide
ctccggatacgtcgagcgattgtgaaagta

SEQ ID NO: 148732 - DNA, 30 bp, Artificial Sequence
  Synthetic oligonucleotide
tgtcggtcaggtgatgaatcttgacaagta

SEQ ID NO: 148733 - DNA, 30 bp, Artificial Sequence
  Synthetic oligonucleotide
ccgtgtcgcccaaggtactacgatcaagta

SEQ ID NO: 148734 - DNA, 30 bp, Artificial Sequence
  Synthetic oligonucleotide
acttatgtcctccaaattgtccgcgaagta

SEQ ID NO: 148735 - DNA, 30 bp, Artificial Sequence
  Synthetic oligonucleotide
ttgtccgcaaaagacgactcgtcggaagta

SEQ ID NO: 148736 - DNA, 30 bp, Artificial Sequence
  Synthetic oligonucleotide
ttaataggttaatatggatcagaataagta

SEQ ID NO: 148737 - DNA, 30 bp, Artificial Sequence
  Synthetic oligonucleotide
aaagggattaaccgggtggactcctaagta

SEQ ID NO: 148738 - DNA, 30 bp, Artificial Sequence
  Synthetic oligonucleotide
cgtatccgctaaagtacaccctgttaagta

SEQ ID NO: 148739 - DNA, 30 bp, Artificial Sequence
  Synthetic oligonucleotide
caagcaccgggaaacatgtctctttaagta

SEQ ID NO: 148740 - DNA, 30 bp, Artificial Sequence
  Synthetic oligonucleotide
atcccagcaggagcgcccagtcgaacagta

SEQ ID NO: 148741 - DNA, 30 bp, Artificial Sequence
  Synthetic oligonucleotide
cagtgttttatcgaaaatactctaacagta

SEQ ID NO: 148742 - DNA, 30 bp, Artificial Sequence
  Synthetic oligonucleotide
gacgaacaccctcgcatatatttaacagta

SEQ ID NO: 148743 - DNA, 30 bp, Artificial Sequence
  Synthetic oligonucleotide
cacaactggtccccgaccagcccaccagta

SEQ ID NO: 148744 - DNA, 30 bp, Artificial Sequence
  Synthetic oligonucleotide
ttgagaagggactcttctcacaacgcagta

SEQ ID NO: 148745 - DNA, 30 bp, Artificial Sequence
  Synthetic oligonucleotide
taaaaccaaataatgcaggtgtcggcagta

SEQ ID NO: 148746 - DNA, 30 bp, Artificial Sequence
  Synthetic oligonucleotide
ccgtgtacactaggttaaagttcggcagta

SEQ ID NO: 148747 - DNA, 30 bp, Artificial Sequence
  Synthetic oligonucleotide
cgcgggatggtccgcatggtgtactcagta

SEQ ID NO: 148748 - DNA, 30 bp, Artificial Sequence
  Synthetic oligonucleotide
cctatcaaggaaaggcaaggtagaagagta

SEQ ID NO: 148749 - DNA, 30 bp, Artificial Sequence
  Synthetic oligonucleotide
atgtttgaagccgtggttatgcacagagta

SEQ ID NO: 148750 - DNA, 30 bp, Artificial Sequence
  Synthetic oligonucleotide
gattcacctgaccaccgtcaatctagagta

SEQ ID NO: 148751 - DNA, 30 bp, Artificial Sequence
  Synthetic oligonucleotide
ggtaaccttgacacttcgatgctacgagta

SEQ ID NO: 148752 - DNA, 30 bp, Artificial Sequence
  Synthetic oligonucleotide
ggaatggcccacacacttaacgaccgagta

SEQ ID NO: 148753 - DNA, 30 bp, Artificial Sequence
  Synthetic oligonucleotide
cgattatgggcggtcagacacacaggagta

SEQ ID NO: 148754 - DNA, 30 bp, Artificial Sequence
  Synthetic oligonucleotide
agttgaggggatgggagcaattacggagta

SEQ ID NO: 148755 - DNA, 30 bp, Artificial Sequence
  Synthetic oligonucleotide
gcgatgtaagtcttaagaatcatgggagta

SEQ ID NO: 148756 - DNA, 30 bp, Artificial Sequence
  Synthetic oligonucleotide
taaggccacagcatgcttaaattgggagta

SEQ ID NO: 148757 - DNA, 31 bp, Artificial Sequence
  Synthetic oligonucleotide
taatccccccatcaaagaccactgatgagta

SEQ ID NO: 148758 - DNA, 30 bp, Artificial Sequence
  Synthetic oligonucleotide
tcatgcccagcagtaggacgtttatgagta

SEQ ID NO: 148759 - DNA, 30 bp, Artificial Sequence
  Synthetic oligonucleotide
ataatagtagttagacctgctagttgagta

SEQ ID NO: 148760 - DNA, 30 bp, Artificial Sequence
  Synthetic oligonucleotide
tcgaaattaaacacggtcgttatttgagta

SEQ ID NO: 148761 - DNA, 30 bp, Artificial Sequence
  Synthetic oligonucleotide
atcggtaagggattatgatccgaaatagta

SEQ ID NO: 148762 - DNA, 30 bp, Artificial Sequence
  Synthetic oligonucleotide
gtagatttttcaggtaagggaagaatagta

SEQ ID NO: 148763 - DNA, 30 bp, Artificial Sequence
  Synthetic oligonucleotide
gtgatggttggaacgtgatgacccatagta

SEQ ID NO: 148764 - DNA, 30 bp, Artificial Sequence
  Synthetic oligonucleotide
ggtaagggtataacagtacagatcatagta

SEQ ID NO: 148765 - DNA, 30 bp, Artificial Sequence
  Synthetic oligonucleotide
cgggtatagatggatatctgagatatagta

SEQ ID NO: 148766 - DNA, 30 bp, Artificial Sequence
  Synthetic oligonucleotide
ctcgatgcagaggtggaagcagctatagta

SEQ ID NO: 148767 - DNA, 30 bp, Artificial Sequence
  Synthetic oligonucleotide
acattgcacggagaaagatcatctatagta

SEQ ID NO: 148768 - DNA, 30 bp, Artificial Sequence
  Synthetic oligonucleotide
ctagcaatacacctcgtaaatatactagta

SEQ ID NO: 148769 - DNA, 30 bp, Artificial Sequence
  Synthetic oligonucleotide
aacgacgtccgagcatgggaaagtctagta

SEQ ID NO: 148770 - DNA, 30 bp, Artificial Sequence
  Synthetic oligonucleotide
gccccagctgtatgaatcctgagtctagta

SEQ ID NO: 148771 - DNA, 30 bp, Artificial Sequence
  Synthetic oligonucleotide
gaaggtgtgtgtcggttagtaatagtagta

SEQ ID NO: 148772 - DNA, 30 bp, Artificial Sequence
  Synthetic oligonucleotide
gtaatgtcgaagcaaagatgggtagtagta

SEQ ID NO: 148773 - DNA, 30 bp, Artificial Sequence
  Synthetic oligonucleotide
gggtatcgcaatttacggggtgcggtagta

SEQ ID NO: 148774 - DNA, 30 bp, Artificial Sequence
  Synthetic oligonucleotide
cgcaaccccttttttatgtggcgggtagta

SEQ ID NO: 148775 - DNA, 30 bp, Artificial Sequence
  Synthetic oligonucleotide
ttcatcgcgtaaaatgttgaaatattagta

SEQ ID NO: 148776 - DNA, 30 bp, Artificial Sequence
  Synthetic oligonucleotide
caactcacttagctaatcgggtacttagta

SEQ ID NO: 148777 - DNA, 30 bp, Artificial Sequence
  Synthetic oligonucleotide
ctaatattcgccagtaacatctccttagta

SEQ ID NO: 148778 - DNA, 30 bp, Artificial Sequence
  Synthetic oligonucleotide
gcgcgtatgccaggtcatcgtgctttagta

SEQ ID NO: 148779 - DNA, 30 bp, Artificial Sequence
  Synthetic oligonucleotide
acacagtgagatgagacaaggtttttagta

SEQ ID NO: 148780 - DNA, 30 bp, Artificial Sequence
  Synthetic oligonucleotide
tccaatcgaacggcgaatggtccaaacgta

SEQ ID NO: 148781 - DNA, 30 bp, Artificial Sequence
  Synthetic oligonucleotide
cataagggactcgccgcgctcatgaacgta

SEQ ID NO: 148782 - DNA, 30 bp, Artificial Sequence
  Synthetic oligonucleotide
ggactgtgtatcgcaaaaaagaataacgta

SEQ ID NO: 148783 - DNA, 30 bp, Artificial Sequence
  Synthetic oligonucleotide
caaaaaaggtggatatacgattaacacgta

SEQ ID NO: 148784 - DNA, 30 bp, Artificial Sequence
  Synthetic oligonucleotide
ttggaattctgtaaagaaactggacacgta

SEQ ID NO: 148785 - DNA, 30 bp, Artificial Sequence
  Synthetic oligonucleotide
aagggcgtgagccaggtatcgatgcacgta

SEQ ID NO: 148786 - DNA, 30 bp, Artificial Sequence
  Synthetic oligonucleotide
aggcgttaccacgtgtgacatatgcacgta

SEQ ID NO: 148787 - DNA, 30 bp, Artificial Sequence
  Synthetic oligonucleotide
gaagagcataaagtgtctcctatgcacgta

SEQ ID NO: 148788 - DNA, 30 bp, Artificial Sequence
  Synthetic oligonucleotide
atggtggctctacaggtaaaagttcacgta

SEQ ID NO: 148789 - DNA, 30 bp, Artificial Sequence
  Synthetic oligonucleotide
tgttgtaaagcggcggggaagttagacgta

SEQ ID NO: 148790 - DNA, 30 bp, Artificial Sequence
  Synthetic oligonucleotide
accactcagagaatgagccgttaggacgta

SEQ ID NO: 148791 - DNA, 30 bp, Artificial Sequence
  Synthetic oligonucleotide
taaggtcggcaaagcttcagaggggacgta

SEQ ID NO: 148792 - DNA, 30 bp, Artificial Sequence
  Synthetic oligonucleotide
ctgagctcacgggaaaacagtcatgacgta

SEQ ID NO: 148793 - DNA, 30 bp, Artificial Sequence
  Synthetic oligonucleotide
actgtcaacctcaagatttacttatacgta

SEQ ID NO: 148794 - DNA, 30 bp, Artificial Sequence
  Synthetic oligonucleotide
acgatcgcggggtgggcttatctttacgta

SEQ ID NO: 148795 - DNA, 30 bp, Artificial Sequence
  Synthetic oligonucleotide
tcaaatagtttcaaaactaggcacaccgta

SEQ ID NO: 148796 - DNA, 30 bp, Artificial Sequence
  Synthetic oligonucleotide
acgctatagcacattagccgatataccgta

SEQ ID NO: 148797 - DNA, 30 bp, Artificial Sequence
  Synthetic oligonucleotide
cacagtaacgtataagtagtatctaccgta

SEQ ID NO: 148798 - DNA, 30 bp, Artificial Sequence
  Synthetic oligonucleotide
tcaagtcggagagtaggtccgttacccgta

SEQ ID NO: 148799 - DNA, 30 bp, Artificial Sequence
  Synthetic oligonucleotide
gaaaccacttgtccaaacttcaggcccgta

SEQ ID NO: 148800 - DNA, 30 bp, Artificial Sequence
  Synthetic oligonucleotide
gtgccgccaacgtcagcgtgaatgcccgta

SEQ ID NO: 148801 - DNA, 30 bp, Artificial Sequence
  Synthetic oligonucleotide
tggatgtttgaaaccggacatgaatccgta

SEQ ID NO: 148802 - DNA, 30 bp, Artificial Sequence
  Synthetic oligonucleotide
ggccgttctctggcctctaaaagatccgta

SEQ ID NO: 148803 - DNA, 30 bp, Artificial Sequence
  Synthetic oligonucleotide
ccattgagggagagatcagctatatccgta

SEQ ID NO: 148804 - DNA, 30 bp, Artificial Sequence
  Synthetic oligonucleotide
attatccaagatggagacggaaactccgta

SEQ ID NO: 148805 - DNA, 30 bp, Artificial Sequence
  Synthetic oligonucleotide
tcctagacggcttaatgtcaatggtccgta

SEQ ID NO: 148806 - DNA, 30 bp, Artificial Sequence
  Synthetic oligonucleotide
aggcaggtgctgatggtttacgtaagcgta

SEQ ID NO: 148807 - DNA, 30 bp, Artificial Sequence
  Synthetic oligonucleotide
tcggtgtgtgcgcgttgactaacgagcgta

SEQ ID NO: 148808 - DNA, 30 bp, Artificial Sequence
  Synthetic oligonucleotide
ttcggaagttgccgagtcacagcccgcgta

SEQ ID NO: 148809 - DNA, 30 bp, Artificial Sequence
  Synthetic oligonucleotide
ttccacaaaccgcgcaacaaatgccgcgta

SEQ ID NO: 148810 - DNA, 30 bp, Artificial Sequence
  Synthetic oligonucleotide
gcgtaggctaatgtgtaggaactaggcgta

SEQ ID NO: 148811 - DNA, 30 bp, Artificial Sequence
  Synthetic oligonucleotide
ggaggtccagcccgcggaaggccatgcgta

SEQ ID NO: 148812 - DNA, 30 bp, Artificial Sequence
  Synthetic oligonucleotide
agctaaacaacaacagcgatagcatgcgta

SEQ ID NO: 148813 - DNA, 30 bp, Artificial Sequence
  Synthetic oligonucleotide
tacactcattctgaaattctctactgcgta

SEQ ID NO: 148814 - DNA, 30 bp, Artificial Sequence
  Synthetic oligonucleotide
ggaacggtcccgtataagcggtcctgcgta

SEQ ID NO: 148815 - DNA, 30 bp, Artificial Sequence
  Synthetic oligonucleotide
agatgcctaaaaccccgattctcttgcgta

SEQ ID NO: 148816 - DNA, 30 bp, Artificial Sequence
  Synthetic oligonucleotide
atggatccatattaagactaataaatcgta

SEQ ID NO: 148817 - DNA, 30 bp, Artificial Sequence
  Synthetic oligonucleotide
gcactgagggttgtgttaaacgacatcgta

SEQ ID NO: 148818 - DNA, 30 bp, Artificial Sequence
  Synthetic oligonucleotide
acattcaagtacacgggctacttcatcgta

SEQ ID NO: 148819 - DNA, 30 bp, Artificial Sequence
  Synthetic oligonucleotide
catagtccctccgctgactagcggatcgta

SEQ ID NO: 148820 - DNA, 30 bp, Artificial Sequence
  Synthetic oligonucleotide
acacctaaggttcgattataatgcctcgta

SEQ ID NO: 148821 - DNA, 30 bp, Artificial Sequence
  Synthetic oligonucleotide
tccctgtcctatgcgttaactaaattcgta

SEQ ID NO: 148822 - DNA, 30 bp, Artificial Sequence
  Synthetic oligonucleotide
tctgtggacaataagatatcaggattcgta

SEQ ID NO: 148823 - DNA, 30 bp, Artificial Sequence
  Synthetic oligonucleotide
cactccatcatcatctacgagttgttcgta

SEQ ID NO: 148824 - DNA, 30 bp, Artificial Sequence
  Synthetic oligonucleotide
agaccgttacagaacattcggcgtttcgta

SEQ ID NO: 148825 - DNA, 30 bp, Artificial Sequence
  Synthetic oligonucleotide
agctgcttgagttaactcttgaccaaggta

SEQ ID NO: 148826 - DNA, 30 bp, Artificial Sequence
  Synthetic oligonucleotide
ttggggcgtaataaatgcacagccaaggta

SEQ ID NO: 148827 - DNA, 30 bp, Artificial Sequence
  Synthetic oligonucleotide
gaagcggacatagggtttattgttaaggta

SEQ ID NO: 148828 - DNA, 30 bp, Artificial Sequence
  Synthetic oligonucleotide
gcataagagctcatgtactaatttaaggta

SEQ ID NO: 148829 - DNA, 30 bp, Artificial Sequence
  Synthetic oligonucleotide
agattgccaacccagctacttcaccaggta

SEQ ID NO: 148830 - DNA, 30 bp, Artificial Sequence
  Synthetic oligonucleotide
gtagagtaataatagcatcatccgcaggta

SEQ ID NO: 148831 - DNA, 30 bp, Artificial Sequence
  Synthetic oligonucleotide
atctatcaagatggcgaccgggtgcaggta

SEQ ID NO: 148832 - DNA, 30 bp, Artificial Sequence
  Synthetic oligonucleotide
aggactgccacgactactactcatcaggta

SEQ ID NO: 148833 - DNA, 30 bp, Artificial Sequence
  Synthetic oligonucleotide
acggtaaagctaacctgtgttggtcaggta

SEQ ID NO: 148834 - DNA, 30 bp, Artificial Sequence
  Synthetic oligonucleotide
gcaccaccggcacttatctataaagaggta

SEQ ID NO: 148835 - DNA, 30 bp, Artificial Sequence
  Synthetic oligonucleotide
taaacacagacgatgcgcgtgaacgaggta

SEQ ID NO: 148836 - DNA, 30 bp, Artificial Sequence
  Synthetic oligonucleotide
tcttgtaatagatcccgtaatgtcgaggta

SEQ ID NO: 148837 - DNA, 30 bp, Artificial Sequence
  Synthetic oligonucleotide
gtaagaatacgtatagaattgtaggaggta

SEQ ID NO: 148838 - DNA, 30 bp, Artificial Sequence
  Synthetic oligonucleotide
catgggtatgacctttctcactttgaggta

SEQ ID NO: 148839 - DNA, 30 bp, Artificial Sequence
  Synthetic oligonucleotide
cactgccaggaattaatctgaacgtaggta

SEQ ID NO: 148840 - DNA, 30 bp, Artificial Sequence
  Synthetic oligonucleotide
tcaaaatatacggcaagacacgcaccggta

SEQ ID NO: 148841 - DNA, 30 bp, Artificial Sequence
  Synthetic oligonucleotide
gtaagggctaggcatgcctacttaccggta

SEQ ID NO: 148842 - DNA, 30 bp, Artificial Sequence
  Synthetic oligonucleotide
cttactaacgagtattctctacgcccggta

SEQ ID NO: 148843 - DNA, 30 bp, Artificial Sequence
  Synthetic oligonucleotide
gggcgtatacacccaggcgtgaccgcggta

SEQ ID NO: 148844 - DNA, 30 bp, Artificial Sequence
  Synthetic oligonucleotide
cacgcaatttttatcaagattggctcggta

SEQ ID NO: 148845 - DNA, 30 bp, Artificial Sequence
  Synthetic oligonucleotide
gacggcacagtataacagcttgaaagggta

SEQ ID NO: 148846 - DNA, 30 bp, Artificial Sequence
  Synthetic oligonucleotide
aatatcgcttcgatcttaggtcggagggta

SEQ ID NO: 148847 - DNA, 30 bp, Artificial Sequence
  Synthetic oligonucleotide
cggtgcaggaaaaaccgctacgatcgggta

SEQ ID NO: 148848 - DNA, 30 bp, Artificial Sequence
  Synthetic oligonucleotide
atgagcactcgcagttttgggtttcgggta

SEQ ID NO: 148849 - DNA, 30 bp, Artificial Sequence
  Synthetic oligonucleotide
taccgacggatcgcatgctgaaaaggggta

SEQ ID NO: 148850 - DNA, 30 bp, Artificial Sequence
  Synthetic oligonucleotide
cccataggtctttcattcgcgtgaggggta

SEQ ID NO: 148851 - DNA, 30 bp, Artificial Sequence
  Synthetic oligonucleotide
gttaagtgtgcgtccatggtgactggggta

SEQ ID NO: 148852 - DNA, 30 bp, Artificial Sequence
  Synthetic oligonucleotide
tgcaccagaattaattgtgaataatgggta

SEQ ID NO: 148853 - DNA, 30 bp, Artificial Sequence
  Synthetic oligonucleotide
ccaggaggacggtcaaggatgacatgggta

SEQ ID NO: 148854 - DNA, 30 bp, Artificial Sequence
  Synthetic oligonucleotide
gtaagggaacaggaccgaaccgcatgggta

SEQ ID NO: 148855 - DNA, 30 bp, Artificial Sequence
  Synthetic oligonucleotide
agtaacatcaagtttggttagaagtgggta

SEQ ID NO: 148856 - DNA, 30 bp, Artificial Sequence
  Synthetic oligonucleotide
cgcctcactctagccatagataacatggta

SEQ ID NO: 148857 - DNA, 30 bp, Artificial Sequence
  Synthetic oligonucleotide
ttaacagagtgcgaatcaccatacatggta

SEQ ID NO: 148858 - DNA, 30 bp, Artificial Sequence
  Synthetic oligonucleotide
aggatagaaaacagcgaggctatcatggta

SEQ ID NO: 148859 - DNA, 30 bp, Artificial Sequence
  Synthetic oligonucleotide
caggatacctccccagtgggccgtatggta

SEQ ID NO: 148860 - DNA, 30 bp, Artificial Sequence
  Synthetic oligonucleotide
catccaaggaagattcgcgcgtgtatggta

SEQ ID NO: 148861 - DNA, 30 bp, Artificial Sequence
  Synthetic oligonucleotide
aaatcgaggcttacacctggaaaactggta

SEQ ID NO: 148862 - DNA, 31 bp, Artificial Sequence
  Synthetic oligonucleotide
cggagttaatgtcgggtattaaccgctggta

SEQ ID NO: 148863 - DNA, 30 bp, Artificial Sequence
  Synthetic oligonucleotide
atcagcgctatgacacttcactggctggta

SEQ ID NO: 148864 - DNA, 30 bp, Artificial Sequence
  Synthetic oligonucleotide
cgcggcggccatgtataaagtgctctggta

SEQ ID NO: 148865 - DNA, 30 bp, Artificial Sequence
  Synthetic oligonucleotide
agacggaagcattctaatcacaaagtggta

SEQ ID NO: 148866 - DNA, 30 bp, Artificial Sequence
  Synthetic oligonucleotide
gcttccctcggcctaaccgtcaaagtggta

SEQ ID NO: 148867 - DNA, 30 bp, Artificial Sequence
  Synthetic oligonucleotide
cttgattgttcgggagagaaacgagtggta

SEQ ID NO: 148868 - DNA, 30 bp, Artificial Sequence
  Synthetic oligonucleotide
acttcagtagtgctgaacagaacggtggta

SEQ ID NO: 148869 - DNA, 30 bp, Artificial Sequence
  Synthetic oligonucleotide
gacgagatcgtctgcattgaatcggtggta

SEQ ID NO: 148870 - DNA, 30 bp, Artificial Sequence
  Synthetic oligonucleotide
aggagctccgcgagcaagagagtgttggta

SEQ ID NO: 148871 - DNA, 30 bp, Artificial Sequence
  Synthetic oligonucleotide
tacatggcgttttgaggttattctttggta

SEQ ID NO: 148872 - DNA, 30 bp, Artificial Sequence
  Synthetic oligonucleotide
ggtcatcagggggattgaggtcccaatgta

SEQ ID NO: 148873 - DNA, 30 bp, Artificial Sequence
  Synthetic oligonucleotide
gagttggtagccagagacaaggagaatgta

SEQ ID NO: 148874 - DNA, 30 bp, Artificial Sequence
  Synthetic oligonucleotide
aatgaagaaactgggcggaatgtgaatgta

SEQ ID NO: 148875 - DNA, 30 bp, Artificial Sequence
  Synthetic oligonucleotide
gcctaagtgtagcataaaaagaataatgta

SEQ ID NO: 148876 - DNA, 30 bp, Artificial Sequence
  Synthetic oligonucleotide
agttgagataaggtgatggtagttaatgta

SEQ ID NO: 148877 - DNA, 30 bp, Artificial Sequence
  Synthetic oligonucleotide
cgtgcgtgaatacagaagcatgggcatgta

SEQ ID NO: 148878 - DNA, 30 bp, Artificial Sequence
  Synthetic oligonucleotide
atctgcttgcagtagggttaacgagatgta

SEQ ID NO: 148879 - DNA, 30 bp, Artificial Sequence
  Synthetic oligonucleotide
gggcaatgagatacgataagccgcgatgta

SEQ ID NO: 148880 - DNA, 30 bp, Artificial Sequence
  Synthetic oligonucleotide
ggtcataatacaaagaaggtaggggatgta

SEQ ID NO: 148881 - DNA, 30 bp, Artificial Sequence
  Synthetic oligonucleotide
ataaatagagaaccagctccagaatatgta

SEQ ID NO: 148882 - DNA, 30 bp, Artificial Sequence
  Synthetic oligonucleotide
aatagcggtctaagtggatacaggtatgta

SEQ ID NO: 148883 - DNA, 30 bp, Artificial Sequence
  Synthetic oligonucleotide
ccggaggcatcaggtcctaataggtatgta

SEQ ID NO: 148884 - DNA, 30 bp, Artificial Sequence
  Synthetic oligonucleotide
tgtctatcacctaagacaaccttgtatgta

SEQ ID NO: 148885 - DNA, 30 bp, Artificial Sequence
  Synthetic oligonucleotide
agagtagaagatgactgcagtctttatgta

SEQ ID NO: 148886 - DNA, 30 bp, Artificial Sequence
  Synthetic oligonucleotide
atacgggttgtcaagagaatctcaactgta

SEQ ID NO: 148887 - DNA, 30 bp, Artificial Sequence
  Synthetic oligonucleotide
cgaacagttaggtctcccagcctgactgta

SEQ ID NO: 148888 - DNA, 30 bp, Artificial Sequence
  Synthetic oligonucleotide
cactcagttaacgttgggttagctactgta

SEQ ID NO: 148889 - DNA, 30 bp, Artificial Sequence
  Synthetic oligonucleotide
acaataagaataattatctaggcccctgta

SEQ ID NO: 148890 - DNA, 30 bp, Artificial Sequence
  Synthetic oligonucleotide
cttaatacaccgtaggtaaacggccctgta

SEQ ID NO: 148891 - DNA, 30 bp, Artificial Sequence
  Synthetic oligonucleotide
gaccaggccgtggtctgagaaggggctgta

SEQ ID NO: 148892 - DNA, 30 bp, Artificial Sequence
  Synthetic oligonucleotide
gtactacgacgggcgtatccgaaatctgta

SEQ ID NO: 148893 - DNA, 30 bp, Artificial Sequence
  Synthetic oligonucleotide
agtccgaccgtaagctagcgggcatctgta

SEQ ID NO: 148894 - DNA, 30 bp, Artificial Sequence
  Synthetic oligonucleotide
gttagcggtgttcaattgacttaaagtgta

SEQ ID NO: 148895 - DNA, 30 bp, Artificial Sequence
  Synthetic oligonucleotide
gggcattggggatgtgaatgcggaagtgta

SEQ ID NO: 148896 - DNA, 30 bp, Artificial Sequence
  Synthetic oligonucleotide
ccatggtagcgcactgaccatatcagtgta

SEQ ID NO: 148897 - DNA, 30 bp, Artificial Sequence
  Synthetic oligonucleotide
acccatgcaaataagacccagggccgtgta

SEQ ID NO: 148898 - DNA, 30 bp, Artificial Sequence
  Synthetic oligonucleotide
gcaaagaccaaaacggcgcgttctcgtgta

SEQ ID NO: 148899 - DNA, 30 bp, Artificial Sequence
  Synthetic oligonucleotide
aaagtgacggatgggtcggaacaaggtgta

SEQ ID NO: 148900 - DNA, 30 bp, Artificial Sequence
  Synthetic oligonucleotide
gcgtttacgccttgaaagttccagggtgta

SEQ ID NO: 148901 - DNA, 30 bp, Artificial Sequence
  Synthetic oligonucleotide
tagatttgtccaacaatgccggcgggtgta

SEQ ID NO: 148902 - DNA, 30 bp, Artificial Sequence
  Synthetic oligonucleotide
acggtagtgttcggacttaggaaatgtgta

SEQ ID NO: 148903 - DNA, 30 bp, Artificial Sequence
  Synthetic oligonucleotide
ggtcctgatggtctatcaaaggagtgtgta

SEQ ID NO: 148904 - DNA, 30 bp, Artificial Sequence
  Synthetic oligonucleotide
tgcggagcgtaacagcagtgaacttgtgta

SEQ ID NO: 148905 - DNA, 30 bp, Artificial Sequence
  Synthetic oligonucleotide
cagggcgagacaactctgtaaacaattgta

SEQ ID NO: 148906 - DNA, 30 bp, Artificial Sequence
  Synthetic oligonucleotide
acggttcatacttggtatctgaagattgta

SEQ ID NO: 148907 - DNA, 30 bp, Artificial Sequence
  Synthetic oligonucleotide
cgggcatacctggggtaaaaccggattgta

SEQ ID NO: 148908 - DNA, 30 bp, Artificial Sequence
  Synthetic oligonucleotide
gatagagtgggagctatggagatgattgta

SEQ ID NO: 148909 - DNA, 30 bp, Artificial Sequence
  Synthetic oligonucleotide
gatgcatgagcgcactggtaatctattgta

SEQ ID NO: 148910 - DNA, 30 bp, Artificial Sequence
  Synthetic oligonucleotide
ctgcgcgtaactgtagctagtgtgcttgta

SEQ ID NO: 148911 - DNA, 30 bp, Artificial Sequence
  Synthetic oligonucleotide
ccgtgtcaatcctgacaaaaacttcttgta

SEQ ID NO: 148912 - DNA, 30 bp, Artificial Sequence
  Synthetic oligonucleotide
cgtgtctacagtttgaagctgctagttgta

SEQ ID NO: 148913 - DNA, 30 bp, Artificial Sequence
  Synthetic oligonucleotide
acccttaacggtccactattccacgttgta

SEQ ID NO: 148914 - DNA, 30 bp, Artificial Sequence
  Synthetic oligonucleotide
ccgtgttcagaagtaaagtatatcgttgta

SEQ ID NO: 148915 - DNA, 30 bp, Artificial Sequence
  Synthetic oligonucleotide
agaacggggctgcttagtcggtaggttgta

SEQ ID NO: 148916 - DNA, 30 bp, Artificial Sequence
  Synthetic oligonucleotide
tcactagtaatccacggcataatttttgta

SEQ ID NO: 148917 - DNA, 30 bp, Artificial Sequence
  Synthetic oligonucleotide
ggacaagcaagggggcggtagaaaaaatta

SEQ ID NO: 148918 - DNA, 30 bp, Artificial Sequence
  Synthetic oligonucleotide
ggtgtcttaccatgaacataccaaaaatta

SEQ ID NO: 148919 - DNA, 30 bp, Artificial Sequence
  Synthetic oligonucleotide
agtcgaaggtcgaccacgtctgaaaaatta

SEQ ID NO: 148920 - DNA, 30 bp, Artificial Sequence
  Synthetic oligonucleotide
gtcgacatcgctgctcggcggccaaaatta

SEQ ID NO: 148921 - DNA, 30 bp, Artificial Sequence
  Synthetic oligonucleotide
ctagtttgtaaggagtcataacgaaaatta

SEQ ID NO: 148922 - DNA, 30 bp, Artificial Sequence
  Synthetic oligonucleotide
ggttcgaggtaaaaagtgtttctaaaatta

SEQ ID NO: 148923 - DNA, 30 bp, Artificial Sequence
  Synthetic oligonucleotide
tcacggtccctagcagaacccgggaaatta

SEQ ID NO: 148924 - DNA, 30 bp, Artificial Sequence
  Synthetic oligonucleotide
tatgggtaatgaactctagagcctaaatta

SEQ ID NO: 148925 - DNA, 30 bp, Artificial Sequence
  Synthetic oligonucleotide
aactgccgcgtaaaaaatgggtctaaatta

SEQ ID NO: 148926 - DNA, 30 bp, Artificial Sequence
  Synthetic oligonucleotide
ccttgctttaatagggaagacttacaatta

SEQ ID NO: 148927 - DNA, 30 bp, Artificial Sequence
  Synthetic oligonucleotide
cagggcaaaagctaggaaattttacaatta

SEQ ID NO: 148928 - DNA, 30 bp, Artificial Sequence
  Synthetic oligonucleotide
tacagtgacggtaaaaacatggcgcaatta

SEQ ID NO: 148929 - DNA, 30 bp, Artificial Sequence
  Synthetic oligonucleotide
acataggcgcgaacgagctcgttgcaatta

SEQ ID NO: 148930 - DNA, 30 bp, Artificial Sequence
  Synthetic oligonucleotide
tcgaaatatggggtggagagccctcaatta

SEQ ID NO: 148931 - DNA, 30 bp, Artificial Sequence
  Synthetic oligonucleotide
atgggtgccgtcaagccttactctcaatta

SEQ ID NO: 148932 - DNA, 30 bp, Artificial Sequence
  Synthetic oligonucleotide
cagcgggggtgccggaagacacgtcaatta

SEQ ID NO: 148933 - DNA, 30 bp, Artificial Sequence
  Synthetic oligonucleotide
tactttgcaggcaatttaaagaaagaatta

SEQ ID NO: 148934 - DNA, 30 bp, Artificial Sequence
  Synthetic oligonucleotide
attacgctgggactgaagcccacagaatta

SEQ ID NO: 148935 - DNA, 30 bp, Artificial Sequence
  Synthetic oligonucleotide
caaacggtgataagcttagggcacgaatta

SEQ ID NO: 148936 - DNA, 30 bp, Artificial Sequence
  Synthetic oligonucleotide
ataactatgtgagtagggagattcgaatta

SEQ ID NO: 148937 - DNA, 30 bp, Artificial Sequence
  Synthetic oligonucleotide
gggtgtctttccaccgcaatagatgaatta

SEQ ID NO: 148938 - DNA, 30 bp, Artificial Sequence
  Synthetic oligonucleotide
ccccacggccaagtacctcacgcctaatta

SEQ ID NO: 148939 - DNA, 30 bp, Artificial Sequence
  Synthetic oligonucleotide
tagcgggagggacactgtgagttttaatta

SEQ ID NO: 148940 - DNA, 30 bp, Artificial Sequence
  Synthetic oligonucleotide
aacagctcgaggcatcgtcgtacaacatta

SEQ ID NO: 148941 - DNA, 30 bp, Artificial Sequence
  Synthetic oligonucleotide
ctcggcttagcgattgcgagccagacatta

SEQ ID NO: 148942 - DNA, 30 bp, Artificial Sequence
  Synthetic oligonucleotide
tgagattttgaacgaatgatcgttacatta

SEQ ID NO: 148943 - DNA, 30 bp, Artificial Sequence
  Synthetic oligonucleotide
agagacatagcttcagcaatgtagccatta

SEQ ID NO: 148944 - DNA, 30 bp, Artificial Sequence
  Synthetic oligonucleotide
ttgaccgcccaccgacctaggctagcatta

SEQ ID NO: 148945 - DNA, 30 bp, Artificial Sequence
  Synthetic oligonucleotide
tgtgccacgaggtctatcagtgaggcatta

SEQ ID NO: 148946 - DNA, 30 bp, Artificial Sequence
  Synthetic oligonucleotide
catgggatagattactgacctaattcatta

SEQ ID NO: 148947 - DNA, 30 bp, Artificial Sequence
  Synthetic oligonucleotide
cgggggtacccaaccgagagaacgagatta

SEQ ID NO: 148948 - DNA, 30 bp, Artificial Sequence
  Synthetic oligonucleotide
gcctagcttaggggatactgaccgagatta

SEQ ID NO: 148949 - DNA, 30 bp, Artificial Sequence
  Synthetic oligonucleotide
cacacatttttattccagcctgcgagatta

SEQ ID NO: 148950 - DNA, 30 bp, Artificial Sequence
  Synthetic oligonucleotide
cgggtctgacggctaacagaattccgatta

SEQ ID NO: 148951 - DNA, 30 bp, Artificial Sequence
  Synthetic oligonucleotide
gaatgttgattcccggacctaaatcgatta

SEQ ID NO: 148952 - DNA, 30 bp, Artificial Sequence
  Synthetic oligonucleotide
tccggaagtgtagttaactcgcaaggatta

SEQ ID NO: 148953 - DNA, 30 bp, Artificial Sequence
  Synthetic oligonucleotide
cttgacgaaccggcctgcaattaaggatta

SEQ ID NO: 148954 - DNA, 30 bp, Artificial Sequence
  Synthetic oligonucleotide
cctaactgcccggcctaaagtcagggatta

SEQ ID NO: 148955 - DNA, 30 bp, Artificial Sequence
  Synthetic oligonucleotide
tatcaggtagtttaggggcatgcgggatta

SEQ ID NO: 148956 - DNA, 30 bp, Artificial Sequence
  Synthetic oligonucleotide
ccggcacaactcctgaatttcctgggatta

SEQ ID NO: 148957 - DNA, 30 bp, Artificial Sequence
  Synthetic oligonucleotide
tacatacgtaggcctgaatgacatggatta

SEQ ID NO: 148958 - DNA, 30 bp, Artificial Sequence
  Synthetic oligonucleotide
attacaacgttaaagaccggtcatggatta

SEQ ID NO: 148959 - DNA, 30 bp, Artificial Sequence
  Synthetic oligonucleotide
gagattacggtgtagaaatcacgtggatta

SEQ ID NO: 148960 - DNA, 30 bp, Artificial Sequence
  Synthetic oligonucleotide
gcatctaatgctagatctaccaactgatta

SEQ ID NO: 148961 - DNA, 30 bp, Artificial Sequence
  Synthetic oligonucleotide
cgatcccctgtagtgggtgaactctgatta

SEQ ID NO: 148962 - DNA, 30 bp, Artificial Sequence
  Synthetic oligonucleotide
ggctttaggggacgatacttttagtgatta

SEQ ID NO: 148963 - DNA, 30 bp, Artificial Sequence
  Synthetic oligonucleotide
cgagccagtgcaccacagtttggttgatta

SEQ ID NO: 148964 - DNA, 30 bp, Artificial Sequence
  Synthetic oligonucleotide
tcaagtctcacgcattggcgatcaatatta

SEQ ID NO: 148965 - DNA, 30 bp, Artificial Sequence
  Synthetic oligonucleotide
ttagggaggagccgggccaccgagatatta

SEQ ID NO: 148966 - DNA, 30 bp, Artificial Sequence
  Synthetic oligonucleotide
gtggtgcgaaaatgaataataagactatta

SEQ ID NO: 148967 - DNA, 30 bp, Artificial Sequence
  Synthetic oligonucleotide
gggaaagctgtattttcgtatagtctatta

SEQ ID NO: 148968 - DNA, 30 bp, Artificial Sequence
  Synthetic oligonucleotide
gcacgtgatcagcttttgattatagtatta

SEQ ID NO: 148969 - DNA, 30 bp, Artificial Sequence
  Synthetic oligonucleotide
tttagacatttacaaaattctcgcgtatta

SEQ ID NO: 148970 - DNA, 30 bp, Artificial Sequence
  Synthetic oligonucleotide
tggcgacgtcggtcggttgttggcgtatta

SEQ ID NO: 148971 - DNA, 30 bp, Artificial Sequence
  Synthetic oligonucleotide
gtcaccggtaaaacggttagtgaggtatta

SEQ ID NO: 148972 - DNA, 30 bp, Artificial Sequence
  Synthetic oligonucleotide
gcggcactagtgccggggcactcggtatta

SEQ ID NO: 148973 - DNA, 30 bp, Artificial Sequence
  Synthetic oligonucleotide
gacacgagagtaaacaggcggtatgtatta

SEQ ID NO: 148974 - DNA, 30 bp, Artificial Sequence
  Synthetic oligonucleotide
gcaaggccatgaggaaaagtaccaaactta

SEQ ID NO: 148975 - DNA, 30 bp, Artificial Sequence
  Synthetic oligonucleotide
agccaatctatcatattgcccctgaactta

SEQ ID NO: 148976 - DNA, 30 bp, Artificial Sequence
  Synthetic oligonucleotide
gcttaggtcaatcgtcattcacctaactta

SEQ ID NO: 148977 - DNA, 30 bp, Artificial Sequence
  Synthetic oligonucleotide
gcgtcctaaacgcaggcatgaaggcactta

SEQ ID NO: 148978 - DNA, 30 bp, Artificial Sequence
  Synthetic oligonucleotide
aaggtcgtcgagttctaatgtagtcactta

SEQ ID NO: 148979 - DNA, 30 bp, Artificial Sequence
  Synthetic oligonucleotide
gaccccaagtgcgcatgcggtaacgactta

SEQ ID NO: 148980 - DNA, 30 bp, Artificial Sequence
  Synthetic oligonucleotide
tgactggatagtgttcgtatgtaggactta

SEQ ID NO: 148981 - DNA, 30 bp, Artificial Sequence
  Synthetic oligonucleotide
atctgagtggaagaaatttagatggactta

SEQ ID NO: 148982 - DNA, 30 bp, Artificial Sequence
  Synthetic oligonucleotide
cgcaatcttcctggggccgaaattgactta

SEQ ID NO: 148983 - DNA, 30 bp, Artificial Sequence
  Synthetic oligonucleotide
ggtcactgaacgtgatgtgaactgacctta

SEQ ID NO: 148984 - DNA, 30 bp, Artificial Sequence
  Synthetic oligonucleotide
taagtcgaaactctaattagccagccctta

SEQ ID NO: 148985 - DNA, 30 bp, Artificial Sequence
  Synthetic oligonucleotide
acatatatccaagttccaacagatccctta

SEQ ID NO: 148986 - DNA, 30 bp, Artificial Sequence
  Synthetic oligonucleotide
cggccaaccacagaacctgtacctccctta

SEQ ID NO: 148987 - DNA, 30 bp, Artificial Sequence
  Synthetic oligonucleotide
gggaggggtaatgtaagaagaatgtcctta

SEQ ID NO: 148988 - DNA, 30 bp, Artificial Sequence
  Synthetic oligonucleotide
aggcacattaaacgcgggtaccaaagctta

SEQ ID NO: 148989 - DNA, 30 bp, Artificial Sequence
  Synthetic oligonucleotide
tgaccgtgccaatggggcaatacgagctta

SEQ ID NO: 148990 - DNA, 30 bp, Artificial Sequence
  Synthetic oligonucleotide
aatgagcaggagccatgcagtgcgagctta

SEQ ID NO: 148991 - DNA, 30 bp, Artificial Sequence
  Synthetic oligonucleotide
cggaatgatgattccgtgtaatctagctta

SEQ ID NO: 148992 - DNA, 30 bp, Artificial Sequence
  Synthetic oligonucleotide
ccaatcaaccatttgaagaggaaccgctta

SEQ ID NO: 148993 - DNA, 30 bp, Artificial Sequence
  Synthetic oligonucleotide
agtcgataacgactagcggtgactcgctta

SEQ ID NO: 148994 - DNA, 30 bp, Artificial Sequence
  Synthetic oligonucleotide
ggtcgtcggtagatccgccatcaaggctta

SEQ ID NO: 148995 - DNA, 30 bp, Artificial Sequence
  Synthetic oligonucleotide
gtgtggattgtgatcgggatgtaaggctta

SEQ ID NO: 148996 - DNA, 30 bp, Artificial Sequence
  Synthetic oligonucleotide
cctattcgggcatcagggttgcagggctta

SEQ ID NO: 148997 - DNA, 30 bp, Artificial Sequence
  Synthetic oligonucleotide
cgccccggtagagaacatgaagactgctta

SEQ ID NO: 148998 - DNA, 30 bp, Artificial Sequence
  Synthetic oligonucleotide
ctgactgttgagaaattggatgagtgctta

SEQ ID NO: 148999 - DNA, 30 bp, Artificial Sequence
  Synthetic oligonucleotide
tgcaacagaacattacactaaccgtgctta

SEQ ID NO: 149000 - DNA, 30 bp, Artificial Sequence
  Synthetic oligonucleotide
cgtccgtgcctaaataggaattaaatctta

SEQ ID NO: 149001 - DNA, 30 bp, Artificial Sequence
  Synthetic oligonucleotide
aggagacacacgcattccaacggcatctta

SEQ ID NO: 149002 - DNA, 30 bp, Artificial Sequence
  Synthetic oligonucleotide
ctcggtacctgcgcatctctagggatctta

SEQ ID NO: 149003 - DNA, 30 bp, Artificial Sequence
  Synthetic oligonucleotide
tcatgtgtgggttatagagaagctatctta

SEQ ID NO: 149004 - DNA, 30 bp, Artificial Sequence
  Synthetic oligonucleotide
atcgaaaacctcaaacaatggcttctctta

SEQ ID NO: 149005 - DNA, 30 bp, Artificial Sequence
  Synthetic oligonucleotide
acctgcttccgtgctccacgtaacgtctta

SEQ ID NO: 149006 - DNA, 30 bp, Artificial Sequence
  Synthetic oligonucleotide
attgtaagcacgtaacgtgcggccgtctta

SEQ ID NO: 149007 - DNA, 30 bp, Artificial Sequence
  Synthetic oligonucleotide
gggtaaagctgtagagtctgatgcgtctta

SEQ ID NO: 149008 - DNA, 30 bp, Artificial Sequence
  Synthetic oligonucleotide
cttgtggaacatggtaattatgtcgtctta

SEQ ID NO: 149009 - DNA, 30 bp, Artificial Sequence
  Synthetic oligonucleotide
tactgaaggcttagcaccacaggcttctta

SEQ ID NO: 149010 - DNA, 30 bp, Artificial Sequence
  Synthetic oligonucleotide
ccgccagattgttgttaggttagaaagtta

SEQ ID NO: 149011 - DNA, 30 bp, Artificial Sequence
  Synthetic oligonucleotide
gggtatgccgttagtgacgttcagaagtta

SEQ ID NO: 149012 - DNA, 30 bp, Artificial Sequence
  Synthetic oligonucleotide
gcaccagcatgttctgaatgagtgaagtta

SEQ ID NO: 149013 - DNA, 30 bp, Artificial Sequence
  Synthetic oligonucleotide
taacgaatccttggccgtaaacctaagtta

SEQ ID NO: 149014 - DNA, 30 bp, Artificial Sequence
  Synthetic oligonucleotide
aggtctagagagccctaagcacaacagtta

SEQ ID NO: 149015 - DNA, 30 bp, Artificial Sequence
  Synthetic oligonucleotide
cgcacgtgaagggtttaagtaggacagtta

SEQ ID NO: 149016 - DNA, 30 bp, Artificial Sequence
  Synthetic oligonucleotide
ctgatgtgtcagttattttagtagcagtta

SEQ ID NO: 149017 - DNA, 30 bp, Artificial Sequence
  Synthetic oligonucleotide
atcgacgaacatacagttacctaagagtta

SEQ ID NO: 149018 - DNA, 30 bp, Artificial Sequence
  Synthetic oligonucleotide
gcgtaagtccacgagcccgatccggagtta

SEQ ID NO: 149019 - DNA, 30 bp, Artificial Sequence
  Synthetic oligonucleotide
gtggtcaaccggaggaacaaactggagtta

SEQ ID NO: 149020 - DNA, 30 bp, Artificial Sequence
  Synthetic oligonucleotide
agatcctatcaattacactaatatgagtta

SEQ ID NO: 149021 - DNA, 30 bp, Artificial Sequence
  Synthetic oligonucleotide
tcatgtgacaagtgatgagggtaatagtta

SEQ ID NO: 149022 - DNA, 30 bp, Artificial Sequence
  Synthetic oligonucleotide
gcacagaattgctaataggtaccatagtta

SEQ ID NO: 149023 - DNA, 30 bp, Artificial Sequence
  Synthetic oligonucleotide
agatggtggcaatgtttaacactctagtta

SEQ ID NO: 149024 - DNA, 30 bp, Artificial Sequence
  Synthetic oligonucleotide
cgtgagagggtcgggtcacacgattagtta

SEQ ID NO: 149025 - DNA, 30 bp, Artificial Sequence
  Synthetic oligonucleotide
atgctgccatacgtagaattgtacacgtta

SEQ ID NO: 149026 - DNA, 30 bp, Artificial Sequence
  Synthetic oligonucleotide
caatgggcaccgtattttcgggtcacgtta

SEQ ID NO: 149027 - DNA, 30 bp, Artificial Sequence
  Synthetic oligonucleotide
aaatatggagggcgaaaccgtcagccgtta

SEQ ID NO: 149028 - DNA, 30 bp, Artificial Sequence
  Synthetic oligonucleotide
gaatgaactgttaagtttcgtgcgccgtta

SEQ ID NO: 149029 - DNA, 30 bp, Artificial Sequence
  Synthetic oligonucleotide
tgcaatacctacgggcagtgatcgccgtta

SEQ ID NO: 149030 - DNA, 30 bp, Artificial Sequence
  Synthetic oligonucleotide
gggagaaacgcagagcactgggggccgtta

SEQ ID NO: 149031 - DNA, 30 bp, Artificial Sequence
  Synthetic oligonucleotide
agtggctgatccaaaccgggccctccgtta

SEQ ID NO: 149032 - DNA, 30 bp, Artificial Sequence
  Synthetic oligonucleotide
gaagttcgcgagtgagtaagttgagcgtta

SEQ ID NO: 149033 - DNA, 30 bp, Artificial Sequence
  Synthetic oligonucleotide
agggtattgtgaattatagaattcgcgtta

SEQ ID NO: 149034 - DNA, 30 bp, Artificial Sequence
  Synthetic oligonucleotide
tgcgaatcaggggggtgtaaggtggcgtta

SEQ ID NO: 149035 - DNA, 30 bp, Artificial Sequence
  Synthetic oligonucleotide
gtaggtgggtacttaatgcgtatatcgtta

SEQ ID NO: 149036 - DNA, 30 bp, Artificial Sequence
  Synthetic oligonucleotide
cgaagagcctgcaactcaacatactcgtta

SEQ ID NO: 149037 - DNA, 30 bp, Artificial Sequence
  Synthetic oligonucleotide
cgtgtgtttggcaaaaggtttccgtcgtta

SEQ ID NO: 149038 - DNA, 30 bp, Artificial Sequence
  Synthetic oligonucleotide
gaacagcccgagtgaataagagtttcgtta

SEQ ID NO: 149039 - DNA, 30 bp, Artificial Sequence
  Synthetic oligonucleotide
ggcaggaagagtcgtttcgtcataaggtta

SEQ ID NO: 149040 - DNA, 30 bp, Artificial Sequence
  Synthetic oligonucleotide
ttgacgacactactcggtaggaacaggtta

SEQ ID NO: 149041 - DNA, 30 bp, Artificial Sequence
  Synthetic oligonucleotide
atatctcatacaggctaatcgaggaggtta

SEQ ID NO: 149042 - DNA, 30 bp, Artificial Sequence
  Synthetic oligonucleotide
ccagccttatggcacaatgttatgaggtta

SEQ ID NO: 149043 - DNA, 30 bp, Artificial Sequence
  Synthetic oligonucleotide
ccgcttgtgtgggctaactgcagagggtta

SEQ ID NO: 149044 - DNA, 30 bp, Artificial Sequence
  Synthetic oligonucleotide
aacggggcggcgcgctaacgcggagggtta

SEQ ID NO: 149045 - DNA, 30 bp, Artificial Sequence
  Synthetic oligonucleotide
atacttgggcttaatcgctacggcgggtta

SEQ ID NO: 149046 - DNA, 30 bp, Artificial Sequence
  Synthetic oligonucleotide
catgggcgaactcgctgtgcgattgggtta

SEQ ID NO: 149047 - DNA, 30 bp, Artificial Sequence
  Synthetic oligonucleotide
gcggctgaatggaaaacctgcaaatggtta

SEQ ID NO: 149048 - DNA, 30 bp, Artificial Sequence
  Synthetic oligonucleotide
ccacagttgagaggaggagacggatggtta

SEQ ID NO: 149049 - DNA, 30 bp, Artificial Sequence
  Synthetic oligonucleotide
cgtgtgggttaatagtcggggaactggtta

SEQ ID NO: 149050 - DNA, 30 bp, Artificial Sequence
  Synthetic oligonucleotide
caggggagaatgatatatagggtctggtta

SEQ ID NO: 149051 - DNA, 30 bp, Artificial Sequence
  Synthetic oligonucleotide
tagcgagagctaagaactccaccaatgtta

SEQ ID NO: 149052 - DNA, 30 bp, Artificial Sequence
  Synthetic oligonucleotide
gtgggtggaccggcgggcacaataatgtta

SEQ ID NO: 149053 - DNA, 30 bp, Artificial Sequence
  Synthetic oligonucleotide
ctgctaatttctgccaatagagccatgtta

SEQ ID NO: 149054 - DNA, 30 bp, Artificial Sequence
  Synthetic oligonucleotide
gcgtgaaacattaactcagtctgcatgtta

SEQ ID NO: 149055 - DNA, 30 bp, Artificial Sequence
  Synthetic oligonucleotide
tcactaaggccataacgcgacttcatgtta

SEQ ID NO: 149056 - DNA, 30 bp, Artificial Sequence
  Synthetic oligonucleotide
cacagggatggattactgctctcactgtta

SEQ ID NO: 149057 - DNA, 30 bp, Artificial Sequence
  Synthetic oligonucleotide
cccctagtgtgatagatacctgtgctgtta

SEQ ID NO: 149058 - DNA, 30 bp, Artificial Sequence
  Synthetic oligonucleotide
ggtttcatgacacaggaggagaatctgtta

SEQ ID NO: 149059 - DNA, 30 bp, Artificial Sequence
  Synthetic oligonucleotide
gtacgggggcacgtaatgacgactctgtta

SEQ ID NO: 149060 - DNA, 30 bp, Artificial Sequence
  Synthetic oligonucleotide
aaggtagtccgcactgttaaatacgtgtta

SEQ ID NO: 149061 - DNA, 30 bp, Artificial Sequence
  Synthetic oligonucleotide
taagggtgatccggtggagattgcgtgtta

SEQ ID NO: 149062 - DNA, 30 bp, Artificial Sequence
  Synthetic oligonucleotide
aatggttcgggttgtcctttgcgattgtta

SEQ ID NO: 149063 - DNA, 30 bp, Artificial Sequence
  Synthetic oligonucleotide
aggatagcatgcaggcccccttgattgtta

SEQ ID NO: 149064 - DNA, 30 bp, Artificial Sequence
  Synthetic oligonucleotide
ttagctcagccaccgtcaacagggaattta

SEQ ID NO: 149065 - DNA, 30 bp, Artificial Sequence
  Synthetic oligonucleotide
gtggggaggatacttcccttgccgcattta

SEQ ID NO: 149066 - DNA, 30 bp, Artificial Sequence
  Synthetic oligonucleotide
tattagtcttaacaggaattacgagattta

SEQ ID NO: 149067 - DNA, 30 bp, Artificial Sequence
  Synthetic oligonucleotide
gcggcaccacggttagttggtctagattta

SEQ ID NO: 149068 - DNA, 30 bp, Artificial Sequence
  Synthetic oligonucleotide
acaacaaaaacgggaaccgtgaaggattta

SEQ ID NO: 149069 - DNA, 30 bp, Artificial Sequence
  Synthetic oligonucleotide
ctaactgagcaaagaaatcatacggattta

SEQ ID NO: 149070 - DNA, 30 bp, Artificial Sequence
  Synthetic oligonucleotide
cgctaggaacaggcacactgtacggattta

SEQ ID NO: 149071 - DNA, 30 bp, Artificial Sequence
  Synthetic oligonucleotide
gcgtagacaccatgacggccgagtgattta

SEQ ID NO: 149072 - DNA, 30 bp, Artificial Sequence
  Synthetic oligonucleotide
cctggcagcggtgcgcgagtgggatattta

SEQ ID NO: 149073 - DNA, 30 bp, Artificial Sequence
  Synthetic oligonucleotide
gcacgcggctggtaccaggactgatattta

SEQ ID NO: 149074 - DNA, 30 bp, Artificial Sequence
  Synthetic oligonucleotide
aataccggtttgaagaaggaatggtattta

SEQ ID NO: 149075 - DNA, 30 bp, Artificial Sequence
  Synthetic oligonucleotide
tatccgtcagcggctagggaagcttattta

SEQ ID NO: 149076 - DNA, 30 bp, Artificial Sequence
  Synthetic oligonucleotide
taaccggcgagctctccgtgacaaagttta

SEQ ID NO: 149077 - DNA, 30 bp, Artificial Sequence
  Synthetic oligonucleotide
ggaagtacatgctttgcacagagaagttta

SEQ ID NO: 149078 - DNA, 30 bp, Artificial Sequence
  Synthetic oligonucleotide
tcgcaccggatgcggtaggcgactagttta

SEQ ID NO: 149079 - DNA, 30 bp, Artificial Sequence
  Synthetic oligonucleotide
gaggaaggaagtttacagaacgaccgttta

SEQ ID NO: 149080 - DNA, 30 bp, Artificial Sequence
  Synthetic oligonucleotide
tcgtaaacttcaagaacgctgtggcgttta

SEQ ID NO: 149081 - DNA, 30 bp, Artificial Sequence
  Synthetic oligonucleotide
gagggggtcggggaatacgacgtgcgttta

SEQ ID NO: 149082 - DNA, 30 bp, Artificial Sequence
  Synthetic oligonucleotide
acactccagaaatatatggtaggtcgttta

SEQ ID NO: 149083 - DNA, 30 bp, Artificial Sequence
  Synthetic oligonucleotide
ggaacccactgagagcgacttactggttta

SEQ ID NO: 149084 - DNA, 30 bp, Artificial Sequence
  Synthetic oligonucleotide
cgcatacgggcgtatgaaagaaggtgttta

SEQ ID NO: 149085 - DNA, 30 bp, Artificial Sequence
  Synthetic oligonucleotide
gaggtcatactaatgcaattgcggatttta

SEQ ID NO: 149086 - DNA, 30 bp, Artificial Sequence
  Synthetic oligonucleotide
cgaggtaagaactaagcgtaaaacgtttta

SEQ ID NO: 149087 - DNA, 30 bp, Artificial Sequence
  Synthetic oligonucleotide
ccggccaagaacatataaacgagcgtttta

SEQ ID NO: 149088 - DNA, 30 bp, Artificial Sequence
  Synthetic oligonucleotide
gaaggtgacataatggtacagagattttta

SEQ ID NO: 149089 - DNA, 30 bp, Artificial Sequence
  Synthetic oligonucleotide
ccaagatcttcttaacaaagcacgaaaaac

SEQ ID NO: 149090 - DNA, 30 bp, Artificial Sequence
  Synthetic oligonucleotide
ctcgtgacaatcggtaatagggcgaaaaac

SEQ ID NO: 149091 - DNA, 30 bp, Artificial Sequence
  Synthetic oligonucleotide
ggatcaacactggctcatggtaggaaaaac

SEQ ID NO: 149092 - DNA, 30 bp, Artificial Sequence
  Synthetic oligonucleotide
ctatcaggtcgttggatggccaataaaaac

SEQ ID NO: 149093 - DNA, 30 bp, Artificial Sequence
  Synthetic oligonucleotide
actgcaaaagcgtatgggagaaaacaaaac

SEQ ID NO: 149094 - DNA, 31 bp, Artificial Sequence
  Synthetic oligonucleotide
agtgggtccaacgaggttatgcctccaaaac

SEQ ID NO: 149095 - DNA, 30 bp, Artificial Sequence
  Synthetic oligonucleotide
atgccggagggtgtgcagggggtgcaaaac

SEQ ID NO: 149096 - DNA, 30 bp, Artificial Sequence
  Synthetic oligonucleotide
tctgcataggacggaccaaactcagaaaac

SEQ ID NO: 149097 - DNA, 30 bp, Artificial Sequence
  Synthetic oligonucleotide
tcgtcgtcaagtattatcacagtagaaaac

SEQ ID NO: 149098 - DNA, 30 bp, Artificial Sequence
  Synthetic oligonucleotide
ttgcgaagcgctcaatgcatgctcgaaaac

SEQ ID NO: 149099 - DNA, 30 bp, Artificial Sequence
  Synthetic oligonucleotide
gcgagggtcaactgttggtgctaggaaaac

SEQ ID NO: 149100 - DNA, 30 bp, Artificial Sequence
  Synthetic oligonucleotide
aactaagcgcgactgatgtaattctaaaac

SEQ ID NO: 149101 - DNA, 30 bp, Artificial Sequence
  Synthetic oligonucleotide
ggagggtatcgctcatagaaatggtaaaac

SEQ ID NO: 149102 - DNA, 30 bp, Artificial Sequence
  Synthetic oligonucleotide
gggtccgtattacaccgttaccccacaaac

SEQ ID NO: 149103 - DNA, 30 bp, Artificial Sequence
  Synthetic oligonucleotide
cacagctatcgatgaggactgtcgacaaac

SEQ ID NO: 149104 - DNA, 29 bp, Artificial Sequence
  Synthetic oligonucleotide
gccgagggggcaataagctgaatacaaac

SEQ ID NO: 149105 - DNA, 30 bp, Artificial Sequence
  Synthetic oligonucleotide
acagtgataatcgatttaagaagaccaaac

SEQ ID NO: 149106 - DNA, 30 bp, Artificial Sequence
  Synthetic oligonucleotide
caagtgcacttggtacacgaacgcccaaac

SEQ ID NO: 149107 - DNA, 30 bp, Artificial Sequence
  Synthetic oligonucleotide
aaaggaattgcgggcaccaacaagccaaac

SEQ ID NO: 149108 - DNA, 30 bp, Artificial Sequence
  Synthetic oligonucleotide
ccccacaagattgaaccaatcccagcaaac

SEQ ID NO: 149109 - DNA, 30 bp, Artificial Sequence
  Synthetic oligonucleotide
acctcggctccactaaagagtcacgcaaac

SEQ ID NO: 149110 - DNA, 30 bp, Artificial Sequence
  Synthetic oligonucleotide
ctcgtcgagcactaataaaaccatgcaaac

SEQ ID NO: 149111 - DNA, 30 bp, Artificial Sequence
  Synthetic oligonucleotide
atacgcgacctcgggatcacgactgcaaac

SEQ ID NO: 149112 - DNA, 30 bp, Artificial Sequence
  Synthetic oligonucleotide
ctcctgcgcgtgccaagtcagcctgcaaac

SEQ ID NO: 149113 - DNA, 30 bp, Artificial Sequence
  Synthetic oligonucleotide
ctagatgggtttcagtcccacacatcaaac

SEQ ID NO: 149114 - DNA, 30 bp, Artificial Sequence
  Synthetic oligonucleotide
aagaaacgaactggccgaatatgatcaaac

SEQ ID NO: 149115 - DNA, 30 bp, Artificial Sequence
  Synthetic oligonucleotide
taggacgatcatttcgttctcccgtcaaac

SEQ ID NO: 149116 - DNA, 30 bp, Artificial Sequence
  Synthetic oligonucleotide
gccatcaaagtgagcacgcgatcgtcaaac

SEQ ID NO: 149117 - DNA, 30 bp, Artificial Sequence
  Synthetic oligonucleotide
ttgattcagaatgcgtcatgagtgtcaaac

SEQ ID NO: 149118 - DNA, 30 bp, Artificial Sequence
  Synthetic oligonucleotide
agtagactcaaacccgttgtagtgtcaaac

SEQ ID NO: 149119 - DNA, 30 bp, Artificial Sequence
  Synthetic oligonucleotide
acaacacatactatgtctgcaatgagaaac

SEQ ID NO: 149120 - DNA, 30 bp, Artificial Sequence
  Synthetic oligonucleotide
gggatcgaggtggacacgaccaatagaaac

SEQ ID NO: 149121 - DNA, 30 bp, Artificial Sequence
  Synthetic oligonucleotide
gaaacgaaaaggggaatatcctctagaaac

SEQ ID NO: 149122 - DNA, 30 bp, Artificial Sequence
  Synthetic oligonucleotide
ctacgctacacgtactggtgaccgcgaaac

SEQ ID NO: 149123 - DNA, 30 bp, Artificial Sequence
  Synthetic oligonucleotide
gggaagttttccttgaggaacatgcgaaac

SEQ ID NO: 149124 - DNA, 30 bp, Artificial Sequence
  Synthetic oligonucleotide
taaagtcagtaatgagatctcatgggaaac

SEQ ID NO: 149125 - DNA, 30 bp, Artificial Sequence
  Synthetic oligonucleotide
tgttgacaatatcggagggttggtggaaac

SEQ ID NO: 149126 - DNA, 30 bp, Artificial Sequence
  Synthetic oligonucleotide
ggcacagtgtcctctctgcagccatgaaac

SEQ ID NO: 149127 - DNA, 30 bp, Artificial Sequence
  Synthetic oligonucleotide
cacaaatagagagcctctggacgttgaaac

SEQ ID NO: 149128 - DNA, 30 bp, Artificial Sequence
  Synthetic oligonucleotide
acccgtggacgtcaaccttgtctcataaac

SEQ ID NO: 149129 - DNA, 30 bp, Artificial Sequence
  Synthetic oligonucleotide
aataatggtgacaaggcgtgacatataaac

SEQ ID NO: 149130 - DNA, 30 bp, Artificial Sequence
  Synthetic oligonucleotide
cgccgaactttactaggaggttaactaaac

SEQ ID NO: 149131 - DNA, 29 bp, Artificial Sequence
  Synthetic oligonucleotide
aaggcgtcagtgcaatgcggccactaaac

SEQ ID NO: 149132 - DNA, 30 bp, Artificial Sequence
  Synthetic oligonucleotide
tgcccctagctaacgaaggaccgtctaaac

SEQ ID NO: 149133 - DNA, 30 bp, Artificial Sequence
  Synthetic oligonucleotide
ccacgcgaagccgaccacagggaagtaaac

SEQ ID NO: 149134 - DNA, 30 bp, Artificial Sequence
  Synthetic oligonucleotide
gttgggatagtgcagagatgaggcgtaaac

SEQ ID NO: 149135 - DNA, 30 bp, Artificial Sequence
  Synthetic oligonucleotide
ttgtcccgttggagagctcgggtggtaaac

SEQ ID NO: 149136 - DNA, 30 bp, Artificial Sequence
  Synthetic oligonucleotide
cgagtgcggtgccaccattatgtggtaaac

SEQ ID NO: 149137 - DNA, 30 bp, Artificial Sequence
  Synthetic oligonucleotide
gcagggcttaatgctacatcctacttaaac

SEQ ID NO: 149138 - DNA, 30 bp, Artificial Sequence
  Synthetic oligonucleotide
ggacggtcacagaagctatagcatttaaac

SEQ ID NO: 149139 - DNA, 30 bp, Artificial Sequence
  Synthetic oligonucleotide
acgtggaatagatagttggatcttttaaac

SEQ ID NO: 149140 - DNA, 30 bp, Artificial Sequence
  Synthetic oligonucleotide
ccgtctccagccatcgaccctataaacaac

SEQ ID NO: 149141 - DNA, 30 bp, Artificial Sequence
  Synthetic oligonucleotide
aagtgcgcgaagattgttcggcccaacaac

SEQ ID NO: 149142 - DNA, 30 bp, Artificial Sequence
  Synthetic oligonucleotide
ggtactcgtggtcacaagcgattcaacaac

SEQ ID NO: 149143 - DNA, 30 bp, Artificial Sequence
  Synthetic oligonucleotide
gagagaccagacaatgccagcgataacaac

SEQ ID NO: 149144 - DNA, 30 bp, Artificial Sequence
  Synthetic oligonucleotide
gtacaattgctgggtacgggaactaacaac

SEQ ID NO: 149145 - DNA, 30 bp, Artificial Sequence
  Synthetic oligonucleotide
aattaggcaaaatgagcctaagcccacaac

SEQ ID NO: 149146 - DNA, 30 bp, Artificial Sequence
  Synthetic oligonucleotide
cggcccgaccgggttcctgtaatccacaac

SEQ ID NO: 149147 - DNA, 30 bp, Artificial Sequence
  Synthetic oligonucleotide
tgggaacatgggagggtgcggcggcacaac

SEQ ID NO: 149148 - DNA, 30 bp, Artificial Sequence
  Synthetic oligonucleotide
gggttagaaggtcggatatgatttcacaac

SEQ ID NO: 149149 - DNA, 30 bp, Artificial Sequence
  Synthetic oligonucleotide
tcatgggagttgacgtcgtgggcagacaac

SEQ ID NO: 149150 - DNA, 30 bp, Artificial Sequence
  Synthetic oligonucleotide
ttgaagaaccaattatgccgtaacgacaac

SEQ ID NO: 149151 - DNA, 30 bp, Artificial Sequence
  Synthetic oligonucleotide
tgcggtatggttctataaagtctcgacaac

SEQ ID NO: 149152 - DNA, 30 bp, Artificial Sequence
  Synthetic oligonucleotide
gctggggccgactctatcctatcggacaac

SEQ ID NO: 149153 - DNA, 30 bp, Artificial Sequence
  Synthetic oligonucleotide
tatgatccagataagccagaggtggacaac

SEQ ID NO: 149154 - DNA, 30 bp, Artificial Sequence
  Synthetic oligonucleotide
atggagtcaactcaagtacagtgtgacaac

SEQ ID NO: 149155 - DNA, 30 bp, Artificial Sequence
  Synthetic oligonucleotide
tcggtatagggagtaaaggaaatatacaac

SEQ ID NO: 149156 - DNA, 30 bp, Artificial Sequence
  Synthetic oligonucleotide
ggagggatgtttcggtaacccagctacaac

SEQ ID NO: 149157 - DNA, 30 bp, Artificial Sequence
  Synthetic oligonucleotide
tgacgaattatgtcaaatgtgtgttacaac

SEQ ID NO: 149158 - DNA, 30 bp, Artificial Sequence
  Synthetic oligonucleotide
agttgattaacggcagtaagcaacaccaac

SEQ ID NO: 149159 - DNA, 30 bp, Artificial Sequence
  Synthetic oligonucleotide
tgggatgaggccgggttcacaagccccaac

SEQ ID NO: 149160 - DNA, 30 bp, Artificial Sequence
  Synthetic oligonucleotide
ataaaggaataagggcttgttcgcgccaac

SEQ ID NO: 149161 - DNA, 30 bp, Artificial Sequence
  Synthetic oligonucleotide
gacagtgcgctgccgaatcactgcgccaac

SEQ ID NO: 149162 - DNA, 30 bp, Artificial Sequence
  Synthetic oligonucleotide
ctttcggacatctgagaacagggggccaac

SEQ ID NO: 149163 - DNA, 30 bp, Artificial Sequence
  Synthetic oligonucleotide
tccttaagattgcctgctcggactgccaac

SEQ ID NO: 149164 - DNA, 30 bp, Artificial Sequence
  Synthetic oligonucleotide
cgtaacaggggcaggtcgcaatgtgccaac

SEQ ID NO: 149165 - DNA, 30 bp, Artificial Sequence
  Synthetic oligonucleotide
acgagagtcaaatctatgtcctcgtccaac

SEQ ID NO: 149166 - DNA, 30 bp, Artificial Sequence
  Synthetic oligonucleotide
acgctctcccaaaaagcggtcaggtccaac

SEQ ID NO: 149167 - DNA, 30 bp, Artificial Sequence
  Synthetic oligonucleotide
acaacgcgggcaacttctagccgaagcaac

SEQ ID NO: 149168 - DNA, 30 bp, Artificial Sequence
  Synthetic oligonucleotide
aggcagaaaaagatgttagtcaggagcaac

SEQ ID NO: 149169 - DNA, 30 bp, Artificial Sequence
  Synthetic oligonucleotide
gtacaaagatctaaagctaaaaaacgcaac

SEQ ID NO: 149170 - DNA, 30 bp, Artificial Sequence
  Synthetic oligonucleotide
gctagccgggcggcatacgtaacgcgcaac

SEQ ID NO: 149171 - DNA, 30 bp, Artificial Sequence
  Synthetic oligonucleotide
aaagcaatcactgcaagcacctagggcaac

SEQ ID NO: 149172 - DNA, 30 bp, Artificial Sequence
  Synthetic oligonucleotide
cctggacgcatcgtccttgggaactgcaac

SEQ ID NO: 149173 - DNA, 30 bp, Artificial Sequence
  Synthetic oligonucleotide
aatctcacatgactgccacaacaaatcaac

SEQ ID NO: 149174 - DNA, 30 bp, Artificial Sequence
  Synthetic oligonucleotide
agcaccaaacggacacccgcatccatcaac

SEQ ID NO: 149175 - DNA, 30 bp, Artificial Sequence
  Synthetic oligonucleotide
tggaccaggttgcgctattttcttatcaac

SEQ ID NO: 149176 - DNA, 30 bp, Artificial Sequence
  Synthetic oligonucleotide
aggatctgctttccggtccaagggctcaac

SEQ ID NO: 149177 - DNA, 30 bp, Artificial Sequence
  Synthetic oligonucleotide
ggagactccctaggatagcggcccgtcaac

SEQ ID NO: 149178 - DNA, 30 bp, Artificial Sequence
  Synthetic oligonucleotide
taggtctcaaaacctatttaaatggtcaac

SEQ ID NO: 149179 - DNA, 30 bp, Artificial Sequence
  Synthetic oligonucleotide
tcggttactacactgacactggatgtcaac

SEQ ID NO: 149180 - DNA, 30 bp, Artificial Sequence
  Synthetic oligonucleotide
catcgaagattacgccggggctatgtcaac

SEQ ID NO: 149181 - DNA, 30 bp, Artificial Sequence
  Synthetic oligonucleotide
ggggggccttcgcgcagcaacgaattcaac

SEQ ID NO: 149182 - DNA, 30 bp, Artificial Sequence
  Synthetic oligonucleotide
catgggccgctgcctcaaaggaaaaagaac

SEQ ID NO: 149183 - DNA, 30 bp, Artificial Sequence
  Synthetic oligonucleotide
cacggcttggttccttcgcaataaaagaac

SEQ ID NO: 149184 - DNA, 30 bp, Artificial Sequence
  Synthetic oligonucleotide
ccccccggggaaggataaaagtacaagaac

SEQ ID NO: 149185 - DNA, 30 bp, Artificial Sequence
  Synthetic oligonucleotide
ttggaggtcaacataggaaggattaagaac

SEQ ID NO: 149186 - DNA, 30 bp, Artificial Sequence
  Synthetic oligonucleotide
gtaattcaggacctaagacatgcgcagaac

SEQ ID NO: 149187 - DNA, 30 bp, Artificial Sequence
  Synthetic oligonucleotide
ccgctgtgaaaggtcccccggactcagaac

SEQ ID NO: 149188 - DNA, 30 bp, Artificial Sequence
  Synthetic oligonucleotide
ctcgagccagaccacccagttgttcagaac

SEQ ID NO: 149189 - DNA, 30 bp, Artificial Sequence
  Synthetic oligonucleotide
ggagtaggtaatggaatcccatgagagaac

SEQ ID NO: 149190 - DNA, 30 bp, Artificial Sequence
  Synthetic oligonucleotide
ggcacgttagacgttgatatgcccgagaac

SEQ ID NO: 149191 - DNA, 30 bp, Artificial Sequence
  Synthetic oligonucleotide
aaggccaagttaggcttgaataaggagaac

SEQ ID NO: 149192 - DNA, 30 bp, Artificial Sequence
  Synthetic oligonucleotide
gccacgaatacgggtcacgcaacggagaac

SEQ ID NO: 149193 - DNA, 30 bp, Artificial Sequence
  Synthetic oligonucleotide
tactgcgggacgtatgattggaaatagaac

SEQ ID NO: 149194 - DNA, 30 bp, Artificial Sequence
  Synthetic oligonucleotide
taccaagccgtgctggaacgcgaatagaac

SEQ ID NO: 149195 - DNA, 30 bp, Artificial Sequence
  Synthetic oligonucleotide
atcatcatcatgcaatcgctccgatagaac

SEQ ID NO: 149196 - DNA, 30 bp, Artificial Sequence
  Synthetic oligonucleotide
gactgccaatatttttcacgaacttagaac

SEQ ID NO: 149197 - DNA, 30 bp, Artificial Sequence
  Synthetic oligonucleotide
agaagaagaaccgtaagcgcttatacgaac

SEQ ID NO: 149198 - DNA, 30 bp, Artificial Sequence
  Synthetic oligonucleotide
agtatggcttcgagcacgctagcaccgaac

SEQ ID NO: 149199 - DNA, 30 bp, Artificial Sequence
  Synthetic oligonucleotide
ataaaaacccctgtaaaggaacgaccgaac

SEQ ID NO: 149200 - DNA, 30 bp, Artificial Sequence
  Synthetic oligonucleotide
cccatggtactgtagtgtactaccccgaac

SEQ ID NO: 149201 - DNA, 30 bp, Artificial Sequence
  Synthetic oligonucleotide
ggctctcacagtagtcattgatccccgaac

SEQ ID NO: 149202 - DNA, 30 bp, Artificial Sequence
  Synthetic oligonucleotide
ctcggatgttcatgaattgactgcccgaac

SEQ ID NO: 149203 - DNA, 30 bp, Artificial Sequence
  Synthetic oligonucleotide
gccgttgcacctactcagagcatcccgaac

SEQ ID NO: 149204 - DNA, 30 bp, Artificial Sequence
  Synthetic oligonucleotide
atcatcacataagtcagaactgagccgaac

SEQ ID NO: 149205 - DNA, 30 bp, Artificial Sequence
  Synthetic oligonucleotide
atatcctgggctatcctcaaaaaagcgaac

SEQ ID NO: 149206 - DNA, 30 bp, Artificial Sequence
  Synthetic oligonucleotide
gaaccacatgtttgggctttgtaagcgaac

SEQ ID NO: 149207 - DNA, 30 bp, Artificial Sequence
  Synthetic oligonucleotide
atgacggttgaaaaattgcccagggcgaac

SEQ ID NO: 149208 - DNA, 30 bp, Artificial Sequence
  Synthetic oligonucleotide
gcaggccacatgaaacaggttagtgcgaac

SEQ ID NO: 149209 - DNA, 30 bp, Artificial Sequence
  Synthetic oligonucleotide
tcaatacggtggggcttcctgtgctcgaac

SEQ ID NO: 149210 - DNA, 30 bp, Artificial Sequence
  Synthetic oligonucleotide
atgaccagggggacgtaagcctcaaggaac

SEQ ID NO: 149211 - DNA, 30 bp, Artificial Sequence
  Synthetic oligonucleotide
ctgggtaagtgtcatcgtcaggggaggaac

SEQ ID NO: 149212 - DNA, 30 bp, Artificial Sequence
  Synthetic oligonucleotide
agtcgcgtaacggttacggcggcacggaac

SEQ ID NO: 149213 - DNA, 30 bp, Artificial Sequence
  Synthetic oligonucleotide
gtacgtgctgctgtggcagagctacggaac

SEQ ID NO: 149214 - DNA, 30 bp, Artificial Sequence
  Synthetic oligonucleotide
gtacgttgccgaacaaatgggatgcggaac

SEQ ID NO: 149215 - DNA, 30 bp, Artificial Sequence
  Synthetic oligonucleotide
ccatcacaaactcaaattcctctggggaac

SEQ ID NO: 149216 - DNA, 30 bp, Artificial Sequence
  Synthetic oligonucleotide
aagacgagaacatatatacttctatggaac

SEQ ID NO: 149217 - DNA, 30 bp, Artificial Sequence
  Synthetic oligonucleotide
acaccaccagctgtgcgttttgagtggaac

SEQ ID NO: 149218 - DNA, 30 bp, Artificial Sequence
  Synthetic oligonucleotide
caaacgtcacagttaaagtttaggtggaac

SEQ ID NO: 149219 - DNA, 30 bp, Artificial Sequence
  Synthetic oligonucleotide
atattagacgaggggtgtactgaaatgaac

SEQ ID NO: 149220 - DNA, 30 bp, Artificial Sequence
  Synthetic oligonucleotide
gcatagcaagccaagggtcggtacatgaac

SEQ ID NO: 149221 - DNA, 30 bp, Artificial Sequence
  Synthetic oligonucleotide
ttggctttatgtggtggctgcaccatgaac

SEQ ID NO: 149222 - DNA, 30 bp, Artificial Sequence
  Synthetic oligonucleotide
aactatggacaagacagtaatgggatgaac

SEQ ID NO: 149223 - DNA, 30 bp, Artificial Sequence
  Synthetic oligonucleotide
atgttctctaagcgacactgacatatgaac

SEQ ID NO: 149224 - DNA, 30 bp, Artificial Sequence
  Synthetic oligonucleotide
ccgataaacagatcggtggattccctgaac

SEQ ID NO: 149225 - DNA, 30 bp, Artificial Sequence
  Synthetic oligonucleotide
aagttcaactaggcaccaaaggcgctgaac

SEQ ID NO: 149226 - DNA, 30 bp, Artificial Sequence
  Synthetic oligonucleotide
gcttgaattgacacccgtatctgagtgaac

SEQ ID NO: 149227 - DNA, 30 bp, Artificial Sequence
  Synthetic oligonucleotide
cggcggaaccatcgacccaggacattgaac

SEQ ID NO: 149228 - DNA, 30 bp, Artificial Sequence
  Synthetic oligonucleotide
aatacgcccatgtctaaactcagattgaac

SEQ ID NO: 149229 - DNA, 30 bp, Artificial Sequence
  Synthetic oligonucleotide
cttttccaggtgggcgcgtaggacaataac

SEQ ID NO: 149230 - DNA, 30 bp, Artificial Sequence
  Synthetic oligonucleotide
tttgcacaacccaaggcaatacctaataac

SEQ ID NO: 149231 - DNA, 30 bp, Artificial Sequence
  Synthetic oligonucleotide
acgttctcgcttcctagcagagagcataac

SEQ ID NO: 149232 - DNA, 30 bp, Artificial Sequence
  Synthetic oligonucleotide
tctcactctctctagtacagtcgtcataac

SEQ ID NO: 149233 - DNA, 30 bp, Artificial Sequence
  Synthetic oligonucleotide
gaggggttcgcaaaaaaccacagcgataac

SEQ ID NO: 149234 - DNA, 30 bp, Artificial Sequence
  Synthetic oligonucleotide
aagtcgactgatatccgacccgtgtataac

SEQ ID NO: 149235 - DNA, 30 bp, Artificial Sequence
  Synthetic oligonucleotide
gcgtggtctagagggcggtagttaactaac

SEQ ID NO: 149236 - DNA, 30 bp, Artificial Sequence
  Synthetic oligonucleotide
tgtaacaattgtaaagagtaccctcctaac

SEQ ID NO: 149237 - DNA, 30 bp, Artificial Sequence
  Synthetic oligonucleotide
ggggcccgaccttacataatccgtcctaac

SEQ ID NO: 149238 - DNA, 30 bp, Artificial Sequence
  Synthetic oligonucleotide
gacgactaagttatgtactctgacgctaac

SEQ ID NO: 149239 - DNA, 30 bp, Artificial Sequence
  Synthetic oligonucleotide
cggttcatttacgaggcaacgggggctaac

SEQ ID NO: 149240 - DNA, 30 bp, Artificial Sequence
  Synthetic oligonucleotide
cataagtgcagaagacatggggctgctaac

SEQ ID NO: 149241 - DNA, 30 bp, Artificial Sequence
  Synthetic oligonucleotide
tggccccttataaggactctgacaagtaac

SEQ ID NO: 149242 - DNA, 30 bp, Artificial Sequence
  Synthetic oligonucleotide
tcgtgaatggcaagatacccgagaagtaac

SEQ ID NO: 149243 - DNA, 30 bp, Artificial Sequence
  Synthetic oligonucleotide
ctatcaatatacccatgagaaacgagtaac

SEQ ID NO: 149244 - DNA, 30 bp, Artificial Sequence
  Synthetic oligonucleotide
gaccactaatctgaaatgggatgtagtaac

SEQ ID NO: 149245 - DNA, 30 bp, Artificial Sequence
  Synthetic oligonucleotide
acgtacccgcgggatgaagtgccccgtaac

SEQ ID NO: 149246 - DNA, 30 bp, Artificial Sequence
  Synthetic oligonucleotide
catcctaacacctcacacctttatcgtaac

SEQ ID NO: 149247 - DNA, 30 bp, Artificial Sequence
  Synthetic oligonucleotide
cgttgccgaaatcacctagcaataggtaac

SEQ ID NO: 149248 - DNA, 30 bp, Artificial Sequence
  Synthetic oligonucleotide
attcgagtatagagtggtgcgctaggtaac

SEQ ID NO: 149249 - DNA, 30 bp, Artificial Sequence
  Synthetic oligonucleotide
ccatggcgggatgtttattctctaggtaac

SEQ ID NO: 149250 - DNA, 30 bp, Artificial Sequence
  Synthetic oligonucleotide
atagtcctatggtagagcggtaatggtaac

SEQ ID NO: 149251 - DNA, 30 bp, Artificial Sequence
  Synthetic oligonucleotide
gtgtgtctagtggtcgggtgagactgtaac

SEQ ID NO: 149252 - DNA, 30 bp, Artificial Sequence
  Synthetic oligonucleotide
ggagggtatcaatgaatctgacgttgtaac

SEQ ID NO: 149253 - DNA, 30 bp, Artificial Sequence
  Synthetic oligonucleotide
cggagaagttgatctctaaaacccattaac

SEQ ID NO: 149254 - DNA, 30 bp, Artificial Sequence
  Synthetic oligonucleotide
gcgcacgacggactaaaaataccgattaac

SEQ ID NO: 149255 - DNA, 30 bp, Artificial Sequence
  Synthetic oligonucleotide
cacgtggagacactttattaaccgcttaac

SEQ ID NO: 149256 - DNA, 30 bp, Artificial Sequence
  Synthetic oligonucleotide
agattccacaataaaagaagcggcgttaac

SEQ ID NO: 149257 - DNA, 30 bp, Artificial Sequence
  Synthetic oligonucleotide
cgcgtcaatgtagctacagcaaaggttaac

SEQ ID NO: 149258 - DNA, 30 bp, Artificial Sequence
  Synthetic oligonucleotide
tctgtcgagtccgacagttcccactttaac

SEQ ID NO: 149259 - DNA, 40 bp, Artificial Sequence
  Synthetic oligonucleotide
gacggtgccctcttccgtaatcgttgtcaatgcttttaac

SEQ ID NO: 149260 - DNA, 30 bp, Artificial Sequence
  Synthetic oligonucleotide
gctgaaaattatgtgcggcctgtcaaacac

SEQ ID NO: 149261 - DNA, 30 bp, Artificial Sequence
  Synthetic oligonucleotide
tcagcctaagggtacgggtaagtgaaacac

SEQ ID NO: 149262 - DNA, 30 bp, Artificial Sequence
  Synthetic oligonucleotide
accttccgcgcgcaaacaccgacacaacac

SEQ ID NO: 149263 - DNA, 30 bp, Artificial Sequence
  Synthetic oligonucleotide
ctccacggaagagaacgttcttagcaacac

SEQ ID NO: 149264 - DNA, 30 bp, Artificial Sequence
  Synthetic oligonucleotide
taggggagggctgcggaatccaatcaacac

SEQ ID NO: 149265 - DNA, 30 bp, Artificial Sequence
  Synthetic oligonucleotide
caaaccttagaggctaacggtggtcaacac

SEQ ID NO: 149266 - DNA, 30 bp, Artificial Sequence
  Synthetic oligonucleotide
tagaataataccgagtcttcaatagaacac

SEQ ID NO: 149267 - DNA, 30 bp, Artificial Sequence
  Synthetic oligonucleotide
gcgtaatcagttctggttccgcccgaacac

SEQ ID NO: 149268 - DNA, 30 bp, Artificial Sequence
  Synthetic oligonucleotide
gctgggcgagaagaattcacccgcgaacac

SEQ ID NO: 149269 - DNA, 30 bp, Artificial Sequence
  Synthetic oligonucleotide
ttcacaatactcctataaacgttcgaacac

SEQ ID NO: 149270 - DNA, 30 bp, Artificial Sequence
  Synthetic oligonucleotide
cacaaaggtattgtacgggacgaggaacac

SEQ ID NO: 149271 - DNA, 30 bp, Artificial Sequence
  Synthetic oligonucleotide
cgggccactccttggggagaagcggaacac

SEQ ID NO: 149272 - DNA, 30 bp, Artificial Sequence
  Synthetic oligonucleotide
tcgttaggtttagatttagcgtatgaacac

SEQ ID NO: 149273 - DNA, 30 bp, Artificial Sequence
  Synthetic oligonucleotide
cgttcttagttctttgccaaagagtaacac

SEQ ID NO: 149274 - DNA, 30 bp, Artificial Sequence
  Synthetic oligonucleotide
actataactccgccggacacgacaacacac

SEQ ID NO: 149275 - DNA, 30 bp, Artificial Sequence
  Synthetic oligonucleotide
ttagggctggtgcaggatttaaacacacac

SEQ ID NO: 149276 - DNA, 30 bp, Artificial Sequence
  Synthetic oligonucleotide
cattgtatgggaaataagtagtccacacac

SEQ ID NO: 149277 - DNA, 30 bp, Artificial Sequence
  Synthetic oligonucleotide
cgcgtcacatgaaagtccgacggaccacac

SEQ ID NO: 149278 - DNA, 30 bp, Artificial Sequence
  Synthetic oligonucleotide
acatgcctacggtgaactaaaacgccacac

SEQ ID NO: 149279 - DNA, 30 bp, Artificial Sequence
  Synthetic oligonucleotide
agcgaaataggcggatctgctacagcacac

SEQ ID NO: 149280 - DNA, 30 bp, Artificial Sequence
  Synthetic oligonucleotide
ggggggttgatgacctcgacacaggcacac

SEQ ID NO: 149281 - DNA, 30 bp, Artificial Sequence
  Synthetic oligonucleotide
aggtcctcattacgggcattcttatcacac

SEQ ID NO: 149282 - DNA, 30 bp, Artificial Sequence
  Synthetic oligonucleotide
gttacggaacgcgatcgcacgaacagacac

SEQ ID NO: 149283 - DNA, 30 bp, Artificial Sequence
  Synthetic oligonucleotide
cgatgaacgtccactcaagaggccagacac

SEQ ID NO: 149284 - DNA, 31 bp, Artificial Sequence
  Synthetic oligonucleotide
cgtcggaggacctgctgcgatacggagacac

SEQ ID NO: 149285 - DNA, 30 bp, Artificial Sequence
  Synthetic oligonucleotide
agtgtggggcaagtgagatgtctgagacac

SEQ ID NO: 149286 - DNA, 30 bp, Artificial Sequence
  Synthetic oligonucleotide
tccggaaaaggccgttagttccatagacac

SEQ ID NO: 149287 - DNA, 30 bp, Artificial Sequence
  Synthetic oligonucleotide
tccgcgcgttagagcggtgtaactagacac

SEQ ID NO: 149288 - DNA, 30 bp, Artificial Sequence
  Synthetic oligonucleotide
ggagagggcgaacgggtaactagtagacac

SEQ ID NO: 149289 - DNA, 30 bp, Artificial Sequence
  Synthetic oligonucleotide
aaccgatacgtgcgaaaccataaacgacac

SEQ ID NO: 149290 - DNA, 30 bp, Artificial Sequence
  Synthetic oligonucleotide
gcactaacgtcacaagatcgccacggacac

SEQ ID NO: 149291 - DNA, 30 bp, Artificial Sequence
  Synthetic oligonucleotide
gagaatcaccaagagggctatagtggacac

SEQ ID NO: 149292 - DNA, 31 bp, Artificial Sequence
  Synthetic oligonucleotide
agcaggtacaaagttacgggaaattggacac

SEQ ID NO: 149293 - DNA, 30 bp, Artificial Sequence
  Synthetic oligonucleotide
tctactgctaagttcaccccatagatacac

SEQ ID NO: 149294 - DNA, 30 bp, Artificial Sequence
  Synthetic oligonucleotide
taggaagagccaacaatatatcatatacac

SEQ ID NO: 149295 - DNA, 30 bp, Artificial Sequence
  Synthetic oligonucleotide
ccaggggtgaggcacgaaatgattatacac

SEQ ID NO: 149296 - DNA, 30 bp, Artificial Sequence
  Synthetic oligonucleotide
ttctgggccaatagttgaaaggcgctacac

SEQ ID NO: 149297 - DNA, 30 bp, Artificial Sequence
  Synthetic oligonucleotide
gacgctgctcatcaagtactacgggtacac

SEQ ID NO: 149298 - DNA, 30 bp, Artificial Sequence
  Synthetic oligonucleotide
tggtgttaaattggtgacaagttggtacac

SEQ ID NO: 149299 - DNA, 30 bp, Artificial Sequence
  Synthetic oligonucleotide
tttaacggcagctgacaccggggattacac

SEQ ID NO: 149300 - DNA, 30 bp, Artificial Sequence
  Synthetic oligonucleotide
cgccccctaacagaaggttgcaaaaaccac

SEQ ID NO: 149301 - DNA, 30 bp, Artificial Sequence
  Synthetic oligonucleotide
agtgcgatcacgttccacatgtgaaaccac

SEQ ID NO: 149302 - DNA, 30 bp, Artificial Sequence
  Synthetic oligonucleotide
cgcaaacgccccccacgaatctacaaccac

SEQ ID NO: 149303 - DNA, 30 bp, Artificial Sequence
  Synthetic oligonucleotide
agcgagtctaagtattcataggggaaccac

SEQ ID NO: 149304 - DNA, 30 bp, Artificial Sequence
  Synthetic oligonucleotide
ttgtagagatcacttttatgctataaccac

SEQ ID NO: 149305 - DNA, 30 bp, Artificial Sequence
  Synthetic oligonucleotide
cgacgtcgcttagagtcggtccgccaccac

SEQ ID NO: 149306 - DNA, 30 bp, Artificial Sequence
  Synthetic oligonucleotide
ggtccccgagggatgatcatgtagcaccac

SEQ ID NO: 149307 - DNA, 30 bp, Artificial Sequence
  Synthetic oligonucleotide
tggaagatacgcgataggtaccatgaccac

SEQ ID NO: 149308 - DNA, 30 bp, Artificial Sequence
  Synthetic oligonucleotide
tgataagggtgacaaagatttcttgaccac

SEQ ID NO: 149309 - DNA, 30 bp, Artificial Sequence
  Synthetic oligonucleotide
tgctaatgagaagggttgattcgttaccac

SEQ ID NO: 149310 - DNA, 30 bp, Artificial Sequence
  Synthetic oligonucleotide
aggggtgagcctcgtcaccggctttaccac

SEQ ID NO: 149311 - DNA, 30 bp, Artificial Sequence
  Synthetic oligonucleotide
agtacgtggtggcgcgtgatgtccacccac

SEQ ID NO: 149312 - DNA, 30 bp, Artificial Sequence
  Synthetic oligonucleotide
taaataagattacaatatattactacccac

SEQ ID NO: 149313 - DNA, 30 bp, Artificial Sequence
  Synthetic oligonucleotide
agactcactcaagcgctctatggtacccac

SEQ ID NO: 149314 - DNA, 30 bp, Artificial Sequence
  Synthetic oligonucleotide
tcttgttgtggtggaagcgtgataccccac

SEQ ID NO: 149315 - DNA, 30 bp, Artificial Sequence
  Synthetic oligonucleotide
agaacgcaaaagagggatcgctccccccac

SEQ ID NO: 149316 - DNA, 30 bp, Artificial Sequence
  Synthetic oligonucleotide
gttcgactaacgacatgaggctagccccac

SEQ ID NO: 149317 - DNA, 30 bp, Artificial Sequence
  Synthetic oligonucleotide
agtcgggtttagtcagcatacaacgcccac

SEQ ID NO: 149318 - DNA, 30 bp, Artificial Sequence
  Synthetic oligonucleotide
gtcagcaatgatagcgtactcccggcccac

SEQ ID NO: 149319 - DNA, 30 bp, Artificial Sequence
  Synthetic oligonucleotide
tatgtgccaaacgagatagatcgggcccac

SEQ ID NO: 149320 - DNA, 30 bp, Artificial Sequence
  Synthetic oligonucleotide
gcgtagtaggatctcaagatgagctcccac

SEQ ID NO: 149321 - DNA, 30 bp, Artificial Sequence
  Synthetic oligonucleotide
ccggattcgaagggtatctcacggagccac

SEQ ID NO: 149322 - DNA, 30 bp, Artificial Sequence
  Synthetic oligonucleotide
gttcgatatcacgcgatacaatgtagccac

SEQ ID NO: 149323 - DNA, 30 bp, Artificial Sequence
  Synthetic oligonucleotide
gggaaacttagtctagactcaacacgccac

SEQ ID NO: 149324 - DNA, 30 bp, Artificial Sequence
  Synthetic oligonucleotide
tgatgtcgggaaatcaagtagtcacgccac

SEQ ID NO: 149325 - DNA, 30 bp, Artificial Sequence
  Synthetic oligonucleotide
agcacgaggcggactaattaccgacgccac

SEQ ID NO: 149326 - DNA, 30 bp, Artificial Sequence
  Synthetic oligonucleotide
tccaggtccgctgaggaattttggcgccac

SEQ ID NO: 149327 - DNA, 30 bp, Artificial Sequence
  Synthetic oligonucleotide
atgggtctcctggtgggccttctgcgccac

SEQ ID NO: 149328 - DNA, 30 bp, Artificial Sequence
  Synthetic oligonucleotide
ggtatcgcaatcgcatcgcacgaaggccac

SEQ ID NO: 149329 - DNA, 30 bp, Artificial Sequence
  Synthetic oligonucleotide
atagggtaaatatcggaggaaccaggccac

SEQ ID NO: 149330 - DNA, 30 bp, Artificial Sequence
  Synthetic oligonucleotide
attgtgagtcacgctcacaatcaatgccac

SEQ ID NO: 149331 - DNA, 30 bp, Artificial Sequence
  Synthetic oligonucleotide
ggctaagcgagagcatgtatacgatgccac

SEQ ID NO: 149332 - DNA, 30 bp, Artificial Sequence
  Synthetic oligonucleotide
tacacataaattcgcgaactgaccatccac

SEQ ID NO: 149333 - DNA, 30 bp, Artificial Sequence
  Synthetic oligonucleotide
agctagatgcaggacttcgaagagatccac

SEQ ID NO: 149334 - DNA, 30 bp, Artificial Sequence
  Synthetic oligonucleotide
gagacgacaaccctcgactggcggatccac

SEQ ID NO: 149335 - DNA, 30 bp, Artificial Sequence
  Synthetic oligonucleotide
aacggcatcagtactatctacaatatccac

SEQ ID NO: 149336 - DNA, 30 bp, Artificial Sequence
  Synthetic oligonucleotide
tgtgctgaaggtgaatagtgtaatatccac

SEQ ID NO: 149337 - DNA, 30 bp, Artificial Sequence
  Synthetic oligonucleotide
tatgcaatcccgtatcccgtccgactccac

SEQ ID NO: 149338 - DNA, 30 bp, Artificial Sequence
  Synthetic oligonucleotide
agcaagagtcccacgccgttcgtagtccac

SEQ ID NO: 149339 - DNA, 30 bp, Artificial Sequence
  Synthetic oligonucleotide
caaaatacaggagagaagggttaggtccac

SEQ ID NO: 149340 - DNA, 30 bp, Artificial Sequence
  Synthetic oligonucleotide
agcagggaacagatggtgaaaatggtccac

SEQ ID NO: 149341 - DNA, 30 bp, Artificial Sequence
  Synthetic oligonucleotide
ccataacggaagtagagagccactgtccac

SEQ ID NO: 149342 - DNA, 30 bp, Artificial Sequence
  Synthetic oligonucleotide
gtgataagcaaagggataaaagtcttccac

SEQ ID NO: 149343 - DNA, 30 bp, Artificial Sequence
  Synthetic oligonucleotide
agcacccaatgtactcggaaaaggttccac

SEQ ID NO: 149344 - DNA, 30 bp, Artificial Sequence
  Synthetic oligonucleotide
ggtgaggatctaacctgcctccaaaagcac

SEQ ID NO: 149345 - DNA, 30 bp, Artificial Sequence
  Synthetic oligonucleotide
cagacccctccagacctagagttaaagcac

SEQ ID NO: 149346 - DNA, 30 bp, Artificial Sequence
  Synthetic oligonucleotide
atgactacactttttggacccttcaagcac

SEQ ID NO: 149347 - DNA, 30 bp, Artificial Sequence
  Synthetic oligonucleotide
agtgtagaaatccccagtaacgggaagcac

SEQ ID NO: 149348 - DNA, 30 bp, Artificial Sequence
  Synthetic oligonucleotide
taatgtctgcgattgtatccggtgaagcac

SEQ ID NO: 149349 - DNA, 30 bp, Artificial Sequence
  Synthetic oligonucleotide
tgatgggtatccttctaaaaaccacagcac

SEQ ID NO: 149350 - DNA, 30 bp, Artificial Sequence
  Synthetic oligonucleotide
tttgttttaggacaaggcctattccagcac

SEQ ID NO: 149351 - DNA, 30 bp, Artificial Sequence
  Synthetic oligonucleotide
ctgaatacactacgttaaacccagcagcac

SEQ ID NO: 149352 - DNA, 30 bp, Artificial Sequence
  Synthetic oligonucleotide
acatacactggggaaatgcggactcagcac

SEQ ID NO: 149353 - DNA, 30 bp, Artificial Sequence
  Synthetic oligonucleotide
catttaatgtgtctaaggatcgaagagcac

SEQ ID NO: 149354 - DNA, 30 bp, Artificial Sequence
  Synthetic oligonucleotide
tccgacggtgctgcttacttgtgagagcac

SEQ ID NO: 149355 - DNA, 30 bp, Artificial Sequence
  Synthetic oligonucleotide
ggaatcggttaggatgaataagacgagcac

SEQ ID NO: 149356 - DNA, 30 bp, Artificial Sequence
  Synthetic oligonucleotide
ctgcggtcaaaggtccgtttaaaggagcac

SEQ ID NO: 149357 - DNA, 30 bp, Artificial Sequence
  Synthetic oligonucleotide
ggacggtccgactaagttaaagcatagcac

SEQ ID NO: 149358 - DNA, 30 bp, Artificial Sequence
  Synthetic oligonucleotide
cacctacgatatgattgtactatatagcac

SEQ ID NO: 149359 - DNA, 30 bp, Artificial Sequence
  Synthetic oligonucleotide
ggaaaattgagtattacataacactagcac

SEQ ID NO: 149360 - DNA, 30 bp, Artificial Sequence
  Synthetic oligonucleotide
gactaaagtgggacctgtaggatcacgcac

SEQ ID NO: 149361 - DNA, 30 bp, Artificial Sequence
  Synthetic oligonucleotide
tattgggcgatagttatgtaacctacgcac

SEQ ID NO: 149362 - DNA, 30 bp, Artificial Sequence
  Synthetic oligonucleotide
atctaatctaaacacaatctgcgtacgcac

SEQ ID NO: 149363 - DNA, 30 bp, Artificial Sequence
  Synthetic oligonucleotide
tggcggctcatagccactgtttatccgcac

SEQ ID NO: 149364 - DNA, 30 bp, Artificial Sequence
  Synthetic oligonucleotide
gggaaccacaaggaaccggcgtctccgcac

SEQ ID NO: 149365 - DNA, 30 bp, Artificial Sequence
  Synthetic oligonucleotide
atatggtaggtaacactggcgccagcgcac

SEQ ID NO: 149366 - DNA, 31 bp, Artificial Sequence
  Synthetic oligonucleotide
ggagcaaccaaaagaggcggacggagcgcac

SEQ ID NO: 149367 - DNA, 30 bp, Artificial Sequence
  Synthetic oligonucleotide
taaggcataccaagtatggtatacgcgcac

SEQ ID NO: 149368 - DNA, 30 bp, Artificial Sequence
  Synthetic oligonucleotide
taggacaatacttgtccactaagcgcgcac

SEQ ID NO: 149369 - DNA, 30 bp, Artificial Sequence
  Synthetic oligonucleotide
tagaaatgagacctgcgtattagggcgcac

SEQ ID NO: 149370 - DNA, 30 bp, Artificial Sequence
  Synthetic oligonucleotide
tcctagagcatatatttctaggatgcgcac

SEQ ID NO: 149371 - DNA, 30 bp, Artificial Sequence
  Synthetic oligonucleotide
taggagacaccatctgcgttagtttcgcac

SEQ ID NO: 149372 - DNA, 30 bp, Artificial Sequence
  Synthetic oligonucleotide
gttaaattcgtaatagtgcaggaaaggcac

SEQ ID NO: 149373 - DNA, 30 bp, Artificial Sequence
  Synthetic oligonucleotide
gggttggtcaagaaaactagggcaaggcac

SEQ ID NO: 149374 - DNA, 30 bp, Artificial Sequence
  Synthetic oligonucleotide
catgcgctgggtggttggtcgcgccggcac

SEQ ID NO: 149375 - DNA, 30 bp, Artificial Sequence
  Synthetic oligonucleotide
gaacggcggtacgcataacggttccggcac

SEQ ID NO: 149376 - DNA, 30 bp, Artificial Sequence
  Synthetic oligonucleotide
aaaggcgtctcaagcagaagtgcgcggcac

SEQ ID NO: 149377 - DNA, 30 bp, Artificial Sequence
  Synthetic oligonucleotide
agttacctacctttgaacagaactcggcac

SEQ ID NO: 149378 - DNA, 30 bp, Artificial Sequence
  Synthetic oligonucleotide
cgcggtcggcttgccaccccaagtcggcac

SEQ ID NO: 149379 - DNA, 30 bp, Artificial Sequence
  Synthetic oligonucleotide
caatgccactactaaggatatagtcggcac

SEQ ID NO: 149380 - DNA, 30 bp, Artificial Sequence
  Synthetic oligonucleotide
gcgtgtctggtggagcggtacagcgggcac

SEQ ID NO: 149381 - DNA, 30 bp, Artificial Sequence
  Synthetic oligonucleotide
ataatgacttttgagctagactatgggcac

SEQ ID NO: 149382 - DNA, 30 bp, Artificial Sequence
  Synthetic oligonucleotide
acgcgtgttgtaataactgttcgtgggcac

SEQ ID NO: 149383 - DNA, 30 bp, Artificial Sequence
  Synthetic oligonucleotide
ctgcaccgttgcttggaccgttaatggcac

SEQ ID NO: 149384 - DNA, 30 bp, Artificial Sequence
  Synthetic oligonucleotide
cgagctcatcactcggatggctagtggcac

SEQ ID NO: 149385 - DNA, 30 bp, Artificial Sequence
  Synthetic oligonucleotide
cgtgaaaacggacacgagacttcttggcac

SEQ ID NO: 149386 - DNA, 30 bp, Artificial Sequence
  Synthetic oligonucleotide
ggctagtatggtcccgccgatcacatgcac

SEQ ID NO: 149387 - DNA, 30 bp, Artificial Sequence
  Synthetic oligonucleotide
caaaatggaataagctaaccaaccatgcac

SEQ ID NO: 149388 - DNA, 30 bp, Artificial Sequence
  Synthetic oligonucleotide
actacgctcatgtctacaggacagatgcac

SEQ ID NO: 149389 - DNA, 30 bp, Artificial Sequence
  Synthetic oligonucleotide
tactctggaccaccatatgacaatatgcac

SEQ ID NO: 149390 - DNA, 30 bp, Artificial Sequence
  Synthetic oligonucleotide
tcagcgaccctgtccgagttatggctgcac

SEQ ID NO: 149391 - DNA, 30 bp, Artificial Sequence
  Synthetic oligonucleotide
tatgcaaacatatcgggtggccgtctgcac

SEQ ID NO: 149392 - DNA, 30 bp, Artificial Sequence
  Synthetic oligonucleotide
acatcaagtcaataggtcaatgtcgtgcac

SEQ ID NO: 149393 - DNA, 30 bp, Artificial Sequence
  Synthetic oligonucleotide
ctgatgcggtgcggggagaatgtcgtgcac

SEQ ID NO: 149394 - DNA, 30 bp, Artificial Sequence
  Synthetic oligonucleotide
ccagttctcttgcttaccaacgatgtgcac

SEQ ID NO: 149395 - DNA, 30 bp, Artificial Sequence
  Synthetic oligonucleotide
accttggtccatatcatatcaggtgtgcac

SEQ ID NO: 149396 - DNA, 30 bp, Artificial Sequence
  Synthetic oligonucleotide
atatacagttcgaaatgggatcaattgcac

SEQ ID NO: 149397 - DNA, 30 bp, Artificial Sequence
  Synthetic oligonucleotide
ttgtacgactaacgacaggaccgattgcac

SEQ ID NO: 149398 - DNA, 30 bp, Artificial Sequence
  Synthetic oligonucleotide
tggcattgacttttgacctcagagttgcac

SEQ ID NO: 149399 - DNA, 30 bp, Artificial Sequence
  Synthetic oligonucleotide
gagatcgctcgcggaaagcaattgttgcac

SEQ ID NO: 149400 - DNA, 30 bp, Artificial Sequence
  Synthetic oligonucleotide
tccatcgtatgctcgtcacgcgagaatcac

SEQ ID NO: 149401 - DNA, 30 bp, Artificial Sequence
  Synthetic oligonucleotide
ctggttggtgcggataaatcgctgaatcac

SEQ ID NO: 149402 - DNA, 30 bp, Artificial Sequence
  Synthetic oligonucleotide
ccatctgagcacatgtcatgaaaacatcac

SEQ ID NO: 149403 - DNA, 30 bp, Artificial Sequence
  Synthetic oligonucleotide
cttgtaggtggtaaccaggacgtacatcac

SEQ ID NO: 149404 - DNA, 29 bp, Artificial Sequence
  Synthetic oligonucleotide
atgatgcctatgcattagaagacgatcac

SEQ ID NO: 149405 - DNA, 30 bp, Artificial Sequence
  Synthetic oligonucleotide
ctagaggacgcgttacggacatcggatcac

SEQ ID NO: 149406 - DNA, 30 bp, Artificial Sequence
  Synthetic oligonucleotide
tttcgtgacggaagcgactagtgggatcac

SEQ ID NO: 149407 - DNA, 30 bp, Artificial Sequence
  Synthetic oligonucleotide
gggatgggtgatctggacactgaatatcac

SEQ ID NO: 149408 - DNA, 30 bp, Artificial Sequence
  Synthetic oligonucleotide
cgattttagctcgaaggttacacatatcac

SEQ ID NO: 149409 - DNA, 30 bp, Artificial Sequence
  Synthetic oligonucleotide
tgtacacgacgagactccactttaactcac

SEQ ID NO: 149410 - DNA, 30 bp, Artificial Sequence
  Synthetic oligonucleotide
aggaaatggctggactgcaataatactcac

SEQ ID NO: 149411 - DNA, 30 bp, Artificial Sequence
  Synthetic oligonucleotide
tcatgcacccataagcctattacagctcac

SEQ ID NO: 149412 - DNA, 30 bp, Artificial Sequence
  Synthetic oligonucleotide
acggagtaacatgcaagacgagtcgctcac

SEQ ID NO: 149413 - DNA, 30 bp, Artificial Sequence
  Synthetic oligonucleotide
tagaacgagcggtagttcatcttggctcac

SEQ ID NO: 149414 - DNA, 30 bp, Artificial Sequence
  Synthetic oligonucleotide
gtaagtggggacggaaatgggcacagtcac

SEQ ID NO: 149415 - DNA, 30 bp, Artificial Sequence
  Synthetic oligonucleotide
taagggcatacccaaatagcttacagtcac

SEQ ID NO: 149416 - DNA, 30 bp, Artificial Sequence
  Synthetic oligonucleotide
ttggttgagtgtattgcaccacagagtcac

SEQ ID NO: 149417 - DNA, 30 bp, Artificial Sequence
  Synthetic oligonucleotide
gatccttagggataggcccatcctagtcac

SEQ ID NO: 149418 - DNA, 30 bp, Artificial Sequence
  Synthetic oligonucleotide
acagcatcctagtcagaaagtgctagtcac

SEQ ID NO: 149419 - DNA, 30 bp, Artificial Sequence
  Synthetic oligonucleotide
agtcatccttgcagatagggtgttagtcac

SEQ ID NO: 149420 - DNA, 30 bp, Artificial Sequence
  Synthetic oligonucleotide
tcgtcgtttggcgacaggagtaacggtcac

SEQ ID NO: 149421 - DNA, 30 bp, Artificial Sequence
  Synthetic oligonucleotide
tcggacagacaggcaacgatcaagggtcac

SEQ ID NO: 149422 - DNA, 29 bp, Artificial Sequence
  Synthetic oligonucleotide
gagacatactagtagtaccacagggtcac

SEQ ID NO: 149423 - DNA, 30 bp, Artificial Sequence
  Synthetic oligonucleotide
acggccaatcttggtggctgggggggtcac

SEQ ID NO: 149424 - DNA, 30 bp, Artificial Sequence
  Synthetic oligonucleotide
aagaaggttctggatcgaaggactggtcac

SEQ ID NO: 149425 - DNA, 30 bp, Artificial Sequence
  Synthetic oligonucleotide
ctatacaaaccgatagccttgatgtgtcac

SEQ ID NO: 149426 - DNA, 30 bp, Artificial Sequence
  Synthetic oligonucleotide
cttaccaatcaacagagtaggaatattcac

SEQ ID NO: 149427 - DNA, 30 bp, Artificial Sequence
  Synthetic oligonucleotide
ccttaaaagagtaagccaccgttacttcac

SEQ ID NO: 149428 - DNA, 30 bp, Artificial Sequence
  Synthetic oligonucleotide
agcccggctgacgagagtcaagagcttcac

SEQ ID NO: 149429 - DNA, 30 bp, Artificial Sequence
  Synthetic oligonucleotide
ggaagccaaggggccaaaccataagttcac

SEQ ID NO: 149430 - DNA, 30 bp, Artificial Sequence
  Synthetic oligonucleotide
agtgcaaacggcgtccgggcatatgttcac

SEQ ID NO: 149431 - DNA, 30 bp, Artificial Sequence
  Synthetic oligonucleotide
gccgaaagcgcacggaaactgtttgttcac

SEQ ID NO: 149432 - DNA, 34 bp, Artificial Sequence
  Synthetic oligonucleotide
gataatagaccaccacgtgtccatcacaaaagac

SEQ ID NO: 149433 - DNA, 34 bp, Artificial Sequence
  Synthetic oligonucleotide
gatactagaccaccacgtgtacatcagaaaagac

SEQ ID NO: 149434 - DNA, 34 bp, Artificial Sequence
  Synthetic oligonucleotide
gataatagaccaccacgtgtccatcagaaaagac

SEQ ID NO: 149435 - DNA, 30 bp, Artificial Sequence
  Synthetic oligonucleotide
ccgagaatgagggttgggagcctcaaagac

SEQ ID NO: 149436 - DNA, 30 bp, Artificial Sequence
  Synthetic oligonucleotide
tgatacggtaatctatcttagaggaaagac

SEQ ID NO: 149437 - DNA, 30 bp, Artificial Sequence
  Synthetic oligonucleotide
cgggcgcaggctacttccgggtatcaagac

SEQ ID NO: 149438 - DNA, 30 bp, Artificial Sequence
  Synthetic oligonucleotide
cggtggttagactctaaaggatccgaagac

SEQ ID NO: 149439 - DNA, 30 bp, Artificial Sequence
  Synthetic oligonucleotide
gcaaagatcaggcgtcattttggtgaagac

SEQ ID NO: 149440 - DNA, 30 bp, Artificial Sequence
  Synthetic oligonucleotide
tttgggatagtcgtggcacgccagtaagac

SEQ ID NO: 149441 - DNA, 30 bp, Artificial Sequence
  Synthetic oligonucleotide
aatggtagtcgatgtgaagggataacagac

SEQ ID NO: 149442 - DNA, 30 bp, Artificial Sequence
  Synthetic oligonucleotide
agaatataggtcttttgtagtgggacagac

SEQ ID NO: 149443 - DNA, 30 bp, Artificial Sequence
  Synthetic oligonucleotide
cttcatgttttatctcaaccatcaccagac

SEQ ID NO: 149444 - DNA, 30 bp, Artificial Sequence
  Synthetic oligonucleotide
tcatccgttgaaatgggaaaccatccagac

SEQ ID NO: 149445 - DNA, 30 bp, Artificial Sequence
  Synthetic oligonucleotide
ttgtattgtgtaattaagtcaacggcagac

SEQ ID NO: 149446 - DNA, 30 bp, Artificial Sequence
  Synthetic oligonucleotide
gactggcgtcacttgacaatgctggcagac

SEQ ID NO: 149447 - DNA, 30 bp, Artificial Sequence
  Synthetic oligonucleotide
catcgcagtacgattcgaccccctgcagac

SEQ ID NO: 149448 - DNA, 30 bp, Artificial Sequence
  Synthetic oligonucleotide
tcccagtcgtcctaacgagggtcatcagac

SEQ ID NO: 149449 - DNA, 30 bp, Artificial Sequence
  Synthetic oligonucleotide
caaggaaagcgttgtgattgtgtatcagac

SEQ ID NO: 149450 - DNA, 30 bp, Artificial Sequence
  Synthetic oligonucleotide
actaactacgagcggtattaggactcagac

SEQ ID NO: 149451 - DNA, 30 bp, Artificial Sequence
  Synthetic oligonucleotide
gtccggtcgaactaatcggatcagtcagac

SEQ ID NO: 149452 - DNA, 30 bp, Artificial Sequence
  Synthetic oligonucleotide
attgaggttatttccctctcagcgtcagac

SEQ ID NO: 149453 - DNA, 30 bp, Artificial Sequence
  Synthetic oligonucleotide
ccgagtcgcactgttcagagggggtcagac

SEQ ID NO: 149454 - DNA, 30 bp, Artificial Sequence
  Synthetic oligonucleotide
tactattaggagttcgcatactggtcagac

SEQ ID NO: 149455 - DNA, 30 bp, Artificial Sequence
  Synthetic oligonucleotide
taaccctgaggggagggatcgtccagagac

SEQ ID NO: 149456 - DNA, 30 bp, Artificial Sequence
  Synthetic oligonucleotide
gcccaagcgggggtgataggagctagagac

SEQ ID NO: 149457 - DNA, 30 bp, Artificial Sequence
  Synthetic oligonucleotide
cgctacacgacaaaaactagcccacgagac

SEQ ID NO: 149458 - DNA, 30 bp, Artificial Sequence
  Synthetic oligonucleotide
agtctacgagttcaggaaaatttacgagac

SEQ ID NO: 149459 - DNA, 30 bp, Artificial Sequence
  Synthetic oligonucleotide
gaagcgagcacttgacgggaggaccgagac

SEQ ID NO: 149460 - DNA, 30 bp, Artificial Sequence
  Synthetic oligonucleotide
gtaagaaagcgcaacatgcttgtgcgagac

SEQ ID NO: 149461 - DNA, 30 bp, Artificial Sequence
  Synthetic oligonucleotide
caaccccttggcggcgtgatacacggagac

SEQ ID NO: 149462 - DNA, 30 bp, Artificial Sequence
  Synthetic oligonucleotide
gccatatcatcgcaaaagatgcacggagac

SEQ ID NO: 149463 - DNA, 30 bp, Artificial Sequence
  Synthetic oligonucleotide
tttgcgctccatacgagacgaaagggagac

SEQ ID NO: 149464 - DNA, 30 bp, Artificial Sequence
  Synthetic oligonucleotide
cacggggcgggttattatatttaatgagac

SEQ ID NO: 149465 - DNA, 30 bp, Artificial Sequence
  Synthetic oligonucleotide
cggacaaagttgggacgttgatcgatagac

SEQ ID NO: 149466 - DNA, 30 bp, Artificial Sequence
  Synthetic oligonucleotide
tgggcagcaaaaaggaatgctaaactagac

SEQ ID NO: 149467 - DNA, 30 bp, Artificial Sequence
  Synthetic oligonucleotide
agtagcgaactcgtggccatagatctagac

SEQ ID NO: 149468 - DNA, 30 bp, Artificial Sequence
  Synthetic oligonucleotide
tgtactaacgaacataagcccggtctagac

SEQ ID NO: 149469 - DNA, 30 bp, Artificial Sequence
  Synthetic oligonucleotide
ggcacgggagaaccgtggtcgtgagtagac

SEQ ID NO: 149470 - DNA, 30 bp, Artificial Sequence
  Synthetic oligonucleotide
gctgtcgctaggaattgcaaacgcgtagac

SEQ ID NO: 149471 - DNA, 30 bp, Artificial Sequence
  Synthetic oligonucleotide
gttcgcaaatacacgggacgcatggtagac

SEQ ID NO: 149472 - DNA, 30 bp, Artificial Sequence
  Synthetic oligonucleotide
aaccgacgacaaaaagggagaatgttagac

SEQ ID NO: 149473 - DNA, 30 bp, Artificial Sequence
  Synthetic oligonucleotide
cccagtagcatgtggaaccgatctttagac

SEQ ID NO: 149474 - DNA, 30 bp, Artificial Sequence
  Synthetic oligonucleotide
gaggaaaaaggtaagaatcgctgtttagac

SEQ ID NO: 149475 - DNA, 30 bp, Artificial Sequence
  Synthetic oligonucleotide
cagtcatctaaatcatgggccaggaacgac

SEQ ID NO: 149476 - DNA, 30 bp, Artificial Sequence
  Synthetic oligonucleotide
aacggaaataactttgcaaaccttaacgac

SEQ ID NO: 149477 - DNA, 30 bp, Artificial Sequence
  Synthetic oligonucleotide
tactgctgtaaaacctgccgtttgcacgac

SEQ ID NO: 149478 - DNA, 30 bp, Artificial Sequence
  Synthetic oligonucleotide
ttaacggaagctgtgcatgaatctcacgac

SEQ ID NO: 149479 - DNA, 30 bp, Artificial Sequence
  Synthetic oligonucleotide
gggacttctctgactaatgcccaagacgac

SEQ ID NO: 149480 - DNA, 30 bp, Artificial Sequence
  Synthetic oligonucleotide
cgcttcaacaaatagggcgtataggacgac

SEQ ID NO: 149481 - DNA, 30 bp, Artificial Sequence
  Synthetic oligonucleotide
cattcatgggagccgcacaccggggacgac

SEQ ID NO: 149482 - DNA, 30 bp, Artificial Sequence
  Synthetic oligonucleotide
tccgattaaacaatctgccaaaggtacgac

SEQ ID NO: 149483 - DNA, 30 bp, Artificial Sequence
  Synthetic oligonucleotide
tccagcttggaaggagcgatgcaaaccgac

SEQ ID NO: 149484 - DNA, 30 bp, Artificial Sequence
  Synthetic oligonucleotide
ccatgccactagcgctagtgctgtaccgac

SEQ ID NO: 149485 - DNA, 30 bp, Artificial Sequence
  Synthetic oligonucleotide
gatgcactcaagcgtacaaacgtacccgac

SEQ ID NO: 149486 - DNA, 30 bp, Artificial Sequence
  Synthetic oligonucleotide
ttctcgcctcctttcgtgtaaagctccgac

SEQ ID NO: 149487 - DNA, 30 bp, Artificial Sequence
  Synthetic oligonucleotide
ctgggagcggataggaaggcgacccgcgac

SEQ ID NO: 149488 - DNA, 30 bp, Artificial Sequence
  Synthetic oligonucleotide
aattgcgccactaaaatcgaccggcgcgac

SEQ ID NO: 149489 - DNA, 30 bp, Artificial Sequence
  Synthetic oligonucleotide
gatccctgagagtgttatcagcttggcgac

SEQ ID NO: 149490 - DNA, 30 bp, Artificial Sequence
  Synthetic oligonucleotide
ggatgagcgccggtggcgggaggatgcgac

SEQ ID NO: 149491 - DNA, 30 bp, Artificial Sequence
  Synthetic oligonucleotide
tgccaaagcaagagccggttgcgctgcgac

SEQ ID NO: 149492 - DNA, 30 bp, Artificial Sequence
  Synthetic oligonucleotide
tatactctggctagatcagaggggtgcgac

SEQ ID NO: 149493 - DNA, 30 bp, Artificial Sequence
  Synthetic oligonucleotide
gcgtgatgctggggctcggttttgatcgac

SEQ ID NO: 149494 - DNA, 30 bp, Artificial Sequence
  Synthetic oligonucleotide
atgaagcgtatgggacatttttctatcgac

SEQ ID NO: 149495 - DNA, 30 bp, Artificial Sequence
  Synthetic oligonucleotide
caggcacggaacgtgggatatggactcgac

SEQ ID NO: 149496 - DNA, 30 bp, Artificial Sequence
  Synthetic oligonucleotide
atcaggcccctgaacaagcacgacgtcgac

SEQ ID NO: 149497 - DNA, 30 bp, Artificial Sequence
  Synthetic oligonucleotide
cccttcgtttgcacatgcctagccgtcgac

SEQ ID NO: 149498 - DNA, 30 bp, Artificial Sequence
  Synthetic oligonucleotide
agtaacatcgacttcagtggggaggtcgac

SEQ ID NO: 149499 - DNA, 30 bp, Artificial Sequence
  Synthetic oligonucleotide
ctgataagtagaaagtacggatatgtcgac

SEQ ID NO: 149500 - DNA, 30 bp, Artificial Sequence
  Synthetic oligonucleotide
gatcactagctgcacagttaactattcgac

SEQ ID NO: 149501 - DNA, 30 bp, Artificial Sequence
  Synthetic oligonucleotide
atgtcggggccattctgtaaggtcttcgac

SEQ ID NO: 149502 - DNA, 30 bp, Artificial Sequence
  Synthetic oligonucleotide
aagggacatcaagtctgtgttctcaaggac

SEQ ID NO: 149503 - DNA, 30 bp, Artificial Sequence
  Synthetic oligonucleotide
aaaaccgttcgtagtctgcttcagaaggac

SEQ ID NO: 149504 - DNA, 30 bp, Artificial Sequence
  Synthetic oligonucleotide
taacagggggacggctgtctcccgaaggac

SEQ ID NO: 149505 - DNA, 30 bp, Artificial Sequence
  Synthetic oligonucleotide
caatgtcattacgcgtcactaagacaggac

SEQ ID NO: 149506 - DNA, 30 bp, Artificial Sequence
  Synthetic oligonucleotide
aagctaacggtattcagtggatgacaggac

SEQ ID NO: 149507 - DNA, 30 bp, Artificial Sequence
  Synthetic oligonucleotide
gggatggattcaggcggagcaaaagaggac

SEQ ID NO: 149508 - DNA, 30 bp, Artificial Sequence
  Synthetic oligonucleotide
acatgcatacccgccgtattggcagaggac

SEQ ID NO: 149509 - DNA, 30 bp, Artificial Sequence
  Synthetic oligonucleotide
tcagcccataagtacaggccgtccgaggac

SEQ ID NO: 149510 - DNA, 30 bp, Artificial Sequence
  Synthetic oligonucleotide
catacggtgaccttggtaggcgtggaggac

SEQ ID NO: 149511 - DNA, 30 bp, Artificial Sequence
  Synthetic oligonucleotide
catctagagacttatccaatcaatgaggac

SEQ ID NO: 149512 - DNA, 30 bp, Artificial Sequence
  Synthetic oligonucleotide
aggttggagccactagaggaaaaataggac

SEQ ID NO: 149513 - DNA, 30 bp, Artificial Sequence
  Synthetic oligonucleotide
ggatcatccccactgcttacaagataggac

SEQ ID NO: 149514 - DNA, 30 bp, Artificial Sequence
  Synthetic oligonucleotide
tcatcgattacacaggattttcggtaggac

SEQ ID NO: 149515 - DNA, 30 bp, Artificial Sequence
  Synthetic oligonucleotide
accgtaaccgagaaaagcgggttaacggac

SEQ ID NO: 149516 - DNA, 30 bp, Artificial Sequence
  Synthetic oligonucleotide
tgtacatgatggttgtgtcgctacacggac

SEQ ID NO: 149517 - DNA, 30 bp, Artificial Sequence
  Synthetic oligonucleotide
tgaaagacataagatacagggatcacggac

SEQ ID NO: 149518 - DNA, 30 bp, Artificial Sequence
  Synthetic oligonucleotide
ggtgtctaagtgcgctcaatccggacggac

SEQ ID NO: 149519 - DNA, 30 bp, Artificial Sequence
  Synthetic oligonucleotide
ttgtggccatataaccccaggttgacggac

SEQ ID NO: 149520 - DNA, 30 bp, Artificial Sequence
  Synthetic oligonucleotide
aatgtacgccgcgaaaccatgggagcggac

SEQ ID NO: 149521 - DNA, 30 bp, Artificial Sequence
  Synthetic oligonucleotide
cataaacgaagagatggtatgtacgcggac

SEQ ID NO: 149522 - DNA, 30 bp, Artificial Sequence
  Synthetic oligonucleotide
cgcggagttataaatggtcgctcctcggac

SEQ ID NO: 149523 - DNA, 30 bp, Artificial Sequence
  Synthetic oligonucleotide
tacataatggtaagaaatggttgctcggac

SEQ ID NO: 149524 - DNA, 30 bp, Artificial Sequence
  Synthetic oligonucleotide
atagatgtaagtctaacacctacgtcggac

SEQ ID NO: 149525 - DNA, 30 bp, Artificial Sequence
  Synthetic oligonucleotide
gagccatggcttagaccgcgatccagggac

SEQ ID NO: 149526 - DNA, 30 bp, Artificial Sequence
  Synthetic oligonucleotide
gccggggtaaagaggcctaagtggagggac

SEQ ID NO: 149527 - DNA, 30 bp, Artificial Sequence
  Synthetic oligonucleotide
agtggtacacactacgacatttaacgggac

SEQ ID NO: 149528 - DNA, 30 bp, Artificial Sequence
  Synthetic oligonucleotide
aaagcccgagtcaggttcaaaatacgggac

SEQ ID NO: 149529 - DNA, 30 bp, Artificial Sequence
  Synthetic oligonucleotide
cattcgcaaccaagatgtgaactacgggac

SEQ ID NO: 149530 - DNA, 30 bp, Artificial Sequence
  Synthetic oligonucleotide
aacgcggtgactgtatataaccaccgggac

SEQ ID NO: 149531 - DNA, 30 bp, Artificial Sequence
  Synthetic oligonucleotide
cagtagtcggggagccttagtaaaggggac

SEQ ID NO: 149532 - DNA, 30 bp, Artificial Sequence
  Synthetic oligonucleotide
tggatcaggccagcaggtgggtgaggggac

SEQ ID NO: 149533 - DNA, 30 bp, Artificial Sequence
  Synthetic oligonucleotide
ggatagtcagattgattgttaaactgggac

SEQ ID NO: 149534 - DNA, 30 bp, Artificial Sequence
  Synthetic oligonucleotide
taacagcgtagccgcgagcgtaggtgggac

SEQ ID NO: 149535 - DNA, 30 bp, Artificial Sequence
  Synthetic oligonucleotide
aaaggggcaccttaaacggggaacatggac

SEQ ID NO: 149536 - DNA, 30 bp, Artificial Sequence
  Synthetic oligonucleotide
cgcatgagttactgggccgtctagatggac

SEQ ID NO: 149537 - DNA, 30 bp, Artificial Sequence
  Synthetic oligonucleotide
gcggatgggagggatgacaagaggatggac

SEQ ID NO: 149538 - DNA, 30 bp, Artificial Sequence
  Synthetic oligonucleotide
gtgcgaggttcagccgcatgcctgatggac

SEQ ID NO: 149539 - DNA, 30 bp, Artificial Sequence
  Synthetic oligonucleotide
acgtttcctgtggtggagatctagctggac

SEQ ID NO: 149540 - DNA, 30 bp, Artificial Sequence
  Synthetic oligonucleotide
gcttcattcggcaaccgcgtaaatctggac

SEQ ID NO: 149541 - DNA, 30 bp, Artificial Sequence
  Synthetic oligonucleotide
aatacaggcctgacatcttctagcgtggac

SEQ ID NO: 149542 - DNA, 30 bp, Artificial Sequence
  Synthetic oligonucleotide
cgaggcggagcggttcgtgtggagttggac

SEQ ID NO: 149543 - DNA, 31 bp, Artificial Sequence
  Synthetic oligonucleotide
atgcatacctatcagtaatatacaccatgac

SEQ ID NO: 149544 - DNA, 30 bp, Artificial Sequence
  Synthetic oligonucleotide
gacataggacaggcactgggtcggcatgac

SEQ ID NO: 149545 - DNA, 30 bp, Artificial Sequence
  Synthetic oligonucleotide
tacgtaaagcgagtgagaccactggatgac

SEQ ID NO: 149546 - DNA, 30 bp, Artificial Sequence
  Synthetic oligonucleotide
gttggtacgttctaatggggtactgatgac

SEQ ID NO: 149547 - DNA, 30 bp, Artificial Sequence
  Synthetic oligonucleotide
ggtaaagtgatcaacgcgattgactatgac

SEQ ID NO: 149548 - DNA, 30 bp, Artificial Sequence
  Synthetic oligonucleotide
agagagcatgacaccgtagcgccttatgac

SEQ ID NO: 149549 - DNA, 30 bp, Artificial Sequence
  Synthetic oligonucleotide
acagcggcgatgaagtcctcgttttatgac

SEQ ID NO: 149550 - DNA, 30 bp, Artificial Sequence
  Synthetic oligonucleotide
gaaagaggccaagggcttcttatcactgac

SEQ ID NO: 149551 - DNA, 30 bp, Artificial Sequence
  Synthetic oligonucleotide
gggcaacctgtaccagtgggggcacctgac

SEQ ID NO: 149552 - DNA, 30 bp, Artificial Sequence
  Synthetic oligonucleotide
gggtactctttcgcttgttaggtgcctgac

SEQ ID NO: 149553 - DNA, 30 bp, Artificial Sequence
  Synthetic oligonucleotide
gtatacggaacacatcgatcgaactctgac

SEQ ID NO: 149554 - DNA, 30 bp, Artificial Sequence
  Synthetic oligonucleotide
agtgtggcttacgcacagggcacctctgac

SEQ ID NO: 149555 - DNA, 30 bp, Artificial Sequence
  Synthetic oligonucleotide
ccaacctgctaagagaatcctactagtgac

SEQ ID NO: 149556 - DNA, 30 bp, Artificial Sequence
  Synthetic oligonucleotide
aaggcagagtagaaccggatagttagtgac

SEQ ID NO: 149557 - DNA, 30 bp, Artificial Sequence
  Synthetic oligonucleotide
taaatcgaaggggcggtatggacccgtgac

SEQ ID NO: 149558 - DNA, 30 bp, Artificial Sequence
  Synthetic oligonucleotide
cggtactggccacccagttgaagccgtgac

SEQ ID NO: 149559 - DNA, 30 bp, Artificial Sequence
  Synthetic oligonucleotide
cacaaagcgtgtggctagatatagcgtgac

SEQ ID NO: 149560 - DNA, 30 bp, Artificial Sequence
  Synthetic oligonucleotide
atacgtttggaagaataataagggggtgac

SEQ ID NO: 149561 - DNA, 30 bp, Artificial Sequence
  Synthetic oligonucleotide
gggtatttgcgttccccaagaaatggtgac

SEQ ID NO: 149562 - DNA, 30 bp, Artificial Sequence
  Synthetic oligonucleotide
gggtcacactcgcaattcctagatggtgac

SEQ ID NO: 149563 - DNA, 30 bp, Artificial Sequence
  Synthetic oligonucleotide
caggtctacctcgcaaggtacctctgtgac

SEQ ID NO: 149564 - DNA, 30 bp, Artificial Sequence
  Synthetic oligonucleotide
agtagaaataatacggggaacaggtgtgac

SEQ ID NO: 149565 - DNA, 30 bp, Artificial Sequence
  Synthetic oligonucleotide
tcaaaggtgtccgcacacttcgacattgac

SEQ ID NO: 149566 - DNA, 30 bp, Artificial Sequence
  Synthetic oligonucleotide
ctcgaactgattttagggtcgtctattgac

SEQ ID NO: 149567 - DNA, 30 bp, Artificial Sequence
  Synthetic oligonucleotide
gaatcctgtaaggcaaacaccatccttgac

SEQ ID NO: 149568 - DNA, 30 bp, Artificial Sequence
  Synthetic oligonucleotide
ggatccgattagagctcatgtccagttgac

SEQ ID NO: 149569 - DNA, 29 bp, Artificial Sequence
  Synthetic oligonucleotide
cggggtatgcgacatccagtaccgttgac

SEQ ID NO: 149570 - DNA, 30 bp, Artificial Sequence
  Synthetic oligonucleotide
tggctggcttcgttatcatgtcccgttgac

SEQ ID NO: 149571 - DNA, 30 bp, Artificial Sequence
  Synthetic oligonucleotide
tgacgattcaaactggccctaagggttgac

SEQ ID NO: 149572 - DNA, 30 bp, Artificial Sequence
  Synthetic oligonucleotide
cgcaaatacaggggacgcatggcctttgac

SEQ ID NO: 149573 - DNA, 30 bp, Artificial Sequence
  Synthetic oligonucleotide
gcgtaaaatgctacacataatgattttgac

SEQ ID NO: 149574 - DNA, 30 bp, Artificial Sequence
  Synthetic oligonucleotide
ttcaaggggacaagggacactcgttttgac

SEQ ID NO: 149575 - DNA, 30 bp, Artificial Sequence
  Synthetic oligonucleotide
tacaaaacgaatccgaaaactcaaaaatac

SEQ ID NO: 149576 - DNA, 30 bp, Artificial Sequence
  Synthetic oligonucleotide
gcaaatcgcaaatggcccccgtcaaaatac

SEQ ID NO: 149577 - DNA, 30 bp, Artificial Sequence
  Synthetic oligonucleotide
gatctgacagggggtagcctggggaaatac

SEQ ID NO: 149578 - DNA, 30 bp, Artificial Sequence
  Synthetic oligonucleotide
accgaatgtaaataattaagtttccaatac

SEQ ID NO: 149579 - DNA, 30 bp, Artificial Sequence
  Synthetic oligonucleotide
tgcctcataaaccacacaacgaatcaatac

SEQ ID NO: 149580 - DNA, 30 bp, Artificial Sequence
  Synthetic oligonucleotide
agcggtaggatctctgcaaagtgtcaatac

SEQ ID NO: 149581 - DNA, 30 bp, Artificial Sequence
  Synthetic oligonucleotide
ttcggacccataaggtctgtgcttcaatac

SEQ ID NO: 149582 - DNA, 30 bp, Artificial Sequence
  Synthetic oligonucleotide
cacggtagacaatgattctactttcaatac

SEQ ID NO: 149583 - DNA, 30 bp, Artificial Sequence
  Synthetic oligonucleotide
ccgcgaatccgaataaggtgaagagaatac

SEQ ID NO: 149584 - DNA, 30 bp, Artificial Sequence
  Synthetic oligonucleotide
tgcactgcgtactaatataacggagaatac

SEQ ID NO: 149585 - DNA, 30 bp, Artificial Sequence
  Synthetic oligonucleotide
gaatgagtaagaacaagttgtggagaatac

SEQ ID NO: 149586 - DNA, 30 bp, Artificial Sequence
  Synthetic oligonucleotide
taccttgcaacccgggactcggccgaatac

SEQ ID NO: 149587 - DNA, 30 bp, Artificial Sequence
  Synthetic oligonucleotide
cttaaattagatggctagttatcggaatac

SEQ ID NO: 149588 - DNA, 30 bp, Artificial Sequence
  Synthetic oligonucleotide
cggagggaggaaactgatttaattgaatac

SEQ ID NO: 149589 - DNA, 30 bp, Artificial Sequence
  Synthetic oligonucleotide
tggcaggagcaaataggaggcgactaatac

SEQ ID NO: 149590 - DNA, 30 bp, Artificial Sequence
  Synthetic oligonucleotide
acctaactgtgggtcgtatgaggctaatac

SEQ ID NO: 149591 - DNA, 30 bp, Artificial Sequence
  Synthetic oligonucleotide
caggcaagaatcaaggatacgatttaatac

SEQ ID NO: 149592 - DNA, 30 bp, Artificial Sequence
  Synthetic oligonucleotide
ggagtcaaatgtaaataatacaggacatac

SEQ ID NO: 149593 - DNA, 30 bp, Artificial Sequence
  Synthetic oligonucleotide
ggcaacaatgaattgctactgatgacatac

SEQ ID NO: 149594 - DNA, 30 bp, Artificial Sequence
  Synthetic oligonucleotide
gatcgaacaacatatcgtagtatcccatac

SEQ ID NO: 149595 - DNA, 30 bp, Artificial Sequence
  Synthetic oligonucleotide
ggcgaacgcgcatatgtccaggtcccatac

SEQ ID NO: 149596 - DNA, 30 bp, Artificial Sequence
  Synthetic oligonucleotide
tgttgaccagtgggaggcaggagtccatac

SEQ ID NO: 149597 - DNA, 30 bp, Artificial Sequence
  Synthetic oligonucleotide
cagcggtgggcataaaactcggccgcatac

SEQ ID NO: 149598 - DNA, 30 bp, Artificial Sequence
  Synthetic oligonucleotide
acatcgggagccatactggctagcgcatac

SEQ ID NO: 149599 - DNA, 30 bp, Artificial Sequence
  Synthetic oligonucleotide
cgattaatggatcgtctttatatcgcatac

SEQ ID NO: 149600 - DNA, 30 bp, Artificial Sequence
  Synthetic oligonucleotide
ccgggtaagtacaggtaatactctgcatac

SEQ ID NO: 149601 - DNA, 30 bp, Artificial Sequence
  Synthetic oligonucleotide
cagatagtggtccaaatcttggcatcatac

SEQ ID NO: 149602 - DNA, 30 bp, Artificial Sequence
  Synthetic oligonucleotide
tacgaacgaagtcgcatgaagctatcatac

SEQ ID NO: 149603 - DNA, 30 bp, Artificial Sequence
  Synthetic oligonucleotide
caagatactgatgttggtaggcactcatac

SEQ ID NO: 149604 - DNA, 30 bp, Artificial Sequence
  Synthetic oligonucleotide
aataaatcataacgttggaagacgtcatac

SEQ ID NO: 149605 - DNA, 30 bp, Artificial Sequence
  Synthetic oligonucleotide
gcggtcggcgaataagagtcaataagatac

SEQ ID NO: 149606 - DNA, 30 bp, Artificial Sequence
  Synthetic oligonucleotide
tctgcgaaagcgagtgcacatttaagatac

SEQ ID NO: 149607 - DNA, 30 bp, Artificial Sequence
  Synthetic oligonucleotide
gtgccgaatccgagtagcgaaattagatac

SEQ ID NO: 149608 - DNA, 30 bp, Artificial Sequence
  Synthetic oligonucleotide
actacgaagaccagcggattattacgatac

SEQ ID NO: 149609 - DNA, 30 bp, Artificial Sequence
  Synthetic oligonucleotide
gccactacactggcggctaaaggtcgatac

SEQ ID NO: 149610 - DNA, 30 bp, Artificial Sequence
  Synthetic oligonucleotide
agagggtgaaagcgtacgcgacgtggatac

SEQ ID NO: 149611 - DNA, 30 bp, Artificial Sequence
  Synthetic oligonucleotide
ctgccgtgaagtgggaggcttttcatatac

SEQ ID NO: 149612 - DNA, 30 bp, Artificial Sequence
  Synthetic oligonucleotide
ctaatcgaacccatcagaacgttgatatac

SEQ ID NO: 149613 - DNA, 30 bp, Artificial Sequence
  Synthetic oligonucleotide
taacgaatgtaatatcgagcaaatatatac

SEQ ID NO: 149614 - DNA, 30 bp, Artificial Sequence
  Synthetic oligonucleotide
atcgcgataatccaagcatcaggtatatac

SEQ ID NO: 149615 - DNA, 30 bp, Artificial Sequence
  Synthetic oligonucleotide
ttgttgcaaatcccatagagctacctatac

SEQ ID NO: 149616 - DNA, 30 bp, Artificial Sequence
  Synthetic oligonucleotide
gaggactacgcgatacccttgtcagtatac

SEQ ID NO: 149617 - DNA, 30 bp, Artificial Sequence
  Synthetic oligonucleotide
gtgcagatggacttcattttatacgtatac

SEQ ID NO: 149618 - DNA, 30 bp, Artificial Sequence
  Synthetic oligonucleotide
gatcttcaaggtgggtaaccaagcgtatac

SEQ ID NO: 149619 - DNA, 30 bp, Artificial Sequence
  Synthetic oligonucleotide
ggtggaagtcaccatcatgtccatgtatac

SEQ ID NO: 149620 - DNA, 30 bp, Artificial Sequence
  Synthetic oligonucleotide
ctaggcgtggctaaggaaacctcgttatac

SEQ ID NO: 149621 - DNA, 30 bp, Artificial Sequence
  Synthetic oligonucleotide
agacagttctccgagcggatataaaactac

SEQ ID NO: 149622 - DNA, 30 bp, Artificial Sequence
  Synthetic oligonucleotide
ggagatgttttcaaatcacacataaactac

SEQ ID NO: 149623 - DNA, 30 bp, Artificial Sequence
  Synthetic oligonucleotide
cggatcacaaaaccaacttcacacgactac

SEQ ID NO: 149624 - DNA, 30 bp, Artificial Sequence
  Synthetic oligonucleotide
aagtagataaaataggtatgaggcgactac

SEQ ID NO: 149625 - DNA, 30 bp, Artificial Sequence
  Synthetic oligonucleotide
gtgatggcaggatctggcgtggtggactac

SEQ ID NO: 149626 - DNA, 30 bp, Artificial Sequence
  Synthetic oligonucleotide
gtcaaggggataacctcacaatgtacctac

SEQ ID NO: 149627 - DNA, 30 bp, Artificial Sequence
  Synthetic oligonucleotide
ggcggaaatccggccctcgagataccctac

SEQ ID NO: 149628 - DNA, 30 bp, Artificial Sequence
  Synthetic oligonucleotide
cagcggagctgacttgaaacttagccctac

SEQ ID NO: 149629 - DNA, 30 bp, Artificial Sequence
  Synthetic oligonucleotide
caacgtatgtgttttctcgagtatccctac

SEQ ID NO: 149630 - DNA, 30 bp, Artificial Sequence
  Synthetic oligonucleotide
aatcgggtaagcatggcgccgattccctac

SEQ ID NO: 149631 - DNA, 30 bp, Artificial Sequence
  Synthetic oligonucleotide
gggccaccacggaatcccccttcagcctac

SEQ ID NO: 149632 - DNA, 30 bp, Artificial Sequence
  Synthetic oligonucleotide
gcctaaacatagccttaaagtatcgcctac

SEQ ID NO: 149633 - DNA, 30 bp, Artificial Sequence
  Synthetic oligonucleotide
ccaaagcattcaatacacggcgtggcctac

SEQ ID NO: 149634 - DNA, 30 bp, Artificial Sequence
  Synthetic oligonucleotide
tcaggcaaaccaaccgacggaaagtcctac

SEQ ID NO: 149635 - DNA, 30 bp, Artificial Sequence
  Synthetic oligonucleotide
caccaggaagtccggccgatcatcagctac

SEQ ID NO: 149636 - DNA, 30 bp, Artificial Sequence
  Synthetic oligonucleotide
ataaatatctgacgagatactatcagctac

SEQ ID NO: 149637 - DNA, 30 bp, Artificial Sequence
  Synthetic oligonucleotide
tatgtcaagtggctgttactcacgagctac

SEQ ID NO: 149638 - DNA, 30 bp, Artificial Sequence
  Synthetic oligonucleotide
atgtaatcaatcaaagcttagtggagctac

SEQ ID NO: 149639 - DNA, 30 bp, Artificial Sequence
  Synthetic oligonucleotide
ggtcctctgtatataaaaacctagcgctac

SEQ ID NO: 149640 - DNA, 30 bp, Artificial Sequence
  Synthetic oligonucleotide
aactagatctgagggtcgtgccgtcgctac

SEQ ID NO: 149641 - DNA, 30 bp, Artificial Sequence
  Synthetic oligonucleotide
ggcagggaactactgcctctctgtcgctac

SEQ ID NO: 149642 - DNA, 30 bp, Artificial Sequence
  Synthetic oligonucleotide
aggtgcctatgaagtgatcagataggctac

SEQ ID NO: 149643 - DNA, 30 bp, Artificial Sequence
  Synthetic oligonucleotide
atagcatcgttggacaatcgagagggctac

SEQ ID NO: 149644 - DNA, 30 bp, Artificial Sequence
  Synthetic oligonucleotide
caagcatcacgggaaagttgaggatgctac

SEQ ID NO: 149645 - DNA, 30 bp, Artificial Sequence
  Synthetic oligonucleotide
agagcaagcaagctggctaagagctgctac

SEQ ID NO: 149646 - DNA, 30 bp, Artificial Sequence
  Synthetic oligonucleotide
acactgaggagtagagtttattggtgctac

SEQ ID NO: 149647 - DNA, 30 bp, Artificial Sequence
  Synthetic oligonucleotide
ccgcggctcaccagcgcgaatatgtgctac

SEQ ID NO: 149648 - DNA, 30 bp, Artificial Sequence
  Synthetic oligonucleotide
cacatgctcccatagtttaaaacttgctac

SEQ ID NO: 149649 - DNA, 30 bp, Artificial Sequence
  Synthetic oligonucleotide
aagaaggaattccgcaacgctagtatctac

SEQ ID NO: 149650 - DNA, 30 bp, Artificial Sequence
  Synthetic oligonucleotide
aggacgtaggcttgccctgagggtatctac

SEQ ID NO: 149651 - DNA, 30 bp, Artificial Sequence
  Synthetic oligonucleotide
cgaaataagtttatcgacgctgccgtctac

SEQ ID NO: 149652 - DNA, 30 bp, Artificial Sequence
  Synthetic oligonucleotide
ggggggatagagtcgtttcaatcggtctac

SEQ ID NO: 149653 - DNA, 30 bp, Artificial Sequence
  Synthetic oligonucleotide
acaaaaggcacatcgtgggctaatgtctac

SEQ ID NO: 149654 - DNA, 30 bp, Artificial Sequence
  Synthetic oligonucleotide
catgccatttgtcgtaggtgcgccttctac

SEQ ID NO: 149655 - DNA, 30 bp, Artificial Sequence
  Synthetic oligonucleotide
aagaggctgcgaatggacgatgggttctac

SEQ ID NO: 149656 - DNA, 30 bp, Artificial Sequence
  Synthetic oligonucleotide
aacatgagatagtaagtattcagtttctac

SEQ ID NO: 149657 - DNA, 30 bp, Artificial Sequence
  Synthetic oligonucleotide
atagacatccaatgacgaacgtctaagtac

SEQ ID NO: 149658 - DNA, 30 bp, Artificial Sequence
  Synthetic oligonucleotide
taattgaccgctaatccgggggtccagtac

SEQ ID NO: 149659 - DNA, 30 bp, Artificial Sequence
  Synthetic oligonucleotide
acaggtaccaagccataagcaaatcagtac

SEQ ID NO: 149660 - DNA, 30 bp, Artificial Sequence
  Synthetic oligonucleotide
gcaaaacgagtggggggatctagtcagtac

SEQ ID NO: 149661 - DNA, 30 bp, Artificial Sequence
  Synthetic oligonucleotide
gggtggtaaatatgatcacttgttcagtac

SEQ ID NO: 149662 - DNA, 30 bp, Artificial Sequence
  Synthetic oligonucleotide
gtgcgtcccgtcggcttacaagcagagtac

SEQ ID NO: 149663 - DNA, 30 bp, Artificial Sequence
  Synthetic oligonucleotide
aacgcagtcggaaagggtatctgcgagtac

SEQ ID NO: 149664 - DNA, 30 bp, Artificial Sequence
  Synthetic oligonucleotide
ctcctgccgagcatagaggagttggagtac

SEQ ID NO: 149665 - DNA, 30 bp, Artificial Sequence
  Synthetic oligonucleotide
aggttaaccgtgagatggagactatagtac

SEQ ID NO: 149666 - DNA, 30 bp, Artificial Sequence
  Synthetic oligonucleotide
tttacgagaccaattcctcctcactagtac

SEQ ID NO: 149667 - DNA, 30 bp, Artificial Sequence
  Synthetic oligonucleotide
atggattcaagcagccgattttggtagtac

SEQ ID NO: 149668 - DNA, 30 bp, Artificial Sequence
  Synthetic oligonucleotide
catcttgccgaggtcatggaactgtagtac

SEQ ID NO: 149669 - DNA, 30 bp, Artificial Sequence
  Synthetic oligonucleotide
gagggcggtcgaattttaagagtttagtac

SEQ ID NO: 149670 - DNA, 30 bp, Artificial Sequence
  Synthetic oligonucleotide
tcacagcccgataagcggaatgcaacgtac

SEQ ID NO: 149671 - DNA, 30 bp, Artificial Sequence
  Synthetic oligonucleotide
agagggttcggcaagcgactgaagacgtac

SEQ ID NO: 149672 - DNA, 30 bp, Artificial Sequence
  Synthetic oligonucleotide
tacgttggaggacaaagtaatattacgtac

SEQ ID NO: 149673 - DNA, 30 bp, Artificial Sequence
  Synthetic oligonucleotide
ggtataataaatgcttcgaggcacccgtac

SEQ ID NO: 149674 - DNA, 30 bp, Artificial Sequence
  Synthetic oligonucleotide
agcgtcacaatctgcctaccctggccgtac

SEQ ID NO: 149675 - DNA, 30 bp, Artificial Sequence
  Synthetic oligonucleotide
tatcgagttattcaacgactcgtagcgtac

SEQ ID NO: 149676 - DNA, 30 bp, Artificial Sequence
  Synthetic oligonucleotide
caaggggccagtgaaatcgaggcatcgtac

SEQ ID NO: 149677 - DNA, 30 bp, Artificial Sequence
  Synthetic oligonucleotide
atatatctgaaagtcaaacgtaggtcgtac

SEQ ID NO: 149678 - DNA, 30 bp, Artificial Sequence
  Synthetic oligonucleotide
ggggttaatgaaaaatgcgtgctgtcgtac

SEQ ID NO: 149679 - DNA, 30 bp, Artificial Sequence
  Synthetic oligonucleotide
tgcatcactgtgatgagagcacacaggtac

SEQ ID NO: 149680 - DNA, 30 bp, Artificial Sequence
  Synthetic oligonucleotide
tataaggaaatctagacataatagaggtac

SEQ ID NO: 149681 - DNA, 30 bp, Artificial Sequence
  Synthetic oligonucleotide
tagtataagaagggtcaaagctagaggtac

SEQ ID NO: 149682 - DNA, 30 bp, Artificial Sequence
  Synthetic oligonucleotide
gtgtacgtgctagggtgatagcataggtac

SEQ ID NO: 149683 - DNA, 30 bp, Artificial Sequence
  Synthetic oligonucleotide
tctgatatgggtcggcactccaaacggtac

SEQ ID NO: 149684 - DNA, 30 bp, Artificial Sequence
  Synthetic oligonucleotide
cggaactttctgtgcagaatcgaacggtac

SEQ ID NO: 149685 - DNA, 30 bp, Artificial Sequence
  Synthetic oligonucleotide
tcgcctattgtcgaccaacaagcagggtac

SEQ ID NO: 149686 - DNA, 30 bp, Artificial Sequence
  Synthetic oligonucleotide
aaatatacgacgggacgcgatatagggtac

SEQ ID NO: 149687 - DNA, 30 bp, Artificial Sequence
  Synthetic oligonucleotide
ggataatacgcatgagtgtttagcgggtac

SEQ ID NO: 149688 - DNA, 30 bp, Artificial Sequence
  Synthetic oligonucleotide
tgaaggcctgggagtatcaaaagggggtac

SEQ ID NO: 149689 - DNA, 30 bp, Artificial Sequence
  Synthetic oligonucleotide
gtccgtgcacgggactgaatatcgtggtac

SEQ ID NO: 149690 - DNA, 30 bp, Artificial Sequence
  Synthetic oligonucleotide
agattggctgaacactggcactggtggtac

SEQ ID NO: 149691 - DNA, 30 bp, Artificial Sequence
  Synthetic oligonucleotide
agtatcggtgagtccaacaggaacatgtac

SEQ ID NO: 149692 - DNA, 30 bp, Artificial Sequence
  Synthetic oligonucleotide
ggttgaccatcagtgattaggcacatgtac

SEQ ID NO: 149693 - DNA, 30 bp, Artificial Sequence
  Synthetic oligonucleotide
ggacagctgccgctcgttgttagcatgtac

SEQ ID NO: 149694 - DNA, 30 bp, Artificial Sequence
  Synthetic oligonucleotide
agattcacgatacagatagtgcgcatgtac

SEQ ID NO: 149695 - DNA, 30 bp, Artificial Sequence
  Synthetic oligonucleotide
acccacaggggaagaaaaaatatactgtac

SEQ ID NO: 149696 - DNA, 30 bp, Artificial Sequence
  Synthetic oligonucleotide
cgattaatatcaacgtaaccacttctgtac

SEQ ID NO: 149697 - DNA, 30 bp, Artificial Sequence
  Synthetic oligonucleotide
gcagtgtagtggtcggctggaaaagtgtac

SEQ ID NO: 149698 - DNA, 30 bp, Artificial Sequence
  Synthetic oligonucleotide
aaagatttgagcaatacgggctgagtgtac

SEQ ID NO: 149699 - DNA, 30 bp, Artificial Sequence
  Synthetic oligonucleotide
ctaccatagcgctcgccagaaaatgtgtac

SEQ ID NO: 149700 - DNA, 30 bp, Artificial Sequence
  Synthetic oligonucleotide
agaatagaagatacaggtttgtgtgtgtac

SEQ ID NO: 149701 - DNA, 30 bp, Artificial Sequence
  Synthetic oligonucleotide
ggaaaattgaaactagatagtatattgtac

SEQ ID NO: 149702 - DNA, 30 bp, Artificial Sequence
  Synthetic oligonucleotide
cgctcagttggcaatctagcgcacttgtac

SEQ ID NO: 149703 - DNA, 30 bp, Artificial Sequence
  Synthetic oligonucleotide
ggacagaaacgccttaatagatatttgtac

SEQ ID NO: 149704 - DNA, 30 bp, Artificial Sequence
  Synthetic oligonucleotide
gccacgagggtaatgcaggcccgcaattac

SEQ ID NO: 149705 - DNA, 30 bp, Artificial Sequence
  Synthetic oligonucleotide
ttcacgaaacctagagcgtcaaagcattac

SEQ ID NO: 149706 - DNA, 30 bp, Artificial Sequence
  Synthetic oligonucleotide
cacttagccccatcgcacgataatcattac

SEQ ID NO: 149707 - DNA, 30 bp, Artificial Sequence
  Synthetic oligonucleotide
gactaacaaaatggacttatgtgagattac

SEQ ID NO: 149708 - DNA, 30 bp, Artificial Sequence
  Synthetic oligonucleotide
cccatgcgttatacaagcctaatcgattac

SEQ ID NO: 149709 - DNA, 30 bp, Artificial Sequence
  Synthetic oligonucleotide
tggccgtgcgcgcgtcggcgggaatattac

SEQ ID NO: 149710 - DNA, 30 bp, Artificial Sequence
  Synthetic oligonucleotide
gtaagcattatacacgaataacgatattac

SEQ ID NO: 149711 - DNA, 30 bp, Artificial Sequence
  Synthetic oligonucleotide
cgagtaccattgagtacaaaaacctattac

SEQ ID NO: 149712 - DNA, 30 bp, Artificial Sequence
  Synthetic oligonucleotide
cctgaacacatccatgattcatagtattac

SEQ ID NO: 149713 - DNA, 30 bp, Artificial Sequence
  Synthetic oligonucleotide
gccgaatctctactactcggtaagacttac

SEQ ID NO: 149714 - DNA, 30 bp, Artificial Sequence
  Synthetic oligonucleotide
agggcttgtgtaaggtcaatcacagcttac

SEQ ID NO: 149715 - DNA, 30 bp, Artificial Sequence
  Synthetic oligonucleotide
caacgaccctcgcaaaaacgataggcttac

SEQ ID NO: 149716 - DNA, 30 bp, Artificial Sequence
  Synthetic oligonucleotide
agaactgttaaggcgaatttgacatcttac

SEQ ID NO: 149717 - DNA, 30 bp, Artificial Sequence
  Synthetic oligonucleotide
cgtgacgattccggcataaaagcgagttac

SEQ ID NO: 149718 - DNA, 30 bp, Artificial Sequence
  Synthetic oligonucleotide
gagccagtcggtacactatcggtgagttac

SEQ ID NO: 149719 - DNA, 30 bp, Artificial Sequence
  Synthetic oligonucleotide
acgatatctccccagacaatcgccggttac

SEQ ID NO: 149720 - DNA, 30 bp, Artificial Sequence
  Synthetic oligonucleotide
ggctcagcgtagtggtctcccctcggttac

SEQ ID NO: 149721 - DNA, 30 bp, Artificial Sequence
  Synthetic oligonucleotide
cgtggggcggcgctaaattggttcggttac

SEQ ID NO: 149722 - DNA, 30 bp, Artificial Sequence
  Synthetic oligonucleotide
gaaaactttgagcactagattaagggttac

SEQ ID NO: 149723 - DNA, 30 bp, Artificial Sequence
  Synthetic oligonucleotide
ttggtataggtcagagcagttcagggttac

SEQ ID NO: 149724 - DNA, 30 bp, Artificial Sequence
  Synthetic oligonucleotide
cacgacccggagtgagtcggggtgggttac

SEQ ID NO: 149725 - DNA, 30 bp, Artificial Sequence
  Synthetic oligonucleotide
tcgagtcgattaacaaggaccagctgttac

SEQ ID NO: 149726 - DNA, 30 bp, Artificial Sequence
  Synthetic oligonucleotide
ccgtatagatactcccataaagcgatttac

SEQ ID NO: 149727 - DNA, 30 bp, Artificial Sequence
  Synthetic oligonucleotide
gtgccgtagagcacatccctgttcctttac

SEQ ID NO: 149728 - DNA, 30 bp, Artificial Sequence
  Synthetic oligonucleotide
atacgggattcctcacctgggtgcgtttac

SEQ ID NO: 149729 - DNA, 30 bp, Artificial Sequence
  Synthetic oligonucleotide
aacttagcgcgagttgaaaagacggtttac

SEQ ID NO: 149730 - DNA, 30 bp, Artificial Sequence
  Synthetic oligonucleotide
agagcctctgcgcacaggatcccggtttac

SEQ ID NO: 149731 - DNA, 30 bp, Artificial Sequence
  Synthetic oligonucleotide
ataggaaatgccatttcataggaattttac

SEQ ID NO: 149732 - DNA, 29 bp, Artificial Sequence
  Synthetic oligonucleotide
tcgatattttatatcgcaccgcattttac

SEQ ID NO: 149733 - DNA, 30 bp, Artificial Sequence
  Synthetic oligonucleotide
gggatttccagaagttctaccgacaaaacc

SEQ ID NO: 149734 - DNA, 30 bp, Artificial Sequence
  Synthetic oligonucleotide
agaaaccctactgtccctcacgagaaaacc

SEQ ID NO: 149735 - DNA, 30 bp, Artificial Sequence
  Synthetic oligonucleotide
gggccgatgtcatctcgtagttttaaaacc

SEQ ID NO: 149736 - DNA, 30 bp, Artificial Sequence
  Synthetic oligonucleotide
aaccgagcattaaaccatacacagcaaacc

SEQ ID NO: 149737 - DNA, 30 bp, Artificial Sequence
  Synthetic oligonucleotide
ctgactgactgggtgtggaaactgcaaacc

SEQ ID NO: 149738 - DNA, 30 bp, Artificial Sequence
  Synthetic oligonucleotide
gtatccaaccgataaccttgtttgcaaacc

SEQ ID NO: 149739 - DNA, 30 bp, Artificial Sequence
  Synthetic oligonucleotide
caccgccttctgctgcgccctcatcaaacc

SEQ ID NO: 149740 - DNA, 30 bp, Artificial Sequence
  Synthetic oligonucleotide
tcagaagtctaggtgtttgtatgtcaaacc

SEQ ID NO: 149741 - DNA, 30 bp, Artificial Sequence
  Synthetic oligonucleotide
ccgacgatcactttaggtatcccggaaacc

SEQ ID NO: 149742 - DNA, 30 bp, Artificial Sequence
  Synthetic oligonucleotide
ggcgagtacgaattccgcagcatggaaacc

SEQ ID NO: 149743 - DNA, 30 bp, Artificial Sequence
  Synthetic oligonucleotide
gggctagcggatctcttggccctggaaacc

SEQ ID NO: 149744 - DNA, 30 bp, Artificial Sequence
  Synthetic oligonucleotide
ggaacgctcggctcaacgccagtataaacc

SEQ ID NO: 149745 - DNA, 30 bp, Artificial Sequence
  Synthetic oligonucleotide
ggttaggtttgtgttagcatattctaaacc

SEQ ID NO: 149746 - DNA, 31 bp, Artificial Sequence
  Synthetic oligonucleotide
gagacaaggttcggggggtcagatgtaaacc

SEQ ID NO: 149747 - DNA, 30 bp, Artificial Sequence
  Synthetic oligonucleotide
atcgggttagagggtaggcgttgttaaacc

SEQ ID NO: 149748 - DNA, 30 bp, Artificial Sequence
  Synthetic oligonucleotide
gcctgcggaggggaatgtcatgtcgcaacc

SEQ ID NO: 149749 - DNA, 30 bp, Artificial Sequence
  Synthetic oligonucleotide
agacatatcgggttgaggcattcggcaacc

SEQ ID NO: 149750 - DNA, 30 bp, Artificial Sequence
  Synthetic oligonucleotide
aagtctaagtacaaactagttacgtcaacc

SEQ ID NO: 149751 - DNA, 30 bp, Artificial Sequence
  Synthetic oligonucleotide
cggtagagtaagcgctggcataccagaacc

SEQ ID NO: 149752 - DNA, 30 bp, Artificial Sequence
  Synthetic oligonucleotide
ggcagagtggtcgtggtgcacgagagaacc

SEQ ID NO: 149753 - DNA, 30 bp, Artificial Sequence
  Synthetic oligonucleotide
aacctataacctgcgcgataccatagaacc

SEQ ID NO: 149754 - DNA, 30 bp, Artificial Sequence
  Synthetic oligonucleotide
actgtatgtattagtacaccgtgccgaacc

SEQ ID NO: 149755 - DNA, 30 bp, Artificial Sequence
  Synthetic oligonucleotide
cagataatgtcataacacgctgtccgaacc

SEQ ID NO: 149756 - DNA, 30 bp, Artificial Sequence
  Synthetic oligonucleotide
gtaacccgacagctgtggaacatgcgaacc

SEQ ID NO: 149757 - DNA, 30 bp, Artificial Sequence
  Synthetic oligonucleotide
ggggagctgagaagtgcatcctgtcgaacc

SEQ ID NO: 149758 - DNA, 30 bp, Artificial Sequence
  Synthetic oligonucleotide
ctgttcaataccaaacggctcacgggaacc

SEQ ID NO: 149759 - DNA, 30 bp, Artificial Sequence
  Synthetic oligonucleotide
cttgagtgtgcatcaactggtcagctaacc

SEQ ID NO: 149760 - DNA, 30 bp, Artificial Sequence
  Synthetic oligonucleotide
ggggatcgcctatctcgagtacacttaacc

SEQ ID NO: 149761 - DNA, 30 bp, Artificial Sequence
  Synthetic oligonucleotide
tggtagtaataatctcaccctatcaacacc

SEQ ID NO: 149762 - DNA, 30 bp, Artificial Sequence
  Synthetic oligonucleotide
acaataaaaagcctggggttaaacgacacc

SEQ ID NO: 149763 - DNA, 30 bp, Artificial Sequence
  Synthetic oligonucleotide
agaggaatcttgtacgtcgtgcacgacacc

SEQ ID NO: 149764 - DNA, 30 bp, Artificial Sequence
  Synthetic oligonucleotide
gaaagaacgtggactggcgacaaggacacc

SEQ ID NO: 149765 - DNA, 30 bp, Artificial Sequence
  Synthetic oligonucleotide
atcacaagtggaatcaagcgacgggacacc

SEQ ID NO: 149766 - DNA, 30 bp, Artificial Sequence
  Synthetic oligonucleotide
gggattgtcgagtggaggtgcagtgacacc

SEQ ID NO: 149767 - DNA, 30 bp, Artificial Sequence
  Synthetic oligonucleotide
caaggatctcccaatgagcaccgatacacc

SEQ ID NO: 149768 - DNA, 30 bp, Artificial Sequence
  Synthetic oligonucleotide
atccgagatcttcaggaaggcccgaccacc

SEQ ID NO: 149769 - DNA, 30 bp, Artificial Sequence
  Synthetic oligonucleotide
gataccgggaggtcactccacatgaccacc

SEQ ID NO: 149770 - DNA, 30 bp, Artificial Sequence
  Synthetic oligonucleotide
cccggcccagttaggagtgtcaagcccacc

SEQ ID NO: 149771 - DNA, 30 bp, Artificial Sequence
  Synthetic oligonucleotide
agggtgtctgcgggcagttaccggcccacc

SEQ ID NO: 149772 - DNA, 30 bp, Artificial Sequence
  Synthetic oligonucleotide
gagagtagagcattaggacaggtagccacc

SEQ ID NO: 149773 - DNA, 30 bp, Artificial Sequence
  Synthetic oligonucleotide
ggtgggcctgaacgacgaaccttcgccacc

SEQ ID NO: 149774 - DNA, 30 bp, Artificial Sequence
  Synthetic oligonucleotide
agtgagccaaagggtccttgagactccacc

SEQ ID NO: 149775 - DNA, 30 bp, Artificial Sequence
  Synthetic oligonucleotide
ggacagaacgtacctcccggtatctccacc

SEQ ID NO: 149776 - DNA, 30 bp, Artificial Sequence
  Synthetic oligonucleotide
ttgcaatcaagggaacaatccgaaagcacc

SEQ ID NO: 149777 - DNA, 30 bp, Artificial Sequence
  Synthetic oligonucleotide
aagacccaagtgtcgttggatacgagcacc

SEQ ID NO: 149778 - DNA, 30 bp, Artificial Sequence
  Synthetic oligonucleotide
aggtactagtggcagaaacatggtagcacc

SEQ ID NO: 149779 - DNA, 30 bp, Artificial Sequence
  Synthetic oligonucleotide
ctaaatgaccctccatggacgaaaggcacc

SEQ ID NO: 149780 - DNA, 30 bp, Artificial Sequence
  Synthetic oligonucleotide
gaatgggagtttgccaggatagaaggcacc

SEQ ID NO: 149781 - DNA, 30 bp, Artificial Sequence
  Synthetic oligonucleotide
gtatgggggagcccaaattatacgggcacc

SEQ ID NO: 149782 - DNA, 30 bp, Artificial Sequence
  Synthetic oligonucleotide
tgagcgcaggttaacgtgatgtcatgcacc

SEQ ID NO: 149783 - DNA, 30 bp, Artificial Sequence
  Synthetic oligonucleotide
acttagccgaaggcgcgttagggaatcacc

SEQ ID NO: 149784 - DNA, 30 bp, Artificial Sequence
  Synthetic oligonucleotide
aacgactgatttaattgaggatcgctcacc

SEQ ID NO: 149785 - DNA, 30 bp, Artificial Sequence
  Synthetic oligonucleotide
ctaatgtgagtgatagtacagtggctcacc

SEQ ID NO: 149786 - DNA, 30 bp, Artificial Sequence
  Synthetic oligonucleotide
agaggagtgcgagatatccgtatgctcacc

SEQ ID NO: 149787 - DNA, 30 bp, Artificial Sequence
  Synthetic oligonucleotide
acttgcatgaactcatccggcgtgctcacc

SEQ ID NO: 149788 - DNA, 30 bp, Artificial Sequence
  Synthetic oligonucleotide
actaggagtgtactgattacccctttcacc

SEQ ID NO: 149789 - DNA, 30 bp, Artificial Sequence
  Synthetic oligonucleotide
gccaacgttggtaaggaatcctaaaagacc

SEQ ID NO: 149790 - DNA, 30 bp, Artificial Sequence
  Synthetic oligonucleotide
aaaaaggcacaacggtagaacgacaagacc

SEQ ID NO: 149791 - DNA, 30 bp, Artificial Sequence
  Synthetic oligonucleotide
catacgccggtggggactgatgtcaagacc

SEQ ID NO: 149792 - DNA, 30 bp, Artificial Sequence
  Synthetic oligonucleotide
tcgatacctatgttggtgttacggaagacc

SEQ ID NO: 149793 - DNA, 30 bp, Artificial Sequence
  Synthetic oligonucleotide
tagttctatcatagttgagtacgccagacc

SEQ ID NO: 149794 - DNA, 30 bp, Artificial Sequence
  Synthetic oligonucleotide
gttcatacgtgacgtcgcacgtctcagacc

SEQ ID NO: 149795 - DNA, 30 bp, Artificial Sequence
  Synthetic oligonucleotide
agctatgcaaaggtgcacttgcgtcagacc

SEQ ID NO: 149796 - DNA, 30 bp, Artificial Sequence
  Synthetic oligonucleotide
gcactccgctagtgactacccgtagagacc

SEQ ID NO: 149797 - DNA, 30 bp, Artificial Sequence
  Synthetic oligonucleotide
taacggatggaacgctgcgcaaacgagacc

SEQ ID NO: 149798 - DNA, 30 bp, Artificial Sequence
  Synthetic oligonucleotide
ggatcactgtaatatgctatactcgagacc

SEQ ID NO: 149799 - DNA, 30 bp, Artificial Sequence
  Synthetic oligonucleotide
agacgtctcaaagcccataatattgagacc

SEQ ID NO: 149800 - DNA, 30 bp, Artificial Sequence
  Synthetic oligonucleotide
ccgactcaggaacctgagaacgttgagacc

SEQ ID NO: 149801 - DNA, 30 bp, Artificial Sequence
  Synthetic oligonucleotide
cttcgacgagtaggaaagcgtaaatagacc

SEQ ID NO: 149802 - DNA, 30 bp, Artificial Sequence
  Synthetic oligonucleotide
actcatcgtcctgagacttaccgctagacc

SEQ ID NO: 149803 - DNA, 30 bp, Artificial Sequence
  Synthetic oligonucleotide
acaccatgatcagcccccatcggttagacc

SEQ ID NO: 149804 - DNA, 30 bp, Artificial Sequence
  Synthetic oligonucleotide
cgccatctcaaccttcgaaccgagacgacc

SEQ ID NO: 149805 - DNA, 30 bp, Artificial Sequence
  Synthetic oligonucleotide
atcttacgaggaaacgggtctgggacgacc

SEQ ID NO: 149806 - DNA, 30 bp, Artificial Sequence
  Synthetic oligonucleotide
agtccagtctgtatcagggtacatacgacc

SEQ ID NO: 149807 - DNA, 30 bp, Artificial Sequence
  Synthetic oligonucleotide
ggctgtcggcgcaaaatgccaagtacgacc

SEQ ID NO: 149808 - DNA, 30 bp, Artificial Sequence
  Synthetic oligonucleotide
acagtttaaacctcggcaagagtagcgacc

SEQ ID NO: 149809 - DNA, 31 bp, Artificial Sequence
  Synthetic oligonucleotide
tgacacatcttcggagacagtacaggcgacc

SEQ ID NO: 149810 - DNA, 30 bp, Artificial Sequence
  Synthetic oligonucleotide
cggcggacctatcttcctcccccctcgacc

SEQ ID NO: 149811 - DNA, 30 bp, Artificial Sequence
  Synthetic oligonucleotide
gggtccgagggagtggccaacgtgaggacc

SEQ ID NO: 149812 - DNA, 30 bp, Artificial Sequence
  Synthetic oligonucleotide
gaaatcgttttgcacccagaggtgaggacc

SEQ ID NO: 149813 - DNA, 30 bp, Artificial Sequence
  Synthetic oligonucleotide
agcgtctggagaaaatatgcttttaggacc

SEQ ID NO: 149814 - DNA, 30 bp, Artificial Sequence
  Synthetic oligonucleotide
gatgcgaatagcagctgatcatcacggacc

SEQ ID NO: 149815 - DNA, 30 bp, Artificial Sequence
  Synthetic oligonucleotide
gcaaactggcatgtgccgaccgacgggacc

SEQ ID NO: 149816 - DNA, 30 bp, Artificial Sequence
  Synthetic oligonucleotide
aaaaactcaccagtgcggaacgaggggacc

SEQ ID NO: 149817 - DNA, 30 bp, Artificial Sequence
  Synthetic oligonucleotide
ttgtaaggtaataatacatttgatgggacc

SEQ ID NO: 149818 - DNA, 30 bp, Artificial Sequence
  Synthetic oligonucleotide
agttggcgcgtgtgtgataatgaatggacc

SEQ ID NO: 149819 - DNA, 30 bp, Artificial Sequence
  Synthetic oligonucleotide
cgcatccaaatattgccaggaagttggacc

SEQ ID NO: 149820 - DNA, 30 bp, Artificial Sequence
  Synthetic oligonucleotide
gtagtccagcgaaatctagagcaaatgacc

SEQ ID NO: 149821 - DNA, 30 bp, Artificial Sequence
  Synthetic oligonucleotide
ggactggcaggcagaaccgcaagaatgacc

SEQ ID NO: 149822 - DNA, 30 bp, Artificial Sequence
  Synthetic oligonucleotide
agatgccgatattggaccgtagtgatgacc

SEQ ID NO: 149823 - DNA, 30 bp, Artificial Sequence
  Synthetic oligonucleotide
ctacgatgtgaagatgtgatgctagtgacc

SEQ ID NO: 149824 - DNA, 30 bp, Artificial Sequence
  Synthetic oligonucleotide
gacccttgtgcacgacgtaacttagtgacc

SEQ ID NO: 149825 - DNA, 30 bp, Artificial Sequence
  Synthetic oligonucleotide
agacatgcagtcttttttagagcggtgacc

SEQ ID NO: 149826 - DNA, 30 bp, Artificial Sequence
  Synthetic oligonucleotide
cgataattaacttcagtgtctagggtgacc

SEQ ID NO: 149827 - DNA, 30 bp, Artificial Sequence
  Synthetic oligonucleotide
gttgccgcctggtgaaagcgacgtgtgacc

SEQ ID NO: 149828 - DNA, 30 bp, Artificial Sequence
  Synthetic oligonucleotide
tgcgtcacgtttacctgcctggcattgacc

SEQ ID NO: 149829 - DNA, 30 bp, Artificial Sequence
  Synthetic oligonucleotide
gagcatctggaatggctgcggaacttgacc

SEQ ID NO: 149830 - DNA, 29 bp, Artificial Sequence
  Synthetic oligonucleotide
ggacgcctcatagagatgacagcttgacc

SEQ ID NO: 149831 - DNA, 30 bp, Artificial Sequence
  Synthetic oligonucleotide
acgggggcgataccccaagttagtttgacc

SEQ ID NO: 149832 - DNA, 30 bp, Artificial Sequence
  Synthetic oligonucleotide
taccgtcggcatcaactcctagtcaatacc

SEQ ID NO: 149833 - DNA, 30 bp, Artificial Sequence
  Synthetic oligonucleotide
gcactaccaaaacagcgggtgaggaatacc

SEQ ID NO: 149834 - DNA, 30 bp, Artificial Sequence
  Synthetic oligonucleotide
gtcaagcgccgggactatgagccacatacc

SEQ ID NO: 149835 - DNA, 30 bp, Artificial Sequence
  Synthetic oligonucleotide
cttatacggaagacatgcaaataccatacc

SEQ ID NO: 149836 - DNA, 30 bp, Artificial Sequence
  Synthetic oligonucleotide
ctaagacctgggcttccagctgactatacc

SEQ ID NO: 149837 - DNA, 30 bp, Artificial Sequence
  Synthetic oligonucleotide
cgagcggcttcatgcttatgaccgtatacc

SEQ ID NO: 149838 - DNA, 30 bp, Artificial Sequence
  Synthetic oligonucleotide
gagtagccattaactagagcaccaactacc

SEQ ID NO: 149839 - DNA, 30 bp, Artificial Sequence
  Synthetic oligonucleotide
cacggattagtaagactgagaagcactacc

SEQ ID NO: 149840 - DNA, 30 bp, Artificial Sequence
  Synthetic oligonucleotide
cgacgcatgacgtactcggcattgactacc

SEQ ID NO: 149841 - DNA, 30 bp, Artificial Sequence
  Synthetic oligonucleotide
cgcaagtgaaaccaaaagtagttccctacc

SEQ ID NO: 149842 - DNA, 30 bp, Artificial Sequence
  Synthetic oligonucleotide
ggaataccaggtcaagacttcagtcctacc

SEQ ID NO: 149843 - DNA, 30 bp, Artificial Sequence
  Synthetic oligonucleotide
catcgctgatctgatatcaaacatgctacc

SEQ ID NO: 149844 - DNA, 30 bp, Artificial Sequence
  Synthetic oligonucleotide
gaactaagcgtacaccagttgactgctacc

SEQ ID NO: 149845 - DNA, 30 bp, Artificial Sequence
  Synthetic oligonucleotide
aacttgggtcaaaggggtcatacatctacc

SEQ ID NO: 149846 - DNA, 30 bp, Artificial Sequence
  Synthetic oligonucleotide
ggtgaacaactgcggggaaataggtctacc

SEQ ID NO: 149847 - DNA, 30 bp, Artificial Sequence
  Synthetic oligonucleotide
gttggtgagcgtgtcgtacaagattctacc

SEQ ID NO: 149848 - DNA, 30 bp, Artificial Sequence
  Synthetic oligonucleotide
ccgctatattgcaataaacctggtagtacc

SEQ ID NO: 149849 - DNA, 30 bp, Artificial Sequence
  Synthetic oligonucleotide
aaaaacttcgagcattaagcctaacgtacc

SEQ ID NO: 149850 - DNA, 30 bp, Artificial Sequence
  Synthetic oligonucleotide
taacttcgggtgcgatgagagatacgtacc

SEQ ID NO: 149851 - DNA, 30 bp, Artificial Sequence
  Synthetic oligonucleotide
ccgtgacaattagcgtttatgtagcgtacc

SEQ ID NO: 149852 - DNA, 30 bp, Artificial Sequence
  Synthetic oligonucleotide
gtagtaccagcttcggtatcactaggtacc

SEQ ID NO: 149853 - DNA, 30 bp, Artificial Sequence
  Synthetic oligonucleotide
ataggtagaactattggagagtggggtacc

SEQ ID NO: 149854 - DNA, 30 bp, Artificial Sequence
  Synthetic oligonucleotide
ggaacccacgaacacacataagaatgtacc

SEQ ID NO: 149855 - DNA, 30 bp, Artificial Sequence
  Synthetic oligonucleotide
agtacagctgaattgctccgcacatgtacc

SEQ ID NO: 149856 - DNA, 30 bp, Artificial Sequence
  Synthetic oligonucleotide
gcaggaagtatccgtgtaaggcgatgtacc

SEQ ID NO: 149857 - DNA, 30 bp, Artificial Sequence
  Synthetic oligonucleotide
aggaaggaaggatggatacgatgatgtacc

SEQ ID NO: 149858 - DNA, 30 bp, Artificial Sequence
  Synthetic oligonucleotide
gggatccacgagttccaggttagtgttacc

SEQ ID NO: 149859 - DNA, 30 bp, Artificial Sequence
  Synthetic oligonucleotide
ttaataggcctgagctcgagctaaaaaccc

SEQ ID NO: 149860 - DNA, 30 bp, Artificial Sequence
  Synthetic oligonucleotide
cgttacaatgaatcgatacgagcaaaaccc

SEQ ID NO: 149861 - DNA, 30 bp, Artificial Sequence
  Synthetic oligonucleotide
agagcggatgaagcataatccacgaaaccc

SEQ ID NO: 149862 - DNA, 30 bp, Artificial Sequence
  Synthetic oligonucleotide
tatgtcgacacttagcctaccagacaaccc

SEQ ID NO: 149863 - DNA, 30 bp, Artificial Sequence
  Synthetic oligonucleotide
aaaaaatggaggctcaatgtcggggaaccc

SEQ ID NO: 149864 - DNA, 30 bp, Artificial Sequence
  Synthetic oligonucleotide
aacagggaaaggggacaagcgtgggaaccc

SEQ ID NO: 149865 - DNA, 30 bp, Artificial Sequence
  Synthetic oligonucleotide
caagggtaaaggttgtgacggattgaaccc

SEQ ID NO: 149866 - DNA, 29 bp, Artificial Sequence
  Synthetic oligonucleotide
gcggggcgatacatcaaggcaactaaccc

SEQ ID NO: 149867 - DNA, 30 bp, Artificial Sequence
  Synthetic oligonucleotide
aagctgtggaacacaagtgaattttaaccc

SEQ ID NO: 149868 - DNA, 30 bp, Artificial Sequence
  Synthetic oligonucleotide
accttggaagagtgggccatctagccaccc

SEQ ID NO: 149869 - DNA, 30 bp, Artificial Sequence
  Synthetic oligonucleotide
ctagtgtacgttgtatccgaggaatcaccc

SEQ ID NO: 149870 - DNA, 30 bp, Artificial Sequence
  Synthetic oligonucleotide
aatgggcagagaatttaaagtgggagaccc

SEQ ID NO: 149871 - DNA, 30 bp, Artificial Sequence
  Synthetic oligonucleotide
catcgaatggggtctgagggtgatcgaccc

SEQ ID NO: 149872 - DNA, 30 bp, Artificial Sequence
  Synthetic oligonucleotide
tacggtcgggttagtgtcggtggaggaccc

SEQ ID NO: 149873 - DNA, 30 bp, Artificial Sequence
  Synthetic oligonucleotide
cttaaattgaaccgagatagtctcggaccc

SEQ ID NO: 149874 - DNA, 30 bp, Artificial Sequence
  Synthetic oligonucleotide
ggaggttaagtacgcccattctggggaccc

SEQ ID NO: 149875 - DNA, 30 bp, Artificial Sequence
  Synthetic oligonucleotide
tcggtcagtgaccagtttcacaatggaccc

SEQ ID NO: 149876 - DNA, 30 bp, Artificial Sequence
  Synthetic oligonucleotide
caggatggctgccccttcaataaatgaccc

SEQ ID NO: 149877 - DNA, 30 bp, Artificial Sequence
  Synthetic oligonucleotide
tcaatgccctggagagtttgggaatgaccc

SEQ ID NO: 149878 - DNA, 30 bp, Artificial Sequence
  Synthetic oligonucleotide
tggatcggtgggtaccagatagcgtgaccc

SEQ ID NO: 149879 - DNA, 30 bp, Artificial Sequence
  Synthetic oligonucleotide
cttagtaggtaaggtgcaccagcttgaccc

SEQ ID NO: 149880 - DNA, 30 bp, Artificial Sequence
  Synthetic oligonucleotide
agctggtcgtatcaccgcgataaagtaccc

SEQ ID NO: 149881 - DNA, 31 bp, Artificial Sequence
  Synthetic oligonucleotide
ctcaactgagaatagtaaggagtaggtaccc

SEQ ID NO: 149882 - DNA, 30 bp, Artificial Sequence
  Synthetic oligonucleotide
cggattgatacaagctttctcattgtaccc

SEQ ID NO: 149883 - DNA, 30 bp, Artificial Sequence
  Synthetic oligonucleotide
ataaacgaagcgagggcacaactcttaccc

SEQ ID NO: 149884 - DNA, 30 bp, Artificial Sequence
  Synthetic oligonucleotide
gctagttggtccgagcgggcgtagttaccc

SEQ ID NO: 149885 - DNA, 30 bp, Artificial Sequence
  Synthetic oligonucleotide
actgcattcgctcgattgcggtagttaccc

SEQ ID NO: 149886 - DNA, 30 bp, Artificial Sequence
  Synthetic oligonucleotide
gggcatatttagcgctgggacataaacccc

SEQ ID NO: 149887 - DNA, 30 bp, Artificial Sequence
  Synthetic oligonucleotide
cgtgatgtgtttggcaatacacccaacccc

SEQ ID NO: 149888 - DNA, 30 bp, Artificial Sequence
  Synthetic oligonucleotide
agataagctctggcagagccgacgaacccc

SEQ ID NO: 149889 - DNA, 30 bp, Artificial Sequence
  Synthetic oligonucleotide
acagtacattgagcctatgcgatgaacccc

SEQ ID NO: 149890 - DNA, 30 bp, Artificial Sequence
  Synthetic oligonucleotide
acggtacacgtaaagtgactgccagacccc

SEQ ID NO: 149891 - DNA, 30 bp, Artificial Sequence
  Synthetic oligonucleotide
cggacagaaatgacaccgtagtacaccccc

SEQ ID NO: 149892 - DNA, 30 bp, Artificial Sequence
  Synthetic oligonucleotide
ggtcgccttggcgtccacatgagtgccccc

SEQ ID NO: 149893 - DNA, 30 bp, Artificial Sequence
  Synthetic oligonucleotide
tgttgattgacgaataacccgagatccccc

SEQ ID NO: 149894 - DNA, 30 bp, Artificial Sequence
  Synthetic oligonucleotide
tctaactttcctggcgcggactaccgcccc

SEQ ID NO: 149895 - DNA, 30 bp, Artificial Sequence
  Synthetic oligonucleotide
taacggtacattagtgtttccggccgcccc

SEQ ID NO: 149896 - DNA, 30 bp, Artificial Sequence
  Synthetic oligonucleotide
caaggtcttgtaattctctaaaatcgcccc

SEQ ID NO: 149897 - DNA, 30 bp, Artificial Sequence
  Synthetic oligonucleotide
tgttgaactgagcaatctatggatcgcccc

SEQ ID NO: 149898 - DNA, 30 bp, Artificial Sequence
  Synthetic oligonucleotide
agtcaccatgaagaaactctcagtcgcccc

SEQ ID NO: 149899 - DNA, 30 bp, Artificial Sequence
  Synthetic oligonucleotide
gatgtaggctgcacctacccaagtggcccc

SEQ ID NO: 149900 - DNA, 30 bp, Artificial Sequence
  Synthetic oligonucleotide
atgagataccacgcgaaattgcaaatcccc

SEQ ID NO: 149901 - DNA, 30 bp, Artificial Sequence
  Synthetic oligonucleotide
taaccgcctagagggccttgcgtaatcccc

SEQ ID NO: 149902 - DNA, 30 bp, Artificial Sequence
  Synthetic oligonucleotide
acgggtgcctcaatgcgattgagtatcccc

SEQ ID NO: 149903 - DNA, 30 bp, Artificial Sequence
  Synthetic oligonucleotide
acgcggtgtgcctgtggtacgggcttcccc

SEQ ID NO: 149904 - DNA, 30 bp, Artificial Sequence
  Synthetic oligonucleotide
cactagattgcgctagttgtcctaaagccc

SEQ ID NO: 149905 - DNA, 30 bp, Artificial Sequence
  Synthetic oligonucleotide
ggcggaacgagcccggcccacagcaagccc

SEQ ID NO: 149906 - DNA, 30 bp, Artificial Sequence
  Synthetic oligonucleotide
ctgagcgatcttgaaagaaatcctaagccc

SEQ ID NO: 149907 - DNA, 30 bp, Artificial Sequence
  Synthetic oligonucleotide
gtcggaacgtcgtatattacgcaccagccc

SEQ ID NO: 149908 - DNA, 30 bp, Artificial Sequence
  Synthetic oligonucleotide
ctcgaaaaaagtagataggactaccagccc

SEQ ID NO: 149909 - DNA, 30 bp, Artificial Sequence
  Synthetic oligonucleotide
ggtacaggcaactagtgacggcgccagccc

SEQ ID NO: 149910 - DNA, 30 bp, Artificial Sequence
  Synthetic oligonucleotide
gctgaatccgagagtcaagcccacgagccc

SEQ ID NO: 149911 - DNA, 30 bp, Artificial Sequence
  Synthetic oligonucleotide
aaaagtcatacagacttccactatgagccc

SEQ ID NO: 149912 - DNA, 30 bp, Artificial Sequence
  Synthetic oligonucleotide
acggattaacttggccattgaccatagccc

SEQ ID NO: 149913 - DNA, 30 bp, Artificial Sequence
  Synthetic oligonucleotide
tcagcatggtgtgatagatagcgatagccc

SEQ ID NO: 149914 - DNA, 30 bp, Artificial Sequence
  Synthetic oligonucleotide
ttgtggtactcagcctagagacctacgccc

SEQ ID NO: 149915 - DNA, 30 bp, Artificial Sequence
  Synthetic oligonucleotide
ctcaatgtcgccatcttagcggctacgccc

SEQ ID NO: 149916 - DNA, 30 bp, Artificial Sequence
  Synthetic oligonucleotide
acaacgagcgcaccccgtgggaggccgccc

SEQ ID NO: 149917 - DNA, 30 bp, Artificial Sequence
  Synthetic oligonucleotide
agagaggaatctcccaaacgcgggccgccc

SEQ ID NO: 149918 - DNA, 31 bp, Artificial Sequence
  Synthetic oligonucleotide
acgtaaagtgggcctaaggattatgccgccc

SEQ ID NO: 149919 - DNA, 30 bp, Artificial Sequence
  Synthetic oligonucleotide
aaagccgaggagcaacgaaaggtagcgccc

SEQ ID NO: 149920 - DNA, 30 bp, Artificial Sequence
  Synthetic oligonucleotide
ttccaggcgaacgcagttcgattggcgccc

SEQ ID NO: 149921 - DNA, 30 bp, Artificial Sequence
  Synthetic oligonucleotide
cgccagtaaattgggggtttgagtgcgccc

SEQ ID NO: 149922 - DNA, 30 bp, Artificial Sequence
  Synthetic oligonucleotide
ccaatttgcgagtaatatgggtactcgccc

SEQ ID NO: 149923 - DNA, 30 bp, Artificial Sequence
  Synthetic oligonucleotide
atctaataagtagagtgttaacccaggccc

SEQ ID NO: 149924 - DNA, 30 bp, Artificial Sequence
  Synthetic oligonucleotide
cgtgcttttcgcactgaacttgctaggccc

SEQ ID NO: 149925 - DNA, 30 bp, Artificial Sequence
  Synthetic oligonucleotide
aggttactaagtgttgatctagacgggccc

SEQ ID NO: 149926 - DNA, 30 bp, Artificial Sequence
  Synthetic oligonucleotide
gcggtacttctacctgtgtaactcgggccc

SEQ ID NO: 149927 - DNA, 30 bp, Artificial Sequence
  Synthetic oligonucleotide
atgcctgaaccttaaacgtagggggggccc

SEQ ID NO: 149928 - DNA, 30 bp, Artificial Sequence
  Synthetic oligonucleotide
aggccaagtataccctgatggctgtggccc

SEQ ID NO: 149929 - DNA, 30 bp, Artificial Sequence
  Synthetic oligonucleotide
aaggaggggatatagtcttcgggcctgccc

SEQ ID NO: 149930 - DNA, 30 bp, Artificial Sequence
  Synthetic oligonucleotide
ctcttggaagcaccataagccactgtgccc

SEQ ID NO: 149931 - DNA, 30 bp, Artificial Sequence
  Synthetic oligonucleotide
gtgccggagcgaagtggcgtggtaaatccc

SEQ ID NO: 149932 - DNA, 30 bp, Artificial Sequence
  Synthetic oligonucleotide
gcggttacaacacgcgccggagtacatccc

SEQ ID NO: 149933 - DNA, 30 bp, Artificial Sequence
  Synthetic oligonucleotide
cctgagccacataatgtggcgtaggatccc

SEQ ID NO: 149934 - DNA, 30 bp, Artificial Sequence
  Synthetic oligonucleotide
actgactagtgagacataacctgggatccc

SEQ ID NO: 149935 - DNA, 30 bp, Artificial Sequence
  Synthetic oligonucleotide
gcgcgtgggaccgggtaaaattactatccc

SEQ ID NO: 149936 - DNA, 30 bp, Artificial Sequence
  Synthetic oligonucleotide
ttcgagtaaatgtgctcctcatagtatccc

SEQ ID NO: 149937 - DNA, 30 bp, Artificial Sequence
  Synthetic oligonucleotide
tttgaacattaactgccaacgagttatccc

SEQ ID NO: 149938 - DNA, 30 bp, Artificial Sequence
  Synthetic oligonucleotide
acttgcgggactgctgatgcggaggctccc

SEQ ID NO: 149939 - DNA, 30 bp, Artificial Sequence
  Synthetic oligonucleotide
ggccactagagtggaaggaacgctgctccc

SEQ ID NO: 149940 - DNA, 30 bp, Artificial Sequence
  Synthetic oligonucleotide
gggggttgttatatctaaagcaggtctccc

SEQ ID NO: 149941 - DNA, 30 bp, Artificial Sequence
  Synthetic oligonucleotide
tctgtacgaagtggtgctgttaaaagtccc

SEQ ID NO: 149942 - DNA, 30 bp, Artificial Sequence
  Synthetic oligonucleotide
gaagcgaccataacacgccaggaaagtccc

SEQ ID NO: 149943 - DNA, 30 bp, Artificial Sequence
  Synthetic oligonucleotide
attgtgcgtggcatcacgatcccgagtccc

SEQ ID NO: 149944 - DNA, 30 bp, Artificial Sequence
  Synthetic oligonucleotide
taggaatttcatgacgaccaatggagtccc

SEQ ID NO: 149945 - DNA, 30 bp, Artificial Sequence
  Synthetic oligonucleotide
ccacgtctgacattgcggggttaacgtccc

SEQ ID NO: 149946 - DNA, 30 bp, Artificial Sequence
  Synthetic oligonucleotide
tggcctcaaacgatttggaaagcacgtccc

SEQ ID NO: 149947 - DNA, 30 bp, Artificial Sequence
  Synthetic oligonucleotide
aggcaaacaggttactattttgatcgtccc

SEQ ID NO: 149948 - DNA, 30 bp, Artificial Sequence
  Synthetic oligonucleotide
gatcaacggatataggtaaaagaaggtccc

SEQ ID NO: 149949 - DNA, 30 bp, Artificial Sequence
  Synthetic oligonucleotide
tgaatgaaggagtcatgtgacaagggtccc

SEQ ID NO: 149950 - DNA, 30 bp, Artificial Sequence
  Synthetic oligonucleotide
ggtaggtgagcgcaagatatacggggtccc

SEQ ID NO: 149951 - DNA, 30 bp, Artificial Sequence
  Synthetic oligonucleotide
ttactggctatgtaatactgtaatggtccc

SEQ ID NO: 149952 - DNA, 30 bp, Artificial Sequence
  Synthetic oligonucleotide
cataatgcatatttgattggatgttgtccc

SEQ ID NO: 149953 - DNA, 30 bp, Artificial Sequence
  Synthetic oligonucleotide
gttgggaggcggttcgaaagggatattccc

SEQ ID NO: 149954 - DNA, 30 bp, Artificial Sequence
  Synthetic oligonucleotide
cgaagcccaggagaaaacataccacttccc

SEQ ID NO: 149955 - DNA, 30 bp, Artificial Sequence
  Synthetic oligonucleotide
tccagaaggggtcacggggatcatgttccc

SEQ ID NO: 149956 - DNA, 30 bp, Artificial Sequence
  Synthetic oligonucleotide
aataccggatgggaatatggggcgtttccc

SEQ ID NO: 149957 - DNA, 30 bp, Artificial Sequence
  Synthetic oligonucleotide
atgtccgaaacaggtatgaaccacaaagcc

SEQ ID NO: 149958 - DNA, 30 bp, Artificial Sequence
  Synthetic oligonucleotide
gtcgcgcacacaagtgagcacccgaaagcc

SEQ ID NO: 149959 - DNA, 30 bp, Artificial Sequence
  Synthetic oligonucleotide
agcgtcgccacagtcttccgggctaaagcc

SEQ ID NO: 149960 - DNA, 30 bp, Artificial Sequence
  Synthetic oligonucleotide
gcagtaagagggaacattcatgaccaagcc

SEQ ID NO: 149961 - DNA, 30 bp, Artificial Sequence
  Synthetic oligonucleotide
agggtaagtgaataatataccaggcaagcc

SEQ ID NO: 149962 - DNA, 30 bp, Artificial Sequence
  Synthetic oligonucleotide
gggtcagtcgaagcttcaggggtgcaagcc

SEQ ID NO: 149963 - DNA, 30 bp, Artificial Sequence
  Synthetic oligonucleotide
tcccggtgagtgctaacgagccttgaagcc

SEQ ID NO: 149964 - DNA, 30 bp, Artificial Sequence
  Synthetic oligonucleotide
catcgaccgtcgtgaagcttcttctaagcc

SEQ ID NO: 149965 - DNA, 30 bp, Artificial Sequence
  Synthetic oligonucleotide
acacatttggcttctttgaatgggtaagcc

SEQ ID NO: 149966 - DNA, 30 bp, Artificial Sequence
  Synthetic oligonucleotide
atactcgtacatgtaacttagcgttaagcc

SEQ ID NO: 149967 - DNA, 30 bp, Artificial Sequence
  Synthetic oligonucleotide
ggtctgttataggatgcgggaaacacagcc

SEQ ID NO: 149968 - DNA, 30 bp, Artificial Sequence
  Synthetic oligonucleotide
gcagcccacgttagcatatttcccacagcc

SEQ ID NO: 149969 - DNA, 30 bp, Artificial Sequence
  Synthetic oligonucleotide
cgccgtatcacgcccgtattgagaccagcc

SEQ ID NO: 149970 - DNA, 30 bp, Artificial Sequence
  Synthetic oligonucleotide
ggattgcaaatagtagtgtaaacagcagcc

SEQ ID NO: 149971 - DNA, 30 bp, Artificial Sequence
  Synthetic oligonucleotide
aggagcatgggtggatactcgcccgcagcc

SEQ ID NO: 149972 - DNA, 30 bp, Artificial Sequence
  Synthetic oligonucleotide
ctaacacggttgaggccttggtgatcagcc

SEQ ID NO: 149973 - DNA, 30 bp, Artificial Sequence
  Synthetic oligonucleotide
gtgcagtgcttgagtaacaaaggcagagcc

SEQ ID NO: 149974 - DNA, 30 bp, Artificial Sequence
  Synthetic oligonucleotide
ggaccggaatgtgcctggtctgagagagcc

SEQ ID NO: 149975 - DNA, 30 bp, Artificial Sequence
  Synthetic oligonucleotide
aatgaattcaccacggtcacgtagcgagcc

SEQ ID NO: 149976 - DNA, 30 bp, Artificial Sequence
  Synthetic oligonucleotide
ttcatcgattaggcgactgaccggcgagcc

SEQ ID NO: 149977 - DNA, 30 bp, Artificial Sequence
  Synthetic oligonucleotide
gggtcgggagggcgaaacaagcgatgagcc

SEQ ID NO: 149978 - DNA, 30 bp, Artificial Sequence
  Synthetic oligonucleotide
cattgccaatgcctattcgatttatgagcc

SEQ ID NO: 149979 - DNA, 30 bp, Artificial Sequence
  Synthetic oligonucleotide
ctagagagctgtatgccagagcactgagcc

SEQ ID NO: 149980 - DNA, 30 bp, Artificial Sequence
  Synthetic oligonucleotide
attgtcttggagtagttcatcagcatagcc

SEQ ID NO: 149981 - DNA, 30 bp, Artificial Sequence
  Synthetic oligonucleotide
ttccttcaagagcactgttcatgcatagcc

SEQ ID NO: 149982 - DNA, 30 bp, Artificial Sequence
  Synthetic oligonucleotide
tggtggggctgatgatggcagtgcatagcc

SEQ ID NO: 149983 - DNA, 30 bp, Artificial Sequence
  Synthetic oligonucleotide
ctaaggtccccccattgaggtcgactagcc

SEQ ID NO: 149984 - DNA, 31 bp, Artificial Sequence
  Synthetic oligonucleotide
aagaacaccggttgctagggacggactagcc

SEQ ID NO: 149985 - DNA, 30 bp, Artificial Sequence
  Synthetic oligonucleotide
gtacgattagcgaatcgagccatggtagcc

SEQ ID NO: 149986 - DNA, 30 bp, Artificial Sequence
  Synthetic oligonucleotide
gacaaaaaaacataatcaaattctgtagcc

SEQ ID NO: 149987 - DNA, 30 bp, Artificial Sequence
  Synthetic oligonucleotide
cagtaagcgcaattccaaggatgattagcc

SEQ ID NO: 149988 - DNA, 30 bp, Artificial Sequence
  Synthetic oligonucleotide
ttcctcacagacgtgtggcgagtattagcc

SEQ ID NO: 149989 - DNA, 30 bp, Artificial Sequence
  Synthetic oligonucleotide
ctcattggggaataagcctgcgtaaacgcc

SEQ ID NO: 149990 - DNA, 30 bp, Artificial Sequence
  Synthetic oligonucleotide
attccaacgcctcaatagatatgcaacgcc

SEQ ID NO: 149991 - DNA, 30 bp, Artificial Sequence
  Synthetic oligonucleotide
gtgagtccaaaggaaggggaagcgcacgcc

SEQ ID NO: 149992 - DNA, 30 bp, Artificial Sequence
  Synthetic oligonucleotide
agtggcgtagtaatcattcaaaccgacgcc

SEQ ID NO: 149993 - DNA, 30 bp, Artificial Sequence
  Synthetic oligonucleotide
tctgaacaaagtgtactaacctgcgacgcc

SEQ ID NO: 149994 - DNA, 30 bp, Artificial Sequence
  Synthetic oligonucleotide
cggaccaggaaaggtcagaacggggacgcc

SEQ ID NO: 149995 - DNA, 30 bp, Artificial Sequence
  Synthetic oligonucleotide
atgggaaggctagcagatcaagtctacgcc

SEQ ID NO: 149996 - DNA, 30 bp, Artificial Sequence
  Synthetic oligonucleotide
cgtcaatatcttagatcttatctcaccgcc

SEQ ID NO: 149997 - DNA, 30 bp, Artificial Sequence
  Synthetic oligonucleotide
tagtcgtgacaaatatgaggcccgaccgcc

SEQ ID NO: 149998 - DNA, 30 bp, Artificial Sequence
  Synthetic oligonucleotide
gcgaggaaacatgcttggctattgaccgcc

SEQ ID NO: 149999 - DNA, 30 bp, Artificial Sequence
  Synthetic oligonucleotide
tgtaccggtgaatcctaaaggcgtaccgcc

SEQ ID NO: 150000 - DNA, 30 bp, Artificial Sequence
  Synthetic oligonucleotide
acgagggtacaagagcgctgatcacccgcc

SEQ ID NO: 150001 - DNA, 30 bp, Artificial Sequence
  Synthetic oligonucleotide
cattacacttatgattactgtcgccccgcc

SEQ ID NO: 150002 - DNA, 30 bp, Artificial Sequence
  Synthetic oligonucleotide
aaacactacctattttcgagaggagccgcc

SEQ ID NO: 150003 - DNA, 30 bp, Artificial Sequence
  Synthetic oligonucleotide
ctacttaagttacactttcggcaggccgcc

SEQ ID NO: 150004 - DNA, 30 bp, Artificial Sequence
  Synthetic oligonucleotide
tgcgagcaatctagaccgagtgcaagcgcc

SEQ ID NO: 150005 - DNA, 30 bp, Artificial Sequence
  Synthetic oligonucleotide
taacgccggtgcatgggtaactatagcgcc

SEQ ID NO: 150006 - DNA, 30 bp, Artificial Sequence
  Synthetic oligonucleotide
aggcggtacctaaaaagggccgttagcgcc

SEQ ID NO: 150007 - DNA, 30 bp, Artificial Sequence
  Synthetic oligonucleotide
gacgcgagaaactacgtaatgtggcgcgcc

SEQ ID NO: 150008 - DNA, 30 bp, Artificial Sequence
  Synthetic oligonucleotide
cgacgcggtccgaacatagttgaaggcgcc

SEQ ID NO: 150009 - DNA, 30 bp, Artificial Sequence
  Synthetic oligonucleotide
aaggagattgaaccttggttttgtggcgcc

SEQ ID NO: 150010 - DNA, 30 bp, Artificial Sequence
  Synthetic oligonucleotide
ttactcctaaggcgtactgccaggtgcgcc

SEQ ID NO: 150011 - DNA, 30 bp, Artificial Sequence
  Synthetic oligonucleotide
caccacaggcaagtgcaagttaattgcgcc

SEQ ID NO: 150012 - DNA, 30 bp, Artificial Sequence
  Synthetic oligonucleotide
catagaaatggagaggggaactggatcgcc

SEQ ID NO: 150013 - DNA, 30 bp, Artificial Sequence
  Synthetic oligonucleotide
cgaaacagttaccgtagaattaaactcgcc

SEQ ID NO: 150014 - DNA, 30 bp, Artificial Sequence
  Synthetic oligonucleotide
agaccacaggcgctgatcgagaccctcgcc

SEQ ID NO: 150015 - DNA, 30 bp, Artificial Sequence
  Synthetic oligonucleotide
accacagtaatggcgccggcatccctcgcc

SEQ ID NO: 150016 - DNA, 30 bp, Artificial Sequence
  Synthetic oligonucleotide
tgagctatcatagcagtgttcaccttcgcc

SEQ ID NO: 150017 - DNA, 30 bp, Artificial Sequence
  Synthetic oligonucleotide
cacaaaagcacagttccagaaaagttcgcc

SEQ ID NO: 150018 - DNA, 30 bp, Artificial Sequence
  Synthetic oligonucleotide
acgtctgtagggttagcttcgttgttcgcc

SEQ ID NO: 150019 - DNA, 30 bp, Artificial Sequence
  Synthetic oligonucleotide
ctgtactgaccggattctaccactttcgcc

SEQ ID NO: 150020 - DNA, 30 bp, Artificial Sequence
  Synthetic oligonucleotide
accgcgaaaagtgggcacggcactttcgcc

SEQ ID NO: 150021 - DNA, 30 bp, Artificial Sequence
  Synthetic oligonucleotide
cattgaatgctgataccgataagaaaggcc

SEQ ID NO: 150022 - DNA, 30 bp, Artificial Sequence
  Synthetic oligonucleotide
gctcgatggggaggagagtcgttaaaggcc

SEQ ID NO: 150023 - DNA, 30 bp, Artificial Sequence
  Synthetic oligonucleotide
cggagacacccagttcatcgacccaaggcc

SEQ ID NO: 150024 - DNA, 30 bp, Artificial Sequence
  Synthetic oligonucleotide
gtattggggaatgtgtggggtggtaaggcc

SEQ ID NO: 150025 - DNA, 30 bp, Artificial Sequence
  Synthetic oligonucleotide
attagcgatgacaatcagcaacaacaggcc

SEQ ID NO: 150026 - DNA, 30 bp, Artificial Sequence
  Synthetic oligonucleotide
tatgaagtcagatatgaatgacacgaggcc

SEQ ID NO: 150027 - DNA, 30 bp, Artificial Sequence
  Synthetic oligonucleotide
ctccctacaagggaacggaattacgaggcc

SEQ ID NO: 150028 - DNA, 30 bp, Artificial Sequence
  Synthetic oligonucleotide
agaaggatggtgccggggcgctgggaggcc

SEQ ID NO: 150029 - DNA, 30 bp, Artificial Sequence
  Synthetic oligonucleotide
ttaacggaggcatgaagagggttggaggcc

SEQ ID NO: 150030 - DNA, 30 bp, Artificial Sequence
  Synthetic oligonucleotide
ttcagaaacgaagttacgtacacataggcc

SEQ ID NO: 150031 - DNA, 30 bp, Artificial Sequence
  Synthetic oligonucleotide
tcggggtcgatcacgccggacaagtaggcc

SEQ ID NO: 150032 - DNA, 30 bp, Artificial Sequence
  Synthetic oligonucleotide
aatgaaaatggctgaacaaggccaacggcc

SEQ ID NO: 150033 - DNA, 30 bp, Artificial Sequence
  Synthetic oligonucleotide
aatcgggtgaggttgtcgggcaagacggcc

SEQ ID NO: 150034 - DNA, 30 bp, Artificial Sequence
  Synthetic oligonucleotide
tcgggaaactatgaaagcaacgcgacggcc

SEQ ID NO: 150035 - DNA, 30 bp, Artificial Sequence
  Synthetic oligonucleotide
acacagtacgtgtctcgattaaaaccggcc

SEQ ID NO: 150036 - DNA, 30 bp, Artificial Sequence
  Synthetic oligonucleotide
gactgtacgtttgtagaggatcgagcggcc

SEQ ID NO: 150037 - DNA, 30 bp, Artificial Sequence
  Synthetic oligonucleotide
acgttacccaacttgataaaatggtcggcc

SEQ ID NO: 150038 - DNA, 30 bp, Artificial Sequence
  Synthetic oligonucleotide
gcacgggacgggttgtatcgcgattcggcc

SEQ ID NO: 150039 - DNA, 30 bp, Artificial Sequence
  Synthetic oligonucleotide
tattactgagcagaaactatgccttcggcc

SEQ ID NO: 150040 - DNA, 30 bp, Artificial Sequence
  Synthetic oligonucleotide
tccaaaaggcaacagtgtctcatttcggcc

SEQ ID NO: 150041 - DNA, 30 bp, Artificial Sequence
  Synthetic oligonucleotide
taagtgaaagataagggaggtgcaagggcc

SEQ ID NO: 150042 - DNA, 30 bp, Artificial Sequence
  Synthetic oligonucleotide
ctcgaaagtatattatgatagtgaagggcc

SEQ ID NO: 150043 - DNA, 30 bp, Artificial Sequence
  Synthetic oligonucleotide
gccgtggagtcaaactagatattgcgggcc

SEQ ID NO: 150044 - DNA, 30 bp, Artificial Sequence
  Synthetic oligonucleotide
aagtagaggaagtaagtggagtaaggggcc

SEQ ID NO: 150045 - DNA, 30 bp, Artificial Sequence
  Synthetic oligonucleotide
gatgttagtcattcatggcacagcggggcc

SEQ ID NO: 150046 - DNA, 30 bp, Artificial Sequence
  Synthetic oligonucleotide
tagtgaatctttatcatcacattcggggcc

SEQ ID NO: 150047 - DNA, 31 bp, Artificial Sequence
  Synthetic oligonucleotide
ggacggatatcagggcctatcagagggggcc

SEQ ID NO: 150048 - DNA, 30 bp, Artificial Sequence
  Synthetic oligonucleotide
gcacgtaattaaacgtggtagtatggggcc

SEQ ID NO: 150049 - DNA, 30 bp, Artificial Sequence
  Synthetic oligonucleotide
tcggtgataagcttaacagggccctgggcc

SEQ ID NO: 150050 - DNA, 30 bp, Artificial Sequence
  Synthetic oligonucleotide
tctttcgggggtccgaaatgtgagtgggcc

SEQ ID NO: 150051 - DNA, 30 bp, Artificial Sequence
  Synthetic oligonucleotide
agttcgattttcgtcgcccgaacaatggcc

SEQ ID NO: 150052 - DNA, 30 bp, Artificial Sequence
  Synthetic oligonucleotide
cgagcggtacgcgagataacaccaatggcc

SEQ ID NO: 150053 - DNA, 30 bp, Artificial Sequence
  Synthetic oligonucleotide
ctacgtaggggtccgtaccggctcatggcc

SEQ ID NO: 150054 - DNA, 30 bp, Artificial Sequence
  Synthetic oligonucleotide
cgctcgtaggtaagtcattaagagatggcc

SEQ ID NO: 150055 - DNA, 30 bp, Artificial Sequence
  Synthetic oligonucleotide
cagaagtgatttttcttaatagggatggcc

SEQ ID NO: 150056 - DNA, 30 bp, Artificial Sequence
  Synthetic oligonucleotide
ttcctagtgtcgacctcggagaggctggcc

SEQ ID NO: 150057 - DNA, 31 bp, Artificial Sequence
  Synthetic oligonucleotide
aaaacgacatagtactgaacgcatcgtggcc

SEQ ID NO: 150058 - DNA, 30 bp, Artificial Sequence
  Synthetic oligonucleotide
gaagtagatagagggtcaattcaggtggcc

SEQ ID NO: 150059 - DNA, 30 bp, Artificial Sequence
  Synthetic oligonucleotide
ctgtggtatattaaaagagaatgggtggcc

SEQ ID NO: 150060 - DNA, 30 bp, Artificial Sequence
  Synthetic oligonucleotide
tcaacaggagcattcacgcaatacttggcc

SEQ ID NO: 150061 - DNA, 30 bp, Artificial Sequence
  Synthetic oligonucleotide
tgtaactcgtcaataaaactgtgcttggcc

SEQ ID NO: 150062 - DNA, 30 bp, Artificial Sequence
  Synthetic oligonucleotide
catattgctgacccaaggaacagtttggcc

SEQ ID NO: 150063 - DNA, 30 bp, Artificial Sequence
  Synthetic oligonucleotide
caactaggacactaggtcttcgcaaatgcc

SEQ ID NO: 150064 - DNA, 30 bp, Artificial Sequence
  Synthetic oligonucleotide
tcccgcttacggccgaatcaccgcaatgcc

SEQ ID NO: 150065 - DNA, 30 bp, Artificial Sequence
  Synthetic oligonucleotide
gaagagtgtaatgcggaaaatcatgatgcc

SEQ ID NO: 150066 - DNA, 30 bp, Artificial Sequence
  Synthetic oligonucleotide
gtcgttacaaatgcctatactaaatatgcc

SEQ ID NO: 150067 - DNA, 30 bp, Artificial Sequence
  Synthetic oligonucleotide
ataagattactagagaagtggtcaactgcc

SEQ ID NO: 150068 - DNA, 30 bp, Artificial Sequence
  Synthetic oligonucleotide
aatcagtcgtattcgcgcaatctcactgcc

SEQ ID NO: 150069 - DNA, 30 bp, Artificial Sequence
  Synthetic oligonucleotide
atgagagatattgatgtcaccccgactgcc

SEQ ID NO: 150070 - DNA, 30 bp, Artificial Sequence
  Synthetic oligonucleotide
cagtgcgaatagaccttcccctatactgcc

SEQ ID NO: 150071 - DNA, 30 bp, Artificial Sequence
  Synthetic oligonucleotide
cggttggggagcgaacgaacgaacgctgcc

SEQ ID NO: 150072 - DNA, 30 bp, Artificial Sequence
  Synthetic oligonucleotide
ggctccggtctgtagagcaccttcgctgcc

SEQ ID NO: 150073 - DNA, 30 bp, Artificial Sequence
  Synthetic oligonucleotide
gggagccctcggtcactcgcaacgtctgcc

SEQ ID NO: 150074 - DNA, 30 bp, Artificial Sequence
  Synthetic oligonucleotide
ggaggtagtctagccagatttgggtctgcc

SEQ ID NO: 150075 - DNA, 30 bp, Artificial Sequence
  Synthetic oligonucleotide
attacaacccaactacactgtgacagtgcc

SEQ ID NO: 150076 - DNA, 30 bp, Artificial Sequence
  Synthetic oligonucleotide
cagaaggcagtttaccgaacactgagtgcc

SEQ ID NO: 150077 - DNA, 30 bp, Artificial Sequence
  Synthetic oligonucleotide
tggaaacatcgaattgactaggctcgtgcc

SEQ ID NO: 150078 - DNA, 30 bp, Artificial Sequence
  Synthetic oligonucleotide
ggaggggaccattctctaataatgggtgcc

SEQ ID NO: 150079 - DNA, 30 bp, Artificial Sequence
  Synthetic oligonucleotide
tgccataattatttgctgggccagtgtgcc

SEQ ID NO: 150080 - DNA, 30 bp, Artificial Sequence
  Synthetic oligonucleotide
aggccataacacgaaattctgacgtgtgcc

SEQ ID NO: 150081 - DNA, 30 bp, Artificial Sequence
  Synthetic oligonucleotide
cgacacgtccctctaaaccggggagttgcc

SEQ ID NO: 150082 - DNA, 30 bp, Artificial Sequence
  Synthetic oligonucleotide
catgacattcatatacttcagaacgttgcc

SEQ ID NO: 150083 - DNA, 30 bp, Artificial Sequence
  Synthetic oligonucleotide
gatcgagtgttgagaactcgaccggttgcc

SEQ ID NO: 150084 - DNA, 30 bp, Artificial Sequence
  Synthetic oligonucleotide
ggtattagcctctagcagttctcggttgcc

SEQ ID NO: 150085 - DNA, 30 bp, Artificial Sequence
  Synthetic oligonucleotide
gatgtaaacgtcagggcggtggactttgcc

SEQ ID NO: 150086 - DNA, 30 bp, Artificial Sequence
  Synthetic oligonucleotide
aacgtgccaccgtgcgttggttgcaaatcc

SEQ ID NO: 150087 - DNA, 30 bp, Artificial Sequence
  Synthetic oligonucleotide
ccaacagcctctcatcgacatccgaaatcc

SEQ ID NO: 150088 - DNA, 31 bp, Artificial Sequence
  Synthetic oligonucleotide
tgggatgtgtgcgctaaggcgatgtaaatcc

SEQ ID NO: 150089 - DNA, 30 bp, Artificial Sequence
  Synthetic oligonucleotide
ggggaacgatatttacagttaagtcaatcc

SEQ ID NO: 150090 - DNA, 30 bp, Artificial Sequence
  Synthetic oligonucleotide
gggccaatggcacttgaggactcagaatcc

SEQ ID NO: 150091 - DNA, 30 bp, Artificial Sequence
  Synthetic oligonucleotide
aaccaaccggggatgacaacacgttaatcc

SEQ ID NO: 150092 - DNA, 30 bp, Artificial Sequence
  Synthetic oligonucleotide
tactcgatagggtggcttcagagaccatcc

SEQ ID NO: 150093 - DNA, 30 bp, Artificial Sequence
  Synthetic oligonucleotide
tgaagatagacggattattgggagccatcc

SEQ ID NO: 150094 - DNA, 30 bp, Artificial Sequence
  Synthetic oligonucleotide
aactcgtagaggggggagcggtttccatcc

SEQ ID NO: 150095 - DNA, 30 bp, Artificial Sequence
  Synthetic oligonucleotide
aaggacactccgggtccgtgaagagcatcc

SEQ ID NO: 150096 - DNA, 30 bp, Artificial Sequence
  Synthetic oligonucleotide
caaccgagtcagatgataagccccgcatcc

SEQ ID NO: 150097 - DNA, 30 bp, Artificial Sequence
  Synthetic oligonucleotide
ttaggtgttcactagacacaaggggcatcc

SEQ ID NO: 150098 - DNA, 30 bp, Artificial Sequence
  Synthetic oligonucleotide
tccctttgcgaagctaccgggacgtcatcc

SEQ ID NO: 150099 - DNA, 30 bp, Artificial Sequence
  Synthetic oligonucleotide
ttaacggcggaaatcgtatcttcaagatcc

SEQ ID NO: 150100 - DNA, 30 bp, Artificial Sequence
  Synthetic oligonucleotide
actctagccaggtccaagaaacccagatcc

SEQ ID NO: 150101 - DNA, 30 bp, Artificial Sequence
  Synthetic oligonucleotide
cggaagtgtaatcgtctcaatgttagatcc

SEQ ID NO: 150102 - DNA, 30 bp, Artificial Sequence
  Synthetic oligonucleotide
tacgtctgataaactaaccggctccgatcc

SEQ ID NO: 150103 - DNA, 30 bp, Artificial Sequence
  Synthetic oligonucleotide
cgattcaagaaatatgcccgaatgcgatcc

SEQ ID NO: 150104 - DNA, 30 bp, Artificial Sequence
  Synthetic oligonucleotide
atagtagaagtacagagcacatgtcgatcc

SEQ ID NO: 150105 - DNA, 30 bp, Artificial Sequence
  Synthetic oligonucleotide
cgtccaaatgtgttgtgaaaattaggatcc

SEQ ID NO: 150106 - DNA, 30 bp, Artificial Sequence
  Synthetic oligonucleotide
cgcgaagtgtcctggtgggagtcctgatcc

SEQ ID NO: 150107 - DNA, 30 bp, Artificial Sequence
  Synthetic oligonucleotide
ggccccacactcaaagaaaggctttgatcc

SEQ ID NO: 150108 - DNA, 30 bp, Artificial Sequence
  Synthetic oligonucleotide
tagtgaagattcgatggtatgggaatatcc

SEQ ID NO: 150109 - DNA, 30 bp, Artificial Sequence
  Synthetic oligonucleotide
tctcacggacgataagggcataggctatcc

SEQ ID NO: 150110 - DNA, 30 bp, Artificial Sequence
  Synthetic oligonucleotide
ccaaggtgtggttggcaaatttatctatcc

SEQ ID NO: 150111 - DNA, 30 bp, Artificial Sequence
  Synthetic oligonucleotide
acctgcttagaacgaccaggccatgtatcc

SEQ ID NO: 150112 - DNA, 30 bp, Artificial Sequence
  Synthetic oligonucleotide
ccgtcaatcatgatggggcattatgtatcc

SEQ ID NO: 150113 - DNA, 30 bp, Artificial Sequence
  Synthetic oligonucleotide
tcaacgtcaaatgttgcctgagcattatcc

SEQ ID NO: 150114 - DNA, 30 bp, Artificial Sequence
  Synthetic oligonucleotide
ctgcatcccaaggagataagggagttatcc

SEQ ID NO: 150115 - DNA, 30 bp, Artificial Sequence
  Synthetic oligonucleotide
atgggtgcgtttgtgtgtgttaatttatcc

SEQ ID NO: 150116 - DNA, 30 bp, Artificial Sequence
  Synthetic oligonucleotide
actatgcgtggaacatataactcaaactcc

SEQ ID NO: 150117 - DNA, 30 bp, Artificial Sequence
  Synthetic oligonucleotide
cctccaatcaaacggttacggtagaactcc

SEQ ID NO: 150118 - DNA, 30 bp, Artificial Sequence
  Synthetic oligonucleotide
gagcagaagggcaggaagcaaacgaactcc

SEQ ID NO: 150119 - DNA, 30 bp, Artificial Sequence
  Synthetic oligonucleotide
catgcaactgcccgctagatcttgaactcc

SEQ ID NO: 150120 - DNA, 30 bp, Artificial Sequence
  Synthetic oligonucleotide
tgtctccgaccccgcacatggaaccactcc

SEQ ID NO: 150121 - DNA, 30 bp, Artificial Sequence
  Synthetic oligonucleotide
gaactataggggaattgaatgcattactcc

SEQ ID NO: 150122 - DNA, 30 bp, Artificial Sequence
  Synthetic oligonucleotide
cggctaccatggcacacacttaatacctcc

SEQ ID NO: 150123 - DNA, 30 bp, Artificial Sequence
  Synthetic oligonucleotide
cagattaccagcacgccgtcgataccctcc

SEQ ID NO: 150124 - DNA, 30 bp, Artificial Sequence
  Synthetic oligonucleotide
gtatgactagttagcgaaaatgaggcctcc

SEQ ID NO: 150125 - DNA, 30 bp, Artificial Sequence
  Synthetic oligonucleotide
ctaattgggaatattcgatattgtgcctcc

SEQ ID NO: 150126 - DNA, 30 bp, Artificial Sequence
  Synthetic oligonucleotide
caaagcggggatgagtcaaaggttgcctcc

SEQ ID NO: 150127 - DNA, 30 bp, Artificial Sequence
  Synthetic oligonucleotide
tcatcactagttatgaatttccagtcctcc

SEQ ID NO: 150128 - DNA, 30 bp, Artificial Sequence
  Synthetic oligonucleotide
tgatgaaatcctaatatcgtcagttcctcc

SEQ ID NO: 150129 - DNA, 30 bp, Artificial Sequence
  Synthetic oligonucleotide
cacgggcattcacagcagctaccaagctcc

SEQ ID NO: 150130 - DNA, 30 bp, Artificial Sequence
  Synthetic oligonucleotide
aatgacacgttattttgcgcgtatagctcc

SEQ ID NO: 150131 - DNA, 30 bp, Artificial Sequence
  Synthetic oligonucleotide
ggtaccttacgacaccagttggttagctcc

SEQ ID NO: 150132 - DNA, 30 bp, Artificial Sequence
  Synthetic oligonucleotide
catgccgcgttgaagttgctggccggctcc

SEQ ID NO: 150133 - DNA, 30 bp, Artificial Sequence
  Synthetic oligonucleotide
ccactcagcttgatccattaaatcggctcc

SEQ ID NO: 150134 - DNA, 30 bp, Artificial Sequence
  Synthetic oligonucleotide
taccgaccacgagacaagccgctgggctcc

SEQ ID NO: 150135 - DNA, 30 bp, Artificial Sequence
  Synthetic oligonucleotide
tgatgtcgaccaagggagcatacctgctcc

SEQ ID NO: 150136 - DNA, 30 bp, Artificial Sequence
  Synthetic oligonucleotide
ggggataggtcgacttctcttaagtgctcc

SEQ ID NO: 150137 - DNA, 30 bp, Artificial Sequence
  Synthetic oligonucleotide
tatacgaagacccactcgtcaaatatctcc

SEQ ID NO: 150138 - DNA, 30 bp, Artificial Sequence
  Synthetic oligonucleotide
gatggtccaccgctcggtccggctctctcc

SEQ ID NO: 150139 - DNA, 30 bp, Artificial Sequence
  Synthetic oligonucleotide
gcggtcagttggcgattatcgaccgtctcc

SEQ ID NO: 150140 - DNA, 30 bp, Artificial Sequence
  Synthetic oligonucleotide
cttactatcacctaagacgaaacggtctcc

SEQ ID NO: 150141 - DNA, 30 bp, Artificial Sequence
  Synthetic oligonucleotide
gcggcgaattcacgtaggacggaaaagtcc

SEQ ID NO: 150142 - DNA, 30 bp, Artificial Sequence
  Synthetic oligonucleotide
gggaagataagactgtgagagaccaagtcc

SEQ ID NO: 150143 - DNA, 30 bp, Artificial Sequence
  Synthetic oligonucleotide
gcccaaacccatgcaggaccaggacagtcc

SEQ ID NO: 150144 - DNA, 30 bp, Artificial Sequence
  Synthetic oligonucleotide
agattggggggttgtgccaaaaggcagtcc

SEQ ID NO: 150145 - DNA, 30 bp, Artificial Sequence
  Synthetic oligonucleotide
agatacaacgcttccaaaagtacagagtcc

SEQ ID NO: 150146 - DNA, 30 bp, Artificial Sequence
  Synthetic oligonucleotide
gcatgtacagtagagcaaactggagagtcc

SEQ ID NO: 150147 - DNA, 30 bp, Artificial Sequence
  Synthetic oligonucleotide
ccggtcgtgctgtttatagcggtagagtcc

SEQ ID NO: 150148 - DNA, 30 bp, Artificial Sequence
  Synthetic oligonucleotide
ggcaggcagtggataaggttgctcgagtcc

SEQ ID NO: 150149 - DNA, 30 bp, Artificial Sequence
  Synthetic oligonucleotide
tagggcacgaatggattacaataggagtcc

SEQ ID NO: 150150 - DNA, 30 bp, Artificial Sequence
  Synthetic oligonucleotide
taaaactggggaaaccggcacaatgagtcc

SEQ ID NO: 150151 - DNA, 30 bp, Artificial Sequence
  Synthetic oligonucleotide
caataagcagttggaaacgttatctagtcc

SEQ ID NO: 150152 - DNA, 30 bp, Artificial Sequence
  Synthetic oligonucleotide
cactccgttcttttaattgagtaaacgtcc

SEQ ID NO: 150153 - DNA, 30 bp, Artificial Sequence
  Synthetic oligonucleotide
tacgttagaaaaagatgttaatagacgtcc

SEQ ID NO: 150154 - DNA, 30 bp, Artificial Sequence
  Synthetic oligonucleotide
cagaaaaatagcacggctcttcgtacgtcc

SEQ ID NO: 150155 - DNA, 30 bp, Artificial Sequence
  Synthetic oligonucleotide
tactgtattagtctgacataagagccgtcc

SEQ ID NO: 150156 - DNA, 30 bp, Artificial Sequence
  Synthetic oligonucleotide
tacgcgggataatcgggtctaggcgcgtcc

SEQ ID NO: 150157 - DNA, 30 bp, Artificial Sequence
  Synthetic oligonucleotide
caggatttcataaacttgtagttggcgtcc

SEQ ID NO: 150158 - DNA, 30 bp, Artificial Sequence
  Synthetic oligonucleotide
gatacgtaatatcgcttgtacggttcgtcc

SEQ ID NO: 150159 - DNA, 31 bp, Artificial Sequence
  Synthetic oligonucleotide
ggtggatctccttacccagatattcaggtcc

SEQ ID NO: 150160 - DNA, 30 bp, Artificial Sequence
  Synthetic oligonucleotide
gtcaggctggtttgctatcagtaacggtcc

SEQ ID NO: 150161 - DNA, 30 bp, Artificial Sequence
  Synthetic oligonucleotide
cgaaattggctgagtgtgcatggacggtcc

SEQ ID NO: 150162 - DNA, 30 bp, Artificial Sequence
  Synthetic oligonucleotide
ggtccccgtctggcgcggaaaaaccggtcc

SEQ ID NO: 150163 - DNA, 30 bp, Artificial Sequence
  Synthetic oligonucleotide
atcgccggagcgagctactgacaagggtcc

SEQ ID NO: 150164 - DNA, 30 bp, Artificial Sequence
  Synthetic oligonucleotide
cgttgtataaactagttagcggagatgtcc

SEQ ID NO: 150165 - DNA, 30 bp, Artificial Sequence
  Synthetic oligonucleotide
tggcaataagtaaagcctgctgcactgtcc

SEQ ID NO: 150166 - DNA, 30 bp, Artificial Sequence
  Synthetic oligonucleotide
gcaaaaacgtggtgcgttacgaccctgtcc

SEQ ID NO: 150167 - DNA, 30 bp, Artificial Sequence
  Synthetic oligonucleotide
cgagctcaatacagatagacaggcctgtcc

SEQ ID NO: 150168 - DNA, 30 bp, Artificial Sequence
  Synthetic oligonucleotide
gaaggcaagttgagccatgccggcctgtcc

SEQ ID NO: 150169 - DNA, 30 bp, Artificial Sequence
  Synthetic oligonucleotide
agagaagcttggggcaacggctttctgtcc

SEQ ID NO: 150170 - DNA, 30 bp, Artificial Sequence
  Synthetic oligonucleotide
cccattggaagagtcatgactcccgtgtcc

SEQ ID NO: 150171 - DNA, 30 bp, Artificial Sequence
  Synthetic oligonucleotide
catagttctagtgactacaccagggtgtcc

SEQ ID NO: 150172 - DNA, 30 bp, Artificial Sequence
  Synthetic oligonucleotide
tgatagtggtaggtcacagagggggtgtcc

SEQ ID NO: 150173 - DNA, 30 bp, Artificial Sequence
  Synthetic oligonucleotide
gccatgaggatgcccctataaggattgtcc

SEQ ID NO: 150174 - DNA, 30 bp, Artificial Sequence
  Synthetic oligonucleotide
acggttgatggacgcgcaactatgttgtcc

SEQ ID NO: 150175 - DNA, 30 bp, Artificial Sequence
  Synthetic oligonucleotide
accatctctttatcttaacttccacattcc

SEQ ID NO: 150176 - DNA, 30 bp, Artificial Sequence
  Synthetic oligonucleotide
tgcgtaacattgcggcattatagccattcc

SEQ ID NO: 150177 - DNA, 30 bp, Artificial Sequence
  Synthetic oligonucleotide
tacaaataggtgcgggggcagtgcgattcc

SEQ ID NO: 150178 - DNA, 29 bp, Artificial Sequence
  Synthetic oligonucleotide
ggggtagcggggcgtgaattctggattcc

SEQ ID NO: 150179 - DNA, 30 bp, Artificial Sequence
  Synthetic oligonucleotide
aagatcataacgatgtcctaccatgattcc

SEQ ID NO: 150180 - DNA, 30 bp, Artificial Sequence
  Synthetic oligonucleotide
gtagtattagagcgaccatggcatgattcc

SEQ ID NO: 150181 - DNA, 30 bp, Artificial Sequence
  Synthetic oligonucleotide
ccggtcacgggcaggtaagctgctgattcc

SEQ ID NO: 150182 - DNA, 30 bp, Artificial Sequence
  Synthetic oligonucleotide
tagagacatatgatgttaccagtatattcc

SEQ ID NO: 150183 - DNA, 30 bp, Artificial Sequence
  Synthetic oligonucleotide
ggaccacgaggcgccgggaacccaccttcc

SEQ ID NO: 150184 - DNA, 30 bp, Artificial Sequence
  Synthetic oligonucleotide
caccgaccgaaacagcggtgaggaccttcc

SEQ ID NO: 150185 - DNA, 30 bp, Artificial Sequence
  Synthetic oligonucleotide
gcgtgcgtacgactcggctcgccagcttcc

SEQ ID NO: 150186 - DNA, 30 bp, Artificial Sequence
  Synthetic oligonucleotide
ggtttctagagaaggatagtgagagcttcc

SEQ ID NO: 150187 - DNA, 30 bp, Artificial Sequence
  Synthetic oligonucleotide
cgatggtgcctggtgtgcccggaatcttcc

SEQ ID NO: 150188 - DNA, 30 bp, Artificial Sequence
  Synthetic oligonucleotide
tggcatatatgcccgagaaggggacgttcc

SEQ ID NO: 150189 - DNA, 30 bp, Artificial Sequence
  Synthetic oligonucleotide
cacggtaatctcacaaacgcgagtcgttcc

SEQ ID NO: 150190 - DNA, 30 bp, Artificial Sequence
  Synthetic oligonucleotide
cggcgatctggccgagcgtttggtcgttcc

SEQ ID NO: 150191 - DNA, 30 bp, Artificial Sequence
  Synthetic oligonucleotide
tggcaaaggcccaaagcaatcaagggttcc

SEQ ID NO: 150192 - DNA, 30 bp, Artificial Sequence
  Synthetic oligonucleotide
catcagatgggggcatttcctgagggttcc

SEQ ID NO: 150193 - DNA, 30 bp, Artificial Sequence
  Synthetic oligonucleotide
gttatgattgatgggccggtgaaatgttcc

SEQ ID NO: 150194 - DNA, 30 bp, Artificial Sequence
  Synthetic oligonucleotide
taaaacgatagtcccacgattttgtgttcc

SEQ ID NO: 150195 - DNA, 30 bp, Artificial Sequence
  Synthetic oligonucleotide
agtgagggtccagcgggtcctcaaatttcc

SEQ ID NO: 150196 - DNA, 30 bp, Artificial Sequence
  Synthetic oligonucleotide
caggatgcctatggcagcgaagcaatttcc

SEQ ID NO: 150197 - DNA, 30 bp, Artificial Sequence
  Synthetic oligonucleotide
gtgctgaggcctatgaaagcactgctttcc

SEQ ID NO: 150198 - DNA, 30 bp, Artificial Sequence
  Synthetic oligonucleotide
tcacgagtaacagagagcagggttctttcc

SEQ ID NO: 150199 - DNA, 30 bp, Artificial Sequence
  Synthetic oligonucleotide
atgccgggggtgccaggagaggaagtttcc

SEQ ID NO: 150200 - DNA, 30 bp, Artificial Sequence
  Synthetic oligonucleotide
atcacaactgtgagcagttcgaccgtttcc

SEQ ID NO: 150201 - DNA, 30 bp, Artificial Sequence
  Synthetic oligonucleotide
tggcaattgaacttaaggaaggatgtttcc

SEQ ID NO: 150202 - DNA, 30 bp, Artificial Sequence
  Synthetic oligonucleotide
gcccagcactggaagtccgtcatgaaaagc

SEQ ID NO: 150203 - DNA, 30 bp, Artificial Sequence
  Synthetic oligonucleotide
caatgtgcatacatttgcgactgcgaaagc

SEQ ID NO: 150204 - DNA, 30 bp, Artificial Sequence
  Synthetic oligonucleotide
ggtacgatgatggttccgaatttggaaagc

SEQ ID NO: 150205 - DNA, 30 bp, Artificial Sequence
  Synthetic oligonucleotide
tacctaaaacttggcccaaggtttgaaagc

SEQ ID NO: 150206 - DNA, 30 bp, Artificial Sequence
  Synthetic oligonucleotide
ccttgctatgatggcaaaggttaataaagc

SEQ ID NO: 150207 - DNA, 30 bp, Artificial Sequence
  Synthetic oligonucleotide
tcgtacctgagtcggtgtagttagtaaagc

SEQ ID NO: 150208 - DNA, 30 bp, Artificial Sequence
  Synthetic oligonucleotide
tcagaaccatccgagaaatgtacgtaaagc

SEQ ID NO: 150209 - DNA, 30 bp, Artificial Sequence
  Synthetic oligonucleotide
agtctaattacagggcattacggttaaagc

SEQ ID NO: 150210 - DNA, 30 bp, Artificial Sequence
  Synthetic oligonucleotide
gggacgttctagctaccctcacgaacaagc

SEQ ID NO: 150211 - DNA, 30 bp, Artificial Sequence
  Synthetic oligonucleotide
accacgagggccgcccatttcgttacaagc

SEQ ID NO: 150212 - DNA, 30 bp, Artificial Sequence
  Synthetic oligonucleotide
cccaatttgagaaacctggtacaaccaagc

SEQ ID NO: 150213 - DNA, 30 bp, Artificial Sequence
  Synthetic oligonucleotide
caatcagcggctgttccccgaagaccaagc

SEQ ID NO: 150214 - DNA, 30 bp, Artificial Sequence
  Synthetic oligonucleotide
aatggctcctggagcgatagttagccaagc

SEQ ID NO: 150215 - DNA, 30 bp, Artificial Sequence
  Synthetic oligonucleotide
tccaaagttatactgttgtttccgccaagc

SEQ ID NO: 150216 - DNA, 30 bp, Artificial Sequence
  Synthetic oligonucleotide
agaaggcaatgctattagatcgttccaagc

SEQ ID NO: 150217 - DNA, 30 bp, Artificial Sequence
  Synthetic oligonucleotide
ctgtccactataccataaacgcccgcaagc

SEQ ID NO: 150218 - DNA, 30 bp, Artificial Sequence
  Synthetic oligonucleotide
gttgtgcaaatcagcacccacgtcgcaagc

SEQ ID NO: 150219 - DNA, 30 bp, Artificial Sequence
  Synthetic oligonucleotide
tccgggatgacaggataatcccaggcaagc

SEQ ID NO: 150220 - DNA, 30 bp, Artificial Sequence
  Synthetic oligonucleotide
cgctagaatcaaatactgggttgggcaagc

SEQ ID NO: 150221 - DNA, 30 bp, Artificial Sequence
  Synthetic oligonucleotide
taaggtccacgatgcggctcgggtgcaagc

SEQ ID NO: 150222 - DNA, 30 bp, Artificial Sequence
  Synthetic oligonucleotide
atggtgagtagtggtattggcatatcaagc

SEQ ID NO: 150223 - DNA, 30 bp, Artificial Sequence
  Synthetic oligonucleotide
aggagtcaagttcactcgccgcactcaagc

SEQ ID NO: 150224 - DNA, 30 bp, Artificial Sequence
  Synthetic oligonucleotide
aagcagtcgggagtcaggacgaattcaagc

SEQ ID NO: 150225 - DNA, 30 bp, Artificial Sequence
  Synthetic oligonucleotide
agccgctaagaacggcatccccaaagaagc

SEQ ID NO: 150226 - DNA, 30 bp, Artificial Sequence
  Synthetic oligonucleotide
atactatctgggacggtagcctaaagaagc

SEQ ID NO: 150227 - DNA, 30 bp, Artificial Sequence
  Synthetic oligonucleotide
agcgcctgtcgagaaacaaagatcagaagc

SEQ ID NO: 150228 - DNA, 30 bp, Artificial Sequence
  Synthetic oligonucleotide
taatagcggagatcgtccgtgaaacgaagc

SEQ ID NO: 150229 - DNA, 30 bp, Artificial Sequence
  Synthetic oligonucleotide
gaggccgagaattcatcgcatcgacgaagc

SEQ ID NO: 150230 - DNA, 30 bp, Artificial Sequence
  Synthetic oligonucleotide
ctagtcagtctaatcaagtgcagccgaagc

SEQ ID NO: 150231 - DNA, 30 bp, Artificial Sequence
  Synthetic oligonucleotide
cttcgtcgtcaaccggtatggctgggaagc

SEQ ID NO: 150232 - DNA, 30 bp, Artificial Sequence
  Synthetic oligonucleotide
ctccacccaaacgaatatcgttgctgaagc

SEQ ID NO: 150233 - DNA, 30 bp, Artificial Sequence
  Synthetic oligonucleotide
cacctgtaaggagaagtaatttagtgaagc

SEQ ID NO: 150234 - DNA, 30 bp, Artificial Sequence
  Synthetic oligonucleotide
tgtgtcggggttcaaattccactgtgaagc

SEQ ID NO: 150235 - DNA, 30 bp, Artificial Sequence
  Synthetic oligonucleotide
ggaaaggcggtacgagccgaaaaaataagc

SEQ ID NO: 150236 - DNA, 30 bp, Artificial Sequence
  Synthetic oligonucleotide
tctttaatgtagccgaagtccgaaataagc

SEQ ID NO: 150237 - DNA, 30 bp, Artificial Sequence
  Synthetic oligonucleotide
aagagaaagtgaggggtgtatagcataagc

SEQ ID NO: 150238 - DNA, 30 bp, Artificial Sequence
  Synthetic oligonucleotide
gacagtatctcctacgtatatcggataagc

SEQ ID NO: 150239 - DNA, 30 bp, Artificial Sequence
  Synthetic oligonucleotide
acagagggtagaatcgccatctgtataagc

SEQ ID NO: 150240 - DNA, 30 bp, Artificial Sequence
  Synthetic oligonucleotide
cctatagtttggcagggatggtcgctaagc

SEQ ID NO: 150241 - DNA, 30 bp, Artificial Sequence
  Synthetic oligonucleotide
ctcagagttcacatttgtacgatagtaagc

SEQ ID NO: 150242 - DNA, 30 bp, Artificial Sequence
  Synthetic oligonucleotide
cccgtcaaatgcaataggtgcctagtaagc

SEQ ID NO: 150243 - DNA, 30 bp, Artificial Sequence
  Synthetic oligonucleotide
cactgccctgtgcatttggcgggtgtaagc

SEQ ID NO: 150244 - DNA, 30 bp, Artificial Sequence
  Synthetic oligonucleotide
aacgagcgcgccgaaattgcgtcgttaagc

SEQ ID NO: 150245 - DNA, 30 bp, Artificial Sequence
  Synthetic oligonucleotide
ctcgagtaacgtaagcaaaattgcaacagc

SEQ ID NO: 150246 - DNA, 30 bp, Artificial Sequence
  Synthetic oligonucleotide
ggggaaatgagggcgtaaacggggaacagc

SEQ ID NO: 150247 - DNA, 30 bp, Artificial Sequence
  Synthetic oligonucleotide
actggatagaaaaatgaacaatctaacagc

SEQ ID NO: 150248 - DNA, 30 bp, Artificial Sequence
  Synthetic oligonucleotide
tcatagtattatttgcgagcgacacacagc

SEQ ID NO: 150249 - DNA, 30 bp, Artificial Sequence
  Synthetic oligonucleotide
ctagttacgaaaaaagaacttcgtcacagc

SEQ ID NO: 150250 - DNA, 30 bp, Artificial Sequence
  Synthetic oligonucleotide
gtgacgaaagaggagaggcttggggacagc

SEQ ID NO: 150251 - DNA, 30 bp, Artificial Sequence
  Synthetic oligonucleotide
gaacgtaacggcggccgattggtttacagc

SEQ ID NO: 150252 - DNA, 31 bp, Artificial Sequence
  Synthetic oligonucleotide
agtagacaataaaaggatagcctggaccagc

SEQ ID NO: 150253 - DNA, 30 bp, Artificial Sequence
  Synthetic oligonucleotide
cgtatagcaggatgctctgaacttaccagc

SEQ ID NO: 150254 - DNA, 30 bp, Artificial Sequence
  Synthetic oligonucleotide
tagggtggacattaaagcttggcccccagc

SEQ ID NO: 150255 - DNA, 30 bp, Artificial Sequence
  Synthetic oligonucleotide
gtgagctggtgttgtaagactacggccagc

SEQ ID NO: 150256 - DNA, 30 bp, Artificial Sequence
  Synthetic oligonucleotide
atcagggaacaggaaattaagtgctccagc

SEQ ID NO: 150257 - DNA, 30 bp, Artificial Sequence
  Synthetic oligonucleotide
gagcgagagagggctccccatacgtccagc

SEQ ID NO: 150258 - DNA, 29 bp, Artificial Sequence
  Synthetic oligonucleotide
tgaccggattaagaacctgtgattccagc

SEQ ID NO: 150259 - DNA, 30 bp, Artificial Sequence
  Synthetic oligonucleotide
ctctggaaatatatagcattcaatagcagc

SEQ ID NO: 150260 - DNA, 30 bp, Artificial Sequence
  Synthetic oligonucleotide
aacctcaaagatgaaaaatgaaaacgcagc

SEQ ID NO: 150261 - DNA, 30 bp, Artificial Sequence
  Synthetic oligonucleotide
ggagcaccaccgtagcaacatctacgcagc

SEQ ID NO: 150262 - DNA, 30 bp, Artificial Sequence
  Synthetic oligonucleotide
gatagtaacagaaagcaaaggctgcgcagc

SEQ ID NO: 150263 - DNA, 30 bp, Artificial Sequence
  Synthetic oligonucleotide
ggacccggacggacgcgtaagagaggcagc

SEQ ID NO: 150264 - DNA, 30 bp, Artificial Sequence
  Synthetic oligonucleotide
acggataatttttaggcccggtgaggcagc

SEQ ID NO: 150265 - DNA, 30 bp, Artificial Sequence
  Synthetic oligonucleotide
attcggattttagcctagtcagagggcagc

SEQ ID NO: 150266 - DNA, 30 bp, Artificial Sequence
  Synthetic oligonucleotide
gagagtagaggctttcaagaggagggcagc

SEQ ID NO: 150267 - DNA, 30 bp, Artificial Sequence
  Synthetic oligonucleotide
tgaccatcgtttctaatccagacgggcagc

SEQ ID NO: 150268 - DNA, 30 bp, Artificial Sequence
  Synthetic oligonucleotide
tgaactcagatcaaaaagtataggggcagc

SEQ ID NO: 150269 - DNA, 30 bp, Artificial Sequence
  Synthetic oligonucleotide
ggattcattggacctagctggcggtgcagc

SEQ ID NO: 150270 - DNA, 30 bp, Artificial Sequence
  Synthetic oligonucleotide
acacccatgggaacactgataatgtgcagc

SEQ ID NO: 150271 - DNA, 30 bp, Artificial Sequence
  Synthetic oligonucleotide
taggagtctcggctaacacgcgggatcagc

SEQ ID NO: 150272 - DNA, 30 bp, Artificial Sequence
  Synthetic oligonucleotide
tctcgtgcaaagggagatcattccctcagc

SEQ ID NO: 150273 - DNA, 30 bp, Artificial Sequence
  Synthetic oligonucleotide
acgggttgactttagaagtgtaaagtcagc

SEQ ID NO: 150274 - DNA, 30 bp, Artificial Sequence
  Synthetic oligonucleotide
gtgtatgcgatagtagagactgcagtcagc

SEQ ID NO: 150275 - DNA, 30 bp, Artificial Sequence
  Synthetic oligonucleotide
atcactgtcgcgttgaattgcggcttcagc

SEQ ID NO: 150276 - DNA, 30 bp, Artificial Sequence
  Synthetic oligonucleotide
atttgggtacagtacttaatggcaaagagc

SEQ ID NO: 150277 - DNA, 30 bp, Artificial Sequence
  Synthetic oligonucleotide
agggttctaaagatgactaacgacaagagc

SEQ ID NO: 150278 - DNA, 30 bp, Artificial Sequence
  Synthetic oligonucleotide
acggcaaattgcaatctatcatttaagagc

SEQ ID NO: 150279 - DNA, 30 bp, Artificial Sequence
  Synthetic oligonucleotide
ttacaatactcgtgtgacagtgcacagagc

SEQ ID NO: 150280 - DNA, 30 bp, Artificial Sequence
  Synthetic oligonucleotide
aaagttgaggatttcacgaacatacagagc

SEQ ID NO: 150281 - DNA, 30 bp, Artificial Sequence
  Synthetic oligonucleotide
atgtgagacgatcaaagacccagccagagc

SEQ ID NO: 150282 - DNA, 30 bp, Artificial Sequence
  Synthetic oligonucleotide
aaagcggcaaaacgcggcacgtggcagagc

SEQ ID NO: 150283 - DNA, 30 bp, Artificial Sequence
  Synthetic oligonucleotide
ctagttgacttgaccacagtgttagagagc

SEQ ID NO: 150284 - DNA, 30 bp, Artificial Sequence
  Synthetic oligonucleotide
tccaaactcattcttcaggcgttggagagc

SEQ ID NO: 150285 - DNA, 30 bp, Artificial Sequence
  Synthetic oligonucleotide
gtaggctaaaacgttttaatttatgagagc

SEQ ID NO: 150286 - DNA, 30 bp, Artificial Sequence
  Synthetic oligonucleotide
ctatacatgcatgtagtactaactgagagc

SEQ ID NO: 150287 - DNA, 30 bp, Artificial Sequence
  Synthetic oligonucleotide
actggcaacgcttgcgcggtcgcatagagc

SEQ ID NO: 150288 - DNA, 30 bp, Artificial Sequence
  Synthetic oligonucleotide
attactcatagctcatccctcctatagagc

SEQ ID NO: 150289 - DNA, 30 bp, Artificial Sequence
  Synthetic oligonucleotide
agtatcgggacctggaaaatttactagagc

SEQ ID NO: 150290 - DNA, 30 bp, Artificial Sequence
  Synthetic oligonucleotide
agtcccagtaaagaacagtgcatttagagc

SEQ ID NO: 150291 - DNA, 31 bp, Artificial Sequence
  Synthetic oligonucleotide
ggaatggtctttctaaatcaggcaaacgagc

SEQ ID NO: 150292 - DNA, 30 bp, Artificial Sequence
  Synthetic oligonucleotide
gcacagtaacaaggcgtctaagcaacgagc

SEQ ID NO: 150293 - DNA, 30 bp, Artificial Sequence
  Synthetic oligonucleotide
tgttccgtgtaactccttcaatccacgagc

SEQ ID NO: 150294 - DNA, 30 bp, Artificial Sequence
  Synthetic oligonucleotide
ataaaagcgggatgtcccttaaatacgagc

SEQ ID NO: 150295 - DNA, 30 bp, Artificial Sequence
  Synthetic oligonucleotide
ggaggatggcggaattcattcattacgagc

SEQ ID NO: 150296 - DNA, 30 bp, Artificial Sequence
  Synthetic oligonucleotide
agcgaggctggtaaattaagaagaccgagc

SEQ ID NO: 150297 - DNA, 30 bp, Artificial Sequence
  Synthetic oligonucleotide
gcaagtgcgcaacactatggcagagcgagc

SEQ ID NO: 150298 - DNA, 30 bp, Artificial Sequence
  Synthetic oligonucleotide
gatcaaccaagcacatattatggagcgagc

SEQ ID NO: 150299 - DNA, 30 bp, Artificial Sequence
  Synthetic oligonucleotide
gttgggcctgacttaggttcaaccgcgagc

SEQ ID NO: 150300 - DNA, 30 bp, Artificial Sequence
  Synthetic oligonucleotide
ggagatggtgctaggatgtgaatcgcgagc

SEQ ID NO: 150301 - DNA, 30 bp, Artificial Sequence
  Synthetic oligonucleotide
gatgatttctgttgccgtcaggaggcgagc

SEQ ID NO: 150302 - DNA, 30 bp, Artificial Sequence
  Synthetic oligonucleotide
taatggctcaaatacggacaaggggcgagc

SEQ ID NO: 150303 - DNA, 30 bp, Artificial Sequence
  Synthetic oligonucleotide
tcggtcctacgggatgagcttggggcgagc

SEQ ID NO: 150304 - DNA, 30 bp, Artificial Sequence
  Synthetic oligonucleotide
agagcctaatgggactgtgtattatcgagc

SEQ ID NO: 150305 - DNA, 30 bp, Artificial Sequence
  Synthetic oligonucleotide
gacgcctctaggttacacgaatcctcgagc

SEQ ID NO: 150306 - DNA, 30 bp, Artificial Sequence
  Synthetic oligonucleotide
atcgctagcctttcactccccatctcgagc

SEQ ID NO: 150307 - DNA, 30 bp, Artificial Sequence
  Synthetic oligonucleotide
aagggtgatgttgcgtcgttgatgtcgagc

SEQ ID NO: 150308 - DNA, 30 bp, Artificial Sequence
  Synthetic oligonucleotide
ggcagactctgtacgggggtcacaaggagc

SEQ ID NO: 150309 - DNA, 30 bp, Artificial Sequence
  Synthetic oligonucleotide
gtgaactcggaaacgtgacacaacaggagc

SEQ ID NO: 150310 - DNA, 30 bp, Artificial Sequence
  Synthetic oligonucleotide
ttaagtgtgacgagtattaacaccaggagc

SEQ ID NO: 150311 - DNA, 30 bp, Artificial Sequence
  Synthetic oligonucleotide
aaggtctatatagtatacctatagaggagc

SEQ ID NO: 150312 - DNA, 30 bp, Artificial Sequence
  Synthetic oligonucleotide
tcacacttatcaagcatggatgcgaggagc

SEQ ID NO: 150313 - DNA, 30 bp, Artificial Sequence
  Synthetic oligonucleotide
gtgcaatatccgagctaatgtacgcggagc

SEQ ID NO: 150314 - DNA, 30 bp, Artificial Sequence
  Synthetic oligonucleotide
actaatagtaggtattcttggatgcggagc

SEQ ID NO: 150315 - DNA, 30 bp, Artificial Sequence
  Synthetic oligonucleotide
taaatggcaatgtattatcacactcggagc

SEQ ID NO: 150316 - DNA, 30 bp, Artificial Sequence
  Synthetic oligonucleotide
ctcctcaatttaaattgacagaaagggagc

SEQ ID NO: 150317 - DNA, 30 bp, Artificial Sequence
  Synthetic oligonucleotide
gggcacaagaactcgaattaagtagggagc

SEQ ID NO: 150318 - DNA, 30 bp, Artificial Sequence
  Synthetic oligonucleotide
tcgctgtatctatttgcgtagagcgggagc

SEQ ID NO: 150319 - DNA, 30 bp, Artificial Sequence
  Synthetic oligonucleotide
caatttatgaaattaaagattgcggggagc

SEQ ID NO: 150320 - DNA, 30 bp, Artificial Sequence
  Synthetic oligonucleotide
atggtaagacgatcttcaattttggggagc

SEQ ID NO: 150321 - DNA, 30 bp, Artificial Sequence
  Synthetic oligonucleotide
aatgagcttatgagtcaagcaacctggagc

SEQ ID NO: 150322 - DNA, 30 bp, Artificial Sequence
  Synthetic oligonucleotide
cttcagcatgtcaagtcaaatagctggagc

SEQ ID NO: 150323 - DNA, 30 bp, Artificial Sequence
  Synthetic oligonucleotide
aaggttcaactgtttcgaaaagagtggagc

SEQ ID NO: 150324 - DNA, 30 bp, Artificial Sequence
  Synthetic oligonucleotide
tgccattggtcgccatgagaaaggtggagc

SEQ ID NO: 150325 - DNA, 30 bp, Artificial Sequence
  Synthetic oligonucleotide
gggatcattgcaacattgaaacattggagc

SEQ ID NO: 150326 - DNA, 30 bp, Artificial Sequence
  Synthetic oligonucleotide
attatgcgcaatgttcaaactggttggagc

SEQ ID NO: 150327 - DNA, 30 bp, Artificial Sequence
  Synthetic oligonucleotide
aaatgcgccagtgtcaatcgtgctatgagc

SEQ ID NO: 150328 - DNA, 30 bp, Artificial Sequence
  Synthetic oligonucleotide
accgtgcgtcgacaacagctatagctgagc

SEQ ID NO: 150329 - DNA, 30 bp, Artificial Sequence
  Synthetic oligonucleotide
gacctgctcagcatgactaaatgtgtgagc

SEQ ID NO: 150330 - DNA, 30 bp, Artificial Sequence
  Synthetic oligonucleotide
tacgactctgtggagtttctacggttgagc

SEQ ID NO: 150331 - DNA, 30 bp, Artificial Sequence
  Synthetic oligonucleotide
agatagatagtggttctagcccctttgagc

SEQ ID NO: 150332 - DNA, 30 bp, Artificial Sequence
  Synthetic oligonucleotide
cgcggtacctgggcttgggtacacaatagc

SEQ ID NO: 150333 - DNA, 30 bp, Artificial Sequence
  Synthetic oligonucleotide
aaggaggtttaaccatgtcgcattcatagc

SEQ ID NO: 150334 - DNA, 30 bp, Artificial Sequence
  Synthetic oligonucleotide
cgcgacgaaacattcaagaggcaggatagc

SEQ ID NO: 150335 - DNA, 30 bp, Artificial Sequence
  Synthetic oligonucleotide
actggagcgggaccatccgccagtgatagc

SEQ ID NO: 150336 - DNA, 30 bp, Artificial Sequence
  Synthetic oligonucleotide
gcgagaataacgagtagaagaacatatagc

SEQ ID NO: 150337 - DNA, 31 bp, Artificial Sequence
  Synthetic oligonucleotide
gtagcgctcgaacataatgttgtcgtatagc

SEQ ID NO: 150338 - DNA, 30 bp, Artificial Sequence
  Synthetic oligonucleotide
accgaataagacagagactattggtatagc

SEQ ID NO: 150339 - DNA, 30 bp, Artificial Sequence
  Synthetic oligonucleotide
cttggtgtggtgagagtagagcaaactagc

SEQ ID NO: 150340 - DNA, 30 bp, Artificial Sequence
  Synthetic oligonucleotide
actggctcactcaatgtttaagcaactagc

SEQ ID NO: 150341 - DNA, 30 bp, Artificial Sequence
  Synthetic oligonucleotide
gatgacccatcgcgccagaaaacgactagc

SEQ ID NO: 150342 - DNA, 30 bp, Artificial Sequence
  Synthetic oligonucleotide
agcgatgtgcggctgtaagcaaatactagc

SEQ ID NO: 150343 - DNA, 30 bp, Artificial Sequence
  Synthetic oligonucleotide
ttgtgccgatcaaggcaaccgtgacctagc

SEQ ID NO: 150344 - DNA, 30 bp, Artificial Sequence
  Synthetic oligonucleotide
ccggatagacaatggcgtccttgctctagc

SEQ ID NO: 150345 - DNA, 30 bp, Artificial Sequence
  Synthetic oligonucleotide
tcgttacggaattccgtgcgggtctctagc

SEQ ID NO: 150346 - DNA, 30 bp, Artificial Sequence
  Synthetic oligonucleotide
tctcggtattagtcacatagttaaagtagc

SEQ ID NO: 150347 - DNA, 30 bp, Artificial Sequence
  Synthetic oligonucleotide
agtccaagagttactggtgtcgacagtagc

SEQ ID NO: 150348 - DNA, 30 bp, Artificial Sequence
  Synthetic oligonucleotide
gtctcatccgagaacctatatatcagtagc

SEQ ID NO: 150349 - DNA, 30 bp, Artificial Sequence
  Synthetic oligonucleotide
ctgtggagccattgcttggaacatagtagc

SEQ ID NO: 150350 - DNA, 30 bp, Artificial Sequence
  Synthetic oligonucleotide
tcgcgtcatgagcgattcagggctagtagc

SEQ ID NO: 150351 - DNA, 30 bp, Artificial Sequence
  Synthetic oligonucleotide
ggacttagccagtattccgtaatcggtagc

SEQ ID NO: 150352 - DNA, 30 bp, Artificial Sequence
  Synthetic oligonucleotide
tagggctgggggtttgcaagaaggggtagc

SEQ ID NO: 150353 - DNA, 30 bp, Artificial Sequence
  Synthetic oligonucleotide
taggatcgtggtggtgcggagaggggtagc

SEQ ID NO: 150354 - DNA, 30 bp, Artificial Sequence
  Synthetic oligonucleotide
cggcggtttgagcattcaaagcggggtagc

SEQ ID NO: 150355 - DNA, 30 bp, Artificial Sequence
  Synthetic oligonucleotide
tagcgctagtctagtgattacttctgtagc

SEQ ID NO: 150356 - DNA, 30 bp, Artificial Sequence
  Synthetic oligonucleotide
ctgtccagcgcctccaaggctgggtgtagc

SEQ ID NO: 150357 - DNA, 30 bp, Artificial Sequence
  Synthetic oligonucleotide
agctatgagataacacgaagatattgtagc

SEQ ID NO: 150358 - DNA, 30 bp, Artificial Sequence
  Synthetic oligonucleotide
aacggaccaaggccggggtggacttgtagc

SEQ ID NO: 150359 - DNA, 30 bp, Artificial Sequence
  Synthetic oligonucleotide
acggacaagcgtctcacccacgcttgtagc

SEQ ID NO: 150360 - DNA, 30 bp, Artificial Sequence
  Synthetic oligonucleotide
cgaagttacctagtggtaaggtcaattagc

SEQ ID NO: 150361 - DNA, 30 bp, Artificial Sequence
  Synthetic oligonucleotide
ctaactgtagggagcccagtctccattagc

SEQ ID NO: 150362 - DNA, 30 bp, Artificial Sequence
  Synthetic oligonucleotide
gtcaaccacgagtcaaggcgatctgttagc

SEQ ID NO: 150363 - DNA, 30 bp, Artificial Sequence
  Synthetic oligonucleotide
cgacggcgcttctagtaataaaaatttagc

SEQ ID NO: 150364 - DNA, 30 bp, Artificial Sequence
  Synthetic oligonucleotide
catttgccaagcatcagtaagggatttagc

SEQ ID NO: 150365 - DNA, 30 bp, Artificial Sequence
  Synthetic oligonucleotide
cgaacagttagctgcgaaaggacgtttagc

SEQ ID NO: 150366 - DNA, 30 bp, Artificial Sequence
  Synthetic oligonucleotide
cgcgaaagttctagcaatgctagaaaacgc

SEQ ID NO: 150367 - DNA, 30 bp, Artificial Sequence
  Synthetic oligonucleotide
ggcgggacccacaccgctgaccgaaaacgc

SEQ ID NO: 150368 - DNA, 30 bp, Artificial Sequence
  Synthetic oligonucleotide
tatgtcacattggtgaacgaaaagaaacgc

SEQ ID NO: 150369 - DNA, 30 bp, Artificial Sequence
  Synthetic oligonucleotide
atccggaaagctcaggagattgcgaaacgc

SEQ ID NO: 150370 - DNA, 30 bp, Artificial Sequence
  Synthetic oligonucleotide
gtagaagacgaatcgtgtgtccgtaaacgc

SEQ ID NO: 150371 - DNA, 30 bp, Artificial Sequence
  Synthetic oligonucleotide
gtggagcgaactagggtacggcgcgaacgc

SEQ ID NO: 150372 - DNA, 30 bp, Artificial Sequence
  Synthetic oligonucleotide
tggggtacccaacgaaacggttatacacgc

SEQ ID NO: 150373 - DNA, 30 bp, Artificial Sequence
  Synthetic oligonucleotide
ttacaaacgataggattggctcgcccacgc

SEQ ID NO: 150374 - DNA, 30 bp, Artificial Sequence
  Synthetic oligonucleotide
cgcattggggccttaaagcgcgtcccacgc

SEQ ID NO: 150375 - DNA, 30 bp, Artificial Sequence
  Synthetic oligonucleotide
gtagagttcagtcgagtaaagggtccacgc

SEQ ID NO: 150376 - DNA, 30 bp, Artificial Sequence
  Synthetic oligonucleotide
atctaggtatgggtccgaaacaatgcacgc

SEQ ID NO: 150377 - DNA, 30 bp, Artificial Sequence
  Synthetic oligonucleotide
acgggtagtgttatgggtcaagttgcacgc

SEQ ID NO: 150378 - DNA, 30 bp, Artificial Sequence
  Synthetic oligonucleotide
taccggctcacgaaggcttgtaactcacgc

SEQ ID NO: 150379 - DNA, 30 bp, Artificial Sequence
  Synthetic oligonucleotide
atactaaagtacgtcctatatcgttcacgc

SEQ ID NO: 150380 - DNA, 30 bp, Artificial Sequence
  Synthetic oligonucleotide
actcaaagaggatcgggggcgcgccgacgc

SEQ ID NO: 150381 - DNA, 30 bp, Artificial Sequence
  Synthetic oligonucleotide
agccaaaaaaagatgcgcggaaaaggacgc

SEQ ID NO: 150382 - DNA, 30 bp, Artificial Sequence
  Synthetic oligonucleotide
agcagaactgatcaaaggaaggccatacgc

SEQ ID NO: 150383 - DNA, 30 bp, Artificial Sequence
  Synthetic oligonucleotide
gggcgatatgaccaaagaccggccatacgc

SEQ ID NO: 150384 - DNA, 30 bp, Artificial Sequence
  Synthetic oligonucleotide
cgctaggcttgtgcactaactattatacgc

SEQ ID NO: 150385 - DNA, 30 bp, Artificial Sequence
  Synthetic oligonucleotide
agaatttctgggctggataagggtctacgc

SEQ ID NO: 150386 - DNA, 30 bp, Artificial Sequence
  Synthetic oligonucleotide
tagggccctgtgtcgagtgaagaagtacgc

SEQ ID NO: 150387 - DNA, 30 bp, Artificial Sequence
  Synthetic oligonucleotide
attggtagcattttatcgcgctgagtacgc

SEQ ID NO: 150388 - DNA, 30 bp, Artificial Sequence
  Synthetic oligonucleotide
ctcggacatcaccggtaaatctctgtacgc

SEQ ID NO: 150389 - DNA, 30 bp, Artificial Sequence
  Synthetic oligonucleotide
tatcaacgctcggaccacgaacgtgtacgc

SEQ ID NO: 150390 - DNA, 30 bp, Artificial Sequence
  Synthetic oligonucleotide
gagatcagtaggtacgttgaagttgtacgc

SEQ ID NO: 150391 - DNA, 30 bp, Artificial Sequence
  Synthetic oligonucleotide
tactgcacgtaaggatggaggatgttacgc

SEQ ID NO: 150392 - DNA, 30 bp, Artificial Sequence
  Synthetic oligonucleotide
caatggggaatgtcggcccggccaaaccgc

SEQ ID NO: 150393 - DNA, 30 bp, Artificial Sequence
  Synthetic oligonucleotide
tggttgacaaatgctaacctaatcaaccgc

SEQ ID NO: 150394 - DNA, 30 bp, Artificial Sequence
  Synthetic oligonucleotide
gcacacgcggactgataaagactcaaccgc

SEQ ID NO: 150395 - DNA, 30 bp, Artificial Sequence
  Synthetic oligonucleotide
agactgcaaaatattattacaatacaccgc

SEQ ID NO: 150396 - DNA, 30 bp, Artificial Sequence
  Synthetic oligonucleotide
gcagtaggagggaaacaactgacccaccgc

SEQ ID NO: 150397 - DNA, 30 bp, Artificial Sequence
  Synthetic oligonucleotide
catcgtaggtcgccttccgcctggcaccgc

SEQ ID NO: 150398 - DNA, 30 bp, Artificial Sequence
  Synthetic oligonucleotide
gcgcacttatagttggatcgatcagaccgc

SEQ ID NO: 150399 - DNA, 30 bp, Artificial Sequence
  Synthetic oligonucleotide
tgcagtccattgagggcaatggggtaccgc

SEQ ID NO: 150400 - DNA, 30 bp, Artificial Sequence
  Synthetic oligonucleotide
ggacgcgaagggattcgttaattttaccgc

SEQ ID NO: 150401 - DNA, 30 bp, Artificial Sequence
  Synthetic oligonucleotide
agacaaatacaggcgtagttaagcacccgc

SEQ ID NO: 150402 - DNA, 30 bp, Artificial Sequence
  Synthetic oligonucleotide
gaggtctcctcgggacaaacctgcacccgc

SEQ ID NO: 150403 - DNA, 30 bp, Artificial Sequence
  Synthetic oligonucleotide
ctctgacaatgcgatggagggaagacccgc

SEQ ID NO: 150404 - DNA, 30 bp, Artificial Sequence
  Synthetic oligonucleotide
agtaatacacgcggaatcactgatccccgc

SEQ ID NO: 150405 - DNA, 30 bp, Artificial Sequence
  Synthetic oligonucleotide
gctaaaggggtcacttatagatgcgcccgc

SEQ ID NO: 150406 - DNA, 30 bp, Artificial Sequence
  Synthetic oligonucleotide
tccttcaaggcgtttgaggaccgtgcccgc

SEQ ID NO: 150407 - DNA, 30 bp, Artificial Sequence
  Synthetic oligonucleotide
cgagtgggttcgactctaactcttgcccgc

SEQ ID NO: 150408 - DNA, 30 bp, Artificial Sequence
  Synthetic oligonucleotide
acattgtgcaggccgaaaaatagttcccgc

SEQ ID NO: 150409 - DNA, 30 bp, Artificial Sequence
  Synthetic oligonucleotide
cgcactggtacggtcaaatcccaaagccgc

SEQ ID NO: 150410 - DNA, 30 bp, Artificial Sequence
  Synthetic oligonucleotide
actcaacctaggggggttacgctaagccgc

SEQ ID NO: 150411 - DNA, 30 bp, Artificial Sequence
  Synthetic oligonucleotide
ggcccaagtgactgatcaaaaggtagccgc

SEQ ID NO: 150412 - DNA, 30 bp, Artificial Sequence
  Synthetic oligonucleotide
aggctggatgcaaagaaatttgtccgccgc

SEQ ID NO: 150413 - DNA, 30 bp, Artificial Sequence
  Synthetic oligonucleotide
acgtgataaaccgcgcacctggaaggccgc

SEQ ID NO: 150414 - DNA, 30 bp, Artificial Sequence
  Synthetic oligonucleotide
tctgtcagggtaaccctcggtgactgccgc

SEQ ID NO: 150415 - DNA, 30 bp, Artificial Sequence
  Synthetic oligonucleotide
ggattcgtgagaacaatggcgacctgccgc

SEQ ID NO: 150416 - DNA, 30 bp, Artificial Sequence
  Synthetic oligonucleotide
aacgtctagaccgagcgtactttcatccgc

SEQ ID NO: 150417 - DNA, 30 bp, Artificial Sequence
  Synthetic oligonucleotide
acgtaattccagctcgcaaggccagtccgc

SEQ ID NO: 150418 - DNA, 30 bp, Artificial Sequence
  Synthetic oligonucleotide
cacaatgatcctagcgcgtggtcagtccgc

SEQ ID NO: 150419 - DNA, 30 bp, Artificial Sequence
  Synthetic oligonucleotide
gcaaaaatccagacaatctgatgagtccgc

SEQ ID NO: 150420 - DNA, 30 bp, Artificial Sequence
  Synthetic oligonucleotide
tgcttagagccgagttggatgttagtccgc

SEQ ID NO: 150421 - DNA, 30 bp, Artificial Sequence
  Synthetic oligonucleotide
ctttcctaaaaattggccgaatcgttccgc

SEQ ID NO: 150422 - DNA, 30 bp, Artificial Sequence
  Synthetic oligonucleotide
gcgccaaagggagcaacgaccctgttccgc

SEQ ID NO: 150423 - DNA, 30 bp, Artificial Sequence
  Synthetic oligonucleotide
tacgtagggtggtataaaacggttttccgc

SEQ ID NO: 150424 - DNA, 30 bp, Artificial Sequence
  Synthetic oligonucleotide
aaaggttcacctagccctagaaacaagcgc

SEQ ID NO: 150425 - DNA, 30 bp, Artificial Sequence
  Synthetic oligonucleotide
aagctcaaggagaaacggggccaacagcgc

SEQ ID NO: 150426 - DNA, 30 bp, Artificial Sequence
  Synthetic oligonucleotide
gttaacactgtaatataggcagaacagcgc

SEQ ID NO: 150427 - DNA, 30 bp, Artificial Sequence
  Synthetic oligonucleotide
atccgggaactggccccagtactgcagcgc

SEQ ID NO: 150428 - DNA, 30 bp, Artificial Sequence
  Synthetic oligonucleotide
ctctccgacacaaactcgtgggctcagcgc

SEQ ID NO: 150429 - DNA, 30 bp, Artificial Sequence
  Synthetic oligonucleotide
acttgtataaacgtgttaaagagggagcgc

SEQ ID NO: 150430 - DNA, 30 bp, Artificial Sequence
  Synthetic oligonucleotide
tacacaatgagtattctacattgggagcgc

SEQ ID NO: 150431 - DNA, 30 bp, Artificial Sequence
  Synthetic oligonucleotide
gcgagtaacagtaacgggcgctgtgagcgc

SEQ ID NO: 150432 - DNA, 30 bp, Artificial Sequence
  Synthetic oligonucleotide
ttcaggtggggaaatttaaggaaatagcgc

SEQ ID NO: 150433 - DNA, 30 bp, Artificial Sequence
  Synthetic oligonucleotide
ttgggagaaaaggataataccacatagcgc

SEQ ID NO: 150434 - DNA, 30 bp, Artificial Sequence
  Synthetic oligonucleotide
gagcagtgaagatggacggcggcctagcgc

SEQ ID NO: 150435 - DNA, 30 bp, Artificial Sequence
  Synthetic oligonucleotide
gcatagggttaatcacgatatgagtagcgc

SEQ ID NO: 150436 - DNA, 30 bp, Artificial Sequence
  Synthetic oligonucleotide
cgacgtagtgttatgcgagtcctgtagcgc

SEQ ID NO: 150437 - DNA, 30 bp, Artificial Sequence
  Synthetic oligonucleotide
tagcgcattaagttaacttgaaaaccgcgc

SEQ ID NO: 150438 - DNA, 30 bp, Artificial Sequence
  Synthetic oligonucleotide
aggattaaactgctgaaaagtctcgcgcgc

SEQ ID NO: 150439 - DNA, 30 bp, Artificial Sequence
  Synthetic oligonucleotide
cctaacgccaagcattggggtacggcgcgc

SEQ ID NO: 150440 - DNA, 30 bp, Artificial Sequence
  Synthetic oligonucleotide
tcaatagtggcgacccttcaccaatcgcgc

SEQ ID NO: 150441 - DNA, 30 bp, Artificial Sequence
  Synthetic oligonucleotide
tctgcgaataccatggcgccaggaaggcgc

SEQ ID NO: 150442 - DNA, 30 bp, Artificial Sequence
  Synthetic oligonucleotide
ataatactgtgccgtatagctacgaggcgc

SEQ ID NO: 150443 - DNA, 30 bp, Artificial Sequence
  Synthetic oligonucleotide
tcagagcgcaagttacttccaatgaggcgc

SEQ ID NO: 150444 - DNA, 30 bp, Artificial Sequence
  Synthetic oligonucleotide
ggtatgaaagtagactggagctatcggcgc

SEQ ID NO: 150445 - DNA, 30 bp, Artificial Sequence
  Synthetic oligonucleotide
cgattcatttgtagcgtgcagctagggcgc

SEQ ID NO: 150446 - DNA, 30 bp, Artificial Sequence
  Synthetic oligonucleotide
acgcatgctaatttggagctcgtaatgcgc

SEQ ID NO: 150447 - DNA, 30 bp, Artificial Sequence
  Synthetic oligonucleotide
tatccaattgactacaaaaagttaatgcgc

SEQ ID NO: 150448 - DNA, 29 bp, Artificial Sequence
  Synthetic oligonucleotide
tgctaatatgagaggatcaaatgatgcgc

SEQ ID NO: 150449 - DNA, 30 bp, Artificial Sequence
  Synthetic oligonucleotide
gatgtacgtacacggactccgcttatgcgc

SEQ ID NO: 150450 - DNA, 30 bp, Artificial Sequence
  Synthetic oligonucleotide
aggttgggatcacgagctggggttctgcgc

SEQ ID NO: 150451 - DNA, 30 bp, Artificial Sequence
  Synthetic oligonucleotide
taacaattgtgagatcgaggctcagtgcgc

SEQ ID NO: 150452 - DNA, 30 bp, Artificial Sequence
  Synthetic oligonucleotide
ctgtaagtttggggacttgggtgcgtgcgc

SEQ ID NO: 150453 - DNA, 30 bp, Artificial Sequence
  Synthetic oligonucleotide
tagggccgatcggcgcgatacatcgtgcgc

SEQ ID NO: 150454 - DNA, 30 bp, Artificial Sequence
  Synthetic oligonucleotide
caccgggtcatgcctttttcgaaggtgcgc

SEQ ID NO: 150455 - DNA, 30 bp, Artificial Sequence
  Synthetic oligonucleotide
gtggtataaataagtagtaacctggtgcgc

SEQ ID NO: 150456 - DNA, 30 bp, Artificial Sequence
  Synthetic oligonucleotide
cacgtaaaggttggttcgctggccttgcgc

SEQ ID NO: 150457 - DNA, 30 bp, Artificial Sequence
  Synthetic oligonucleotide
ccggaatcatcccgcgacctcacgttgcgc

SEQ ID NO: 150458 - DNA, 30 bp, Artificial Sequence
  Synthetic oligonucleotide
cggcaagctaatctaggcttaccgttgcgc

SEQ ID NO: 150459 - DNA, 30 bp, Artificial Sequence
  Synthetic oligonucleotide
agacttgtgtggatagtcaataaaaatcgc

SEQ ID NO: 150460 - DNA, 30 bp, Artificial Sequence
  Synthetic oligonucleotide
aggagctaatgattccattacccaaatcgc

SEQ ID NO: 150461 - DNA, 30 bp, Artificial Sequence
  Synthetic oligonucleotide
tatattacggcgtgagtctatatacatcgc

SEQ ID NO: 150462 - DNA, 30 bp, Artificial Sequence
  Synthetic oligonucleotide
acgtggactaatctgagtctttatcatcgc

SEQ ID NO: 150463 - DNA, 30 bp, Artificial Sequence
  Synthetic oligonucleotide
cacgtgagggatcttgttatgcaagatcgc

SEQ ID NO: 150464 - DNA, 30 bp, Artificial Sequence
  Synthetic oligonucleotide
tcgttgacaaaaccattacatcagtatcgc

SEQ ID NO: 150465 - DNA, 30 bp, Artificial Sequence
  Synthetic oligonucleotide
tggacgatctggtatggttacatgtatcgc

SEQ ID NO: 150466 - DNA, 30 bp, Artificial Sequence
  Synthetic oligonucleotide
ttgggtttgggcgatccattctaaactcgc

SEQ ID NO: 150467 - DNA, 30 bp, Artificial Sequence
  Synthetic oligonucleotide
attgcgctggcagatcacgtcgtaactcgc

SEQ ID NO: 150468 - DNA, 30 bp, Artificial Sequence
  Synthetic oligonucleotide
gtgggtggttctggtccaggctttactcgc

SEQ ID NO: 150469 - DNA, 30 bp, Artificial Sequence
  Synthetic oligonucleotide
gtatggatctttacgggccagacacctcgc

SEQ ID NO: 150470 - DNA, 30 bp, Artificial Sequence
  Synthetic oligonucleotide
gtcagggaaatagaaggggctatccctcgc

SEQ ID NO: 150471 - DNA, 30 bp, Artificial Sequence
  Synthetic oligonucleotide
ccgcgcaatcatttggcacgtcggtctcgc

SEQ ID NO: 150472 - DNA, 30 bp, Artificial Sequence
  Synthetic oligonucleotide
agtcttacagggtgggaatatcaaagtcgc

SEQ ID NO: 150473 - DNA, 30 bp, Artificial Sequence
  Synthetic oligonucleotide
tcttacaaaacgtcacacggtggaagtcgc

SEQ ID NO: 150474 - DNA, 30 bp, Artificial Sequence
  Synthetic oligonucleotide
caatacaataaagacgtgcaatagagtcgc

SEQ ID NO: 150475 - DNA, 30 bp, Artificial Sequence
  Synthetic oligonucleotide
actcggattgacatccgtgtcctgagtcgc

SEQ ID NO: 150476 - DNA, 30 bp, Artificial Sequence
  Synthetic oligonucleotide
aggccaggactaggttcaaggctgagtcgc

SEQ ID NO: 150477 - DNA, 30 bp, Artificial Sequence
  Synthetic oligonucleotide
aaggggcggtacgggaaacggttacgtcgc

SEQ ID NO: 150478 - DNA, 30 bp, Artificial Sequence
  Synthetic oligonucleotide
agaatttagctcacaggcccaaccggtcgc

SEQ ID NO: 150479 - DNA, 30 bp, Artificial Sequence
  Synthetic oligonucleotide
gttcatttgaaatatataggaatcggtcgc

SEQ ID NO: 150480 - DNA, 30 bp, Artificial Sequence
  Synthetic oligonucleotide
cgtgaagctcacgactttttatagggtcgc

SEQ ID NO: 150481 - DNA, 30 bp, Artificial Sequence
  Synthetic oligonucleotide
ctagctcattgggtggattgtcatggtcgc

SEQ ID NO: 150482 - DNA, 30 bp, Artificial Sequence
  Synthetic oligonucleotide
aaattgcattaaacatccacaggctgtcgc

SEQ ID NO: 150483 - DNA, 30 bp, Artificial Sequence
  Synthetic oligonucleotide
acacggtcttagagaaccccgccgtgtcgc

SEQ ID NO: 150484 - DNA, 30 bp, Artificial Sequence
  Synthetic oligonucleotide
cacagagaggcttagccttgtatgtgtcgc

SEQ ID NO: 150485 - DNA, 30 bp, Artificial Sequence
  Synthetic oligonucleotide
acgtgacactgttacaggataaaaattcgc

SEQ ID NO: 150486 - DNA, 30 bp, Artificial Sequence
  Synthetic oligonucleotide
cggcaactgcacgtgacaactgaaattcgc

SEQ ID NO: 150487 - DNA, 30 bp, Artificial Sequence
  Synthetic oligonucleotide
attatcccgggcgaataaacgaccattcgc

SEQ ID NO: 150488 - DNA, 30 bp, Artificial Sequence
  Synthetic oligonucleotide
cctgcatttaacaaagtgcaagccattcgc

SEQ ID NO: 150489 - DNA, 30 bp, Artificial Sequence
  Synthetic oligonucleotide
ctggtgtgcgactcgtccaatgccattcgc

SEQ ID NO: 150490 - DNA, 30 bp, Artificial Sequence
  Synthetic oligonucleotide
acgcaacgggtaagggagagccgtattcgc

SEQ ID NO: 150491 - DNA, 30 bp, Artificial Sequence
  Synthetic oligonucleotide
caagtaggcattgtagctactgttattcgc

SEQ ID NO: 150492 - DNA, 30 bp, Artificial Sequence
  Synthetic oligonucleotide
gggactgggcagtacctgtcgtcacttcgc

SEQ ID NO: 150493 - DNA, 30 bp, Artificial Sequence
  Synthetic oligonucleotide
cttccagatcatctgtcaaaaccccttcgc

SEQ ID NO: 150494 - DNA, 30 bp, Artificial Sequence
  Synthetic oligonucleotide
ttaagggaagctgtatcgacttgagttcgc

SEQ ID NO: 150495 - DNA, 30 bp, Artificial Sequence
  Synthetic oligonucleotide
tggaggttccgaagccttacattatttcgc

SEQ ID NO: 150496 - DNA, 30 bp, Artificial Sequence
  Synthetic oligonucleotide
ccaacttgggacgggtaaacgggaaaaggc

SEQ ID NO: 150497 - DNA, 30 bp, Artificial Sequence
  Synthetic oligonucleotide
acagggaaggtacgcgttatagcgaaaggc

SEQ ID NO: 150498 - DNA, 30 bp, Artificial Sequence
  Synthetic oligonucleotide
gcgacaatacggtgcaactccgtgaaaggc

SEQ ID NO: 150499 - DNA, 30 bp, Artificial Sequence
  Synthetic oligonucleotide
aaccaccctggcaggttctgggcacaaggc

SEQ ID NO: 150500 - DNA, 30 bp, Artificial Sequence
  Synthetic oligonucleotide
cgcgtgaaacactatatacatatagaaggc

SEQ ID NO: 150501 - DNA, 30 bp, Artificial Sequence
  Synthetic oligonucleotide
ccggctcaaccgttaggcgtagaggaaggc

SEQ ID NO: 150502 - DNA, 30 bp, Artificial Sequence
  Synthetic oligonucleotide
aggtgtacaaaccatggaacctgggaaggc

SEQ ID NO: 150503 - DNA, 30 bp, Artificial Sequence
  Synthetic oligonucleotide
tgcctttagcggtgaaggactagcacaggc

SEQ ID NO: 150504 - DNA, 30 bp, Artificial Sequence
  Synthetic oligonucleotide
tttcaccagaaaatgcaggctgttacaggc

SEQ ID NO: 150505 - DNA, 30 bp, Artificial Sequence
  Synthetic oligonucleotide
ccgtatgggaatctgtggtgtcccccaggc

SEQ ID NO: 150506 - DNA, 30 bp, Artificial Sequence
  Synthetic oligonucleotide
gatatcgttgtgaccgcctgccggccaggc

SEQ ID NO: 150507 - DNA, 30 bp, Artificial Sequence
  Synthetic oligonucleotide
aaggcaacggtgatggaaggccttccaggc

SEQ ID NO: 150508 - DNA, 30 bp, Artificial Sequence
  Synthetic oligonucleotide
cgtcactaccggttacatgcacctgcaggc

SEQ ID NO: 150509 - DNA, 30 bp, Artificial Sequence
  Synthetic oligonucleotide
ccccaatatagcttgcccgaccgtgcaggc

SEQ ID NO: 150510 - DNA, 30 bp, Artificial Sequence
  Synthetic oligonucleotide
gcttacataagaaacgtactgccatcaggc

SEQ ID NO: 150511 - DNA, 30 bp, Artificial Sequence
  Synthetic oligonucleotide
gggcatgtagacaaactgaccagctcaggc

SEQ ID NO: 150512 - DNA, 30 bp, Artificial Sequence
  Synthetic oligonucleotide
cagtcgccgacacgctacggtgtctcaggc

SEQ ID NO: 150513 - DNA, 30 bp, Artificial Sequence
  Synthetic oligonucleotide
atcgttcgtcattcgatacgaaagtcaggc

SEQ ID NO: 150514 - DNA, 30 bp, Artificial Sequence
  Synthetic oligonucleotide
tatgtgcagtggacatctaagtgttcaggc

SEQ ID NO: 150515 - DNA, 30 bp, Artificial Sequence
  Synthetic oligonucleotide
tgatgtcgaggtaactgcaggcgaagaggc

SEQ ID NO: 150516 - DNA, 30 bp, Artificial Sequence
  Synthetic oligonucleotide
acagttcccattagcacagactctagaggc

SEQ ID NO: 150517 - DNA, 30 bp, Artificial Sequence
  Synthetic oligonucleotide
caatgccataaacggcggtcctggcgaggc

SEQ ID NO: 150518 - DNA, 30 bp, Artificial Sequence
  Synthetic oligonucleotide
agcatgagggcgactgaatttgatcgaggc

SEQ ID NO: 150519 - DNA, 30 bp, Artificial Sequence
  Synthetic oligonucleotide
gtaggtatttaataggcctacccaggaggc

SEQ ID NO: 150520 - DNA, 30 bp, Artificial Sequence
  Synthetic oligonucleotide
cgggtccctatgagccaggtacgcggaggc

SEQ ID NO: 150521 - DNA, 30 bp, Artificial Sequence
  Synthetic oligonucleotide
cgtccaggtcagaatagtcgtgtcggaggc

SEQ ID NO: 150522 - DNA, 30 bp, Artificial Sequence
  Synthetic oligonucleotide
gggatagaagcccaggtacgcctgggaggc

SEQ ID NO: 150523 - DNA, 30 bp, Artificial Sequence
  Synthetic oligonucleotide
aaggtccagctgtttgatcaggtgggaggc

SEQ ID NO: 150524 - DNA, 30 bp, Artificial Sequence
  Synthetic oligonucleotide
ttctcgaaaagggagtacatggtgggaggc

SEQ ID NO: 150525 - DNA, 30 bp, Artificial Sequence
  Synthetic oligonucleotide
tcatgcggagcagtgttaatgaatggaggc

SEQ ID NO: 150526 - DNA, 30 bp, Artificial Sequence
  Synthetic oligonucleotide
ttgtctcaggacatatgacatcaatgaggc

SEQ ID NO: 150527 - DNA, 30 bp, Artificial Sequence
  Synthetic oligonucleotide
aagtgtatcggtgtcgggacattatgaggc

SEQ ID NO: 150528 - DNA, 30 bp, Artificial Sequence
  Synthetic oligonucleotide
cagaggtattcgtgctcccgattatgaggc

SEQ ID NO: 150529 - DNA, 30 bp, Artificial Sequence
  Synthetic oligonucleotide
aagccatatctcgagcagagccgctgaggc

SEQ ID NO: 150530 - DNA, 29 bp, Artificial Sequence
  Synthetic oligonucleotide
accggggacggacccaacaatgaataggc

SEQ ID NO: 150531 - DNA, 30 bp, Artificial Sequence
  Synthetic oligonucleotide
agcatatactgtctaacggtcggcataggc

SEQ ID NO: 150532 - DNA, 30 bp, Artificial Sequence
  Synthetic oligonucleotide
aggtatggcactctagtaacaagactaggc

SEQ ID NO: 150533 - DNA, 30 bp, Artificial Sequence
  Synthetic oligonucleotide
tggcgctatcgaaactaataagtactaggc

SEQ ID NO: 150534 - DNA, 30 bp, Artificial Sequence
  Synthetic oligonucleotide
tcctatgtggttagtaagacaatgctaggc

SEQ ID NO: 150535 - DNA, 30 bp, Artificial Sequence
  Synthetic oligonucleotide
atcaagtgattgaagccagggcatctaggc

SEQ ID NO: 150536 - DNA, 30 bp, Artificial Sequence
  Synthetic oligonucleotide
gatgtactaatttcagtaaagaccgtaggc

SEQ ID NO: 150537 - DNA, 30 bp, Artificial Sequence
  Synthetic oligonucleotide
caccgcctaaggtcctggaaacaggtaggc

SEQ ID NO: 150538 - DNA, 30 bp, Artificial Sequence
  Synthetic oligonucleotide
cttcatcagctaatcttgggcctggtaggc

SEQ ID NO: 150539 - DNA, 30 bp, Artificial Sequence
  Synthetic oligonucleotide
gaggaggtcgtgacactgagtgtggtaggc

SEQ ID NO: 150540 - DNA, 30 bp, Artificial Sequence
  Synthetic oligonucleotide
gataggccttgcataactggaacgttaggc

SEQ ID NO: 150541 - DNA, 30 bp, Artificial Sequence
  Synthetic oligonucleotide
tacgcgtgtagggttgaaagaaaaaacggc

SEQ ID NO: 150542 - DNA, 30 bp, Artificial Sequence
  Synthetic oligonucleotide
tgagactgagatcagatacagtcgaacggc

SEQ ID NO: 150543 - DNA, 30 bp, Artificial Sequence
  Synthetic oligonucleotide
caacgaggggaactgagggataataacggc

SEQ ID NO: 150544 - DNA, 30 bp, Artificial Sequence
  Synthetic oligonucleotide
atgtaatagctctacgacaccgctaacggc

SEQ ID NO: 150545 - DNA, 30 bp, Artificial Sequence
  Synthetic oligonucleotide
tcgacaaccgtgtcgcccgtaccacacggc

SEQ ID NO: 150546 - DNA, 30 bp, Artificial Sequence
  Synthetic oligonucleotide
cgtagccttctggtcataagagaatacggc

SEQ ID NO: 150547 - DNA, 30 bp, Artificial Sequence
  Synthetic oligonucleotide
tggacgcttatattcactacaaactacggc

SEQ ID NO: 150548 - DNA, 30 bp, Artificial Sequence
  Synthetic oligonucleotide
ataactttgaacggcgggagtcagtacggc

SEQ ID NO: 150549 - DNA, 30 bp, Artificial Sequence
  Synthetic oligonucleotide
cgccgagaaaaggtctaagacaggtacggc

SEQ ID NO: 150550 - DNA, 30 bp, Artificial Sequence
  Synthetic oligonucleotide
aacgaaaagtcgattactacgcgaaccggc

SEQ ID NO: 150551 - DNA, 30 bp, Artificial Sequence
  Synthetic oligonucleotide
catctgatcaagcgccctatcgtaaccggc

SEQ ID NO: 150552 - DNA, 30 bp, Artificial Sequence
  Synthetic oligonucleotide
cgataattgggcgaaggatttaataccggc

SEQ ID NO: 150553 - DNA, 30 bp, Artificial Sequence
  Synthetic oligonucleotide
gcgcgcctcgctataggtaatcgtaccggc

SEQ ID NO: 150554 - DNA, 30 bp, Artificial Sequence
  Synthetic oligonucleotide
gtagtacatccatggggctcgtgacccggc

SEQ ID NO: 150555 - DNA, 30 bp, Artificial Sequence
  Synthetic oligonucleotide
catgcggtttaactgttgcttgtacccggc

SEQ ID NO: 150556 - DNA, 30 bp, Artificial Sequence
  Synthetic oligonucleotide
acaaaaatagcatattggtaaaaggccggc

SEQ ID NO: 150557 - DNA, 30 bp, Artificial Sequence
  Synthetic oligonucleotide
attgcgtaaagttgggcctcgattgccggc

SEQ ID NO: 150558 - DNA, 30 bp, Artificial Sequence
  Synthetic oligonucleotide
gcaaggccaaataccgaaaacactcgcggc

SEQ ID NO: 150559 - DNA, 29 bp, Artificial Sequence
  Synthetic oligonucleotide
actgactggtctgaaaacgaacgggcggc

SEQ ID NO: 150560 - DNA, 30 bp, Artificial Sequence
  Synthetic oligonucleotide
gacgttgtgaagtctctcacgacgggcggc

SEQ ID NO: 150561 - DNA, 30 bp, Artificial Sequence
  Synthetic oligonucleotide
catgcaatatcagatgtatgggaatgcggc

SEQ ID NO: 150562 - DNA, 30 bp, Artificial Sequence
  Synthetic oligonucleotide
tagactagggatatcgaatgtcgctgcggc

SEQ ID NO: 150563 - DNA, 30 bp, Artificial Sequence
  Synthetic oligonucleotide
ctaggttgtttcaactcagccatctgcggc

SEQ ID NO: 150564 - DNA, 30 bp, Artificial Sequence
  Synthetic oligonucleotide
tacacttggggcctagaagtaagaatcggc

SEQ ID NO: 150565 - DNA, 31 bp, Artificial Sequence
  Synthetic oligonucleotide
agaatacagcttggtttcagttgggatcggc

SEQ ID NO: 150566 - DNA, 30 bp, Artificial Sequence
  Synthetic oligonucleotide
tgggtgtacgatctcctgggcggtatcggc

SEQ ID NO: 150567 - DNA, 30 bp, Artificial Sequence
  Synthetic oligonucleotide
ccagcaggtcacgtccaagaaatcctcggc

SEQ ID NO: 150568 - DNA, 30 bp, Artificial Sequence
  Synthetic oligonucleotide
ggttgcgatgtacgctagcgactcctcggc

SEQ ID NO: 150569 - DNA, 30 bp, Artificial Sequence
  Synthetic oligonucleotide
cccagcccacaaccgacatgtaggctcggc

SEQ ID NO: 150570 - DNA, 30 bp, Artificial Sequence
  Synthetic oligonucleotide
ctaaacgcaaaggcaaaagacatcgtcggc

SEQ ID NO: 150571 - DNA, 30 bp, Artificial Sequence
  Synthetic oligonucleotide
taaatctcagaaaaagcttgaaaggtcggc

SEQ ID NO: 150572 - DNA, 30 bp, Artificial Sequence
  Synthetic oligonucleotide
agcgtacatgatattatgatgtgattcggc

SEQ ID NO: 150573 - DNA, 30 bp, Artificial Sequence
  Synthetic oligonucleotide
gaggtgcaacccaagtctatagccttcggc

SEQ ID NO: 150574 - DNA, 30 bp, Artificial Sequence
  Synthetic oligonucleotide
tgtggagttaaaggttgcatggggttcggc

SEQ ID NO: 150575 - DNA, 30 bp, Artificial Sequence
  Synthetic oligonucleotide
gggtttgaagagagacgtagtgttttcggc

SEQ ID NO: 150576 - DNA, 30 bp, Artificial Sequence
  Synthetic oligonucleotide
tcatcggggtattctttagcctcaaagggc

SEQ ID NO: 150577 - DNA, 30 bp, Artificial Sequence
  Synthetic oligonucleotide
aggtaccggtcactcctattgtcaaagggc

SEQ ID NO: 150578 - DNA, 30 bp, Artificial Sequence
  Synthetic oligonucleotide
gtggatcgagagaacaagtgtaccaagggc

SEQ ID NO: 150579 - DNA, 30 bp, Artificial Sequence
  Synthetic oligonucleotide
atcgacagatattggcaaaatgggaagggc

SEQ ID NO: 150580 - DNA, 30 bp, Artificial Sequence
  Synthetic oligonucleotide
aagggtttgcctcaccacgagcataagggc

SEQ ID NO: 150581 - DNA, 30 bp, Artificial Sequence
  Synthetic oligonucleotide
tcggtgctctgggctctgcgctgtaagggc

SEQ ID NO: 150582 - DNA, 30 bp, Artificial Sequence
  Synthetic oligonucleotide
ccgttgctcaaagtagtaaggagccagggc

SEQ ID NO: 150583 - DNA, 30 bp, Artificial Sequence
  Synthetic oligonucleotide
aacctgagctaggtggatcgcctccagggc

SEQ ID NO: 150584 - DNA, 30 bp, Artificial Sequence
  Synthetic oligonucleotide
ataagacggtgcaaaccgtgatcgcagggc

SEQ ID NO: 150585 - DNA, 30 bp, Artificial Sequence
  Synthetic oligonucleotide
aagtctccggttaacatggggcctcagggc

SEQ ID NO: 150586 - DNA, 30 bp, Artificial Sequence
  Synthetic oligonucleotide
gtgttcgagtcgaatgcaacacgcgagggc

SEQ ID NO: 150587 - DNA, 30 bp, Artificial Sequence
  Synthetic oligonucleotide
aagatggaatgcttcggtgctctggagggc

SEQ ID NO: 150588 - DNA, 30 bp, Artificial Sequence
  Synthetic oligonucleotide
ggaggctttgaatacgggacacatgagggc

SEQ ID NO: 150589 - DNA, 30 bp, Artificial Sequence
  Synthetic oligonucleotide
acttgtacaccactccatgtgacatagggc

SEQ ID NO: 150590 - DNA, 30 bp, Artificial Sequence
  Synthetic oligonucleotide
aggtcttcgtgttagtttataggatagggc

SEQ ID NO: 150591 - DNA, 30 bp, Artificial Sequence
  Synthetic oligonucleotide
tagtacgatacccggcgcatatagtagggc

SEQ ID NO: 150592 - DNA, 30 bp, Artificial Sequence
  Synthetic oligonucleotide
aggaagacctaggcgatatcaggttagggc

SEQ ID NO: 150593 - DNA, 30 bp, Artificial Sequence
  Synthetic oligonucleotide
gcttgtaacgagagcaatcacaacacgggc

SEQ ID NO: 150594 - DNA, 30 bp, Artificial Sequence
  Synthetic oligonucleotide
gggctgataggtcgttgaaattgcacgggc

SEQ ID NO: 150595 - DNA, 30 bp, Artificial Sequence
  Synthetic oligonucleotide
taaacaatttcaattcgtgaggtgacgggc

SEQ ID NO: 150596 - DNA, 30 bp, Artificial Sequence
  Synthetic oligonucleotide
gaacttagtggcacagatgcacttacgggc

SEQ ID NO: 150597 - DNA, 30 bp, Artificial Sequence
  Synthetic oligonucleotide
aaactgtcccctaacaaatgaaaaccgggc

SEQ ID NO: 150598 - DNA, 30 bp, Artificial Sequence
  Synthetic oligonucleotide
cggggggtcgacagttagtcgaaaccgggc

SEQ ID NO: 150599 - DNA, 30 bp, Artificial Sequence
  Synthetic oligonucleotide
aacgacgaattgtatgggaaattaccgggc

SEQ ID NO: 150600 - DNA, 30 bp, Artificial Sequence
  Synthetic oligonucleotide
ctgtagtgatcaaggcggtactcgccgggc

SEQ ID NO: 150601 - DNA, 30 bp, Artificial Sequence
  Synthetic oligonucleotide
gattagcaaagtgcagttcgtttgccgggc

SEQ ID NO: 150602 - DNA, 30 bp, Artificial Sequence
  Synthetic oligonucleotide
gtacacaaagtgacgtttggtaacgcgggc

SEQ ID NO: 150603 - DNA, 30 bp, Artificial Sequence
  Synthetic oligonucleotide
cgggttaatcgcaaataggatcaggcgggc

SEQ ID NO: 150604 - DNA, 30 bp, Artificial Sequence
  Synthetic oligonucleotide
atcaggcgtgcggaaaaaatataggcgggc

SEQ ID NO: 150605 - DNA, 30 bp, Artificial Sequence
  Synthetic oligonucleotide
agataggggatttaaggtaagccggcgggc

SEQ ID NO: 150606 - DNA, 30 bp, Artificial Sequence
  Synthetic oligonucleotide
gtcggttaagtgattaagatgtgcaggggc

SEQ ID NO: 150607 - DNA, 30 bp, Artificial Sequence
  Synthetic oligonucleotide
gtgccttatgggactgttccacagaggggc

SEQ ID NO: 150608 - DNA, 30 bp, Artificial Sequence
  Synthetic oligonucleotide
cgtcgaccagcaagcgataaccggaggggc

SEQ ID NO: 150609 - DNA, 30 bp, Artificial Sequence
  Synthetic oligonucleotide
tgcaaaatctgcttcactaatgcgcggggc

SEQ ID NO: 150610 - DNA, 30 bp, Artificial Sequence
  Synthetic oligonucleotide
acgcggaagaactggtttctctatcggggc

SEQ ID NO: 150611 - DNA, 30 bp, Artificial Sequence
  Synthetic oligonucleotide
agatctcctcctaccgctacagaagggggc

SEQ ID NO: 150612 - DNA, 30 bp, Artificial Sequence
  Synthetic oligonucleotide
gccaacattgtctggcaaaggatcgggggc

SEQ ID NO: 150613 - DNA, 30 bp, Artificial Sequence
  Synthetic oligonucleotide
ggcacgaaccctgccagggacaaggggggc

SEQ ID NO: 150614 - DNA, 30 bp, Artificial Sequence
  Synthetic oligonucleotide
ttcgacaaaaaaaggcctaaacctgggggc

SEQ ID NO: 150615 - DNA, 30 bp, Artificial Sequence
  Synthetic oligonucleotide
acgtcaccaacgagacgttaaacatggggc

SEQ ID NO: 150616 - DNA, 30 bp, Artificial Sequence
  Synthetic oligonucleotide
cttgactcagcaaaggtgaactggtggggc

SEQ ID NO: 150617 - DNA, 30 bp, Artificial Sequence
  Synthetic oligonucleotide
tccaggcctacagattataaagtgtggggc

SEQ ID NO: 150618 - DNA, 30 bp, Artificial Sequence
  Synthetic oligonucleotide
gaactactgtgtcgtggctggtattggggc

SEQ ID NO: 150619 - DNA, 30 bp, Artificial Sequence
  Synthetic oligonucleotide
tctggcaggtctgcgttgggcctttggggc

SEQ ID NO: 150620 - DNA, 30 bp, Artificial Sequence
  Synthetic oligonucleotide
ttgtatgatcagactgaggagcaaatgggc

SEQ ID NO: 150621 - DNA, 30 bp, Artificial Sequence
  Synthetic oligonucleotide
ctctaacaagacacaatgagagcaatgggc

SEQ ID NO: 150622 - DNA, 30 bp, Artificial Sequence
  Synthetic oligonucleotide
tacgcgtagtaactccttaagtcaatgggc

SEQ ID NO: 150623 - DNA, 30 bp, Artificial Sequence
  Synthetic oligonucleotide
tccttgtgagctaacctaacgttactgggc

SEQ ID NO: 150624 - DNA, 30 bp, Artificial Sequence
  Synthetic oligonucleotide
aaaaagtgcctgttgaacacgcaagtgggc

SEQ ID NO: 150625 - DNA, 30 bp, Artificial Sequence
  Synthetic oligonucleotide
ggtcaacccgtgagaggtgcttcggtgggc

SEQ ID NO: 150626 - DNA, 30 bp, Artificial Sequence
  Synthetic oligonucleotide
ggacagcaccttataagtagcagggtgggc

SEQ ID NO: 150627 - DNA, 30 bp, Artificial Sequence
  Synthetic oligonucleotide
agctcacgtatgtccttcggctctgtgggc

SEQ ID NO: 150628 - DNA, 30 bp, Artificial Sequence
  Synthetic oligonucleotide
gtggactgaaagatattgggtaaattgggc

SEQ ID NO: 150629 - DNA, 30 bp, Artificial Sequence
  Synthetic oligonucleotide
gtgtagtcgtgagtcggcgcttaattgggc

SEQ ID NO: 150630 - DNA, 30 bp, Artificial Sequence
  Synthetic oligonucleotide
tcgaaggacaagtggtgccattagttgggc

SEQ ID NO: 150631 - DNA, 30 bp, Artificial Sequence
  Synthetic oligonucleotide
agccgagtctggttgacagcgtctttgggc

SEQ ID NO: 150632 - DNA, 30 bp, Artificial Sequence
  Synthetic oligonucleotide
aaggctcgacttgacacgagatacaatggc

SEQ ID NO: 150633 - DNA, 30 bp, Artificial Sequence
  Synthetic oligonucleotide
aaccactacggtatgctccgggtcaatggc

SEQ ID NO: 150634 - DNA, 30 bp, Artificial Sequence
  Synthetic oligonucleotide
ttccagattaccagtaaatctcgccatggc

SEQ ID NO: 150635 - DNA, 30 bp, Artificial Sequence
  Synthetic oligonucleotide
tgcatgaaacaatataactgttggcatggc

SEQ ID NO: 150636 - DNA, 30 bp, Artificial Sequence
  Synthetic oligonucleotide
tgggacggcgatgctgattttctgcatggc

SEQ ID NO: 150637 - DNA, 30 bp, Artificial Sequence
  Synthetic oligonucleotide
cttgataaagacacatgtggcgtgcatggc

SEQ ID NO: 150638 - DNA, 30 bp, Artificial Sequence
  Synthetic oligonucleotide
tgccccagtataaggtcaccgtaagatggc

SEQ ID NO: 150639 - DNA, 30 bp, Artificial Sequence
  Synthetic oligonucleotide
ggacagaagttaatactcataagagatggc

SEQ ID NO: 150640 - DNA, 30 bp, Artificial Sequence
  Synthetic oligonucleotide
ctaagagcacgcgctgccctacgcgatggc

SEQ ID NO: 150641 - DNA, 30 bp, Artificial Sequence
  Synthetic oligonucleotide
ctcggtaagctccattgagggggggatggc

SEQ ID NO: 150642 - DNA, 30 bp, Artificial Sequence
  Synthetic oligonucleotide
cagagggcacgcaaggtggagcatgatggc

SEQ ID NO: 150643 - DNA, 30 bp, Artificial Sequence
  Synthetic oligonucleotide
cgccgaaaagcatatgttgcgcaatatggc

SEQ ID NO: 150644 - DNA, 30 bp, Artificial Sequence
  Synthetic oligonucleotide
accaaatactcaaagatgcagtcaactggc

SEQ ID NO: 150645 - DNA, 30 bp, Artificial Sequence
  Synthetic oligonucleotide
taaatgaaccgagcatactgctatactggc

SEQ ID NO: 150646 - DNA, 30 bp, Artificial Sequence
  Synthetic oligonucleotide
agctggaccctatgccgaattacacctggc

SEQ ID NO: 150647 - DNA, 30 bp, Artificial Sequence
  Synthetic oligonucleotide
cagacagatgtacattcgttgtcggctggc

SEQ ID NO: 150648 - DNA, 30 bp, Artificial Sequence
  Synthetic oligonucleotide
atcactggtaaattatgtactgcgtctggc

SEQ ID NO: 150649 - DNA, 30 bp, Artificial Sequence
  Synthetic oligonucleotide
gacgtaataggcgcgatacgatattctggc

SEQ ID NO: 150650 - DNA, 30 bp, Artificial Sequence
  Synthetic oligonucleotide
tcaatgtagtgggtgtatgctcctagtggc

SEQ ID NO: 150651 - DNA, 30 bp, Artificial Sequence
  Synthetic oligonucleotide
atgtaattcaagaatagtagttcccgtggc

SEQ ID NO: 150652 - DNA, 30 bp, Artificial Sequence
  Synthetic oligonucleotide
gggtgtgccatgtggacatatgcaggtggc

SEQ ID NO: 150653 - DNA, 30 bp, Artificial Sequence
  Synthetic oligonucleotide
gatcaaacaaacgatctggcatcatgtggc

SEQ ID NO: 150654 - DNA, 30 bp, Artificial Sequence
  Synthetic oligonucleotide
acagtatacataacacgaggcggatgtggc

SEQ ID NO: 150655 - DNA, 30 bp, Artificial Sequence
  Synthetic oligonucleotide
tctttgtggaggggatacgttgtgtgtggc

SEQ ID NO: 150656 - DNA, 30 bp, Artificial Sequence
  Synthetic oligonucleotide
gggttgcgaactacactggtaggaattggc

SEQ ID NO: 150657 - DNA, 30 bp, Artificial Sequence
  Synthetic oligonucleotide
gggtgattcaggacagcttagcacattggc

SEQ ID NO: 150658 - DNA, 30 bp, Artificial Sequence
  Synthetic oligonucleotide
caaggaagttgtcattgagaggtgattggc

SEQ ID NO: 150659 - DNA, 30 bp, Artificial Sequence
  Synthetic oligonucleotide
ggaaacgggcacccgagcaactatattggc

SEQ ID NO: 150660 - DNA, 30 bp, Artificial Sequence
  Synthetic oligonucleotide
aaagggacttgaatgaattcacgtattggc

SEQ ID NO: 150661 - DNA, 30 bp, Artificial Sequence
  Synthetic oligonucleotide
catgtaattcacggccaaacgatacttggc

SEQ ID NO: 150662 - DNA, 30 bp, Artificial Sequence
  Synthetic oligonucleotide
gatgcgacacgatcccaagccccccttggc

SEQ ID NO: 150663 - DNA, 30 bp, Artificial Sequence
  Synthetic oligonucleotide
gcctaaagcagttataatgcgaaggttggc

SEQ ID NO: 150664 - DNA, 30 bp, Artificial Sequence
  Synthetic oligonucleotide
ccttaaggggtttagctgactgaggttggc

SEQ ID NO: 150665 - DNA, 30 bp, Artificial Sequence
  Synthetic oligonucleotide
gcgtgtgcttggaatgcatgaagggttggc

SEQ ID NO: 150666 - DNA, 30 bp, Artificial Sequence
  Synthetic oligonucleotide
tctgaatcatccaccaccgcgagtgttggc

SEQ ID NO: 150667 - DNA, 30 bp, Artificial Sequence
  Synthetic oligonucleotide
acagagttcaatgtcttccttggctttggc

SEQ ID NO: 150668 - DNA, 30 bp, Artificial Sequence
  Synthetic oligonucleotide
gggcgacggagcacggttgtgagaaaatgc

SEQ ID NO: 150669 - DNA, 30 bp, Artificial Sequence
  Synthetic oligonucleotide
agaagagaagtccaggggacatgtaaatgc

SEQ ID NO: 150670 - DNA, 30 bp, Artificial Sequence
  Synthetic oligonucleotide
aaggcggggttccaactaaggaggcaatgc

SEQ ID NO: 150671 - DNA, 30 bp, Artificial Sequence
  Synthetic oligonucleotide
gccaacgtgttactcgcaccggggcaatgc

SEQ ID NO: 150672 - DNA, 30 bp, Artificial Sequence
  Synthetic oligonucleotide
tgggagatcatctgaaatgcttggcaatgc

SEQ ID NO: 150673 - DNA, 30 bp, Artificial Sequence
  Synthetic oligonucleotide
ggtagtgttactaagaattgtatgcaatgc

SEQ ID NO: 150674 - DNA, 30 bp, Artificial Sequence
  Synthetic oligonucleotide
aacagctccagcactttaaatcacgaatgc

SEQ ID NO: 150675 - DNA, 30 bp, Artificial Sequence
  Synthetic oligonucleotide
cttagggaaaaactggtccgcttcgaatgc

SEQ ID NO: 150676 - DNA, 30 bp, Artificial Sequence
  Synthetic oligonucleotide
cctagaaagattctcgtgacgagggaatgc

SEQ ID NO: 150677 - DNA, 30 bp, Artificial Sequence
  Synthetic oligonucleotide
ataacgacacggactgtcggatgtgaatgc

SEQ ID NO: 150678 - DNA, 30 bp, Artificial Sequence
  Synthetic oligonucleotide
catcagtgcgtatctaaaacctcataatgc

SEQ ID NO: 150679 - DNA, 30 bp, Artificial Sequence
  Synthetic oligonucleotide
taccgcatgactaggcctggaggataatgc

SEQ ID NO: 150680 - DNA, 30 bp, Artificial Sequence
  Synthetic oligonucleotide
ataaatgtccaagggcggcctgagtaatgc

SEQ ID NO: 150681 - DNA, 30 bp, Artificial Sequence
  Synthetic oligonucleotide
acccatatgttggaaacagaagcttaatgc

SEQ ID NO: 150682 - DNA, 30 bp, Artificial Sequence
  Synthetic oligonucleotide
agtaaagggaacccgtaactgtatacatgc

SEQ ID NO: 150683 - DNA, 30 bp, Artificial Sequence
  Synthetic oligonucleotide
gggctccgtccatacgtaggctgtacatgc

SEQ ID NO: 150684 - DNA, 30 bp, Artificial Sequence
  Synthetic oligonucleotide
cagttgcactagtaatcggaagccccatgc

SEQ ID NO: 150685 - DNA, 30 bp, Artificial Sequence
  Synthetic oligonucleotide
gatagagcccggaatcgcccaagagcatgc

SEQ ID NO: 150686 - DNA, 30 bp, Artificial Sequence
  Synthetic oligonucleotide
attatgtaagaaagtgacgtacccgcatgc

SEQ ID NO: 150687 - DNA, 30 bp, Artificial Sequence
  Synthetic oligonucleotide
aactacaagactgacttgcgttgggcatgc

SEQ ID NO: 150688 - DNA, 30 bp, Artificial Sequence
  Synthetic oligonucleotide
agattcactattatgcccgtgtcatcatgc

SEQ ID NO: 150689 - DNA, 30 bp, Artificial Sequence
  Synthetic oligonucleotide
gaaggatcacaaacgtaaaatgtcagatgc

SEQ ID NO: 150690 - DNA, 30 bp, Artificial Sequence
  Synthetic oligonucleotide
cattgaggaaactatcttagcacccgatgc

SEQ ID NO: 150691 - DNA, 30 bp, Artificial Sequence
  Synthetic oligonucleotide
agcaaataatcatcagccagagacggatgc

SEQ ID NO: 150692 - DNA, 30 bp, Artificial Sequence
  Synthetic oligonucleotide
gagcgtcaacttatgttgtctatcggatgc

SEQ ID NO: 150693 - DNA, 30 bp, Artificial Sequence
  Synthetic oligonucleotide
tgttgggccaccaggtatcaacatggatgc

SEQ ID NO: 150694 - DNA, 30 bp, Artificial Sequence
  Synthetic oligonucleotide
acacactcggcataagttaatgcaatatgc

SEQ ID NO: 150695 - DNA, 30 bp, Artificial Sequence
  Synthetic oligonucleotide
ggttcccgggcacccgttactgcaatatgc

SEQ ID NO: 150696 - DNA, 30 bp, Artificial Sequence
  Synthetic oligonucleotide
agcaataggtaaatacttcgcagcatatgc

SEQ ID NO: 150697 - DNA, 31 bp, Artificial Sequence
  Synthetic oligonucleotide
gctgccggcacaatgggctcacgtgatatgc

SEQ ID NO: 150698 - DNA, 30 bp, Artificial Sequence
  Synthetic oligonucleotide
actaaagcacggatgacgccgattatatgc

SEQ ID NO: 150699 - DNA, 30 bp, Artificial Sequence
  Synthetic oligonucleotide
gccgcccgtagtgtaaggcgtggactatgc

SEQ ID NO: 150700 - DNA, 30 bp, Artificial Sequence
  Synthetic oligonucleotide
ggggccatttctagtaaggtcgagctatgc

SEQ ID NO: 150701 - DNA, 30 bp, Artificial Sequence
  Synthetic oligonucleotide
tcactcgacacacaagggggtaaagtatgc

SEQ ID NO: 150702 - DNA, 30 bp, Artificial Sequence
  Synthetic oligonucleotide
ggcggggatgatccatacactcaagtatgc

SEQ ID NO: 150703 - DNA, 30 bp, Artificial Sequence
  Synthetic oligonucleotide
ttggtaagaagcctgcgattgccagtatgc

SEQ ID NO: 150704 - DNA, 30 bp, Artificial Sequence
  Synthetic oligonucleotide
cacctggcctcagtatggatggtggtatgc

SEQ ID NO: 150705 - DNA, 30 bp, Artificial Sequence
  Synthetic oligonucleotide
gaggcgagcgccccccagtactgattatgc

SEQ ID NO: 150706 - DNA, 30 bp, Artificial Sequence
  Synthetic oligonucleotide
ggtgtattatgcacgtgggccatattatgc

SEQ ID NO: 150707 - DNA, 30 bp, Artificial Sequence
  Synthetic oligonucleotide
ccggtgtcataaagtactgcggcgttatgc

SEQ ID NO: 150708 - DNA, 30 bp, Artificial Sequence
  Synthetic oligonucleotide
ggccgagtattcatgacgtctttaaactgc

SEQ ID NO: 150709 - DNA, 30 bp, Artificial Sequence
  Synthetic oligonucleotide
cggcacttcaatgatcccaccaataactgc

SEQ ID NO: 150710 - DNA, 30 bp, Artificial Sequence
  Synthetic oligonucleotide
caatcatgaagattcgggatgggacactgc

SEQ ID NO: 150711 - DNA, 30 bp, Artificial Sequence
  Synthetic oligonucleotide
atgcaaaaatctagtagtcagggccactgc

SEQ ID NO: 150712 - DNA, 30 bp, Artificial Sequence
  Synthetic oligonucleotide
tgtcgcgcggtaacattctcttgccactgc

SEQ ID NO: 150713 - DNA, 30 bp, Artificial Sequence
  Synthetic oligonucleotide
atctagtagtgaaagactcggaaggactgc

SEQ ID NO: 150714 - DNA, 30 bp, Artificial Sequence
  Synthetic oligonucleotide
cgacgcacaaataacggaaccacggactgc

SEQ ID NO: 150715 - DNA, 30 bp, Artificial Sequence
  Synthetic oligonucleotide
gagccatggccccctgaaacaaaatactgc

SEQ ID NO: 150716 - DNA, 30 bp, Artificial Sequence
  Synthetic oligonucleotide
cacggcaaacgttatagcatggagtactgc

SEQ ID NO: 150717 - DNA, 30 bp, Artificial Sequence
  Synthetic oligonucleotide
cacaaccgtagctgtcagctgctcacctgc

SEQ ID NO: 150718 - DNA, 30 bp, Artificial Sequence
  Synthetic oligonucleotide
atggatgtgtgcggcaaactggagacctgc

SEQ ID NO: 150719 - DNA, 30 bp, Artificial Sequence
  Synthetic oligonucleotide
tacgacgtcttacaagatttgactacctgc

SEQ ID NO: 150720 - DNA, 30 bp, Artificial Sequence
  Synthetic oligonucleotide
cttaaaggtaaatctccgcggttagcctgc

SEQ ID NO: 150721 - DNA, 30 bp, Artificial Sequence
  Synthetic oligonucleotide
ttggacacatccttacccgcaggttcctgc

SEQ ID NO: 150722 - DNA, 30 bp, Artificial Sequence
  Synthetic oligonucleotide
ccagaaccatgacgaagatgtaaccgctgc

SEQ ID NO: 150723 - DNA, 30 bp, Artificial Sequence
  Synthetic oligonucleotide
catcaccggataagatagattgggcgctgc

SEQ ID NO: 150724 - DNA, 30 bp, Artificial Sequence
  Synthetic oligonucleotide
tcccgatagaatgagagagtcaatcgctgc

SEQ ID NO: 150725 - DNA, 30 bp, Artificial Sequence
  Synthetic oligonucleotide
gtgatgaaaacgtgccgcgtcacaggctgc

SEQ ID NO: 150726 - DNA, 30 bp, Artificial Sequence
  Synthetic oligonucleotide
actaaggcgttttacgctaggttaggctgc

SEQ ID NO: 150727 - DNA, 30 bp, Artificial Sequence
  Synthetic oligonucleotide
tcacatggatagtccgtggcactcggctgc

SEQ ID NO: 150728 - DNA, 30 bp, Artificial Sequence
  Synthetic oligonucleotide
gacggggattaaatgtaacattctggctgc

SEQ ID NO: 150729 - DNA, 30 bp, Artificial Sequence
  Synthetic oligonucleotide
gatacgtggttaacgctcaggaattgctgc

SEQ ID NO: 150730 - DNA, 30 bp, Artificial Sequence
  Synthetic oligonucleotide
gggggagctggattagttagtcgaatctgc

SEQ ID NO: 150731 - DNA, 30 bp, Artificial Sequence
  Synthetic oligonucleotide
gcgcttgcgcaaacactaagctctatctgc

SEQ ID NO: 150732 - DNA, 30 bp, Artificial Sequence
  Synthetic oligonucleotide
tggtaattaggatacgaacacattatctgc

SEQ ID NO: 150733 - DNA, 30 bp, Artificial Sequence
  Synthetic oligonucleotide
accgagttcgcaggtggcgcggtggtctgc

SEQ ID NO: 150734 - DNA, 30 bp, Artificial Sequence
  Synthetic oligonucleotide
tctccgaactctaagaagcaatggaagtgc

SEQ ID NO: 150735 - DNA, 31 bp, Artificial Sequence
  Synthetic oligonucleotide
gtgcggtgaaagatcaagtccaccgcagtgc

SEQ ID NO: 150736 - DNA, 30 bp, Artificial Sequence
  Synthetic oligonucleotide
cactggctagagccgaagcacaatcagtgc

SEQ ID NO: 150737 - DNA, 30 bp, Artificial Sequence
  Synthetic oligonucleotide
gcttcagatcagaagagaacatatcagtgc

SEQ ID NO: 150738 - DNA, 30 bp, Artificial Sequence
  Synthetic oligonucleotide
tcgaaggccaatcgtactaactatcagtgc

SEQ ID NO: 150739 - DNA, 30 bp, Artificial Sequence
  Synthetic oligonucleotide
ggtctagagcacggtgtgtattgtcagtgc

SEQ ID NO: 150740 - DNA, 30 bp, Artificial Sequence
  Synthetic oligonucleotide
agacgctaaacgcattactaaggcgagtgc

SEQ ID NO: 150741 - DNA, 30 bp, Artificial Sequence
  Synthetic oligonucleotide
atgtagatggtatgcattaaaagctagtgc

SEQ ID NO: 150742 - DNA, 30 bp, Artificial Sequence
  Synthetic oligonucleotide
agagtgcgaaggtaccgtaggttgtagtgc

SEQ ID NO: 150743 - DNA, 30 bp, Artificial Sequence
  Synthetic oligonucleotide
cacttagagccccgtactcgttcgacgtgc

SEQ ID NO: 150744 - DNA, 30 bp, Artificial Sequence
  Synthetic oligonucleotide
agtcaataggactgcgtgggccttacgtgc

SEQ ID NO: 150745 - DNA, 30 bp, Artificial Sequence
  Synthetic oligonucleotide
ttatctcgggccttgaaagaggtgccgtgc

SEQ ID NO: 150746 - DNA, 30 bp, Artificial Sequence
  Synthetic oligonucleotide
tggcaatcccaggcaagtcttgctccgtgc

SEQ ID NO: 150747 - DNA, 30 bp, Artificial Sequence
  Synthetic oligonucleotide
ttgacgtttagttctctagcatcagcgtgc

SEQ ID NO: 150748 - DNA, 30 bp, Artificial Sequence
  Synthetic oligonucleotide
gttgcgacgatagattattgggctgcgtgc

SEQ ID NO: 150749 - DNA, 30 bp, Artificial Sequence
  Synthetic oligonucleotide
tgaaattagtgtgtaccggagtaaaggtgc

SEQ ID NO: 150750 - DNA, 30 bp, Artificial Sequence
  Synthetic oligonucleotide
tggggaggaaaaaaccatgacacaaggtgc

SEQ ID NO: 150751 - DNA, 30 bp, Artificial Sequence
  Synthetic oligonucleotide
gtagcctcaacgcatacctagaagaggtgc

SEQ ID NO: 150752 - DNA, 30 bp, Artificial Sequence
  Synthetic oligonucleotide
gatgctgggtcaattttggtgatgaggtgc

SEQ ID NO: 150753 - DNA, 30 bp, Artificial Sequence
  Synthetic oligonucleotide
aggacactcgtgattcggtagcctaggtgc

SEQ ID NO: 150754 - DNA, 30 bp, Artificial Sequence
  Synthetic oligonucleotide
ggtcccgattcgttggttagtattaggtgc

SEQ ID NO: 150755 - DNA, 30 bp, Artificial Sequence
  Synthetic oligonucleotide
tttagacacattcacacgaatgcacggtgc

SEQ ID NO: 150756 - DNA, 30 bp, Artificial Sequence
  Synthetic oligonucleotide
tgagtgtatttataactaagggtacggtgc

SEQ ID NO: 150757 - DNA, 30 bp, Artificial Sequence
  Synthetic oligonucleotide
cctaagggaaaccactggagtgtccggtgc

SEQ ID NO: 150758 - DNA, 30 bp, Artificial Sequence
  Synthetic oligonucleotide
agggcccttatcatagtgtaacatgggtgc

SEQ ID NO: 150759 - DNA, 30 bp, Artificial Sequence
  Synthetic oligonucleotide
ctctggtgggagctctcagaggcatggtgc

SEQ ID NO: 150760 - DNA, 30 bp, Artificial Sequence
  Synthetic oligonucleotide
ggagctacagattttgtggcaggatggtgc

SEQ ID NO: 150761 - DNA, 30 bp, Artificial Sequence
  Synthetic oligonucleotide
atgcaacatgccgaaccgagaaattggtgc

SEQ ID NO: 150762 - DNA, 30 bp, Artificial Sequence
  Synthetic oligonucleotide
gacgttatcgaactgcactgttattggtgc

SEQ ID NO: 150763 - DNA, 30 bp, Artificial Sequence
  Synthetic oligonucleotide
gaagtgataggccgggcttaagtttggtgc

SEQ ID NO: 150764 - DNA, 30 bp, Artificial Sequence
  Synthetic oligonucleotide
cactaggattcagttaccgcctgaatgtgc

SEQ ID NO: 150765 - DNA, 30 bp, Artificial Sequence
  Synthetic oligonucleotide
tagcataaggatggaattacacagatgtgc

SEQ ID NO: 150766 - DNA, 30 bp, Artificial Sequence
  Synthetic oligonucleotide
ctagatgtacatgataggacttacgtgtgc

SEQ ID NO: 150767 - DNA, 30 bp, Artificial Sequence
  Synthetic oligonucleotide
gctggtctgagaacccgagtgataaattgc

SEQ ID NO: 150768 - DNA, 30 bp, Artificial Sequence
  Synthetic oligonucleotide
cggatcacgaaggctaccggagtaaattgc

SEQ ID NO: 150769 - DNA, 30 bp, Artificial Sequence
  Synthetic oligonucleotide
gcgtggcgtggttatataactttaaattgc

SEQ ID NO: 150770 - DNA, 30 bp, Artificial Sequence
  Synthetic oligonucleotide
agacgcggtctatcatgtcaggttaattgc

SEQ ID NO: 150771 - DNA, 30 bp, Artificial Sequence
  Synthetic oligonucleotide
tcctcttaccggaagagtgggtgacattgc

SEQ ID NO: 150772 - DNA, 31 bp, Artificial Sequence
  Synthetic oligonucleotide
accaatatagccccttaagtgcgggcattgc

SEQ ID NO: 150773 - DNA, 30 bp, Artificial Sequence
  Synthetic oligonucleotide
acgaagaaggagtttcatattgtgcattgc

SEQ ID NO: 150774 - DNA, 30 bp, Artificial Sequence
  Synthetic oligonucleotide
ttcgtagtgctagaatcaaggcacgattgc

SEQ ID NO: 150775 - DNA, 30 bp, Artificial Sequence
  Synthetic oligonucleotide
acctaaacaggtgatcaacaggcggattgc

SEQ ID NO: 150776 - DNA, 30 bp, Artificial Sequence
  Synthetic oligonucleotide
agctacataaaggctatgagagaatattgc

SEQ ID NO: 150777 - DNA, 30 bp, Artificial Sequence
  Synthetic oligonucleotide
tcacacggtaaggatcaatggaactattgc

SEQ ID NO: 150778 - DNA, 30 bp, Artificial Sequence
  Synthetic oligonucleotide
ccgaggcgagataggcggcgcgagtattgc

SEQ ID NO: 150779 - DNA, 30 bp, Artificial Sequence
  Synthetic oligonucleotide
tgcgggcagccacgcataactgggtattgc

SEQ ID NO: 150780 - DNA, 30 bp, Artificial Sequence
  Synthetic oligonucleotide
accggcattcacctggtaagagtgtattgc

SEQ ID NO: 150781 - DNA, 30 bp, Artificial Sequence
  Synthetic oligonucleotide
ggggttatcgaggttatgagggtgtattgc

SEQ ID NO: 150782 - DNA, 30 bp, Artificial Sequence
  Synthetic oligonucleotide
ccaaccctggctgtgtatcgaatttattgc

SEQ ID NO: 150783 - DNA, 30 bp, Artificial Sequence
  Synthetic oligonucleotide
cctactaacggaccatcgaggaacacttgc

SEQ ID NO: 150784 - DNA, 30 bp, Artificial Sequence
  Synthetic oligonucleotide
ctctcggaagaagtacgccaagtgacttgc

SEQ ID NO: 150785 - DNA, 30 bp, Artificial Sequence
  Synthetic oligonucleotide
cgatcgtggcacgtccactggtatacttgc

SEQ ID NO: 150786 - DNA, 30 bp, Artificial Sequence
  Synthetic oligonucleotide
atggtgcattatcagaggcgaagaccttgc

SEQ ID NO: 150787 - DNA, 30 bp, Artificial Sequence
  Synthetic oligonucleotide
tagcgataaaaactagttattggaccttgc

SEQ ID NO: 150788 - DNA, 30 bp, Artificial Sequence
  Synthetic oligonucleotide
ctgaggggagcttgagagtactgcccttgc

SEQ ID NO: 150789 - DNA, 30 bp, Artificial Sequence
  Synthetic oligonucleotide
acggaaatttctgaaaatagagcagcttgc

SEQ ID NO: 150790 - DNA, 30 bp, Artificial Sequence
  Synthetic oligonucleotide
accgaaaatgtgcctcaacgaagcgcttgc

SEQ ID NO: 150791 - DNA, 30 bp, Artificial Sequence
  Synthetic oligonucleotide
atacttacagggaataacatacggtcttgc

SEQ ID NO: 150792 - DNA, 30 bp, Artificial Sequence
  Synthetic oligonucleotide
aaatgcaccgttacgtctctagcttcttgc

SEQ ID NO: 150793 - DNA, 30 bp, Artificial Sequence
  Synthetic oligonucleotide
cgactatgggacccagcatcgtggagttgc

SEQ ID NO: 150794 - DNA, 30 bp, Artificial Sequence
  Synthetic oligonucleotide
ccgccattcaattagtatcttaaccgttgc

SEQ ID NO: 150795 - DNA, 30 bp, Artificial Sequence
  Synthetic oligonucleotide
tttgagaatggtaagagggatactcgttgc

SEQ ID NO: 150796 - DNA, 30 bp, Artificial Sequence
  Synthetic oligonucleotide
caagggcattgttatcactcgtgtatttgc

SEQ ID NO: 150797 - DNA, 30 bp, Artificial Sequence
  Synthetic oligonucleotide
cgaacggccaaggcagttatctcggtttgc

SEQ ID NO: 150798 - DNA, 30 bp, Artificial Sequence
  Synthetic oligonucleotide
gttacgagcgtcgaacccgcaatgaaaatc

SEQ ID NO: 150799 - DNA, 30 bp, Artificial Sequence
  Synthetic oligonucleotide
atatgctgacttatatgaaacgtgaaaatc

SEQ ID NO: 150800 - DNA, 30 bp, Artificial Sequence
  Synthetic oligonucleotide
ctaggaatcggttcaaacgatttgaaaatc

SEQ ID NO: 150801 - DNA, 30 bp, Artificial Sequence
  Synthetic oligonucleotide
cgagtatccgcccgccgtctccctaaaatc

SEQ ID NO: 150802 - DNA, 30 bp, Artificial Sequence
  Synthetic oligonucleotide
actttgtcgagagagattccaaatcaaatc

SEQ ID NO: 150803 - DNA, 30 bp, Artificial Sequence
  Synthetic oligonucleotide
gcatataatgcggcgtctgttcgcgaaatc

SEQ ID NO: 150804 - DNA, 30 bp, Artificial Sequence
  Synthetic oligonucleotide
ccaagagctgccgtgcatatacaataaatc

SEQ ID NO: 150805 - DNA, 30 bp, Artificial Sequence
  Synthetic oligonucleotide
cgacacttcttgagagtgggcgtataaatc

SEQ ID NO: 150806 - DNA, 30 bp, Artificial Sequence
  Synthetic oligonucleotide
ttaactcaagaagttgaataagcctaaatc

SEQ ID NO: 150807 - DNA, 30 bp, Artificial Sequence
  Synthetic oligonucleotide
cgtatgaccatgtggtctccatgttaaatc

SEQ ID NO: 150808 - DNA, 30 bp, Artificial Sequence
  Synthetic oligonucleotide
atccggacatggaagggagtacgaacaatc

SEQ ID NO: 150809 - DNA, 30 bp, Artificial Sequence
  Synthetic oligonucleotide
gaacctatgcacgcgtgtgagggaacaatc

SEQ ID NO: 150810 - DNA, 30 bp, Artificial Sequence
  Synthetic oligonucleotide
gtcctaatgattaacggactagggacaatc

SEQ ID NO: 150811 - DNA, 30 bp, Artificial Sequence
  Synthetic oligonucleotide
caacaggcatattaatccgtatgcccaatc

SEQ ID NO: 150812 - DNA, 30 bp, Artificial Sequence
  Synthetic oligonucleotide
ccggccatctatattttgcgtaagccaatc

SEQ ID NO: 150813 - DNA, 30 bp, Artificial Sequence
  Synthetic oligonucleotide
aaatggagattgaaccgggaatatccaatc

SEQ ID NO: 150814 - DNA, 30 bp, Artificial Sequence
  Synthetic oligonucleotide
aagaaggtatccgattccgaataagcaatc

SEQ ID NO: 150815 - DNA, 30 bp, Artificial Sequence
  Synthetic oligonucleotide
gagaagaacgtggatgggtactgcgcaatc

SEQ ID NO: 150816 - DNA, 30 bp, Artificial Sequence
  Synthetic oligonucleotide
gcagcgctattcagaacagtgatcgcaatc

SEQ ID NO: 150817 - DNA, 30 bp, Artificial Sequence
  Synthetic oligonucleotide
gccaattactcacgaaacaaaagggcaatc

SEQ ID NO: 150818 - DNA, 30 bp, Artificial Sequence
  Synthetic oligonucleotide
cgacaagggtccaggtttgtccatgcaatc

SEQ ID NO: 150819 - DNA, 30 bp, Artificial Sequence
  Synthetic oligonucleotide
aaggacatcagcgacaagtcgattgcaatc

SEQ ID NO: 150820 - DNA, 30 bp, Artificial Sequence
  Synthetic oligonucleotide
cggaaaagaaacgggcagtgtttgtcaatc

SEQ ID NO: 150821 - DNA, 30 bp, Artificial Sequence
  Synthetic oligonucleotide
taaaaggtcgttctcacaactgattcaatc

SEQ ID NO: 150822 - DNA, 30 bp, Artificial Sequence
  Synthetic oligonucleotide
ttgaacgcgaagctataggctgattcaatc

SEQ ID NO: 150823 - DNA, 30 bp, Artificial Sequence
  Synthetic oligonucleotide
gagatatccaagaatagtcaaacttcaatc

SEQ ID NO: 150824 - DNA, 30 bp, Artificial Sequence
  Synthetic oligonucleotide
taggaggcgcaatagcgaccaccaagaatc

SEQ ID NO: 150825 - DNA, 30 bp, Artificial Sequence
  Synthetic oligonucleotide
gtattttgccaagccttacatcagagaatc

SEQ ID NO: 150826 - DNA, 30 bp, Artificial Sequence
  Synthetic oligonucleotide
actgaatagtagtaacagaagccgagaatc

SEQ ID NO: 150827 - DNA, 30 bp, Artificial Sequence
  Synthetic oligonucleotide
acttgcgacagagctaatggatgtcgaatc

SEQ ID NO: 150828 - DNA, 30 bp, Artificial Sequence
  Synthetic oligonucleotide
gggtaccgtggaggtggatgggtaggaatc

SEQ ID NO: 150829 - DNA, 30 bp, Artificial Sequence
  Synthetic oligonucleotide
cccctccaatgtgaatcatagaacggaatc

SEQ ID NO: 150830 - DNA, 30 bp, Artificial Sequence
  Synthetic oligonucleotide
acagaagcgcctgatcttgttgagggaatc

SEQ ID NO: 150831 - DNA, 30 bp, Artificial Sequence
  Synthetic oligonucleotide
tccccatcaggtctggaacgataatgaatc

SEQ ID NO: 150832 - DNA, 30 bp, Artificial Sequence
  Synthetic oligonucleotide
gtaggagtggaagaagttttaggatgaatc

SEQ ID NO: 150833 - DNA, 30 bp, Artificial Sequence
  Synthetic oligonucleotide
agaagattgaaatggtcagatgtatgaatc

SEQ ID NO: 150834 - DNA, 30 bp, Artificial Sequence
  Synthetic oligonucleotide
gctatccgacacccagaaattacctgaatc

SEQ ID NO: 150835 - DNA, 30 bp, Artificial Sequence
  Synthetic oligonucleotide
tgaatcaaacgggtaaaaattagctgaatc

SEQ ID NO: 150836 - DNA, 30 bp, Artificial Sequence
  Synthetic oligonucleotide
gcatgcctaattagtgataatgtctgaatc

SEQ ID NO: 150837 - DNA, 30 bp, Artificial Sequence
  Synthetic oligonucleotide
gtaaaatagtaatggtacaaatgtataatc

SEQ ID NO: 150838 - DNA, 30 bp, Artificial Sequence
  Synthetic oligonucleotide
aatcatgtaatgccggatccggccgtaatc

SEQ ID NO: 150839 - DNA, 30 bp, Artificial Sequence
  Synthetic oligonucleotide
ttggtctggcccaggccttctgccgtaatc

SEQ ID NO: 150840 - DNA, 30 bp, Artificial Sequence
  Synthetic oligonucleotide
cctgggagaggagaaggatgaccggtaatc

SEQ ID NO: 150841 - DNA, 30 bp, Artificial Sequence
  Synthetic oligonucleotide
ttgtacaggatcttaataagcgaattaatc

SEQ ID NO: 150842 - DNA, 30 bp, Artificial Sequence
  Synthetic oligonucleotide
ttcgagacgggatttggcttgcgaaacatc

SEQ ID NO: 150843 - DNA, 30 bp, Artificial Sequence
  Synthetic oligonucleotide
gaaggaattatgaaacgtcccggcaacatc

SEQ ID NO: 150844 - DNA, 30 bp, Artificial Sequence
  Synthetic oligonucleotide
aaaatcgtaagcaaaccaactctcaacatc

SEQ ID NO: 150845 - DNA, 30 bp, Artificial Sequence
  Synthetic oligonucleotide
tgagaaacccagcttaacgctacgaacatc

SEQ ID NO: 150846 - DNA, 30 bp, Artificial Sequence
  Synthetic oligonucleotide
accataaaaccatctccaggtgctaacatc

SEQ ID NO: 150847 - DNA, 30 bp, Artificial Sequence
  Synthetic oligonucleotide
tcgggttgaaggcatattagcgcacacatc

SEQ ID NO: 150848 - DNA, 30 bp, Artificial Sequence
  Synthetic oligonucleotide
caccgtcttctccaaaagcgggtacacatc

SEQ ID NO: 150849 - DNA, 30 bp, Artificial Sequence
  Synthetic oligonucleotide
agcgctgtatgctctagtggatggcacatc

SEQ ID NO: 150850 - DNA, 30 bp, Artificial Sequence
  Synthetic oligonucleotide
tgggtccgaaccatacgcatgggtcacatc

SEQ ID NO: 150851 - DNA, 30 bp, Artificial Sequence
  Synthetic oligonucleotide
tcatagcgaagaaaatttttggtcgacatc

SEQ ID NO: 150852 - DNA, 30 bp, Artificial Sequence
  Synthetic oligonucleotide
accgcggttggctctcggaaaagggacatc

SEQ ID NO: 150853 - DNA, 30 bp, Artificial Sequence
  Synthetic oligonucleotide
aggaatctgcatttatggttaagggacatc

SEQ ID NO: 150854 - DNA, 30 bp, Artificial Sequence
  Synthetic oligonucleotide
ggtctggtgcgtaggttaggacgtgacatc

SEQ ID NO: 150855 - DNA, 30 bp, Artificial Sequence
  Synthetic oligonucleotide
tacagccgtgaacagcgtaccctgtacatc

SEQ ID NO: 150856 - DNA, 30 bp, Artificial Sequence
  Synthetic oligonucleotide
taccctactcgagacctaggattaaccatc

SEQ ID NO: 150857 - DNA, 29 bp, Artificial Sequence
  Synthetic oligonucleotide
tccttggcgctacaggctacttaaccatc

SEQ ID NO: 150858 - DNA, 30 bp, Artificial Sequence
  Synthetic oligonucleotide
ggagattcatttgtaagggcgaagaccatc

SEQ ID NO: 150859 - DNA, 30 bp, Artificial Sequence
  Synthetic oligonucleotide
atcatacaatggcctttatacggtaccatc

SEQ ID NO: 150860 - DNA, 30 bp, Artificial Sequence
  Synthetic oligonucleotide
ctgggtgggaacctcacctacctagccatc

SEQ ID NO: 150861 - DNA, 30 bp, Artificial Sequence
  Synthetic oligonucleotide
tgtggagggaaccgattttaactatccatc

SEQ ID NO: 150862 - DNA, 29 bp, Artificial Sequence
  Synthetic oligonucleotide
cgtttagggttattcgacagttctccatc

SEQ ID NO: 150863 - DNA, 30 bp, Artificial Sequence
  Synthetic oligonucleotide
taggcaacattccgaatgggctgcagcatc

SEQ ID NO: 150864 - DNA, 30 bp, Artificial Sequence
  Synthetic oligonucleotide
aaaactcgaccgagactcactcatagcatc

SEQ ID NO: 150865 - DNA, 30 bp, Artificial Sequence
  Synthetic oligonucleotide
attgagcaaatattgccaatgcaacgcatc

SEQ ID NO: 150866 - DNA, 30 bp, Artificial Sequence
  Synthetic oligonucleotide
agtcattctattggcgagtatacaggcatc

SEQ ID NO: 150867 - DNA, 30 bp, Artificial Sequence
  Synthetic oligonucleotide
ccccgtaacgttcgtgcacccctaggcatc

SEQ ID NO: 150868 - DNA, 30 bp, Artificial Sequence
  Synthetic oligonucleotide
tataccatttatagggacatgaccggcatc

SEQ ID NO: 150869 - DNA, 30 bp, Artificial Sequence
  Synthetic oligonucleotide
caattagctcctcgtaatgccttcggcatc

SEQ ID NO: 150870 - DNA, 30 bp, Artificial Sequence
  Synthetic oligonucleotide
ttcaaagcgactaataccgggcagtgcatc

SEQ ID NO: 150871 - DNA, 30 bp, Artificial Sequence
  Synthetic oligonucleotide
tcaagtccacgtcgaggcgggcgttgcatc

SEQ ID NO: 150872 - DNA, 30 bp, Artificial Sequence
  Synthetic oligonucleotide
cgggggtgcgggagggtaaagctttgcatc

SEQ ID NO: 150873 - DNA, 30 bp, Artificial Sequence
  Synthetic oligonucleotide
agtgtggtgggaagacaattggaactcatc

SEQ ID NO: 150874 - DNA, 30 bp, Artificial Sequence
  Synthetic oligonucleotide
ttgctcattttcgctacgtttactctcatc

SEQ ID NO: 150875 - DNA, 30 bp, Artificial Sequence
  Synthetic oligonucleotide
tggaaaagttcccgtcagttgggtctcatc

SEQ ID NO: 150876 - DNA, 30 bp, Artificial Sequence
  Synthetic oligonucleotide
aggctagtattgcatgtactgtgcgtcatc

SEQ ID NO: 150877 - DNA, 30 bp, Artificial Sequence
  Synthetic oligonucleotide
ggggagtagacggatgaaccaagggtcatc

SEQ ID NO: 150878 - DNA, 30 bp, Artificial Sequence
  Synthetic oligonucleotide
gcctgatggtatgcattaagaagggtcatc

SEQ ID NO: 150879 - DNA, 31 bp, Artificial Sequence
  Synthetic oligonucleotide
ttggccagggaactgcaaggaaggtgtcatc

SEQ ID NO: 150880 - DNA, 30 bp, Artificial Sequence
  Synthetic oligonucleotide
taatgacgatgaatgacaatcacattcatc

SEQ ID NO: 150881 - DNA, 30 bp, Artificial Sequence
  Synthetic oligonucleotide
aacagtaacaggactactgtcgacttcatc

SEQ ID NO: 150882 - DNA, 30 bp, Artificial Sequence
  Synthetic oligonucleotide
gattgggaggcgacaaacggggagttcatc

SEQ ID NO: 150883 - DNA, 30 bp, Artificial Sequence
  Synthetic oligonucleotide
aacctcaacaactcgctcgaggaaaagatc

SEQ ID NO: 150884 - DNA, 30 bp, Artificial Sequence
  Synthetic oligonucleotide
aaagacgtgagacagtaatattcaaagatc

SEQ ID NO: 150885 - DNA, 30 bp, Artificial Sequence
  Synthetic oligonucleotide
atggagtacctcgccatgcatggaaagatc

SEQ ID NO: 150886 - DNA, 30 bp, Artificial Sequence
  Synthetic oligonucleotide
agtgcacgtcttattcagcacgacaagatc

SEQ ID NO: 150887 - DNA, 30 bp, Artificial Sequence
  Synthetic oligonucleotide
ttagaggaacgtaaatcgacgcttaagatc

SEQ ID NO: 150888 - DNA, 30 bp, Artificial Sequence
  Synthetic oligonucleotide
tagtaaaacagtatccatagagaacagatc

SEQ ID NO: 150889 - DNA, 30 bp, Artificial Sequence
  Synthetic oligonucleotide
ctgaatagtgatactcgtttaaggcagatc

SEQ ID NO: 150890 - DNA, 30 bp, Artificial Sequence
  Synthetic oligonucleotide
cgtacctaagtgccgcttatggttgagatc

SEQ ID NO: 150891 - DNA, 30 bp, Artificial Sequence
  Synthetic oligonucleotide
aattaggctcgacaaagattttgctagatc

SEQ ID NO: 150892 - DNA, 30 bp, Artificial Sequence
  Synthetic oligonucleotide
acaataatggcaagtgcgagtcgttagatc

SEQ ID NO: 150893 - DNA, 30 bp, Artificial Sequence
  Synthetic oligonucleotide
cgttcaaacacagaagctccctgaacgatc

SEQ ID NO: 150894 - DNA, 30 bp, Artificial Sequence
  Synthetic oligonucleotide
tgatgggccaatatgggtaaactcacgatc

SEQ ID NO: 150895 - DNA, 30 bp, Artificial Sequence
  Synthetic oligonucleotide
agtcgagttgcccacgacacctttacgatc

SEQ ID NO: 150896 - DNA, 30 bp, Artificial Sequence
  Synthetic oligonucleotide
gcccgagacccgtagtcctcaagcccgatc

SEQ ID NO: 150897 - DNA, 30 bp, Artificial Sequence
  Synthetic oligonucleotide
gaccaaagagttgtgcggatcgctccgatc

SEQ ID NO: 150898 - DNA, 30 bp, Artificial Sequence
  Synthetic oligonucleotide
catggtaagtctgaatctctgaaagcgatc

SEQ ID NO: 150899 - DNA, 30 bp, Artificial Sequence
  Synthetic oligonucleotide
gtatcaaaccgtaacgggagcacagcgatc

SEQ ID NO: 150900 - DNA, 30 bp, Artificial Sequence
  Synthetic oligonucleotide
aggatacggaatttagcttccccagcgatc

SEQ ID NO: 150901 - DNA, 30 bp, Artificial Sequence
  Synthetic oligonucleotide
taccatgagaaactatcatcctgggcgatc

SEQ ID NO: 150902 - DNA, 30 bp, Artificial Sequence
  Synthetic oligonucleotide
aacactgtctaaccatcgctgacaaggatc

SEQ ID NO: 150903 - DNA, 30 bp, Artificial Sequence
  Synthetic oligonucleotide
gaagacggtgcgaacgaaagaaaacggatc

SEQ ID NO: 150904 - DNA, 30 bp, Artificial Sequence
  Synthetic oligonucleotide
ccaaagtggctacaattcaagcggcggatc

SEQ ID NO: 150905 - DNA, 30 bp, Artificial Sequence
  Synthetic oligonucleotide
ctgtggggatatataccgcgatggcggatc

SEQ ID NO: 150906 - DNA, 30 bp, Artificial Sequence
  Synthetic oligonucleotide
tggcaactggctttctgtggattcgggatc

SEQ ID NO: 150907 - DNA, 30 bp, Artificial Sequence
  Synthetic oligonucleotide
atgtgggaaaccccacaacatgtatggatc

SEQ ID NO: 150908 - DNA, 30 bp, Artificial Sequence
  Synthetic oligonucleotide
cacgtgggcaaatgtattccagcgtggatc

SEQ ID NO: 150909 - DNA, 30 bp, Artificial Sequence
  Synthetic oligonucleotide
cacttaatagtacccatagacacttggatc

SEQ ID NO: 150910 - DNA, 30 bp, Artificial Sequence
  Synthetic oligonucleotide
aggtatcggtacggtgggagtataatgatc

SEQ ID NO: 150911 - DNA, 30 bp, Artificial Sequence
  Synthetic oligonucleotide
agttacacctgtgtactgatacctatgatc

SEQ ID NO: 150912 - DNA, 30 bp, Artificial Sequence
  Synthetic oligonucleotide
tactctctttggaacaaacagcgagtgatc

SEQ ID NO: 150913 - DNA, 30 bp, Artificial Sequence
  Synthetic oligonucleotide
ttgatcatggtaggtccaaagctcgtgatc

SEQ ID NO: 150914 - DNA, 30 bp, Artificial Sequence
  Synthetic oligonucleotide
ggattaattggggacatctccagtgtgatc

SEQ ID NO: 150915 - DNA, 30 bp, Artificial Sequence
  Synthetic oligonucleotide
cgacatgctacgtctggaagcagtgtgatc

SEQ ID NO: 150916 - DNA, 30 bp, Artificial Sequence
  Synthetic oligonucleotide
aaaaaagacaaagcgaataaagtattgatc

SEQ ID NO: 150917 - DNA, 31 bp, Artificial Sequence
  Synthetic oligonucleotide
cagtcgttcggggataattctggtcaatatc

SEQ ID NO: 150918 - DNA, 30 bp, Artificial Sequence
  Synthetic oligonucleotide
acgtagcttcgaggcaactaaaaacatatc

SEQ ID NO: 150919 - DNA, 30 bp, Artificial Sequence
  Synthetic oligonucleotide
tagcctcaccactttaggttcaaacatatc

SEQ ID NO: 150920 - DNA, 30 bp, Artificial Sequence
  Synthetic oligonucleotide
gagatccatggtggtacaaccgcacatatc

SEQ ID NO: 150921 - DNA, 30 bp, Artificial Sequence
  Synthetic oligonucleotide
tcgggacagtatgcctcagcaagccatatc

SEQ ID NO: 150922 - DNA, 30 bp, Artificial Sequence
  Synthetic oligonucleotide
gcttgtggaataaacactggtagccatatc

SEQ ID NO: 150923 - DNA, 30 bp, Artificial Sequence
  Synthetic oligonucleotide
taccgccgcgtagtaccacccaatcatatc

SEQ ID NO: 150924 - DNA, 30 bp, Artificial Sequence
  Synthetic oligonucleotide
acgggaacttctccgggcttgtgtcatatc

SEQ ID NO: 150925 - DNA, 30 bp, Artificial Sequence
  Synthetic oligonucleotide
ggaaaacattaagaatgtgtacaagatatc

SEQ ID NO: 150926 - DNA, 30 bp, Artificial Sequence
  Synthetic oligonucleotide
tcgagaggagttgattcaacacgcgatatc

SEQ ID NO: 150927 - DNA, 30 bp, Artificial Sequence
  Synthetic oligonucleotide
tggtggaccgttatagtccactcggatatc

SEQ ID NO: 150928 - DNA, 30 bp, Artificial Sequence
  Synthetic oligonucleotide
gccgttaaccaaggctgttcttcggatatc

SEQ ID NO: 150929 - DNA, 30 bp, Artificial Sequence
  Synthetic oligonucleotide
gctccgaagtctatggagcacagtgatatc

SEQ ID NO: 150930 - DNA, 30 bp, Artificial Sequence
  Synthetic oligonucleotide
cggaacttgttaggttcagtcagtgatatc

SEQ ID NO: 150931 - DNA, 30 bp, Artificial Sequence
  Synthetic oligonucleotide
ttgatgaggagccgaccttcgatttatatc

SEQ ID NO: 150932 - DNA, 30 bp, Artificial Sequence
  Synthetic oligonucleotide
atgcacctatgggagaggccgggaactatc

SEQ ID NO: 150933 - DNA, 30 bp, Artificial Sequence
  Synthetic oligonucleotide
ttcagggcggggagtacttgttttactatc

SEQ ID NO: 150934 - DNA, 30 bp, Artificial Sequence
  Synthetic oligonucleotide
acttccctagggacgaccgacatgagtatc

SEQ ID NO: 150935 - DNA, 30 bp, Artificial Sequence
  Synthetic oligonucleotide
tccacatttactaatcatcgacaacgtatc

SEQ ID NO: 150936 - DNA, 30 bp, Artificial Sequence
  Synthetic oligonucleotide
catagtcaaactgtgtatacagtccgtatc

SEQ ID NO: 150937 - DNA, 30 bp, Artificial Sequence
  Synthetic oligonucleotide
attacctcgaacaattgtgccagcggtatc

SEQ ID NO: 150938 - DNA, 30 bp, Artificial Sequence
  Synthetic oligonucleotide
cagtcaacaacaatgtgaagttctggtatc

SEQ ID NO: 150939 - DNA, 30 bp, Artificial Sequence
  Synthetic oligonucleotide
gtgactagttacatacatcccagatgtatc

SEQ ID NO: 150940 - DNA, 30 bp, Artificial Sequence
  Synthetic oligonucleotide
actaacgaacaattttaaaccacctgtatc

SEQ ID NO: 150941 - DNA, 30 bp, Artificial Sequence
  Synthetic oligonucleotide
gggcggtcgaggcttaacaaacatattatc

SEQ ID NO: 150942 - DNA, 30 bp, Artificial Sequence
  Synthetic oligonucleotide
agtgacacagtcagaatgcacatacttatc

SEQ ID NO: 150943 - DNA, 30 bp, Artificial Sequence
  Synthetic oligonucleotide
gcatcttaaatgtgtgtgcggagagttatc

SEQ ID NO: 150944 - DNA, 30 bp, Artificial Sequence
  Synthetic oligonucleotide
aggttgacaggttcaatgagtcatgttatc

SEQ ID NO: 150945 - DNA, 30 bp, Artificial Sequence
  Synthetic oligonucleotide
ggtaccgcgatacccttcgtggctgttatc

SEQ ID NO: 150946 - DNA, 30 bp, Artificial Sequence
  Synthetic oligonucleotide
agattgaagtcaaatagtcggagatttatc

SEQ ID NO: 150947 - DNA, 30 bp, Artificial Sequence
  Synthetic oligonucleotide
cctggggtgggcgcccatcttttgaaactc

SEQ ID NO: 150948 - DNA, 30 bp, Artificial Sequence
  Synthetic oligonucleotide
gtatacccaggtcggaaataaagtaaactc

SEQ ID NO: 150949 - DNA, 30 bp, Artificial Sequence
  Synthetic oligonucleotide
tgaatgggcgcctctaaagagggataactc

SEQ ID NO: 150950 - DNA, 30 bp, Artificial Sequence
  Synthetic oligonucleotide
gtcgattacggtgttacaaccatgtaactc

SEQ ID NO: 150951 - DNA, 30 bp, Artificial Sequence
  Synthetic oligonucleotide
ccctcatataccacaatatggtgtacactc

SEQ ID NO: 150952 - DNA, 30 bp, Artificial Sequence
  Synthetic oligonucleotide
tccttactataattggaaggaatcccactc

SEQ ID NO: 150953 - DNA, 30 bp, Artificial Sequence
  Synthetic oligonucleotide
tgcatcattgcgtgggtagcctaagcactc

SEQ ID NO: 150954 - DNA, 30 bp, Artificial Sequence
  Synthetic oligonucleotide
tagaatggtgttgccccgaaagtctcactc

SEQ ID NO: 150955 - DNA, 30 bp, Artificial Sequence
  Synthetic oligonucleotide
cgatgctcacgaaaaccagagttctcactc

SEQ ID NO: 150956 - DNA, 30 bp, Artificial Sequence
  Synthetic oligonucleotide
ggacttgtgaagccataatgaaagtcactc

SEQ ID NO: 150957 - DNA, 30 bp, Artificial Sequence
  Synthetic oligonucleotide
gcgtaggccatcaagcgcggcgcgtcactc

SEQ ID NO: 150958 - DNA, 30 bp, Artificial Sequence
  Synthetic oligonucleotide
cagatcacttagaattctatcatcagactc

SEQ ID NO: 150959 - DNA, 30 bp, Artificial Sequence
  Synthetic oligonucleotide
aaaagttacatacagcgaaccgcgggactc

SEQ ID NO: 150960 - DNA, 30 bp, Artificial Sequence
  Synthetic oligonucleotide
caattcgcgaccatacatgcaatgggactc

SEQ ID NO: 150961 - DNA, 30 bp, Artificial Sequence
  Synthetic oligonucleotide
atggcttatcggaaaaactaattgggactc

SEQ ID NO: 150962 - DNA, 30 bp, Artificial Sequence
  Synthetic oligonucleotide
aatagggagatatcgcatggggcatgactc

SEQ ID NO: 150963 - DNA, 30 bp, Artificial Sequence
  Synthetic oligonucleotide
gatgttgggaaacaacggtcagaaatactc

SEQ ID NO: 150964 - DNA, 30 bp, Artificial Sequence
  Synthetic oligonucleotide
aaacagtgctggtgagttcgaagcatactc

SEQ ID NO: 150965 - DNA, 30 bp, Artificial Sequence
  Synthetic oligonucleotide
gataacactggacgtggttaggatctactc

SEQ ID NO: 150966 - DNA, 30 bp, Artificial Sequence
  Synthetic oligonucleotide
gggttgggcgacttagcgcgaccagtactc

SEQ ID NO: 150967 - DNA, 30 bp, Artificial Sequence
  Synthetic oligonucleotide
cactccaacgggacccgaaattgagtactc

SEQ ID NO: 150968 - DNA, 30 bp, Artificial Sequence
  Synthetic oligonucleotide
gacggtgggacagaaaccagtagtgtactc

SEQ ID NO: 150969 - DNA, 30 bp, Artificial Sequence
  Synthetic oligonucleotide
cgtctagcgtataagggggataaattactc

SEQ ID NO: 150970 - DNA, 30 bp, Artificial Sequence
  Synthetic oligonucleotide
agggatattaacatacagccacatttactc

SEQ ID NO: 150971 - DNA, 30 bp, Artificial Sequence
  Synthetic oligonucleotide
cgagactattaggaccgaatgggtttactc

SEQ ID NO: 150972 - DNA, 30 bp, Artificial Sequence
  Synthetic oligonucleotide
gatgccccatcaaggaccttcgttaacctc

SEQ ID NO: 150973 - DNA, 30 bp, Artificial Sequence
  Synthetic oligonucleotide
cgagtagaagtcctcaaagcgggccacctc

SEQ ID NO: 150974 - DNA, 30 bp, Artificial Sequence
  Synthetic oligonucleotide
aggatataagaagattgctgggcgcacctc

SEQ ID NO: 150975 - DNA, 30 bp, Artificial Sequence
  Synthetic oligonucleotide
ttatgcaaaatagtgggttagtggcacctc

SEQ ID NO: 150976 - DNA, 30 bp, Artificial Sequence
  Synthetic oligonucleotide
ggtaatgcccggtatctcaggaatcacctc

SEQ ID NO: 150977 - DNA, 30 bp, Artificial Sequence
  Synthetic oligonucleotide
tgccattacttcttgtgaccgaacgacctc

SEQ ID NO: 150978 - DNA, 30 bp, Artificial Sequence
  Synthetic oligonucleotide
gtcgtacgacttcggcgtcaaggcgacctc

SEQ ID NO: 150979 - DNA, 30 bp, Artificial Sequence
  Synthetic oligonucleotide
cacaggaagacaatcgatgacacatacctc

SEQ ID NO: 150980 - DNA, 30 bp, Artificial Sequence
  Synthetic oligonucleotide
aaggatctctaaggcagaaccgactacctc

SEQ ID NO: 150981 - DNA, 30 bp, Artificial Sequence
  Synthetic oligonucleotide
cttggggtggattcagaggaagaaaccctc

SEQ ID NO: 150982 - DNA, 30 bp, Artificial Sequence
  Synthetic oligonucleotide
gctggggcgaaatcatctgttgaaaccctc

SEQ ID NO: 150983 - DNA, 30 bp, Artificial Sequence
  Synthetic oligonucleotide
ggcatatcgatgttaatccacgcaaccctc

SEQ ID NO: 150984 - DNA, 30 bp, Artificial Sequence
  Synthetic oligonucleotide
gaaatgatgggaatctaaaccataaccctc

SEQ ID NO: 150985 - DNA, 30 bp, Artificial Sequence
  Synthetic oligonucleotide
tacaagccagtatagtcactatataccctc

SEQ ID NO: 150986 - DNA, 30 bp, Artificial Sequence
  Synthetic oligonucleotide
agtgactgagcgtgaaagcatgaagccctc

SEQ ID NO: 150987 - DNA, 30 bp, Artificial Sequence
  Synthetic oligonucleotide
ggcaagaaaattaatccaataacagccctc

SEQ ID NO: 150988 - DNA, 30 bp, Artificial Sequence
  Synthetic oligonucleotide
aagagctgacttcccgcccccaccagcctc

SEQ ID NO: 150989 - DNA, 30 bp, Artificial Sequence
  Synthetic oligonucleotide
aaaatggccaacacctaattagatagcctc

SEQ ID NO: 150990 - DNA, 30 bp, Artificial Sequence
  Synthetic oligonucleotide
cgcctcggttgaagaccttaaggtagcctc

SEQ ID NO: 150991 - DNA, 30 bp, Artificial Sequence
  Synthetic oligonucleotide
gctcgatgtggaagcgcaaacattagcctc

SEQ ID NO: 150992 - DNA, 30 bp, Artificial Sequence
  Synthetic oligonucleotide
agggtggtttccccccagtgccttagcctc

SEQ ID NO: 150993 - DNA, 30 bp, Artificial Sequence
  Synthetic oligonucleotide
cagatgtatagcactggacatcgtggcctc

SEQ ID NO: 150994 - DNA, 30 bp, Artificial Sequence
  Synthetic oligonucleotide
accaatgtaatgtggacagtcacttgcctc

SEQ ID NO: 150995 - DNA, 30 bp, Artificial Sequence
  Synthetic oligonucleotide
atggctcattaggccattttcggttgcctc

SEQ ID NO: 150996 - DNA, 30 bp, Artificial Sequence
  Synthetic oligonucleotide
cacctgaccgctcatacacgaatcatcctc

SEQ ID NO: 150997 - DNA, 30 bp, Artificial Sequence
  Synthetic oligonucleotide
tactggggttgtcgtaaagcggtgatcctc

SEQ ID NO: 150998 - DNA, 30 bp, Artificial Sequence
  Synthetic oligonucleotide
tgacgacgcctaccaggacacgcactcctc

SEQ ID NO: 150999 - DNA, 30 bp, Artificial Sequence
  Synthetic oligonucleotide
aatgttgcggtgaaagcacaagcattcctc

SEQ ID NO: 151000 - DNA, 30 bp, Artificial Sequence
  Synthetic oligonucleotide
cgagaaagagctctccatatcgagcagctc

SEQ ID NO: 151001 - DNA, 30 bp, Artificial Sequence
  Synthetic oligonucleotide
gcctggacagatgcttacgtgtaggagctc

SEQ ID NO: 151002 - DNA, 30 bp, Artificial Sequence
  Synthetic oligonucleotide
cggccgcttccagtggagtgtctctagctc

SEQ ID NO: 151003 - DNA, 30 bp, Artificial Sequence
  Synthetic oligonucleotide
agagcataactgcgccttactttgtagctc

SEQ ID NO: 151004 - DNA, 30 bp, Artificial Sequence
  Synthetic oligonucleotide
ttcgccaaacaatagtcctgaaattagctc

SEQ ID NO: 151005 - DNA, 30 bp, Artificial Sequence
  Synthetic oligonucleotide
ggtacatttatcaatcagatatattagctc

SEQ ID NO: 151006 - DNA, 30 bp, Artificial Sequence
  Synthetic oligonucleotide
ccaaagagcgaaggattcgttcgttagctc

SEQ ID NO: 151007 - DNA, 30 bp, Artificial Sequence
  Synthetic oligonucleotide
cgattcagccagggtgaacagcccacgctc

SEQ ID NO: 151008 - DNA, 30 bp, Artificial Sequence
  Synthetic oligonucleotide
catggggaacccttctacgggatcacgctc

SEQ ID NO: 151009 - DNA, 30 bp, Artificial Sequence
  Synthetic oligonucleotide
aaaagggagtggtgatcacagggtacgctc

SEQ ID NO: 151010 - DNA, 30 bp, Artificial Sequence
  Synthetic oligonucleotide
ctaccgacccctcatcgccaagcaccgctc

SEQ ID NO: 151011 - DNA, 30 bp, Artificial Sequence
  Synthetic oligonucleotide
agcggttcggggtgctgcgtagtaccgctc

SEQ ID NO: 151012 - DNA, 30 bp, Artificial Sequence
  Synthetic oligonucleotide
gtgctatccctggtatgcgcaaagccgctc

SEQ ID NO: 151013 - DNA, 30 bp, Artificial Sequence
  Synthetic oligonucleotide
gcagaaggggtgctataccaaactccgctc

SEQ ID NO: 151014 - DNA, 29 bp, Artificial Sequence
  Synthetic oligonucleotide
ggttgcagtcaagttgaaatacagcgctc

SEQ ID NO: 151015 - DNA, 30 bp, Artificial Sequence
  Synthetic oligonucleotide
gtgtcgtataccaccgacaggtcggcgctc

SEQ ID NO: 151016 - DNA, 30 bp, Artificial Sequence
  Synthetic oligonucleotide
tatggtgatgacagtgcgcataggaggctc

SEQ ID NO: 151017 - DNA, 30 bp, Artificial Sequence
  Synthetic oligonucleotide
tggactcacgaaccggacgtaagtaggctc

SEQ ID NO: 151018 - DNA, 30 bp, Artificial Sequence
  Synthetic oligonucleotide
tctacataaaacgagttataacaccggctc

SEQ ID NO: 151019 - DNA, 30 bp, Artificial Sequence
  Synthetic oligonucleotide
gaatggatacggccctcatataatgggctc

SEQ ID NO: 151020 - DNA, 30 bp, Artificial Sequence
  Synthetic oligonucleotide
caaccgctccgatagtagatagttgggctc

SEQ ID NO: 151021 - DNA, 30 bp, Artificial Sequence
  Synthetic oligonucleotide
cgacgggtgccgcataaaccaccttggctc

SEQ ID NO: 151022 - DNA, 30 bp, Artificial Sequence
  Synthetic oligonucleotide
gtgaaaattgcgaggatcttcagaatgctc

SEQ ID NO: 151023 - DNA, 30 bp, Artificial Sequence
  Synthetic oligonucleotide
ataggccttaaggatttcaagcagctgctc

SEQ ID NO: 151024 - DNA, 30 bp, Artificial Sequence
  Synthetic oligonucleotide
tgctgacgtcaggtgttttaaaaagtgctc

SEQ ID NO: 151025 - DNA, 30 bp, Artificial Sequence
  Synthetic oligonucleotide
attggccgtgatacgaactcaagggtgctc

SEQ ID NO: 151026 - DNA, 30 bp, Artificial Sequence
  Synthetic oligonucleotide
ctatcgtatactggtgattaataattgctc

SEQ ID NO: 151027 - DNA, 30 bp, Artificial Sequence
  Synthetic oligonucleotide
atagcctgcctccaccgatatgcgttgctc

SEQ ID NO: 151028 - DNA, 30 bp, Artificial Sequence
  Synthetic oligonucleotide
gggaatggcgccagagacaagattcatctc

SEQ ID NO: 151029 - DNA, 30 bp, Artificial Sequence
  Synthetic oligonucleotide
aagtcataggggttaagatggattcatctc

SEQ ID NO: 151030 - DNA, 30 bp, Artificial Sequence
  Synthetic oligonucleotide
tggagcttaaagtcgctgtaaaaagatctc

SEQ ID NO: 151031 - DNA, 30 bp, Artificial Sequence
  Synthetic oligonucleotide
ggtggggcaaaatctttctatcccgatctc

SEQ ID NO: 151032 - DNA, 30 bp, Artificial Sequence
  Synthetic oligonucleotide
tcttctacctcgttgccatcgggatatctc

SEQ ID NO: 151033 - DNA, 30 bp, Artificial Sequence
  Synthetic oligonucleotide
gcgaggcgacaattacccattgggtatctc

SEQ ID NO: 151034 - DNA, 30 bp, Artificial Sequence
  Synthetic oligonucleotide
tcgtattgatcaaggacgggcgtgtatctc

SEQ ID NO: 151035 - DNA, 30 bp, Artificial Sequence
  Synthetic oligonucleotide
cggtattccgagggcgcgtgctgaactctc

SEQ ID NO: 151036 - DNA, 30 bp, Artificial Sequence
  Synthetic oligonucleotide
gttagggttcgccacaaagtactaactctc

SEQ ID NO: 151037 - DNA, 30 bp, Artificial Sequence
  Synthetic oligonucleotide
atatcagtcccaaagctgcccctcactctc

SEQ ID NO: 151038 - DNA, 30 bp, Artificial Sequence
  Synthetic oligonucleotide
ataggcgacacacgtcctcctgaggctctc

SEQ ID NO: 151039 - DNA, 30 bp, Artificial Sequence
  Synthetic oligonucleotide
accgcaaagtactcatcgtagcatgctctc

SEQ ID NO: 151040 - DNA, 30 bp, Artificial Sequence
  Synthetic oligonucleotide
gccgagggaacgtccgtctgcggatctctc

SEQ ID NO: 151041 - DNA, 30 bp, Artificial Sequence
  Synthetic oligonucleotide
gggttactctgtaaccaaagagccagtctc

SEQ ID NO: 151042 - DNA, 30 bp, Artificial Sequence
  Synthetic oligonucleotide
ccagttgagtggtcagataatccgagtctc

SEQ ID NO: 151043 - DNA, 30 bp, Artificial Sequence
  Synthetic oligonucleotide
tgaaatgctaatccgctccttgcgagtctc

SEQ ID NO: 151044 - DNA, 30 bp, Artificial Sequence
  Synthetic oligonucleotide
ggcaaattacaccgttgcattaggagtctc

SEQ ID NO: 151045 - DNA, 30 bp, Artificial Sequence
  Synthetic oligonucleotide
tgagcaggatcagtcaaagtagggagtctc

SEQ ID NO: 151046 - DNA, 30 bp, Artificial Sequence
  Synthetic oligonucleotide
gttagtagtaagcgactagtcggccgtctc

SEQ ID NO: 151047 - DNA, 30 bp, Artificial Sequence
  Synthetic oligonucleotide
gcggagttacgtacgttcttgaggcgtctc

SEQ ID NO: 151048 - DNA, 30 bp, Artificial Sequence
  Synthetic oligonucleotide
gaactggttggcggacggcacccatgtctc

SEQ ID NO: 151049 - DNA, 30 bp, Artificial Sequence
  Synthetic oligonucleotide
tgttaattagggtcaacacaccatattctc

SEQ ID NO: 151050 - DNA, 30 bp, Artificial Sequence
  Synthetic oligonucleotide
tgcgtactgggctagacatggcgggttctc

SEQ ID NO: 151051 - DNA, 30 bp, Artificial Sequence
  Synthetic oligonucleotide
actaagcggtcatggtcggagatatttctc

SEQ ID NO: 151052 - DNA, 30 bp, Artificial Sequence
  Synthetic oligonucleotide
tcgcgatgatgcggtcctgcagaaaaagtc

SEQ ID NO: 151053 - DNA, 30 bp, Artificial Sequence
  Synthetic oligonucleotide
tatcgatagacttatggaatgaggaaagtc

SEQ ID NO: 151054 - DNA, 30 bp, Artificial Sequence
  Synthetic oligonucleotide
taacagggataagtagtactacataaagtc

SEQ ID NO: 151055 - DNA, 30 bp, Artificial Sequence
  Synthetic oligonucleotide
ttactctccacttaccccttaactaaagtc

SEQ ID NO: 151056 - DNA, 30 bp, Artificial Sequence
  Synthetic oligonucleotide
gggcatatacccggacgcaatccagaagtc

SEQ ID NO: 151057 - DNA, 30 bp, Artificial Sequence
  Synthetic oligonucleotide
caactaaagttctccactactatcgaagtc

SEQ ID NO: 151058 - DNA, 30 bp, Artificial Sequence
  Synthetic oligonucleotide
tggacatgcaagcaacatgctaggtaagtc

SEQ ID NO: 151059 - DNA, 30 bp, Artificial Sequence
  Synthetic oligonucleotide
gcgcctagcatagcgccctgaagttaagtc

SEQ ID NO: 151060 - DNA, 30 bp, Artificial Sequence
  Synthetic oligonucleotide
ttcagggataagggatgcaagtgaacagtc

SEQ ID NO: 151061 - DNA, 30 bp, Artificial Sequence
  Synthetic oligonucleotide
gtacataagacccgccacgacgtaacagtc

SEQ ID NO: 151062 - DNA, 30 bp, Artificial Sequence
  Synthetic oligonucleotide
atgcgttgaagtgcacacgccgagacagtc

SEQ ID NO: 151063 - DNA, 30 bp, Artificial Sequence
  Synthetic oligonucleotide
atactcatcactgctaaatccgagacagtc

SEQ ID NO: 151064 - DNA, 30 bp, Artificial Sequence
  Synthetic oligonucleotide
agatattaggggaacggtccgcacccagtc

SEQ ID NO: 151065 - DNA, 30 bp, Artificial Sequence
  Synthetic oligonucleotide
agccaggcgagatcaaggttttagccagtc

SEQ ID NO: 151066 - DNA, 30 bp, Artificial Sequence
  Synthetic oligonucleotide
ttaaaatggaggttcaaatcttggccagtc

SEQ ID NO: 151067 - DNA, 30 bp, Artificial Sequence
  Synthetic oligonucleotide
tgaggcatacatggtgtgaatgtgccagtc

SEQ ID NO: 151068 - DNA, 30 bp, Artificial Sequence
  Synthetic oligonucleotide
aaggatcaggcctaatacccaggagcagtc

SEQ ID NO: 151069 - DNA, 30 bp, Artificial Sequence
  Synthetic oligonucleotide
gactcctgatttccaataaaccgcgcagtc

SEQ ID NO: 151070 - DNA, 30 bp, Artificial Sequence
  Synthetic oligonucleotide
gaaaatatggacccaatacagaaggcagtc

SEQ ID NO: 151071 - DNA, 30 bp, Artificial Sequence
  Synthetic oligonucleotide
gaggacttaaatagtaaactaccatcagtc

SEQ ID NO: 151072 - DNA, 30 bp, Artificial Sequence
  Synthetic oligonucleotide
tgggtgagctacgtagcgggcaaaagagtc

SEQ ID NO: 151073 - DNA, 30 bp, Artificial Sequence
  Synthetic oligonucleotide
ggatatgataaagcctctacgacaagagtc

SEQ ID NO: 151074 - DNA, 30 bp, Artificial Sequence
  Synthetic oligonucleotide
actgtccaacgggtgaccgacaggagagtc

SEQ ID NO: 151075 - DNA, 30 bp, Artificial Sequence
  Synthetic oligonucleotide
aatcctggcacagggaatggaaaccgagtc

SEQ ID NO: 151076 - DNA, 30 bp, Artificial Sequence
  Synthetic oligonucleotide
gaaggacggcccgtggactgtaatcgagtc

SEQ ID NO: 151077 - DNA, 30 bp, Artificial Sequence
  Synthetic oligonucleotide
tggcgggaggtacaacatgattatcgagtc

SEQ ID NO: 151078 - DNA, 30 bp, Artificial Sequence
  Synthetic oligonucleotide
gtgcataaagccacggaaccacgtcgagtc

SEQ ID NO: 151079 - DNA, 30 bp, Artificial Sequence
  Synthetic oligonucleotide
gagggtcataagcgaagctagccatgagtc

SEQ ID NO: 151080 - DNA, 30 bp, Artificial Sequence
  Synthetic oligonucleotide
cttataccggcgacgggtttcgtctgagtc

SEQ ID NO: 151081 - DNA, 30 bp, Artificial Sequence
  Synthetic oligonucleotide
agtacggcacattaaatgcaaacgtgagtc

SEQ ID NO: 151082 - DNA, 30 bp, Artificial Sequence
  Synthetic oligonucleotide
tccaactttaacttttggccttcgtgagtc

SEQ ID NO: 151083 - DNA, 30 bp, Artificial Sequence
  Synthetic oligonucleotide
ggagtagtttaagggtaactcgcaatagtc

SEQ ID NO: 151084 - DNA, 30 bp, Artificial Sequence
  Synthetic oligonucleotide
cgcttaggttacttatgtccgaaagtagtc

SEQ ID NO: 151085 - DNA, 30 bp, Artificial Sequence
  Synthetic oligonucleotide
cctaatcttttcactgcaaggttagtagtc

SEQ ID NO: 151086 - DNA, 30 bp, Artificial Sequence
  Synthetic oligonucleotide
aggctctgagtaatacaatagaacttagtc

SEQ ID NO: 151087 - DNA, 30 bp, Artificial Sequence
  Synthetic oligonucleotide
ctcggggggcttgttttatcgttcttagtc

SEQ ID NO: 151088 - DNA, 30 bp, Artificial Sequence
  Synthetic oligonucleotide
agcgttataccccaagcgaggactttagtc

SEQ ID NO: 151089 - DNA, 30 bp, Artificial Sequence
  Synthetic oligonucleotide
gtggatctgaagtatgtccgctaaaacgtc

SEQ ID NO: 151090 - DNA, 30 bp, Artificial Sequence
  Synthetic oligonucleotide
ttagggatcaagcgagcacagtcgcacgtc

SEQ ID NO: 151091 - DNA, 30 bp, Artificial Sequence
  Synthetic oligonucleotide
tacgcatgtcttatcgggtgatttcacgtc

SEQ ID NO: 151092 - DNA, 30 bp, Artificial Sequence
  Synthetic oligonucleotide
ccgtattaactctagcgcacagcagacgtc

SEQ ID NO: 151093 - DNA, 30 bp, Artificial Sequence
  Synthetic oligonucleotide
aaagaagtgcgtcgtaagtagggggacgtc

SEQ ID NO: 151094 - DNA, 30 bp, Artificial Sequence
  Synthetic oligonucleotide
caaccttatcatcttgaaggaaactacgtc

SEQ ID NO: 151095 - DNA, 30 bp, Artificial Sequence
  Synthetic oligonucleotide
acttacaacgacatgtgtctcggctacgtc

SEQ ID NO: 151096 - DNA, 30 bp, Artificial Sequence
  Synthetic oligonucleotide
gtttccgtcttagagagaaatccgtacgtc

SEQ ID NO: 151097 - DNA, 30 bp, Artificial Sequence
  Synthetic oligonucleotide
ttattgttgagttgagaccgagggaccgtc

SEQ ID NO: 151098 - DNA, 30 bp, Artificial Sequence
  Synthetic oligonucleotide
ccaccaccactggggcgatgagcagccgtc

SEQ ID NO: 151099 - DNA, 30 bp, Artificial Sequence
  Synthetic oligonucleotide
tcatgcgcgtggtcgggataatcagccgtc

SEQ ID NO: 151100 - DNA, 30 bp, Artificial Sequence
  Synthetic oligonucleotide
acggcaataggtgatgcatataccgccgtc

SEQ ID NO: 151101 - DNA, 30 bp, Artificial Sequence
  Synthetic oligonucleotide
gaccaggggtaccgaatacatatcagcgtc

SEQ ID NO: 151102 - DNA, 30 bp, Artificial Sequence
  Synthetic oligonucleotide
acgataatgaaacatgggtgttggagcgtc

SEQ ID NO: 151103 - DNA, 30 bp, Artificial Sequence
  Synthetic oligonucleotide
ggcagccctgttgttacacaaaatagcgtc

SEQ ID NO: 151104 - DNA, 30 bp, Artificial Sequence
  Synthetic oligonucleotide
cggcaggcagggatcttaatcctacgcgtc

SEQ ID NO: 151105 - DNA, 30 bp, Artificial Sequence
  Synthetic oligonucleotide
gtcaagtttgaataacgccatgaaggcgtc

SEQ ID NO: 151106 - DNA, 30 bp, Artificial Sequence
  Synthetic oligonucleotide
caccgaaaatgggattctttgataggcgtc

SEQ ID NO: 151107 - DNA, 30 bp, Artificial Sequence
  Synthetic oligonucleotide
gggcgtttctcgctagaaaagcttggcgtc

SEQ ID NO: 151108 - DNA, 30 bp, Artificial Sequence
  Synthetic oligonucleotide
ttcaacaacacacgttatgcatggtgcgtc

SEQ ID NO: 151109 - DNA, 30 bp, Artificial Sequence
  Synthetic oligonucleotide
agggtgccgggttcactgaaaatgtgcgtc

SEQ ID NO: 151110 - DNA, 30 bp, Artificial Sequence
  Synthetic oligonucleotide
tcaggctaagacaggggcatgacttgcgtc

SEQ ID NO: 151111 - DNA, 30 bp, Artificial Sequence
  Synthetic oligonucleotide
aatgctatagtttattaaaggccaatcgtc

SEQ ID NO: 151112 - DNA, 30 bp, Artificial Sequence
  Synthetic oligonucleotide
gtcgtgcacaggattgttcaccacatcgtc

SEQ ID NO: 151113 - DNA, 30 bp, Artificial Sequence
  Synthetic oligonucleotide
catgcgatccatgccgtcaaggaactcgtc

SEQ ID NO: 151114 - DNA, 30 bp, Artificial Sequence
  Synthetic oligonucleotide
gggccagggaattatgacggctaactcgtc

SEQ ID NO: 151115 - DNA, 30 bp, Artificial Sequence
  Synthetic oligonucleotide
gaacgtcacccccacagtattgtgctcgtc

SEQ ID NO: 151116 - DNA, 30 bp, Artificial Sequence
  Synthetic oligonucleotide
ctttcgactgaatggattactgtagtcgtc

SEQ ID NO: 151117 - DNA, 30 bp, Artificial Sequence
  Synthetic oligonucleotide
ccgtccaagttctcgttggataaggtcgtc

SEQ ID NO: 151118 - DNA, 30 bp, Artificial Sequence
  Synthetic oligonucleotide
cagtcggtggatctccctgcatgtttcgtc

SEQ ID NO: 151119 - DNA, 30 bp, Artificial Sequence
  Synthetic oligonucleotide
cgatcttaagaaggatcgatatgaaaggtc

SEQ ID NO: 151120 - DNA, 30 bp, Artificial Sequence
  Synthetic oligonucleotide
cgttagaatacaagtccaaaacggaaggtc

SEQ ID NO: 151121 - DNA, 30 bp, Artificial Sequence
  Synthetic oligonucleotide
atcccggatatcccatagcgggcacaggtc

SEQ ID NO: 151122 - DNA, 30 bp, Artificial Sequence
  Synthetic oligonucleotide
cgtctcgtctgatctcaaagtttacaggtc

SEQ ID NO: 151123 - DNA, 30 bp, Artificial Sequence
  Synthetic oligonucleotide
gtacagtggagatcggttaaccaccaggtc

SEQ ID NO: 151124 - DNA, 31 bp, Artificial Sequence
  Synthetic oligonucleotide
tgtcctcaacaatactaaaagtagccaggtc

SEQ ID NO: 151125 - DNA, 30 bp, Artificial Sequence
  Synthetic oligonucleotide
tttgggacgacccttgctaaatggcaggtc

SEQ ID NO: 151126 - DNA, 30 bp, Artificial Sequence
  Synthetic oligonucleotide
ataactctaccattcttgcgaaaagaggtc

SEQ ID NO: 151127 - DNA, 30 bp, Artificial Sequence
  Synthetic oligonucleotide
ggcgctccgaaggtcattattcatgaggtc

SEQ ID NO: 151128 - DNA, 30 bp, Artificial Sequence
  Synthetic oligonucleotide
agatagcgttcgagggcaggggatgaggtc

SEQ ID NO: 151129 - DNA, 30 bp, Artificial Sequence
  Synthetic oligonucleotide
tacctcgtaagcgaccccctggtgacggtc

SEQ ID NO: 151130 - DNA, 30 bp, Artificial Sequence
  Synthetic oligonucleotide
gccagccacaacttagaacatctaccggtc

SEQ ID NO: 151131 - DNA, 30 bp, Artificial Sequence
  Synthetic oligonucleotide
acataaagaacggagcgataaatggcggtc

SEQ ID NO: 151132 - DNA, 30 bp, Artificial Sequence
  Synthetic oligonucleotide
atacagggtcaagacagtatctatgcggtc

SEQ ID NO: 151133 - DNA, 30 bp, Artificial Sequence
  Synthetic oligonucleotide
tgtaagccaagttacgtggtccactcggtc

SEQ ID NO: 151134 - DNA, 30 bp, Artificial Sequence
  Synthetic oligonucleotide
acgatatgttcaacctgaagcatctcggtc

SEQ ID NO: 151135 - DNA, 30 bp, Artificial Sequence
  Synthetic oligonucleotide
actcatgagagggacaattacacttcggtc

SEQ ID NO: 151136 - DNA, 30 bp, Artificial Sequence
  Synthetic oligonucleotide
gccggcctcaagtaataaagggacagggtc

SEQ ID NO: 151137 - DNA, 28 bp, Artificial Sequence
  Synthetic oligonucleotide
tttatcgaatggcagggccacgagggtc

SEQ ID NO: 151138 - DNA, 31 bp, Artificial Sequence
  Synthetic oligonucleotide
cagtcgcaaggcctgcgcacgtaggagggtc

SEQ ID NO: 151139 - DNA, 30 bp, Artificial Sequence
  Synthetic oligonucleotide
atcgcaacaggaagcaaaagtattcgggtc

SEQ ID NO: 151140 - DNA, 30 bp, Artificial Sequence
  Synthetic oligonucleotide
gagatggaaatgatgatcgattaaggggtc

SEQ ID NO: 151141 - DNA, 30 bp, Artificial Sequence
  Synthetic oligonucleotide
aagcattacaggaaaaccattaccggggtc

SEQ ID NO: 151142 - DNA, 30 bp, Artificial Sequence
  Synthetic oligonucleotide
atgcgagaaggacagacgcgctgcggggtc

SEQ ID NO: 151143 - DNA, 30 bp, Artificial Sequence
  Synthetic oligonucleotide
gggtgtttcgatactgtggctgagggggtc

SEQ ID NO: 151144 - DNA, 30 bp, Artificial Sequence
  Synthetic oligonucleotide
catgggctcgattgttgatcgtctggggtc

SEQ ID NO: 151145 - DNA, 30 bp, Artificial Sequence
  Synthetic oligonucleotide
tgggaccgtcagacgattagcagtggggtc

SEQ ID NO: 151146 - DNA, 30 bp, Artificial Sequence
  Synthetic oligonucleotide
cgtagagaggtaatttcaatcagtggggtc

SEQ ID NO: 151147 - DNA, 30 bp, Artificial Sequence
  Synthetic oligonucleotide
agtcgccggcaaggatgaagtgcctgggtc

SEQ ID NO: 151148 - DNA, 30 bp, Artificial Sequence
  Synthetic oligonucleotide
tgtgaccatcgccagtagagaccgatggtc

SEQ ID NO: 151149 - DNA, 30 bp, Artificial Sequence
  Synthetic oligonucleotide
acggcttaagtaatggtcggctcgctggtc

SEQ ID NO: 151150 - DNA, 30 bp, Artificial Sequence
  Synthetic oligonucleotide
aagagaacttcaaatttagtcaatctggtc

SEQ ID NO: 151151 - DNA, 30 bp, Artificial Sequence
  Synthetic oligonucleotide
aggaagtccatgaatgatagtggggtggtc

SEQ ID NO: 151152 - DNA, 30 bp, Artificial Sequence
  Synthetic oligonucleotide
atcgggctctagcagtttgagcgattggtc

SEQ ID NO: 151153 - DNA, 30 bp, Artificial Sequence
  Synthetic oligonucleotide
tcgggcggaagtaaggatgtcttgttggtc

SEQ ID NO: 151154 - DNA, 30 bp, Artificial Sequence
  Synthetic oligonucleotide
acttaccgcgccaacaccgttgcaaatgtc

SEQ ID NO: 151155 - DNA, 30 bp, Artificial Sequence
  Synthetic oligonucleotide
ttgcggaggggaaaagaccctcgaaatgtc

SEQ ID NO: 151156 - DNA, 30 bp, Artificial Sequence
  Synthetic oligonucleotide
ggtgtaatagggtagttctgctgcaatgtc

SEQ ID NO: 151157 - DNA, 30 bp, Artificial Sequence
  Synthetic oligonucleotide
gaccatgttccccagttaggcctcaatgtc

SEQ ID NO: 151158 - DNA, 30 bp, Artificial Sequence
  Synthetic oligonucleotide
tatagcctttgatcgagcctacggaatgtc

SEQ ID NO: 151159 - DNA, 30 bp, Artificial Sequence
  Synthetic oligonucleotide
tgcgatgtacaacacggagtcactcatgtc

SEQ ID NO: 151160 - DNA, 30 bp, Artificial Sequence
  Synthetic oligonucleotide
acgattaagtcaaatctagaataagatgtc

SEQ ID NO: 151161 - DNA, 30 bp, Artificial Sequence
  Synthetic oligonucleotide
cttcaataaaaggaagaccatatcgatgtc

SEQ ID NO: 151162 - DNA, 30 bp, Artificial Sequence
  Synthetic oligonucleotide
tacgcgcggatggaactctcattcgatgtc

SEQ ID NO: 151163 - DNA, 30 bp, Artificial Sequence
  Synthetic oligonucleotide
tctacactcttagtcaatcttacggatgtc

SEQ ID NO: 151164 - DNA, 30 bp, Artificial Sequence
  Synthetic oligonucleotide
gtctcacaaaccccgcaatcaccggatgtc

SEQ ID NO: 151165 - DNA, 30 bp, Artificial Sequence
  Synthetic oligonucleotide
cgaggccaattggttagcctccgtgatgtc

SEQ ID NO: 151166 - DNA, 30 bp, Artificial Sequence
  Synthetic oligonucleotide
agggtgttccctgttcaccgtccatatgtc

SEQ ID NO: 151167 - DNA, 30 bp, Artificial Sequence
  Synthetic oligonucleotide
aggggaacgtatgtatttcaatcatatgtc

SEQ ID NO: 151168 - DNA, 30 bp, Artificial Sequence
  Synthetic oligonucleotide
cggcaatagctgagtcccatctcatatgtc

SEQ ID NO: 151169 - DNA, 30 bp, Artificial Sequence
  Synthetic oligonucleotide
agcgaagatagtaagataagggactatgtc

SEQ ID NO: 151170 - DNA, 30 bp, Artificial Sequence
  Synthetic oligonucleotide
gtatcacgtgaagacagaggaaagtatgtc

SEQ ID NO: 151171 - DNA, 30 bp, Artificial Sequence
  Synthetic oligonucleotide
tccatgtaaagaagtaagcagatgtatgtc

SEQ ID NO: 151172 - DNA, 30 bp, Artificial Sequence
  Synthetic oligonucleotide
ggtgctgattgtcgcgatactcgttatgtc

SEQ ID NO: 151173 - DNA, 30 bp, Artificial Sequence
  Synthetic oligonucleotide
cgatacgtggccacccatagctaaactgtc

SEQ ID NO: 151174 - DNA, 30 bp, Artificial Sequence
  Synthetic oligonucleotide
gtaagcttcgccgaacgggagtggactgtc

SEQ ID NO: 151175 - DNA, 30 bp, Artificial Sequence
  Synthetic oligonucleotide
agaataggatgtcaggagtgcgatactgtc

SEQ ID NO: 151176 - DNA, 30 bp, Artificial Sequence
  Synthetic oligonucleotide
cctcgtctcttggccggttgccttactgtc

SEQ ID NO: 151177 - DNA, 30 bp, Artificial Sequence
  Synthetic oligonucleotide
tgacatagccgggactagcgtaggcctgtc

SEQ ID NO: 151178 - DNA, 30 bp, Artificial Sequence
  Synthetic oligonucleotide
gggactaaacaacgaaagagttcctctgtc

SEQ ID NO: 151179 - DNA, 30 bp, Artificial Sequence
  Synthetic oligonucleotide
tcattttgtcggccggaaagtgaaagtgtc

SEQ ID NO: 151180 - DNA, 30 bp, Artificial Sequence
  Synthetic oligonucleotide
agacacccactagatagtattcagagtgtc

SEQ ID NO: 151181 - DNA, 30 bp, Artificial Sequence
  Synthetic oligonucleotide
agtggaggttagcctgcgctcaatagtgtc

SEQ ID NO: 151182 - DNA, 30 bp, Artificial Sequence
  Synthetic oligonucleotide
gtgcaatatgcggtgatagcaattagtgtc

SEQ ID NO: 151183 - DNA, 30 bp, Artificial Sequence
  Synthetic oligonucleotide
gacatcacgattaactgatcgaaacgtgtc

SEQ ID NO: 151184 - DNA, 30 bp, Artificial Sequence
  Synthetic oligonucleotide
gtgactgtgttttagtcgccagtgcgtgtc

SEQ ID NO: 151185 - DNA, 30 bp, Artificial Sequence
  Synthetic oligonucleotide
gtagacaataaccgatcgacgtttcgtgtc

SEQ ID NO: 151186 - DNA, 30 bp, Artificial Sequence
  Synthetic oligonucleotide
aggattgtcaacatcgtagagtaaggtgtc

SEQ ID NO: 151187 - DNA, 30 bp, Artificial Sequence
  Synthetic oligonucleotide
aacagccctacgccccaactaccaggtgtc

SEQ ID NO: 151188 - DNA, 30 bp, Artificial Sequence
  Synthetic oligonucleotide
ctgtacccatgtggcgccaatacgggtgtc

SEQ ID NO: 151189 - DNA, 30 bp, Artificial Sequence
  Synthetic oligonucleotide
ggtcatcaaacccgttaacgccgatgtgtc

SEQ ID NO: 151190 - DNA, 30 bp, Artificial Sequence
  Synthetic oligonucleotide
tccctgaactctcaggaaaggcggtgtgtc

SEQ ID NO: 151191 - DNA, 30 bp, Artificial Sequence
  Synthetic oligonucleotide
gccggggtgagtttaggtccggaaattgtc

SEQ ID NO: 151192 - DNA, 30 bp, Artificial Sequence
  Synthetic oligonucleotide
gtaatcacatatgcgagaataatgattgtc

SEQ ID NO: 151193 - DNA, 30 bp, Artificial Sequence
  Synthetic oligonucleotide
gtaggtgtaggggggcataatcgtcttgtc

SEQ ID NO: 151194 - DNA, 30 bp, Artificial Sequence
  Synthetic oligonucleotide
tgcgctcgccttaatcgggatgttcttgtc

SEQ ID NO: 151195 - DNA, 30 bp, Artificial Sequence
  Synthetic oligonucleotide
agaacaggactcaacacgggtttcgttgtc

SEQ ID NO: 151196 - DNA, 30 bp, Artificial Sequence
  Synthetic oligonucleotide
tcaataacaatatcggttagttactttgtc

SEQ ID NO: 151197 - DNA, 30 bp, Artificial Sequence
  Synthetic oligonucleotide
cgagtgtgattcgctttgttcgtgtttgtc

SEQ ID NO: 151198 - DNA, 30 bp, Artificial Sequence
  Synthetic oligonucleotide
cttcgggtcgggcatagagatgcaaaattc

SEQ ID NO: 151199 - DNA, 30 bp, Artificial Sequence
  Synthetic oligonucleotide
gttgagagctctagaaggttaaaccaattc

SEQ ID NO: 151200 - DNA, 30 bp, Artificial Sequence
  Synthetic oligonucleotide
aattagataataacgaggtgactgcaattc

SEQ ID NO: 151201 - DNA, 30 bp, Artificial Sequence
  Synthetic oligonucleotide
ctgattagagtggcgaaagtatacgaattc

SEQ ID NO: 151202 - DNA, 30 bp, Artificial Sequence
  Synthetic oligonucleotide
cctggcatcgcgtcccaattggtcgaattc

SEQ ID NO: 151203 - DNA, 30 bp, Artificial Sequence
  Synthetic oligonucleotide
ggggaaggaatacagtaaaaggttgaattc

SEQ ID NO: 151204 - DNA, 30 bp, Artificial Sequence
  Synthetic oligonucleotide
ctaacccaccattattagaaagaataattc

SEQ ID NO: 151205 - DNA, 30 bp, Artificial Sequence
  Synthetic oligonucleotide
gcacgttagtagcaagcacttggttaattc

SEQ ID NO: 151206 - DNA, 30 bp, Artificial Sequence
  Synthetic oligonucleotide
ggtataccgtctttcctgcctaacccattc

SEQ ID NO: 151207 - DNA, 30 bp, Artificial Sequence
  Synthetic oligonucleotide
gagcatacgtgccggacagtgtagccattc

SEQ ID NO: 151208 - DNA, 30 bp, Artificial Sequence
  Synthetic oligonucleotide
cagcaaccttagggaataccgccgccattc

SEQ ID NO: 151209 - DNA, 30 bp, Artificial Sequence
  Synthetic oligonucleotide
tgaattacagagagcgagcgtttgccattc

SEQ ID NO: 151210 - DNA, 30 bp, Artificial Sequence
  Synthetic oligonucleotide
tatagcggggagtgcgatgcataagcattc

SEQ ID NO: 151211 - DNA, 30 bp, Artificial Sequence
  Synthetic oligonucleotide
gctagaactgcaaccccctctcccgcattc

SEQ ID NO: 151212 - DNA, 30 bp, Artificial Sequence
  Synthetic oligonucleotide
agaagattccaacaagattagtctagattc

SEQ ID NO: 151213 - DNA, 30 bp, Artificial Sequence
  Synthetic oligonucleotide
cgtaatggggcccgttcgcttgttagattc

SEQ ID NO: 151214 - DNA, 30 bp, Artificial Sequence
  Synthetic oligonucleotide
acatcattggaatgggatatatttagattc

SEQ ID NO: 151215 - DNA, 30 bp, Artificial Sequence
  Synthetic oligonucleotide
tcaacaatgaagtggggttaatcacgattc

SEQ ID NO: 151216 - DNA, 30 bp, Artificial Sequence
  Synthetic oligonucleotide
cgttattcgttttgtggagtcgaccgattc

SEQ ID NO: 151217 - DNA, 30 bp, Artificial Sequence
  Synthetic oligonucleotide
acataggctagaattctttcgccccgattc

SEQ ID NO: 151218 - DNA, 30 bp, Artificial Sequence
  Synthetic oligonucleotide
gacctaggagaaacttcgacggcccgattc

SEQ ID NO: 151219 - DNA, 30 bp, Artificial Sequence
  Synthetic oligonucleotide
gggatccaataagccgaaacaggaggattc

SEQ ID NO: 151220 - DNA, 30 bp, Artificial Sequence
  Synthetic oligonucleotide
gacggtaagggttgtataccagttggattc

SEQ ID NO: 151221 - DNA, 30 bp, Artificial Sequence
  Synthetic oligonucleotide
tcggatatgctttgggagcaccaatgattc

SEQ ID NO: 151222 - DNA, 30 bp, Artificial Sequence
  Synthetic oligonucleotide
aggagttagtcaaagtttagtaggtgattc

SEQ ID NO: 151223 - DNA, 30 bp, Artificial Sequence
  Synthetic oligonucleotide
catgtcgcaacgctaagctagcggtgattc

SEQ ID NO: 151224 - DNA, 30 bp, Artificial Sequence
  Synthetic oligonucleotide
gggtctagggattcatatgagttgtgattc

SEQ ID NO: 151225 - DNA, 30 bp, Artificial Sequence
  Synthetic oligonucleotide
aacgtcagataaatgtataaccgttgattc

SEQ ID NO: 151226 - DNA, 30 bp, Artificial Sequence
  Synthetic oligonucleotide
gaggcgaccatgacagcggacgtcctattc

SEQ ID NO: 151227 - DNA, 30 bp, Artificial Sequence
  Synthetic oligonucleotide
tcatccactgaagctacttagcgtctattc

SEQ ID NO: 151228 - DNA, 30 bp, Artificial Sequence
  Synthetic oligonucleotide
cgatcagggggcaatcggccacaagtattc

SEQ ID NO: 151229 - DNA, 30 bp, Artificial Sequence
  Synthetic oligonucleotide
caaacacattagtagagggggtcagtattc

SEQ ID NO: 151230 - DNA, 30 bp, Artificial Sequence
  Synthetic oligonucleotide
cacgttactcatggcaccaagcgtttattc

SEQ ID NO: 151231 - DNA, 30 bp, Artificial Sequence
  Synthetic oligonucleotide
tataccatgggggattatagggaacacttc

SEQ ID NO: 151232 - DNA, 30 bp, Artificial Sequence
  Synthetic oligonucleotide
caggcactctcgaccgatgagtcacacttc

SEQ ID NO: 151233 - DNA, 30 bp, Artificial Sequence
  Synthetic oligonucleotide
ccgttcaggaaatgccttgaagaccacttc

SEQ ID NO: 151234 - DNA, 30 bp, Artificial Sequence
  Synthetic oligonucleotide
gaatggtacttagcctatgttgccgacttc

SEQ ID NO: 151235 - DNA, 30 bp, Artificial Sequence
  Synthetic oligonucleotide
tacctggcgtttcaaaggactgatgacttc

SEQ ID NO: 151236 - DNA, 30 bp, Artificial Sequence
  Synthetic oligonucleotide
ccgatacggtaagtgtgcggctaatacttc

SEQ ID NO: 151237 - DNA, 30 bp, Artificial Sequence
  Synthetic oligonucleotide
cggtgtaaacacagtccgtggaactacttc

SEQ ID NO: 151238 - DNA, 30 bp, Artificial Sequence
  Synthetic oligonucleotide
acctgtcaggagaggtcatccgttaccttc

SEQ ID NO: 151239 - DNA, 30 bp, Artificial Sequence
  Synthetic oligonucleotide
ttacacgtctacgcttgaaatggagccttc

SEQ ID NO: 151240 - DNA, 30 bp, Artificial Sequence
  Synthetic oligonucleotide
gagaaaaaatagcttagagaacatgccttc

SEQ ID NO: 151241 - DNA, 30 bp, Artificial Sequence
  Synthetic oligonucleotide
gtaaggtaattgtgttaccagaccagcttc

SEQ ID NO: 151242 - DNA, 30 bp, Artificial Sequence
  Synthetic oligonucleotide
ggtgaaattattatgccagtcgatagcttc

SEQ ID NO: 151243 - DNA, 30 bp, Artificial Sequence
  Synthetic oligonucleotide
cactgactatccagttttatctctcgcttc

SEQ ID NO: 151244 - DNA, 30 bp, Artificial Sequence
  Synthetic oligonucleotide
ccgagggaaccgatatcaattgttcgcttc

SEQ ID NO: 151245 - DNA, 30 bp, Artificial Sequence
  Synthetic oligonucleotide
gtggaggggatccaagcttggccaggcttc

SEQ ID NO: 151246 - DNA, 30 bp, Artificial Sequence
  Synthetic oligonucleotide
tgaaaatttataaatgggaggtgaggcttc

SEQ ID NO: 151247 - DNA, 30 bp, Artificial Sequence
  Synthetic oligonucleotide
ggagtgacctccgcgagacaggacggcttc

SEQ ID NO: 151248 - DNA, 30 bp, Artificial Sequence
  Synthetic oligonucleotide
aacaacattggtctggcaacagcatgcttc

SEQ ID NO: 151249 - DNA, 30 bp, Artificial Sequence
  Synthetic oligonucleotide
cagggttggcgacgtacgccccggatcttc

SEQ ID NO: 151250 - DNA, 30 bp, Artificial Sequence
  Synthetic oligonucleotide
ttacctcagtgtgacacattgccgctcttc

SEQ ID NO: 151251 - DNA, 30 bp, Artificial Sequence
  Synthetic oligonucleotide
atgcgatttcaacacgcgaatccgctcttc

SEQ ID NO: 151252 - DNA, 30 bp, Artificial Sequence
  Synthetic oligonucleotide
aagccagataacagtgctcctttgctcttc

SEQ ID NO: 151253 - DNA, 30 bp, Artificial Sequence
  Synthetic oligonucleotide
gtcagtgctgaattcccattgtgcgtcttc

SEQ ID NO: 151254 - DNA, 30 bp, Artificial Sequence
  Synthetic oligonucleotide
ctgagtcacagtgaagagtctacaaagttc

SEQ ID NO: 151255 - DNA, 30 bp, Artificial Sequence
  Synthetic oligonucleotide
agtcacagcgctgcttgtaaccgaaagttc

SEQ ID NO: 151256 - DNA, 30 bp, Artificial Sequence
  Synthetic oligonucleotide
aacgtgtacaacaggagggtttgccagttc

SEQ ID NO: 151257 - DNA, 30 bp, Artificial Sequence
  Synthetic oligonucleotide
tctaatgccatgtgtaatcgggagcagttc

SEQ ID NO: 151258 - DNA, 30 bp, Artificial Sequence
  Synthetic oligonucleotide
gcgagttgaaacgcgagtcaattcgagttc

SEQ ID NO: 151259 - DNA, 30 bp, Artificial Sequence
  Synthetic oligonucleotide
agatagcgaccagggaatgaatttgagttc

SEQ ID NO: 151260 - DNA, 30 bp, Artificial Sequence
  Synthetic oligonucleotide
acacagatggtaaagccggacccaacgttc

SEQ ID NO: 151261 - DNA, 30 bp, Artificial Sequence
  Synthetic oligonucleotide
agcctaacggtcgaaataaccgccacgttc

SEQ ID NO: 151262 - DNA, 30 bp, Artificial Sequence
  Synthetic oligonucleotide
cgggatattaatatacacttccggacgttc

SEQ ID NO: 151263 - DNA, 30 bp, Artificial Sequence
  Synthetic oligonucleotide
tcggcggatatgaaatgtgatgcaccgttc

SEQ ID NO: 151264 - DNA, 30 bp, Artificial Sequence
  Synthetic oligonucleotide
tgttatggtggctacgtacaatcgccgttc

SEQ ID NO: 151265 - DNA, 30 bp, Artificial Sequence
  Synthetic oligonucleotide
tttacactgcgcatactctaggtgccgttc

SEQ ID NO: 151266 - DNA, 30 bp, Artificial Sequence
  Synthetic oligonucleotide
ggtctgtccagtggcggtcggatctcgttc

SEQ ID NO: 151267 - DNA, 30 bp, Artificial Sequence
  Synthetic oligonucleotide
tcaactgactgcgattggttgtggtcgttc

SEQ ID NO: 151268 - DNA, 30 bp, Artificial Sequence
  Synthetic oligonucleotide
catccaccgaaaaatagaacttgttcgttc

SEQ ID NO: 151269 - DNA, 30 bp, Artificial Sequence
  Synthetic oligonucleotide
tgcaaaatggggatcggcgtcttcaggttc

SEQ ID NO: 151270 - DNA, 30 bp, Artificial Sequence
  Synthetic oligonucleotide
gcgctcatgaagcgtaaccgtcaccggttc

SEQ ID NO: 151271 - DNA, 30 bp, Artificial Sequence
  Synthetic oligonucleotide
cacgggaaggtcgctcctaattttcggttc

SEQ ID NO: 151272 - DNA, 30 bp, Artificial Sequence
  Synthetic oligonucleotide
ctcgcgacatcggccgtcattggggggttc

SEQ ID NO: 151273 - DNA, 30 bp, Artificial Sequence
  Synthetic oligonucleotide
caaaagtcaacctcgccgagaccgtggttc

SEQ ID NO: 151274 - DNA, 30 bp, Artificial Sequence
  Synthetic oligonucleotide
catgtgcaggggaggtccacaacttggttc

SEQ ID NO: 151275 - DNA, 30 bp, Artificial Sequence
  Synthetic oligonucleotide
cgatgaaggagcagtttaaactacatgttc

SEQ ID NO: 151276 - DNA, 30 bp, Artificial Sequence
  Synthetic oligonucleotide
aagcattgaggaaagaaaagtgttatgttc

SEQ ID NO: 151277 - DNA, 30 bp, Artificial Sequence
  Synthetic oligonucleotide
actgattgtaagggcgtctgtgttatgttc

SEQ ID NO: 151278 - DNA, 30 bp, Artificial Sequence
  Synthetic oligonucleotide
cggtaatagcctaggttcattctactgttc

SEQ ID NO: 151279 - DNA, 30 bp, Artificial Sequence
  Synthetic oligonucleotide
cgtcccagttgcctagtccggccgctgttc

SEQ ID NO: 151280 - DNA, 30 bp, Artificial Sequence
  Synthetic oligonucleotide
cggcgtgtacaggatcaacgtccagtgttc

SEQ ID NO: 151281 - DNA, 30 bp, Artificial Sequence
  Synthetic oligonucleotide
ggttggaataaggaggctaaaggcgtgttc

SEQ ID NO: 151282 - DNA, 29 bp, Artificial Sequence
  Synthetic oligonucleotide
gcgtaccagtccacaccggcttcgtgttc

SEQ ID NO: 151283 - DNA, 30 bp, Artificial Sequence
  Synthetic oligonucleotide
atagccgcgaaaatttacagagtggtgttc

SEQ ID NO: 151284 - DNA, 30 bp, Artificial Sequence
  Synthetic oligonucleotide
agaataattagccatctattgcgattgttc

SEQ ID NO: 151285 - DNA, 30 bp, Artificial Sequence
  Synthetic oligonucleotide
tgcgggataaccagtaggtcgtagttgttc

SEQ ID NO: 151286 - DNA, 30 bp, Artificial Sequence
  Synthetic oligonucleotide
agcatgggttgacggcatgggtaaaatttc

SEQ ID NO: 151287 - DNA, 30 bp, Artificial Sequence
  Synthetic oligonucleotide
aggactagtatttagcgtaattcaaatttc

SEQ ID NO: 151288 - DNA, 30 bp, Artificial Sequence
  Synthetic oligonucleotide
gggggacagaacttaggaaggggaaatttc

SEQ ID NO: 151289 - DNA, 30 bp, Artificial Sequence
  Synthetic oligonucleotide
cgcgtgcggtgtcggagctgaagtaatttc

SEQ ID NO: 151290 - DNA, 30 bp, Artificial Sequence
  Synthetic oligonucleotide
agacaaggtgggttggttgaaacggatttc

SEQ ID NO: 151291 - DNA, 30 bp, Artificial Sequence
  Synthetic oligonucleotide
gatcgtgaatccaccctaatccggactttc

SEQ ID NO: 151292 - DNA, 30 bp, Artificial Sequence
  Synthetic oligonucleotide
tgagccggcgaacctatcggaagacctttc

SEQ ID NO: 151293 - DNA, 30 bp, Artificial Sequence
  Synthetic oligonucleotide
agcaccgagaaggatgtgaaagaagctttc

SEQ ID NO: 151294 - DNA, 30 bp, Artificial Sequence
  Synthetic oligonucleotide
ggcattattctctcactccagcacgctttc

SEQ ID NO: 151295 - DNA, 30 bp, Artificial Sequence
  Synthetic oligonucleotide
agggaagcgtaccgtgaataatcggctttc

SEQ ID NO: 151296 - DNA, 30 bp, Artificial Sequence
  Synthetic oligonucleotide
aggagactaacgttttcttatcgggctttc

SEQ ID NO: 151297 - DNA, 30 bp, Artificial Sequence
  Synthetic oligonucleotide
acaaaaaatctggatcgtctcgagtctttc

SEQ ID NO: 151298 - DNA, 30 bp, Artificial Sequence
  Synthetic oligonucleotide
aagcccgagaaaaatggttcggacagtttc

SEQ ID NO: 151299 - DNA, 30 bp, Artificial Sequence
  Synthetic oligonucleotide
aaagggtaggccagggagaagattagtttc

SEQ ID NO: 151300 - DNA, 30 bp, Artificial Sequence
  Synthetic oligonucleotide
tggggttgctggtacgagggggttggtttc

SEQ ID NO: 151301 - DNA, 30 bp, Artificial Sequence
  Synthetic oligonucleotide
cgatattaagcaagggccatagaatgtttc

SEQ ID NO: 151302 - DNA, 30 bp, Artificial Sequence
  Synthetic oligonucleotide
acccaccgcctgaaaaagggtagatgtttc

SEQ ID NO: 151303 - DNA, 31 bp, Artificial Sequence
  Synthetic oligonucleotide
acaggtcagatgcttaagagatatatgtttc

SEQ ID NO: 151304 - DNA, 30 bp, Artificial Sequence
  Synthetic oligonucleotide
atcctagctgtcgagtgagttgtttgtttc

SEQ ID NO: 151305 - DNA, 30 bp, Artificial Sequence
  Synthetic oligonucleotide
agaattggttgcgggagtaggcatattttc

SEQ ID NO: 151306 - DNA, 30 bp, Artificial Sequence
  Synthetic oligonucleotide
gagaggtgggacaaaacaacgcaacttttc

SEQ ID NO: 151307 - DNA, 30 bp, Artificial Sequence
  Synthetic oligonucleotide
agcctaattgggcggttatgttgccttttc

SEQ ID NO: 151308 - DNA, 30 bp, Artificial Sequence
  Synthetic oligonucleotide
catataccagcataaatcacgtgcgttttc

SEQ ID NO: 151309 - DNA, 30 bp, Artificial Sequence
  Synthetic oligonucleotide
tgaagtcagtatggcacactggcatttttc

SEQ ID NO: 151310 - DNA, 30 bp, Artificial Sequence
  Synthetic oligonucleotide
tagtacaggaattgtgctatcccaaaaaag

SEQ ID NO: 151311 - DNA, 30 bp, Artificial Sequence
  Synthetic oligonucleotide
aggtcaacgcggacacgtgctcacaaaaag

SEQ ID NO: 151312 - DNA, 30 bp, Artificial Sequence
  Synthetic oligonucleotide
gcacggaaaaaaaaccgcttatgcaaaaag

SEQ ID NO: 151313 - DNA, 30 bp, Artificial Sequence
  Synthetic oligonucleotide
taagaaggcgtagtaaactggtagaaaaag

SEQ ID NO: 151314 - DNA, 30 bp, Artificial Sequence
  Synthetic oligonucleotide
gatgagatccattggtgccaacggaaaaag

SEQ ID NO: 151315 - DNA, 30 bp, Artificial Sequence
  Synthetic oligonucleotide
ccacaagggaggtggagccctcggaaaaag

SEQ ID NO: 151316 - DNA, 30 bp, Artificial Sequence
  Synthetic oligonucleotide
cgagtgctgtgccgggtgagggataaaaag

SEQ ID NO: 151317 - DNA, 30 bp, Artificial Sequence
  Synthetic oligonucleotide
cagacgtttgatctgtttgggtttaaaaag

SEQ ID NO: 151318 - DNA, 30 bp, Artificial Sequence
  Synthetic oligonucleotide
ctgtaccttatcgcttgctccgaacaaaag

SEQ ID NO: 151319 - DNA, 30 bp, Artificial Sequence
  Synthetic oligonucleotide
ttcaagatactaaggattcgatgccaaaag

SEQ ID NO: 151320 - DNA, 30 bp, Artificial Sequence
  Synthetic oligonucleotide
acaagcgtatatcgcggctacaagcaaaag

SEQ ID NO: 151321 - DNA, 30 bp, Artificial Sequence
  Synthetic oligonucleotide
acgagcccggttcatcgccgtgtgcaaaag

SEQ ID NO: 151322 - DNA, 30 bp, Artificial Sequence
  Synthetic oligonucleotide
gtgcagtgttcgaaggggatgagtcaaaag

SEQ ID NO: 151323 - DNA, 30 bp, Artificial Sequence
  Synthetic oligonucleotide
agatttcagattggcatcaaacaagaaaag

SEQ ID NO: 151324 - DNA, 30 bp, Artificial Sequence
  Synthetic oligonucleotide
aaattctttcggtgccgacccacagaaaag

SEQ ID NO: 151325 - DNA, 30 bp, Artificial Sequence
  Synthetic oligonucleotide
aggtccgaagaaaccttgcagtcagaaaag

SEQ ID NO: 151326 - DNA, 30 bp, Artificial Sequence
  Synthetic oligonucleotide
cgtagacacgatggttcggtctccgaaaag

SEQ ID NO: 151327 - DNA, 31 bp, Artificial Sequence
  Synthetic oligonucleotide
caaagttaagagtcacgaagagtccgaaaag

SEQ ID NO: 151328 - DNA, 30 bp, Artificial Sequence
  Synthetic oligonucleotide
ttgataatttggtgattagacggcgaaaag

SEQ ID NO: 151329 - DNA, 30 bp, Artificial Sequence
  Synthetic oligonucleotide
aaccgaagctagcccgacagggatgaaaag

SEQ ID NO: 151330 - DNA, 30 bp, Artificial Sequence
  Synthetic oligonucleotide
gtaggtcctggaaaatccccaggtgaaaag

SEQ ID NO: 151331 - DNA, 30 bp, Artificial Sequence
  Synthetic oligonucleotide
cctgaaaccccccacgtttccgcataaaag

SEQ ID NO: 151332 - DNA, 30 bp, Artificial Sequence
  Synthetic oligonucleotide
gcaaacccacgcattcaatgcagataaaag

SEQ ID NO: 151333 - DNA, 30 bp, Artificial Sequence
  Synthetic oligonucleotide
actcgcctgccgcgggtgattggataaaag

SEQ ID NO: 151334 - DNA, 31 bp, Artificial Sequence
  Synthetic oligonucleotide
agatgacaacttcgtaaaagctttataaaag

SEQ ID NO: 151335 - DNA, 30 bp, Artificial Sequence
  Synthetic oligonucleotide
cccgtgagatatgaggtttgtttgtaaaag

SEQ ID NO: 151336 - DNA, 30 bp, Artificial Sequence
  Synthetic oligonucleotide
gggggtgtccgacgtcccctgccttaaaag

SEQ ID NO: 151337 - DNA, 30 bp, Artificial Sequence
  Synthetic oligonucleotide
gtgttgacaggttcaaaacctgagacaaag

SEQ ID NO: 151338 - DNA, 30 bp, Artificial Sequence
  Synthetic oligonucleotide
aatagtagatatgtaaaaaactagacaaag

SEQ ID NO: 151339 - DNA, 30 bp, Artificial Sequence
  Synthetic oligonucleotide
ctgtagcggaaacgctcagcagcgacaaag

SEQ ID NO: 151340 - DNA, 30 bp, Artificial Sequence
  Synthetic oligonucleotide
ttcggtcactcttgaaaattcaaaccaaag

SEQ ID NO: 151341 - DNA, 30 bp, Artificial Sequence
  Synthetic oligonucleotide
cagtgtgggcgaggtgaatagtaaccaaag

SEQ ID NO: 151342 - DNA, 30 bp, Artificial Sequence
  Synthetic oligonucleotide
ccgctagcgaaaaccgtcaggataccaaag

SEQ ID NO: 151343 - DNA, 30 bp, Artificial Sequence
  Synthetic oligonucleotide
gactattcgacaagtgtggggaccccaaag

SEQ ID NO: 151344 - DNA, 30 bp, Artificial Sequence
  Synthetic oligonucleotide
gcataccttaacagatccataggcccaaag

SEQ ID NO: 151345 - DNA, 30 bp, Artificial Sequence
  Synthetic oligonucleotide
gagggcgtaatgtatgggatgggcccaaag

SEQ ID NO: 151346 - DNA, 30 bp, Artificial Sequence
  Synthetic oligonucleotide
tcatggaagttgggcgttgccaatccaaag

SEQ ID NO: 151347 - DNA, 30 bp, Artificial Sequence
  Synthetic oligonucleotide
gtagaccataatcatgaccggtacgcaaag

SEQ ID NO: 151348 - DNA, 30 bp, Artificial Sequence
  Synthetic oligonucleotide
gaagtaaggttgtatcggggatgcgcaaag

SEQ ID NO: 151349 - DNA, 30 bp, Artificial Sequence
  Synthetic oligonucleotide
caatggcgactcaaattctgggaggcaaag

SEQ ID NO: 151350 - DNA, 30 bp, Artificial Sequence
  Synthetic oligonucleotide
tagtgattgtcagctgcgtccagggcaaag

SEQ ID NO: 151351 - DNA, 30 bp, Artificial Sequence
  Synthetic oligonucleotide
taaatcacgacactatacctcgttgcaaag

SEQ ID NO: 151352 - DNA, 30 bp, Artificial Sequence
  Synthetic oligonucleotide
aatggaccgatttacgtccgaaaatcaaag

SEQ ID NO: 151353 - DNA, 30 bp, Artificial Sequence
  Synthetic oligonucleotide
cgaggaggttaagagctggcacaatcaaag

SEQ ID NO: 151354 - DNA, 30 bp, Artificial Sequence
  Synthetic oligonucleotide
cccgattgccagatacggctacaatcaaag

SEQ ID NO: 151355 - DNA, 30 bp, Artificial Sequence
  Synthetic oligonucleotide
aagaaagggtaaggttagctatactcaaag

SEQ ID NO: 151356 - DNA, 30 bp, Artificial Sequence
  Synthetic oligonucleotide
ataaaatgaatttaccaaaaaacgtcaaag

SEQ ID NO: 151357 - DNA, 30 bp, Artificial Sequence
  Synthetic oligonucleotide
ctcagattcggtttattcagggtgtcaaag

SEQ ID NO: 151358 - DNA, 30 bp, Artificial Sequence
  Synthetic oligonucleotide
atgcttacggtctaggcaacccattcaaag

SEQ ID NO: 151359 - DNA, 30 bp, Artificial Sequence
  Synthetic oligonucleotide
tagaccgcagtgtgagccggtcattcaaag

SEQ ID NO: 151360 - DNA, 30 bp, Artificial Sequence
  Synthetic oligonucleotide
gatacacgatttccgcatggaacaagaaag

SEQ ID NO: 151361 - DNA, 30 bp, Artificial Sequence
  Synthetic oligonucleotide
gtagtacataaagagtctgttggcagaaag

SEQ ID NO: 151362 - DNA, 30 bp, Artificial Sequence
  Synthetic oligonucleotide
gttcattacgagggccaacagtttagaaag

SEQ ID NO: 151363 - DNA, 30 bp, Artificial Sequence
  Synthetic oligonucleotide
taaaggcacgcccccggtcgtgaacgaaag

SEQ ID NO: 151364 - DNA, 30 bp, Artificial Sequence
  Synthetic oligonucleotide
cgcccttcaaatgaaaatgagtgacgaaag

SEQ ID NO: 151365 - DNA, 30 bp, Artificial Sequence
  Synthetic oligonucleotide
ccgtgtttggccaccctttttctgcgaaag

SEQ ID NO: 151366 - DNA, 30 bp, Artificial Sequence
  Synthetic oligonucleotide
tatgcgaacgaggtagcttaggatcgaaag

SEQ ID NO: 151367 - DNA, 30 bp, Artificial Sequence
  Synthetic oligonucleotide
tggcgctcaacacgagcttacgctcgaaag

SEQ ID NO: 151368 - DNA, 30 bp, Artificial Sequence
  Synthetic oligonucleotide
gtaggcacgctcttctaattttttcgaaag

SEQ ID NO: 151369 - DNA, 30 bp, Artificial Sequence
  Synthetic oligonucleotide
gttgggacgatattatttacggagggaaag

SEQ ID NO: 151370 - DNA, 30 bp, Artificial Sequence
  Synthetic oligonucleotide
gtgacggtacggtggggcctaaggggaaag

SEQ ID NO: 151371 - DNA, 30 bp, Artificial Sequence
  Synthetic oligonucleotide
tgaactccacttcatcaagatggtggaaag

SEQ ID NO: 151372 - DNA, 30 bp, Artificial Sequence
  Synthetic oligonucleotide
aacgatacgtacgaattaacgcaatgaaag

SEQ ID NO: 151373 - DNA, 30 bp, Artificial Sequence
  Synthetic oligonucleotide
atcgctgaactggtgaactggtaatgaaag

SEQ ID NO: 151374 - DNA, 30 bp, Artificial Sequence
  Synthetic oligonucleotide
attgtacactaatggctcgcctactgaaag

SEQ ID NO: 151375 - DNA, 30 bp, Artificial Sequence
  Synthetic oligonucleotide
gacatgaaagaagtatttcaaaattgaaag

SEQ ID NO: 151376 - DNA, 30 bp, Artificial Sequence
  Synthetic oligonucleotide
catcccgggggttcagtgaggccaataaag

SEQ ID NO: 151377 - DNA, 30 bp, Artificial Sequence
  Synthetic oligonucleotide
gtgataattgggtggcgcggtgcaataaag

SEQ ID NO: 151378 - DNA, 30 bp, Artificial Sequence
  Synthetic oligonucleotide
cgttaggaatagggattgctcataataaag

SEQ ID NO: 151379 - DNA, 30 bp, Artificial Sequence
  Synthetic oligonucleotide
ccacggctaacacaggtactcaggataaag

SEQ ID NO: 151380 - DNA, 30 bp, Artificial Sequence
  Synthetic oligonucleotide
ccgtcttgagaaaaagaatcggggataaag

SEQ ID NO: 151381 - DNA, 30 bp, Artificial Sequence
  Synthetic oligonucleotide
accaggagccctggatgatcgaaactaaag

SEQ ID NO: 151382 - DNA, 30 bp, Artificial Sequence
  Synthetic oligonucleotide
ccaggatgacgcgtcgaaatccccctaaag

SEQ ID NO: 151383 - DNA, 30 bp, Artificial Sequence
  Synthetic oligonucleotide
gccgtggcgtcatcacgggcaatgctaaag

SEQ ID NO: 151384 - DNA, 30 bp, Artificial Sequence
  Synthetic oligonucleotide
gggatcgacttccatggttcaagagtaaag

SEQ ID NO: 151385 - DNA, 30 bp, Artificial Sequence
  Synthetic oligonucleotide
tgagcgcccgtattcgaatgaggagtaaag

SEQ ID NO: 151386 - DNA, 30 bp, Artificial Sequence
  Synthetic oligonucleotide
gtcctaaagttcgggcgatctctagtaaag

SEQ ID NO: 151387 - DNA, 30 bp, Artificial Sequence
  Synthetic oligonucleotide
ttgcggtaattcgcgggatgccaggtaaag

SEQ ID NO: 151388 - DNA, 30 bp, Artificial Sequence
  Synthetic oligonucleotide
ggctctgtcaggttaggccactaggtaaag

SEQ ID NO: 151389 - DNA, 30 bp, Artificial Sequence
  Synthetic oligonucleotide
tgtcttgcgaggtgacgtatcagggtaaag

SEQ ID NO: 151390 - DNA, 30 bp, Artificial Sequence
  Synthetic oligonucleotide
tgcatgttatataagtcacatgtggtaaag

SEQ ID NO: 151391 - DNA, 30 bp, Artificial Sequence
  Synthetic oligonucleotide
cgagtatgctaggagggggattaattaaag

SEQ ID NO: 151392 - DNA, 30 bp, Artificial Sequence
  Synthetic oligonucleotide
tctccgtcagccgaggcgaagggcttaaag

SEQ ID NO: 151393 - DNA, 30 bp, Artificial Sequence
  Synthetic oligonucleotide
caaacactgtaaagaatatatctcttaaag

SEQ ID NO: 151394 - DNA, 30 bp, Artificial Sequence
  Synthetic oligonucleotide
ggtatcggtctagtatgaggggcgttaaag

SEQ ID NO: 151395 - DNA, 30 bp, Artificial Sequence
  Synthetic oligonucleotide
tggatattgacacgagctagttcgttaaag

SEQ ID NO: 151396 - DNA, 30 bp, Artificial Sequence
  Synthetic oligonucleotide
cacatgcgaagaagactatgctggttaaag

SEQ ID NO: 151397 - DNA, 30 bp, Artificial Sequence
  Synthetic oligonucleotide
gtgcaggatggaggttgaatcgatttaaag

SEQ ID NO: 151398 - DNA, 30 bp, Artificial Sequence
  Synthetic oligonucleotide
ctggtgcgtgacgtatgggacactttaaag

SEQ ID NO: 151399 - DNA, 30 bp, Artificial Sequence
  Synthetic oligonucleotide
gcctgactggcctcaatgtctggtttaaag

SEQ ID NO: 151400 - DNA, 30 bp, Artificial Sequence
  Synthetic oligonucleotide
cagtcaagaaatatcggttctcaaaacaag

SEQ ID NO: 151401 - DNA, 30 bp, Artificial Sequence
  Synthetic oligonucleotide
aacgccggtcgaaccggccgtcacaacaag

SEQ ID NO: 151402 - DNA, 30 bp, Artificial Sequence
  Synthetic oligonucleotide
tcggtacgtgataggtaaccgcggaacaag

SEQ ID NO: 151403 - DNA, 30 bp, Artificial Sequence
  Synthetic oligonucleotide
gtacagagttgtatttgtcgctggaacaag

SEQ ID NO: 151404 - DNA, 30 bp, Artificial Sequence
  Synthetic oligonucleotide
agaaaatcacaggtagcgccacgtaacaag

SEQ ID NO: 151405 - DNA, 30 bp, Artificial Sequence
  Synthetic oligonucleotide
aacgcgatgcgtggtcacaagtaacacaag

SEQ ID NO: 151406 - DNA, 30 bp, Artificial Sequence
  Synthetic oligonucleotide
ctagatggcgtcaaactaggtgcacacaag

SEQ ID NO: 151407 - DNA, 30 bp, Artificial Sequence
  Synthetic oligonucleotide
acaaaacagttcgtaggtaaggagcacaag

SEQ ID NO: 151408 - DNA, 30 bp, Artificial Sequence
  Synthetic oligonucleotide
aaggcacgggacgattaaggaaggcacaag

SEQ ID NO: 151409 - DNA, 30 bp, Artificial Sequence
  Synthetic oligonucleotide
attgatagtgtgatttcggtgaggcacaag

SEQ ID NO: 151410 - DNA, 30 bp, Artificial Sequence
  Synthetic oligonucleotide
aagtctgaaggaacgcaacaaggtcacaag

SEQ ID NO: 151411 - DNA, 30 bp, Artificial Sequence
  Synthetic oligonucleotide
ttcgaagcatgtgtgtctgataaagacaag

SEQ ID NO: 151412 - DNA, 30 bp, Artificial Sequence
  Synthetic oligonucleotide
gtgtccatgttagaggcgtgttaagacaag

SEQ ID NO: 151413 - DNA, 30 bp, Artificial Sequence
  Synthetic oligonucleotide
cagtgtcaatgggcttattattgcgacaag

SEQ ID NO: 151414 - DNA, 30 bp, Artificial Sequence
  Synthetic oligonucleotide
atataatagacatcttcgcaataggacaag

SEQ ID NO: 151415 - DNA, 30 bp, Artificial Sequence
  Synthetic oligonucleotide
gccggagcgggctagaacagccgggacaag

SEQ ID NO: 151416 - DNA, 30 bp, Artificial Sequence
  Synthetic oligonucleotide
actcggtcgcacggaggatcgcgatacaag

SEQ ID NO: 151417 - DNA, 30 bp, Artificial Sequence
  Synthetic oligonucleotide
agagatagtatccgatgaccctgctacaag

SEQ ID NO: 151418 - DNA, 30 bp, Artificial Sequence
  Synthetic oligonucleotide
gcaagtcaacgtttatatggcgagtacaag

SEQ ID NO: 151419 - DNA, 30 bp, Artificial Sequence
  Synthetic oligonucleotide
gaccgggtagagtgggcaggtaattacaag

SEQ ID NO: 151420 - DNA, 30 bp, Artificial Sequence
  Synthetic oligonucleotide
ctggtatcggcggttagagcatattacaag

SEQ ID NO: 151421 - DNA, 30 bp, Artificial Sequence
  Synthetic oligonucleotide
ccgccttgtgggtccacgaattccaccaag

SEQ ID NO: 151422 - DNA, 30 bp, Artificial Sequence
  Synthetic oligonucleotide
cgccatgggaaagggcgatgccgcaccaag

SEQ ID NO: 151423 - DNA, 30 bp, Artificial Sequence
  Synthetic oligonucleotide
catcatctaatcagaatcccatcgaccaag

SEQ ID NO: 151424 - DNA, 30 bp, Artificial Sequence
  Synthetic oligonucleotide
atattacatccgcctagcaaccgacccaag

SEQ ID NO: 151425 - DNA, 30 bp, Artificial Sequence
  Synthetic oligonucleotide
ctgccatcgaagattagcgctcaagccaag

SEQ ID NO: 151426 - DNA, 30 bp, Artificial Sequence
  Synthetic oligonucleotide
ccatattaaagaacgattctgacagccaag

SEQ ID NO: 151427 - DNA, 30 bp, Artificial Sequence
  Synthetic oligonucleotide
cactcgatgggcactgataggccagccaag

SEQ ID NO: 151428 - DNA, 30 bp, Artificial Sequence
  Synthetic oligonucleotide
ttagactattttcccaaggcgtaggccaag

SEQ ID NO: 151429 - DNA, 30 bp, Artificial Sequence
  Synthetic oligonucleotide
ctcaatgtaaagaaagtggacgtggccaag

SEQ ID NO: 151430 - DNA, 30 bp, Artificial Sequence
  Synthetic oligonucleotide
gcagagcacgcccccgcgcgaccatccaag

SEQ ID NO: 151431 - DNA, 30 bp, Artificial Sequence
  Synthetic oligonucleotide
ccggaatctgccttcaatgatcaaagcaag

SEQ ID NO: 151432 - DNA, 30 bp, Artificial Sequence
  Synthetic oligonucleotide
aacgccaagaagtccgccaccgtcagcaag

SEQ ID NO: 151433 - DNA, 30 bp, Artificial Sequence
  Synthetic oligonucleotide
ccaaatagaatctgtttagtgtcgagcaag

SEQ ID NO: 151434 - DNA, 30 bp, Artificial Sequence
  Synthetic oligonucleotide
aatgtaacgaatgtgggcgcgcggagcaag

SEQ ID NO: 151435 - DNA, 30 bp, Artificial Sequence
  Synthetic oligonucleotide
gaaggtgtttcgacataaaacttgagcaag

SEQ ID NO: 151436 - DNA, 30 bp, Artificial Sequence
  Synthetic oligonucleotide
gtagtgagaattcataattcgaggcgcaag

SEQ ID NO: 151437 - DNA, 30 bp, Artificial Sequence
  Synthetic oligonucleotide
tcaaatcgcttaaacttaacgttgcgcaag

SEQ ID NO: 151438 - DNA, 30 bp, Artificial Sequence
  Synthetic oligonucleotide
accgcattaatatagtacataaccggcaag

SEQ ID NO: 151439 - DNA, 30 bp, Artificial Sequence
  Synthetic oligonucleotide
cggtacgggagagccctcttcgcgggcaag

SEQ ID NO: 151440 - DNA, 30 bp, Artificial Sequence
  Synthetic oligonucleotide
gtgatatcgctggcagtaagttaatgcaag

SEQ ID NO: 151441 - DNA, 30 bp, Artificial Sequence
  Synthetic oligonucleotide
tgatgttctaaggaccgtttttgatgcaag

SEQ ID NO: 151442 - DNA, 30 bp, Artificial Sequence
  Synthetic oligonucleotide
ggcatatcagactgtgacggcctctgcaag

SEQ ID NO: 151443 - DNA, 30 bp, Artificial Sequence
  Synthetic oligonucleotide
acgagtgccttgcatacaatcacaatcaag

SEQ ID NO: 151444 - DNA, 30 bp, Artificial Sequence
  Synthetic oligonucleotide
ccaccaaccctcgttgaacaggccatcaag

SEQ ID NO: 151445 - DNA, 30 bp, Artificial Sequence
  Synthetic oligonucleotide
ggcgatgatatatggggtaacggcatcaag

SEQ ID NO: 151446 - DNA, 30 bp, Artificial Sequence
  Synthetic oligonucleotide
gacctgaaaaatatcaaagctttactcaag

SEQ ID NO: 151447 - DNA, 30 bp, Artificial Sequence
  Synthetic oligonucleotide
taggaccacgctacttggggcagtctcaag

SEQ ID NO: 151448 - DNA, 30 bp, Artificial Sequence
  Synthetic oligonucleotide
acacaacgggtcattaaatcaggtctcaag

SEQ ID NO: 151449 - DNA, 30 bp, Artificial Sequence
  Synthetic oligonucleotide
gtacaatctggcacctatacttgtctcaag

SEQ ID NO: 151450 - DNA, 30 bp, Artificial Sequence
  Synthetic oligonucleotide
attgaatggataggttgtcacgttctcaag

SEQ ID NO: 151451 - DNA, 30 bp, Artificial Sequence
  Synthetic oligonucleotide
gtacatagacctcgtcccgtgatagtcaag

SEQ ID NO: 151452 - DNA, 30 bp, Artificial Sequence
  Synthetic oligonucleotide
atattgaatgtgcgtcactcgaacgtcaag

SEQ ID NO: 151453 - DNA, 30 bp, Artificial Sequence
  Synthetic oligonucleotide
gtactacgacacatgtgtcttcacgtcaag

SEQ ID NO: 151454 - DNA, 30 bp, Artificial Sequence
  Synthetic oligonucleotide
gcgagtttccacgcccagcataatgtcaag

SEQ ID NO: 151455 - DNA, 30 bp, Artificial Sequence
  Synthetic oligonucleotide
atagcctacggatggccgtgttctgtcaag

SEQ ID NO: 151456 - DNA, 30 bp, Artificial Sequence
  Synthetic oligonucleotide
cgtgcttgcgcacgacatagccatttcaag

SEQ ID NO: 151457 - DNA, 30 bp, Artificial Sequence
  Synthetic oligonucleotide
caaccggcagttgggagcctgcaaaagaag

SEQ ID NO: 151458 - DNA, 30 bp, Artificial Sequence
  Synthetic oligonucleotide
caccgcgtgagctatacccgtagaaagaag

SEQ ID NO: 151459 - DNA, 30 bp, Artificial Sequence
  Synthetic oligonucleotide
agacactcaggatcaagtcttgacaagaag

SEQ ID NO: 151460 - DNA, 30 bp, Artificial Sequence
  Synthetic oligonucleotide
ggtaatcggatgacacctgtccccaagaag

SEQ ID NO: 151461 - DNA, 30 bp, Artificial Sequence
  Synthetic oligonucleotide
ggtttatatcgagattcggtgcgtaagaag

SEQ ID NO: 151462 - DNA, 30 bp, Artificial Sequence
  Synthetic oligonucleotide
ctgaccggctatcatcgttactcacagaag

SEQ ID NO: 151463 - DNA, 30 bp, Artificial Sequence
  Synthetic oligonucleotide
tgatacgagcaaactgcgacaccgcagaag

SEQ ID NO: 151464 - DNA, 30 bp, Artificial Sequence
  Synthetic oligonucleotide
acaatggtagattaggtcagcagtcagaag

SEQ ID NO: 151465 - DNA, 30 bp, Artificial Sequence
  Synthetic oligonucleotide
ccaaaccacaggtggggacgcacagagaag

SEQ ID NO: 151466 - DNA, 30 bp, Artificial Sequence
  Synthetic oligonucleotide
cccgtaagtgcaaaagaccggtactagaag

SEQ ID NO: 151467 - DNA, 30 bp, Artificial Sequence
  Synthetic oligonucleotide
tattcgttagtgaaggtaaggacctagaag

SEQ ID NO: 151468 - DNA, 30 bp, Artificial Sequence
  Synthetic oligonucleotide
acacagtaaagtgttgttattgacacgaag

SEQ ID NO: 151469 - DNA, 30 bp, Artificial Sequence
  Synthetic oligonucleotide
gggttgccctcggtttagaagtacacgaag

SEQ ID NO: 151470 - DNA, 30 bp, Artificial Sequence
  Synthetic oligonucleotide
actcaagataagtggactgatactacgaag

SEQ ID NO: 151471 - DNA, 30 bp, Artificial Sequence
  Synthetic oligonucleotide
ctccgtgatattgtggaaatccttacgaag

SEQ ID NO: 151472 - DNA, 30 bp, Artificial Sequence
  Synthetic oligonucleotide
cacgtttcaaaacggatgatacgaccgaag

SEQ ID NO: 151473 - DNA, 30 bp, Artificial Sequence
  Synthetic oligonucleotide
agggtcgattatcagcacttgctgccgaag

SEQ ID NO: 151474 - DNA, 30 bp, Artificial Sequence
  Synthetic oligonucleotide
ggaataaccatgctaacgcgtttagcgaag

SEQ ID NO: 151475 - DNA, 30 bp, Artificial Sequence
  Synthetic oligonucleotide
acaaacatacaaatagaaaccgctgcgaag

SEQ ID NO: 151476 - DNA, 30 bp, Artificial Sequence
  Synthetic oligonucleotide
agagccctagtacaacgcggggcatcgaag

SEQ ID NO: 151477 - DNA, 30 bp, Artificial Sequence
  Synthetic oligonucleotide
atgggggcggcgtgggcctcatgatcgaag

SEQ ID NO: 151478 - DNA, 30 bp, Artificial Sequence
  Synthetic oligonucleotide
taaatcggcacttttggctccggctcgaag

SEQ ID NO: 151479 - DNA, 30 bp, Artificial Sequence
  Synthetic oligonucleotide
tctcaccgccttgccattactgagtcgaag

SEQ ID NO: 151480 - DNA, 30 bp, Artificial Sequence
  Synthetic oligonucleotide
gcggatcggttattcgattgccacaggaag

SEQ ID NO: 151481 - DNA, 30 bp, Artificial Sequence
  Synthetic oligonucleotide
tccacgacgtcgcaaagaatatccaggaag

SEQ ID NO: 151482 - DNA, 30 bp, Artificial Sequence
  Synthetic oligonucleotide
atcaagggcggtgtcgatccacgcaggaag

SEQ ID NO: 151483 - DNA, 30 bp, Artificial Sequence
  Synthetic oligonucleotide
agaaatcatggcatacttgaattgaggaag

SEQ ID NO: 151484 - DNA, 30 bp, Artificial Sequence
  Synthetic oligonucleotide
cggctatagccaccagcgctatctaggaag

SEQ ID NO: 151485 - DNA, 30 bp, Artificial Sequence
  Synthetic oligonucleotide
gcggaataacacctggataacagacggaag

SEQ ID NO: 151486 - DNA, 30 bp, Artificial Sequence
  Synthetic oligonucleotide
ggtcctgacaaaatgtagtggggacggaag

SEQ ID NO: 151487 - DNA, 30 bp, Artificial Sequence
  Synthetic oligonucleotide
ggcgaccccttaacgttgattccccggaag

SEQ ID NO: 151488 - DNA, 30 bp, Artificial Sequence
  Synthetic oligonucleotide
cggttggacagtaacccgtcaacgcggaag

SEQ ID NO: 151489 - DNA, 30 bp, Artificial Sequence
  Synthetic oligonucleotide
tatcgtggaagtgtcacatttacagggaag

SEQ ID NO: 151490 - DNA, 30 bp, Artificial Sequence
  Synthetic oligonucleotide
agtggcgaccgaacgaacatttgagggaag

SEQ ID NO: 151491 - DNA, 30 bp, Artificial Sequence
  Synthetic oligonucleotide
cgggtttgattgtctcccgtaatagggaag

SEQ ID NO: 151492 - DNA, 30 bp, Artificial Sequence
  Synthetic oligonucleotide
agagcgtgcgtcgtggaggtgcacgggaag

SEQ ID NO: 151493 - DNA, 30 bp, Artificial Sequence
  Synthetic oligonucleotide
tagctctgaaaccaacggataggcgggaag

SEQ ID NO: 151494 - DNA, 30 bp, Artificial Sequence
  Synthetic oligonucleotide
gggtatactggtaggcgttaatgcgggaag

SEQ ID NO: 151495 - DNA, 30 bp, Artificial Sequence
  Synthetic oligonucleotide
ctacggagaccattatacaagccatggaag

SEQ ID NO: 151496 - DNA, 30 bp, Artificial Sequence
  Synthetic oligonucleotide
ggccatacatactcgttgggcgcatggaag

SEQ ID NO: 151497 - DNA, 30 bp, Artificial Sequence
  Synthetic oligonucleotide
tgcatgggttcgatcggcgagtgatggaag

SEQ ID NO: 151498 - DNA, 30 bp, Artificial Sequence
  Synthetic oligonucleotide
gcgtggatctactgcaggaatttatggaag

SEQ ID NO: 151499 - DNA, 30 bp, Artificial Sequence
  Synthetic oligonucleotide
ggtgtcgcttaatctcaggcattctggaag

SEQ ID NO: 151500 - DNA, 30 bp, Artificial Sequence
  Synthetic oligonucleotide
tgaaaccgggagtagcgtctgccttggaag

SEQ ID NO: 151501 - DNA, 30 bp, Artificial Sequence
  Synthetic oligonucleotide
ccacggtcgataactgactcaggttggaag

SEQ ID NO: 151502 - DNA, 29 bp, Artificial Sequence
  Synthetic oligonucleotide
tctggagcctactccaagcggaaatgaag

SEQ ID NO: 151503 - DNA, 30 bp, Artificial Sequence
  Synthetic oligonucleotide
ttagaaaaggcgtcctggtaataaatgaag

SEQ ID NO: 151504 - DNA, 30 bp, Artificial Sequence
  Synthetic oligonucleotide
acgtatacaactcgcacatattcaatgaag

SEQ ID NO: 151505 - DNA, 30 bp, Artificial Sequence
  Synthetic oligonucleotide
acattgaatgtccactcatgatcgatgaag

SEQ ID NO: 151506 - DNA, 30 bp, Artificial Sequence
  Synthetic oligonucleotide
caatacgactccagtaatgaacctatgaag

SEQ ID NO: 151507 - DNA, 29 bp, Artificial Sequence
  Synthetic oligonucleotide
tcaggaggtccgtagaaattggcctgaag

SEQ ID NO: 151508 - DNA, 30 bp, Artificial Sequence
  Synthetic oligonucleotide
agtacgagttgtacgcgttctccgctgaag

SEQ ID NO: 151509 - DNA, 30 bp, Artificial Sequence
  Synthetic oligonucleotide
tcagctcgtcccaaaatactcaatctgaag

SEQ ID NO: 151510 - DNA, 30 bp, Artificial Sequence
  Synthetic oligonucleotide
tcatcactgccgggtgatcagcgagtgaag

SEQ ID NO: 151511 - DNA, 30 bp, Artificial Sequence
  Synthetic oligonucleotide
cagagatggagaggaactcggctggtgaag

SEQ ID NO: 151512 - DNA, 30 bp, Artificial Sequence
  Synthetic oligonucleotide
aatacgtatatcccgggttggattgtgaag

SEQ ID NO: 151513 - DNA, 30 bp, Artificial Sequence
  Synthetic oligonucleotide
accgtgaaccgttcataacgggtattgaag

SEQ ID NO: 151514 - DNA, 30 bp, Artificial Sequence
  Synthetic oligonucleotide
aggtcagggactacttatctcaagttgaag

SEQ ID NO: 151515 - DNA, 30 bp, Artificial Sequence
  Synthetic oligonucleotide
ccatgcagaggcattacaccgcggttgaag

SEQ ID NO: 151516 - DNA, 30 bp, Artificial Sequence
  Synthetic oligonucleotide
ttggaagggctccatgtcgaaatgttgaag

SEQ ID NO: 151517 - DNA, 30 bp, Artificial Sequence
  Synthetic oligonucleotide
ggagtaggtaaggaaatgtccacaaataag

SEQ ID NO: 151518 - DNA, 30 bp, Artificial Sequence
  Synthetic oligonucleotide
acattgattggaaatcttgcgagaaataag

SEQ ID NO: 151519 - DNA, 30 bp, Artificial Sequence
  Synthetic oligonucleotide
aatggcgtacttggacgagcaaacaataag

SEQ ID NO: 151520 - DNA, 30 bp, Artificial Sequence
  Synthetic oligonucleotide
gcttagcagcaaaacggcggagtgaataag

SEQ ID NO: 151521 - DNA, 30 bp, Artificial Sequence
  Synthetic oligonucleotide
ccccgcactagaatatcggcgcgacataag

SEQ ID NO: 151522 - DNA, 30 bp, Artificial Sequence
  Synthetic oligonucleotide
acgtggggtactctaaaaattcaccataag

SEQ ID NO: 151523 - DNA, 30 bp, Artificial Sequence
  Synthetic oligonucleotide
tgaagctacacgacgtgggaggaggataag

SEQ ID NO: 151524 - DNA, 30 bp, Artificial Sequence
  Synthetic oligonucleotide
agtaatgggagggtaggcgtttctgataag

SEQ ID NO: 151525 - DNA, 30 bp, Artificial Sequence
  Synthetic oligonucleotide
ctgaagactggcaagtctcttagtgataag

SEQ ID NO: 151526 - DNA, 30 bp, Artificial Sequence
  Synthetic oligonucleotide
gtaagtcacccatgaacttccgttgataag

SEQ ID NO: 151527 - DNA, 30 bp, Artificial Sequence
  Synthetic oligonucleotide
agcagttcttaggagagtacaaaatataag

SEQ ID NO: 151528 - DNA, 30 bp, Artificial Sequence
  Synthetic oligonucleotide
ctcaggcgctccaagaacccactatataag

SEQ ID NO: 151529 - DNA, 30 bp, Artificial Sequence
  Synthetic oligonucleotide
actcagtcgaagtgtagggtcctatataag

SEQ ID NO: 151530 - DNA, 30 bp, Artificial Sequence
  Synthetic oligonucleotide
atccagagcggaagcgtctaggcctataag

SEQ ID NO: 151531 - DNA, 30 bp, Artificial Sequence
  Synthetic oligonucleotide
ggttcgggtagttagtctatcggctataag

SEQ ID NO: 151532 - DNA, 30 bp, Artificial Sequence
  Synthetic oligonucleotide
gcgtgagcagtgtccataaatatctataag

SEQ ID NO: 151533 - DNA, 30 bp, Artificial Sequence
  Synthetic oligonucleotide
atcatttactggacaacgtaatagtataag

SEQ ID NO: 151534 - DNA, 30 bp, Artificial Sequence
  Synthetic oligonucleotide
tagcctcatcatcatgaaaaagggtataag

SEQ ID NO: 151535 - DNA, 30 bp, Artificial Sequence
  Synthetic oligonucleotide
cttcgtgcgtcttcggtgaacatgtataag

SEQ ID NO: 151536 - DNA, 30 bp, Artificial Sequence
  Synthetic oligonucleotide
gtaatggggggcaacctacataaaactaag

SEQ ID NO: 151537 - DNA, 30 bp, Artificial Sequence
  Synthetic oligonucleotide
acgcatcttcgatggaaggtaacaactaag

SEQ ID NO: 151538 - DNA, 30 bp, Artificial Sequence
  Synthetic oligonucleotide
atgcatggccctcggaggtttaggactaag

SEQ ID NO: 151539 - DNA, 27 bp, Artificial Sequence
  Synthetic oligonucleotide
tagtcaaacccccgtcacgggcctaag

SEQ ID NO: 151540 - DNA, 30 bp, Artificial Sequence
  Synthetic oligonucleotide
cacggtaattagtgtaaccctttagctaag

SEQ ID NO: 151541 - DNA, 30 bp, Artificial Sequence
  Synthetic oligonucleotide
gaccatcaagctcgacacgcgtcggctaag

SEQ ID NO: 151542 - DNA, 30 bp, Artificial Sequence
  Synthetic oligonucleotide
tatgcatccgggttgtgttctggatctaag

SEQ ID NO: 151543 - DNA, 30 bp, Artificial Sequence
  Synthetic oligonucleotide
acggaatagtagttcattctatagtctaag

SEQ ID NO: 151544 - DNA, 30 bp, Artificial Sequence
  Synthetic oligonucleotide
attatgggccactagaggcacatgtctaag

SEQ ID NO: 151545 - DNA, 30 bp, Artificial Sequence
  Synthetic oligonucleotide
cggtggagacatcccaaggaaagttctaag

SEQ ID NO: 151546 - DNA, 30 bp, Artificial Sequence
  Synthetic oligonucleotide
tttaacaatatgttcttaggggatagtaag

SEQ ID NO: 151547 - DNA, 30 bp, Artificial Sequence
  Synthetic oligonucleotide
ggttacgacgttggatcgatataccgtaag

SEQ ID NO: 151548 - DNA, 30 bp, Artificial Sequence
  Synthetic oligonucleotide
aagtcgagctttacgtgaagaacccgtaag

SEQ ID NO: 151549 - DNA, 30 bp, Artificial Sequence
  Synthetic oligonucleotide
cacattacgaaccgtcaaacatcgcgtaag

SEQ ID NO: 151550 - DNA, 30 bp, Artificial Sequence
  Synthetic oligonucleotide
acccgaaagtataccaggtatcggcgtaag

SEQ ID NO: 151551 - DNA, 30 bp, Artificial Sequence
  Synthetic oligonucleotide
ataggctaataacaacaccattggcgtaag

SEQ ID NO: 151552 - DNA, 30 bp, Artificial Sequence
  Synthetic oligonucleotide
cgctcgcctattcaggtataggttcgtaag

SEQ ID NO: 151553 - DNA, 30 bp, Artificial Sequence
  Synthetic oligonucleotide
acggattctacccgctaggagcaaggtaag

SEQ ID NO: 151554 - DNA, 30 bp, Artificial Sequence
  Synthetic oligonucleotide
cgtatgctcttcatccacgtactatgtaag

SEQ ID NO: 151555 - DNA, 30 bp, Artificial Sequence
  Synthetic oligonucleotide
tctctgtgccgataacgtcggaagtgtaag

SEQ ID NO: 151556 - DNA, 30 bp, Artificial Sequence
  Synthetic oligonucleotide
cgtttttgacgctagggcctgaggtgtaag

SEQ ID NO: 151557 - DNA, 30 bp, Artificial Sequence
  Synthetic oligonucleotide
taagtgtgctggtcaacctgtaattgtaag

SEQ ID NO: 151558 - DNA, 30 bp, Artificial Sequence
  Synthetic oligonucleotide
tgacacctgtgggactaacatcaaattaag

SEQ ID NO: 151559 - DNA, 30 bp, Artificial Sequence
  Synthetic oligonucleotide
cctgcccagcagttatatggctgaattaag

SEQ ID NO: 151560 - DNA, 30 bp, Artificial Sequence
  Synthetic oligonucleotide
ttactgcggtcttccgccaagaacattaag

SEQ ID NO: 151561 - DNA, 30 bp, Artificial Sequence
  Synthetic oligonucleotide
caagcaaagtcacaactttaacggcttaag

SEQ ID NO: 151562 - DNA, 30 bp, Artificial Sequence
  Synthetic oligonucleotide
ggttttcaaagacacgtggtcgaagttaag

SEQ ID NO: 151563 - DNA, 30 bp, Artificial Sequence
  Synthetic oligonucleotide
cttaaagaactatggttcatgtcagttaag

SEQ ID NO: 151564 - DNA, 30 bp, Artificial Sequence
  Synthetic oligonucleotide
gcccatgcaggtagcgtctgtcgagttaag

SEQ ID NO: 151565 - DNA, 30 bp, Artificial Sequence
  Synthetic oligonucleotide
attcaaattgagtgaaatcgatgagttaag

SEQ ID NO: 151566 - DNA, 30 bp, Artificial Sequence
  Synthetic oligonucleotide
atgagtagccgaactgggctaatagttaag

SEQ ID NO: 151567 - DNA, 30 bp, Artificial Sequence
  Synthetic oligonucleotide
attagatgccgaacacgaccgctagttaag

SEQ ID NO: 151568 - DNA, 30 bp, Artificial Sequence
  Synthetic oligonucleotide
gactacgctatagtatggtgttacgttaag

SEQ ID NO: 151569 - DNA, 30 bp, Artificial Sequence
  Synthetic oligonucleotide
ggaacttacagcaaccgaatttaggttaag

SEQ ID NO: 151570 - DNA, 30 bp, Artificial Sequence
  Synthetic oligonucleotide
tacacatcgagtaacttacacatggttaag

SEQ ID NO: 151571 - DNA, 30 bp, Artificial Sequence
  Synthetic oligonucleotide
aggaaaacaggcagtttcagcttatttaag

SEQ ID NO: 151572 - DNA, 31 bp, Artificial Sequence
  Synthetic oligonucleotide
tggattagccagggtatatatcccgtttaag

SEQ ID NO: 151573 - DNA, 30 bp, Artificial Sequence
  Synthetic oligonucleotide
agtctataagaggtctgactgtgaaaacag

SEQ ID NO: 151574 - DNA, 30 bp, Artificial Sequence
  Synthetic oligonucleotide
catgcgggcgatcaattctgtgccaaacag

SEQ ID NO: 151575 - DNA, 30 bp, Artificial Sequence
  Synthetic oligonucleotide
aggcgcgaattggacctctgtaataaacag

SEQ ID NO: 151576 - DNA, 30 bp, Artificial Sequence
  Synthetic oligonucleotide
tggaggccttatgaggacatggaacaacag

SEQ ID NO: 151577 - DNA, 30 bp, Artificial Sequence
  Synthetic oligonucleotide
tcaggttatgaataatattgctgacaacag

SEQ ID NO: 151578 - DNA, 30 bp, Artificial Sequence
  Synthetic oligonucleotide
ggtactgctgatgcgtatggtagccaacag

SEQ ID NO: 151579 - DNA, 30 bp, Artificial Sequence
  Synthetic oligonucleotide
ataggaatgacatagccattccgccaacag

SEQ ID NO: 151580 - DNA, 30 bp, Artificial Sequence
  Synthetic oligonucleotide
tccagcatgctggaatgctgtcagcaacag

SEQ ID NO: 151581 - DNA, 30 bp, Artificial Sequence
  Synthetic oligonucleotide
cggtcaggacctgagcaggatcatcaacag

SEQ ID NO: 151582 - DNA, 30 bp, Artificial Sequence
  Synthetic oligonucleotide
ttggaaattcgtacaaagggcgtagaacag

SEQ ID NO: 151583 - DNA, 30 bp, Artificial Sequence
  Synthetic oligonucleotide
ggtgatggggcgttaaacactggggaacag

SEQ ID NO: 151584 - DNA, 30 bp, Artificial Sequence
  Synthetic oligonucleotide
actacgaccagcaatagtggaccataacag

SEQ ID NO: 151585 - DNA, 30 bp, Artificial Sequence
  Synthetic oligonucleotide
tctacgtgatcatgtcgtgcctagtaacag

SEQ ID NO: 151586 - DNA, 30 bp, Artificial Sequence
  Synthetic oligonucleotide
ggctagttgctgccaccgctaccgtaacag

SEQ ID NO: 151587 - DNA, 30 bp, Artificial Sequence
  Synthetic oligonucleotide
taagctctaggctgacccacttggtaacag

SEQ ID NO: 151588 - DNA, 30 bp, Artificial Sequence
  Synthetic oligonucleotide
ccagtcagggcaaattcaccttgaacacag

SEQ ID NO: 151589 - DNA, 30 bp, Artificial Sequence
  Synthetic oligonucleotide
agtttaacatagttctccaaaaacacacag

SEQ ID NO: 151590 - DNA, 30 bp, Artificial Sequence
  Synthetic oligonucleotide
cccagtatccagtatccgagactcacacag

SEQ ID NO: 151591 - DNA, 30 bp, Artificial Sequence
  Synthetic oligonucleotide
tattgattccgcaaaaccaccacgacacag

SEQ ID NO: 151592 - DNA, 30 bp, Artificial Sequence
  Synthetic oligonucleotide
tgcgaacttgaaatggcctggtatacacag

SEQ ID NO: 151593 - DNA, 30 bp, Artificial Sequence
  Synthetic oligonucleotide
gataagatccctttagcgagctaaccacag

SEQ ID NO: 151594 - DNA, 30 bp, Artificial Sequence
  Synthetic oligonucleotide
cctggatgtatacggacgaacggtccacag

SEQ ID NO: 151595 - DNA, 30 bp, Artificial Sequence
  Synthetic oligonucleotide
aagtattgccaggctgctggtccagcacag

SEQ ID NO: 151596 - DNA, 30 bp, Artificial Sequence
  Synthetic oligonucleotide
gcgaaggcttccacataatccgcagcacag

SEQ ID NO: 151597 - DNA, 30 bp, Artificial Sequence
  Synthetic oligonucleotide
gtcgctagcggttcgcttataagagcacag

SEQ ID NO: 151598 - DNA, 30 bp, Artificial Sequence
  Synthetic oligonucleotide
gcaacaagtgagcattacgcgttagcacag

SEQ ID NO: 151599 - DNA, 30 bp, Artificial Sequence
  Synthetic oligonucleotide
caggttactcagtcaactcgaggatcacag

SEQ ID NO: 151600 - DNA, 30 bp, Artificial Sequence
  Synthetic oligonucleotide
tcccgctcggtggaacgcccggtctcacag

SEQ ID NO: 151601 - DNA, 30 bp, Artificial Sequence
  Synthetic oligonucleotide
cactgcgctatccctctgtacgtgtcacag

SEQ ID NO: 151602 - DNA, 30 bp, Artificial Sequence
  Synthetic oligonucleotide
cggagaattaaggcaaagttccgttcacag

SEQ ID NO: 151603 - DNA, 30 bp, Artificial Sequence
  Synthetic oligonucleotide
ggtgatgctgacagcatgcgtctcggacag

SEQ ID NO: 151604 - DNA, 30 bp, Artificial Sequence
  Synthetic oligonucleotide
gcggcccaaagttatctcccgtggggacag

SEQ ID NO: 151605 - DNA, 30 bp, Artificial Sequence
  Synthetic oligonucleotide
ctctaaatagcaacaagtagagtgggacag

SEQ ID NO: 151606 - DNA, 30 bp, Artificial Sequence
  Synthetic oligonucleotide
cgaagatgtagcaacgctatatattgacag

SEQ ID NO: 151607 - DNA, 30 bp, Artificial Sequence
  Synthetic oligonucleotide
ttgagtcaaccgtgcagttatcgttgacag

SEQ ID NO: 151608 - DNA, 30 bp, Artificial Sequence
  Synthetic oligonucleotide
gcgagtgaattgagactatatggttgacag

SEQ ID NO: 151609 - DNA, 30 bp, Artificial Sequence
  Synthetic oligonucleotide
aggcgcttattataacctgtataaatacag

SEQ ID NO: 151610 - DNA, 30 bp, Artificial Sequence
  Synthetic oligonucleotide
ctgtaggcggagtccaggagcctaatacag

SEQ ID NO: 151611 - DNA, 30 bp, Artificial Sequence
  Synthetic oligonucleotide
acacagcgtcctcttgatctgcccatacag

SEQ ID NO: 151612 - DNA, 30 bp, Artificial Sequence
  Synthetic oligonucleotide
gaacgatttttcggcaaaagtacgatacag

SEQ ID NO: 151613 - DNA, 30 bp, Artificial Sequence
  Synthetic oligonucleotide
cagggtacgtttcgactgttctatatacag

SEQ ID NO: 151614 - DNA, 30 bp, Artificial Sequence
  Synthetic oligonucleotide
ccactgtgccaatatcaatatacactacag

SEQ ID NO: 151615 - DNA, 30 bp, Artificial Sequence
  Synthetic oligonucleotide
gcatcacctgctgcttcgcgtctactacag

SEQ ID NO: 151616 - DNA, 30 bp, Artificial Sequence
  Synthetic oligonucleotide
gtcactgagtcttgcaccggttggctacag

SEQ ID NO: 151617 - DNA, 30 bp, Artificial Sequence
  Synthetic oligonucleotide
tatcaagggtccggatcgattacagtacag

SEQ ID NO: 151618 - DNA, 30 bp, Artificial Sequence
  Synthetic oligonucleotide
tcttgaaaagcggtgcgacacatagtacag

SEQ ID NO: 151619 - DNA, 30 bp, Artificial Sequence
  Synthetic oligonucleotide
ggaaggtccaagagacggcaactggtacag

SEQ ID NO: 151620 - DNA, 30 bp, Artificial Sequence
  Synthetic oligonucleotide
aaagtggtgagcgtcgagtcatatgtacag

SEQ ID NO: 151621 - DNA, 30 bp, Artificial Sequence
  Synthetic oligonucleotide
tccgtcgatctcgctggtaagagattacag

SEQ ID NO: 151622 - DNA, 30 bp, Artificial Sequence
  Synthetic oligonucleotide
agcactgatttctgtaggaacaacttacag

SEQ ID NO: 151623 - DNA, 30 bp, Artificial Sequence
  Synthetic oligonucleotide
tcggagaagcaaccgatggcacagttacag

SEQ ID NO: 151624 - DNA, 30 bp, Artificial Sequence
  Synthetic oligonucleotide
acacggatccgctggtagcatggtttacag

SEQ ID NO: 151625 - DNA, 30 bp, Artificial Sequence
  Synthetic oligonucleotide
cacgcggatgcgcattaggtttaaaaccag

SEQ ID NO: 151626 - DNA, 30 bp, Artificial Sequence
  Synthetic oligonucleotide
tccagtacggtaagtgccgcaagaaaccag

SEQ ID NO: 151627 - DNA, 30 bp, Artificial Sequence
  Synthetic oligonucleotide
ggtgactagatatccctaaggcgaaaccag

SEQ ID NO: 151628 - DNA, 31 bp, Artificial Sequence
  Synthetic oligonucleotide
cccaaattcccgcttagaagataccaaccag

SEQ ID NO: 151629 - DNA, 30 bp, Artificial Sequence
  Synthetic oligonucleotide
atcgtgggtgggtccgttttgtccaaccag

SEQ ID NO: 151630 - DNA, 30 bp, Artificial Sequence
  Synthetic oligonucleotide
gttacgtcgctatgggggccaaataaccag

SEQ ID NO: 151631 - DNA, 30 bp, Artificial Sequence
  Synthetic oligonucleotide
aaagactcgtagttgcgcatgcgtaaccag

SEQ ID NO: 151632 - DNA, 30 bp, Artificial Sequence
  Synthetic oligonucleotide
tcagtagtcgtttagtgcgaagggcaccag

SEQ ID NO: 151633 - DNA, 30 bp, Artificial Sequence
  Synthetic oligonucleotide
cgctctattgcgttattgtggtggcaccag

SEQ ID NO: 151634 - DNA, 30 bp, Artificial Sequence
  Synthetic oligonucleotide
gatggttaagtctcccggatataagaccag

SEQ ID NO: 151635 - DNA, 29 bp, Artificial Sequence
  Synthetic oligonucleotide
tcgaagtcagtgtgtatatcgcagaccag

SEQ ID NO: 151636 - DNA, 31 bp, Artificial Sequence
  Synthetic oligonucleotide
gagtcggcgtcattttgcagaattggaccag

SEQ ID NO: 151637 - DNA, 30 bp, Artificial Sequence
  Synthetic oligonucleotide
aaagggtcaaaagcgcacatccgtgaccag

SEQ ID NO: 151638 - DNA, 30 bp, Artificial Sequence
  Synthetic oligonucleotide
cggtaaatgagagcttccgatggataccag

SEQ ID NO: 151639 - DNA, 30 bp, Artificial Sequence
  Synthetic oligonucleotide
aaatctagtatgagggcttgaaactaccag

SEQ ID NO: 151640 - DNA, 30 bp, Artificial Sequence
  Synthetic oligonucleotide
cgtggcttcttgagataacgccagtaccag

SEQ ID NO: 151641 - DNA, 30 bp, Artificial Sequence
  Synthetic oligonucleotide
ccaaatgctgaatccgaatacgggtaccag

SEQ ID NO: 151642 - DNA, 30 bp, Artificial Sequence
  Synthetic oligonucleotide
gaggctcgctgcgatgggctagattaccag

SEQ ID NO: 151643 - DNA, 30 bp, Artificial Sequence
  Synthetic oligonucleotide
gggtgcccataatacctgttatagacccag

SEQ ID NO: 151644 - DNA, 30 bp, Artificial Sequence
  Synthetic oligonucleotide
aacggcctataagtgagcaaagctacccag

SEQ ID NO: 151645 - DNA, 30 bp, Artificial Sequence
  Synthetic oligonucleotide
ggacagtgcaatcggatttgtggtacccag

SEQ ID NO: 151646 - DNA, 30 bp, Artificial Sequence
  Synthetic oligonucleotide
agcttagaccataaggggtataaaccccag

SEQ ID NO: 151647 - DNA, 31 bp, Artificial Sequence
  Synthetic oligonucleotide
tagggcgggttgacattgccaggaaccccag

SEQ ID NO: 151648 - DNA, 30 bp, Artificial Sequence
  Synthetic oligonucleotide
agcaggaacgcatatggggcggccccccag

SEQ ID NO: 151649 - DNA, 30 bp, Artificial Sequence
  Synthetic oligonucleotide
aatcaaaaatgccgacctataccgccccag

SEQ ID NO: 151650 - DNA, 30 bp, Artificial Sequence
  Synthetic oligonucleotide
ccagaggtcgcagttcgatctgatccccag

SEQ ID NO: 151651 - DNA, 30 bp, Artificial Sequence
  Synthetic oligonucleotide
taattcttgaaaggtttccgctcggcccag

SEQ ID NO: 151652 - DNA, 30 bp, Artificial Sequence
  Synthetic oligonucleotide
gctggatgagaattcgcagatgtggcccag

SEQ ID NO: 151653 - DNA, 30 bp, Artificial Sequence
  Synthetic oligonucleotide
gattacaacagttcatgtattttggcccag

SEQ ID NO: 151654 - DNA, 30 bp, Artificial Sequence
  Synthetic oligonucleotide
tcccagggtatggtaaccggcgtatcccag

SEQ ID NO: 151655 - DNA, 30 bp, Artificial Sequence
  Synthetic oligonucleotide
agcaacgacaaaacacgcagtacctcccag

SEQ ID NO: 151656 - DNA, 30 bp, Artificial Sequence
  Synthetic oligonucleotide
gagcccccggccagctacacaggctcccag

SEQ ID NO: 151657 - DNA, 30 bp, Artificial Sequence
  Synthetic oligonucleotide
gcccacaatcggttgactagtaaaagccag

SEQ ID NO: 151658 - DNA, 30 bp, Artificial Sequence
  Synthetic oligonucleotide
gagcgataggcacgagctataggcagccag

SEQ ID NO: 151659 - DNA, 30 bp, Artificial Sequence
  Synthetic oligonucleotide
cgccttctactggtgtagtaagcgagccag

SEQ ID NO: 151660 - DNA, 30 bp, Artificial Sequence
  Synthetic oligonucleotide
tagaatctaggtgggatacccattagccag

SEQ ID NO: 151661 - DNA, 30 bp, Artificial Sequence
  Synthetic oligonucleotide
gcaaagaacacatggaacctgcggcgccag

SEQ ID NO: 151662 - DNA, 30 bp, Artificial Sequence
  Synthetic oligonucleotide
cacggcaatcgttcttcaatcatgcgccag

SEQ ID NO: 151663 - DNA, 30 bp, Artificial Sequence
  Synthetic oligonucleotide
ggtgtatgcgagcgcggcaaaacaggccag

SEQ ID NO: 151664 - DNA, 30 bp, Artificial Sequence
  Synthetic oligonucleotide
caaggttgatgttcgccatcgaccggccag

SEQ ID NO: 151665 - DNA, 30 bp, Artificial Sequence
  Synthetic oligonucleotide
tgcccacgatccaattcgagagcgggccag

SEQ ID NO: 151666 - DNA, 30 bp, Artificial Sequence
  Synthetic oligonucleotide
agaagtttgtgttacttgcgaggttgccag

SEQ ID NO: 151667 - DNA, 30 bp, Artificial Sequence
  Synthetic oligonucleotide
tagcttgcgaccggcaggagcataatccag

SEQ ID NO: 151668 - DNA, 30 bp, Artificial Sequence
  Synthetic oligonucleotide
cctggagcccgatcatctcgacacatccag

SEQ ID NO: 151669 - DNA, 30 bp, Artificial Sequence
  Synthetic oligonucleotide
gccgcagaaataccaaatacggggatccag

SEQ ID NO: 151670 - DNA, 30 bp, Artificial Sequence
  Synthetic oligonucleotide
tctcggaccatatctaatgcatcactccag

SEQ ID NO: 151671 - DNA, 31 bp, Artificial Sequence
  Synthetic oligonucleotide
aggcagttctgaaaagtgtcagcgtctccag

SEQ ID NO: 151672 - DNA, 30 bp, Artificial Sequence
  Synthetic oligonucleotide
cgatagggctagtacttgttcccggtccag

SEQ ID NO: 151673 - DNA, 30 bp, Artificial Sequence
  Synthetic oligonucleotide
aagcacacatcatatctgtcggcggtccag

SEQ ID NO: 151674 - DNA, 30 bp, Artificial Sequence
  Synthetic oligonucleotide
tagactcctgtgtgcggtcaagtcttccag

SEQ ID NO: 151675 - DNA, 30 bp, Artificial Sequence
  Synthetic oligonucleotide
cctccacgagcacggtgtgaatagttccag

SEQ ID NO: 151676 - DNA, 30 bp, Artificial Sequence
  Synthetic oligonucleotide
attaggtgagactggtccacggcgttccag

SEQ ID NO: 151677 - DNA, 30 bp, Artificial Sequence
  Synthetic oligonucleotide
gtctctacggcacgtgaatcgcaaaagcag

SEQ ID NO: 151678 - DNA, 30 bp, Artificial Sequence
  Synthetic oligonucleotide
ctcacaggccgattagtccgataaaagcag

SEQ ID NO: 151679 - DNA, 30 bp, Artificial Sequence
  Synthetic oligonucleotide
cctctattaaagcaggggcgaaacaagcag

SEQ ID NO: 151680 - DNA, 30 bp, Artificial Sequence
  Synthetic oligonucleotide
cttttaagcatgtattagaaagggaagcag

SEQ ID NO: 151681 - DNA, 30 bp, Artificial Sequence
  Synthetic oligonucleotide
gcgattcgtatttacgggtgcgggaagcag

SEQ ID NO: 151682 - DNA, 30 bp, Artificial Sequence
  Synthetic oligonucleotide
tctgacgtgaggaacgccttcctgcagcag

SEQ ID NO: 151683 - DNA, 30 bp, Artificial Sequence
  Synthetic oligonucleotide
cggcagggcgtcgtatagacattagagcag

SEQ ID NO: 151684 - DNA, 30 bp, Artificial Sequence
  Synthetic oligonucleotide
ggccccacccctgttacaaatgttgagcag

SEQ ID NO: 151685 - DNA, 30 bp, Artificial Sequence
  Synthetic oligonucleotide
tagctaattactggcgggtatagctagcag

SEQ ID NO: 151686 - DNA, 30 bp, Artificial Sequence
  Synthetic oligonucleotide
ggaggaaactcgtgtttgattgattagcag

SEQ ID NO: 151687 - DNA, 30 bp, Artificial Sequence
  Synthetic oligonucleotide
gcttatactaggtggccgtgctgttagcag

SEQ ID NO: 151688 - DNA, 30 bp, Artificial Sequence
  Synthetic oligonucleotide
gacaagacgagaccttggaagcaaacgcag

SEQ ID NO: 151689 - DNA, 30 bp, Artificial Sequence
  Synthetic oligonucleotide
tgagcagaagcgggctcaaatccaccgcag

SEQ ID NO: 151690 - DNA, 30 bp, Artificial Sequence
  Synthetic oligonucleotide
tagggtatattactgaacagcagcccgcag

SEQ ID NO: 151691 - DNA, 30 bp, Artificial Sequence
  Synthetic oligonucleotide
tgtaaggtgctagactgtgccaatccgcag

SEQ ID NO: 151692 - DNA, 30 bp, Artificial Sequence
  Synthetic oligonucleotide
atccattcaaccggcctaggccctccgcag

SEQ ID NO: 151693 - DNA, 30 bp, Artificial Sequence
  Synthetic oligonucleotide
accgtaaaacctgggtttaggtgggcgcag

SEQ ID NO: 151694 - DNA, 30 bp, Artificial Sequence
  Synthetic oligonucleotide
gaagtaagccgtcccaatcttaactcgcag

SEQ ID NO: 151695 - DNA, 30 bp, Artificial Sequence
  Synthetic oligonucleotide
agagcggataatgcatagcggagttcgcag

SEQ ID NO: 151696 - DNA, 30 bp, Artificial Sequence
  Synthetic oligonucleotide
aggaattgagaattgtgtggtatttcgcag

SEQ ID NO: 151697 - DNA, 30 bp, Artificial Sequence
  Synthetic oligonucleotide
tcgtatctttaggtaaaacaccgaaggcag

SEQ ID NO: 151698 - DNA, 30 bp, Artificial Sequence
  Synthetic oligonucleotide
gagctccacgaccgactggtggtaaggcag

SEQ ID NO: 151699 - DNA, 30 bp, Artificial Sequence
  Synthetic oligonucleotide
taagccgaggagaagtttaatgtaaggcag

SEQ ID NO: 151700 - DNA, 30 bp, Artificial Sequence
  Synthetic oligonucleotide
ttaatacggagtaacgtggcggacaggcag

SEQ ID NO: 151701 - DNA, 30 bp, Artificial Sequence
  Synthetic oligonucleotide
agtaagcgccggctaccccctcataggcag

SEQ ID NO: 151702 - DNA, 30 bp, Artificial Sequence
  Synthetic oligonucleotide
tggaaatgtgggttcatattagctaggcag

SEQ ID NO: 151703 - DNA, 30 bp, Artificial Sequence
  Synthetic oligonucleotide
tcagggtctgacgtggactcaggtcggcag

SEQ ID NO: 151704 - DNA, 30 bp, Artificial Sequence
  Synthetic oligonucleotide
tactcaaaagaacgaggaacgggagggcag

SEQ ID NO: 151705 - DNA, 30 bp, Artificial Sequence
  Synthetic oligonucleotide
cgcacggatttggtgtggatattagggcag

SEQ ID NO: 151706 - DNA, 30 bp, Artificial Sequence
  Synthetic oligonucleotide
ctacttcaacaaattcgggctttggggcag

SEQ ID NO: 151707 - DNA, 30 bp, Artificial Sequence
  Synthetic oligonucleotide
agcctcggctacgtaaacgtccaatggcag

SEQ ID NO: 151708 - DNA, 30 bp, Artificial Sequence
  Synthetic oligonucleotide
gcggtataaaggttgactcaagcatggcag

SEQ ID NO: 151709 - DNA, 30 bp, Artificial Sequence
  Synthetic oligonucleotide
agaggtcgcaacgaccggtatatgtggcag

SEQ ID NO: 151710 - DNA, 30 bp, Artificial Sequence
  Synthetic oligonucleotide
cgagcggttacccaagacatgtgttggcag

SEQ ID NO: 151711 - DNA, 30 bp, Artificial Sequence
  Synthetic oligonucleotide
agatcgaaagcacacttcggactactgcag

SEQ ID NO: 151712 - DNA, 30 bp, Artificial Sequence
  Synthetic oligonucleotide
tggactgcctaccattacgttaggctgcag

SEQ ID NO: 151713 - DNA, 30 bp, Artificial Sequence
  Synthetic oligonucleotide
accggtcttccgatacgagaacatgtgcag

SEQ ID NO: 151714 - DNA, 30 bp, Artificial Sequence
  Synthetic oligonucleotide
ctgtgtgggtactcagcgtcgtaattgcag

SEQ ID NO: 151715 - DNA, 30 bp, Artificial Sequence
  Synthetic oligonucleotide
gcaaatccaatacgctgcgacatattgcag

SEQ ID NO: 151716 - DNA, 30 bp, Artificial Sequence
  Synthetic oligonucleotide
cgatccataaatgggcggctgttattgcag

SEQ ID NO: 151717 - DNA, 30 bp, Artificial Sequence
  Synthetic oligonucleotide
agggacagtccttccccggatgacttgcag

SEQ ID NO: 151718 - DNA, 30 bp, Artificial Sequence
  Synthetic oligonucleotide
gctaagaaacaaaggggatgctgcttgcag

SEQ ID NO: 151719 - DNA, 30 bp, Artificial Sequence
  Synthetic oligonucleotide
gcttccatagcaaccacaccgttgttgcag

SEQ ID NO: 151720 - DNA, 30 bp, Artificial Sequence
  Synthetic oligonucleotide
cacaatcagtcctatattggtactttgcag

SEQ ID NO: 151721 - DNA, 30 bp, Artificial Sequence
  Synthetic oligonucleotide
gattataaggattattcgaatgaaaatcag

SEQ ID NO: 151722 - DNA, 30 bp, Artificial Sequence
  Synthetic oligonucleotide
atcaaaaggcccatgggaagcgaacatcag

SEQ ID NO: 151723 - DNA, 30 bp, Artificial Sequence
  Synthetic oligonucleotide
aaccaatcacactctgacaggtaccatcag

SEQ ID NO: 151724 - DNA, 30 bp, Artificial Sequence
  Synthetic oligonucleotide
ccgtaggatagatgtgtttaaccccatcag

SEQ ID NO: 151725 - DNA, 30 bp, Artificial Sequence
  Synthetic oligonucleotide
caacgcgcctagaatgcatgggcgcatcag

SEQ ID NO: 151726 - DNA, 30 bp, Artificial Sequence
  Synthetic oligonucleotide
gatcaggtaagaacattacacgatcatcag

SEQ ID NO: 151727 - DNA, 30 bp, Artificial Sequence
  Synthetic oligonucleotide
acctagacggccgtggttaagatagatcag

SEQ ID NO: 151728 - DNA, 30 bp, Artificial Sequence
  Synthetic oligonucleotide
tgctcgacagtacatcctgtctgcgatcag

SEQ ID NO: 151729 - DNA, 30 bp, Artificial Sequence
  Synthetic oligonucleotide
cgaaagaatttttgaattaaatcatatcag

SEQ ID NO: 151730 - DNA, 30 bp, Artificial Sequence
  Synthetic oligonucleotide
ccagggatggagtgccctttatcttatcag

SEQ ID NO: 151731 - DNA, 30 bp, Artificial Sequence
  Synthetic oligonucleotide
gcaggaagcgctgtatcaacgataactcag

SEQ ID NO: 151732 - DNA, 30 bp, Artificial Sequence
  Synthetic oligonucleotide
tgaggagcaacaagggggccctccactcag

SEQ ID NO: 151733 - DNA, 30 bp, Artificial Sequence
  Synthetic oligonucleotide
ctggtgttcttgacaagatcttccactcag

SEQ ID NO: 151734 - DNA, 30 bp, Artificial Sequence
  Synthetic oligonucleotide
actcgaaacgatgcatcgatcgagactcag

SEQ ID NO: 151735 - DNA, 30 bp, Artificial Sequence
  Synthetic oligonucleotide
gcgcagcggacagagtaacgaacgactcag

SEQ ID NO: 151736 - DNA, 30 bp, Artificial Sequence
  Synthetic oligonucleotide
gcagtaaggcacgaggatgccctgactcag

SEQ ID NO: 151737 - DNA, 30 bp, Artificial Sequence
  Synthetic oligonucleotide
accattaccgccgtccagtagcgagctcag

SEQ ID NO: 151738 - DNA, 30 bp, Artificial Sequence
  Synthetic oligonucleotide
cctgtagtggtgaagttgccagtcgctcag

SEQ ID NO: 151739 - DNA, 30 bp, Artificial Sequence
  Synthetic oligonucleotide
gcttaccattgcgactttacaatggctcag

SEQ ID NO: 151740 - DNA, 30 bp, Artificial Sequence
  Synthetic oligonucleotide
tgaaaggcgatgctcctgagagtggctcag

SEQ ID NO: 151741 - DNA, 30 bp, Artificial Sequence
  Synthetic oligonucleotide
ccatcaacaatccaaaactcgagatctcag

SEQ ID NO: 151742 - DNA, 30 bp, Artificial Sequence
  Synthetic oligonucleotide
ggtcacagtgttccggcactgatatctcag

SEQ ID NO: 151743 - DNA, 30 bp, Artificial Sequence
  Synthetic oligonucleotide
ctttggtcggaggggaaactttactctcag

SEQ ID NO: 151744 - DNA, 30 bp, Artificial Sequence
  Synthetic oligonucleotide
acttgaactgtcaaccgcacaagctctcag

SEQ ID NO: 151745 - DNA, 30 bp, Artificial Sequence
  Synthetic oligonucleotide
ccgagaaatgcgagtcagatggagtctcag

SEQ ID NO: 151746 - DNA, 30 bp, Artificial Sequence
  Synthetic oligonucleotide
tctccgatcactacagtacaagcttctcag

SEQ ID NO: 151747 - DNA, 30 bp, Artificial Sequence
  Synthetic oligonucleotide
tcatagatcgaaggtctggactcaagtcag

SEQ ID NO: 151748 - DNA, 30 bp, Artificial Sequence
  Synthetic oligonucleotide
gtgggccctgagcgtaaaatgttaagtcag

SEQ ID NO: 151749 - DNA, 30 bp, Artificial Sequence
  Synthetic oligonucleotide
tagatgagattgtggctctcgtgcagtcag

SEQ ID NO: 151750 - DNA, 30 bp, Artificial Sequence
  Synthetic oligonucleotide
tacggaataataagtatatgtccgagtcag

SEQ ID NO: 151751 - DNA, 30 bp, Artificial Sequence
  Synthetic oligonucleotide
atggaggtcaagcctgtggtgtcgagtcag

SEQ ID NO: 151752 - DNA, 30 bp, Artificial Sequence
  Synthetic oligonucleotide
tcaaggtgtcgcgattgacatggccgtcag

SEQ ID NO: 151753 - DNA, 30 bp, Artificial Sequence
  Synthetic oligonucleotide
aggaacagtagatggctatagatccgtcag

SEQ ID NO: 151754 - DNA, 30 bp, Artificial Sequence
  Synthetic oligonucleotide
ggtggtatcttctagaaaggtacgcgtcag

SEQ ID NO: 151755 - DNA, 30 bp, Artificial Sequence
  Synthetic oligonucleotide
ggattctcttaagctccgactcggcgtcag

SEQ ID NO: 151756 - DNA, 30 bp, Artificial Sequence
  Synthetic oligonucleotide
acagctgagctgacgggacatcctggtcag

SEQ ID NO: 151757 - DNA, 30 bp, Artificial Sequence
  Synthetic oligonucleotide
cacctcgatagagagatcaggacatgtcag

SEQ ID NO: 151758 - DNA, 30 bp, Artificial Sequence
  Synthetic oligonucleotide
ccctcgcgccagtcagtcgaatagtgtcag

SEQ ID NO: 151759 - DNA, 30 bp, Artificial Sequence
  Synthetic oligonucleotide
caaattacagttgagtctactgtgtgtcag

SEQ ID NO: 151760 - DNA, 30 bp, Artificial Sequence
  Synthetic oligonucleotide
acctgagtgcataggcatcagtgttgtcag

SEQ ID NO: 151761 - DNA, 30 bp, Artificial Sequence
  Synthetic oligonucleotide
cattacgttgaatgaagtattcgaattcag

SEQ ID NO: 151762 - DNA, 30 bp, Artificial Sequence
  Synthetic oligonucleotide
gaacgggccccccagaatggggacattcag

SEQ ID NO: 151763 - DNA, 30 bp, Artificial Sequence
  Synthetic oligonucleotide
aacaaatcgagacaggtatctatgcttcag

SEQ ID NO: 151764 - DNA, 30 bp, Artificial Sequence
  Synthetic oligonucleotide
gaggtacaagattagcgttcgactcttcag

SEQ ID NO: 151765 - DNA, 30 bp, Artificial Sequence
  Synthetic oligonucleotide
atgagcatatgtaatctaacagcagttcag

SEQ ID NO: 151766 - DNA, 30 bp, Artificial Sequence
  Synthetic oligonucleotide
ccatatccataatgaagatattccgttcag

SEQ ID NO: 151767 - DNA, 30 bp, Artificial Sequence
  Synthetic oligonucleotide
tcaaagagcagaatgcctgcctgcgttcag

SEQ ID NO: 151768 - DNA, 30 bp, Artificial Sequence
  Synthetic oligonucleotide
tcggattcatgtcctgtatcacctgttcag

SEQ ID NO: 151769 - DNA, 30 bp, Artificial Sequence
  Synthetic oligonucleotide
tatctcgggattagagtaaactttgttcag

SEQ ID NO: 151770 - DNA, 30 bp, Artificial Sequence
  Synthetic oligonucleotide
ctgtaccgatatatggcaaaaacatttcag

SEQ ID NO: 151771 - DNA, 30 bp, Artificial Sequence
  Synthetic oligonucleotide
ggcatcagctgtgggctgggccgttttcag

SEQ ID NO: 151772 - DNA, 30 bp, Artificial Sequence
  Synthetic oligonucleotide
gcgttgcgctttaatagcttctgcaaagag

SEQ ID NO: 151773 - DNA, 30 bp, Artificial Sequence
  Synthetic oligonucleotide
aaagtacaacggatcataaagccgaaagag

SEQ ID NO: 151774 - DNA, 30 bp, Artificial Sequence
  Synthetic oligonucleotide
ttttacgaacaatggtaacggcataaagag

SEQ ID NO: 151775 - DNA, 30 bp, Artificial Sequence
  Synthetic oligonucleotide
gtgagtgagtgttccgtcgcacaccaagag

SEQ ID NO: 151776 - DNA, 30 bp, Artificial Sequence
  Synthetic oligonucleotide
ccttgctgatcgaaagacctgagccaagag

SEQ ID NO: 151777 - DNA, 30 bp, Artificial Sequence
  Synthetic oligonucleotide
ttatccagaattgggataactatccaagag

SEQ ID NO: 151778 - DNA, 30 bp, Artificial Sequence
  Synthetic oligonucleotide
cccgcggcgagcttaattgcttagcaagag

SEQ ID NO: 151779 - DNA, 30 bp, Artificial Sequence
  Synthetic oligonucleotide
tttgacccattcattgagcaacatcaagag

SEQ ID NO: 151780 - DNA, 30 bp, Artificial Sequence
  Synthetic oligonucleotide
cgcctagcggacagggaccaaattcaagag

SEQ ID NO: 151781 - DNA, 30 bp, Artificial Sequence
  Synthetic oligonucleotide
ctctgggtcctgagcgagcctgacgaagag

SEQ ID NO: 151782 - DNA, 30 bp, Artificial Sequence
  Synthetic oligonucleotide
gggcagaatcaagaggtttcacctgaagag

SEQ ID NO: 151783 - DNA, 30 bp, Artificial Sequence
  Synthetic oligonucleotide
gcctcatgtgttgatagtcttattgaagag

SEQ ID NO: 151784 - DNA, 30 bp, Artificial Sequence
  Synthetic oligonucleotide
agaaattgagtcctatacgtggttgaagag

SEQ ID NO: 151785 - DNA, 30 bp, Artificial Sequence
  Synthetic oligonucleotide
aaaataaaccgtcgatcaaacaaataagag

SEQ ID NO: 151786 - DNA, 31 bp, Artificial Sequence
  Synthetic oligonucleotide
atgaacacattggttgtaacctgcataagag

SEQ ID NO: 151787 - DNA, 30 bp, Artificial Sequence
  Synthetic oligonucleotide
aagcgtactagcattgctcttgcgtaagag

SEQ ID NO: 151788 - DNA, 30 bp, Artificial Sequence
  Synthetic oligonucleotide
tattctaggcatgggcgatggacttaagag

SEQ ID NO: 151789 - DNA, 30 bp, Artificial Sequence
  Synthetic oligonucleotide
gggtatggtaacagagcctgtacttaagag

SEQ ID NO: 151790 - DNA, 30 bp, Artificial Sequence
  Synthetic oligonucleotide
cagccgaaattatcttagcgaccttaagag

SEQ ID NO: 151791 - DNA, 30 bp, Artificial Sequence
  Synthetic oligonucleotide
agatgctcgatggccacacgatcttaagag

SEQ ID NO: 151792 - DNA, 30 bp, Artificial Sequence
  Synthetic oligonucleotide
tatgcagaaattttggtaacaggaacagag

SEQ ID NO: 151793 - DNA, 30 bp, Artificial Sequence
  Synthetic oligonucleotide
gagtactaacgaggtcgtcggctaacagag

SEQ ID NO: 151794 - DNA, 30 bp, Artificial Sequence
  Synthetic oligonucleotide
gccgtaggaccagggacaggagccacagag

SEQ ID NO: 151795 - DNA, 30 bp, Artificial Sequence
  Synthetic oligonucleotide
tcagtaaggcgggaacgatgtggcacagag

SEQ ID NO: 151796 - DNA, 30 bp, Artificial Sequence
  Synthetic oligonucleotide
agttgaccatctaatactagtaggacagag

SEQ ID NO: 151797 - DNA, 30 bp, Artificial Sequence
  Synthetic oligonucleotide
tgcaactgtaacgtctagcctgtggcagag

SEQ ID NO: 151798 - DNA, 30 bp, Artificial Sequence
  Synthetic oligonucleotide
cggacaggccatttggccgtcggatcagag

SEQ ID NO: 151799 - DNA, 30 bp, Artificial Sequence
  Synthetic oligonucleotide
tcaatacggagcataagcagaatctcagag

SEQ ID NO: 151800 - DNA, 30 bp, Artificial Sequence
  Synthetic oligonucleotide
ctaacaattaacgtctccctgacgtcagag

SEQ ID NO: 151801 - DNA, 30 bp, Artificial Sequence
  Synthetic oligonucleotide
acgggatgtgggccaactagcccgtcagag

SEQ ID NO: 151802 - DNA, 30 bp, Artificial Sequence
  Synthetic oligonucleotide
cgccgctgttatggtcaagcttccagagag

SEQ ID NO: 151803 - DNA, 30 bp, Artificial Sequence
  Synthetic oligonucleotide
taggggctatacgtactcacacagagagag

SEQ ID NO: 151804 - DNA, 30 bp, Artificial Sequence
  Synthetic oligonucleotide
ttagctggacgttagagcaagcatagagag

SEQ ID NO: 151805 - DNA, 30 bp, Artificial Sequence
  Synthetic oligonucleotide
ttatgctcggacaggtgagtggatagagag

SEQ ID NO: 151806 - DNA, 30 bp, Artificial Sequence
  Synthetic oligonucleotide
caggaatgaaaatgagggaaagcacgagag

SEQ ID NO: 151807 - DNA, 30 bp, Artificial Sequence
  Synthetic oligonucleotide
ttgggttcgtcgctttatccgatacgagag

SEQ ID NO: 151808 - DNA, 30 bp, Artificial Sequence
  Synthetic oligonucleotide
agggtaatagtaccgaaggtttagcgagag

SEQ ID NO: 151809 - DNA, 30 bp, Artificial Sequence
  Synthetic oligonucleotide
atcggcatggaagatctggctgcgcgagag

SEQ ID NO: 151810 - DNA, 30 bp, Artificial Sequence
  Synthetic oligonucleotide
ggtgaggctgagtgcacatctaggcgagag

SEQ ID NO: 151811 - DNA, 30 bp, Artificial Sequence
  Synthetic oligonucleotide
atatagttaatataagcggaaataggagag

SEQ ID NO: 151812 - DNA, 30 bp, Artificial Sequence
  Synthetic oligonucleotide
aggccaatgtgtgataagagatctggagag

SEQ ID NO: 151813 - DNA, 30 bp, Artificial Sequence
  Synthetic oligonucleotide
gtcgcaagaaatgcgcctgggtaatgagag

SEQ ID NO: 151814 - DNA, 30 bp, Artificial Sequence
  Synthetic oligonucleotide
ttaggtgcttccaattgttcatactgagag

SEQ ID NO: 151815 - DNA, 30 bp, Artificial Sequence
  Synthetic oligonucleotide
ctgtcgtcccgggtcacgatttgctgagag

SEQ ID NO: 151816 - DNA, 30 bp, Artificial Sequence
  Synthetic oligonucleotide
ccctggttatttagggttgcggaaatagag

SEQ ID NO: 151817 - DNA, 30 bp, Artificial Sequence
  Synthetic oligonucleotide
agcgcctagcggagacgcgtgttaatagag

SEQ ID NO: 151818 - DNA, 30 bp, Artificial Sequence
  Synthetic oligonucleotide
cagtctaactcaggtatgtagaagatagag

SEQ ID NO: 151819 - DNA, 30 bp, Artificial Sequence
  Synthetic oligonucleotide
ttgcctagcatggcggtctgtaggatagag

SEQ ID NO: 151820 - DNA, 30 bp, Artificial Sequence
  Synthetic oligonucleotide
cgaaccgtaacgaatgtttccaatatagag

SEQ ID NO: 151821 - DNA, 30 bp, Artificial Sequence
  Synthetic oligonucleotide
tcagtccaaaacacagactgctctatagag

SEQ ID NO: 151822 - DNA, 30 bp, Artificial Sequence
  Synthetic oligonucleotide
gcgagatgcgaggcggccaagtctatagag

SEQ ID NO: 151823 - DNA, 30 bp, Artificial Sequence
  Synthetic oligonucleotide
tcttggctgtcagttactgccacactagag

SEQ ID NO: 151824 - DNA, 29 bp, Artificial Sequence
  Synthetic oligonucleotide
tcgtgaaatgcacggagcgcgccctagag

SEQ ID NO: 151825 - DNA, 30 bp, Artificial Sequence
  Synthetic oligonucleotide
gtgcagaaatatataaatacaaagctagag

SEQ ID NO: 151826 - DNA, 30 bp, Artificial Sequence
  Synthetic oligonucleotide
acgagggtggatcggtctggagggctagag

SEQ ID NO: 151827 - DNA, 30 bp, Artificial Sequence
  Synthetic oligonucleotide
ttgctacgcagcggattaccggggctagag

SEQ ID NO: 151828 - DNA, 30 bp, Artificial Sequence
  Synthetic oligonucleotide
ccgaactcatctgccgccgacttgctagag

SEQ ID NO: 151829 - DNA, 30 bp, Artificial Sequence
  Synthetic oligonucleotide
tcctcctcgtactgagttgcggttctagag

SEQ ID NO: 151830 - DNA, 30 bp, Artificial Sequence
  Synthetic oligonucleotide
cgagttcgcgcgtatggtgctgaagtagag

SEQ ID NO: 151831 - DNA, 30 bp, Artificial Sequence
  Synthetic oligonucleotide
gcgctaagattatgcatgagccacgtagag

SEQ ID NO: 151832 - DNA, 30 bp, Artificial Sequence
  Synthetic oligonucleotide
ctgtgcatcgtcagattagtatacgtagag

SEQ ID NO: 151833 - DNA, 30 bp, Artificial Sequence
  Synthetic oligonucleotide
tgtaaccgaacggctggcatgtgggtagag

SEQ ID NO: 151834 - DNA, 31 bp, Artificial Sequence
  Synthetic oligonucleotide
ccggtcacaccagggtgtgcaaaaattagag

SEQ ID NO: 151835 - DNA, 30 bp, Artificial Sequence
  Synthetic oligonucleotide
tggttctcagcggatgtaactttattagag

SEQ ID NO: 151836 - DNA, 30 bp, Artificial Sequence
  Synthetic oligonucleotide
gattagagagttctccgttattcaaacgag

SEQ ID NO: 151837 - DNA, 30 bp, Artificial Sequence
  Synthetic oligonucleotide
gggcccttactgccagacgtcttaaacgag

SEQ ID NO: 151838 - DNA, 30 bp, Artificial Sequence
  Synthetic oligonucleotide
gcgacgaaattagtatctagacgtaacgag

SEQ ID NO: 151839 - DNA, 30 bp, Artificial Sequence
  Synthetic oligonucleotide
aacattatgggtaacatcagaaaacacgag

SEQ ID NO: 151840 - DNA, 30 bp, Artificial Sequence
  Synthetic oligonucleotide
gttaaagaccatacttctggttaacacgag

SEQ ID NO: 151841 - DNA, 30 bp, Artificial Sequence
  Synthetic oligonucleotide
ccgacgatcaattcttcactcaggcacgag

SEQ ID NO: 151842 - DNA, 30 bp, Artificial Sequence
  Synthetic oligonucleotide
tgggagatcagccgactggagtggcacgag

SEQ ID NO: 151843 - DNA, 30 bp, Artificial Sequence
  Synthetic oligonucleotide
cctccgagctataacagtatcctgcacgag

SEQ ID NO: 151844 - DNA, 30 bp, Artificial Sequence
  Synthetic oligonucleotide
taagaacgcgggtctaaggggctgcacgag

SEQ ID NO: 151845 - DNA, 30 bp, Artificial Sequence
  Synthetic oligonucleotide
cctagtggtcaatatctgtattatcacgag

SEQ ID NO: 151846 - DNA, 30 bp, Artificial Sequence
  Synthetic oligonucleotide
ataggcacggatcatatgactgctcacgag

SEQ ID NO: 151847 - DNA, 30 bp, Artificial Sequence
  Synthetic oligonucleotide
caggggttgtgaaagtgtcaacgcgacgag

SEQ ID NO: 151848 - DNA, 30 bp, Artificial Sequence
  Synthetic oligonucleotide
gaaatcggccaaatacaagagcctgacgag

SEQ ID NO: 151849 - DNA, 30 bp, Artificial Sequence
  Synthetic oligonucleotide
gaggagcgttcagacaacagtgactacgag

SEQ ID NO: 151850 - DNA, 30 bp, Artificial Sequence
  Synthetic oligonucleotide
cccggactaactttacaccctcgttacgag

SEQ ID NO: 151851 - DNA, 30 bp, Artificial Sequence
  Synthetic oligonucleotide
ggcagccagggacaggcccaggtaaccgag

SEQ ID NO: 151852 - DNA, 30 bp, Artificial Sequence
  Synthetic oligonucleotide
ccaagtcaacccttcggggtccccaccgag

SEQ ID NO: 151853 - DNA, 30 bp, Artificial Sequence
  Synthetic oligonucleotide
attaaggcaggacgtcgcggggtgaccgag

SEQ ID NO: 151854 - DNA, 30 bp, Artificial Sequence
  Synthetic oligonucleotide
aatgtcactatcgccttcagggctaccgag

SEQ ID NO: 151855 - DNA, 30 bp, Artificial Sequence
  Synthetic oligonucleotide
gtacgtgttactgtggaacgatttaccgag

SEQ ID NO: 151856 - DNA, 30 bp, Artificial Sequence
  Synthetic oligonucleotide
taagcaaagggcagttccgatgaacccgag

SEQ ID NO: 151857 - DNA, 30 bp, Artificial Sequence
  Synthetic oligonucleotide
actccactgagctttagtaaccaccccgag

SEQ ID NO: 151858 - DNA, 30 bp, Artificial Sequence
  Synthetic oligonucleotide
cggtgatcgagtcttgtggctggtcccgag

SEQ ID NO: 151859 - DNA, 30 bp, Artificial Sequence
  Synthetic oligonucleotide
ccacagaggtcgatgttttgcgccgccgag

SEQ ID NO: 151860 - DNA, 30 bp, Artificial Sequence
  Synthetic oligonucleotide
gaggatgtaatagcgggggtccaggccgag

SEQ ID NO: 151861 - DNA, 30 bp, Artificial Sequence
  Synthetic oligonucleotide
ttacgataggtgtgaaaccccgggtccgag

SEQ ID NO: 151862 - DNA, 30 bp, Artificial Sequence
  Synthetic oligonucleotide
ccaatccctgcggaactttcgaatagcgag

SEQ ID NO: 151863 - DNA, 30 bp, Artificial Sequence
  Synthetic oligonucleotide
caagacgtatgttgtgcaaattatagcgag

SEQ ID NO: 151864 - DNA, 30 bp, Artificial Sequence
  Synthetic oligonucleotide
ttactcacgaacatgtcgcacggccgcgag

SEQ ID NO: 151865 - DNA, 30 bp, Artificial Sequence
  Synthetic oligonucleotide
cgtgtaaactccgctagacccgtccgcgag

SEQ ID NO: 151866 - DNA, 30 bp, Artificial Sequence
  Synthetic oligonucleotide
taatgtgtagcggtgaggggttgcggcgag

SEQ ID NO: 151867 - DNA, 30 bp, Artificial Sequence
  Synthetic oligonucleotide
cagtcggctagatataatatgatgggcgag

SEQ ID NO: 151868 - DNA, 30 bp, Artificial Sequence
  Synthetic oligonucleotide
tggctatggttatgtgctcccttatgcgag

SEQ ID NO: 151869 - DNA, 30 bp, Artificial Sequence
  Synthetic oligonucleotide
atggacgtacgtcgactaggctaaatcgag

SEQ ID NO: 151870 - DNA, 30 bp, Artificial Sequence
  Synthetic oligonucleotide
attaggcggattcgtcgcataaagatcgag

SEQ ID NO: 151871 - DNA, 30 bp, Artificial Sequence
  Synthetic oligonucleotide
cgagctctacgggggtcatatatactcgag

SEQ ID NO: 151872 - DNA, 30 bp, Artificial Sequence
  Synthetic oligonucleotide
acttgatcacgatggcagttatagctcgag

SEQ ID NO: 151873 - DNA, 30 bp, Artificial Sequence
  Synthetic oligonucleotide
agtcttaggctatcgtcaaccgcagtcgag

SEQ ID NO: 151874 - DNA, 30 bp, Artificial Sequence
  Synthetic oligonucleotide
actcgccagtgcgtctatccacgcgtcgag

SEQ ID NO: 151875 - DNA, 30 bp, Artificial Sequence
  Synthetic oligonucleotide
atagcgttttcaccgctgatgtaggtcgag

SEQ ID NO: 151876 - DNA, 30 bp, Artificial Sequence
  Synthetic oligonucleotide
atggtaggatattgaattcactgggtcgag

SEQ ID NO: 151877 - DNA, 30 bp, Artificial Sequence
  Synthetic oligonucleotide
cgcataggcgcgcaatgtgtgggtgtcgag

SEQ ID NO: 151878 - DNA, 30 bp, Artificial Sequence
  Synthetic oligonucleotide
taattgctactctgacgacacgcattcgag

SEQ ID NO: 151879 - DNA, 30 bp, Artificial Sequence
  Synthetic oligonucleotide
atattcgctagggctaagaaaatgttcgag

SEQ ID NO: 151880 - DNA, 30 bp, Artificial Sequence
  Synthetic oligonucleotide
cgttccgaaccgggagctgttcttttcgag

SEQ ID NO: 151881 - DNA, 30 bp, Artificial Sequence
  Synthetic oligonucleotide
atgcggaggaccagggctcgacccaaggag

SEQ ID NO: 151882 - DNA, 30 bp, Artificial Sequence
  Synthetic oligonucleotide
tgtcactcgccttcaaggacgggtaaggag

SEQ ID NO: 151883 - DNA, 30 bp, Artificial Sequence
  Synthetic oligonucleotide
ccagacaaatgaccataattagttaaggag

SEQ ID NO: 151884 - DNA, 30 bp, Artificial Sequence
  Synthetic oligonucleotide
tgccctattcggaaaaaattatgacaggag

SEQ ID NO: 151885 - DNA, 30 bp, Artificial Sequence
  Synthetic oligonucleotide
taaccggttttcgatgctattatccaggag

SEQ ID NO: 151886 - DNA, 30 bp, Artificial Sequence
  Synthetic oligonucleotide
atgctattccgtaacaattggagtcaggag

SEQ ID NO: 151887 - DNA, 30 bp, Artificial Sequence
  Synthetic oligonucleotide
ttctgtgggtgccaatgtaagacagaggag

SEQ ID NO: 151888 - DNA, 31 bp, Artificial Sequence
  Synthetic oligonucleotide
caacacgggcataaagttccctgaggaggag

SEQ ID NO: 151889 - DNA, 30 bp, Artificial Sequence
  Synthetic oligonucleotide
cctgttgcgtttcagcgtcttccggaggag

SEQ ID NO: 151890 - DNA, 30 bp, Artificial Sequence
  Synthetic oligonucleotide
atgtggtagcgtgagtgggattttgaggag

SEQ ID NO: 151891 - DNA, 30 bp, Artificial Sequence
  Synthetic oligonucleotide
taatggagatcagatacgtttagataggag

SEQ ID NO: 151892 - DNA, 30 bp, Artificial Sequence
  Synthetic oligonucleotide
cgtagtatcggtaagtgcctctagtaggag

SEQ ID NO: 151893 - DNA, 30 bp, Artificial Sequence
  Synthetic oligonucleotide
tctgctcaacggtatcatgaaagttaggag

SEQ ID NO: 151894 - DNA, 30 bp, Artificial Sequence
  Synthetic oligonucleotide
gaacgacctttcaggaccagaccaacggag

SEQ ID NO: 151895 - DNA, 30 bp, Artificial Sequence
  Synthetic oligonucleotide
ttaaaggtccaatgaaaggggtggacggag

SEQ ID NO: 151896 - DNA, 30 bp, Artificial Sequence
  Synthetic oligonucleotide
ttagtgggtgctatgtaccgtactacggag

SEQ ID NO: 151897 - DNA, 30 bp, Artificial Sequence
  Synthetic oligonucleotide
atattcacgatggtctgctaaagcccggag

SEQ ID NO: 151898 - DNA, 30 bp, Artificial Sequence
  Synthetic oligonucleotide
ggggaacaaatgaattcccagcatccggag

SEQ ID NO: 151899 - DNA, 30 bp, Artificial Sequence
  Synthetic oligonucleotide
tgttagtgaaggtgagttaactcagcggag

SEQ ID NO: 151900 - DNA, 30 bp, Artificial Sequence
  Synthetic oligonucleotide
tacacctgatcaggcaccagccacgcggag

SEQ ID NO: 151901 - DNA, 30 bp, Artificial Sequence
  Synthetic oligonucleotide
cgaggttaagttgaatatttcgacgcggag

SEQ ID NO: 151902 - DNA, 30 bp, Artificial Sequence
  Synthetic oligonucleotide
tacatcaatggacagcgccagacatcggag

SEQ ID NO: 151903 - DNA, 30 bp, Artificial Sequence
  Synthetic oligonucleotide
gttctatgaacgtaaccctgaggctcggag

SEQ ID NO: 151904 - DNA, 30 bp, Artificial Sequence
  Synthetic oligonucleotide
tcgatattggcggaccgccctatctcggag

SEQ ID NO: 151905 - DNA, 30 bp, Artificial Sequence
  Synthetic oligonucleotide
atcctagtccacagctaagcatggtcggag

SEQ ID NO: 151906 - DNA, 30 bp, Artificial Sequence
  Synthetic oligonucleotide
cgtgtaatcgtggagtcggccttgtcggag

SEQ ID NO: 151907 - DNA, 30 bp, Artificial Sequence
  Synthetic oligonucleotide
gggacggagggacggggttaatgaagggag

SEQ ID NO: 151908 - DNA, 30 bp, Artificial Sequence
  Synthetic oligonucleotide
acgccagatcactctcctttcttcagggag

SEQ ID NO: 151909 - DNA, 30 bp, Artificial Sequence
  Synthetic oligonucleotide
gagtcatcctacagagcattttagagggag

SEQ ID NO: 151910 - DNA, 30 bp, Artificial Sequence
  Synthetic oligonucleotide
atcacgtcggttattagtcggcgtagggag

SEQ ID NO: 151911 - DNA, 30 bp, Artificial Sequence
  Synthetic oligonucleotide
aagaccataaagggctgcgcttggcgggag

SEQ ID NO: 151912 - DNA, 30 bp, Artificial Sequence
  Synthetic oligonucleotide
ataccctggcacccacagtcgctgcgggag

SEQ ID NO: 151913 - DNA, 30 bp, Artificial Sequence
  Synthetic oligonucleotide
aggcaaggggagagactggttgcaggggag

SEQ ID NO: 151914 - DNA, 30 bp, Artificial Sequence
  Synthetic oligonucleotide
atagagcgttggaactttgctctaggggag

SEQ ID NO: 151915 - DNA, 30 bp, Artificial Sequence
  Synthetic oligonucleotide
atatatccaggacgacgtagtggctgggag

SEQ ID NO: 151916 - DNA, 30 bp, Artificial Sequence
  Synthetic oligonucleotide
aagttcaggttatgtatatacaagtgggag

SEQ ID NO: 151917 - DNA, 30 bp, Artificial Sequence
  Synthetic oligonucleotide
aagataaaattctgaagatgtgaaatggag

SEQ ID NO: 151918 - DNA, 30 bp, Artificial Sequence
  Synthetic oligonucleotide
acagtcccattaaagttgaaaggaatggag

SEQ ID NO: 151919 - DNA, 30 bp, Artificial Sequence
  Synthetic oligonucleotide
ctcgttggtaagggggcgcgatctatggag

SEQ ID NO: 151920 - DNA, 30 bp, Artificial Sequence
  Synthetic oligonucleotide
accgccactggcagaaaacccgttatggag

SEQ ID NO: 151921 - DNA, 30 bp, Artificial Sequence
  Synthetic oligonucleotide
ctacaaagagccccacaaaaagccctggag

SEQ ID NO: 151922 - DNA, 29 bp, Artificial Sequence
  Synthetic oligonucleotide
ggtagtcagtgctcgatcggaaggtggag

SEQ ID NO: 151923 - DNA, 30 bp, Artificial Sequence
  Synthetic oligonucleotide
aaagtcccagtaaacgtttaacaggtggag

SEQ ID NO: 151924 - DNA, 30 bp, Artificial Sequence
  Synthetic oligonucleotide
cggaactcaatgtagtaaggactggtggag

SEQ ID NO: 151925 - DNA, 30 bp, Artificial Sequence
  Synthetic oligonucleotide
aacgattagggagtgatgaagtatgtggag

SEQ ID NO: 151926 - DNA, 30 bp, Artificial Sequence
  Synthetic oligonucleotide
ccgtttgtgctgttattacaccctgtggag

SEQ ID NO: 151927 - DNA, 30 bp, Artificial Sequence
  Synthetic oligonucleotide
ggatgtaaacgttagggcgctgctgtggag

SEQ ID NO: 151928 - DNA, 30 bp, Artificial Sequence
  Synthetic oligonucleotide
acgcgggtcaaccgagcgcatggtgtggag

SEQ ID NO: 151929 - DNA, 30 bp, Artificial Sequence
  Synthetic oligonucleotide
acaccaaggcttccatgattatttgtggag

SEQ ID NO: 151930 - DNA, 30 bp, Artificial Sequence
  Synthetic oligonucleotide
gccctgcagtacgacttaaagaaattggag

SEQ ID NO: 151931 - DNA, 30 bp, Artificial Sequence
  Synthetic oligonucleotide
cagtgcgacacttggtaagtcaagttggag

SEQ ID NO: 151932 - DNA, 30 bp, Artificial Sequence
  Synthetic oligonucleotide
tcggcccggaaacagggctagaagttggag

SEQ ID NO: 151933 - DNA, 30 bp, Artificial Sequence
  Synthetic oligonucleotide
tgaagtcttctgaccggctaactgttggag

SEQ ID NO: 151934 - DNA, 30 bp, Artificial Sequence
  Synthetic oligonucleotide
ggtcttggtacctagtggaggtaaaatgag

SEQ ID NO: 151935 - DNA, 30 bp, Artificial Sequence
  Synthetic oligonucleotide
gataaagaggggatatggatgccaaatgag

SEQ ID NO: 151936 - DNA, 30 bp, Artificial Sequence
  Synthetic oligonucleotide
ttttcacggaggacatgctcaagaaatgag

SEQ ID NO: 151937 - DNA, 30 bp, Artificial Sequence
  Synthetic oligonucleotide
aaaagcagctggtcccgacgtgccaatgag

SEQ ID NO: 151938 - DNA, 30 bp, Artificial Sequence
  Synthetic oligonucleotide
atgtatgcgtgttatcgatggctcaatgag

SEQ ID NO: 151939 - DNA, 30 bp, Artificial Sequence
  Synthetic oligonucleotide
tcttgtcgaacagagatcgcaaggaatgag

SEQ ID NO: 151940 - DNA, 30 bp, Artificial Sequence
  Synthetic oligonucleotide
tgagggagttggtggagccatcggaatgag

SEQ ID NO: 151941 - DNA, 30 bp, Artificial Sequence
  Synthetic oligonucleotide
tcggagaagcagccgatttcgactaatgag

SEQ ID NO: 151942 - DNA, 30 bp, Artificial Sequence
  Synthetic oligonucleotide
tacgtcagtatgatcaaggtgactaatgag

SEQ ID NO: 151943 - DNA, 30 bp, Artificial Sequence
  Synthetic oligonucleotide
agggattagtaattaaacggagggcatgag

SEQ ID NO: 151944 - DNA, 30 bp, Artificial Sequence
  Synthetic oligonucleotide
gacaggccaggcccacttcggaccgatgag

SEQ ID NO: 151945 - DNA, 30 bp, Artificial Sequence
  Synthetic oligonucleotide
taccgtcgggagtttccaggggcctatgag

SEQ ID NO: 151946 - DNA, 30 bp, Artificial Sequence
  Synthetic oligonucleotide
ggtaatccttggggcgaccctgtctatgag

SEQ ID NO: 151947 - DNA, 30 bp, Artificial Sequence
  Synthetic oligonucleotide
tccgagtacatacactggtgagcgtatgag

SEQ ID NO: 151948 - DNA, 30 bp, Artificial Sequence
  Synthetic oligonucleotide
gacccgccgttggcccacccaagttatgag

SEQ ID NO: 151949 - DNA, 30 bp, Artificial Sequence
  Synthetic oligonucleotide
actaagttgacattagctttaaaaactgag

SEQ ID NO: 151950 - DNA, 30 bp, Artificial Sequence
  Synthetic oligonucleotide
acacctccgtctgttgacaagcgaactgag

SEQ ID NO: 151951 - DNA, 30 bp, Artificial Sequence
  Synthetic oligonucleotide
gaatgcggtgaacggggctaaaaacctgag

SEQ ID NO: 151952 - DNA, 30 bp, Artificial Sequence
  Synthetic oligonucleotide
cagatattaggtggacatcagtatcctgag

SEQ ID NO: 151953 - DNA, 30 bp, Artificial Sequence
  Synthetic oligonucleotide
tctgtcgtaagttatcgtggcaaggctgag

SEQ ID NO: 151954 - DNA, 30 bp, Artificial Sequence
  Synthetic oligonucleotide
cctgcgtgcaggggggtcacttgggctgag

SEQ ID NO: 151955 - DNA, 30 bp, Artificial Sequence
  Synthetic oligonucleotide
atctcaagcaacatcatgagacgtgctgag

SEQ ID NO: 151956 - DNA, 30 bp, Artificial Sequence
  Synthetic oligonucleotide
tgtcattaatagataatagaaaaatctgag

SEQ ID NO: 151957 - DNA, 30 bp, Artificial Sequence
  Synthetic oligonucleotide
cataacttgttgtatctcagctaatctgag

SEQ ID NO: 151958 - DNA, 30 bp, Artificial Sequence
  Synthetic oligonucleotide
ctcgtctaaccctgtaatctcgcctctgag

SEQ ID NO: 151959 - DNA, 30 bp, Artificial Sequence
  Synthetic oligonucleotide
gcttgggatctaccaactcacggctctgag

SEQ ID NO: 151960 - DNA, 30 bp, Artificial Sequence
  Synthetic oligonucleotide
agcactgtataatcctccctctagtctgag

SEQ ID NO: 151961 - DNA, 30 bp, Artificial Sequence
  Synthetic oligonucleotide
atgtggcgcggtcttgcgcttagttctgag

SEQ ID NO: 151962 - DNA, 30 bp, Artificial Sequence
  Synthetic oligonucleotide
aaaagtacagtatcgaactatataagtgag

SEQ ID NO: 151963 - DNA, 30 bp, Artificial Sequence
  Synthetic oligonucleotide
taaccgaggggatgaaatattcgcagtgag

SEQ ID NO: 151964 - DNA, 30 bp, Artificial Sequence
  Synthetic oligonucleotide
cttgcagggatctagaagcctaacggtgag

SEQ ID NO: 151965 - DNA, 30 bp, Artificial Sequence
  Synthetic oligonucleotide
cttgcatttccttctttcagcgacggtgag

SEQ ID NO: 151966 - DNA, 30 bp, Artificial Sequence
  Synthetic oligonucleotide
gagttgtacagttagcagtcttacggtgag

SEQ ID NO: 151967 - DNA, 30 bp, Artificial Sequence
  Synthetic oligonucleotide
tccgttaagtcggaccgggttcagggtgag

SEQ ID NO: 151968 - DNA, 30 bp, Artificial Sequence
  Synthetic oligonucleotide
gacagcttgagcgggattatcccgggtgag

SEQ ID NO: 151969 - DNA, 30 bp, Artificial Sequence
  Synthetic oligonucleotide
atgatttaacgtttcccgcgagcgggtgag

SEQ ID NO: 151970 - DNA, 31 bp, Artificial Sequence
  Synthetic oligonucleotide
aacctgatggcccccatgctatcgtggtgag

SEQ ID NO: 151971 - DNA, 30 bp, Artificial Sequence
  Synthetic oligonucleotide
ctgggatcttaaacgcttccattatgtgag

SEQ ID NO: 151972 - DNA, 30 bp, Artificial Sequence
  Synthetic oligonucleotide
agccccccgatcggcgtagtagagtgtgag

SEQ ID NO: 151973 - DNA, 30 bp, Artificial Sequence
  Synthetic oligonucleotide
ctgaccgcgttggacagggatacgtgtgag

SEQ ID NO: 151974 - DNA, 30 bp, Artificial Sequence
  Synthetic oligonucleotide
tcagccattttccgaaggtcattgtgtgag

SEQ ID NO: 151975 - DNA, 30 bp, Artificial Sequence
  Synthetic oligonucleotide
ttacagagagcagggagaaactattgtgag

SEQ ID NO: 151976 - DNA, 30 bp, Artificial Sequence
  Synthetic oligonucleotide
tgagcactgggcttataatgggtaattgag

SEQ ID NO: 151977 - DNA, 30 bp, Artificial Sequence
  Synthetic oligonucleotide
tgtaggcggtagggattcactacgattgag

SEQ ID NO: 151978 - DNA, 30 bp, Artificial Sequence
  Synthetic oligonucleotide
atgtaatcgtacgtaactggtgcgattgag

SEQ ID NO: 151979 - DNA, 30 bp, Artificial Sequence
  Synthetic oligonucleotide
ttgatggcaatcttgggttcttatattgag

SEQ ID NO: 151980 - DNA, 30 bp, Artificial Sequence
  Synthetic oligonucleotide
ggtcgacgcctggtaccgcgtcctattgag

SEQ ID NO: 151981 - DNA, 30 bp, Artificial Sequence
  Synthetic oligonucleotide
aggcggggctcggaacttttccttattgag

SEQ ID NO: 151982 - DNA, 30 bp, Artificial Sequence
  Synthetic oligonucleotide
accgccgtggaaaaccggcaaaaacttgag

SEQ ID NO: 151983 - DNA, 30 bp, Artificial Sequence
  Synthetic oligonucleotide
tcgcaggtactgcctgtgcacgcccttgag

SEQ ID NO: 151984 - DNA, 30 bp, Artificial Sequence
  Synthetic oligonucleotide
actctatgttggtgtcgattggtagttgag

SEQ ID NO: 151985 - DNA, 30 bp, Artificial Sequence
  Synthetic oligonucleotide
tctgtgaatttaaccaagggcgcggttgag

SEQ ID NO: 151986 - DNA, 30 bp, Artificial Sequence
  Synthetic oligonucleotide
cctaggtgctgaatagcgataactgttgag

SEQ ID NO: 151987 - DNA, 30 bp, Artificial Sequence
  Synthetic oligonucleotide
ataggctcccgaccgataacagttgttgag

SEQ ID NO: 151988 - DNA, 30 bp, Artificial Sequence
  Synthetic oligonucleotide
acatcttctagttccagggacaaatttgag

SEQ ID NO: 151989 - DNA, 30 bp, Artificial Sequence
  Synthetic oligonucleotide
gaataggagatgacaaacgcgtaatttgag

SEQ ID NO: 151990 - DNA, 30 bp, Artificial Sequence
  Synthetic oligonucleotide
ctctagcaatgcggcgtatatgcatttgag

SEQ ID NO: 151991 - DNA, 30 bp, Artificial Sequence
  Synthetic oligonucleotide
tcgcaagccggtaactactcaagatttgag

SEQ ID NO: 151992 - DNA, 30 bp, Artificial Sequence
  Synthetic oligonucleotide
attgcccattattgctttaattcctttgag

SEQ ID NO: 151993 - DNA, 30 bp, Artificial Sequence
  Synthetic oligonucleotide
gtcatcggcagttagcttaccgagtttgag

SEQ ID NO: 151994 - DNA, 30 bp, Artificial Sequence
  Synthetic oligonucleotide
cgcatgtcacttaattgcgggacaaaatag

SEQ ID NO: 151995 - DNA, 30 bp, Artificial Sequence
  Synthetic oligonucleotide
ggggcccagtatttccccccgagaaaatag

SEQ ID NO: 151996 - DNA, 30 bp, Artificial Sequence
  Synthetic oligonucleotide
ctgtgcggaagatttttagaggtaaaatag

SEQ ID NO: 151997 - DNA, 30 bp, Artificial Sequence
  Synthetic oligonucleotide
caggataggaagggccgtggcttaaaatag

SEQ ID NO: 151998 - DNA, 30 bp, Artificial Sequence
  Synthetic oligonucleotide
gcacccgtcaaggcctacgagttaaaatag

SEQ ID NO: 151999 - DNA, 30 bp, Artificial Sequence
  Synthetic oligonucleotide
tagctaagtccacatataactcacaaatag

SEQ ID NO: 152000 - DNA, 30 bp, Artificial Sequence
  Synthetic oligonucleotide
gatgttcatgaccctatataacgcaaatag

SEQ ID NO: 152001 - DNA, 29 bp, Artificial Sequence
  Synthetic oligonucleotide
tgtcagaggaaaatactctcggcaaatag

SEQ ID NO: 152002 - DNA, 30 bp, Artificial Sequence
  Synthetic oligonucleotide
ttaaaccagcttgtgcgccggttcaaatag

SEQ ID NO: 152003 - DNA, 30 bp, Artificial Sequence
  Synthetic oligonucleotide
ctcgccgggtggataggccactagaaatag

SEQ ID NO: 152004 - DNA, 30 bp, Artificial Sequence
  Synthetic oligonucleotide
ccgacgtgggtccctgtgggttttaaatag

SEQ ID NO: 152005 - DNA, 30 bp, Artificial Sequence
  Synthetic oligonucleotide
tcctcccaccgggactttccggaacaatag

SEQ ID NO: 152006 - DNA, 30 bp, Artificial Sequence
  Synthetic oligonucleotide
aaagaagtatgcccgagacggcgacaatag

SEQ ID NO: 152007 - DNA, 30 bp, Artificial Sequence
  Synthetic oligonucleotide
ttgcagtgcaagcatggaacgatagaatag

SEQ ID NO: 152008 - DNA, 30 bp, Artificial Sequence
  Synthetic oligonucleotide
gcggagagttgcgcaaagcctatagaatag

SEQ ID NO: 152009 - DNA, 30 bp, Artificial Sequence
  Synthetic oligonucleotide
tgaaatcggaggcttttgcgcggcgaatag

SEQ ID NO: 152010 - DNA, 30 bp, Artificial Sequence
  Synthetic oligonucleotide
ctgtccgtgggatgagtacagttggaatag

SEQ ID NO: 152011 - DNA, 30 bp, Artificial Sequence
  Synthetic oligonucleotide
gtgccctactaagggcaaacgtgtgaatag

SEQ ID NO: 152012 - DNA, 30 bp, Artificial Sequence
  Synthetic oligonucleotide
ttcgggaatgctggtctgtgattctaatag

SEQ ID NO: 152013 - DNA, 30 bp, Artificial Sequence
  Synthetic oligonucleotide
aggtatgccctcggtggtgtaataacatag

SEQ ID NO: 152014 - DNA, 30 bp, Artificial Sequence
  Synthetic oligonucleotide
cagggttgctaacatacagcctcgacatag

SEQ ID NO: 152015 - DNA, 30 bp, Artificial Sequence
  Synthetic oligonucleotide
aatgtaaggcaaagagtaaggaatacatag

SEQ ID NO: 152016 - DNA, 30 bp, Artificial Sequence
  Synthetic oligonucleotide
gttgccgtatcctctcgcacccatacatag

SEQ ID NO: 152017 - DNA, 30 bp, Artificial Sequence
  Synthetic oligonucleotide
acgcgtgataatagattgtcgggtacatag

SEQ ID NO: 152018 - DNA, 30 bp, Artificial Sequence
  Synthetic oligonucleotide
gcttaataaggtgcgattgaccacccatag

SEQ ID NO: 152019 - DNA, 30 bp, Artificial Sequence
  Synthetic oligonucleotide
actcaaaatgtaacacgttgaaccccatag

SEQ ID NO: 152020 - DNA, 30 bp, Artificial Sequence
  Synthetic oligonucleotide
agaaaagctgcggtgtaaggctggccatag

SEQ ID NO: 152021 - DNA, 30 bp, Artificial Sequence
  Synthetic oligonucleotide
gatacttcgcatggatcacatcttccatag

SEQ ID NO: 152022 - DNA, 30 bp, Artificial Sequence
  Synthetic oligonucleotide
ggcctacatgctgaagatgcttaagcatag

SEQ ID NO: 152023 - DNA, 30 bp, Artificial Sequence
  Synthetic oligonucleotide
gatctctagtggcgaacaagagtagcatag

SEQ ID NO: 152024 - DNA, 30 bp, Artificial Sequence
  Synthetic oligonucleotide
gcgtgtgagttgtggagcagcggcgcatag

SEQ ID NO: 152025 - DNA, 30 bp, Artificial Sequence
  Synthetic oligonucleotide
aaacggaacataagatttggtaatgcatag

SEQ ID NO: 152026 - DNA, 30 bp, Artificial Sequence
  Synthetic oligonucleotide
cgataacccatgagatttcgacgatcatag

SEQ ID NO: 152027 - DNA, 30 bp, Artificial Sequence
  Synthetic oligonucleotide
tgaacctccggaggacgcacaacgtcatag

SEQ ID NO: 152028 - DNA, 30 bp, Artificial Sequence
  Synthetic oligonucleotide
ctaaggcgtaacgttttggtaatttcatag

SEQ ID NO: 152029 - DNA, 31 bp, Artificial Sequence
  Synthetic oligonucleotide
cttagatgatagacaataaagttaaagatag

SEQ ID NO: 152030 - DNA, 30 bp, Artificial Sequence
  Synthetic oligonucleotide
catccagtagtaacatgcaatgtcagatag

SEQ ID NO: 152031 - DNA, 30 bp, Artificial Sequence
  Synthetic oligonucleotide
tgtgaatagtcctagctttgcgggagatag

SEQ ID NO: 152032 - DNA, 30 bp, Artificial Sequence
  Synthetic oligonucleotide
agtgagtgactgggggcggcgtaacgatag

SEQ ID NO: 152033 - DNA, 30 bp, Artificial Sequence
  Synthetic oligonucleotide
acacgaatagctttagtgataacgcgatag

SEQ ID NO: 152034 - DNA, 30 bp, Artificial Sequence
  Synthetic oligonucleotide
tatgcaggtgaggggccaccttcgcgatag

SEQ ID NO: 152035 - DNA, 30 bp, Artificial Sequence
  Synthetic oligonucleotide
acccagcatattgggatcgtatatcgatag

SEQ ID NO: 152036 - DNA, 30 bp, Artificial Sequence
  Synthetic oligonucleotide
cgacatctcattagaaagcgtgttcgatag

SEQ ID NO: 152037 - DNA, 30 bp, Artificial Sequence
  Synthetic oligonucleotide
aagcgtagagccaatgcccttcacggatag

SEQ ID NO: 152038 - DNA, 30 bp, Artificial Sequence
  Synthetic oligonucleotide
ctggcagtcgtaaatggttccagcggatag

SEQ ID NO: 152039 - DNA, 30 bp, Artificial Sequence
  Synthetic oligonucleotide
gttgctgcgatagcgcacaagtggggatag

SEQ ID NO: 152040 - DNA, 30 bp, Artificial Sequence
  Synthetic oligonucleotide
tacgacactgttcctctaagaggatgatag

SEQ ID NO: 152041 - DNA, 30 bp, Artificial Sequence
  Synthetic oligonucleotide
gagggtcaggatggcatggatcggtgatag

SEQ ID NO: 152042 - DNA, 30 bp, Artificial Sequence
  Synthetic oligonucleotide
ggtggggcggtatagtcattgctgtgatag

SEQ ID NO: 152043 - DNA, 30 bp, Artificial Sequence
  Synthetic oligonucleotide
gccttggcacacgctagtttccgttgatag

SEQ ID NO: 152044 - DNA, 30 bp, Artificial Sequence
  Synthetic oligonucleotide
gaaagcctggatacacagatcgagatatag

SEQ ID NO: 152045 - DNA, 30 bp, Artificial Sequence
  Synthetic oligonucleotide
acttcgtaagccgaacctaatccactatag

SEQ ID NO: 152046 - DNA, 30 bp, Artificial Sequence
  Synthetic oligonucleotide
ttacaccaataagtaataggcatactatag

SEQ ID NO: 152047 - DNA, 30 bp, Artificial Sequence
  Synthetic oligonucleotide
tggctcgttacccgacgagagtcgctatag

SEQ ID NO: 152048 - DNA, 30 bp, Artificial Sequence
  Synthetic oligonucleotide
ggcgcatgcgccgatggtaagcgtctatag

SEQ ID NO: 152049 - DNA, 30 bp, Artificial Sequence
  Synthetic oligonucleotide
atacacgtcggcgccgcaacgggtctatag

SEQ ID NO: 152050 - DNA, 30 bp, Artificial Sequence
  Synthetic oligonucleotide
agtaagtgtcaatgtcactgccatgtatag

SEQ ID NO: 152051 - DNA, 30 bp, Artificial Sequence
  Synthetic oligonucleotide
ctcagctctcgcgagtggggaaacttatag

SEQ ID NO: 152052 - DNA, 30 bp, Artificial Sequence
  Synthetic oligonucleotide
gcggccacgtgattaagtgcaagcaactag

SEQ ID NO: 152053 - DNA, 30 bp, Artificial Sequence
  Synthetic oligonucleotide
ccctgttattacttatcacacgtcaactag

SEQ ID NO: 152054 - DNA, 30 bp, Artificial Sequence
  Synthetic oligonucleotide
ggtcctcccgatggagggactcagaactag

SEQ ID NO: 152055 - DNA, 30 bp, Artificial Sequence
  Synthetic oligonucleotide
gaggtaaagcagagcatgcgttagaactag

SEQ ID NO: 152056 - DNA, 30 bp, Artificial Sequence
  Synthetic oligonucleotide
ataaccgcgtatattgggggattgaactag

SEQ ID NO: 152057 - DNA, 30 bp, Artificial Sequence
  Synthetic oligonucleotide
aaggtaatctaacgggcataggataactag

SEQ ID NO: 152058 - DNA, 30 bp, Artificial Sequence
  Synthetic oligonucleotide
gggcacgacctttagctttattctaactag

SEQ ID NO: 152059 - DNA, 30 bp, Artificial Sequence
  Synthetic oligonucleotide
ttgtacggtccacgaaacagctttaactag

SEQ ID NO: 152060 - DNA, 30 bp, Artificial Sequence
  Synthetic oligonucleotide
aaacagtcaaacgcttcaataaatcactag

SEQ ID NO: 152061 - DNA, 30 bp, Artificial Sequence
  Synthetic oligonucleotide
taacgtggaggattgcggcaccccgactag

SEQ ID NO: 152062 - DNA, 30 bp, Artificial Sequence
  Synthetic oligonucleotide
cagtggaaaattctgtataaagctgactag

SEQ ID NO: 152063 - DNA, 30 bp, Artificial Sequence
  Synthetic oligonucleotide
cagtgatgtagagtgaaatgctgtgactag

SEQ ID NO: 152064 - DNA, 30 bp, Artificial Sequence
  Synthetic oligonucleotide
atgaaactagtaaaagtcaggccatactag

SEQ ID NO: 152065 - DNA, 30 bp, Artificial Sequence
  Synthetic oligonucleotide
caccgtattcacgaaggatgactatactag

SEQ ID NO: 152066 - DNA, 30 bp, Artificial Sequence
  Synthetic oligonucleotide
atccactggcatgttcaagtatcctactag

SEQ ID NO: 152067 - DNA, 30 bp, Artificial Sequence
  Synthetic oligonucleotide
ctcttagcgtcggaaatttggaggacctag

SEQ ID NO: 152068 - DNA, 30 bp, Artificial Sequence
  Synthetic oligonucleotide
gttgcgttgtgcaaggatccgaatacctag

SEQ ID NO: 152069 - DNA, 30 bp, Artificial Sequence
  Synthetic oligonucleotide
gtatgctgtcatcagccccttaaaccctag

SEQ ID NO: 152070 - DNA, 30 bp, Artificial Sequence
  Synthetic oligonucleotide
tgttcgccgaaaggtcaaagggcaccctag

SEQ ID NO: 152071 - DNA, 30 bp, Artificial Sequence
  Synthetic oligonucleotide
agtagaagacaaagccggcgacgaccctag

SEQ ID NO: 152072 - DNA, 30 bp, Artificial Sequence
  Synthetic oligonucleotide
cggcgtcggtaatcaagaagtctaccctag

SEQ ID NO: 152073 - DNA, 30 bp, Artificial Sequence
  Synthetic oligonucleotide
accaaggagaaataacaatgaaagccctag

SEQ ID NO: 152074 - DNA, 30 bp, Artificial Sequence
  Synthetic oligonucleotide
gcccctcgtgactgcctggatcaagcctag

SEQ ID NO: 152075 - DNA, 30 bp, Artificial Sequence
  Synthetic oligonucleotide
acgggcgcgctagcctgaattcaagcctag

SEQ ID NO: 152076 - DNA, 30 bp, Artificial Sequence
  Synthetic oligonucleotide
ggcgtcggtccacgtctggaaccggcctag

SEQ ID NO: 152077 - DNA, 30 bp, Artificial Sequence
  Synthetic oligonucleotide
ccgtacgcatgaggctaatcaagggcctag

SEQ ID NO: 152078 - DNA, 30 bp, Artificial Sequence
  Synthetic oligonucleotide
catttcggaactgagttttaagcatcctag

SEQ ID NO: 152079 - DNA, 30 bp, Artificial Sequence
  Synthetic oligonucleotide
acccgggaaggagtgcctgtgggatcctag

SEQ ID NO: 152080 - DNA, 30 bp, Artificial Sequence
  Synthetic oligonucleotide
cctgttttacatcctggagtggtctcctag

SEQ ID NO: 152081 - DNA, 29 bp, Artificial Sequence
  Synthetic oligonucleotide
ggcggggcggtgtccgatgcgggtcctag

SEQ ID NO: 152082 - DNA, 30 bp, Artificial Sequence
  Synthetic oligonucleotide
ctgtgtaacgggatggggagaccaagctag

SEQ ID NO: 152083 - DNA, 30 bp, Artificial Sequence
  Synthetic oligonucleotide
tgtaactacaagggtaggcctaatagctag

SEQ ID NO: 152084 - DNA, 30 bp, Artificial Sequence
  Synthetic oligonucleotide
cctaaagtaaaccggcacactaatcgctag

SEQ ID NO: 152085 - DNA, 31 bp, Artificial Sequence
  Synthetic oligonucleotide
acggtgcatgtccacggactgggacggctag

SEQ ID NO: 152086 - DNA, 30 bp, Artificial Sequence
  Synthetic oligonucleotide
ccagaatccgtatgacccgcgcggggctag

SEQ ID NO: 152087 - DNA, 30 bp, Artificial Sequence
  Synthetic oligonucleotide
gagagttaaggagactgacctagtggctag

SEQ ID NO: 152088 - DNA, 30 bp, Artificial Sequence
  Synthetic oligonucleotide
agatagatcttcatatcaaactgatgctag

SEQ ID NO: 152089 - DNA, 30 bp, Artificial Sequence
  Synthetic oligonucleotide
cgcatcgagtcccgcgtcgtatgctgctag

SEQ ID NO: 152090 - DNA, 30 bp, Artificial Sequence
  Synthetic oligonucleotide
aacacgcgctcgcggtataatcgttgctag

SEQ ID NO: 152091 - DNA, 30 bp, Artificial Sequence
  Synthetic oligonucleotide
agtcggataacaggaccctacaacatctag

SEQ ID NO: 152092 - DNA, 30 bp, Artificial Sequence
  Synthetic oligonucleotide
atgctagttggatctggtgttagactctag

SEQ ID NO: 152093 - DNA, 30 bp, Artificial Sequence
  Synthetic oligonucleotide
cgcttcctagacagtacggggaacctctag

SEQ ID NO: 152094 - DNA, 30 bp, Artificial Sequence
  Synthetic oligonucleotide
tagggagggcacaatatcgctcgcctctag

SEQ ID NO: 152095 - DNA, 30 bp, Artificial Sequence
  Synthetic oligonucleotide
tcaaattgtaagtaccagaaaatcctctag

SEQ ID NO: 152096 - DNA, 30 bp, Artificial Sequence
  Synthetic oligonucleotide
gtaaaagtctaacggggatggaatctctag

SEQ ID NO: 152097 - DNA, 30 bp, Artificial Sequence
  Synthetic oligonucleotide
tacgcaattattagcagctgcacagtctag

SEQ ID NO: 152098 - DNA, 30 bp, Artificial Sequence
  Synthetic oligonucleotide
agttcccattatggcccgcgaacggtctag

SEQ ID NO: 152099 - DNA, 30 bp, Artificial Sequence
  Synthetic oligonucleotide
cagaagcttactacattacatcgtgtctag

SEQ ID NO: 152100 - DNA, 30 bp, Artificial Sequence
  Synthetic oligonucleotide
acattctagtagcacgaatctcttgtctag

SEQ ID NO: 152101 - DNA, 30 bp, Artificial Sequence
  Synthetic oligonucleotide
gatacaaaagataggtctagcacattctag

SEQ ID NO: 152102 - DNA, 30 bp, Artificial Sequence
  Synthetic oligonucleotide
aaggtagaccccgtcaccgttcaaaagtag

SEQ ID NO: 152103 - DNA, 30 bp, Artificial Sequence
  Synthetic oligonucleotide
gggctacacgcgggttttttccacaagtag

SEQ ID NO: 152104 - DNA, 30 bp, Artificial Sequence
  Synthetic oligonucleotide
gggcatgttgctgagtcgcctactaagtag

SEQ ID NO: 152105 - DNA, 30 bp, Artificial Sequence
  Synthetic oligonucleotide
ctgcaggatgaatatttacatacacagtag

SEQ ID NO: 152106 - DNA, 30 bp, Artificial Sequence
  Synthetic oligonucleotide
acggcattggggccgatgaagtatcagtag

SEQ ID NO: 152107 - DNA, 30 bp, Artificial Sequence
  Synthetic oligonucleotide
gtcaaagaaggttgaagatttactcagtag

SEQ ID NO: 152108 - DNA, 30 bp, Artificial Sequence
  Synthetic oligonucleotide
tgttgagtaacactaagtagttttcagtag

SEQ ID NO: 152109 - DNA, 30 bp, Artificial Sequence
  Synthetic oligonucleotide
attgcgggtagttggtccatgaaagagtag

SEQ ID NO: 152110 - DNA, 30 bp, Artificial Sequence
  Synthetic oligonucleotide
aaaatggcgggaaggttggagacagagtag

SEQ ID NO: 152111 - DNA, 30 bp, Artificial Sequence
  Synthetic oligonucleotide
tgtagttacaaagtaacctggtacgagtag

SEQ ID NO: 152112 - DNA, 30 bp, Artificial Sequence
  Synthetic oligonucleotide
gttcggtaggatcggcgggtcctcgagtag

SEQ ID NO: 152113 - DNA, 30 bp, Artificial Sequence
  Synthetic oligonucleotide
ctgggttaggccactgcacagtcatagtag

SEQ ID NO: 152114 - DNA, 30 bp, Artificial Sequence
  Synthetic oligonucleotide
cctagactgattcgaatccactactagtag

SEQ ID NO: 152115 - DNA, 30 bp, Artificial Sequence
  Synthetic oligonucleotide
aaacaccgtaatgcaaaaaatgtctagtag

SEQ ID NO: 152116 - DNA, 30 bp, Artificial Sequence
  Synthetic oligonucleotide
taagacgaagtacctcggcatgaaacgtag

SEQ ID NO: 152117 - DNA, 30 bp, Artificial Sequence
  Synthetic oligonucleotide
tgaaacggaggcacattgattccaacgtag

SEQ ID NO: 152118 - DNA, 29 bp, Artificial Sequence
  Synthetic oligonucleotide
gtgctatcagtacatttatatcaacgtag

SEQ ID NO: 152119 - DNA, 30 bp, Artificial Sequence
  Synthetic oligonucleotide
cgccggacatacaatggaccttacacgtag

SEQ ID NO: 152120 - DNA, 30 bp, Artificial Sequence
  Synthetic oligonucleotide
aagcatgcatcgttgaattccggcacgtag

SEQ ID NO: 152121 - DNA, 30 bp, Artificial Sequence
  Synthetic oligonucleotide
tagcgaggaaactcgcgtttccagacgtag

SEQ ID NO: 152122 - DNA, 30 bp, Artificial Sequence
  Synthetic oligonucleotide
ctcctccataatgtcgggtgacatacgtag

SEQ ID NO: 152123 - DNA, 30 bp, Artificial Sequence
  Synthetic oligonucleotide
tgaatgaaattagaatttgcgtggccgtag

SEQ ID NO: 152124 - DNA, 30 bp, Artificial Sequence
  Synthetic oligonucleotide
gttaacggatgataagcaaatagtgcgtag

SEQ ID NO: 152125 - DNA, 30 bp, Artificial Sequence
  Synthetic oligonucleotide
caggggcaggtttaaagaaccttatcgtag

SEQ ID NO: 152126 - DNA, 30 bp, Artificial Sequence
  Synthetic oligonucleotide
atagacagcgagccggtattcggttcgtag

SEQ ID NO: 152127 - DNA, 30 bp, Artificial Sequence
  Synthetic oligonucleotide
atgaatccatcttattgcgagaaaaggtag

SEQ ID NO: 152128 - DNA, 31 bp, Artificial Sequence
  Synthetic oligonucleotide
tatgagccactaatcttctaggacaaggtag

SEQ ID NO: 152129 - DNA, 30 bp, Artificial Sequence
  Synthetic oligonucleotide
gccggatatcggttgtcagggctaaggtag

SEQ ID NO: 152130 - DNA, 30 bp, Artificial Sequence
  Synthetic oligonucleotide
ggattggatcgagttaagctcagcaggtag

SEQ ID NO: 152131 - DNA, 30 bp, Artificial Sequence
  Synthetic oligonucleotide
attgagaacagcggggtgtcttcgaggtag

SEQ ID NO: 152132 - DNA, 30 bp, Artificial Sequence
  Synthetic oligonucleotide
cccgaacgggcaagaagaggtcaacggtag

SEQ ID NO: 152133 - DNA, 30 bp, Artificial Sequence
  Synthetic oligonucleotide
aggataagtgagcggttgttctcacggtag

SEQ ID NO: 152134 - DNA, 30 bp, Artificial Sequence
  Synthetic oligonucleotide
caaatacagtggatgacactttcccggtag

SEQ ID NO: 152135 - DNA, 30 bp, Artificial Sequence
  Synthetic oligonucleotide
cgaatccatcgcgaatccatattccggtag

SEQ ID NO: 152136 - DNA, 30 bp, Artificial Sequence
  Synthetic oligonucleotide
aaatgagacaaggggacagtcgctcggtag

SEQ ID NO: 152137 - DNA, 30 bp, Artificial Sequence
  Synthetic oligonucleotide
cagcgacgggatatggccgagtgagggtag

SEQ ID NO: 152138 - DNA, 30 bp, Artificial Sequence
  Synthetic oligonucleotide
ggtcggggtcatgcccagcattccgggtag

SEQ ID NO: 152139 - DNA, 30 bp, Artificial Sequence
  Synthetic oligonucleotide
aagacgagagtcataacttaggatgggtag

SEQ ID NO: 152140 - DNA, 30 bp, Artificial Sequence
  Synthetic oligonucleotide
cagtacatccgacaacaaccctattggtag

SEQ ID NO: 152141 - DNA, 30 bp, Artificial Sequence
  Synthetic oligonucleotide
gagatctttcctacacactcttgcatgtag

SEQ ID NO: 152142 - DNA, 30 bp, Artificial Sequence
  Synthetic oligonucleotide
ggtaaagaatcggtggatggcatgatgtag

SEQ ID NO: 152143 - DNA, 30 bp, Artificial Sequence
  Synthetic oligonucleotide
ccgctccgtgcgaatcctcggttgatgtag

SEQ ID NO: 152144 - DNA, 30 bp, Artificial Sequence
  Synthetic oligonucleotide
aacaaaggcatgcccgcttttggtatgtag

SEQ ID NO: 152145 - DNA, 30 bp, Artificial Sequence
  Synthetic oligonucleotide
atctcgcgcgtggatgagagacaactgtag

SEQ ID NO: 152146 - DNA, 30 bp, Artificial Sequence
  Synthetic oligonucleotide
aacttaaacggtcagccgcttccactgtag

SEQ ID NO: 152147 - DNA, 30 bp, Artificial Sequence
  Synthetic oligonucleotide
caattatccagtatgcgaaataagctgtag

SEQ ID NO: 152148 - DNA, 30 bp, Artificial Sequence
  Synthetic oligonucleotide
ctggaggggcgtcgaggagggatgctgtag

SEQ ID NO: 152149 - DNA, 30 bp, Artificial Sequence
  Synthetic oligonucleotide
agttaaactcagtgtagacatagagtgtag

SEQ ID NO: 152150 - DNA, 30 bp, Artificial Sequence
  Synthetic oligonucleotide
ataagcaccagattgaatgagggagtgtag

SEQ ID NO: 152151 - DNA, 30 bp, Artificial Sequence
  Synthetic oligonucleotide
cgtggtctactggtaggtgaattggtgtag

SEQ ID NO: 152152 - DNA, 30 bp, Artificial Sequence
  Synthetic oligonucleotide
gaacacgaagggggttcaactcctgtgtag

SEQ ID NO: 152153 - DNA, 30 bp, Artificial Sequence
  Synthetic oligonucleotide
cataaggtgaccgggcgctcatagttgtag

SEQ ID NO: 152154 - DNA, 30 bp, Artificial Sequence
  Synthetic oligonucleotide
ctgagggtgcaataaaccagtcccaattag

SEQ ID NO: 152155 - DNA, 30 bp, Artificial Sequence
  Synthetic oligonucleotide
ccttttgcgggacccgtcaggagcaattag

SEQ ID NO: 152156 - DNA, 30 bp, Artificial Sequence
  Synthetic oligonucleotide
cgttcgaaccatagcgggtgactccattag

SEQ ID NO: 152157 - DNA, 30 bp, Artificial Sequence
  Synthetic oligonucleotide
gcacgtctaccatggcctcggtcgcattag

SEQ ID NO: 152158 - DNA, 30 bp, Artificial Sequence
  Synthetic oligonucleotide
aacggctatgtggaggctccgtttgattag

SEQ ID NO: 152159 - DNA, 30 bp, Artificial Sequence
  Synthetic oligonucleotide
tgcgactcatcacgtcaataacaaacttag

SEQ ID NO: 152160 - DNA, 30 bp, Artificial Sequence
  Synthetic oligonucleotide
tcgaaacgcaagtaagcgacagttccttag

SEQ ID NO: 152161 - DNA, 30 bp, Artificial Sequence
  Synthetic oligonucleotide
acaactacgcgtctcgggacccttgcttag

SEQ ID NO: 152162 - DNA, 30 bp, Artificial Sequence
  Synthetic oligonucleotide
aaacacgcagtgaacaaattaaactcttag

SEQ ID NO: 152163 - DNA, 30 bp, Artificial Sequence
  Synthetic oligonucleotide
cgttatgtactaggagaggaggtctcttag

SEQ ID NO: 152164 - DNA, 30 bp, Artificial Sequence
  Synthetic oligonucleotide
cgactaggtacactaattgaggcttcttag

SEQ ID NO: 152165 - DNA, 30 bp, Artificial Sequence
  Synthetic oligonucleotide
tagtcattcaggagaaaattaccaagttag

SEQ ID NO: 152166 - DNA, 30 bp, Artificial Sequence
  Synthetic oligonucleotide
ttaacgtacgtgagcgttgagttaagttag

SEQ ID NO: 152167 - DNA, 30 bp, Artificial Sequence
  Synthetic oligonucleotide
gatacgcctatcaggttagagtacagttag

SEQ ID NO: 152168 - DNA, 30 bp, Artificial Sequence
  Synthetic oligonucleotide
acaattcagctataattagggtacagttag

SEQ ID NO: 152169 - DNA, 30 bp, Artificial Sequence
  Synthetic oligonucleotide
tgccgaggcacggcgttgcggtgcagttag

SEQ ID NO: 152170 - DNA, 30 bp, Artificial Sequence
  Synthetic oligonucleotide
acattggtcaaccaggcttttaaccgttag

SEQ ID NO: 152171 - DNA, 30 bp, Artificial Sequence
  Synthetic oligonucleotide
gcgttacactgaacaaaggattttcgttag

SEQ ID NO: 152172 - DNA, 30 bp, Artificial Sequence
  Synthetic oligonucleotide
cactggtgtggcgaaatcacgggaggttag

SEQ ID NO: 152173 - DNA, 30 bp, Artificial Sequence
  Synthetic oligonucleotide
aaagccgactttggagtactaagcggttag

SEQ ID NO: 152174 - DNA, 30 bp, Artificial Sequence
  Synthetic oligonucleotide
aagcttagattgcctttgatcagcggttag

SEQ ID NO: 152175 - DNA, 30 bp, Artificial Sequence
  Synthetic oligonucleotide
tacggcctcgacagcctctgagtcggttag

SEQ ID NO: 152176 - DNA, 30 bp, Artificial Sequence
  Synthetic oligonucleotide
tggggacatacagcagcgcattgatgttag

SEQ ID NO: 152177 - DNA, 30 bp, Artificial Sequence
  Synthetic oligonucleotide
atgtgggttgtcggtattcagtaaatttag

SEQ ID NO: 152178 - DNA, 30 bp, Artificial Sequence
  Synthetic oligonucleotide
gtagactggctgttccggcaacgaatttag

SEQ ID NO: 152179 - DNA, 30 bp, Artificial Sequence
  Synthetic oligonucleotide
gtttacgcgtggtgctgtacccagatttag

SEQ ID NO: 152180 - DNA, 30 bp, Artificial Sequence
  Synthetic oligonucleotide
aactacgagggcaaatacggtttgatttag

SEQ ID NO: 152181 - DNA, 30 bp, Artificial Sequence
  Synthetic oligonucleotide
gatgaacgaactctatcattaaatatttag

SEQ ID NO: 152182 - DNA, 30 bp, Artificial Sequence
  Synthetic oligonucleotide
agcgtaggagctgttaatacagctatttag

SEQ ID NO: 152183 - DNA, 30 bp, Artificial Sequence
  Synthetic oligonucleotide
taagcaagttaaaatacatgtggcctttag

SEQ ID NO: 152184 - DNA, 30 bp, Artificial Sequence
  Synthetic oligonucleotide
cgcatatacccccaacattctaatctttag

SEQ ID NO: 152185 - DNA, 30 bp, Artificial Sequence
  Synthetic oligonucleotide
gtatcggcccggctgccagaccttctttag

SEQ ID NO: 152186 - DNA, 30 bp, Artificial Sequence
  Synthetic oligonucleotide
cactctattggtggcctgaactaggtttag

SEQ ID NO: 152187 - DNA, 30 bp, Artificial Sequence
  Synthetic oligonucleotide
attcgcccgtgcaagcggagtctggtttag

SEQ ID NO: 152188 - DNA, 30 bp, Artificial Sequence
  Synthetic oligonucleotide
cgtacttagggtcatacgttcgaattttag

SEQ ID NO: 152189 - DNA, 30 bp, Artificial Sequence
  Synthetic oligonucleotide
tggatggacttattgcgccgtacattttag

SEQ ID NO: 152190 - DNA, 30 bp, Artificial Sequence
  Synthetic oligonucleotide
cgatttctgccacgcgtggacatattttag

SEQ ID NO: 152191 - DNA, 30 bp, Artificial Sequence
  Synthetic oligonucleotide
ggcctatgagtatgcgaaaatttcttttag

SEQ ID NO: 152192 - DNA, 30 bp, Artificial Sequence
  Synthetic oligonucleotide
ccatctaaattccgaagattacggttttag

SEQ ID NO: 152193 - DNA, 30 bp, Artificial Sequence
  Synthetic oligonucleotide
tcgggatatgcgccgacgggtagtttttag

SEQ ID NO: 152194 - DNA, 30 bp, Artificial Sequence
  Synthetic oligonucleotide
tgtgcgaacgccaccaggcgcattttttag

SEQ ID NO: 152195 - DNA, 30 bp, Artificial Sequence
  Synthetic oligonucleotide
atcacctagaggagacaaaagttaaaaacg

SEQ ID NO: 152196 - DNA, 30 bp, Artificial Sequence
  Synthetic oligonucleotide
gtcggtaagtcacagctacgaaacaaaacg

SEQ ID NO: 152197 - DNA, 30 bp, Artificial Sequence
  Synthetic oligonucleotide
tcaacgcggtacagaatgttcgacaaaacg

SEQ ID NO: 152198 - DNA, 30 bp, Artificial Sequence
  Synthetic oligonucleotide
aacggacatgagccaccattggacaaaacg

SEQ ID NO: 152199 - DNA, 30 bp, Artificial Sequence
  Synthetic oligonucleotide
ttataggagcgctagtgagtacccaaaacg

SEQ ID NO: 152200 - DNA, 30 bp, Artificial Sequence
  Synthetic oligonucleotide
gcctagctacccgtgagggctaataaaacg

SEQ ID NO: 152201 - DNA, 30 bp, Artificial Sequence
  Synthetic oligonucleotide
accgtgcatgcggattatatatctaaaacg

SEQ ID NO: 152202 - DNA, 30 bp, Artificial Sequence
  Synthetic oligonucleotide
gagtaagttaagcgatactcctaccaaacg

SEQ ID NO: 152203 - DNA, 30 bp, Artificial Sequence
  Synthetic oligonucleotide
ggttagatggtgtcaagcctaacccaaacg

SEQ ID NO: 152204 - DNA, 30 bp, Artificial Sequence
  Synthetic oligonucleotide
ctaagtatagactcaacactacggcaaacg

SEQ ID NO: 152205 - DNA, 30 bp, Artificial Sequence
  Synthetic oligonucleotide
tcgccgaagaatattgtcaatatgcaaacg

SEQ ID NO: 152206 - DNA, 30 bp, Artificial Sequence
  Synthetic oligonucleotide
ggacgggtggatgagtaccgaactcaaacg

SEQ ID NO: 152207 - DNA, 30 bp, Artificial Sequence
  Synthetic oligonucleotide
cacacgtcataggcgaatacgtctcaaacg

SEQ ID NO: 152208 - DNA, 30 bp, Artificial Sequence
  Synthetic oligonucleotide
tcccaatggttactaactcgtggcgaaacg

SEQ ID NO: 152209 - DNA, 30 bp, Artificial Sequence
  Synthetic oligonucleotide
aagagggctgacccgtaaatatctgaaacg

SEQ ID NO: 152210 - DNA, 30 bp, Artificial Sequence
  Synthetic oligonucleotide
aactacggagtgcgcacttttcgtgaaacg

SEQ ID NO: 152211 - DNA, 30 bp, Artificial Sequence
  Synthetic oligonucleotide
gcaggcactcttaataagccgtgtgaaacg

SEQ ID NO: 152212 - DNA, 30 bp, Artificial Sequence
  Synthetic oligonucleotide
ttggaataagttaatccggctaagtaaacg

SEQ ID NO: 152213 - DNA, 30 bp, Artificial Sequence
  Synthetic oligonucleotide
gggtatcaattccagactaggcagtaaacg

SEQ ID NO: 152214 - DNA, 30 bp, Artificial Sequence
  Synthetic oligonucleotide
ctagtcctaaaattcgagtaacgcacaacg

SEQ ID NO: 152215 - DNA, 30 bp, Artificial Sequence
  Synthetic oligonucleotide
taaccagggactcgcttcggcacgacaacg

SEQ ID NO: 152216 - DNA, 30 bp, Artificial Sequence
  Synthetic oligonucleotide
taaagggctcaccggatttaagcgacaacg

SEQ ID NO: 152217 - DNA, 30 bp, Artificial Sequence
  Synthetic oligonucleotide
gtggctacggagtaaccgcttgctacaacg

SEQ ID NO: 152218 - DNA, 30 bp, Artificial Sequence
  Synthetic oligonucleotide
tagaggcactatgccaattgcacaccaacg

SEQ ID NO: 152219 - DNA, 30 bp, Artificial Sequence
  Synthetic oligonucleotide
atggtatcagattacgcaaataaagcaacg

SEQ ID NO: 152220 - DNA, 30 bp, Artificial Sequence
  Synthetic oligonucleotide
aaaattgaggttgtggcctcacaggcaacg

SEQ ID NO: 152221 - DNA, 30 bp, Artificial Sequence
  Synthetic oligonucleotide
ggtaaatcctgcgtggtccacacatcaacg

SEQ ID NO: 152222 - DNA, 30 bp, Artificial Sequence
  Synthetic oligonucleotide
ccagagtgtccccgattcctccgatcaacg

SEQ ID NO: 152223 - DNA, 30 bp, Artificial Sequence
  Synthetic oligonucleotide
ggtggaagcgtttgtaggagcgtatcaacg

SEQ ID NO: 152224 - DNA, 30 bp, Artificial Sequence
  Synthetic oligonucleotide
agatgaataccgtcgaggtccctctcaacg

SEQ ID NO: 152225 - DNA, 30 bp, Artificial Sequence
  Synthetic oligonucleotide
cctaggaagatatacccaggtcgaagaacg

SEQ ID NO: 152226 - DNA, 30 bp, Artificial Sequence
  Synthetic oligonucleotide
tgctgtcattggaactagtatatgagaacg

SEQ ID NO: 152227 - DNA, 30 bp, Artificial Sequence
  Synthetic oligonucleotide
gctaagcctaccacttataatgctagaacg

SEQ ID NO: 152228 - DNA, 30 bp, Artificial Sequence
  Synthetic oligonucleotide
agatggagcggtttccgcatgcgccgaacg

SEQ ID NO: 152229 - DNA, 30 bp, Artificial Sequence
  Synthetic oligonucleotide
aacaaccctaaagagcggcttgtccgaacg

SEQ ID NO: 152230 - DNA, 30 bp, Artificial Sequence
  Synthetic oligonucleotide
agatctcaacggggcctgcgagtgcgaacg

SEQ ID NO: 152231 - DNA, 30 bp, Artificial Sequence
  Synthetic oligonucleotide
ctagtcatatcgatcttttgacttcgaacg

SEQ ID NO: 152232 - DNA, 30 bp, Artificial Sequence
  Synthetic oligonucleotide
accaaagactggacccacaaggatggaacg

SEQ ID NO: 152233 - DNA, 30 bp, Artificial Sequence
  Synthetic oligonucleotide
tctacactaaaattgaagtggggtggaacg

SEQ ID NO: 152234 - DNA, 30 bp, Artificial Sequence
  Synthetic oligonucleotide
ataaatccgccgaggacccactcatgaacg

SEQ ID NO: 152235 - DNA, 30 bp, Artificial Sequence
  Synthetic oligonucleotide
gctagtttggtacatctccaggactgaacg

SEQ ID NO: 152236 - DNA, 30 bp, Artificial Sequence
  Synthetic oligonucleotide
aacgccttttgcaaaattccttactgaacg

SEQ ID NO: 152237 - DNA, 30 bp, Artificial Sequence
  Synthetic oligonucleotide
aatcataacaagtcaccccccgggtgaacg

SEQ ID NO: 152238 - DNA, 30 bp, Artificial Sequence
  Synthetic oligonucleotide
agcgtaccgcaagctagttagacttgaacg

SEQ ID NO: 152239 - DNA, 31 bp, Artificial Sequence
  Synthetic oligonucleotide
gtgaacaccggttagaaaactagtttgaacg

SEQ ID NO: 152240 - DNA, 30 bp, Artificial Sequence
  Synthetic oligonucleotide
gcggtcttacgtggggggcacgccataacg

SEQ ID NO: 152241 - DNA, 30 bp, Artificial Sequence
  Synthetic oligonucleotide
gcgatctagagagtgccccgaaatataacg

SEQ ID NO: 152242 - DNA, 30 bp, Artificial Sequence
  Synthetic oligonucleotide
tgcggagtttattaatgattgcatataacg

SEQ ID NO: 152243 - DNA, 30 bp, Artificial Sequence
  Synthetic oligonucleotide
ctgctcagattcttctaaaatactataacg

SEQ ID NO: 152244 - DNA, 30 bp, Artificial Sequence
  Synthetic oligonucleotide
caactaaacgttgaaaccctgtaactaacg

SEQ ID NO: 152245 - DNA, 30 bp, Artificial Sequence
  Synthetic oligonucleotide
gaagggcggtagaagaagtattggctaacg

SEQ ID NO: 152246 - DNA, 30 bp, Artificial Sequence
  Synthetic oligonucleotide
tcagctggtgcttcaaaaggaggtctaacg

SEQ ID NO: 152247 - DNA, 30 bp, Artificial Sequence
  Synthetic oligonucleotide
agagaacgtccggccgagtggctagtaacg

SEQ ID NO: 152248 - DNA, 30 bp, Artificial Sequence
  Synthetic oligonucleotide
agcaatagcttggaagaccccgccgtaacg

SEQ ID NO: 152249 - DNA, 30 bp, Artificial Sequence
  Synthetic oligonucleotide
ggttcagcttcattaagtcatgatgtaacg

SEQ ID NO: 152250 - DNA, 30 bp, Artificial Sequence
  Synthetic oligonucleotide
cggatgtgcgaacgtcatgtgtttgtaacg

SEQ ID NO: 152251 - DNA, 30 bp, Artificial Sequence
  Synthetic oligonucleotide
gagcgtaatacaaaaccaagtacattaacg

SEQ ID NO: 152252 - DNA, 30 bp, Artificial Sequence
  Synthetic oligonucleotide
gaaacaccatactacgggttgtatttaacg

SEQ ID NO: 152253 - DNA, 30 bp, Artificial Sequence
  Synthetic oligonucleotide
ctatccgcccagtcctggagtgcaaacacg

SEQ ID NO: 152254 - DNA, 30 bp, Artificial Sequence
  Synthetic oligonucleotide
gtatacggcgaggtcagtactcccaacacg

SEQ ID NO: 152255 - DNA, 30 bp, Artificial Sequence
  Synthetic oligonucleotide
gggctgttaagtatgattaccgctaacacg

SEQ ID NO: 152256 - DNA, 30 bp, Artificial Sequence
  Synthetic oligonucleotide
ccccgagccgtgcaactacgccaacacacg

SEQ ID NO: 152257 - DNA, 30 bp, Artificial Sequence
  Synthetic oligonucleotide
gaaacggataagactagaggccaacacacg

SEQ ID NO: 152258 - DNA, 30 bp, Artificial Sequence
  Synthetic oligonucleotide
tgggtgaagaccatagtgatgcaccacacg

SEQ ID NO: 152259 - DNA, 30 bp, Artificial Sequence
  Synthetic oligonucleotide
gtccggagttgtcgaggatcgaagcacacg

SEQ ID NO: 152260 - DNA, 30 bp, Artificial Sequence
  Synthetic oligonucleotide
gcctcgcaattaaggacaacggcgcacacg

SEQ ID NO: 152261 - DNA, 30 bp, Artificial Sequence
  Synthetic oligonucleotide
cagcgacacgactcctggcgggttcacacg

SEQ ID NO: 152262 - DNA, 30 bp, Artificial Sequence
  Synthetic oligonucleotide
aggggacctctatgagtatgctttcacacg

SEQ ID NO: 152263 - DNA, 30 bp, Artificial Sequence
  Synthetic oligonucleotide
tcaacctcgtaggactacaagccagacacg

SEQ ID NO: 152264 - DNA, 30 bp, Artificial Sequence
  Synthetic oligonucleotide
cgaatcgagggtcggaacttgtacgacacg

SEQ ID NO: 152265 - DNA, 30 bp, Artificial Sequence
  Synthetic oligonucleotide
cagatatgcacggatggtttattctacacg

SEQ ID NO: 152266 - DNA, 30 bp, Artificial Sequence
  Synthetic oligonucleotide
gagattattcactaagggaacgcgtacacg

SEQ ID NO: 152267 - DNA, 30 bp, Artificial Sequence
  Synthetic oligonucleotide
taagatgcgtgttagactatttcaaccacg

SEQ ID NO: 152268 - DNA, 30 bp, Artificial Sequence
  Synthetic oligonucleotide
gcatacacagctcgcacggcgccgaccacg

SEQ ID NO: 152269 - DNA, 30 bp, Artificial Sequence
  Synthetic oligonucleotide
ggataactagaagattcatgacaacccacg

SEQ ID NO: 152270 - DNA, 30 bp, Artificial Sequence
  Synthetic oligonucleotide
tctgactgacgtctcatccggcgacccacg

SEQ ID NO: 152271 - DNA, 30 bp, Artificial Sequence
  Synthetic oligonucleotide
tgcacacataagcaccaaatagcccccacg

SEQ ID NO: 152272 - DNA, 30 bp, Artificial Sequence
  Synthetic oligonucleotide
tttataatctagggagagggcggagccacg

SEQ ID NO: 152273 - DNA, 29 bp, Artificial Sequence
  Synthetic oligonucleotide
acggtagtttcaaatatgaggacgccacg

SEQ ID NO: 152274 - DNA, 30 bp, Artificial Sequence
  Synthetic oligonucleotide
gatcaaaagctccgtaccatttatgccacg

SEQ ID NO: 152275 - DNA, 30 bp, Artificial Sequence
  Synthetic oligonucleotide
tcgttagccattccaaatgattgctccacg

SEQ ID NO: 152276 - DNA, 30 bp, Artificial Sequence
  Synthetic oligonucleotide
gtacagcctaagtgtgtgcaaccgtccacg

SEQ ID NO: 152277 - DNA, 30 bp, Artificial Sequence
  Synthetic oligonucleotide
cgaactactgagttggcgaaaaattccacg

SEQ ID NO: 152278 - DNA, 30 bp, Artificial Sequence
  Synthetic oligonucleotide
cggccacgtcaatggaagcgtgaaagcacg

SEQ ID NO: 152279 - DNA, 30 bp, Artificial Sequence
  Synthetic oligonucleotide
cggaggcaaaattgtgcatgattaagcacg

SEQ ID NO: 152280 - DNA, 30 bp, Artificial Sequence
  Synthetic oligonucleotide
aggctaatcacacttggttgccacagcacg

SEQ ID NO: 152281 - DNA, 30 bp, Artificial Sequence
  Synthetic oligonucleotide
gcgtaaccatcctgttcgtgcaccagcacg

SEQ ID NO: 152282 - DNA, 30 bp, Artificial Sequence
  Synthetic oligonucleotide
gacttgtgctcgcacaccgagtagagcacg

SEQ ID NO: 152283 - DNA, 30 bp, Artificial Sequence
  Synthetic oligonucleotide
cgttaatgagacgggctacagtgtagcacg

SEQ ID NO: 152284 - DNA, 30 bp, Artificial Sequence
  Synthetic oligonucleotide
tccacaaattaaagcaaacgcgaccgcacg

SEQ ID NO: 152285 - DNA, 30 bp, Artificial Sequence
  Synthetic oligonucleotide
caactccgatattaacagattctccgcacg

SEQ ID NO: 152286 - DNA, 30 bp, Artificial Sequence
  Synthetic oligonucleotide
gagaccgggcattattgtataaaaggcacg

SEQ ID NO: 152287 - DNA, 30 bp, Artificial Sequence
  Synthetic oligonucleotide
gttgaacatcaactcttggtaaacggcacg

SEQ ID NO: 152288 - DNA, 30 bp, Artificial Sequence
  Synthetic oligonucleotide
ggcaaggtcaccgtgacaatagagggcacg

SEQ ID NO: 152289 - DNA, 30 bp, Artificial Sequence
  Synthetic oligonucleotide
caggacgtaaatattggggacggtggcacg

SEQ ID NO: 152290 - DNA, 30 bp, Artificial Sequence
  Synthetic oligonucleotide
tattaccttgggggtaagagacttggcacg

SEQ ID NO: 152291 - DNA, 30 bp, Artificial Sequence
  Synthetic oligonucleotide
tgtatccgagtgcacgatacctcttgcacg

SEQ ID NO: 152292 - DNA, 30 bp, Artificial Sequence
  Synthetic oligonucleotide
atctaaagtatggacctagttctttgcacg

SEQ ID NO: 152293 - DNA, 30 bp, Artificial Sequence
  Synthetic oligonucleotide
cctagctaccaggggggtaagcaaatcacg

SEQ ID NO: 152294 - DNA, 30 bp, Artificial Sequence
  Synthetic oligonucleotide
agtgggtgctatgaccgaataagaatcacg

SEQ ID NO: 152295 - DNA, 30 bp, Artificial Sequence
  Synthetic oligonucleotide
taaactaacagagtgtatcggctcatcacg

SEQ ID NO: 152296 - DNA, 30 bp, Artificial Sequence
  Synthetic oligonucleotide
ctagtgtcccaccatactagagggatcacg

SEQ ID NO: 152297 - DNA, 30 bp, Artificial Sequence
  Synthetic oligonucleotide
gcatctgaaactgaataacctatgatcacg

SEQ ID NO: 152298 - DNA, 30 bp, Artificial Sequence
  Synthetic oligonucleotide
cacaaatcattagtggtcgcgacactcacg

SEQ ID NO: 152299 - DNA, 30 bp, Artificial Sequence
  Synthetic oligonucleotide
ggaacagtggtaatcttgcggagagtcacg

SEQ ID NO: 152300 - DNA, 30 bp, Artificial Sequence
  Synthetic oligonucleotide
tggggggttcattccaaagccaaggtcacg

SEQ ID NO: 152301 - DNA, 30 bp, Artificial Sequence
  Synthetic oligonucleotide
gctgggtctctaccagggcagaaggtcacg

SEQ ID NO: 152302 - DNA, 30 bp, Artificial Sequence
  Synthetic oligonucleotide
ctagtagcgtaatcaaacggaagggtcacg

SEQ ID NO: 152303 - DNA, 30 bp, Artificial Sequence
  Synthetic oligonucleotide
gctgggtgctatggggtcaaacgggtcacg

SEQ ID NO: 152304 - DNA, 30 bp, Artificial Sequence
  Synthetic oligonucleotide
tgcatgccgtcttttttgggtcctgtcacg

SEQ ID NO: 152305 - DNA, 30 bp, Artificial Sequence
  Synthetic oligonucleotide
ggcatttgatattacctaaattggttcacg

SEQ ID NO: 152306 - DNA, 30 bp, Artificial Sequence
  Synthetic oligonucleotide
tagggacgtatatcgggtcttataaagacg

SEQ ID NO: 152307 - DNA, 30 bp, Artificial Sequence
  Synthetic oligonucleotide
gtacgggagttaaaagctgggggcaagacg

SEQ ID NO: 152308 - DNA, 30 bp, Artificial Sequence
  Synthetic oligonucleotide
cctgcagtccggatgagtccagagaagacg

SEQ ID NO: 152309 - DNA, 30 bp, Artificial Sequence
  Synthetic oligonucleotide
gaactcgtgtcctttaggatacctaagacg

SEQ ID NO: 152310 - DNA, 30 bp, Artificial Sequence
  Synthetic oligonucleotide
cagtagaagatctaatatatggaccagacg

SEQ ID NO: 152311 - DNA, 30 bp, Artificial Sequence
  Synthetic oligonucleotide
cgcgctagacgggatcgttcaaggcagacg

SEQ ID NO: 152312 - DNA, 30 bp, Artificial Sequence
  Synthetic oligonucleotide
cttgtcgcggaagatggaacaacggagacg

SEQ ID NO: 152313 - DNA, 30 bp, Artificial Sequence
  Synthetic oligonucleotide
aatgtcggggaaacagccaaggatgagacg

SEQ ID NO: 152314 - DNA, 30 bp, Artificial Sequence
  Synthetic oligonucleotide
gtgtacatgttcaggaggtgttatgagacg

SEQ ID NO: 152315 - DNA, 30 bp, Artificial Sequence
  Synthetic oligonucleotide
atgcaggtgagaatgatatgcactgagacg

SEQ ID NO: 152316 - DNA, 30 bp, Artificial Sequence
  Synthetic oligonucleotide
catcatggggatctggaacaatctgagacg

SEQ ID NO: 152317 - DNA, 30 bp, Artificial Sequence
  Synthetic oligonucleotide
gtgggcaagagtgagtgggtttctgagacg

SEQ ID NO: 152318 - DNA, 30 bp, Artificial Sequence
  Synthetic oligonucleotide
taatcgctgtctttaccgcggaaatagacg

SEQ ID NO: 152319 - DNA, 30 bp, Artificial Sequence
  Synthetic oligonucleotide
gtaaaacggccggggactcacgactagacg

SEQ ID NO: 152320 - DNA, 30 bp, Artificial Sequence
  Synthetic oligonucleotide
acgggcatacaagatccaatatgctagacg

SEQ ID NO: 152321 - DNA, 30 bp, Artificial Sequence
  Synthetic oligonucleotide
gcatactaattctgatggatgctctagacg

SEQ ID NO: 152322 - DNA, 30 bp, Artificial Sequence
  Synthetic oligonucleotide
gtgcgatgtcatgtgacgtataattagacg

SEQ ID NO: 152323 - DNA, 30 bp, Artificial Sequence
  Synthetic oligonucleotide
gtcaaatgaacatccggcaagtcaacgacg

SEQ ID NO: 152324 - DNA, 30 bp, Artificial Sequence
  Synthetic oligonucleotide
gtggtacgttcgagtgtaccaagtacgacg

SEQ ID NO: 152325 - DNA, 30 bp, Artificial Sequence
  Synthetic oligonucleotide
taacctggactacgtgagatgggaccgacg

SEQ ID NO: 152326 - DNA, 30 bp, Artificial Sequence
  Synthetic oligonucleotide
agaagcgtggtgggagctggcgacccgacg

SEQ ID NO: 152327 - DNA, 30 bp, Artificial Sequence
  Synthetic oligonucleotide
atagaagagcagtcagaacttgtcgcgacg

SEQ ID NO: 152328 - DNA, 30 bp, Artificial Sequence
  Synthetic oligonucleotide
tgcgtcgtggatcgaattggtaatgcgacg

SEQ ID NO: 152329 - DNA, 30 bp, Artificial Sequence
  Synthetic oligonucleotide
ccctccagaatacaaaatcggttatcgacg

SEQ ID NO: 152330 - DNA, 30 bp, Artificial Sequence
  Synthetic oligonucleotide
caggacctgacgttgtaaaacccctcgacg

SEQ ID NO: 152331 - DNA, 30 bp, Artificial Sequence
  Synthetic oligonucleotide
gggaggtagaggaatctgaacggctcgacg

SEQ ID NO: 152332 - DNA, 30 bp, Artificial Sequence
  Synthetic oligonucleotide
ggcagactggtttcatgtgagctctcgacg

SEQ ID NO: 152333 - DNA, 30 bp, Artificial Sequence
  Synthetic oligonucleotide
acgcgtggttgtgaagtcatataaaggacg

SEQ ID NO: 152334 - DNA, 30 bp, Artificial Sequence
  Synthetic oligonucleotide
aacccaggggcctaagggaacacaaggacg

SEQ ID NO: 152335 - DNA, 30 bp, Artificial Sequence
  Synthetic oligonucleotide
cgtcgcctgacagtaaactgaataaggacg

SEQ ID NO: 152336 - DNA, 30 bp, Artificial Sequence
  Synthetic oligonucleotide
caccgtaacaaaatcctgttcaccaggacg

SEQ ID NO: 152337 - DNA, 30 bp, Artificial Sequence
  Synthetic oligonucleotide
gataagcacttagtgcagccttagaggacg

SEQ ID NO: 152338 - DNA, 30 bp, Artificial Sequence
  Synthetic oligonucleotide
ttggaaggattcaagacacctacccggacg

SEQ ID NO: 152339 - DNA, 30 bp, Artificial Sequence
  Synthetic oligonucleotide
ctgaacacggagtacctcatggtgcggacg

SEQ ID NO: 152340 - DNA, 30 bp, Artificial Sequence
  Synthetic oligonucleotide
ctgctaaggctctctattgaccatcggacg

SEQ ID NO: 152341 - DNA, 30 bp, Artificial Sequence
  Synthetic oligonucleotide
ccgtgtcaatacacatacacccatcggacg

SEQ ID NO: 152342 - DNA, 30 bp, Artificial Sequence
  Synthetic oligonucleotide
atgatagcacgaatgggccgtcctcggacg

SEQ ID NO: 152343 - DNA, 30 bp, Artificial Sequence
  Synthetic oligonucleotide
ggctcacgtgacccacattgtggagggacg

SEQ ID NO: 152344 - DNA, 30 bp, Artificial Sequence
  Synthetic oligonucleotide
cttacatacctcaatatcagcgtagggacg

SEQ ID NO: 152345 - DNA, 30 bp, Artificial Sequence
  Synthetic oligonucleotide
caggcttcaggtgttagatcgaaggggacg

SEQ ID NO: 152346 - DNA, 30 bp, Artificial Sequence
  Synthetic oligonucleotide
cagtatcttgtgtacggttaacaggggacg

SEQ ID NO: 152347 - DNA, 30 bp, Artificial Sequence
  Synthetic oligonucleotide
tgccaaaaggtccgacgtgagtaggggacg

SEQ ID NO: 152348 - DNA, 30 bp, Artificial Sequence
  Synthetic oligonucleotide
gaaccatggcaacatgactgtacctggacg

SEQ ID NO: 152349 - DNA, 30 bp, Artificial Sequence
  Synthetic oligonucleotide
gggtagaaccgagtgtgaggagtgtggacg

SEQ ID NO: 152350 - DNA, 30 bp, Artificial Sequence
  Synthetic oligonucleotide
tgtacaggtagggtagaacggtaaatgacg

SEQ ID NO: 152351 - DNA, 30 bp, Artificial Sequence
  Synthetic oligonucleotide
aggaatgagcggtaaacgggctggatgacg

SEQ ID NO: 152352 - DNA, 30 bp, Artificial Sequence
  Synthetic oligonucleotide
atgagtgtgtctaacacgacaccactgacg

SEQ ID NO: 152353 - DNA, 30 bp, Artificial Sequence
  Synthetic oligonucleotide
ctacataagattgagatgagactactgacg

SEQ ID NO: 152354 - DNA, 30 bp, Artificial Sequence
  Synthetic oligonucleotide
gtcgcgggtgactttcagaaagagctgacg

SEQ ID NO: 152355 - DNA, 30 bp, Artificial Sequence
  Synthetic oligonucleotide
gggaacgtaacaggccagccactcgtgacg

SEQ ID NO: 152356 - DNA, 30 bp, Artificial Sequence
  Synthetic oligonucleotide
gtggcctcgtaatgctacattgcggtgacg

SEQ ID NO: 152357 - DNA, 30 bp, Artificial Sequence
  Synthetic oligonucleotide
cgactactgtgtcacatgcggtgggtgacg

SEQ ID NO: 152358 - DNA, 30 bp, Artificial Sequence
  Synthetic oligonucleotide
catgaacaccgacttgtataattattgacg

SEQ ID NO: 152359 - DNA, 30 bp, Artificial Sequence
  Synthetic oligonucleotide
ccccaaccaagtgcgcggttcaccttgacg

SEQ ID NO: 152360 - DNA, 30 bp, Artificial Sequence
  Synthetic oligonucleotide
tgccggaaaattgcagtgtatccaaatacg

SEQ ID NO: 152361 - DNA, 30 bp, Artificial Sequence
  Synthetic oligonucleotide
ggtgcgaggcggtggagcccctgaaatacg

SEQ ID NO: 152362 - DNA, 30 bp, Artificial Sequence
  Synthetic oligonucleotide
tgatcccgacataagagaccgtacaatacg

SEQ ID NO: 152363 - DNA, 30 bp, Artificial Sequence
  Synthetic oligonucleotide
cggaaactgcctagggggttgcttaatacg

SEQ ID NO: 152364 - DNA, 30 bp, Artificial Sequence
  Synthetic oligonucleotide
gagaataggtaggcacagcagacacatacg

SEQ ID NO: 152365 - DNA, 30 bp, Artificial Sequence
  Synthetic oligonucleotide
ttagtgaccatcgtcccagtccaccatacg

SEQ ID NO: 152366 - DNA, 30 bp, Artificial Sequence
  Synthetic oligonucleotide
aagtggtattaatctggtgagatccatacg

SEQ ID NO: 152367 - DNA, 30 bp, Artificial Sequence
  Synthetic oligonucleotide
gatttagggctgaaggcatcatagcatacg

SEQ ID NO: 152368 - DNA, 30 bp, Artificial Sequence
  Synthetic oligonucleotide
ccaggctcgtcacgggtcgtatcgcatacg

SEQ ID NO: 152369 - DNA, 30 bp, Artificial Sequence
  Synthetic oligonucleotide
atggggggcgttttttgcgtgacagatacg

SEQ ID NO: 152370 - DNA, 30 bp, Artificial Sequence
  Synthetic oligonucleotide
gggcatgtcgcctgcacaactgcagatacg

SEQ ID NO: 152371 - DNA, 30 bp, Artificial Sequence
  Synthetic oligonucleotide
acaaaggtctgtaggctataaccaactacg

SEQ ID NO: 152372 - DNA, 30 bp, Artificial Sequence
  Synthetic oligonucleotide
gcgcctgtgaataatagcgcagccactacg

SEQ ID NO: 152373 - DNA, 30 bp, Artificial Sequence
  Synthetic oligonucleotide
taggtaatcaaaacgcaaaagttcactacg

SEQ ID NO: 152374 - DNA, 30 bp, Artificial Sequence
  Synthetic oligonucleotide
gttccattatctttgagtacaaggactacg

SEQ ID NO: 152375 - DNA, 30 bp, Artificial Sequence
  Synthetic oligonucleotide
gctagtgccgtggagtctaatctacctacg

SEQ ID NO: 152376 - DNA, 30 bp, Artificial Sequence
  Synthetic oligonucleotide
tccaagatttcccaaccttaatgccctacg

SEQ ID NO: 152377 - DNA, 30 bp, Artificial Sequence
  Synthetic oligonucleotide
cactgaaacaacaacatcgatgccgctacg

SEQ ID NO: 152378 - DNA, 30 bp, Artificial Sequence
  Synthetic oligonucleotide
ccaacgctgtgaagcctgaaaggggctacg

SEQ ID NO: 152379 - DNA, 30 bp, Artificial Sequence
  Synthetic oligonucleotide
cggtgtcgccaataagtcgtcccatctacg

SEQ ID NO: 152380 - DNA, 30 bp, Artificial Sequence
  Synthetic oligonucleotide
tgggtaatgtagtgttagggatgctctacg

SEQ ID NO: 152381 - DNA, 30 bp, Artificial Sequence
  Synthetic oligonucleotide
tcttggaagggtatactcgaatagtctacg

SEQ ID NO: 152382 - DNA, 30 bp, Artificial Sequence
  Synthetic oligonucleotide
tacataacccaatctaagatggtgtctacg

SEQ ID NO: 152383 - DNA, 30 bp, Artificial Sequence
  Synthetic oligonucleotide
cacaccagccactttggataatgaagtacg

SEQ ID NO: 152384 - DNA, 30 bp, Artificial Sequence
  Synthetic oligonucleotide
gaggaagagcgcccatgagttgtaagtacg

SEQ ID NO: 152385 - DNA, 30 bp, Artificial Sequence
  Synthetic oligonucleotide
cagaatcttgagcgtcaacgactcagtacg

SEQ ID NO: 152386 - DNA, 30 bp, Artificial Sequence
  Synthetic oligonucleotide
atgcatcggtgccgggtttcgatgagtacg

SEQ ID NO: 152387 - DNA, 30 bp, Artificial Sequence
  Synthetic oligonucleotide
gtcgataagcaggatgttgtaccccgtacg

SEQ ID NO: 152388 - DNA, 30 bp, Artificial Sequence
  Synthetic oligonucleotide
atgatggctccaagtgtagtcggaggtacg

SEQ ID NO: 152389 - DNA, 30 bp, Artificial Sequence
  Synthetic oligonucleotide
agcggatccagaacgttatggcacggtacg

SEQ ID NO: 152390 - DNA, 30 bp, Artificial Sequence
  Synthetic oligonucleotide
tcaggtaggcgggtggtattgtgcggtacg

SEQ ID NO: 152391 - DNA, 30 bp, Artificial Sequence
  Synthetic oligonucleotide
atccacttaacagcgggtatgtcgggtacg

SEQ ID NO: 152392 - DNA, 30 bp, Artificial Sequence
  Synthetic oligonucleotide
tcggcggtatacagcacaatgaatggtacg

SEQ ID NO: 152393 - DNA, 30 bp, Artificial Sequence
  Synthetic oligonucleotide
gtctcaaaaggtgtaataatggactgtacg

SEQ ID NO: 152394 - DNA, 30 bp, Artificial Sequence
  Synthetic oligonucleotide
gcacaggggaggctatggcggacgtgtacg

SEQ ID NO: 152395 - DNA, 30 bp, Artificial Sequence
  Synthetic oligonucleotide
atgtaggtgacaagaaacgatacaattacg

SEQ ID NO: 152396 - DNA, 30 bp, Artificial Sequence
  Synthetic oligonucleotide
tcaactgggactaccaggtggtagattacg

SEQ ID NO: 152397 - DNA, 30 bp, Artificial Sequence
  Synthetic oligonucleotide
actcgattgggaatttaggtgacgattacg

SEQ ID NO: 152398 - DNA, 30 bp, Artificial Sequence
  Synthetic oligonucleotide
tcctccgcgtgagcacttgaagttattacg

SEQ ID NO: 152399 - DNA, 30 bp, Artificial Sequence
  Synthetic oligonucleotide
tctcgactgactacttgtgattcggttacg

SEQ ID NO: 152400 - DNA, 30 bp, Artificial Sequence
  Synthetic oligonucleotide
gatgtcgggaggtcttgaggtttggttacg

SEQ ID NO: 152401 - DNA, 30 bp, Artificial Sequence
  Synthetic oligonucleotide
gaaagatcagcatccaaaagaggtgttacg

SEQ ID NO: 152402 - DNA, 30 bp, Artificial Sequence
  Synthetic oligonucleotide
gagcactagtcaacacgattgaactttacg

SEQ ID NO: 152403 - DNA, 30 bp, Artificial Sequence
  Synthetic oligonucleotide
actagtacgacagatgcaagaccctttacg

SEQ ID NO: 152404 - DNA, 30 bp, Artificial Sequence
  Synthetic oligonucleotide
aacaatatggttatgatgttctagtttacg

SEQ ID NO: 152405 - DNA, 30 bp, Artificial Sequence
  Synthetic oligonucleotide
caaattactaaagggatagtgggaaaaccg

SEQ ID NO: 152406 - DNA, 30 bp, Artificial Sequence
  Synthetic oligonucleotide
caatagcaacatatgcactgcctaaaaccg

SEQ ID NO: 152407 - DNA, 30 bp, Artificial Sequence
  Synthetic oligonucleotide
cacccattgtggttaaggaagccgaaaccg

SEQ ID NO: 152408 - DNA, 30 bp, Artificial Sequence
  Synthetic oligonucleotide
gtgatcggtgccagagtatactttaaaccg

SEQ ID NO: 152409 - DNA, 30 bp, Artificial Sequence
  Synthetic oligonucleotide
ccgtcgtctataaatctcgtcgttcaaccg

SEQ ID NO: 152410 - DNA, 30 bp, Artificial Sequence
  Synthetic oligonucleotide
gcgacgttgggggatcccttggttcaaccg

SEQ ID NO: 152411 - DNA, 30 bp, Artificial Sequence
  Synthetic oligonucleotide
tagacgtacaggggtggactaatataaccg

SEQ ID NO: 152412 - DNA, 30 bp, Artificial Sequence
  Synthetic oligonucleotide
tccataccagactaatttaagcactaaccg

SEQ ID NO: 152413 - DNA, 30 bp, Artificial Sequence
  Synthetic oligonucleotide
tctgccgttccatatcttatcgactaaccg

SEQ ID NO: 152414 - DNA, 30 bp, Artificial Sequence
  Synthetic oligonucleotide
tccaggccaaagtgatctttcgcctaaccg

SEQ ID NO: 152415 - DNA, 30 bp, Artificial Sequence
  Synthetic oligonucleotide
ccaccaatccgaccgatggccatctaaccg

SEQ ID NO: 152416 - DNA, 30 bp, Artificial Sequence
  Synthetic oligonucleotide
agcgttacggatgagcgagaggcgtaaccg

SEQ ID NO: 152417 - DNA, 30 bp, Artificial Sequence
  Synthetic oligonucleotide
tgacttccaatatcgggtttccggtaaccg

SEQ ID NO: 152418 - DNA, 30 bp, Artificial Sequence
  Synthetic oligonucleotide
ccggacatgggaccaccccgcgggtaaccg

SEQ ID NO: 152419 - DNA, 30 bp, Artificial Sequence
  Synthetic oligonucleotide
tgacgggactcccttgtttgaccttaaccg

SEQ ID NO: 152420 - DNA, 30 bp, Artificial Sequence
  Synthetic oligonucleotide
cgggcgttaacgggccaccctgcttaaccg

SEQ ID NO: 152421 - DNA, 30 bp, Artificial Sequence
  Synthetic oligonucleotide
catcgaaaattaacatcacttagttaaccg

SEQ ID NO: 152422 - DNA, 30 bp, Artificial Sequence
  Synthetic oligonucleotide
acccaggtcatcttgagagggtaaacaccg

SEQ ID NO: 152423 - DNA, 30 bp, Artificial Sequence
  Synthetic oligonucleotide
cgattcggtcaccgggctgtagcaacaccg

SEQ ID NO: 152424 - DNA, 30 bp, Artificial Sequence
  Synthetic oligonucleotide
cagacttgtaaacgcgtctccgacacaccg

SEQ ID NO: 152425 - DNA, 30 bp, Artificial Sequence
  Synthetic oligonucleotide
gtggttggaaatacatcgacatgcacaccg

SEQ ID NO: 152426 - DNA, 30 bp, Artificial Sequence
  Synthetic oligonucleotide
ttaaccgtgtcaattgcagatcagacaccg

SEQ ID NO: 152427 - DNA, 30 bp, Artificial Sequence
  Synthetic oligonucleotide
aaagaattagggtcccgagaaaggacaccg

SEQ ID NO: 152428 - DNA, 30 bp, Artificial Sequence
  Synthetic oligonucleotide
ctagtggatgaacagtagtgaattacaccg

SEQ ID NO: 152429 - DNA, 30 bp, Artificial Sequence
  Synthetic oligonucleotide
agtctatcactgcatgccgttgttacaccg

SEQ ID NO: 152430 - DNA, 30 bp, Artificial Sequence
  Synthetic oligonucleotide
ggtggagggggtccaatcagatgaccaccg

SEQ ID NO: 152431 - DNA, 30 bp, Artificial Sequence
  Synthetic oligonucleotide
aacatcgggttcgatctcccctgcccaccg

SEQ ID NO: 152432 - DNA, 30 bp, Artificial Sequence
  Synthetic oligonucleotide
acgctcctatgattaacgccataggcaccg

SEQ ID NO: 152433 - DNA, 30 bp, Artificial Sequence
  Synthetic oligonucleotide
ttggaaattagtgtacagtctcgtgcaccg

SEQ ID NO: 152434 - DNA, 30 bp, Artificial Sequence
  Synthetic oligonucleotide
cggagaagaattatattaatttaatcaccg

SEQ ID NO: 152435 - DNA, 30 bp, Artificial Sequence
  Synthetic oligonucleotide
gccgaaaggcatcgcgcgagccactcaccg

SEQ ID NO: 152436 - DNA, 30 bp, Artificial Sequence
  Synthetic oligonucleotide
cgcagtaaagcgatacgtcactactcaccg

SEQ ID NO: 152437 - DNA, 30 bp, Artificial Sequence
  Synthetic oligonucleotide
cgttaagaatggttgcggaagttgtcaccg

SEQ ID NO: 152438 - DNA, 30 bp, Artificial Sequence
  Synthetic oligonucleotide
acaccttaagtctgcagggaatcttcaccg

SEQ ID NO: 152439 - DNA, 30 bp, Artificial Sequence
  Synthetic oligonucleotide
gcgtcatgtatgctcgccatgttcagaccg

SEQ ID NO: 152440 - DNA, 31 bp, Artificial Sequence
  Synthetic oligonucleotide
ttgccctgtggtcagggacggaacgagaccg

SEQ ID NO: 152441 - DNA, 30 bp, Artificial Sequence
  Synthetic oligonucleotide
atactctcgaaaacgacaaggcggagaccg

SEQ ID NO: 152442 - DNA, 30 bp, Artificial Sequence
  Synthetic oligonucleotide
atggttgtcgtaggttactagagaggaccg

SEQ ID NO: 152443 - DNA, 30 bp, Artificial Sequence
  Synthetic oligonucleotide
gatctttcaatggtaaatcaggggggaccg

SEQ ID NO: 152444 - DNA, 30 bp, Artificial Sequence
  Synthetic oligonucleotide
attagcacgcgtcaaatagaatcatgaccg

SEQ ID NO: 152445 - DNA, 30 bp, Artificial Sequence
  Synthetic oligonucleotide
tgaatagctctcaatacaagcgagtgaccg

SEQ ID NO: 152446 - DNA, 30 bp, Artificial Sequence
  Synthetic oligonucleotide
atattagagcggcaaatgaaaaattgaccg

SEQ ID NO: 152447 - DNA, 30 bp, Artificial Sequence
  Synthetic oligonucleotide
aggaactcattgtgtggcggagaaataccg

SEQ ID NO: 152448 - DNA, 30 bp, Artificial Sequence
  Synthetic oligonucleotide
aggacataacgcacagatatagccataccg

SEQ ID NO: 152449 - DNA, 30 bp, Artificial Sequence
  Synthetic oligonucleotide
gaggttgctttttatgcaaatactataccg

SEQ ID NO: 152450 - DNA, 30 bp, Artificial Sequence
  Synthetic oligonucleotide
tcacgttttgtttaagtgacatctataccg

SEQ ID NO: 152451 - DNA, 30 bp, Artificial Sequence
  Synthetic oligonucleotide
ggatcatcgttgagtactagactgctaccg

SEQ ID NO: 152452 - DNA, 30 bp, Artificial Sequence
  Synthetic oligonucleotide
tggtaatcccgtccagggcatctggtaccg

SEQ ID NO: 152453 - DNA, 30 bp, Artificial Sequence
  Synthetic oligonucleotide
gatcttggcggttcgagaagctgtgtaccg

SEQ ID NO: 152454 - DNA, 30 bp, Artificial Sequence
  Synthetic oligonucleotide
catgacaaacacggatttggggttgtaccg

SEQ ID NO: 152455 - DNA, 30 bp, Artificial Sequence
  Synthetic oligonucleotide
gactaccaggcagggtctatcgcattaccg

SEQ ID NO: 152456 - DNA, 30 bp, Artificial Sequence
  Synthetic oligonucleotide
gtgagacttgagctgaaattcatgttaccg

SEQ ID NO: 152457 - DNA, 30 bp, Artificial Sequence
  Synthetic oligonucleotide
tagtcgatacttgtgtatggatgtttaccg

SEQ ID NO: 152458 - DNA, 30 bp, Artificial Sequence
  Synthetic oligonucleotide
tgccttttggtctcagaccgcgcgaacccg

SEQ ID NO: 152459 - DNA, 30 bp, Artificial Sequence
  Synthetic oligonucleotide
ccagtgataccgtctccatatcaccacccg

SEQ ID NO: 152460 - DNA, 30 bp, Artificial Sequence
  Synthetic oligonucleotide
atttcaagtaataaggagaggaggcacccg

SEQ ID NO: 152461 - DNA, 30 bp, Artificial Sequence
  Synthetic oligonucleotide
tccttcaaaaaagtttcttgccctcacccg

SEQ ID NO: 152462 - DNA, 30 bp, Artificial Sequence
  Synthetic oligonucleotide
aacggaacatgtagctgtgtagaagacccg

SEQ ID NO: 152463 - DNA, 30 bp, Artificial Sequence
  Synthetic oligonucleotide
tactaaaccagctctagttaggaagacccg

SEQ ID NO: 152464 - DNA, 30 bp, Artificial Sequence
  Synthetic oligonucleotide
acggggacctatcaggacgggtaagacccg

SEQ ID NO: 152465 - DNA, 30 bp, Artificial Sequence
  Synthetic oligonucleotide
tcccatgcattatgagtaatattcgacccg

SEQ ID NO: 152466 - DNA, 30 bp, Artificial Sequence
  Synthetic oligonucleotide
acagaagggttacactgagaggcatacccg

SEQ ID NO: 152467 - DNA, 30 bp, Artificial Sequence
  Synthetic oligonucleotide
tcgataaactgcgggagcaacggatacccg

SEQ ID NO: 152468 - DNA, 30 bp, Artificial Sequence
  Synthetic oligonucleotide
tccatggaaggatgaatgttttaacccccg

SEQ ID NO: 152469 - DNA, 30 bp, Artificial Sequence
  Synthetic oligonucleotide
gcgaaagctatgaggcagggcacgcccccg

SEQ ID NO: 152470 - DNA, 30 bp, Artificial Sequence
  Synthetic oligonucleotide
aaacctcagctaccgccggagcggcccccg

SEQ ID NO: 152471 - DNA, 30 bp, Artificial Sequence
  Synthetic oligonucleotide
caaaccgtgaggtgaggtgatgttcccccg

SEQ ID NO: 152472 - DNA, 30 bp, Artificial Sequence
  Synthetic oligonucleotide
caaagacacctatgactaatcctgcgcccg

SEQ ID NO: 152473 - DNA, 30 bp, Artificial Sequence
  Synthetic oligonucleotide
atcaaccaattttagaaacgcgttcgcccg

SEQ ID NO: 152474 - DNA, 30 bp, Artificial Sequence
  Synthetic oligonucleotide
ctcctcaagggacattaactagggggcccg

SEQ ID NO: 152475 - DNA, 30 bp, Artificial Sequence
  Synthetic oligonucleotide
tggccatcgaggtttcggaaagtttgcccg

SEQ ID NO: 152476 - DNA, 30 bp, Artificial Sequence
  Synthetic oligonucleotide
cctagtcatctctttaacgagcggctcccg

SEQ ID NO: 152477 - DNA, 30 bp, Artificial Sequence
  Synthetic oligonucleotide
tcagatcgtaatgatacttcgcggctcccg

SEQ ID NO: 152478 - DNA, 30 bp, Artificial Sequence
  Synthetic oligonucleotide
acactcacaccggagtgggtatacgtcccg

SEQ ID NO: 152479 - DNA, 30 bp, Artificial Sequence
  Synthetic oligonucleotide
ccagcttgactacctacctcgtccgtcccg

SEQ ID NO: 152480 - DNA, 30 bp, Artificial Sequence
  Synthetic oligonucleotide
gtcgccagaccgattgttcgtatggtcccg

SEQ ID NO: 152481 - DNA, 30 bp, Artificial Sequence
  Synthetic oligonucleotide
tgagtacagaatttttgtctcgatgtcccg

SEQ ID NO: 152482 - DNA, 30 bp, Artificial Sequence
  Synthetic oligonucleotide
ctagacgatagatatcggtctcgtgtcccg

SEQ ID NO: 152483 - DNA, 30 bp, Artificial Sequence
  Synthetic oligonucleotide
gcgaaaggcaccatgccctctaccttcccg

SEQ ID NO: 152484 - DNA, 30 bp, Artificial Sequence
  Synthetic oligonucleotide
gaggattgattgcatgccgaattgttcccg

SEQ ID NO: 152485 - DNA, 30 bp, Artificial Sequence
  Synthetic oligonucleotide
ctccacaaaaagctatacggattgttcccg

SEQ ID NO: 152486 - DNA, 30 bp, Artificial Sequence
  Synthetic oligonucleotide
gacgagtacatccttaggaattctttcccg

SEQ ID NO: 152487 - DNA, 30 bp, Artificial Sequence
  Synthetic oligonucleotide
tggttataatttaccgaagatctcaagccg

SEQ ID NO: 152488 - DNA, 30 bp, Artificial Sequence
  Synthetic oligonucleotide
atttccacggactgcaacaaatctaagccg

SEQ ID NO: 152489 - DNA, 30 bp, Artificial Sequence
  Synthetic oligonucleotide
actaccgcggcagttcagattcgtaagccg

SEQ ID NO: 152490 - DNA, 30 bp, Artificial Sequence
  Synthetic oligonucleotide
atcgattatgggaattaggcactccagccg

SEQ ID NO: 152491 - DNA, 30 bp, Artificial Sequence
  Synthetic oligonucleotide
ccgcaagttggcacaaataaatcgcagccg

SEQ ID NO: 152492 - DNA, 30 bp, Artificial Sequence
  Synthetic oligonucleotide
agccgccgggtaggaagcccgatagagccg

SEQ ID NO: 152493 - DNA, 30 bp, Artificial Sequence
  Synthetic oligonucleotide
gggtgaaaacaacagccgagctcatagccg

SEQ ID NO: 152494 - DNA, 30 bp, Artificial Sequence
  Synthetic oligonucleotide
gataatatggtgctataacgtgtttagccg

SEQ ID NO: 152495 - DNA, 30 bp, Artificial Sequence
  Synthetic oligonucleotide
agtacgtccacctggaagcaagacacgccg

SEQ ID NO: 152496 - DNA, 30 bp, Artificial Sequence
  Synthetic oligonucleotide
tggtatcaacgaccctatggcgctacgccg

SEQ ID NO: 152497 - DNA, 30 bp, Artificial Sequence
  Synthetic oligonucleotide
atttcggagggttgcagcataggtacgccg

SEQ ID NO: 152498 - DNA, 30 bp, Artificial Sequence
  Synthetic oligonucleotide
accagaattgctattacgagggcaccgccg

SEQ ID NO: 152499 - DNA, 30 bp, Artificial Sequence
  Synthetic oligonucleotide
gggcagatacgaccaagcatgaccccgccg

SEQ ID NO: 152500 - DNA, 30 bp, Artificial Sequence
  Synthetic oligonucleotide
agagaagtggacgtgccgcctgtgccgccg

SEQ ID NO: 152501 - DNA, 30 bp, Artificial Sequence
  Synthetic oligonucleotide
accagtgctggaatagtctgcctagcgccg

SEQ ID NO: 152502 - DNA, 30 bp, Artificial Sequence
  Synthetic oligonucleotide
aatgaacaacaggtagctgggtaggcgccg

SEQ ID NO: 152503 - DNA, 30 bp, Artificial Sequence
  Synthetic oligonucleotide
ggtccatctatatagattgagggctcgccg

SEQ ID NO: 152504 - DNA, 30 bp, Artificial Sequence
  Synthetic oligonucleotide
agacgtccgccacataagactgcgtcgccg

SEQ ID NO: 152505 - DNA, 35 bp, Artificial Sequence
  Synthetic oligonucleotide
ataagcaatttctggcgtttaacatctcgtcgccg

SEQ ID NO: 152506 - DNA, 30 bp, Artificial Sequence
  Synthetic oligonucleotide
accagttgcagccaggaggctcgttcgccg

SEQ ID NO: 152507 - DNA, 30 bp, Artificial Sequence
  Synthetic oligonucleotide
actacgggcggggagtacaagcagaggccg

SEQ ID NO: 152508 - DNA, 30 bp, Artificial Sequence
  Synthetic oligonucleotide
ttagcgtagcggcggtcttagatgaggccg

SEQ ID NO: 152509 - DNA, 30 bp, Artificial Sequence
  Synthetic oligonucleotide
ctcccatcatcacagcaaacgtataggccg

SEQ ID NO: 152510 - DNA, 30 bp, Artificial Sequence
  Synthetic oligonucleotide
gttcacagaggttaatatgtgcgtaggccg

SEQ ID NO: 152511 - DNA, 30 bp, Artificial Sequence
  Synthetic oligonucleotide
ataactagtgtatcttagttacaccggccg

SEQ ID NO: 152512 - DNA, 30 bp, Artificial Sequence
  Synthetic oligonucleotide
acgagtaacatactcgagtcgcgccggccg

SEQ ID NO: 152513 - DNA, 30 bp, Artificial Sequence
  Synthetic oligonucleotide
tggtgagttatgtcatatgttgaagggccg

SEQ ID NO: 152514 - DNA, 30 bp, Artificial Sequence
  Synthetic oligonucleotide
cagagatgaccaagtaggtttgaagggccg

SEQ ID NO: 152515 - DNA, 30 bp, Artificial Sequence
  Synthetic oligonucleotide
ggcgccggatagagggattcttgagggccg

SEQ ID NO: 152516 - DNA, 30 bp, Artificial Sequence
  Synthetic oligonucleotide
tgtacatgagttttcgaatagaacgggccg

SEQ ID NO: 152517 - DNA, 30 bp, Artificial Sequence
  Synthetic oligonucleotide
gataatctccaaccgctgaggaaggggccg

SEQ ID NO: 152518 - DNA, 30 bp, Artificial Sequence
  Synthetic oligonucleotide
tacttaattagctcccgtccatgggggccg

SEQ ID NO: 152519 - DNA, 30 bp, Artificial Sequence
  Synthetic oligonucleotide
cgtatcagtaaaccattcagatcatggccg

SEQ ID NO: 152520 - DNA, 30 bp, Artificial Sequence
  Synthetic oligonucleotide
gtcagcgactctgtcagaagccagtggccg

SEQ ID NO: 152521 - DNA, 30 bp, Artificial Sequence
  Synthetic oligonucleotide
gacgggccgaccggagcatacgacatgccg

SEQ ID NO: 152522 - DNA, 30 bp, Artificial Sequence
  Synthetic oligonucleotide
ggccttcttcaaaaccaattgcgcatgccg

SEQ ID NO: 152523 - DNA, 30 bp, Artificial Sequence
  Synthetic oligonucleotide
taagggcataagaccgatacctatatgccg

SEQ ID NO: 152524 - DNA, 30 bp, Artificial Sequence
  Synthetic oligonucleotide
atcactgatcggtgttttgcacgactgccg

SEQ ID NO: 152525 - DNA, 30 bp, Artificial Sequence
  Synthetic oligonucleotide
gacgtgggtagaataccggtccgcctgccg

SEQ ID NO: 152526 - DNA, 30 bp, Artificial Sequence
  Synthetic oligonucleotide
gggacatctttggtcctttggcgcctgccg

SEQ ID NO: 152527 - DNA, 30 bp, Artificial Sequence
  Synthetic oligonucleotide
gcgcaaaaagtaccagggttaactctgccg

SEQ ID NO: 152528 - DNA, 30 bp, Artificial Sequence
  Synthetic oligonucleotide
ctcgaatgcgtgttcgcaaccgtcgtgccg

SEQ ID NO: 152529 - DNA, 30 bp, Artificial Sequence
  Synthetic oligonucleotide
gtcggaatcggacgaactagacaggtgccg

SEQ ID NO: 152530 - DNA, 30 bp, Artificial Sequence
  Synthetic oligonucleotide
gaccgggggcctcagttgttgtgtgtgccg

SEQ ID NO: 152531 - DNA, 30 bp, Artificial Sequence
  Synthetic oligonucleotide
cgctaatatttacgtcttcacttattgccg

SEQ ID NO: 152532 - DNA, 30 bp, Artificial Sequence
  Synthetic oligonucleotide
gaggacactacagtgctactgtttttgccg

SEQ ID NO: 152533 - DNA, 30 bp, Artificial Sequence
  Synthetic oligonucleotide
ggtggtgctaattatgcgagacacaatccg

SEQ ID NO: 152534 - DNA, 30 bp, Artificial Sequence
  Synthetic oligonucleotide
ggttaatcccgatcactaataggcaatccg

SEQ ID NO: 152535 - DNA, 30 bp, Artificial Sequence
  Synthetic oligonucleotide
tgcggctcgtaaccgggataatagaatccg

SEQ ID NO: 152536 - DNA, 30 bp, Artificial Sequence
  Synthetic oligonucleotide
gctcacgagtcgcgcaatcacgataatccg

SEQ ID NO: 152537 - DNA, 30 bp, Artificial Sequence
  Synthetic oligonucleotide
ataaactatggagtaataatacgtaatccg

SEQ ID NO: 152538 - DNA, 30 bp, Artificial Sequence
  Synthetic oligonucleotide
acggtaccatggtatggttcatgtaatccg

SEQ ID NO: 152539 - DNA, 30 bp, Artificial Sequence
  Synthetic oligonucleotide
aagaaaacgtgcgtagaagtatcacatccg

SEQ ID NO: 152540 - DNA, 30 bp, Artificial Sequence
  Synthetic oligonucleotide
caaacttacgtgcggagtatgcaccatccg

SEQ ID NO: 152541 - DNA, 30 bp, Artificial Sequence
  Synthetic oligonucleotide
cgatctggcaagcggcccctcacccatccg

SEQ ID NO: 152542 - DNA, 29 bp, Artificial Sequence
  Synthetic oligonucleotide
gtacaagtcagggaagaccacgccatccg

SEQ ID NO: 152543 - DNA, 30 bp, Artificial Sequence
  Synthetic oligonucleotide
gcagaggtgccctcgtgctaaggccatccg

SEQ ID NO: 152544 - DNA, 30 bp, Artificial Sequence
  Synthetic oligonucleotide
ccgataagccgcaggccgactggtcatccg

SEQ ID NO: 152545 - DNA, 30 bp, Artificial Sequence
  Synthetic oligonucleotide
actgaagttaatgtccagtagattcatccg

SEQ ID NO: 152546 - DNA, 30 bp, Artificial Sequence
  Synthetic oligonucleotide
tcaatttgtagggaatagaagaaagatccg

SEQ ID NO: 152547 - DNA, 30 bp, Artificial Sequence
  Synthetic oligonucleotide
acgcacgcctgtgggctttagtgcgatccg

SEQ ID NO: 152548 - DNA, 30 bp, Artificial Sequence
  Synthetic oligonucleotide
acgaggattccgcgtgtatcacgggatccg

SEQ ID NO: 152549 - DNA, 30 bp, Artificial Sequence
  Synthetic oligonucleotide
catgtacatgcaagttagctggatgatccg

SEQ ID NO: 152550 - DNA, 30 bp, Artificial Sequence
  Synthetic oligonucleotide
ataattcgactgggaggttcacgtgatccg

SEQ ID NO: 152551 - DNA, 30 bp, Artificial Sequence
  Synthetic oligonucleotide
atataggaacgacgaaaatattgcactccg

SEQ ID NO: 152552 - DNA, 30 bp, Artificial Sequence
  Synthetic oligonucleotide
gcgttgaatgctccagatatcatgactccg

SEQ ID NO: 152553 - DNA, 30 bp, Artificial Sequence
  Synthetic oligonucleotide
tggttgctaagaccggaagtgggtcctccg

SEQ ID NO: 152554 - DNA, 30 bp, Artificial Sequence
  Synthetic oligonucleotide
gctcgaatcacgaattggttcaatgctccg

SEQ ID NO: 152555 - DNA, 30 bp, Artificial Sequence
  Synthetic oligonucleotide
tacctcgctgctcaattacataagtctccg

SEQ ID NO: 152556 - DNA, 30 bp, Artificial Sequence
  Synthetic oligonucleotide
aacaggcacgggtatcgagttaagtctccg

SEQ ID NO: 152557 - DNA, 30 bp, Artificial Sequence
  Synthetic oligonucleotide
tcatcatatcaggtagtaaatccgtctccg

SEQ ID NO: 152558 - DNA, 30 bp, Artificial Sequence
  Synthetic oligonucleotide
catattttgaagcttcggacaaaaagtccg

SEQ ID NO: 152559 - DNA, 30 bp, Artificial Sequence
  Synthetic oligonucleotide
agtctaagaatggcaaagagttaaagtccg

SEQ ID NO: 152560 - DNA, 30 bp, Artificial Sequence
  Synthetic oligonucleotide
aacagatacaactcctgacggtacagtccg

SEQ ID NO: 152561 - DNA, 30 bp, Artificial Sequence
  Synthetic oligonucleotide
gtgtaagggaatccaaaaggcccgagtccg

SEQ ID NO: 152562 - DNA, 30 bp, Artificial Sequence
  Synthetic oligonucleotide
ggcggtattatgcaatagcctagtagtccg

SEQ ID NO: 152563 - DNA, 30 bp, Artificial Sequence
  Synthetic oligonucleotide
aggtacgaggcttccccatatagccgtccg

SEQ ID NO: 152564 - DNA, 30 bp, Artificial Sequence
  Synthetic oligonucleotide
aggacaggttacagatttgaactgggtccg

SEQ ID NO: 152565 - DNA, 30 bp, Artificial Sequence
  Synthetic oligonucleotide
aatccaagggtatatcaatctgtgggtccg

SEQ ID NO: 152566 - DNA, 30 bp, Artificial Sequence
  Synthetic oligonucleotide
ggatattgaaatggcggaaaatatggtccg

SEQ ID NO: 152567 - DNA, 30 bp, Artificial Sequence
  Synthetic oligonucleotide
tctgttatggggagcaactcatctggtccg

SEQ ID NO: 152568 - DNA, 30 bp, Artificial Sequence
  Synthetic oligonucleotide
ttgcgccatagtacaccccaacaatgtccg

SEQ ID NO: 152569 - DNA, 30 bp, Artificial Sequence
  Synthetic oligonucleotide
ccaccgcttcaggggcgttcgtcctgtccg

SEQ ID NO: 152570 - DNA, 30 bp, Artificial Sequence
  Synthetic oligonucleotide
cgtccagtaaggtattaacctgggtgtccg

SEQ ID NO: 152571 - DNA, 30 bp, Artificial Sequence
  Synthetic oligonucleotide
acaccctcacaggcattccaaatgtgtccg

SEQ ID NO: 152572 - DNA, 30 bp, Artificial Sequence
  Synthetic oligonucleotide
tacagtacgacaatggaggtcgcttgtccg

SEQ ID NO: 152573 - DNA, 30 bp, Artificial Sequence
  Synthetic oligonucleotide
tgcgcactaagtaggtgaaaatgaattccg

SEQ ID NO: 152574 - DNA, 30 bp, Artificial Sequence
  Synthetic oligonucleotide
tgcataggatgcggtactcgcatgattccg

SEQ ID NO: 152575 - DNA, 30 bp, Artificial Sequence
  Synthetic oligonucleotide
ttaccggaagcaccgagctggcatattccg

SEQ ID NO: 152576 - DNA, 30 bp, Artificial Sequence
  Synthetic oligonucleotide
aaacagggacctcattacgacagacttccg

SEQ ID NO: 152577 - DNA, 30 bp, Artificial Sequence
  Synthetic oligonucleotide
attggggaggaattgaaacctgagcttccg

SEQ ID NO: 152578 - DNA, 30 bp, Artificial Sequence
  Synthetic oligonucleotide
ctcaagagggaccgccaccaggtgcttccg

SEQ ID NO: 152579 - DNA, 30 bp, Artificial Sequence
  Synthetic oligonucleotide
ttaggaaaactgtgtcctcttgatcttccg

SEQ ID NO: 152580 - DNA, 30 bp, Artificial Sequence
  Synthetic oligonucleotide
agacctagcggaaaacatagcgaggttccg

SEQ ID NO: 152581 - DNA, 30 bp, Artificial Sequence
  Synthetic oligonucleotide
ggtagtgagcttgtagcgagtccaaaagcg

SEQ ID NO: 152582 - DNA, 30 bp, Artificial Sequence
  Synthetic oligonucleotide
ataacggctacgtcctagagggtaaaagcg

SEQ ID NO: 152583 - DNA, 30 bp, Artificial Sequence
  Synthetic oligonucleotide
gatattctaactagcatctgaaagaaagcg

SEQ ID NO: 152584 - DNA, 30 bp, Artificial Sequence
  Synthetic oligonucleotide
tgaaacactgcgacccagcgaattaaagcg

SEQ ID NO: 152585 - DNA, 31 bp, Artificial Sequence
  Synthetic oligonucleotide
actggtcgtccatgcctggctagaccaagcg

SEQ ID NO: 152586 - DNA, 30 bp, Artificial Sequence
  Synthetic oligonucleotide
actcctgatgccacgaagggggcccaagcg

SEQ ID NO: 152587 - DNA, 30 bp, Artificial Sequence
  Synthetic oligonucleotide
taacgatatgttcaagctcctgggcaagcg

SEQ ID NO: 152588 - DNA, 30 bp, Artificial Sequence
  Synthetic oligonucleotide
taaatgcgttcccggcggtttcatcaagcg

SEQ ID NO: 152589 - DNA, 30 bp, Artificial Sequence
  Synthetic oligonucleotide
agatgtagtgcggcccatccgcgagaagcg

SEQ ID NO: 152590 - DNA, 30 bp, Artificial Sequence
  Synthetic oligonucleotide
ggatgcaagagagtttgctctcacgaagcg

SEQ ID NO: 152591 - DNA, 30 bp, Artificial Sequence
  Synthetic oligonucleotide
ccctaagtctgtaggttctcaagcgaagcg

SEQ ID NO: 152592 - DNA, 30 bp, Artificial Sequence
  Synthetic oligonucleotide
gaccaggaggtcgtaatggcatcggaagcg

SEQ ID NO: 152593 - DNA, 30 bp, Artificial Sequence
  Synthetic oligonucleotide
ccgcaaaaaaaaggggcttaggatgaagcg

SEQ ID NO: 152594 - DNA, 30 bp, Artificial Sequence
  Synthetic oligonucleotide
tcgggctttctctcaattctctcgtaagcg

SEQ ID NO: 152595 - DNA, 30 bp, Artificial Sequence
  Synthetic oligonucleotide
aataggcaactgaggtcaggaactacagcg

SEQ ID NO: 152596 - DNA, 30 bp, Artificial Sequence
  Synthetic oligonucleotide
aaatgcacatggtactcattacatccagcg

SEQ ID NO: 152597 - DNA, 30 bp, Artificial Sequence
  Synthetic oligonucleotide
agatggtagacgatagccttggtagcagcg

SEQ ID NO: 152598 - DNA, 30 bp, Artificial Sequence
  Synthetic oligonucleotide
caagggtatcgtatcagttactaggcagcg

SEQ ID NO: 152599 - DNA, 30 bp, Artificial Sequence
  Synthetic oligonucleotide
atcttaatcagtcctctacccactgcagcg

SEQ ID NO: 152600 - DNA, 30 bp, Artificial Sequence
  Synthetic oligonucleotide
acagatcacccgccagggcgtagatcagcg

SEQ ID NO: 152601 - DNA, 30 bp, Artificial Sequence
  Synthetic oligonucleotide
tggttaactgtgtaagcgtcattctcagcg

SEQ ID NO: 152602 - DNA, 31 bp, Artificial Sequence
  Synthetic oligonucleotide
aagcgtgcgaatctaggttaaggaaagagcg

SEQ ID NO: 152603 - DNA, 30 bp, Artificial Sequence
  Synthetic oligonucleotide
cctacatgccaatgtagaaggtcaagagcg

SEQ ID NO: 152604 - DNA, 30 bp, Artificial Sequence
  Synthetic oligonucleotide
gtcatatctcgttagacttgaataagagcg

SEQ ID NO: 152605 - DNA, 30 bp, Artificial Sequence
  Synthetic oligonucleotide
gtccagggcgttataggccggagcagagcg

SEQ ID NO: 152606 - DNA, 30 bp, Artificial Sequence
  Synthetic oligonucleotide
atttcgatctagaaatggggtgggagagcg

SEQ ID NO: 152607 - DNA, 30 bp, Artificial Sequence
  Synthetic oligonucleotide
gaaacaggagcccactccggcggtagagcg

SEQ ID NO: 152608 - DNA, 30 bp, Artificial Sequence
  Synthetic oligonucleotide
catgtccattaaaactaacttgcccgagcg

SEQ ID NO: 152609 - DNA, 30 bp, Artificial Sequence
  Synthetic oligonucleotide
tgcgttgctcctactagacctcatcgagcg

SEQ ID NO: 152610 - DNA, 30 bp, Artificial Sequence
  Synthetic oligonucleotide
cggtcgagtttccagatccccctgggagcg

SEQ ID NO: 152611 - DNA, 30 bp, Artificial Sequence
  Synthetic oligonucleotide
tgagtactttcaatgctaaagcgtggagcg

SEQ ID NO: 152612 - DNA, 30 bp, Artificial Sequence
  Synthetic oligonucleotide
caattagttgctgggaagatatttggagcg

SEQ ID NO: 152613 - DNA, 30 bp, Artificial Sequence
  Synthetic oligonucleotide
atcccctggcctatcgcgtgctcatgagcg

SEQ ID NO: 152614 - DNA, 30 bp, Artificial Sequence
  Synthetic oligonucleotide
catggaatcgttagagaccataactgagcg

SEQ ID NO: 152615 - DNA, 30 bp, Artificial Sequence
  Synthetic oligonucleotide
taaggaccccccggaggacttccctgagcg

SEQ ID NO: 152616 - DNA, 30 bp, Artificial Sequence
  Synthetic oligonucleotide
tacaccgactgagaaggagagtgttgagcg

SEQ ID NO: 152617 - DNA, 30 bp, Artificial Sequence
  Synthetic oligonucleotide
cagcgccaggagagcaacgcagaaatagcg

SEQ ID NO: 152618 - DNA, 30 bp, Artificial Sequence
  Synthetic oligonucleotide
gtaatcaggattagccttggtcgcatagcg

SEQ ID NO: 152619 - DNA, 30 bp, Artificial Sequence
  Synthetic oligonucleotide
gatcgcagtgttaaaatcgtgagactagcg

SEQ ID NO: 152620 - DNA, 30 bp, Artificial Sequence
  Synthetic oligonucleotide
gaggacccaaatcgataacttgggctagcg

SEQ ID NO: 152621 - DNA, 30 bp, Artificial Sequence
  Synthetic oligonucleotide
acatctagggattcgtaacaattagtagcg

SEQ ID NO: 152622 - DNA, 30 bp, Artificial Sequence
  Synthetic oligonucleotide
cagcgaatggtgccgccctcgtaattagcg

SEQ ID NO: 152623 - DNA, 30 bp, Artificial Sequence
  Synthetic oligonucleotide
tctcgacggaagtaaattttccgattagcg

SEQ ID NO: 152624 - DNA, 30 bp, Artificial Sequence
  Synthetic oligonucleotide
tttaaaacggtcaggaatattggattagcg

SEQ ID NO: 152625 - DNA, 30 bp, Artificial Sequence
  Synthetic oligonucleotide
agtgaaaggagccagggtgagtgattagcg

SEQ ID NO: 152626 - DNA, 30 bp, Artificial Sequence
  Synthetic oligonucleotide
atttagcggagtggaggtatggacttagcg

SEQ ID NO: 152627 - DNA, 30 bp, Artificial Sequence
  Synthetic oligonucleotide
aagtaatatactcatctataaggcttagcg

SEQ ID NO: 152628 - DNA, 30 bp, Artificial Sequence
  Synthetic oligonucleotide
agagtccgcggaactttcttttgcttagcg

SEQ ID NO: 152629 - DNA, 30 bp, Artificial Sequence
  Synthetic oligonucleotide
acttccgagtactcccccagcaaaaacgcg

SEQ ID NO: 152630 - DNA, 30 bp, Artificial Sequence
  Synthetic oligonucleotide
gtgcgttcagccccgaaggcgataaacgcg

SEQ ID NO: 152631 - DNA, 30 bp, Artificial Sequence
  Synthetic oligonucleotide
aagatagattcttttaagagtcggaacgcg

SEQ ID NO: 152632 - DNA, 30 bp, Artificial Sequence
  Synthetic oligonucleotide
tcacatgctagagacttgctaatacacgcg

SEQ ID NO: 152633 - DNA, 30 bp, Artificial Sequence
  Synthetic oligonucleotide
gttgggaggcgacattcgctggtgcacgcg

SEQ ID NO: 152634 - DNA, 30 bp, Artificial Sequence
  Synthetic oligonucleotide
aaacgttatgttctcgacagggttcacgcg

SEQ ID NO: 152635 - DNA, 30 bp, Artificial Sequence
  Synthetic oligonucleotide
ttggtccttcgacagggaaacaaatacgcg

SEQ ID NO: 152636 - DNA, 30 bp, Artificial Sequence
  Synthetic oligonucleotide
atattataaagcaatagggtaagctacgcg

SEQ ID NO: 152637 - DNA, 30 bp, Artificial Sequence
  Synthetic oligonucleotide
caatgaaaatgcccagccatccgttacgcg

SEQ ID NO: 152638 - DNA, 30 bp, Artificial Sequence
  Synthetic oligonucleotide
ttgcgccttggtaggctatggttcaccgcg

SEQ ID NO: 152639 - DNA, 30 bp, Artificial Sequence
  Synthetic oligonucleotide
ttgcagggtatgttgagggcagagaccgcg

SEQ ID NO: 152640 - DNA, 30 bp, Artificial Sequence
  Synthetic oligonucleotide
ccgagaaaggttgatacgggggctaccgcg

SEQ ID NO: 152641 - DNA, 30 bp, Artificial Sequence
  Synthetic oligonucleotide
gtcaagtgctcactacggtcttgtcccgcg

SEQ ID NO: 152642 - DNA, 30 bp, Artificial Sequence
  Synthetic oligonucleotide
atatcacaatcgatgagcacacaagccgcg

SEQ ID NO: 152643 - DNA, 30 bp, Artificial Sequence
  Synthetic oligonucleotide
cttgtaaccgtggcttacatgcaatccgcg

SEQ ID NO: 152644 - DNA, 30 bp, Artificial Sequence
  Synthetic oligonucleotide
aacagcaagatatcgtcaagataatccgcg

SEQ ID NO: 152645 - DNA, 30 bp, Artificial Sequence
  Synthetic oligonucleotide
cggtcgaaattgctttgagctgagtccgcg

SEQ ID NO: 152646 - DNA, 30 bp, Artificial Sequence
  Synthetic oligonucleotide
gaggtacgttgcaacctgtgtctgtccgcg

SEQ ID NO: 152647 - DNA, 30 bp, Artificial Sequence
  Synthetic oligonucleotide
tacacggaattctgagtgccataaagcgcg

SEQ ID NO: 152648 - DNA, 30 bp, Artificial Sequence
  Synthetic oligonucleotide
tcgtcctcctcgtaactctctctcagcgcg

SEQ ID NO: 152649 - DNA, 30 bp, Artificial Sequence
  Synthetic oligonucleotide
cgagcctaatctctccaggctgagagcgcg

SEQ ID NO: 152650 - DNA, 30 bp, Artificial Sequence
  Synthetic oligonucleotide
atgtggcgtcgggcgaccacagttagcgcg

SEQ ID NO: 152651 - DNA, 30 bp, Artificial Sequence
  Synthetic oligonucleotide
catatagtgcaaggagcgaacaaccgcgcg

SEQ ID NO: 152652 - DNA, 30 bp, Artificial Sequence
  Synthetic oligonucleotide
cgtggcccagtcaaccattccacgcgcgcg

SEQ ID NO: 152653 - DNA, 30 bp, Artificial Sequence
  Synthetic oligonucleotide
aacccaatagggaagagaagggctggcgcg

SEQ ID NO: 152654 - DNA, 30 bp, Artificial Sequence
  Synthetic oligonucleotide
aaggcaaacctctcctgtgattattgcgcg

SEQ ID NO: 152655 - DNA, 30 bp, Artificial Sequence
  Synthetic oligonucleotide
tctccttggcacctcagaaatcgcatcgcg

SEQ ID NO: 152656 - DNA, 30 bp, Artificial Sequence
  Synthetic oligonucleotide
gatactatcggatagtatggatcgatcgcg

SEQ ID NO: 152657 - DNA, 30 bp, Artificial Sequence
  Synthetic oligonucleotide
cgtgcctgaacgtcaaactactggatcgcg

SEQ ID NO: 152658 - DNA, 30 bp, Artificial Sequence
  Synthetic oligonucleotide
cgcggacggtatcatcttcgccttatcgcg

SEQ ID NO: 152659 - DNA, 30 bp, Artificial Sequence
  Synthetic oligonucleotide
gccaatgctcacataaaggacgtggtcgcg

SEQ ID NO: 152660 - DNA, 30 bp, Artificial Sequence
  Synthetic oligonucleotide
agcatagtgggggtggcagtgttaaaggcg

SEQ ID NO: 152661 - DNA, 30 bp, Artificial Sequence
  Synthetic oligonucleotide
ccataaaaggggtcgctgagcgataaggcg

SEQ ID NO: 152662 - DNA, 30 bp, Artificial Sequence
  Synthetic oligonucleotide
tgatcccccgttagttaaaattctaaggcg

SEQ ID NO: 152663 - DNA, 30 bp, Artificial Sequence
  Synthetic oligonucleotide
ctgcacttaacggtggtgtttgaacaggcg

SEQ ID NO: 152664 - DNA, 30 bp, Artificial Sequence
  Synthetic oligonucleotide
atcgcgggctgcaagaagcgaagccaggcg

SEQ ID NO: 152665 - DNA, 30 bp, Artificial Sequence
  Synthetic oligonucleotide
caggaatcccacaattgatgactgcaggcg

SEQ ID NO: 152666 - DNA, 30 bp, Artificial Sequence
  Synthetic oligonucleotide
gcaaggtcgcattcgactttacaagaggcg

SEQ ID NO: 152667 - DNA, 30 bp, Artificial Sequence
  Synthetic oligonucleotide
gagagcgaactagccctagattgagaggcg

SEQ ID NO: 152668 - DNA, 30 bp, Artificial Sequence
  Synthetic oligonucleotide
acacgcggagccaacaggtccgcggaggcg

SEQ ID NO: 152669 - DNA, 30 bp, Artificial Sequence
  Synthetic oligonucleotide
atagtcgatcggcaggattttctggaggcg

SEQ ID NO: 152670 - DNA, 30 bp, Artificial Sequence
  Synthetic oligonucleotide
gttgtaagatccacgcttgatccataggcg

SEQ ID NO: 152671 - DNA, 31 bp, Artificial Sequence
  Synthetic oligonucleotide
gtcctaagatgccatcagacctcgataggcg

SEQ ID NO: 152672 - DNA, 30 bp, Artificial Sequence
  Synthetic oligonucleotide
gttcaaagcgagcaaagatccaagtaggcg

SEQ ID NO: 152673 - DNA, 30 bp, Artificial Sequence
  Synthetic oligonucleotide
ttatcaaaaagtgcgaagttcaagtaggcg

SEQ ID NO: 152674 - DNA, 30 bp, Artificial Sequence
  Synthetic oligonucleotide
gtctacgtgggcggttaaagccaaacggcg

SEQ ID NO: 152675 - DNA, 30 bp, Artificial Sequence
  Synthetic oligonucleotide
cggcaagggacactctgctgacgaacggcg

SEQ ID NO: 152676 - DNA, 30 bp, Artificial Sequence
  Synthetic oligonucleotide
gggggtcagcaagagaggcccagtacggcg

SEQ ID NO: 152677 - DNA, 30 bp, Artificial Sequence
  Synthetic oligonucleotide
tgatggctggggcgcgcatttacaccggcg

SEQ ID NO: 152678 - DNA, 30 bp, Artificial Sequence
  Synthetic oligonucleotide
aggaaagagatttctatccatggaccggcg

SEQ ID NO: 152679 - DNA, 30 bp, Artificial Sequence
  Synthetic oligonucleotide
tataacgataggcgatagccacacccggcg

SEQ ID NO: 152680 - DNA, 30 bp, Artificial Sequence
  Synthetic oligonucleotide
catgcttgtaaagaccgcgcctggccggcg

SEQ ID NO: 152681 - DNA, 30 bp, Artificial Sequence
  Synthetic oligonucleotide
gtcattaatgctgaattgtcagaagcggcg

SEQ ID NO: 152682 - DNA, 30 bp, Artificial Sequence
  Synthetic oligonucleotide
cagatcgaacgttccaggatagaaagggcg

SEQ ID NO: 152683 - DNA, 30 bp, Artificial Sequence
  Synthetic oligonucleotide
cgaactctcgtgcgtagtctataaagggcg

SEQ ID NO: 152684 - DNA, 30 bp, Artificial Sequence
  Synthetic oligonucleotide
ggcgagcgtcgggaagtgttcggaagggcg

SEQ ID NO: 152685 - DNA, 30 bp, Artificial Sequence
  Synthetic oligonucleotide
agctccattagccaacccagattcagggcg

SEQ ID NO: 152686 - DNA, 30 bp, Artificial Sequence
  Synthetic oligonucleotide
attaaaaccccattaaacgatgcgagggcg

SEQ ID NO: 152687 - DNA, 30 bp, Artificial Sequence
  Synthetic oligonucleotide
ctgcttgtaaagcggaccgcaaatagggcg

SEQ ID NO: 152688 - DNA, 30 bp, Artificial Sequence
  Synthetic oligonucleotide
tgtgatcgaaagcctatgtctaaacgggcg

SEQ ID NO: 152689 - DNA, 30 bp, Artificial Sequence
  Synthetic oligonucleotide
gaatctacgaacatggggaatccacgggcg

SEQ ID NO: 152690 - DNA, 30 bp, Artificial Sequence
  Synthetic oligonucleotide
cgatcagaatccaatggttcgtctcgggcg

SEQ ID NO: 152691 - DNA, 30 bp, Artificial Sequence
  Synthetic oligonucleotide
ctaggcgttatggcatgcttagtaggggcg

SEQ ID NO: 152692 - DNA, 30 bp, Artificial Sequence
  Synthetic oligonucleotide
tctggagggaggggtggagtggcctgggcg

SEQ ID NO: 152693 - DNA, 30 bp, Artificial Sequence
  Synthetic oligonucleotide
cacatatttgcgcgcgcgaatcattgggcg

SEQ ID NO: 152694 - DNA, 30 bp, Artificial Sequence
  Synthetic oligonucleotide
atcgagggtcaggtacacataaaaatggcg

SEQ ID NO: 152695 - DNA, 30 bp, Artificial Sequence
  Synthetic oligonucleotide
cgcaaaagcaaactttatagggacatggcg

SEQ ID NO: 152696 - DNA, 30 bp, Artificial Sequence
  Synthetic oligonucleotide
taaaacacgaagtaggagtgcccgatggcg

SEQ ID NO: 152697 - DNA, 30 bp, Artificial Sequence
  Synthetic oligonucleotide
aatcagacctagggaaaacgatcgatggcg

SEQ ID NO: 152698 - DNA, 30 bp, Artificial Sequence
  Synthetic oligonucleotide
aggtagataccttgcgataccggcctggcg

SEQ ID NO: 152699 - DNA, 30 bp, Artificial Sequence
  Synthetic oligonucleotide
atacaacgccgacattaagaatcgctggcg

SEQ ID NO: 152700 - DNA, 30 bp, Artificial Sequence
  Synthetic oligonucleotide
acaacccgtcggcacgacgaacatctggcg

SEQ ID NO: 152701 - DNA, 30 bp, Artificial Sequence
  Synthetic oligonucleotide
ctgtttggaagaatacaatgagatctggcg

SEQ ID NO: 152702 - DNA, 30 bp, Artificial Sequence
  Synthetic oligonucleotide
gcattttacttggtagagggtgatctggcg

SEQ ID NO: 152703 - DNA, 30 bp, Artificial Sequence
  Synthetic oligonucleotide
gagctcattaaagttacccggtatctggcg

SEQ ID NO: 152704 - DNA, 30 bp, Artificial Sequence
  Synthetic oligonucleotide
gatgtaagggagctcaccttcgttctggcg

SEQ ID NO: 152705 - DNA, 30 bp, Artificial Sequence
  Synthetic oligonucleotide
cgttacaagttagatacgccttttctggcg

SEQ ID NO: 152706 - DNA, 30 bp, Artificial Sequence
  Synthetic oligonucleotide
gctgggtaatcgctcgcaagacgattggcg

SEQ ID NO: 152707 - DNA, 30 bp, Artificial Sequence
  Synthetic oligonucleotide
ggagctgagttttgcgattttgacttggcg

SEQ ID NO: 152708 - DNA, 30 bp, Artificial Sequence
  Synthetic oligonucleotide
gaaatatagctgagactagaaaggttggcg

SEQ ID NO: 152709 - DNA, 30 bp, Artificial Sequence
  Synthetic oligonucleotide
aaaaggagagacttcaaagatgaaaatgcg

SEQ ID NO: 152710 - DNA, 30 bp, Artificial Sequence
  Synthetic oligonucleotide
gtgtcagacggtgcatagctcagaaatgcg

SEQ ID NO: 152711 - DNA, 30 bp, Artificial Sequence
  Synthetic oligonucleotide
tagagagtcataaacactggttcgaatgcg

SEQ ID NO: 152712 - DNA, 30 bp, Artificial Sequence
  Synthetic oligonucleotide
tcgatcccttcactaggtcaactacatgcg

SEQ ID NO: 152713 - DNA, 30 bp, Artificial Sequence
  Synthetic oligonucleotide
gccaaggaatagcggggtgttgcgcatgcg

SEQ ID NO: 152714 - DNA, 30 bp, Artificial Sequence
  Synthetic oligonucleotide
agttgggttatcctgagatagacagatgcg

SEQ ID NO: 152715 - DNA, 30 bp, Artificial Sequence
  Synthetic oligonucleotide
ttcggagggacctcaaaggccccagatgcg

SEQ ID NO: 152716 - DNA, 30 bp, Artificial Sequence
  Synthetic oligonucleotide
cgagttatagggattcgcaatcaggatgcg

SEQ ID NO: 152717 - DNA, 30 bp, Artificial Sequence
  Synthetic oligonucleotide
ggctatggcttttgtactgatacatatgcg

SEQ ID NO: 152718 - DNA, 30 bp, Artificial Sequence
  Synthetic oligonucleotide
cgattagcaacgcccctgagatgctatgcg

SEQ ID NO: 152719 - DNA, 30 bp, Artificial Sequence
  Synthetic oligonucleotide
gtctacatgattacagcgtccgtgtatgcg

SEQ ID NO: 152720 - DNA, 30 bp, Artificial Sequence
  Synthetic oligonucleotide
aaaaggataaatttaaacgcatattatgcg

SEQ ID NO: 152721 - DNA, 30 bp, Artificial Sequence
  Synthetic oligonucleotide
acacctaagtctgggctgggatgaactgcg

SEQ ID NO: 152722 - DNA, 30 bp, Artificial Sequence
  Synthetic oligonucleotide
ttgtcttggagttttaaatcagtaactgcg

SEQ ID NO: 152723 - DNA, 30 bp, Artificial Sequence
  Synthetic oligonucleotide
ccagggataacggggactctgcagactgcg

SEQ ID NO: 152724 - DNA, 30 bp, Artificial Sequence
  Synthetic oligonucleotide
ggtgagtaagcacggatttgacatactgcg

SEQ ID NO: 152725 - DNA, 30 bp, Artificial Sequence
  Synthetic oligonucleotide
aaggtggaaactgccaggacgtagcctgcg

SEQ ID NO: 152726 - DNA, 30 bp, Artificial Sequence
  Synthetic oligonucleotide
ggcaacatggctcagcttatactgcctgcg

SEQ ID NO: 152727 - DNA, 30 bp, Artificial Sequence
  Synthetic oligonucleotide
taagacagaggggggatcatggttcctgcg

SEQ ID NO: 152728 - DNA, 30 bp, Artificial Sequence
  Synthetic oligonucleotide
cgataacggattaaaaatagttccgctgcg

SEQ ID NO: 152729 - DNA, 30 bp, Artificial Sequence
  Synthetic oligonucleotide
gagcatgacttcaggtaacggattgctgcg

SEQ ID NO: 152730 - DNA, 30 bp, Artificial Sequence
  Synthetic oligonucleotide
gaactagcgatgttcttaggagttgctgcg

SEQ ID NO: 152731 - DNA, 30 bp, Artificial Sequence
  Synthetic oligonucleotide
ctagtgtgtgacatgacgcctagatctgcg

SEQ ID NO: 152732 - DNA, 30 bp, Artificial Sequence
  Synthetic oligonucleotide
cttgtagaaatggtagtaaggatgtctgcg

SEQ ID NO: 152733 - DNA, 30 bp, Artificial Sequence
  Synthetic oligonucleotide
ttgggacaagggtcccagctgtgttctgcg

SEQ ID NO: 152734 - DNA, 30 bp, Artificial Sequence
  Synthetic oligonucleotide
ttagtgaaatacttaggtgtgcgaagtgcg

SEQ ID NO: 152735 - DNA, 30 bp, Artificial Sequence
  Synthetic oligonucleotide
agaagcgttagggagggggactgcagtgcg

SEQ ID NO: 152736 - DNA, 30 bp, Artificial Sequence
  Synthetic oligonucleotide
aaatgggaagtcttcacagtcctacgtgcg

SEQ ID NO: 152737 - DNA, 30 bp, Artificial Sequence
  Synthetic oligonucleotide
aattgaccatttttcgtaagtacccgtgcg

SEQ ID NO: 152738 - DNA, 30 bp, Artificial Sequence
  Synthetic oligonucleotide
gatcgaatcgtctaagcagccccccgtgcg

SEQ ID NO: 152739 - DNA, 30 bp, Artificial Sequence
  Synthetic oligonucleotide
ggggctgtcgccaccgatctgcttcgtgcg

SEQ ID NO: 152740 - DNA, 30 bp, Artificial Sequence
  Synthetic oligonucleotide
gctatcctcccctcggtaaacctaggtgcg

SEQ ID NO: 152741 - DNA, 30 bp, Artificial Sequence
  Synthetic oligonucleotide
gaaaagggggccaatttataattaggtgcg

SEQ ID NO: 152742 - DNA, 30 bp, Artificial Sequence
  Synthetic oligonucleotide
tacactggaccttggggacccgagggtgcg

SEQ ID NO: 152743 - DNA, 30 bp, Artificial Sequence
  Synthetic oligonucleotide
cgagaagtctggaggcggtaagcgggtgcg

SEQ ID NO: 152744 - DNA, 30 bp, Artificial Sequence
  Synthetic oligonucleotide
ccagtatcggggaagaccatacaatgtgcg

SEQ ID NO: 152745 - DNA, 30 bp, Artificial Sequence
  Synthetic oligonucleotide
tagctgaggtcccactggcgggaatgtgcg

SEQ ID NO: 152746 - DNA, 30 bp, Artificial Sequence
  Synthetic oligonucleotide
tcagctggtcattccaaactttaatgtgcg

SEQ ID NO: 152747 - DNA, 30 bp, Artificial Sequence
  Synthetic oligonucleotide
ttgaccaatcggtcaagggtgcactgtgcg

SEQ ID NO: 152748 - DNA, 30 bp, Artificial Sequence
  Synthetic oligonucleotide
ccctgggatatctcgttagtcctgtgtgcg

SEQ ID NO: 152749 - DNA, 30 bp, Artificial Sequence
  Synthetic oligonucleotide
gcctggggggatacgattcgatcttgtgcg

SEQ ID NO: 152750 - DNA, 30 bp, Artificial Sequence
  Synthetic oligonucleotide
ccactacatagcttgcataattcttgtgcg

SEQ ID NO: 152751 - DNA, 30 bp, Artificial Sequence
  Synthetic oligonucleotide
aggcttgaaagtccaaccggcagttgtgcg

SEQ ID NO: 152752 - DNA, 30 bp, Artificial Sequence
  Synthetic oligonucleotide
aagtatagtcccagttgacatagttgtgcg

SEQ ID NO: 152753 - DNA, 30 bp, Artificial Sequence
  Synthetic oligonucleotide
ccgggatcggtctttcactgcggttgtgcg

SEQ ID NO: 152754 - DNA, 30 bp, Artificial Sequence
  Synthetic oligonucleotide
gggggaccacttgctaacacgaatattgcg

SEQ ID NO: 152755 - DNA, 30 bp, Artificial Sequence
  Synthetic oligonucleotide
atgacttcgacaaattacagaaaccttgcg

SEQ ID NO: 152756 - DNA, 30 bp, Artificial Sequence
  Synthetic oligonucleotide
gcgcaacaagcgattcatccatagcttgcg

SEQ ID NO: 152757 - DNA, 30 bp, Artificial Sequence
  Synthetic oligonucleotide
aaaagccatggtgttcataggtagcttgcg

SEQ ID NO: 152758 - DNA, 30 bp, Artificial Sequence
  Synthetic oligonucleotide
gcggttccgaaataaggccccgtgcttgcg

SEQ ID NO: 152759 - DNA, 30 bp, Artificial Sequence
  Synthetic oligonucleotide
gcagtcagacacacgataggtgtagttgcg

SEQ ID NO: 152760 - DNA, 30 bp, Artificial Sequence
  Synthetic oligonucleotide
gacgacctggctagcagtactcacgttgcg

SEQ ID NO: 152761 - DNA, 30 bp, Artificial Sequence
  Synthetic oligonucleotide
agtcttgataagatttcgtggacatttgcg

SEQ ID NO: 152762 - DNA, 30 bp, Artificial Sequence
  Synthetic oligonucleotide
caagacccacgaaagataatctccaaatcg

SEQ ID NO: 152763 - DNA, 30 bp, Artificial Sequence
  Synthetic oligonucleotide
cgtcaagggatcactatggttctcaaatcg

SEQ ID NO: 152764 - DNA, 30 bp, Artificial Sequence
  Synthetic oligonucleotide
cgtgtccaaaccgccctggatattaaatcg

SEQ ID NO: 152765 - DNA, 30 bp, Artificial Sequence
  Synthetic oligonucleotide
agggtataatggttcgattccaaacaatcg

SEQ ID NO: 152766 - DNA, 30 bp, Artificial Sequence
  Synthetic oligonucleotide
aggtgtactattcgtaatccagtacaatcg

SEQ ID NO: 152767 - DNA, 30 bp, Artificial Sequence
  Synthetic oligonucleotide
ggcaggtttgtagggctagcagtacaatcg

SEQ ID NO: 152768 - DNA, 30 bp, Artificial Sequence
  Synthetic oligonucleotide
cgtgtccatgaacgagtaaaaacgcaatcg

SEQ ID NO: 152769 - DNA, 30 bp, Artificial Sequence
  Synthetic oligonucleotide
cctaggtaaccgtacatgtggagtcaatcg

SEQ ID NO: 152770 - DNA, 30 bp, Artificial Sequence
  Synthetic oligonucleotide
cgtagagcgaaagtgccctcgggtcaatcg

SEQ ID NO: 152771 - DNA, 30 bp, Artificial Sequence
  Synthetic oligonucleotide
taagttattacaacttgggcaaaagaatcg

SEQ ID NO: 152772 - DNA, 30 bp, Artificial Sequence
  Synthetic oligonucleotide
gaaggtaatatcgtatcggtctaagaatcg

SEQ ID NO: 152773 - DNA, 30 bp, Artificial Sequence
  Synthetic oligonucleotide
tacactccgccctactttgttcgagaatcg

SEQ ID NO: 152774 - DNA, 30 bp, Artificial Sequence
  Synthetic oligonucleotide
tctcagctttctctcgctctgtccgaatcg

SEQ ID NO: 152775 - DNA, 30 bp, Artificial Sequence
  Synthetic oligonucleotide
agaaaactcggtcggtcttcagcggaatcg

SEQ ID NO: 152776 - DNA, 30 bp, Artificial Sequence
  Synthetic oligonucleotide
atatgacactcggccaactacgcggaatcg

SEQ ID NO: 152777 - DNA, 30 bp, Artificial Sequence
  Synthetic oligonucleotide
tatgtagggaaggagactaaccgggaatcg

SEQ ID NO: 152778 - DNA, 30 bp, Artificial Sequence
  Synthetic oligonucleotide
gctgccatgaacgcggtctaacatgaatcg

SEQ ID NO: 152779 - DNA, 30 bp, Artificial Sequence
  Synthetic oligonucleotide
agtgaaagggggcggggattggaataatcg

SEQ ID NO: 152780 - DNA, 30 bp, Artificial Sequence
  Synthetic oligonucleotide
ggtaacactttacaattcagaaactaatcg

SEQ ID NO: 152781 - DNA, 30 bp, Artificial Sequence
  Synthetic oligonucleotide
tactttccttgctcataaagatgctaatcg

SEQ ID NO: 152782 - DNA, 30 bp, Artificial Sequence
  Synthetic oligonucleotide
cggtaggatggtttggctaagcggtaatcg

SEQ ID NO: 152783 - DNA, 30 bp, Artificial Sequence
  Synthetic oligonucleotide
ccagcataaacaaggtaactagaaacatcg

SEQ ID NO: 152784 - DNA, 30 bp, Artificial Sequence
  Synthetic oligonucleotide
agtcacttgggaaacactgctttaacatcg

SEQ ID NO: 152785 - DNA, 30 bp, Artificial Sequence
  Synthetic oligonucleotide
cagaagagagtagccggtccgtacacatcg

SEQ ID NO: 152786 - DNA, 30 bp, Artificial Sequence
  Synthetic oligonucleotide
tgggacaggaccgattcgacgaagacatcg

SEQ ID NO: 152787 - DNA, 30 bp, Artificial Sequence
  Synthetic oligonucleotide
acccaaggtattcatccttgtagtacatcg

SEQ ID NO: 152788 - DNA, 30 bp, Artificial Sequence
  Synthetic oligonucleotide
ctggttattattaaaatccaatcaccatcg

SEQ ID NO: 152789 - DNA, 30 bp, Artificial Sequence
  Synthetic oligonucleotide
ctgggaatgtgggacgggcatgagccatcg

SEQ ID NO: 152790 - DNA, 30 bp, Artificial Sequence
  Synthetic oligonucleotide
ccggacctccaatgatatctcattccatcg

SEQ ID NO: 152791 - DNA, 30 bp, Artificial Sequence
  Synthetic oligonucleotide
tccatcatatgctgcgcctcatttccatcg

SEQ ID NO: 152792 - DNA, 30 bp, Artificial Sequence
  Synthetic oligonucleotide
tcatcgccggtttttcggaagctatcatcg

SEQ ID NO: 152793 - DNA, 30 bp, Artificial Sequence
  Synthetic oligonucleotide
ccagaacacgtacgctcgaattattcatcg

SEQ ID NO: 152794 - DNA, 30 bp, Artificial Sequence
  Synthetic oligonucleotide
gctggataaagctttttcaataacagatcg

SEQ ID NO: 152795 - DNA, 30 bp, Artificial Sequence
  Synthetic oligonucleotide
ataaccagaaaccattaaaagtacagatcg

SEQ ID NO: 152796 - DNA, 30 bp, Artificial Sequence
  Synthetic oligonucleotide
gggaaagaaatgcctggtttaacgagatcg

SEQ ID NO: 152797 - DNA, 30 bp, Artificial Sequence
  Synthetic oligonucleotide
agaagatgaaatttggtgaggtttcgatcg

SEQ ID NO: 152798 - DNA, 30 bp, Artificial Sequence
  Synthetic oligonucleotide
tggcgacgatgagtccattccgacggatcg

SEQ ID NO: 152799 - DNA, 30 bp, Artificial Sequence
  Synthetic oligonucleotide
tgccgtgaggactacctatgttacggatcg

SEQ ID NO: 152800 - DNA, 30 bp, Artificial Sequence
  Synthetic oligonucleotide
ctcgttcaaggtttaaacccgcggggatcg

SEQ ID NO: 152801 - DNA, 30 bp, Artificial Sequence
  Synthetic oligonucleotide
atgcgtgtactcttgtggctagggggatcg

SEQ ID NO: 152802 - DNA, 30 bp, Artificial Sequence
  Synthetic oligonucleotide
tttggcaaacgccatagcgtgaatggatcg

SEQ ID NO: 152803 - DNA, 30 bp, Artificial Sequence
  Synthetic oligonucleotide
cagacacctacacatgcaactactggatcg

SEQ ID NO: 152804 - DNA, 30 bp, Artificial Sequence
  Synthetic oligonucleotide
catcggtatttatgcgtcggtcgatgatcg

SEQ ID NO: 152805 - DNA, 30 bp, Artificial Sequence
  Synthetic oligonucleotide
cagctttagattaggaaattgagctgatcg

SEQ ID NO: 152806 - DNA, 30 bp, Artificial Sequence
  Synthetic oligonucleotide
aactcggatcaaaaagggttcgggtgatcg

SEQ ID NO: 152807 - DNA, 30 bp, Artificial Sequence
  Synthetic oligonucleotide
gggaacatgcgtactgctgtatcttgatcg

SEQ ID NO: 152808 - DNA, 30 bp, Artificial Sequence
  Synthetic oligonucleotide
ggtcgacatacataaagtaggggttgatcg

SEQ ID NO: 152809 - DNA, 30 bp, Artificial Sequence
  Synthetic oligonucleotide
ggcagtgccataatcaataagcgaatatcg

SEQ ID NO: 152810 - DNA, 30 bp, Artificial Sequence
  Synthetic oligonucleotide
acacgttttgcagacaaaaagccgatatcg

SEQ ID NO: 152811 - DNA, 30 bp, Artificial Sequence
  Synthetic oligonucleotide
tagatagcggtaggaaaaggaaggatatcg

SEQ ID NO: 152812 - DNA, 30 bp, Artificial Sequence
  Synthetic oligonucleotide
agcaccatgacaccttataatgccctatcg

SEQ ID NO: 152813 - DNA, 30 bp, Artificial Sequence
  Synthetic oligonucleotide
tctatcgaggtccgcgtataacttctatcg

SEQ ID NO: 152814 - DNA, 30 bp, Artificial Sequence
  Synthetic oligonucleotide
ctatcatgggattcactagcgtcggtatcg

SEQ ID NO: 152815 - DNA, 30 bp, Artificial Sequence
  Synthetic oligonucleotide
acgacctatcgtcgcgtgaaatctgtatcg

SEQ ID NO: 152816 - DNA, 30 bp, Artificial Sequence
  Synthetic oligonucleotide
ccaatggtgaactaaaaaataagcttatcg

SEQ ID NO: 152817 - DNA, 30 bp, Artificial Sequence
  Synthetic oligonucleotide
gtcccgatggtatcttactgccagttatcg

SEQ ID NO: 152818 - DNA, 30 bp, Artificial Sequence
  Synthetic oligonucleotide
agacagccactgttgtgtatttggttatcg

SEQ ID NO: 152819 - DNA, 30 bp, Artificial Sequence
  Synthetic oligonucleotide
gtcgagcactttggatgaaatcatttatcg

SEQ ID NO: 152820 - DNA, 30 bp, Artificial Sequence
  Synthetic oligonucleotide
cacactcagtcatcaaataagggtttatcg

SEQ ID NO: 152821 - DNA, 30 bp, Artificial Sequence
  Synthetic oligonucleotide
gctcgatcgctttgttgacgtcccaactcg

SEQ ID NO: 152822 - DNA, 30 bp, Artificial Sequence
  Synthetic oligonucleotide
cgctatatttcgattgttgggctcaactcg

SEQ ID NO: 152823 - DNA, 30 bp, Artificial Sequence
  Synthetic oligonucleotide
agaggataaaactacgctatcatgaactcg

SEQ ID NO: 152824 - DNA, 30 bp, Artificial Sequence
  Synthetic oligonucleotide
ggccatgtaaagtatttcgaacaacactcg

SEQ ID NO: 152825 - DNA, 30 bp, Artificial Sequence
  Synthetic oligonucleotide
aaaacggtcgcgccgattgcagaacactcg

SEQ ID NO: 152826 - DNA, 30 bp, Artificial Sequence
  Synthetic oligonucleotide
gctcggtgcctcgtttcgaataaccactcg

SEQ ID NO: 152827 - DNA, 30 bp, Artificial Sequence
  Synthetic oligonucleotide
aaaaggtatgggaccgacttagaggactcg

SEQ ID NO: 152828 - DNA, 30 bp, Artificial Sequence
  Synthetic oligonucleotide
gaaaggcatcaatatcagtacgcatactcg

SEQ ID NO: 152829 - DNA, 30 bp, Artificial Sequence
  Synthetic oligonucleotide
gcagttttaatcggctagttgtgttactcg

SEQ ID NO: 152830 - DNA, 30 bp, Artificial Sequence
  Synthetic oligonucleotide
cagtcgtactagtatcgactactttactcg

SEQ ID NO: 152831 - DNA, 30 bp, Artificial Sequence
  Synthetic oligonucleotide
atagtggcatggctatctagggcaacctcg

SEQ ID NO: 152832 - DNA, 30 bp, Artificial Sequence
  Synthetic oligonucleotide
acagcctacctatcttcattggcaacctcg

SEQ ID NO: 152833 - DNA, 30 bp, Artificial Sequence
  Synthetic oligonucleotide
gtaaattacagcgagaaggccagaacctcg

SEQ ID NO: 152834 - DNA, 30 bp, Artificial Sequence
  Synthetic oligonucleotide
tgcagaacttagaagctgtgccaaccctcg

SEQ ID NO: 152835 - DNA, 30 bp, Artificial Sequence
  Synthetic oligonucleotide
agcatacgtctagacgactttcacccctcg

SEQ ID NO: 152836 - DNA, 30 bp, Artificial Sequence
  Synthetic oligonucleotide
agactctcaataaccatcgatgctccctcg

SEQ ID NO: 152837 - DNA, 30 bp, Artificial Sequence
  Synthetic oligonucleotide
tctaaactaacttttggcaccaacgcctcg

SEQ ID NO: 152838 - DNA, 30 bp, Artificial Sequence
  Synthetic oligonucleotide
tggcatgttggatgaaataactccgcctcg

SEQ ID NO: 152839 - DNA, 30 bp, Artificial Sequence
  Synthetic oligonucleotide
ttaaggcacattaaccaactgtaatcctcg

SEQ ID NO: 152840 - DNA, 29 bp, Artificial Sequence
  Synthetic oligonucleotide
actggtgtcatccattactttagtcctcg

SEQ ID NO: 152841 - DNA, 30 bp, Artificial Sequence
  Synthetic oligonucleotide
gggatggtaagccgctccatgtcaagctcg

SEQ ID NO: 152842 - DNA, 30 bp, Artificial Sequence
  Synthetic oligonucleotide
gctcgcgggtacaactgattatcgagctcg

SEQ ID NO: 152843 - DNA, 30 bp, Artificial Sequence
  Synthetic oligonucleotide
acaacttctccagaattgactcatagctcg

SEQ ID NO: 152844 - DNA, 30 bp, Artificial Sequence
  Synthetic oligonucleotide
tgatctcatgaatcacttgacaggcgctcg

SEQ ID NO: 152845 - DNA, 30 bp, Artificial Sequence
  Synthetic oligonucleotide
ggtaagtatgagtgaaatgctggcggctcg

SEQ ID NO: 152846 - DNA, 30 bp, Artificial Sequence
  Synthetic oligonucleotide
acatgcgtctgacgggggaaaccatgctcg

SEQ ID NO: 152847 - DNA, 30 bp, Artificial Sequence
  Synthetic oligonucleotide
gtttagcgagcccattcgttcccgtgctcg

SEQ ID NO: 152848 - DNA, 30 bp, Artificial Sequence
  Synthetic oligonucleotide
gtaacgaaatcgggcagaattgtgtgctcg

SEQ ID NO: 152849 - DNA, 30 bp, Artificial Sequence
  Synthetic oligonucleotide
cggctttggagcgagcgatcagttatctcg

SEQ ID NO: 152850 - DNA, 30 bp, Artificial Sequence
  Synthetic oligonucleotide
aatacaccagcttacgtacttaaagtctcg

SEQ ID NO: 152851 - DNA, 30 bp, Artificial Sequence
  Synthetic oligonucleotide
caaaagcttagactttgtcattacgtctcg

SEQ ID NO: 152852 - DNA, 30 bp, Artificial Sequence
  Synthetic oligonucleotide
tttgtagacacttgacccgactccgtctcg

SEQ ID NO: 152853 - DNA, 30 bp, Artificial Sequence
  Synthetic oligonucleotide
cggataatcggtctcttaaggcgggtctcg

SEQ ID NO: 152854 - DNA, 30 bp, Artificial Sequence
  Synthetic oligonucleotide
gccatagataacctagatgtcgctgtctcg

SEQ ID NO: 152855 - DNA, 30 bp, Artificial Sequence
  Synthetic oligonucleotide
ccatcacagttcattatctctttattctcg

SEQ ID NO: 152856 - DNA, 30 bp, Artificial Sequence
  Synthetic oligonucleotide
gaattagagtttacaattaaagagttctcg

SEQ ID NO: 152857 - DNA, 30 bp, Artificial Sequence
  Synthetic oligonucleotide
tgatatggtgcgggtgggcagtttttctcg

SEQ ID NO: 152858 - DNA, 30 bp, Artificial Sequence
  Synthetic oligonucleotide
agaagtaggcaccgtctactgttaaagtcg

SEQ ID NO: 152859 - DNA, 30 bp, Artificial Sequence
  Synthetic oligonucleotide
actgttggaaacaaaagcgtttttaagtcg

SEQ ID NO: 152860 - DNA, 30 bp, Artificial Sequence
  Synthetic oligonucleotide
ctcaggttaaactaaaagttttcacagtcg

SEQ ID NO: 152861 - DNA, 30 bp, Artificial Sequence
  Synthetic oligonucleotide
catagggcccatctgaaagtccatgagtcg

SEQ ID NO: 152862 - DNA, 30 bp, Artificial Sequence
  Synthetic oligonucleotide
gattcgtcggatcggtaactaccatagtcg

SEQ ID NO: 152863 - DNA, 31 bp, Artificial Sequence
  Synthetic oligonucleotide
atccgaagtcggcccaacctactgatagtcg

SEQ ID NO: 152864 - DNA, 30 bp, Artificial Sequence
  Synthetic oligonucleotide
gttaagcccgatggctcctccctctagtcg

SEQ ID NO: 152865 - DNA, 30 bp, Artificial Sequence
  Synthetic oligonucleotide
acaacgtgacgtacttagggtaaaacgtcg

SEQ ID NO: 152866 - DNA, 30 bp, Artificial Sequence
  Synthetic oligonucleotide
agcgggagattgatactgggtatgacgtcg

SEQ ID NO: 152867 - DNA, 30 bp, Artificial Sequence
  Synthetic oligonucleotide
atgctatcgttgtgtgtggcatcaccgtcg

SEQ ID NO: 152868 - DNA, 30 bp, Artificial Sequence
  Synthetic oligonucleotide
catgtacgtgtgggtaaaaatagcccgtcg

SEQ ID NO: 152869 - DNA, 30 bp, Artificial Sequence
  Synthetic oligonucleotide
gcgccgaagtagcacgctccgcgcccgtcg

SEQ ID NO: 152870 - DNA, 30 bp, Artificial Sequence
  Synthetic oligonucleotide
taaacattggtaatatatatcgagccgtcg

SEQ ID NO: 152871 - DNA, 30 bp, Artificial Sequence
  Synthetic oligonucleotide
tgataaatgtccggtggaaaagggccgtcg

SEQ ID NO: 152872 - DNA, 30 bp, Artificial Sequence
  Synthetic oligonucleotide
cgtgtcccggctggcgtcaaacatccgtcg

SEQ ID NO: 152873 - DNA, 30 bp, Artificial Sequence
  Synthetic oligonucleotide
cccgagttgcgtactcctttagttccgtcg

SEQ ID NO: 152874 - DNA, 30 bp, Artificial Sequence
  Synthetic oligonucleotide
tgtggaaatgctttcgaacattttccgtcg

SEQ ID NO: 152875 - DNA, 30 bp, Artificial Sequence
  Synthetic oligonucleotide
tatgtggggtaatccaccatcacagcgtcg

SEQ ID NO: 152876 - DNA, 30 bp, Artificial Sequence
  Synthetic oligonucleotide
tatctccaagcagattgcactaacgcgtcg

SEQ ID NO: 152877 - DNA, 30 bp, Artificial Sequence
  Synthetic oligonucleotide
agtaacttgcgcagagccaaatcggcgtcg

SEQ ID NO: 152878 - DNA, 30 bp, Artificial Sequence
  Synthetic oligonucleotide
taatgggtgttcgaagatcatctggcgtcg

SEQ ID NO: 152879 - DNA, 30 bp, Artificial Sequence
  Synthetic oligonucleotide
tcggtaagccccggcacctggttggcgtcg

SEQ ID NO: 152880 - DNA, 30 bp, Artificial Sequence
  Synthetic oligonucleotide
agggttgcatgggtgaattggggatcgtcg

SEQ ID NO: 152881 - DNA, 30 bp, Artificial Sequence
  Synthetic oligonucleotide
tcactaccacaggtcgttctagactcgtcg

SEQ ID NO: 152882 - DNA, 30 bp, Artificial Sequence
  Synthetic oligonucleotide
gacgaagctgaatcacatggtttgtcgtcg

SEQ ID NO: 152883 - DNA, 30 bp, Artificial Sequence
  Synthetic oligonucleotide
gatacagcatggcgggtgcaataaaggtcg

SEQ ID NO: 152884 - DNA, 30 bp, Artificial Sequence
  Synthetic oligonucleotide
ctctcccccacctacgactcgttcaggtcg

SEQ ID NO: 152885 - DNA, 30 bp, Artificial Sequence
  Synthetic oligonucleotide
ctgatactccattgggctgctgggaggtcg

SEQ ID NO: 152886 - DNA, 30 bp, Artificial Sequence
  Synthetic oligonucleotide
ggaattcatgcaacggggacggttaggtcg

SEQ ID NO: 152887 - DNA, 30 bp, Artificial Sequence
  Synthetic oligonucleotide
tgtcttagcaatcataagccagtagggtcg

SEQ ID NO: 152888 - DNA, 30 bp, Artificial Sequence
  Synthetic oligonucleotide
tcgcttttgggccgtctagattacgggtcg

SEQ ID NO: 152889 - DNA, 30 bp, Artificial Sequence
  Synthetic oligonucleotide
ccactcccaattgtagcaatgcatgggtcg

SEQ ID NO: 152890 - DNA, 30 bp, Artificial Sequence
  Synthetic oligonucleotide
tcgaaacgattgcgcaggggcgatgggtcg

SEQ ID NO: 152891 - DNA, 30 bp, Artificial Sequence
  Synthetic oligonucleotide
gcaatgataaactctctgcgcagctggtcg

SEQ ID NO: 152892 - DNA, 31 bp, Artificial Sequence
  Synthetic oligonucleotide
tgagatcatttacacccctctgctctggtcg

SEQ ID NO: 152893 - DNA, 30 bp, Artificial Sequence
  Synthetic oligonucleotide
aagaccctaattaatgtttgtgggatgtcg

SEQ ID NO: 152894 - DNA, 30 bp, Artificial Sequence
  Synthetic oligonucleotide
gagcaagcactccacgggaaggtgatgtcg

SEQ ID NO: 152895 - DNA, 30 bp, Artificial Sequence
  Synthetic oligonucleotide
cccaaatatcgacatgcgcccactatgtcg

SEQ ID NO: 152896 - DNA, 30 bp, Artificial Sequence
  Synthetic oligonucleotide
ttagagttgacgtgctagatcctagtgtcg

SEQ ID NO: 152897 - DNA, 30 bp, Artificial Sequence
  Synthetic oligonucleotide
ccgggaaccagagctcaaaattacgtgtcg

SEQ ID NO: 152898 - DNA, 30 bp, Artificial Sequence
  Synthetic oligonucleotide
gcctgactgtaattgtcacttaaggtgtcg

SEQ ID NO: 152899 - DNA, 30 bp, Artificial Sequence
  Synthetic oligonucleotide
ggctcgtcctgctcgccatcacatgtgtcg

SEQ ID NO: 152900 - DNA, 30 bp, Artificial Sequence
  Synthetic oligonucleotide
ggcggaccttgtagcaccgctagtgtgtcg

SEQ ID NO: 152901 - DNA, 30 bp, Artificial Sequence
  Synthetic oligonucleotide
aaacggacaatcagaaatgctagtgtgtcg

SEQ ID NO: 152902 - DNA, 31 bp, Artificial Sequence
  Synthetic oligonucleotide
tacagtaccgactaccatggacgtattgtcg

SEQ ID NO: 152903 - DNA, 30 bp, Artificial Sequence
  Synthetic oligonucleotide
ggaagtgtactctgccaattctacttgtcg

SEQ ID NO: 152904 - DNA, 30 bp, Artificial Sequence
  Synthetic oligonucleotide
aatgaggcagggctagtccctggcttgtcg

SEQ ID NO: 152905 - DNA, 30 bp, Artificial Sequence
  Synthetic oligonucleotide
gagcgatgcgctatattcgcccggttgtcg

SEQ ID NO: 152906 - DNA, 30 bp, Artificial Sequence
  Synthetic oligonucleotide
ccagcaagggtattcaccctggcaaattcg

SEQ ID NO: 152907 - DNA, 30 bp, Artificial Sequence
  Synthetic oligonucleotide
gtgtctgagaatatgtcttatcgaaattcg

SEQ ID NO: 152908 - DNA, 30 bp, Artificial Sequence
  Synthetic oligonucleotide
gcaacgaggactagtcctcaagtcaattcg

SEQ ID NO: 152909 - DNA, 30 bp, Artificial Sequence
  Synthetic oligonucleotide
gtgcgttgaatcatgggtcccaaagattcg

SEQ ID NO: 152910 - DNA, 30 bp, Artificial Sequence
  Synthetic oligonucleotide
ccaacttcatatccgcgtgataacgattcg

SEQ ID NO: 152911 - DNA, 28 bp, Artificial Sequence
  Synthetic oligonucleotide
tcacatatacgaggtgcacattgattcg

SEQ ID NO: 152912 - DNA, 30 bp, Artificial Sequence
  Synthetic oligonucleotide
gcgcgagagataatttgcaaactgtattcg

SEQ ID NO: 152913 - DNA, 30 bp, Artificial Sequence
  Synthetic oligonucleotide
cgcttggatagtaacgtttagtgttattcg

SEQ ID NO: 152914 - DNA, 30 bp, Artificial Sequence
  Synthetic oligonucleotide
gttcagaggagtaggtatgacgtttattcg

SEQ ID NO: 152915 - DNA, 30 bp, Artificial Sequence
  Synthetic oligonucleotide
catcctcggaaatcttcccacagaacttcg

SEQ ID NO: 152916 - DNA, 30 bp, Artificial Sequence
  Synthetic oligonucleotide
ggtaatgttactgctgactatccgacttcg

SEQ ID NO: 152917 - DNA, 30 bp, Artificial Sequence
  Synthetic oligonucleotide
ccggttcggcgttctgttcttccgacttcg

SEQ ID NO: 152918 - DNA, 30 bp, Artificial Sequence
  Synthetic oligonucleotide
caagatatattgaatgcgtgggggacttcg

SEQ ID NO: 152919 - DNA, 30 bp, Artificial Sequence
  Synthetic oligonucleotide
cggtcaaaagggtgcctagtacttgcttcg

SEQ ID NO: 152920 - DNA, 30 bp, Artificial Sequence
  Synthetic oligonucleotide
tgtgtgaaacctatgttatgcctatcttcg

SEQ ID NO: 152921 - DNA, 30 bp, Artificial Sequence
  Synthetic oligonucleotide
caaagcaaccgtggattgtcgttatcttcg

SEQ ID NO: 152922 - DNA, 30 bp, Artificial Sequence
  Synthetic oligonucleotide
acaacgattttgcggaagcggtggtcttcg

SEQ ID NO: 152923 - DNA, 30 bp, Artificial Sequence
  Synthetic oligonucleotide
ccgaagcgtgtaatgtggcgaaattcttcg

SEQ ID NO: 152924 - DNA, 30 bp, Artificial Sequence
  Synthetic oligonucleotide
gtgaagcagtcgtcaacagtggtttcttcg

SEQ ID NO: 152925 - DNA, 30 bp, Artificial Sequence
  Synthetic oligonucleotide
tattaactctaatatgacatacgaagttcg

SEQ ID NO: 152926 - DNA, 30 bp, Artificial Sequence
  Synthetic oligonucleotide
tccgcggggcccaaggtcggcgtcagttcg

SEQ ID NO: 152927 - DNA, 30 bp, Artificial Sequence
  Synthetic oligonucleotide
gagcccattggtgttaaggtttcgagttcg

SEQ ID NO: 152928 - DNA, 30 bp, Artificial Sequence
  Synthetic oligonucleotide
atcctgatgtgcgtcaaggagtctagttcg

SEQ ID NO: 152929 - DNA, 30 bp, Artificial Sequence
  Synthetic oligonucleotide
cgatgatcacacatggaggtatttagttcg

SEQ ID NO: 152930 - DNA, 30 bp, Artificial Sequence
  Synthetic oligonucleotide
catatcggaagcttacagaatccacgttcg

SEQ ID NO: 152931 - DNA, 30 bp, Artificial Sequence
  Synthetic oligonucleotide
ttcagagggattctcagaaagatccgttcg

SEQ ID NO: 152932 - DNA, 30 bp, Artificial Sequence
  Synthetic oligonucleotide
accaggccgatacattcctggtatcgttcg

SEQ ID NO: 152933 - DNA, 30 bp, Artificial Sequence
  Synthetic oligonucleotide
ttgtgtgcgggtacgggtgcgcgaggttcg

SEQ ID NO: 152934 - DNA, 30 bp, Artificial Sequence
  Synthetic oligonucleotide
gtgagttcttagtcagggtctgctggttcg

SEQ ID NO: 152935 - DNA, 30 bp, Artificial Sequence
  Synthetic oligonucleotide
catacattatccgcaactccgtgtggttcg

SEQ ID NO: 152936 - DNA, 30 bp, Artificial Sequence
  Synthetic oligonucleotide
agtttatatagtggtcattacaaatgttcg

SEQ ID NO: 152937 - DNA, 30 bp, Artificial Sequence
  Synthetic oligonucleotide
tcaaagggcaactgtgccgcatactgttcg

SEQ ID NO: 152938 - DNA, 30 bp, Artificial Sequence
  Synthetic oligonucleotide
ctgacgtgttgtggatgcctttagtgttcg

SEQ ID NO: 152939 - DNA, 30 bp, Artificial Sequence
  Synthetic oligonucleotide
taaacatacgtgccctaatatagcatttcg

SEQ ID NO: 152940 - DNA, 30 bp, Artificial Sequence
  Synthetic oligonucleotide
gagaccgatggtataatcctgcgcatttcg

SEQ ID NO: 152941 - DNA, 30 bp, Artificial Sequence
  Synthetic oligonucleotide
gaggctttacagaaatcatctgcgatttcg

SEQ ID NO: 152942 - DNA, 30 bp, Artificial Sequence
  Synthetic oligonucleotide
tttgtcgagggtagcgtatggctactttcg

SEQ ID NO: 152943 - DNA, 30 bp, Artificial Sequence
  Synthetic oligonucleotide
ctgcagactccgaatgagtcatagctttcg

SEQ ID NO: 152944 - DNA, 30 bp, Artificial Sequence
  Synthetic oligonucleotide
agcctgacggcatgtgtgggagccgtttcg

SEQ ID NO: 152945 - DNA, 30 bp, Artificial Sequence
  Synthetic oligonucleotide
tccgtaccgccgctggaccagtgcgtttcg

SEQ ID NO: 152946 - DNA, 30 bp, Artificial Sequence
  Synthetic oligonucleotide
gaacattggttactttcaattcaggtttcg

SEQ ID NO: 152947 - DNA, 30 bp, Artificial Sequence
  Synthetic oligonucleotide
aagccactgcgagttaactggatattttcg

SEQ ID NO: 152948 - DNA, 30 bp, Artificial Sequence
  Synthetic oligonucleotide
ttcagacaaggggcactaaccgtcttttcg

SEQ ID NO: 152949 - DNA, 30 bp, Artificial Sequence
  Synthetic oligonucleotide
gcgcaataattgagaaatgagccgttttcg

SEQ ID NO: 152950 - DNA, 30 bp, Artificial Sequence
  Synthetic oligonucleotide
ctcccgcgctgttcagaggttatgttttcg

SEQ ID NO: 152951 - DNA, 30 bp, Artificial Sequence
  Synthetic oligonucleotide
gagaacccagagcttatccgcttgttttcg

SEQ ID NO: 152952 - DNA, 30 bp, Artificial Sequence
  Synthetic oligonucleotide
ctacaacggaaaaggcatatcttgttttcg

SEQ ID NO: 152953 - DNA, 30 bp, Artificial Sequence
  Synthetic oligonucleotide
acggtggtcgagaatcaggtcgaaaaaagg

SEQ ID NO: 152954 - DNA, 30 bp, Artificial Sequence
  Synthetic oligonucleotide
ataacgcgcgctgtcctaccaggaaaaagg

SEQ ID NO: 152955 - DNA, 30 bp, Artificial Sequence
  Synthetic oligonucleotide
accgggacttgactttataaacgcaaaagg

SEQ ID NO: 152956 - DNA, 30 bp, Artificial Sequence
  Synthetic oligonucleotide
cattccccagggtatggtatctgcaaaagg

SEQ ID NO: 152957 - DNA, 30 bp, Artificial Sequence
  Synthetic oligonucleotide
gaaggcgaaatacatcagctttcgaaaagg

SEQ ID NO: 152958 - DNA, 30 bp, Artificial Sequence
  Synthetic oligonucleotide
aggtgaacttagatgtcgaagtaacaaagg

SEQ ID NO: 152959 - DNA, 30 bp, Artificial Sequence
  Synthetic oligonucleotide
tgctgactgcgaaggtgttagacacaaagg

SEQ ID NO: 152960 - DNA, 30 bp, Artificial Sequence
  Synthetic oligonucleotide
taattataatgccgggggaaacgccaaagg

SEQ ID NO: 152961 - DNA, 30 bp, Artificial Sequence
  Synthetic oligonucleotide
ggaagaagaatgttggcattacagcaaagg

SEQ ID NO: 152962 - DNA, 30 bp, Artificial Sequence
  Synthetic oligonucleotide
ggcaaagacatttgcttttgcgcgcaaagg

SEQ ID NO: 152963 - DNA, 30 bp, Artificial Sequence
  Synthetic oligonucleotide
ggagtacatacgtcactcaggacagaaagg

SEQ ID NO: 152964 - DNA, 30 bp, Artificial Sequence
  Synthetic oligonucleotide
ttgatgtgttctaggcgatgaaaggaaagg

SEQ ID NO: 152965 - DNA, 30 bp, Artificial Sequence
  Synthetic oligonucleotide
ccgattgtggtgacggttgctaaggaaagg

SEQ ID NO: 152966 - DNA, 31 bp, Artificial Sequence
  Synthetic oligonucleotide
gaagggatctaccggtagccccggggaaagg

SEQ ID NO: 152967 - DNA, 30 bp, Artificial Sequence
  Synthetic oligonucleotide
taagcgtcactctagcctcacttggaaagg

SEQ ID NO: 152968 - DNA, 30 bp, Artificial Sequence
  Synthetic oligonucleotide
tcaacatgaggcatttccgaaggataaagg

SEQ ID NO: 152969 - DNA, 30 bp, Artificial Sequence
  Synthetic oligonucleotide
ttgggcataaacgctaacggtgcgtaaagg

SEQ ID NO: 152970 - DNA, 30 bp, Artificial Sequence
  Synthetic oligonucleotide
acggttctcaaagaaggggagtattaaagg

SEQ ID NO: 152971 - DNA, 30 bp, Artificial Sequence
  Synthetic oligonucleotide
gacaagtttgatgagtggtccacaacaagg

SEQ ID NO: 152972 - DNA, 30 bp, Artificial Sequence
  Synthetic oligonucleotide
aatcaaagcagagcctattaagacacaagg

SEQ ID NO: 152973 - DNA, 30 bp, Artificial Sequence
  Synthetic oligonucleotide
gggttcttcccgtataggtgctccacaagg

SEQ ID NO: 152974 - DNA, 30 bp, Artificial Sequence
  Synthetic oligonucleotide
ggcatgatacatcgatataaaggcacaagg

SEQ ID NO: 152975 - DNA, 30 bp, Artificial Sequence
  Synthetic oligonucleotide
gtcgccggcgtttgtatctcggtcacaagg

SEQ ID NO: 152976 - DNA, 30 bp, Artificial Sequence
  Synthetic oligonucleotide
ggcccatagggtcgtcgtgggggtacaagg

SEQ ID NO: 152977 - DNA, 30 bp, Artificial Sequence
  Synthetic oligonucleotide
gcctagcagtaggcggcgttacttacaagg

SEQ ID NO: 152978 - DNA, 30 bp, Artificial Sequence
  Synthetic oligonucleotide
gagctaggtaactgtgcaaataagccaagg

SEQ ID NO: 152979 - DNA, 30 bp, Artificial Sequence
  Synthetic oligonucleotide
acacttccggccggctgatccaaagcaagg

SEQ ID NO: 152980 - DNA, 30 bp, Artificial Sequence
  Synthetic oligonucleotide
tgctcaaaccgccagggattgggagcaagg

SEQ ID NO: 152981 - DNA, 30 bp, Artificial Sequence
  Synthetic oligonucleotide
gaggtagagcgcgtttttagtccggcaagg

SEQ ID NO: 152982 - DNA, 30 bp, Artificial Sequence
  Synthetic oligonucleotide
tttgctggttaagcgtcgcccggggcaagg

SEQ ID NO: 152983 - DNA, 30 bp, Artificial Sequence
  Synthetic oligonucleotide
taattgatggcataccgataggaatcaagg

SEQ ID NO: 152984 - DNA, 30 bp, Artificial Sequence
  Synthetic oligonucleotide
taatcagatctcctctatcactaatcaagg

SEQ ID NO: 152985 - DNA, 30 bp, Artificial Sequence
  Synthetic oligonucleotide
cggacaactgccttgtatggtctatcaagg

SEQ ID NO: 152986 - DNA, 30 bp, Artificial Sequence
  Synthetic oligonucleotide
agcgttgacactagtctgccagtctcaagg

SEQ ID NO: 152987 - DNA, 30 bp, Artificial Sequence
  Synthetic oligonucleotide
ggcgcccagggtactgcggtgttctcaagg

SEQ ID NO: 152988 - DNA, 30 bp, Artificial Sequence
  Synthetic oligonucleotide
taacgtggttggtattcgcacaattcaagg

SEQ ID NO: 152989 - DNA, 30 bp, Artificial Sequence
  Synthetic oligonucleotide
ctgatccatactcaaataacgagaagaagg

SEQ ID NO: 152990 - DNA, 30 bp, Artificial Sequence
  Synthetic oligonucleotide
agtatgcgttcattttggggcacgagaagg

SEQ ID NO: 152991 - DNA, 30 bp, Artificial Sequence
  Synthetic oligonucleotide
ttgactccctcacgtaagctcagtagaagg

SEQ ID NO: 152992 - DNA, 30 bp, Artificial Sequence
  Synthetic oligonucleotide
caggattcctagactccttttacccgaagg

SEQ ID NO: 152993 - DNA, 30 bp, Artificial Sequence
  Synthetic oligonucleotide
ctatctactgacttcaagttcgtgcgaagg

SEQ ID NO: 152994 - DNA, 30 bp, Artificial Sequence
  Synthetic oligonucleotide
atacagcaaatgggtccagtcttgcgaagg

SEQ ID NO: 152995 - DNA, 30 bp, Artificial Sequence
  Synthetic oligonucleotide
ctacgtaaaggaacgcgggggcatcgaagg

SEQ ID NO: 152996 - DNA, 30 bp, Artificial Sequence
  Synthetic oligonucleotide
caactaattgggtcaacggcagatcgaagg

SEQ ID NO: 152997 - DNA, 30 bp, Artificial Sequence
  Synthetic oligonucleotide
ttagctgccgttgctagattcaaaggaagg

SEQ ID NO: 152998 - DNA, 30 bp, Artificial Sequence
  Synthetic oligonucleotide
cgtagcagaatcgatcctcgctcaggaagg

SEQ ID NO: 152999 - DNA, 30 bp, Artificial Sequence
  Synthetic oligonucleotide
tctatgcacaagttcaacgggcacggaagg

SEQ ID NO: 153000 - DNA, 30 bp, Artificial Sequence
  Synthetic oligonucleotide
atcatctaggatataaaagatgcgggaagg

SEQ ID NO: 153001 - DNA, 30 bp, Artificial Sequence
  Synthetic oligonucleotide
cagcttaaatcttatctaagttatggaagg

SEQ ID NO: 153002 - DNA, 30 bp, Artificial Sequence
  Synthetic oligonucleotide
ccgggaaaatgcgcgtaatagggtggaagg

SEQ ID NO: 153003 - DNA, 30 bp, Artificial Sequence
  Synthetic oligonucleotide
aggataagaggaactaatgatggatgaagg

SEQ ID NO: 153004 - DNA, 30 bp, Artificial Sequence
  Synthetic oligonucleotide
cacaccccgctggatcccgatgggtgaagg

SEQ ID NO: 153005 - DNA, 30 bp, Artificial Sequence
  Synthetic oligonucleotide
tacaagtgaagatcggcggtatgaataagg

SEQ ID NO: 153006 - DNA, 30 bp, Artificial Sequence
  Synthetic oligonucleotide
gcgcccaagaatgggggttcgtgaataagg

SEQ ID NO: 153007 - DNA, 30 bp, Artificial Sequence
  Synthetic oligonucleotide
acattcatcgtagtccgattatacataagg

SEQ ID NO: 153008 - DNA, 30 bp, Artificial Sequence
  Synthetic oligonucleotide
gtagtgcgacctacgagggtggggataagg

SEQ ID NO: 153009 - DNA, 30 bp, Artificial Sequence
  Synthetic oligonucleotide
aaggctgcggataatgatacaactataagg

SEQ ID NO: 153010 - DNA, 30 bp, Artificial Sequence
  Synthetic oligonucleotide
tgactaatattatctcatttagcgctaagg

SEQ ID NO: 153011 - DNA, 30 bp, Artificial Sequence
  Synthetic oligonucleotide
cacatagtgttatgaacgcccagagtaagg

SEQ ID NO: 153012 - DNA, 30 bp, Artificial Sequence
  Synthetic oligonucleotide
gggcgcccactagtggacatcagtgtaagg

SEQ ID NO: 153013 - DNA, 30 bp, Artificial Sequence
  Synthetic oligonucleotide
cggcggacggctaagtttctggttgtaagg

SEQ ID NO: 153014 - DNA, 30 bp, Artificial Sequence
  Synthetic oligonucleotide
acgctataagtcgtgggcatctccttaagg

SEQ ID NO: 153015 - DNA, 30 bp, Artificial Sequence
  Synthetic oligonucleotide
gcgtattttaatgattgttaactcttaagg

SEQ ID NO: 153016 - DNA, 30 bp, Artificial Sequence
  Synthetic oligonucleotide
tagctagtgatgcttagtaagtttttaagg

SEQ ID NO: 153017 - DNA, 29 bp, Artificial Sequence
  Synthetic oligonucleotide
gatcataaaaaagtccccaataaaacagg

SEQ ID NO: 153018 - DNA, 30 bp, Artificial Sequence
  Synthetic oligonucleotide
cgcaagcgtgcatgctgacacggaaacagg

SEQ ID NO: 153019 - DNA, 30 bp, Artificial Sequence
  Synthetic oligonucleotide
ttagaacacacgctttgacattagaacagg

SEQ ID NO: 153020 - DNA, 30 bp, Artificial Sequence
  Synthetic oligonucleotide
gctcctccgctggcattataccggaacagg

SEQ ID NO: 153021 - DNA, 30 bp, Artificial Sequence
  Synthetic oligonucleotide
aacagcgttgagggcatggtacgggacagg

SEQ ID NO: 153022 - DNA, 30 bp, Artificial Sequence
  Synthetic oligonucleotide
ccgtagggacctcatggtaaatgtgacagg

SEQ ID NO: 153023 - DNA, 30 bp, Artificial Sequence
  Synthetic oligonucleotide
aaagggcacccagactgtgacattgacagg

SEQ ID NO: 153024 - DNA, 30 bp, Artificial Sequence
  Synthetic oligonucleotide
tagttgcatacttgtcaggtacgatacagg

SEQ ID NO: 153025 - DNA, 30 bp, Artificial Sequence
  Synthetic oligonucleotide
agatcacgcacagtacacttacgatacagg

SEQ ID NO: 153026 - DNA, 30 bp, Artificial Sequence
  Synthetic oligonucleotide
ggcaagcccggtattgttttcgtatacagg

SEQ ID NO: 153027 - DNA, 30 bp, Artificial Sequence
  Synthetic oligonucleotide
gatgcgaaaaaggcgctttcattatacagg

SEQ ID NO: 153028 - DNA, 30 bp, Artificial Sequence
  Synthetic oligonucleotide
aatgtctgacacggggagtgccactacagg

SEQ ID NO: 153029 - DNA, 30 bp, Artificial Sequence
  Synthetic oligonucleotide
ctcatcaaagcaccaggaatagagtacagg

SEQ ID NO: 153030 - DNA, 30 bp, Artificial Sequence
  Synthetic oligonucleotide
tagagggaaggtagcgacatccattacagg

SEQ ID NO: 153031 - DNA, 30 bp, Artificial Sequence
  Synthetic oligonucleotide
gttgcaacgcctctggtaggaataaccagg

SEQ ID NO: 153032 - DNA, 30 bp, Artificial Sequence
  Synthetic oligonucleotide
tttctgagcgctacctcccctagcaccagg

SEQ ID NO: 153033 - DNA, 30 bp, Artificial Sequence
  Synthetic oligonucleotide
taatgaaaggcactgatcaccctcaccagg

SEQ ID NO: 153034 - DNA, 30 bp, Artificial Sequence
  Synthetic oligonucleotide
tgggatggtcagcggaagttggataccagg

SEQ ID NO: 153035 - DNA, 30 bp, Artificial Sequence
  Synthetic oligonucleotide
ctttcgggcctcttgatctggattaccagg

SEQ ID NO: 153036 - DNA, 30 bp, Artificial Sequence
  Synthetic oligonucleotide
ccttaattggaggggctaacgcttaccagg

SEQ ID NO: 153037 - DNA, 30 bp, Artificial Sequence
  Synthetic oligonucleotide
gggtattggctggaataggtggttaccagg

SEQ ID NO: 153038 - DNA, 30 bp, Artificial Sequence
  Synthetic oligonucleotide
gggtggcacacatctactcatgtacccagg

SEQ ID NO: 153039 - DNA, 30 bp, Artificial Sequence
  Synthetic oligonucleotide
tcacgaaatctatggtcctgagcccccagg

SEQ ID NO: 153040 - DNA, 30 bp, Artificial Sequence
  Synthetic oligonucleotide
gtgaagataaggaaacggaactggcccagg

SEQ ID NO: 153041 - DNA, 30 bp, Artificial Sequence
  Synthetic oligonucleotide
tagggacgcttgaaaaggatccaagccagg

SEQ ID NO: 153042 - DNA, 30 bp, Artificial Sequence
  Synthetic oligonucleotide
cgtaataatgttagtatagggtaagccagg

SEQ ID NO: 153043 - DNA, 30 bp, Artificial Sequence
  Synthetic oligonucleotide
cagcggcatgagcagttcatatgagccagg

SEQ ID NO: 153044 - DNA, 30 bp, Artificial Sequence
  Synthetic oligonucleotide
aggacttgccatgtcggctcgcacgccagg

SEQ ID NO: 153045 - DNA, 30 bp, Artificial Sequence
  Synthetic oligonucleotide
aggccaaatacggatcatacatacgccagg

SEQ ID NO: 153046 - DNA, 30 bp, Artificial Sequence
  Synthetic oligonucleotide
acaagccacccgcaccatgcccgcgccagg

SEQ ID NO: 153047 - DNA, 30 bp, Artificial Sequence
  Synthetic oligonucleotide
atctctaagccatatgttagaactgccagg

SEQ ID NO: 153048 - DNA, 30 bp, Artificial Sequence
  Synthetic oligonucleotide
ataggcaccagttggcatccgattgccagg

SEQ ID NO: 153049 - DNA, 30 bp, Artificial Sequence
  Synthetic oligonucleotide
aacgacaccagtgagttaaataagtccagg

SEQ ID NO: 153050 - DNA, 30 bp, Artificial Sequence
  Synthetic oligonucleotide
ttcagggcgaagatgtggacgctgtccagg

SEQ ID NO: 153051 - DNA, 30 bp, Artificial Sequence
  Synthetic oligonucleotide
cttagcccggtacgtccgcataaaagcagg

SEQ ID NO: 153052 - DNA, 30 bp, Artificial Sequence
  Synthetic oligonucleotide
cctgcatccgaatacacgtatgcaagcagg

SEQ ID NO: 153053 - DNA, 30 bp, Artificial Sequence
  Synthetic oligonucleotide
ccgagtggcggatcaaggttacacagcagg

SEQ ID NO: 153054 - DNA, 30 bp, Artificial Sequence
  Synthetic oligonucleotide
actcgtctcacgggagaccctgggagcagg

SEQ ID NO: 153055 - DNA, 30 bp, Artificial Sequence
  Synthetic oligonucleotide
acaaaggaaccgcggatacggggtagcagg

SEQ ID NO: 153056 - DNA, 30 bp, Artificial Sequence
  Synthetic oligonucleotide
aagtgggatggtacaaggaaattgggcagg

SEQ ID NO: 153057 - DNA, 30 bp, Artificial Sequence
  Synthetic oligonucleotide
gcctagggcgtgtatcgtgcgagatgcagg

SEQ ID NO: 153058 - DNA, 30 bp, Artificial Sequence
  Synthetic oligonucleotide
gggaataagagtttcgggcgaatctgcagg

SEQ ID NO: 153059 - DNA, 30 bp, Artificial Sequence
  Synthetic oligonucleotide
atgagagttgctcgaccggaggtttgcagg

SEQ ID NO: 153060 - DNA, 30 bp, Artificial Sequence
  Synthetic oligonucleotide
cacacagcgtattacaaaaaatcaatcagg

SEQ ID NO: 153061 - DNA, 30 bp, Artificial Sequence
  Synthetic oligonucleotide
agcttcgcgtcagcggttcggaccatcagg

SEQ ID NO: 153062 - DNA, 30 bp, Artificial Sequence
  Synthetic oligonucleotide
tggtccaagaagaggactcgaattatcagg

SEQ ID NO: 153063 - DNA, 30 bp, Artificial Sequence
  Synthetic oligonucleotide
cggagtgaagattcagtggttattatcagg

SEQ ID NO: 153064 - DNA, 30 bp, Artificial Sequence
  Synthetic oligonucleotide
ttacgttagtattgtttttagggtctcagg

SEQ ID NO: 153065 - DNA, 30 bp, Artificial Sequence
  Synthetic oligonucleotide
attgggagaaatgtagacctacgagtcagg

SEQ ID NO: 153066 - DNA, 30 bp, Artificial Sequence
  Synthetic oligonucleotide
ttcagctagcggggatgattatacgtcagg

SEQ ID NO: 153067 - DNA, 30 bp, Artificial Sequence
  Synthetic oligonucleotide
catgtcctgaggggccgagggggtgtcagg

SEQ ID NO: 153068 - DNA, 30 bp, Artificial Sequence
  Synthetic oligonucleotide
atacggagtgaaagggcataccacttcagg

SEQ ID NO: 153069 - DNA, 30 bp, Artificial Sequence
  Synthetic oligonucleotide
aatatgttacggcacggctaggagttcagg

SEQ ID NO: 153070 - DNA, 30 bp, Artificial Sequence
  Synthetic oligonucleotide
gtcccgcttgccgacggcgacaggttcagg

SEQ ID NO: 153071 - DNA, 30 bp, Artificial Sequence
  Synthetic oligonucleotide
ggtcgctgaatatgattgttccggttcagg

SEQ ID NO: 153072 - DNA, 30 bp, Artificial Sequence
  Synthetic oligonucleotide
agtggccagtttctccttgaaatgttcagg

SEQ ID NO: 153073 - DNA, 30 bp, Artificial Sequence
  Synthetic oligonucleotide
atgaaggttgagttgggacgacatttcagg

SEQ ID NO: 153074 - DNA, 30 bp, Artificial Sequence
  Synthetic oligonucleotide
tagctgcgaaaacagtccatggacaagagg

SEQ ID NO: 153075 - DNA, 30 bp, Artificial Sequence
  Synthetic oligonucleotide
aagcggcattctgactagcgagggaagagg

SEQ ID NO: 153076 - DNA, 30 bp, Artificial Sequence
  Synthetic oligonucleotide
agaaaatatcatatagtttctacccagagg

SEQ ID NO: 153077 - DNA, 30 bp, Artificial Sequence
  Synthetic oligonucleotide
tgttaaggagtaactaactaggtccagagg

SEQ ID NO: 153078 - DNA, 30 bp, Artificial Sequence
  Synthetic oligonucleotide
tccgtagcagtgaccctttgtaggcagagg

SEQ ID NO: 153079 - DNA, 30 bp, Artificial Sequence
  Synthetic oligonucleotide
ttgctggtaaatggccctttttggcagagg

SEQ ID NO: 153080 - DNA, 30 bp, Artificial Sequence
  Synthetic oligonucleotide
cacataaaacacataggcggggaagagagg

SEQ ID NO: 153081 - DNA, 30 bp, Artificial Sequence
  Synthetic oligonucleotide
gtcctgagggcaataccaccggccgagagg

SEQ ID NO: 153082 - DNA, 30 bp, Artificial Sequence
  Synthetic oligonucleotide
gcacgaggaggttttactggtacggagagg

SEQ ID NO: 153083 - DNA, 30 bp, Artificial Sequence
  Synthetic oligonucleotide
ctgctcaatgacaaacaagcacatgagagg

SEQ ID NO: 153084 - DNA, 30 bp, Artificial Sequence
  Synthetic oligonucleotide
atttcggcaagaacgccccgcaaatagagg

SEQ ID NO: 153085 - DNA, 30 bp, Artificial Sequence
  Synthetic oligonucleotide
tagctcgggcttgtaataacccgatagagg

SEQ ID NO: 153086 - DNA, 30 bp, Artificial Sequence
  Synthetic oligonucleotide
tctgatataggagagtggagaatatagagg

SEQ ID NO: 153087 - DNA, 30 bp, Artificial Sequence
  Synthetic oligonucleotide
gggaacacaggaggtgagatatcttagagg

SEQ ID NO: 153088 - DNA, 30 bp, Artificial Sequence
  Synthetic oligonucleotide
cattgggacacccgactacgaagttagagg

SEQ ID NO: 153089 - DNA, 30 bp, Artificial Sequence
  Synthetic oligonucleotide
agccccttcggaacagtctcttgcacgagg

SEQ ID NO: 153090 - DNA, 30 bp, Artificial Sequence
  Synthetic oligonucleotide
agtccacctggattgctgagttttccgagg

SEQ ID NO: 153091 - DNA, 30 bp, Artificial Sequence
  Synthetic oligonucleotide
atcctgtactcccacaggccacacgcgagg

SEQ ID NO: 153092 - DNA, 30 bp, Artificial Sequence
  Synthetic oligonucleotide
accttgtacaaggtataatgaagggcgagg

SEQ ID NO: 153093 - DNA, 30 bp, Artificial Sequence
  Synthetic oligonucleotide
gtacgatgaccgccgtattagcgggcgagg

SEQ ID NO: 153094 - DNA, 30 bp, Artificial Sequence
  Synthetic oligonucleotide
cggccccgataaggtccaaagtgggcgagg

SEQ ID NO: 153095 - DNA, 30 bp, Artificial Sequence
  Synthetic oligonucleotide
agtggatctcttatcacgttcagatcgagg

SEQ ID NO: 153096 - DNA, 30 bp, Artificial Sequence
  Synthetic oligonucleotide
tgaataggcccatcaccacaccgatcgagg

SEQ ID NO: 153097 - DNA, 30 bp, Artificial Sequence
  Synthetic oligonucleotide
gtgagcccggccgtattgagtaggtcgagg

SEQ ID NO: 153098 - DNA, 30 bp, Artificial Sequence
  Synthetic oligonucleotide
cccacaggaccatagttaatctggtcgagg

SEQ ID NO: 153099 - DNA, 30 bp, Artificial Sequence
  Synthetic oligonucleotide
gagccaaccccgtatctcgtcggaaggagg

SEQ ID NO: 153100 - DNA, 30 bp, Artificial Sequence
  Synthetic oligonucleotide
cgagtgaaccagcaggtaaggcaggggagg

SEQ ID NO: 153101 - DNA, 30 bp, Artificial Sequence
  Synthetic oligonucleotide
gctcgtagttttcaaaggtcctaggggagg

SEQ ID NO: 153102 - DNA, 30 bp, Artificial Sequence
  Synthetic oligonucleotide
gggtggcgtacgtcacgcaagtttgggagg

SEQ ID NO: 153103 - DNA, 30 bp, Artificial Sequence
  Synthetic oligonucleotide
gaactgtccaagtttgatcgagactggagg

SEQ ID NO: 153104 - DNA, 30 bp, Artificial Sequence
  Synthetic oligonucleotide
gccgtgccgaagagctagcatatgtggagg

SEQ ID NO: 153105 - DNA, 30 bp, Artificial Sequence
  Synthetic oligonucleotide
aatctgtaatggaagtcaatagcttggagg

SEQ ID NO: 153106 - DNA, 30 bp, Artificial Sequence
  Synthetic oligonucleotide
ggcaagtccagtcaagagcattaaatgagg

SEQ ID NO: 153107 - DNA, 30 bp, Artificial Sequence
  Synthetic oligonucleotide
gggaatcggaatgaaggctttacaatgagg

SEQ ID NO: 153108 - DNA, 30 bp, Artificial Sequence
  Synthetic oligonucleotide
ctatgtctcggctcataccccttcatgagg

SEQ ID NO: 153109 - DNA, 30 bp, Artificial Sequence
  Synthetic oligonucleotide
ccaggaatcatagaccgagtggggatgagg

SEQ ID NO: 153110 - DNA, 30 bp, Artificial Sequence
  Synthetic oligonucleotide
tagctaactacgccaacgttcgaactgagg

SEQ ID NO: 153111 - DNA, 30 bp, Artificial Sequence
  Synthetic oligonucleotide
ggagggaagttggtccaccggcacgtgagg

SEQ ID NO: 153112 - DNA, 30 bp, Artificial Sequence
  Synthetic oligonucleotide
gggccagcttagaccctaccttaggtgagg

SEQ ID NO: 153113 - DNA, 30 bp, Artificial Sequence
  Synthetic oligonucleotide
tgggctcctacggcttgaaactgtgtgagg

SEQ ID NO: 153114 - DNA, 30 bp, Artificial Sequence
  Synthetic oligonucleotide
tatggcctggaaagggtttagtacttgagg

SEQ ID NO: 153115 - DNA, 30 bp, Artificial Sequence
  Synthetic oligonucleotide
cgaggccttgcagaaatgtacgcgttgagg

SEQ ID NO: 153116 - DNA, 30 bp, Artificial Sequence
  Synthetic oligonucleotide
gttggacgtcggagcccagtatgtttgagg

SEQ ID NO: 153117 - DNA, 30 bp, Artificial Sequence
  Synthetic oligonucleotide
aaccggaaacagatcgaggtccttttgagg

SEQ ID NO: 153118 - DNA, 30 bp, Artificial Sequence
  Synthetic oligonucleotide
gcgtaaacgaacataggggttcttttgagg

SEQ ID NO: 153119 - DNA, 30 bp, Artificial Sequence
  Synthetic oligonucleotide
ccttcttgaaaggcaggattccacaatagg

SEQ ID NO: 153120 - DNA, 30 bp, Artificial Sequence
  Synthetic oligonucleotide
gtgtcgaccatgattttcatcgagaatagg

SEQ ID NO: 153121 - DNA, 30 bp, Artificial Sequence
  Synthetic oligonucleotide
ccagttatttaagccctcgtgcgtaatagg

SEQ ID NO: 153122 - DNA, 30 bp, Artificial Sequence
  Synthetic oligonucleotide
ccaaggttagaaagagcgcaaacacatagg

SEQ ID NO: 153123 - DNA, 30 bp, Artificial Sequence
  Synthetic oligonucleotide
tatcagtgagtcacttgacccgagcatagg

SEQ ID NO: 153124 - DNA, 30 bp, Artificial Sequence
  Synthetic oligonucleotide
acaaagtggttgggtgcttgaaccgatagg

SEQ ID NO: 153125 - DNA, 30 bp, Artificial Sequence
  Synthetic oligonucleotide
acaaggggtttaccttcttacaaggatagg

SEQ ID NO: 153126 - DNA, 30 bp, Artificial Sequence
  Synthetic oligonucleotide
tgaatataaataggtttagaacgggatagg

SEQ ID NO: 153127 - DNA, 30 bp, Artificial Sequence
  Synthetic oligonucleotide
ggtgaggttacccgctaagcatgttatagg

SEQ ID NO: 153128 - DNA, 30 bp, Artificial Sequence
  Synthetic oligonucleotide
aagtaaacttcgaagaaagactgttatagg

SEQ ID NO: 153129 - DNA, 30 bp, Artificial Sequence
  Synthetic oligonucleotide
aacgcctctggggtgatgttacgaactagg

SEQ ID NO: 153130 - DNA, 30 bp, Artificial Sequence
  Synthetic oligonucleotide
gagtgcttaagttaatcgaaacttactagg

SEQ ID NO: 153131 - DNA, 30 bp, Artificial Sequence
  Synthetic oligonucleotide
agagtagtatgcgtccctttcccacctagg

SEQ ID NO: 153132 - DNA, 30 bp, Artificial Sequence
  Synthetic oligonucleotide
ttatttaagatggtactcccctcgcctagg

SEQ ID NO: 153133 - DNA, 30 bp, Artificial Sequence
  Synthetic oligonucleotide
aagctaaaaagatggaccacgtgtcctagg

SEQ ID NO: 153134 - DNA, 30 bp, Artificial Sequence
  Synthetic oligonucleotide
aaggggccagggttgataggctttcctagg

SEQ ID NO: 153135 - DNA, 30 bp, Artificial Sequence
  Synthetic oligonucleotide
aattgcacagacgatcagtgtaaagctagg

SEQ ID NO: 153136 - DNA, 30 bp, Artificial Sequence
  Synthetic oligonucleotide
atctcccgataataggtggaaacggctagg

SEQ ID NO: 153137 - DNA, 30 bp, Artificial Sequence
  Synthetic oligonucleotide
ttcataagctactgtgtttgtagggctagg

SEQ ID NO: 153138 - DNA, 30 bp, Artificial Sequence
  Synthetic oligonucleotide
gcacaagggggagtttcgaattagtctagg

SEQ ID NO: 153139 - DNA, 30 bp, Artificial Sequence
  Synthetic oligonucleotide
gatactaatcacattttcataaggtctagg

SEQ ID NO: 153140 - DNA, 30 bp, Artificial Sequence
  Synthetic oligonucleotide
cagagatatcgcatcggaaaccaaagtagg

SEQ ID NO: 153141 - DNA, 30 bp, Artificial Sequence
  Synthetic oligonucleotide
tcgaacaatgtaacgggggctcgaagtagg

SEQ ID NO: 153142 - DNA, 30 bp, Artificial Sequence
  Synthetic oligonucleotide
aataagaaaagggaaaaccgcaggagtagg

SEQ ID NO: 153143 - DNA, 30 bp, Artificial Sequence
  Synthetic oligonucleotide
acaccggactgattgaggtaaaaacgtagg

SEQ ID NO: 153144 - DNA, 30 bp, Artificial Sequence
  Synthetic oligonucleotide
ttctaacactgcataggtaatagaggtagg

SEQ ID NO: 153145 - DNA, 30 bp, Artificial Sequence
  Synthetic oligonucleotide
ttacggtgatacgtatgtactagaggtagg

SEQ ID NO: 153146 - DNA, 30 bp, Artificial Sequence
  Synthetic oligonucleotide
ccgattagagataacaaatcactaggtagg

SEQ ID NO: 153147 - DNA, 30 bp, Artificial Sequence
  Synthetic oligonucleotide
ccggctataccggatgtaaacaacggtagg

SEQ ID NO: 153148 - DNA, 30 bp, Artificial Sequence
  Synthetic oligonucleotide
taactggtacggaaaacgttttacggtagg

SEQ ID NO: 153149 - DNA, 30 bp, Artificial Sequence
  Synthetic oligonucleotide
agtggtcacgatctgtgtaaggcgggtagg

SEQ ID NO: 153150 - DNA, 30 bp, Artificial Sequence
  Synthetic oligonucleotide
tccgcagccaggaatacaagtgttggtagg

SEQ ID NO: 153151 - DNA, 30 bp, Artificial Sequence
  Synthetic oligonucleotide
gggggatttagtttgtggggtctatgtagg

SEQ ID NO: 153152 - DNA, 30 bp, Artificial Sequence
  Synthetic oligonucleotide
cagcagcgtatgatttccgagttatgtagg

SEQ ID NO: 153153 - DNA, 30 bp, Artificial Sequence
  Synthetic oligonucleotide
tgatatatggttgttggcaagtcgtgtagg

SEQ ID NO: 153154 - DNA, 30 bp, Artificial Sequence
  Synthetic oligonucleotide
ggaggatgtgaggatgtgggatgttgtagg

SEQ ID NO: 153155 - DNA, 30 bp, Artificial Sequence
  Synthetic oligonucleotide
accgaccattttcaatacgtgctttgtagg

SEQ ID NO: 153156 - DNA, 30 bp, Artificial Sequence
  Synthetic oligonucleotide
tctgggctgctgaatccagagacaattagg

SEQ ID NO: 153157 - DNA, 30 bp, Artificial Sequence
  Synthetic oligonucleotide
ggtacatgatgcggtatgaatacaattagg

SEQ ID NO: 153158 - DNA, 30 bp, Artificial Sequence
  Synthetic oligonucleotide
tcgtggcgttaggatctagttatcattagg

SEQ ID NO: 153159 - DNA, 30 bp, Artificial Sequence
  Synthetic oligonucleotide
gtctgaacttaggaaagtggaccgattagg

SEQ ID NO: 153160 - DNA, 30 bp, Artificial Sequence
  Synthetic oligonucleotide
ggtgtatgtttaggccaggttgtgattagg

SEQ ID NO: 153161 - DNA, 30 bp, Artificial Sequence
  Synthetic oligonucleotide
tcagcaagtggagtaagtctgaatattagg

SEQ ID NO: 153162 - DNA, 30 bp, Artificial Sequence
  Synthetic oligonucleotide
taattagcgggaccctttcggggtattagg

SEQ ID NO: 153163 - DNA, 30 bp, Artificial Sequence
  Synthetic oligonucleotide
ctaggcctactcgactatctgcggcttagg

SEQ ID NO: 153164 - DNA, 30 bp, Artificial Sequence
  Synthetic oligonucleotide
gtggtcaattgctaaaggtaatttcttagg

SEQ ID NO: 153165 - DNA, 30 bp, Artificial Sequence
  Synthetic oligonucleotide
gctgctacagtgtgagggtggacagttagg

SEQ ID NO: 153166 - DNA, 30 bp, Artificial Sequence
  Synthetic oligonucleotide
gagttccggaaaattgatgaaccagttagg

SEQ ID NO: 153167 - DNA, 30 bp, Artificial Sequence
  Synthetic oligonucleotide
gcgaatgaagagagcccatcacccgttagg

SEQ ID NO: 153168 - DNA, 30 bp, Artificial Sequence
  Synthetic oligonucleotide
cttcgcggcgaggagaatgtggtcgttagg

SEQ ID NO: 153169 - DNA, 30 bp, Artificial Sequence
  Synthetic oligonucleotide
cgtgctccttcttatactatcttcgttagg

SEQ ID NO: 153170 - DNA, 30 bp, Artificial Sequence
  Synthetic oligonucleotide
acaccgtacacttttacaatggcatttagg

SEQ ID NO: 153171 - DNA, 30 bp, Artificial Sequence
  Synthetic oligonucleotide
atggctaatttaatcgcggtactatttagg

SEQ ID NO: 153172 - DNA, 30 bp, Artificial Sequence
  Synthetic oligonucleotide
agataaagtccaaacctaggtacctttagg

SEQ ID NO: 153173 - DNA, 30 bp, Artificial Sequence
  Synthetic oligonucleotide
tggggaagaccagcagcaagaggctttagg

SEQ ID NO: 153174 - DNA, 30 bp, Artificial Sequence
  Synthetic oligonucleotide
ggcggctacatacatcgccgttgctttagg

SEQ ID NO: 153175 - DNA, 30 bp, Artificial Sequence
  Synthetic oligonucleotide
gctgagatctgtcttgtggtggtgtttagg

SEQ ID NO: 153176 - DNA, 30 bp, Artificial Sequence
  Synthetic oligonucleotide
ggaaatacaacatcggtgggaggaaaacgg

SEQ ID NO: 153177 - DNA, 30 bp, Artificial Sequence
  Synthetic oligonucleotide
aacggatggagcatgggatttaacaaacgg

SEQ ID NO: 153178 - DNA, 30 bp, Artificial Sequence
  Synthetic oligonucleotide
tgataccagcagttcacatggtccaaacgg

SEQ ID NO: 153179 - DNA, 30 bp, Artificial Sequence
  Synthetic oligonucleotide
ggaacaaaattaggtcttctggtgaaacgg

SEQ ID NO: 153180 - DNA, 30 bp, Artificial Sequence
  Synthetic oligonucleotide
acttaatcgacagtgacacttgataaacgg

SEQ ID NO: 153181 - DNA, 30 bp, Artificial Sequence
  Synthetic oligonucleotide
agtcagatactcgcctcaggtccccaacgg

SEQ ID NO: 153182 - DNA, 30 bp, Artificial Sequence
  Synthetic oligonucleotide
gtactaaaatggtttcccaggggccaacgg

SEQ ID NO: 153183 - DNA, 30 bp, Artificial Sequence
  Synthetic oligonucleotide
gtgcaagtcgaagatcgctcggcgcaacgg

SEQ ID NO: 153184 - DNA, 30 bp, Artificial Sequence
  Synthetic oligonucleotide
aaaacagtgtcttcttgaagctgagaacgg

SEQ ID NO: 153185 - DNA, 30 bp, Artificial Sequence
  Synthetic oligonucleotide
gcagtagagactctggccgaggaggaacgg

SEQ ID NO: 153186 - DNA, 30 bp, Artificial Sequence
  Synthetic oligonucleotide
gagcatgataaccgcgttcaggcggaacgg

SEQ ID NO: 153187 - DNA, 30 bp, Artificial Sequence
  Synthetic oligonucleotide
ccaagattaggagacccgatcatggaacgg

SEQ ID NO: 153188 - DNA, 30 bp, Artificial Sequence
  Synthetic oligonucleotide
gactacaccatcttttaaggcacctaacgg

SEQ ID NO: 153189 - DNA, 30 bp, Artificial Sequence
  Synthetic oligonucleotide
aatgcgtgcattatcacattacaaacacgg

SEQ ID NO: 153190 - DNA, 30 bp, Artificial Sequence
  Synthetic oligonucleotide
ataaagcacgagacgacactgaatacacgg

SEQ ID NO: 153191 - DNA, 30 bp, Artificial Sequence
  Synthetic oligonucleotide
tatggcacctcgatgtggagctagccacgg

SEQ ID NO: 153192 - DNA, 30 bp, Artificial Sequence
  Synthetic oligonucleotide
ggaggaacacgcgaagtgattcttccacgg

SEQ ID NO: 153193 - DNA, 30 bp, Artificial Sequence
  Synthetic oligonucleotide
aaaccatatcagaagtcggataaagcacgg

SEQ ID NO: 153194 - DNA, 30 bp, Artificial Sequence
  Synthetic oligonucleotide
acacatctcagctgccttgtctaagcacgg

SEQ ID NO: 153195 - DNA, 30 bp, Artificial Sequence
  Synthetic oligonucleotide
aactccatgaaaagtagacacactgcacgg

SEQ ID NO: 153196 - DNA, 30 bp, Artificial Sequence
  Synthetic oligonucleotide
ggcgtggattataataagagagttgcacgg

SEQ ID NO: 153197 - DNA, 30 bp, Artificial Sequence
  Synthetic oligonucleotide
cgtcgaatgtccactcgtctcgtttcacgg

SEQ ID NO: 153198 - DNA, 30 bp, Artificial Sequence
  Synthetic oligonucleotide
gaaaactgcgaaaccacggatacaagacgg

SEQ ID NO: 153199 - DNA, 30 bp, Artificial Sequence
  Synthetic oligonucleotide
atcgacggctgaatagtgaagaccagacgg

SEQ ID NO: 153200 - DNA, 30 bp, Artificial Sequence
  Synthetic oligonucleotide
tcgggtacattaggaatgcttatcagacgg

SEQ ID NO: 153201 - DNA, 30 bp, Artificial Sequence
  Synthetic oligonucleotide
ggagcgcgtctcctgaatcggctccgacgg

SEQ ID NO: 153202 - DNA, 30 bp, Artificial Sequence
  Synthetic oligonucleotide
gcgggtgagagtgttcgagtttagcgacgg

SEQ ID NO: 153203 - DNA, 30 bp, Artificial Sequence
  Synthetic oligonucleotide
gaatacgatctggaatcaggaggaggacgg

SEQ ID NO: 153204 - DNA, 30 bp, Artificial Sequence
  Synthetic oligonucleotide
aacgcaaagtaccccacctgaataggacgg

SEQ ID NO: 153205 - DNA, 30 bp, Artificial Sequence
  Synthetic oligonucleotide
taagtgcgaattttgagcagaatgggacgg

SEQ ID NO: 153206 - DNA, 30 bp, Artificial Sequence
  Synthetic oligonucleotide
ggattagagtcgctgttgagacatggacgg

SEQ ID NO: 153207 - DNA, 30 bp, Artificial Sequence
  Synthetic oligonucleotide
agctgtgctagggtcggtcgccaaatacgg

SEQ ID NO: 153208 - DNA, 30 bp, Artificial Sequence
  Synthetic oligonucleotide
acgaaaggagatatgaaagtgagcatacgg

SEQ ID NO: 153209 - DNA, 30 bp, Artificial Sequence
  Synthetic oligonucleotide
ttgggataaagttcgctaggccctatacgg

SEQ ID NO: 153210 - DNA, 30 bp, Artificial Sequence
  Synthetic oligonucleotide
cacgaaggtattatattaggcgtactacgg

SEQ ID NO: 153211 - DNA, 30 bp, Artificial Sequence
  Synthetic oligonucleotide
tcaaattcggcggattcctagtatctacgg

SEQ ID NO: 153212 - DNA, 30 bp, Artificial Sequence
  Synthetic oligonucleotide
tgatcttagcttcatgcctcaaaattacgg

SEQ ID NO: 153213 - DNA, 30 bp, Artificial Sequence
  Synthetic oligonucleotide
ctgggagtaggactaggatctatattacgg

SEQ ID NO: 153214 - DNA, 30 bp, Artificial Sequence
  Synthetic oligonucleotide
cggatagtcttgggccgcgattagttacgg

SEQ ID NO: 153215 - DNA, 30 bp, Artificial Sequence
  Synthetic oligonucleotide
cccgcgcacggtagcaagaggtcgaaccgg

SEQ ID NO: 153216 - DNA, 30 bp, Artificial Sequence
  Synthetic oligonucleotide
tacaaagctgcgatctagacatataaccgg

SEQ ID NO: 153217 - DNA, 30 bp, Artificial Sequence
  Synthetic oligonucleotide
ctcgctggaaagggggcactcgaacaccgg

SEQ ID NO: 153218 - DNA, 30 bp, Artificial Sequence
  Synthetic oligonucleotide
acgttaagttgttgtggctcattccaccgg

SEQ ID NO: 153219 - DNA, 30 bp, Artificial Sequence
  Synthetic oligonucleotide
agtgaattaccatgaccctttgcgcaccgg

SEQ ID NO: 153220 - DNA, 30 bp, Artificial Sequence
  Synthetic oligonucleotide
gtctttagcagaacagcgctgcgagaccgg

SEQ ID NO: 153221 - DNA, 29 bp, Artificial Sequence
  Synthetic oligonucleotide
ctaaggcacatgatcactcctgggaccgg

SEQ ID NO: 153222 - DNA, 30 bp, Artificial Sequence
  Synthetic oligonucleotide
aactcaaggaagtttgtttcacactaccgg

SEQ ID NO: 153223 - DNA, 30 bp, Artificial Sequence
  Synthetic oligonucleotide
ccctaaccgggaaagtaacacaagacccgg

SEQ ID NO: 153224 - DNA, 30 bp, Artificial Sequence
  Synthetic oligonucleotide
ggagtatttaccaaccatggggagacccgg

SEQ ID NO: 153225 - DNA, 30 bp, Artificial Sequence
  Synthetic oligonucleotide
ccttgccaggcggacgacttcacgacccgg

SEQ ID NO: 153226 - DNA, 30 bp, Artificial Sequence
  Synthetic oligonucleotide
ggaaagcctttaatggtgtcgaacgcccgg

SEQ ID NO: 153227 - DNA, 30 bp, Artificial Sequence
  Synthetic oligonucleotide
ctagattagctaagctataatgtatcccgg

SEQ ID NO: 153228 - DNA, 30 bp, Artificial Sequence
  Synthetic oligonucleotide
tgggaatgcaacgtagtaaaacagtcccgg

SEQ ID NO: 153229 - DNA, 30 bp, Artificial Sequence
  Synthetic oligonucleotide
cgagtcaattgtttcgggacgccttcccgg

SEQ ID NO: 153230 - DNA, 30 bp, Artificial Sequence
  Synthetic oligonucleotide
agctatttatgacacctactatccagccgg

SEQ ID NO: 153231 - DNA, 30 bp, Artificial Sequence
  Synthetic oligonucleotide
tcttgttaagctccacagatggagagccgg

SEQ ID NO: 153232 - DNA, 30 bp, Artificial Sequence
  Synthetic oligonucleotide
atatacgaaaaaagtttcgcgttgagccgg

SEQ ID NO: 153233 - DNA, 30 bp, Artificial Sequence
  Synthetic oligonucleotide
agggcctttagtcatgaggccgtccgccgg

SEQ ID NO: 153234 - DNA, 30 bp, Artificial Sequence
  Synthetic oligonucleotide
cgccgatgggtcgctctggagattcgccgg

SEQ ID NO: 153235 - DNA, 30 bp, Artificial Sequence
  Synthetic oligonucleotide
ccgcccggctgcagagaatgaagtggccgg

SEQ ID NO: 153236 - DNA, 30 bp, Artificial Sequence
  Synthetic oligonucleotide
atcgttggaagacttgatgaccaatgccgg

SEQ ID NO: 153237 - DNA, 31 bp, Artificial Sequence
  Synthetic oligonucleotide
cactaatacggtaatataggtcttatgccgg

SEQ ID NO: 153238 - DNA, 30 bp, Artificial Sequence
  Synthetic oligonucleotide
caaggacgtatagtctacgtggtgtgccgg

SEQ ID NO: 153239 - DNA, 30 bp, Artificial Sequence
  Synthetic oligonucleotide
tatcgactcggtaggcagataacttgccgg

SEQ ID NO: 153240 - DNA, 30 bp, Artificial Sequence
  Synthetic oligonucleotide
tcactactagttgagggatagtcttgccgg

SEQ ID NO: 153241 - DNA, 30 bp, Artificial Sequence
  Synthetic oligonucleotide
ggtagcttgcgaggagaaccgttcatccgg

SEQ ID NO: 153242 - DNA, 30 bp, Artificial Sequence
  Synthetic oligonucleotide
ccaatagcgtggcttgttcgcgatatccgg

SEQ ID NO: 153243 - DNA, 30 bp, Artificial Sequence
  Synthetic oligonucleotide
ctatccaagaatcctattttctaactccgg

SEQ ID NO: 153244 - DNA, 30 bp, Artificial Sequence
  Synthetic oligonucleotide
cacgcatatgcatacagacgcgtcctccgg

SEQ ID NO: 153245 - DNA, 30 bp, Artificial Sequence
  Synthetic oligonucleotide
ttgcgacgagccaagtcgtcgaacgtccgg

SEQ ID NO: 153246 - DNA, 30 bp, Artificial Sequence
  Synthetic oligonucleotide
ggcatgatgcgcgaatagcgaaaggtccgg

SEQ ID NO: 153247 - DNA, 30 bp, Artificial Sequence
  Synthetic oligonucleotide
gcaaagtaggccaagaagggcctaaagcgg

SEQ ID NO: 153248 - DNA, 30 bp, Artificial Sequence
  Synthetic oligonucleotide
cacggattggatggcacgtgattaaagcgg

SEQ ID NO: 153249 - DNA, 30 bp, Artificial Sequence
  Synthetic oligonucleotide
gcgaactcgagttggtttcacaggaagcgg

SEQ ID NO: 153250 - DNA, 30 bp, Artificial Sequence
  Synthetic oligonucleotide
taccttggtcgggatggttcttgtaagcgg

SEQ ID NO: 153251 - DNA, 30 bp, Artificial Sequence
  Synthetic oligonucleotide
tccagatgtggaccgtaagctaaacagcgg

SEQ ID NO: 153252 - DNA, 30 bp, Artificial Sequence
  Synthetic oligonucleotide
gtgcattagatgacttattgttaacagcgg

SEQ ID NO: 153253 - DNA, 30 bp, Artificial Sequence
  Synthetic oligonucleotide
agtagaggtcaagagacggcctagcagcgg

SEQ ID NO: 153254 - DNA, 30 bp, Artificial Sequence
  Synthetic oligonucleotide
agcccctataacaaccgtgcgcgtcagcgg

SEQ ID NO: 153255 - DNA, 30 bp, Artificial Sequence
  Synthetic oligonucleotide
gagcgagagtgttcatgacagccagagcgg

SEQ ID NO: 153256 - DNA, 30 bp, Artificial Sequence
  Synthetic oligonucleotide
acgggaatccgctgatcattctagacgcgg

SEQ ID NO: 153257 - DNA, 30 bp, Artificial Sequence
  Synthetic oligonucleotide
agatagaaatcaaggttggaaacgacgcgg

SEQ ID NO: 153258 - DNA, 30 bp, Artificial Sequence
  Synthetic oligonucleotide
atgatccggtagatacagttgaatacgcgg

SEQ ID NO: 153259 - DNA, 30 bp, Artificial Sequence
  Synthetic oligonucleotide
tatgcaagtgtacattgccaccttacgcgg

SEQ ID NO: 153260 - DNA, 30 bp, Artificial Sequence
  Synthetic oligonucleotide
acgtctaccaactgataaacgcttacgcgg

SEQ ID NO: 153261 - DNA, 30 bp, Artificial Sequence
  Synthetic oligonucleotide
caaggtcggcggctgggcttggacccgcgg

SEQ ID NO: 153262 - DNA, 30 bp, Artificial Sequence
  Synthetic oligonucleotide
accctgacgttcattagggcagctccgcgg

SEQ ID NO: 153263 - DNA, 30 bp, Artificial Sequence
  Synthetic oligonucleotide
gccgcaggtgaagattagccaatggcgcgg

SEQ ID NO: 153264 - DNA, 30 bp, Artificial Sequence
  Synthetic oligonucleotide
agttcaaatgcatcgggttgggaatcgcgg

SEQ ID NO: 153265 - DNA, 30 bp, Artificial Sequence
  Synthetic oligonucleotide
atctagtgattaaaatcgccgctaaggcgg

SEQ ID NO: 153266 - DNA, 30 bp, Artificial Sequence
  Synthetic oligonucleotide
acgcatgataactaccaagtagccaggcgg

SEQ ID NO: 153267 - DNA, 30 bp, Artificial Sequence
  Synthetic oligonucleotide
atgtcatttacggtcactgtcgcgaggcgg

SEQ ID NO: 153268 - DNA, 30 bp, Artificial Sequence
  Synthetic oligonucleotide
cctgattagtaggtctgggtaggtaggcgg

SEQ ID NO: 153269 - DNA, 30 bp, Artificial Sequence
  Synthetic oligonucleotide
acggtacttatatatatttacatacggcgg

SEQ ID NO: 153270 - DNA, 30 bp, Artificial Sequence
  Synthetic oligonucleotide
ttgagagggcaagatcaattagttcggcgg

SEQ ID NO: 153271 - DNA, 30 bp, Artificial Sequence
  Synthetic oligonucleotide
ccggagttgaagataggtctggtagggcgg

SEQ ID NO: 153272 - DNA, 30 bp, Artificial Sequence
  Synthetic oligonucleotide
tgtggcatatgaagttccgtgaaggggcgg

SEQ ID NO: 153273 - DNA, 30 bp, Artificial Sequence
  Synthetic oligonucleotide
catactttccatcaggatcctgaggggcgg

SEQ ID NO: 153274 - DNA, 30 bp, Artificial Sequence
  Synthetic oligonucleotide
ataccaagttgattttacataagggggcgg

SEQ ID NO: 153275 - DNA, 30 bp, Artificial Sequence
  Synthetic oligonucleotide
gggtgaagggaagctagggaatgggggcgg

SEQ ID NO: 153276 - DNA, 30 bp, Artificial Sequence
  Synthetic oligonucleotide
aggatgacaatcggacaggacaaatggcgg

SEQ ID NO: 153277 - DNA, 30 bp, Artificial Sequence
  Synthetic oligonucleotide
gtcaactaccgtagggatgtgccatggcgg

SEQ ID NO: 153278 - DNA, 30 bp, Artificial Sequence
  Synthetic oligonucleotide
cggggtatgttgggcgctgtgtgatggcgg

SEQ ID NO: 153279 - DNA, 30 bp, Artificial Sequence
  Synthetic oligonucleotide
tatgtaggatagtttaaatttttctggcgg

SEQ ID NO: 153280 - DNA, 30 bp, Artificial Sequence
  Synthetic oligonucleotide
gtctccacagtgctcggtgaatcttggcgg

SEQ ID NO: 153281 - DNA, 30 bp, Artificial Sequence
  Synthetic oligonucleotide
tgagtcggtaataacgactctggttggcgg

SEQ ID NO: 153282 - DNA, 30 bp, Artificial Sequence
  Synthetic oligonucleotide
taatcgcaggctgggaaaacggtttggcgg

SEQ ID NO: 153283 - DNA, 30 bp, Artificial Sequence
  Synthetic oligonucleotide
cgaaatctccctgaggattccttttggcgg

SEQ ID NO: 153284 - DNA, 30 bp, Artificial Sequence
  Synthetic oligonucleotide
cgtggtgagaaccaggtccgactaatgcgg

SEQ ID NO: 153285 - DNA, 30 bp, Artificial Sequence
  Synthetic oligonucleotide
cgtaggtcttgtgggagtctggcgatgcgg

SEQ ID NO: 153286 - DNA, 30 bp, Artificial Sequence
  Synthetic oligonucleotide
tcgaacgttggctagttcggactcctgcgg

SEQ ID NO: 153287 - DNA, 30 bp, Artificial Sequence
  Synthetic oligonucleotide
aacggtccgattgaatagcctccgctgcgg

SEQ ID NO: 153288 - DNA, 30 bp, Artificial Sequence
  Synthetic oligonucleotide
aactagtcgagttgggactacggtctgcgg

SEQ ID NO: 153289 - DNA, 30 bp, Artificial Sequence
  Synthetic oligonucleotide
tggcattcgacggcgtaaaaattagtgcgg

SEQ ID NO: 153290 - DNA, 30 bp, Artificial Sequence
  Synthetic oligonucleotide
ttgactggtggtaacgcagggtacgtgcgg

SEQ ID NO: 153291 - DNA, 30 bp, Artificial Sequence
  Synthetic oligonucleotide
ggcagagggtgactgaatcgggaggtgcgg

SEQ ID NO: 153292 - DNA, 30 bp, Artificial Sequence
  Synthetic oligonucleotide
tcgtggtgagccgtgctggttaaattgcgg

SEQ ID NO: 153293 - DNA, 30 bp, Artificial Sequence
  Synthetic oligonucleotide
agcagggatgcagaagtgatatgtttgcgg

SEQ ID NO: 153294 - DNA, 30 bp, Artificial Sequence
  Synthetic oligonucleotide
ggtaaatcgcgtggcgatggttcaaatcgg

SEQ ID NO: 153295 - DNA, 30 bp, Artificial Sequence
  Synthetic oligonucleotide
gaagtccgtcccacatctggcaacaatcgg

SEQ ID NO: 153296 - DNA, 30 bp, Artificial Sequence
  Synthetic oligonucleotide
gcgtaagcctcggcgctcgagagcaatcgg

SEQ ID NO: 153297 - DNA, 30 bp, Artificial Sequence
  Synthetic oligonucleotide
aaagtaacgtgtggcctcacgatcaatcgg

SEQ ID NO: 153298 - DNA, 30 bp, Artificial Sequence
  Synthetic oligonucleotide
agaaggataaaaaagttatacctcaatcgg

SEQ ID NO: 153299 - DNA, 30 bp, Artificial Sequence
  Synthetic oligonucleotide
cagtagttaagccacaacggtctcaatcgg

SEQ ID NO: 153300 - DNA, 30 bp, Artificial Sequence
  Synthetic oligonucleotide
acctacccttacaataaaattgcgaatcgg

SEQ ID NO: 153301 - DNA, 30 bp, Artificial Sequence
  Synthetic oligonucleotide
ggcatctctcgctgaaacacttggaatcgg

SEQ ID NO: 153302 - DNA, 30 bp, Artificial Sequence
  Synthetic oligonucleotide
ggggaaccaggcgttacctgctaacatcgg

SEQ ID NO: 153303 - DNA, 30 bp, Artificial Sequence
  Synthetic oligonucleotide
cagtggtgactctcagccatgtaacatcgg

SEQ ID NO: 153304 - DNA, 30 bp, Artificial Sequence
  Synthetic oligonucleotide
tgcgacccgacggtagaggtaccacatcgg

SEQ ID NO: 153305 - DNA, 30 bp, Artificial Sequence
  Synthetic oligonucleotide
acaggcgggacccgctagggaagacatcgg

SEQ ID NO: 153306 - DNA, 30 bp, Artificial Sequence
  Synthetic oligonucleotide
gaagaacgctacacgtaatggcgacatcgg

SEQ ID NO: 153307 - DNA, 30 bp, Artificial Sequence
  Synthetic oligonucleotide
cgttaatacccgcagagtgcactgcatcgg

SEQ ID NO: 153308 - DNA, 30 bp, Artificial Sequence
  Synthetic oligonucleotide
gcacgttgttgagaaggacgcccagatcgg

SEQ ID NO: 153309 - DNA, 30 bp, Artificial Sequence
  Synthetic oligonucleotide
gggttataagattttttggcacgagatcgg

SEQ ID NO: 153310 - DNA, 30 bp, Artificial Sequence
  Synthetic oligonucleotide
ggttcagtgtctgtcaatgggatagatcgg

SEQ ID NO: 153311 - DNA, 30 bp, Artificial Sequence
  Synthetic oligonucleotide
gcctccctgtgacctacgcgtctcgatcgg

SEQ ID NO: 153312 - DNA, 30 bp, Artificial Sequence
  Synthetic oligonucleotide
taggcaatacttcttatcgactatgatcgg

SEQ ID NO: 153313 - DNA, 30 bp, Artificial Sequence
  Synthetic oligonucleotide
atgggaattaatactatcctgtcatatcgg

SEQ ID NO: 153314 - DNA, 30 bp, Artificial Sequence
  Synthetic oligonucleotide
ccatctcgccgttcatcgtactcctatcgg

SEQ ID NO: 153315 - DNA, 30 bp, Artificial Sequence
  Synthetic oligonucleotide
tgggtaagctataggagcaggtgaactcgg

SEQ ID NO: 153316 - DNA, 30 bp, Artificial Sequence
  Synthetic oligonucleotide
aggcctcatcgggctggtcagataactcgg

SEQ ID NO: 153317 - DNA, 30 bp, Artificial Sequence
  Synthetic oligonucleotide
ccagtttaagtatcggaggggcaacctcgg

SEQ ID NO: 153318 - DNA, 30 bp, Artificial Sequence
  Synthetic oligonucleotide
cattctgagcgggattaccacgtccctcgg

SEQ ID NO: 153319 - DNA, 30 bp, Artificial Sequence
  Synthetic oligonucleotide
accctacggctacggatatgaacgcctcgg

SEQ ID NO: 153320 - DNA, 30 bp, Artificial Sequence
  Synthetic oligonucleotide
cagtagacctcagattggttgcaagctcgg

SEQ ID NO: 153321 - DNA, 30 bp, Artificial Sequence
  Synthetic oligonucleotide
tacgggtataccgattccgcagtggctcgg

SEQ ID NO: 153322 - DNA, 30 bp, Artificial Sequence
  Synthetic oligonucleotide
gctgcgttaagggaaacctagccatctcgg

SEQ ID NO: 153323 - DNA, 30 bp, Artificial Sequence
  Synthetic oligonucleotide
ataaacaacagaaaaatgagtctatctcgg

SEQ ID NO: 153324 - DNA, 30 bp, Artificial Sequence
  Synthetic oligonucleotide
aaggcactatctgtaaaaatcgcctctcgg

SEQ ID NO: 153325 - DNA, 30 bp, Artificial Sequence
  Synthetic oligonucleotide
tgggaaccatagtttacgcccttctctcgg

SEQ ID NO: 153326 - DNA, 30 bp, Artificial Sequence
  Synthetic oligonucleotide
cacaggatcgggaagtcggcgcaaagtcgg

SEQ ID NO: 153327 - DNA, 30 bp, Artificial Sequence
  Synthetic oligonucleotide
cacccggtaagcagcttagctgaaagtcgg

SEQ ID NO: 153328 - DNA, 30 bp, Artificial Sequence
  Synthetic oligonucleotide
cactcgttaccacgagcaatggcaagtcgg

SEQ ID NO: 153329 - DNA, 30 bp, Artificial Sequence
  Synthetic oligonucleotide
gccaaacggaatccgatctgctgcagtcgg

SEQ ID NO: 153330 - DNA, 30 bp, Artificial Sequence
  Synthetic oligonucleotide
aactttccaccccgattcagcctgagtcgg

SEQ ID NO: 153331 - DNA, 30 bp, Artificial Sequence
  Synthetic oligonucleotide
tttattcagagcgcacgagctggccgtcgg

SEQ ID NO: 153332 - DNA, 30 bp, Artificial Sequence
  Synthetic oligonucleotide
tgagctacgggatagctcggtggccgtcgg

SEQ ID NO: 153333 - DNA, 30 bp, Artificial Sequence
  Synthetic oligonucleotide
gctgtccaagagtcagggtgtcgaggtcgg

SEQ ID NO: 153334 - DNA, 30 bp, Artificial Sequence
  Synthetic oligonucleotide
atggcgtgacgaagatgaaaccccggtcgg

SEQ ID NO: 153335 - DNA, 30 bp, Artificial Sequence
  Synthetic oligonucleotide
caggtgtggtgagtaaaacctttgggtcgg

SEQ ID NO: 153336 - DNA, 30 bp, Artificial Sequence
  Synthetic oligonucleotide
taagatagtggcccttaacggcatggtcgg

SEQ ID NO: 153337 - DNA, 30 bp, Artificial Sequence
  Synthetic oligonucleotide
gtcagtgccaaaaatatgtctgctggtcgg

SEQ ID NO: 153338 - DNA, 30 bp, Artificial Sequence
  Synthetic oligonucleotide
cgtggagactaagtctagacggaatgtcgg

SEQ ID NO: 153339 - DNA, 30 bp, Artificial Sequence
  Synthetic oligonucleotide
tagggattggttttatgtatctcatgtcgg

SEQ ID NO: 153340 - DNA, 30 bp, Artificial Sequence
  Synthetic oligonucleotide
taaattattgtcgtactaaggctatgtcgg

SEQ ID NO: 153341 - DNA, 30 bp, Artificial Sequence
  Synthetic oligonucleotide
taggagaattacagtttacggttatgtcgg

SEQ ID NO: 153342 - DNA, 30 bp, Artificial Sequence
  Synthetic oligonucleotide
agaaccactattttagcgctgctctgtcgg

SEQ ID NO: 153343 - DNA, 30 bp, Artificial Sequence
  Synthetic oligonucleotide
gtattgtagagaggttagtacttgtgtcgg

SEQ ID NO: 153344 - DNA, 30 bp, Artificial Sequence
  Synthetic oligonucleotide
gatcaggggtttactattaggctttgtcgg

SEQ ID NO: 153345 - DNA, 30 bp, Artificial Sequence
  Synthetic oligonucleotide
gtccgctcaaccttagcccggaagattcgg

SEQ ID NO: 153346 - DNA, 30 bp, Artificial Sequence
  Synthetic oligonucleotide
gtagacgatttaagcctctggaagattcgg

SEQ ID NO: 153347 - DNA, 30 bp, Artificial Sequence
  Synthetic oligonucleotide
cagtgcggtttgcaccaactcgggattcgg

SEQ ID NO: 153348 - DNA, 30 bp, Artificial Sequence
  Synthetic oligonucleotide
ctgctgcgatttagcataatgcatattcgg

SEQ ID NO: 153349 - DNA, 30 bp, Artificial Sequence
  Synthetic oligonucleotide
cctaccatccccaacggtaagtctattcgg

SEQ ID NO: 153350 - DNA, 30 bp, Artificial Sequence
  Synthetic oligonucleotide
tctgaaggtgtcggatacgttaatcttcgg

SEQ ID NO: 153351 - DNA, 30 bp, Artificial Sequence
  Synthetic oligonucleotide
cgaagcgacgttgtatggtgacctcttcgg

SEQ ID NO: 153352 - DNA, 30 bp, Artificial Sequence
  Synthetic oligonucleotide
cacgtgctaactgagaacactaacgttcgg

SEQ ID NO: 153353 - DNA, 30 bp, Artificial Sequence
  Synthetic oligonucleotide
gaaggggggcaaaaaaacgttctggttcgg

SEQ ID NO: 153354 - DNA, 30 bp, Artificial Sequence
  Synthetic oligonucleotide
cggtaacctggaccaatgtctaatgttcgg

SEQ ID NO: 153355 - DNA, 29 bp, Artificial Sequence
  Synthetic oligonucleotide
cagaaattatcgaatcagtctgtgttcgg

SEQ ID NO: 153356 - DNA, 30 bp, Artificial Sequence
  Synthetic oligonucleotide
agatgttgaatcggccaaatttgaaaaggg

SEQ ID NO: 153357 - DNA, 30 bp, Artificial Sequence
  Synthetic oligonucleotide
agctgggcggagtgtgtcgagataaaaggg

SEQ ID NO: 153358 - DNA, 30 bp, Artificial Sequence
  Synthetic oligonucleotide
cgtagtctatcccgtggacatgagaaaggg

SEQ ID NO: 153359 - DNA, 30 bp, Artificial Sequence
  Synthetic oligonucleotide
aaacaaaggtatgagtcatcccctaaaggg

SEQ ID NO: 153360 - DNA, 30 bp, Artificial Sequence
  Synthetic oligonucleotide
gcaggtccaaggggggcctttggtaaaggg

SEQ ID NO: 153361 - DNA, 30 bp, Artificial Sequence
  Synthetic oligonucleotide
tagccacggataggacgccgctgtaaaggg

SEQ ID NO: 153362 - DNA, 30 bp, Artificial Sequence
  Synthetic oligonucleotide
atagccctcgaatctgctgtcacacaaggg

SEQ ID NO: 153363 - DNA, 30 bp, Artificial Sequence
  Synthetic oligonucleotide
cataattgatagtatgaatatgcacaaggg

SEQ ID NO: 153364 - DNA, 30 bp, Artificial Sequence
  Synthetic oligonucleotide
ctgctttgaccacatttcgccgtgcaaggg

SEQ ID NO: 153365 - DNA, 30 bp, Artificial Sequence
  Synthetic oligonucleotide
cctcctcaaggatgtggtcctaaagaaggg

SEQ ID NO: 153366 - DNA, 30 bp, Artificial Sequence
  Synthetic oligonucleotide
ttcagtgtccagagcatatggtgtgaaggg

SEQ ID NO: 153367 - DNA, 30 bp, Artificial Sequence
  Synthetic oligonucleotide
tggtataaaatcgtcgagcgtgcataaggg

SEQ ID NO: 153368 - DNA, 30 bp, Artificial Sequence
  Synthetic oligonucleotide
ggtttaagtgctattgctcgccggtaaggg

SEQ ID NO: 153369 - DNA, 28 bp, Artificial Sequence
  Synthetic oligonucleotide
acaagcttggtaggcgagggggtaaggg

SEQ ID NO: 153370 - DNA, 30 bp, Artificial Sequence
  Synthetic oligonucleotide
aatactaagccctctcccgatctgtaaggg

SEQ ID NO: 153371 - DNA, 30 bp, Artificial Sequence
  Synthetic oligonucleotide
caatgttggtttatctggctaaaaacaggg

SEQ ID NO: 153372 - DNA, 30 bp, Artificial Sequence
  Synthetic oligonucleotide
taggccgtagatgttaagggggggacaggg

SEQ ID NO: 153373 - DNA, 30 bp, Artificial Sequence
  Synthetic oligonucleotide
cgtgctcggtccggggggcggcatacaggg

SEQ ID NO: 153374 - DNA, 30 bp, Artificial Sequence
  Synthetic oligonucleotide
ataattccgtaagcggcagtccttacaggg

SEQ ID NO: 153375 - DNA, 30 bp, Artificial Sequence
  Synthetic oligonucleotide
cccaaaacgtatggataacccgttacaggg

SEQ ID NO: 153376 - DNA, 30 bp, Artificial Sequence
  Synthetic oligonucleotide
ctaaccgtgacaaggtatatgacaccaggg

SEQ ID NO: 153377 - DNA, 30 bp, Artificial Sequence
  Synthetic oligonucleotide
atgggaaaggtcgaggacggtctaccaggg

SEQ ID NO: 153378 - DNA, 30 bp, Artificial Sequence
  Synthetic oligonucleotide
tacaacctgtcgaggcaaccagtaccaggg

SEQ ID NO: 153379 - DNA, 30 bp, Artificial Sequence
  Synthetic oligonucleotide
gtaacactcggcgggcctagagagccaggg

SEQ ID NO: 153380 - DNA, 30 bp, Artificial Sequence
  Synthetic oligonucleotide
cacgaagactattttttattggaagcaggg

SEQ ID NO: 153381 - DNA, 30 bp, Artificial Sequence
  Synthetic oligonucleotide
gtaatatgcgatgtgagtagagtagcaggg

SEQ ID NO: 153382 - DNA, 31 bp, Artificial Sequence
  Synthetic oligonucleotide
tgtagtggccccatacatcgtacacgcaggg

SEQ ID NO: 153383 - DNA, 30 bp, Artificial Sequence
  Synthetic oligonucleotide
gctaccgctgaaaacacgcaagaggcaggg

SEQ ID NO: 153384 - DNA, 30 bp, Artificial Sequence
  Synthetic oligonucleotide
gtgaaggttgatatcttcaatacggcaggg

SEQ ID NO: 153385 - DNA, 30 bp, Artificial Sequence
  Synthetic oligonucleotide
agacaagtgacatgccggtgcccggcaggg

SEQ ID NO: 153386 - DNA, 30 bp, Artificial Sequence
  Synthetic oligonucleotide
cattgacgtttctgggtcctcggggcaggg

SEQ ID NO: 153387 - DNA, 30 bp, Artificial Sequence
  Synthetic oligonucleotide
gcgccggactgcgagggccgggtggcaggg

SEQ ID NO: 153388 - DNA, 30 bp, Artificial Sequence
  Synthetic oligonucleotide
agtatggactgtcgatttggtgctgcaggg

SEQ ID NO: 153389 - DNA, 30 bp, Artificial Sequence
  Synthetic oligonucleotide
tcggtgaatgggcaccaagtgtcctcaggg

SEQ ID NO: 153390 - DNA, 30 bp, Artificial Sequence
  Synthetic oligonucleotide
gactaattgcgtgtagttgatttttcaggg

SEQ ID NO: 153391 - DNA, 30 bp, Artificial Sequence
  Synthetic oligonucleotide
tgcatctccaacacgagccctgacagaggg

SEQ ID NO: 153392 - DNA, 30 bp, Artificial Sequence
  Synthetic oligonucleotide
gtacttggtcaacatgtagaattcagaggg

SEQ ID NO: 153393 - DNA, 30 bp, Artificial Sequence
  Synthetic oligonucleotide
aaagctgctagtgccttgtctaatagaggg

SEQ ID NO: 153394 - DNA, 30 bp, Artificial Sequence
  Synthetic oligonucleotide
cggattcccttgacaaccaatagacgaggg

SEQ ID NO: 153395 - DNA, 30 bp, Artificial Sequence
  Synthetic oligonucleotide
ctaacgcatccaagtacatgtttgcgaggg

SEQ ID NO: 153396 - DNA, 30 bp, Artificial Sequence
  Synthetic oligonucleotide
ttagataatcttcccgtaagggatcgaggg

SEQ ID NO: 153397 - DNA, 30 bp, Artificial Sequence
  Synthetic oligonucleotide
aaggcacgtttacctacggagtgtcgaggg

SEQ ID NO: 153398 - DNA, 30 bp, Artificial Sequence
  Synthetic oligonucleotide
gttactactttaagctcaacgtgaggaggg

SEQ ID NO: 153399 - DNA, 30 bp, Artificial Sequence
  Synthetic oligonucleotide
atcttcaaaggatatagcccgacgggaggg

SEQ ID NO: 153400 - DNA, 30 bp, Artificial Sequence
  Synthetic oligonucleotide
atctattggtggcacagttaggtatgaggg

SEQ ID NO: 153401 - DNA, 30 bp, Artificial Sequence
  Synthetic oligonucleotide
gggggatgcctggactaatgattatgaggg

SEQ ID NO: 153402 - DNA, 30 bp, Artificial Sequence
  Synthetic oligonucleotide
ctagtaccattcagtccaacaccctgaggg

SEQ ID NO: 153403 - DNA, 30 bp, Artificial Sequence
  Synthetic oligonucleotide
aagagtatgttaaattggtcagcttgaggg

SEQ ID NO: 153404 - DNA, 30 bp, Artificial Sequence
  Synthetic oligonucleotide
gtctgacagcatggtcagtgatcttgaggg

SEQ ID NO: 153405 - DNA, 30 bp, Artificial Sequence
  Synthetic oligonucleotide
gtctgttaactcagtaggctgggttgaggg

SEQ ID NO: 153406 - DNA, 30 bp, Artificial Sequence
  Synthetic oligonucleotide
gacataggagacggggacagggtttgaggg

SEQ ID NO: 153407 - DNA, 30 bp, Artificial Sequence
  Synthetic oligonucleotide
gacgggtattgagcgacgcccaaaataggg

SEQ ID NO: 153408 - DNA, 30 bp, Artificial Sequence
  Synthetic oligonucleotide
cacttagctcgataggtggtgcgaataggg

SEQ ID NO: 153409 - DNA, 30 bp, Artificial Sequence
  Synthetic oligonucleotide
attgcggcccaccaaagagcgtagataggg

SEQ ID NO: 153410 - DNA, 30 bp, Artificial Sequence
  Synthetic oligonucleotide
gtcggcagtgctagccttggggatataggg

SEQ ID NO: 153411 - DNA, 30 bp, Artificial Sequence
  Synthetic oligonucleotide
gcggggtgaactacccaaaacggtataggg

SEQ ID NO: 153412 - DNA, 30 bp, Artificial Sequence
  Synthetic oligonucleotide
tagatgcatgtcgacgatacgtgtataggg

SEQ ID NO: 153413 - DNA, 30 bp, Artificial Sequence
  Synthetic oligonucleotide
atgtaagggtgatatggggtctttataggg

SEQ ID NO: 153414 - DNA, 30 bp, Artificial Sequence
  Synthetic oligonucleotide
cgaatcgacggcattgtttcgctcctaggg

SEQ ID NO: 153415 - DNA, 30 bp, Artificial Sequence
  Synthetic oligonucleotide
acttaattgtaattcaagggttggctaggg

SEQ ID NO: 153416 - DNA, 30 bp, Artificial Sequence
  Synthetic oligonucleotide
cgcctatgtgactctcacctcctgctaggg

SEQ ID NO: 153417 - DNA, 30 bp, Artificial Sequence
  Synthetic oligonucleotide
gttggtactcgtttctgaggttatctaggg

SEQ ID NO: 153418 - DNA, 30 bp, Artificial Sequence
  Synthetic oligonucleotide
cggccgtgcaaattccaattcccagtaggg

SEQ ID NO: 153419 - DNA, 30 bp, Artificial Sequence
  Synthetic oligonucleotide
aacaaccacgttcgtggcttaaacgtaggg

SEQ ID NO: 153420 - DNA, 30 bp, Artificial Sequence
  Synthetic oligonucleotide
taacacatagggaacgggtttcaattaggg

SEQ ID NO: 153421 - DNA, 30 bp, Artificial Sequence
  Synthetic oligonucleotide
acaggtgccagatcgaacgcttaaaacggg

SEQ ID NO: 153422 - DNA, 27 bp, Artificial Sequence
  Synthetic oligonucleotide
agggatgagagggtctattacaacggg

SEQ ID NO: 153423 - DNA, 30 bp, Artificial Sequence
  Synthetic oligonucleotide
agaagttattggattgaatgcaagaacggg

SEQ ID NO: 153424 - DNA, 30 bp, Artificial Sequence
  Synthetic oligonucleotide
ccctcgtaatgaatctcatctgggaacggg

SEQ ID NO: 153425 - DNA, 30 bp, Artificial Sequence
  Synthetic oligonucleotide
attctagcgttaaaagctggagctaacggg

SEQ ID NO: 153426 - DNA, 30 bp, Artificial Sequence
  Synthetic oligonucleotide
cgccctacaatcatcaaaggatgtaacggg

SEQ ID NO: 153427 - DNA, 30 bp, Artificial Sequence
  Synthetic oligonucleotide
accgccaatggcctccgcggacttaacggg

SEQ ID NO: 153428 - DNA, 30 bp, Artificial Sequence
  Synthetic oligonucleotide
ttgcatcacgtgaaaatagcataacacggg

SEQ ID NO: 153429 - DNA, 30 bp, Artificial Sequence
  Synthetic oligonucleotide
aggtgggataggtcaggccggtgacacggg

SEQ ID NO: 153430 - DNA, 30 bp, Artificial Sequence
  Synthetic oligonucleotide
ccgtgcaaatgcttgagcccgactcacggg

SEQ ID NO: 153431 - DNA, 30 bp, Artificial Sequence
  Synthetic oligonucleotide
gcggttaatagcattgcgaactttcacggg

SEQ ID NO: 153432 - DNA, 30 bp, Artificial Sequence
  Synthetic oligonucleotide
catcattctgtaaacatcattccagacggg

SEQ ID NO: 153433 - DNA, 30 bp, Artificial Sequence
  Synthetic oligonucleotide
ggccagcaatgtgtgatgcgacaggacggg

SEQ ID NO: 153434 - DNA, 30 bp, Artificial Sequence
  Synthetic oligonucleotide
tgcgttgcttacgaaagagtgattgacggg

SEQ ID NO: 153435 - DNA, 30 bp, Artificial Sequence
  Synthetic oligonucleotide
cagaacgtattgttataatgccactacggg

SEQ ID NO: 153436 - DNA, 30 bp, Artificial Sequence
  Synthetic oligonucleotide
cacgagagcgcggtctcacaggcttacggg

SEQ ID NO: 153437 - DNA, 30 bp, Artificial Sequence
  Synthetic oligonucleotide
tattagtcaactggtttggggtcaaccggg

SEQ ID NO: 153438 - DNA, 30 bp, Artificial Sequence
  Synthetic oligonucleotide
tcgtttctgttctcctgcccgcccaccggg

SEQ ID NO: 153439 - DNA, 30 bp, Artificial Sequence
  Synthetic oligonucleotide
gctcggtgcgccaagtcacttcagaccggg

SEQ ID NO: 153440 - DNA, 30 bp, Artificial Sequence
  Synthetic oligonucleotide
gtcctaatctcatagagagcgactaccggg

SEQ ID NO: 153441 - DNA, 30 bp, Artificial Sequence
  Synthetic oligonucleotide
tccgcaggcaagagagcacaagctaccggg

SEQ ID NO: 153442 - DNA, 30 bp, Artificial Sequence
  Synthetic oligonucleotide
aagagaatatacttataaacatttaccggg

SEQ ID NO: 153443 - DNA, 30 bp, Artificial Sequence
  Synthetic oligonucleotide
caaagggcatattctgtttttcaacccggg

SEQ ID NO: 153444 - DNA, 30 bp, Artificial Sequence
  Synthetic oligonucleotide
tacctctttgacagagttcagacggccggg

SEQ ID NO: 153445 - DNA, 30 bp, Artificial Sequence
  Synthetic oligonucleotide
tcagagcgctacaaagagtgctgctccggg

SEQ ID NO: 153446 - DNA, 30 bp, Artificial Sequence
  Synthetic oligonucleotide
gattgcggtgacccaaagtgagggtccggg

SEQ ID NO: 153447 - DNA, 30 bp, Artificial Sequence
  Synthetic oligonucleotide
tcgcaatcatcttcgatggccgaaagcggg

SEQ ID NO: 153448 - DNA, 30 bp, Artificial Sequence
  Synthetic oligonucleotide
tgacgcttcacaaacgagtatttaagcggg

SEQ ID NO: 153449 - DNA, 30 bp, Artificial Sequence
  Synthetic oligonucleotide
tattgttaggataaccataggtgcagcggg

SEQ ID NO: 153450 - DNA, 30 bp, Artificial Sequence
  Synthetic oligonucleotide
aataggtccgggccactatattagagcggg

SEQ ID NO: 153451 - DNA, 30 bp, Artificial Sequence
  Synthetic oligonucleotide
agatcatgtgccgaacttcgatctagcggg

SEQ ID NO: 153452 - DNA, 30 bp, Artificial Sequence
  Synthetic oligonucleotide
cagtaagcaatgtgcagcgctcttagcggg

SEQ ID NO: 153453 - DNA, 30 bp, Artificial Sequence
  Synthetic oligonucleotide
atagaatctagactacacgtgtgccgcggg

SEQ ID NO: 153454 - DNA, 30 bp, Artificial Sequence
  Synthetic oligonucleotide
gatcaaaacatacgaaagtttcacggcggg

SEQ ID NO: 153455 - DNA, 30 bp, Artificial Sequence
  Synthetic oligonucleotide
agatctccgaaccccggaaaattgggcggg

SEQ ID NO: 153456 - DNA, 30 bp, Artificial Sequence
  Synthetic oligonucleotide
tcccaggaaacttaacgaacgattggcggg

SEQ ID NO: 153457 - DNA, 30 bp, Artificial Sequence
  Synthetic oligonucleotide
aggtgcagaagcggctacgtctcctgcggg

SEQ ID NO: 153458 - DNA, 30 bp, Artificial Sequence
  Synthetic oligonucleotide
ggatacagcaattggctaatgcagtgcggg

SEQ ID NO: 153459 - DNA, 30 bp, Artificial Sequence
  Synthetic oligonucleotide
ataggtaacgaaggttacttgaggtgcggg

SEQ ID NO: 153460 - DNA, 30 bp, Artificial Sequence
  Synthetic oligonucleotide
tccctaagggatgtactgtactccatcggg

SEQ ID NO: 153461 - DNA, 30 bp, Artificial Sequence
  Synthetic oligonucleotide
tttgaaccagtacaagatcgagagatcggg

SEQ ID NO: 153462 - DNA, 30 bp, Artificial Sequence
  Synthetic oligonucleotide
cgcatattattctcagaagtagtgatcggg

SEQ ID NO: 153463 - DNA, 30 bp, Artificial Sequence
  Synthetic oligonucleotide
caagaggtacggtgcgatcatatcctcggg

SEQ ID NO: 153464 - DNA, 30 bp, Artificial Sequence
  Synthetic oligonucleotide
ctaattagcatgcgttagatggaagtcggg

SEQ ID NO: 153465 - DNA, 30 bp, Artificial Sequence
  Synthetic oligonucleotide
gaagtgtttaacattgaagacgccgtcggg

SEQ ID NO: 153466 - DNA, 30 bp, Artificial Sequence
  Synthetic oligonucleotide
taccgtagcgtattttcaacctaggtcggg

SEQ ID NO: 153467 - DNA, 30 bp, Artificial Sequence
  Synthetic oligonucleotide
gatcggtttagttactatcactgtgtcggg

SEQ ID NO: 153468 - DNA, 30 bp, Artificial Sequence
  Synthetic oligonucleotide
acgctgtaggttgcgcaaaagtttgtcggg

SEQ ID NO: 153469 - DNA, 30 bp, Artificial Sequence
  Synthetic oligonucleotide
gtagaaaggagcgaacagtctcagttcggg

SEQ ID NO: 153470 - DNA, 30 bp, Artificial Sequence
  Synthetic oligonucleotide
cctggctagacagtatctctttcaaagggg

SEQ ID NO: 153471 - DNA, 30 bp, Artificial Sequence
  Synthetic oligonucleotide
gtcgaccgggtttactgtaactcgaagggg

SEQ ID NO: 153472 - DNA, 30 bp, Artificial Sequence
  Synthetic oligonucleotide
ccttgcttaagcaccagaggcgggaagggg

SEQ ID NO: 153473 - DNA, 30 bp, Artificial Sequence
  Synthetic oligonucleotide
tgcgaaagattaacaccagaagttaagggg

SEQ ID NO: 153474 - DNA, 30 bp, Artificial Sequence
  Synthetic oligonucleotide
tagtcgcggggacgctggtggaaacagggg

SEQ ID NO: 153475 - DNA, 30 bp, Artificial Sequence
  Synthetic oligonucleotide
gtccgtgttgcttcagttcgaaagcagggg

SEQ ID NO: 153476 - DNA, 30 bp, Artificial Sequence
  Synthetic oligonucleotide
gtttacgagacggtctattgtactcagggg

SEQ ID NO: 153477 - DNA, 30 bp, Artificial Sequence
  Synthetic oligonucleotide
ggagtcagataatgacgaagattagagggg

SEQ ID NO: 153478 - DNA, 30 bp, Artificial Sequence
  Synthetic oligonucleotide
gtaagtggttcgtagctgataacttagggg

SEQ ID NO: 153479 - DNA, 30 bp, Artificial Sequence
  Synthetic oligonucleotide
cctggcctagcactatagagccgaacgggg

SEQ ID NO: 153480 - DNA, 30 bp, Artificial Sequence
  Synthetic oligonucleotide
tccgttgttcaagcggaaccaaacacgggg

SEQ ID NO: 153481 - DNA, 30 bp, Artificial Sequence
  Synthetic oligonucleotide
tttctagagactcggcggggaaatacgggg

SEQ ID NO: 153482 - DNA, 30 bp, Artificial Sequence
  Synthetic oligonucleotide
aagtcgcattgtatcagatgtgctacgggg

SEQ ID NO: 153483 - DNA, 30 bp, Artificial Sequence
  Synthetic oligonucleotide
gtgagaaatgatagctcccgcggaccgggg

SEQ ID NO: 153484 - DNA, 30 bp, Artificial Sequence
  Synthetic oligonucleotide
gctagtacatattccactccaactccgggg

SEQ ID NO: 153485 - DNA, 30 bp, Artificial Sequence
  Synthetic oligonucleotide
acataccacctatcccagtgccctccgggg

SEQ ID NO: 153486 - DNA, 30 bp, Artificial Sequence
  Synthetic oligonucleotide
attaaggactgaagtctgtggtttccgggg

SEQ ID NO: 153487 - DNA, 30 bp, Artificial Sequence
  Synthetic oligonucleotide
cctgcggaatagcgggcatagccagcgggg

SEQ ID NO: 153488 - DNA, 30 bp, Artificial Sequence
  Synthetic oligonucleotide
ggtagaagcgagatgcgcgcatcatcgggg

SEQ ID NO: 153489 - DNA, 30 bp, Artificial Sequence
  Synthetic oligonucleotide
aagcttaaatcgaggcaaccacagtcgggg

SEQ ID NO: 153490 - DNA, 30 bp, Artificial Sequence
  Synthetic oligonucleotide
gaacgatttgtataagttgatataaggggg

SEQ ID NO: 153491 - DNA, 30 bp, Artificial Sequence
  Synthetic oligonucleotide
gattcacgaaagcacacaaattagaggggg

SEQ ID NO: 153492 - DNA, 30 bp, Artificial Sequence
  Synthetic oligonucleotide
ctcatagttaggagggcgaaaaggaggggg

SEQ ID NO: 153493 - DNA, 30 bp, Artificial Sequence
  Synthetic oligonucleotide
tctctcgagttgcgtatatcggataggggg

SEQ ID NO: 153494 - DNA, 30 bp, Artificial Sequence
  Synthetic oligonucleotide
gcacggagtttagcgggtcagtcgcggggg

SEQ ID NO: 153495 - DNA, 30 bp, Artificial Sequence
  Synthetic oligonucleotide
aagtaatgcggtaggaagagcaatcggggg

SEQ ID NO: 153496 - DNA, 30 bp, Artificial Sequence
  Synthetic oligonucleotide
gctttagtcggcgatgtatgtggagggggg

SEQ ID NO: 153497 - DNA, 30 bp, Artificial Sequence
  Synthetic oligonucleotide
acatatgttcatgtgtttgaattcgggggg

SEQ ID NO: 153498 - DNA, 30 bp, Artificial Sequence
  Synthetic oligonucleotide
ccgtgtgctctgtactgcggtattgggggg

SEQ ID NO: 153499 - DNA, 30 bp, Artificial Sequence
  Synthetic oligonucleotide
ggatgggaggaccggaatctgggatggggg

SEQ ID NO: 153500 - DNA, 30 bp, Artificial Sequence
  Synthetic oligonucleotide
agcaaaaggatgatgtacgtcgtgtggggg

SEQ ID NO: 153501 - DNA, 30 bp, Artificial Sequence
  Synthetic oligonucleotide
acggtatgcactaataacatgttgtggggg

SEQ ID NO: 153502 - DNA, 30 bp, Artificial Sequence
  Synthetic oligonucleotide
ctattaggagggacaggcaattattggggg

SEQ ID NO: 153503 - DNA, 30 bp, Artificial Sequence
  Synthetic oligonucleotide
ctgcaggaggtgattggggggtccatgggg

SEQ ID NO: 153504 - DNA, 30 bp, Artificial Sequence
  Synthetic oligonucleotide
taaagcgaatcgttccagatttgcatgggg

SEQ ID NO: 153505 - DNA, 30 bp, Artificial Sequence
  Synthetic oligonucleotide
ttcttaacaacgacgtatcgaatcatgggg

SEQ ID NO: 153506 - DNA, 30 bp, Artificial Sequence
  Synthetic oligonucleotide
atgccttgcatggtgaacgcgccgatgggg

SEQ ID NO: 153507 - DNA, 30 bp, Artificial Sequence
  Synthetic oligonucleotide
tcccgatggccggcaatatagtcactgggg

SEQ ID NO: 153508 - DNA, 30 bp, Artificial Sequence
  Synthetic oligonucleotide
caggatgggatcccaagaccatgtctgggg

SEQ ID NO: 153509 - DNA, 30 bp, Artificial Sequence
  Synthetic oligonucleotide
agagtggtggatagaagagctattctgggg

SEQ ID NO: 153510 - DNA, 30 bp, Artificial Sequence
  Synthetic oligonucleotide
actgtcaacatccccacagatagggtgggg

SEQ ID NO: 153511 - DNA, 30 bp, Artificial Sequence
  Synthetic oligonucleotide
ttagaccatatacacggtttgtgggtgggg

SEQ ID NO: 153512 - DNA, 30 bp, Artificial Sequence
  Synthetic oligonucleotide
agccggcaccttgtgtcggtctctgtgggg

SEQ ID NO: 153513 - DNA, 30 bp, Artificial Sequence
  Synthetic oligonucleotide
cttcccacaaaagtgtcaggcaaattgggg

SEQ ID NO: 153514 - DNA, 30 bp, Artificial Sequence
  Synthetic oligonucleotide
cggtatacgttcgggtgggagccattgggg

SEQ ID NO: 153515 - DNA, 30 bp, Artificial Sequence
  Synthetic oligonucleotide
tataggaccacagttggtatacagttgggg

SEQ ID NO: 153516 - DNA, 30 bp, Artificial Sequence
  Synthetic oligonucleotide
tgctagtctagctatgaggaaaatttgggg

SEQ ID NO: 153517 - DNA, 30 bp, Artificial Sequence
  Synthetic oligonucleotide
gactaattagtcattcaccgataaaatggg

SEQ ID NO: 153518 - DNA, 30 bp, Artificial Sequence
  Synthetic oligonucleotide
taccttagaggaaaacttgttccaaatggg

SEQ ID NO: 153519 - DNA, 30 bp, Artificial Sequence
  Synthetic oligonucleotide
aagtagcacgtgaatggtcttaggaatggg

SEQ ID NO: 153520 - DNA, 30 bp, Artificial Sequence
  Synthetic oligonucleotide
aagcagctgaagacgatatgggataatggg

SEQ ID NO: 153521 - DNA, 30 bp, Artificial Sequence
  Synthetic oligonucleotide
gctacagtactgaagttttgtcgccatggg

SEQ ID NO: 153522 - DNA, 30 bp, Artificial Sequence
  Synthetic oligonucleotide
gaaactttcatcgctctcataattcatggg

SEQ ID NO: 153523 - DNA, 30 bp, Artificial Sequence
  Synthetic oligonucleotide
cggtaattcttttacagcctcattcatggg

SEQ ID NO: 153524 - DNA, 30 bp, Artificial Sequence
  Synthetic oligonucleotide
tcccggtcgatggggacgcattgggatggg

SEQ ID NO: 153525 - DNA, 30 bp, Artificial Sequence
  Synthetic oligonucleotide
agcgagatcatcagaacattcttatatggg

SEQ ID NO: 153526 - DNA, 30 bp, Artificial Sequence
  Synthetic oligonucleotide
tggagccgatcagcggggattccgtatggg

SEQ ID NO: 153527 - DNA, 30 bp, Artificial Sequence
  Synthetic oligonucleotide
tggggactggtcacatgttgcgcgtatggg

SEQ ID NO: 153528 - DNA, 30 bp, Artificial Sequence
  Synthetic oligonucleotide
agtggtaatgcaggcggcaaacgttatggg

SEQ ID NO: 153529 - DNA, 30 bp, Artificial Sequence
  Synthetic oligonucleotide
ctaaggtgtcttcagttcctccggactggg

SEQ ID NO: 153530 - DNA, 30 bp, Artificial Sequence
  Synthetic oligonucleotide
ttacttaagtgtctacagtactgacctggg

SEQ ID NO: 153531 - DNA, 30 bp, Artificial Sequence
  Synthetic oligonucleotide
cactgaaggagtagacgcgcatgtcctggg

SEQ ID NO: 153532 - DNA, 30 bp, Artificial Sequence
  Synthetic oligonucleotide
aggtgcattgcactgtcggccgacgctggg

SEQ ID NO: 153533 - DNA, 30 bp, Artificial Sequence
  Synthetic oligonucleotide
caaccatggactgctagccgggccgctggg

SEQ ID NO: 153534 - DNA, 30 bp, Artificial Sequence
  Synthetic oligonucleotide
tataactaggttagaaggttacgcgctggg

SEQ ID NO: 153535 - DNA, 30 bp, Artificial Sequence
  Synthetic oligonucleotide
tccaacggcgcaaggattcatagggctggg

SEQ ID NO: 153536 - DNA, 30 bp, Artificial Sequence
  Synthetic oligonucleotide
aaaggactgcctaggatatccacctctggg

SEQ ID NO: 153537 - DNA, 30 bp, Artificial Sequence
  Synthetic oligonucleotide
agctccgactaacctagttgcggttctggg

SEQ ID NO: 153538 - DNA, 30 bp, Artificial Sequence
  Synthetic oligonucleotide
aatgaataggaaatttaaataaaaagtggg

SEQ ID NO: 153539 - DNA, 30 bp, Artificial Sequence
  Synthetic oligonucleotide
cgtgcagtctcgagatcggaagaaagtggg

SEQ ID NO: 153540 - DNA, 30 bp, Artificial Sequence
  Synthetic oligonucleotide
ttgagtttcactgagttactccgaagtggg

SEQ ID NO: 153541 - DNA, 30 bp, Artificial Sequence
  Synthetic oligonucleotide
cataattcgaccaattgcgtatgaagtggg

SEQ ID NO: 153542 - DNA, 30 bp, Artificial Sequence
  Synthetic oligonucleotide
gtggcttgcaccaaagtatctacgagtggg

SEQ ID NO: 153543 - DNA, 30 bp, Artificial Sequence
  Synthetic oligonucleotide
cttctacaggtaatgagtattaatagtggg

SEQ ID NO: 153544 - DNA, 30 bp, Artificial Sequence
  Synthetic oligonucleotide
ccaccgtcgccccgagttaagcaacgtggg

SEQ ID NO: 153545 - DNA, 30 bp, Artificial Sequence
  Synthetic oligonucleotide
tgtaggccggaaccggctaaatcccgtggg

SEQ ID NO: 153546 - DNA, 30 bp, Artificial Sequence
  Synthetic oligonucleotide
gaaataggcgatgtctgcgttaagcgtggg

SEQ ID NO: 153547 - DNA, 30 bp, Artificial Sequence
  Synthetic oligonucleotide
tctacaaaagagcccgcgtaatttcgtggg

SEQ ID NO: 153548 - DNA, 30 bp, Artificial Sequence
  Synthetic oligonucleotide
gctcgttcaacgggtgacggtacaggtggg

SEQ ID NO: 153549 - DNA, 30 bp, Artificial Sequence
  Synthetic oligonucleotide
aggtggacggcactacagtcacgaggtggg

SEQ ID NO: 153550 - DNA, 30 bp, Artificial Sequence
  Synthetic oligonucleotide
aaagtgaaagggttaggcgggtacggtggg

SEQ ID NO: 153551 - DNA, 30 bp, Artificial Sequence
  Synthetic oligonucleotide
attagtaacaactcggtccatgactgtggg

SEQ ID NO: 153552 - DNA, 30 bp, Artificial Sequence
  Synthetic oligonucleotide
tggtaatataaatgcgaggctgcgtgtggg

SEQ ID NO: 153553 - DNA, 30 bp, Artificial Sequence
  Synthetic oligonucleotide
cccatggtatcagatcactcccaaattggg

SEQ ID NO: 153554 - DNA, 30 bp, Artificial Sequence
  Synthetic oligonucleotide
tctaggatgctgacaacggcagctattggg

SEQ ID NO: 153555 - DNA, 30 bp, Artificial Sequence
  Synthetic oligonucleotide
caaatacgcaacgaaggattgcagcttggg

SEQ ID NO: 153556 - DNA, 30 bp, Artificial Sequence
  Synthetic oligonucleotide
ggctcccaccttaaactagtcgtgcttggg

SEQ ID NO: 153557 - DNA, 30 bp, Artificial Sequence
  Synthetic oligonucleotide
agccagaatcaataaggtctattgcttggg

SEQ ID NO: 153558 - DNA, 30 bp, Artificial Sequence
  Synthetic oligonucleotide
agcctctaccggaggcaaattaaggttggg

SEQ ID NO: 153559 - DNA, 30 bp, Artificial Sequence
  Synthetic oligonucleotide
ttgtgggatcactttaaaatctcggttggg

SEQ ID NO: 153560 - DNA, 30 bp, Artificial Sequence
  Synthetic oligonucleotide
tcacagcacagcccgtgatcgtcggttggg

SEQ ID NO: 153561 - DNA, 32 bp, Artificial Sequence
  Synthetic oligonucleotide
ttgttgtgtaggtttactcatctactgttggg

SEQ ID NO: 153562 - DNA, 30 bp, Artificial Sequence
  Synthetic oligonucleotide
aagcgcacatcgacctacgcattatttggg

SEQ ID NO: 153563 - DNA, 30 bp, Artificial Sequence
  Synthetic oligonucleotide
gccgaacacaagatcccgacaccgtttggg

SEQ ID NO: 153564 - DNA, 30 bp, Artificial Sequence
  Synthetic oligonucleotide
ccaaccgactgtgaatgcctccattttggg

SEQ ID NO: 153565 - DNA, 30 bp, Artificial Sequence
  Synthetic oligonucleotide
ctttaggtaatgatcatagtgagttttggg

SEQ ID NO: 153566 - DNA, 30 bp, Artificial Sequence
  Synthetic oligonucleotide
gtggcctcacagctaaaggggtgttttggg

SEQ ID NO: 153567 - DNA, 30 bp, Artificial Sequence
  Synthetic oligonucleotide
aacggtctgacggagggttaaggcaaatgg

SEQ ID NO: 153568 - DNA, 30 bp, Artificial Sequence
  Synthetic oligonucleotide
cagtcgggtattaaactcaagctcaaatgg

SEQ ID NO: 153569 - DNA, 30 bp, Artificial Sequence
  Synthetic oligonucleotide
cgtcagccgccaggtcactgagataaatgg

SEQ ID NO: 153570 - DNA, 30 bp, Artificial Sequence
  Synthetic oligonucleotide
aggattcgcaagacgttccaatataaatgg

SEQ ID NO: 153571 - DNA, 30 bp, Artificial Sequence
  Synthetic oligonucleotide
atggttgcacatgacgggaggtgtaaatgg

SEQ ID NO: 153572 - DNA, 30 bp, Artificial Sequence
  Synthetic oligonucleotide
agccagacacgagaattgtgataacaatgg

SEQ ID NO: 153573 - DNA, 30 bp, Artificial Sequence
  Synthetic oligonucleotide
gatgacacgtgccaagagcattgacaatgg

SEQ ID NO: 153574 - DNA, 30 bp, Artificial Sequence
  Synthetic oligonucleotide
gcgctaactttaaccgttcaagtacaatgg

SEQ ID NO: 153575 - DNA, 31 bp, Artificial Sequence
  Synthetic oligonucleotide
caatgacaaaatattctacaaaggccaatgg

SEQ ID NO: 153576 - DNA, 30 bp, Artificial Sequence
  Synthetic oligonucleotide
tattgggcagctaaatcaagcaggcaatgg

SEQ ID NO: 153577 - DNA, 30 bp, Artificial Sequence
  Synthetic oligonucleotide
tcggattatctagatgaaacttgtcaatgg

SEQ ID NO: 153578 - DNA, 30 bp, Artificial Sequence
  Synthetic oligonucleotide
aaccgcgcagcgtagggattaaaagaatgg

SEQ ID NO: 153579 - DNA, 30 bp, Artificial Sequence
  Synthetic oligonucleotide
cggagagaccgctgagtggcgacagaatgg

SEQ ID NO: 153580 - DNA, 30 bp, Artificial Sequence
  Synthetic oligonucleotide
agagattcatcgcttgagagcatcgaatgg

SEQ ID NO: 153581 - DNA, 30 bp, Artificial Sequence
  Synthetic oligonucleotide
aaacgataatgtcaccttagttatgaatgg

SEQ ID NO: 153582 - DNA, 30 bp, Artificial Sequence
  Synthetic oligonucleotide
ccagagatagtaatcgaatcagttgaatgg

SEQ ID NO: 153583 - DNA, 30 bp, Artificial Sequence
  Synthetic oligonucleotide
taggaatgtcaggcgactctgttataatgg

SEQ ID NO: 153584 - DNA, 30 bp, Artificial Sequence
  Synthetic oligonucleotide
agaccaggtagagccctataaacctaatgg

SEQ ID NO: 153585 - DNA, 30 bp, Artificial Sequence
  Synthetic oligonucleotide
caagtagcgagcaccaacgagaagtaatgg

SEQ ID NO: 153586 - DNA, 30 bp, Artificial Sequence
  Synthetic oligonucleotide
cttggaagaactagaggcgtagcgtaatgg

SEQ ID NO: 153587 - DNA, 30 bp, Artificial Sequence
  Synthetic oligonucleotide
ccgagaatttattatgtaggggtgtaatgg

SEQ ID NO: 153588 - DNA, 30 bp, Artificial Sequence
  Synthetic oligonucleotide
gagcgaaattatgggatcgatttgtaatgg

SEQ ID NO: 153589 - DNA, 30 bp, Artificial Sequence
  Synthetic oligonucleotide
actaagaaaagcattatgtaaagttaatgg

SEQ ID NO: 153590 - DNA, 31 bp, Artificial Sequence
  Synthetic oligonucleotide
gcattggaagtagtttaggagcttttaatgg

SEQ ID NO: 153591 - DNA, 30 bp, Artificial Sequence
  Synthetic oligonucleotide
gcagttcctcgaaccatagatgaaacatgg

SEQ ID NO: 153592 - DNA, 30 bp, Artificial Sequence
  Synthetic oligonucleotide
gaaggcatggcggtcttttgatcaacatgg

SEQ ID NO: 153593 - DNA, 30 bp, Artificial Sequence
  Synthetic oligonucleotide
ccccacgattcacctgaaagaaccacatgg

SEQ ID NO: 153594 - DNA, 30 bp, Artificial Sequence
  Synthetic oligonucleotide
ggtccggtgcgctacaaaacgagcccatgg

SEQ ID NO: 153595 - DNA, 30 bp, Artificial Sequence
  Synthetic oligonucleotide
tggtacacttccgcaggtactagcccatgg

SEQ ID NO: 153596 - DNA, 30 bp, Artificial Sequence
  Synthetic oligonucleotide
cacataagacgtaagatggcgagtccatgg

SEQ ID NO: 153597 - DNA, 30 bp, Artificial Sequence
  Synthetic oligonucleotide
acttgcggggtgtagtgcagctgtccatgg

SEQ ID NO: 153598 - DNA, 30 bp, Artificial Sequence
  Synthetic oligonucleotide
ccaatggctgacttcggaattattccatgg

SEQ ID NO: 153599 - DNA, 30 bp, Artificial Sequence
  Synthetic oligonucleotide
ccgtcctatctataaacgaggacagcatgg

SEQ ID NO: 153600 - DNA, 30 bp, Artificial Sequence
  Synthetic oligonucleotide
cacattattcagtcgtgctcttcagcatgg

SEQ ID NO: 153601 - DNA, 30 bp, Artificial Sequence
  Synthetic oligonucleotide
tgcacgtcatcagtcccacgccgggcatgg

SEQ ID NO: 153602 - DNA, 30 bp, Artificial Sequence
  Synthetic oligonucleotide
ccttgctaaggcggtgtggggggtgcatgg

SEQ ID NO: 153603 - DNA, 30 bp, Artificial Sequence
  Synthetic oligonucleotide
caagaggttaggtcaggctgggtgtcatgg

SEQ ID NO: 153604 - DNA, 30 bp, Artificial Sequence
  Synthetic oligonucleotide
gttgatcatcgtatgatctgcgcttcatgg

SEQ ID NO: 153605 - DNA, 30 bp, Artificial Sequence
  Synthetic oligonucleotide
gtcaatgggaagtgaaccttcggttcatgg

SEQ ID NO: 153606 - DNA, 30 bp, Artificial Sequence
  Synthetic oligonucleotide
agtcagaagaattcgggcattgaaagatgg

SEQ ID NO: 153607 - DNA, 30 bp, Artificial Sequence
  Synthetic oligonucleotide
gcttatgtgagttacagatggagaagatgg

SEQ ID NO: 153608 - DNA, 30 bp, Artificial Sequence
  Synthetic oligonucleotide
aagagtaacgcacgcctacagggcagatgg

SEQ ID NO: 153609 - DNA, 30 bp, Artificial Sequence
  Synthetic oligonucleotide
cacaatagataatcttgtcgaatcagatgg

SEQ ID NO: 153610 - DNA, 30 bp, Artificial Sequence
  Synthetic oligonucleotide
aagttgtgaaatggtttctttatcagatgg

SEQ ID NO: 153611 - DNA, 30 bp, Artificial Sequence
  Synthetic oligonucleotide
gacaggttggcaggcgagatcctcagatgg

SEQ ID NO: 153612 - DNA, 30 bp, Artificial Sequence
  Synthetic oligonucleotide
agtgggaagaaccctcacaccgcgagatgg

SEQ ID NO: 153613 - DNA, 30 bp, Artificial Sequence
  Synthetic oligonucleotide
tccaatcctgcaagccggagtccccgatgg

SEQ ID NO: 153614 - DNA, 30 bp, Artificial Sequence
  Synthetic oligonucleotide
tagggagctgttgggcgtgggcgtcgatgg

SEQ ID NO: 153615 - DNA, 30 bp, Artificial Sequence
  Synthetic oligonucleotide
tctaagcaccaagcagaattctaaggatgg

SEQ ID NO: 153616 - DNA, 30 bp, Artificial Sequence
  Synthetic oligonucleotide
cctaaaggggttgcggtacgttacggatgg

SEQ ID NO: 153617 - DNA, 30 bp, Artificial Sequence
  Synthetic oligonucleotide
taaattgaccagtatttgtttaagggatgg

SEQ ID NO: 153618 - DNA, 30 bp, Artificial Sequence
  Synthetic oligonucleotide
tttggctctccccaatgcagtttgggatgg

SEQ ID NO: 153619 - DNA, 30 bp, Artificial Sequence
  Synthetic oligonucleotide
cacgtcagttcgtggctgatgtcctgatgg

SEQ ID NO: 153620 - DNA, 30 bp, Artificial Sequence
  Synthetic oligonucleotide
gcatagaggacctgcacgatagcgtgatgg

SEQ ID NO: 153621 - DNA, 30 bp, Artificial Sequence
  Synthetic oligonucleotide
ttagtccgtataaacaatttcctgtgatgg

SEQ ID NO: 153622 - DNA, 30 bp, Artificial Sequence
  Synthetic oligonucleotide
tgccgttgaaggtcctaggacgcttgatgg

SEQ ID NO: 153623 - DNA, 30 bp, Artificial Sequence
  Synthetic oligonucleotide
ttccgaccgcaactgcggagtgcttgatgg

SEQ ID NO: 153624 - DNA, 30 bp, Artificial Sequence
  Synthetic oligonucleotide
agaactatgaaggcacggttaggcatatgg

SEQ ID NO: 153625 - DNA, 30 bp, Artificial Sequence
  Synthetic oligonucleotide
tttcgggtctgcccaccgaactagatatgg

SEQ ID NO: 153626 - DNA, 30 bp, Artificial Sequence
  Synthetic oligonucleotide
attcagtgtgccgcgatggtgctactatgg

SEQ ID NO: 153627 - DNA, 30 bp, Artificial Sequence
  Synthetic oligonucleotide
gaagggtaacgatgggggcgcaggctatgg

SEQ ID NO: 153628 - DNA, 30 bp, Artificial Sequence
  Synthetic oligonucleotide
tgcgaagacggtaattgtaccatgctatgg

SEQ ID NO: 153629 - DNA, 30 bp, Artificial Sequence
  Synthetic oligonucleotide
cctgagttatggggcgcccaacatctatgg

SEQ ID NO: 153630 - DNA, 30 bp, Artificial Sequence
  Synthetic oligonucleotide
gagatgtacaggggcttggtctctctatgg

SEQ ID NO: 153631 - DNA, 30 bp, Artificial Sequence
  Synthetic oligonucleotide
tgctggccggtgaaaatgtttgaagtatgg

SEQ ID NO: 153632 - DNA, 30 bp, Artificial Sequence
  Synthetic oligonucleotide
atgaagtgcttacttgtgcggaacgtatgg

SEQ ID NO: 153633 - DNA, 30 bp, Artificial Sequence
  Synthetic oligonucleotide
ttcctcagcggtgtgatataagccgtatgg

SEQ ID NO: 153634 - DNA, 30 bp, Artificial Sequence
  Synthetic oligonucleotide
cctaggtaggacactagacaaacggtatgg

SEQ ID NO: 153635 - DNA, 30 bp, Artificial Sequence
  Synthetic oligonucleotide
atttcgggactcgtaagcatgagggtatgg

SEQ ID NO: 153636 - DNA, 30 bp, Artificial Sequence
  Synthetic oligonucleotide
ctacgccaacagacagaagccatggtatgg

SEQ ID NO: 153637 - DNA, 30 bp, Artificial Sequence
  Synthetic oligonucleotide
taagatagaaaccgagtgttagtattatgg

SEQ ID NO: 153638 - DNA, 30 bp, Artificial Sequence
  Synthetic oligonucleotide
ccacaagcttgcgtgaaaagggtcttatgg

SEQ ID NO: 153639 - DNA, 30 bp, Artificial Sequence
  Synthetic oligonucleotide
ctgacttcagttaagcctcacctgttatgg

SEQ ID NO: 153640 - DNA, 30 bp, Artificial Sequence
  Synthetic oligonucleotide
atcagctaccatgactatatagagaactgg

SEQ ID NO: 153641 - DNA, 30 bp, Artificial Sequence
  Synthetic oligonucleotide
acgatcctgatcagggattattagaactgg

SEQ ID NO: 153642 - DNA, 30 bp, Artificial Sequence
  Synthetic oligonucleotide
gttgcataccttatgggtgcggggaactgg

SEQ ID NO: 153643 - DNA, 30 bp, Artificial Sequence
  Synthetic oligonucleotide
ctagatatgtccagcagaggattccactgg

SEQ ID NO: 153644 - DNA, 30 bp, Artificial Sequence
  Synthetic oligonucleotide
ggggtgtttactggtccagacatgcactgg

SEQ ID NO: 153645 - DNA, 30 bp, Artificial Sequence
  Synthetic oligonucleotide
agataactaaaaattagcagccatcactgg

SEQ ID NO: 153646 - DNA, 30 bp, Artificial Sequence
  Synthetic oligonucleotide
tcttgtcaataatacttggtagctcactgg

SEQ ID NO: 153647 - DNA, 30 bp, Artificial Sequence
  Synthetic oligonucleotide
tcttcctaaaacgtgaatgcacaatactgg

SEQ ID NO: 153648 - DNA, 30 bp, Artificial Sequence
  Synthetic oligonucleotide
ccatcgaggttcgaagaaataaaaacctgg

SEQ ID NO: 153649 - DNA, 30 bp, Artificial Sequence
  Synthetic oligonucleotide
cggcgtggcgtacgttatcgaccaacctgg

SEQ ID NO: 153650 - DNA, 30 bp, Artificial Sequence
  Synthetic oligonucleotide
ctacactgtgtgaactcagtcgtcacctgg

SEQ ID NO: 153651 - DNA, 30 bp, Artificial Sequence
  Synthetic oligonucleotide
cgaaaaactatatggagtggatggacctgg

SEQ ID NO: 153652 - DNA, 30 bp, Artificial Sequence
  Synthetic oligonucleotide
tctggagagcggccagattctcaaccctgg

SEQ ID NO: 153653 - DNA, 30 bp, Artificial Sequence
  Synthetic oligonucleotide
gtaggaggaaaaggactgagctctccctgg

SEQ ID NO: 153654 - DNA, 30 bp, Artificial Sequence
  Synthetic oligonucleotide
agctaggtcgcccactcggaatccgcctgg

SEQ ID NO: 153655 - DNA, 30 bp, Artificial Sequence
  Synthetic oligonucleotide
catcaccgtatagctgcgtttgctgcctgg

SEQ ID NO: 153656 - DNA, 30 bp, Artificial Sequence
  Synthetic oligonucleotide
acatccgttgtggtaaagttacgatcctgg

SEQ ID NO: 153657 - DNA, 30 bp, Artificial Sequence
  Synthetic oligonucleotide
aacaggatagacgaatgcttgtacagctgg

SEQ ID NO: 153658 - DNA, 30 bp, Artificial Sequence
  Synthetic oligonucleotide
aagacgatggtaaataaaatttacagctgg

SEQ ID NO: 153659 - DNA, 30 bp, Artificial Sequence
  Synthetic oligonucleotide
cagggtcatcttatgcagatgcaacgctgg

SEQ ID NO: 153660 - DNA, 30 bp, Artificial Sequence
  Synthetic oligonucleotide
atgccatttcaggaacgttcagctcgctgg

SEQ ID NO: 153661 - DNA, 30 bp, Artificial Sequence
  Synthetic oligonucleotide
caaaagtgagccggtgcgttcgaaggctgg

SEQ ID NO: 153662 - DNA, 30 bp, Artificial Sequence
  Synthetic oligonucleotide
gtcatagctaacactacaccgaacggctgg

SEQ ID NO: 153663 - DNA, 30 bp, Artificial Sequence
  Synthetic oligonucleotide
acaagtctaagtcagacctggtagggctgg

SEQ ID NO: 153664 - DNA, 30 bp, Artificial Sequence
  Synthetic oligonucleotide
gaacttcgagtgcccaagggatttggctgg

SEQ ID NO: 153665 - DNA, 30 bp, Artificial Sequence
  Synthetic oligonucleotide
cagcaagaggtaacagaaactggatgctgg

SEQ ID NO: 153666 - DNA, 30 bp, Artificial Sequence
  Synthetic oligonucleotide
ctagaagaagtgatacgagtggaaatctgg

SEQ ID NO: 153667 - DNA, 30 bp, Artificial Sequence
  Synthetic oligonucleotide
gtcattctgagagcatgtctttacctctgg

SEQ ID NO: 153668 - DNA, 30 bp, Artificial Sequence
  Synthetic oligonucleotide
ttactcagtctttgaagaaacaggctctgg

SEQ ID NO: 153669 - DNA, 30 bp, Artificial Sequence
  Synthetic oligonucleotide
ggttacggtcgggctggaagtcggctctgg

SEQ ID NO: 153670 - DNA, 30 bp, Artificial Sequence
  Synthetic oligonucleotide
ggatcgcgattttccgtacgtgaagtctgg

SEQ ID NO: 153671 - DNA, 30 bp, Artificial Sequence
  Synthetic oligonucleotide
gacgacccacggttcaaagatatagtctgg

SEQ ID NO: 153672 - DNA, 30 bp, Artificial Sequence
  Synthetic oligonucleotide
tcgtcgcgtttccaggataaaaccgtctgg

SEQ ID NO: 153673 - DNA, 30 bp, Artificial Sequence
  Synthetic oligonucleotide
cgcatggtgcttgacaatgaccatgtctgg

SEQ ID NO: 153674 - DNA, 30 bp, Artificial Sequence
  Synthetic oligonucleotide
gcagaacacaatactaaatgggatgtctgg

SEQ ID NO: 153675 - DNA, 30 bp, Artificial Sequence
  Synthetic oligonucleotide
gcacggaatgcaggaaacttaattgtctgg

SEQ ID NO: 153676 - DNA, 30 bp, Artificial Sequence
  Synthetic oligonucleotide
tatgaaggtctccgctcacagcaattctgg

SEQ ID NO: 153677 - DNA, 30 bp, Artificial Sequence
  Synthetic oligonucleotide
tgaaaagattggcgccttggggaattctgg

SEQ ID NO: 153678 - DNA, 30 bp, Artificial Sequence
  Synthetic oligonucleotide
cacccccgttgcgtatcagcgagattctgg

SEQ ID NO: 153679 - DNA, 30 bp, Artificial Sequence
  Synthetic oligonucleotide
aggaggacgtcacagttgggaatcttctgg

SEQ ID NO: 153680 - DNA, 30 bp, Artificial Sequence
  Synthetic oligonucleotide
ttcacttgagtgcatcttgttcggttctgg

SEQ ID NO: 153681 - DNA, 30 bp, Artificial Sequence
  Synthetic oligonucleotide
aaagcccaggttgtacggcgggccaagtgg

SEQ ID NO: 153682 - DNA, 30 bp, Artificial Sequence
  Synthetic oligonucleotide
tcaaaaacatccttcagtgagcgcaagtgg

SEQ ID NO: 153683 - DNA, 30 bp, Artificial Sequence
  Synthetic oligonucleotide
ccttcccgcttagggcagcaatgcaagtgg

SEQ ID NO: 153684 - DNA, 30 bp, Artificial Sequence
  Synthetic oligonucleotide
gacaagctttattcgggcgtaaggaagtgg

SEQ ID NO: 153685 - DNA, 30 bp, Artificial Sequence
  Synthetic oligonucleotide
ctgccgacttaactatgtccatataagtgg

SEQ ID NO: 153686 - DNA, 31 bp, Artificial Sequence
  Synthetic oligonucleotide
ctaattagttcaagaggtgaactaccagtgg

SEQ ID NO: 153687 - DNA, 31 bp, Artificial Sequence
  Synthetic oligonucleotide
tgtggtccgtcccggtcgcagaagtcagtgg

SEQ ID NO: 153688 - DNA, 30 bp, Artificial Sequence
  Synthetic oligonucleotide
ctcggggctttgaaggggagaaaagagtgg

SEQ ID NO: 153689 - DNA, 30 bp, Artificial Sequence
  Synthetic oligonucleotide
gacttttagcgtcaccagaggtaagagtgg

SEQ ID NO: 153690 - DNA, 30 bp, Artificial Sequence
  Synthetic oligonucleotide
tgtcagtggaccttaggcttaatcgagtgg

SEQ ID NO: 153691 - DNA, 30 bp, Artificial Sequence
  Synthetic oligonucleotide
caagttcgataccaggcaagttctgagtgg

SEQ ID NO: 153692 - DNA, 30 bp, Artificial Sequence
  Synthetic oligonucleotide
gacggcctcggcgagtcaagcggaacgtgg

SEQ ID NO: 153693 - DNA, 30 bp, Artificial Sequence
  Synthetic oligonucleotide
tatgcatgtcggcaatgcgctttaacgtgg

SEQ ID NO: 153694 - DNA, 30 bp, Artificial Sequence
  Synthetic oligonucleotide
aggtgcacactacttcttctcaacacgtgg

SEQ ID NO: 153695 - DNA, 30 bp, Artificial Sequence
  Synthetic oligonucleotide
cctaacccgatctcctcgttcatcacgtgg

SEQ ID NO: 153696 - DNA, 30 bp, Artificial Sequence
  Synthetic oligonucleotide
aatagcagtttaacgtggggggctccgtgg

SEQ ID NO: 153697 - DNA, 30 bp, Artificial Sequence
  Synthetic oligonucleotide
tcatctacagaagcaccagtacttccgtgg

SEQ ID NO: 153698 - DNA, 30 bp, Artificial Sequence
  Synthetic oligonucleotide
acccgacgggggagtcgcttaaccgcgtgg

SEQ ID NO: 153699 - DNA, 30 bp, Artificial Sequence
  Synthetic oligonucleotide
gacatgatattgaaggatagcgtggcgtgg

SEQ ID NO: 153700 - DNA, 30 bp, Artificial Sequence
  Synthetic oligonucleotide
cgttaactttaacgtcactccgatgcgtgg

SEQ ID NO: 153701 - DNA, 30 bp, Artificial Sequence
  Synthetic oligonucleotide
gcctggggctgtggaccaagtcgtgcgtgg

SEQ ID NO: 153702 - DNA, 30 bp, Artificial Sequence
  Synthetic oligonucleotide
tgagaatatggacttggactttttgcgtgg

SEQ ID NO: 153703 - DNA, 30 bp, Artificial Sequence
  Synthetic oligonucleotide
catatcatatacggtcctatgttctcgtgg

SEQ ID NO: 153704 - DNA, 30 bp, Artificial Sequence
  Synthetic oligonucleotide
cctagcaattcttttgtgtggataaggtgg

SEQ ID NO: 153705 - DNA, 30 bp, Artificial Sequence
  Synthetic oligonucleotide
gcagaaccagtagactactcctcgaggtgg

SEQ ID NO: 153706 - DNA, 30 bp, Artificial Sequence
  Synthetic oligonucleotide
aacgaagtcataagtacagcgactaggtgg

SEQ ID NO: 153707 - DNA, 30 bp, Artificial Sequence
  Synthetic oligonucleotide
caaaagtcgcaatattaggtcgggcggtgg

SEQ ID NO: 153708 - DNA, 30 bp, Artificial Sequence
  Synthetic oligonucleotide
tacacaggattgctaacctaaatgcggtgg

SEQ ID NO: 153709 - DNA, 30 bp, Artificial Sequence
  Synthetic oligonucleotide
atcagcacaaaatcccactatgatcggtgg

SEQ ID NO: 153710 - DNA, 30 bp, Artificial Sequence
  Synthetic oligonucleotide
gttgcttaaagacgagcctttgatcggtgg

SEQ ID NO: 153711 - DNA, 30 bp, Artificial Sequence
  Synthetic oligonucleotide
ctgtcgtaactctacggaccactggggtgg

SEQ ID NO: 153712 - DNA, 30 bp, Artificial Sequence
  Synthetic oligonucleotide
tatacttaggcaggcatgacaggtgggtgg

SEQ ID NO: 153713 - DNA, 30 bp, Artificial Sequence
  Synthetic oligonucleotide
gctgatatttttcaagtaaaatgtgggtgg

SEQ ID NO: 153714 - DNA, 30 bp, Artificial Sequence
  Synthetic oligonucleotide
atgaacccagtatagtgtgacaaatggtgg

SEQ ID NO: 153715 - DNA, 30 bp, Artificial Sequence
  Synthetic oligonucleotide
tcaccggcattacctactagcgtatggtgg

SEQ ID NO: 153716 - DNA, 30 bp, Artificial Sequence
  Synthetic oligonucleotide
gaggcacatgtaaagagcacagtttggtgg

SEQ ID NO: 153717 - DNA, 30 bp, Artificial Sequence
  Synthetic oligonucleotide
ttcgtgtcaaaaacggtgcatgcaatgtgg

SEQ ID NO: 153718 - DNA, 30 bp, Artificial Sequence
  Synthetic oligonucleotide
aactgaagacagtctagcaactccatgtgg

SEQ ID NO: 153719 - DNA, 30 bp, Artificial Sequence
  Synthetic oligonucleotide
gcggaaacaggtgcacggcagcatatgtgg

SEQ ID NO: 153720 - DNA, 30 bp, Artificial Sequence
  Synthetic oligonucleotide
cgaggcgcgctcgaaatacgctctatgtgg

SEQ ID NO: 153721 - DNA, 30 bp, Artificial Sequence
  Synthetic oligonucleotide
gcgggaagactcatttgtatctctatgtgg

SEQ ID NO: 153722 - DNA, 30 bp, Artificial Sequence
  Synthetic oligonucleotide
cttgccttccgtaggatgccaaacctgtgg

SEQ ID NO: 153723 - DNA, 30 bp, Artificial Sequence
  Synthetic oligonucleotide
ctccctgtagataacccacaaggcctgtgg

SEQ ID NO: 153724 - DNA, 30 bp, Artificial Sequence
  Synthetic oligonucleotide
tcatcgcgttgttaagcaatttagctgtgg

SEQ ID NO: 153725 - DNA, 30 bp, Artificial Sequence
  Synthetic oligonucleotide
agtgacgttgagaatccgcgaaggctgtgg

SEQ ID NO: 153726 - DNA, 30 bp, Artificial Sequence
  Synthetic oligonucleotide
acacttgttgacctcaactagagcttgtgg

SEQ ID NO: 153727 - DNA, 30 bp, Artificial Sequence
  Synthetic oligonucleotide
ctatatatacaaaagaaatttgggttgtgg

SEQ ID NO: 153728 - DNA, 30 bp, Artificial Sequence
  Synthetic oligonucleotide
ttggcccgagttggtcgcctgaaaaattgg

SEQ ID NO: 153729 - DNA, 30 bp, Artificial Sequence
  Synthetic oligonucleotide
tcaatcggggcgcctactagattaaattgg

SEQ ID NO: 153730 - DNA, 30 bp, Artificial Sequence
  Synthetic oligonucleotide
tgaactgtaggtagcgggtaatgcaattgg

SEQ ID NO: 153731 - DNA, 30 bp, Artificial Sequence
  Synthetic oligonucleotide
ggtggcccgacattgttgtggccgaattgg

SEQ ID NO: 153732 - DNA, 30 bp, Artificial Sequence
  Synthetic oligonucleotide
agccggactgtttatcagttcattaattgg

SEQ ID NO: 153733 - DNA, 30 bp, Artificial Sequence
  Synthetic oligonucleotide
catccgaagtatcgggagtcgagacattgg

SEQ ID NO: 153734 - DNA, 30 bp, Artificial Sequence
  Synthetic oligonucleotide
gcgcgaatccgccttgatcatcgacattgg

SEQ ID NO: 153735 - DNA, 30 bp, Artificial Sequence
  Synthetic oligonucleotide
acgattagtaacttaggggtcggccattgg

SEQ ID NO: 153736 - DNA, 30 bp, Artificial Sequence
  Synthetic oligonucleotide
atcaccattatagggatttcgatccattgg

SEQ ID NO: 153737 - DNA, 30 bp, Artificial Sequence
  Synthetic oligonucleotide
tgtctcgtaggacttgctacttgagattgg

SEQ ID NO: 153738 - DNA, 30 bp, Artificial Sequence
  Synthetic oligonucleotide
gcgttgctgggatagtcggccaccgattgg

SEQ ID NO: 153739 - DNA, 30 bp, Artificial Sequence
  Synthetic oligonucleotide
tcctcagatacagatgcaatagcggattgg

SEQ ID NO: 153740 - DNA, 30 bp, Artificial Sequence
  Synthetic oligonucleotide
cacaacggatttctcagaccagtggattgg

SEQ ID NO: 153741 - DNA, 30 bp, Artificial Sequence
  Synthetic oligonucleotide
tctgattcgtggcgaaacttccatgattgg

SEQ ID NO: 153742 - DNA, 30 bp, Artificial Sequence
  Synthetic oligonucleotide
tatggagggccatcagggaacgatgattgg

SEQ ID NO: 153743 - DNA, 30 bp, Artificial Sequence
  Synthetic oligonucleotide
caggtcttacttaagaattgcgttgattgg

SEQ ID NO: 153744 - DNA, 30 bp, Artificial Sequence
  Synthetic oligonucleotide
ctgaaggaacgcatgatgtgtgcatattgg

SEQ ID NO: 153745 - DNA, 30 bp, Artificial Sequence
  Synthetic oligonucleotide
cgttaaaaggtgtttacttgcagctattgg

SEQ ID NO: 153746 - DNA, 30 bp, Artificial Sequence
  Synthetic oligonucleotide
ggcagaatgtagatatgtgcgtattattgg

SEQ ID NO: 153747 - DNA, 30 bp, Artificial Sequence
  Synthetic oligonucleotide
cgggagtagcacgtcggagggatcacttgg

SEQ ID NO: 153748 - DNA, 30 bp, Artificial Sequence
  Synthetic oligonucleotide
aaagcgactccgacaacatgaacgacttgg

SEQ ID NO: 153749 - DNA, 30 bp, Artificial Sequence
  Synthetic oligonucleotide
ggttagttttgcgtggtgactccgacttgg

SEQ ID NO: 153750 - DNA, 30 bp, Artificial Sequence
  Synthetic oligonucleotide
ggggcatgcagagattatctatggacttgg

SEQ ID NO: 153751 - DNA, 30 bp, Artificial Sequence
  Synthetic oligonucleotide
tatggaacacgtgggccctacaatacttgg

SEQ ID NO: 153752 - DNA, 30 bp, Artificial Sequence
  Synthetic oligonucleotide
catacggcctgcgagagtcgaggtacttgg

SEQ ID NO: 153753 - DNA, 30 bp, Artificial Sequence
  Synthetic oligonucleotide
ctagaacccgttacagttgtaggcccttgg

SEQ ID NO: 153754 - DNA, 30 bp, Artificial Sequence
  Synthetic oligonucleotide
agtgtcatgtttggattcgctcgggcttgg

SEQ ID NO: 153755 - DNA, 30 bp, Artificial Sequence
  Synthetic oligonucleotide
cctgacgtgtctccaaaaatagctgcttgg

SEQ ID NO: 153756 - DNA, 30 bp, Artificial Sequence
  Synthetic oligonucleotide
gtgctatctcatcgggtagcatctgcttgg

SEQ ID NO: 153757 - DNA, 30 bp, Artificial Sequence
  Synthetic oligonucleotide
tcatatctggggcaaaagcgaatctcttgg

SEQ ID NO: 153758 - DNA, 30 bp, Artificial Sequence
  Synthetic oligonucleotide
gattcacataaactacggttcgagtcttgg

SEQ ID NO: 153759 - DNA, 30 bp, Artificial Sequence
  Synthetic oligonucleotide
caagagtaaaccgttggcctaaattcttgg

SEQ ID NO: 153760 - DNA, 30 bp, Artificial Sequence
  Synthetic oligonucleotide
ccctgaccttcttactcccgaccttcttgg

SEQ ID NO: 153761 - DNA, 30 bp, Artificial Sequence
  Synthetic oligonucleotide
ttgtttcgtgccgttgattgtctttcttgg

SEQ ID NO: 153762 - DNA, 30 bp, Artificial Sequence
  Synthetic oligonucleotide
aggttaagccgaagtcaactataaagttgg

SEQ ID NO: 153763 - DNA, 30 bp, Artificial Sequence
  Synthetic oligonucleotide
gcgccaggcgtctgttcagatcccagttgg

SEQ ID NO: 153764 - DNA, 30 bp, Artificial Sequence
  Synthetic oligonucleotide
ggtgacgtataaacccaaggacctagttgg

SEQ ID NO: 153765 - DNA, 30 bp, Artificial Sequence
  Synthetic oligonucleotide
tcgaagtgaaaaaccttgtgatctagttgg

SEQ ID NO: 153766 - DNA, 30 bp, Artificial Sequence
  Synthetic oligonucleotide
cttcttggcaacacgtaccgtggtagttgg

SEQ ID NO: 153767 - DNA, 30 bp, Artificial Sequence
  Synthetic oligonucleotide
actaacgagactagccctcgcacacgttgg

SEQ ID NO: 153768 - DNA, 30 bp, Artificial Sequence
  Synthetic oligonucleotide
tcctcgatatagacaatcattctccgttgg

SEQ ID NO: 153769 - DNA, 30 bp, Artificial Sequence
  Synthetic oligonucleotide
gtcgctttgccaagaatgacttagcgttgg

SEQ ID NO: 153770 - DNA, 30 bp, Artificial Sequence
  Synthetic oligonucleotide
tatcagacgcgttgacatatctcgcgttgg

SEQ ID NO: 153771 - DNA, 30 bp, Artificial Sequence
  Synthetic oligonucleotide
atccaccacttgactaaggtcaggcgttgg

SEQ ID NO: 153772 - DNA, 30 bp, Artificial Sequence
  Synthetic oligonucleotide
acataatgtgtggcaaattgggtgggttgg

SEQ ID NO: 153773 - DNA, 30 bp, Artificial Sequence
  Synthetic oligonucleotide
agccacaaagatctaatgacccatggttgg

SEQ ID NO: 153774 - DNA, 30 bp, Artificial Sequence
  Synthetic oligonucleotide
tggcaacgaattcatgatttaccatgttgg

SEQ ID NO: 153775 - DNA, 30 bp, Artificial Sequence
  Synthetic oligonucleotide
gactgggcaccggtagtcgggctatgttgg

SEQ ID NO: 153776 - DNA, 30 bp, Artificial Sequence
  Synthetic oligonucleotide
aagatagcacaccaattcggcctttgttgg

SEQ ID NO: 153777 - DNA, 30 bp, Artificial Sequence
  Synthetic oligonucleotide
gtcaccgtgaatgtagtggctacaatttgg

SEQ ID NO: 153778 - DNA, 30 bp, Artificial Sequence
  Synthetic oligonucleotide
ggcaatcgtatgtacaagttcttcctttgg

SEQ ID NO: 153779 - DNA, 30 bp, Artificial Sequence
  Synthetic oligonucleotide
gtcatgggatattagctactgccgctttgg

SEQ ID NO: 153780 - DNA, 30 bp, Artificial Sequence
  Synthetic oligonucleotide
cacagggttacacgttcgagaaaattttgg

SEQ ID NO: 153781 - DNA, 30 bp, Artificial Sequence
  Synthetic oligonucleotide
gacacaggttggtccttcagtcacttttgg

SEQ ID NO: 153782 - DNA, 30 bp, Artificial Sequence
  Synthetic oligonucleotide
tgcgcgtcgccagacactcgggacttttgg

SEQ ID NO: 153783 - DNA, 30 bp, Artificial Sequence
  Synthetic oligonucleotide
gcttcatagtgaactggactctccttttgg

SEQ ID NO: 153784 - DNA, 30 bp, Artificial Sequence
  Synthetic oligonucleotide
tcggttacagacatcgtgcccttcttttgg

SEQ ID NO: 153785 - DNA, 30 bp, Artificial Sequence
  Synthetic oligonucleotide
gtgtagggtacattacggactgctttttgg

SEQ ID NO: 153786 - DNA, 30 bp, Artificial Sequence
  Synthetic oligonucleotide
taccagctacacaacgagatataaaaaatg

SEQ ID NO: 153787 - DNA, 30 bp, Artificial Sequence
  Synthetic oligonucleotide
aggtgtgaacctaagcacggcaacaaaatg

SEQ ID NO: 153788 - DNA, 30 bp, Artificial Sequence
  Synthetic oligonucleotide
tcgataaagacctctagtggccacaaaatg

SEQ ID NO: 153789 - DNA, 30 bp, Artificial Sequence
  Synthetic oligonucleotide
atgttgcctaaattgatctagcacaaaatg

SEQ ID NO: 153790 - DNA, 30 bp, Artificial Sequence
  Synthetic oligonucleotide
tgctcgttgaagcctatattatagaaaatg

SEQ ID NO: 153791 - DNA, 30 bp, Artificial Sequence
  Synthetic oligonucleotide
ctttttggcagaaatcgggtaccgaaaatg

SEQ ID NO: 153792 - DNA, 30 bp, Artificial Sequence
  Synthetic oligonucleotide
atgatccgcagtgggccggcaactaaaatg

SEQ ID NO: 153793 - DNA, 30 bp, Artificial Sequence
  Synthetic oligonucleotide
tcagaaaacccgcgtcggtttacacaaatg

SEQ ID NO: 153794 - DNA, 30 bp, Artificial Sequence
  Synthetic oligonucleotide
tgggttaggacaggcagtgcaggacaaatg

SEQ ID NO: 153795 - DNA, 30 bp, Artificial Sequence
  Synthetic oligonucleotide
gcggtatgacgctaatgcccgggacaaatg

SEQ ID NO: 153796 - DNA, 30 bp, Artificial Sequence
  Synthetic oligonucleotide
aatggccattagcagttagcgatacaaatg

SEQ ID NO: 153797 - DNA, 30 bp, Artificial Sequence
  Synthetic oligonucleotide
ctgggcgaacacatcgttatgttacaaatg

SEQ ID NO: 153798 - DNA, 30 bp, Artificial Sequence
  Synthetic oligonucleotide
tccaaccagtcttgacagcgtgcccaaatg

SEQ ID NO: 153799 - DNA, 30 bp, Artificial Sequence
  Synthetic oligonucleotide
ggattgagcctaggactcagacctcaaatg

SEQ ID NO: 153800 - DNA, 30 bp, Artificial Sequence
  Synthetic oligonucleotide
aaatatccccgtgcgctagaaaaagaaatg

SEQ ID NO: 153801 - DNA, 30 bp, Artificial Sequence
  Synthetic oligonucleotide
cggacgtagccgtcactggcctaagaaatg

SEQ ID NO: 153802 - DNA, 30 bp, Artificial Sequence
  Synthetic oligonucleotide
gtaaaaagacctcacacgaaattggaaatg

SEQ ID NO: 153803 - DNA, 30 bp, Artificial Sequence
  Synthetic oligonucleotide
gtcaggactacgctgtccctgtaataaatg

SEQ ID NO: 153804 - DNA, 30 bp, Artificial Sequence
  Synthetic oligonucleotide
gggaatgttagtccgaaatgccgctaaatg

SEQ ID NO: 153805 - DNA, 30 bp, Artificial Sequence
  Synthetic oligonucleotide
ctataaggaagaaatcttgcgaggtaaatg

SEQ ID NO: 153806 - DNA, 30 bp, Artificial Sequence
  Synthetic oligonucleotide
catgtggctaccaccctcaggcggtaaatg

SEQ ID NO: 153807 - DNA, 30 bp, Artificial Sequence
  Synthetic oligonucleotide
tctaagcgtcacgaacacaggcattaaatg

SEQ ID NO: 153808 - DNA, 30 bp, Artificial Sequence
  Synthetic oligonucleotide
agcgtcgacgtggtactagtaatttaaatg

SEQ ID NO: 153809 - DNA, 30 bp, Artificial Sequence
  Synthetic oligonucleotide
cctcacacttatcaggataagttttaaatg

SEQ ID NO: 153810 - DNA, 30 bp, Artificial Sequence
  Synthetic oligonucleotide
atcctcacctactagggtcccgggacaatg

SEQ ID NO: 153811 - DNA, 30 bp, Artificial Sequence
  Synthetic oligonucleotide
ccttcgaggtgaagttaattcgggacaatg

SEQ ID NO: 153812 - DNA, 30 bp, Artificial Sequence
  Synthetic oligonucleotide
tcaatggtaaccgcgtaccggctgacaatg

SEQ ID NO: 153813 - DNA, 30 bp, Artificial Sequence
  Synthetic oligonucleotide
agaaaactttgagcaaatttacacccaatg

SEQ ID NO: 153814 - DNA, 30 bp, Artificial Sequence
  Synthetic oligonucleotide
gtcttgccccgacccaccaacgacccaatg

SEQ ID NO: 153815 - DNA, 30 bp, Artificial Sequence
  Synthetic oligonucleotide
ttgatcttagcgttagttgccagagcaatg

SEQ ID NO: 153816 - DNA, 28 bp, Artificial Sequence
  Synthetic oligonucleotide
acaagggtggcatagccggttagcaatg

SEQ ID NO: 153817 - DNA, 30 bp, Artificial Sequence
  Synthetic oligonucleotide
cccgaacgacatgaataggtgaacgcaatg

SEQ ID NO: 153818 - DNA, 30 bp, Artificial Sequence
  Synthetic oligonucleotide
aacctgctgctaggatggaaagtcgcaatg

SEQ ID NO: 153819 - DNA, 30 bp, Artificial Sequence
  Synthetic oligonucleotide
ccgacttctctagggttagctagggcaatg

SEQ ID NO: 153820 - DNA, 30 bp, Artificial Sequence
  Synthetic oligonucleotide
cattgcatcatgggcgatagattggcaatg

SEQ ID NO: 153821 - DNA, 30 bp, Artificial Sequence
  Synthetic oligonucleotide
ccttatcttccgtaaaaaagtcgtgcaatg

SEQ ID NO: 153822 - DNA, 30 bp, Artificial Sequence
  Synthetic oligonucleotide
aaactcgtgtgtagcaacgtgaactcaatg

SEQ ID NO: 153823 - DNA, 30 bp, Artificial Sequence
  Synthetic oligonucleotide
atgtaaatgtgcaatcgaatatattcaatg

SEQ ID NO: 153824 - DNA, 30 bp, Artificial Sequence
  Synthetic oligonucleotide
gtcttataacggatgaatattaacagaatg

SEQ ID NO: 153825 - DNA, 30 bp, Artificial Sequence
  Synthetic oligonucleotide
tggaattatgcactcccttggggcagaatg

SEQ ID NO: 153826 - DNA, 30 bp, Artificial Sequence
  Synthetic oligonucleotide
ccattcagcgacaactaggaatagagaatg

SEQ ID NO: 153827 - DNA, 30 bp, Artificial Sequence
  Synthetic oligonucleotide
agatgctcgagccagacagttgcgagaatg

SEQ ID NO: 153828 - DNA, 30 bp, Artificial Sequence
  Synthetic oligonucleotide
gtcactgcgagttcggcaatgaatagaatg

SEQ ID NO: 153829 - DNA, 30 bp, Artificial Sequence
  Synthetic oligonucleotide
cgcaggtacttattagcaaaccttagaatg

SEQ ID NO: 153830 - DNA, 30 bp, Artificial Sequence
  Synthetic oligonucleotide
cattacatcagatatttttaccgacgaatg

SEQ ID NO: 153831 - DNA, 30 bp, Artificial Sequence
  Synthetic oligonucleotide
aagagcggctcatgacatagtgtacgaatg

SEQ ID NO: 153832 - DNA, 30 bp, Artificial Sequence
  Synthetic oligonucleotide
tggaaaatatgtgtgatccacgatcgaatg

SEQ ID NO: 153833 - DNA, 31 bp, Artificial Sequence
  Synthetic oligonucleotide
tcccttaaagaacggggggtggtttcgaatg

SEQ ID NO: 153834 - DNA, 30 bp, Artificial Sequence
  Synthetic oligonucleotide
gctctctgtagtacgtgagaactcggaatg

SEQ ID NO: 153835 - DNA, 30 bp, Artificial Sequence
  Synthetic oligonucleotide
tggtgcttatagagaacatgtgtcggaatg

SEQ ID NO: 153836 - DNA, 30 bp, Artificial Sequence
  Synthetic oligonucleotide
gaggaataagcacgagcacaaaggggaatg

SEQ ID NO: 153837 - DNA, 30 bp, Artificial Sequence
  Synthetic oligonucleotide
taatttgtgaatcggcaacaggggggaatg

SEQ ID NO: 153838 - DNA, 30 bp, Artificial Sequence
  Synthetic oligonucleotide
tcccttaaacagtgacgggtcaactgaatg

SEQ ID NO: 153839 - DNA, 30 bp, Artificial Sequence
  Synthetic oligonucleotide
tcggtgcagtatgtcagcgaagtaataatg

SEQ ID NO: 153840 - DNA, 30 bp, Artificial Sequence
  Synthetic oligonucleotide
cagtcgtatttcgagctgatgagcataatg

SEQ ID NO: 153841 - DNA, 30 bp, Artificial Sequence
  Synthetic oligonucleotide
gggctggagggttgaataaagatcataatg

SEQ ID NO: 153842 - DNA, 30 bp, Artificial Sequence
  Synthetic oligonucleotide
aggtttagtacagatagccagagtataatg

SEQ ID NO: 153843 - DNA, 30 bp, Artificial Sequence
  Synthetic oligonucleotide
cgaagttgttgtcaacttcggtccgtaatg

SEQ ID NO: 153844 - DNA, 30 bp, Artificial Sequence
  Synthetic oligonucleotide
agacacatcattctaacactacaggtaatg

SEQ ID NO: 153845 - DNA, 30 bp, Artificial Sequence
  Synthetic oligonucleotide
cgcgggaagtcatgtaaactggatgtaatg

SEQ ID NO: 153846 - DNA, 30 bp, Artificial Sequence
  Synthetic oligonucleotide
ctaaaccggaaaatattttgtcttgtaatg

SEQ ID NO: 153847 - DNA, 30 bp, Artificial Sequence
  Synthetic oligonucleotide
caatgatgtagatcatatggggggttaatg

SEQ ID NO: 153848 - DNA, 30 bp, Artificial Sequence
  Synthetic oligonucleotide
gcacgtaactaataaagttatatgttaatg

SEQ ID NO: 153849 - DNA, 30 bp, Artificial Sequence
  Synthetic oligonucleotide
gcgtttgacacggagcagtattgaaacatg

SEQ ID NO: 153850 - DNA, 30 bp, Artificial Sequence
  Synthetic oligonucleotide
ttgggatgcaacgtgactgtgcacaacatg

SEQ ID NO: 153851 - DNA, 30 bp, Artificial Sequence
  Synthetic oligonucleotide
ggcgtgaaggagatacacggcaagaacatg

SEQ ID NO: 153852 - DNA, 30 bp, Artificial Sequence
  Synthetic oligonucleotide
ccggacaacctagatggctggaaccacatg

SEQ ID NO: 153853 - DNA, 30 bp, Artificial Sequence
  Synthetic oligonucleotide
ttcgtaagtgatcttgcctgaagccacatg

SEQ ID NO: 153854 - DNA, 30 bp, Artificial Sequence
  Synthetic oligonucleotide
gtggtagatcagtcttttcctagccacatg

SEQ ID NO: 153855 - DNA, 30 bp, Artificial Sequence
  Synthetic oligonucleotide
gctatcgggagaagttacacacggcacatg

SEQ ID NO: 153856 - DNA, 30 bp, Artificial Sequence
  Synthetic oligonucleotide
ctagtgtacccgggctccaggaatcacatg

SEQ ID NO: 153857 - DNA, 30 bp, Artificial Sequence
  Synthetic oligonucleotide
gtcatgatagatagacgggcgcgagacatg

SEQ ID NO: 153858 - DNA, 30 bp, Artificial Sequence
  Synthetic oligonucleotide
tgcaaactttgtccgcatgtatccgacatg

SEQ ID NO: 153859 - DNA, 29 bp, Artificial Sequence
  Synthetic oligonucleotide
ctctgggatcaataatgatatgcgacatg

SEQ ID NO: 153860 - DNA, 30 bp, Artificial Sequence
  Synthetic oligonucleotide
ccggtgaaaaggtcctacgcaatggacatg

SEQ ID NO: 153861 - DNA, 30 bp, Artificial Sequence
  Synthetic oligonucleotide
gggaattcggactcgtagaaagttgacatg

SEQ ID NO: 153862 - DNA, 30 bp, Artificial Sequence
  Synthetic oligonucleotide
cgggggattgccattaagcctgtatacatg

SEQ ID NO: 153863 - DNA, 30 bp, Artificial Sequence
  Synthetic oligonucleotide
gacgtctggtccgctctactgagctacatg

SEQ ID NO: 153864 - DNA, 30 bp, Artificial Sequence
  Synthetic oligonucleotide
gtattagtcggtactgtttgagtctacatg

SEQ ID NO: 153865 - DNA, 30 bp, Artificial Sequence
  Synthetic oligonucleotide
gagtccgtttggacggggctcccgtacatg

SEQ ID NO: 153866 - DNA, 30 bp, Artificial Sequence
  Synthetic oligonucleotide
ggtgctgagcgccgttagttaattaccatg

SEQ ID NO: 153867 - DNA, 30 bp, Artificial Sequence
  Synthetic oligonucleotide
taggttcttcgggcttaaccatgccccatg

SEQ ID NO: 153868 - DNA, 30 bp, Artificial Sequence
  Synthetic oligonucleotide
ggataaaaccgatcagacctgatccccatg

SEQ ID NO: 153869 - DNA, 30 bp, Artificial Sequence
  Synthetic oligonucleotide
tgataacaccgaaacttttgttatcccatg

SEQ ID NO: 153870 - DNA, 30 bp, Artificial Sequence
  Synthetic oligonucleotide
atagacttaggtgggggtggacgagccatg

SEQ ID NO: 153871 - DNA, 30 bp, Artificial Sequence
  Synthetic oligonucleotide
gttatactcgttaaattacgatacgccatg

SEQ ID NO: 153872 - DNA, 30 bp, Artificial Sequence
  Synthetic oligonucleotide
aaagtgggtggtacgtaggggcgggccatg

SEQ ID NO: 153873 - DNA, 30 bp, Artificial Sequence
  Synthetic oligonucleotide
gatgttcggtcgtcaagaccagctgccatg

SEQ ID NO: 153874 - DNA, 30 bp, Artificial Sequence
  Synthetic oligonucleotide
gtttgctgtatcaacgtaaaaagatccatg

SEQ ID NO: 153875 - DNA, 30 bp, Artificial Sequence
  Synthetic oligonucleotide
tgcaaaacttatttcagaggctcctccatg

SEQ ID NO: 153876 - DNA, 30 bp, Artificial Sequence
  Synthetic oligonucleotide
acagttccgcgacgtgataaggattccatg

SEQ ID NO: 153877 - DNA, 30 bp, Artificial Sequence
  Synthetic oligonucleotide
aggtgcatccaaccatcgtctgtttccatg

SEQ ID NO: 153878 - DNA, 30 bp, Artificial Sequence
  Synthetic oligonucleotide
cattactcacaatgtcttgagctaagcatg

SEQ ID NO: 153879 - DNA, 30 bp, Artificial Sequence
  Synthetic oligonucleotide
tagtgacgttcaatccgaaggtatagcatg

SEQ ID NO: 153880 - DNA, 30 bp, Artificial Sequence
  Synthetic oligonucleotide
aagggggcgggccctccaggttatagcatg

SEQ ID NO: 153881 - DNA, 30 bp, Artificial Sequence
  Synthetic oligonucleotide
tcaggcaagtgatatgtacgctcacgcatg

SEQ ID NO: 153882 - DNA, 30 bp, Artificial Sequence
  Synthetic oligonucleotide
cccactaacttccctatgccctatcgcatg

SEQ ID NO: 153883 - DNA, 31 bp, Artificial Sequence
  Synthetic oligonucleotide
ttgggctcacaaagctctgatgtctcgcatg

SEQ ID NO: 153884 - DNA, 30 bp, Artificial Sequence
  Synthetic oligonucleotide
ccagattagcagcacgaaaggaggggcatg

SEQ ID NO: 153885 - DNA, 30 bp, Artificial Sequence
  Synthetic oligonucleotide
ggtaaattacccactccgcacgatggcatg

SEQ ID NO: 153886 - DNA, 30 bp, Artificial Sequence
  Synthetic oligonucleotide
agaagattaagcgcgcgccaaggtggcatg

SEQ ID NO: 153887 - DNA, 30 bp, Artificial Sequence
  Synthetic oligonucleotide
ttgtacaatccatgggggacccactgcatg

SEQ ID NO: 153888 - DNA, 30 bp, Artificial Sequence
  Synthetic oligonucleotide
gtgcactataggcgtagtgcgatctgcatg

SEQ ID NO: 153889 - DNA, 30 bp, Artificial Sequence
  Synthetic oligonucleotide
gagacgtgggtaataactggctaaatcatg

SEQ ID NO: 153890 - DNA, 30 bp, Artificial Sequence
  Synthetic oligonucleotide
cccacgtggacaaggagtaaactcatcatg

SEQ ID NO: 153891 - DNA, 30 bp, Artificial Sequence
  Synthetic oligonucleotide
gctcaatacctattccggtcttgtatcatg

SEQ ID NO: 153892 - DNA, 30 bp, Artificial Sequence
  Synthetic oligonucleotide
aattggtacattgaccgggaatcactcatg

SEQ ID NO: 153893 - DNA, 30 bp, Artificial Sequence
  Synthetic oligonucleotide
tgggaacgcacatagaaggatgtactcatg

SEQ ID NO: 153894 - DNA, 30 bp, Artificial Sequence
  Synthetic oligonucleotide
acagactgcaacggctaagccttcctcatg

SEQ ID NO: 153895 - DNA, 31 bp, Artificial Sequence
  Synthetic oligonucleotide
taattcggtaaaaaggactactttcctcatg

SEQ ID NO: 153896 - DNA, 30 bp, Artificial Sequence
  Synthetic oligonucleotide
catctcggtaggtccgaaacattgctcatg

SEQ ID NO: 153897 - DNA, 30 bp, Artificial Sequence
  Synthetic oligonucleotide
cgaggatgcagggcctcgacaattctcatg

SEQ ID NO: 153898 - DNA, 30 bp, Artificial Sequence
  Synthetic oligonucleotide
ggaactgcaaccaagaactaattcgtcatg

SEQ ID NO: 153899 - DNA, 30 bp, Artificial Sequence
  Synthetic oligonucleotide
ctgtgtccctcgcctgtgcgcctggtcatg

SEQ ID NO: 153900 - DNA, 30 bp, Artificial Sequence
  Synthetic oligonucleotide
acagtagtaatggaacccgtgcatgtcatg

SEQ ID NO: 153901 - DNA, 30 bp, Artificial Sequence
  Synthetic oligonucleotide
gattcaggaattgcgtcctggaggttcatg

SEQ ID NO: 153902 - DNA, 30 bp, Artificial Sequence
  Synthetic oligonucleotide
accgagcaattgtgattctggaatttcatg

SEQ ID NO: 153903 - DNA, 30 bp, Artificial Sequence
  Synthetic oligonucleotide
aactgggcaaacgggataagatgtttcatg

SEQ ID NO: 153904 - DNA, 30 bp, Artificial Sequence
  Synthetic oligonucleotide
aagctggtcttcaccactatcgtaaagatg

SEQ ID NO: 153905 - DNA, 30 bp, Artificial Sequence
  Synthetic oligonucleotide
aagggggtgaacttctttaagcacaagatg

SEQ ID NO: 153906 - DNA, 30 bp, Artificial Sequence
  Synthetic oligonucleotide
gtcagattgtaattgctaatctacaagatg

SEQ ID NO: 153907 - DNA, 30 bp, Artificial Sequence
  Synthetic oligonucleotide
gtcgtatcgttgactagtgtcgagaagatg

SEQ ID NO: 153908 - DNA, 30 bp, Artificial Sequence
  Synthetic oligonucleotide
gtggtcgaggtaggcccgggtatgaagatg

SEQ ID NO: 153909 - DNA, 30 bp, Artificial Sequence
  Synthetic oligonucleotide
gtaggtccttcgcgcgaaacccagcagatg

SEQ ID NO: 153910 - DNA, 30 bp, Artificial Sequence
  Synthetic oligonucleotide
ttagacataagagaggcgcccaggcagatg

SEQ ID NO: 153911 - DNA, 31 bp, Artificial Sequence
  Synthetic oligonucleotide
tctctctgttgtatgcccaggccggcagatg

SEQ ID NO: 153912 - DNA, 30 bp, Artificial Sequence
  Synthetic oligonucleotide
tagggaagagtcgtaagcgccgctcagatg

SEQ ID NO: 153913 - DNA, 30 bp, Artificial Sequence
  Synthetic oligonucleotide
gcagtagtaaacgaatcggtctcagagatg

SEQ ID NO: 153914 - DNA, 30 bp, Artificial Sequence
  Synthetic oligonucleotide
ttccagaagaatccaagaggatccgagatg

SEQ ID NO: 153915 - DNA, 30 bp, Artificial Sequence
  Synthetic oligonucleotide
acactatcggggtcctagggcctcgagatg

SEQ ID NO: 153916 - DNA, 30 bp, Artificial Sequence
  Synthetic oligonucleotide
catcacgctcttcagttcggggtcgagatg

SEQ ID NO: 153917 - DNA, 30 bp, Artificial Sequence
  Synthetic oligonucleotide
aatagccggggactcgagggatgggagatg

SEQ ID NO: 153918 - DNA, 30 bp, Artificial Sequence
  Synthetic oligonucleotide
cggaccggaacctttcgtggttgaacgatg

SEQ ID NO: 153919 - DNA, 30 bp, Artificial Sequence
  Synthetic oligonucleotide
cttgagtcatagttacttggagtaacgatg

SEQ ID NO: 153920 - DNA, 30 bp, Artificial Sequence
  Synthetic oligonucleotide
gcacaaatgataattccctaaggtacgatg

SEQ ID NO: 153921 - DNA, 30 bp, Artificial Sequence
  Synthetic oligonucleotide
cctattcgggtatgcccaaccttaccgatg

SEQ ID NO: 153922 - DNA, 30 bp, Artificial Sequence
  Synthetic oligonucleotide
acggtcgggacttattacgataagccgatg

SEQ ID NO: 153923 - DNA, 30 bp, Artificial Sequence
  Synthetic oligonucleotide
tcggacaggtgcttagagggacctccgatg

SEQ ID NO: 153924 - DNA, 30 bp, Artificial Sequence
  Synthetic oligonucleotide
cccgagtctaattaccaagacctagcgatg

SEQ ID NO: 153925 - DNA, 30 bp, Artificial Sequence
  Synthetic oligonucleotide
agcgggtgctgtggctcccgacatgcgatg

SEQ ID NO: 153926 - DNA, 30 bp, Artificial Sequence
  Synthetic oligonucleotide
cgtagatactgccaagccgtgattgcgatg

SEQ ID NO: 153927 - DNA, 30 bp, Artificial Sequence
  Synthetic oligonucleotide
taccgaatgttaaaagcagaacaatcgatg

SEQ ID NO: 153928 - DNA, 30 bp, Artificial Sequence
  Synthetic oligonucleotide
tgtttcagtcgaaggggagagtcatcgatg

SEQ ID NO: 153929 - DNA, 30 bp, Artificial Sequence
  Synthetic oligonucleotide
tggcgtttgattactcaggtaatatcgatg

SEQ ID NO: 153930 - DNA, 30 bp, Artificial Sequence
  Synthetic oligonucleotide
atgtaaaaacggaaacactattattcgatg

SEQ ID NO: 153931 - DNA, 30 bp, Artificial Sequence
  Synthetic oligonucleotide
cctgtgattaagatccgacgcctttcgatg

SEQ ID NO: 153932 - DNA, 30 bp, Artificial Sequence
  Synthetic oligonucleotide
tccgggctccggctagcaaaataaaggatg

SEQ ID NO: 153933 - DNA, 30 bp, Artificial Sequence
  Synthetic oligonucleotide
agcgagggcaaggacctggggcgaaggatg

SEQ ID NO: 153934 - DNA, 30 bp, Artificial Sequence
  Synthetic oligonucleotide
gtactgtgaaaaagcaaaaggtgcaggatg

SEQ ID NO: 153935 - DNA, 30 bp, Artificial Sequence
  Synthetic oligonucleotide
tgtcgttctgctcaaccccgcgtcaggatg

SEQ ID NO: 153936 - DNA, 30 bp, Artificial Sequence
  Synthetic oligonucleotide
acctagcgattaggctatcctaagaggatg

SEQ ID NO: 153937 - DNA, 30 bp, Artificial Sequence
  Synthetic oligonucleotide
agcaaagtgggacgataattctgtaggatg

SEQ ID NO: 153938 - DNA, 30 bp, Artificial Sequence
  Synthetic oligonucleotide
taatggactgcttgggttgattttaggatg

SEQ ID NO: 153939 - DNA, 30 bp, Artificial Sequence
  Synthetic oligonucleotide
ctgcagcgaatttatagagggtttcggatg

SEQ ID NO: 153940 - DNA, 30 bp, Artificial Sequence
  Synthetic oligonucleotide
gactcacgggctgcagttgaaggagggatg

SEQ ID NO: 153941 - DNA, 30 bp, Artificial Sequence
  Synthetic oligonucleotide
agtgagaggtatcgaaggatcggagggatg

SEQ ID NO: 153942 - DNA, 30 bp, Artificial Sequence
  Synthetic oligonucleotide
cacgccgtcagacccaactgactagggatg

SEQ ID NO: 153943 - DNA, 30 bp, Artificial Sequence
  Synthetic oligonucleotide
accatcaaagatgggggttcgcacgggatg

SEQ ID NO: 153944 - DNA, 30 bp, Artificial Sequence
  Synthetic oligonucleotide
gagcattataggcgcatcggagccgggatg

SEQ ID NO: 153945 - DNA, 30 bp, Artificial Sequence
  Synthetic oligonucleotide
gtaaattgataagaagttaataaggggatg

SEQ ID NO: 153946 - DNA, 30 bp, Artificial Sequence
  Synthetic oligonucleotide
gaaagcttcgtactgttcgttactgggatg

SEQ ID NO: 153947 - DNA, 30 bp, Artificial Sequence
  Synthetic oligonucleotide
agtcggcactagggctgattcaaatggatg

SEQ ID NO: 153948 - DNA, 30 bp, Artificial Sequence
  Synthetic oligonucleotide
caacggataaaggatagtcctttcatgatg

SEQ ID NO: 153949 - DNA, 30 bp, Artificial Sequence
  Synthetic oligonucleotide
ggggatgtctgccagattagcacgatgatg

SEQ ID NO: 153950 - DNA, 30 bp, Artificial Sequence
  Synthetic oligonucleotide
ccgctttagatcaagatgactattatgatg

SEQ ID NO: 153951 - DNA, 30 bp, Artificial Sequence
  Synthetic oligonucleotide
tgtagaccctcatgttgctgggttatgatg

SEQ ID NO: 153952 - DNA, 30 bp, Artificial Sequence
  Synthetic oligonucleotide
gtcaacgagcccgttgcaagtttcctgatg

SEQ ID NO: 153953 - DNA, 30 bp, Artificial Sequence
  Synthetic oligonucleotide
tcaagtatggctgctagggatagtctgatg

SEQ ID NO: 153954 - DNA, 30 bp, Artificial Sequence
  Synthetic oligonucleotide
cttgtggcacggcgaacggggtgtgtgatg

SEQ ID NO: 153955 - DNA, 30 bp, Artificial Sequence
  Synthetic oligonucleotide
gtagagctccgtactccgcggtcattgatg

SEQ ID NO: 153956 - DNA, 30 bp, Artificial Sequence
  Synthetic oligonucleotide
cgcgcggcaagtaattactattagttgatg

SEQ ID NO: 153957 - DNA, 30 bp, Artificial Sequence
  Synthetic oligonucleotide
atgggtgacagttattgactacgaaatatg

SEQ ID NO: 153958 - DNA, 30 bp, Artificial Sequence
  Synthetic oligonucleotide
agctatcgggtcaagtccgctatcaatatg

SEQ ID NO: 153959 - DNA, 30 bp, Artificial Sequence
  Synthetic oligonucleotide
ctgaggagccctctgcctaagcagaatatg

SEQ ID NO: 153960 - DNA, 30 bp, Artificial Sequence
  Synthetic oligonucleotide
taaacttctatgggcaggtgatagaatatg

SEQ ID NO: 153961 - DNA, 30 bp, Artificial Sequence
  Synthetic oligonucleotide
gggatcacgacgttattgcggaggaatatg

SEQ ID NO: 153962 - DNA, 30 bp, Artificial Sequence
  Synthetic oligonucleotide
acgtttagaatctcctgcacggataatatg

SEQ ID NO: 153963 - DNA, 30 bp, Artificial Sequence
  Synthetic oligonucleotide
tcgtggtctttgccatacctaccacatatg

SEQ ID NO: 153964 - DNA, 30 bp, Artificial Sequence
  Synthetic oligonucleotide
gttcaaagtcaacaaaactcatgacatatg

SEQ ID NO: 153965 - DNA, 30 bp, Artificial Sequence
  Synthetic oligonucleotide
aggcccatgcgcaaagccagaaggcatatg

SEQ ID NO: 153966 - DNA, 30 bp, Artificial Sequence
  Synthetic oligonucleotide
tccagtaggaatagcacagtgtttcatatg

SEQ ID NO: 153967 - DNA, 30 bp, Artificial Sequence
  Synthetic oligonucleotide
gctaccgaaaatagggctcgggtagatatg

SEQ ID NO: 153968 - DNA, 30 bp, Artificial Sequence
  Synthetic oligonucleotide
caacgttcatgcggtgataagcgcgatatg

SEQ ID NO: 153969 - DNA, 30 bp, Artificial Sequence
  Synthetic oligonucleotide
tgaataccactagggccgcactgcgatatg

SEQ ID NO: 153970 - DNA, 30 bp, Artificial Sequence
  Synthetic oligonucleotide
aggacctcgagccaggcgggtttcgatatg

SEQ ID NO: 153971 - DNA, 30 bp, Artificial Sequence
  Synthetic oligonucleotide
gccggcagatggtcaaccgcgttggatatg

SEQ ID NO: 153972 - DNA, 30 bp, Artificial Sequence
  Synthetic oligonucleotide
agataattggtggaattcacgattgatatg

SEQ ID NO: 153973 - DNA, 30 bp, Artificial Sequence
  Synthetic oligonucleotide
acacataaacagtaaccaagttcatatatg

SEQ ID NO: 153974 - DNA, 30 bp, Artificial Sequence
  Synthetic oligonucleotide
cgttaatgctggctaaaatgccattatatg

SEQ ID NO: 153975 - DNA, 30 bp, Artificial Sequence
  Synthetic oligonucleotide
cacacacgggatttcctacagtattatatg

SEQ ID NO: 153976 - DNA, 30 bp, Artificial Sequence
  Synthetic oligonucleotide
agtaatgaatagaagatcgtcacttatatg

SEQ ID NO: 153977 - DNA, 30 bp, Artificial Sequence
  Synthetic oligonucleotide
gcgcctacagcggcaatcgatgcttatatg

SEQ ID NO: 153978 - DNA, 30 bp, Artificial Sequence
  Synthetic oligonucleotide
cggagaatcgaggtagcactagacactatg

SEQ ID NO: 153979 - DNA, 30 bp, Artificial Sequence
  Synthetic oligonucleotide
acgtacacgtttggagcgcatgtcactatg

SEQ ID NO: 153980 - DNA, 30 bp, Artificial Sequence
  Synthetic oligonucleotide
atgaagatacgagccggcttcgggactatg

SEQ ID NO: 153981 - DNA, 30 bp, Artificial Sequence
  Synthetic oligonucleotide
caaggagggatcgtatgtctaacacctatg

SEQ ID NO: 153982 - DNA, 30 bp, Artificial Sequence
  Synthetic oligonucleotide
ccgtagcctatggttattatgggcgctatg

SEQ ID NO: 153983 - DNA, 30 bp, Artificial Sequence
  Synthetic oligonucleotide
aagctcaatcaagttcgttagacggctatg

SEQ ID NO: 153984 - DNA, 31 bp, Artificial Sequence
  Synthetic oligonucleotide
tgggatactttctggataagttccatctatg

SEQ ID NO: 153985 - DNA, 30 bp, Artificial Sequence
  Synthetic oligonucleotide
gtcacgttcggtctctctactcgatctatg

SEQ ID NO: 153986 - DNA, 30 bp, Artificial Sequence
  Synthetic oligonucleotide
taaaaataacgaagaccgacgccctctatg

SEQ ID NO: 153987 - DNA, 30 bp, Artificial Sequence
  Synthetic oligonucleotide
atatgcagtttcgcttgtcggcggtctatg

SEQ ID NO: 153988 - DNA, 30 bp, Artificial Sequence
  Synthetic oligonucleotide
agtcgtatataacggggttcgatgtctatg

SEQ ID NO: 153989 - DNA, 30 bp, Artificial Sequence
  Synthetic oligonucleotide
gtctcctttcgaaacgacctgcaaagtatg

SEQ ID NO: 153990 - DNA, 30 bp, Artificial Sequence
  Synthetic oligonucleotide
gctaacaactatcaaatgggataaagtatg

SEQ ID NO: 153991 - DNA, 30 bp, Artificial Sequence
  Synthetic oligonucleotide
tgcccgattcggtaggccactagcagtatg

SEQ ID NO: 153992 - DNA, 30 bp, Artificial Sequence
  Synthetic oligonucleotide
aagacgacgtacgggacgcactatagtatg

SEQ ID NO: 153993 - DNA, 30 bp, Artificial Sequence
  Synthetic oligonucleotide
tactgttgattggggtctctggggcgtatg

SEQ ID NO: 153994 - DNA, 31 bp, Artificial Sequence
  Synthetic oligonucleotide
atatggaagagtggccgaggtactgcgtatg

SEQ ID NO: 153995 - DNA, 30 bp, Artificial Sequence
  Synthetic oligonucleotide
cgccgatgcaaacgctaaagggtgcgtatg

SEQ ID NO: 153996 - DNA, 30 bp, Artificial Sequence
  Synthetic oligonucleotide
ccgtgtatatgcccttccgacacaggtatg

SEQ ID NO: 153997 - DNA, 30 bp, Artificial Sequence
  Synthetic oligonucleotide
cagcttgccgtacgggttcttcgaggtatg

SEQ ID NO: 153998 - DNA, 30 bp, Artificial Sequence
  Synthetic oligonucleotide
gaaatcttcgttcttgacaatgagggtatg

SEQ ID NO: 153999 - DNA, 30 bp, Artificial Sequence
  Synthetic oligonucleotide
ttcgtaaggttctaaggacgacggggtatg

SEQ ID NO: 154000 - DNA, 30 bp, Artificial Sequence
  Synthetic oligonucleotide
gatcgctcaggactgcaaattcggggtatg

SEQ ID NO: 154001 - DNA, 30 bp, Artificial Sequence
  Synthetic oligonucleotide
agggattgcttaatcttcgagcttggtatg

SEQ ID NO: 154002 - DNA, 30 bp, Artificial Sequence
  Synthetic oligonucleotide
tcatcgtctggaatcaagaggcgatgtatg

SEQ ID NO: 154003 - DNA, 30 bp, Artificial Sequence
  Synthetic oligonucleotide
tgctcgatcaatagtggtaccttttgtatg

SEQ ID NO: 154004 - DNA, 30 bp, Artificial Sequence
  Synthetic oligonucleotide
gctagcgactcgtataagagcgacattatg

SEQ ID NO: 154005 - DNA, 30 bp, Artificial Sequence
  Synthetic oligonucleotide
actattgacagcaacctgaccaccattatg

SEQ ID NO: 154006 - DNA, 30 bp, Artificial Sequence
  Synthetic oligonucleotide
acccccagctagagaaagatgtagattatg

SEQ ID NO: 154007 - DNA, 30 bp, Artificial Sequence
  Synthetic oligonucleotide
acatttaaagctctaatacccgggattatg

SEQ ID NO: 154008 - DNA, 30 bp, Artificial Sequence
  Synthetic oligonucleotide
gatagtctccacggacaattcattattatg

SEQ ID NO: 154009 - DNA, 30 bp, Artificial Sequence
  Synthetic oligonucleotide
catccacagagatcgaatctgagacttatg

SEQ ID NO: 154010 - DNA, 30 bp, Artificial Sequence
  Synthetic oligonucleotide
agggacggctaggagcaccgattacttatg

SEQ ID NO: 154011 - DNA, 30 bp, Artificial Sequence
  Synthetic oligonucleotide
tgaaaaggcggtactgaacttttacttatg

SEQ ID NO: 154012 - DNA, 30 bp, Artificial Sequence
  Synthetic oligonucleotide
cttacggccacgatttgtggtacgcttatg

SEQ ID NO: 154013 - DNA, 30 bp, Artificial Sequence
  Synthetic oligonucleotide
cgcgacaaacaaaaacttgcgtctcttatg

SEQ ID NO: 154014 - DNA, 30 bp, Artificial Sequence
  Synthetic oligonucleotide
tatctgaagcacgaatataaaggcgttatg

SEQ ID NO: 154015 - DNA, 30 bp, Artificial Sequence
  Synthetic oligonucleotide
ggattcagagaggctagagaacttgttatg

SEQ ID NO: 154016 - DNA, 30 bp, Artificial Sequence
  Synthetic oligonucleotide
agattccaacgaacgctaatgacctttatg

SEQ ID NO: 154017 - DNA, 30 bp, Artificial Sequence
  Synthetic oligonucleotide
ccaggtaaagagtacgacagatcctttatg

SEQ ID NO: 154018 - DNA, 30 bp, Artificial Sequence
  Synthetic oligonucleotide
gacttaatatgacatggggggtagtttatg

SEQ ID NO: 154019 - DNA, 30 bp, Artificial Sequence
  Synthetic oligonucleotide
agtgatggacaacctgtaacccattttatg

SEQ ID NO: 154020 - DNA, 30 bp, Artificial Sequence
  Synthetic oligonucleotide
gccgggtgggggagtaaattctgttttatg

SEQ ID NO: 154021 - DNA, 30 bp, Artificial Sequence
  Synthetic oligonucleotide
gagcgtgaacacctgttgtaagcaaaactg

SEQ ID NO: 154022 - DNA, 30 bp, Artificial Sequence
  Synthetic oligonucleotide
acgatggcgttaaggtgaggcttgaaactg

SEQ ID NO: 154023 - DNA, 30 bp, Artificial Sequence
  Synthetic oligonucleotide
agtgtatagggcccaggaagtcataaactg

SEQ ID NO: 154024 - DNA, 30 bp, Artificial Sequence
  Synthetic oligonucleotide
gtaggcgaatcagattggtcaagtaaactg

SEQ ID NO: 154025 - DNA, 30 bp, Artificial Sequence
  Synthetic oligonucleotide
gactccgcggcaaattgcactattaaactg

SEQ ID NO: 154026 - DNA, 30 bp, Artificial Sequence
  Synthetic oligonucleotide
gacctcctagtgacaggggtagtacaactg

SEQ ID NO: 154027 - DNA, 30 bp, Artificial Sequence
  Synthetic oligonucleotide
aattgaccaatccccaaatgctcccaactg

SEQ ID NO: 154028 - DNA, 30 bp, Artificial Sequence
  Synthetic oligonucleotide
ataactgagatggatattgcagtgcaactg

SEQ ID NO: 154029 - DNA, 30 bp, Artificial Sequence
  Synthetic oligonucleotide
taagcgggatctcgctggagaacagaactg

SEQ ID NO: 154030 - DNA, 30 bp, Artificial Sequence
  Synthetic oligonucleotide
tgcggcatgtgattgaagcctggagaactg

SEQ ID NO: 154031 - DNA, 30 bp, Artificial Sequence
  Synthetic oligonucleotide
gactcaatacgttaggccgcatcggaactg

SEQ ID NO: 154032 - DNA, 30 bp, Artificial Sequence
  Synthetic oligonucleotide
ctactgatcaacgatcacagcatataactg

SEQ ID NO: 154033 - DNA, 30 bp, Artificial Sequence
  Synthetic oligonucleotide
gctcaaccgtatacacatgcgatataactg

SEQ ID NO: 154034 - DNA, 30 bp, Artificial Sequence
  Synthetic oligonucleotide
cactaagggtaaggggccaactggtaactg

SEQ ID NO: 154035 - DNA, 30 bp, Artificial Sequence
  Synthetic oligonucleotide
ccaaacgcgctagaaattgcaggaacactg

SEQ ID NO: 154036 - DNA, 30 bp, Artificial Sequence
  Synthetic oligonucleotide
cattgtagcagtttattctatggaacactg

SEQ ID NO: 154037 - DNA, 30 bp, Artificial Sequence
  Synthetic oligonucleotide
ggcgacacttttgtctcgttatgaacactg

SEQ ID NO: 154038 - DNA, 30 bp, Artificial Sequence
  Synthetic oligonucleotide
ggccagttatggcttataggagagacactg

SEQ ID NO: 154039 - DNA, 30 bp, Artificial Sequence
  Synthetic oligonucleotide
gtattgggaggtgaaggacagcctacactg

SEQ ID NO: 154040 - DNA, 30 bp, Artificial Sequence
  Synthetic oligonucleotide
tggggaaaggtcggagcggctggtacactg

SEQ ID NO: 154041 - DNA, 30 bp, Artificial Sequence
  Synthetic oligonucleotide
ggcacctgggggaatgacccatttacactg

SEQ ID NO: 154042 - DNA, 30 bp, Artificial Sequence
  Synthetic oligonucleotide
ccgcttcatgccctatcagaggtcccactg

SEQ ID NO: 154043 - DNA, 30 bp, Artificial Sequence
  Synthetic oligonucleotide
acacggttgcactgcgactagggagcactg

SEQ ID NO: 154044 - DNA, 30 bp, Artificial Sequence
  Synthetic oligonucleotide
acgccttatgtaaatagagcggtcgcactg

SEQ ID NO: 154045 - DNA, 30 bp, Artificial Sequence
  Synthetic oligonucleotide
tgcaatgcgttcctaaaccttgtggcactg

SEQ ID NO: 154046 - DNA, 30 bp, Artificial Sequence
  Synthetic oligonucleotide
ccactaattggaatcactcgaaatgcactg

SEQ ID NO: 154047 - DNA, 30 bp, Artificial Sequence
  Synthetic oligonucleotide
tcgggtacaaaatctcgctccgctgcactg

SEQ ID NO: 154048 - DNA, 30 bp, Artificial Sequence
  Synthetic oligonucleotide
tgaaaagggcggtaacaaaaggttgcactg

SEQ ID NO: 154049 - DNA, 30 bp, Artificial Sequence
  Synthetic oligonucleotide
caagaaattctctaatagtgcaaatcactg

SEQ ID NO: 154050 - DNA, 30 bp, Artificial Sequence
  Synthetic oligonucleotide
gatgttgggcgcggtttaaggcgatcactg

SEQ ID NO: 154051 - DNA, 30 bp, Artificial Sequence
  Synthetic oligonucleotide
gggacttccctagtcgataccggatcactg

SEQ ID NO: 154052 - DNA, 30 bp, Artificial Sequence
  Synthetic oligonucleotide
gcctctcggagcggcttgccatcctcactg

SEQ ID NO: 154053 - DNA, 30 bp, Artificial Sequence
  Synthetic oligonucleotide
cccccagtgcagtgagggacgtgaagactg

SEQ ID NO: 154054 - DNA, 30 bp, Artificial Sequence
  Synthetic oligonucleotide
atcctttgggtggacggcatgaagagactg

SEQ ID NO: 154055 - DNA, 30 bp, Artificial Sequence
  Synthetic oligonucleotide
ttggatatgagggctcaacgcgagagactg

SEQ ID NO: 154056 - DNA, 30 bp, Artificial Sequence
  Synthetic oligonucleotide
cgttgctagtgcccagatgaggcccgactg

SEQ ID NO: 154057 - DNA, 30 bp, Artificial Sequence
  Synthetic oligonucleotide
caacttccccggagtcattatactcgactg

SEQ ID NO: 154058 - DNA, 30 bp, Artificial Sequence
  Synthetic oligonucleotide
aggtggagtatctctgatccagcaggactg

SEQ ID NO: 154059 - DNA, 30 bp, Artificial Sequence
  Synthetic oligonucleotide
cggatattcttgcttgtcgccgacggactg

SEQ ID NO: 154060 - DNA, 30 bp, Artificial Sequence
  Synthetic oligonucleotide
attgaaccactataagctagtacatgactg

SEQ ID NO: 154061 - DNA, 30 bp, Artificial Sequence
  Synthetic oligonucleotide
agagaggcattgtggtggcctagatgactg

SEQ ID NO: 154062 - DNA, 30 bp, Artificial Sequence
  Synthetic oligonucleotide
acactaatccacttgcgctttgcgtgactg

SEQ ID NO: 154063 - DNA, 30 bp, Artificial Sequence
  Synthetic oligonucleotide
aggtatacagcatgaagcgtcgacatactg

SEQ ID NO: 154064 - DNA, 30 bp, Artificial Sequence
  Synthetic oligonucleotide
aggagacgcgagcgaagttaacgcatactg

SEQ ID NO: 154065 - DNA, 30 bp, Artificial Sequence
  Synthetic oligonucleotide
gaggtaacgatttgtttctatggcatactg

SEQ ID NO: 154066 - DNA, 30 bp, Artificial Sequence
  Synthetic oligonucleotide
tgttgacaacagccgggttaagtgatactg

SEQ ID NO: 154067 - DNA, 30 bp, Artificial Sequence
  Synthetic oligonucleotide
cgttccgcatggaaaaacgagtacctactg

SEQ ID NO: 154068 - DNA, 30 bp, Artificial Sequence
  Synthetic oligonucleotide
aggtggattgggtcgccactggaagtactg

SEQ ID NO: 154069 - DNA, 30 bp, Artificial Sequence
  Synthetic oligonucleotide
gatggcagatcagcgccagcgtcagtactg

SEQ ID NO: 154070 - DNA, 30 bp, Artificial Sequence
  Synthetic oligonucleotide
gaagatacacagcaatagctgatagtactg

SEQ ID NO: 154071 - DNA, 30 bp, Artificial Sequence
  Synthetic oligonucleotide
actaaggaggcgtctaccaaaagcgtactg

SEQ ID NO: 154072 - DNA, 30 bp, Artificial Sequence
  Synthetic oligonucleotide
gacgcgtaaaacaccggtataggcgtactg

SEQ ID NO: 154073 - DNA, 30 bp, Artificial Sequence
  Synthetic oligonucleotide
gcacgagtggtacggtcagggtaggtactg

SEQ ID NO: 154074 - DNA, 30 bp, Artificial Sequence
  Synthetic oligonucleotide
gggcacaattgtcgatatttgcgggtactg

SEQ ID NO: 154075 - DNA, 30 bp, Artificial Sequence
  Synthetic oligonucleotide
caacgagtgcagtatttctaatgggtactg

SEQ ID NO: 154076 - DNA, 30 bp, Artificial Sequence
  Synthetic oligonucleotide
gtataggacgcccgcctgggcaatgtactg

SEQ ID NO: 154077 - DNA, 30 bp, Artificial Sequence
  Synthetic oligonucleotide
tcttggccatactacgcacaattcttactg

SEQ ID NO: 154078 - DNA, 30 bp, Artificial Sequence
  Synthetic oligonucleotide
tcactctggaactgaagtaattagttactg

SEQ ID NO: 154079 - DNA, 30 bp, Artificial Sequence
  Synthetic oligonucleotide
acgctcacatactaaagctgacatttactg

SEQ ID NO: 154080 - DNA, 30 bp, Artificial Sequence
  Synthetic oligonucleotide
tacagtacggatgctcggataaaaaacctg

SEQ ID NO: 154081 - DNA, 30 bp, Artificial Sequence
  Synthetic oligonucleotide
aagaccattaaagggcgtgcatccaacctg

SEQ ID NO: 154082 - DNA, 30 bp, Artificial Sequence
  Synthetic oligonucleotide
gtggcaccttcctcgaatgtgctccacctg

SEQ ID NO: 154083 - DNA, 30 bp, Artificial Sequence
  Synthetic oligonucleotide
tgttcggacttcagacgaaccttgcacctg

SEQ ID NO: 154084 - DNA, 30 bp, Artificial Sequence
  Synthetic oligonucleotide
ttatggtgtggacaaatctattttgacctg

SEQ ID NO: 154085 - DNA, 30 bp, Artificial Sequence
  Synthetic oligonucleotide
aagggagaatcagttgattggacttacctg

SEQ ID NO: 154086 - DNA, 30 bp, Artificial Sequence
  Synthetic oligonucleotide
tgcgttatttgcgcataaggaagttacctg

SEQ ID NO: 154087 - DNA, 30 bp, Artificial Sequence
  Synthetic oligonucleotide
tccggtaatctaataagacgactttacctg

SEQ ID NO: 154088 - DNA, 31 bp, Artificial Sequence
  Synthetic oligonucleotide
tgctaagggcacagcagatcttgtgaccctg

SEQ ID NO: 154089 - DNA, 30 bp, Artificial Sequence
  Synthetic oligonucleotide
aacaatggtggtgggaccagccttaccctg

SEQ ID NO: 154090 - DNA, 30 bp, Artificial Sequence
  Synthetic oligonucleotide
aaagaggaaaagagtgacaggcttaccctg

SEQ ID NO: 154091 - DNA, 30 bp, Artificial Sequence
  Synthetic oligonucleotide
taaagcggtattgtatgtgatggccccctg

SEQ ID NO: 154092 - DNA, 30 bp, Artificial Sequence
  Synthetic oligonucleotide
tctcggtaaggggagaattcaaaagccctg

SEQ ID NO: 154093 - DNA, 30 bp, Artificial Sequence
  Synthetic oligonucleotide
cttcgcgcgggccgatcctccagagccctg

SEQ ID NO: 154094 - DNA, 30 bp, Artificial Sequence
  Synthetic oligonucleotide
atataagcataagtctcggtacacgccctg

SEQ ID NO: 154095 - DNA, 30 bp, Artificial Sequence
  Synthetic oligonucleotide
aggaagcttgttctcgcccagggggccctg

SEQ ID NO: 154096 - DNA, 30 bp, Artificial Sequence
  Synthetic oligonucleotide
tcgcgggttgtaacgagtgagtctgccctg

SEQ ID NO: 154097 - DNA, 30 bp, Artificial Sequence
  Synthetic oligonucleotide
cttagcatagtgagaggaacgtcgtccctg

SEQ ID NO: 154098 - DNA, 30 bp, Artificial Sequence
  Synthetic oligonucleotide
acgaagcgagtggtagtcacaacttccctg

SEQ ID NO: 154099 - DNA, 30 bp, Artificial Sequence
  Synthetic oligonucleotide
ggttagggcacgcattgcctgagaagcctg

SEQ ID NO: 154100 - DNA, 30 bp, Artificial Sequence
  Synthetic oligonucleotide
cctggtaagtgtaaataagttataagcctg

SEQ ID NO: 154101 - DNA, 30 bp, Artificial Sequence
  Synthetic oligonucleotide
cgggagcggcgttcgcaattgacgagcctg

SEQ ID NO: 154102 - DNA, 30 bp, Artificial Sequence
  Synthetic oligonucleotide
tcggtggtgacctcggaagagtatagcctg

SEQ ID NO: 154103 - DNA, 30 bp, Artificial Sequence
  Synthetic oligonucleotide
aaaccgggtcgatggaagtcagttagcctg

SEQ ID NO: 154104 - DNA, 30 bp, Artificial Sequence
  Synthetic oligonucleotide
ctctcccgcgaaggattcccgtgtcgcctg

SEQ ID NO: 154105 - DNA, 30 bp, Artificial Sequence
  Synthetic oligonucleotide
tcacaaatcgcatagagttatttcggcctg

SEQ ID NO: 154106 - DNA, 30 bp, Artificial Sequence
  Synthetic oligonucleotide
aaactggctagctgggtggatgaatgcctg

SEQ ID NO: 154107 - DNA, 30 bp, Artificial Sequence
  Synthetic oligonucleotide
cgtgtagtctgcgacaacactagctgcctg

SEQ ID NO: 154108 - DNA, 30 bp, Artificial Sequence
  Synthetic oligonucleotide
gccaacatagtttaggaccgatgaatcctg

SEQ ID NO: 154109 - DNA, 30 bp, Artificial Sequence
  Synthetic oligonucleotide
tttctgatattcgacaatttgtgactcctg

SEQ ID NO: 154110 - DNA, 30 bp, Artificial Sequence
  Synthetic oligonucleotide
ctggaacgggctacgtgctgtacggtcctg

SEQ ID NO: 154111 - DNA, 30 bp, Artificial Sequence
  Synthetic oligonucleotide
acatcgggtcatttcataagctatgtcctg

SEQ ID NO: 154112 - DNA, 30 bp, Artificial Sequence
  Synthetic oligonucleotide
ctcgtcactagaagtcaattccgattcctg

SEQ ID NO: 154113 - DNA, 30 bp, Artificial Sequence
  Synthetic oligonucleotide
catctagtggggcacctctaaatattcctg

SEQ ID NO: 154114 - DNA, 30 bp, Artificial Sequence
  Synthetic oligonucleotide
aatgcgcgatctgacaattggtacaagctg

SEQ ID NO: 154115 - DNA, 30 bp, Artificial Sequence
  Synthetic oligonucleotide
cacgtctgcttaggaagatcgatcaagctg

SEQ ID NO: 154116 - DNA, 30 bp, Artificial Sequence
  Synthetic oligonucleotide
catcaaacagtcttatgtcggattaagctg

SEQ ID NO: 154117 - DNA, 30 bp, Artificial Sequence
  Synthetic oligonucleotide
ttggcgtcagtagtgaaccttctacagctg

SEQ ID NO: 154118 - DNA, 30 bp, Artificial Sequence
  Synthetic oligonucleotide
acgcaggttgatcccactcttttccagctg

SEQ ID NO: 154119 - DNA, 30 bp, Artificial Sequence
  Synthetic oligonucleotide
tcggggtgctacgggcgttaaactcagctg

SEQ ID NO: 154120 - DNA, 30 bp, Artificial Sequence
  Synthetic oligonucleotide
aatcgtacgaaatcccgggcatccgagctg

SEQ ID NO: 154121 - DNA, 30 bp, Artificial Sequence
  Synthetic oligonucleotide
tataccatcagaacctcgaactaatagctg

SEQ ID NO: 154122 - DNA, 30 bp, Artificial Sequence
  Synthetic oligonucleotide
aactggtggataccacaggcggcatagctg

SEQ ID NO: 154123 - DNA, 30 bp, Artificial Sequence
  Synthetic oligonucleotide
accccgcccgccatgccgagtatgtagctg

SEQ ID NO: 154124 - DNA, 30 bp, Artificial Sequence
  Synthetic oligonucleotide
ggttaccactaaactgacgtctattagctg

SEQ ID NO: 154125 - DNA, 30 bp, Artificial Sequence
  Synthetic oligonucleotide
ctgttctgataaagtcaaagatgttagctg

SEQ ID NO: 154126 - DNA, 30 bp, Artificial Sequence
  Synthetic oligonucleotide
cttctacacaggcctagcctaaacacgctg

SEQ ID NO: 154127 - DNA, 30 bp, Artificial Sequence
  Synthetic oligonucleotide
gcaaggggatagaaacccgtccacacgctg

SEQ ID NO: 154128 - DNA, 30 bp, Artificial Sequence
  Synthetic oligonucleotide
ggaccaccacgcgaggatgaactcacgctg

SEQ ID NO: 154129 - DNA, 30 bp, Artificial Sequence
  Synthetic oligonucleotide
agtactagcccaaagggcaaaattacgctg

SEQ ID NO: 154130 - DNA, 30 bp, Artificial Sequence
  Synthetic oligonucleotide
cgggccaaatatgctgggtacgttacgctg

SEQ ID NO: 154131 - DNA, 30 bp, Artificial Sequence
  Synthetic oligonucleotide
cgttcggttaaaccaagcagcagaccgctg

SEQ ID NO: 154132 - DNA, 30 bp, Artificial Sequence
  Synthetic oligonucleotide
ggcgagggccaaccatccatatccccgctg

SEQ ID NO: 154133 - DNA, 30 bp, Artificial Sequence
  Synthetic oligonucleotide
gtaaaggcagagaatccttccctgccgctg

SEQ ID NO: 154134 - DNA, 30 bp, Artificial Sequence
  Synthetic oligonucleotide
accgccccagatgtacgcataactccgctg

SEQ ID NO: 154135 - DNA, 30 bp, Artificial Sequence
  Synthetic oligonucleotide
acgctaacggactttttcaacagcgcgctg

SEQ ID NO: 154136 - DNA, 30 bp, Artificial Sequence
  Synthetic oligonucleotide
agtattcgaacaggtgcggtgccggcgctg

SEQ ID NO: 154137 - DNA, 30 bp, Artificial Sequence
  Synthetic oligonucleotide
gcatggtaggtggatactacctctgcgctg

SEQ ID NO: 154138 - DNA, 30 bp, Artificial Sequence
  Synthetic oligonucleotide
agtattcgtgttgcgtaatcgccatcgctg

SEQ ID NO: 154139 - DNA, 30 bp, Artificial Sequence
  Synthetic oligonucleotide
acaccgagggtcttgaatttgagatcgctg

SEQ ID NO: 154140 - DNA, 30 bp, Artificial Sequence
  Synthetic oligonucleotide
ttgcttgagacctagacccgtatatcgctg

SEQ ID NO: 154141 - DNA, 30 bp, Artificial Sequence
  Synthetic oligonucleotide
aacggttcacccacattggcaaagtcgctg

SEQ ID NO: 154142 - DNA, 30 bp, Artificial Sequence
  Synthetic oligonucleotide
ccactccgctcttagtcttgtgcgtcgctg

SEQ ID NO: 154143 - DNA, 30 bp, Artificial Sequence
  Synthetic oligonucleotide
cctgcctgcagcggtgtagcttattcgctg

SEQ ID NO: 154144 - DNA, 30 bp, Artificial Sequence
  Synthetic oligonucleotide
cctgaaggcgactggtgaatttcttcgctg

SEQ ID NO: 154145 - DNA, 30 bp, Artificial Sequence
  Synthetic oligonucleotide
taggacagggagttatcgcggtcaaggctg

SEQ ID NO: 154146 - DNA, 30 bp, Artificial Sequence
  Synthetic oligonucleotide
gcagcatggggagagtgtggactaaggctg

SEQ ID NO: 154147 - DNA, 30 bp, Artificial Sequence
  Synthetic oligonucleotide
gtccggtcgaacccgtaggatcacaggctg

SEQ ID NO: 154148 - DNA, 30 bp, Artificial Sequence
  Synthetic oligonucleotide
agcgacagcttactctttgtactgaggctg

SEQ ID NO: 154149 - DNA, 30 bp, Artificial Sequence
  Synthetic oligonucleotide
tacaagtaggcgacaagagaacataggctg

SEQ ID NO: 154150 - DNA, 30 bp, Artificial Sequence
  Synthetic oligonucleotide
gatgattggattcacagaggtggtaggctg

SEQ ID NO: 154151 - DNA, 30 bp, Artificial Sequence
  Synthetic oligonucleotide
gagactgcagtcgcaaatggtgaacggctg

SEQ ID NO: 154152 - DNA, 30 bp, Artificial Sequence
  Synthetic oligonucleotide
ggtacctcaataaatttttctttacggctg

SEQ ID NO: 154153 - DNA, 30 bp, Artificial Sequence
  Synthetic oligonucleotide
ggtgatcaaactgcaggaaacaggcggctg

SEQ ID NO: 154154 - DNA, 30 bp, Artificial Sequence
  Synthetic oligonucleotide
aacagccgaactaggtaggttatgcggctg

SEQ ID NO: 154155 - DNA, 30 bp, Artificial Sequence
  Synthetic oligonucleotide
tcgaggtgcccggtcacgttgtaagggctg

SEQ ID NO: 154156 - DNA, 27 bp, Artificial Sequence
  Synthetic oligonucleotide
gcataggcttccaagacaaatgggctg

SEQ ID NO: 154157 - DNA, 30 bp, Artificial Sequence
  Synthetic oligonucleotide
cgaaggggtacagagatgtgcgcctggctg

SEQ ID NO: 154158 - DNA, 30 bp, Artificial Sequence
  Synthetic oligonucleotide
acttccgtacattgcgtgagtaggtggctg

SEQ ID NO: 154159 - DNA, 30 bp, Artificial Sequence
  Synthetic oligonucleotide
ccaatcgatgcggactggacgacaatgctg

SEQ ID NO: 154160 - DNA, 30 bp, Artificial Sequence
  Synthetic oligonucleotide
aacgacgtcctacggttaatactaatgctg

SEQ ID NO: 154161 - DNA, 30 bp, Artificial Sequence
  Synthetic oligonucleotide
gcttgcccaaactcacgacaccacatgctg

SEQ ID NO: 154162 - DNA, 30 bp, Artificial Sequence
  Synthetic oligonucleotide
agcttgtacctgtggatccagatcatgctg

SEQ ID NO: 154163 - DNA, 30 bp, Artificial Sequence
  Synthetic oligonucleotide
aggcttaggccttgaccagaagctatgctg

SEQ ID NO: 154164 - DNA, 30 bp, Artificial Sequence
  Synthetic oligonucleotide
gacagttgaccaaagccgtggggcctgctg

SEQ ID NO: 154165 - DNA, 30 bp, Artificial Sequence
  Synthetic oligonucleotide
ccgagagtgtggtcattggaacgtctgctg

SEQ ID NO: 154166 - DNA, 30 bp, Artificial Sequence
  Synthetic oligonucleotide
agaatataggaagttgactagtgtgtgctg

SEQ ID NO: 154167 - DNA, 30 bp, Artificial Sequence
  Synthetic oligonucleotide
tgggattacccgcgctatcgctggttgctg

SEQ ID NO: 154168 - DNA, 30 bp, Artificial Sequence
  Synthetic oligonucleotide
tgtaggatacgtcgcgacatgggtttgctg

SEQ ID NO: 154169 - DNA, 31 bp, Artificial Sequence
  Synthetic oligonucleotide
ggcaaacggcggtggcagtaggtgtttgctg

SEQ ID NO: 154170 - DNA, 30 bp, Artificial Sequence
  Synthetic oligonucleotide
ggcgcataacgggaacgggtgccaaatctg

SEQ ID NO: 154171 - DNA, 30 bp, Artificial Sequence
  Synthetic oligonucleotide
tcttgaggcgatgtcttggtgccacatctg

SEQ ID NO: 154172 - DNA, 30 bp, Artificial Sequence
  Synthetic oligonucleotide
aagaagtatgcggtaaatcaagtacatctg

SEQ ID NO: 154173 - DNA, 30 bp, Artificial Sequence
  Synthetic oligonucleotide
acgaatcaagtggccgatcgtgtacatctg

SEQ ID NO: 154174 - DNA, 30 bp, Artificial Sequence
  Synthetic oligonucleotide
tccacaggacgaacagggcgggaccatctg

SEQ ID NO: 154175 - DNA, 30 bp, Artificial Sequence
  Synthetic oligonucleotide
cacactagtgtggttatttgaaatcatctg

SEQ ID NO: 154176 - DNA, 30 bp, Artificial Sequence
  Synthetic oligonucleotide
ccagccaggcgaaaacaggtgccggatctg

SEQ ID NO: 154177 - DNA, 30 bp, Artificial Sequence
  Synthetic oligonucleotide
tacgagccataatcccttcccgcatatctg

SEQ ID NO: 154178 - DNA, 30 bp, Artificial Sequence
  Synthetic oligonucleotide
ggggcacgccgggcaactggtttgtatctg

SEQ ID NO: 154179 - DNA, 30 bp, Artificial Sequence
  Synthetic oligonucleotide
gacttcatggaaaggttcagttagactctg

SEQ ID NO: 154180 - DNA, 30 bp, Artificial Sequence
  Synthetic oligonucleotide
gcgcccatataagggtgaacaggacctctg

SEQ ID NO: 154181 - DNA, 30 bp, Artificial Sequence
  Synthetic oligonucleotide
tgtgaaactggctcgggaccagcccctctg

SEQ ID NO: 154182 - DNA, 30 bp, Artificial Sequence
  Synthetic oligonucleotide
cgtcttaccggggggtctagatcgcctctg

SEQ ID NO: 154183 - DNA, 30 bp, Artificial Sequence
  Synthetic oligonucleotide
cggagtttgtctcctgattccgttcctctg

SEQ ID NO: 154184 - DNA, 30 bp, Artificial Sequence
  Synthetic oligonucleotide
ggcgctttatacgtgggcaggggcgctctg

SEQ ID NO: 154185 - DNA, 30 bp, Artificial Sequence
  Synthetic oligonucleotide
ttacgctcgttcaagaacatcttggctctg

SEQ ID NO: 154186 - DNA, 30 bp, Artificial Sequence
  Synthetic oligonucleotide
atatctggcgcgcgaggagatacttctctg

SEQ ID NO: 154187 - DNA, 30 bp, Artificial Sequence
  Synthetic oligonucleotide
caggcggacactctccctagtgcgagtctg

SEQ ID NO: 154188 - DNA, 30 bp, Artificial Sequence
  Synthetic oligonucleotide
cgcttacgggactcaacaataagtagtctg

SEQ ID NO: 154189 - DNA, 30 bp, Artificial Sequence
  Synthetic oligonucleotide
gtgcgaaaggtgatgccgcaagggcgtctg

SEQ ID NO: 154190 - DNA, 30 bp, Artificial Sequence
  Synthetic oligonucleotide
tccgacaacgtgaagcagacatctcgtctg

SEQ ID NO: 154191 - DNA, 30 bp, Artificial Sequence
  Synthetic oligonucleotide
aagtagtgtactcaaaaggtttgtcgtctg

SEQ ID NO: 154192 - DNA, 29 bp, Artificial Sequence
  Synthetic oligonucleotide
ttatggctgagggaatcacgcgaggtctg

SEQ ID NO: 154193 - DNA, 30 bp, Artificial Sequence
  Synthetic oligonucleotide
atggttggatcaatgagaggatacggtctg

SEQ ID NO: 154194 - DNA, 30 bp, Artificial Sequence
  Synthetic oligonucleotide
gacacgctgatggaggggaataatggtctg

SEQ ID NO: 154195 - DNA, 30 bp, Artificial Sequence
  Synthetic oligonucleotide
cgaagcctaaatagtgcgggcgatggtctg

SEQ ID NO: 154196 - DNA, 30 bp, Artificial Sequence
  Synthetic oligonucleotide
catctcccacccccagtacttgttggtctg

SEQ ID NO: 154197 - DNA, 30 bp, Artificial Sequence
  Synthetic oligonucleotide
ggtataaccgttagcgcttcagcctgtctg

SEQ ID NO: 154198 - DNA, 30 bp, Artificial Sequence
  Synthetic oligonucleotide
gaagaaaaaggtattctgagtaattgtctg

SEQ ID NO: 154199 - DNA, 30 bp, Artificial Sequence
  Synthetic oligonucleotide
gggtgggccaatccacagtgtaattgtctg

SEQ ID NO: 154200 - DNA, 30 bp, Artificial Sequence
  Synthetic oligonucleotide
attcgcacctaagtcaatgtcattattctg

SEQ ID NO: 154201 - DNA, 30 bp, Artificial Sequence
  Synthetic oligonucleotide
agttgtatgcacattttctagaaccttctg

SEQ ID NO: 154202 - DNA, 30 bp, Artificial Sequence
  Synthetic oligonucleotide
taaagtcagtagctggactgaacgcttctg

SEQ ID NO: 154203 - DNA, 30 bp, Artificial Sequence
  Synthetic oligonucleotide
acagtgatgaatgtctcttccaatcttctg

SEQ ID NO: 154204 - DNA, 30 bp, Artificial Sequence
  Synthetic oligonucleotide
atttaggtctgacactaagctaatcttctg

SEQ ID NO: 154205 - DNA, 30 bp, Artificial Sequence
  Synthetic oligonucleotide
acggcgcggatggcattcccctgcgttctg

SEQ ID NO: 154206 - DNA, 30 bp, Artificial Sequence
  Synthetic oligonucleotide
aaagcctggccccagctgactagggttctg

SEQ ID NO: 154207 - DNA, 30 bp, Artificial Sequence
  Synthetic oligonucleotide
gaagttgtagtaaaccaattcactgttctg

SEQ ID NO: 154208 - DNA, 30 bp, Artificial Sequence
  Synthetic oligonucleotide
agcactaactagacaccgactctgtttctg

SEQ ID NO: 154209 - DNA, 30 bp, Artificial Sequence
  Synthetic oligonucleotide
cgtcgggaagtcatcttgtggagttttctg

SEQ ID NO: 154210 - DNA, 30 bp, Artificial Sequence
  Synthetic oligonucleotide
tatgcaggcgcttaaaatcggccaaaagtg

SEQ ID NO: 154211 - DNA, 30 bp, Artificial Sequence
  Synthetic oligonucleotide
ctggggatatggaggacagggctaaaagtg

SEQ ID NO: 154212 - DNA, 30 bp, Artificial Sequence
  Synthetic oligonucleotide
atagacacgaaagcggattctagacaagtg

SEQ ID NO: 154213 - DNA, 30 bp, Artificial Sequence
  Synthetic oligonucleotide
ggttacaaaccacgcggtcggatccaagtg

SEQ ID NO: 154214 - DNA, 30 bp, Artificial Sequence
  Synthetic oligonucleotide
aatagtagtaatatatcaaagcagcaagtg

SEQ ID NO: 154215 - DNA, 30 bp, Artificial Sequence
  Synthetic oligonucleotide
agatgccgcctcatgtgcatagggcaagtg

SEQ ID NO: 154216 - DNA, 30 bp, Artificial Sequence
  Synthetic oligonucleotide
gatcaattaaaaaaaagacatactcaagtg

SEQ ID NO: 154217 - DNA, 30 bp, Artificial Sequence
  Synthetic oligonucleotide
aagagttatgggaaccgtggttaagaagtg

SEQ ID NO: 154218 - DNA, 30 bp, Artificial Sequence
  Synthetic oligonucleotide
gttaagaacagtcacaaggctatagaagtg

SEQ ID NO: 154219 - DNA, 30 bp, Artificial Sequence
  Synthetic oligonucleotide
cttatagtaacaagcgaccaggccgaagtg

SEQ ID NO: 154220 - DNA, 30 bp, Artificial Sequence
  Synthetic oligonucleotide
ctatgttccggtagtacagatcaggaagtg

SEQ ID NO: 154221 - DNA, 30 bp, Artificial Sequence
  Synthetic oligonucleotide
aaaacgacattatctaatgcataggaagtg

SEQ ID NO: 154222 - DNA, 30 bp, Artificial Sequence
  Synthetic oligonucleotide
gatactgtgatgcacagaactgaataagtg

SEQ ID NO: 154223 - DNA, 30 bp, Artificial Sequence
  Synthetic oligonucleotide
gtttcgtggagacactagacaggataagtg

SEQ ID NO: 154224 - DNA, 30 bp, Artificial Sequence
  Synthetic oligonucleotide
agacacagttaagttttcgaatgataagtg

SEQ ID NO: 154225 - DNA, 30 bp, Artificial Sequence
  Synthetic oligonucleotide
tactagtccaaggaggctaggaagtaagtg

SEQ ID NO: 154226 - DNA, 31 bp, Artificial Sequence
  Synthetic oligonucleotide
ctggaatcacctctcgcgggccccgtaagtg

SEQ ID NO: 154227 - DNA, 30 bp, Artificial Sequence
  Synthetic oligonucleotide
ttcacatatgaccgggcagatagaacagtg

SEQ ID NO: 154228 - DNA, 30 bp, Artificial Sequence
  Synthetic oligonucleotide
cgccacaggaatgcggggtgggagacagtg

SEQ ID NO: 154229 - DNA, 30 bp, Artificial Sequence
  Synthetic oligonucleotide
gggtttccagaggctcgggacatgacagtg

SEQ ID NO: 154230 - DNA, 30 bp, Artificial Sequence
  Synthetic oligonucleotide
gtactcatctatgacgtactcgctacagtg

SEQ ID NO: 154231 - DNA, 30 bp, Artificial Sequence
  Synthetic oligonucleotide
actgtggcgtcgtagtgaaaatctacagtg

SEQ ID NO: 154232 - DNA, 30 bp, Artificial Sequence
  Synthetic oligonucleotide
ctgctggagcactaggctatggttacagtg

SEQ ID NO: 154233 - DNA, 30 bp, Artificial Sequence
  Synthetic oligonucleotide
acacagagacacggaccatacggaccagtg

SEQ ID NO: 154234 - DNA, 30 bp, Artificial Sequence
  Synthetic oligonucleotide
tcttgaatgtaagctcggtccaacccagtg

SEQ ID NO: 154235 - DNA, 30 bp, Artificial Sequence
  Synthetic oligonucleotide
gcagatacaaagggtaggcagttcccagtg

SEQ ID NO: 154236 - DNA, 30 bp, Artificial Sequence
  Synthetic oligonucleotide
atgatgctgtctaagcggattcctccagtg

SEQ ID NO: 154237 - DNA, 30 bp, Artificial Sequence
  Synthetic oligonucleotide
ttttacatttcttagttggcaagtccagtg

SEQ ID NO: 154238 - DNA, 30 bp, Artificial Sequence
  Synthetic oligonucleotide
aaagagcagacgcgtatggtccccgcagtg

SEQ ID NO: 154239 - DNA, 30 bp, Artificial Sequence
  Synthetic oligonucleotide
gtgacgatagtttgtgagctatgcgcagtg

SEQ ID NO: 154240 - DNA, 30 bp, Artificial Sequence
  Synthetic oligonucleotide
gatgaagactccgcgggttaacatgcagtg

SEQ ID NO: 154241 - DNA, 30 bp, Artificial Sequence
  Synthetic oligonucleotide
caaggattgagaacgttcaataaatcagtg

SEQ ID NO: 154242 - DNA, 30 bp, Artificial Sequence
  Synthetic oligonucleotide
caccacggacgcatattatatgcatcagtg

SEQ ID NO: 154243 - DNA, 30 bp, Artificial Sequence
  Synthetic oligonucleotide
cattaaaagcacacaattgttacctcagtg

SEQ ID NO: 154244 - DNA, 30 bp, Artificial Sequence
  Synthetic oligonucleotide
tgctgcagggcgaggcactttggctcagtg

SEQ ID NO: 154245 - DNA, 30 bp, Artificial Sequence
  Synthetic oligonucleotide
gtcaaacagggacgttttatagcgtcagtg

SEQ ID NO: 154246 - DNA, 30 bp, Artificial Sequence
  Synthetic oligonucleotide
tagattgacaaacaaacgagtgacagagtg

SEQ ID NO: 154247 - DNA, 30 bp, Artificial Sequence
  Synthetic oligonucleotide
taggtctccatggaccatcccatcagagtg

SEQ ID NO: 154248 - DNA, 30 bp, Artificial Sequence
  Synthetic oligonucleotide
tcttacacggagctggcattcgatagagtg

SEQ ID NO: 154249 - DNA, 30 bp, Artificial Sequence
  Synthetic oligonucleotide
atcacaccacagcaatacgggccgcgagtg

SEQ ID NO: 154250 - DNA, 30 bp, Artificial Sequence
  Synthetic oligonucleotide
agacgcaaacatgacttgtcatggcgagtg

SEQ ID NO: 154251 - DNA, 30 bp, Artificial Sequence
  Synthetic oligonucleotide
aattagttgtgcgaaaatttggatcgagtg

SEQ ID NO: 154252 - DNA, 30 bp, Artificial Sequence
  Synthetic oligonucleotide
cgggtaccggtgcggacaaaccgtcgagtg

SEQ ID NO: 154253 - DNA, 30 bp, Artificial Sequence
  Synthetic oligonucleotide
caagaactggacgtctaatatgcaggagtg

SEQ ID NO: 154254 - DNA, 30 bp, Artificial Sequence
  Synthetic oligonucleotide
ctttgtaggcgtgtgtgagtaggatgagtg

SEQ ID NO: 154255 - DNA, 30 bp, Artificial Sequence
  Synthetic oligonucleotide
ttttcgatccaatcgcttcatgcgtgagtg

SEQ ID NO: 154256 - DNA, 30 bp, Artificial Sequence
  Synthetic oligonucleotide
atgcttatacgaagattagggatgtgagtg

SEQ ID NO: 154257 - DNA, 30 bp, Artificial Sequence
  Synthetic oligonucleotide
tcctcccaggatcagtgttaatattgagtg

SEQ ID NO: 154258 - DNA, 30 bp, Artificial Sequence
  Synthetic oligonucleotide
ggaccacaattagaaggtatcaaaatagtg

SEQ ID NO: 154259 - DNA, 30 bp, Artificial Sequence
  Synthetic oligonucleotide
aaaggtcacgaaggatcactggaaatagtg

SEQ ID NO: 154260 - DNA, 30 bp, Artificial Sequence
  Synthetic oligonucleotide
atcgtcctccgctagggttccataatagtg

SEQ ID NO: 154261 - DNA, 30 bp, Artificial Sequence
  Synthetic oligonucleotide
gtcgtctgactgaagcgagttgagatagtg

SEQ ID NO: 154262 - DNA, 30 bp, Artificial Sequence
  Synthetic oligonucleotide
aaatgacaccctgctttcctgtagatagtg

SEQ ID NO: 154263 - DNA, 30 bp, Artificial Sequence
  Synthetic oligonucleotide
cccattaaggtcccaccattggggatagtg

SEQ ID NO: 154264 - DNA, 30 bp, Artificial Sequence
  Synthetic oligonucleotide
cgtctattatagggctctaacgtgatagtg

SEQ ID NO: 154265 - DNA, 30 bp, Artificial Sequence
  Synthetic oligonucleotide
ggtgtttgccgccatttttttcatatagtg

SEQ ID NO: 154266 - DNA, 30 bp, Artificial Sequence
  Synthetic oligonucleotide
gcctcgcttccgtatcgtcaggccctagtg

SEQ ID NO: 154267 - DNA, 30 bp, Artificial Sequence
  Synthetic oligonucleotide
aatcccgtaagggactatcagaggctagtg

SEQ ID NO: 154268 - DNA, 30 bp, Artificial Sequence
  Synthetic oligonucleotide
tcaccaggactaaggagtccacgcttagtg

SEQ ID NO: 154269 - DNA, 30 bp, Artificial Sequence
  Synthetic oligonucleotide
gaagaaattgcctgccctcggcagttagtg

SEQ ID NO: 154270 - DNA, 30 bp, Artificial Sequence
  Synthetic oligonucleotide
gatccaaggcactaagtggaatctttagtg

SEQ ID NO: 154271 - DNA, 30 bp, Artificial Sequence
  Synthetic oligonucleotide
accaagtgagggcgcaagtctgttttagtg

SEQ ID NO: 154272 - DNA, 30 bp, Artificial Sequence
  Synthetic oligonucleotide
ggagattacacaatcgcaaataacaacgtg

SEQ ID NO: 154273 - DNA, 30 bp, Artificial Sequence
  Synthetic oligonucleotide
gtaacagaacggacataaagtttcaacgtg

SEQ ID NO: 154274 - DNA, 30 bp, Artificial Sequence
  Synthetic oligonucleotide
gaccctaagcaagcatgttgtaggaacgtg

SEQ ID NO: 154275 - DNA, 30 bp, Artificial Sequence
  Synthetic oligonucleotide
ggatggacatcggggttagctatgaacgtg

SEQ ID NO: 154276 - DNA, 30 bp, Artificial Sequence
  Synthetic oligonucleotide
gtgaaaccatcttcaaggaagttgaacgtg

SEQ ID NO: 154277 - DNA, 30 bp, Artificial Sequence
  Synthetic oligonucleotide
agaacgttgtggcatctcaaaatacacgtg

SEQ ID NO: 154278 - DNA, 30 bp, Artificial Sequence
  Synthetic oligonucleotide
caaacccacagcgggacaggggtagacgtg

SEQ ID NO: 154279 - DNA, 30 bp, Artificial Sequence
  Synthetic oligonucleotide
aagtcggcattggtccggcgaatcgacgtg

SEQ ID NO: 154280 - DNA, 30 bp, Artificial Sequence
  Synthetic oligonucleotide
gcttaccccacgagaagatggtaatacgtg

SEQ ID NO: 154281 - DNA, 30 bp, Artificial Sequence
  Synthetic oligonucleotide
aacaatcctcgttatgtcaacgtatacgtg

SEQ ID NO: 154282 - DNA, 30 bp, Artificial Sequence
  Synthetic oligonucleotide
gtaggtatatcacggggtatgttatacgtg

SEQ ID NO: 154283 - DNA, 30 bp, Artificial Sequence
  Synthetic oligonucleotide
ccagacgtaagtggtaagatatcgtacgtg

SEQ ID NO: 154284 - DNA, 30 bp, Artificial Sequence
  Synthetic oligonucleotide
gagataacgtcgggcctacgagggtacgtg

SEQ ID NO: 154285 - DNA, 30 bp, Artificial Sequence
  Synthetic oligonucleotide
agactacacggtaatttattaaacaccgtg

SEQ ID NO: 154286 - DNA, 30 bp, Artificial Sequence
  Synthetic oligonucleotide
ttggtttttgaataatgccaagataccgtg

SEQ ID NO: 154287 - DNA, 30 bp, Artificial Sequence
  Synthetic oligonucleotide
ggcacatcggactatcagacacttaccgtg

SEQ ID NO: 154288 - DNA, 29 bp, Artificial Sequence
  Synthetic oligonucleotide
agtgaaaagatatggaccaatagcccgtg

SEQ ID NO: 154289 - DNA, 30 bp, Artificial Sequence
  Synthetic oligonucleotide
agttcctcggaaagaaacacggcagccgtg

SEQ ID NO: 154290 - DNA, 30 bp, Artificial Sequence
  Synthetic oligonucleotide
agcgtcggtatcactttaaaaccggccgtg

SEQ ID NO: 154291 - DNA, 30 bp, Artificial Sequence
  Synthetic oligonucleotide
tcaagttgaccaacacacctgattgccgtg

SEQ ID NO: 154292 - DNA, 30 bp, Artificial Sequence
  Synthetic oligonucleotide
ccggagtctaacgagctcagtgaatccgtg

SEQ ID NO: 154293 - DNA, 30 bp, Artificial Sequence
  Synthetic oligonucleotide
gcctacggaagaaacattattacctccgtg

SEQ ID NO: 154294 - DNA, 30 bp, Artificial Sequence
  Synthetic oligonucleotide
tgaagctatcgaagcagggcaacttccgtg

SEQ ID NO: 154295 - DNA, 30 bp, Artificial Sequence
  Synthetic oligonucleotide
atgttagccatgactcggttgagttccgtg

SEQ ID NO: 154296 - DNA, 30 bp, Artificial Sequence
  Synthetic oligonucleotide
tcttcgatagacactagtacgcgttccgtg

SEQ ID NO: 154297 - DNA, 30 bp, Artificial Sequence
  Synthetic oligonucleotide
tgtaatagcagtgtttagctgggttccgtg

SEQ ID NO: 154298 - DNA, 30 bp, Artificial Sequence
  Synthetic oligonucleotide
agagcttggcactcaggttcgcgaagcgtg

SEQ ID NO: 154299 - DNA, 30 bp, Artificial Sequence
  Synthetic oligonucleotide
ctcctacctctgaagaccaagccgagcgtg

SEQ ID NO: 154300 - DNA, 30 bp, Artificial Sequence
  Synthetic oligonucleotide
ggaggacggcttttcagtgacagccgcgtg

SEQ ID NO: 154301 - DNA, 30 bp, Artificial Sequence
  Synthetic oligonucleotide
ttgaccagccttagatctacaaatcgcgtg

SEQ ID NO: 154302 - DNA, 30 bp, Artificial Sequence
  Synthetic oligonucleotide
cagcctaagaaatttgcctgtgtaggcgtg

SEQ ID NO: 154303 - DNA, 31 bp, Artificial Sequence
  Synthetic oligonucleotide
ttgtctcaggattggacgatattagggcgtg

SEQ ID NO: 154304 - DNA, 30 bp, Artificial Sequence
  Synthetic oligonucleotide
ttaggtgtcaggaccgatcgactgggcgtg

SEQ ID NO: 154305 - DNA, 30 bp, Artificial Sequence
  Synthetic oligonucleotide
gaatgacaaatctttcacctggaatgcgtg

SEQ ID NO: 154306 - DNA, 30 bp, Artificial Sequence
  Synthetic oligonucleotide
gaccgacatgcgaaggccatgagatgcgtg

SEQ ID NO: 154307 - DNA, 30 bp, Artificial Sequence
  Synthetic oligonucleotide
cgaataagtggatcttttagcgtgtgcgtg

SEQ ID NO: 154308 - DNA, 30 bp, Artificial Sequence
  Synthetic oligonucleotide
ggggatcggttgaagtagtgaaagctcgtg

SEQ ID NO: 154309 - DNA, 30 bp, Artificial Sequence
  Synthetic oligonucleotide
tcactacaagggatagtacggcagctcgtg

SEQ ID NO: 154310 - DNA, 30 bp, Artificial Sequence
  Synthetic oligonucleotide
cgaaggttggctatccaaataacgctcgtg

SEQ ID NO: 154311 - DNA, 30 bp, Artificial Sequence
  Synthetic oligonucleotide
attgtgatggagttggtgggtcgagtcgtg

SEQ ID NO: 154312 - DNA, 30 bp, Artificial Sequence
  Synthetic oligonucleotide
tgccacgtacaggctagacagaccgtcgtg

SEQ ID NO: 154313 - DNA, 30 bp, Artificial Sequence
  Synthetic oligonucleotide
aattacagaggctgcggatcaacggtcgtg

SEQ ID NO: 154314 - DNA, 30 bp, Artificial Sequence
  Synthetic oligonucleotide
ctggtccattggacatgaatatgggtcgtg

SEQ ID NO: 154315 - DNA, 30 bp, Artificial Sequence
  Synthetic oligonucleotide
gtctacagatatcgttatctgtaattcgtg

SEQ ID NO: 154316 - DNA, 30 bp, Artificial Sequence
  Synthetic oligonucleotide
ataggtcgcagatcgagccatggattcgtg

SEQ ID NO: 154317 - DNA, 30 bp, Artificial Sequence
  Synthetic oligonucleotide
tagcgttgcaaagcacggacaaccttcgtg

SEQ ID NO: 154318 - DNA, 30 bp, Artificial Sequence
  Synthetic oligonucleotide
ccaccttcatggtcggaagtttccttcgtg

SEQ ID NO: 154319 - DNA, 30 bp, Artificial Sequence
  Synthetic oligonucleotide
ttatttgagcgaactgccagcgtcttcgtg

SEQ ID NO: 154320 - DNA, 30 bp, Artificial Sequence
  Synthetic oligonucleotide
tacaaggggttgcatgatcgtccgttcgtg

SEQ ID NO: 154321 - DNA, 30 bp, Artificial Sequence
  Synthetic oligonucleotide
tcattcagaattgttaccgtttggttcgtg

SEQ ID NO: 154322 - DNA, 30 bp, Artificial Sequence
  Synthetic oligonucleotide
ggggcagtctcagacatgctgttgttcgtg

SEQ ID NO: 154323 - DNA, 30 bp, Artificial Sequence
  Synthetic oligonucleotide
acactttgactgaaagcgtagtctttcgtg

SEQ ID NO: 154324 - DNA, 30 bp, Artificial Sequence
  Synthetic oligonucleotide
gcacagatagtggcgtaggggtgtttcgtg

SEQ ID NO: 154325 - DNA, 30 bp, Artificial Sequence
  Synthetic oligonucleotide
ggtcctgcgtacggcgactagccaaaggtg

SEQ ID NO: 154326 - DNA, 30 bp, Artificial Sequence
  Synthetic oligonucleotide
gtacaaacgtgggtttcattcagcaaggtg

SEQ ID NO: 154327 - DNA, 30 bp, Artificial Sequence
  Synthetic oligonucleotide
gggtaggtactaacaacacatggccaggtg

SEQ ID NO: 154328 - DNA, 30 bp, Artificial Sequence
  Synthetic oligonucleotide
gaagctgcagcttgaaggcactgtcaggtg

SEQ ID NO: 154329 - DNA, 30 bp, Artificial Sequence
  Synthetic oligonucleotide
aaccggggtgtagtaacgttgggagaggtg

SEQ ID NO: 154330 - DNA, 30 bp, Artificial Sequence
  Synthetic oligonucleotide
gtccaaacaatcttattaaaagacgaggtg

SEQ ID NO: 154331 - DNA, 30 bp, Artificial Sequence
  Synthetic oligonucleotide
tcgccatgtacttatagttctagtgaggtg

SEQ ID NO: 154332 - DNA, 30 bp, Artificial Sequence
  Synthetic oligonucleotide
tggaagccgcatagaaagagtattgaggtg

SEQ ID NO: 154333 - DNA, 30 bp, Artificial Sequence
  Synthetic oligonucleotide
agccgacttgcagaaaaactttcataggtg

SEQ ID NO: 154334 - DNA, 30 bp, Artificial Sequence
  Synthetic oligonucleotide
ggaatccaagcgtacacctgatggtaggtg

SEQ ID NO: 154335 - DNA, 30 bp, Artificial Sequence
  Synthetic oligonucleotide
gtataaactagtacgccgaatctttaggtg

SEQ ID NO: 154336 - DNA, 30 bp, Artificial Sequence
  Synthetic oligonucleotide
cacgagttaacagcttacggccgaacggtg

SEQ ID NO: 154337 - DNA, 30 bp, Artificial Sequence
  Synthetic oligonucleotide
aggataagaatgtaaatgaataggacggtg

SEQ ID NO: 154338 - DNA, 30 bp, Artificial Sequence
  Synthetic oligonucleotide
aatcgacgaataacatctcgggtgacggtg

SEQ ID NO: 154339 - DNA, 30 bp, Artificial Sequence
  Synthetic oligonucleotide
gcggataaccactcgttctagggtacggtg

SEQ ID NO: 154340 - DNA, 30 bp, Artificial Sequence
  Synthetic oligonucleotide
acttaggggagcgttagctaggagccggtg

SEQ ID NO: 154341 - DNA, 30 bp, Artificial Sequence
  Synthetic oligonucleotide
aggacgagaagcggtcatcccagagcggtg

SEQ ID NO: 154342 - DNA, 30 bp, Artificial Sequence
  Synthetic oligonucleotide
tagttacgtaaatttgctttcggagcggtg

SEQ ID NO: 154343 - DNA, 30 bp, Artificial Sequence
  Synthetic oligonucleotide
tcattaaatgtcttcctggttaaggcggtg

SEQ ID NO: 154344 - DNA, 30 bp, Artificial Sequence
  Synthetic oligonucleotide
gctgaagattccactcggactgaggcggtg

SEQ ID NO: 154345 - DNA, 30 bp, Artificial Sequence
  Synthetic oligonucleotide
tatttccggccaagatcttgtggggcggtg

SEQ ID NO: 154346 - DNA, 30 bp, Artificial Sequence
  Synthetic oligonucleotide
tggtgggctgtagtatatcccttggcggtg

SEQ ID NO: 154347 - DNA, 31 bp, Artificial Sequence
  Synthetic oligonucleotide
tctttcgtttcaaccctgcgttcgatcggtg

SEQ ID NO: 154348 - DNA, 30 bp, Artificial Sequence
  Synthetic oligonucleotide
ggaccttctaaaaccatgccacagtcggtg

SEQ ID NO: 154349 - DNA, 30 bp, Artificial Sequence
  Synthetic oligonucleotide
acgctaaaggccctttttatctagtcggtg

SEQ ID NO: 154350 - DNA, 30 bp, Artificial Sequence
  Synthetic oligonucleotide
aggccatgagtttagcgccgcaggtcggtg

SEQ ID NO: 154351 - DNA, 30 bp, Artificial Sequence
  Synthetic oligonucleotide
cgtaaccctttatcctggattccttcggtg

SEQ ID NO: 154352 - DNA, 30 bp, Artificial Sequence
  Synthetic oligonucleotide
ggctagcgtgaagccttagtctcttcggtg

SEQ ID NO: 154353 - DNA, 30 bp, Artificial Sequence
  Synthetic oligonucleotide
acgtcggaatttcacgaatggaacagggtg

SEQ ID NO: 154354 - DNA, 30 bp, Artificial Sequence
  Synthetic oligonucleotide
atggtagactgtagtggtatttcgagggtg

SEQ ID NO: 154355 - DNA, 30 bp, Artificial Sequence
  Synthetic oligonucleotide
gaatgtcacggagctggtttttggagggtg

SEQ ID NO: 154356 - DNA, 30 bp, Artificial Sequence
  Synthetic oligonucleotide
cgacggttgcaccattattaaattagggtg

SEQ ID NO: 154357 - DNA, 30 bp, Artificial Sequence
  Synthetic oligonucleotide
acagctgtagttggactcattgtacgggtg

SEQ ID NO: 154358 - DNA, 30 bp, Artificial Sequence
  Synthetic oligonucleotide
tagataggctaaattctggcttatcgggtg

SEQ ID NO: 154359 - DNA, 30 bp, Artificial Sequence
  Synthetic oligonucleotide
cggatcccatatcaacatgtcgcaggggtg

SEQ ID NO: 154360 - DNA, 30 bp, Artificial Sequence
  Synthetic oligonucleotide
gtcaagaatcactcggcttaggcgggggtg

SEQ ID NO: 154361 - DNA, 30 bp, Artificial Sequence
  Synthetic oligonucleotide
tgagaaggtcatagttcatgggcgggggtg

SEQ ID NO: 154362 - DNA, 30 bp, Artificial Sequence
  Synthetic oligonucleotide
gactattgttaggcagaccgaacatgggtg

SEQ ID NO: 154363 - DNA, 30 bp, Artificial Sequence
  Synthetic oligonucleotide
ttacaccgggtgcgctcaggcgactgggtg

SEQ ID NO: 154364 - DNA, 30 bp, Artificial Sequence
  Synthetic oligonucleotide
atgcgacagtccaaagctcgccgttgggtg

SEQ ID NO: 154365 - DNA, 30 bp, Artificial Sequence
  Synthetic oligonucleotide
gaagaattacataggacaaacaaaatggtg

SEQ ID NO: 154366 - DNA, 30 bp, Artificial Sequence
  Synthetic oligonucleotide
agtctacaaccggatcccgagaaaatggtg

SEQ ID NO: 154367 - DNA, 30 bp, Artificial Sequence
  Synthetic oligonucleotide
caacgtacgaagctaattagagtaatggtg

SEQ ID NO: 154368 - DNA, 30 bp, Artificial Sequence
  Synthetic oligonucleotide
gggttcggataaactctagtagcgatggtg

SEQ ID NO: 154369 - DNA, 30 bp, Artificial Sequence
  Synthetic oligonucleotide
taggcttgggggcctagtatagacctggtg

SEQ ID NO: 154370 - DNA, 30 bp, Artificial Sequence
  Synthetic oligonucleotide
ccttctccggccgcacggtaaaagctggtg

SEQ ID NO: 154371 - DNA, 30 bp, Artificial Sequence
  Synthetic oligonucleotide
gggattaggagttttctcgtaaggctggtg

SEQ ID NO: 154372 - DNA, 30 bp, Artificial Sequence
  Synthetic oligonucleotide
gggggatcccaaaaaaaaagcgctctggtg

SEQ ID NO: 154373 - DNA, 30 bp, Artificial Sequence
  Synthetic oligonucleotide
tcagcgtgcatcatacgttataaagtggtg

SEQ ID NO: 154374 - DNA, 30 bp, Artificial Sequence
  Synthetic oligonucleotide
aatgacagtctccaatgaccgcccgtggtg

SEQ ID NO: 154375 - DNA, 30 bp, Artificial Sequence
  Synthetic oligonucleotide
cctcaaacaatggtctgcgatagggtggtg

SEQ ID NO: 154376 - DNA, 30 bp, Artificial Sequence
  Synthetic oligonucleotide
ccagctggggtgagccgtgagcgggtggtg

SEQ ID NO: 154377 - DNA, 30 bp, Artificial Sequence
  Synthetic oligonucleotide
ccagtccgaccgacagccaggctggtggtg

SEQ ID NO: 154378 - DNA, 30 bp, Artificial Sequence
  Synthetic oligonucleotide
tcggatttgcatcagtcgcctactgtggtg

SEQ ID NO: 154379 - DNA, 30 bp, Artificial Sequence
  Synthetic oligonucleotide
gcagtcgcctagactagtcaacgtgtggtg

SEQ ID NO: 154380 - DNA, 30 bp, Artificial Sequence
  Synthetic oligonucleotide
atcaactcggtcttcgagcttaaattggtg

SEQ ID NO: 154381 - DNA, 30 bp, Artificial Sequence
  Synthetic oligonucleotide
atgattgcgtgatcattgccgcacttggtg

SEQ ID NO: 154382 - DNA, 30 bp, Artificial Sequence
  Synthetic oligonucleotide
aacaaaagagtcgccgtgttccctttggtg

SEQ ID NO: 154383 - DNA, 30 bp, Artificial Sequence
  Synthetic oligonucleotide
tgctacggcggcagagtgaaccttttggtg

SEQ ID NO: 154384 - DNA, 30 bp, Artificial Sequence
  Synthetic oligonucleotide
cgccgggagtcctactaagtggcaaatgtg

SEQ ID NO: 154385 - DNA, 30 bp, Artificial Sequence
  Synthetic oligonucleotide
ggcttgttaagttggaagcaacagaatgtg

SEQ ID NO: 154386 - DNA, 30 bp, Artificial Sequence
  Synthetic oligonucleotide
agggccgcctatattgtcagtggacatgtg

SEQ ID NO: 154387 - DNA, 30 bp, Artificial Sequence
  Synthetic oligonucleotide
cggacccatagattggacaccctccatgtg

SEQ ID NO: 154388 - DNA, 30 bp, Artificial Sequence
  Synthetic oligonucleotide
gcgacgttttcgttgcaggttgcgcatgtg

SEQ ID NO: 154389 - DNA, 30 bp, Artificial Sequence
  Synthetic oligonucleotide
catccgtcacaagatgacttgaatcatgtg

SEQ ID NO: 154390 - DNA, 30 bp, Artificial Sequence
  Synthetic oligonucleotide
cagcggatcgtgtccctgtgtactcatgtg

SEQ ID NO: 154391 - DNA, 30 bp, Artificial Sequence
  Synthetic oligonucleotide
atcgcagactgtctgtggaggtgtgatgtg

SEQ ID NO: 154392 - DNA, 30 bp, Artificial Sequence
  Synthetic oligonucleotide
acagcggaatcgcctgtggatacatatgtg

SEQ ID NO: 154393 - DNA, 30 bp, Artificial Sequence
  Synthetic oligonucleotide
ggccttttgcaatgcttgaactactatgtg

SEQ ID NO: 154394 - DNA, 30 bp, Artificial Sequence
  Synthetic oligonucleotide
cataattttgccagaagaaaggtctatgtg

SEQ ID NO: 154395 - DNA, 30 bp, Artificial Sequence
  Synthetic oligonucleotide
ccgcaccaatccgcatagatctattatgtg

SEQ ID NO: 154396 - DNA, 30 bp, Artificial Sequence
  Synthetic oligonucleotide
ctcagaggcgctaccattcaatgttatgtg

SEQ ID NO: 154397 - DNA, 30 bp, Artificial Sequence
  Synthetic oligonucleotide
agatgcgatggcacgttaaaatcaactgtg

SEQ ID NO: 154398 - DNA, 30 bp, Artificial Sequence
  Synthetic oligonucleotide
gggccaggaaattggacctcctgaactgtg

SEQ ID NO: 154399 - DNA, 30 bp, Artificial Sequence
  Synthetic oligonucleotide
acggataaaggtcacaggacttttactgtg

SEQ ID NO: 154400 - DNA, 30 bp, Artificial Sequence
  Synthetic oligonucleotide
gtgtagggtctgtcaatttcaaaacctgtg

SEQ ID NO: 154401 - DNA, 30 bp, Artificial Sequence
  Synthetic oligonucleotide
aacttgctagattaacacaggggacctgtg

SEQ ID NO: 154402 - DNA, 30 bp, Artificial Sequence
  Synthetic oligonucleotide
agctgtttcaggattacgaggccgcctgtg

SEQ ID NO: 154403 - DNA, 30 bp, Artificial Sequence
  Synthetic oligonucleotide
atggaaccttgcttactatgggcgcctgtg

SEQ ID NO: 154404 - DNA, 30 bp, Artificial Sequence
  Synthetic oligonucleotide
cataattattatacccattacagtcctgtg

SEQ ID NO: 154405 - DNA, 30 bp, Artificial Sequence
  Synthetic oligonucleotide
acgtgaagtagtgttagcccaaaagctgtg

SEQ ID NO: 154406 - DNA, 30 bp, Artificial Sequence
  Synthetic oligonucleotide
ggtaggtttaaggccgtttggtcagctgtg

SEQ ID NO: 154407 - DNA, 30 bp, Artificial Sequence
  Synthetic oligonucleotide
taaccatggcaaaaaatttccagtgctgtg

SEQ ID NO: 154408 - DNA, 30 bp, Artificial Sequence
  Synthetic oligonucleotide
gtggtcaagtcacaacctgcaagttctgtg

SEQ ID NO: 154409 - DNA, 30 bp, Artificial Sequence
  Synthetic oligonucleotide
agtgcggaacaacaggttggcctaagtgtg

SEQ ID NO: 154410 - DNA, 30 bp, Artificial Sequence
  Synthetic oligonucleotide
attgtaggagggacccggtacaccagtgtg

SEQ ID NO: 154411 - DNA, 30 bp, Artificial Sequence
  Synthetic oligonucleotide
gatagacttttattaagatggactagtgtg

SEQ ID NO: 154412 - DNA, 30 bp, Artificial Sequence
  Synthetic oligonucleotide
gtatcctgatcgggcatgtcataacgtgtg

SEQ ID NO: 154413 - DNA, 30 bp, Artificial Sequence
  Synthetic oligonucleotide
atagtcggtaaactgtatcttccacgtgtg

SEQ ID NO: 154414 - DNA, 30 bp, Artificial Sequence
  Synthetic oligonucleotide
ctagggtgcagagggccttgctgacgtgtg

SEQ ID NO: 154415 - DNA, 30 bp, Artificial Sequence
  Synthetic oligonucleotide
cacggccgcgggatcacactactccgtgtg

SEQ ID NO: 154416 - DNA, 30 bp, Artificial Sequence
  Synthetic oligonucleotide
gttacagtcgaaagctcttaaagaggtgtg

SEQ ID NO: 154417 - DNA, 30 bp, Artificial Sequence
  Synthetic oligonucleotide
gcctaaagttttacaatcgctctcggtgtg

SEQ ID NO: 154418 - DNA, 30 bp, Artificial Sequence
  Synthetic oligonucleotide
gatagcagggttcgaatgagtgtgggtgtg

SEQ ID NO: 154419 - DNA, 30 bp, Artificial Sequence
  Synthetic oligonucleotide
gcgctcaaacaggtggataccacatgtgtg

SEQ ID NO: 154420 - DNA, 30 bp, Artificial Sequence
  Synthetic oligonucleotide
tgaacatgcgatgactgttaagcatgtgtg

SEQ ID NO: 154421 - DNA, 30 bp, Artificial Sequence
  Synthetic oligonucleotide
cgttgacaagaaaatgaactgcgatgtgtg

SEQ ID NO: 154422 - DNA, 30 bp, Artificial Sequence
  Synthetic oligonucleotide
gatgactgggcatgcatgtgtcgatgtgtg

SEQ ID NO: 154423 - DNA, 30 bp, Artificial Sequence
  Synthetic oligonucleotide
cttaccggggtagtaaatacgtgatgtgtg

SEQ ID NO: 154424 - DNA, 30 bp, Artificial Sequence
  Synthetic oligonucleotide
caagtttcacctgaatcacggctgtgtgtg

SEQ ID NO: 154425 - DNA, 30 bp, Artificial Sequence
  Synthetic oligonucleotide
tgaaaaaccgatttcgtgatgtattgtgtg

SEQ ID NO: 154426 - DNA, 30 bp, Artificial Sequence
  Synthetic oligonucleotide
ttaattggacttcaggatactctaattgtg

SEQ ID NO: 154427 - DNA, 30 bp, Artificial Sequence
  Synthetic oligonucleotide
gtacgtaaaatcgataagtaggccattgtg

SEQ ID NO: 154428 - DNA, 30 bp, Artificial Sequence
  Synthetic oligonucleotide
gaaatgaaaacagagtctgatttcattgtg

SEQ ID NO: 154429 - DNA, 30 bp, Artificial Sequence
  Synthetic oligonucleotide
cggggtgagcgatatagtctcaggattgtg

SEQ ID NO: 154430 - DNA, 30 bp, Artificial Sequence
  Synthetic oligonucleotide
ctaagttactcagaggttgattggattgtg

SEQ ID NO: 154431 - DNA, 30 bp, Artificial Sequence
  Synthetic oligonucleotide
atacccgatgtgcgacgtcgggaacttgtg

SEQ ID NO: 154432 - DNA, 30 bp, Artificial Sequence
  Synthetic oligonucleotide
agaagccacttaagcgtgcgctaacttgtg

SEQ ID NO: 154433 - DNA, 30 bp, Artificial Sequence
  Synthetic oligonucleotide
atgaacggtcattagttcatacaccttgtg

SEQ ID NO: 154434 - DNA, 30 bp, Artificial Sequence
  Synthetic oligonucleotide
ggcgatccagccattgcttgaaatcttgtg

SEQ ID NO: 154435 - DNA, 30 bp, Artificial Sequence
  Synthetic oligonucleotide
ctgccataaagttctagatcgattcttgtg

SEQ ID NO: 154436 - DNA, 30 bp, Artificial Sequence
  Synthetic oligonucleotide
gcggttaaacaatatcgaattccagttgtg

SEQ ID NO: 154437 - DNA, 30 bp, Artificial Sequence
  Synthetic oligonucleotide
tcaaaactttactcatgcatgaacgttgtg

SEQ ID NO: 154438 - DNA, 30 bp, Artificial Sequence
  Synthetic oligonucleotide
gcgcgacaccgggacattgagttcgttgtg

SEQ ID NO: 154439 - DNA, 30 bp, Artificial Sequence
  Synthetic oligonucleotide
gaggggtaaaactctccctaggcggttgtg

SEQ ID NO: 154440 - DNA, 30 bp, Artificial Sequence
  Synthetic oligonucleotide
tcaaggcggttcccggtaccggtggttgtg

SEQ ID NO: 154441 - DNA, 30 bp, Artificial Sequence
  Synthetic oligonucleotide
aacgaggtatagacttggaagtatgttgtg

SEQ ID NO: 154442 - DNA, 30 bp, Artificial Sequence
  Synthetic oligonucleotide
cgagcgaccaatgaggggatgttttttgtg

SEQ ID NO: 154443 - DNA, 30 bp, Artificial Sequence
  Synthetic oligonucleotide
acgcgtccggtatgtaactctcaaaaattg

SEQ ID NO: 154444 - DNA, 30 bp, Artificial Sequence
  Synthetic oligonucleotide
gctaggatttgaaaaccaaagccgaaattg

SEQ ID NO: 154445 - DNA, 30 bp, Artificial Sequence
  Synthetic oligonucleotide
cgtagcggtcctctgatttctgtgaaattg

SEQ ID NO: 154446 - DNA, 30 bp, Artificial Sequence
  Synthetic oligonucleotide
atcgggcgccactctgttagagttaaattg

SEQ ID NO: 154447 - DNA, 30 bp, Artificial Sequence
  Synthetic oligonucleotide
tttcggcaaataagagcctaaaaacaattg

SEQ ID NO: 154448 - DNA, 30 bp, Artificial Sequence
  Synthetic oligonucleotide
gtccccagcttacccgggaaagagcaattg

SEQ ID NO: 154449 - DNA, 30 bp, Artificial Sequence
  Synthetic oligonucleotide
ccctcaatgacattgttgtctattcaattg

SEQ ID NO: 154450 - DNA, 30 bp, Artificial Sequence
  Synthetic oligonucleotide
ggcagtgacgtagtgacttggcaagaattg

SEQ ID NO: 154451 - DNA, 30 bp, Artificial Sequence
  Synthetic oligonucleotide
tctccttgcgatgtgagtaaaaacgaattg

SEQ ID NO: 154452 - DNA, 30 bp, Artificial Sequence
  Synthetic oligonucleotide
tttaaagggctatcacagtggaacgaattg

SEQ ID NO: 154453 - DNA, 30 bp, Artificial Sequence
  Synthetic oligonucleotide
ccccggagaaaaaactcgtataacgaattg

SEQ ID NO: 154454 - DNA, 30 bp, Artificial Sequence
  Synthetic oligonucleotide
gcgcgctaatgagtcgtttataaggaattg

SEQ ID NO: 154455 - DNA, 30 bp, Artificial Sequence
  Synthetic oligonucleotide
tagttttccatgaaccaaggcacgtaattg

SEQ ID NO: 154456 - DNA, 30 bp, Artificial Sequence
  Synthetic oligonucleotide
ccggtcgtcgggaggtgttcaacttaattg

SEQ ID NO: 154457 - DNA, 30 bp, Artificial Sequence
  Synthetic oligonucleotide
aggaaaagggcgctacactactcttaattg

SEQ ID NO: 154458 - DNA, 30 bp, Artificial Sequence
  Synthetic oligonucleotide
catggtctgcggtaacccttgaccacattg

SEQ ID NO: 154459 - DNA, 30 bp, Artificial Sequence
  Synthetic oligonucleotide
gggcataagtacccagacgaatagacattg

SEQ ID NO: 154460 - DNA, 29 bp, Artificial Sequence
  Synthetic oligonucleotide
actttagtccaatgcgctaaatgacattg

SEQ ID NO: 154461 - DNA, 30 bp, Artificial Sequence
  Synthetic oligonucleotide
tgtagtccagatagagtcggaggtccattg

SEQ ID NO: 154462 - DNA, 30 bp, Artificial Sequence
  Synthetic oligonucleotide
cttaatcgggcgggagcttgataggcattg

SEQ ID NO: 154463 - DNA, 30 bp, Artificial Sequence
  Synthetic oligonucleotide
tggccagtaggaattacgattagggcattg

SEQ ID NO: 154464 - DNA, 31 bp, Artificial Sequence
  Synthetic oligonucleotide
aatgttcgtacacagttggttagtggcattg

SEQ ID NO: 154465 - DNA, 30 bp, Artificial Sequence
  Synthetic oligonucleotide
ctagtggagttactacttttttactcattg

SEQ ID NO: 154466 - DNA, 30 bp, Artificial Sequence
  Synthetic oligonucleotide
tatcactcggtgcgtctagctccgtcattg

SEQ ID NO: 154467 - DNA, 30 bp, Artificial Sequence
  Synthetic oligonucleotide
gcttagagcaaaaatcagctcaaaagattg

SEQ ID NO: 154468 - DNA, 30 bp, Artificial Sequence
  Synthetic oligonucleotide
gattgatttgagctgaacactaagagattg

SEQ ID NO: 154469 - DNA, 30 bp, Artificial Sequence
  Synthetic oligonucleotide
gagccgagcttgtggagaagatggagattg

SEQ ID NO: 154470 - DNA, 30 bp, Artificial Sequence
  Synthetic oligonucleotide
cattacgtccttgatgccgattatagattg

SEQ ID NO: 154471 - DNA, 30 bp, Artificial Sequence
  Synthetic oligonucleotide
ttggttgttggtgaggaactaatccgattg

SEQ ID NO: 154472 - DNA, 30 bp, Artificial Sequence
  Synthetic oligonucleotide
gtcacgtgtatgcgagctaagtagcgattg

SEQ ID NO: 154473 - DNA, 30 bp, Artificial Sequence
  Synthetic oligonucleotide
gtatttggtgaggaagaactttggcgattg

SEQ ID NO: 154474 - DNA, 30 bp, Artificial Sequence
  Synthetic oligonucleotide
aatgtcgcaaggctcggaactactcgattg

SEQ ID NO: 154475 - DNA, 30 bp, Artificial Sequence
  Synthetic oligonucleotide
ccaatgatcctagatgttatcccaggattg

SEQ ID NO: 154476 - DNA, 30 bp, Artificial Sequence
  Synthetic oligonucleotide
gtaattgaagtatccatcggtatgggattg

SEQ ID NO: 154477 - DNA, 30 bp, Artificial Sequence
  Synthetic oligonucleotide
cggactcctcttaaaatgggtttgggattg

SEQ ID NO: 154478 - DNA, 30 bp, Artificial Sequence
  Synthetic oligonucleotide
taaataccgttttgccgatcaacatgattg

SEQ ID NO: 154479 - DNA, 30 bp, Artificial Sequence
  Synthetic oligonucleotide
gccttcggcacctaagctcctccatgattg

SEQ ID NO: 154480 - DNA, 30 bp, Artificial Sequence
  Synthetic oligonucleotide
acaacctacctgcgtatttacgacatattg

SEQ ID NO: 154481 - DNA, 30 bp, Artificial Sequence
  Synthetic oligonucleotide
gtacggtactaatagaattgcatcatattg

SEQ ID NO: 154482 - DNA, 30 bp, Artificial Sequence
  Synthetic oligonucleotide
gcgagcggctcgggaagattcgtcatattg

SEQ ID NO: 154483 - DNA, 30 bp, Artificial Sequence
  Synthetic oligonucleotide
cgcgatacggcgtccagcagaatcctattg

SEQ ID NO: 154484 - DNA, 30 bp, Artificial Sequence
  Synthetic oligonucleotide
ctgacgaatgtaatgatcgaatcgctattg

SEQ ID NO: 154485 - DNA, 30 bp, Artificial Sequence
  Synthetic oligonucleotide
agttgtggtgagttgtcgcgttggctattg

SEQ ID NO: 154486 - DNA, 30 bp, Artificial Sequence
  Synthetic oligonucleotide
tgaaacactgcgagatgttagcgtctattg

SEQ ID NO: 154487 - DNA, 30 bp, Artificial Sequence
  Synthetic oligonucleotide
taaaagtaaactgaggtctttaaagtattg

SEQ ID NO: 154488 - DNA, 30 bp, Artificial Sequence
  Synthetic oligonucleotide
cgttgtgcctaagagtttcaaagagtattg

SEQ ID NO: 154489 - DNA, 30 bp, Artificial Sequence
  Synthetic oligonucleotide
cgtaactgtgcaatattgctatgagtattg

SEQ ID NO: 154490 - DNA, 30 bp, Artificial Sequence
  Synthetic oligonucleotide
ataaaggaaatccactgtgacgtagtattg

SEQ ID NO: 154491 - DNA, 31 bp, Artificial Sequence
  Synthetic oligonucleotide
gccataagataacgatcggtcaatcgtattg

SEQ ID NO: 154492 - DNA, 30 bp, Artificial Sequence
  Synthetic oligonucleotide
ttaggatagtcacagaacatgaaggtattg

SEQ ID NO: 154493 - DNA, 30 bp, Artificial Sequence
  Synthetic oligonucleotide
aaacggaatgggaggaataacggggtattg

SEQ ID NO: 154494 - DNA, 30 bp, Artificial Sequence
  Synthetic oligonucleotide
atatctaaagtatgtagtgaggctgtattg

SEQ ID NO: 154495 - DNA, 30 bp, Artificial Sequence
  Synthetic oligonucleotide
aagattatagagatccggacaaagttattg

SEQ ID NO: 154496 - DNA, 30 bp, Artificial Sequence
  Synthetic oligonucleotide
ctctggaagaactaagatgtagggttattg

SEQ ID NO: 154497 - DNA, 30 bp, Artificial Sequence
  Synthetic oligonucleotide
catatactaacaaccacgtcctctttattg

SEQ ID NO: 154498 - DNA, 30 bp, Artificial Sequence
  Synthetic oligonucleotide
aaaacaacataggtcatggtgaggcacttg

SEQ ID NO: 154499 - DNA, 30 bp, Artificial Sequence
  Synthetic oligonucleotide
tggatttgaacggcgtgaacaacggacttg

SEQ ID NO: 154500 - DNA, 30 bp, Artificial Sequence
  Synthetic oligonucleotide
cgattgcctgcaagcgcggcgggggacttg

SEQ ID NO: 154501 - DNA, 30 bp, Artificial Sequence
  Synthetic oligonucleotide
cagtgctgatggtgtacggtttgggacttg

SEQ ID NO: 154502 - DNA, 30 bp, Artificial Sequence
  Synthetic oligonucleotide
tccgttagcctcaaatcgaggctggacttg

SEQ ID NO: 154503 - DNA, 30 bp, Artificial Sequence
  Synthetic oligonucleotide
ttggtcatcctaactaggtatctggacttg

SEQ ID NO: 154504 - DNA, 29 bp, Artificial Sequence
  Synthetic oligonucleotide
agggcggttgtctttgtgccagtgacttg

SEQ ID NO: 154505 - DNA, 30 bp, Artificial Sequence
  Synthetic oligonucleotide
aggaagccgaagtattaggacggatacttg

SEQ ID NO: 154506 - DNA, 30 bp, Artificial Sequence
  Synthetic oligonucleotide
accgggtcggtgcttcaacatagaaccttg

SEQ ID NO: 154507 - DNA, 30 bp, Artificial Sequence
  Synthetic oligonucleotide
cggctcaacacgtcccgcgtaataaccttg

SEQ ID NO: 154508 - DNA, 30 bp, Artificial Sequence
  Synthetic oligonucleotide
gtaccgaaattgcatctggcactacccttg

SEQ ID NO: 154509 - DNA, 30 bp, Artificial Sequence
  Synthetic oligonucleotide
caggtttgagactcgtgttgggtccccttg

SEQ ID NO: 154510 - DNA, 30 bp, Artificial Sequence
  Synthetic oligonucleotide
acactggtcacatagcgtgcacccgccttg

SEQ ID NO: 154511 - DNA, 30 bp, Artificial Sequence
  Synthetic oligonucleotide
gcgcgagacgttcatatttgcgaggccttg

SEQ ID NO: 154512 - DNA, 30 bp, Artificial Sequence
  Synthetic oligonucleotide
cttttgtgaatgtgagtccggacggccttg

SEQ ID NO: 154513 - DNA, 30 bp, Artificial Sequence
  Synthetic oligonucleotide
tgcacccccgccgccgggaaatactccttg

SEQ ID NO: 154514 - DNA, 30 bp, Artificial Sequence
  Synthetic oligonucleotide
atggacaggtaacaggcttcataaagcttg

SEQ ID NO: 154515 - DNA, 30 bp, Artificial Sequence
  Synthetic oligonucleotide
tggagagtatctacgtgagtactaagcttg

SEQ ID NO: 154516 - DNA, 30 bp, Artificial Sequence
  Synthetic oligonucleotide
gcaactggaatgtaggacgacctcagcttg

SEQ ID NO: 154517 - DNA, 30 bp, Artificial Sequence
  Synthetic oligonucleotide
tgtggggtttatgaagatacgaagagcttg

SEQ ID NO: 154518 - DNA, 30 bp, Artificial Sequence
  Synthetic oligonucleotide
tcaagcgggcctactaggacgccacgcttg

SEQ ID NO: 154519 - DNA, 30 bp, Artificial Sequence
  Synthetic oligonucleotide
cactcggagggtcacataatggtacgcttg

SEQ ID NO: 154520 - DNA, 30 bp, Artificial Sequence
  Synthetic oligonucleotide
tcccggtacgctattgaacactgaggcttg

SEQ ID NO: 154521 - DNA, 30 bp, Artificial Sequence
  Synthetic oligonucleotide
gtaactcgcgaggcctcatatttaggcttg

SEQ ID NO: 154522 - DNA, 30 bp, Artificial Sequence
  Synthetic oligonucleotide
gtcggtcccgacctcgaaatctgtggcttg

SEQ ID NO: 154523 - DNA, 30 bp, Artificial Sequence
  Synthetic oligonucleotide
ctgaacttcaggaacaatggggcatgcttg

SEQ ID NO: 154524 - DNA, 30 bp, Artificial Sequence
  Synthetic oligonucleotide
ctatccaagcacaaactgataagatgcttg

SEQ ID NO: 154525 - DNA, 30 bp, Artificial Sequence
  Synthetic oligonucleotide
actacttgctgagcgtttgggatatgcttg

SEQ ID NO: 154526 - DNA, 30 bp, Artificial Sequence
  Synthetic oligonucleotide
gtgccgtgcgaaaaaagtggttactgcttg

SEQ ID NO: 154527 - DNA, 30 bp, Artificial Sequence
  Synthetic oligonucleotide
tctgtttggggatttttagggcattgcttg

SEQ ID NO: 154528 - DNA, 30 bp, Artificial Sequence
  Synthetic oligonucleotide
aaccagggacaatactgtataagaatcttg

SEQ ID NO: 154529 - DNA, 30 bp, Artificial Sequence
  Synthetic oligonucleotide
ttgttggggtcagtgattaaagtaatcttg

SEQ ID NO: 154530 - DNA, 30 bp, Artificial Sequence
  Synthetic oligonucleotide
gacagcccatctatgccttgaatcctcttg

SEQ ID NO: 154531 - DNA, 30 bp, Artificial Sequence
  Synthetic oligonucleotide
cggccgacatctgcgagcccttgagtcttg

SEQ ID NO: 154532 - DNA, 30 bp, Artificial Sequence
  Synthetic oligonucleotide
gggagaggtgccccgtagactctggtcttg

SEQ ID NO: 154533 - DNA, 30 bp, Artificial Sequence
  Synthetic oligonucleotide
agaataattatctacctctatggattcttg

SEQ ID NO: 154534 - DNA, 30 bp, Artificial Sequence
  Synthetic oligonucleotide
accggacctcgaaggtccatgagcttcttg

SEQ ID NO: 154535 - DNA, 30 bp, Artificial Sequence
  Synthetic oligonucleotide
acctaggacatcaacctatccaagttcttg

SEQ ID NO: 154536 - DNA, 30 bp, Artificial Sequence
  Synthetic oligonucleotide
ttgcacgacggatattacaaacagttcttg

SEQ ID NO: 154537 - DNA, 30 bp, Artificial Sequence
  Synthetic oligonucleotide
cctagaccagatctcgatcgcacgttcttg

SEQ ID NO: 154538 - DNA, 30 bp, Artificial Sequence
  Synthetic oligonucleotide
accgtatgcccgtctaaggttgggttcttg

SEQ ID NO: 154539 - DNA, 30 bp, Artificial Sequence
  Synthetic oligonucleotide
ccgacgccttattaattgaccactttcttg

SEQ ID NO: 154540 - DNA, 30 bp, Artificial Sequence
  Synthetic oligonucleotide
gcaatgtggagatgctcccaagcaaagttg

SEQ ID NO: 154541 - DNA, 30 bp, Artificial Sequence
  Synthetic oligonucleotide
tgtgtcctctgacagacagtgggaaagttg

SEQ ID NO: 154542 - DNA, 30 bp, Artificial Sequence
  Synthetic oligonucleotide
tcaggctggcccgggacgacaaggaagttg

SEQ ID NO: 154543 - DNA, 30 bp, Artificial Sequence
  Synthetic oligonucleotide
gccgagaatatagatccgtttaaccagttg

SEQ ID NO: 154544 - DNA, 30 bp, Artificial Sequence
  Synthetic oligonucleotide
gtcctccgggcggggcaaagggctcagttg

SEQ ID NO: 154545 - DNA, 30 bp, Artificial Sequence
  Synthetic oligonucleotide
atctcgatcacggtcttgaagggcgagttg

SEQ ID NO: 154546 - DNA, 30 bp, Artificial Sequence
  Synthetic oligonucleotide
ctagtgcgggcctaccaacagtgctagttg

SEQ ID NO: 154547 - DNA, 30 bp, Artificial Sequence
  Synthetic oligonucleotide
agtcaaaataggtgttgaccccattagttg

SEQ ID NO: 154548 - DNA, 30 bp, Artificial Sequence
  Synthetic oligonucleotide
tagaaaactaaggatactttgcattagttg

SEQ ID NO: 154549 - DNA, 30 bp, Artificial Sequence
  Synthetic oligonucleotide
gcgctgtttacaataaatggtacttagttg

SEQ ID NO: 154550 - DNA, 30 bp, Artificial Sequence
  Synthetic oligonucleotide
cgacgctatggattttcgctacaaacgttg

SEQ ID NO: 154551 - DNA, 30 bp, Artificial Sequence
  Synthetic oligonucleotide
ggagagtacctgaatattcaagaaacgttg

SEQ ID NO: 154552 - DNA, 30 bp, Artificial Sequence
  Synthetic oligonucleotide
gctgttgatggaatggttatattaccgttg

SEQ ID NO: 154553 - DNA, 30 bp, Artificial Sequence
  Synthetic oligonucleotide
cggcaaccgcatccggagtgttgtccgttg

SEQ ID NO: 154554 - DNA, 30 bp, Artificial Sequence
  Synthetic oligonucleotide
cacccgtagactaatacgaacgatgcgttg

SEQ ID NO: 154555 - DNA, 30 bp, Artificial Sequence
  Synthetic oligonucleotide
gctcaactgtaatggtggttgggtgcgttg

SEQ ID NO: 154556 - DNA, 30 bp, Artificial Sequence
  Synthetic oligonucleotide
taatcagtcggtagctgctatgttgcgttg

SEQ ID NO: 154557 - DNA, 30 bp, Artificial Sequence
  Synthetic oligonucleotide
tatgaacacacaggccaatgaacatcgttg

SEQ ID NO: 154558 - DNA, 30 bp, Artificial Sequence
  Synthetic oligonucleotide
cgttcttgtctcagacgacggaagtcgttg

SEQ ID NO: 154559 - DNA, 30 bp, Artificial Sequence
  Synthetic oligonucleotide
caaccttctgggagcggaatgatttcgttg

SEQ ID NO: 154560 - DNA, 30 bp, Artificial Sequence
  Synthetic oligonucleotide
gtattcaaggcagggtcagataataggttg

SEQ ID NO: 154561 - DNA, 30 bp, Artificial Sequence
  Synthetic oligonucleotide
cggtacaggactgtcttccaagacgggttg

SEQ ID NO: 154562 - DNA, 30 bp, Artificial Sequence
  Synthetic oligonucleotide
acatcatctggccgtccaagagacgggttg

SEQ ID NO: 154563 - DNA, 30 bp, Artificial Sequence
  Synthetic oligonucleotide
acttgatgataggacgtcgaaacggggttg

SEQ ID NO: 154564 - DNA, 30 bp, Artificial Sequence
  Synthetic oligonucleotide
aaacgaccaagaaatttgttccgtgggttg

SEQ ID NO: 154565 - DNA, 30 bp, Artificial Sequence
  Synthetic oligonucleotide
acaagctagaatggatatcgtatctggttg

SEQ ID NO: 154566 - DNA, 25 bp, Artificial Sequence
  Synthetic oligonucleotide
agaggaccaagctcaagacatgttg

SEQ ID NO: 154567 - DNA, 30 bp, Artificial Sequence
  Synthetic oligonucleotide
ggtaccgccgggcgtgatccggagatgttg

SEQ ID NO: 154568 - DNA, 30 bp, Artificial Sequence
  Synthetic oligonucleotide
gtctggtgtggccgattatcagccctgttg

SEQ ID NO: 154569 - DNA, 30 bp, Artificial Sequence
  Synthetic oligonucleotide
acggacccaaactgacgtcgcctgctgttg

SEQ ID NO: 154570 - DNA, 30 bp, Artificial Sequence
  Synthetic oligonucleotide
aggaagcccctgtcgaactgtcgtctgttg

SEQ ID NO: 154571 - DNA, 30 bp, Artificial Sequence
  Synthetic oligonucleotide
ttcgcgtggcccgttcccgtggtcgtgttg

SEQ ID NO: 154572 - DNA, 30 bp, Artificial Sequence
  Synthetic oligonucleotide
ctaataagttaacatcttggtatcttgttg

SEQ ID NO: 154573 - DNA, 30 bp, Artificial Sequence
  Synthetic oligonucleotide
cagcgggatgtaggtgttaagtcgttgttg

SEQ ID NO: 154574 - DNA, 30 bp, Artificial Sequence
  Synthetic oligonucleotide
agtacgatcaaaaagatcagcgatttgttg

SEQ ID NO: 154575 - DNA, 30 bp, Artificial Sequence
  Synthetic oligonucleotide
agctgtggtgtcagcgggatggtaaatttg

SEQ ID NO: 154576 - DNA, 30 bp, Artificial Sequence
  Synthetic oligonucleotide
agggaagcccgggaagtgatcttaaatttg

SEQ ID NO: 154577 - DNA, 30 bp, Artificial Sequence
  Synthetic oligonucleotide
atcggagctgagataaaggatgccaatttg

SEQ ID NO: 154578 - DNA, 30 bp, Artificial Sequence
  Synthetic oligonucleotide
aagggtccatagggtcgaatacttaatttg

SEQ ID NO: 154579 - DNA, 30 bp, Artificial Sequence
  Synthetic oligonucleotide
ggatcatcaaagactttataaacacatttg

SEQ ID NO: 154580 - DNA, 30 bp, Artificial Sequence
  Synthetic oligonucleotide
cgttaccagtaggcaaagctcctacatttg

SEQ ID NO: 154581 - DNA, 30 bp, Artificial Sequence
  Synthetic oligonucleotide
gatatgatagggaggagggctaaccatttg

SEQ ID NO: 154582 - DNA, 30 bp, Artificial Sequence
  Synthetic oligonucleotide
ggcttccggaaccaaattccataccatttg

SEQ ID NO: 154583 - DNA, 30 bp, Artificial Sequence
  Synthetic oligonucleotide
tacggatcagtcatggttaaagagcatttg

SEQ ID NO: 154584 - DNA, 30 bp, Artificial Sequence
  Synthetic oligonucleotide
tacgagtatccgaacctacttattcatttg

SEQ ID NO: 154585 - DNA, 30 bp, Artificial Sequence
  Synthetic oligonucleotide
ttatgttcgtatttaggtgtggaagatttg

SEQ ID NO: 154586 - DNA, 30 bp, Artificial Sequence
  Synthetic oligonucleotide
caggagcgcactcgaccactctcagatttg

SEQ ID NO: 154587 - DNA, 30 bp, Artificial Sequence
  Synthetic oligonucleotide
cgcgagggaacgtaactgattggcgatttg

SEQ ID NO: 154588 - DNA, 30 bp, Artificial Sequence
  Synthetic oligonucleotide
gtctgattacacattcggcctactgatttg

SEQ ID NO: 154589 - DNA, 30 bp, Artificial Sequence
  Synthetic oligonucleotide
cggcaatctcaaggttgaccccttgatttg

SEQ ID NO: 154590 - DNA, 30 bp, Artificial Sequence
  Synthetic oligonucleotide
catgacgaccgtggcgcttagtaatatttg

SEQ ID NO: 154591 - DNA, 30 bp, Artificial Sequence
  Synthetic oligonucleotide
gataaggaatcaatggtaaggccatatttg

SEQ ID NO: 154592 - DNA, 30 bp, Artificial Sequence
  Synthetic oligonucleotide
cagtatggcaggaattgaagtgagtatttg

SEQ ID NO: 154593 - DNA, 30 bp, Artificial Sequence
  Synthetic oligonucleotide
gatcgtgcatatgcgcgtcgtagaactttg

SEQ ID NO: 154594 - DNA, 30 bp, Artificial Sequence
  Synthetic oligonucleotide
tactgacatactttcggcccaggaactttg

SEQ ID NO: 154595 - DNA, 30 bp, Artificial Sequence
  Synthetic oligonucleotide
cagcggggtttggacgaattattaactttg

SEQ ID NO: 154596 - DNA, 30 bp, Artificial Sequence
  Synthetic oligonucleotide
aagagcaggtcgcttgtcccagcgactttg

SEQ ID NO: 154597 - DNA, 30 bp, Artificial Sequence
  Synthetic oligonucleotide
tctaaattcgacaccggtgtccatactttg

SEQ ID NO: 154598 - DNA, 30 bp, Artificial Sequence
  Synthetic oligonucleotide
taagggctgttgattccctggtgacctttg

SEQ ID NO: 154599 - DNA, 30 bp, Artificial Sequence
  Synthetic oligonucleotide
atagtcggagaccgccgttgattccctttg

SEQ ID NO: 154600 - DNA, 30 bp, Artificial Sequence
  Synthetic oligonucleotide
caaaagttggtagctaagagttagcctttg

SEQ ID NO: 154601 - DNA, 30 bp, Artificial Sequence
  Synthetic oligonucleotide
gagccaccattcgtgaacatgtcagctttg

SEQ ID NO: 154602 - DNA, 30 bp, Artificial Sequence
  Synthetic oligonucleotide
gcagtcaatcagttggcaggtcgagctttg

SEQ ID NO: 154603 - DNA, 30 bp, Artificial Sequence
  Synthetic oligonucleotide
aaggggaaagattgatagtcccccgctttg

SEQ ID NO: 154604 - DNA, 30 bp, Artificial Sequence
  Synthetic oligonucleotide
gcaagtagacttgataatgaaagatctttg

SEQ ID NO: 154605 - DNA, 30 bp, Artificial Sequence
  Synthetic oligonucleotide
aagtgagactcgctagttccacaaagtttg

SEQ ID NO: 154606 - DNA, 30 bp, Artificial Sequence
  Synthetic oligonucleotide
gtcaatacagatggcaagatccgaagtttg

SEQ ID NO: 154607 - DNA, 30 bp, Artificial Sequence
  Synthetic oligonucleotide
gtgttaatgggcaggcaaaaacccagtttg

SEQ ID NO: 154608 - DNA, 30 bp, Artificial Sequence
  Synthetic oligonucleotide
atcactgggatacttttggtggccagtttg

SEQ ID NO: 154609 - DNA, 31 bp, Artificial Sequence
  Synthetic oligonucleotide
aattacgacaggagacatcggagagagtttg

SEQ ID NO: 154610 - DNA, 30 bp, Artificial Sequence
  Synthetic oligonucleotide
atgtctctggtatcatattttcatagtttg

SEQ ID NO: 154611 - DNA, 30 bp, Artificial Sequence
  Synthetic oligonucleotide
gaaactgcgaaagagggcacacctagtttg

SEQ ID NO: 154612 - DNA, 30 bp, Artificial Sequence
  Synthetic oligonucleotide
acggtcggttgagggtaagcagctagtttg

SEQ ID NO: 154613 - DNA, 30 bp, Artificial Sequence
  Synthetic oligonucleotide
acatatgctcgcggtttcgaggagcgtttg

SEQ ID NO: 154614 - DNA, 30 bp, Artificial Sequence
  Synthetic oligonucleotide
acagtcacattgagtgaggtttggcgtttg

SEQ ID NO: 154615 - DNA, 30 bp, Artificial Sequence
  Synthetic oligonucleotide
tgctaacaggccggaaaaaactaaggtttg

SEQ ID NO: 154616 - DNA, 30 bp, Artificial Sequence
  Synthetic oligonucleotide
gatgtgtctagagactcgaagttcggtttg

SEQ ID NO: 154617 - DNA, 30 bp, Artificial Sequence
  Synthetic oligonucleotide
acgaactgcgcagaggtaacgttcggtttg

SEQ ID NO: 154618 - DNA, 30 bp, Artificial Sequence
  Synthetic oligonucleotide
accctgaacaacgatgtcgcgtttggtttg

SEQ ID NO: 154619 - DNA, 30 bp, Artificial Sequence
  Synthetic oligonucleotide
cgacaaccggcagggataaatttctgtttg

SEQ ID NO: 154620 - DNA, 30 bp, Artificial Sequence
  Synthetic oligonucleotide
aatacacgatcccggcagcaggtgtgtttg

SEQ ID NO: 154621 - DNA, 30 bp, Artificial Sequence
  Synthetic oligonucleotide
atctccaaagagagaggtgcgccgattttg

SEQ ID NO: 154622 - DNA, 30 bp, Artificial Sequence
  Synthetic oligonucleotide
aggaaatgtagagaaagtcaaaaacttttg

SEQ ID NO: 154623 - DNA, 30 bp, Artificial Sequence
  Synthetic oligonucleotide
ccaacatccgttgaacaaaaaccgcttttg

SEQ ID NO: 154624 - DNA, 30 bp, Artificial Sequence
  Synthetic oligonucleotide
acgggcaaggctcgatgaacttttcttttg

SEQ ID NO: 154625 - DNA, 30 bp, Artificial Sequence
  Synthetic oligonucleotide
tgcactttcagctatattcaatacgttttg

SEQ ID NO: 154626 - DNA, 30 bp, Artificial Sequence
  Synthetic oligonucleotide
aatcgtcgtcggagcaacgatggcgttttg

SEQ ID NO: 154627 - DNA, 30 bp, Artificial Sequence
  Synthetic oligonucleotide
ctagctgcttgaagggtaagccgatttttg

SEQ ID NO: 154628 - DNA, 30 bp, Artificial Sequence
  Synthetic oligonucleotide
ctgaaaagacagggataagaggtgtttttg

SEQ ID NO: 154629 - DNA, 30 bp, Artificial Sequence
  Synthetic oligonucleotide
tcgcagagatttgagtttaagatttttttg

SEQ ID NO: 154630 - DNA, 30 bp, Artificial Sequence
  Synthetic oligonucleotide
gttatccccgagccacttagacagaaaaat

SEQ ID NO: 154631 - DNA, 30 bp, Artificial Sequence
  Synthetic oligonucleotide
gcttaaatccctaagtaatcacggaaaaat

SEQ ID NO: 154632 - DNA, 30 bp, Artificial Sequence
  Synthetic oligonucleotide
aaacacgggtagtcagctaacgtgaaaaat

SEQ ID NO: 154633 - DNA, 30 bp, Artificial Sequence
  Synthetic oligonucleotide
agacatttgcggcaccaacagcctaaaaat

SEQ ID NO: 154634 - DNA, 30 bp, Artificial Sequence
  Synthetic oligonucleotide
ctggctagggcagtttgccctgaacaaaat

SEQ ID NO: 154635 - DNA, 30 bp, Artificial Sequence
  Synthetic oligonucleotide
ggtggttataggaattgttgtgaccaaaat

SEQ ID NO: 154636 - DNA, 30 bp, Artificial Sequence
  Synthetic oligonucleotide
tgtgagggcgggctgattgtaacccaaaat

SEQ ID NO: 154637 - DNA, 30 bp, Artificial Sequence
  Synthetic oligonucleotide
gagcctaaaagacgaccgtggtgccaaaat

SEQ ID NO: 154638 - DNA, 30 bp, Artificial Sequence
  Synthetic oligonucleotide
cttccctgttcgcactcagacaccgaaaat

SEQ ID NO: 154639 - DNA, 30 bp, Artificial Sequence
  Synthetic oligonucleotide
ggcggaaggcaaacatctgccgcggaaaat

SEQ ID NO: 154640 - DNA, 31 bp, Artificial Sequence
  Synthetic oligonucleotide
agctccacggcaccatcatgcattctaaaat

SEQ ID NO: 154641 - DNA, 30 bp, Artificial Sequence
  Synthetic oligonucleotide
ccagaagtagcgtatggcggtaagtaaaat

SEQ ID NO: 154642 - DNA, 30 bp, Artificial Sequence
  Synthetic oligonucleotide
cagaccgggacagggttagtatggtaaaat

SEQ ID NO: 154643 - DNA, 30 bp, Artificial Sequence
  Synthetic oligonucleotide
tcagtggaacatgcgcgtagaaattaaaat

SEQ ID NO: 154644 - DNA, 30 bp, Artificial Sequence
  Synthetic oligonucleotide
agtgaaagctcgacgtcaccacgcacaaat

SEQ ID NO: 154645 - DNA, 30 bp, Artificial Sequence
  Synthetic oligonucleotide
accgtgaacgggaaaggtcgcggcacaaat

SEQ ID NO: 154646 - DNA, 30 bp, Artificial Sequence
  Synthetic oligonucleotide
tggaactctcttgccaacccctagacaaat

SEQ ID NO: 154647 - DNA, 30 bp, Artificial Sequence
  Synthetic oligonucleotide
cagaatcgtccatgaggacattctacaaat

SEQ ID NO: 154648 - DNA, 30 bp, Artificial Sequence
  Synthetic oligonucleotide
aggaccgagagacgatatattattacaaat

SEQ ID NO: 154649 - DNA, 30 bp, Artificial Sequence
  Synthetic oligonucleotide
tgggccacccaacctcgtctaatgccaaat

SEQ ID NO: 154650 - DNA, 30 bp, Artificial Sequence
  Synthetic oligonucleotide
tatgcaggaaccggtgacctggcagcaaat

SEQ ID NO: 154651 - DNA, 30 bp, Artificial Sequence
  Synthetic oligonucleotide
tagggccactaggctcttgttttagcaaat

SEQ ID NO: 154652 - DNA, 30 bp, Artificial Sequence
  Synthetic oligonucleotide
gcgatcccattaacgaagattaatgcaaat

SEQ ID NO: 154653 - DNA, 30 bp, Artificial Sequence
  Synthetic oligonucleotide
tcggcggagaaagactttgcatttgcaaat

SEQ ID NO: 154654 - DNA, 30 bp, Artificial Sequence
  Synthetic oligonucleotide
tgccagactacatgtcggaattaatcaaat

SEQ ID NO: 154655 - DNA, 30 bp, Artificial Sequence
  Synthetic oligonucleotide
caatgagagattctccctatcagctcaaat

SEQ ID NO: 154656 - DNA, 30 bp, Artificial Sequence
  Synthetic oligonucleotide
cacagagctacctgatccaccgggagaaat

SEQ ID NO: 154657 - DNA, 30 bp, Artificial Sequence
  Synthetic oligonucleotide
agagagcaatttagagtataaaatagaaat

SEQ ID NO: 154658 - DNA, 30 bp, Artificial Sequence
  Synthetic oligonucleotide
aaagatgctttgtttaacggaccacgaaat

SEQ ID NO: 154659 - DNA, 30 bp, Artificial Sequence
  Synthetic oligonucleotide
agtcgaagagagaatagccgcccgcgaaat

SEQ ID NO: 154660 - DNA, 30 bp, Artificial Sequence
  Synthetic oligonucleotide
ccgttacgggtacagtgcaccactcgaaat

SEQ ID NO: 154661 - DNA, 30 bp, Artificial Sequence
  Synthetic oligonucleotide
aatatgtaagatcatactcagcctcgaaat

SEQ ID NO: 154662 - DNA, 30 bp, Artificial Sequence
  Synthetic oligonucleotide
ccctaaccaaggaaatgttttcgtcgaaat

SEQ ID NO: 154663 - DNA, 30 bp, Artificial Sequence
  Synthetic oligonucleotide
gtcgaggacgtttgcgcactctgtcgaaat

SEQ ID NO: 154664 - DNA, 30 bp, Artificial Sequence
  Synthetic oligonucleotide
tgtataatgagtaattacatctttcgaaat

SEQ ID NO: 154665 - DNA, 30 bp, Artificial Sequence
  Synthetic oligonucleotide
cggacaagtgggtgattgtcctgaggaaat

SEQ ID NO: 154666 - DNA, 30 bp, Artificial Sequence
  Synthetic oligonucleotide
gaaaggcgaaataccgattacaagggaaat

SEQ ID NO: 154667 - DNA, 30 bp, Artificial Sequence
  Synthetic oligonucleotide
agatgaacgacattccgatgatcgggaaat

SEQ ID NO: 154668 - DNA, 30 bp, Artificial Sequence
  Synthetic oligonucleotide
cggtcaaatctgggcttggtccggggaaat

SEQ ID NO: 154669 - DNA, 30 bp, Artificial Sequence
  Synthetic oligonucleotide
ctctagcaatacgggcccgtcactggaaat

SEQ ID NO: 154670 - DNA, 30 bp, Artificial Sequence
  Synthetic oligonucleotide
agaggacatacaattaagaaaatatgaaat

SEQ ID NO: 154671 - DNA, 30 bp, Artificial Sequence
  Synthetic oligonucleotide
cgttggatccttctattacagttatgaaat

SEQ ID NO: 154672 - DNA, 30 bp, Artificial Sequence
  Synthetic oligonucleotide
tacacagcctgagtgggtgatgactgaaat

SEQ ID NO: 154673 - DNA, 30 bp, Artificial Sequence
  Synthetic oligonucleotide
taatacggtatcttggcttctaattgaaat

SEQ ID NO: 154674 - DNA, 30 bp, Artificial Sequence
  Synthetic oligonucleotide
cgaacatttaactacactgatttttgaaat

SEQ ID NO: 154675 - DNA, 30 bp, Artificial Sequence
  Synthetic oligonucleotide
aaggggcgaagcggtattcaagaaataaat

SEQ ID NO: 154676 - DNA, 30 bp, Artificial Sequence
  Synthetic oligonucleotide
gatccgagtcaggaagtatcaggaataaat

SEQ ID NO: 154677 - DNA, 31 bp, Artificial Sequence
  Synthetic oligonucleotide
ctgtaggcaagtctctcaggtttcgataaat

SEQ ID NO: 154678 - DNA, 30 bp, Artificial Sequence
  Synthetic oligonucleotide
gcttgcgcattgagggctgtttcgataaat

SEQ ID NO: 154679 - DNA, 30 bp, Artificial Sequence
  Synthetic oligonucleotide
gttgcgttagatcaatcgactaaactaaat

SEQ ID NO: 154680 - DNA, 30 bp, Artificial Sequence
  Synthetic oligonucleotide
tggccgtatttaggccccattgatctaaat

SEQ ID NO: 154681 - DNA, 30 bp, Artificial Sequence
  Synthetic oligonucleotide
taataggcaatcggatggaaatatctaaat

SEQ ID NO: 154682 - DNA, 30 bp, Artificial Sequence
  Synthetic oligonucleotide
gctgaggcgttgtcaatttgccaagtaaat

SEQ ID NO: 154683 - DNA, 30 bp, Artificial Sequence
  Synthetic oligonucleotide
acctccccaggtggtagacacagagtaaat

SEQ ID NO: 154684 - DNA, 30 bp, Artificial Sequence
  Synthetic oligonucleotide
gccaaagcaattcgggatagcgtagtaaat

SEQ ID NO: 154685 - DNA, 30 bp, Artificial Sequence
  Synthetic oligonucleotide
gatctgatgctcatgagaagtaacgtaaat

SEQ ID NO: 154686 - DNA, 31 bp, Artificial Sequence
  Synthetic oligonucleotide
gctgcagaaagcatgtcaatctaaggtaaat

SEQ ID NO: 154687 - DNA, 30 bp, Artificial Sequence
  Synthetic oligonucleotide
catggcggttaatagtttaaagtggtaaat

SEQ ID NO: 154688 - DNA, 30 bp, Artificial Sequence
  Synthetic oligonucleotide
gacgctggaagcgaggggagaattgtaaat

SEQ ID NO: 154689 - DNA, 30 bp, Artificial Sequence
  Synthetic oligonucleotide
tcagcattccataaattgagcctcttaaat

SEQ ID NO: 154690 - DNA, 30 bp, Artificial Sequence
  Synthetic oligonucleotide
agctggtagactgcgtcggaaccaaacaat

SEQ ID NO: 154691 - DNA, 30 bp, Artificial Sequence
  Synthetic oligonucleotide
agcttatagacccggagaagtcgaaacaat

SEQ ID NO: 154692 - DNA, 30 bp, Artificial Sequence
  Synthetic oligonucleotide
gggagacgtatcacaccccagcctaacaat

SEQ ID NO: 154693 - DNA, 30 bp, Artificial Sequence
  Synthetic oligonucleotide
gggatgccagcttgcacatttcatcacaat

SEQ ID NO: 154694 - DNA, 30 bp, Artificial Sequence
  Synthetic oligonucleotide
cctggccacttgagtcgaacataggacaat

SEQ ID NO: 154695 - DNA, 30 bp, Artificial Sequence
  Synthetic oligonucleotide
gagcaactggttgcccgactgagggacaat

SEQ ID NO: 154696 - DNA, 30 bp, Artificial Sequence
  Synthetic oligonucleotide
ttcacatttagaacgggcgtgggtgacaat

SEQ ID NO: 154697 - DNA, 30 bp, Artificial Sequence
  Synthetic oligonucleotide
ccaatgagccgctattctcaggtttacaat

SEQ ID NO: 154698 - DNA, 30 bp, Artificial Sequence
  Synthetic oligonucleotide
tcatttaagggggtactagccgccaccaat

SEQ ID NO: 154699 - DNA, 30 bp, Artificial Sequence
  Synthetic oligonucleotide
gttatgactcgggtaagatcgaggaccaat

SEQ ID NO: 154700 - DNA, 30 bp, Artificial Sequence
  Synthetic oligonucleotide
taaggagtccttaactcacctctacccaat

SEQ ID NO: 154701 - DNA, 30 bp, Artificial Sequence
  Synthetic oligonucleotide
tcagtggttgaattgaccgagacccccaat

SEQ ID NO: 154702 - DNA, 30 bp, Artificial Sequence
  Synthetic oligonucleotide
taagtggccgacttgtaagttaagcccaat

SEQ ID NO: 154703 - DNA, 30 bp, Artificial Sequence
  Synthetic oligonucleotide
cgtgagggcatattttgaaactcagccaat

SEQ ID NO: 154704 - DNA, 30 bp, Artificial Sequence
  Synthetic oligonucleotide
agaggccgacccctcgcgaatatagccaat

SEQ ID NO: 154705 - DNA, 30 bp, Artificial Sequence
  Synthetic oligonucleotide
tgagagccaatcgggtggcagagtgccaat

SEQ ID NO: 154706 - DNA, 30 bp, Artificial Sequence
  Synthetic oligonucleotide
ggtaacaaatcgagtgtatttagtgccaat

SEQ ID NO: 154707 - DNA, 30 bp, Artificial Sequence
  Synthetic oligonucleotide
tcgattgtaactggtgggaatattcgcaat

SEQ ID NO: 154708 - DNA, 30 bp, Artificial Sequence
  Synthetic oligonucleotide
gtgcaatccgtgaaatgacagtcaggcaat

SEQ ID NO: 154709 - DNA, 30 bp, Artificial Sequence
  Synthetic oligonucleotide
tgcccgaggcagctgaacaagatcggcaat

SEQ ID NO: 154710 - DNA, 30 bp, Artificial Sequence
  Synthetic oligonucleotide
atcaccccaaaggctaagttgcatggcaat

SEQ ID NO: 154711 - DNA, 30 bp, Artificial Sequence
  Synthetic oligonucleotide
accttgtgagttgcaccagacagtggcaat

SEQ ID NO: 154712 - DNA, 30 bp, Artificial Sequence
  Synthetic oligonucleotide
cgacgctgtccgcacggaccaaactgcaat

SEQ ID NO: 154713 - DNA, 30 bp, Artificial Sequence
  Synthetic oligonucleotide
cgcttcgtaagtatgtcgaggtgctgcaat

SEQ ID NO: 154714 - DNA, 30 bp, Artificial Sequence
  Synthetic oligonucleotide
aggcaattgagcgaaaggcaaacttgcaat

SEQ ID NO: 154715 - DNA, 30 bp, Artificial Sequence
  Synthetic oligonucleotide
atggtgatcccccaatatgtcggactcaat

SEQ ID NO: 154716 - DNA, 31 bp, Artificial Sequence
  Synthetic oligonucleotide
taagttgaggtggctctgacagaccctcaat

SEQ ID NO: 154717 - DNA, 30 bp, Artificial Sequence
  Synthetic oligonucleotide
acagatatatacgaaccagcgtagctcaat

SEQ ID NO: 154718 - DNA, 30 bp, Artificial Sequence
  Synthetic oligonucleotide
aacatcacaagcgcgatcattgtgctcaat

SEQ ID NO: 154719 - DNA, 30 bp, Artificial Sequence
  Synthetic oligonucleotide
cagcagggccccgcttatgcaaccgtcaat

SEQ ID NO: 154720 - DNA, 30 bp, Artificial Sequence
  Synthetic oligonucleotide
aatggcgagcatgtccaacggcacttcaat

SEQ ID NO: 154721 - DNA, 30 bp, Artificial Sequence
  Synthetic oligonucleotide
ggaggttgccgacgtagattgtacttcaat

SEQ ID NO: 154722 - DNA, 30 bp, Artificial Sequence
  Synthetic oligonucleotide
ggagcggcttgcttgcatgcgcggaagaat

SEQ ID NO: 154723 - DNA, 30 bp, Artificial Sequence
  Synthetic oligonucleotide
atcgaggaggattagagagcgatgaagaat

SEQ ID NO: 154724 - DNA, 30 bp, Artificial Sequence
  Synthetic oligonucleotide
gctaacgttcatgtttcaggacttaagaat

SEQ ID NO: 154725 - DNA, 30 bp, Artificial Sequence
  Synthetic oligonucleotide
gtgagcttattgacacctaaaggacagaat

SEQ ID NO: 154726 - DNA, 30 bp, Artificial Sequence
  Synthetic oligonucleotide
ctgattcattcagtagacaatgcccagaat

SEQ ID NO: 154727 - DNA, 30 bp, Artificial Sequence
  Synthetic oligonucleotide
gtatacttgatatagtacaaacggcagaat

SEQ ID NO: 154728 - DNA, 30 bp, Artificial Sequence
  Synthetic oligonucleotide
cagaaaagagccaactatagattgcagaat

SEQ ID NO: 154729 - DNA, 30 bp, Artificial Sequence
  Synthetic oligonucleotide
cagcgcagggatgcactaaatgttcagaat

SEQ ID NO: 154730 - DNA, 30 bp, Artificial Sequence
  Synthetic oligonucleotide
cacgctcttagtatgattcagggagagaat

SEQ ID NO: 154731 - DNA, 30 bp, Artificial Sequence
  Synthetic oligonucleotide
aggcccactgtgccttcctgtgcggagaat

SEQ ID NO: 154732 - DNA, 30 bp, Artificial Sequence
  Synthetic oligonucleotide
acgagaagccgtgtattgtgtcaatagaat

SEQ ID NO: 154733 - DNA, 30 bp, Artificial Sequence
  Synthetic oligonucleotide
ggacgaataatttaattgtgtagatagaat

SEQ ID NO: 154734 - DNA, 30 bp, Artificial Sequence
  Synthetic oligonucleotide
atgtgagtttaactcgatagccggtagaat

SEQ ID NO: 154735 - DNA, 30 bp, Artificial Sequence
  Synthetic oligonucleotide
aaaacaatgatcatactaaagcaaacgaat

SEQ ID NO: 154736 - DNA, 30 bp, Artificial Sequence
  Synthetic oligonucleotide
tatttaggctattgactcatacgaacgaat

SEQ ID NO: 154737 - DNA, 30 bp, Artificial Sequence
  Synthetic oligonucleotide
taggatatcgggtaaaaccttgtcacgaat

SEQ ID NO: 154738 - DNA, 30 bp, Artificial Sequence
  Synthetic oligonucleotide
cgcgccttacccataaattccgagacgaat

SEQ ID NO: 154739 - DNA, 30 bp, Artificial Sequence
  Synthetic oligonucleotide
ggtcaatagttctcaggtgaagcgacgaat

SEQ ID NO: 154740 - DNA, 30 bp, Artificial Sequence
  Synthetic oligonucleotide
gacctcctgcgtctgaagccccaaccgaat

SEQ ID NO: 154741 - DNA, 30 bp, Artificial Sequence
  Synthetic oligonucleotide
tcacccgagaatggaacagtatcaccgaat

SEQ ID NO: 154742 - DNA, 30 bp, Artificial Sequence
  Synthetic oligonucleotide
catgccgagttcatttgtgtgctaccgaat

SEQ ID NO: 154743 - DNA, 30 bp, Artificial Sequence
  Synthetic oligonucleotide
taaagtcactgttactctaacctcccgaat

SEQ ID NO: 154744 - DNA, 30 bp, Artificial Sequence
  Synthetic oligonucleotide
tggatccgagattgaaccgatactccgaat

SEQ ID NO: 154745 - DNA, 30 bp, Artificial Sequence
  Synthetic oligonucleotide
cttgagctttatggcagcctccgagcgaat

SEQ ID NO: 154746 - DNA, 30 bp, Artificial Sequence
  Synthetic oligonucleotide
ccgatggccaagttagcagaaatggcgaat

SEQ ID NO: 154747 - DNA, 30 bp, Artificial Sequence
  Synthetic oligonucleotide
gaacggtaaaagtttggtctatctgcgaat

SEQ ID NO: 154748 - DNA, 30 bp, Artificial Sequence
  Synthetic oligonucleotide
ccgataccctaaactatcaaaagctcgaat

SEQ ID NO: 154749 - DNA, 30 bp, Artificial Sequence
  Synthetic oligonucleotide
cctatatgtcttgtacactggtagtcgaat

SEQ ID NO: 154750 - DNA, 30 bp, Artificial Sequence
  Synthetic oligonucleotide
caagcagtacccaactatgaggggtcgaat

SEQ ID NO: 154751 - DNA, 30 bp, Artificial Sequence
  Synthetic oligonucleotide
atgtaggtgctcatacaggggaaaaggaat

SEQ ID NO: 154752 - DNA, 30 bp, Artificial Sequence
  Synthetic oligonucleotide
acgctggatgcccgaaacgtagtcaggaat

SEQ ID NO: 154753 - DNA, 30 bp, Artificial Sequence
  Synthetic oligonucleotide
aagaggatcttggtcataataaggaggaat

SEQ ID NO: 154754 - DNA, 30 bp, Artificial Sequence
  Synthetic oligonucleotide
tagcgatgggagcacaacccggctaggaat

SEQ ID NO: 154755 - DNA, 30 bp, Artificial Sequence
  Synthetic oligonucleotide
gaattacaagtgcaagtagctctacggaat

SEQ ID NO: 154756 - DNA, 30 bp, Artificial Sequence
  Synthetic oligonucleotide
tggagactctggataaagtgctgccggaat

SEQ ID NO: 154757 - DNA, 30 bp, Artificial Sequence
  Synthetic oligonucleotide
taaccgattagagattgcgtgatagggaat

SEQ ID NO: 154758 - DNA, 30 bp, Artificial Sequence
  Synthetic oligonucleotide
aagcggactacgaagatccgtgtggggaat

SEQ ID NO: 154759 - DNA, 30 bp, Artificial Sequence
  Synthetic oligonucleotide
gcccgcttgggacgatgcttgtatgggaat

SEQ ID NO: 154760 - DNA, 30 bp, Artificial Sequence
  Synthetic oligonucleotide
tcaatgaattatggattaacgggtgggaat

SEQ ID NO: 154761 - DNA, 30 bp, Artificial Sequence
  Synthetic oligonucleotide
ggcaaatattttatagcgttacaatggaat

SEQ ID NO: 154762 - DNA, 30 bp, Artificial Sequence
  Synthetic oligonucleotide
aactacgtagcataagaaggaagatggaat

SEQ ID NO: 154763 - DNA, 30 bp, Artificial Sequence
  Synthetic oligonucleotide
caagaagtggagggtaggtgtaactggaat

SEQ ID NO: 154764 - DNA, 30 bp, Artificial Sequence
  Synthetic oligonucleotide
tgcagtgaggactgaccgggccactggaat

SEQ ID NO: 154765 - DNA, 30 bp, Artificial Sequence
  Synthetic oligonucleotide
gtaggtaggttgtacattgcgcgctggaat

SEQ ID NO: 154766 - DNA, 30 bp, Artificial Sequence
  Synthetic oligonucleotide
ttccgctcgaaggcgaggacgatctggaat

SEQ ID NO: 154767 - DNA, 30 bp, Artificial Sequence
  Synthetic oligonucleotide
acgtttccatttacagcacttcggtggaat

SEQ ID NO: 154768 - DNA, 30 bp, Artificial Sequence
  Synthetic oligonucleotide
ttagctcatcgacagaaagggtattggaat

SEQ ID NO: 154769 - DNA, 30 bp, Artificial Sequence
  Synthetic oligonucleotide
ggacccggcaaagaacgcgagacttggaat

SEQ ID NO: 154770 - DNA, 30 bp, Artificial Sequence
  Synthetic oligonucleotide
aagtcgtaaggttctacagagcccatgaat

SEQ ID NO: 154771 - DNA, 30 bp, Artificial Sequence
  Synthetic oligonucleotide
cggttgtactcgtaaacaggaagcatgaat

SEQ ID NO: 154772 - DNA, 30 bp, Artificial Sequence
  Synthetic oligonucleotide
atgcgggtttcgtgtggcatcagcatgaat

SEQ ID NO: 154773 - DNA, 30 bp, Artificial Sequence
  Synthetic oligonucleotide
ggcaatcgccggggggagcatgtgatgaat

SEQ ID NO: 154774 - DNA, 30 bp, Artificial Sequence
  Synthetic oligonucleotide
aaatgaggagatttgtccaatgatatgaat

SEQ ID NO: 154775 - DNA, 30 bp, Artificial Sequence
  Synthetic oligonucleotide
gggttttagtgaaagatatataggctgaat

SEQ ID NO: 154776 - DNA, 30 bp, Artificial Sequence
  Synthetic oligonucleotide
gtcgactgggccggaaacgatgggctgaat

SEQ ID NO: 154777 - DNA, 30 bp, Artificial Sequence
  Synthetic oligonucleotide
gctcactagcccaaatcgccgttgctgaat

SEQ ID NO: 154778 - DNA, 30 bp, Artificial Sequence
  Synthetic oligonucleotide
gcacgtactatatacgcatgtggagtgaat

SEQ ID NO: 154779 - DNA, 30 bp, Artificial Sequence
  Synthetic oligonucleotide
ctgggttgaatagtaatagttcatgtgaat

SEQ ID NO: 154780 - DNA, 30 bp, Artificial Sequence
  Synthetic oligonucleotide
tctcgggaacagcgcccacaatgtgtgaat

SEQ ID NO: 154781 - DNA, 30 bp, Artificial Sequence
  Synthetic oligonucleotide
gaacagcttgcgatgtctaagtgtgtgaat

SEQ ID NO: 154782 - DNA, 30 bp, Artificial Sequence
  Synthetic oligonucleotide
gtgcgaattaggtgtcgcgttcttgtgaat

SEQ ID NO: 154783 - DNA, 31 bp, Artificial Sequence
  Synthetic oligonucleotide
caaagagcgcgaacctaatgcgatcttgaat

SEQ ID NO: 154784 - DNA, 30 bp, Artificial Sequence
  Synthetic oligonucleotide
ctcacaggtcaccaagaaatagagttgaat

SEQ ID NO: 154785 - DNA, 30 bp, Artificial Sequence
  Synthetic oligonucleotide
tcacacagttcacacaggcgtacaaataat

SEQ ID NO: 154786 - DNA, 30 bp, Artificial Sequence
  Synthetic oligonucleotide
aacgtgccaggttgagttgttaacaataat

SEQ ID NO: 154787 - DNA, 30 bp, Artificial Sequence
  Synthetic oligonucleotide
ggacctaacgacaccaaggaccacaataat

SEQ ID NO: 154788 - DNA, 30 bp, Artificial Sequence
  Synthetic oligonucleotide
gcgcccctacaatcacggacatcccataat

SEQ ID NO: 154789 - DNA, 30 bp, Artificial Sequence
  Synthetic oligonucleotide
atgacggatcttaccgggcggcatcataat

SEQ ID NO: 154790 - DNA, 30 bp, Artificial Sequence
  Synthetic oligonucleotide
acagttagcgaaaacccgcagcacgataat

SEQ ID NO: 154791 - DNA, 30 bp, Artificial Sequence
  Synthetic oligonucleotide
cgcgctaaccaaattccttaatgggataat

SEQ ID NO: 154792 - DNA, 30 bp, Artificial Sequence
  Synthetic oligonucleotide
gcaagtgcagacagcacgtagactgataat

SEQ ID NO: 154793 - DNA, 30 bp, Artificial Sequence
  Synthetic oligonucleotide
cgaaagggtggcgcaaagcagttatataat

SEQ ID NO: 154794 - DNA, 30 bp, Artificial Sequence
  Synthetic oligonucleotide
cgaattagaagccactaaagatcgtataat

SEQ ID NO: 154795 - DNA, 30 bp, Artificial Sequence
  Synthetic oligonucleotide
aatgtccattaacagccatcgcaaactaat

SEQ ID NO: 154796 - DNA, 30 bp, Artificial Sequence
  Synthetic oligonucleotide
atgctgtacgaagacattctcctcactaat

SEQ ID NO: 154797 - DNA, 30 bp, Artificial Sequence
  Synthetic oligonucleotide
tggcagcaacacgcaataagaggtactaat

SEQ ID NO: 154798 - DNA, 30 bp, Artificial Sequence
  Synthetic oligonucleotide
tatgcccatgcaaaagaggctacacctaat

SEQ ID NO: 154799 - DNA, 30 bp, Artificial Sequence
  Synthetic oligonucleotide
gcaggggccaaaaggcctgcagtgcctaat

SEQ ID NO: 154800 - DNA, 30 bp, Artificial Sequence
  Synthetic oligonucleotide
ctgatagtatgactatgggttcaagctaat

SEQ ID NO: 154801 - DNA, 30 bp, Artificial Sequence
  Synthetic oligonucleotide
caggtaatcgacaggaataattccgctaat

SEQ ID NO: 154802 - DNA, 30 bp, Artificial Sequence
  Synthetic oligonucleotide
tgaggaaaaatggttaagctcaatgctaat

SEQ ID NO: 154803 - DNA, 30 bp, Artificial Sequence
  Synthetic oligonucleotide
gcaagaggccatgtatgcgcgaaatctaat

SEQ ID NO: 154804 - DNA, 30 bp, Artificial Sequence
  Synthetic oligonucleotide
cacgcctactagcagaagttaagatctaat

SEQ ID NO: 154805 - DNA, 30 bp, Artificial Sequence
  Synthetic oligonucleotide
aagcgcgtgatggggtgttaccgctctaat

SEQ ID NO: 154806 - DNA, 30 bp, Artificial Sequence
  Synthetic oligonucleotide
ctgcgactggcgatgaatgcggaaagtaat

SEQ ID NO: 154807 - DNA, 31 bp, Artificial Sequence
  Synthetic oligonucleotide
tgcagagcaaacgcgtggtggttacagtaat

SEQ ID NO: 154808 - DNA, 30 bp, Artificial Sequence
  Synthetic oligonucleotide
cgggaaaggtatcggggttggatgagtaat

SEQ ID NO: 154809 - DNA, 30 bp, Artificial Sequence
  Synthetic oligonucleotide
taactgggtgctatactagcaggccgtaat

SEQ ID NO: 154810 - DNA, 30 bp, Artificial Sequence
  Synthetic oligonucleotide
agagcactgaatcttggacaggatcgtaat

SEQ ID NO: 154811 - DNA, 30 bp, Artificial Sequence
  Synthetic oligonucleotide
ttgcaataaaaggtggatcaggaaggtaat

SEQ ID NO: 154812 - DNA, 30 bp, Artificial Sequence
  Synthetic oligonucleotide
atagttgcgatcggaaaccggggcggtaat

SEQ ID NO: 154813 - DNA, 30 bp, Artificial Sequence
  Synthetic oligonucleotide
ggccgtgcatgaaggcccccctgcggtaat

SEQ ID NO: 154814 - DNA, 30 bp, Artificial Sequence
  Synthetic oligonucleotide
atacgtcattctgggattatggggggtaat

SEQ ID NO: 154815 - DNA, 30 bp, Artificial Sequence
  Synthetic oligonucleotide
gggtacgaccgatttagtaatccatgtaat

SEQ ID NO: 154816 - DNA, 30 bp, Artificial Sequence
  Synthetic oligonucleotide
cggaagcaaaaaaatgggtactcatgtaat

SEQ ID NO: 154817 - DNA, 30 bp, Artificial Sequence
  Synthetic oligonucleotide
aatcagcgaggtagctgcggtccctgtaat

SEQ ID NO: 154818 - DNA, 30 bp, Artificial Sequence
  Synthetic oligonucleotide
gcctgcacatctaagctgcaaaggtgtaat

SEQ ID NO: 154819 - DNA, 30 bp, Artificial Sequence
  Synthetic oligonucleotide
ttaacggccacagttagagcagtttgtaat

SEQ ID NO: 154820 - DNA, 30 bp, Artificial Sequence
  Synthetic oligonucleotide
agacgggccaggcgcactttgcaaattaat

SEQ ID NO: 154821 - DNA, 30 bp, Artificial Sequence
  Synthetic oligonucleotide
aggaaatttactagtacagataccattaat

SEQ ID NO: 154822 - DNA, 30 bp, Artificial Sequence
  Synthetic oligonucleotide
atgtaaggatagagtcacagtgttattaat

SEQ ID NO: 154823 - DNA, 30 bp, Artificial Sequence
  Synthetic oligonucleotide
tcataacctttcagatacatcgaccttaat

SEQ ID NO: 154824 - DNA, 30 bp, Artificial Sequence
  Synthetic oligonucleotide
ccttcggcacaaggaattttgtcggttaat

SEQ ID NO: 154825 - DNA, 30 bp, Artificial Sequence
  Synthetic oligonucleotide
cactcggagcgtgctacggaagagtttaat

SEQ ID NO: 154826 - DNA, 30 bp, Artificial Sequence
  Synthetic oligonucleotide
agagcgtactaaccggcgtacacgtttaat

SEQ ID NO: 154827 - DNA, 30 bp, Artificial Sequence
  Synthetic oligonucleotide
ccaggatgggtactttcacccgcgtttaat

SEQ ID NO: 154828 - DNA, 30 bp, Artificial Sequence
  Synthetic oligonucleotide
aacgacaaagctttagaacgtgtaaaacat

SEQ ID NO: 154829 - DNA, 30 bp, Artificial Sequence
  Synthetic oligonucleotide
cttaagactgaaccacacgttcccaaacat

SEQ ID NO: 154830 - DNA, 30 bp, Artificial Sequence
  Synthetic oligonucleotide
gatggcgtagttgtaagtataagcaaacat

SEQ ID NO: 154831 - DNA, 30 bp, Artificial Sequence
  Synthetic oligonucleotide
tggtgaggttcgtcatccgcccagaaacat

SEQ ID NO: 154832 - DNA, 30 bp, Artificial Sequence
  Synthetic oligonucleotide
cgaaggatggattccctgtgttagaaacat

SEQ ID NO: 154833 - DNA, 30 bp, Artificial Sequence
  Synthetic oligonucleotide
cggtcataaagaggtctttaatataaacat

SEQ ID NO: 154834 - DNA, 30 bp, Artificial Sequence
  Synthetic oligonucleotide
ctctgccctttaacggcactaattaaacat

SEQ ID NO: 154835 - DNA, 30 bp, Artificial Sequence
  Synthetic oligonucleotide
agaacaccaagggaaagaatcaaccaacat

SEQ ID NO: 154836 - DNA, 30 bp, Artificial Sequence
  Synthetic oligonucleotide
aaaaaagaggacatttcccacgatcaacat

SEQ ID NO: 154837 - DNA, 30 bp, Artificial Sequence
  Synthetic oligonucleotide
tcggctaggtctccaggaagtcctcaacat

SEQ ID NO: 154838 - DNA, 30 bp, Artificial Sequence
  Synthetic oligonucleotide
aggatagcccacgagtatgaaccagaacat

SEQ ID NO: 154839 - DNA, 30 bp, Artificial Sequence
  Synthetic oligonucleotide
catgtaagatcgctcggagggggagaacat

SEQ ID NO: 154840 - DNA, 30 bp, Artificial Sequence
  Synthetic oligonucleotide
ataagccgccggacgccatgcgaggaacat

SEQ ID NO: 154841 - DNA, 30 bp, Artificial Sequence
  Synthetic oligonucleotide
agtcaatcctagatgctaagtcatgaacat

SEQ ID NO: 154842 - DNA, 30 bp, Artificial Sequence
  Synthetic oligonucleotide
ggataactagtggcgcatatatatgaacat

SEQ ID NO: 154843 - DNA, 30 bp, Artificial Sequence
  Synthetic oligonucleotide
gctgtggcgccaaaagaggatgctgaacat

SEQ ID NO: 154844 - DNA, 30 bp, Artificial Sequence
  Synthetic oligonucleotide
taagcctcgggctctaaacttgttgaacat

SEQ ID NO: 154845 - DNA, 30 bp, Artificial Sequence
  Synthetic oligonucleotide
tgaaacagaatgtcggagccgtaataacat

SEQ ID NO: 154846 - DNA, 30 bp, Artificial Sequence
  Synthetic oligonucleotide
tcggttagtagtgacacaagctagtaacat

SEQ ID NO: 154847 - DNA, 31 bp, Artificial Sequence
  Synthetic oligonucleotide
gttatgccatcgttatatcgtgcgaacacat

SEQ ID NO: 154848 - DNA, 30 bp, Artificial Sequence
  Synthetic oligonucleotide
cattacatctcttgtaatgggggaacacat

SEQ ID NO: 154849 - DNA, 30 bp, Artificial Sequence
  Synthetic oligonucleotide
ccaggctggatttagccacccgctacacat

SEQ ID NO: 154850 - DNA, 30 bp, Artificial Sequence
  Synthetic oligonucleotide
cgatgcccgcaggacggaattgaaccacat

SEQ ID NO: 154851 - DNA, 30 bp, Artificial Sequence
  Synthetic oligonucleotide
gcgaggggtggaggcaggagttagccacat

SEQ ID NO: 154852 - DNA, 30 bp, Artificial Sequence
  Synthetic oligonucleotide
gaacgctatatacgagagtgcgctccacat

SEQ ID NO: 154853 - DNA, 30 bp, Artificial Sequence
  Synthetic oligonucleotide
gtggatcgataaacagctctgcagtcacat

SEQ ID NO: 154854 - DNA, 30 bp, Artificial Sequence
  Synthetic oligonucleotide
gggggccatgggtataacccttcgtcacat

SEQ ID NO: 154855 - DNA, 30 bp, Artificial Sequence
  Synthetic oligonucleotide
gggtacagttgactgggcatgataagacat

SEQ ID NO: 154856 - DNA, 30 bp, Artificial Sequence
  Synthetic oligonucleotide
gggggggaaggaagggagacgctcagacat

SEQ ID NO: 154857 - DNA, 30 bp, Artificial Sequence
  Synthetic oligonucleotide
tcgtataggagccgtgggcaccagagacat

SEQ ID NO: 154858 - DNA, 30 bp, Artificial Sequence
  Synthetic oligonucleotide
tttaaaagtacagtaacacaagagagacat

SEQ ID NO: 154859 - DNA, 30 bp, Artificial Sequence
  Synthetic oligonucleotide
aatgaactttagccccagagtcaccgacat

SEQ ID NO: 154860 - DNA, 30 bp, Artificial Sequence
  Synthetic oligonucleotide
agcattggcgtatggatcgagtcaggacat

SEQ ID NO: 154861 - DNA, 30 bp, Artificial Sequence
  Synthetic oligonucleotide
ataagcacggtctgaccagggtgcggacat

SEQ ID NO: 154862 - DNA, 30 bp, Artificial Sequence
  Synthetic oligonucleotide
aagtaatttttcctgcaggtaacgggacat

SEQ ID NO: 154863 - DNA, 30 bp, Artificial Sequence
  Synthetic oligonucleotide
acgtgttatgattccacggaatatggacat

SEQ ID NO: 154864 - DNA, 30 bp, Artificial Sequence
  Synthetic oligonucleotide
tagtaactctaagtaactcatctatgacat

SEQ ID NO: 154865 - DNA, 30 bp, Artificial Sequence
  Synthetic oligonucleotide
ttcctaggggaaaccttgggaaagtgacat

SEQ ID NO: 154866 - DNA, 30 bp, Artificial Sequence
  Synthetic oligonucleotide
cagtaatagaagcgtcaccatgagtgacat

SEQ ID NO: 154867 - DNA, 30 bp, Artificial Sequence
  Synthetic oligonucleotide
cgccctaatagacgacaagtagattgacat

SEQ ID NO: 154868 - DNA, 30 bp, Artificial Sequence
  Synthetic oligonucleotide
caagcacaaatgcgtctattgaaaatacat

SEQ ID NO: 154869 - DNA, 30 bp, Artificial Sequence
  Synthetic oligonucleotide
ctagggaatatgccataagtgattatacat

SEQ ID NO: 154870 - DNA, 30 bp, Artificial Sequence
  Synthetic oligonucleotide
cccgagaagagctaccacatgtgcctacat

SEQ ID NO: 154871 - DNA, 30 bp, Artificial Sequence
  Synthetic oligonucleotide
agttagaaaggggtctatgcgacgctacat

SEQ ID NO: 154872 - DNA, 30 bp, Artificial Sequence
  Synthetic oligonucleotide
taagagagggctgattggaaggaagtacat

SEQ ID NO: 154873 - DNA, 30 bp, Artificial Sequence
  Synthetic oligonucleotide
agtaagtggagactacggggtatcgtacat

SEQ ID NO: 154874 - DNA, 30 bp, Artificial Sequence
  Synthetic oligonucleotide
acaattcttggatacagagaatcattacat

SEQ ID NO: 154875 - DNA, 30 bp, Artificial Sequence
  Synthetic oligonucleotide
tacgaaccgaggcctaggctgctattacat

SEQ ID NO: 154876 - DNA, 28 bp, Artificial Sequence
  Synthetic oligonucleotide
cggtagtcgccctagctccgcaaaccat

SEQ ID NO: 154877 - DNA, 30 bp, Artificial Sequence
  Synthetic oligonucleotide
cgatgagtgcacgtcttatacataaaccat

SEQ ID NO: 154878 - DNA, 30 bp, Artificial Sequence
  Synthetic oligonucleotide
cttgggacagacccatactgccggaaccat

SEQ ID NO: 154879 - DNA, 30 bp, Artificial Sequence
  Synthetic oligonucleotide
ccggaagacggcagttgaaacaggcaccat

SEQ ID NO: 154880 - DNA, 30 bp, Artificial Sequence
  Synthetic oligonucleotide
agcgtggacgaagagttacgagttcaccat

SEQ ID NO: 154881 - DNA, 30 bp, Artificial Sequence
  Synthetic oligonucleotide
gaaaagattacacaacccatattagaccat

SEQ ID NO: 154882 - DNA, 30 bp, Artificial Sequence
  Synthetic oligonucleotide
agttagcacatggggcatgttacggaccat

SEQ ID NO: 154883 - DNA, 30 bp, Artificial Sequence
  Synthetic oligonucleotide
tgttcaggggcacatctcaggagggaccat

SEQ ID NO: 154884 - DNA, 30 bp, Artificial Sequence
  Synthetic oligonucleotide
tgacatcagcgtctatccgtcccttaccat

SEQ ID NO: 154885 - DNA, 30 bp, Artificial Sequence
  Synthetic oligonucleotide
atagacggttcgtaccggaaaaaaacccat

SEQ ID NO: 154886 - DNA, 30 bp, Artificial Sequence
  Synthetic oligonucleotide
atgcagctgaaacactaattgaatacccat

SEQ ID NO: 154887 - DNA, 30 bp, Artificial Sequence
  Synthetic oligonucleotide
tcaaagcgacttgttatcttcccaccccat

SEQ ID NO: 154888 - DNA, 30 bp, Artificial Sequence
  Synthetic oligonucleotide
accggatggactcatactatcctggcccat

SEQ ID NO: 154889 - DNA, 30 bp, Artificial Sequence
  Synthetic oligonucleotide
cgggaatactacgtgctaaccgcgtcccat

SEQ ID NO: 154890 - DNA, 30 bp, Artificial Sequence
  Synthetic oligonucleotide
cgaccggtcaggtatgcaggcatgtcccat

SEQ ID NO: 154891 - DNA, 30 bp, Artificial Sequence
  Synthetic oligonucleotide
aggttcccgttcatggagaggataagccat

SEQ ID NO: 154892 - DNA, 30 bp, Artificial Sequence
  Synthetic oligonucleotide
tactggtgagcggcgcctaatagtagccat

SEQ ID NO: 154893 - DNA, 30 bp, Artificial Sequence
  Synthetic oligonucleotide
tgacagtgagttgaagtaatggcacgccat

SEQ ID NO: 154894 - DNA, 30 bp, Artificial Sequence
  Synthetic oligonucleotide
ctcaagtaatcaggagtaaccccccgccat

SEQ ID NO: 154895 - DNA, 28 bp, Artificial Sequence
  Synthetic oligonucleotide
aacattggatatacggctcacgcgccat

SEQ ID NO: 154896 - DNA, 30 bp, Artificial Sequence
  Synthetic oligonucleotide
gtcaaggacaacctgcccatttttcgccat

SEQ ID NO: 154897 - DNA, 30 bp, Artificial Sequence
  Synthetic oligonucleotide
ataggatgtggtgttagtgtccgaggccat

SEQ ID NO: 154898 - DNA, 30 bp, Artificial Sequence
  Synthetic oligonucleotide
gcatccgtgatgggcgctcgggacggccat

SEQ ID NO: 154899 - DNA, 30 bp, Artificial Sequence
  Synthetic oligonucleotide
gcgaaaatgattatcctgggggctggccat

SEQ ID NO: 154900 - DNA, 30 bp, Artificial Sequence
  Synthetic oligonucleotide
tggtaacacctgggtgcgcgaaaatgccat

SEQ ID NO: 154901 - DNA, 30 bp, Artificial Sequence
  Synthetic oligonucleotide
cagagtgggacctttacccaatgctgccat

SEQ ID NO: 154902 - DNA, 30 bp, Artificial Sequence
  Synthetic oligonucleotide
ggagacttttagtagaagaaatacatccat

SEQ ID NO: 154903 - DNA, 30 bp, Artificial Sequence
  Synthetic oligonucleotide
aagcagatgttagccaacagctctatccat

SEQ ID NO: 154904 - DNA, 30 bp, Artificial Sequence
  Synthetic oligonucleotide
gcgaatgcgcgaggctgtagatgactccat

SEQ ID NO: 154905 - DNA, 30 bp, Artificial Sequence
  Synthetic oligonucleotide
cgttcccatcctcatctctggctcctccat

SEQ ID NO: 154906 - DNA, 30 bp, Artificial Sequence
  Synthetic oligonucleotide
catcggaataagaaggtgactatggtccat

SEQ ID NO: 154907 - DNA, 30 bp, Artificial Sequence
  Synthetic oligonucleotide
agaattaggtaatcatgaagccacttccat

SEQ ID NO: 154908 - DNA, 30 bp, Artificial Sequence
  Synthetic oligonucleotide
caccgtgcagatgatatttggaccttccat

SEQ ID NO: 154909 - DNA, 30 bp, Artificial Sequence
  Synthetic oligonucleotide
gaataagtggtaaaatacagtcggttccat

SEQ ID NO: 154910 - DNA, 30 bp, Artificial Sequence
  Synthetic oligonucleotide
agagtaaaactggtttcgccccgaaagcat

SEQ ID NO: 154911 - DNA, 30 bp, Artificial Sequence
  Synthetic oligonucleotide
aacaggccagggtcccgagcatccaagcat

SEQ ID NO: 154912 - DNA, 30 bp, Artificial Sequence
  Synthetic oligonucleotide
ttgatacggatgggtggcaggcaacagcat

SEQ ID NO: 154913 - DNA, 30 bp, Artificial Sequence
  Synthetic oligonucleotide
ttcttagggtgctagttgttgtgccagcat

SEQ ID NO: 154914 - DNA, 30 bp, Artificial Sequence
  Synthetic oligonucleotide
caggtaaagtggcagtacaaaacgcagcat

SEQ ID NO: 154915 - DNA, 30 bp, Artificial Sequence
  Synthetic oligonucleotide
agaggggcttcatatgcccggctgcagcat

SEQ ID NO: 154916 - DNA, 30 bp, Artificial Sequence
  Synthetic oligonucleotide
tccatccgggggtaaagcataattcagcat

SEQ ID NO: 154917 - DNA, 30 bp, Artificial Sequence
  Synthetic oligonucleotide
gctctccaggagggacttatttaagagcat

SEQ ID NO: 154918 - DNA, 30 bp, Artificial Sequence
  Synthetic oligonucleotide
ggaacgagcccttcagggcctacagagcat

SEQ ID NO: 154919 - DNA, 30 bp, Artificial Sequence
  Synthetic oligonucleotide
tggtaactatcaatctaacagatagagcat

SEQ ID NO: 154920 - DNA, 30 bp, Artificial Sequence
  Synthetic oligonucleotide
cagttggcaactatcgatcaactagagcat

SEQ ID NO: 154921 - DNA, 30 bp, Artificial Sequence
  Synthetic oligonucleotide
tcgagccggagcacggagaatagggagcat

SEQ ID NO: 154922 - DNA, 30 bp, Artificial Sequence
  Synthetic oligonucleotide
ttatgagcggtcagcgtaattcttgagcat

SEQ ID NO: 154923 - DNA, 30 bp, Artificial Sequence
  Synthetic oligonucleotide
aagcccgcaccgagtgaacccagatagcat

SEQ ID NO: 154924 - DNA, 30 bp, Artificial Sequence
  Synthetic oligonucleotide
atgagcgtgaggtggtctctgtgatagcat

SEQ ID NO: 154925 - DNA, 30 bp, Artificial Sequence
  Synthetic oligonucleotide
gtcgggggctcggcgaatgtggggtagcat

SEQ ID NO: 154926 - DNA, 30 bp, Artificial Sequence
  Synthetic oligonucleotide
aggtaataggcggttcatgggctgtagcat

SEQ ID NO: 154927 - DNA, 30 bp, Artificial Sequence
  Synthetic oligonucleotide
gttagcttatgtttcaagtgtctgtagcat

SEQ ID NO: 154928 - DNA, 30 bp, Artificial Sequence
  Synthetic oligonucleotide
agttaagtgcaagcatcccgtttgtagcat

SEQ ID NO: 154929 - DNA, 30 bp, Artificial Sequence
  Synthetic oligonucleotide
aactacggccagtgaggcttctaaccgcat

SEQ ID NO: 154930 - DNA, 30 bp, Artificial Sequence
  Synthetic oligonucleotide
tgtacaaggttgacgctaatgtcgccgcat

SEQ ID NO: 154931 - DNA, 30 bp, Artificial Sequence
  Synthetic oligonucleotide
ataagccccctaatggacaattggccgcat

SEQ ID NO: 154932 - DNA, 30 bp, Artificial Sequence
  Synthetic oligonucleotide
atatcaaatcaaggcaaaccccaagcgcat

SEQ ID NO: 154933 - DNA, 30 bp, Artificial Sequence
  Synthetic oligonucleotide
agacgacaaatgcaagttataggagcgcat

SEQ ID NO: 154934 - DNA, 30 bp, Artificial Sequence
  Synthetic oligonucleotide
acaaagtggatcctctctgatggtgcgcat

SEQ ID NO: 154935 - DNA, 30 bp, Artificial Sequence
  Synthetic oligonucleotide
atagttccaatgttctgcatgctttcgcat

SEQ ID NO: 154936 - DNA, 30 bp, Artificial Sequence
  Synthetic oligonucleotide
tctgagacctggggcaagcggccaaggcat

SEQ ID NO: 154937 - DNA, 30 bp, Artificial Sequence
  Synthetic oligonucleotide
agcccattgaatcagaatacattcaggcat

SEQ ID NO: 154938 - DNA, 30 bp, Artificial Sequence
  Synthetic oligonucleotide
atcgaatatataagacggggataacggcat

SEQ ID NO: 154939 - DNA, 30 bp, Artificial Sequence
  Synthetic oligonucleotide
attacgcaacagtaggtataagagcggcat

SEQ ID NO: 154940 - DNA, 30 bp, Artificial Sequence
  Synthetic oligonucleotide
aacggatagggtagtgtttctgggcggcat

SEQ ID NO: 154941 - DNA, 30 bp, Artificial Sequence
  Synthetic oligonucleotide
ccctgtcaaggtggtagttgaattcggcat

SEQ ID NO: 154942 - DNA, 30 bp, Artificial Sequence
  Synthetic oligonucleotide
ttacacataattcttaccgaccaagggcat

SEQ ID NO: 154943 - DNA, 30 bp, Artificial Sequence
  Synthetic oligonucleotide
acgttgattcgtatttgaaaagaagggcat

SEQ ID NO: 154944 - DNA, 30 bp, Artificial Sequence
  Synthetic oligonucleotide
ggatgcgttgtagccactgcatcggggcat

SEQ ID NO: 154945 - DNA, 30 bp, Artificial Sequence
  Synthetic oligonucleotide
gcccgaagggactctaactattatgggcat

SEQ ID NO: 154946 - DNA, 30 bp, Artificial Sequence
  Synthetic oligonucleotide
ccggtaagctaggcacaattctactggcat

SEQ ID NO: 154947 - DNA, 30 bp, Artificial Sequence
  Synthetic oligonucleotide
gtgttccgccaaatacgatatcaaatgcat

SEQ ID NO: 154948 - DNA, 30 bp, Artificial Sequence
  Synthetic oligonucleotide
tccgagtcatcagagcgcaagcgaatgcat

SEQ ID NO: 154949 - DNA, 30 bp, Artificial Sequence
  Synthetic oligonucleotide
cccgagtaagtcaattggaggtcgctgcat

SEQ ID NO: 154950 - DNA, 30 bp, Artificial Sequence
  Synthetic oligonucleotide
acaaagtctgatttcaggtttggagtgcat

SEQ ID NO: 154951 - DNA, 30 bp, Artificial Sequence
  Synthetic oligonucleotide
caactccctagaagtaaagatctagtgcat

SEQ ID NO: 154952 - DNA, 30 bp, Artificial Sequence
  Synthetic oligonucleotide
gagcgaataaactcaaacatcggggtgcat

SEQ ID NO: 154953 - DNA, 30 bp, Artificial Sequence
  Synthetic oligonucleotide
atgtcatgttgctagaaagggcgtgtgcat

SEQ ID NO: 154954 - DNA, 30 bp, Artificial Sequence
  Synthetic oligonucleotide
gggtaggagtgaagatctttgggtgtgcat

SEQ ID NO: 154955 - DNA, 30 bp, Artificial Sequence
  Synthetic oligonucleotide
gcacaggtacaaatgtgcacagtgttgcat

SEQ ID NO: 154956 - DNA, 30 bp, Artificial Sequence
  Synthetic oligonucleotide
aaggagtaggttcagcacgtaaagaatcat

SEQ ID NO: 154957 - DNA, 30 bp, Artificial Sequence
  Synthetic oligonucleotide
cgatcgtgggagcctgtaagcaataatcat

SEQ ID NO: 154958 - DNA, 30 bp, Artificial Sequence
  Synthetic oligonucleotide
ggcggctctccgtatgtccctaataatcat

SEQ ID NO: 154959 - DNA, 30 bp, Artificial Sequence
  Synthetic oligonucleotide
caacatcgatcagtaaagttatcacatcat

SEQ ID NO: 154960 - DNA, 30 bp, Artificial Sequence
  Synthetic oligonucleotide
taagtgcagggcctaggcttaatagatcat

SEQ ID NO: 154961 - DNA, 30 bp, Artificial Sequence
  Synthetic oligonucleotide
tagaatcacgtcctgatcgcgatcgatcat

SEQ ID NO: 154962 - DNA, 29 bp, Artificial Sequence
  Synthetic oligonucleotide
cgtaagaattgtcgtgcttagcatatcat

SEQ ID NO: 154963 - DNA, 30 bp, Artificial Sequence
  Synthetic oligonucleotide
caaaggcttcaaaatgggtatgggtatcat

SEQ ID NO: 154964 - DNA, 31 bp, Artificial Sequence
  Synthetic oligonucleotide
gaggggagccgtaaggactggactgtatcat

SEQ ID NO: 154965 - DNA, 30 bp, Artificial Sequence
  Synthetic oligonucleotide
aagtaagacgatttattggtactcactcat

SEQ ID NO: 154966 - DNA, 30 bp, Artificial Sequence
  Synthetic oligonucleotide
agattacgccaccgcgtaacgtaacctcat

SEQ ID NO: 154967 - DNA, 30 bp, Artificial Sequence
  Synthetic oligonucleotide
ttgtgcgacggcggggaggacacagctcat

SEQ ID NO: 154968 - DNA, 30 bp, Artificial Sequence
  Synthetic oligonucleotide
gcgtacctgccggtttaaaggtcagctcat

SEQ ID NO: 154969 - DNA, 30 bp, Artificial Sequence
  Synthetic oligonucleotide
gtgttgtcaagcgaaaggaacgaggctcat

SEQ ID NO: 154970 - DNA, 30 bp, Artificial Sequence
  Synthetic oligonucleotide
cgcgatctgcctccttatacagttgctcat

SEQ ID NO: 154971 - DNA, 30 bp, Artificial Sequence
  Synthetic oligonucleotide
gtggtgttaagcgtgcagtcaccatctcat

SEQ ID NO: 154972 - DNA, 30 bp, Artificial Sequence
  Synthetic oligonucleotide
ttggaacgacgtgcgcagtacaggtctcat

SEQ ID NO: 154973 - DNA, 30 bp, Artificial Sequence
  Synthetic oligonucleotide
gccataattgtagttccacgagattctcat

SEQ ID NO: 154974 - DNA, 30 bp, Artificial Sequence
  Synthetic oligonucleotide
ctcattctcaagaatcgatctgtttctcat

SEQ ID NO: 154975 - DNA, 30 bp, Artificial Sequence
  Synthetic oligonucleotide
cgcaagttgaccctatagtgaaccagtcat

SEQ ID NO: 154976 - DNA, 30 bp, Artificial Sequence
  Synthetic oligonucleotide
ggctgataatgagtctataccagtagtcat

SEQ ID NO: 154977 - DNA, 30 bp, Artificial Sequence
  Synthetic oligonucleotide
ccaccgagccgatagagtaggtttagtcat

SEQ ID NO: 154978 - DNA, 30 bp, Artificial Sequence
  Synthetic oligonucleotide
ggccctcgaaagttgtagagtcctcgtcat

SEQ ID NO: 154979 - DNA, 30 bp, Artificial Sequence
  Synthetic oligonucleotide
tacgtctggcttttgcgcggaagtcgtcat

SEQ ID NO: 154980 - DNA, 30 bp, Artificial Sequence
  Synthetic oligonucleotide
agattaactgtctcacaagaaagaggtcat

SEQ ID NO: 154981 - DNA, 30 bp, Artificial Sequence
  Synthetic oligonucleotide
agccagcttaaggaacgcaccgccggtcat

SEQ ID NO: 154982 - DNA, 30 bp, Artificial Sequence
  Synthetic oligonucleotide
tgtttggggacaccaatcatgaaatgtcat

SEQ ID NO: 154983 - DNA, 30 bp, Artificial Sequence
  Synthetic oligonucleotide
gggcgttaatacgaagatgtagtgtgtcat

SEQ ID NO: 154984 - DNA, 30 bp, Artificial Sequence
  Synthetic oligonucleotide
cctgtttgttgtctagtggtatgttgtcat

SEQ ID NO: 154985 - DNA, 30 bp, Artificial Sequence
  Synthetic oligonucleotide
aggaacgactaacttcgcttgtacattcat

SEQ ID NO: 154986 - DNA, 30 bp, Artificial Sequence
  Synthetic oligonucleotide
agttctgaaactagccatgttgcgattcat

SEQ ID NO: 154987 - DNA, 30 bp, Artificial Sequence
  Synthetic oligonucleotide
aaagtccccagtgcgcgcatagggattcat

SEQ ID NO: 154988 - DNA, 30 bp, Artificial Sequence
  Synthetic oligonucleotide
agttattaatagtgcgatgaacatattcat

SEQ ID NO: 154989 - DNA, 30 bp, Artificial Sequence
  Synthetic oligonucleotide
gggtacggctcgatatcgaatcgtcttcat

SEQ ID NO: 154990 - DNA, 30 bp, Artificial Sequence
  Synthetic oligonucleotide
gacgcatggtaagtattgtgaacagttcat

SEQ ID NO: 154991 - DNA, 30 bp, Artificial Sequence
  Synthetic oligonucleotide
tgaggaggctccatcatcaactacgttcat

SEQ ID NO: 154992 - DNA, 30 bp, Artificial Sequence
  Synthetic oligonucleotide
ggaaagagaactcacgctatcagggttcat

SEQ ID NO: 154993 - DNA, 30 bp, Artificial Sequence
  Synthetic oligonucleotide
atgtgatctaaggtgcatcgaaatgttcat

SEQ ID NO: 154994 - DNA, 30 bp, Artificial Sequence
  Synthetic oligonucleotide
tcgacctgatccagatccgctgaatttcat

SEQ ID NO: 154995 - DNA, 30 bp, Artificial Sequence
  Synthetic oligonucleotide
tcacggattggtgtaaaacggatctttcat

SEQ ID NO: 154996 - DNA, 30 bp, Artificial Sequence
  Synthetic oligonucleotide
gaacagataaggtgataagatcagtttcat

SEQ ID NO: 154997 - DNA, 30 bp, Artificial Sequence
  Synthetic oligonucleotide
cactacccacaatggtctctgacaaaagat

SEQ ID NO: 154998 - DNA, 30 bp, Artificial Sequence
  Synthetic oligonucleotide
gctcgcccattcagcgatttgccaaaagat

SEQ ID NO: 154999 - DNA, 30 bp, Artificial Sequence
  Synthetic oligonucleotide
aagtcagattagactaggtcgcgcaaagat

SEQ ID NO: 155000 - DNA, 30 bp, Artificial Sequence
  Synthetic oligonucleotide
gggacgggtatcgagataatgcagaaagat

SEQ ID NO: 155001 - DNA, 30 bp, Artificial Sequence
  Synthetic oligonucleotide
taagcgacgacattggggcgcctacaagat

SEQ ID NO: 155002 - DNA, 31 bp, Artificial Sequence
  Synthetic oligonucleotide
atctgaaacacccggagataggaagcaagat

SEQ ID NO: 155003 - DNA, 30 bp, Artificial Sequence
  Synthetic oligonucleotide
gccggaggacgggaaggccgacagcaagat

SEQ ID NO: 155004 - DNA, 30 bp, Artificial Sequence
  Synthetic oligonucleotide
tgagggtgtaacgttaatgtgtatcaagat

SEQ ID NO: 155005 - DNA, 30 bp, Artificial Sequence
  Synthetic oligonucleotide
gatctgcgatcaccattgaagactcaagat

SEQ ID NO: 155006 - DNA, 30 bp, Artificial Sequence
  Synthetic oligonucleotide
catgttacatgctgggggtagttagaagat

SEQ ID NO: 155007 - DNA, 30 bp, Artificial Sequence
  Synthetic oligonucleotide
tcaactacgtcaattcctccaagggaagat

SEQ ID NO: 155008 - DNA, 30 bp, Artificial Sequence
  Synthetic oligonucleotide
gctcgagtaccagtgcgtgtcgaataagat

SEQ ID NO: 155009 - DNA, 30 bp, Artificial Sequence
  Synthetic oligonucleotide
actgtgccgttctagatccagttataagat

SEQ ID NO: 155010 - DNA, 30 bp, Artificial Sequence
  Synthetic oligonucleotide
agggggcctccatcataagaaagctaagat

SEQ ID NO: 155011 - DNA, 30 bp, Artificial Sequence
  Synthetic oligonucleotide
ttcgatgagagagtatcaatctgttaagat

SEQ ID NO: 155012 - DNA, 30 bp, Artificial Sequence
  Synthetic oligonucleotide
gagccacgggtatggcaaatgttaacagat

SEQ ID NO: 155013 - DNA, 30 bp, Artificial Sequence
  Synthetic oligonucleotide
tcctgagcggagttaacactatggacagat

SEQ ID NO: 155014 - DNA, 30 bp, Artificial Sequence
  Synthetic oligonucleotide
agacctggcaggacgcatgcgtctacagat

SEQ ID NO: 155015 - DNA, 30 bp, Artificial Sequence
  Synthetic oligonucleotide
gtttcagcggtgaagcttcgtaacccagat

SEQ ID NO: 155016 - DNA, 30 bp, Artificial Sequence
  Synthetic oligonucleotide
tttgcaataatcgtgctctagctcccagat

SEQ ID NO: 155017 - DNA, 30 bp, Artificial Sequence
  Synthetic oligonucleotide
ggccggtccaagaaggtattcaggccagat

SEQ ID NO: 155018 - DNA, 30 bp, Artificial Sequence
  Synthetic oligonucleotide
tgaaatattggttccatcacgagtccagat

SEQ ID NO: 155019 - DNA, 30 bp, Artificial Sequence
  Synthetic oligonucleotide
atggacttctgattccgagctcgtccagat

SEQ ID NO: 155020 - DNA, 30 bp, Artificial Sequence
  Synthetic oligonucleotide
gtagcttgtactaaggaccaaggcgcagat

SEQ ID NO: 155021 - DNA, 30 bp, Artificial Sequence
  Synthetic oligonucleotide
gaaagatcacgggcggagaaaaaatcagat

SEQ ID NO: 155022 - DNA, 30 bp, Artificial Sequence
  Synthetic oligonucleotide
tattgcataccccaccatgcgctatcagat

SEQ ID NO: 155023 - DNA, 30 bp, Artificial Sequence
  Synthetic oligonucleotide
tggtttgagacatctcaaaaagggtcagat

SEQ ID NO: 155024 - DNA, 30 bp, Artificial Sequence
  Synthetic oligonucleotide
ttatccactcaggacatacagggttcagat

SEQ ID NO: 155025 - DNA, 30 bp, Artificial Sequence
  Synthetic oligonucleotide
ggagaccctcttcatgggacggacagagat

SEQ ID NO: 155026 - DNA, 30 bp, Artificial Sequence
  Synthetic oligonucleotide
aaagatcaatcccgtggacaagccagagat

SEQ ID NO: 155027 - DNA, 30 bp, Artificial Sequence
  Synthetic oligonucleotide
cttgaattaagttaatatgtaagcagagat

SEQ ID NO: 155028 - DNA, 30 bp, Artificial Sequence
  Synthetic oligonucleotide
atggacatagagaggagaaagcgcagagat

SEQ ID NO: 155029 - DNA, 30 bp, Artificial Sequence
  Synthetic oligonucleotide
acaagcggctcgaattgctttcgtagagat

SEQ ID NO: 155030 - DNA, 30 bp, Artificial Sequence
  Synthetic oligonucleotide
gggggtgggccctttgtctagcgccgagat

SEQ ID NO: 155031 - DNA, 30 bp, Artificial Sequence
  Synthetic oligonucleotide
agtttagggcagagtcagtcacggcgagat

SEQ ID NO: 155032 - DNA, 30 bp, Artificial Sequence
  Synthetic oligonucleotide
ataggcgacacgtttgtccccctgcgagat

SEQ ID NO: 155033 - DNA, 30 bp, Artificial Sequence
  Synthetic oligonucleotide
cgtaaacactggtgcatgctgctgcgagat

SEQ ID NO: 155034 - DNA, 30 bp, Artificial Sequence
  Synthetic oligonucleotide
tgatggaaatccaggaaataaaatcgagat

SEQ ID NO: 155035 - DNA, 30 bp, Artificial Sequence
  Synthetic oligonucleotide
aatgacagtagttgtacaggagaatgagat

SEQ ID NO: 155036 - DNA, 30 bp, Artificial Sequence
  Synthetic oligonucleotide
gaacccaatcacgtaatcgagatatgagat

SEQ ID NO: 155037 - DNA, 30 bp, Artificial Sequence
  Synthetic oligonucleotide
cgaagaagtgtcttggtgttaacctgagat

SEQ ID NO: 155038 - DNA, 30 bp, Artificial Sequence
  Synthetic oligonucleotide
tcactaataaccgggtggagtaggtgagat

SEQ ID NO: 155039 - DNA, 30 bp, Artificial Sequence
  Synthetic oligonucleotide
tgtaggcattagtctggctgcggttgagat

SEQ ID NO: 155040 - DNA, 30 bp, Artificial Sequence
  Synthetic oligonucleotide
gctcgcacgaactaaacttacacaatagat

SEQ ID NO: 155041 - DNA, 30 bp, Artificial Sequence
  Synthetic oligonucleotide
gatatcaagaggggagaggcggacatagat

SEQ ID NO: 155042 - DNA, 30 bp, Artificial Sequence
  Synthetic oligonucleotide
agcgtgtatccgcgaataaaacggatagat

SEQ ID NO: 155043 - DNA, 30 bp, Artificial Sequence
  Synthetic oligonucleotide
catgaacacccccatggatgttatatagat

SEQ ID NO: 155044 - DNA, 30 bp, Artificial Sequence
  Synthetic oligonucleotide
gagggccttttaccggtaacgtctatagat

SEQ ID NO: 155045 - DNA, 30 bp, Artificial Sequence
  Synthetic oligonucleotide
tagggcggcgagggcggaatttgagtagat

SEQ ID NO: 155046 - DNA, 30 bp, Artificial Sequence
  Synthetic oligonucleotide
tacattttgggcatcggatgcgtcgtagat

SEQ ID NO: 155047 - DNA, 30 bp, Artificial Sequence
  Synthetic oligonucleotide
tcgagtatgttgaagcatttaggattagat

SEQ ID NO: 155048 - DNA, 30 bp, Artificial Sequence
  Synthetic oligonucleotide
tggtacagtgttcgtgtcggatccttagat

SEQ ID NO: 155049 - DNA, 30 bp, Artificial Sequence
  Synthetic oligonucleotide
gaggtcacaaagctgcaagctcatttagat

SEQ ID NO: 155050 - DNA, 30 bp, Artificial Sequence
  Synthetic oligonucleotide
gccgaaggggttaaagttaagagtttagat

SEQ ID NO: 155051 - DNA, 30 bp, Artificial Sequence
  Synthetic oligonucleotide
cagtcgagctggtggagagcgcaaaacgat

SEQ ID NO: 155052 - DNA, 30 bp, Artificial Sequence
  Synthetic oligonucleotide
accctgatatcctaggttcgatacaacgat

SEQ ID NO: 155053 - DNA, 30 bp, Artificial Sequence
  Synthetic oligonucleotide
tcttaaacgtagataacttggagtaacgat

SEQ ID NO: 155054 - DNA, 30 bp, Artificial Sequence
  Synthetic oligonucleotide
gtaatagtaagcgcaccccggtgtaacgat

SEQ ID NO: 155055 - DNA, 30 bp, Artificial Sequence
  Synthetic oligonucleotide
atccgcaaatagcactaccaacgggacgat

SEQ ID NO: 155056 - DNA, 30 bp, Artificial Sequence
  Synthetic oligonucleotide
cgggcggagacatcgactgtcaggtacgat

SEQ ID NO: 155057 - DNA, 30 bp, Artificial Sequence
  Synthetic oligonucleotide
aagagagggtcttcagcagtcaacaccgat

SEQ ID NO: 155058 - DNA, 30 bp, Artificial Sequence
  Synthetic oligonucleotide
catgccgtgccaaggctcaggcaacccgat

SEQ ID NO: 155059 - DNA, 30 bp, Artificial Sequence
  Synthetic oligonucleotide
aagactggtagtgaatttacatcgcccgat

SEQ ID NO: 155060 - DNA, 30 bp, Artificial Sequence
  Synthetic oligonucleotide
cgcacagcaactacataagtcatgcccgat

SEQ ID NO: 155061 - DNA, 30 bp, Artificial Sequence
  Synthetic oligonucleotide
cggaacttcgtctgggcctaaatggccgat

SEQ ID NO: 155062 - DNA, 30 bp, Artificial Sequence
  Synthetic oligonucleotide
ttgtgctcttaacaagttagaattgccgat

SEQ ID NO: 155063 - DNA, 30 bp, Artificial Sequence
  Synthetic oligonucleotide
ccaagctcgtcggtaacggttagcagcgat

SEQ ID NO: 155064 - DNA, 30 bp, Artificial Sequence
  Synthetic oligonucleotide
gatggcggaaccgaagatgtgtatagcgat

SEQ ID NO: 155065 - DNA, 30 bp, Artificial Sequence
  Synthetic oligonucleotide
acggcttcacggcataatttataaggcgat

SEQ ID NO: 155066 - DNA, 30 bp, Artificial Sequence
  Synthetic oligonucleotide
ctaagctttcagaacagaaatgagggcgat

SEQ ID NO: 155067 - DNA, 30 bp, Artificial Sequence
  Synthetic oligonucleotide
actttcgccggctgatggtgatcgggcgat

SEQ ID NO: 155068 - DNA, 30 bp, Artificial Sequence
  Synthetic oligonucleotide
ttctaaactgagtcccgagtgcggggcgat

SEQ ID NO: 155069 - DNA, 30 bp, Artificial Sequence
  Synthetic oligonucleotide
ccatctttaggtgacttaagggtgggcgat

SEQ ID NO: 155070 - DNA, 30 bp, Artificial Sequence
  Synthetic oligonucleotide
cagttcaagagagatagattgttaatcgat

SEQ ID NO: 155071 - DNA, 30 bp, Artificial Sequence
  Synthetic oligonucleotide
taacaaaacgggagtgtgaacaggatcgat

SEQ ID NO: 155072 - DNA, 30 bp, Artificial Sequence
  Synthetic oligonucleotide
atggggcgggtgtcatacaccgggatcgat

SEQ ID NO: 155073 - DNA, 30 bp, Artificial Sequence
  Synthetic oligonucleotide
tagtaatagtgggagcgttggctgatcgat

SEQ ID NO: 155074 - DNA, 30 bp, Artificial Sequence
  Synthetic oligonucleotide
gcaggacgcgggtctattctataactcgat

SEQ ID NO: 155075 - DNA, 30 bp, Artificial Sequence
  Synthetic oligonucleotide
gccgttagatctgaagagcatgggctcgat

SEQ ID NO: 155076 - DNA, 30 bp, Artificial Sequence
  Synthetic oligonucleotide
gtattctggacgcaatgtaggagagtcgat

SEQ ID NO: 155077 - DNA, 30 bp, Artificial Sequence
  Synthetic oligonucleotide
atagcatggtcagggtcctggcccgtcgat

SEQ ID NO: 155078 - DNA, 30 bp, Artificial Sequence
  Synthetic oligonucleotide
acgatcaccagaggccggtttggtgtcgat

SEQ ID NO: 155079 - DNA, 30 bp, Artificial Sequence
  Synthetic oligonucleotide
gcgtaggaagtcattctgagtggattcgat

SEQ ID NO: 155080 - DNA, 30 bp, Artificial Sequence
  Synthetic oligonucleotide
tcctccattaaccaggataatgagttcgat

SEQ ID NO: 155081 - DNA, 30 bp, Artificial Sequence
  Synthetic oligonucleotide
ctgctccatgaggtacggcatgagttcgat

SEQ ID NO: 155082 - DNA, 30 bp, Artificial Sequence
  Synthetic oligonucleotide
ttggcgaacaagcatgtacggttgttcgat

SEQ ID NO: 155083 - DNA, 30 bp, Artificial Sequence
  Synthetic oligonucleotide
aacccttacaaagaatggtcatcaaaggat

SEQ ID NO: 155084 - DNA, 30 bp, Artificial Sequence
  Synthetic oligonucleotide
gacaggtgtatttgtacgagtcgcaaggat

SEQ ID NO: 155085 - DNA, 30 bp, Artificial Sequence
  Synthetic oligonucleotide
ttacggcaaagtaaacaatctaggaaggat

SEQ ID NO: 155086 - DNA, 30 bp, Artificial Sequence
  Synthetic oligonucleotide
ccgcaacgacgacatatgggtctgaaggat

SEQ ID NO: 155087 - DNA, 30 bp, Artificial Sequence
  Synthetic oligonucleotide
ttccaaggcccagccatgcacaataaggat

SEQ ID NO: 155088 - DNA, 30 bp, Artificial Sequence
  Synthetic oligonucleotide
ggaaacgtagcgatgtgaaagcctaaggat

SEQ ID NO: 155089 - DNA, 30 bp, Artificial Sequence
  Synthetic oligonucleotide
aacattcagagcattgcagggtctaaggat

SEQ ID NO: 155090 - DNA, 27 bp, Artificial Sequence
  Synthetic oligonucleotide
gtgtgatggtacaaggtcttacaggat

SEQ ID NO: 155091 - DNA, 30 bp, Artificial Sequence
  Synthetic oligonucleotide
actagtcagccggatgagagcattcaggat

SEQ ID NO: 155092 - DNA, 30 bp, Artificial Sequence
  Synthetic oligonucleotide
aacccggtgtgcaaacgagaggttcaggat

SEQ ID NO: 155093 - DNA, 30 bp, Artificial Sequence
  Synthetic oligonucleotide
cggttttcggtgtacggctacaacgaggat

SEQ ID NO: 155094 - DNA, 31 bp, Artificial Sequence
  Synthetic oligonucleotide
cggtcggccgtcaccgctcacaaccgaggat

SEQ ID NO: 155095 - DNA, 30 bp, Artificial Sequence
  Synthetic oligonucleotide
ttgtacatcttcaacaccttaatataggat

SEQ ID NO: 155096 - DNA, 30 bp, Artificial Sequence
  Synthetic oligonucleotide
cgagagcgacaaacaagttgtttataggat

SEQ ID NO: 155097 - DNA, 30 bp, Artificial Sequence
  Synthetic oligonucleotide
aatggcacccgtgcgtcgccgtactaggat

SEQ ID NO: 155098 - DNA, 30 bp, Artificial Sequence
  Synthetic oligonucleotide
acgaacgccgggggccgacgttactaggat

SEQ ID NO: 155099 - DNA, 30 bp, Artificial Sequence
  Synthetic oligonucleotide
agggtatccagaacgcgattcatctaggat

SEQ ID NO: 155100 - DNA, 30 bp, Artificial Sequence
  Synthetic oligonucleotide
atggattcagggctagcccccgcgtaggat

SEQ ID NO: 155101 - DNA, 30 bp, Artificial Sequence
  Synthetic oligonucleotide
cgtaccatacactatagagattcgtaggat

SEQ ID NO: 155102 - DNA, 30 bp, Artificial Sequence
  Synthetic oligonucleotide
tcgcgaacatgtacagaacggaattaggat

SEQ ID NO: 155103 - DNA, 30 bp, Artificial Sequence
  Synthetic oligonucleotide
aaccgaaatcagaaatatacttgcacggat

SEQ ID NO: 155104 - DNA, 30 bp, Artificial Sequence
  Synthetic oligonucleotide
agtgtacaggtacaagacggcaggacggat

SEQ ID NO: 155105 - DNA, 30 bp, Artificial Sequence
  Synthetic oligonucleotide
gtagggactcaatgcgcaaggactacggat

SEQ ID NO: 155106 - DNA, 30 bp, Artificial Sequence
  Synthetic oligonucleotide
tttcggcctggacaatatctgcacccggat

SEQ ID NO: 155107 - DNA, 30 bp, Artificial Sequence
  Synthetic oligonucleotide
acgaagacaggtttggaatgcacgccggat

SEQ ID NO: 155108 - DNA, 30 bp, Artificial Sequence
  Synthetic oligonucleotide
tcatcgcgaggacgctttctaaggccggat

SEQ ID NO: 155109 - DNA, 30 bp, Artificial Sequence
  Synthetic oligonucleotide
aacgcattgacatccactattgatccggat

SEQ ID NO: 155110 - DNA, 30 bp, Artificial Sequence
  Synthetic oligonucleotide
agacgctgggtatatctccactgtccggat

SEQ ID NO: 155111 - DNA, 30 bp, Artificial Sequence
  Synthetic oligonucleotide
tagcaaaaagcattatgtgtacttccggat

SEQ ID NO: 155112 - DNA, 30 bp, Artificial Sequence
  Synthetic oligonucleotide
acaaaaaagcaatcgatagggtttccggat

SEQ ID NO: 155113 - DNA, 30 bp, Artificial Sequence
  Synthetic oligonucleotide
caccggtgcctgaggcaactggtagcggat

SEQ ID NO: 155114 - DNA, 30 bp, Artificial Sequence
  Synthetic oligonucleotide
ttgatggacatcccttttcaccgcgcggat

SEQ ID NO: 155115 - DNA, 30 bp, Artificial Sequence
  Synthetic oligonucleotide
tctgctcattatggccatccaggttcggat

SEQ ID NO: 155116 - DNA, 30 bp, Artificial Sequence
  Synthetic oligonucleotide
actccccctgatgataccactaacggggat

SEQ ID NO: 155117 - DNA, 30 bp, Artificial Sequence
  Synthetic oligonucleotide
agaatgatttgggcccgtggacgaatggat

SEQ ID NO: 155118 - DNA, 30 bp, Artificial Sequence
  Synthetic oligonucleotide
ctcttagtaggcacctaagtggtaatggat

SEQ ID NO: 155119 - DNA, 29 bp, Artificial Sequence
  Synthetic oligonucleotide
tataataggaaggtgagctgctcatggat

SEQ ID NO: 155120 - DNA, 30 bp, Artificial Sequence
  Synthetic oligonucleotide
cgaggttggtgctgatggaaattactggat

SEQ ID NO: 155121 - DNA, 30 bp, Artificial Sequence
  Synthetic oligonucleotide
aggcgctacagcttgcgagcctcgctggat

SEQ ID NO: 155122 - DNA, 30 bp, Artificial Sequence
  Synthetic oligonucleotide
tgagcacgtataatttgatctacattggat

SEQ ID NO: 155123 - DNA, 30 bp, Artificial Sequence
  Synthetic oligonucleotide
ataggactgaaactaatgctgagattggat

SEQ ID NO: 155124 - DNA, 30 bp, Artificial Sequence
  Synthetic oligonucleotide
taacgacatgcaccttaggagacgttggat

SEQ ID NO: 155125 - DNA, 30 bp, Artificial Sequence
  Synthetic oligonucleotide
gcgcgtcccgaacctgtggtccaaaatgat

SEQ ID NO: 155126 - DNA, 30 bp, Artificial Sequence
  Synthetic oligonucleotide
cgacaaagctctttctgggtcataaatgat

SEQ ID NO: 155127 - DNA, 30 bp, Artificial Sequence
  Synthetic oligonucleotide
attgaggtggtgaaacgctacggacatgat

SEQ ID NO: 155128 - DNA, 30 bp, Artificial Sequence
  Synthetic oligonucleotide
acacggtacaaccacagcgaccaccatgat

SEQ ID NO: 155129 - DNA, 30 bp, Artificial Sequence
  Synthetic oligonucleotide
taggtgataattgagaccggataccatgat

SEQ ID NO: 155130 - DNA, 30 bp, Artificial Sequence
  Synthetic oligonucleotide
cgcagggctcttgcggaataatgagatgat

SEQ ID NO: 155131 - DNA, 30 bp, Artificial Sequence
  Synthetic oligonucleotide
gggacgcgggacatattcccgatagatgat

SEQ ID NO: 155132 - DNA, 30 bp, Artificial Sequence
  Synthetic oligonucleotide
gttaggatggctggaggttctttggatgat

SEQ ID NO: 155133 - DNA, 30 bp, Artificial Sequence
  Synthetic oligonucleotide
ttgtagcgacatgacagaacgatatatgat

SEQ ID NO: 155134 - DNA, 30 bp, Artificial Sequence
  Synthetic oligonucleotide
cataaatatttcagtagggcgaactatgat

SEQ ID NO: 155135 - DNA, 30 bp, Artificial Sequence
  Synthetic oligonucleotide
gcgagtaaataatctatagaccactatgat

SEQ ID NO: 155136 - DNA, 30 bp, Artificial Sequence
  Synthetic oligonucleotide
tgttactgaacttcccgataaaggtatgat

SEQ ID NO: 155137 - DNA, 30 bp, Artificial Sequence
  Synthetic oligonucleotide
tgctagttgacggtgaggacgaggtatgat

SEQ ID NO: 155138 - DNA, 30 bp, Artificial Sequence
  Synthetic oligonucleotide
agggcaaatgtaaaggacggaaaaactgat

SEQ ID NO: 155139 - DNA, 30 bp, Artificial Sequence
  Synthetic oligonucleotide
ggtaggtccggcagtggtgccacaactgat

SEQ ID NO: 155140 - DNA, 30 bp, Artificial Sequence
  Synthetic oligonucleotide
gatgtagaagtctaaacgtgaagaactgat

SEQ ID NO: 155141 - DNA, 30 bp, Artificial Sequence
  Synthetic oligonucleotide
atgtggtggtattagttgtcccgaactgat

SEQ ID NO: 155142 - DNA, 30 bp, Artificial Sequence
  Synthetic oligonucleotide
gctcgtagtataggtggggcggtcactgat

SEQ ID NO: 155143 - DNA, 30 bp, Artificial Sequence
  Synthetic oligonucleotide
tattgcgcaccggatcgtttaagagctgat

SEQ ID NO: 155144 - DNA, 30 bp, Artificial Sequence
  Synthetic oligonucleotide
gtgaataaaagtgtgcataaattcgctgat

SEQ ID NO: 155145 - DNA, 30 bp, Artificial Sequence
  Synthetic oligonucleotide
gaacgtgcttcgtggcctaccaaggctgat

SEQ ID NO: 155146 - DNA, 30 bp, Artificial Sequence
  Synthetic oligonucleotide
catgacggacccacggtagagttggctgat

SEQ ID NO: 155147 - DNA, 30 bp, Artificial Sequence
  Synthetic oligonucleotide
cggtataggtttaagttaatcatttctgat

SEQ ID NO: 155148 - DNA, 30 bp, Artificial Sequence
  Synthetic oligonucleotide
taagaatatgctcttaaggtaaacagtgat

SEQ ID NO: 155149 - DNA, 30 bp, Artificial Sequence
  Synthetic oligonucleotide
gatagattaagcgaatagggaatcagtgat

SEQ ID NO: 155150 - DNA, 30 bp, Artificial Sequence
  Synthetic oligonucleotide
agaatgcaccatgtacctgtggcgagtgat

SEQ ID NO: 155151 - DNA, 30 bp, Artificial Sequence
  Synthetic oligonucleotide
gtatgcggtagtgtcagtccgagacgtgat

SEQ ID NO: 155152 - DNA, 30 bp, Artificial Sequence
  Synthetic oligonucleotide
ggtctcgtgacatgtaggtgacttcgtgat

SEQ ID NO: 155153 - DNA, 30 bp, Artificial Sequence
  Synthetic oligonucleotide
gtgagccctacaagatgagagagaggtgat

SEQ ID NO: 155154 - DNA, 30 bp, Artificial Sequence
  Synthetic oligonucleotide
cacagctaagtgagggcagatggcggtgat

SEQ ID NO: 155155 - DNA, 30 bp, Artificial Sequence
  Synthetic oligonucleotide
caatagtataggtgggtggctcactgtgat

SEQ ID NO: 155156 - DNA, 30 bp, Artificial Sequence
  Synthetic oligonucleotide
aaggacgaggtcccaaaacctatgtgtgat

SEQ ID NO: 155157 - DNA, 30 bp, Artificial Sequence
  Synthetic oligonucleotide
aaggaattactcgtcaaccgcgtgtgtgat

SEQ ID NO: 155158 - DNA, 30 bp, Artificial Sequence
  Synthetic oligonucleotide
gctaggcagacctcgatgtttgccattgat

SEQ ID NO: 155159 - DNA, 30 bp, Artificial Sequence
  Synthetic oligonucleotide
ctgttacgaggcttgctatgaaagattgat

SEQ ID NO: 155160 - DNA, 30 bp, Artificial Sequence
  Synthetic oligonucleotide
cacaagttcatgcgagtaacacagattgat

SEQ ID NO: 155161 - DNA, 30 bp, Artificial Sequence
  Synthetic oligonucleotide
aggcattaacgtcgaaggagtgcgattgat

SEQ ID NO: 155162 - DNA, 30 bp, Artificial Sequence
  Synthetic oligonucleotide
gcctagccagcatccccaaggaggattgat

SEQ ID NO: 155163 - DNA, 30 bp, Artificial Sequence
  Synthetic oligonucleotide
gcgaagaaagtaccggggtgctcacttgat

SEQ ID NO: 155164 - DNA, 30 bp, Artificial Sequence
  Synthetic oligonucleotide
agcgaacccaactttgccagtatagttgat

SEQ ID NO: 155165 - DNA, 30 bp, Artificial Sequence
  Synthetic oligonucleotide
accctaatacggagtgggcatcccgttgat

SEQ ID NO: 155166 - DNA, 30 bp, Artificial Sequence
  Synthetic oligonucleotide
gttggtgttaataagcgagtgatggttgat

SEQ ID NO: 155167 - DNA, 30 bp, Artificial Sequence
  Synthetic oligonucleotide
agagcacaagccgaacaatatatgtttgat

SEQ ID NO: 155168 - DNA, 30 bp, Artificial Sequence
  Synthetic oligonucleotide
cacaactctcaacccccaggtgcgaaatat

SEQ ID NO: 155169 - DNA, 30 bp, Artificial Sequence
  Synthetic oligonucleotide
ctagttaattcggcaagaaacggacaatat

SEQ ID NO: 155170 - DNA, 30 bp, Artificial Sequence
  Synthetic oligonucleotide
gcgagaccactaaacgcgagtctccaatat

SEQ ID NO: 155171 - DNA, 30 bp, Artificial Sequence
  Synthetic oligonucleotide
ctatggagagctggtagtgctgcgcaatat

SEQ ID NO: 155172 - DNA, 30 bp, Artificial Sequence
  Synthetic oligonucleotide
caccgacaccgcgaaccgagttatcaatat

SEQ ID NO: 155173 - DNA, 30 bp, Artificial Sequence
  Synthetic oligonucleotide
accccaggaggcgcgttcccttgagaatat

SEQ ID NO: 155174 - DNA, 30 bp, Artificial Sequence
  Synthetic oligonucleotide
accaatgatcaagtgtgtggtagcgaatat

SEQ ID NO: 155175 - DNA, 30 bp, Artificial Sequence
  Synthetic oligonucleotide
tatcatataccaaactttccatgcgaatat

SEQ ID NO: 155176 - DNA, 30 bp, Artificial Sequence
  Synthetic oligonucleotide
agagatgtaaggaaattaggaggggaatat

SEQ ID NO: 155177 - DNA, 30 bp, Artificial Sequence
  Synthetic oligonucleotide
acggggtctgccgttccgcgtgtggaatat

SEQ ID NO: 155178 - DNA, 30 bp, Artificial Sequence
  Synthetic oligonucleotide
gatggggtgctgccgtcatagcttgaatat

SEQ ID NO: 155179 - DNA, 30 bp, Artificial Sequence
  Synthetic oligonucleotide
ggctcggttgcatggaaggcgtactaatat

SEQ ID NO: 155180 - DNA, 31 bp, Artificial Sequence
  Synthetic oligonucleotide
tggagtgatataatatagcataccaacatat

SEQ ID NO: 155181 - DNA, 30 bp, Artificial Sequence
  Synthetic oligonucleotide
taccgggacgacaggctctaatcaacatat

SEQ ID NO: 155182 - DNA, 30 bp, Artificial Sequence
  Synthetic oligonucleotide
ccatcgaagtagagcacattgagaacatat

SEQ ID NO: 155183 - DNA, 30 bp, Artificial Sequence
  Synthetic oligonucleotide
tctacttgaaaagtggagatccccacatat

SEQ ID NO: 155184 - DNA, 30 bp, Artificial Sequence
  Synthetic oligonucleotide
agaaggtgataatcttgtgcgcggacatat

SEQ ID NO: 155185 - DNA, 30 bp, Artificial Sequence
  Synthetic oligonucleotide
gtcctgggattagggtcactcgatacatat

SEQ ID NO: 155186 - DNA, 30 bp, Artificial Sequence
  Synthetic oligonucleotide
cgaggcgggtctgcggacccaagtacatat

SEQ ID NO: 155187 - DNA, 30 bp, Artificial Sequence
  Synthetic oligonucleotide
ttgtagacactacaccatttacacccatat

SEQ ID NO: 155188 - DNA, 30 bp, Artificial Sequence
  Synthetic oligonucleotide
caaccggtgtagagcgaccatccagcatat

SEQ ID NO: 155189 - DNA, 30 bp, Artificial Sequence
  Synthetic oligonucleotide
gccttgaggatcatactgggagtcgcatat

SEQ ID NO: 155190 - DNA, 30 bp, Artificial Sequence
  Synthetic oligonucleotide
ggtccctggcaactcgtgataatggcatat

SEQ ID NO: 155191 - DNA, 31 bp, Artificial Sequence
  Synthetic oligonucleotide
aacacgacaaccatactcgcccccctcatat

SEQ ID NO: 155192 - DNA, 30 bp, Artificial Sequence
  Synthetic oligonucleotide
aacaaaaataaaactaagtggagaagatat

SEQ ID NO: 155193 - DNA, 30 bp, Artificial Sequence
  Synthetic oligonucleotide
ggaataatcaacggaagcgcgaggagatat

SEQ ID NO: 155194 - DNA, 30 bp, Artificial Sequence
  Synthetic oligonucleotide
ccattcggcgacagggctgtactgagatat

SEQ ID NO: 155195 - DNA, 30 bp, Artificial Sequence
  Synthetic oligonucleotide
gccggaagactcaccatgacattgagatat

SEQ ID NO: 155196 - DNA, 30 bp, Artificial Sequence
  Synthetic oligonucleotide
tcgaaaactcgtcatgtcgttcttagatat

SEQ ID NO: 155197 - DNA, 30 bp, Artificial Sequence
  Synthetic oligonucleotide
tgacattaaaaacctgtgtggatgcgatat

SEQ ID NO: 155198 - DNA, 30 bp, Artificial Sequence
  Synthetic oligonucleotide
ccatatgtaagggcttgcaaaagatgatat

SEQ ID NO: 155199 - DNA, 30 bp, Artificial Sequence
  Synthetic oligonucleotide
gcagtcactccagaaaccattcgctgatat

SEQ ID NO: 155200 - DNA, 30 bp, Artificial Sequence
  Synthetic oligonucleotide
tggtgatgtcatgcaatcgtcggctgatat

SEQ ID NO: 155201 - DNA, 31 bp, Artificial Sequence
  Synthetic oligonucleotide
gaagaaacaaggcagcagtgtacaaatatat

SEQ ID NO: 155202 - DNA, 30 bp, Artificial Sequence
  Synthetic oligonucleotide
tggatgcgcgacaaagtaagcaagatatat

SEQ ID NO: 155203 - DNA, 30 bp, Artificial Sequence
  Synthetic oligonucleotide
cgtttaatagtcttcggcaaacagatatat

SEQ ID NO: 155204 - DNA, 30 bp, Artificial Sequence
  Synthetic oligonucleotide
tccatcaggactaatcgtggaaatatatat

SEQ ID NO: 155205 - DNA, 30 bp, Artificial Sequence
  Synthetic oligonucleotide
tagtagatttaccatggatacatgctatat

SEQ ID NO: 155206 - DNA, 30 bp, Artificial Sequence
  Synthetic oligonucleotide
agggaatgcaagatatgcgttatcgtatat

SEQ ID NO: 155207 - DNA, 30 bp, Artificial Sequence
  Synthetic oligonucleotide
ccgtcggagagatccgtagggcttgtatat

SEQ ID NO: 155208 - DNA, 30 bp, Artificial Sequence
  Synthetic oligonucleotide
atgccggtaaggtaagggattacattatat

SEQ ID NO: 155209 - DNA, 30 bp, Artificial Sequence
  Synthetic oligonucleotide
agacgccatcatgtgcctatttaaaactat

SEQ ID NO: 155210 - DNA, 30 bp, Artificial Sequence
  Synthetic oligonucleotide
gacaccacccgcgataaaagacgaaactat

SEQ ID NO: 155211 - DNA, 30 bp, Artificial Sequence
  Synthetic oligonucleotide
cttagggtattccagagttcgggaaactat

SEQ ID NO: 155212 - DNA, 30 bp, Artificial Sequence
  Synthetic oligonucleotide
ggcgcatatgatgcgaaagtgagtaactat

SEQ ID NO: 155213 - DNA, 30 bp, Artificial Sequence
  Synthetic oligonucleotide
atccgcctgcaggatagggattcacactat

SEQ ID NO: 155214 - DNA, 30 bp, Artificial Sequence
  Synthetic oligonucleotide
ctgagcaacgcccccattattgtgcactat

SEQ ID NO: 155215 - DNA, 30 bp, Artificial Sequence
  Synthetic oligonucleotide
acgtcgcgcgctaaattcactagagactat

SEQ ID NO: 155216 - DNA, 30 bp, Artificial Sequence
  Synthetic oligonucleotide
ccaacccaaagccaatccacggcggactat

SEQ ID NO: 155217 - DNA, 30 bp, Artificial Sequence
  Synthetic oligonucleotide
ttggtgagatatagccgtaacgatgactat

SEQ ID NO: 155218 - DNA, 30 bp, Artificial Sequence
  Synthetic oligonucleotide
tcgctgagagattaaagtgtaaaatactat

SEQ ID NO: 155219 - DNA, 30 bp, Artificial Sequence
  Synthetic oligonucleotide
attgagattcacaagcgagataggtactat

SEQ ID NO: 155220 - DNA, 30 bp, Artificial Sequence
  Synthetic oligonucleotide
ctcgagtgcagaaatcggaagctgtactat

SEQ ID NO: 155221 - DNA, 30 bp, Artificial Sequence
  Synthetic oligonucleotide
ggtaccataatgcaccacggggacacctat

SEQ ID NO: 155222 - DNA, 30 bp, Artificial Sequence
  Synthetic oligonucleotide
tacggtgggattcatggtgtgcagacctat

SEQ ID NO: 155223 - DNA, 30 bp, Artificial Sequence
  Synthetic oligonucleotide
cgatggatctggagaatcgcgaaaccctat

SEQ ID NO: 155224 - DNA, 30 bp, Artificial Sequence
  Synthetic oligonucleotide
ctagtccactcttaacgactccgaccctat

SEQ ID NO: 155225 - DNA, 30 bp, Artificial Sequence
  Synthetic oligonucleotide
atgggggacgttataggttaaaagccctat

SEQ ID NO: 155226 - DNA, 30 bp, Artificial Sequence
  Synthetic oligonucleotide
agtacgtggacttcatcctgggatccctat

SEQ ID NO: 155227 - DNA, 30 bp, Artificial Sequence
  Synthetic oligonucleotide
caatagggctagcgtagattcagtccctat

SEQ ID NO: 155228 - DNA, 30 bp, Artificial Sequence
  Synthetic oligonucleotide
aggatgctagcatcttcctaacgcgcctat

SEQ ID NO: 155229 - DNA, 30 bp, Artificial Sequence
  Synthetic oligonucleotide
gatgcacgtccggtagtgggagtgcgctat

SEQ ID NO: 155230 - DNA, 30 bp, Artificial Sequence
  Synthetic oligonucleotide
tcgcgcaaatatacaactagtcgaggctat

SEQ ID NO: 155231 - DNA, 30 bp, Artificial Sequence
  Synthetic oligonucleotide
cgaacagcgggcactcccttgcggggctat

SEQ ID NO: 155232 - DNA, 30 bp, Artificial Sequence
  Synthetic oligonucleotide
ccgggggatacacaagataaagtctgctat

SEQ ID NO: 155233 - DNA, 30 bp, Artificial Sequence
  Synthetic oligonucleotide
attacgccagattggagttttgcgtgctat

SEQ ID NO: 155234 - DNA, 30 bp, Artificial Sequence
  Synthetic oligonucleotide
agagttgaggtgtgagttgggggcatctat

SEQ ID NO: 155235 - DNA, 30 bp, Artificial Sequence
  Synthetic oligonucleotide
ttcaagggcggtagaattaatgcactctat

SEQ ID NO: 155236 - DNA, 30 bp, Artificial Sequence
  Synthetic oligonucleotide
gcggaacattccatttcccattgtctctat

SEQ ID NO: 155237 - DNA, 30 bp, Artificial Sequence
  Synthetic oligonucleotide
ggagtacaaaacacactgggaatgaagtat

SEQ ID NO: 155238 - DNA, 30 bp, Artificial Sequence
  Synthetic oligonucleotide
tgcgatagttagtgaccgacccctaagtat

SEQ ID NO: 155239 - DNA, 30 bp, Artificial Sequence
  Synthetic oligonucleotide
cactagagcaggagatggtcacgtaagtat

SEQ ID NO: 155240 - DNA, 30 bp, Artificial Sequence
  Synthetic oligonucleotide
cacgagctttgctttcaagtacgacagtat

SEQ ID NO: 155241 - DNA, 30 bp, Artificial Sequence
  Synthetic oligonucleotide
cgatggggaattgcagaatctacccagtat

SEQ ID NO: 155242 - DNA, 30 bp, Artificial Sequence
  Synthetic oligonucleotide
ggagcagagcatggcgccgcccgagagtat

SEQ ID NO: 155243 - DNA, 30 bp, Artificial Sequence
  Synthetic oligonucleotide
cgcatgttgagtaacatacgcacgtagtat

SEQ ID NO: 155244 - DNA, 30 bp, Artificial Sequence
  Synthetic oligonucleotide
gggacgtcggatcgtctaaaaagcacgtat

SEQ ID NO: 155245 - DNA, 30 bp, Artificial Sequence
  Synthetic oligonucleotide
cagcgaaatcacacacgatactatacgtat

SEQ ID NO: 155246 - DNA, 30 bp, Artificial Sequence
  Synthetic oligonucleotide
ttacctgcgctaagactaagtgctacgtat

SEQ ID NO: 155247 - DNA, 30 bp, Artificial Sequence
  Synthetic oligonucleotide
gcaggaggtagctgatgtggtggtacgtat

SEQ ID NO: 155248 - DNA, 30 bp, Artificial Sequence
  Synthetic oligonucleotide
agtataagcataggtatattgacaccgtat

SEQ ID NO: 155249 - DNA, 30 bp, Artificial Sequence
  Synthetic oligonucleotide
gaagggcaggcaggtatttattcaccgtat

SEQ ID NO: 155250 - DNA, 30 bp, Artificial Sequence
  Synthetic oligonucleotide
taggggcaaccaaaagaacgggtaccgtat

SEQ ID NO: 155251 - DNA, 30 bp, Artificial Sequence
  Synthetic oligonucleotide
actaatggggccgttatgccgaatccgtat

SEQ ID NO: 155252 - DNA, 30 bp, Artificial Sequence
  Synthetic oligonucleotide
ctgactcagatgccatctatcatagcgtat

SEQ ID NO: 155253 - DNA, 30 bp, Artificial Sequence
  Synthetic oligonucleotide
atggacatacactttcaaagcctggcgtat

SEQ ID NO: 155254 - DNA, 30 bp, Artificial Sequence
  Synthetic oligonucleotide
gacagggtagagttagtcagtgtggcgtat

SEQ ID NO: 155255 - DNA, 30 bp, Artificial Sequence
  Synthetic oligonucleotide
cccctcacatggggccgcgctcgtgcgtat

SEQ ID NO: 155256 - DNA, 30 bp, Artificial Sequence
  Synthetic oligonucleotide
ggttcgcgggagttagaccccagctcgtat

SEQ ID NO: 155257 - DNA, 30 bp, Artificial Sequence
  Synthetic oligonucleotide
cagggaggttaccgctctcttagttcgtat

SEQ ID NO: 155258 - DNA, 30 bp, Artificial Sequence
  Synthetic oligonucleotide
agatgtgcatcgggatctttacgaaggtat

SEQ ID NO: 155259 - DNA, 30 bp, Artificial Sequence
  Synthetic oligonucleotide
tctagcgtcaacggtagggtggacaggtat

SEQ ID NO: 155260 - DNA, 30 bp, Artificial Sequence
  Synthetic oligonucleotide
ctagtggcggcgaatagcaggtacaggtat

SEQ ID NO: 155261 - DNA, 30 bp, Artificial Sequence
  Synthetic oligonucleotide
agaatcacggatgtccggcggtccaggtat

SEQ ID NO: 155262 - DNA, 30 bp, Artificial Sequence
  Synthetic oligonucleotide
gtgataaccgaacaaaagaccagcaggtat

SEQ ID NO: 155263 - DNA, 30 bp, Artificial Sequence
  Synthetic oligonucleotide
ctgagttaacttcgggtggagctcaggtat

SEQ ID NO: 155264 - DNA, 30 bp, Artificial Sequence
  Synthetic oligonucleotide
cacgaagggttacatccgcgcacgaggtat

SEQ ID NO: 155265 - DNA, 30 bp, Artificial Sequence
  Synthetic oligonucleotide
agggagggcggctcgcatagtaggaggtat

SEQ ID NO: 155266 - DNA, 30 bp, Artificial Sequence
  Synthetic oligonucleotide
ggactggtgcgaaaagtgcaggggaggtat

SEQ ID NO: 155267 - DNA, 30 bp, Artificial Sequence
  Synthetic oligonucleotide
ctcaataagaactgaaggcaatataggtat

SEQ ID NO: 155268 - DNA, 31 bp, Artificial Sequence
  Synthetic oligonucleotide
atgtatcacagtggcgccggagcgacggtat

SEQ ID NO: 155269 - DNA, 30 bp, Artificial Sequence
  Synthetic oligonucleotide
cgtgcaacacgtggatatagactacggtat

SEQ ID NO: 155270 - DNA, 30 bp, Artificial Sequence
  Synthetic oligonucleotide
agagtcttgtcaatgattatcagtcggtat

SEQ ID NO: 155271 - DNA, 30 bp, Artificial Sequence
  Synthetic oligonucleotide
tagggtgtggaacacacggtagcagggtat

SEQ ID NO: 155272 - DNA, 30 bp, Artificial Sequence
  Synthetic oligonucleotide
gggcgtgtcgaagtccgagcaatagggtat

SEQ ID NO: 155273 - DNA, 30 bp, Artificial Sequence
  Synthetic oligonucleotide
agaaggaagtataaatcttgagtcgggtat

SEQ ID NO: 155274 - DNA, 30 bp, Artificial Sequence
  Synthetic oligonucleotide
agctaattcatgcgaaacatcccatggtat

SEQ ID NO: 155275 - DNA, 30 bp, Artificial Sequence
  Synthetic oligonucleotide
gcagaggcagagccggtttgcggctggtat

SEQ ID NO: 155276 - DNA, 30 bp, Artificial Sequence
  Synthetic oligonucleotide
ggcgcatgacgacgctcattgccttggtat

SEQ ID NO: 155277 - DNA, 30 bp, Artificial Sequence
  Synthetic oligonucleotide
atggactcggcataacagggggcgctgtat

SEQ ID NO: 155278 - DNA, 30 bp, Artificial Sequence
  Synthetic oligonucleotide
atctgcgacggtgatagggtcggagtgtat

SEQ ID NO: 155279 - DNA, 30 bp, Artificial Sequence
  Synthetic oligonucleotide
gtcaagccatttgactcgtatgccgtgtat

SEQ ID NO: 155280 - DNA, 30 bp, Artificial Sequence
  Synthetic oligonucleotide
aggaatctctttgccgggtcatgcgtgtat

SEQ ID NO: 155281 - DNA, 30 bp, Artificial Sequence
  Synthetic oligonucleotide
tccaatagtgaaaagtagcgcctcgtgtat

SEQ ID NO: 155282 - DNA, 30 bp, Artificial Sequence
  Synthetic oligonucleotide
aggatcacgacaacacaagactcggtgtat

SEQ ID NO: 155283 - DNA, 30 bp, Artificial Sequence
  Synthetic oligonucleotide
cagtcggagagtagtcagagtcgggtgtat

SEQ ID NO: 155284 - DNA, 30 bp, Artificial Sequence
  Synthetic oligonucleotide
tcttatctgttgtgttttcctctggtgtat

SEQ ID NO: 155285 - DNA, 30 bp, Artificial Sequence
  Synthetic oligonucleotide
attcctgcgatgaggtatagaacattgtat

SEQ ID NO: 155286 - DNA, 30 bp, Artificial Sequence
  Synthetic oligonucleotide
gttgagggaacatcttgttatgccttgtat

SEQ ID NO: 155287 - DNA, 30 bp, Artificial Sequence
  Synthetic oligonucleotide
cgatggtgggggctcttggtaacgttgtat

SEQ ID NO: 155288 - DNA, 30 bp, Artificial Sequence
  Synthetic oligonucleotide
ggctcgaaatcgcaggattgcccgttgtat

SEQ ID NO: 155289 - DNA, 30 bp, Artificial Sequence
  Synthetic oligonucleotide
taaatgggaagggattgtggccagaattat

SEQ ID NO: 155290 - DNA, 30 bp, Artificial Sequence
  Synthetic oligonucleotide
agagtggggcattgaaacgatagtaattat

SEQ ID NO: 155291 - DNA, 30 bp, Artificial Sequence
  Synthetic oligonucleotide
acctgctatcgataagtaagatagcattat

SEQ ID NO: 155292 - DNA, 30 bp, Artificial Sequence
  Synthetic oligonucleotide
caggcgacgaattcgagttgcctgcattat

SEQ ID NO: 155293 - DNA, 30 bp, Artificial Sequence
  Synthetic oligonucleotide
ttaagatactcacgagtcgggctgcattat

SEQ ID NO: 155294 - DNA, 30 bp, Artificial Sequence
  Synthetic oligonucleotide
caactgcacactgtcatctagagtcattat

SEQ ID NO: 155295 - DNA, 30 bp, Artificial Sequence
  Synthetic oligonucleotide
agacagagttggttattaagtcaaacttat

SEQ ID NO: 155296 - DNA, 30 bp, Artificial Sequence
  Synthetic oligonucleotide
atcacacacgtagatagaggaccgacttat

SEQ ID NO: 155297 - DNA, 30 bp, Artificial Sequence
  Synthetic oligonucleotide
aactacgccacaatgaggttatcgacttat

SEQ ID NO: 155298 - DNA, 30 bp, Artificial Sequence
  Synthetic oligonucleotide
cagaattatgctacaaggaaccgaccttat

SEQ ID NO: 155299 - DNA, 30 bp, Artificial Sequence
  Synthetic oligonucleotide
tccaaagtagcacagtgccgtaccccttat

SEQ ID NO: 155300 - DNA, 30 bp, Artificial Sequence
  Synthetic oligonucleotide
tcgacaagctgcaaacaaagacaagcttat

SEQ ID NO: 155301 - DNA, 30 bp, Artificial Sequence
  Synthetic oligonucleotide
acggtgctatctagtgtcaaccccgcttat

SEQ ID NO: 155302 - DNA, 30 bp, Artificial Sequence
  Synthetic oligonucleotide
ttggtgcaacgaaaccccctgtaggcttat

SEQ ID NO: 155303 - DNA, 30 bp, Artificial Sequence
  Synthetic oligonucleotide
ttaaatacaacggacgaaacctactcttat

SEQ ID NO: 155304 - DNA, 30 bp, Artificial Sequence
  Synthetic oligonucleotide
gggaagcgacatgtcctgaaatagtcttat

SEQ ID NO: 155305 - DNA, 30 bp, Artificial Sequence
  Synthetic oligonucleotide
ccacagtttcgactgttagagatgtcttat

SEQ ID NO: 155306 - DNA, 30 bp, Artificial Sequence
  Synthetic oligonucleotide
ccaggttagctagagggtgattattcttat

SEQ ID NO: 155307 - DNA, 30 bp, Artificial Sequence
  Synthetic oligonucleotide
aggtagcgtcgatcacctgagataagttat

SEQ ID NO: 155308 - DNA, 30 bp, Artificial Sequence
  Synthetic oligonucleotide
caggaggatattttgctgagcttaagttat

SEQ ID NO: 155309 - DNA, 30 bp, Artificial Sequence
  Synthetic oligonucleotide
gtctgagggcggcgtggtaccgcgagttat

SEQ ID NO: 155310 - DNA, 30 bp, Artificial Sequence
  Synthetic oligonucleotide
acgaccttgccgatcgaacggtgacgttat

SEQ ID NO: 155311 - DNA, 30 bp, Artificial Sequence
  Synthetic oligonucleotide
atgcgaaaaggcctcgtccaagggcgttat

SEQ ID NO: 155312 - DNA, 30 bp, Artificial Sequence
  Synthetic oligonucleotide
tggattcaagtgtaatgctcttttcgttat

SEQ ID NO: 155313 - DNA, 30 bp, Artificial Sequence
  Synthetic oligonucleotide
cgcgctggatacggaacgactccaggttat

SEQ ID NO: 155314 - DNA, 30 bp, Artificial Sequence
  Synthetic oligonucleotide
acgcctgggtgtgacacaaatcccggttat

SEQ ID NO: 155315 - DNA, 30 bp, Artificial Sequence
  Synthetic oligonucleotide
attgggcgggggacatgagtcaggggttat

SEQ ID NO: 155316 - DNA, 30 bp, Artificial Sequence
  Synthetic oligonucleotide
agagccaatatagttgcagagaatggttat

SEQ ID NO: 155317 - DNA, 30 bp, Artificial Sequence
  Synthetic oligonucleotide
acgcccaaaaatgagttggggaaatgttat

SEQ ID NO: 155318 - DNA, 30 bp, Artificial Sequence
  Synthetic oligonucleotide
cggggcgagatgggattttagcaatgttat

SEQ ID NO: 155319 - DNA, 30 bp, Artificial Sequence
  Synthetic oligonucleotide
tcggatggtaactgcaaatgaagatgttat

SEQ ID NO: 155320 - DNA, 30 bp, Artificial Sequence
  Synthetic oligonucleotide
aggccgcgtggcagcagctttggctgttat

SEQ ID NO: 155321 - DNA, 30 bp, Artificial Sequence
  Synthetic oligonucleotide
aatagcataacggtaagtacaagcatttat

SEQ ID NO: 155322 - DNA, 30 bp, Artificial Sequence
  Synthetic oligonucleotide
agcgtagatgcttaggaagcaacactttat

SEQ ID NO: 155323 - DNA, 30 bp, Artificial Sequence
  Synthetic oligonucleotide
catcaacgcggatgtcgctctcacgtttat

SEQ ID NO: 155324 - DNA, 30 bp, Artificial Sequence
  Synthetic oligonucleotide
actgctaagggcgagatgatattcgtttat

SEQ ID NO: 155325 - DNA, 30 bp, Artificial Sequence
  Synthetic oligonucleotide
ggaagaactatcaagaggaacgaggtttat

SEQ ID NO: 155326 - DNA, 30 bp, Artificial Sequence
  Synthetic oligonucleotide
atttcggcacaacaaaggtacgaggtttat

SEQ ID NO: 155327 - DNA, 30 bp, Artificial Sequence
  Synthetic oligonucleotide
cgagcgcgacgaggggtcgaaaaattttat

SEQ ID NO: 155328 - DNA, 30 bp, Artificial Sequence
  Synthetic oligonucleotide
cggtatgggttgaaaggaatgaaattttat

SEQ ID NO: 155329 - DNA, 30 bp, Artificial Sequence
  Synthetic oligonucleotide
ggtaaatgacctcattcctaattattttat

SEQ ID NO: 155330 - DNA, 30 bp, Artificial Sequence
  Synthetic oligonucleotide
aggtaagtcccaagttaatgtgcgttttat

SEQ ID NO: 155331 - DNA, 30 bp, Artificial Sequence
  Synthetic oligonucleotide
ggtggtaagctggcatatatggataaaact

SEQ ID NO: 155332 - DNA, 30 bp, Artificial Sequence
  Synthetic oligonucleotide
ttaggggtcgctgtttgccggattaaaact

SEQ ID NO: 155333 - DNA, 30 bp, Artificial Sequence
  Synthetic oligonucleotide
cagctggtacggcggatgcgtgtacaaact

SEQ ID NO: 155334 - DNA, 30 bp, Artificial Sequence
  Synthetic oligonucleotide
agctgaggtgcttaaacagttcagcaaact

SEQ ID NO: 155335 - DNA, 30 bp, Artificial Sequence
  Synthetic oligonucleotide
tatggcaggggtttcctgcctgcgcaaact

SEQ ID NO: 155336 - DNA, 30 bp, Artificial Sequence
  Synthetic oligonucleotide
cgcgcactaattggtctggtcaatcaaact

SEQ ID NO: 155337 - DNA, 30 bp, Artificial Sequence
  Synthetic oligonucleotide
aaggagtctggacgtctaaaactagaaact

SEQ ID NO: 155338 - DNA, 30 bp, Artificial Sequence
  Synthetic oligonucleotide
taggatgctggagatcaacatatcgaaact

SEQ ID NO: 155339 - DNA, 30 bp, Artificial Sequence
  Synthetic oligonucleotide
actaactcaagtaatactcggttcgaaact

SEQ ID NO: 155340 - DNA, 30 bp, Artificial Sequence
  Synthetic oligonucleotide
ggccccagacccgtgattagtacataaact

SEQ ID NO: 155341 - DNA, 30 bp, Artificial Sequence
  Synthetic oligonucleotide
atgctgagaatgcgcgtgacgtactaaact

SEQ ID NO: 155342 - DNA, 30 bp, Artificial Sequence
  Synthetic oligonucleotide
ccggaaaaagtgactggccaacagtaaact

SEQ ID NO: 155343 - DNA, 30 bp, Artificial Sequence
  Synthetic oligonucleotide
caagaaatagtcgtgacgaggaggtaaact

SEQ ID NO: 155344 - DNA, 29 bp, Artificial Sequence
  Synthetic oligonucleotide
tatgggtaagaatcggaatatcaacaact

SEQ ID NO: 155345 - DNA, 30 bp, Artificial Sequence
  Synthetic oligonucleotide
cgaaaggcgtctaataatgcgcatacaact

SEQ ID NO: 155346 - DNA, 30 bp, Artificial Sequence
  Synthetic oligonucleotide
aggaccaaaggggaggttctggaaccaact

SEQ ID NO: 155347 - DNA, 30 bp, Artificial Sequence
  Synthetic oligonucleotide
tacaacagtggggcggcgtgtaggccaact

SEQ ID NO: 155348 - DNA, 30 bp, Artificial Sequence
  Synthetic oligonucleotide
ttctcaagatatcatacaagatctccaact

SEQ ID NO: 155349 - DNA, 30 bp, Artificial Sequence
  Synthetic oligonucleotide
cggttagcgtgccgttatttacttccaact

SEQ ID NO: 155350 - DNA, 30 bp, Artificial Sequence
  Synthetic oligonucleotide
gcaccgaactagaaaggggttctcgcaact

SEQ ID NO: 155351 - DNA, 30 bp, Artificial Sequence
  Synthetic oligonucleotide
attcgactgtttacggttactacggcaact

SEQ ID NO: 155352 - DNA, 30 bp, Artificial Sequence
  Synthetic oligonucleotide
gaagagggaaccccctggccgtgatcaact

SEQ ID NO: 155353 - DNA, 30 bp, Artificial Sequence
  Synthetic oligonucleotide
ttacaatacattaaaccgatgaactcaact

SEQ ID NO: 155354 - DNA, 30 bp, Artificial Sequence
  Synthetic oligonucleotide
ataataatggtaccgtccgcgtagtcaact

SEQ ID NO: 155355 - DNA, 30 bp, Artificial Sequence
  Synthetic oligonucleotide
accactatgtaattgcccgagaggtcaact

SEQ ID NO: 155356 - DNA, 30 bp, Artificial Sequence
  Synthetic oligonucleotide
ggtaaagtagcggcattggatatgtcaact

SEQ ID NO: 155357 - DNA, 30 bp, Artificial Sequence
  Synthetic oligonucleotide
agatgtaaatacggccaggcaacttcaact

SEQ ID NO: 155358 - DNA, 30 bp, Artificial Sequence
  Synthetic oligonucleotide
atcatcatgctttaagttaaaacgagaact

SEQ ID NO: 155359 - DNA, 30 bp, Artificial Sequence
  Synthetic oligonucleotide
tgcgatacaacacgtttgtatgatagaact

SEQ ID NO: 155360 - DNA, 30 bp, Artificial Sequence
  Synthetic oligonucleotide
gtgacttaagggtgtccttggtatagaact

SEQ ID NO: 155361 - DNA, 30 bp, Artificial Sequence
  Synthetic oligonucleotide
gggctttgcgcggttgggtttactagaact

SEQ ID NO: 155362 - DNA, 30 bp, Artificial Sequence
  Synthetic oligonucleotide
cacttgcgttcgaatacaaccgctagaact

SEQ ID NO: 155363 - DNA, 30 bp, Artificial Sequence
  Synthetic oligonucleotide
cgactttcaacagaagacgctagtagaact

SEQ ID NO: 155364 - DNA, 30 bp, Artificial Sequence
  Synthetic oligonucleotide
caaaagagcgaatatgccaagcagcgaact

SEQ ID NO: 155365 - DNA, 30 bp, Artificial Sequence
  Synthetic oligonucleotide
ctagatgtcgagacggactgaacgcgaact

SEQ ID NO: 155366 - DNA, 30 bp, Artificial Sequence
  Synthetic oligonucleotide
gcaggaaaagccaattgagatgttcgaact

SEQ ID NO: 155367 - DNA, 30 bp, Artificial Sequence
  Synthetic oligonucleotide
gcgtggaaggggaaaatagtaaccggaact

SEQ ID NO: 155368 - DNA, 30 bp, Artificial Sequence
  Synthetic oligonucleotide
ggtaaatgtcactactatgaatagggaact

SEQ ID NO: 155369 - DNA, 30 bp, Artificial Sequence
  Synthetic oligonucleotide
accatgaagccaaggtctacccctggaact

SEQ ID NO: 155370 - DNA, 30 bp, Artificial Sequence
  Synthetic oligonucleotide
cgaggctatacaaatagatgccgtggaact

SEQ ID NO: 155371 - DNA, 30 bp, Artificial Sequence
  Synthetic oligonucleotide
ctacgatacttgtacatgttatgttgaact

SEQ ID NO: 155372 - DNA, 30 bp, Artificial Sequence
  Synthetic oligonucleotide
taggggtattgattgctagattgttgaact

SEQ ID NO: 155373 - DNA, 30 bp, Artificial Sequence
  Synthetic oligonucleotide
cacaggagactatcgcttgacatttgaact

SEQ ID NO: 155374 - DNA, 30 bp, Artificial Sequence
  Synthetic oligonucleotide
cagtaaaaaatgcattcagcaccgataact

SEQ ID NO: 155375 - DNA, 30 bp, Artificial Sequence
  Synthetic oligonucleotide
gattgagtaatttcgagaggagccctaact

SEQ ID NO: 155376 - DNA, 30 bp, Artificial Sequence
  Synthetic oligonucleotide
aatcgtctgaaataaacatggagcctaact

SEQ ID NO: 155377 - DNA, 30 bp, Artificial Sequence
  Synthetic oligonucleotide
gatagcccaatgagcccgttgaagctaact

SEQ ID NO: 155378 - DNA, 30 bp, Artificial Sequence
  Synthetic oligonucleotide
taacgtaagttcgggtttgtgtgtctaact

SEQ ID NO: 155379 - DNA, 30 bp, Artificial Sequence
  Synthetic oligonucleotide
ggtatgggccgggtcccagaaaaagtaact

SEQ ID NO: 155380 - DNA, 30 bp, Artificial Sequence
  Synthetic oligonucleotide
ttaaagtgatagcaagatagacaagtaact

SEQ ID NO: 155381 - DNA, 30 bp, Artificial Sequence
  Synthetic oligonucleotide
aatcattgccacacctgaaatctggtaact

SEQ ID NO: 155382 - DNA, 30 bp, Artificial Sequence
  Synthetic oligonucleotide
agaagaggacggtcttgcagcttggtaact

SEQ ID NO: 155383 - DNA, 30 bp, Artificial Sequence
  Synthetic oligonucleotide
gtggtagagacttgcggaggaaaattaact

SEQ ID NO: 155384 - DNA, 30 bp, Artificial Sequence
  Synthetic oligonucleotide
caacggattcccgacactgtggaattaact

SEQ ID NO: 155385 - DNA, 30 bp, Artificial Sequence
  Synthetic oligonucleotide
gccgagatgcccgcggaataatcgttaact

SEQ ID NO: 155386 - DNA, 30 bp, Artificial Sequence
  Synthetic oligonucleotide
cgggtaaaggtaaatgcgcatgatttaact

SEQ ID NO: 155387 - DNA, 30 bp, Artificial Sequence
  Synthetic oligonucleotide
agggctctacgaggagtgccatgtttaact

SEQ ID NO: 155388 - DNA, 30 bp, Artificial Sequence
  Synthetic oligonucleotide
ccccgacatcggggcgttgcttcgaacact

SEQ ID NO: 155389 - DNA, 30 bp, Artificial Sequence
  Synthetic oligonucleotide
gggttaagtacccgtgccctccagcacact

SEQ ID NO: 155390 - DNA, 30 bp, Artificial Sequence
  Synthetic oligonucleotide
ctgacgtacaggtgcgacccgcagcacact

SEQ ID NO: 155391 - DNA, 30 bp, Artificial Sequence
  Synthetic oligonucleotide
gtgtcatgcggacttccttgaccagacact

SEQ ID NO: 155392 - DNA, 30 bp, Artificial Sequence
  Synthetic oligonucleotide
ggagtaaatctcctagtgggtcgggacact

SEQ ID NO: 155393 - DNA, 30 bp, Artificial Sequence
  Synthetic oligonucleotide
tgtagtcccaaaatgcagatgcaatacact

SEQ ID NO: 155394 - DNA, 30 bp, Artificial Sequence
  Synthetic oligonucleotide
cagttatgggcgttagtagcggaatacact

SEQ ID NO: 155395 - DNA, 30 bp, Artificial Sequence
  Synthetic oligonucleotide
atgaagtgtatgtatggacgataatacact

SEQ ID NO: 155396 - DNA, 30 bp, Artificial Sequence
  Synthetic oligonucleotide
caagtcaacgagatttagctgcactacact

SEQ ID NO: 155397 - DNA, 30 bp, Artificial Sequence
  Synthetic oligonucleotide
catggcactccacccacgaggcattacact

SEQ ID NO: 155398 - DNA, 30 bp, Artificial Sequence
  Synthetic oligonucleotide
aaatgggagctccgccccaagataaccact

SEQ ID NO: 155399 - DNA, 30 bp, Artificial Sequence
  Synthetic oligonucleotide
aataccatgtatgctcagaacgagaccact

SEQ ID NO: 155400 - DNA, 30 bp, Artificial Sequence
  Synthetic oligonucleotide
cgttcagaggagttccgaaacgcacccact

SEQ ID NO: 155401 - DNA, 30 bp, Artificial Sequence
  Synthetic oligonucleotide
gcgaggatacctttctacgaagtccccact

SEQ ID NO: 155402 - DNA, 30 bp, Artificial Sequence
  Synthetic oligonucleotide
cagggaacgggggactactcggagcccact

SEQ ID NO: 155403 - DNA, 30 bp, Artificial Sequence
  Synthetic oligonucleotide
ctttgcagggcatccaagaatcatcccact

SEQ ID NO: 155404 - DNA, 30 bp, Artificial Sequence
  Synthetic oligonucleotide
aatcggggataggtgcgcgtccttcccact

SEQ ID NO: 155405 - DNA, 30 bp, Artificial Sequence
  Synthetic oligonucleotide
acgggtatgtgctgaaacgatcttcccact

SEQ ID NO: 155406 - DNA, 30 bp, Artificial Sequence
  Synthetic oligonucleotide
tcggcagtcttagatgatttacgcgccact

SEQ ID NO: 155407 - DNA, 30 bp, Artificial Sequence
  Synthetic oligonucleotide
gagaaatgtcggtgggatactatggccact

SEQ ID NO: 155408 - DNA, 30 bp, Artificial Sequence
  Synthetic oligonucleotide
ataacgaccaacttacaacgtactgccact

SEQ ID NO: 155409 - DNA, 30 bp, Artificial Sequence
  Synthetic oligonucleotide
ctggttgagcgaaattgtcggacatccact

SEQ ID NO: 155410 - DNA, 30 bp, Artificial Sequence
  Synthetic oligonucleotide
aggacaatgttactctagccatcatccact

SEQ ID NO: 155411 - DNA, 30 bp, Artificial Sequence
  Synthetic oligonucleotide
cagggtgtgctataaggcacgcgatccact

SEQ ID NO: 155412 - DNA, 30 bp, Artificial Sequence
  Synthetic oligonucleotide
gcaacgttgctgggtgcttcaatctccact

SEQ ID NO: 155413 - DNA, 30 bp, Artificial Sequence
  Synthetic oligonucleotide
gaggcgagtgtaatgcgctccgggtccact

SEQ ID NO: 155414 - DNA, 30 bp, Artificial Sequence
  Synthetic oligonucleotide
caccctcaatgaaaaggtggagcttccact

SEQ ID NO: 155415 - DNA, 30 bp, Artificial Sequence
  Synthetic oligonucleotide
aggattgaatgatggcatatgaagcgcact

SEQ ID NO: 155416 - DNA, 30 bp, Artificial Sequence
  Synthetic oligonucleotide
gccagagtaaacagggaccatagaggcact

SEQ ID NO: 155417 - DNA, 30 bp, Artificial Sequence
  Synthetic oligonucleotide
cagaaggtagacaagccttttagcggcact

SEQ ID NO: 155418 - DNA, 30 bp, Artificial Sequence
  Synthetic oligonucleotide
tgtgaaggtggtttggtcgaaaagggcact

SEQ ID NO: 155419 - DNA, 30 bp, Artificial Sequence
  Synthetic oligonucleotide
tgggaggatttgggctagtcaacgtgcact

SEQ ID NO: 155420 - DNA, 30 bp, Artificial Sequence
  Synthetic oligonucleotide
gtaactccacgttgggctaaatcttgcact

SEQ ID NO: 155421 - DNA, 30 bp, Artificial Sequence
  Synthetic oligonucleotide
aggttcaagctgtgagcattggcaatcact

SEQ ID NO: 155422 - DNA, 30 bp, Artificial Sequence
  Synthetic oligonucleotide
gtgggcaccaggaacctaattcgaatcact

SEQ ID NO: 155423 - DNA, 30 bp, Artificial Sequence
  Synthetic oligonucleotide
cacagggtcacacacgttcctgctatcact

SEQ ID NO: 155424 - DNA, 31 bp, Artificial Sequence
  Synthetic oligonucleotide
tacagctccatggagtggataccgcctcact

SEQ ID NO: 155425 - DNA, 30 bp, Artificial Sequence
  Synthetic oligonucleotide
cgtcgtgcgggcggggagcagatagtcact

SEQ ID NO: 155426 - DNA, 30 bp, Artificial Sequence
  Synthetic oligonucleotide
gcgcgatcctggcaaagagttcaggtcact

SEQ ID NO: 155427 - DNA, 30 bp, Artificial Sequence
  Synthetic oligonucleotide
cgatccagggaattatggcgctaggtcact

SEQ ID NO: 155428 - DNA, 30 bp, Artificial Sequence
  Synthetic oligonucleotide
accagaatcgagctttgtgtccccttcact

SEQ ID NO: 155429 - DNA, 30 bp, Artificial Sequence
  Synthetic oligonucleotide
aaactgacgggtcacgattaggggttcact

SEQ ID NO: 155430 - DNA, 30 bp, Artificial Sequence
  Synthetic oligonucleotide
cgcacgacatcaaatgccgatagaaagact

SEQ ID NO: 155431 - DNA, 30 bp, Artificial Sequence
  Synthetic oligonucleotide
tcgagccgatttaacatacggtagaagact

SEQ ID NO: 155432 - DNA, 30 bp, Artificial Sequence
  Synthetic oligonucleotide
tatagacgaataagtaattaagctaagact

SEQ ID NO: 155433 - DNA, 30 bp, Artificial Sequence
  Synthetic oligonucleotide
agcttcaattcttggatacgatgtaagact

SEQ ID NO: 155434 - DNA, 30 bp, Artificial Sequence
  Synthetic oligonucleotide
gaagtcgcctggagattagctagacagact

SEQ ID NO: 155435 - DNA, 30 bp, Artificial Sequence
  Synthetic oligonucleotide
ggcaggcaacatcgtctttgagagcagact

SEQ ID NO: 155436 - DNA, 30 bp, Artificial Sequence
  Synthetic oligonucleotide
gccgtaggactatccgcccaaatgcagact

SEQ ID NO: 155437 - DNA, 30 bp, Artificial Sequence
  Synthetic oligonucleotide
gtgcatcctataacctaagagaaagagact

SEQ ID NO: 155438 - DNA, 30 bp, Artificial Sequence
  Synthetic oligonucleotide
tggctggacgtgaggaaaagcggagagact

SEQ ID NO: 155439 - DNA, 30 bp, Artificial Sequence
  Synthetic oligonucleotide
accaatatccggcccccgcaagacgagact

SEQ ID NO: 155440 - DNA, 30 bp, Artificial Sequence
  Synthetic oligonucleotide
ccaggaaatggttagggtaccccctagact

SEQ ID NO: 155441 - DNA, 30 bp, Artificial Sequence
  Synthetic oligonucleotide
aggcaactgttctcgcgcgggagctagact

SEQ ID NO: 155442 - DNA, 30 bp, Artificial Sequence
  Synthetic oligonucleotide
tatgcgtactcgtaaagtgctcgctagact

SEQ ID NO: 155443 - DNA, 30 bp, Artificial Sequence
  Synthetic oligonucleotide
agacgcactctctccgggataaggtagact

SEQ ID NO: 155444 - DNA, 30 bp, Artificial Sequence
  Synthetic oligonucleotide
atattatcacgcgaggtaacctacacgact

SEQ ID NO: 155445 - DNA, 30 bp, Artificial Sequence
  Synthetic oligonucleotide
ggagtcacggacactctgaatgcgccgact

SEQ ID NO: 155446 - DNA, 30 bp, Artificial Sequence
  Synthetic oligonucleotide
ttggtgtcctggtcgggaggaaggccgact

SEQ ID NO: 155447 - DNA, 30 bp, Artificial Sequence
  Synthetic oligonucleotide
gggaccacatcgccgagtcagaacgcgact

SEQ ID NO: 155448 - DNA, 30 bp, Artificial Sequence
  Synthetic oligonucleotide
ggactcttaggctcgggactgaacgcgact

SEQ ID NO: 155449 - DNA, 30 bp, Artificial Sequence
  Synthetic oligonucleotide
aaaacagagagaagcaaattcgccgcgact

SEQ ID NO: 155450 - DNA, 30 bp, Artificial Sequence
  Synthetic oligonucleotide
actggtcacaaggactaaacactggcgact

SEQ ID NO: 155451 - DNA, 30 bp, Artificial Sequence
  Synthetic oligonucleotide
cacgaaacggtgaacactgagagtgcgact

SEQ ID NO: 155452 - DNA, 30 bp, Artificial Sequence
  Synthetic oligonucleotide
tagagccggtgattcgataccagctcgact

SEQ ID NO: 155453 - DNA, 30 bp, Artificial Sequence
  Synthetic oligonucleotide
cttcggaaccataacactaaggagtcgact

SEQ ID NO: 155454 - DNA, 30 bp, Artificial Sequence
  Synthetic oligonucleotide
tgggtcgggctgtcgcgatgatattcgact

SEQ ID NO: 155455 - DNA, 30 bp, Artificial Sequence
  Synthetic oligonucleotide
ccgacggcatgttctaggccggaaaggact

SEQ ID NO: 155456 - DNA, 30 bp, Artificial Sequence
  Synthetic oligonucleotide
ttggcaacggtaaagaaggttcacaggact

SEQ ID NO: 155457 - DNA, 30 bp, Artificial Sequence
  Synthetic oligonucleotide
aatgcggtagtccggggacgtaataggact

SEQ ID NO: 155458 - DNA, 30 bp, Artificial Sequence
  Synthetic oligonucleotide
gggcatgggacacgagaagcgttgcggact

SEQ ID NO: 155459 - DNA, 30 bp, Artificial Sequence
  Synthetic oligonucleotide
tcaatgaccagggaacctagggaagggact

SEQ ID NO: 155460 - DNA, 30 bp, Artificial Sequence
  Synthetic oligonucleotide
aaaaaggaaacagtgactgttggatggact

SEQ ID NO: 155461 - DNA, 30 bp, Artificial Sequence
  Synthetic oligonucleotide
tccggcattaagacattcccagggctgact

SEQ ID NO: 155462 - DNA, 30 bp, Artificial Sequence
  Synthetic oligonucleotide
atcgaattacagcaattacgcgaagtgact

SEQ ID NO: 155463 - DNA, 30 bp, Artificial Sequence
  Synthetic oligonucleotide
atctactaccgatgtaactactaagtgact

SEQ ID NO: 155464 - DNA, 30 bp, Artificial Sequence
  Synthetic oligonucleotide
gtggttaacgtcggaacaagtggattgact

SEQ ID NO: 155465 - DNA, 30 bp, Artificial Sequence
  Synthetic oligonucleotide
ccacataggtcgataaatttgcagttgact

SEQ ID NO: 155466 - DNA, 30 bp, Artificial Sequence
  Synthetic oligonucleotide
aacaacggatcaggcctgtacactttgact

SEQ ID NO: 155467 - DNA, 30 bp, Artificial Sequence
  Synthetic oligonucleotide
gtaaaactagtcggcgtacgccaaaatact

SEQ ID NO: 155468 - DNA, 30 bp, Artificial Sequence
  Synthetic oligonucleotide
tcggtaagacttaattcgatttgaaatact

SEQ ID NO: 155469 - DNA, 30 bp, Artificial Sequence
  Synthetic oligonucleotide
atggccctaaatgttcgggacgagaatact

SEQ ID NO: 155470 - DNA, 30 bp, Artificial Sequence
  Synthetic oligonucleotide
acgatgagccaccgcgctacgttgaatact

SEQ ID NO: 155471 - DNA, 30 bp, Artificial Sequence
  Synthetic oligonucleotide
ccatcgatgcgggcaggtaggaaacatact

SEQ ID NO: 155472 - DNA, 40 bp, Artificial Sequence
  Synthetic oligonucleotide
tgttaaggtttgagtccgtccatcatcgtccgtacatact

SEQ ID NO: 155473 - DNA, 30 bp, Artificial Sequence
  Synthetic oligonucleotide
cttcaacagtaaggcaagggtagccatact

SEQ ID NO: 155474 - DNA, 30 bp, Artificial Sequence
  Synthetic oligonucleotide
ggcctcggggggccatcagagtccgatact

SEQ ID NO: 155475 - DNA, 30 bp, Artificial Sequence
  Synthetic oligonucleotide
aagcacactacaatggggggtagtgatact

SEQ ID NO: 155476 - DNA, 30 bp, Artificial Sequence
  Synthetic oligonucleotide
tgatgatgggcatttgtaatcatttatact

SEQ ID NO: 155477 - DNA, 30 bp, Artificial Sequence
  Synthetic oligonucleotide
aggaagtctacgagatcaggttaaactact

SEQ ID NO: 155478 - DNA, 30 bp, Artificial Sequence
  Synthetic oligonucleotide
tgcgggtgaagaaatgctagggcaactact

SEQ ID NO: 155479 - DNA, 30 bp, Artificial Sequence
  Synthetic oligonucleotide
tgtgaaagttcatacatatgggacactact

SEQ ID NO: 155480 - DNA, 30 bp, Artificial Sequence
  Synthetic oligonucleotide
acgaattttatattaccagtctacactact

SEQ ID NO: 155481 - DNA, 30 bp, Artificial Sequence
  Synthetic oligonucleotide
gactccaatttaccgttagtgttcactact

SEQ ID NO: 155482 - DNA, 30 bp, Artificial Sequence
  Synthetic oligonucleotide
acgtcagatccaagacttaaccggactact

SEQ ID NO: 155483 - DNA, 30 bp, Artificial Sequence
  Synthetic oligonucleotide
aataacgggatcaaggggggcgttactact

SEQ ID NO: 155484 - DNA, 30 bp, Artificial Sequence
  Synthetic oligonucleotide
tgtagcgaattcaggggatatgcggctact

SEQ ID NO: 155485 - DNA, 30 bp, Artificial Sequence
  Synthetic oligonucleotide
acgtggttattattcattgcgcgggctact

SEQ ID NO: 155486 - DNA, 30 bp, Artificial Sequence
  Synthetic oligonucleotide
tacaccgtgaattcattcaggctggctact

SEQ ID NO: 155487 - DNA, 30 bp, Artificial Sequence
  Synthetic oligonucleotide
gggtaacgcgcgggaacctcagatgctact

SEQ ID NO: 155488 - DNA, 30 bp, Artificial Sequence
  Synthetic oligonucleotide
atatgcaataactccgagaaccctgctact

SEQ ID NO: 155489 - DNA, 30 bp, Artificial Sequence
  Synthetic oligonucleotide
cgtaggcctaggacattaccaatgtctact

SEQ ID NO: 155490 - DNA, 30 bp, Artificial Sequence
  Synthetic oligonucleotide
ttaacgacggtagagggcgccctaagtact

SEQ ID NO: 155491 - DNA, 30 bp, Artificial Sequence
  Synthetic oligonucleotide
gcgggacgcccacagagattaggcagtact

SEQ ID NO: 155492 - DNA, 30 bp, Artificial Sequence
  Synthetic oligonucleotide
taatactggagtgcaatgatgtgcagtact

SEQ ID NO: 155493 - DNA, 30 bp, Artificial Sequence
  Synthetic oligonucleotide
tttagaggactaaatcagctgttccgtact

SEQ ID NO: 155494 - DNA, 30 bp, Artificial Sequence
  Synthetic oligonucleotide
tgtcgtgatattacagactttaagcgtact

SEQ ID NO: 155495 - DNA, 30 bp, Artificial Sequence
  Synthetic oligonucleotide
agcacagtgcttgaattggtgtggcgtact

SEQ ID NO: 155496 - DNA, 30 bp, Artificial Sequence
  Synthetic oligonucleotide
cggtgtatgtggcgctcggctaatcgtact

SEQ ID NO: 155497 - DNA, 30 bp, Artificial Sequence
  Synthetic oligonucleotide
ccaaataatctcctgcttagcaagggtact

SEQ ID NO: 155498 - DNA, 30 bp, Artificial Sequence
  Synthetic oligonucleotide
agatgtgacagggttgattggggtggtact

SEQ ID NO: 155499 - DNA, 30 bp, Artificial Sequence
  Synthetic oligonucleotide
ctgtatttgaggaatcacgttcactgtact

SEQ ID NO: 155500 - DNA, 30 bp, Artificial Sequence
  Synthetic oligonucleotide
aagaaacaatacacgaacagaaattgtact

SEQ ID NO: 155501 - DNA, 30 bp, Artificial Sequence
  Synthetic oligonucleotide
agagcacagtgttacaatgacggaattact

SEQ ID NO: 155502 - DNA, 30 bp, Artificial Sequence
  Synthetic oligonucleotide
tcgcgggctcggtccagttactgcattact

SEQ ID NO: 155503 - DNA, 30 bp, Artificial Sequence
  Synthetic oligonucleotide
ttgtcaagaagaaaattgaccatgattact

SEQ ID NO: 155504 - DNA, 30 bp, Artificial Sequence
  Synthetic oligonucleotide
tcctaaccgttggatcagtaaaaggttact

SEQ ID NO: 155505 - DNA, 30 bp, Artificial Sequence
  Synthetic oligonucleotide
ggcatggagggtctatacctgtgtgttact

SEQ ID NO: 155506 - DNA, 30 bp, Artificial Sequence
  Synthetic oligonucleotide
aaaggtatagactgaataacggttgttact

SEQ ID NO: 155507 - DNA, 30 bp, Artificial Sequence
  Synthetic oligonucleotide
ttgagagtgcaggttggctgtcacaaacct

SEQ ID NO: 155508 - DNA, 30 bp, Artificial Sequence
  Synthetic oligonucleotide
aaggaacgtgttgggactaaacgacaacct

SEQ ID NO: 155509 - DNA, 30 bp, Artificial Sequence
  Synthetic oligonucleotide
gattacagacggcgataaccctagcaacct

SEQ ID NO: 155510 - DNA, 30 bp, Artificial Sequence
  Synthetic oligonucleotide
ggtcacatatgacaggctctagctcaacct

SEQ ID NO: 155511 - DNA, 30 bp, Artificial Sequence
  Synthetic oligonucleotide
ggagcagaacgagttgggcatattcaacct

SEQ ID NO: 155512 - DNA, 30 bp, Artificial Sequence
  Synthetic oligonucleotide
gacggataataagcagtatcctacgaacct

SEQ ID NO: 155513 - DNA, 30 bp, Artificial Sequence
  Synthetic oligonucleotide
ggccgtcggacgaagtgataaaaataacct

SEQ ID NO: 155514 - DNA, 30 bp, Artificial Sequence
  Synthetic oligonucleotide
atcagtgaacttggctatgcgacaccacct

SEQ ID NO: 155515 - DNA, 30 bp, Artificial Sequence
  Synthetic oligonucleotide
gggcggcatgtgtttatttggcgaccacct

SEQ ID NO: 155516 - DNA, 30 bp, Artificial Sequence
  Synthetic oligonucleotide
gaggcatccgggcggctctgtaatgcacct

SEQ ID NO: 155517 - DNA, 30 bp, Artificial Sequence
  Synthetic oligonucleotide
aacacgaaatggacccattatggcagacct

SEQ ID NO: 155518 - DNA, 30 bp, Artificial Sequence
  Synthetic oligonucleotide
ggtgcaaaaagtctaagagaggttagacct

SEQ ID NO: 155519 - DNA, 30 bp, Artificial Sequence
  Synthetic oligonucleotide
acttgtgtaattatcaaacaaaggcgacct

SEQ ID NO: 155520 - DNA, 30 bp, Artificial Sequence
  Synthetic oligonucleotide
taagtggtactgataggttagccgggacct

SEQ ID NO: 155521 - DNA, 30 bp, Artificial Sequence
  Synthetic oligonucleotide
gacaggccctggatggataacacgtgacct

SEQ ID NO: 155522 - DNA, 30 bp, Artificial Sequence
  Synthetic oligonucleotide
ggacggtgagggcttggtccggcgtgacct

SEQ ID NO: 155523 - DNA, 30 bp, Artificial Sequence
  Synthetic oligonucleotide
aaaagagtgctagaacgggttacttgacct

SEQ ID NO: 155524 - DNA, 30 bp, Artificial Sequence
  Synthetic oligonucleotide
gggtggtaagtcataaagtatatttgacct

SEQ ID NO: 155525 - DNA, 30 bp, Artificial Sequence
  Synthetic oligonucleotide
cctgtagttcagaggatccggaggctacct

SEQ ID NO: 155526 - DNA, 30 bp, Artificial Sequence
  Synthetic oligonucleotide
ttgctgacgtctaaaagacttcttctacct

SEQ ID NO: 155527 - DNA, 30 bp, Artificial Sequence
  Synthetic oligonucleotide
ggccatatagtcagtagaagatagttacct

SEQ ID NO: 155528 - DNA, 30 bp, Artificial Sequence
  Synthetic oligonucleotide
ttactcatcgggtatgttccggggttacct

SEQ ID NO: 155529 - DNA, 30 bp, Artificial Sequence
  Synthetic oligonucleotide
acgtgtattaagcaaacccggaatttacct

SEQ ID NO: 155530 - DNA, 30 bp, Artificial Sequence
  Synthetic oligonucleotide
aatgaaagtagctttcccgaggatttacct

SEQ ID NO: 155531 - DNA, 30 bp, Artificial Sequence
  Synthetic oligonucleotide
atcaagcagaggtgagcagtaagtttacct

SEQ ID NO: 155532 - DNA, 30 bp, Artificial Sequence
  Synthetic oligonucleotide
acttcgcgagataatgtatacacaaaccct

SEQ ID NO: 155533 - DNA, 30 bp, Artificial Sequence
  Synthetic oligonucleotide
gacaggtagctaccgttcctgcccaaccct

SEQ ID NO: 155534 - DNA, 30 bp, Artificial Sequence
  Synthetic oligonucleotide
agagaatgactccggcttaggaggaaccct

SEQ ID NO: 155535 - DNA, 30 bp, Artificial Sequence
  Synthetic oligonucleotide
cttggctaaagaccaatgctgaataaccct

SEQ ID NO: 155536 - DNA, 30 bp, Artificial Sequence
  Synthetic oligonucleotide
ttgcagagcagagcgcagggagaccaccct

SEQ ID NO: 155537 - DNA, 30 bp, Artificial Sequence
  Synthetic oligonucleotide
gcaataatcaaaactagtaaccgtcaccct

SEQ ID NO: 155538 - DNA, 30 bp, Artificial Sequence
  Synthetic oligonucleotide
cgaggttggatagatgagcgtattcaccct

SEQ ID NO: 155539 - DNA, 30 bp, Artificial Sequence
  Synthetic oligonucleotide
caactgttatcatggtcatgcgttcaccct

SEQ ID NO: 155540 - DNA, 30 bp, Artificial Sequence
  Synthetic oligonucleotide
aatgaatacgtccaccgcccccgctaccct

SEQ ID NO: 155541 - DNA, 30 bp, Artificial Sequence
  Synthetic oligonucleotide
ccgatcaccacaggagacgccttctaccct

SEQ ID NO: 155542 - DNA, 30 bp, Artificial Sequence
  Synthetic oligonucleotide
ccaacagaagcactacgtttagccacccct

SEQ ID NO: 155543 - DNA, 30 bp, Artificial Sequence
  Synthetic oligonucleotide
ccggcggtaggacgacatgactcgacccct

SEQ ID NO: 155544 - DNA, 30 bp, Artificial Sequence
  Synthetic oligonucleotide
tcggaataatgtaatccaggagatacccct

SEQ ID NO: 155545 - DNA, 30 bp, Artificial Sequence
  Synthetic oligonucleotide
gcgggggaacgcgacagtaaatctacccct

SEQ ID NO: 155546 - DNA, 30 bp, Artificial Sequence
  Synthetic oligonucleotide
acggtttccaagccacctgtgttgccccct

SEQ ID NO: 155547 - DNA, 30 bp, Artificial Sequence
  Synthetic oligonucleotide
ccaacacattgctagcacatctcaagccct

SEQ ID NO: 155548 - DNA, 30 bp, Artificial Sequence
  Synthetic oligonucleotide
cgccaacatcactttagagaaccccgccct

SEQ ID NO: 155549 - DNA, 30 bp, Artificial Sequence
  Synthetic oligonucleotide
gacaaaccgaaacattgtacgccccgccct

SEQ ID NO: 155550 - DNA, 30 bp, Artificial Sequence
  Synthetic oligonucleotide
acggattcgggcatctccgggattcgccct

SEQ ID NO: 155551 - DNA, 30 bp, Artificial Sequence
  Synthetic oligonucleotide
atatgggcagaatagatttgcatgggccct

SEQ ID NO: 155552 - DNA, 30 bp, Artificial Sequence
  Synthetic oligonucleotide
ccgcgaagaattctcgtgttaacatgccct

SEQ ID NO: 155553 - DNA, 30 bp, Artificial Sequence
  Synthetic oligonucleotide
atgtaccgcaggccccagaagcagtgccct

SEQ ID NO: 155554 - DNA, 29 bp, Artificial Sequence
  Synthetic oligonucleotide
ggcacatcgcccagtgagaaaattgccct

SEQ ID NO: 155555 - DNA, 30 bp, Artificial Sequence
  Synthetic oligonucleotide
gcatgggtgagcccatgtactgagatccct

SEQ ID NO: 155556 - DNA, 30 bp, Artificial Sequence
  Synthetic oligonucleotide
catcggacgagcctgcgactcaagctccct

SEQ ID NO: 155557 - DNA, 30 bp, Artificial Sequence
  Synthetic oligonucleotide
tcccacgtattaacacgttcacaagtccct

SEQ ID NO: 155558 - DNA, 30 bp, Artificial Sequence
  Synthetic oligonucleotide
tgaagggaggcaaatcgatcctgggtccct

SEQ ID NO: 155559 - DNA, 30 bp, Artificial Sequence
  Synthetic oligonucleotide
accgaacatggtgatgattctctgcagcct

SEQ ID NO: 155560 - DNA, 30 bp, Artificial Sequence
  Synthetic oligonucleotide
tcgtgctgaaacggatgtcttcatcagcct

SEQ ID NO: 155561 - DNA, 30 bp, Artificial Sequence
  Synthetic oligonucleotide
cgattgcgtggttagccatcggtcacgcct

SEQ ID NO: 155562 - DNA, 30 bp, Artificial Sequence
  Synthetic oligonucleotide
tcttgatccgtaaaaactgtcaatccgcct

SEQ ID NO: 155563 - DNA, 30 bp, Artificial Sequence
  Synthetic oligonucleotide
gaaggtctcctgttagcacgagatccgcct

SEQ ID NO: 155564 - DNA, 30 bp, Artificial Sequence
  Synthetic oligonucleotide
tccgtcaaacgattcccctcgattccgcct

SEQ ID NO: 155565 - DNA, 30 bp, Artificial Sequence
  Synthetic oligonucleotide
accaatgcagaaatgttggtaagatcgcct

SEQ ID NO: 155566 - DNA, 30 bp, Artificial Sequence
  Synthetic oligonucleotide
attggtcggaagatgactatccctaggcct

SEQ ID NO: 155567 - DNA, 30 bp, Artificial Sequence
  Synthetic oligonucleotide
tgtggaaacggatattctgattctaggcct

SEQ ID NO: 155568 - DNA, 30 bp, Artificial Sequence
  Synthetic oligonucleotide
agaagatgatatccgccttcctgtcggcct

SEQ ID NO: 155569 - DNA, 30 bp, Artificial Sequence
  Synthetic oligonucleotide
gttgtgcggcatatccgctcaatagggcct

SEQ ID NO: 155570 - DNA, 30 bp, Artificial Sequence
  Synthetic oligonucleotide
cgtcccccatcctagcggtaagccgggcct

SEQ ID NO: 155571 - DNA, 30 bp, Artificial Sequence
  Synthetic oligonucleotide
agcaccatgaggatagtgcttgtcgggcct

SEQ ID NO: 155572 - DNA, 31 bp, Artificial Sequence
  Synthetic oligonucleotide
tggacagtatgccagcacaccggtggggcct

SEQ ID NO: 155573 - DNA, 30 bp, Artificial Sequence
  Synthetic oligonucleotide
aagtgggtatggatcgatcggagctggcct

SEQ ID NO: 155574 - DNA, 30 bp, Artificial Sequence
  Synthetic oligonucleotide
taattaggagacgtggaacgtttgtggcct

SEQ ID NO: 155575 - DNA, 30 bp, Artificial Sequence
  Synthetic oligonucleotide
tatgccccccatgtgagccgtgcttggcct

SEQ ID NO: 155576 - DNA, 30 bp, Artificial Sequence
  Synthetic oligonucleotide
agacagttgtatacaacttgtgacatgcct

SEQ ID NO: 155577 - DNA, 30 bp, Artificial Sequence
  Synthetic oligonucleotide
catgagacacgccgcacgttagctatgcct

SEQ ID NO: 155578 - DNA, 30 bp, Artificial Sequence
  Synthetic oligonucleotide
gttccgggtcgaagactgcaagttatgcct

SEQ ID NO: 155579 - DNA, 30 bp, Artificial Sequence
  Synthetic oligonucleotide
aaggtgcggataccctaggccacactgcct

SEQ ID NO: 155580 - DNA, 30 bp, Artificial Sequence
  Synthetic oligonucleotide
gggtcagacgagacggaaaggttgctgcct

SEQ ID NO: 155581 - DNA, 30 bp, Artificial Sequence
  Synthetic oligonucleotide
taggggcggttaaacgaacagtaggtgcct

SEQ ID NO: 155582 - DNA, 30 bp, Artificial Sequence
  Synthetic oligonucleotide
accacataaggacattcacatggtgtgcct

SEQ ID NO: 155583 - DNA, 30 bp, Artificial Sequence
  Synthetic oligonucleotide
tcagagaagatccgggacgtttaaaatcct

SEQ ID NO: 155584 - DNA, 30 bp, Artificial Sequence
  Synthetic oligonucleotide
tccgtgctataacgataccctcgaaatcct

SEQ ID NO: 155585 - DNA, 30 bp, Artificial Sequence
  Synthetic oligonucleotide
cttaagggcatgatcggtattataaatcct

SEQ ID NO: 155586 - DNA, 30 bp, Artificial Sequence
  Synthetic oligonucleotide
cgctgttgttgcggatagaagatgaatcct

SEQ ID NO: 155587 - DNA, 30 bp, Artificial Sequence
  Synthetic oligonucleotide
cgccccggggacgctcgtagaagacatcct

SEQ ID NO: 155588 - DNA, 30 bp, Artificial Sequence
  Synthetic oligonucleotide
cgcgcttactgtgcgtagtttcaccatcct

SEQ ID NO: 155589 - DNA, 30 bp, Artificial Sequence
  Synthetic oligonucleotide
agtagtagattaattatatagcatcatcct

SEQ ID NO: 155590 - DNA, 30 bp, Artificial Sequence
  Synthetic oligonucleotide
aagatacttgagaaagtcgtgttagatcct

SEQ ID NO: 155591 - DNA, 30 bp, Artificial Sequence
  Synthetic oligonucleotide
ttgagacgggctttactatacagtgatcct

SEQ ID NO: 155592 - DNA, 30 bp, Artificial Sequence
  Synthetic oligonucleotide
gcaaataggagtgtgcgggtcggtgatcct

SEQ ID NO: 155593 - DNA, 30 bp, Artificial Sequence
  Synthetic oligonucleotide
aacatgcccgtaatgaatgtatagtatcct

SEQ ID NO: 155594 - DNA, 30 bp, Artificial Sequence
  Synthetic oligonucleotide
gcgcacttgaactacccgcctaggtatcct

SEQ ID NO: 155595 - DNA, 30 bp, Artificial Sequence
  Synthetic oligonucleotide
catagtctgcagatcatagtgcattatcct

SEQ ID NO: 155596 - DNA, 30 bp, Artificial Sequence
  Synthetic oligonucleotide
cttcacaatccacctagctcgggttatcct

SEQ ID NO: 155597 - DNA, 30 bp, Artificial Sequence
  Synthetic oligonucleotide
ctaaggatctgcaagcggtagcccactcct

SEQ ID NO: 155598 - DNA, 30 bp, Artificial Sequence
  Synthetic oligonucleotide
tacatcgcaggcacttggggatggactcct

SEQ ID NO: 155599 - DNA, 30 bp, Artificial Sequence
  Synthetic oligonucleotide
ggcagttcagcctggtataattctgctcct

SEQ ID NO: 155600 - DNA, 30 bp, Artificial Sequence
  Synthetic oligonucleotide
cggaactgtcccatccagctacaaagtcct

SEQ ID NO: 155601 - DNA, 30 bp, Artificial Sequence
  Synthetic oligonucleotide
gtcacaaaaaaacgagcgcacatcagtcct

SEQ ID NO: 155602 - DNA, 30 bp, Artificial Sequence
  Synthetic oligonucleotide
ggagggagcggatagtaggcaaatggtcct

SEQ ID NO: 155603 - DNA, 30 bp, Artificial Sequence
  Synthetic oligonucleotide
ccaatggagcatacgttaaggaatggtcct

SEQ ID NO: 155604 - DNA, 30 bp, Artificial Sequence
  Synthetic oligonucleotide
accatagaaaactaccatcgagtatgtcct

SEQ ID NO: 155605 - DNA, 30 bp, Artificial Sequence
  Synthetic oligonucleotide
agtggccacataacacctaacagagttcct

SEQ ID NO: 155606 - DNA, 30 bp, Artificial Sequence
  Synthetic oligonucleotide
tgggtataagcttctcgaatcaacgttcct

SEQ ID NO: 155607 - DNA, 30 bp, Artificial Sequence
  Synthetic oligonucleotide
accggctaacggatggacgtctttgttcct

SEQ ID NO: 155608 - DNA, 30 bp, Artificial Sequence
  Synthetic oligonucleotide
agtgttgggtttgggacgaccaaaaaagct

SEQ ID NO: 155609 - DNA, 30 bp, Artificial Sequence
  Synthetic oligonucleotide
tggcgacgcatatgaatgtcgacaaaagct

SEQ ID NO: 155610 - DNA, 30 bp, Artificial Sequence
  Synthetic oligonucleotide
aggtaaaaattagtgaaattacgaaaagct

SEQ ID NO: 155611 - DNA, 30 bp, Artificial Sequence
  Synthetic oligonucleotide
ccggacaagaagtgctcgctactaaaagct

SEQ ID NO: 155612 - DNA, 30 bp, Artificial Sequence
  Synthetic oligonucleotide
cgcgtaggaatcttactaatacacaaagct

SEQ ID NO: 155613 - DNA, 30 bp, Artificial Sequence
  Synthetic oligonucleotide
gcacgattataaattataccgatccaagct

SEQ ID NO: 155614 - DNA, 29 bp, Artificial Sequence
  Synthetic oligonucleotide
cacgtgcacaggtactttcgtaagaagct

SEQ ID NO: 155615 - DNA, 30 bp, Artificial Sequence
  Synthetic oligonucleotide
gggttatactcaaacataccgccggaagct

SEQ ID NO: 155616 - DNA, 30 bp, Artificial Sequence
  Synthetic oligonucleotide
gcgcataacgatgccgtaggcccctaagct

SEQ ID NO: 155617 - DNA, 30 bp, Artificial Sequence
  Synthetic oligonucleotide
atgttatacctcgtagcggccgggtaagct

SEQ ID NO: 155618 - DNA, 30 bp, Artificial Sequence
  Synthetic oligonucleotide
tgtgatattgatagagtggcttcttaagct

SEQ ID NO: 155619 - DNA, 30 bp, Artificial Sequence
  Synthetic oligonucleotide
taaggcactggcggaggtttaccaacagct

SEQ ID NO: 155620 - DNA, 30 bp, Artificial Sequence
  Synthetic oligonucleotide
tgggtgccaggacgtgaggttccgacagct

SEQ ID NO: 155621 - DNA, 30 bp, Artificial Sequence
  Synthetic oligonucleotide
caagccgatcgtgccatataatggacagct

SEQ ID NO: 155622 - DNA, 30 bp, Artificial Sequence
  Synthetic oligonucleotide
cgtttaactatatgatatcctagtacagct

SEQ ID NO: 155623 - DNA, 30 bp, Artificial Sequence
  Synthetic oligonucleotide
aagatgtcgaattttctcagtcaatcagct

SEQ ID NO: 155624 - DNA, 30 bp, Artificial Sequence
  Synthetic oligonucleotide
ctacattaaatgtggtctactggatcagct

SEQ ID NO: 155625 - DNA, 30 bp, Artificial Sequence
  Synthetic oligonucleotide
gtgttccgatcttcgaagtgatcctcagct

SEQ ID NO: 155626 - DNA, 30 bp, Artificial Sequence
  Synthetic oligonucleotide
taagtccttgatttcgtgtctgtgtcagct

SEQ ID NO: 155627 - DNA, 30 bp, Artificial Sequence
  Synthetic oligonucleotide
ctatctgaggctcggcgccaattgtcagct

SEQ ID NO: 155628 - DNA, 30 bp, Artificial Sequence
  Synthetic oligonucleotide
ttaaacatagtactcgagtcactttcagct

SEQ ID NO: 155629 - DNA, 30 bp, Artificial Sequence
  Synthetic oligonucleotide
caacacccagagacaccggtcgcaagagct

SEQ ID NO: 155630 - DNA, 30 bp, Artificial Sequence
  Synthetic oligonucleotide
ggggtgacacggggtgacgaaaggagagct

SEQ ID NO: 155631 - DNA, 30 bp, Artificial Sequence
  Synthetic oligonucleotide
gcgaaacccagaagcgtttaagctagagct

SEQ ID NO: 155632 - DNA, 30 bp, Artificial Sequence
  Synthetic oligonucleotide
agagttggtcatccacaaggatgtagagct

SEQ ID NO: 155633 - DNA, 29 bp, Artificial Sequence
  Synthetic oligonucleotide
agtttcttaggctgagagttgcacgagct

SEQ ID NO: 155634 - DNA, 30 bp, Artificial Sequence
  Synthetic oligonucleotide
agatcatgctggggggggccgttacgagct

SEQ ID NO: 155635 - DNA, 30 bp, Artificial Sequence
  Synthetic oligonucleotide
ggggccccttagggattcaaaagaggagct

SEQ ID NO: 155636 - DNA, 30 bp, Artificial Sequence
  Synthetic oligonucleotide
ccaagatagattagtggtcccggaggagct

SEQ ID NO: 155637 - DNA, 30 bp, Artificial Sequence
  Synthetic oligonucleotide
gaaaacagcagcggccggaccaaatgagct

SEQ ID NO: 155638 - DNA, 30 bp, Artificial Sequence
  Synthetic oligonucleotide
ggggcagtcgagagggtccggttatgagct

SEQ ID NO: 155639 - DNA, 30 bp, Artificial Sequence
  Synthetic oligonucleotide
ctgttggtaccgcaaagtgggacctgagct

SEQ ID NO: 155640 - DNA, 30 bp, Artificial Sequence
  Synthetic oligonucleotide
cttcgcgcagcgatccacttgacctgagct

SEQ ID NO: 155641 - DNA, 30 bp, Artificial Sequence
  Synthetic oligonucleotide
tatcgcgatgtagggaagtgttagtgagct

SEQ ID NO: 155642 - DNA, 30 bp, Artificial Sequence
  Synthetic oligonucleotide
ggcatttctgcatcggagtaaaggtgagct

SEQ ID NO: 155643 - DNA, 30 bp, Artificial Sequence
  Synthetic oligonucleotide
cgaaatgttatgcttttgaacatgtgagct

SEQ ID NO: 155644 - DNA, 30 bp, Artificial Sequence
  Synthetic oligonucleotide
atcctcgtgagcgacttaacttgttgagct

SEQ ID NO: 155645 - DNA, 30 bp, Artificial Sequence
  Synthetic oligonucleotide
cagtatccagatgccgagtagtaaatagct

SEQ ID NO: 155646 - DNA, 39 bp, Artificial Sequence
  Synthetic oligonucleotide
ggcttaaaagaagtggcctaaatctgttcctgaatagct

SEQ ID NO: 155647 - DNA, 30 bp, Artificial Sequence
  Synthetic oligonucleotide
ccgtcagcgatgtgggagagtaatatagct

SEQ ID NO: 155648 - DNA, 30 bp, Artificial Sequence
  Synthetic oligonucleotide
agaagagagcctaatatgtggcgtatagct

SEQ ID NO: 155649 - DNA, 30 bp, Artificial Sequence
  Synthetic oligonucleotide
cgtcccaatagccaaggctgcgatctagct

SEQ ID NO: 155650 - DNA, 30 bp, Artificial Sequence
  Synthetic oligonucleotide
agccgtcccaaagacagttgggatctagct

SEQ ID NO: 155651 - DNA, 30 bp, Artificial Sequence
  Synthetic oligonucleotide
ggcgtacagtagctcatatgctccgtagct

SEQ ID NO: 155652 - DNA, 30 bp, Artificial Sequence
  Synthetic oligonucleotide
tctaaaatgggctccaccacacgggtagct

SEQ ID NO: 155653 - DNA, 31 bp, Artificial Sequence
  Synthetic oligonucleotide
tcgcgatctcaacagtcgggctatggtagct

SEQ ID NO: 155654 - DNA, 30 bp, Artificial Sequence
  Synthetic oligonucleotide
tacacgtcagtaacgacagtttccttagct

SEQ ID NO: 155655 - DNA, 30 bp, Artificial Sequence
  Synthetic oligonucleotide
gaggatagtggcctagtattagtcttagct

SEQ ID NO: 155656 - DNA, 30 bp, Artificial Sequence
  Synthetic oligonucleotide
aacggcatatgggcaacagtggatttagct

SEQ ID NO: 155657 - DNA, 30 bp, Artificial Sequence
  Synthetic oligonucleotide
gacagccacctcactcacgagtatttagct

SEQ ID NO: 155658 - DNA, 30 bp, Artificial Sequence
  Synthetic oligonucleotide
aatcacggggggagctagcatcgtaacgct

SEQ ID NO: 155659 - DNA, 30 bp, Artificial Sequence
  Synthetic oligonucleotide
gtaccctaaattggttaagagggtaacgct

SEQ ID NO: 155660 - DNA, 30 bp, Artificial Sequence
  Synthetic oligonucleotide
ccttggatgcggtaatttagctcctacgct

SEQ ID NO: 155661 - DNA, 30 bp, Artificial Sequence
  Synthetic oligonucleotide
tgtgagtactgaggagctttaaaaaccgct

SEQ ID NO: 155662 - DNA, 30 bp, Artificial Sequence
  Synthetic oligonucleotide
gttcatggctgcacattgggggacaccgct

SEQ ID NO: 155663 - DNA, 30 bp, Artificial Sequence
  Synthetic oligonucleotide
taggtcgtaagcaaacctagattgaccgct

SEQ ID NO: 155664 - DNA, 31 bp, Artificial Sequence
  Synthetic oligonucleotide
caaaggctgtcctatagtgtgccgtcccgct

SEQ ID NO: 155665 - DNA, 30 bp, Artificial Sequence
  Synthetic oligonucleotide
aggttcagtgtgactcagttcctagccgct

SEQ ID NO: 155666 - DNA, 30 bp, Artificial Sequence
  Synthetic oligonucleotide
acagggatttacacgggcgcgtgcgccgct

SEQ ID NO: 155667 - DNA, 29 bp, Artificial Sequence
  Synthetic oligonucleotide
cgaatgaatggtccgatgtaccttccgct

SEQ ID NO: 155668 - DNA, 30 bp, Artificial Sequence
  Synthetic oligonucleotide
ggtacgagtatcactccaagataaagcgct

SEQ ID NO: 155669 - DNA, 30 bp, Artificial Sequence
  Synthetic oligonucleotide
ttctgtactgtctaagaagcgagcagcgct

SEQ ID NO: 155670 - DNA, 30 bp, Artificial Sequence
  Synthetic oligonucleotide
agataggcaaagggagctttctagcgcgct

SEQ ID NO: 155671 - DNA, 30 bp, Artificial Sequence
  Synthetic oligonucleotide
cgtgcaaaagctcacatctacagtcgcgct

SEQ ID NO: 155672 - DNA, 30 bp, Artificial Sequence
  Synthetic oligonucleotide
gtacgcttagtccgtatacgaaaaggcgct

SEQ ID NO: 155673 - DNA, 30 bp, Artificial Sequence
  Synthetic oligonucleotide
atagggattgggttggtctaaaacggcgct

SEQ ID NO: 155674 - DNA, 30 bp, Artificial Sequence
  Synthetic oligonucleotide
tccattgtccgctgaccagaaaccggcgct

SEQ ID NO: 155675 - DNA, 30 bp, Artificial Sequence
  Synthetic oligonucleotide
aacggagtctggcacgaacattacatcgct

SEQ ID NO: 155676 - DNA, 30 bp, Artificial Sequence
  Synthetic oligonucleotide
cgtagctttctactaccatcgccactcgct

SEQ ID NO: 155677 - DNA, 30 bp, Artificial Sequence
  Synthetic oligonucleotide
ctaaatgttccttggcccgggcacctcgct

SEQ ID NO: 155678 - DNA, 29 bp, Artificial Sequence
  Synthetic oligonucleotide
agaggtctgctgtagtaatcttgctcgct

SEQ ID NO: 155679 - DNA, 30 bp, Artificial Sequence
  Synthetic oligonucleotide
aaggactgaaaagcacccatcgtattcgct

SEQ ID NO: 155680 - DNA, 30 bp, Artificial Sequence
  Synthetic oligonucleotide
gtcggaggatctggcgtccctaagttcgct

SEQ ID NO: 155681 - DNA, 30 bp, Artificial Sequence
  Synthetic oligonucleotide
ggacgagctccatgcgggtaaccgttcgct

SEQ ID NO: 155682 - DNA, 30 bp, Artificial Sequence
  Synthetic oligonucleotide
catcttagcaggccgtcctggtttttcgct

SEQ ID NO: 155683 - DNA, 30 bp, Artificial Sequence
  Synthetic oligonucleotide
tcctgatcacgggcgatcgtcagaaaggct

SEQ ID NO: 155684 - DNA, 30 bp, Artificial Sequence
  Synthetic oligonucleotide
ccgtcagggattataatcaggagaaaggct

SEQ ID NO: 155685 - DNA, 30 bp, Artificial Sequence
  Synthetic oligonucleotide
attgcccctaaactgagtcaagtaaaggct

SEQ ID NO: 155686 - DNA, 30 bp, Artificial Sequence
  Synthetic oligonucleotide
gagcccccaaaatgttacgataaacaggct

SEQ ID NO: 155687 - DNA, 30 bp, Artificial Sequence
  Synthetic oligonucleotide
tgtggggagggatgcatggagcaacaggct

SEQ ID NO: 155688 - DNA, 30 bp, Artificial Sequence
  Synthetic oligonucleotide
atcaggcttggagaaggaacaggacaggct

SEQ ID NO: 155689 - DNA, 30 bp, Artificial Sequence
  Synthetic oligonucleotide
agccgtcacgtgttgttcttcatacaggct

SEQ ID NO: 155690 - DNA, 30 bp, Artificial Sequence
  Synthetic oligonucleotide
ccgtacccatgtttgcgtacgtaccaggct

SEQ ID NO: 155691 - DNA, 30 bp, Artificial Sequence
  Synthetic oligonucleotide
gtatacgggcatctatcacgcaagcaggct

SEQ ID NO: 155692 - DNA, 30 bp, Artificial Sequence
  Synthetic oligonucleotide
acaaaaaggaaagtgattccgcagcaggct

SEQ ID NO: 155693 - DNA, 30 bp, Artificial Sequence
  Synthetic oligonucleotide
atgggtccatgaaggaccagactcgaggct

SEQ ID NO: 155694 - DNA, 30 bp, Artificial Sequence
  Synthetic oligonucleotide
cgaagtcttcttggaagggtaagggaggct

SEQ ID NO: 155695 - DNA, 30 bp, Artificial Sequence
  Synthetic oligonucleotide
tcgatctgcaaacacagccacagctaggct

SEQ ID NO: 155696 - DNA, 30 bp, Artificial Sequence
  Synthetic oligonucleotide
ggtactgcggaaaagatggctagttaggct

SEQ ID NO: 155697 - DNA, 30 bp, Artificial Sequence
  Synthetic oligonucleotide
taccagggatagtttggacacctaccggct

SEQ ID NO: 155698 - DNA, 30 bp, Artificial Sequence
  Synthetic oligonucleotide
tcctggacgtcttaatctagcccgccggct

SEQ ID NO: 155699 - DNA, 30 bp, Artificial Sequence
  Synthetic oligonucleotide
ggaattaccttacattcaaaaaggccggct

SEQ ID NO: 155700 - DNA, 30 bp, Artificial Sequence
  Synthetic oligonucleotide
tactgtgtactgggtttttcggaagcggct

SEQ ID NO: 155701 - DNA, 30 bp, Artificial Sequence
  Synthetic oligonucleotide
ccttcaaaaacaaattcgtcagatgcggct

SEQ ID NO: 155702 - DNA, 30 bp, Artificial Sequence
  Synthetic oligonucleotide
cggctgtctcggattcccgcgtgtgcggct

SEQ ID NO: 155703 - DNA, 30 bp, Artificial Sequence
  Synthetic oligonucleotide
ggggaatacggccggcgcaagagatcggct

SEQ ID NO: 155704 - DNA, 30 bp, Artificial Sequence
  Synthetic oligonucleotide
agtttggatcaaccgttatgagtttcggct

SEQ ID NO: 155705 - DNA, 30 bp, Artificial Sequence
  Synthetic oligonucleotide
cgcacatagaacgaatattggccaagggct

SEQ ID NO: 155706 - DNA, 30 bp, Artificial Sequence
  Synthetic oligonucleotide
tacggcgaataaaggggcagaagcagggct

SEQ ID NO: 155707 - DNA, 30 bp, Artificial Sequence
  Synthetic oligonucleotide
gcaaaatgacaatctctaagtcagagggct

SEQ ID NO: 155708 - DNA, 30 bp, Artificial Sequence
  Synthetic oligonucleotide
tcgccatgtacagggatagcggatagggct

SEQ ID NO: 155709 - DNA, 30 bp, Artificial Sequence
  Synthetic oligonucleotide
gtgcatgcgcaaccggtcgctgtaggggct

SEQ ID NO: 155710 - DNA, 30 bp, Artificial Sequence
  Synthetic oligonucleotide
tttaagggcagccgtaagagtcacggggct

SEQ ID NO: 155711 - DNA, 30 bp, Artificial Sequence
  Synthetic oligonucleotide
ccaaagagtagcgcgagagtgcgcggggct

SEQ ID NO: 155712 - DNA, 30 bp, Artificial Sequence
  Synthetic oligonucleotide
aacgcgccgtagtagttaagaggtggggct

SEQ ID NO: 155713 - DNA, 30 bp, Artificial Sequence
  Synthetic oligonucleotide
aacagattgatgcccagagacggctgggct

SEQ ID NO: 155714 - DNA, 30 bp, Artificial Sequence
  Synthetic oligonucleotide
ctgtggaggttatctgagattggctgggct

SEQ ID NO: 155715 - DNA, 30 bp, Artificial Sequence
  Synthetic oligonucleotide
gggcgattgagcaggtactctgtcatggct

SEQ ID NO: 155716 - DNA, 30 bp, Artificial Sequence
  Synthetic oligonucleotide
tcgatcctcattgattaaccagagatggct

SEQ ID NO: 155717 - DNA, 30 bp, Artificial Sequence
  Synthetic oligonucleotide
tgtaaacaccactagagcgttccgatggct

SEQ ID NO: 155718 - DNA, 30 bp, Artificial Sequence
  Synthetic oligonucleotide
gtaagaaaaaacaggtccattgaactggct

SEQ ID NO: 155719 - DNA, 30 bp, Artificial Sequence
  Synthetic oligonucleotide
cttcccatagcctcggcaatagtactggct

SEQ ID NO: 155720 - DNA, 30 bp, Artificial Sequence
  Synthetic oligonucleotide
ggctgaaaattatcaagtatttgcctggct

SEQ ID NO: 155721 - DNA, 30 bp, Artificial Sequence
  Synthetic oligonucleotide
agagcatctagtattgctagggggctggct

SEQ ID NO: 155722 - DNA, 30 bp, Artificial Sequence
  Synthetic oligonucleotide
tattaaaacagaaaacagcctcatgtggct

SEQ ID NO: 155723 - DNA, 30 bp, Artificial Sequence
  Synthetic oligonucleotide
cagtattgggtacggattgctcttgtggct

SEQ ID NO: 155724 - DNA, 30 bp, Artificial Sequence
  Synthetic oligonucleotide
atttatggaataaacgtgattgttgtggct

SEQ ID NO: 155725 - DNA, 30 bp, Artificial Sequence
  Synthetic oligonucleotide
agactcaccatcccgttaatacaattggct

SEQ ID NO: 155726 - DNA, 30 bp, Artificial Sequence
  Synthetic oligonucleotide
aagccgtggttggaaccaaacagattggct

SEQ ID NO: 155727 - DNA, 30 bp, Artificial Sequence
  Synthetic oligonucleotide
agcgaccgacacgtgtcgtattgattggct

SEQ ID NO: 155728 - DNA, 30 bp, Artificial Sequence
  Synthetic oligonucleotide
gcttatgcacgggcaatacggaaaaatgct

SEQ ID NO: 155729 - DNA, 30 bp, Artificial Sequence
  Synthetic oligonucleotide
ccagccggaactcgacacgggctaaatgct

SEQ ID NO: 155730 - DNA, 30 bp, Artificial Sequence
  Synthetic oligonucleotide
ggtcgaccacacaataacgggtcgaatgct

SEQ ID NO: 155731 - DNA, 30 bp, Artificial Sequence
  Synthetic oligonucleotide
aagcaatgattagggaagatgggtaatgct

SEQ ID NO: 155732 - DNA, 30 bp, Artificial Sequence
  Synthetic oligonucleotide
ccgaatcgttatgttctccgtgtccatgct

SEQ ID NO: 155733 - DNA, 30 bp, Artificial Sequence
  Synthetic oligonucleotide
actaggaaggacaccagggatccggatgct

SEQ ID NO: 155734 - DNA, 30 bp, Artificial Sequence
  Synthetic oligonucleotide
ggggctaaacttagcattgtgcgatatgct

SEQ ID NO: 155735 - DNA, 30 bp, Artificial Sequence
  Synthetic oligonucleotide
tggacgaggatgagaaggagactacctgct

SEQ ID NO: 155736 - DNA, 30 bp, Artificial Sequence
  Synthetic oligonucleotide
gggactagcgcaatgtattcggagtctgct

SEQ ID NO: 155737 - DNA, 30 bp, Artificial Sequence
  Synthetic oligonucleotide
attaagaacttattgcattccgaacgtgct

SEQ ID NO: 155738 - DNA, 30 bp, Artificial Sequence
  Synthetic oligonucleotide
gaggtatgtaatggtagggagataggtgct

SEQ ID NO: 155739 - DNA, 30 bp, Artificial Sequence
  Synthetic oligonucleotide
ttagagctagtaagcgagctctactgtgct

SEQ ID NO: 155740 - DNA, 30 bp, Artificial Sequence
  Synthetic oligonucleotide
ataaaaggtggtcaggaggttattattgct

SEQ ID NO: 155741 - DNA, 30 bp, Artificial Sequence
  Synthetic oligonucleotide
gctaccaaaatcacaaaaagtcatgttgct

SEQ ID NO: 155742 - DNA, 30 bp, Artificial Sequence
  Synthetic oligonucleotide
cgtcaaatggacccgagggttaagaaatct

SEQ ID NO: 155743 - DNA, 30 bp, Artificial Sequence
  Synthetic oligonucleotide
agggagctgtcgacaggaacgacgaaatct

SEQ ID NO: 155744 - DNA, 29 bp, Artificial Sequence
  Synthetic oligonucleotide
gacgtgaaccgacctagttgaaagaatct

SEQ ID NO: 155745 - DNA, 30 bp, Artificial Sequence
  Synthetic oligonucleotide
tccattgcctacgagagatttgcgtaatct

SEQ ID NO: 155746 - DNA, 30 bp, Artificial Sequence
  Synthetic oligonucleotide
aggggtgttggaacctagtactgcccatct

SEQ ID NO: 155747 - DNA, 30 bp, Artificial Sequence
  Synthetic oligonucleotide
ccagatgaagcacagagaggtctcccatct

SEQ ID NO: 155748 - DNA, 30 bp, Artificial Sequence
  Synthetic oligonucleotide
acggcttggtcacataggctttggccatct

SEQ ID NO: 155749 - DNA, 30 bp, Artificial Sequence
  Synthetic oligonucleotide
tgcttagttccttagctcaggtcagcatct

SEQ ID NO: 155750 - DNA, 31 bp, Artificial Sequence
  Synthetic oligonucleotide
ctaccttaacagaaaccagatcttagcatct

SEQ ID NO: 155751 - DNA, 30 bp, Artificial Sequence
  Synthetic oligonucleotide
tcaggtggttttgtcttgagtaaggcatct

SEQ ID NO: 155752 - DNA, 30 bp, Artificial Sequence
  Synthetic oligonucleotide
ggacttgtttcgttcgaagctcatgcatct

SEQ ID NO: 155753 - DNA, 30 bp, Artificial Sequence
  Synthetic oligonucleotide
ctaaagtaggggcccccgacaaagtcatct

SEQ ID NO: 155754 - DNA, 30 bp, Artificial Sequence
  Synthetic oligonucleotide
acaggctaacgataagacgcccgttcatct

SEQ ID NO: 155755 - DNA, 30 bp, Artificial Sequence
  Synthetic oligonucleotide
aaggatcgtctcaaagtcgcaagaagatct

SEQ ID NO: 155756 - DNA, 30 bp, Artificial Sequence
  Synthetic oligonucleotide
agggttggagtttcgcttgctggcagatct

SEQ ID NO: 155757 - DNA, 30 bp, Artificial Sequence
  Synthetic oligonucleotide
ggaagaaaatgcccgacaacggggagatct

SEQ ID NO: 155758 - DNA, 30 bp, Artificial Sequence
  Synthetic oligonucleotide
cgcgaactaacttcgcttccctcacgatct

SEQ ID NO: 155759 - DNA, 30 bp, Artificial Sequence
  Synthetic oligonucleotide
acaccaaatattcgacgtgcaggtcgatct

SEQ ID NO: 155760 - DNA, 30 bp, Artificial Sequence
  Synthetic oligonucleotide
gtgccaaatccaaatcacgtgaagggatct

SEQ ID NO: 155761 - DNA, 30 bp, Artificial Sequence
  Synthetic oligonucleotide
acgatgcgaggtatggccatgaaatgatct

SEQ ID NO: 155762 - DNA, 30 bp, Artificial Sequence
  Synthetic oligonucleotide
acttccaattggcgtaaggtcgcatgatct

SEQ ID NO: 155763 - DNA, 30 bp, Artificial Sequence
  Synthetic oligonucleotide
gtgcacgcggataatagagaggtatgatct

SEQ ID NO: 155764 - DNA, 30 bp, Artificial Sequence
  Synthetic oligonucleotide
cgagtttaagaatatcctggtctctgatct

SEQ ID NO: 155765 - DNA, 30 bp, Artificial Sequence
  Synthetic oligonucleotide
aacgctagtgccatagtatatgattgatct

SEQ ID NO: 155766 - DNA, 30 bp, Artificial Sequence
  Synthetic oligonucleotide
cagcacggtaatgatgcaaggctttgatct

SEQ ID NO: 155767 - DNA, 30 bp, Artificial Sequence
  Synthetic oligonucleotide
acagtgtgtataatactcgtgaggatatct

SEQ ID NO: 155768 - DNA, 30 bp, Artificial Sequence
  Synthetic oligonucleotide
cagcggcgcgtacacagtaggagactatct

SEQ ID NO: 155769 - DNA, 30 bp, Artificial Sequence
  Synthetic oligonucleotide
tcgggcacggccaaggatagcgcgctatct

SEQ ID NO: 155770 - DNA, 30 bp, Artificial Sequence
  Synthetic oligonucleotide
aggagtaatgaaatcgattgtcaagtatct

SEQ ID NO: 155771 - DNA, 30 bp, Artificial Sequence
  Synthetic oligonucleotide
cgtaacccgactaagataagcttcgtatct

SEQ ID NO: 155772 - DNA, 30 bp, Artificial Sequence
  Synthetic oligonucleotide
aagggtgtcgcacttgagcatgtggtatct

SEQ ID NO: 155773 - DNA, 30 bp, Artificial Sequence
  Synthetic oligonucleotide
ttacatctagtgagactcattacgttatct

SEQ ID NO: 155774 - DNA, 30 bp, Artificial Sequence
  Synthetic oligonucleotide
cgatcatttatccagtggaggatcaactct

SEQ ID NO: 155775 - DNA, 30 bp, Artificial Sequence
  Synthetic oligonucleotide
tacaaacattatgcgtacgagctcaactct

SEQ ID NO: 155776 - DNA, 30 bp, Artificial Sequence
  Synthetic oligonucleotide
cacacaggccgatcatcgctagtcaactct

SEQ ID NO: 155777 - DNA, 30 bp, Artificial Sequence
  Synthetic oligonucleotide
gacaaaggtcagcctaggcactgtaactct

SEQ ID NO: 155778 - DNA, 30 bp, Artificial Sequence
  Synthetic oligonucleotide
atgtgaatgattagtcaatctgcccactct

SEQ ID NO: 155779 - DNA, 30 bp, Artificial Sequence
  Synthetic oligonucleotide
aggattgtatatgatttcataaccgactct

SEQ ID NO: 155780 - DNA, 30 bp, Artificial Sequence
  Synthetic oligonucleotide
gctcaaaatagcacacgggagctgtactct

SEQ ID NO: 155781 - DNA, 30 bp, Artificial Sequence
  Synthetic oligonucleotide
agaatcacgagtggaacgtgcgccacctct

SEQ ID NO: 155782 - DNA, 30 bp, Artificial Sequence
  Synthetic oligonucleotide
taggtagtggggtgtccgacctggacctct

SEQ ID NO: 155783 - DNA, 30 bp, Artificial Sequence
  Synthetic oligonucleotide
ttagaggggatctaatggctatatacctct

SEQ ID NO: 155784 - DNA, 30 bp, Artificial Sequence
  Synthetic oligonucleotide
agttacgataccccgattgccgacccctct

SEQ ID NO: 155785 - DNA, 30 bp, Artificial Sequence
  Synthetic oligonucleotide
acggtataatccggaaggacagtgccctct

SEQ ID NO: 155786 - DNA, 30 bp, Artificial Sequence
  Synthetic oligonucleotide
acctggcgaaacagtcgccagtaagcctct

SEQ ID NO: 155787 - DNA, 30 bp, Artificial Sequence
  Synthetic oligonucleotide
aggcgccacccgctaaggccggaatcctct

SEQ ID NO: 155788 - DNA, 30 bp, Artificial Sequence
  Synthetic oligonucleotide
ggtagtatttagctcttgtgagttagctct

SEQ ID NO: 155789 - DNA, 30 bp, Artificial Sequence
  Synthetic oligonucleotide
acccggcgaaggtagtcgtgcacacgctct

SEQ ID NO: 155790 - DNA, 30 bp, Artificial Sequence
  Synthetic oligonucleotide
ccatcacgttagactagcagttgacgctct

SEQ ID NO: 155791 - DNA, 30 bp, Artificial Sequence
  Synthetic oligonucleotide
gtcttggagtcctacacacccgtgcgctct

SEQ ID NO: 155792 - DNA, 30 bp, Artificial Sequence
  Synthetic oligonucleotide
taataaagggagggcgatggaagaggctct

SEQ ID NO: 155793 - DNA, 30 bp, Artificial Sequence
  Synthetic oligonucleotide
gacataggaatcccgggggtagcatgctct

SEQ ID NO: 155794 - DNA, 30 bp, Artificial Sequence
  Synthetic oligonucleotide
tatcgctacaataccgccgtcacctgctct

SEQ ID NO: 155795 - DNA, 30 bp, Artificial Sequence
  Synthetic oligonucleotide
agatttcatggttggggaactcagtgctct

SEQ ID NO: 155796 - DNA, 30 bp, Artificial Sequence
  Synthetic oligonucleotide
aggaggacgggccgtccgagacaaatctct

SEQ ID NO: 155797 - DNA, 30 bp, Artificial Sequence
  Synthetic oligonucleotide
atctcaccacataacgattatgatatctct

SEQ ID NO: 155798 - DNA, 30 bp, Artificial Sequence
  Synthetic oligonucleotide
catcccgtaggcctctagtacacgctctct

SEQ ID NO: 155799 - DNA, 30 bp, Artificial Sequence
  Synthetic oligonucleotide
cgtgggtgggataaagctggagtggtctct

SEQ ID NO: 155800 - DNA, 30 bp, Artificial Sequence
  Synthetic oligonucleotide
cttttcaatcggaagactaacttattctct

SEQ ID NO: 155801 - DNA, 30 bp, Artificial Sequence
  Synthetic oligonucleotide
tgcctgcgagctggatgagcagaaaagtct

SEQ ID NO: 155802 - DNA, 30 bp, Artificial Sequence
  Synthetic oligonucleotide
agcctcctggaaggggacgagataaagtct

SEQ ID NO: 155803 - DNA, 30 bp, Artificial Sequence
  Synthetic oligonucleotide
gtacgattggtaaagatcactttccagtct

SEQ ID NO: 155804 - DNA, 30 bp, Artificial Sequence
  Synthetic oligonucleotide
ctaaagggtttaaataagtgtaatcagtct

SEQ ID NO: 155805 - DNA, 30 bp, Artificial Sequence
  Synthetic oligonucleotide
gagggatcgtgtgagtaggttctagagtct

SEQ ID NO: 155806 - DNA, 30 bp, Artificial Sequence
  Synthetic oligonucleotide
tcaccacagggaagtcgggcatatgagtct

SEQ ID NO: 155807 - DNA, 31 bp, Artificial Sequence
  Synthetic oligonucleotide
accagggcacgtcctcaaattacctgagtct

SEQ ID NO: 155808 - DNA, 30 bp, Artificial Sequence
  Synthetic oligonucleotide
ctggtgacatagcgtaacttatcgtagtct

SEQ ID NO: 155809 - DNA, 30 bp, Artificial Sequence
  Synthetic oligonucleotide
ccgcgagtagtgccttatgtaaggtagtct

SEQ ID NO: 155810 - DNA, 30 bp, Artificial Sequence
  Synthetic oligonucleotide
tcgcaagccaggtggtcgagaacttagtct

SEQ ID NO: 155811 - DNA, 30 bp, Artificial Sequence
  Synthetic oligonucleotide
caaaagtgtgtatccgtatgcacttagtct

SEQ ID NO: 155812 - DNA, 30 bp, Artificial Sequence
  Synthetic oligonucleotide
ggagctatggacctacccttgcaaacgtct

SEQ ID NO: 155813 - DNA, 30 bp, Artificial Sequence
  Synthetic oligonucleotide
cctaaaccacgtccgtcagtgatcacgtct

SEQ ID NO: 155814 - DNA, 30 bp, Artificial Sequence
  Synthetic oligonucleotide
gggcttgatagtagttcgtttctcccgtct

SEQ ID NO: 155815 - DNA, 30 bp, Artificial Sequence
  Synthetic oligonucleotide
agtgttgcgctcccctggtatgtgccgtct

SEQ ID NO: 155816 - DNA, 30 bp, Artificial Sequence
  Synthetic oligonucleotide
cggctctaatataagagccgccccgcgtct

SEQ ID NO: 155817 - DNA, 30 bp, Artificial Sequence
  Synthetic oligonucleotide
tacgtctgcgtaggacgtaggcaggcgtct

SEQ ID NO: 155818 - DNA, 30 bp, Artificial Sequence
  Synthetic oligonucleotide
tactgttgaacagaacgctatctggcgtct

SEQ ID NO: 155819 - DNA, 30 bp, Artificial Sequence
  Synthetic oligonucleotide
aggtgaggactaacgtttcgcccatcgtct

SEQ ID NO: 155820 - DNA, 30 bp, Artificial Sequence
  Synthetic oligonucleotide
ggcaaccacaggggagttaacggctcgtct

SEQ ID NO: 155821 - DNA, 30 bp, Artificial Sequence
  Synthetic oligonucleotide
tgtccacgctcaataccatgaacgtcgtct

SEQ ID NO: 155822 - DNA, 30 bp, Artificial Sequence
  Synthetic oligonucleotide
ctgccctacggaacgtcctggggaaggtct

SEQ ID NO: 155823 - DNA, 30 bp, Artificial Sequence
  Synthetic oligonucleotide
actacgtggttatcaaagtgttgcaggtct

SEQ ID NO: 155824 - DNA, 30 bp, Artificial Sequence
  Synthetic oligonucleotide
catgtcggcacggcaatgcctatccggtct

SEQ ID NO: 155825 - DNA, 30 bp, Artificial Sequence
  Synthetic oligonucleotide
cctctttgaactttatgggcagagcggtct

SEQ ID NO: 155826 - DNA, 30 bp, Artificial Sequence
  Synthetic oligonucleotide
cagctcgtattctaatctcgcccagggtct

SEQ ID NO: 155827 - DNA, 30 bp, Artificial Sequence
  Synthetic oligonucleotide
agttcgtgagagtgaaaacatccgtggtct

SEQ ID NO: 155828 - DNA, 30 bp, Artificial Sequence
  Synthetic oligonucleotide
tcagcagaaattgacagttgggcgatgtct

SEQ ID NO: 155829 - DNA, 30 bp, Artificial Sequence
  Synthetic oligonucleotide
tatggagtagattgaggggagccactgtct

SEQ ID NO: 155830 - DNA, 30 bp, Artificial Sequence
  Synthetic oligonucleotide
caactacctaacagggttggcgcactgtct

SEQ ID NO: 155831 - DNA, 30 bp, Artificial Sequence
  Synthetic oligonucleotide
ctcgccgcgtgagctcccaaggatctgtct

SEQ ID NO: 155832 - DNA, 30 bp, Artificial Sequence
  Synthetic oligonucleotide
cctcgagtattactaagcactgccgtgtct

SEQ ID NO: 155833 - DNA, 30 bp, Artificial Sequence
  Synthetic oligonucleotide
atcgcatctcgaaagtggcaccttgtgtct

SEQ ID NO: 155834 - DNA, 30 bp, Artificial Sequence
  Synthetic oligonucleotide
cctaatgcctacaacacccggacattgtct

SEQ ID NO: 155835 - DNA, 30 bp, Artificial Sequence
  Synthetic oligonucleotide
agaggcattcaacagtttcaaaatttgtct

SEQ ID NO: 155836 - DNA, 30 bp, Artificial Sequence
  Synthetic oligonucleotide
tgtcaccttgaaataagtggctgtaattct

SEQ ID NO: 155837 - DNA, 30 bp, Artificial Sequence
  Synthetic oligonucleotide
tgtgagctctagacatccgacaaacattct

SEQ ID NO: 155838 - DNA, 30 bp, Artificial Sequence
  Synthetic oligonucleotide
tgcagaccagagtaagagccacctcattct

SEQ ID NO: 155839 - DNA, 30 bp, Artificial Sequence
  Synthetic oligonucleotide
gcttgctatccattacgtttggctcattct

SEQ ID NO: 155840 - DNA, 30 bp, Artificial Sequence
  Synthetic oligonucleotide
tgggaaccgacaaagtgatgcaaagattct

SEQ ID NO: 155841 - DNA, 30 bp, Artificial Sequence
  Synthetic oligonucleotide
cgcacgtagagcgttacaagctcagattct

SEQ ID NO: 155842 - DNA, 30 bp, Artificial Sequence
  Synthetic oligonucleotide
gttaaggccggaacgctagtgattgattct

SEQ ID NO: 155843 - DNA, 30 bp, Artificial Sequence
  Synthetic oligonucleotide
tagcgacgggttaccaggtgagtatattct

SEQ ID NO: 155844 - DNA, 30 bp, Artificial Sequence
  Synthetic oligonucleotide
gcgagcggagcaaacgtacagaactattct

SEQ ID NO: 155845 - DNA, 30 bp, Artificial Sequence
  Synthetic oligonucleotide
ccggaattgctatccgtagacatgccttct

SEQ ID NO: 155846 - DNA, 30 bp, Artificial Sequence
  Synthetic oligonucleotide
ggcccatacagcaggtgcgagtacgcttct

SEQ ID NO: 155847 - DNA, 30 bp, Artificial Sequence
  Synthetic oligonucleotide
actaaggaacgtccgtcgataacggcttct

SEQ ID NO: 155848 - DNA, 30 bp, Artificial Sequence
  Synthetic oligonucleotide
gtaaggaagaaagatcacagcagtgcttct

SEQ ID NO: 155849 - DNA, 30 bp, Artificial Sequence
  Synthetic oligonucleotide
gtggggggcaggcttgcatatggatcttct

SEQ ID NO: 155850 - DNA, 30 bp, Artificial Sequence
  Synthetic oligonucleotide
tgcacgttacgttatagcgtggcccgttct

SEQ ID NO: 155851 - DNA, 30 bp, Artificial Sequence
  Synthetic oligonucleotide
tcgtggggcgtacagatatgcaaaggttct

SEQ ID NO: 155852 - DNA, 30 bp, Artificial Sequence
  Synthetic oligonucleotide
tggtgggttgggataagccgcggtggttct

SEQ ID NO: 155853 - DNA, 30 bp, Artificial Sequence
  Synthetic oligonucleotide
gcggacgacgctctaaaatattcatgttct

SEQ ID NO: 155854 - DNA, 30 bp, Artificial Sequence
  Synthetic oligonucleotide
gccacggccaatgggcgcctacagtgttct

SEQ ID NO: 155855 - DNA, 30 bp, Artificial Sequence
  Synthetic oligonucleotide
atcgctgggtattaggaaagttattgttct

SEQ ID NO: 155856 - DNA, 30 bp, Artificial Sequence
  Synthetic oligonucleotide
tctggcgcaaagtcgatactactcgtttct

SEQ ID NO: 155857 - DNA, 30 bp, Artificial Sequence
  Synthetic oligonucleotide
agagccccagatttagatgatcacaaaagt

SEQ ID NO: 155858 - DNA, 30 bp, Artificial Sequence
  Synthetic oligonucleotide
acgttactcaggagaagtccggtcaaaagt

SEQ ID NO: 155859 - DNA, 30 bp, Artificial Sequence
  Synthetic oligonucleotide
aagaataaagtccgttgcgaggatcaaagt

SEQ ID NO: 155860 - DNA, 30 bp, Artificial Sequence
  Synthetic oligonucleotide
ctatcacaaacttggcactcctaagaaagt

SEQ ID NO: 155861 - DNA, 30 bp, Artificial Sequence
  Synthetic oligonucleotide
atccaggccgagtactcttgctgcgaaagt

SEQ ID NO: 155862 - DNA, 30 bp, Artificial Sequence
  Synthetic oligonucleotide
cgtgtctccatatgtccgatagtcgaaagt

SEQ ID NO: 155863 - DNA, 30 bp, Artificial Sequence
  Synthetic oligonucleotide
cgctcgaaccaaactcgtgatgttgaaagt

SEQ ID NO: 155864 - DNA, 30 bp, Artificial Sequence
  Synthetic oligonucleotide
ttagcggacagtaaatcccggccataaagt

SEQ ID NO: 155865 - DNA, 30 bp, Artificial Sequence
  Synthetic oligonucleotide
ttcgtgtggtgtgagatttagtcataaagt

SEQ ID NO: 155866 - DNA, 30 bp, Artificial Sequence
  Synthetic oligonucleotide
atcgtgcggtattggcccagtatataaagt

SEQ ID NO: 155867 - DNA, 30 bp, Artificial Sequence
  Synthetic oligonucleotide
gactatatcggcgcgatgtaatggtaaagt

SEQ ID NO: 155868 - DNA, 30 bp, Artificial Sequence
  Synthetic oligonucleotide
tgatgtagtatccacaggaaagcttaaagt

SEQ ID NO: 155869 - DNA, 30 bp, Artificial Sequence
  Synthetic oligonucleotide
cgctttgtcccagaaccggtagacacaagt

SEQ ID NO: 155870 - DNA, 30 bp, Artificial Sequence
  Synthetic oligonucleotide
atcatttctctcttgaacagctcgacaagt

SEQ ID NO: 155871 - DNA, 30 bp, Artificial Sequence
  Synthetic oligonucleotide
aacattatagtgcatgtagtagggacaagt

SEQ ID NO: 155872 - DNA, 30 bp, Artificial Sequence
  Synthetic oligonucleotide
atgctcgcaacgccccaaatcgggacaagt

SEQ ID NO: 155873 - DNA, 30 bp, Artificial Sequence
  Synthetic oligonucleotide
caataccgccataaccagggttatacaagt

SEQ ID NO: 155874 - DNA, 30 bp, Artificial Sequence
  Synthetic oligonucleotide
cgtgctggtttgggggaatatgtcgcaagt

SEQ ID NO: 155875 - DNA, 30 bp, Artificial Sequence
  Synthetic oligonucleotide
gttacagtagcatgctgagcgggggcaagt

SEQ ID NO: 155876 - DNA, 30 bp, Artificial Sequence
  Synthetic oligonucleotide
atgtttaaaactacataacgtaacagaagt

SEQ ID NO: 155877 - DNA, 30 bp, Artificial Sequence
  Synthetic oligonucleotide
ggcattacgcccatcgttacgaccagaagt

SEQ ID NO: 155878 - DNA, 30 bp, Artificial Sequence
  Synthetic oligonucleotide
attcacgactgccgaggagccaggagaagt

SEQ ID NO: 155879 - DNA, 30 bp, Artificial Sequence
  Synthetic oligonucleotide
gatacgctgccaggagtagtcttacgaagt

SEQ ID NO: 155880 - DNA, 30 bp, Artificial Sequence
  Synthetic oligonucleotide
tataaacaacggagatcgcggttgcgaagt

SEQ ID NO: 155881 - DNA, 30 bp, Artificial Sequence
  Synthetic oligonucleotide
aaacgaaccgtctgggccagagaaggaagt

SEQ ID NO: 155882 - DNA, 30 bp, Artificial Sequence
  Synthetic oligonucleotide
acgagtgatcaaggggacccgacaggaagt

SEQ ID NO: 155883 - DNA, 30 bp, Artificial Sequence
  Synthetic oligonucleotide
gccgtgagggaactgaccacaatgggaagt

SEQ ID NO: 155884 - DNA, 30 bp, Artificial Sequence
  Synthetic oligonucleotide
cggagtcagctctctttagaaatatgaagt

SEQ ID NO: 155885 - DNA, 30 bp, Artificial Sequence
  Synthetic oligonucleotide
gagcgggcagcccgacaaatgatatgaagt

SEQ ID NO: 155886 - DNA, 30 bp, Artificial Sequence
  Synthetic oligonucleotide
tgcattctcagggatctgtgattgataagt

SEQ ID NO: 155887 - DNA, 30 bp, Artificial Sequence
  Synthetic oligonucleotide
ggggggtaatgcaaagtaggctaactaagt

SEQ ID NO: 155888 - DNA, 30 bp, Artificial Sequence
  Synthetic oligonucleotide
acagttgaggtatgtatccagcatctaagt

SEQ ID NO: 155889 - DNA, 30 bp, Artificial Sequence
  Synthetic oligonucleotide
ggacggtgagggtcacacaccagagtaagt

SEQ ID NO: 155890 - DNA, 30 bp, Artificial Sequence
  Synthetic oligonucleotide
tgatcataccgctgcttagcctgagtaagt

SEQ ID NO: 155891 - DNA, 30 bp, Artificial Sequence
  Synthetic oligonucleotide
ttcgaggtacgttctaggaaaacggtaagt

SEQ ID NO: 155892 - DNA, 30 bp, Artificial Sequence
  Synthetic oligonucleotide
ggatatgacgagtacgcgaacggggtaagt

SEQ ID NO: 155893 - DNA, 30 bp, Artificial Sequence
  Synthetic oligonucleotide
tcatgaacaacatcgttgactcatgtaagt

SEQ ID NO: 155894 - DNA, 30 bp, Artificial Sequence
  Synthetic oligonucleotide
gaatggtcgtttggaaataggactgtaagt

SEQ ID NO: 155895 - DNA, 30 bp, Artificial Sequence
  Synthetic oligonucleotide
ttgccgagacgttggaccgtcaaattaagt

SEQ ID NO: 155896 - DNA, 30 bp, Artificial Sequence
  Synthetic oligonucleotide
actgagactcgtaagctgggtcgcttaagt

SEQ ID NO: 155897 - DNA, 30 bp, Artificial Sequence
  Synthetic oligonucleotide
acgtttactagactgtcgtgctcgttaagt

SEQ ID NO: 155898 - DNA, 30 bp, Artificial Sequence
  Synthetic oligonucleotide
gatgaacgtgtgtggggtagcttgttaagt

SEQ ID NO: 155899 - DNA, 30 bp, Artificial Sequence
  Synthetic oligonucleotide
agggtcgaagaactgagatccgttttaagt

SEQ ID NO: 155900 - DNA, 30 bp, Artificial Sequence
  Synthetic oligonucleotide
ctaaagatcactcggaagccgtgaaacagt

SEQ ID NO: 155901 - DNA, 30 bp, Artificial Sequence
  Synthetic oligonucleotide
tgaaaaacaaagaagccgagacacaacagt

SEQ ID NO: 155902 - DNA, 30 bp, Artificial Sequence
  Synthetic oligonucleotide
aaaccacggattacatcatgagtcaacagt

SEQ ID NO: 155903 - DNA, 30 bp, Artificial Sequence
  Synthetic oligonucleotide
catcttcggaggcgacaggcggcacacagt

SEQ ID NO: 155904 - DNA, 30 bp, Artificial Sequence
  Synthetic oligonucleotide
ataggggaggccccaaattcgattcacagt

SEQ ID NO: 155905 - DNA, 30 bp, Artificial Sequence
  Synthetic oligonucleotide
acaaggaaagttgttacgttgagcgacagt

SEQ ID NO: 155906 - DNA, 30 bp, Artificial Sequence
  Synthetic oligonucleotide
ggggaccaggcttgtcgtgatcttgacagt

SEQ ID NO: 155907 - DNA, 30 bp, Artificial Sequence
  Synthetic oligonucleotide
actgggctaccgtcagcatattagtacagt

SEQ ID NO: 155908 - DNA, 30 bp, Artificial Sequence
  Synthetic oligonucleotide
ccgggacaaccttcaataatagcttacagt

SEQ ID NO: 155909 - DNA, 30 bp, Artificial Sequence
  Synthetic oligonucleotide
tgacagctagagaatggccgtagttacagt

SEQ ID NO: 155910 - DNA, 30 bp, Artificial Sequence
  Synthetic oligonucleotide
catgatcctttctcttcggggcgcaccagt

SEQ ID NO: 155911 - DNA, 30 bp, Artificial Sequence
  Synthetic oligonucleotide
gacgtcagatcaggtttaggtaggaccagt

SEQ ID NO: 155912 - DNA, 30 bp, Artificial Sequence
  Synthetic oligonucleotide
tgggagctggtgtgctagttagtgaccagt

SEQ ID NO: 155913 - DNA, 30 bp, Artificial Sequence
  Synthetic oligonucleotide
tctgacgccaagctgtatggtatacccagt

SEQ ID NO: 155914 - DNA, 30 bp, Artificial Sequence
  Synthetic oligonucleotide
gtagccgaacagattgctttcgtccccagt

SEQ ID NO: 155915 - DNA, 30 bp, Artificial Sequence
  Synthetic oligonucleotide
ttgtcaagaaaagaatgataaagtcccagt

SEQ ID NO: 155916 - DNA, 30 bp, Artificial Sequence
  Synthetic oligonucleotide
gcggcaatgtgtgagtctcaagaggccagt

SEQ ID NO: 155917 - DNA, 30 bp, Artificial Sequence
  Synthetic oligonucleotide
tttgaatgtaatgagggccgagatgccagt

SEQ ID NO: 155918 - DNA, 30 bp, Artificial Sequence
  Synthetic oligonucleotide
ttgcgtgagaccgtggctgagaattccagt

SEQ ID NO: 155919 - DNA, 30 bp, Artificial Sequence
  Synthetic oligonucleotide
ggtcccatacatacgattgatagttccagt

SEQ ID NO: 155920 - DNA, 30 bp, Artificial Sequence
  Synthetic oligonucleotide
aacacacctccaatcggataatggagcagt

SEQ ID NO: 155921 - DNA, 30 bp, Artificial Sequence
  Synthetic oligonucleotide
gccatacagcgcaattgttgtcatagcagt

SEQ ID NO: 155922 - DNA, 30 bp, Artificial Sequence
  Synthetic oligonucleotide
catcaatcagaacttgcagtgtaacgcagt

SEQ ID NO: 155923 - DNA, 30 bp, Artificial Sequence
  Synthetic oligonucleotide
aaaaggacctcaggacatgtaaaccgcagt

SEQ ID NO: 155924 - DNA, 29 bp, Artificial Sequence
  Synthetic oligonucleotide
tgatccaaagaaatggctataagcgcagt

SEQ ID NO: 155925 - DNA, 30 bp, Artificial Sequence
  Synthetic oligonucleotide
acgaattatagcacggcgtctctgggcagt

SEQ ID NO: 155926 - DNA, 30 bp, Artificial Sequence
  Synthetic oligonucleotide
taggctgggcgacccatattgtctggcagt

SEQ ID NO: 155927 - DNA, 30 bp, Artificial Sequence
  Synthetic oligonucleotide
gattgtatgcatagactcaaagttggcagt

SEQ ID NO: 155928 - DNA, 30 bp, Artificial Sequence
  Synthetic oligonucleotide
ggggttgttgtgatgcgtgagaactgcagt

SEQ ID NO: 155929 - DNA, 30 bp, Artificial Sequence
  Synthetic oligonucleotide
gagatatgcggaagaagggagatgtgcagt

SEQ ID NO: 155930 - DNA, 30 bp, Artificial Sequence
  Synthetic oligonucleotide
ggcaaacacgatcgcggtggcccttgcagt

SEQ ID NO: 155931 - DNA, 30 bp, Artificial Sequence
  Synthetic oligonucleotide
ccacatgactatatgcctcatcaaatcagt

SEQ ID NO: 155932 - DNA, 30 bp, Artificial Sequence
  Synthetic oligonucleotide
ctcagttggcggggaacgagtggcatcagt

SEQ ID NO: 155933 - DNA, 30 bp, Artificial Sequence
  Synthetic oligonucleotide
tcgccgatttgacgtgtaacaaagatcagt

SEQ ID NO: 155934 - DNA, 30 bp, Artificial Sequence
  Synthetic oligonucleotide
aggctgataagctcgcttattcgtatcagt

SEQ ID NO: 155935 - DNA, 30 bp, Artificial Sequence
  Synthetic oligonucleotide
agcctatacgcaaccggcggcgccctcagt

SEQ ID NO: 155936 - DNA, 31 bp, Artificial Sequence
  Synthetic oligonucleotide
gcgaggaggtaactgcgtggggcttctcagt

SEQ ID NO: 155937 - DNA, 30 bp, Artificial Sequence
  Synthetic oligonucleotide
tggctcactaaagaaagcgacacagtcagt

SEQ ID NO: 155938 - DNA, 30 bp, Artificial Sequence
  Synthetic oligonucleotide
gggtgaagaagaacgtatccgttggtcagt

SEQ ID NO: 155939 - DNA, 30 bp, Artificial Sequence
  Synthetic oligonucleotide
gacgaggcgtaaggctattcaagattcagt

SEQ ID NO: 155940 - DNA, 30 bp, Artificial Sequence
  Synthetic oligonucleotide
gtacgttcaacggcacgcatgagcttcagt

SEQ ID NO: 155941 - DNA, 30 bp, Artificial Sequence
  Synthetic oligonucleotide
acgtgaaatcacatacagtatattttcagt

SEQ ID NO: 155942 - DNA, 30 bp, Artificial Sequence
  Synthetic oligonucleotide
tagcaacgggatggtctatggcggaagagt

SEQ ID NO: 155943 - DNA, 30 bp, Artificial Sequence
  Synthetic oligonucleotide
cgaattcggttgttcagagactctaagagt

SEQ ID NO: 155944 - DNA, 30 bp, Artificial Sequence
  Synthetic oligonucleotide
gtcagtggggaaaataagatatttaagagt

SEQ ID NO: 155945 - DNA, 30 bp, Artificial Sequence
  Synthetic oligonucleotide
gaacagtgcgagtactatcgtcgccagagt

SEQ ID NO: 155946 - DNA, 30 bp, Artificial Sequence
  Synthetic oligonucleotide
ggccgagcagccaaaaagggctgccagagt

SEQ ID NO: 155947 - DNA, 30 bp, Artificial Sequence
  Synthetic oligonucleotide
tataccttagctcgctgtaaagagcagagt

SEQ ID NO: 155948 - DNA, 30 bp, Artificial Sequence
  Synthetic oligonucleotide
tctcaggctctgcctgtttgatgtcagagt

SEQ ID NO: 155949 - DNA, 30 bp, Artificial Sequence
  Synthetic oligonucleotide
gtgaggactcgtctggtcacttaagagagt

SEQ ID NO: 155950 - DNA, 30 bp, Artificial Sequence
  Synthetic oligonucleotide
cgattatggacgggacgtagctgagagagt

SEQ ID NO: 155951 - DNA, 30 bp, Artificial Sequence
  Synthetic oligonucleotide
ggccgtttacacccgagcggttccgagagt

SEQ ID NO: 155952 - DNA, 30 bp, Artificial Sequence
  Synthetic oligonucleotide
ttatgaaagtgttggacacattcaacgagt

SEQ ID NO: 155953 - DNA, 30 bp, Artificial Sequence
  Synthetic oligonucleotide
gactcgaggcattgtccaatcttgccgagt

SEQ ID NO: 155954 - DNA, 30 bp, Artificial Sequence
  Synthetic oligonucleotide
taccgaagcacctatgaatgaaaagcgagt

SEQ ID NO: 155955 - DNA, 30 bp, Artificial Sequence
  Synthetic oligonucleotide
aatgacggagccgaaagggcacaggcgagt

SEQ ID NO: 155956 - DNA, 30 bp, Artificial Sequence
  Synthetic oligonucleotide
attgaccagttgcattaatgatcatcgagt

SEQ ID NO: 155957 - DNA, 30 bp, Artificial Sequence
  Synthetic oligonucleotide
agcttcaggaaatcggagtagtactcgagt

SEQ ID NO: 155958 - DNA, 30 bp, Artificial Sequence
  Synthetic oligonucleotide
accaaactagttaatgccgttagctcgagt

SEQ ID NO: 155959 - DNA, 30 bp, Artificial Sequence
  Synthetic oligonucleotide
ccattgacacggactagcaatatctcgagt

SEQ ID NO: 155960 - DNA, 30 bp, Artificial Sequence
  Synthetic oligonucleotide
ttcattagagagtttacaggtcattcgagt

SEQ ID NO: 155961 - DNA, 30 bp, Artificial Sequence
  Synthetic oligonucleotide
agggaattttgcgagtagtgaccttcgagt

SEQ ID NO: 155962 - DNA, 30 bp, Artificial Sequence
  Synthetic oligonucleotide
ccggctcacagcggccgtgaacaaaggagt

SEQ ID NO: 155963 - DNA, 30 bp, Artificial Sequence
  Synthetic oligonucleotide
ccgtgtaattggccgcatctgtataggagt

SEQ ID NO: 155964 - DNA, 30 bp, Artificial Sequence
  Synthetic oligonucleotide
agagatgtcgacgataacagaaaacggagt

SEQ ID NO: 155965 - DNA, 30 bp, Artificial Sequence
  Synthetic oligonucleotide
cgctaccgtaaatcgaccaaagatcggagt

SEQ ID NO: 155966 - DNA, 30 bp, Artificial Sequence
  Synthetic oligonucleotide
ggacaatggaggccggtcagggaagggagt

SEQ ID NO: 155967 - DNA, 30 bp, Artificial Sequence
  Synthetic oligonucleotide
acgtgacttcgtaaaaatttttgggggagt

SEQ ID NO: 155968 - DNA, 30 bp, Artificial Sequence
  Synthetic oligonucleotide
caggcacttaatagggcaaccatggggagt

SEQ ID NO: 155969 - DNA, 30 bp, Artificial Sequence
  Synthetic oligonucleotide
cttcttaagtaaaattaccggcgtgggagt

SEQ ID NO: 155970 - DNA, 30 bp, Artificial Sequence
  Synthetic oligonucleotide
gcagcggtagaccgttgttatgattggagt

SEQ ID NO: 155971 - DNA, 30 bp, Artificial Sequence
  Synthetic oligonucleotide
cataacactcgaattacgggcatttggagt

SEQ ID NO: 155972 - DNA, 30 bp, Artificial Sequence
  Synthetic oligonucleotide
acaaccgactctcccgaagtactttggagt

SEQ ID NO: 155973 - DNA, 30 bp, Artificial Sequence
  Synthetic oligonucleotide
cccggatgggaccagatctacaccatgagt

SEQ ID NO: 155974 - DNA, 30 bp, Artificial Sequence
  Synthetic oligonucleotide
tcgttgattgagacaccgctgaagatgagt

SEQ ID NO: 155975 - DNA, 30 bp, Artificial Sequence
  Synthetic oligonucleotide
ggcaagcgggctaacttaggtaagatgagt

SEQ ID NO: 155976 - DNA, 30 bp, Artificial Sequence
  Synthetic oligonucleotide
catgttctttgtcaacagcaaatgatgagt

SEQ ID NO: 155977 - DNA, 30 bp, Artificial Sequence
  Synthetic oligonucleotide
ccacgcgtgctgagccggaggaccctgagt

SEQ ID NO: 155978 - DNA, 30 bp, Artificial Sequence
  Synthetic oligonucleotide
ggcttgcgggcacaataggtatgtctgagt

SEQ ID NO: 155979 - DNA, 30 bp, Artificial Sequence
  Synthetic oligonucleotide
cccacggaagctgctggataaaaagtgagt

SEQ ID NO: 155980 - DNA, 30 bp, Artificial Sequence
  Synthetic oligonucleotide
tgaaaatagtggacttccggaaccgtgagt

SEQ ID NO: 155981 - DNA, 30 bp, Artificial Sequence
  Synthetic oligonucleotide
cctccctggtgagaacacaacgctgtgagt

SEQ ID NO: 155982 - DNA, 30 bp, Artificial Sequence
  Synthetic oligonucleotide
tcctagaggatcggcacgttaagcttgagt

SEQ ID NO: 155983 - DNA, 30 bp, Artificial Sequence
  Synthetic oligonucleotide
tcgtctattatgaggaatacacgcttgagt

SEQ ID NO: 155984 - DNA, 30 bp, Artificial Sequence
  Synthetic oligonucleotide
gcctcagatacgagtggtcagatcttgagt

SEQ ID NO: 155985 - DNA, 30 bp, Artificial Sequence
  Synthetic oligonucleotide
acatggaaagaatcaagttgcattttgagt

SEQ ID NO: 155986 - DNA, 30 bp, Artificial Sequence
  Synthetic oligonucleotide
tgctcgcgtcacggactgccatagaatagt

SEQ ID NO: 155987 - DNA, 30 bp, Artificial Sequence
  Synthetic oligonucleotide
tgttgggcgaatacgttaagggcgaatagt

SEQ ID NO: 155988 - DNA, 30 bp, Artificial Sequence
  Synthetic oligonucleotide
cactaacggatgaacactcctaataatagt

SEQ ID NO: 155989 - DNA, 30 bp, Artificial Sequence
  Synthetic oligonucleotide
tccatggtgcgtgatcaccataaccatagt

SEQ ID NO: 155990 - DNA, 30 bp, Artificial Sequence
  Synthetic oligonucleotide
gtcggaatcaagagacgtatccagcatagt

SEQ ID NO: 155991 - DNA, 30 bp, Artificial Sequence
  Synthetic oligonucleotide
ggtgcttaccggcagatattgggtcatagt

SEQ ID NO: 155992 - DNA, 30 bp, Artificial Sequence
  Synthetic oligonucleotide
cggcacctcggtgcccgatgctgcgatagt

SEQ ID NO: 155993 - DNA, 30 bp, Artificial Sequence
  Synthetic oligonucleotide
ggtggaatgttccccgcaagcaaggatagt

SEQ ID NO: 155994 - DNA, 30 bp, Artificial Sequence
  Synthetic oligonucleotide
aaagaacaatcacgcgacattagggatagt

SEQ ID NO: 155995 - DNA, 30 bp, Artificial Sequence
  Synthetic oligonucleotide
tatatgcgcaagggtgtgcgtgtggatagt

SEQ ID NO: 155996 - DNA, 30 bp, Artificial Sequence
  Synthetic oligonucleotide
gaggccccgtcgaccgttatgtgtgatagt

SEQ ID NO: 155997 - DNA, 30 bp, Artificial Sequence
  Synthetic oligonucleotide
aagttccgggtcggtgatggtccctatagt

SEQ ID NO: 155998 - DNA, 30 bp, Artificial Sequence
  Synthetic oligonucleotide
cgttatccgagggtgtacccagggtatagt

SEQ ID NO: 155999 - DNA, 30 bp, Artificial Sequence
  Synthetic oligonucleotide
agttggcttttggctaattggatttatagt

SEQ ID NO: 156000 - DNA, 30 bp, Artificial Sequence
  Synthetic oligonucleotide
aggagcacctgaaggcctggtgtagctagt

SEQ ID NO: 156001 - DNA, 30 bp, Artificial Sequence
  Synthetic oligonucleotide
acgaactggttaatacacccgattgctagt

SEQ ID NO: 156002 - DNA, 30 bp, Artificial Sequence
  Synthetic oligonucleotide
tatgacagtagagagtcgcaagtctctagt

SEQ ID NO: 156003 - DNA, 30 bp, Artificial Sequence
  Synthetic oligonucleotide
gctgaacatgcccgagaataaaggtctagt

SEQ ID NO: 156004 - DNA, 30 bp, Artificial Sequence
  Synthetic oligonucleotide
tatgtgaacggttgacggaaatcaagtagt

SEQ ID NO: 156005 - DNA, 30 bp, Artificial Sequence
  Synthetic oligonucleotide
tggaaggtcgctaaacctaacaatagtagt

SEQ ID NO: 156006 - DNA, 30 bp, Artificial Sequence
  Synthetic oligonucleotide
gctaaagcatagtttttagggaatagtagt

SEQ ID NO: 156007 - DNA, 30 bp, Artificial Sequence
  Synthetic oligonucleotide
cattcggaacagacccatcaggctagtagt

SEQ ID NO: 156008 - DNA, 30 bp, Artificial Sequence
  Synthetic oligonucleotide
atagagggcgagtagattaaacgtagtagt

SEQ ID NO: 156009 - DNA, 30 bp, Artificial Sequence
  Synthetic oligonucleotide
gccagtggggatacgcgctcggtacgtagt

SEQ ID NO: 156010 - DNA, 30 bp, Artificial Sequence
  Synthetic oligonucleotide
ggtcattggtcccgtgcaaggccaggtagt

SEQ ID NO: 156011 - DNA, 30 bp, Artificial Sequence
  Synthetic oligonucleotide
tcaatatcagtgctgaaaaaggacggtagt

SEQ ID NO: 156012 - DNA, 30 bp, Artificial Sequence
  Synthetic oligonucleotide
agcagtatcaatcgcttcaggcatggtagt

SEQ ID NO: 156013 - DNA, 30 bp, Artificial Sequence
  Synthetic oligonucleotide
tggccacgaccgtcatttcccccatgtagt

SEQ ID NO: 156014 - DNA, 30 bp, Artificial Sequence
  Synthetic oligonucleotide
cttgtaaatgtacatatcacggtgtgtagt

SEQ ID NO: 156015 - DNA, 30 bp, Artificial Sequence
  Synthetic oligonucleotide
cgataaaaaggtatgctggccatttgtagt

SEQ ID NO: 156016 - DNA, 30 bp, Artificial Sequence
  Synthetic oligonucleotide
gatcatcacaggggcttcaaccaaattagt

SEQ ID NO: 156017 - DNA, 30 bp, Artificial Sequence
  Synthetic oligonucleotide
gtctactacggcaaagtaaggcaaattagt

SEQ ID NO: 156018 - DNA, 30 bp, Artificial Sequence
  Synthetic oligonucleotide
tggagggaatcgttataccgaataattagt

SEQ ID NO: 156019 - DNA, 30 bp, Artificial Sequence
  Synthetic oligonucleotide
agcgggttttgcattgtacgacggattagt

SEQ ID NO: 156020 - DNA, 30 bp, Artificial Sequence
  Synthetic oligonucleotide
acaaggttttcgagtgcagtaggtattagt

SEQ ID NO: 156021 - DNA, 30 bp, Artificial Sequence
  Synthetic oligonucleotide
cagggtgtccagtccccagtaattattagt

SEQ ID NO: 156022 - DNA, 30 bp, Artificial Sequence
  Synthetic oligonucleotide
agacatagctcttggattgacgatgttagt

SEQ ID NO: 156023 - DNA, 30 bp, Artificial Sequence
  Synthetic oligonucleotide
tctacgataggatgatcagtgacatttagt

SEQ ID NO: 156024 - DNA, 30 bp, Artificial Sequence
  Synthetic oligonucleotide
atgaaacactaggcatccgtagcaaaacgt

SEQ ID NO: 156025 - DNA, 30 bp, Artificial Sequence
  Synthetic oligonucleotide
gcgaacgggtgaggtttcagacgcaaacgt

SEQ ID NO: 156026 - DNA, 30 bp, Artificial Sequence
  Synthetic oligonucleotide
gatggtaccccacgaaggccctgcaaacgt

SEQ ID NO: 156027 - DNA, 30 bp, Artificial Sequence
  Synthetic oligonucleotide
taaaacaaggcgtcaaaacaaacgaaacgt

SEQ ID NO: 156028 - DNA, 30 bp, Artificial Sequence
  Synthetic oligonucleotide
cggaagccattagtctaagatgataaacgt

SEQ ID NO: 156029 - DNA, 30 bp, Artificial Sequence
  Synthetic oligonucleotide
cctttaggatgactaggccttcagcaacgt

SEQ ID NO: 156030 - DNA, 30 bp, Artificial Sequence
  Synthetic oligonucleotide
agagggatctacatacattatcatcaacgt

SEQ ID NO: 156031 - DNA, 30 bp, Artificial Sequence
  Synthetic oligonucleotide
tggaaccttaggggcgcccgaagggaacgt

SEQ ID NO: 156032 - DNA, 30 bp, Artificial Sequence
  Synthetic oligonucleotide
gatgccaagcacatgaatgcgtgtgaacgt

SEQ ID NO: 156033 - DNA, 30 bp, Artificial Sequence
  Synthetic oligonucleotide
catagatgagagaatatttgggagtaacgt

SEQ ID NO: 156034 - DNA, 30 bp, Artificial Sequence
  Synthetic oligonucleotide
ggctgtgattggcgcggtgagagttaacgt

SEQ ID NO: 156035 - DNA, 30 bp, Artificial Sequence
  Synthetic oligonucleotide
gctcaatggggttagctggagaagacacgt

SEQ ID NO: 156036 - DNA, 30 bp, Artificial Sequence
  Synthetic oligonucleotide
tttacgtaggaactacaggacttgacacgt

SEQ ID NO: 156037 - DNA, 30 bp, Artificial Sequence
  Synthetic oligonucleotide
gtgcctggcaagtattcggcagagccacgt

SEQ ID NO: 156038 - DNA, 30 bp, Artificial Sequence
  Synthetic oligonucleotide
atgtaattgaggtatgagccccatccacgt

SEQ ID NO: 156039 - DNA, 30 bp, Artificial Sequence
  Synthetic oligonucleotide
caatgctgctacaatcataaatttccacgt

SEQ ID NO: 156040 - DNA, 30 bp, Artificial Sequence
  Synthetic oligonucleotide
agagcggtcacaaagaacgtatctgcacgt

SEQ ID NO: 156041 - DNA, 30 bp, Artificial Sequence
  Synthetic oligonucleotide
aaggaaacataagtgaacttacttgcacgt

SEQ ID NO: 156042 - DNA, 30 bp, Artificial Sequence
  Synthetic oligonucleotide
agacacacgggcatccaacgggactcacgt

SEQ ID NO: 156043 - DNA, 30 bp, Artificial Sequence
  Synthetic oligonucleotide
aagaatatgtagggattgagagcctcacgt

SEQ ID NO: 156044 - DNA, 30 bp, Artificial Sequence
  Synthetic oligonucleotide
gcatgagtagtgcgggtccaaacttcacgt

SEQ ID NO: 156045 - DNA, 30 bp, Artificial Sequence
  Synthetic oligonucleotide
acgtatcggggggctgttcagataagacgt

SEQ ID NO: 156046 - DNA, 30 bp, Artificial Sequence
  Synthetic oligonucleotide
tgtacgtctgatacgagataactgagacgt

SEQ ID NO: 156047 - DNA, 30 bp, Artificial Sequence
  Synthetic oligonucleotide
aaggaaagaaatgagtcaggccatcgacgt

SEQ ID NO: 156048 - DNA, 30 bp, Artificial Sequence
  Synthetic oligonucleotide
agcggaaaagctcgtaaattaactcgacgt

SEQ ID NO: 156049 - DNA, 30 bp, Artificial Sequence
  Synthetic oligonucleotide
aaggagtcgaagcgcagccgttgtcgacgt

SEQ ID NO: 156050 - DNA, 30 bp, Artificial Sequence
  Synthetic oligonucleotide
atgggtctttcacggtatacccgaggacgt

SEQ ID NO: 156051 - DNA, 30 bp, Artificial Sequence
  Synthetic oligonucleotide
ttattcacagtaacgcgacgggagggacgt

SEQ ID NO: 156052 - DNA, 30 bp, Artificial Sequence
  Synthetic oligonucleotide
atgtgcatgaactataaccgggcgggacgt

SEQ ID NO: 156053 - DNA, 30 bp, Artificial Sequence
  Synthetic oligonucleotide
gctcatggaaaattcgcaaactcgtgacgt

SEQ ID NO: 156054 - DNA, 30 bp, Artificial Sequence
  Synthetic oligonucleotide
cggcttcggtgtcagaaacgaaggtgacgt

SEQ ID NO: 156055 - DNA, 30 bp, Artificial Sequence
  Synthetic oligonucleotide
agctaagtgaatgaccatagccagatacgt

SEQ ID NO: 156056 - DNA, 30 bp, Artificial Sequence
  Synthetic oligonucleotide
cacaagggcgacgccctaaacattatacgt

SEQ ID NO: 156057 - DNA, 30 bp, Artificial Sequence
  Synthetic oligonucleotide
agcggtcagtcggctggtcgacaactacgt

SEQ ID NO: 156058 - DNA, 30 bp, Artificial Sequence
  Synthetic oligonucleotide
gacctggagtctctggtcgacgatgtacgt

SEQ ID NO: 156059 - DNA, 30 bp, Artificial Sequence
  Synthetic oligonucleotide
agcaaaaatacgggaatatatgtattacgt

SEQ ID NO: 156060 - DNA, 30 bp, Artificial Sequence
  Synthetic oligonucleotide
gcgactaatggacgtcctgctcacttacgt

SEQ ID NO: 156061 - DNA, 30 bp, Artificial Sequence
  Synthetic oligonucleotide
catcgaaccgagatggtctccacgttacgt

SEQ ID NO: 156062 - DNA, 30 bp, Artificial Sequence
  Synthetic oligonucleotide
agggcatgttgttgcacaagaaaaaaccgt

SEQ ID NO: 156063 - DNA, 30 bp, Artificial Sequence
  Synthetic oligonucleotide
cagcataaagcccagttaagctgaaaccgt

SEQ ID NO: 156064 - DNA, 30 bp, Artificial Sequence
  Synthetic oligonucleotide
agccggaaagatccactgcaaatcaaccgt

SEQ ID NO: 156065 - DNA, 30 bp, Artificial Sequence
  Synthetic oligonucleotide
cctaaagattcatagaaggctgcgaaccgt

SEQ ID NO: 156066 - DNA, 30 bp, Artificial Sequence
  Synthetic oligonucleotide
atggcacatgatcctgcgaaaagccaccgt

SEQ ID NO: 156067 - DNA, 30 bp, Artificial Sequence
  Synthetic oligonucleotide
gctcagtgaccggcgtgcacttatcaccgt

SEQ ID NO: 156068 - DNA, 30 bp, Artificial Sequence
  Synthetic oligonucleotide
catacatcgaccttaataatgtcagaccgt

SEQ ID NO: 156069 - DNA, 30 bp, Artificial Sequence
  Synthetic oligonucleotide
gcagggtgttatacagacaattactaccgt

SEQ ID NO: 156070 - DNA, 30 bp, Artificial Sequence
  Synthetic oligonucleotide
ggccttaaaagacggatgccgagctaccgt

SEQ ID NO: 156071 - DNA, 30 bp, Artificial Sequence
  Synthetic oligonucleotide
agcatgtgaggataatgttaactgtaccgt

SEQ ID NO: 156072 - DNA, 30 bp, Artificial Sequence
  Synthetic oligonucleotide
tacgagcagataattaagtgtgtgtaccgt

SEQ ID NO: 156073 - DNA, 30 bp, Artificial Sequence
  Synthetic oligonucleotide
aatggacgtaggaaaaacctgatcacccgt

SEQ ID NO: 156074 - DNA, 30 bp, Artificial Sequence
  Synthetic oligonucleotide
cacactgatcaaagtcgcgcgtagccccgt

SEQ ID NO: 156075 - DNA, 30 bp, Artificial Sequence
  Synthetic oligonucleotide
agaggacaacctgcggtaatatgagcccgt

SEQ ID NO: 156076 - DNA, 30 bp, Artificial Sequence
  Synthetic oligonucleotide
aggaatgtttgaatgtcaccggttgcccgt

SEQ ID NO: 156077 - DNA, 30 bp, Artificial Sequence
  Synthetic oligonucleotide
gaagaagtcaccacgaagtcgttatcccgt

SEQ ID NO: 156078 - DNA, 30 bp, Artificial Sequence
  Synthetic oligonucleotide
atagatcattagtttcgatattaaagccgt

SEQ ID NO: 156079 - DNA, 30 bp, Artificial Sequence
  Synthetic oligonucleotide
agtagaaataacggtatagcatggcgccgt

SEQ ID NO: 156080 - DNA, 30 bp, Artificial Sequence
  Synthetic oligonucleotide
gtagcctatttaaaaggattggggggccgt

SEQ ID NO: 156081 - DNA, 30 bp, Artificial Sequence
  Synthetic oligonucleotide
tcagaactctaacggatatgaattggccgt

SEQ ID NO: 156082 - DNA, 30 bp, Artificial Sequence
  Synthetic oligonucleotide
gctgttccaatcatgcatgactcctgccgt

SEQ ID NO: 156083 - DNA, 30 bp, Artificial Sequence
  Synthetic oligonucleotide
atacgaagtaggacccgcaaagcttgccgt

SEQ ID NO: 156084 - DNA, 30 bp, Artificial Sequence
  Synthetic oligonucleotide
tacgtggcagtgtaggtcttagtcatccgt

SEQ ID NO: 156085 - DNA, 30 bp, Artificial Sequence
  Synthetic oligonucleotide
cacgatgggaaatttacgtagattatccgt

SEQ ID NO: 156086 - DNA, 30 bp, Artificial Sequence
  Synthetic oligonucleotide
ctgcgggcgtacttggcagctcacctccgt

SEQ ID NO: 156087 - DNA, 30 bp, Artificial Sequence
  Synthetic oligonucleotide
ggaacgggcgactgactaacctatctccgt

SEQ ID NO: 156088 - DNA, 30 bp, Artificial Sequence
  Synthetic oligonucleotide
ggaaagaagccttacgtgcaggctctccgt

SEQ ID NO: 156089 - DNA, 30 bp, Artificial Sequence
  Synthetic oligonucleotide
cagtccgcgctcactattattctcgtccgt

SEQ ID NO: 156090 - DNA, 30 bp, Artificial Sequence
  Synthetic oligonucleotide
ttagcaatctatcagctggtaggggtccgt

SEQ ID NO: 156091 - DNA, 30 bp, Artificial Sequence
  Synthetic oligonucleotide
tagaaatcctcgaccgtggagttggtccgt

SEQ ID NO: 156092 - DNA, 30 bp, Artificial Sequence
  Synthetic oligonucleotide
attaagggatattccttagtcgatgtccgt

SEQ ID NO: 156093 - DNA, 30 bp, Artificial Sequence
  Synthetic oligonucleotide
ggttacataaagacaagtagatcattccgt

SEQ ID NO: 156094 - DNA, 30 bp, Artificial Sequence
  Synthetic oligonucleotide
tgaggtaaaaaacggcaaccgcaaaagcgt

SEQ ID NO: 156095 - DNA, 30 bp, Artificial Sequence
  Synthetic oligonucleotide
tgagataggcggagggtccatggacagcgt

SEQ ID NO: 156096 - DNA, 30 bp, Artificial Sequence
  Synthetic oligonucleotide
ggccgagtgttgataatcggagtacagcgt

SEQ ID NO: 156097 - DNA, 30 bp, Artificial Sequence
  Synthetic oligonucleotide
agtaaaaatttagcctacccatagcagcgt

SEQ ID NO: 156098 - DNA, 30 bp, Artificial Sequence
  Synthetic oligonucleotide
aaaggtaccccaagcgaacgaaggcagcgt

SEQ ID NO: 156099 - DNA, 30 bp, Artificial Sequence
  Synthetic oligonucleotide
cggcggtctaacactgaagatgatcagcgt

SEQ ID NO: 156100 - DNA, 30 bp, Artificial Sequence
  Synthetic oligonucleotide
acctcagcacctatgagttagtgatagcgt

SEQ ID NO: 156101 - DNA, 30 bp, Artificial Sequence
  Synthetic oligonucleotide
gtggttagccatggtatttctatctagcgt

SEQ ID NO: 156102 - DNA, 30 bp, Artificial Sequence
  Synthetic oligonucleotide
tcggcaacacccagtaagtggcggtagcgt

SEQ ID NO: 156103 - DNA, 30 bp, Artificial Sequence
  Synthetic oligonucleotide
aaaccataggttgacctgagaacaccgcgt

SEQ ID NO: 156104 - DNA, 30 bp, Artificial Sequence
  Synthetic oligonucleotide
aaggtcgatgccgtgtttagcgagccgcgt

SEQ ID NO: 156105 - DNA, 30 bp, Artificial Sequence
  Synthetic oligonucleotide
acagtgcctcttggttacttaaaagcgcgt

SEQ ID NO: 156106 - DNA, 30 bp, Artificial Sequence
  Synthetic oligonucleotide
ggtgagggggcccccctgttaacagcgcgt

SEQ ID NO: 156107 - DNA, 30 bp, Artificial Sequence
  Synthetic oligonucleotide
caaccgctcgtagcgggtatgatagcgcgt

SEQ ID NO: 156108 - DNA, 30 bp, Artificial Sequence
  Synthetic oligonucleotide
acctgacatccacagcgatacaccgcgcgt

SEQ ID NO: 156109 - DNA, 30 bp, Artificial Sequence
  Synthetic oligonucleotide
tgttgcagttaaggtctaacgtaggcgcgt

SEQ ID NO: 156110 - DNA, 30 bp, Artificial Sequence
  Synthetic oligonucleotide
tgggtagctaaaggccggtctactgcgcgt

SEQ ID NO: 156111 - DNA, 30 bp, Artificial Sequence
  Synthetic oligonucleotide
gctgtgcctcgtggagaaagtcactcgcgt

SEQ ID NO: 156112 - DNA, 30 bp, Artificial Sequence
  Synthetic oligonucleotide
ggttgccatccgaagtcaatggcgtcgcgt

SEQ ID NO: 156113 - DNA, 30 bp, Artificial Sequence
  Synthetic oligonucleotide
gagcccacagaaggagaaccgtcgaggcgt

SEQ ID NO: 156114 - DNA, 30 bp, Artificial Sequence
  Synthetic oligonucleotide
ttatgactccgacactaggtgtggaggcgt

SEQ ID NO: 156115 - DNA, 30 bp, Artificial Sequence
  Synthetic oligonucleotide
gtgaaggcaggataaagcttttggcggcgt

SEQ ID NO: 156116 - DNA, 30 bp, Artificial Sequence
  Synthetic oligonucleotide
cggacgaatagtcgtagtaagctgcggcgt

SEQ ID NO: 156117 - DNA, 29 bp, Artificial Sequence
  Synthetic oligonucleotide
cgtaactaatatcggcgtagctgcggcgt

SEQ ID NO: 156118 - DNA, 30 bp, Artificial Sequence
  Synthetic oligonucleotide
ccacagaaaattactcttggatatcggcgt

SEQ ID NO: 156119 - DNA, 30 bp, Artificial Sequence
  Synthetic oligonucleotide
accttcggaagggtcgtgctcattcggcgt

SEQ ID NO: 156120 - DNA, 30 bp, Artificial Sequence
  Synthetic oligonucleotide
gggagcgtgtataatccacgataagggcgt

SEQ ID NO: 156121 - DNA, 30 bp, Artificial Sequence
  Synthetic oligonucleotide
tggtatggctcatgatgagtgcgagggcgt

SEQ ID NO: 156122 - DNA, 30 bp, Artificial Sequence
  Synthetic oligonucleotide
ggaatgagagtgtgcggccggtgtgggcgt

SEQ ID NO: 156123 - DNA, 30 bp, Artificial Sequence
  Synthetic oligonucleotide
tcgttatatcagttattggctgcttggcgt

SEQ ID NO: 156124 - DNA, 30 bp, Artificial Sequence
  Synthetic oligonucleotide
tggccatcgtatccattaacattttggcgt

SEQ ID NO: 156125 - DNA, 30 bp, Artificial Sequence
  Synthetic oligonucleotide
gctgcacctcgaggggcaatattttggcgt

SEQ ID NO: 156126 - DNA, 30 bp, Artificial Sequence
  Synthetic oligonucleotide
cgtcaacgggcctacgattcaggaatgcgt

SEQ ID NO: 156127 - DNA, 30 bp, Artificial Sequence
  Synthetic oligonucleotide
gagagtatgggattactgagtggaatgcgt

SEQ ID NO: 156128 - DNA, 30 bp, Artificial Sequence
  Synthetic oligonucleotide
gacacaaacggaccgtgcgttcacatgcgt

SEQ ID NO: 156129 - DNA, 30 bp, Artificial Sequence
  Synthetic oligonucleotide
tgagagaaagtttgcagtagggcgatgcgt

SEQ ID NO: 156130 - DNA, 30 bp, Artificial Sequence
  Synthetic oligonucleotide
tcggtacttcttctctgtttctgtatgcgt

SEQ ID NO: 156131 - DNA, 30 bp, Artificial Sequence
  Synthetic oligonucleotide
agcatctggacatggccaatgggcctgcgt

SEQ ID NO: 156132 - DNA, 30 bp, Artificial Sequence
  Synthetic oligonucleotide
taaacaaaatagagggtgacgtttgtgcgt

SEQ ID NO: 156133 - DNA, 30 bp, Artificial Sequence
  Synthetic oligonucleotide
ctaccaagttcgattggcagtagtttgcgt

SEQ ID NO: 156134 - DNA, 30 bp, Artificial Sequence
  Synthetic oligonucleotide
ttaggaagctggtagctgagaattaatcgt

SEQ ID NO: 156135 - DNA, 30 bp, Artificial Sequence
  Synthetic oligonucleotide
tcggctgagtcgtcgaatctttttaatcgt

SEQ ID NO: 156136 - DNA, 30 bp, Artificial Sequence
  Synthetic oligonucleotide
tgactggctggcggtcgggcgtaacatcgt

SEQ ID NO: 156137 - DNA, 30 bp, Artificial Sequence
  Synthetic oligonucleotide
aagggagttccgttcgcggtcacacatcgt

SEQ ID NO: 156138 - DNA, 30 bp, Artificial Sequence
  Synthetic oligonucleotide
taaacgagagtgtggagcgcggaccatcgt

SEQ ID NO: 156139 - DNA, 30 bp, Artificial Sequence
  Synthetic oligonucleotide
tgtttcgttacaccggagaaaaggcatcgt

SEQ ID NO: 156140 - DNA, 30 bp, Artificial Sequence
  Synthetic oligonucleotide
tgcttactgcgaggtgtgcggggctatcgt

SEQ ID NO: 156141 - DNA, 30 bp, Artificial Sequence
  Synthetic oligonucleotide
gtgacggccgacgatcaacacaggactcgt

SEQ ID NO: 156142 - DNA, 30 bp, Artificial Sequence
  Synthetic oligonucleotide
gcactatgatcaacggtgggcggtactcgt

SEQ ID NO: 156143 - DNA, 30 bp, Artificial Sequence
  Synthetic oligonucleotide
aggccttaagtcgtttgaccaaaacctcgt

SEQ ID NO: 156144 - DNA, 30 bp, Artificial Sequence
  Synthetic oligonucleotide
ccaatctggtgtgaatacgcttggcctcgt

SEQ ID NO: 156145 - DNA, 30 bp, Artificial Sequence
  Synthetic oligonucleotide
ggagcgggattttacagctaagcgtctcgt

SEQ ID NO: 156146 - DNA, 30 bp, Artificial Sequence
  Synthetic oligonucleotide
gagataaggttacttacttgttcgtctcgt

SEQ ID NO: 156147 - DNA, 30 bp, Artificial Sequence
  Synthetic oligonucleotide
cgaagtagcttgctcaattgacggtctcgt

SEQ ID NO: 156148 - DNA, 30 bp, Artificial Sequence
  Synthetic oligonucleotide
tccttattagtcacaggtcactcaagtcgt

SEQ ID NO: 156149 - DNA, 30 bp, Artificial Sequence
  Synthetic oligonucleotide
acgattcggtaaataaagatgggcagtcgt

SEQ ID NO: 156150 - DNA, 30 bp, Artificial Sequence
  Synthetic oligonucleotide
ccggttgtgaggtatggagaacagagtcgt

SEQ ID NO: 156151 - DNA, 30 bp, Artificial Sequence
  Synthetic oligonucleotide
aacggtataaaggttctaaggttgcgtcgt

SEQ ID NO: 156152 - DNA, 30 bp, Artificial Sequence
  Synthetic oligonucleotide
cttcatcaatccgtagcggattcaggtcgt

SEQ ID NO: 156153 - DNA, 30 bp, Artificial Sequence
  Synthetic oligonucleotide
taagcgtcagctaatagcagggggggtcgt

SEQ ID NO: 156154 - DNA, 30 bp, Artificial Sequence
  Synthetic oligonucleotide
ataatcagaagagaagaggtagcatgtcgt

SEQ ID NO: 156155 - DNA, 30 bp, Artificial Sequence
  Synthetic oligonucleotide
gtatctaagtgaggaccgaaaagatgtcgt

SEQ ID NO: 156156 - DNA, 30 bp, Artificial Sequence
  Synthetic oligonucleotide
cgccggatagagaacgttataacctgtcgt

SEQ ID NO: 156157 - DNA, 30 bp, Artificial Sequence
  Synthetic oligonucleotide
aaacaaggcgtggtcgaaccacggcttcgt

SEQ ID NO: 156158 - DNA, 30 bp, Artificial Sequence
  Synthetic oligonucleotide
cagctgatgatgttaggggcggcagttcgt

SEQ ID NO: 156159 - DNA, 30 bp, Artificial Sequence
  Synthetic oligonucleotide
cagggtattggtcgactttatgccgttcgt

SEQ ID NO: 156160 - DNA, 30 bp, Artificial Sequence
  Synthetic oligonucleotide
gaaaccgatcaagaatgggcgctcgttcgt

SEQ ID NO: 156161 - DNA, 30 bp, Artificial Sequence
  Synthetic oligonucleotide
agacgtatcatttagcccaccgaatttcgt

SEQ ID NO: 156162 - DNA, 30 bp, Artificial Sequence
  Synthetic oligonucleotide
cgcgtcatcacatgtattcgcgacaaaggt

SEQ ID NO: 156163 - DNA, 30 bp, Artificial Sequence
  Synthetic oligonucleotide
aaagtctgggggcctaagatcggcaaaggt

SEQ ID NO: 156164 - DNA, 30 bp, Artificial Sequence
  Synthetic oligonucleotide
cacagtggatttagaatggacgggaaaggt

SEQ ID NO: 156165 - DNA, 30 bp, Artificial Sequence
  Synthetic oligonucleotide
agattgagctgcaagccggtcaataaaggt

SEQ ID NO: 156166 - DNA, 30 bp, Artificial Sequence
  Synthetic oligonucleotide
tcactcaattgctacctaaggaataaaggt

SEQ ID NO: 156167 - DNA, 30 bp, Artificial Sequence
  Synthetic oligonucleotide
gagctcaggcactcccatcctactaaaggt

SEQ ID NO: 156168 - DNA, 30 bp, Artificial Sequence
  Synthetic oligonucleotide
tttagagcgaattgaaggatacgtaaaggt

SEQ ID NO: 156169 - DNA, 30 bp, Artificial Sequence
  Synthetic oligonucleotide
tacatacttcactcatacggaacccaaggt

SEQ ID NO: 156170 - DNA, 30 bp, Artificial Sequence
  Synthetic oligonucleotide
aaaccaaccgaagggggaacacgccaaggt

SEQ ID NO: 156171 - DNA, 30 bp, Artificial Sequence
  Synthetic oligonucleotide
caataacagtatcggaatttatgccaaggt

SEQ ID NO: 156172 - DNA, 30 bp, Artificial Sequence
  Synthetic oligonucleotide
ccgatacacttcattagtataagtcaaggt

SEQ ID NO: 156173 - DNA, 30 bp, Artificial Sequence
  Synthetic oligonucleotide
cttcgtagtacgaaaatacgttcagaaggt

SEQ ID NO: 156174 - DNA, 30 bp, Artificial Sequence
  Synthetic oligonucleotide
aatacaaacatgcggagatagttagaaggt

SEQ ID NO: 156175 - DNA, 30 bp, Artificial Sequence
  Synthetic oligonucleotide
accaacccctgggaagacagcacataaggt

SEQ ID NO: 156176 - DNA, 30 bp, Artificial Sequence
  Synthetic oligonucleotide
gggtacaaggacttcgagatttgctaaggt

SEQ ID NO: 156177 - DNA, 30 bp, Artificial Sequence
  Synthetic oligonucleotide
cagagggtagtcggttgccgaatctaaggt

SEQ ID NO: 156178 - DNA, 30 bp, Artificial Sequence
  Synthetic oligonucleotide
ggacagcagtctatgcaggtggattaaggt

SEQ ID NO: 156179 - DNA, 30 bp, Artificial Sequence
  Synthetic oligonucleotide
ctcacgccgagagttcagttgtattaaggt

SEQ ID NO: 156180 - DNA, 30 bp, Artificial Sequence
  Synthetic oligonucleotide
aagggttcaaccccacagtaaagttaaggt

SEQ ID NO: 156181 - DNA, 30 bp, Artificial Sequence
  Synthetic oligonucleotide
ttgcaacaatcaccacagggaaacacaggt

SEQ ID NO: 156182 - DNA, 30 bp, Artificial Sequence
  Synthetic oligonucleotide
gagacgatatgtcttcgtcaatgaccaggt

SEQ ID NO: 156183 - DNA, 30 bp, Artificial Sequence
  Synthetic oligonucleotide
ggtatgccgtgctaatctagaactccaggt

SEQ ID NO: 156184 - DNA, 30 bp, Artificial Sequence
  Synthetic oligonucleotide
ctgactggtaatccagttcgggtagcaggt

SEQ ID NO: 156185 - DNA, 30 bp, Artificial Sequence
  Synthetic oligonucleotide
atgaaatgaaacaaatgggcgagcgcaggt

SEQ ID NO: 156186 - DNA, 30 bp, Artificial Sequence
  Synthetic oligonucleotide
actatgacggagttggagagcagggcaggt

SEQ ID NO: 156187 - DNA, 30 bp, Artificial Sequence
  Synthetic oligonucleotide
ggaacgccatagtgtcgtcgtatggcaggt

SEQ ID NO: 156188 - DNA, 30 bp, Artificial Sequence
  Synthetic oligonucleotide
attcgaagaggtgtgtgcagagctgcaggt

SEQ ID NO: 156189 - DNA, 30 bp, Artificial Sequence
  Synthetic oligonucleotide
acgacggtataaactatgttatctgcaggt

SEQ ID NO: 156190 - DNA, 30 bp, Artificial Sequence
  Synthetic oligonucleotide
tagggtagttgtcaggatggagaaagaggt

SEQ ID NO: 156191 - DNA, 30 bp, Artificial Sequence
  Synthetic oligonucleotide
cgcgaaacgcatcatactatttaaagaggt

SEQ ID NO: 156192 - DNA, 30 bp, Artificial Sequence
  Synthetic oligonucleotide
tctccgcaggcgcaagtgtgtcagagaggt

SEQ ID NO: 156193 - DNA, 30 bp, Artificial Sequence
  Synthetic oligonucleotide
ggactgcctaggatgataggaattagaggt

SEQ ID NO: 156194 - DNA, 30 bp, Artificial Sequence
  Synthetic oligonucleotide
tgctcagtgcattactctcgaggacgaggt

SEQ ID NO: 156195 - DNA, 30 bp, Artificial Sequence
  Synthetic oligonucleotide
gtcacagcactgcagttgtggcggcgaggt

SEQ ID NO: 156196 - DNA, 30 bp, Artificial Sequence
  Synthetic oligonucleotide
cgctgttagttccactgatacgaaggaggt

SEQ ID NO: 156197 - DNA, 30 bp, Artificial Sequence
  Synthetic oligonucleotide
tcaaggttacgatacgttcgtaggggaggt

SEQ ID NO: 156198 - DNA, 30 bp, Artificial Sequence
  Synthetic oligonucleotide
gctggatagtcttaaaggccattgggaggt

SEQ ID NO: 156199 - DNA, 30 bp, Artificial Sequence
  Synthetic oligonucleotide
acggtgaccagaggccgtaaggaatgaggt

SEQ ID NO: 156200 - DNA, 30 bp, Artificial Sequence
  Synthetic oligonucleotide
aaacggcgtatgtgtggtaatccgtgaggt

SEQ ID NO: 156201 - DNA, 30 bp, Artificial Sequence
  Synthetic oligonucleotide
tatccggacacaacacaagggaggtgaggt

SEQ ID NO: 156202 - DNA, 30 bp, Artificial Sequence
  Synthetic oligonucleotide
gggatgcaagagtattgccagatgtgaggt

SEQ ID NO: 156203 - DNA, 30 bp, Artificial Sequence
  Synthetic oligonucleotide
atgtccgcttcatagctgcatggttgaggt

SEQ ID NO: 156204 - DNA, 30 bp, Artificial Sequence
  Synthetic oligonucleotide
tcttcttgttcggaaggggcgataataggt

SEQ ID NO: 156205 - DNA, 29 bp, Artificial Sequence
  Synthetic oligonucleotide
taggcgggagatggtcactcagtataggt

SEQ ID NO: 156206 - DNA, 30 bp, Artificial Sequence
  Synthetic oligonucleotide
tagcactaggagcgcgaggcgggactaggt

SEQ ID NO: 156207 - DNA, 30 bp, Artificial Sequence
  Synthetic oligonucleotide
gtcgtgcgtttagtgtaattgacagtaggt

SEQ ID NO: 156208 - DNA, 30 bp, Artificial Sequence
  Synthetic oligonucleotide
cagaggaaaccgccaccggcttacgtaggt

SEQ ID NO: 156209 - DNA, 30 bp, Artificial Sequence
  Synthetic oligonucleotide
aaaacaacagtggcgctacatttcgtaggt

SEQ ID NO: 156210 - DNA, 30 bp, Artificial Sequence
  Synthetic oligonucleotide
tcccactctctagatcaacgatctgtaggt

SEQ ID NO: 156211 - DNA, 30 bp, Artificial Sequence
  Synthetic oligonucleotide
aacagttatcgatcgcgtgtcggtgtaggt

SEQ ID NO: 156212 - DNA, 30 bp, Artificial Sequence
  Synthetic oligonucleotide
cgttagggagtggaggacggaacattaggt

SEQ ID NO: 156213 - DNA, 30 bp, Artificial Sequence
  Synthetic oligonucleotide
atagatgatcacacggataacttattaggt

SEQ ID NO: 156214 - DNA, 30 bp, Artificial Sequence
  Synthetic oligonucleotide
ggtgtgtagacagggtgaggtgcaaacggt

SEQ ID NO: 156215 - DNA, 30 bp, Artificial Sequence
  Synthetic oligonucleotide
gaagggagtccttgctagaaaaacaacggt

SEQ ID NO: 156216 - DNA, 30 bp, Artificial Sequence
  Synthetic oligonucleotide
cgggtcctaaacgtgaagcgcgagaacggt

SEQ ID NO: 156217 - DNA, 30 bp, Artificial Sequence
  Synthetic oligonucleotide
aagatggcgagcgctgacgaaacgaacggt

SEQ ID NO: 156218 - DNA, 30 bp, Artificial Sequence
  Synthetic oligonucleotide
gcggttggtattgcgtctacagcgaacggt

SEQ ID NO: 156219 - DNA, 30 bp, Artificial Sequence
  Synthetic oligonucleotide
tacacacgcgcgtcggtccgggcgaacggt

SEQ ID NO: 156220 - DNA, 30 bp, Artificial Sequence
  Synthetic oligonucleotide
taaagaaggcaagacgataagtataacggt

SEQ ID NO: 156221 - DNA, 30 bp, Artificial Sequence
  Synthetic oligonucleotide
gaggcatgaagtggataggatattcacggt

SEQ ID NO: 156222 - DNA, 30 bp, Artificial Sequence
  Synthetic oligonucleotide
gtggctgatgtagagggtagggttcacggt

SEQ ID NO: 156223 - DNA, 30 bp, Artificial Sequence
  Synthetic oligonucleotide
ttggattccgggcggattcgtaccgacggt

SEQ ID NO: 156224 - DNA, 30 bp, Artificial Sequence
  Synthetic oligonucleotide
ccggcggattgatagctatagaactacggt

SEQ ID NO: 156225 - DNA, 30 bp, Artificial Sequence
  Synthetic oligonucleotide
gacggggcgaaacaaaaaatgatctacggt

SEQ ID NO: 156226 - DNA, 30 bp, Artificial Sequence
  Synthetic oligonucleotide
acacagaactatataaaaagaaaaaccggt

SEQ ID NO: 156227 - DNA, 30 bp, Artificial Sequence
  Synthetic oligonucleotide
aacggcgtaaagcagcttaattccaccggt

SEQ ID NO: 156228 - DNA, 30 bp, Artificial Sequence
  Synthetic oligonucleotide
tgttggtgacacagtgctgataaccccggt

SEQ ID NO: 156229 - DNA, 30 bp, Artificial Sequence
  Synthetic oligonucleotide
ttcgttaccagatttaaagggagtcccggt

SEQ ID NO: 156230 - DNA, 30 bp, Artificial Sequence
  Synthetic oligonucleotide
aggaagagagcttcggttagtggggccggt

SEQ ID NO: 156231 - DNA, 30 bp, Artificial Sequence
  Synthetic oligonucleotide
aagccgcacggtctagaattgacgtccggt

SEQ ID NO: 156232 - DNA, 30 bp, Artificial Sequence
  Synthetic oligonucleotide
gccccaaagataactaaaaggtattccggt

SEQ ID NO: 156233 - DNA, 30 bp, Artificial Sequence
  Synthetic oligonucleotide
gcattcagcgaggccttcataggaagcggt

SEQ ID NO: 156234 - DNA, 30 bp, Artificial Sequence
  Synthetic oligonucleotide
gaggggaaaggtgcctgaagagggcgcggt

SEQ ID NO: 156235 - DNA, 30 bp, Artificial Sequence
  Synthetic oligonucleotide
agacgggaatttacgtgtgatactcgcggt

SEQ ID NO: 156236 - DNA, 30 bp, Artificial Sequence
  Synthetic oligonucleotide
caattgaaggagatagggaagcaaggcggt

SEQ ID NO: 156237 - DNA, 30 bp, Artificial Sequence
  Synthetic oligonucleotide
tggctatcctgattaggaaaggagggcggt

SEQ ID NO: 156238 - DNA, 30 bp, Artificial Sequence
  Synthetic oligonucleotide
gcgagtaaccggagatgtggtgagggcggt

SEQ ID NO: 156239 - DNA, 30 bp, Artificial Sequence
  Synthetic oligonucleotide
tcgaggttcgctcgcacgtaaggtggcggt

SEQ ID NO: 156240 - DNA, 30 bp, Artificial Sequence
  Synthetic oligonucleotide
tcatggtgtgtggctgggtcgatatgcggt

SEQ ID NO: 156241 - DNA, 30 bp, Artificial Sequence
  Synthetic oligonucleotide
aacaagaaaggatacagctttccttgcggt

SEQ ID NO: 156242 - DNA, 30 bp, Artificial Sequence
  Synthetic oligonucleotide
aggggactgtcgactgggtaatggatcggt

SEQ ID NO: 156243 - DNA, 30 bp, Artificial Sequence
  Synthetic oligonucleotide
cgcttcgacgataaaggaaaatagctcggt

SEQ ID NO: 156244 - DNA, 30 bp, Artificial Sequence
  Synthetic oligonucleotide
caagatcagagaagttattgctgtctcggt

SEQ ID NO: 156245 - DNA, 30 bp, Artificial Sequence
  Synthetic oligonucleotide
aacaaactgcagttttccacgaacgtcggt

SEQ ID NO: 156246 - DNA, 30 bp, Artificial Sequence
  Synthetic oligonucleotide
aaaggccaaaacatagtcaaacccgtcggt

SEQ ID NO: 156247 - DNA, 30 bp, Artificial Sequence
  Synthetic oligonucleotide
atatcgccaagtagacctaccgccgtcggt

SEQ ID NO: 156248 - DNA, 30 bp, Artificial Sequence
  Synthetic oligonucleotide
cggggtatagcgagcccgtaaagattcggt

SEQ ID NO: 156249 - DNA, 30 bp, Artificial Sequence
  Synthetic oligonucleotide
ttgtatcacatcgaatgatatgggaagggt

SEQ ID NO: 156250 - DNA, 30 bp, Artificial Sequence
  Synthetic oligonucleotide
ctgcggacgaaatagtctgttctgaagggt

SEQ ID NO: 156251 - DNA, 30 bp, Artificial Sequence
  Synthetic oligonucleotide
cacgcttacgatgtctcagagccacagggt

SEQ ID NO: 156252 - DNA, 30 bp, Artificial Sequence
  Synthetic oligonucleotide
cgagtgcaactactgctctatagccagggt

SEQ ID NO: 156253 - DNA, 30 bp, Artificial Sequence
  Synthetic oligonucleotide
cggtcgacggggatcttttccaagcagggt

SEQ ID NO: 156254 - DNA, 30 bp, Artificial Sequence
  Synthetic oligonucleotide
gcatttcccacgaaaggcacctggcagggt

SEQ ID NO: 156255 - DNA, 30 bp, Artificial Sequence
  Synthetic oligonucleotide
cggacaggtatatatatacgcgaagagggt

SEQ ID NO: 156256 - DNA, 30 bp, Artificial Sequence
  Synthetic oligonucleotide
atgaggtggagaaaaacgggcgccgagggt

SEQ ID NO: 156257 - DNA, 30 bp, Artificial Sequence
  Synthetic oligonucleotide
ctaactccgtgaatgactaccagcgagggt

SEQ ID NO: 156258 - DNA, 30 bp, Artificial Sequence
  Synthetic oligonucleotide
caagagatgaccggaattcggagtgagggt

SEQ ID NO: 156259 - DNA, 30 bp, Artificial Sequence
  Synthetic oligonucleotide
acgtaaagggtaaggacagggagtgagggt

SEQ ID NO: 156260 - DNA, 30 bp, Artificial Sequence
  Synthetic oligonucleotide
tgcgggcccagtcgcacgccacttgagggt

SEQ ID NO: 156261 - DNA, 30 bp, Artificial Sequence
  Synthetic oligonucleotide
tcggactatcgcgcatgcaggtcatagggt

SEQ ID NO: 156262 - DNA, 30 bp, Artificial Sequence
  Synthetic oligonucleotide
agccatgtgtcgtaagcccatcgaacgggt

SEQ ID NO: 156263 - DNA, 30 bp, Artificial Sequence
  Synthetic oligonucleotide
acaggatacagaaatgtccaccgatcgggt

SEQ ID NO: 156264 - DNA, 30 bp, Artificial Sequence
  Synthetic oligonucleotide
ggtatgccctaccccaacgttatatcgggt

SEQ ID NO: 156265 - DNA, 30 bp, Artificial Sequence
  Synthetic oligonucleotide
ccttatcagaccactatgtacgggtcgggt

SEQ ID NO: 156266 - DNA, 30 bp, Artificial Sequence
  Synthetic oligonucleotide
taatttacaaggcttgggcacgcttcgggt

SEQ ID NO: 156267 - DNA, 30 bp, Artificial Sequence
  Synthetic oligonucleotide
cctcgtgactcaggtaggctaatttcgggt

SEQ ID NO: 156268 - DNA, 30 bp, Artificial Sequence
  Synthetic oligonucleotide
gagagctgcaggcaaaatcgcatttcgggt

SEQ ID NO: 156269 - DNA, 30 bp, Artificial Sequence
  Synthetic oligonucleotide
ttcggtgcgctggttggcctcgtaaggggt

SEQ ID NO: 156270 - DNA, 30 bp, Artificial Sequence
  Synthetic oligonucleotide
taacaacattggcactctcctacgaggggt

SEQ ID NO: 156271 - DNA, 30 bp, Artificial Sequence
  Synthetic oligonucleotide
ctagtatccgtacccgagagccaacggggt

SEQ ID NO: 156272 - DNA, 30 bp, Artificial Sequence
  Synthetic oligonucleotide
cacacaggtaatggatataaacagcggggt

SEQ ID NO: 156273 - DNA, 30 bp, Artificial Sequence
  Synthetic oligonucleotide
agcttcccaaaaaattttaaagggcggggt

SEQ ID NO: 156274 - DNA, 30 bp, Artificial Sequence
  Synthetic oligonucleotide
aaccgtcagcccggggctaccaaagggggt

SEQ ID NO: 156275 - DNA, 30 bp, Artificial Sequence
  Synthetic oligonucleotide
ccatgccgatcgggtctccgcagagggggt

SEQ ID NO: 156276 - DNA, 30 bp, Artificial Sequence
  Synthetic oligonucleotide
tgcctgatagaggtttagtgacaggggggt

SEQ ID NO: 156277 - DNA, 30 bp, Artificial Sequence
  Synthetic oligonucleotide
tttagacaggaaggtgtgtactttgggggt

SEQ ID NO: 156278 - DNA, 30 bp, Artificial Sequence
  Synthetic oligonucleotide
taggcgcacgacggacaaaataaatggggt

SEQ ID NO: 156279 - DNA, 30 bp, Artificial Sequence
  Synthetic oligonucleotide
atggtcatagcgggctaactttcatggggt

SEQ ID NO: 156280 - DNA, 30 bp, Artificial Sequence
  Synthetic oligonucleotide
cttcaggctgaagcggcgatctggtggggt

SEQ ID NO: 156281 - DNA, 30 bp, Artificial Sequence
  Synthetic oligonucleotide
agagagagtatgcagggaggggcaatgggt

SEQ ID NO: 156282 - DNA, 30 bp, Artificial Sequence
  Synthetic oligonucleotide
gagcgatgtgcggctaaactgtacatgggt

SEQ ID NO: 156283 - DNA, 30 bp, Artificial Sequence
  Synthetic oligonucleotide
tcgtttcgcgtctcctggggagggatgggt

SEQ ID NO: 156284 - DNA, 30 bp, Artificial Sequence
  Synthetic oligonucleotide
ggtaggcttagttacaatctatatatgggt

SEQ ID NO: 156285 - DNA, 30 bp, Artificial Sequence
  Synthetic oligonucleotide
ttgcgtgccaggggtagtggcgctatgggt

SEQ ID NO: 156286 - DNA, 30 bp, Artificial Sequence
  Synthetic oligonucleotide
atgttaaatgtggtgacactagtcctgggt

SEQ ID NO: 156287 - DNA, 30 bp, Artificial Sequence
  Synthetic oligonucleotide
cggatatatttgtcagccaattacgtgggt

SEQ ID NO: 156288 - DNA, 30 bp, Artificial Sequence
  Synthetic oligonucleotide
gccaccagctcgaaggaacgggaggtgggt

SEQ ID NO: 156289 - DNA, 30 bp, Artificial Sequence
  Synthetic oligonucleotide
gttcattgagcgctagttctttcgaatggt

SEQ ID NO: 156290 - DNA, 30 bp, Artificial Sequence
  Synthetic oligonucleotide
atgcataggtgctcggcgggcgggaatggt

SEQ ID NO: 156291 - DNA, 30 bp, Artificial Sequence
  Synthetic oligonucleotide
gaccatagagtggattgaaattggcatggt

SEQ ID NO: 156292 - DNA, 30 bp, Artificial Sequence
  Synthetic oligonucleotide
aggcacagcaatttcgaataggctcatggt

SEQ ID NO: 156293 - DNA, 30 bp, Artificial Sequence
  Synthetic oligonucleotide
ggcgcccttgcggaacactataaagatggt

SEQ ID NO: 156294 - DNA, 30 bp, Artificial Sequence
  Synthetic oligonucleotide
agaagcttagaagttaggaccgccgatggt

SEQ ID NO: 156295 - DNA, 30 bp, Artificial Sequence
  Synthetic oligonucleotide
acagttcgttgtggggtaacttgtgatggt

SEQ ID NO: 156296 - DNA, 30 bp, Artificial Sequence
  Synthetic oligonucleotide
tgcgtacgaaccaggatagctaaatatggt

SEQ ID NO: 156297 - DNA, 30 bp, Artificial Sequence
  Synthetic oligonucleotide
acgttggttagataaccaccacactatggt

SEQ ID NO: 156298 - DNA, 31 bp, Artificial Sequence
  Synthetic oligonucleotide
tggttgatgggcggtcacaatgtgctatggt

SEQ ID NO: 156299 - DNA, 30 bp, Artificial Sequence
  Synthetic oligonucleotide
ggcaccgtacagcactattatgtctatggt

SEQ ID NO: 156300 - DNA, 30 bp, Artificial Sequence
  Synthetic oligonucleotide
tcagtccagtacggaaagatgatttatggt

SEQ ID NO: 156301 - DNA, 30 bp, Artificial Sequence
  Synthetic oligonucleotide
cgttgccattcgattgcgatcctttatggt

SEQ ID NO: 156302 - DNA, 30 bp, Artificial Sequence
  Synthetic oligonucleotide
cacacaggcgtcgacccttcaggaactggt

SEQ ID NO: 156303 - DNA, 30 bp, Artificial Sequence
  Synthetic oligonucleotide
ttggagtgctgcccgatcagaaggactggt

SEQ ID NO: 156304 - DNA, 30 bp, Artificial Sequence
  Synthetic oligonucleotide
gcgcgacgattaatgtgacgagtgactggt

SEQ ID NO: 156305 - DNA, 30 bp, Artificial Sequence
  Synthetic oligonucleotide
aaccctgtgtccataagaccggctactggt

SEQ ID NO: 156306 - DNA, 30 bp, Artificial Sequence
  Synthetic oligonucleotide
agttgctccaggacctagcgcaaacctggt

SEQ ID NO: 156307 - DNA, 30 bp, Artificial Sequence
  Synthetic oligonucleotide
ctgagaatgtggcgctatggtcgacctggt

SEQ ID NO: 156308 - DNA, 30 bp, Artificial Sequence
  Synthetic oligonucleotide
gcttctagagcaggatcagatttagctggt

SEQ ID NO: 156309 - DNA, 30 bp, Artificial Sequence
  Synthetic oligonucleotide
cgtatcgactctcagcactaaaccgctggt

SEQ ID NO: 156310 - DNA, 30 bp, Artificial Sequence
  Synthetic oligonucleotide
cgtcaggggatgctactggcagggtctggt

SEQ ID NO: 156311 - DNA, 30 bp, Artificial Sequence
  Synthetic oligonucleotide
cgcgacatctgagctaaggcagacagtggt

SEQ ID NO: 156312 - DNA, 30 bp, Artificial Sequence
  Synthetic oligonucleotide
gagcgtcaaactaaataaggacatagtggt

SEQ ID NO: 156313 - DNA, 30 bp, Artificial Sequence
  Synthetic oligonucleotide
catatcggccaggactaagctgttcgtggt

SEQ ID NO: 156314 - DNA, 30 bp, Artificial Sequence
  Synthetic oligonucleotide
ccgtactaaaggcagcttatgtcgggtggt

SEQ ID NO: 156315 - DNA, 30 bp, Artificial Sequence
  Synthetic oligonucleotide
gagaggaccaggtgattagcaagtggtggt

SEQ ID NO: 156316 - DNA, 30 bp, Artificial Sequence
  Synthetic oligonucleotide
cttttgagggtctagcaacgaagtggtggt

SEQ ID NO: 156317 - DNA, 30 bp, Artificial Sequence
  Synthetic oligonucleotide
acttgcggtgcttttgctattagtggtggt

SEQ ID NO: 156318 - DNA, 30 bp, Artificial Sequence
  Synthetic oligonucleotide
tcccattgtacaacggggtgtacatgtggt

SEQ ID NO: 156319 - DNA, 30 bp, Artificial Sequence
  Synthetic oligonucleotide
ccgcgcggaccagtggtaacgggatgtggt

SEQ ID NO: 156320 - DNA, 30 bp, Artificial Sequence
  Synthetic oligonucleotide
actgttgtggagatcactggtatatgtggt

SEQ ID NO: 156321 - DNA, 30 bp, Artificial Sequence
  Synthetic oligonucleotide
tcgactcgaaggccactcagtgagtgtggt

SEQ ID NO: 156322 - DNA, 30 bp, Artificial Sequence
  Synthetic oligonucleotide
gcgtgacaaaatcctatcgttgtttgtggt

SEQ ID NO: 156323 - DNA, 30 bp, Artificial Sequence
  Synthetic oligonucleotide
tcgggatgaagttattagatgtaaattggt

SEQ ID NO: 156324 - DNA, 30 bp, Artificial Sequence
  Synthetic oligonucleotide
atgcgatcgttccgtgagatcgtgattggt

SEQ ID NO: 156325 - DNA, 30 bp, Artificial Sequence
  Synthetic oligonucleotide
ggcgatctatccatgtcatcaggccttggt

SEQ ID NO: 156326 - DNA, 30 bp, Artificial Sequence
  Synthetic oligonucleotide
cgacatcatgagttcgagtgagacgttggt

SEQ ID NO: 156327 - DNA, 30 bp, Artificial Sequence
  Synthetic oligonucleotide
aaaaccggataaaggagacttgtcgttggt

SEQ ID NO: 156328 - DNA, 30 bp, Artificial Sequence
  Synthetic oligonucleotide
ttaagggctataggggagcgaggctttggt

SEQ ID NO: 156329 - DNA, 30 bp, Artificial Sequence
  Synthetic oligonucleotide
acacgtggcagatgctagattgattttggt

SEQ ID NO: 156330 - DNA, 30 bp, Artificial Sequence
  Synthetic oligonucleotide
gtggattgggaatttagatcaagttttggt

SEQ ID NO: 156331 - DNA, 30 bp, Artificial Sequence
  Synthetic oligonucleotide
tgccagggcaaaatgtgccggcccaaatgt

SEQ ID NO: 156332 - DNA, 30 bp, Artificial Sequence
  Synthetic oligonucleotide
aatagaggggttagatctagtgctaaatgt

SEQ ID NO: 156333 - DNA, 30 bp, Artificial Sequence
  Synthetic oligonucleotide
ggctagactcagtgccaagcttatcaatgt

SEQ ID NO: 156334 - DNA, 30 bp, Artificial Sequence
  Synthetic oligonucleotide
gggcgttggctcctcagaaagtgggaatgt

SEQ ID NO: 156335 - DNA, 30 bp, Artificial Sequence
  Synthetic oligonucleotide
taggcctagtcgcaattatctgtggaatgt

SEQ ID NO: 156336 - DNA, 30 bp, Artificial Sequence
  Synthetic oligonucleotide
cgcagagagtaggagatgctcattgaatgt

SEQ ID NO: 156337 - DNA, 30 bp, Artificial Sequence
  Synthetic oligonucleotide
gctgggactttgagcgcctcgaaaacatgt

SEQ ID NO: 156338 - DNA, 30 bp, Artificial Sequence
  Synthetic oligonucleotide
catggaggtccgtaggggcaacaaacatgt

SEQ ID NO: 156339 - DNA, 30 bp, Artificial Sequence
  Synthetic oligonucleotide
agcggaccaacttacttgttgaatacatgt

SEQ ID NO: 156340 - DNA, 30 bp, Artificial Sequence
  Synthetic oligonucleotide
ttaaggtatagagatcgaaatccaccatgt

SEQ ID NO: 156341 - DNA, 30 bp, Artificial Sequence
  Synthetic oligonucleotide
gccgatgacatactttactcctgagcatgt

SEQ ID NO: 156342 - DNA, 31 bp, Artificial Sequence
  Synthetic oligonucleotide
tgcggttcgtacaatttactggaaatcatgt

SEQ ID NO: 156343 - DNA, 30 bp, Artificial Sequence
  Synthetic oligonucleotide
atcaggggcaaatagcaggcggagtcatgt

SEQ ID NO: 156344 - DNA, 30 bp, Artificial Sequence
  Synthetic oligonucleotide
ttacgcaatggaaatacgaggcattcatgt

SEQ ID NO: 156345 - DNA, 30 bp, Artificial Sequence
  Synthetic oligonucleotide
gacatagtgttggtgactattagcagatgt

SEQ ID NO: 156346 - DNA, 30 bp, Artificial Sequence
  Synthetic oligonucleotide
gaattgcgactacggacggcacaaggatgt

SEQ ID NO: 156347 - DNA, 30 bp, Artificial Sequence
  Synthetic oligonucleotide
cccaattcctgtaataacaggggaggatgt

SEQ ID NO: 156348 - DNA, 30 bp, Artificial Sequence
  Synthetic oligonucleotide
gcccaccgatgcttcgaaatgaccggatgt

SEQ ID NO: 156349 - DNA, 30 bp, Artificial Sequence
  Synthetic oligonucleotide
cacccggcatttattggtccaagcggatgt

SEQ ID NO: 156350 - DNA, 30 bp, Artificial Sequence
  Synthetic oligonucleotide
ccacgtcgcggccagctaattggcggatgt

SEQ ID NO: 156351 - DNA, 30 bp, Artificial Sequence
  Synthetic oligonucleotide
ttggatacgagtgccatgtatcagggatgt

SEQ ID NO: 156352 - DNA, 30 bp, Artificial Sequence
  Synthetic oligonucleotide
agcggtatgaagtaacatccagcgggatgt

SEQ ID NO: 156353 - DNA, 30 bp, Artificial Sequence
  Synthetic oligonucleotide
cggggattcgcactaaattggagctgatgt

SEQ ID NO: 156354 - DNA, 30 bp, Artificial Sequence
  Synthetic oligonucleotide
ataaggtaagacggccgacggtacctatgt

SEQ ID NO: 156355 - DNA, 30 bp, Artificial Sequence
  Synthetic oligonucleotide
taaggaacgagagttccctcgatcctatgt

SEQ ID NO: 156356 - DNA, 30 bp, Artificial Sequence
  Synthetic oligonucleotide
tgatagttcgaccagcgtaaaacagtatgt

SEQ ID NO: 156357 - DNA, 30 bp, Artificial Sequence
  Synthetic oligonucleotide
gcgcataggggagtatatcgcccagtatgt

SEQ ID NO: 156358 - DNA, 30 bp, Artificial Sequence
  Synthetic oligonucleotide
cgcagtaattcccacatggccagagtatgt

SEQ ID NO: 156359 - DNA, 30 bp, Artificial Sequence
  Synthetic oligonucleotide
accctatagggaaatctcgtacagttatgt

SEQ ID NO: 156360 - DNA, 30 bp, Artificial Sequence
  Synthetic oligonucleotide
ggcacccagcaaaacacatttatgaactgt

SEQ ID NO: 156361 - DNA, 30 bp, Artificial Sequence
  Synthetic oligonucleotide
gaatatctcggcaggaagaaagtgaactgt

SEQ ID NO: 156362 - DNA, 30 bp, Artificial Sequence
  Synthetic oligonucleotide
cgtaggggctaatcattcaatactcactgt

SEQ ID NO: 156363 - DNA, 31 bp, Artificial Sequence
  Synthetic oligonucleotide
gagatggggagccagtattactaccgactgt

SEQ ID NO: 156364 - DNA, 30 bp, Artificial Sequence
  Synthetic oligonucleotide
ggctgtgcctaacaactgtaaagggactgt

SEQ ID NO: 156365 - DNA, 30 bp, Artificial Sequence
  Synthetic oligonucleotide
cggtcctaggggaatatgcaaaaaacctgt

SEQ ID NO: 156366 - DNA, 30 bp, Artificial Sequence
  Synthetic oligonucleotide
cctggttgtgattccgaggagataacctgt

SEQ ID NO: 156367 - DNA, 31 bp, Artificial Sequence
  Synthetic oligonucleotide
tcattgggtgttgctagagcgcgggacctgt

SEQ ID NO: 156368 - DNA, 30 bp, Artificial Sequence
  Synthetic oligonucleotide
tcatattcagcctgcgcgaatcatacctgt

SEQ ID NO: 156369 - DNA, 30 bp, Artificial Sequence
  Synthetic oligonucleotide
agctaaacgatctatataggtagtacctgt

SEQ ID NO: 156370 - DNA, 30 bp, Artificial Sequence
  Synthetic oligonucleotide
atatagaactgactgatcccactagcctgt

SEQ ID NO: 156371 - DNA, 30 bp, Artificial Sequence
  Synthetic oligonucleotide
gtcatcggatcctgcgggccagccgcctgt

SEQ ID NO: 156372 - DNA, 30 bp, Artificial Sequence
  Synthetic oligonucleotide
tggctaaaaggtgacacccgacgtgcctgt

SEQ ID NO: 156373 - DNA, 30 bp, Artificial Sequence
  Synthetic oligonucleotide
tgtggggggtcgcggatggtgcgctcctgt

SEQ ID NO: 156374 - DNA, 30 bp, Artificial Sequence
  Synthetic oligonucleotide
gggcattggaaaagagcacaacattcctgt

SEQ ID NO: 156375 - DNA, 30 bp, Artificial Sequence
  Synthetic oligonucleotide
gagagataaattatgagtgttcagagctgt

SEQ ID NO: 156376 - DNA, 30 bp, Artificial Sequence
  Synthetic oligonucleotide
tacacccagaaaactgcaaccctgagctgt

SEQ ID NO: 156377 - DNA, 30 bp, Artificial Sequence
  Synthetic oligonucleotide
gacgaagaacacagacgcagaagaggctgt

SEQ ID NO: 156378 - DNA, 30 bp, Artificial Sequence
  Synthetic oligonucleotide
ttaccataagctaatatattgggtggctgt

SEQ ID NO: 156379 - DNA, 30 bp, Artificial Sequence
  Synthetic oligonucleotide
ccaaagttctcttatggagccgttggctgt

SEQ ID NO: 156380 - DNA, 30 bp, Artificial Sequence
  Synthetic oligonucleotide
cacgcgttaccccacaaggatgattgctgt

SEQ ID NO: 156381 - DNA, 30 bp, Artificial Sequence
  Synthetic oligonucleotide
gtgtgtcgcgagggcatcagccgcatctgt

SEQ ID NO: 156382 - DNA, 30 bp, Artificial Sequence
  Synthetic oligonucleotide
aaaacatcgacccaagacatagagatctgt

SEQ ID NO: 156383 - DNA, 30 bp, Artificial Sequence
  Synthetic oligonucleotide
tgcgaccgttgttctgaattttcgctctgt

SEQ ID NO: 156384 - DNA, 30 bp, Artificial Sequence
  Synthetic oligonucleotide
ctataaactaacttttgtgggagcgtctgt

SEQ ID NO: 156385 - DNA, 30 bp, Artificial Sequence
  Synthetic oligonucleotide
agagcacggcatataatgtagggggtctgt

SEQ ID NO: 156386 - DNA, 30 bp, Artificial Sequence
  Synthetic oligonucleotide
tgacgaattgtaagataacacgtattctgt

SEQ ID NO: 156387 - DNA, 30 bp, Artificial Sequence
  Synthetic oligonucleotide
gcgcgagctgtagaggttgcttaaaagtgt

SEQ ID NO: 156388 - DNA, 30 bp, Artificial Sequence
  Synthetic oligonucleotide
tgtagcgcggttccccgtggtaacaagtgt

SEQ ID NO: 156389 - DNA, 30 bp, Artificial Sequence
  Synthetic oligonucleotide
catcactagaaaatgtgactactcaagtgt

SEQ ID NO: 156390 - DNA, 31 bp, Artificial Sequence
  Synthetic oligonucleotide
aggaaatatctcatagattttaattaagtgt

SEQ ID NO: 156391 - DNA, 30 bp, Artificial Sequence
  Synthetic oligonucleotide
catcacattgccctgtaggacaaacagtgt

SEQ ID NO: 156392 - DNA, 30 bp, Artificial Sequence
  Synthetic oligonucleotide
gtaacgatggacgagtggcatcagcagtgt

SEQ ID NO: 156393 - DNA, 30 bp, Artificial Sequence
  Synthetic oligonucleotide
ggcacaactcgggcaatcccatacgagtgt

SEQ ID NO: 156394 - DNA, 30 bp, Artificial Sequence
  Synthetic oligonucleotide
ggccaggcccatgaataccggttcgagtgt

SEQ ID NO: 156395 - DNA, 30 bp, Artificial Sequence
  Synthetic oligonucleotide
gcaacatgacaaattaggttacgatagtgt

SEQ ID NO: 156396 - DNA, 30 bp, Artificial Sequence
  Synthetic oligonucleotide
ctgcacgtacgacgtggtctgcggtagtgt

SEQ ID NO: 156397 - DNA, 30 bp, Artificial Sequence
  Synthetic oligonucleotide
tcatatgggaagatatgagtacgttagtgt

SEQ ID NO: 156398 - DNA, 30 bp, Artificial Sequence
  Synthetic oligonucleotide
aggtcttcccgactggagcccaaaacgtgt

SEQ ID NO: 156399 - DNA, 30 bp, Artificial Sequence
  Synthetic oligonucleotide
taggggtgaaagaacgatcatgtgacgtgt

SEQ ID NO: 156400 - DNA, 30 bp, Artificial Sequence
  Synthetic oligonucleotide
tcaaagacgagtgaatagcagtttacgtgt

SEQ ID NO: 156401 - DNA, 30 bp, Artificial Sequence
  Synthetic oligonucleotide
gttcaattgtctgcaaactaggacgcgtgt

SEQ ID NO: 156402 - DNA, 30 bp, Artificial Sequence
  Synthetic oligonucleotide
ggtgggatcacacagtgtcggggcgcgtgt

SEQ ID NO: 156403 - DNA, 30 bp, Artificial Sequence
  Synthetic oligonucleotide
ggtgagcaaatcagatggacccaggcgtgt

SEQ ID NO: 156404 - DNA, 30 bp, Artificial Sequence
  Synthetic oligonucleotide
tcaactatcggcgaagtataataatcgtgt

SEQ ID NO: 156405 - DNA, 30 bp, Artificial Sequence
  Synthetic oligonucleotide
ggcctactggtacccgcatgtgtatcgtgt

SEQ ID NO: 156406 - DNA, 30 bp, Artificial Sequence
  Synthetic oligonucleotide
ggaatacttctccccttagtactctcgtgt

SEQ ID NO: 156407 - DNA, 30 bp, Artificial Sequence
  Synthetic oligonucleotide
acgttgggtcaacttcagaagccgtcgtgt

SEQ ID NO: 156408 - DNA, 30 bp, Artificial Sequence
  Synthetic oligonucleotide
ggggaatatatatgcaaggacaattcgtgt

SEQ ID NO: 156409 - DNA, 30 bp, Artificial Sequence
  Synthetic oligonucleotide
ggagttggtcggtcgtagaaaagttcgtgt

SEQ ID NO: 156410 - DNA, 30 bp, Artificial Sequence
  Synthetic oligonucleotide
tcctgattagcgcacgggtggataaggtgt

SEQ ID NO: 156411 - DNA, 30 bp, Artificial Sequence
  Synthetic oligonucleotide
cactccgataccctacaaaaagctaggtgt

SEQ ID NO: 156412 - DNA, 30 bp, Artificial Sequence
  Synthetic oligonucleotide
tgggtacgagcctcgttgggactccggtgt

SEQ ID NO: 156413 - DNA, 30 bp, Artificial Sequence
  Synthetic oligonucleotide
ctgggaacgggacgcgggggatgtcggtgt

SEQ ID NO: 156414 - DNA, 30 bp, Artificial Sequence
  Synthetic oligonucleotide
gacaggactagctgcgtcatgttagggtgt

SEQ ID NO: 156415 - DNA, 30 bp, Artificial Sequence
  Synthetic oligonucleotide
tagtagatcacgagctcgggtgacgggtgt

SEQ ID NO: 156416 - DNA, 30 bp, Artificial Sequence
  Synthetic oligonucleotide
atcacggagacccaatggctcgaatggtgt

SEQ ID NO: 156417 - DNA, 30 bp, Artificial Sequence
  Synthetic oligonucleotide
ggtgcaggtcttcgattcattacctggtgt

SEQ ID NO: 156418 - DNA, 30 bp, Artificial Sequence
  Synthetic oligonucleotide
gtgggggaggcaccagtgagtaagtggtgt

SEQ ID NO: 156419 - DNA, 30 bp, Artificial Sequence
  Synthetic oligonucleotide
atagcaagacgtttcgccaataacatgtgt

SEQ ID NO: 156420 - DNA, 30 bp, Artificial Sequence
  Synthetic oligonucleotide
ttacaaaagcagcaaataataggcatgtgt

SEQ ID NO: 156421 - DNA, 30 bp, Artificial Sequence
  Synthetic oligonucleotide
tcgataggaaaagacccggcagtgatgtgt

SEQ ID NO: 156422 - DNA, 30 bp, Artificial Sequence
  Synthetic oligonucleotide
gcggacagggaccattcaattaaactgtgt

SEQ ID NO: 156423 - DNA, 30 bp, Artificial Sequence
  Synthetic oligonucleotide
ggtgatttcttggagtagtgcaagctgtgt

SEQ ID NO: 156424 - DNA, 30 bp, Artificial Sequence
  Synthetic oligonucleotide
atcgtccgaggtatcgttgtgtagctgtgt

SEQ ID NO: 156425 - DNA, 30 bp, Artificial Sequence
  Synthetic oligonucleotide
ggcttgcacagagggagtactcgagtgtgt

SEQ ID NO: 156426 - DNA, 30 bp, Artificial Sequence
  Synthetic oligonucleotide
gactgaatatgcctcgtttatggagtgtgt

SEQ ID NO: 156427 - DNA, 30 bp, Artificial Sequence
  Synthetic oligonucleotide
cgtcgtcagcatagagcgcgtggagtgtgt

SEQ ID NO: 156428 - DNA, 30 bp, Artificial Sequence
  Synthetic oligonucleotide
cctacagtacctactacaagtcgcgtgtgt

SEQ ID NO: 156429 - DNA, 30 bp, Artificial Sequence
  Synthetic oligonucleotide
tcgtgacagacaaacactaaggaattgtgt

SEQ ID NO: 156430 - DNA, 30 bp, Artificial Sequence
  Synthetic oligonucleotide
tgcgagtggggagggggcgtttggttgtgt

SEQ ID NO: 156431 - DNA, 30 bp, Artificial Sequence
  Synthetic oligonucleotide
ctaaatcgcgggtgtaattatcgtttgtgt

SEQ ID NO: 156432 - DNA, 30 bp, Artificial Sequence
  Synthetic oligonucleotide
ggcgtgggtcgccaactgcaggttttgtgt

SEQ ID NO: 156433 - DNA, 30 bp, Artificial Sequence
  Synthetic oligonucleotide
cagtgtttatcgcacccagatcgaaattgt

SEQ ID NO: 156434 - DNA, 30 bp, Artificial Sequence
  Synthetic oligonucleotide
ggtgaggcgtggaatcatacgtgaaattgt

SEQ ID NO: 156435 - DNA, 30 bp, Artificial Sequence
  Synthetic oligonucleotide
aaaagagtagtcaatctgagtataaattgt

SEQ ID NO: 156436 - DNA, 30 bp, Artificial Sequence
  Synthetic oligonucleotide
cagcccgagggcctatgtacagtgcattgt

SEQ ID NO: 156437 - DNA, 31 bp, Artificial Sequence
  Synthetic oligonucleotide
acttcagccacgggatataatgtgggattgt

SEQ ID NO: 156438 - DNA, 30 bp, Artificial Sequence
  Synthetic oligonucleotide
gggatcatggaatactgtggtatggattgt

SEQ ID NO: 156439 - DNA, 30 bp, Artificial Sequence
  Synthetic oligonucleotide
gcggcagggtgtcaccaagtcggtgattgt

SEQ ID NO: 156440 - DNA, 30 bp, Artificial Sequence
  Synthetic oligonucleotide
aatcgtgcgagggtcactggctgtgattgt

SEQ ID NO: 156441 - DNA, 30 bp, Artificial Sequence
  Synthetic oligonucleotide
ttgctagctcgtctccaactgccatattgt

SEQ ID NO: 156442 - DNA, 30 bp, Artificial Sequence
  Synthetic oligonucleotide
cctaagttatattggtctcggtccacttgt

SEQ ID NO: 156443 - DNA, 30 bp, Artificial Sequence
  Synthetic oligonucleotide
catattaaagctttaccacgattcacttgt

SEQ ID NO: 156444 - DNA, 30 bp, Artificial Sequence
  Synthetic oligonucleotide
cctgacactacgatgataagatcgacttgt

SEQ ID NO: 156445 - DNA, 31 bp, Artificial Sequence
  Synthetic oligonucleotide
cttaaaggggggcggtctcactttgccttgt

SEQ ID NO: 156446 - DNA, 30 bp, Artificial Sequence
  Synthetic oligonucleotide
agtcggtgttaaaaaattgatgtggcttgt

SEQ ID NO: 156447 - DNA, 30 bp, Artificial Sequence
  Synthetic oligonucleotide
taagtggggagcggtcttccgattgcttgt

SEQ ID NO: 156448 - DNA, 30 bp, Artificial Sequence
  Synthetic oligonucleotide
aagagaatgatactctggagataatcttgt

SEQ ID NO: 156449 - DNA, 30 bp, Artificial Sequence
  Synthetic oligonucleotide
gagcaacaggcgtgccgacagccaagttgt

SEQ ID NO: 156450 - DNA, 30 bp, Artificial Sequence
  Synthetic oligonucleotide
atggcctgccagcagttgaacggaagttgt

SEQ ID NO: 156451 - DNA, 30 bp, Artificial Sequence
  Synthetic oligonucleotide
atcaaggaggccgcgagagatgccagttgt

SEQ ID NO: 156452 - DNA, 30 bp, Artificial Sequence
  Synthetic oligonucleotide
atatgtgatgagggcctgattgctagttgt

SEQ ID NO: 156453 - DNA, 30 bp, Artificial Sequence
  Synthetic oligonucleotide
ggaagtagtcacctgacgtgagtacgttgt

SEQ ID NO: 156454 - DNA, 30 bp, Artificial Sequence
  Synthetic oligonucleotide
agtacgtaagcgaatcctatcgtacgttgt

SEQ ID NO: 156455 - DNA, 30 bp, Artificial Sequence
  Synthetic oligonucleotide
ttaacgacacgatgggggtactcaggttgt

SEQ ID NO: 156456 - DNA, 30 bp, Artificial Sequence
  Synthetic oligonucleotide
gctagtctcacttgcgcgaccaggggttgt

SEQ ID NO: 156457 - DNA, 30 bp, Artificial Sequence
  Synthetic oligonucleotide
tgggggctaagaggctagttgaatggttgt

SEQ ID NO: 156458 - DNA, 30 bp, Artificial Sequence
  Synthetic oligonucleotide
caccagcgtcgaccttaatcgtatggttgt

SEQ ID NO: 156459 - DNA, 30 bp, Artificial Sequence
  Synthetic oligonucleotide
aatgtaagcaacgccaaaacgcgatgttgt

SEQ ID NO: 156460 - DNA, 30 bp, Artificial Sequence
  Synthetic oligonucleotide
tgcgctgtaacgtaggccagaagctgttgt

SEQ ID NO: 156461 - DNA, 30 bp, Artificial Sequence
  Synthetic oligonucleotide
tacaagggacgatgcatacggaaaatttgt

SEQ ID NO: 156462 - DNA, 30 bp, Artificial Sequence
  Synthetic oligonucleotide
ttcacggcgagttagatcgcctaaatttgt

SEQ ID NO: 156463 - DNA, 30 bp, Artificial Sequence
  Synthetic oligonucleotide
ggaacccacactaactcagttcaactttgt

SEQ ID NO: 156464 - DNA, 30 bp, Artificial Sequence
  Synthetic oligonucleotide
cgcgtaaagcaaggggataatgcgctttgt

SEQ ID NO: 156465 - DNA, 30 bp, Artificial Sequence
  Synthetic oligonucleotide
gctgagcaagtcgatcgtaacaggctttgt

SEQ ID NO: 156466 - DNA, 30 bp, Artificial Sequence
  Synthetic oligonucleotide
acgacagtgtcgtgtaagtggctgctttgt

SEQ ID NO: 156467 - DNA, 30 bp, Artificial Sequence
  Synthetic oligonucleotide
gaactggcacgcacagttttggatctttgt

SEQ ID NO: 156468 - DNA, 30 bp, Artificial Sequence
  Synthetic oligonucleotide
agtggccccaactgcggatagcaagtttgt

SEQ ID NO: 156469 - DNA, 30 bp, Artificial Sequence
  Synthetic oligonucleotide
acttcacaggggagaaccgtgagagtttgt

SEQ ID NO: 156470 - DNA, 30 bp, Artificial Sequence
  Synthetic oligonucleotide
atctgtcggacagtgggaacggtagtttgt

SEQ ID NO: 156471 - DNA, 30 bp, Artificial Sequence
  Synthetic oligonucleotide
catcagcacagcgccatagataccgtttgt

SEQ ID NO: 156472 - DNA, 30 bp, Artificial Sequence
  Synthetic oligonucleotide
acgccaaacagtctgatggatcgattttgt

SEQ ID NO: 156473 - DNA, 30 bp, Artificial Sequence
  Synthetic oligonucleotide
aaggccattcacgatggggggtggttttgt

SEQ ID NO: 156474 - DNA, 30 bp, Artificial Sequence
  Synthetic oligonucleotide
atagtcgcgatatcacgaattcatttttgt

SEQ ID NO: 156475 - DNA, 30 bp, Artificial Sequence
  Synthetic oligonucleotide
cggtgcttaccgtgaacgtgagatttttgt

SEQ ID NO: 156476 - DNA, 30 bp, Artificial Sequence
  Synthetic oligonucleotide
ctggctgacgaaggggtgacaggtttttgt

SEQ ID NO: 156477 - DNA, 30 bp, Artificial Sequence
  Synthetic oligonucleotide
atagcgatgactgccaactaccagaaaatt

SEQ ID NO: 156478 - DNA, 30 bp, Artificial Sequence
  Synthetic oligonucleotide
accgcgctttaaacgaaaaccaataaaatt

SEQ ID NO: 156479 - DNA, 30 bp, Artificial Sequence
  Synthetic oligonucleotide
caccaaaggccgacagccgtgcctaaaatt

SEQ ID NO: 156480 - DNA, 30 bp, Artificial Sequence
  Synthetic oligonucleotide
ccagtacgttttagagagtcaagacaaatt

SEQ ID NO: 156481 - DNA, 30 bp, Artificial Sequence
  Synthetic oligonucleotide
accctccgatgattggaaagtaggcaaatt

SEQ ID NO: 156482 - DNA, 30 bp, Artificial Sequence
  Synthetic oligonucleotide
gaagatcaagatgcaaacgaaagggaaatt

SEQ ID NO: 156483 - DNA, 30 bp, Artificial Sequence
  Synthetic oligonucleotide
gcccgatttagaattaaacgggttgaaatt

SEQ ID NO: 156484 - DNA, 30 bp, Artificial Sequence
  Synthetic oligonucleotide
caatgagcaacttcatgaccaagataaatt

SEQ ID NO: 156485 - DNA, 30 bp, Artificial Sequence
  Synthetic oligonucleotide
ggttatgagctccccaagtcacgataaatt

SEQ ID NO: 156486 - DNA, 30 bp, Artificial Sequence
  Synthetic oligonucleotide
acgtacccggcaagatagtaacagtaaatt

SEQ ID NO: 156487 - DNA, 30 bp, Artificial Sequence
  Synthetic oligonucleotide
ctgcaactttccggtgcttggtggtaaatt

SEQ ID NO: 156488 - DNA, 30 bp, Artificial Sequence
  Synthetic oligonucleotide
ccactactcactggatacgttcagacaatt

SEQ ID NO: 156489 - DNA, 30 bp, Artificial Sequence
  Synthetic oligonucleotide
tgtgacaaagtctttgcgtaccggacaatt

SEQ ID NO: 156490 - DNA, 30 bp, Artificial Sequence
  Synthetic oligonucleotide
ctccaatacgccaagtccagtgggacaatt

SEQ ID NO: 156491 - DNA, 30 bp, Artificial Sequence
  Synthetic oligonucleotide
agatcggggccgtgtactgcctggacaatt

SEQ ID NO: 156492 - DNA, 30 bp, Artificial Sequence
  Synthetic oligonucleotide
tggaggggtattcccagtgcgccaccaatt

SEQ ID NO: 156493 - DNA, 30 bp, Artificial Sequence
  Synthetic oligonucleotide
gaagggtacctcaggcaatattccccaatt

SEQ ID NO: 156494 - DNA, 30 bp, Artificial Sequence
  Synthetic oligonucleotide
cggcataaattagaacgagaagtcccaatt

SEQ ID NO: 156495 - DNA, 30 bp, Artificial Sequence
  Synthetic oligonucleotide
ccagcatgttcgaaatttcaagctccaatt

SEQ ID NO: 156496 - DNA, 30 bp, Artificial Sequence
  Synthetic oligonucleotide
gaagatgaataaccgtgatcaagtccaatt

SEQ ID NO: 156497 - DNA, 30 bp, Artificial Sequence
  Synthetic oligonucleotide
ccaaagtacctgcatcggcgggtggcaatt

SEQ ID NO: 156498 - DNA, 30 bp, Artificial Sequence
  Synthetic oligonucleotide
tgggaaacaacggtgcgcaaaacctcaatt

SEQ ID NO: 156499 - DNA, 30 bp, Artificial Sequence
  Synthetic oligonucleotide
ccaagcagtaaaatgaaaatgggctcaatt

SEQ ID NO: 156500 - DNA, 30 bp, Artificial Sequence
  Synthetic oligonucleotide
ggaaatacggttactatcaatctgtcaatt

SEQ ID NO: 156501 - DNA, 30 bp, Artificial Sequence
  Synthetic oligonucleotide
cctaagttaagagggggacagcccagaatt

SEQ ID NO: 156502 - DNA, 30 bp, Artificial Sequence
  Synthetic oligonucleotide
ctgtatacgtgtgatcgtactatgcgaatt

SEQ ID NO: 156503 - DNA, 30 bp, Artificial Sequence
  Synthetic oligonucleotide
agcaaagctaagtacggcgagaatcgaatt

SEQ ID NO: 156504 - DNA, 30 bp, Artificial Sequence
  Synthetic oligonucleotide
gtcttaagttagggtttgggctatcgaatt

SEQ ID NO: 156505 - DNA, 30 bp, Artificial Sequence
  Synthetic oligonucleotide
caacgacgatataacgctgctagaggaatt

SEQ ID NO: 156506 - DNA, 30 bp, Artificial Sequence
  Synthetic oligonucleotide
tcaccagggccgtggggacgaatcggaatt

SEQ ID NO: 156507 - DNA, 30 bp, Artificial Sequence
  Synthetic oligonucleotide
ccggaacaagtggttatggagatcggaatt

SEQ ID NO: 156508 - DNA, 30 bp, Artificial Sequence
  Synthetic oligonucleotide
cagggggcggatgcgtatggagctggaatt

SEQ ID NO: 156509 - DNA, 30 bp, Artificial Sequence
  Synthetic oligonucleotide
tcagtatccaatgatggggataaatgaatt

SEQ ID NO: 156510 - DNA, 30 bp, Artificial Sequence
  Synthetic oligonucleotide
accaatcgtagagggaaccgggaatgaatt

SEQ ID NO: 156511 - DNA, 30 bp, Artificial Sequence
  Synthetic oligonucleotide
cacgttactagcgtaactagatcgtgaatt

SEQ ID NO: 156512 - DNA, 30 bp, Artificial Sequence
  Synthetic oligonucleotide
gcgcagcgcagtccggggcgcgattgaatt

SEQ ID NO: 156513 - DNA, 30 bp, Artificial Sequence
  Synthetic oligonucleotide
gtaatctagttagcatgtcaaccaataatt

SEQ ID NO: 156514 - DNA, 30 bp, Artificial Sequence
  Synthetic oligonucleotide
ggatctagggaaaccactgagctaataatt

SEQ ID NO: 156515 - DNA, 30 bp, Artificial Sequence
  Synthetic oligonucleotide
ataccgggaatatggcaggtaacgataatt

SEQ ID NO: 156516 - DNA, 30 bp, Artificial Sequence
  Synthetic oligonucleotide
tgagggggcacgtacgaacaatatataatt

SEQ ID NO: 156517 - DNA, 30 bp, Artificial Sequence
  Synthetic oligonucleotide
atacccattcgggtctcaccacaactaatt

SEQ ID NO: 156518 - DNA, 30 bp, Artificial Sequence
  Synthetic oligonucleotide
acgaagtgcatttgactattcatactaatt

SEQ ID NO: 156519 - DNA, 29 bp, Artificial Sequence
  Synthetic oligonucleotide
tagcggatgaaaagctgctggtcctaatt

SEQ ID NO: 156520 - DNA, 30 bp, Artificial Sequence
  Synthetic oligonucleotide
gggcacccggcggaagagttgagagtaatt

SEQ ID NO: 156521 - DNA, 30 bp, Artificial Sequence
  Synthetic oligonucleotide
cacacgagaaaggcccgacagctggtaatt

SEQ ID NO: 156522 - DNA, 30 bp, Artificial Sequence
  Synthetic oligonucleotide
gtaaagacaccaacttttgaacatgtaatt

SEQ ID NO: 156523 - DNA, 30 bp, Artificial Sequence
  Synthetic oligonucleotide
aggccctgacgggcgtgcgggcttgtaatt

SEQ ID NO: 156524 - DNA, 30 bp, Artificial Sequence
  Synthetic oligonucleotide
gcgaaaagaggaacaattgcatagttaatt

SEQ ID NO: 156525 - DNA, 30 bp, Artificial Sequence
  Synthetic oligonucleotide
accaaggagtcagagacggtccggttaatt

SEQ ID NO: 156526 - DNA, 30 bp, Artificial Sequence
  Synthetic oligonucleotide
ccggtaggaatgcccagggcgtaacacatt

SEQ ID NO: 156527 - DNA, 30 bp, Artificial Sequence
  Synthetic oligonucleotide
gtcccaaatatcaattgcgcatgacacatt

SEQ ID NO: 156528 - DNA, 30 bp, Artificial Sequence
  Synthetic oligonucleotide
tcagggattcaacaactaaggtgtcacatt

SEQ ID NO: 156529 - DNA, 30 bp, Artificial Sequence
  Synthetic oligonucleotide
ttatcagttcgtgataaatggatcgacatt

SEQ ID NO: 156530 - DNA, 30 bp, Artificial Sequence
  Synthetic oligonucleotide
gttatcggcatgtcgtatattggtgacatt

SEQ ID NO: 156531 - DNA, 30 bp, Artificial Sequence
  Synthetic oligonucleotide
gttgagaaaagtgagttcttgcaatacatt

SEQ ID NO: 156532 - DNA, 30 bp, Artificial Sequence
  Synthetic oligonucleotide
gtcgcgttgcacccctagtaggattacatt

SEQ ID NO: 156533 - DNA, 30 bp, Artificial Sequence
  Synthetic oligonucleotide
gtgaaaatgaacgagttgagttaaaccatt

SEQ ID NO: 156534 - DNA, 30 bp, Artificial Sequence
  Synthetic oligonucleotide
attgtccccaaacagcacattggaaccatt

SEQ ID NO: 156535 - DNA, 30 bp, Artificial Sequence
  Synthetic oligonucleotide
tgggctccctcgtgtactgtcaggaccatt

SEQ ID NO: 156536 - DNA, 30 bp, Artificial Sequence
  Synthetic oligonucleotide
agtaggggcgttcggcatctagctaccatt

SEQ ID NO: 156537 - DNA, 30 bp, Artificial Sequence
  Synthetic oligonucleotide
cgagcatcgccacgcatgaagcaacccatt

SEQ ID NO: 156538 - DNA, 30 bp, Artificial Sequence
  Synthetic oligonucleotide
ttgggagtggacgttgcgaggtcccccatt

SEQ ID NO: 156539 - DNA, 30 bp, Artificial Sequence
  Synthetic oligonucleotide
tgcagtagtcagttaaatccgaagcccatt

SEQ ID NO: 156540 - DNA, 30 bp, Artificial Sequence
  Synthetic oligonucleotide
gcaagattcgtaggggataataggcccatt

SEQ ID NO: 156541 - DNA, 30 bp, Artificial Sequence
  Synthetic oligonucleotide
ggggattcctggagatgtcaggcagccatt

SEQ ID NO: 156542 - DNA, 30 bp, Artificial Sequence
  Synthetic oligonucleotide
gcacgcaaaatatgttacatggcggccatt

SEQ ID NO: 156543 - DNA, 30 bp, Artificial Sequence
  Synthetic oligonucleotide
agggcgaatcgacccccgggtagtgccatt

SEQ ID NO: 156544 - DNA, 30 bp, Artificial Sequence
  Synthetic oligonucleotide
caccgctgaagacgagtcttaggcagcatt

SEQ ID NO: 156545 - DNA, 30 bp, Artificial Sequence
  Synthetic oligonucleotide
actagacttggtgatggcaatactagcatt

SEQ ID NO: 156546 - DNA, 30 bp, Artificial Sequence
  Synthetic oligonucleotide
agcaccctcgttgctgtaatccagtgcatt

SEQ ID NO: 156547 - DNA, 30 bp, Artificial Sequence
  Synthetic oligonucleotide
tgaaacaggttgccttagatactttgcatt

SEQ ID NO: 156548 - DNA, 30 bp, Artificial Sequence
  Synthetic oligonucleotide
tcagaagggaacgaatggaaccatatcatt

SEQ ID NO: 156549 - DNA, 30 bp, Artificial Sequence
  Synthetic oligonucleotide
cacgagtgtcttcacgatatgcttatcatt

SEQ ID NO: 156550 - DNA, 30 bp, Artificial Sequence
  Synthetic oligonucleotide
tcggctaaaacgtaacgctagtgactcatt

SEQ ID NO: 156551 - DNA, 30 bp, Artificial Sequence
  Synthetic oligonucleotide
agccgtgccatagggagtgtgttgctcatt

SEQ ID NO: 156552 - DNA, 30 bp, Artificial Sequence
  Synthetic oligonucleotide
ccgagtggagtttctggtattaatctcatt

SEQ ID NO: 156553 - DNA, 31 bp, Artificial Sequence
  Synthetic oligonucleotide
agtgcataaacttacggcccaatgagtcatt

SEQ ID NO: 156554 - DNA, 31 bp, Artificial Sequence
  Synthetic oligonucleotide
ccatacgtaaggtgatatcaaacccgtcatt

SEQ ID NO: 156555 - DNA, 30 bp, Artificial Sequence
  Synthetic oligonucleotide
gacccagtaggtaaacaaacggttgtcatt

SEQ ID NO: 156556 - DNA, 30 bp, Artificial Sequence
  Synthetic oligonucleotide
tcagtagggaatgggtggctgtaattcatt

SEQ ID NO: 156557 - DNA, 30 bp, Artificial Sequence
  Synthetic oligonucleotide
gttcattttggtacaagggacgacttcatt

SEQ ID NO: 156558 - DNA, 30 bp, Artificial Sequence
  Synthetic oligonucleotide
gcgtcgtagacctagtacggctgaaagatt

SEQ ID NO: 156559 - DNA, 30 bp, Artificial Sequence
  Synthetic oligonucleotide
tcggcgggagagaggcgggagcggaagatt

SEQ ID NO: 156560 - DNA, 30 bp, Artificial Sequence
  Synthetic oligonucleotide
actgactgcgtactacactcagggaagatt

SEQ ID NO: 156561 - DNA, 30 bp, Artificial Sequence
  Synthetic oligonucleotide
gatgagagtaacccgctcggttctaagatt

SEQ ID NO: 156562 - DNA, 30 bp, Artificial Sequence
  Synthetic oligonucleotide
gtaaggtccgcgagactggctattcagatt

SEQ ID NO: 156563 - DNA, 30 bp, Artificial Sequence
  Synthetic oligonucleotide
gctacgaagattacatccttagacgagatt

SEQ ID NO: 156564 - DNA, 30 bp, Artificial Sequence
  Synthetic oligonucleotide
ccacacgtagatggagttgaggtggagatt

SEQ ID NO: 156565 - DNA, 30 bp, Artificial Sequence
  Synthetic oligonucleotide
cacccacatcatgaggacgagaattagatt

SEQ ID NO: 156566 - DNA, 30 bp, Artificial Sequence
  Synthetic oligonucleotide
ggcgcgatccatgtaagcggaagttagatt

SEQ ID NO: 156567 - DNA, 30 bp, Artificial Sequence
  Synthetic oligonucleotide
gtgtggttcgctcttgtgaggtggacgatt

SEQ ID NO: 156568 - DNA, 30 bp, Artificial Sequence
  Synthetic oligonucleotide
acaaagcggtacaattcctagaagccgatt

SEQ ID NO: 156569 - DNA, 30 bp, Artificial Sequence
  Synthetic oligonucleotide
cagccgggcatccgggagacgaggccgatt

SEQ ID NO: 156570 - DNA, 30 bp, Artificial Sequence
  Synthetic oligonucleotide
agttggattactaaggagagcaaagcgatt

SEQ ID NO: 156571 - DNA, 30 bp, Artificial Sequence
  Synthetic oligonucleotide
atcctaggactggggaagcactgagcgatt

SEQ ID NO: 156572 - DNA, 30 bp, Artificial Sequence
  Synthetic oligonucleotide
gttgataacacgtggccctggcaatcgatt

SEQ ID NO: 156573 - DNA, 30 bp, Artificial Sequence
  Synthetic oligonucleotide
atacagaagctaataccctcttgatcgatt

SEQ ID NO: 156574 - DNA, 30 bp, Artificial Sequence
  Synthetic oligonucleotide
aacgacactaacacttgattaacaaggatt

SEQ ID NO: 156575 - DNA, 30 bp, Artificial Sequence
  Synthetic oligonucleotide
ctactccgccagagtcgtaatgagaggatt

SEQ ID NO: 156576 - DNA, 30 bp, Artificial Sequence
  Synthetic oligonucleotide
cttgacactaataaaagtatgccgaggatt

SEQ ID NO: 156577 - DNA, 30 bp, Artificial Sequence
  Synthetic oligonucleotide
tcttagacaaggttgattagcaataggatt

SEQ ID NO: 156578 - DNA, 30 bp, Artificial Sequence
  Synthetic oligonucleotide
cgcaaattacaatagccaagcaaccggatt

SEQ ID NO: 156579 - DNA, 30 bp, Artificial Sequence
  Synthetic oligonucleotide
aagacgtcgagagacctgcttctgcggatt

SEQ ID NO: 156580 - DNA, 30 bp, Artificial Sequence
  Synthetic oligonucleotide
gtgaaaactggcaaggtcaacgtcgggatt

SEQ ID NO: 156581 - DNA, 30 bp, Artificial Sequence
  Synthetic oligonucleotide
acgttacgctcgataaacaatatggggatt

SEQ ID NO: 156582 - DNA, 30 bp, Artificial Sequence
  Synthetic oligonucleotide
agtatagcgtaaggcacaacgcaatggatt

SEQ ID NO: 156583 - DNA, 30 bp, Artificial Sequence
  Synthetic oligonucleotide
cttcgggttgtcgtgtaagtgggatggatt

SEQ ID NO: 156584 - DNA, 30 bp, Artificial Sequence
  Synthetic oligonucleotide
tccaattagggcgtcaattgtagctggatt

SEQ ID NO: 156585 - DNA, 30 bp, Artificial Sequence
  Synthetic oligonucleotide
ccgcgctatgcgggatgaagtaagtggatt

SEQ ID NO: 156586 - DNA, 30 bp, Artificial Sequence
  Synthetic oligonucleotide
tctgggcaaatgtatgtatattgttggatt

SEQ ID NO: 156587 - DNA, 30 bp, Artificial Sequence
  Synthetic oligonucleotide
cgtaagcacagaattgcgtaataaatgatt

SEQ ID NO: 156588 - DNA, 30 bp, Artificial Sequence
  Synthetic oligonucleotide
ctgtaattatgaaatagggtgacgatgatt

SEQ ID NO: 156589 - DNA, 30 bp, Artificial Sequence
  Synthetic oligonucleotide
tcacagtgatttcttcatacttggatgatt

SEQ ID NO: 156590 - DNA, 30 bp, Artificial Sequence
  Synthetic oligonucleotide
gctagagggtcccggccgatacatatgatt

SEQ ID NO: 156591 - DNA, 30 bp, Artificial Sequence
  Synthetic oligonucleotide
atacgaatcgtaattctatgggcactgatt

SEQ ID NO: 156592 - DNA, 30 bp, Artificial Sequence
  Synthetic oligonucleotide
tatcacgggatggatgtaagggccctgatt

SEQ ID NO: 156593 - DNA, 30 bp, Artificial Sequence
  Synthetic oligonucleotide
tagggattgatccgttaagtgacagtgatt

SEQ ID NO: 156594 - DNA, 30 bp, Artificial Sequence
  Synthetic oligonucleotide
tagaggcggtctgcgtggaagacggtgatt

SEQ ID NO: 156595 - DNA, 30 bp, Artificial Sequence
  Synthetic oligonucleotide
gtgggttcgcaaatggtacgccctgtgatt

SEQ ID NO: 156596 - DNA, 30 bp, Artificial Sequence
  Synthetic oligonucleotide
atagtaagagtacagaggagttctttgatt

SEQ ID NO: 156597 - DNA, 30 bp, Artificial Sequence
  Synthetic oligonucleotide
tcaaccgcaagaaaattacgagcaaatatt

SEQ ID NO: 156598 - DNA, 30 bp, Artificial Sequence
  Synthetic oligonucleotide
gaggccgggtaattcacaatcggacatatt

SEQ ID NO: 156599 - DNA, 30 bp, Artificial Sequence
  Synthetic oligonucleotide
acggcgagttctacctaccgagtacatatt

SEQ ID NO: 156600 - DNA, 30 bp, Artificial Sequence
  Synthetic oligonucleotide
acgacatggatcaggtcagatttacatatt

SEQ ID NO: 156601 - DNA, 30 bp, Artificial Sequence
  Synthetic oligonucleotide
aactggaagcggcacaagccttaccatatt

SEQ ID NO: 156602 - DNA, 30 bp, Artificial Sequence
  Synthetic oligonucleotide
ccttgccaagagagctcccatgtccatatt

SEQ ID NO: 156603 - DNA, 30 bp, Artificial Sequence
  Synthetic oligonucleotide
tccagaggagcgatcattgctcagcatatt

SEQ ID NO: 156604 - DNA, 30 bp, Artificial Sequence
  Synthetic oligonucleotide
gctacttgatacgaaataggctaagatatt

SEQ ID NO: 156605 - DNA, 30 bp, Artificial Sequence
  Synthetic oligonucleotide
tgaaaggggtgctctagaagcagcgatatt

SEQ ID NO: 156606 - DNA, 30 bp, Artificial Sequence
  Synthetic oligonucleotide
cggatacactggaatacaaggactgatatt

SEQ ID NO: 156607 - DNA, 30 bp, Artificial Sequence
  Synthetic oligonucleotide
acgtgcaagtaaggccggcaacgtgatatt

SEQ ID NO: 156608 - DNA, 30 bp, Artificial Sequence
  Synthetic oligonucleotide
agagcgccaccgtaatccatatgtgatatt

SEQ ID NO: 156609 - DNA, 30 bp, Artificial Sequence
  Synthetic oligonucleotide
tgctcgctgtgcccatacccgatatatatt

SEQ ID NO: 156610 - DNA, 30 bp, Artificial Sequence
  Synthetic oligonucleotide
atggccaaagttgccatgctttcctatatt

SEQ ID NO: 156611 - DNA, 30 bp, Artificial Sequence
  Synthetic oligonucleotide
gcgttggatatggggtatagcggcactatt

SEQ ID NO: 156612 - DNA, 30 bp, Artificial Sequence
  Synthetic oligonucleotide
tcgaagacgctttgggttgagccgactatt

SEQ ID NO: 156613 - DNA, 30 bp, Artificial Sequence
  Synthetic oligonucleotide
tacaaatatcacactaacaacactactatt

SEQ ID NO: 156614 - DNA, 30 bp, Artificial Sequence
  Synthetic oligonucleotide
gtgcggcagaggctggtcaagtgacctatt

SEQ ID NO: 156615 - DNA, 30 bp, Artificial Sequence
  Synthetic oligonucleotide
aggaagacgtcggcccttctcagtcctatt

SEQ ID NO: 156616 - DNA, 30 bp, Artificial Sequence
  Synthetic oligonucleotide
gcgtgtaggtagccagtgtatgatgctatt

SEQ ID NO: 156617 - DNA, 30 bp, Artificial Sequence
  Synthetic oligonucleotide
cgtacgagtccttgccatcatcgctctatt

SEQ ID NO: 156618 - DNA, 30 bp, Artificial Sequence
  Synthetic oligonucleotide
gagtcaatgtcaaaaatgttagggtctatt

SEQ ID NO: 156619 - DNA, 30 bp, Artificial Sequence
  Synthetic oligonucleotide
ggacatgcgataaatgtaaaacgttctatt

SEQ ID NO: 156620 - DNA, 30 bp, Artificial Sequence
  Synthetic oligonucleotide
ggttgggcatggtaatcgtgcatttctatt

SEQ ID NO: 156621 - DNA, 30 bp, Artificial Sequence
  Synthetic oligonucleotide
tgcaaggataattatggatagtcaagtatt

SEQ ID NO: 156622 - DNA, 30 bp, Artificial Sequence
  Synthetic oligonucleotide
ttggcctcggatcagtactgccacagtatt

SEQ ID NO: 156623 - DNA, 30 bp, Artificial Sequence
  Synthetic oligonucleotide
acagcctgatcaaactaaccatggagtatt

SEQ ID NO: 156624 - DNA, 30 bp, Artificial Sequence
  Synthetic oligonucleotide
agggagcacggctgggcgtatgtgagtatt

SEQ ID NO: 156625 - DNA, 30 bp, Artificial Sequence
  Synthetic oligonucleotide
aggtaataacgcgttgtgatcattagtatt

SEQ ID NO: 156626 - DNA, 30 bp, Artificial Sequence
  Synthetic oligonucleotide
atgtaccgcctaggttctcaagttagtatt

SEQ ID NO: 156627 - DNA, 40 bp, Artificial Sequence
  Synthetic oligonucleotide
attgcatttcatctcctcgcattcaatgccggcgcgtatt

SEQ ID NO: 156628 - DNA, 30 bp, Artificial Sequence
  Synthetic oligonucleotide
cgacagagggtcaacaacggcttaggtatt

SEQ ID NO: 156629 - DNA, 30 bp, Artificial Sequence
  Synthetic oligonucleotide
cgtagtctacttcagtatcggtagggtatt

SEQ ID NO: 156630 - DNA, 30 bp, Artificial Sequence
  Synthetic oligonucleotide
gtggggcgttctagacaaccggttggtatt

SEQ ID NO: 156631 - DNA, 30 bp, Artificial Sequence
  Synthetic oligonucleotide
cgttgatatggacaacgagtgaactgtatt

SEQ ID NO: 156632 - DNA, 30 bp, Artificial Sequence
  Synthetic oligonucleotide
tctcctctcgggccggcagtgacctgtatt

SEQ ID NO: 156633 - DNA, 30 bp, Artificial Sequence
  Synthetic oligonucleotide
cggtccgggtaatgttgtatcagctgtatt

SEQ ID NO: 156634 - DNA, 30 bp, Artificial Sequence
  Synthetic oligonucleotide
cggcgcatcacaggtttcgatggctgtatt

SEQ ID NO: 156635 - DNA, 30 bp, Artificial Sequence
  Synthetic oligonucleotide
tgcaactaggttagcgacaagtattgtatt

SEQ ID NO: 156636 - DNA, 30 bp, Artificial Sequence
  Synthetic oligonucleotide
taggcgattcgaggccctcaaccaattatt

SEQ ID NO: 156637 - DNA, 30 bp, Artificial Sequence
  Synthetic oligonucleotide
ggttaggcaaaggttataagggcaattatt

SEQ ID NO: 156638 - DNA, 30 bp, Artificial Sequence
  Synthetic oligonucleotide
ctttagccgaaacggctatacgaccttatt

SEQ ID NO: 156639 - DNA, 30 bp, Artificial Sequence
  Synthetic oligonucleotide
cacggatacagtacacacgagttccttatt

SEQ ID NO: 156640 - DNA, 30 bp, Artificial Sequence
  Synthetic oligonucleotide
aaagccacctgcgtcgggacaggtcttatt

SEQ ID NO: 156641 - DNA, 30 bp, Artificial Sequence
  Synthetic oligonucleotide
cgatagacacgcaacgtaggacgagttatt

SEQ ID NO: 156642 - DNA, 30 bp, Artificial Sequence
  Synthetic oligonucleotide
gaggagggtaaaccaatcagcatagttatt

SEQ ID NO: 156643 - DNA, 30 bp, Artificial Sequence
  Synthetic oligonucleotide
caaatccctgatggttgtatgatagttatt

SEQ ID NO: 156644 - DNA, 30 bp, Artificial Sequence
  Synthetic oligonucleotide
acgcgtccctctttctcgtatgtggttatt

SEQ ID NO: 156645 - DNA, 30 bp, Artificial Sequence
  Synthetic oligonucleotide
tgattgggctaagctagacagtaaaaactt

SEQ ID NO: 156646 - DNA, 30 bp, Artificial Sequence
  Synthetic oligonucleotide
ttcaaaagatcgagaccagtacgaaaactt

SEQ ID NO: 156647 - DNA, 30 bp, Artificial Sequence
  Synthetic oligonucleotide
acgtctcatcgggacgcgactagtaaactt

SEQ ID NO: 156648 - DNA, 30 bp, Artificial Sequence
  Synthetic oligonucleotide
gagatcaccttgcatcttggagaccaactt

SEQ ID NO: 156649 - DNA, 30 bp, Artificial Sequence
  Synthetic oligonucleotide
gcttcgagggcttagtagggcggtcaactt

SEQ ID NO: 156650 - DNA, 30 bp, Artificial Sequence
  Synthetic oligonucleotide
gaagggtgcgaagcaaaaaaatccgaactt

SEQ ID NO: 156651 - DNA, 30 bp, Artificial Sequence
  Synthetic oligonucleotide
tcgtaaagcggggattatccgcgcgaactt

SEQ ID NO: 156652 - DNA, 30 bp, Artificial Sequence
  Synthetic oligonucleotide
tgagggaaatggtcgcgtttgccggaactt

SEQ ID NO: 156653 - DNA, 30 bp, Artificial Sequence
  Synthetic oligonucleotide
ttatggcgagttacatgccagtcggaactt

SEQ ID NO: 156654 - DNA, 30 bp, Artificial Sequence
  Synthetic oligonucleotide
ggttagatacaggataataagactgaactt

SEQ ID NO: 156655 - DNA, 30 bp, Artificial Sequence
  Synthetic oligonucleotide
gcaatccgtcagtcgtgactacagtaactt

SEQ ID NO: 156656 - DNA, 30 bp, Artificial Sequence
  Synthetic oligonucleotide
aagtcagctcagcgcatggagataacactt

SEQ ID NO: 156657 - DNA, 30 bp, Artificial Sequence
  Synthetic oligonucleotide
cggagtcagctccggttggcctttacactt

SEQ ID NO: 156658 - DNA, 30 bp, Artificial Sequence
  Synthetic oligonucleotide
agcagagaattacaaaagcaatcaccactt

SEQ ID NO: 156659 - DNA, 30 bp, Artificial Sequence
  Synthetic oligonucleotide
acatgacgaaataaagcttgtatgccactt

SEQ ID NO: 156660 - DNA, 30 bp, Artificial Sequence
  Synthetic oligonucleotide
gcgtcataacgctctaagtgacttccactt

SEQ ID NO: 156661 - DNA, 30 bp, Artificial Sequence
  Synthetic oligonucleotide
tcgccacgccaacgagaatcaagagcactt

SEQ ID NO: 156662 - DNA, 30 bp, Artificial Sequence
  Synthetic oligonucleotide
tcaatcggtgctgacctctagcaatcactt

SEQ ID NO: 156663 - DNA, 30 bp, Artificial Sequence
  Synthetic oligonucleotide
atagacatatccctgcccacgtattcactt

SEQ ID NO: 156664 - DNA, 30 bp, Artificial Sequence
  Synthetic oligonucleotide
gtgaaccttgcacaagacacctccagactt

SEQ ID NO: 156665 - DNA, 30 bp, Artificial Sequence
  Synthetic oligonucleotide
agaggtttaagccgtaacttttcaggactt

SEQ ID NO: 156666 - DNA, 30 bp, Artificial Sequence
  Synthetic oligonucleotide
ctggcccattgtctctgtttgcggggactt

SEQ ID NO: 156667 - DNA, 30 bp, Artificial Sequence
  Synthetic oligonucleotide
tgagacttacgagtatgatgtgggggactt

SEQ ID NO: 156668 - DNA, 30 bp, Artificial Sequence
  Synthetic oligonucleotide
tgttggcaacgacgtgcggtattgggactt

SEQ ID NO: 156669 - DNA, 30 bp, Artificial Sequence
  Synthetic oligonucleotide
ccgagcttccgtagtcatggccagtgactt

SEQ ID NO: 156670 - DNA, 30 bp, Artificial Sequence
  Synthetic oligonucleotide
cgcaaaaagcgcactccagattagtgactt

SEQ ID NO: 156671 - DNA, 30 bp, Artificial Sequence
  Synthetic oligonucleotide
taccatataacagcaggaccatagatactt

SEQ ID NO: 156672 - DNA, 30 bp, Artificial Sequence
  Synthetic oligonucleotide
agttagtgcaaggttttagtccgactactt

SEQ ID NO: 156673 - DNA, 30 bp, Artificial Sequence
  Synthetic oligonucleotide
tagaaggcgctctgagctaaggagctactt

SEQ ID NO: 156674 - DNA, 30 bp, Artificial Sequence
  Synthetic oligonucleotide
tggcgtgtaacgacccgttgatggctactt

SEQ ID NO: 156675 - DNA, 30 bp, Artificial Sequence
  Synthetic oligonucleotide
tctgccctgccggagcggacgctggtactt

SEQ ID NO: 156676 - DNA, 30 bp, Artificial Sequence
  Synthetic oligonucleotide
taacggatgaaacgtgtagggttattactt

SEQ ID NO: 156677 - DNA, 30 bp, Artificial Sequence
  Synthetic oligonucleotide
acgtaaaggaaacaggcaaagtatttactt

SEQ ID NO: 156678 - DNA, 30 bp, Artificial Sequence
  Synthetic oligonucleotide
ctccgatgtgtgttaggaaactgtttactt

SEQ ID NO: 156679 - DNA, 30 bp, Artificial Sequence
  Synthetic oligonucleotide
catgttcaggatagcgggtacaagcacctt

SEQ ID NO: 156680 - DNA, 30 bp, Artificial Sequence
  Synthetic oligonucleotide
ctacgtgtacaccaggagcgcagtcacctt

SEQ ID NO: 156681 - DNA, 30 bp, Artificial Sequence
  Synthetic oligonucleotide
gtctcacacatttcataaatttccgacctt

SEQ ID NO: 156682 - DNA, 30 bp, Artificial Sequence
  Synthetic oligonucleotide
acacgataggctacgctttacggcgacctt

SEQ ID NO: 156683 - DNA, 30 bp, Artificial Sequence
  Synthetic oligonucleotide
agcgtatgaggtactttgacagcatacctt

SEQ ID NO: 156684 - DNA, 30 bp, Artificial Sequence
  Synthetic oligonucleotide
ggcatccggacgtattacaggctatacctt

SEQ ID NO: 156685 - DNA, 30 bp, Artificial Sequence
  Synthetic oligonucleotide
tcgcactgataaacattttcagcgtacctt

SEQ ID NO: 156686 - DNA, 30 bp, Artificial Sequence
  Synthetic oligonucleotide
ccacgaaggagaccctgatggaccaccctt

SEQ ID NO: 156687 - DNA, 30 bp, Artificial Sequence
  Synthetic oligonucleotide
gacgtcgtcacatattatagttcgaccctt

SEQ ID NO: 156688 - DNA, 30 bp, Artificial Sequence
  Synthetic oligonucleotide
ccgtgaggttgacgattccatggacccctt

SEQ ID NO: 156689 - DNA, 30 bp, Artificial Sequence
  Synthetic oligonucleotide
ctgaacgagagaaaaataaccgcccccctt

SEQ ID NO: 156690 - DNA, 30 bp, Artificial Sequence
  Synthetic oligonucleotide
tgatcagcgattttgaagtgttgagccctt

SEQ ID NO: 156691 - DNA, 30 bp, Artificial Sequence
  Synthetic oligonucleotide
ggtctatagctggaactccgacagtccctt

SEQ ID NO: 156692 - DNA, 30 bp, Artificial Sequence
  Synthetic oligonucleotide
ctaggaatgaacaggggtggctaccgcctt

SEQ ID NO: 156693 - DNA, 30 bp, Artificial Sequence
  Synthetic oligonucleotide
actcttcactgaatcatcgaaaatcgcctt

SEQ ID NO: 156694 - DNA, 30 bp, Artificial Sequence
  Synthetic oligonucleotide
agtagtaccgctgtagtggaatagggcctt

SEQ ID NO: 156695 - DNA, 30 bp, Artificial Sequence
  Synthetic oligonucleotide
agcaggttatctaggaacggctcatgcctt

SEQ ID NO: 156696 - DNA, 30 bp, Artificial Sequence
  Synthetic oligonucleotide
cgtgacacacctcacaccgcgacttgcctt

SEQ ID NO: 156697 - DNA, 30 bp, Artificial Sequence
  Synthetic oligonucleotide
gtagggtagagacatcagaagcaaatcctt

SEQ ID NO: 156698 - DNA, 30 bp, Artificial Sequence
  Synthetic oligonucleotide
cccgagaggtgtcgaatagggcaactcctt

SEQ ID NO: 156699 - DNA, 30 bp, Artificial Sequence
  Synthetic oligonucleotide
cggaaccgggagcttgtcaagagggtcctt

SEQ ID NO: 156700 - DNA, 30 bp, Artificial Sequence
  Synthetic oligonucleotide
ccggtaggttgattgcgcgaaactgtcctt

SEQ ID NO: 156701 - DNA, 30 bp, Artificial Sequence
  Synthetic oligonucleotide
agtggcaagtagggtagtactttattcctt

SEQ ID NO: 156702 - DNA, 30 bp, Artificial Sequence
  Synthetic oligonucleotide
atgtcatggcaaatattcacggcgttcctt

SEQ ID NO: 156703 - DNA, 30 bp, Artificial Sequence
  Synthetic oligonucleotide
cggacggcggttcatgcgagtgcgttcctt

SEQ ID NO: 156704 - DNA, 30 bp, Artificial Sequence
  Synthetic oligonucleotide
agaggtagtacaggcctctgcccgaagctt

SEQ ID NO: 156705 - DNA, 30 bp, Artificial Sequence
  Synthetic oligonucleotide
atgctcgcgtgggttgatactaggaagctt

SEQ ID NO: 156706 - DNA, 30 bp, Artificial Sequence
  Synthetic oligonucleotide
gtatagtggcgtcgatacctttaccagctt

SEQ ID NO: 156707 - DNA, 30 bp, Artificial Sequence
  Synthetic oligonucleotide
catgtttcgcctcgcaacccagagcagctt

SEQ ID NO: 156708 - DNA, 30 bp, Artificial Sequence
  Synthetic oligonucleotide
agcatccgttgttagcttagaagagagctt

SEQ ID NO: 156709 - DNA, 30 bp, Artificial Sequence
  Synthetic oligonucleotide
gttcgagaataattcgtcatttttgagctt

SEQ ID NO: 156710 - DNA, 30 bp, Artificial Sequence
  Synthetic oligonucleotide
cggctagggactcccccaaacagatagctt

SEQ ID NO: 156711 - DNA, 30 bp, Artificial Sequence
  Synthetic oligonucleotide
ccagagatcataaatcggtacccgtagctt

SEQ ID NO: 156712 - DNA, 30 bp, Artificial Sequence
  Synthetic oligonucleotide
tgtgcgtccgtattatcacaaaggtagctt

SEQ ID NO: 156713 - DNA, 30 bp, Artificial Sequence
  Synthetic oligonucleotide
tcctaaaatgcaaagaccgggggttagctt

SEQ ID NO: 156714 - DNA, 30 bp, Artificial Sequence
  Synthetic oligonucleotide
tattggaagattaagaaggccaccacgctt

SEQ ID NO: 156715 - DNA, 30 bp, Artificial Sequence
  Synthetic oligonucleotide
gcagcaggacttggaactgtgcacccgctt

SEQ ID NO: 156716 - DNA, 30 bp, Artificial Sequence
  Synthetic oligonucleotide
ggatagcccatgcagtgtactgtgccgctt

SEQ ID NO: 156717 - DNA, 30 bp, Artificial Sequence
  Synthetic oligonucleotide
ggaaacgacaatgaacgatggggtgcgctt

SEQ ID NO: 156718 - DNA, 30 bp, Artificial Sequence
  Synthetic oligonucleotide
gtcgaaaagtgcgtagccctcttatcgctt

SEQ ID NO: 156719 - DNA, 30 bp, Artificial Sequence
  Synthetic oligonucleotide
caaaaccacagccgagactcctggtcgctt

SEQ ID NO: 156720 - DNA, 30 bp, Artificial Sequence
  Synthetic oligonucleotide
agcgagatctcctatggaatttgaaggctt

SEQ ID NO: 156721 - DNA, 30 bp, Artificial Sequence
  Synthetic oligonucleotide
ctgatacatcccgaaactcaggacaggctt

SEQ ID NO: 156722 - DNA, 30 bp, Artificial Sequence
  Synthetic oligonucleotide
acgggtcgcatgaacgcgcaaatcaggctt

SEQ ID NO: 156723 - DNA, 30 bp, Artificial Sequence
  Synthetic oligonucleotide
aagcagaagtccaacttcgctgagaggctt

SEQ ID NO: 156724 - DNA, 30 bp, Artificial Sequence
  Synthetic oligonucleotide
ggcattgaaagatgtttcatggtgaggctt

SEQ ID NO: 156725 - DNA, 30 bp, Artificial Sequence
  Synthetic oligonucleotide
tctggcgagccagtagggggcgctaggctt

SEQ ID NO: 156726 - DNA, 30 bp, Artificial Sequence
  Synthetic oligonucleotide
agcttcatcggacagtctatttttaggctt

SEQ ID NO: 156727 - DNA, 29 bp, Artificial Sequence
  Synthetic oligonucleotide
cttaatgagagtcatcttattgccggctt

SEQ ID NO: 156728 - DNA, 30 bp, Artificial Sequence
  Synthetic oligonucleotide
ttgtcagcgtactgagagtcagatcggctt

SEQ ID NO: 156729 - DNA, 30 bp, Artificial Sequence
  Synthetic oligonucleotide
tcacctcgttatgagatcatttgtcggctt

SEQ ID NO: 156730 - DNA, 30 bp, Artificial Sequence
  Synthetic oligonucleotide
ggtgaatatcgtcaaggttgtctagggctt

SEQ ID NO: 156731 - DNA, 30 bp, Artificial Sequence
  Synthetic oligonucleotide
tggtctcgatagtccagaaagaacgggctt

SEQ ID NO: 156732 - DNA, 30 bp, Artificial Sequence
  Synthetic oligonucleotide
tatacatcgtgtcagtttcgtttcgggctt

SEQ ID NO: 156733 - DNA, 30 bp, Artificial Sequence
  Synthetic oligonucleotide
tccaggtttaacaaaggccaactggggctt

SEQ ID NO: 156734 - DNA, 30 bp, Artificial Sequence
  Synthetic oligonucleotide
ttctaagggccagatgacccgattgggctt

SEQ ID NO: 156735 - DNA, 30 bp, Artificial Sequence
  Synthetic oligonucleotide
gccagaatacctattagcctacaaatgctt

SEQ ID NO: 156736 - DNA, 30 bp, Artificial Sequence
  Synthetic oligonucleotide
atgagagatgtccgtaaaatttatatgctt

SEQ ID NO: 156737 - DNA, 30 bp, Artificial Sequence
  Synthetic oligonucleotide
tcgcgtagccacgaactatgcctactgctt

SEQ ID NO: 156738 - DNA, 30 bp, Artificial Sequence
  Synthetic oligonucleotide
cagtacacaggcaatcgggggtatctgctt

SEQ ID NO: 156739 - DNA, 30 bp, Artificial Sequence
  Synthetic oligonucleotide
tattaaatgtaggtgtgataccctgtgctt

SEQ ID NO: 156740 - DNA, 30 bp, Artificial Sequence
  Synthetic oligonucleotide
acacgcataatagctagtttatcgaatctt

SEQ ID NO: 156741 - DNA, 30 bp, Artificial Sequence
  Synthetic oligonucleotide
gcggaagtgagtcttatgagaaatcatctt

SEQ ID NO: 156742 - DNA, 30 bp, Artificial Sequence
  Synthetic oligonucleotide
gcatgactagtcatcgtgacccctcatctt

SEQ ID NO: 156743 - DNA, 30 bp, Artificial Sequence
  Synthetic oligonucleotide
cgttaattttggcaatcctcggttcatctt

SEQ ID NO: 156744 - DNA, 30 bp, Artificial Sequence
  Synthetic oligonucleotide
atcaagcacagggggtccgccggagatctt

SEQ ID NO: 156745 - DNA, 30 bp, Artificial Sequence
  Synthetic oligonucleotide
tgaacggtgtatccgtaatagggagatctt

SEQ ID NO: 156746 - DNA, 30 bp, Artificial Sequence
  Synthetic oligonucleotide
ggatatcacgagggtaatcctctagatctt

SEQ ID NO: 156747 - DNA, 30 bp, Artificial Sequence
  Synthetic oligonucleotide
ggagaaactttcggagatcaaatcgatctt

SEQ ID NO: 156748 - DNA, 30 bp, Artificial Sequence
  Synthetic oligonucleotide
acggattgggggattgcttcaaaggatctt

SEQ ID NO: 156749 - DNA, 30 bp, Artificial Sequence
  Synthetic oligonucleotide
tagaggcaataaaaaggaaaacatgatctt

SEQ ID NO: 156750 - DNA, 30 bp, Artificial Sequence
  Synthetic oligonucleotide
gtcggaagtctccgataggtcggatatctt

SEQ ID NO: 156751 - DNA, 30 bp, Artificial Sequence
  Synthetic oligonucleotide
cagggtaatgatagtcgattggtgtatctt

SEQ ID NO: 156752 - DNA, 30 bp, Artificial Sequence
  Synthetic oligonucleotide
agggagagttcgtacgaaaagtcttatctt

SEQ ID NO: 156753 - DNA, 30 bp, Artificial Sequence
  Synthetic oligonucleotide
gtcagccgtgaaacgagctagctttatctt

SEQ ID NO: 156754 - DNA, 30 bp, Artificial Sequence
  Synthetic oligonucleotide
gatcacgagctgagtttaccggcaactctt

SEQ ID NO: 156755 - DNA, 30 bp, Artificial Sequence
  Synthetic oligonucleotide
gtatcacacttgtaatctctgtagactctt

SEQ ID NO: 156756 - DNA, 30 bp, Artificial Sequence
  Synthetic oligonucleotide
gatctaccggagcactcgaccactactctt

SEQ ID NO: 156757 - DNA, 30 bp, Artificial Sequence
  Synthetic oligonucleotide
aaggagttaggccacattgttaaaagtctt

SEQ ID NO: 156758 - DNA, 30 bp, Artificial Sequence
  Synthetic oligonucleotide
aatgggtaacagaaaggcgtctgcagtctt

SEQ ID NO: 156759 - DNA, 30 bp, Artificial Sequence
  Synthetic oligonucleotide
cctggatccacaattgttgtcaagagtctt

SEQ ID NO: 156760 - DNA, 30 bp, Artificial Sequence
  Synthetic oligonucleotide
accagttctgaggtggagacagagagtctt

SEQ ID NO: 156761 - DNA, 30 bp, Artificial Sequence
  Synthetic oligonucleotide
ggacgtctgatggggaagcacaggagtctt

SEQ ID NO: 156762 - DNA, 30 bp, Artificial Sequence
  Synthetic oligonucleotide
atattcaacaggacaggatttaagcgtctt

SEQ ID NO: 156763 - DNA, 30 bp, Artificial Sequence
  Synthetic oligonucleotide
ccagcggtcattttcatgcacattcgtctt

SEQ ID NO: 156764 - DNA, 30 bp, Artificial Sequence
  Synthetic oligonucleotide
tgcaatacacaccggaatcgggtcggtctt

SEQ ID NO: 156765 - DNA, 30 bp, Artificial Sequence
  Synthetic oligonucleotide
ccgacttcgctctactataaataatgtctt

SEQ ID NO: 156766 - DNA, 30 bp, Artificial Sequence
  Synthetic oligonucleotide
atggaagctcattaatttcgttcctgtctt

SEQ ID NO: 156767 - DNA, 30 bp, Artificial Sequence
  Synthetic oligonucleotide
cgcgacgggcctaacggagctcgcattctt

SEQ ID NO: 156768 - DNA, 30 bp, Artificial Sequence
  Synthetic oligonucleotide
aacttcgaggttatagcgccaaatattctt

SEQ ID NO: 156769 - DNA, 30 bp, Artificial Sequence
  Synthetic oligonucleotide
ctaaagttagtggaagggacagtacttctt

SEQ ID NO: 156770 - DNA, 30 bp, Artificial Sequence
  Synthetic oligonucleotide
agagggtcagagctccgcgagcctcttctt

SEQ ID NO: 156771 - DNA, 30 bp, Artificial Sequence
  Synthetic oligonucleotide
aggccagtgaaaatcagtctcaaagttctt

SEQ ID NO: 156772 - DNA, 30 bp, Artificial Sequence
  Synthetic oligonucleotide
ccgataaccaggttggataaatctgttctt

SEQ ID NO: 156773 - DNA, 30 bp, Artificial Sequence
  Synthetic oligonucleotide
taaactcggttaatacaccggacaaaagtt

SEQ ID NO: 156774 - DNA, 31 bp, Artificial Sequence
  Synthetic oligonucleotide
tccgtcgcaacaggcagacaatagccaagtt

SEQ ID NO: 156775 - DNA, 30 bp, Artificial Sequence
  Synthetic oligonucleotide
cgacgaaaaaacaggtgttaatgccaagtt

SEQ ID NO: 156776 - DNA, 30 bp, Artificial Sequence
  Synthetic oligonucleotide
atcgaaatcgtccgtcgtaaatggcaagtt

SEQ ID NO: 156777 - DNA, 30 bp, Artificial Sequence
  Synthetic oligonucleotide
acctaaaatcgagcatcgtcgactcaagtt

SEQ ID NO: 156778 - DNA, 30 bp, Artificial Sequence
  Synthetic oligonucleotide
ttgaccatcgtatgctcgtgaatcacagtt

SEQ ID NO: 156779 - DNA, 31 bp, Artificial Sequence
  Synthetic oligonucleotide
caactagctgttattaagtggggtcacagtt

SEQ ID NO: 156780 - DNA, 30 bp, Artificial Sequence
  Synthetic oligonucleotide
cagagttgggcataactctgcattacagtt

SEQ ID NO: 156781 - DNA, 30 bp, Artificial Sequence
  Synthetic oligonucleotide
cggaagaacgtcgggaatgctggcccagtt

SEQ ID NO: 156782 - DNA, 30 bp, Artificial Sequence
  Synthetic oligonucleotide
gttaaaagggcagcagggtttcaagcagtt

SEQ ID NO: 156783 - DNA, 30 bp, Artificial Sequence
  Synthetic oligonucleotide
gacctaatgaattatagggcaaactcagtt

SEQ ID NO: 156784 - DNA, 30 bp, Artificial Sequence
  Synthetic oligonucleotide
agaaccgaggactcgggggatagaagagtt

SEQ ID NO: 156785 - DNA, 30 bp, Artificial Sequence
  Synthetic oligonucleotide
atacgatgcgggccgcgttcgatcagagtt

SEQ ID NO: 156786 - DNA, 30 bp, Artificial Sequence
  Synthetic oligonucleotide
gcgacgaggatacgtggtttggatagagtt

SEQ ID NO: 156787 - DNA, 30 bp, Artificial Sequence
  Synthetic oligonucleotide
gcgcccgccaataacgtcggtggtcgagtt

SEQ ID NO: 156788 - DNA, 30 bp, Artificial Sequence
  Synthetic oligonucleotide
ggggagtagtttaaaaatttgggtggagtt

SEQ ID NO: 156789 - DNA, 30 bp, Artificial Sequence
  Synthetic oligonucleotide
cttaccgggatcaacttcccgacttgagtt

SEQ ID NO: 156790 - DNA, 30 bp, Artificial Sequence
  Synthetic oligonucleotide
cggaggaaatgcgagttatgcagttgagtt

SEQ ID NO: 156791 - DNA, 30 bp, Artificial Sequence
  Synthetic oligonucleotide
atcagtagaatgaaaggtctaaccatagtt

SEQ ID NO: 156792 - DNA, 30 bp, Artificial Sequence
  Synthetic oligonucleotide
gatcacatcatgacggagagcaccatagtt

SEQ ID NO: 156793 - DNA, 30 bp, Artificial Sequence
  Synthetic oligonucleotide
agtacaagagtccgctcgatagccatagtt

SEQ ID NO: 156794 - DNA, 30 bp, Artificial Sequence
  Synthetic oligonucleotide
cgtaatgggtaggggagacgtttcatagtt

SEQ ID NO: 156795 - DNA, 30 bp, Artificial Sequence
  Synthetic oligonucleotide
gggatagggaagtatagccaagagctagtt

SEQ ID NO: 156796 - DNA, 30 bp, Artificial Sequence
  Synthetic oligonucleotide
ttcctgtaaaggataagagatacggtagtt

SEQ ID NO: 156797 - DNA, 30 bp, Artificial Sequence
  Synthetic oligonucleotide
cgttaacattgaggacaccgacgggtagtt

SEQ ID NO: 156798 - DNA, 30 bp, Artificial Sequence
  Synthetic oligonucleotide
aggaaaatggatggaaaactgtgtgtagtt

SEQ ID NO: 156799 - DNA, 30 bp, Artificial Sequence
  Synthetic oligonucleotide
ccctcacggaggactgaccagtttgtagtt

SEQ ID NO: 156800 - DNA, 30 bp, Artificial Sequence
  Synthetic oligonucleotide
tcgaagaacttgtgcagcgtatggaacgtt

SEQ ID NO: 156801 - DNA, 30 bp, Artificial Sequence
  Synthetic oligonucleotide
tgatggacgctcaggacagagatacacgtt

SEQ ID NO: 156802 - DNA, 30 bp, Artificial Sequence
  Synthetic oligonucleotide
tgaatggaaggaactgtgatataccacgtt

SEQ ID NO: 156803 - DNA, 30 bp, Artificial Sequence
  Synthetic oligonucleotide
ggggctcgtctcattggaggtttgcacgtt

SEQ ID NO: 156804 - DNA, 30 bp, Artificial Sequence
  Synthetic oligonucleotide
cttgatgagagcgcataggagcatcacgtt

SEQ ID NO: 156805 - DNA, 30 bp, Artificial Sequence
  Synthetic oligonucleotide
gtaggtattgcgtcgatgtccagggacgtt

SEQ ID NO: 156806 - DNA, 30 bp, Artificial Sequence
  Synthetic oligonucleotide
ccagatgcgacagtcagtatgatggacgtt

SEQ ID NO: 156807 - DNA, 30 bp, Artificial Sequence
  Synthetic oligonucleotide
ttaatgcatgataaagtaaagcagtacgtt

SEQ ID NO: 156808 - DNA, 30 bp, Artificial Sequence
  Synthetic oligonucleotide
ccgtcttggaagacgtactctccgtacgtt

SEQ ID NO: 156809 - DNA, 30 bp, Artificial Sequence
  Synthetic oligonucleotide
aaggctgttaacttgggtacaacttacgtt

SEQ ID NO: 156810 - DNA, 30 bp, Artificial Sequence
  Synthetic oligonucleotide
gtgccaacaatcgaagccgggaaaaccgtt

SEQ ID NO: 156811 - DNA, 30 bp, Artificial Sequence
  Synthetic oligonucleotide
atcgcaaatagaaacattgcacgaaccgtt

SEQ ID NO: 156812 - DNA, 30 bp, Artificial Sequence
  Synthetic oligonucleotide
ccaaagtactaacgcggtgccggaaccgtt

SEQ ID NO: 156813 - DNA, 31 bp, Artificial Sequence
  Synthetic oligonucleotide
tgaattgccgagattgcgtgagttaaccgtt

SEQ ID NO: 156814 - DNA, 30 bp, Artificial Sequence
  Synthetic oligonucleotide
ataggataatctcggctagcattgaccgtt

SEQ ID NO: 156815 - DNA, 30 bp, Artificial Sequence
  Synthetic oligonucleotide
tgggacggcatgcggtcaccaaataccgtt

SEQ ID NO: 156816 - DNA, 30 bp, Artificial Sequence
  Synthetic oligonucleotide
tcattgatctactcccaggcttgagccgtt

SEQ ID NO: 156817 - DNA, 30 bp, Artificial Sequence
  Synthetic oligonucleotide
tgaccacacaacttcaggacgaacgccgtt

SEQ ID NO: 156818 - DNA, 30 bp, Artificial Sequence
  Synthetic oligonucleotide
tcattagcggtgccactccaggttgccgtt

SEQ ID NO: 156819 - DNA, 30 bp, Artificial Sequence
  Synthetic oligonucleotide
tagtgatggttatcgcggtgagcatccgtt

SEQ ID NO: 156820 - DNA, 30 bp, Artificial Sequence
  Synthetic oligonucleotide
agggcggatataatttggatgcattccgtt

SEQ ID NO: 156821 - DNA, 30 bp, Artificial Sequence
  Synthetic oligonucleotide
agagagagtgataatcacctttacagcgtt

SEQ ID NO: 156822 - DNA, 30 bp, Artificial Sequence
  Synthetic oligonucleotide
agcagagcatgccacgtcgataagagcgtt

SEQ ID NO: 156823 - DNA, 30 bp, Artificial Sequence
  Synthetic oligonucleotide
atacgcattggtaccatggcgtatagcgtt

SEQ ID NO: 156824 - DNA, 31 bp, Artificial Sequence
  Synthetic oligonucleotide
aataattttggatcgaaaaagtcaacgcgtt

SEQ ID NO: 156825 - DNA, 30 bp, Artificial Sequence
  Synthetic oligonucleotide
atgtaggattaatagacagctacccgcgtt

SEQ ID NO: 156826 - DNA, 30 bp, Artificial Sequence
  Synthetic oligonucleotide
aggaacaagcaagcacattcgtagcgcgtt

SEQ ID NO: 156827 - DNA, 30 bp, Artificial Sequence
  Synthetic oligonucleotide
caatcaggggagcttaaaagatgtcgcgtt

SEQ ID NO: 156828 - DNA, 30 bp, Artificial Sequence
  Synthetic oligonucleotide
ttcaccgtgaactggcgctgccgaggcgtt

SEQ ID NO: 156829 - DNA, 30 bp, Artificial Sequence
  Synthetic oligonucleotide
ttaccctaaccgtagcggattgagggcgtt

SEQ ID NO: 156830 - DNA, 30 bp, Artificial Sequence
  Synthetic oligonucleotide
tctgcacgggttacagcggttacgggcgtt

SEQ ID NO: 156831 - DNA, 30 bp, Artificial Sequence
  Synthetic oligonucleotide
aacggactcaggtccgttaaagatggcgtt

SEQ ID NO: 156832 - DNA, 30 bp, Artificial Sequence
  Synthetic oligonucleotide
aactgggcgggatgataatatagatgcgtt

SEQ ID NO: 156833 - DNA, 30 bp, Artificial Sequence
  Synthetic oligonucleotide
ttatggtatcattattaggtttcgtgcgtt

SEQ ID NO: 156834 - DNA, 30 bp, Artificial Sequence
  Synthetic oligonucleotide
cgtataaagatatttacgcgtcgaatcgtt

SEQ ID NO: 156835 - DNA, 30 bp, Artificial Sequence
  Synthetic oligonucleotide
gttggaggcacccaaagcaagtagatcgtt

SEQ ID NO: 156836 - DNA, 30 bp, Artificial Sequence
  Synthetic oligonucleotide
acgagcctgaaagggatcgtagctctcgtt

SEQ ID NO: 156837 - DNA, 30 bp, Artificial Sequence
  Synthetic oligonucleotide
accctatccaacaagctaggtccggtcgtt

SEQ ID NO: 156838 - DNA, 30 bp, Artificial Sequence
  Synthetic oligonucleotide
gaggttaatgcgactaacagtaatgtcgtt

SEQ ID NO: 156839 - DNA, 30 bp, Artificial Sequence
  Synthetic oligonucleotide
atactcatggccaccgctatagcgttcgtt

SEQ ID NO: 156840 - DNA, 30 bp, Artificial Sequence
  Synthetic oligonucleotide
cgcagtgcacaagaagctgtgaaaaaggtt

SEQ ID NO: 156841 - DNA, 30 bp, Artificial Sequence
  Synthetic oligonucleotide
tgtcagacaaagccatcggtcatacaggtt

SEQ ID NO: 156842 - DNA, 30 bp, Artificial Sequence
  Synthetic oligonucleotide
gcttgaaagtgcggtgtgacatcccaggtt

SEQ ID NO: 156843 - DNA, 30 bp, Artificial Sequence
  Synthetic oligonucleotide
gtagcgtggatcagtggaaaactccaggtt

SEQ ID NO: 156844 - DNA, 30 bp, Artificial Sequence
  Synthetic oligonucleotide
ctcaacggcactggttgggcaaagcaggtt

SEQ ID NO: 156845 - DNA, 30 bp, Artificial Sequence
  Synthetic oligonucleotide
ctgtttatggtggtcagacggtaggaggtt

SEQ ID NO: 156846 - DNA, 30 bp, Artificial Sequence
  Synthetic oligonucleotide
tactagacgctaaaatagttgtgggaggtt

SEQ ID NO: 156847 - DNA, 30 bp, Artificial Sequence
  Synthetic oligonucleotide
atgtgcaagtaacggtcgtagacataggtt

SEQ ID NO: 156848 - DNA, 30 bp, Artificial Sequence
  Synthetic oligonucleotide
atgtagcaactgaattggaagctgtaggtt

SEQ ID NO: 156849 - DNA, 30 bp, Artificial Sequence
  Synthetic oligonucleotide
ttagctatgttagatggaagaggtacggtt

SEQ ID NO: 156850 - DNA, 30 bp, Artificial Sequence
  Synthetic oligonucleotide
acaaacgtcgaatcttgcagaggtacggtt

SEQ ID NO: 156851 - DNA, 30 bp, Artificial Sequence
  Synthetic oligonucleotide
ccgaataccacccagctaaaattcgcggtt

SEQ ID NO: 156852 - DNA, 30 bp, Artificial Sequence
  Synthetic oligonucleotide
ggctgtcagcggactgctgccgatgcggtt

SEQ ID NO: 156853 - DNA, 30 bp, Artificial Sequence
  Synthetic oligonucleotide
tcactgatatcactctatttcttgtcggtt

SEQ ID NO: 156854 - DNA, 30 bp, Artificial Sequence
  Synthetic oligonucleotide
tcacacgcaatagcgtgacgggacagggtt

SEQ ID NO: 156855 - DNA, 30 bp, Artificial Sequence
  Synthetic oligonucleotide
cttaatgggctcaagcaaagtgtacgggtt

SEQ ID NO: 156856 - DNA, 30 bp, Artificial Sequence
  Synthetic oligonucleotide
gtcacacaggactagcagtttcggcgggtt

SEQ ID NO: 156857 - DNA, 30 bp, Artificial Sequence
  Synthetic oligonucleotide
tcgtcgtacccgtcagagcagctgcgggtt

SEQ ID NO: 156858 - DNA, 30 bp, Artificial Sequence
  Synthetic oligonucleotide
ggtccagcgagcgtccgggccgtgcgggtt

SEQ ID NO: 156859 - DNA, 30 bp, Artificial Sequence
  Synthetic oligonucleotide
ctgggcgagaaaagaatgcggtgcggggtt

SEQ ID NO: 156860 - DNA, 30 bp, Artificial Sequence
  Synthetic oligonucleotide
cgggacgaatagatcagacccaatggggtt

SEQ ID NO: 156861 - DNA, 30 bp, Artificial Sequence
  Synthetic oligonucleotide
cggggtataagaataggattataatgggtt

SEQ ID NO: 156862 - DNA, 30 bp, Artificial Sequence
  Synthetic oligonucleotide
ttagtgcgtaagtgtttaggtgtatgggtt

SEQ ID NO: 156863 - DNA, 30 bp, Artificial Sequence
  Synthetic oligonucleotide
acggagttgtagagaaatatagcgtgggtt

SEQ ID NO: 156864 - DNA, 30 bp, Artificial Sequence
  Synthetic oligonucleotide
ggcgatctatagagtgtgaaaaggtgggtt

SEQ ID NO: 156865 - DNA, 30 bp, Artificial Sequence
  Synthetic oligonucleotide
tagtatgacgaccggatatctctttgggtt

SEQ ID NO: 156866 - DNA, 30 bp, Artificial Sequence
  Synthetic oligonucleotide
catccgccaatcatacagacacatatggtt

SEQ ID NO: 156867 - DNA, 30 bp, Artificial Sequence
  Synthetic oligonucleotide
agtgaactaaaggagtcacatgtactggtt

SEQ ID NO: 156868 - DNA, 30 bp, Artificial Sequence
  Synthetic oligonucleotide
ggatggtgaagcggacccgcgagcctggtt

SEQ ID NO: 156869 - DNA, 30 bp, Artificial Sequence
  Synthetic oligonucleotide
tcaagcaaagaacatagggtgggtctggtt

SEQ ID NO: 156870 - DNA, 30 bp, Artificial Sequence
  Synthetic oligonucleotide
ccacacacgcgagccgtccttagggtggtt

SEQ ID NO: 156871 - DNA, 30 bp, Artificial Sequence
  Synthetic oligonucleotide
tcggttcataggcgctacggtgtggtggtt

SEQ ID NO: 156872 - DNA, 30 bp, Artificial Sequence
  Synthetic oligonucleotide
gtacatcgatataggccacggattgtggtt

SEQ ID NO: 156873 - DNA, 30 bp, Artificial Sequence
  Synthetic oligonucleotide
ggacgaagaggtttttagggttttgtggtt

SEQ ID NO: 156874 - DNA, 30 bp, Artificial Sequence
  Synthetic oligonucleotide
gaaacgttttttgtgaaagagggattggtt

SEQ ID NO: 156875 - DNA, 30 bp, Artificial Sequence
  Synthetic oligonucleotide
ggatgtgagcgtaagtgttaatgtttggtt

SEQ ID NO: 156876 - DNA, 30 bp, Artificial Sequence
  Synthetic oligonucleotide
cgtaagttgtgaagattaactaaaaatgtt

SEQ ID NO: 156877 - DNA, 30 bp, Artificial Sequence
  Synthetic oligonucleotide
attaccggacctccgccgggacacaatgtt

SEQ ID NO: 156878 - DNA, 30 bp, Artificial Sequence
  Synthetic oligonucleotide
agctacccaccaggaaaattagacaatgtt

SEQ ID NO: 156879 - DNA, 30 bp, Artificial Sequence
  Synthetic oligonucleotide
acggttgactaagtgtttctgtgcaatgtt

SEQ ID NO: 156880 - DNA, 30 bp, Artificial Sequence
  Synthetic oligonucleotide
cggagggtaggattgatcatacgtaatgtt

SEQ ID NO: 156881 - DNA, 30 bp, Artificial Sequence
  Synthetic oligonucleotide
tcggacttgagtagcacttacgttaatgtt

SEQ ID NO: 156882 - DNA, 30 bp, Artificial Sequence
  Synthetic oligonucleotide
cgaacaagatgcacatcatacacgcatgtt

SEQ ID NO: 156883 - DNA, 30 bp, Artificial Sequence
  Synthetic oligonucleotide
ttgtattgggcgtcggttcgtgaagatgtt

SEQ ID NO: 156884 - DNA, 30 bp, Artificial Sequence
  Synthetic oligonucleotide
tgttgctcggctgagcaggggacagatgtt

SEQ ID NO: 156885 - DNA, 30 bp, Artificial Sequence
  Synthetic oligonucleotide
tcgtggcgatcttcagcggttttcgatgtt

SEQ ID NO: 156886 - DNA, 30 bp, Artificial Sequence
  Synthetic oligonucleotide
aggggctcgctcacattatgtttggatgtt

SEQ ID NO: 156887 - DNA, 30 bp, Artificial Sequence
  Synthetic oligonucleotide
cgaagtgatccaacgtaatcaactgatgtt

SEQ ID NO: 156888 - DNA, 30 bp, Artificial Sequence
  Synthetic oligonucleotide
tcgtcggaagtagtccgttcaagatatgtt

SEQ ID NO: 156889 - DNA, 30 bp, Artificial Sequence
  Synthetic oligonucleotide
agcgcaaattaccggttgcaactgtatgtt

SEQ ID NO: 156890 - DNA, 30 bp, Artificial Sequence
  Synthetic oligonucleotide
ctttgagaaatgaatccaggttacactgtt

SEQ ID NO: 156891 - DNA, 30 bp, Artificial Sequence
  Synthetic oligonucleotide
gcagatatcagtgggggaagtcgtactgtt

SEQ ID NO: 156892 - DNA, 30 bp, Artificial Sequence
  Synthetic oligonucleotide
gctttgccgagtttatgtggaacagctgtt

SEQ ID NO: 156893 - DNA, 30 bp, Artificial Sequence
  Synthetic oligonucleotide
caaaatttgggtcggcactcagcagctgtt

SEQ ID NO: 156894 - DNA, 30 bp, Artificial Sequence
  Synthetic oligonucleotide
agacgatctagtcacgcgcaggtcgctgtt

SEQ ID NO: 156895 - DNA, 30 bp, Artificial Sequence
  Synthetic oligonucleotide
acgtgaggcattggggggatccgtgctgtt

SEQ ID NO: 156896 - DNA, 30 bp, Artificial Sequence
  Synthetic oligonucleotide
ggggaaaacaattgcttagtcctatctgtt

SEQ ID NO: 156897 - DNA, 30 bp, Artificial Sequence
  Synthetic oligonucleotide
gcagcagcgaaatatgggcaccgctctgtt

SEQ ID NO: 156898 - DNA, 30 bp, Artificial Sequence
  Synthetic oligonucleotide
agagaactaccgtgatcacatgaaagtgtt

SEQ ID NO: 156899 - DNA, 30 bp, Artificial Sequence
  Synthetic oligonucleotide
gggttagtacttattttccgaatgagtgtt

SEQ ID NO: 156900 - DNA, 30 bp, Artificial Sequence
  Synthetic oligonucleotide
ggttgcccaggtggaacgggccatagtgtt

SEQ ID NO: 156901 - DNA, 30 bp, Artificial Sequence
  Synthetic oligonucleotide
ccgctcatgtggacagtgcttctacgtgtt

SEQ ID NO: 156902 - DNA, 30 bp, Artificial Sequence
  Synthetic oligonucleotide
tcgcgaatttcgttagatctgaggcgtgtt

SEQ ID NO: 156903 - DNA, 30 bp, Artificial Sequence
  Synthetic oligonucleotide
tatcgatcgtcgcgctaatcttctcgtgtt

SEQ ID NO: 156904 - DNA, 30 bp, Artificial Sequence
  Synthetic oligonucleotide
agtagaatggcgagaatgcgtgaaggtgtt

SEQ ID NO: 156905 - DNA, 30 bp, Artificial Sequence
  Synthetic oligonucleotide
gagaccaaaaatacgaagcaataaggtgtt

SEQ ID NO: 156906 - DNA, 30 bp, Artificial Sequence
  Synthetic oligonucleotide
acacaaccgggacttcgagaaaagggtgtt

SEQ ID NO: 156907 - DNA, 30 bp, Artificial Sequence
  Synthetic oligonucleotide
ttagaggctgagctgcaagtagctggtgtt

SEQ ID NO: 156908 - DNA, 30 bp, Artificial Sequence
  Synthetic oligonucleotide
gcactgggagctaggtcagttgctggtgtt

SEQ ID NO: 156909 - DNA, 30 bp, Artificial Sequence
  Synthetic oligonucleotide
ggatgggtatcctatctgctgtctggtgtt

SEQ ID NO: 156910 - DNA, 30 bp, Artificial Sequence
  Synthetic oligonucleotide
cggcggaggtgaggacctgcctgtggtgtt

SEQ ID NO: 156911 - DNA, 30 bp, Artificial Sequence
  Synthetic oligonucleotide
aattggtggcaccggaatcgaacgtgtgtt

SEQ ID NO: 156912 - DNA, 30 bp, Artificial Sequence
  Synthetic oligonucleotide
ccgtccagttaggatattgtaccgtgtgtt

SEQ ID NO: 156913 - DNA, 30 bp, Artificial Sequence
  Synthetic oligonucleotide
cttgaggtaaaatcggggctaagttgtgtt

SEQ ID NO: 156914 - DNA, 30 bp, Artificial Sequence
  Synthetic oligonucleotide
tgatttgactaaaagtaagggcgtcttgtt

SEQ ID NO: 156915 - DNA, 30 bp, Artificial Sequence
  Synthetic oligonucleotide
tgaactgcagccgaagggatctcatttgtt

SEQ ID NO: 156916 - DNA, 30 bp, Artificial Sequence
  Synthetic oligonucleotide
acgtcaagatgatcttactcctattttgtt

SEQ ID NO: 156917 - DNA, 30 bp, Artificial Sequence
  Synthetic oligonucleotide
aaagactaaacaaaatgggctcaaaaattt

SEQ ID NO: 156918 - DNA, 29 bp, Artificial Sequence
  Synthetic oligonucleotide
gatagcgggtaaggttgtggcgaaaattt

SEQ ID NO: 156919 - DNA, 30 bp, Artificial Sequence
  Synthetic oligonucleotide
gagagtcagtagaagagtacgctgaaattt

SEQ ID NO: 156920 - DNA, 30 bp, Artificial Sequence
  Synthetic oligonucleotide
ggcacttcccgcccggaaagtctacaattt

SEQ ID NO: 156921 - DNA, 30 bp, Artificial Sequence
  Synthetic oligonucleotide
acattagcagtccattgggagaatcaattt

SEQ ID NO: 156922 - DNA, 30 bp, Artificial Sequence
  Synthetic oligonucleotide
gcacaatacaggggacggggcctgtaattt

SEQ ID NO: 156923 - DNA, 30 bp, Artificial Sequence
  Synthetic oligonucleotide
acaacaccaccagccaacgctaaaacattt

SEQ ID NO: 156924 - DNA, 30 bp, Artificial Sequence
  Synthetic oligonucleotide
gaagttgggaagggtcctagtgtaccattt

SEQ ID NO: 156925 - DNA, 30 bp, Artificial Sequence
  Synthetic oligonucleotide
cacgaagcgggtgttttaatgcgcccattt

SEQ ID NO: 156926 - DNA, 30 bp, Artificial Sequence
  Synthetic oligonucleotide
gggactgacaaatcacgtgaaggtccattt

SEQ ID NO: 156927 - DNA, 30 bp, Artificial Sequence
  Synthetic oligonucleotide
gcccacaatttccgagattacatcgcattt

SEQ ID NO: 156928 - DNA, 30 bp, Artificial Sequence
  Synthetic oligonucleotide
agaatgttgaatagtgtgggtggggcattt

SEQ ID NO: 156929 - DNA, 30 bp, Artificial Sequence
  Synthetic oligonucleotide
actacatcctcgaggcatagctgggcattt

SEQ ID NO: 156930 - DNA, 30 bp, Artificial Sequence
  Synthetic oligonucleotide
gccgtaggggcgtcgaatcctccatcattt

SEQ ID NO: 156931 - DNA, 30 bp, Artificial Sequence
  Synthetic oligonucleotide
aggttataccgtcatgaattgaagtcattt

SEQ ID NO: 156932 - DNA, 30 bp, Artificial Sequence
  Synthetic oligonucleotide
cgtcgtataagttatggaggttggtcattt

SEQ ID NO: 156933 - DNA, 30 bp, Artificial Sequence
  Synthetic oligonucleotide
gtgtaacagaaccgtcttgtgcccagattt

SEQ ID NO: 156934 - DNA, 30 bp, Artificial Sequence
  Synthetic oligonucleotide
accatcagcttcgcattcacagggagattt

SEQ ID NO: 156935 - DNA, 30 bp, Artificial Sequence
  Synthetic oligonucleotide
atggtccgctaggccacttgaggccgattt

SEQ ID NO: 156936 - DNA, 30 bp, Artificial Sequence
  Synthetic oligonucleotide
tgcgtacgcgtacgcgagcatgcgcgattt

SEQ ID NO: 156937 - DNA, 30 bp, Artificial Sequence
  Synthetic oligonucleotide
aaaggtgctcttctgacatacaccggattt

SEQ ID NO: 156938 - DNA, 30 bp, Artificial Sequence
  Synthetic oligonucleotide
cagagcgccccagcttcttaaactggattt

SEQ ID NO: 156939 - DNA, 30 bp, Artificial Sequence
  Synthetic oligonucleotide
ctgaaactgcatccttgtactatctgattt

SEQ ID NO: 156940 - DNA, 30 bp, Artificial Sequence
  Synthetic oligonucleotide
ctcaaagtcatcgtaagagtattctgattt

SEQ ID NO: 156941 - DNA, 30 bp, Artificial Sequence
  Synthetic oligonucleotide
atgcgagatattcagggatattggtgattt

SEQ ID NO: 156942 - DNA, 30 bp, Artificial Sequence
  Synthetic oligonucleotide
aacagagacagagcgttaggagacatattt

SEQ ID NO: 156943 - DNA, 30 bp, Artificial Sequence
  Synthetic oligonucleotide
cgtatacatgcctacaagagttagatattt

SEQ ID NO: 156944 - DNA, 30 bp, Artificial Sequence
  Synthetic oligonucleotide
ctggcggcctggtgattaagggaactattt

SEQ ID NO: 156945 - DNA, 30 bp, Artificial Sequence
  Synthetic oligonucleotide
cgtaatgcttaaatcatattatacctattt

SEQ ID NO: 156946 - DNA, 30 bp, Artificial Sequence
  Synthetic oligonucleotide
ccagttggccaaagatttatgtacctattt

SEQ ID NO: 156947 - DNA, 30 bp, Artificial Sequence
  Synthetic oligonucleotide
gcgtacggatgtattaaaaaattgctattt

SEQ ID NO: 156948 - DNA, 30 bp, Artificial Sequence
  Synthetic oligonucleotide
agaagctagagtaggagtcagaaagtattt

SEQ ID NO: 156949 - DNA, 30 bp, Artificial Sequence
  Synthetic oligonucleotide
cgtcgtctcacactaatttcaggagtattt

SEQ ID NO: 156950 - DNA, 30 bp, Artificial Sequence
  Synthetic oligonucleotide
tatgtgtttagcggactatggctagtattt

SEQ ID NO: 156951 - DNA, 30 bp, Artificial Sequence
  Synthetic oligonucleotide
cagggaggatgactacactgttaaaacttt

SEQ ID NO: 156952 - DNA, 30 bp, Artificial Sequence
  Synthetic oligonucleotide
atgtcaataattctacatgatctcaacttt

SEQ ID NO: 156953 - DNA, 30 bp, Artificial Sequence
  Synthetic oligonucleotide
gggggggaataaagattgaaaatccacttt

SEQ ID NO: 156954 - DNA, 31 bp, Artificial Sequence
  Synthetic oligonucleotide
gtcataatctaaaaatgaattgaagcacttt

SEQ ID NO: 156955 - DNA, 30 bp, Artificial Sequence
  Synthetic oligonucleotide
tatagaacaattatgatagtgaaagacttt

SEQ ID NO: 156956 - DNA, 30 bp, Artificial Sequence
  Synthetic oligonucleotide
cagacctaataaagcaagacaactgacttt

SEQ ID NO: 156957 - DNA, 30 bp, Artificial Sequence
  Synthetic oligonucleotide
tacgtgatgtgatcttggttgggtgacttt

SEQ ID NO: 156958 - DNA, 30 bp, Artificial Sequence
  Synthetic oligonucleotide
ttgtgcggacataagatctgaatgtacttt

SEQ ID NO: 156959 - DNA, 30 bp, Artificial Sequence
  Synthetic oligonucleotide
gtcactcacgagtccgcatatgaacccttt

SEQ ID NO: 156960 - DNA, 30 bp, Artificial Sequence
  Synthetic oligonucleotide
caattagatagtaagtggtgggatgccttt

SEQ ID NO: 156961 - DNA, 30 bp, Artificial Sequence
  Synthetic oligonucleotide
gggtgtatggtgtacgtcgttggtgccttt

SEQ ID NO: 156962 - DNA, 30 bp, Artificial Sequence
  Synthetic oligonucleotide
agggtctccacagcacggtagttatccttt

SEQ ID NO: 156963 - DNA, 30 bp, Artificial Sequence
  Synthetic oligonucleotide
cgtaccatgaattgtctaaaggtgtccttt

SEQ ID NO: 156964 - DNA, 30 bp, Artificial Sequence
  Synthetic oligonucleotide
tccaaggatgtatagaggagacgacgcttt

SEQ ID NO: 156965 - DNA, 30 bp, Artificial Sequence
  Synthetic oligonucleotide
tcctagtggcacatcgaatggtcgcgcttt

SEQ ID NO: 156966 - DNA, 30 bp, Artificial Sequence
  Synthetic oligonucleotide
cgataagagtgacaaaacaagataggcttt

SEQ ID NO: 156967 - DNA, 30 bp, Artificial Sequence
  Synthetic oligonucleotide
agtgggtggcgtcgtaacgaggtatgcttt

SEQ ID NO: 156968 - DNA, 30 bp, Artificial Sequence
  Synthetic oligonucleotide
ctagagtggcaatacctagacgtaatcttt

SEQ ID NO: 156969 - DNA, 30 bp, Artificial Sequence
  Synthetic oligonucleotide
aggcctggtgactagagcatagtcctcttt

SEQ ID NO: 156970 - DNA, 30 bp, Artificial Sequence
  Synthetic oligonucleotide
acgcctatacctacatgggcgagagtcttt

SEQ ID NO: 156971 - DNA, 30 bp, Artificial Sequence
  Synthetic oligonucleotide
cggtgcggatcagtacatcggaaggtcttt

SEQ ID NO: 156972 - DNA, 30 bp, Artificial Sequence
  Synthetic oligonucleotide
cacgcaaaccaacataggagaatggtcttt

SEQ ID NO: 156973 - DNA, 30 bp, Artificial Sequence
  Synthetic oligonucleotide
cggttcagcacacgaacagaaaagaagttt

SEQ ID NO: 156974 - DNA, 30 bp, Artificial Sequence
  Synthetic oligonucleotide
gtctcgtcacactgggatagggcgaagttt

SEQ ID NO: 156975 - DNA, 30 bp, Artificial Sequence
  Synthetic oligonucleotide
cgtggttgccatgagggctaatcgaagttt

SEQ ID NO: 156976 - DNA, 30 bp, Artificial Sequence
  Synthetic oligonucleotide
caggtcccgaggtgaccgtcagcccagttt

SEQ ID NO: 156977 - DNA, 30 bp, Artificial Sequence
  Synthetic oligonucleotide
ggtggggcgatcagaggattatgtcagttt

SEQ ID NO: 156978 - DNA, 30 bp, Artificial Sequence
  Synthetic oligonucleotide
tcgtctatcttaagggaagggcgggagttt

SEQ ID NO: 156979 - DNA, 30 bp, Artificial Sequence
  Synthetic oligonucleotide
tgtcgtcaagggtgagaaaaagcatagttt

SEQ ID NO: 156980 - DNA, 30 bp, Artificial Sequence
  Synthetic oligonucleotide
ggactaacgaattgaccatacataacgttt

SEQ ID NO: 156981 - DNA, 30 bp, Artificial Sequence
  Synthetic oligonucleotide
cctagtaacctaaactgctaaaccacgttt

SEQ ID NO: 156982 - DNA, 30 bp, Artificial Sequence
  Synthetic oligonucleotide
cacacaggcatctaagtggctgaaccgttt

SEQ ID NO: 156983 - DNA, 30 bp, Artificial Sequence
  Synthetic oligonucleotide
cgagaatgccaagcgggctaatgaccgttt

SEQ ID NO: 156984 - DNA, 30 bp, Artificial Sequence
  Synthetic oligonucleotide
gcacgatcaggtggggtacagcgcaggttt

SEQ ID NO: 156985 - DNA, 30 bp, Artificial Sequence
  Synthetic oligonucleotide
cgagtgtgttgcagaaacatagcacggttt

SEQ ID NO: 156986 - DNA, 30 bp, Artificial Sequence
  Synthetic oligonucleotide
agagccagagggccatttagaatagggttt

SEQ ID NO: 156987 - DNA, 30 bp, Artificial Sequence
  Synthetic oligonucleotide
gatagggacgcacacgatatacaggggttt

SEQ ID NO: 156988 - DNA, 30 bp, Artificial Sequence
  Synthetic oligonucleotide
ctgatagagaatggtatgttgacggggttt

SEQ ID NO: 156989 - DNA, 30 bp, Artificial Sequence
  Synthetic oligonucleotide
aagggggacaggagtcagaggtccatgttt

SEQ ID NO: 156990 - DNA, 30 bp, Artificial Sequence
  Synthetic oligonucleotide
tcagcagaagaccacccatagatgatgttt

SEQ ID NO: 156991 - DNA, 30 bp, Artificial Sequence
  Synthetic oligonucleotide
gaagtatgcatgagtgtacaaaatatgttt

SEQ ID NO: 156992 - DNA, 30 bp, Artificial Sequence
  Synthetic oligonucleotide
cgaaaagctcgctagcaatgtgggctgttt

SEQ ID NO: 156993 - DNA, 30 bp, Artificial Sequence
  Synthetic oligonucleotide
cccaaatagagtggtagtatacatttgttt

SEQ ID NO: 156994 - DNA, 30 bp, Artificial Sequence
  Synthetic oligonucleotide
atatgccaacctcttccgtccaacaatttt

SEQ ID NO: 156995 - DNA, 30 bp, Artificial Sequence
  Synthetic oligonucleotide
aatgcacattcgtgatcgggagagaatttt

SEQ ID NO: 156996 - DNA, 30 bp, Artificial Sequence
  Synthetic oligonucleotide
cgaacagcattagtcccaggtacgaatttt

SEQ ID NO: 156997 - DNA, 30 bp, Artificial Sequence
  Synthetic oligonucleotide
cggtatcaggaacgtggcgcaagtaatttt

SEQ ID NO: 156998 - DNA, 30 bp, Artificial Sequence
  Synthetic oligonucleotide
agttggtggctataattacaacaacatttt

SEQ ID NO: 156999 - DNA, 30 bp, Artificial Sequence
  Synthetic oligonucleotide
atagtgcggataagagtacgccaacatttt

SEQ ID NO: 157000 - DNA, 30 bp, Artificial Sequence
  Synthetic oligonucleotide
taaactacgggaggcgcactcgctcatttt

SEQ ID NO: 157001 - DNA, 30 bp, Artificial Sequence
  Synthetic oligonucleotide
ggcgccgctgttagaaagctaaaatatttt

SEQ ID NO: 157002 - DNA, 30 bp, Artificial Sequence
  Synthetic oligonucleotide
ggccatagccgccaaatggcaacatatttt

SEQ ID NO: 157003 - DNA, 30 bp, Artificial Sequence
  Synthetic oligonucleotide
aatgacaatgccatttgattggactatttt

SEQ ID NO: 157004 - DNA, 30 bp, Artificial Sequence
  Synthetic oligonucleotide
aagtcaacactactgtcatatacgtatttt

SEQ ID NO: 157005 - DNA, 30 bp, Artificial Sequence
  Synthetic oligonucleotide
gcaagctaacgatgggtggaagaagctttt

SEQ ID NO: 157006 - DNA, 30 bp, Artificial Sequence
  Synthetic oligonucleotide
gagcacgtgaaggcacggaggagagctttt

SEQ ID NO: 157007 - DNA, 30 bp, Artificial Sequence
  Synthetic oligonucleotide
cacgacggggtgaggtttaaattagctttt

SEQ ID NO: 157008 - DNA, 30 bp, Artificial Sequence
  Synthetic oligonucleotide
agtacatggctcaacaagtagatcgctttt

SEQ ID NO: 157009 - DNA, 30 bp, Artificial Sequence
  Synthetic oligonucleotide
agcggaacagtgggagaactgttcgctttt

SEQ ID NO: 157010 - DNA, 30 bp, Artificial Sequence
  Synthetic oligonucleotide
cggagcacgtgctggacgtgtcaatctttt

SEQ ID NO: 157011 - DNA, 30 bp, Artificial Sequence
  Synthetic oligonucleotide
gataagtatgggacaatacaaaaaagtttt

SEQ ID NO: 157012 - DNA, 30 bp, Artificial Sequence
  Synthetic oligonucleotide
cacgtattgacggcgagagttcctagtttt

SEQ ID NO: 157013 - DNA, 30 bp, Artificial Sequence
  Synthetic oligonucleotide
aatacgacggtaaaaagggaggttagtttt

SEQ ID NO: 157014 - DNA, 30 bp, Artificial Sequence
  Synthetic oligonucleotide
agaaccccctacagggacaggccacgtttt

SEQ ID NO: 157015 - DNA, 30 bp, Artificial Sequence
  Synthetic oligonucleotide
acagatgcggtaagttacataggaggtttt

SEQ ID NO: 157016 - DNA, 30 bp, Artificial Sequence
  Synthetic oligonucleotide
agccaacaccggcgaaagggcctttgtttt

SEQ ID NO: 157017 - DNA, 30 bp, Artificial Sequence
  Synthetic oligonucleotide
taaacgacaactgcatgaacccgaattttt

SEQ ID NO: 157018 - DNA, 30 bp, Artificial Sequence
  Synthetic oligonucleotide
gtagctgccgagatggttcagcctattttt

SEQ ID NO: 157019 - DNA, 30 bp, Artificial Sequence
  Synthetic oligonucleotide
aggagagggtgaaaatctgtcggtattttt

SEQ ID NO: 157020 - DNA, 30 bp, Artificial Sequence
  Synthetic oligonucleotide
agcattagggtgccagtacaagaccttttt

SEQ ID NO: 157021 - DNA, 30 bp, Artificial Sequence
  Synthetic oligonucleotide
tgacgctgattctagggccggaactttttt

SEQ ID NO: 157022 - DNA, 29 bp, Artificial Sequence
  Synthetic oligonucleotide
aatggagcacagagactgacacttttttt

SEQ ID NO: 157023 - DNA, 30 bp, Artificial Sequence
  Synthetic oligonucleotide
agccgtaaggcgccctacgatggaaaaaaa

SEQ ID NO: 157024 - DNA, 30 bp, Artificial Sequence
  Synthetic oligonucleotide
ccggtgcaaggcaacatacgctccaaaaaa

SEQ ID NO: 157025 - DNA, 30 bp, Artificial Sequence
  Synthetic oligonucleotide
aagatgagtcttctcgggaaaagcaaaaaa

SEQ ID NO: 157026 - DNA, 30 bp, Artificial Sequence
  Synthetic oligonucleotide
aaccgagctagcacttaagcaagcaaaaaa

SEQ ID NO: 157027 - DNA, 30 bp, Artificial Sequence
  Synthetic oligonucleotide
agggcgcaacgccggaacgcacgcaaaaaa

SEQ ID NO: 157028 - DNA, 30 bp, Artificial Sequence
  Synthetic oligonucleotide
cattcagggtgcaacgggacgtgacaaaaa

SEQ ID NO: 157029 - DNA, 30 bp, Artificial Sequence
  Synthetic oligonucleotide
agccttactaggacactgggcctacaaaaa

SEQ ID NO: 157030 - DNA, 30 bp, Artificial Sequence
  Synthetic oligonucleotide
tggactcagtacacatgcatagaccaaaaa

SEQ ID NO: 157031 - DNA, 30 bp, Artificial Sequence
  Synthetic oligonucleotide
gctagatagtattagcatgaccgccaaaaa

SEQ ID NO: 157032 - DNA, 30 bp, Artificial Sequence
  Synthetic oligonucleotide
tcgaaagattttagatatgttgagcaaaaa

SEQ ID NO: 157033 - DNA, 30 bp, Artificial Sequence
  Synthetic oligonucleotide
agggtactacgtggaattcgtaggcaaaaa

SEQ ID NO: 157034 - DNA, 30 bp, Artificial Sequence
  Synthetic oligonucleotide
cttgggtgagagcactatggcctgcaaaaa

SEQ ID NO: 157035 - DNA, 30 bp, Artificial Sequence
  Synthetic oligonucleotide
cttgagcacaactggctaaaccttcaaaaa

SEQ ID NO: 157036 - DNA, 30 bp, Artificial Sequence
  Synthetic oligonucleotide
cacgccactgatcgtgtgacggcagaaaaa

SEQ ID NO: 157037 - DNA, 30 bp, Artificial Sequence
  Synthetic oligonucleotide
acaggaattctacggggtttatgcgaaaaa

SEQ ID NO: 157038 - DNA, 30 bp, Artificial Sequence
  Synthetic oligonucleotide
tggttaaaactcgaatagcgcagggaaaaa

SEQ ID NO: 157039 - DNA, 30 bp, Artificial Sequence
  Synthetic oligonucleotide
gtgaaccagcggtcggtacccagtgaaaaa

SEQ ID NO: 157040 - DNA, 30 bp, Artificial Sequence
  Synthetic oligonucleotide
gcggcattaggtcagggaatataataaaaa

SEQ ID NO: 157041 - DNA, 30 bp, Artificial Sequence
  Synthetic oligonucleotide
gtacacactgtacgacaggataagtaaaaa

SEQ ID NO: 157042 - DNA, 30 bp, Artificial Sequence
  Synthetic oligonucleotide
ccggtcagacaactcgcctctttgtaaaaa

SEQ ID NO: 157043 - DNA, 30 bp, Artificial Sequence
  Synthetic oligonucleotide
cgcgcagaacataagtcatcagcttaaaaa

SEQ ID NO: 157044 - DNA, 30 bp, Artificial Sequence
  Synthetic oligonucleotide
tctcatcttagatctataggagcttaaaaa

SEQ ID NO: 157045 - DNA, 30 bp, Artificial Sequence
  Synthetic oligonucleotide
ccccacatggtcctaagcacagtgacaaaa

SEQ ID NO: 157046 - DNA, 30 bp, Artificial Sequence
  Synthetic oligonucleotide
ttgagtaaaaatcgcgaatgaggtacaaaa

SEQ ID NO: 157047 - DNA, 30 bp, Artificial Sequence
  Synthetic oligonucleotide
caagtgaccgaactatcgctcaacccaaaa

SEQ ID NO: 157048 - DNA, 30 bp, Artificial Sequence
  Synthetic oligonucleotide
ttaatcgggaataagtgcggggccccaaaa

SEQ ID NO: 157049 - DNA, 30 bp, Artificial Sequence
  Synthetic oligonucleotide
ccatatcgagtctatgccaggcagccaaaa

SEQ ID NO: 157050 - DNA, 30 bp, Artificial Sequence
  Synthetic oligonucleotide
ggattctacaacgtgcttccgactccaaaa

SEQ ID NO: 157051 - DNA, 30 bp, Artificial Sequence
  Synthetic oligonucleotide
gttcggtaggcggtattcgggcgagcaaaa

SEQ ID NO: 157052 - DNA, 30 bp, Artificial Sequence
  Synthetic oligonucleotide
cctgttttggatgacattcggtgagcaaaa

SEQ ID NO: 157053 - DNA, 30 bp, Artificial Sequence
  Synthetic oligonucleotide
cgtggatcgtgttacggatctggggcaaaa

SEQ ID NO: 157054 - DNA, 30 bp, Artificial Sequence
  Synthetic oligonucleotide
accatggggtgatggctggaattggcaaaa

SEQ ID NO: 157055 - DNA, 30 bp, Artificial Sequence
  Synthetic oligonucleotide
aatcgattgaccgagggatctgatgcaaaa

SEQ ID NO: 157056 - DNA, 30 bp, Artificial Sequence
  Synthetic oligonucleotide
tgggatactccctggggacagtaatcaaaa

SEQ ID NO: 157057 - DNA, 30 bp, Artificial Sequence
  Synthetic oligonucleotide
aggaccgacatcatagtgtttggctcaaaa

SEQ ID NO: 157058 - DNA, 30 bp, Artificial Sequence
  Synthetic oligonucleotide
gcctgcagattggcacgtgcacaaagaaaa

SEQ ID NO: 157059 - DNA, 30 bp, Artificial Sequence
  Synthetic oligonucleotide
tccgatctattttaacatgtgggaagaaaa

SEQ ID NO: 157060 - DNA, 30 bp, Artificial Sequence
  Synthetic oligonucleotide
gcgaatgacagcatacacagggtaagaaaa

SEQ ID NO: 157061 - DNA, 30 bp, Artificial Sequence
  Synthetic oligonucleotide
cctatacccgaccaactaggaaagagaaaa

SEQ ID NO: 157062 - DNA, 30 bp, Artificial Sequence
  Synthetic oligonucleotide
gaagttacaataaattggcaaaaccgaaaa

SEQ ID NO: 157063 - DNA, 30 bp, Artificial Sequence
  Synthetic oligonucleotide
tacacgatgaagaacgctcagatccgaaaa

SEQ ID NO: 157064 - DNA, 30 bp, Artificial Sequence
  Synthetic oligonucleotide
ttcgaacatagcagataaggatgtcgaaaa

SEQ ID NO: 157065 - DNA, 30 bp, Artificial Sequence
  Synthetic oligonucleotide
gcagcggcgtagatcttagcgtgtcgaaaa

SEQ ID NO: 157066 - DNA, 30 bp, Artificial Sequence
  Synthetic oligonucleotide
tcccaacgagtagggggttacggcggaaaa

SEQ ID NO: 157067 - DNA, 30 bp, Artificial Sequence
  Synthetic oligonucleotide
aacttacggactaaatcgtagcgtggaaaa

SEQ ID NO: 157068 - DNA, 30 bp, Artificial Sequence
  Synthetic oligonucleotide
agcaaatggtgttacgcttttaaatgaaaa

SEQ ID NO: 157069 - DNA, 30 bp, Artificial Sequence
  Synthetic oligonucleotide
acattaggcgtatggctaggggcctgaaaa

SEQ ID NO: 157070 - DNA, 30 bp, Artificial Sequence
  Synthetic oligonucleotide
tgcacgtcgacctacatatgtcgctgaaaa

SEQ ID NO: 157071 - DNA, 30 bp, Artificial Sequence
  Synthetic oligonucleotide
cgataaatgcgggttatggtccgttgaaaa

SEQ ID NO: 157072 - DNA, 30 bp, Artificial Sequence
  Synthetic oligonucleotide
aagataaagtagtgggagtccatttgaaaa

SEQ ID NO: 157073 - DNA, 30 bp, Artificial Sequence
  Synthetic oligonucleotide
ggtagaaatgattcacacgtcaaaataaaa

SEQ ID NO: 157074 - DNA, 30 bp, Artificial Sequence
  Synthetic oligonucleotide
gcgttgaacaatttaggctcacaaataaaa

SEQ ID NO: 157075 - DNA, 30 bp, Artificial Sequence
  Synthetic oligonucleotide
tacacaagcctctgcggccaccgaataaaa

SEQ ID NO: 157076 - DNA, 30 bp, Artificial Sequence
  Synthetic oligonucleotide
cccgacccacaggggacttagataataaaa

SEQ ID NO: 157077 - DNA, 30 bp, Artificial Sequence
  Synthetic oligonucleotide
tatagggggtcatcttatgagttcataaaa

SEQ ID NO: 157078 - DNA, 30 bp, Artificial Sequence
  Synthetic oligonucleotide
ttaaggcatatccatggcaggtctataaaa

SEQ ID NO: 157079 - DNA, 30 bp, Artificial Sequence
  Synthetic oligonucleotide
taccgaatactgggaggaggccgtataaaa

SEQ ID NO: 157080 - DNA, 30 bp, Artificial Sequence
  Synthetic oligonucleotide
cctggagggcgatctgagaggcgtataaaa

SEQ ID NO: 157081 - DNA, 30 bp, Artificial Sequence
  Synthetic oligonucleotide
caacgtgggtcgatgtatagacttataaaa

SEQ ID NO: 157082 - DNA, 30 bp, Artificial Sequence
  Synthetic oligonucleotide
tctagaagcacgcaatcttgcccactaaaa

SEQ ID NO: 157083 - DNA, 30 bp, Artificial Sequence
  Synthetic oligonucleotide
gcgaggctcacccttatgccttcactaaaa

SEQ ID NO: 157084 - DNA, 30 bp, Artificial Sequence
  Synthetic oligonucleotide
acagcatcctgtaaaggcggggccctaaaa

SEQ ID NO: 157085 - DNA, 29 bp, Artificial Sequence
  Synthetic oligonucleotide
atggtggcaacgcgggtaaaggcctaaaa

SEQ ID NO: 157086 - DNA, 30 bp, Artificial Sequence
  Synthetic oligonucleotide
cactgttgcgcaaaatgagatgtgctaaaa

SEQ ID NO: 157087 - DNA, 30 bp, Artificial Sequence
  Synthetic oligonucleotide
tgtgaagcgcgctgtacggtaggtctaaaa

SEQ ID NO: 157088 - DNA, 31 bp, Artificial Sequence
  Synthetic oligonucleotide
cagggggaaatggaaagaggcacccgtaaaa

SEQ ID NO: 157089 - DNA, 30 bp, Artificial Sequence
  Synthetic oligonucleotide
agacgatctggaaatgtaggcatggtaaaa

SEQ ID NO: 157090 - DNA, 30 bp, Artificial Sequence
  Synthetic oligonucleotide
accgtctagagatagaggtaggacttaaaa

SEQ ID NO: 157091 - DNA, 30 bp, Artificial Sequence
  Synthetic oligonucleotide
agctgtggtaaatagaccaagggcttaaaa

SEQ ID NO: 157092 - DNA, 30 bp, Artificial Sequence
  Synthetic oligonucleotide
ttgaactaactacgcgcgcaagtaaacaaa

SEQ ID NO: 157093 - DNA, 30 bp, Artificial Sequence
  Synthetic oligonucleotide
tgcaggataacgaagtaaagccaacacaaa

SEQ ID NO: 157094 - DNA, 30 bp, Artificial Sequence
  Synthetic oligonucleotide
ttgaagctgcagcagaataaaacacacaaa

SEQ ID NO: 157095 - DNA, 30 bp, Artificial Sequence
  Synthetic oligonucleotide
gtgccgagcgagtctctaatcccacacaaa

SEQ ID NO: 157096 - DNA, 30 bp, Artificial Sequence
  Synthetic oligonucleotide
tttcgacacctagtcacgatgtgacacaaa

SEQ ID NO: 157097 - DNA, 30 bp, Artificial Sequence
  Synthetic oligonucleotide
ggatagttcgtaagttatcccaagcacaaa

SEQ ID NO: 157098 - DNA, 30 bp, Artificial Sequence
  Synthetic oligonucleotide
caaccggtagttgttggtgaaacgcacaaa

SEQ ID NO: 157099 - DNA, 30 bp, Artificial Sequence
  Synthetic oligonucleotide
ggcccaggatcaccggacagaacgcacaaa

SEQ ID NO: 157100 - DNA, 30 bp, Artificial Sequence
  Synthetic oligonucleotide
tcggaccacgcgaactacagcgtgcacaaa

SEQ ID NO: 157101 - DNA, 30 bp, Artificial Sequence
  Synthetic oligonucleotide
gtttggggaagagccgatcttttgcacaaa

SEQ ID NO: 157102 - DNA, 30 bp, Artificial Sequence
  Synthetic oligonucleotide
tgcatccccacagtccgggaccttcacaaa

SEQ ID NO: 157103 - DNA, 30 bp, Artificial Sequence
  Synthetic oligonucleotide
ttagagggttcggctaccggccttcacaaa

SEQ ID NO: 157104 - DNA, 30 bp, Artificial Sequence
  Synthetic oligonucleotide
gactttcatagcaagccatgatgagacaaa

SEQ ID NO: 157105 - DNA, 30 bp, Artificial Sequence
  Synthetic oligonucleotide
agaattgggatgaaatgaattactgacaaa

SEQ ID NO: 157106 - DNA, 30 bp, Artificial Sequence
  Synthetic oligonucleotide
tagcatacttttacgcgaaccagtgacaaa

SEQ ID NO: 157107 - DNA, 30 bp, Artificial Sequence
  Synthetic oligonucleotide
cacaatgacaatgttcatccaaaatacaaa

SEQ ID NO: 157108 - DNA, 30 bp, Artificial Sequence
  Synthetic oligonucleotide
ccacgtacacactaagggagagagtacaaa

SEQ ID NO: 157109 - DNA, 30 bp, Artificial Sequence
  Synthetic oligonucleotide
ttataaaggctccacaagattaattacaaa

SEQ ID NO: 157110 - DNA, 30 bp, Artificial Sequence
  Synthetic oligonucleotide
cttaccaggtcgatcggttctaaaaccaaa

SEQ ID NO: 157111 - DNA, 30 bp, Artificial Sequence
  Synthetic oligonucleotide
ctagcacaccagtgtgtccaatcaaccaaa

SEQ ID NO: 157112 - DNA, 30 bp, Artificial Sequence
  Synthetic oligonucleotide
ggcacaggcaggactgtacctttccccaaa

SEQ ID NO: 157113 - DNA, 30 bp, Artificial Sequence
  Synthetic oligonucleotide
tctcatattaccagtctatgccagcccaaa

SEQ ID NO: 157114 - DNA, 30 bp, Artificial Sequence
  Synthetic oligonucleotide
cggatggcctccaccaacctcttgcccaaa

SEQ ID NO: 157115 - DNA, 30 bp, Artificial Sequence
  Synthetic oligonucleotide
ggggatgcgctacggtgttgtttgcccaaa

SEQ ID NO: 157116 - DNA, 30 bp, Artificial Sequence
  Synthetic oligonucleotide
aggtggatatcaacgcaggtccctcccaaa

SEQ ID NO: 157117 - DNA, 30 bp, Artificial Sequence
  Synthetic oligonucleotide
agatgtgacacgtacgcacgtgacgccaaa

SEQ ID NO: 157118 - DNA, 30 bp, Artificial Sequence
  Synthetic oligonucleotide
ggtcggcgctgtcctaaatcgtcggccaaa

SEQ ID NO: 157119 - DNA, 30 bp, Artificial Sequence
  Synthetic oligonucleotide
agtttaggggtaccatttcggggggccaaa

SEQ ID NO: 157120 - DNA, 30 bp, Artificial Sequence
  Synthetic oligonucleotide
catggtgctaagccgaaagtgtaatccaaa

SEQ ID NO: 157121 - DNA, 30 bp, Artificial Sequence
  Synthetic oligonucleotide
gaacaacgtatggcttaacagggatccaaa

SEQ ID NO: 157122 - DNA, 30 bp, Artificial Sequence
  Synthetic oligonucleotide
aggccgttagagtccttgcacagctccaaa

SEQ ID NO: 157123 - DNA, 30 bp, Artificial Sequence
  Synthetic oligonucleotide
ctgtagaagcggtgcccagtcttctccaaa

SEQ ID NO: 157124 - DNA, 30 bp, Artificial Sequence
  Synthetic oligonucleotide
ggagcccttgacatacgtgtgaggtccaaa

SEQ ID NO: 157125 - DNA, 30 bp, Artificial Sequence
  Synthetic oligonucleotide
aagtatacaagtaaaattgccgggtccaaa

SEQ ID NO: 157126 - DNA, 30 bp, Artificial Sequence
  Synthetic oligonucleotide
aaggaccgactagtttcaggaccttccaaa

SEQ ID NO: 157127 - DNA, 30 bp, Artificial Sequence
  Synthetic oligonucleotide
ccaagaatacgtccaatgagagggagcaaa

SEQ ID NO: 157128 - DNA, 30 bp, Artificial Sequence
  Synthetic oligonucleotide
gcatatattctgtgtgtgcagtggagcaaa

SEQ ID NO: 157129 - DNA, 30 bp, Artificial Sequence
  Synthetic oligonucleotide
cctgagctggcgagcttggtaaatagcaaa

SEQ ID NO: 157130 - DNA, 30 bp, Artificial Sequence
  Synthetic oligonucleotide
ctaaatgttaaacaactctcggagcgcaaa

SEQ ID NO: 157131 - DNA, 30 bp, Artificial Sequence
  Synthetic oligonucleotide
cacagctccgcgtcaaccccccggcgcaaa

SEQ ID NO: 157132 - DNA, 31 bp, Artificial Sequence
  Synthetic oligonucleotide
tgactaaacaatcgatcccgatgtgcgcaaa

SEQ ID NO: 157133 - DNA, 30 bp, Artificial Sequence
  Synthetic oligonucleotide
gaacgggagtcgatagccttatctcgcaaa

SEQ ID NO: 157134 - DNA, 30 bp, Artificial Sequence
  Synthetic oligonucleotide
atcgatcctggggtttcaggaccaggcaaa

SEQ ID NO: 157135 - DNA, 30 bp, Artificial Sequence
  Synthetic oligonucleotide
gttgtcagtcgatagacttagaccggcaaa

SEQ ID NO: 157136 - DNA, 30 bp, Artificial Sequence
  Synthetic oligonucleotide
ctaaaagtatcatacgatcaggccggcaaa

SEQ ID NO: 157137 - DNA, 30 bp, Artificial Sequence
  Synthetic oligonucleotide
tgaaaccgtgagacctgccttgatggcaaa

SEQ ID NO: 157138 - DNA, 30 bp, Artificial Sequence
  Synthetic oligonucleotide
gccatggagcccctctatccaacatgcaaa

SEQ ID NO: 157139 - DNA, 30 bp, Artificial Sequence
  Synthetic oligonucleotide
gcgtagagcctcaacaaaagtctatgcaaa

SEQ ID NO: 157140 - DNA, 30 bp, Artificial Sequence
  Synthetic oligonucleotide
tcgccatgggacgggtgcttacgctgcaaa

SEQ ID NO: 157141 - DNA, 30 bp, Artificial Sequence
  Synthetic oligonucleotide
ttccttgtactagaactacgtgcttgcaaa

SEQ ID NO: 157142 - DNA, 30 bp, Artificial Sequence
  Synthetic oligonucleotide
ttctgctggcataagccgacgaaaatcaaa

SEQ ID NO: 157143 - DNA, 30 bp, Artificial Sequence
  Synthetic oligonucleotide
tctgagtagagtaaccttcatacaatcaaa

SEQ ID NO: 157144 - DNA, 30 bp, Artificial Sequence
  Synthetic oligonucleotide
atggtcgagttgaccattcgctagatcaaa

SEQ ID NO: 157145 - DNA, 30 bp, Artificial Sequence
  Synthetic oligonucleotide
cacgcggaaccgcagattagttaactcaaa

SEQ ID NO: 157146 - DNA, 30 bp, Artificial Sequence
  Synthetic oligonucleotide
gagggatgatatgagtatactgcactcaaa

SEQ ID NO: 157147 - DNA, 30 bp, Artificial Sequence
  Synthetic oligonucleotide
taagcgagggatctatagccctcactcaaa

SEQ ID NO: 157148 - DNA, 30 bp, Artificial Sequence
  Synthetic oligonucleotide
tgcatagtagatgtgctcaggcatctcaaa

SEQ ID NO: 157149 - DNA, 30 bp, Artificial Sequence
  Synthetic oligonucleotide
cgccactggagcggatcgggggttctcaaa

SEQ ID NO: 157150 - DNA, 30 bp, Artificial Sequence
  Synthetic oligonucleotide
gcctgccggcgcgcacaatcccaagtcaaa

SEQ ID NO: 157151 - DNA, 30 bp, Artificial Sequence
  Synthetic oligonucleotide
tagcgtcaaaccgcccgcctcgaagtcaaa

SEQ ID NO: 157152 - DNA, 30 bp, Artificial Sequence
  Synthetic oligonucleotide
tgcggacagcatctgtaatatagggtcaaa

SEQ ID NO: 157153 - DNA, 30 bp, Artificial Sequence
  Synthetic oligonucleotide
cgagcggggcagcggagtaggtgtgtcaaa

SEQ ID NO: 157154 - DNA, 30 bp, Artificial Sequence
  Synthetic oligonucleotide
aaaggcttaatcacagactagattgtcaaa

SEQ ID NO: 157155 - DNA, 30 bp, Artificial Sequence
  Synthetic oligonucleotide
gagtatgggggggagcaacagattttcaaa

SEQ ID NO: 157156 - DNA, 27 bp, Artificial Sequence
  Synthetic oligonucleotide
gctcggcccaagggtgcgcgaaagaaa

SEQ ID NO: 157157 - DNA, 30 bp, Artificial Sequence
  Synthetic oligonucleotide
tatgatccacggtcataccagtgtaagaaa

SEQ ID NO: 157158 - DNA, 30 bp, Artificial Sequence
  Synthetic oligonucleotide
ctgagtgcgaggatgcgttccacacagaaa

SEQ ID NO: 157159 - DNA, 30 bp, Artificial Sequence
  Synthetic oligonucleotide
taagttgttgcgttttagcctttacagaaa

SEQ ID NO: 157160 - DNA, 30 bp, Artificial Sequence
  Synthetic oligonucleotide
gggtacaggcttccagtgggtgtgcagaaa

SEQ ID NO: 157161 - DNA, 30 bp, Artificial Sequence
  Synthetic oligonucleotide
tggactcgacagacgttgatccgtcagaaa

SEQ ID NO: 157162 - DNA, 30 bp, Artificial Sequence
  Synthetic oligonucleotide
ttgcggttgcggagtatctgatgcgagaaa

SEQ ID NO: 157163 - DNA, 30 bp, Artificial Sequence
  Synthetic oligonucleotide
tggattcggcgcaccacaccaatcgagaaa

SEQ ID NO: 157164 - DNA, 30 bp, Artificial Sequence
  Synthetic oligonucleotide
ccccactgtaatgtgactccgcatgagaaa

SEQ ID NO: 157165 - DNA, 30 bp, Artificial Sequence
  Synthetic oligonucleotide
tacgtaaggcagtcccgatggtgatagaaa

SEQ ID NO: 157166 - DNA, 30 bp, Artificial Sequence
  Synthetic oligonucleotide
tcgcgagtgaaacgcggcctgtcctagaaa

SEQ ID NO: 157167 - DNA, 30 bp, Artificial Sequence
  Synthetic oligonucleotide
tgcatatatctgagctgagaggggtagaaa

SEQ ID NO: 157168 - DNA, 30 bp, Artificial Sequence
  Synthetic oligonucleotide
cataaaaacaccgtgggaaaagtgtagaaa

SEQ ID NO: 157169 - DNA, 30 bp, Artificial Sequence
  Synthetic oligonucleotide
acagggttttcgaaagggatagacacgaaa

SEQ ID NO: 157170 - DNA, 30 bp, Artificial Sequence
  Synthetic oligonucleotide
gaagtttcggaggcacggcgtaagacgaaa

SEQ ID NO: 157171 - DNA, 30 bp, Artificial Sequence
  Synthetic oligonucleotide
accagaggtcgtagccccccctagacgaaa

SEQ ID NO: 157172 - DNA, 30 bp, Artificial Sequence
  Synthetic oligonucleotide
ttagcagggggttggcacaaatcgacgaaa

SEQ ID NO: 157173 - DNA, 30 bp, Artificial Sequence
  Synthetic oligonucleotide
ttactagaggttcgataaaaacatacgaaa

SEQ ID NO: 157174 - DNA, 30 bp, Artificial Sequence
  Synthetic oligonucleotide
atggccaaacattttggatcgactacgaaa

SEQ ID NO: 157175 - DNA, 30 bp, Artificial Sequence
  Synthetic oligonucleotide
ctggctaacgggatctctaaaaaaccgaaa

SEQ ID NO: 157176 - DNA, 30 bp, Artificial Sequence
  Synthetic oligonucleotide
gcaaaaaacgtgcagcgcctgtcaccgaaa

SEQ ID NO: 157177 - DNA, 30 bp, Artificial Sequence
  Synthetic oligonucleotide
gaaagattgtaataattagccttcccgaaa

SEQ ID NO: 157178 - DNA, 30 bp, Artificial Sequence
  Synthetic oligonucleotide
cgagcgcctgcaaagctgaaaacagcgaaa

SEQ ID NO: 157179 - DNA, 30 bp, Artificial Sequence
  Synthetic oligonucleotide
ttagaagtgggtataagcagtacagcgaaa

SEQ ID NO: 157180 - DNA, 30 bp, Artificial Sequence
  Synthetic oligonucleotide
cacgcccctcgaatgataggcaaggcgaaa

SEQ ID NO: 157181 - DNA, 30 bp, Artificial Sequence
  Synthetic oligonucleotide
cacaccggttaactagaagtattggcgaaa

SEQ ID NO: 157182 - DNA, 30 bp, Artificial Sequence
  Synthetic oligonucleotide
aatgacctactgaggcgagtattggcgaaa

SEQ ID NO: 157183 - DNA, 30 bp, Artificial Sequence
  Synthetic oligonucleotide
ctcgtggcgagccggggtacacatgcgaaa

SEQ ID NO: 157184 - DNA, 30 bp, Artificial Sequence
  Synthetic oligonucleotide
atcagtgggcagtttagatagccatcgaaa

SEQ ID NO: 157185 - DNA, 30 bp, Artificial Sequence
  Synthetic oligonucleotide
aaccactagacaggtcaaccgtcatcgaaa

SEQ ID NO: 157186 - DNA, 30 bp, Artificial Sequence
  Synthetic oligonucleotide
aagaggtccgacaatacagcactatcgaaa

SEQ ID NO: 157187 - DNA, 30 bp, Artificial Sequence
  Synthetic oligonucleotide
attcgggagcacagtctgtccccttcgaaa

SEQ ID NO: 157188 - DNA, 30 bp, Artificial Sequence
  Synthetic oligonucleotide
agcaacgtagttgaagcgcttagcaggaaa

SEQ ID NO: 157189 - DNA, 30 bp, Artificial Sequence
  Synthetic oligonucleotide
gacaaaaaaaaatatgacagtccgaggaaa

SEQ ID NO: 157190 - DNA, 30 bp, Artificial Sequence
  Synthetic oligonucleotide
tagtacgtctttaaggaaaataggaggaaa

SEQ ID NO: 157191 - DNA, 30 bp, Artificial Sequence
  Synthetic oligonucleotide
cacttctgaagactgcaaggccctaggaaa

SEQ ID NO: 157192 - DNA, 30 bp, Artificial Sequence
  Synthetic oligonucleotide
gccagaacagcgtcgttacgcattaggaaa

SEQ ID NO: 157193 - DNA, 30 bp, Artificial Sequence
  Synthetic oligonucleotide
ggaattgattcgagtaaactcgtacggaaa

SEQ ID NO: 157194 - DNA, 30 bp, Artificial Sequence
  Synthetic oligonucleotide
atcgacgaattcttgacatgggcccggaaa

SEQ ID NO: 157195 - DNA, 30 bp, Artificial Sequence
  Synthetic oligonucleotide
gggcctggtgaggagtattaactgcggaaa

SEQ ID NO: 157196 - DNA, 30 bp, Artificial Sequence
  Synthetic oligonucleotide
atgatcgtcgtaccaacgctcttgcggaaa

SEQ ID NO: 157197 - DNA, 30 bp, Artificial Sequence
  Synthetic oligonucleotide
ctagctctggtagaacgtaaagatcggaaa

SEQ ID NO: 157198 - DNA, 30 bp, Artificial Sequence
  Synthetic oligonucleotide
attactggacggtgaaaatgtgctcggaaa

SEQ ID NO: 157199 - DNA, 30 bp, Artificial Sequence
  Synthetic oligonucleotide
gagcgagcctatgacatggcacaagggaaa

SEQ ID NO: 157200 - DNA, 30 bp, Artificial Sequence
  Synthetic oligonucleotide
aattcatggtaaggtaaattattagggaaa

SEQ ID NO: 157201 - DNA, 30 bp, Artificial Sequence
  Synthetic oligonucleotide
ccgggagtggaaacgaaaccacacgggaaa

SEQ ID NO: 157202 - DNA, 30 bp, Artificial Sequence
  Synthetic oligonucleotide
agagatagcacaccactcagagacgggaaa

SEQ ID NO: 157203 - DNA, 30 bp, Artificial Sequence
  Synthetic oligonucleotide
gcggcgatacagtctgttttagcggggaaa

SEQ ID NO: 157204 - DNA, 30 bp, Artificial Sequence
  Synthetic oligonucleotide
aagacagctaggtaagaggttcatgggaaa

SEQ ID NO: 157205 - DNA, 30 bp, Artificial Sequence
  Synthetic oligonucleotide
gattgcataagatcagcataggatgggaaa

SEQ ID NO: 157206 - DNA, 30 bp, Artificial Sequence
  Synthetic oligonucleotide
taaggaggatcggtggtaatttctgggaaa

SEQ ID NO: 157207 - DNA, 30 bp, Artificial Sequence
  Synthetic oligonucleotide
tctgtgtacgactagttgtgacgatggaaa

SEQ ID NO: 157208 - DNA, 30 bp, Artificial Sequence
  Synthetic oligonucleotide
ggaggggctgttaccctgactggatggaaa

SEQ ID NO: 157209 - DNA, 30 bp, Artificial Sequence
  Synthetic oligonucleotide
agaataatgaagtcgccaggtcactggaaa

SEQ ID NO: 157210 - DNA, 30 bp, Artificial Sequence
  Synthetic oligonucleotide
ggaagttggataaaaatcgaatagtggaaa

SEQ ID NO: 157211 - DNA, 30 bp, Artificial Sequence
  Synthetic oligonucleotide
cttttgccgtcaactcgtccagcgtggaaa

SEQ ID NO: 157212 - DNA, 30 bp, Artificial Sequence
  Synthetic oligonucleotide
gtgaagccatcgagtggggttaattggaaa

SEQ ID NO: 157213 - DNA, 30 bp, Artificial Sequence
  Synthetic oligonucleotide
ccactagtggacttgtgaagtatttggaaa

SEQ ID NO: 157214 - DNA, 30 bp, Artificial Sequence
  Synthetic oligonucleotide
tggcggggctagctggcggaaaaaatgaaa

SEQ ID NO: 157215 - DNA, 30 bp, Artificial Sequence
  Synthetic oligonucleotide
accgcggtttcggataatgcccaaatgaaa

SEQ ID NO: 157216 - DNA, 30 bp, Artificial Sequence
  Synthetic oligonucleotide
aggcatgttgtaacactgctcggcatgaaa

SEQ ID NO: 157217 - DNA, 30 bp, Artificial Sequence
  Synthetic oligonucleotide
gcaaagaaaaagaagcgatgtgagatgaaa

SEQ ID NO: 157218 - DNA, 30 bp, Artificial Sequence
  Synthetic oligonucleotide
gtttgacgtgtaagtaacagccgtatgaaa

SEQ ID NO: 157219 - DNA, 30 bp, Artificial Sequence
  Synthetic oligonucleotide
gtactgagcacaagcacttaagacctgaaa

SEQ ID NO: 157220 - DNA, 30 bp, Artificial Sequence
  Synthetic oligonucleotide
tacacagacggcaataataacctcctgaaa

SEQ ID NO: 157221 - DNA, 30 bp, Artificial Sequence
  Synthetic oligonucleotide
gaagtgagtgcctctctactgaagctgaaa

SEQ ID NO: 157222 - DNA, 30 bp, Artificial Sequence
  Synthetic oligonucleotide
ggtgactccaagcattagcccatgctgaaa

SEQ ID NO: 157223 - DNA, 30 bp, Artificial Sequence
  Synthetic oligonucleotide
ttaataggcggcgaagaaactcgtctgaaa

SEQ ID NO: 157224 - DNA, 30 bp, Artificial Sequence
  Synthetic oligonucleotide
cggtatcccatgctttgtaaagacgtgaaa

SEQ ID NO: 157225 - DNA, 30 bp, Artificial Sequence
  Synthetic oligonucleotide
tccgaaacatcctctgttctcctcgtgaaa

SEQ ID NO: 157226 - DNA, 30 bp, Artificial Sequence
  Synthetic oligonucleotide
tagcctacgggatgatccctaaaggtgaaa

SEQ ID NO: 157227 - DNA, 30 bp, Artificial Sequence
  Synthetic oligonucleotide
aggcatcgataacctgataagccggtgaaa

SEQ ID NO: 157228 - DNA, 30 bp, Artificial Sequence
  Synthetic oligonucleotide
gtgtaacacgggcgttggaaaccattgaaa

SEQ ID NO: 157229 - DNA, 30 bp, Artificial Sequence
  Synthetic oligonucleotide
agggaaacgacctgaggcaacgcattgaaa

SEQ ID NO: 157230 - DNA, 30 bp, Artificial Sequence
  Synthetic oligonucleotide
caagccaccagtcagtccaaaagattgaaa

SEQ ID NO: 157231 - DNA, 30 bp, Artificial Sequence
  Synthetic oligonucleotide
agatcaacagtatagccgagacgattgaaa

SEQ ID NO: 157232 - DNA, 30 bp, Artificial Sequence
  Synthetic oligonucleotide
gcgcttgataagagtgcactttgattgaaa

SEQ ID NO: 157233 - DNA, 30 bp, Artificial Sequence
  Synthetic oligonucleotide
ggccactaaccctatgaaaaccacttgaaa

SEQ ID NO: 157234 - DNA, 30 bp, Artificial Sequence
  Synthetic oligonucleotide
acgtgccttacggcgggttgagagttgaaa

SEQ ID NO: 157235 - DNA, 30 bp, Artificial Sequence
  Synthetic oligonucleotide
tctcacaggctcaagctgggttcgttgaaa

SEQ ID NO: 157236 - DNA, 30 bp, Artificial Sequence
  Synthetic oligonucleotide
attcgaggcgagtagtggaaacggttgaaa

SEQ ID NO: 157237 - DNA, 30 bp, Artificial Sequence
  Synthetic oligonucleotide
ttcccgacggtaaagaaagtgacaaataaa

SEQ ID NO: 157238 - DNA, 30 bp, Artificial Sequence
  Synthetic oligonucleotide
agcacgttcgttataccattcagaaataaa

SEQ ID NO: 157239 - DNA, 30 bp, Artificial Sequence
  Synthetic oligonucleotide
caagtataattatgaaaggggcgaaataaa

SEQ ID NO: 157240 - DNA, 30 bp, Artificial Sequence
  Synthetic oligonucleotide
agtaagggatatcatacgttaataaataaa

SEQ ID NO: 157241 - DNA, 30 bp, Artificial Sequence
  Synthetic oligonucleotide
catcttacggttcgcctcgcactaaataaa

SEQ ID NO: 157242 - DNA, 29 bp, Artificial Sequence
  Synthetic oligonucleotide
gagacgagctgacgcaaacaacgaataaa

SEQ ID NO: 157243 - DNA, 30 bp, Artificial Sequence
  Synthetic oligonucleotide
taacaatactgggggaagatgaggaataaa

SEQ ID NO: 157244 - DNA, 30 bp, Artificial Sequence
  Synthetic oligonucleotide
ggtgataggacaaggttccgatggaataaa

SEQ ID NO: 157245 - DNA, 30 bp, Artificial Sequence
  Synthetic oligonucleotide
taaacgttaatccacgcctcaagtaataaa

SEQ ID NO: 157246 - DNA, 30 bp, Artificial Sequence
  Synthetic oligonucleotide
ggtgtgcagtccgacgggggtcgtaataaa

SEQ ID NO: 157247 - DNA, 30 bp, Artificial Sequence
  Synthetic oligonucleotide
gaaagtacgtgaaaggcacccttacataaa

SEQ ID NO: 157248 - DNA, 30 bp, Artificial Sequence
  Synthetic oligonucleotide
gcacgaggacgtagggttctttaccataaa

SEQ ID NO: 157249 - DNA, 30 bp, Artificial Sequence
  Synthetic oligonucleotide
tacttgaaaaagtagcggaagagccataaa

SEQ ID NO: 157250 - DNA, 30 bp, Artificial Sequence
  Synthetic oligonucleotide
taggagcgtgacatgccccaccagcataaa

SEQ ID NO: 157251 - DNA, 30 bp, Artificial Sequence
  Synthetic oligonucleotide
aatagccctctgggatggagggggcataaa

SEQ ID NO: 157252 - DNA, 30 bp, Artificial Sequence
  Synthetic oligonucleotide
ctgggttaatacacacatgcgagtcataaa

SEQ ID NO: 157253 - DNA, 30 bp, Artificial Sequence
  Synthetic oligonucleotide
gtcggacttcggatttgcagtggtcataaa

SEQ ID NO: 157254 - DNA, 30 bp, Artificial Sequence
  Synthetic oligonucleotide
ctataaggaagaccagacattgacgataaa

SEQ ID NO: 157255 - DNA, 30 bp, Artificial Sequence
  Synthetic oligonucleotide
aagactctttcgaatcgtcgtcccgataaa

SEQ ID NO: 157256 - DNA, 30 bp, Artificial Sequence
  Synthetic oligonucleotide
ctggcactacagttctatgcactcgataaa

SEQ ID NO: 157257 - DNA, 30 bp, Artificial Sequence
  Synthetic oligonucleotide
tgcgggctaccgttccccgagaaggataaa

SEQ ID NO: 157258 - DNA, 30 bp, Artificial Sequence
  Synthetic oligonucleotide
catataagtgtgtcaagtgaagctgataaa

SEQ ID NO: 157259 - DNA, 30 bp, Artificial Sequence
  Synthetic oligonucleotide
tgatgcagtggacgtaagtcgaaatataaa

SEQ ID NO: 157260 - DNA, 30 bp, Artificial Sequence
  Synthetic oligonucleotide
ccagagaaacaaacgataactcaatataaa

SEQ ID NO: 157261 - DNA, 30 bp, Artificial Sequence
  Synthetic oligonucleotide
cctctacccttggatcggatactatataaa

SEQ ID NO: 157262 - DNA, 30 bp, Artificial Sequence
  Synthetic oligonucleotide
agaactcatagagctaaggggtactataaa

SEQ ID NO: 157263 - DNA, 30 bp, Artificial Sequence
  Synthetic oligonucleotide
gtcggctctcactgtctgcatcgctataaa

SEQ ID NO: 157264 - DNA, 30 bp, Artificial Sequence
  Synthetic oligonucleotide
atgccacatgatgcgtgaatacattataaa

SEQ ID NO: 157265 - DNA, 30 bp, Artificial Sequence
  Synthetic oligonucleotide
gttgaattatagctagatgtgccttataaa

SEQ ID NO: 157266 - DNA, 30 bp, Artificial Sequence
  Synthetic oligonucleotide
caagtgggaatccgatattgtccttataaa

SEQ ID NO: 157267 - DNA, 30 bp, Artificial Sequence
  Synthetic oligonucleotide
ccaatgctatagtggcctctttgaactaaa

SEQ ID NO: 157268 - DNA, 30 bp, Artificial Sequence
  Synthetic oligonucleotide
ccgaaaacggcactaccgactaatactaaa

SEQ ID NO: 157269 - DNA, 30 bp, Artificial Sequence
  Synthetic oligonucleotide
tctcgccactgaaacaatgtgagtactaaa

SEQ ID NO: 157270 - DNA, 30 bp, Artificial Sequence
  Synthetic oligonucleotide
gcacgcgctcccgcgtggcaagaacctaaa

SEQ ID NO: 157271 - DNA, 30 bp, Artificial Sequence
  Synthetic oligonucleotide
tatctaaaaggaagtgaccccttacctaaa

SEQ ID NO: 157272 - DNA, 29 bp, Artificial Sequence
  Synthetic oligonucleotide
ctcaaggctccgagttctgtgggcctaaa

SEQ ID NO: 157273 - DNA, 30 bp, Artificial Sequence
  Synthetic oligonucleotide
catagaatttaaaatggtgcctttcctaaa

SEQ ID NO: 157274 - DNA, 30 bp, Artificial Sequence
  Synthetic oligonucleotide
aatgtcgtagccgtcacatcagccgctaaa

SEQ ID NO: 157275 - DNA, 30 bp, Artificial Sequence
  Synthetic oligonucleotide
gactttatcaaagtgccagaaattgctaaa

SEQ ID NO: 157276 - DNA, 30 bp, Artificial Sequence
  Synthetic oligonucleotide
catctgagtgggtcacaagatcactctaaa

SEQ ID NO: 157277 - DNA, 30 bp, Artificial Sequence
  Synthetic oligonucleotide
caaagtgctgtgggcaatttcacttctaaa

SEQ ID NO: 157278 - DNA, 30 bp, Artificial Sequence
  Synthetic oligonucleotide
ataagctgaagtccaacgtgaagaagtaaa

SEQ ID NO: 157279 - DNA, 30 bp, Artificial Sequence
  Synthetic oligonucleotide
agggcgactgttcaaactcatgtaagtaaa

SEQ ID NO: 157280 - DNA, 29 bp, Artificial Sequence
  Synthetic oligonucleotide
gatgccctgcatcataggctgcgagtaaa

SEQ ID NO: 157281 - DNA, 30 bp, Artificial Sequence
  Synthetic oligonucleotide
gtgcgtaaggccgtaactgcttgtagtaaa

SEQ ID NO: 157282 - DNA, 30 bp, Artificial Sequence
  Synthetic oligonucleotide
acaggaaaacatacatgtcggcttagtaaa

SEQ ID NO: 157283 - DNA, 30 bp, Artificial Sequence
  Synthetic oligonucleotide
acgtggcattttaattagcctgcccgtaaa

SEQ ID NO: 157284 - DNA, 30 bp, Artificial Sequence
  Synthetic oligonucleotide
aactacaggagtggcctggttggccgtaaa

SEQ ID NO: 157285 - DNA, 30 bp, Artificial Sequence
  Synthetic oligonucleotide
gtcgggttaagatcacccaagacgcgtaaa

SEQ ID NO: 157286 - DNA, 30 bp, Artificial Sequence
  Synthetic oligonucleotide
cgttgtatcgataccctgcgttgtcgtaaa

SEQ ID NO: 157287 - DNA, 30 bp, Artificial Sequence
  Synthetic oligonucleotide
taaaatcgggcaacacgggagtcaggtaaa

SEQ ID NO: 157288 - DNA, 30 bp, Artificial Sequence
  Synthetic oligonucleotide
attgattcaggtatgaatgagcgaggtaaa

SEQ ID NO: 157289 - DNA, 30 bp, Artificial Sequence
  Synthetic oligonucleotide
tcttgcgctatacatactgtaatcggtaaa

SEQ ID NO: 157290 - DNA, 30 bp, Artificial Sequence
  Synthetic oligonucleotide
cgaacaccgttgaacggcccagtcggtaaa

SEQ ID NO: 157291 - DNA, 30 bp, Artificial Sequence
  Synthetic oligonucleotide
gggagcaatcgcaggaccgggacgggtaaa

SEQ ID NO: 157292 - DNA, 30 bp, Artificial Sequence
  Synthetic oligonucleotide
ggaatctgccaggagaagctggctggtaaa

SEQ ID NO: 157293 - DNA, 30 bp, Artificial Sequence
  Synthetic oligonucleotide
tcagcctaaaggacaataagaagatgtaaa

SEQ ID NO: 157294 - DNA, 30 bp, Artificial Sequence
  Synthetic oligonucleotide
agactcgaagttcgaaggggatactgtaaa

SEQ ID NO: 157295 - DNA, 30 bp, Artificial Sequence
  Synthetic oligonucleotide
gctgcctagtacaggctgtccaagtgtaaa

SEQ ID NO: 157296 - DNA, 30 bp, Artificial Sequence
  Synthetic oligonucleotide
cgctgaacacatctatggcctcattgtaaa

SEQ ID NO: 157297 - DNA, 30 bp, Artificial Sequence
  Synthetic oligonucleotide
gacgggggcagaagtgattttacttgtaaa

SEQ ID NO: 157298 - DNA, 30 bp, Artificial Sequence
  Synthetic oligonucleotide
cccaagaaggggaaaaaattcagttgtaaa

SEQ ID NO: 157299 - DNA, 30 bp, Artificial Sequence
  Synthetic oligonucleotide
tgaaggacgttgcgctaagacgtttgtaaa

SEQ ID NO: 157300 - DNA, 30 bp, Artificial Sequence
  Synthetic oligonucleotide
agtgcctgaagggtagttgagagcattaaa

SEQ ID NO: 157301 - DNA, 30 bp, Artificial Sequence
  Synthetic oligonucleotide
cggtagcacagcattgaagttatcattaaa

SEQ ID NO: 157302 - DNA, 30 bp, Artificial Sequence
  Synthetic oligonucleotide
aagctcaatacgcacggtagttaccttaaa

SEQ ID NO: 157303 - DNA, 30 bp, Artificial Sequence
  Synthetic oligonucleotide
gtatagtaaggggtacacgagggcgttaaa

SEQ ID NO: 157304 - DNA, 30 bp, Artificial Sequence
  Synthetic oligonucleotide
tcaatatatcgggaacacactaaggttaaa

SEQ ID NO: 157305 - DNA, 30 bp, Artificial Sequence
  Synthetic oligonucleotide
ccaatggacgaccattacaggccggttaaa

SEQ ID NO: 157306 - DNA, 30 bp, Artificial Sequence
  Synthetic oligonucleotide
gcctgagaccattcttggagccttgttaaa

SEQ ID NO: 157307 - DNA, 30 bp, Artificial Sequence
  Synthetic oligonucleotide
ccggaagcctttccaaggtgatttgttaaa

SEQ ID NO: 157308 - DNA, 30 bp, Artificial Sequence
  Synthetic oligonucleotide
atgatgtgatcccgggcaccaaactttaaa

SEQ ID NO: 157309 - DNA, 30 bp, Artificial Sequence
  Synthetic oligonucleotide
ggaggcgaataagagttcggatcctttaaa

SEQ ID NO: 157310 - DNA, 30 bp, Artificial Sequence
  Synthetic oligonucleotide
gcacaacgaactgtcacgtctcattttaaa

SEQ ID NO: 157311 - DNA, 30 bp, Artificial Sequence
  Synthetic oligonucleotide
aacgaccgcgtctcactacgtcattttaaa

SEQ ID NO: 157312 - DNA, 30 bp, Artificial Sequence
  Synthetic oligonucleotide
ctttcgggggacgcgggaaagataaaacaa

SEQ ID NO: 157313 - DNA, 30 bp, Artificial Sequence
  Synthetic oligonucleotide
gtacgtggaggctttctagatcagaaacaa

SEQ ID NO: 157314 - DNA, 30 bp, Artificial Sequence
  Synthetic oligonucleotide
ccttaacaggtgcgctacgtactgaaacaa

SEQ ID NO: 157315 - DNA, 30 bp, Artificial Sequence
  Synthetic oligonucleotide
gccgaaggaattattccagggtgtaaacaa

SEQ ID NO: 157316 - DNA, 30 bp, Artificial Sequence
  Synthetic oligonucleotide
agccgctaaactaaacccgtcagacaacaa

SEQ ID NO: 157317 - DNA, 30 bp, Artificial Sequence
  Synthetic oligonucleotide
aataggcactattactcggagggccaacaa

SEQ ID NO: 157318 - DNA, 30 bp, Artificial Sequence
  Synthetic oligonucleotide
atggatcggcggcccgtcggcggagaacaa

SEQ ID NO: 157319 - DNA, 30 bp, Artificial Sequence
  Synthetic oligonucleotide
gttcgtataatcacaaacaacttagaacaa

SEQ ID NO: 157320 - DNA, 30 bp, Artificial Sequence
  Synthetic oligonucleotide
gaccatgaaaaactatgtgtggatgaacaa

SEQ ID NO: 157321 - DNA, 30 bp, Artificial Sequence
  Synthetic oligonucleotide
aaagtcctacgcgtgggagttccataacaa

SEQ ID NO: 157322 - DNA, 30 bp, Artificial Sequence
  Synthetic oligonucleotide
ggaacgtacctctaatagggacggtaacaa

SEQ ID NO: 157323 - DNA, 30 bp, Artificial Sequence
  Synthetic oligonucleotide
gggacggtgtgaaaggccaccttgtaacaa

SEQ ID NO: 157324 - DNA, 30 bp, Artificial Sequence
  Synthetic oligonucleotide
gcgacaacagtcgaaccgtatttgtaacaa

SEQ ID NO: 157325 - DNA, 30 bp, Artificial Sequence
  Synthetic oligonucleotide
gattaagtgctgagttcggggacttaacaa

SEQ ID NO: 157326 - DNA, 30 bp, Artificial Sequence
  Synthetic oligonucleotide
tatgccggtgagattaggagttgttaacaa

SEQ ID NO: 157327 - DNA, 30 bp, Artificial Sequence
  Synthetic oligonucleotide
gtggatatcgtactggaaggactttaacaa

SEQ ID NO: 157328 - DNA, 30 bp, Artificial Sequence
  Synthetic oligonucleotide
cgtattaatttaagtagcttgtaaacacaa

SEQ ID NO: 157329 - DNA, 30 bp, Artificial Sequence
  Synthetic oligonucleotide
gcgcggctagtctaccaaccttgcacacaa

SEQ ID NO: 157330 - DNA, 31 bp, Artificial Sequence
  Synthetic oligonucleotide
tctgaatgagtatcgacccgatatcacacaa

SEQ ID NO: 157331 - DNA, 30 bp, Artificial Sequence
  Synthetic oligonucleotide
ccccatcaactctaccacaccaggacacaa

SEQ ID NO: 157332 - DNA, 30 bp, Artificial Sequence
  Synthetic oligonucleotide
taaagatgaaacagctagctgatgacacaa

SEQ ID NO: 157333 - DNA, 30 bp, Artificial Sequence
  Synthetic oligonucleotide
caaaaatagatatgggacttgaatacacaa

SEQ ID NO: 157334 - DNA, 30 bp, Artificial Sequence
  Synthetic oligonucleotide
gacaattcagactgatcgaatgctacacaa

SEQ ID NO: 157335 - DNA, 30 bp, Artificial Sequence
  Synthetic oligonucleotide
ccaacatctataggcattcgatctacacaa

SEQ ID NO: 157336 - DNA, 30 bp, Artificial Sequence
  Synthetic oligonucleotide
aagagaaggttgaaagaacatcgaccacaa

SEQ ID NO: 157337 - DNA, 30 bp, Artificial Sequence
  Synthetic oligonucleotide
aaggatgcattcgttataacatttccacaa

SEQ ID NO: 157338 - DNA, 30 bp, Artificial Sequence
  Synthetic oligonucleotide
gtggggttaagataggggcatccagcacaa

SEQ ID NO: 157339 - DNA, 30 bp, Artificial Sequence
  Synthetic oligonucleotide
gacgaatatcgacagttgaatatcgcacaa

SEQ ID NO: 157340 - DNA, 30 bp, Artificial Sequence
  Synthetic oligonucleotide
ttgtttaaaatccggaaagtaggctcacaa

SEQ ID NO: 157341 - DNA, 30 bp, Artificial Sequence
  Synthetic oligonucleotide
attaaaataaggtgaggcatcgggtcacaa

SEQ ID NO: 157342 - DNA, 30 bp, Artificial Sequence
  Synthetic oligonucleotide
cgcgcgatttcgtcgggaaagttttcacaa

SEQ ID NO: 157343 - DNA, 30 bp, Artificial Sequence
  Synthetic oligonucleotide
tgtaaacgggttaactaggttacaagacaa

SEQ ID NO: 157344 - DNA, 30 bp, Artificial Sequence
  Synthetic oligonucleotide
ttggctggaccctcaataggaattagacaa

SEQ ID NO: 157345 - DNA, 30 bp, Artificial Sequence
  Synthetic oligonucleotide
tcttgctgtttgaagtcggatacacgacaa

SEQ ID NO: 157346 - DNA, 30 bp, Artificial Sequence
  Synthetic oligonucleotide
aggagtagctccgcggtaccgccacgacaa

SEQ ID NO: 157347 - DNA, 30 bp, Artificial Sequence
  Synthetic oligonucleotide
tcctgcgtggttaagatgtataaccgacaa

SEQ ID NO: 157348 - DNA, 30 bp, Artificial Sequence
  Synthetic oligonucleotide
acattgttcttggaaaattggtcccgacaa

SEQ ID NO: 157349 - DNA, 30 bp, Artificial Sequence
  Synthetic oligonucleotide
acctcaaatacaatccgagcttgtcgacaa

SEQ ID NO: 157350 - DNA, 30 bp, Artificial Sequence
  Synthetic oligonucleotide
gcgtgtccgaactctcattttgcgggacaa

SEQ ID NO: 157351 - DNA, 30 bp, Artificial Sequence
  Synthetic oligonucleotide
gataacgcaggatgctggtagacatgacaa

SEQ ID NO: 157352 - DNA, 30 bp, Artificial Sequence
  Synthetic oligonucleotide
ttaataactgcatttttaaaatgttgacaa

SEQ ID NO: 157353 - DNA, 30 bp, Artificial Sequence
  Synthetic oligonucleotide
gcggagaaaaccatattacttagaatacaa

SEQ ID NO: 157354 - DNA, 30 bp, Artificial Sequence
  Synthetic oligonucleotide
tgggctgttttattggtgggcatcatacaa

SEQ ID NO: 157355 - DNA, 30 bp, Artificial Sequence
  Synthetic oligonucleotide
ggctagctagcaatatgtatcgtcatacaa

SEQ ID NO: 157356 - DNA, 30 bp, Artificial Sequence
  Synthetic oligonucleotide
gggcggtcccaaagtgaaatacatatacaa

SEQ ID NO: 157357 - DNA, 30 bp, Artificial Sequence
  Synthetic oligonucleotide
atcaaacatcaacacaatgtgaacctacaa

SEQ ID NO: 157358 - DNA, 30 bp, Artificial Sequence
  Synthetic oligonucleotide
ggatacaaaaaataccgtgtttagctacaa

SEQ ID NO: 157359 - DNA, 30 bp, Artificial Sequence
  Synthetic oligonucleotide
gatattgttaagctgcacgggaaggtacaa

SEQ ID NO: 157360 - DNA, 30 bp, Artificial Sequence
  Synthetic oligonucleotide
gataggtgtatctcgccgcgcgaggtacaa

SEQ ID NO: 157361 - DNA, 30 bp, Artificial Sequence
  Synthetic oligonucleotide
tcccctgcactcctatatcaaatgttacaa

SEQ ID NO: 157362 - DNA, 30 bp, Artificial Sequence
  Synthetic oligonucleotide
taggttgaaaatggcaggcctagaaaccaa

SEQ ID NO: 157363 - DNA, 30 bp, Artificial Sequence
  Synthetic oligonucleotide
tctggacaaggaaaagtccaggtcaaccaa

SEQ ID NO: 157364 - DNA, 30 bp, Artificial Sequence
  Synthetic oligonucleotide
cctaaactacccctaaataaaactaaccaa

SEQ ID NO: 157365 - DNA, 30 bp, Artificial Sequence
  Synthetic oligonucleotide
atggaattcgaacggggggtttagcaccaa

SEQ ID NO: 157366 - DNA, 30 bp, Artificial Sequence
  Synthetic oligonucleotide
tagatctgcagatgcgcgaaaattcaccaa

SEQ ID NO: 157367 - DNA, 30 bp, Artificial Sequence
  Synthetic oligonucleotide
ctgaccaggaagcacttgcttggagaccaa

SEQ ID NO: 157368 - DNA, 30 bp, Artificial Sequence
  Synthetic oligonucleotide
atatctatgtaagattatagcggtgaccaa

SEQ ID NO: 157369 - DNA, 30 bp, Artificial Sequence
  Synthetic oligonucleotide
gaatgagcatagtagggggtaatataccaa

SEQ ID NO: 157370 - DNA, 30 bp, Artificial Sequence
  Synthetic oligonucleotide
ggttctctgcaggacaagacaggttaccaa

SEQ ID NO: 157371 - DNA, 30 bp, Artificial Sequence
  Synthetic oligonucleotide
gagctatcgtaaatatgaaacggttaccaa

SEQ ID NO: 157372 - DNA, 30 bp, Artificial Sequence
  Synthetic oligonucleotide
aaggttcaatttaaaaaacatggaacccaa

SEQ ID NO: 157373 - DNA, 30 bp, Artificial Sequence
  Synthetic oligonucleotide
taagaagtggctagtacatggaacccccaa

SEQ ID NO: 157374 - DNA, 31 bp, Artificial Sequence
  Synthetic oligonucleotide
ccaaagatgattaccttaagtaatcccccaa

SEQ ID NO: 157375 - DNA, 30 bp, Artificial Sequence
  Synthetic oligonucleotide
atgggggaatgattattttaccttccccaa

SEQ ID NO: 157376 - DNA, 30 bp, Artificial Sequence
  Synthetic oligonucleotide
acgctctcaaagggagatggtaaagcccaa

SEQ ID NO: 157377 - DNA, 31 bp, Artificial Sequence
  Synthetic oligonucleotide
tcttgcaatacgacaggtatcacacgcccaa

SEQ ID NO: 157378 - DNA, 30 bp, Artificial Sequence
  Synthetic oligonucleotide
aagttgagacacctttatctagccgcccaa

SEQ ID NO: 157379 - DNA, 30 bp, Artificial Sequence
  Synthetic oligonucleotide
gggcgataaatttgtgcgactggcgcccaa

SEQ ID NO: 157380 - DNA, 30 bp, Artificial Sequence
  Synthetic oligonucleotide
ggatcagtctcctttagtcagggggcccaa

SEQ ID NO: 157381 - DNA, 30 bp, Artificial Sequence
  Synthetic oligonucleotide
tgcgtgagaacgcaggggacaatggcccaa

SEQ ID NO: 157382 - DNA, 30 bp, Artificial Sequence
  Synthetic oligonucleotide
ttgatccggatctcttgcagcgagtcccaa

SEQ ID NO: 157383 - DNA, 30 bp, Artificial Sequence
  Synthetic oligonucleotide
agctcgcgggctgtgtgcgattggtcccaa

SEQ ID NO: 157384 - DNA, 30 bp, Artificial Sequence
  Synthetic oligonucleotide
tgcacgaccggcgcccttcacaaaagccaa

SEQ ID NO: 157385 - DNA, 30 bp, Artificial Sequence
  Synthetic oligonucleotide
ctcgtgtaaggttgaacaagtcgcagccaa

SEQ ID NO: 157386 - DNA, 30 bp, Artificial Sequence
  Synthetic oligonucleotide
ggaaacaagatcgagccgaatcaacgccaa

SEQ ID NO: 157387 - DNA, 30 bp, Artificial Sequence
  Synthetic oligonucleotide
tggctatcgaaaaataaccatcaccgccaa

SEQ ID NO: 157388 - DNA, 30 bp, Artificial Sequence
  Synthetic oligonucleotide
gtaacaacacctagaacatagtaccgccaa

SEQ ID NO: 157389 - DNA, 30 bp, Artificial Sequence
  Synthetic oligonucleotide
taaaattctgccgtggcacgaacgcgccaa

SEQ ID NO: 157390 - DNA, 30 bp, Artificial Sequence
  Synthetic oligonucleotide
agcgaaccgggcggtcaagcattgcgccaa

SEQ ID NO: 157391 - DNA, 30 bp, Artificial Sequence
  Synthetic oligonucleotide
catgatgggcctccaggtgggaacggccaa

SEQ ID NO: 157392 - DNA, 30 bp, Artificial Sequence
  Synthetic oligonucleotide
gcactgcgtccaagaaatagggacggccaa

SEQ ID NO: 157393 - DNA, 30 bp, Artificial Sequence
  Synthetic oligonucleotide
gtcataggaacgccgaggaaaatcggccaa

SEQ ID NO: 157394 - DNA, 30 bp, Artificial Sequence
  Synthetic oligonucleotide
ggtcgcgtcaacgttcctagaaaatgccaa

SEQ ID NO: 157395 - DNA, 30 bp, Artificial Sequence
  Synthetic oligonucleotide
ctgcaagggtacccgtggatctactgccaa

SEQ ID NO: 157396 - DNA, 30 bp, Artificial Sequence
  Synthetic oligonucleotide
aagtgccaacggcatgcacagcggtgccaa

SEQ ID NO: 157397 - DNA, 30 bp, Artificial Sequence
  Synthetic oligonucleotide
aacgatcggctaagaataacccaaatccaa

SEQ ID NO: 157398 - DNA, 30 bp, Artificial Sequence
  Synthetic oligonucleotide
atatggaccacgcaagcgctgcttatccaa

SEQ ID NO: 157399 - DNA, 30 bp, Artificial Sequence
  Synthetic oligonucleotide
acaaatggtgaattaagtggcgttatccaa

SEQ ID NO: 157400 - DNA, 30 bp, Artificial Sequence
  Synthetic oligonucleotide
gggcttaggtcgttgcgacttaatctccaa

SEQ ID NO: 157401 - DNA, 30 bp, Artificial Sequence
  Synthetic oligonucleotide
cggacgctcttctcgtacctattcgtccaa

SEQ ID NO: 157402 - DNA, 30 bp, Artificial Sequence
  Synthetic oligonucleotide
gagaacatctattatacttcaaatgtccaa

SEQ ID NO: 157403 - DNA, 30 bp, Artificial Sequence
  Synthetic oligonucleotide
ggacaggttaaggcaagtgtgaagttccaa

SEQ ID NO: 157404 - DNA, 30 bp, Artificial Sequence
  Synthetic oligonucleotide
tccgtccgggcataggtcatcaaaaagcaa

SEQ ID NO: 157405 - DNA, 30 bp, Artificial Sequence
  Synthetic oligonucleotide
gatgaaagatgtgacatcttttcgaagcaa

SEQ ID NO: 157406 - DNA, 30 bp, Artificial Sequence
  Synthetic oligonucleotide
ttgtgagctaggctcaccgtaagacagcaa

SEQ ID NO: 157407 - DNA, 30 bp, Artificial Sequence
  Synthetic oligonucleotide
tgcgtttctggtacaaactcagcccagcaa

SEQ ID NO: 157408 - DNA, 30 bp, Artificial Sequence
  Synthetic oligonucleotide
cgtcggcctggaaggggctaagcgcagcaa

SEQ ID NO: 157409 - DNA, 30 bp, Artificial Sequence
  Synthetic oligonucleotide
tgacgtgaatgacgtatacccactcagcaa

SEQ ID NO: 157410 - DNA, 30 bp, Artificial Sequence
  Synthetic oligonucleotide
cgcagggatcataaagcaatgaaagagcaa

SEQ ID NO: 157411 - DNA, 30 bp, Artificial Sequence
  Synthetic oligonucleotide
gtatcaatctggaatctcgccacagagcaa

SEQ ID NO: 157412 - DNA, 30 bp, Artificial Sequence
  Synthetic oligonucleotide
tagtaagatccgcccgatttgttcgagcaa

SEQ ID NO: 157413 - DNA, 30 bp, Artificial Sequence
  Synthetic oligonucleotide
ctggctagaggtaaggaatcagaatagcaa

SEQ ID NO: 157414 - DNA, 30 bp, Artificial Sequence
  Synthetic oligonucleotide
ttcatgcaaagagaacgggagctctagcaa

SEQ ID NO: 157415 - DNA, 30 bp, Artificial Sequence
  Synthetic oligonucleotide
agtcccaaacattgatacccatcgtagcaa

SEQ ID NO: 157416 - DNA, 30 bp, Artificial Sequence
  Synthetic oligonucleotide
ccctaccacaaaagttcctactattagcaa

SEQ ID NO: 157417 - DNA, 30 bp, Artificial Sequence
  Synthetic oligonucleotide
gcgccgtccataatcggttgcagttagcaa

SEQ ID NO: 157418 - DNA, 30 bp, Artificial Sequence
  Synthetic oligonucleotide
ataaccgtcaatgcgaagtttaccacgcaa

SEQ ID NO: 157419 - DNA, 30 bp, Artificial Sequence
  Synthetic oligonucleotide
tgtaagctcgtctacgtatacgcgccgcaa

SEQ ID NO: 157420 - DNA, 30 bp, Artificial Sequence
  Synthetic oligonucleotide
ctagacttgcctttacctgaagggccgcaa

SEQ ID NO: 157421 - DNA, 30 bp, Artificial Sequence
  Synthetic oligonucleotide
gggagtagcaccgaatatttaagagcgcaa

SEQ ID NO: 157422 - DNA, 30 bp, Artificial Sequence
  Synthetic oligonucleotide
aaggcgtccaggaagcgtcctcgcgcgcaa

SEQ ID NO: 157423 - DNA, 30 bp, Artificial Sequence
  Synthetic oligonucleotide
ctatgaacggcatataatggtgtcgcgcaa

SEQ ID NO: 157424 - DNA, 30 bp, Artificial Sequence
  Synthetic oligonucleotide
gggatgctactgattaattcacgggcgcaa

SEQ ID NO: 157425 - DNA, 30 bp, Artificial Sequence
  Synthetic oligonucleotide
atgcttaacctgccataacagattgcgcaa

SEQ ID NO: 157426 - DNA, 30 bp, Artificial Sequence
  Synthetic oligonucleotide
aaagcagggaatggtgaacagacctcgcaa

SEQ ID NO: 157427 - DNA, 30 bp, Artificial Sequence
  Synthetic oligonucleotide
actcagtccgtaggtacactttcaaggcaa

SEQ ID NO: 157428 - DNA, 30 bp, Artificial Sequence
  Synthetic oligonucleotide
attgtcacacgccctctgacatacaggcaa

SEQ ID NO: 157429 - DNA, 30 bp, Artificial Sequence
  Synthetic oligonucleotide
cgtcttgatgtccatggttgcggtaggcaa

SEQ ID NO: 157430 - DNA, 30 bp, Artificial Sequence
  Synthetic oligonucleotide
taagtgaaagctaaacgcggtacccggcaa

SEQ ID NO: 157431 - DNA, 30 bp, Artificial Sequence
  Synthetic oligonucleotide
tatcctgatggtcgagactacgcccggcaa

SEQ ID NO: 157432 - DNA, 30 bp, Artificial Sequence
  Synthetic oligonucleotide
atgacaggatccgcccttgtacgtcggcaa

SEQ ID NO: 157433 - DNA, 30 bp, Artificial Sequence
  Synthetic oligonucleotide
acgagcaggtatgctgacccttgtcggcaa

SEQ ID NO: 157434 - DNA, 30 bp, Artificial Sequence
  Synthetic oligonucleotide
agagggcggataaccgggttcaaagggcaa

SEQ ID NO: 157435 - DNA, 30 bp, Artificial Sequence
  Synthetic oligonucleotide
ttcgcaagtaccaccttatcgacagggcaa

SEQ ID NO: 157436 - DNA, 30 bp, Artificial Sequence
  Synthetic oligonucleotide
ataatgaccggagcgtcgatttcagggcaa

SEQ ID NO: 157437 - DNA, 30 bp, Artificial Sequence
  Synthetic oligonucleotide
tgagaaaaggtcttataaaatcacgggcaa

SEQ ID NO: 157438 - DNA, 30 bp, Artificial Sequence
  Synthetic oligonucleotide
agaccacgaacactagcttccagggggcaa

SEQ ID NO: 157439 - DNA, 30 bp, Artificial Sequence
  Synthetic oligonucleotide
aatcctgggaagaaggagaacctatggcaa

SEQ ID NO: 157440 - DNA, 30 bp, Artificial Sequence
  Synthetic oligonucleotide
aacattcacattcacgtcacggcctggcaa

SEQ ID NO: 157441 - DNA, 30 bp, Artificial Sequence
  Synthetic oligonucleotide
ctgttaaagcttgtcctcacacagtggcaa

SEQ ID NO: 157442 - DNA, 30 bp, Artificial Sequence
  Synthetic oligonucleotide
tgtctgcggagcacccagtgagtttggcaa

SEQ ID NO: 157443 - DNA, 30 bp, Artificial Sequence
  Synthetic oligonucleotide
ttagtggttagagaacgtgcgtgcatgcaa

SEQ ID NO: 157444 - DNA, 30 bp, Artificial Sequence
  Synthetic oligonucleotide
gtaaggtacgctaacagccggattatgcaa

SEQ ID NO: 157445 - DNA, 30 bp, Artificial Sequence
  Synthetic oligonucleotide
cagaccaatactcgacaaatataactgcaa

SEQ ID NO: 157446 - DNA, 30 bp, Artificial Sequence
  Synthetic oligonucleotide
atttggggctcgtcctgaggcttactgcaa

SEQ ID NO: 157447 - DNA, 30 bp, Artificial Sequence
  Synthetic oligonucleotide
tcgaacagctcaggatacatacacctgcaa

SEQ ID NO: 157448 - DNA, 30 bp, Artificial Sequence
  Synthetic oligonucleotide
tgataacagccgaagatgcatatcgtgcaa

SEQ ID NO: 157449 - DNA, 30 bp, Artificial Sequence
  Synthetic oligonucleotide
tcccaagaccatcattgaatcctcgtgcaa

SEQ ID NO: 157450 - DNA, 30 bp, Artificial Sequence
  Synthetic oligonucleotide
gggcgattgctcgggtatcaaagggtgcaa

SEQ ID NO: 157451 - DNA, 30 bp, Artificial Sequence
  Synthetic oligonucleotide
ggcattgttcaatagtagtggcgtgtgcaa

SEQ ID NO: 157452 - DNA, 30 bp, Artificial Sequence
  Synthetic oligonucleotide
gagcgaggagtttaaccctctcgcttgcaa

SEQ ID NO: 157453 - DNA, 30 bp, Artificial Sequence
  Synthetic oligonucleotide
aggctgtattaatgtaggttaaaaaatcaa

SEQ ID NO: 157454 - DNA, 30 bp, Artificial Sequence
  Synthetic oligonucleotide
ccatcttcgaattgagcatggggaaatcaa

SEQ ID NO: 157455 - DNA, 30 bp, Artificial Sequence
  Synthetic oligonucleotide
attgaaactgtggcccacactataaatcaa

SEQ ID NO: 157456 - DNA, 30 bp, Artificial Sequence
  Synthetic oligonucleotide
tagatagggattggcgcaatgttaaatcaa

SEQ ID NO: 157457 - DNA, 30 bp, Artificial Sequence
  Synthetic oligonucleotide
gtctggacacttcaaacagaggacaatcaa

SEQ ID NO: 157458 - DNA, 30 bp, Artificial Sequence
  Synthetic oligonucleotide
atcgaattagcgatagcatgtaagaatcaa

SEQ ID NO: 157459 - DNA, 30 bp, Artificial Sequence
  Synthetic oligonucleotide
cctgtgggtaatcagtcgatcgataatcaa

SEQ ID NO: 157460 - DNA, 30 bp, Artificial Sequence
  Synthetic oligonucleotide
accggacaacaactctctagttataatcaa

SEQ ID NO: 157461 - DNA, 30 bp, Artificial Sequence
  Synthetic oligonucleotide
gtactacgacgtacacttcctagtaatcaa

SEQ ID NO: 157462 - DNA, 30 bp, Artificial Sequence
  Synthetic oligonucleotide
gggcggttgcgaaagtcgacgacacatcaa

SEQ ID NO: 157463 - DNA, 30 bp, Artificial Sequence
  Synthetic oligonucleotide
cgggcggtaagcggggtaaagtgacatcaa

SEQ ID NO: 157464 - DNA, 30 bp, Artificial Sequence
  Synthetic oligonucleotide
tacatcgacatagttacatcccgccatcaa

SEQ ID NO: 157465 - DNA, 30 bp, Artificial Sequence
  Synthetic oligonucleotide
cggccgaaggaatcacctataccagatcaa

SEQ ID NO: 157466 - DNA, 30 bp, Artificial Sequence
  Synthetic oligonucleotide
aacgtgcgcgttgcgatatggatggatcaa

SEQ ID NO: 157467 - DNA, 30 bp, Artificial Sequence
  Synthetic oligonucleotide
gcccaacatcacaacactctatcatatcaa

SEQ ID NO: 157468 - DNA, 30 bp, Artificial Sequence
  Synthetic oligonucleotide
cggagtgggtcgttctggagtgcgtatcaa

SEQ ID NO: 157469 - DNA, 30 bp, Artificial Sequence
  Synthetic oligonucleotide
cggatcaaaggccaagcctgacacactcaa

SEQ ID NO: 157470 - DNA, 30 bp, Artificial Sequence
  Synthetic oligonucleotide
gttggtgtagagcgctcgggaacgactcaa

SEQ ID NO: 157471 - DNA, 30 bp, Artificial Sequence
  Synthetic oligonucleotide
tggaagtaaaaaggacgcgggccacctcaa

SEQ ID NO: 157472 - DNA, 30 bp, Artificial Sequence
  Synthetic oligonucleotide
gcttagtcacccttttatgacacccctcaa

SEQ ID NO: 157473 - DNA, 30 bp, Artificial Sequence
  Synthetic oligonucleotide
gatgtgtaaaagtaagtgtctccccctcaa

SEQ ID NO: 157474 - DNA, 30 bp, Artificial Sequence
  Synthetic oligonucleotide
tatcgtaattactcacaggtcaggcctcaa

SEQ ID NO: 157475 - DNA, 30 bp, Artificial Sequence
  Synthetic oligonucleotide
aacataaagatgaaaaggcagggagctcaa

SEQ ID NO: 157476 - DNA, 30 bp, Artificial Sequence
  Synthetic oligonucleotide
tcatttcaggctgagtagttacgcgctcaa

SEQ ID NO: 157477 - DNA, 30 bp, Artificial Sequence
  Synthetic oligonucleotide
tcgaaaattcaccgcctagggctggctcaa

SEQ ID NO: 157478 - DNA, 30 bp, Artificial Sequence
  Synthetic oligonucleotide
tgggcaaacacactgacgtccactgctcaa

SEQ ID NO: 157479 - DNA, 30 bp, Artificial Sequence
  Synthetic oligonucleotide
ataacgatcttcatgaaaagagctgctcaa

SEQ ID NO: 157480 - DNA, 30 bp, Artificial Sequence
  Synthetic oligonucleotide
tctaggggggaccggataatcatctctcaa

SEQ ID NO: 157481 - DNA, 30 bp, Artificial Sequence
  Synthetic oligonucleotide
atggtaggtagggtacaggggaagtctcaa

SEQ ID NO: 157482 - DNA, 30 bp, Artificial Sequence
  Synthetic oligonucleotide
acacatcaaactctcggggaaccttctcaa

SEQ ID NO: 157483 - DNA, 30 bp, Artificial Sequence
  Synthetic oligonucleotide
gcgtcgcctacacataggcatagaagtcaa

SEQ ID NO: 157484 - DNA, 30 bp, Artificial Sequence
  Synthetic oligonucleotide
gacgtccgggccggttctagttacagtcaa

SEQ ID NO: 157485 - DNA, 30 bp, Artificial Sequence
  Synthetic oligonucleotide
aaaggatgctcaaacaaaactcccagtcaa

SEQ ID NO: 157486 - DNA, 30 bp, Artificial Sequence
  Synthetic oligonucleotide
agattcggctggttcctctaaatcagtcaa

SEQ ID NO: 157487 - DNA, 30 bp, Artificial Sequence
  Synthetic oligonucleotide
gcgtgtgtccgttgattagaaacgagtcaa

SEQ ID NO: 157488 - DNA, 30 bp, Artificial Sequence
  Synthetic oligonucleotide
tagttatgagacacaccatccaatagtcaa

SEQ ID NO: 157489 - DNA, 30 bp, Artificial Sequence
  Synthetic oligonucleotide
ctagttttttgatatgcggaataacgtcaa

SEQ ID NO: 157490 - DNA, 30 bp, Artificial Sequence
  Synthetic oligonucleotide
gggggaccaagcgagggtaacgtacgtcaa

SEQ ID NO: 157491 - DNA, 30 bp, Artificial Sequence
  Synthetic oligonucleotide
tgtctgccaatgtctgccaaacaccgtcaa

SEQ ID NO: 157492 - DNA, 30 bp, Artificial Sequence
  Synthetic oligonucleotide
ggggaaattatagttggcgagagtcgtcaa

SEQ ID NO: 157493 - DNA, 30 bp, Artificial Sequence
  Synthetic oligonucleotide
catacgggcttggaaagcgaatttcgtcaa

SEQ ID NO: 157494 - DNA, 30 bp, Artificial Sequence
  Synthetic oligonucleotide
cgtcggtggtccgagatctcgtcaggtcaa

SEQ ID NO: 157495 - DNA, 30 bp, Artificial Sequence
  Synthetic oligonucleotide
tgatacgaccctacaaatctcggaggtcaa

SEQ ID NO: 157496 - DNA, 30 bp, Artificial Sequence
  Synthetic oligonucleotide
ctatgacgagtcaggaaccaatgaggtcaa

SEQ ID NO: 157497 - DNA, 30 bp, Artificial Sequence
  Synthetic oligonucleotide
gacaccaccgtgactaggattgtaggtcaa

SEQ ID NO: 157498 - DNA, 30 bp, Artificial Sequence
  Synthetic oligonucleotide
tgggtcgggctcttcagcaaattgggtcaa

SEQ ID NO: 157499 - DNA, 30 bp, Artificial Sequence
  Synthetic oligonucleotide
atgtgggtatatcgcggtacatttggtcaa

SEQ ID NO: 157500 - DNA, 30 bp, Artificial Sequence
  Synthetic oligonucleotide
gcgcgtatattttacgtgtgcgactgtcaa

SEQ ID NO: 157501 - DNA, 30 bp, Artificial Sequence
  Synthetic oligonucleotide
gtgtaatattaatggattagggactgtcaa

SEQ ID NO: 157502 - DNA, 30 bp, Artificial Sequence
  Synthetic oligonucleotide
ctctaacagttccgtgatgagatctgtcaa

SEQ ID NO: 157503 - DNA, 30 bp, Artificial Sequence
  Synthetic oligonucleotide
tatgaagctaattccagcacagaaattcaa

SEQ ID NO: 157504 - DNA, 31 bp, Artificial Sequence
  Synthetic oligonucleotide
tcttcaaagtcaccggcgacccgagattcaa

SEQ ID NO: 157505 - DNA, 30 bp, Artificial Sequence
  Synthetic oligonucleotide
gaagacaccacggagcggataaatattcaa

SEQ ID NO: 157506 - DNA, 30 bp, Artificial Sequence
  Synthetic oligonucleotide
acatacaatcctggagggtgacgtattcaa

SEQ ID NO: 157507 - DNA, 30 bp, Artificial Sequence
  Synthetic oligonucleotide
aagcactccaaagggagccgcattattcaa

SEQ ID NO: 157508 - DNA, 30 bp, Artificial Sequence
  Synthetic oligonucleotide
ctcggcgtccccacatttgcgtcacttcaa

SEQ ID NO: 157509 - DNA, 30 bp, Artificial Sequence
  Synthetic oligonucleotide
cgatagttcccgctgggtaacggtcttcaa

SEQ ID NO: 157510 - DNA, 30 bp, Artificial Sequence
  Synthetic oligonucleotide
gttgaacacactaggatagcatacgttcaa

SEQ ID NO: 157511 - DNA, 30 bp, Artificial Sequence
  Synthetic oligonucleotide
acgccgtgcgcagcggataaatgggttcaa

SEQ ID NO: 157512 - DNA, 30 bp, Artificial Sequence
  Synthetic oligonucleotide
gaacggggtttggagcctcacaaatttcaa

SEQ ID NO: 157513 - DNA, 30 bp, Artificial Sequence
  Synthetic oligonucleotide
ctaagattccgtaaacgtatcaaatttcaa

SEQ ID NO: 157514 - DNA, 30 bp, Artificial Sequence
  Synthetic oligonucleotide
acagagcacctcagtgagcctggatttcaa

SEQ ID NO: 157515 - DNA, 30 bp, Artificial Sequence
  Synthetic oligonucleotide
tcgtatgggatacacggctcaaactttcaa

SEQ ID NO: 157516 - DNA, 30 bp, Artificial Sequence
  Synthetic oligonucleotide
ccacgacagccgggcgtacttacgtttcaa

SEQ ID NO: 157517 - DNA, 30 bp, Artificial Sequence
  Synthetic oligonucleotide
tagacgaagacccaccgataaaattttcaa

SEQ ID NO: 157518 - DNA, 30 bp, Artificial Sequence
  Synthetic oligonucleotide
gcaatgtaggagtgggataaaacaaaagaa

SEQ ID NO: 157519 - DNA, 30 bp, Artificial Sequence
  Synthetic oligonucleotide
aaacgccgcgtcccgacgaacgtcaaagaa

SEQ ID NO: 157520 - DNA, 30 bp, Artificial Sequence
  Synthetic oligonucleotide
aaccaccacggccgggggttgttcaaagaa

SEQ ID NO: 157521 - DNA, 30 bp, Artificial Sequence
  Synthetic oligonucleotide
aggcacgcatttaaagtgttgacgaaagaa

SEQ ID NO: 157522 - DNA, 30 bp, Artificial Sequence
  Synthetic oligonucleotide
tgagatgacttcgtcagggcggataaagaa

SEQ ID NO: 157523 - DNA, 30 bp, Artificial Sequence
  Synthetic oligonucleotide
ctgaaagcgggtccatcggtcactaaagaa

SEQ ID NO: 157524 - DNA, 30 bp, Artificial Sequence
  Synthetic oligonucleotide
catccttggggggtaatagtgagtaaagaa

SEQ ID NO: 157525 - DNA, 30 bp, Artificial Sequence
  Synthetic oligonucleotide
cgtgtaacgtgggtttacttgtcccaagaa

SEQ ID NO: 157526 - DNA, 30 bp, Artificial Sequence
  Synthetic oligonucleotide
tttagcaaggtagaggcgtaactccaagaa

SEQ ID NO: 157527 - DNA, 30 bp, Artificial Sequence
  Synthetic oligonucleotide
tagaaaaaaacaacccttggacgtcaagaa

SEQ ID NO: 157528 - DNA, 30 bp, Artificial Sequence
  Synthetic oligonucleotide
tcaaaccagtgagtattaacagtagaagaa

SEQ ID NO: 157529 - DNA, 30 bp, Artificial Sequence
  Synthetic oligonucleotide
tcgtatatgggcgggcttagttgcgaagaa

SEQ ID NO: 157530 - DNA, 30 bp, Artificial Sequence
  Synthetic oligonucleotide
gccattgacactgaaatacgcacggaagaa

SEQ ID NO: 157531 - DNA, 30 bp, Artificial Sequence
  Synthetic oligonucleotide
gactggttgacatctagggacaaataagaa

SEQ ID NO: 157532 - DNA, 30 bp, Artificial Sequence
  Synthetic oligonucleotide
tgggctaatcagaaacgcattgcataagaa

SEQ ID NO: 157533 - DNA, 30 bp, Artificial Sequence
  Synthetic oligonucleotide
ctaccctcgatcacggtcacgacttaagaa

SEQ ID NO: 157534 - DNA, 28 bp, Artificial Sequence
  Synthetic oligonucleotide
aagatggcattgtatgagcatttaagaa

SEQ ID NO: 157535 - DNA, 30 bp, Artificial Sequence
  Synthetic oligonucleotide
aactatgtcactgtacgatatcacacagaa

SEQ ID NO: 157536 - DNA, 30 bp, Artificial Sequence
  Synthetic oligonucleotide
cagtcctaggttcctgaatgctggacagaa

SEQ ID NO: 157537 - DNA, 30 bp, Artificial Sequence
  Synthetic oligonucleotide
gggagtaattagaacgccgtgatgacagaa

SEQ ID NO: 157538 - DNA, 30 bp, Artificial Sequence
  Synthetic oligonucleotide
gacgtcgagcatatcatcctaggaccagaa

SEQ ID NO: 157539 - DNA, 30 bp, Artificial Sequence
  Synthetic oligonucleotide
aacatcgggtactccgtctcgaatccagaa

SEQ ID NO: 157540 - DNA, 30 bp, Artificial Sequence
  Synthetic oligonucleotide
tagcgtatcgaggaccgtagccctccagaa

SEQ ID NO: 157541 - DNA, 30 bp, Artificial Sequence
  Synthetic oligonucleotide
acacacattcagacattctgcacagcagaa

SEQ ID NO: 157542 - DNA, 30 bp, Artificial Sequence
  Synthetic oligonucleotide
attaaacggtccgttaatgcgcaggcagaa

SEQ ID NO: 157543 - DNA, 30 bp, Artificial Sequence
  Synthetic oligonucleotide
ttggttcaaacgtaagggggtagggcagaa

SEQ ID NO: 157544 - DNA, 30 bp, Artificial Sequence
  Synthetic oligonucleotide
cactgtaggccctactataaaaatgcagaa

SEQ ID NO: 157545 - DNA, 30 bp, Artificial Sequence
  Synthetic oligonucleotide
attagccgcaaaacagtcgagcatgcagaa

SEQ ID NO: 157546 - DNA, 30 bp, Artificial Sequence
  Synthetic oligonucleotide
cgcatgtctttaggaaacccgtcatcagaa

SEQ ID NO: 157547 - DNA, 30 bp, Artificial Sequence
  Synthetic oligonucleotide
agctcgcgagacttactgatcggatcagaa

SEQ ID NO: 157548 - DNA, 30 bp, Artificial Sequence
  Synthetic oligonucleotide
agaatagacctactgtaatgaacgtcagaa

SEQ ID NO: 157549 - DNA, 30 bp, Artificial Sequence
  Synthetic oligonucleotide
tcgctccgaaatgttgtgtatgtttcagaa

SEQ ID NO: 157550 - DNA, 30 bp, Artificial Sequence
  Synthetic oligonucleotide
ccggtaacacgtacatacggctccagagaa

SEQ ID NO: 157551 - DNA, 30 bp, Artificial Sequence
  Synthetic oligonucleotide
atgccagttggtgctcaggatccgagagaa

SEQ ID NO: 157552 - DNA, 30 bp, Artificial Sequence
  Synthetic oligonucleotide
ctcacactcacaggctgtacgtggagagaa

SEQ ID NO: 157553 - DNA, 30 bp, Artificial Sequence
  Synthetic oligonucleotide
ccacgataggttgcgcttctggttagagaa

SEQ ID NO: 157554 - DNA, 30 bp, Artificial Sequence
  Synthetic oligonucleotide
tctcggaagtacggaaatacattacgagaa

SEQ ID NO: 157555 - DNA, 30 bp, Artificial Sequence
  Synthetic oligonucleotide
cgttgagagagtcactgcagcccgcgagaa

SEQ ID NO: 157556 - DNA, 30 bp, Artificial Sequence
  Synthetic oligonucleotide
taaccgaccagcggtggtcaaacaggagaa

SEQ ID NO: 157557 - DNA, 30 bp, Artificial Sequence
  Synthetic oligonucleotide
ttatgtactatgataatggaccgtggagaa

SEQ ID NO: 157558 - DNA, 30 bp, Artificial Sequence
  Synthetic oligonucleotide
gtctacacaaacccattcatacttggagaa

SEQ ID NO: 157559 - DNA, 30 bp, Artificial Sequence
  Synthetic oligonucleotide
acctggggagctggagtagtgagatgagaa

SEQ ID NO: 157560 - DNA, 30 bp, Artificial Sequence
  Synthetic oligonucleotide
tcttctaatagtcgtaatttccgatgagaa

SEQ ID NO: 157561 - DNA, 31 bp, Artificial Sequence
  Synthetic oligonucleotide
ggggctgcaattcgcaccagaaggctgagaa

SEQ ID NO: 157562 - DNA, 30 bp, Artificial Sequence
  Synthetic oligonucleotide
acaccggtcagaacctcgcggcgaatagaa

SEQ ID NO: 157563 - DNA, 30 bp, Artificial Sequence
  Synthetic oligonucleotide
ggagcgggaatggatggagtcgacctagaa

SEQ ID NO: 157564 - DNA, 30 bp, Artificial Sequence
  Synthetic oligonucleotide
atttagcagccgttgcgaatgcatctagaa

SEQ ID NO: 157565 - DNA, 30 bp, Artificial Sequence
  Synthetic oligonucleotide
aaggaactttggtgatagaaagatctagaa

SEQ ID NO: 157566 - DNA, 30 bp, Artificial Sequence
  Synthetic oligonucleotide
aatacgcgtatcacctcgtatggcgtagaa

SEQ ID NO: 157567 - DNA, 30 bp, Artificial Sequence
  Synthetic oligonucleotide
aaacttagcaacagggattctgtcgtagaa

SEQ ID NO: 157568 - DNA, 30 bp, Artificial Sequence
  Synthetic oligonucleotide
agagtgtaactgtgataacgcggggtagaa

SEQ ID NO: 157569 - DNA, 30 bp, Artificial Sequence
  Synthetic oligonucleotide
gaggcaatcctgggatggagcgagttagaa

SEQ ID NO: 157570 - DNA, 30 bp, Artificial Sequence
  Synthetic oligonucleotide
gatcaccccatcccatgcccgccgttagaa

SEQ ID NO: 157571 - DNA, 30 bp, Artificial Sequence
  Synthetic oligonucleotide
aatgctagagtaactcgggtagaaaacgaa

SEQ ID NO: 157572 - DNA, 30 bp, Artificial Sequence
  Synthetic oligonucleotide
tgaacaaatttccccaaaacaggacacgaa

SEQ ID NO: 157573 - DNA, 30 bp, Artificial Sequence
  Synthetic oligonucleotide
tggtattcgaaagatctacacatccacgaa

SEQ ID NO: 157574 - DNA, 30 bp, Artificial Sequence
  Synthetic oligonucleotide
ctcacgtgtgttttggccggccagcacgaa

SEQ ID NO: 157575 - DNA, 30 bp, Artificial Sequence
  Synthetic oligonucleotide
cgtgagcggtaccaagggtctgtgcacgaa

SEQ ID NO: 157576 - DNA, 30 bp, Artificial Sequence
  Synthetic oligonucleotide
gcagtcgatttagagtggtgattggacgaa

SEQ ID NO: 157577 - DNA, 30 bp, Artificial Sequence
  Synthetic oligonucleotide
taccctgggcataaaaacgccggctacgaa

SEQ ID NO: 157578 - DNA, 30 bp, Artificial Sequence
  Synthetic oligonucleotide
caacgctctaagaggattcggccttacgaa

SEQ ID NO: 157579 - DNA, 30 bp, Artificial Sequence
  Synthetic oligonucleotide
ccgcttggcttgcgagaagcggcaaccgaa

SEQ ID NO: 157580 - DNA, 30 bp, Artificial Sequence
  Synthetic oligonucleotide
ggacccatagtaatccggtaatcaaccgaa

SEQ ID NO: 157581 - DNA, 30 bp, Artificial Sequence
  Synthetic oligonucleotide
acatgttcccagacttttcgcatgaccgaa

SEQ ID NO: 157582 - DNA, 30 bp, Artificial Sequence
  Synthetic oligonucleotide
caaaaatcccgcatcagtcttatgcccgaa

SEQ ID NO: 157583 - DNA, 30 bp, Artificial Sequence
  Synthetic oligonucleotide
tcgaagcttaaagtatacgggcacgccgaa

SEQ ID NO: 157584 - DNA, 30 bp, Artificial Sequence
  Synthetic oligonucleotide
cagagctggaccccgaggtcacaggccgaa

SEQ ID NO: 157585 - DNA, 30 bp, Artificial Sequence
  Synthetic oligonucleotide
gtatccacgcactagtggagtagggccgaa

SEQ ID NO: 157586 - DNA, 30 bp, Artificial Sequence
  Synthetic oligonucleotide
tagacgtacggtccgcgaaccgcctccgaa

SEQ ID NO: 157587 - DNA, 30 bp, Artificial Sequence
  Synthetic oligonucleotide
catcggcatttggctgttctcgcctccgaa

SEQ ID NO: 157588 - DNA, 30 bp, Artificial Sequence
  Synthetic oligonucleotide
gccagtctgcaaatacgtttagtctccgaa

SEQ ID NO: 157589 - DNA, 30 bp, Artificial Sequence
  Synthetic oligonucleotide
cgtctcagtatcattttctcggtgtccgaa

SEQ ID NO: 157590 - DNA, 30 bp, Artificial Sequence
  Synthetic oligonucleotide
ttacagagctgcttcagtgcagtcagcgaa

SEQ ID NO: 157591 - DNA, 30 bp, Artificial Sequence
  Synthetic oligonucleotide
acggcagcgtaccgaagttccttcagcgaa

SEQ ID NO: 157592 - DNA, 30 bp, Artificial Sequence
  Synthetic oligonucleotide
ctacgagtgggctgctatggcgaccgcgaa

SEQ ID NO: 157593 - DNA, 30 bp, Artificial Sequence
  Synthetic oligonucleotide
tccaaaaatgacctcccttgtatgcgcgaa

SEQ ID NO: 157594 - DNA, 30 bp, Artificial Sequence
  Synthetic oligonucleotide
tcctggttacatcccgagaccaatcgcgaa

SEQ ID NO: 157595 - DNA, 30 bp, Artificial Sequence
  Synthetic oligonucleotide
tgttgcaatgcgtcacgaatctctcgcgaa

SEQ ID NO: 157596 - DNA, 30 bp, Artificial Sequence
  Synthetic oligonucleotide
ctggaaagcctccaaaatggcccaggcgaa

SEQ ID NO: 157597 - DNA, 30 bp, Artificial Sequence
  Synthetic oligonucleotide
taactggctcaagttagatctcgaggcgaa

SEQ ID NO: 157598 - DNA, 30 bp, Artificial Sequence
  Synthetic oligonucleotide
tataccggttcatttggaaatataggcgaa

SEQ ID NO: 157599 - DNA, 30 bp, Artificial Sequence
  Synthetic oligonucleotide
gggagttgggaagagacttgttggggcgaa

SEQ ID NO: 157600 - DNA, 30 bp, Artificial Sequence
  Synthetic oligonucleotide
gtctaattacaggaattgtgtatgggcgaa

SEQ ID NO: 157601 - DNA, 30 bp, Artificial Sequence
  Synthetic oligonucleotide
taaaaaacaccgtattctggagaatgcgaa

SEQ ID NO: 157602 - DNA, 30 bp, Artificial Sequence
  Synthetic oligonucleotide
gttggtccatcaagcgggtcaacatgcgaa

SEQ ID NO: 157603 - DNA, 30 bp, Artificial Sequence
  Synthetic oligonucleotide
actcggagggtgaacgcaacttagtgcgaa

SEQ ID NO: 157604 - DNA, 30 bp, Artificial Sequence
  Synthetic oligonucleotide
aagattaggtgccaatggcatccgtgcgaa

SEQ ID NO: 157605 - DNA, 30 bp, Artificial Sequence
  Synthetic oligonucleotide
cgtcataactatgattgaacagggtgcgaa

SEQ ID NO: 157606 - DNA, 30 bp, Artificial Sequence
  Synthetic oligonucleotide
ccggtatgtagatgagtctgaccttgcgaa

SEQ ID NO: 157607 - DNA, 30 bp, Artificial Sequence
  Synthetic oligonucleotide
cgtatgtgttggcgacaaaggtaactcgaa

SEQ ID NO: 157608 - DNA, 30 bp, Artificial Sequence
  Synthetic oligonucleotide
gacctctccataaaaggggttggactcgaa

SEQ ID NO: 157609 - DNA, 30 bp, Artificial Sequence
  Synthetic oligonucleotide
caggattgcggggagagccaaatactcgaa

SEQ ID NO: 157610 - DNA, 30 bp, Artificial Sequence
  Synthetic oligonucleotide
ttgggacgaggaatgctgttttagctcgaa

SEQ ID NO: 157611 - DNA, 30 bp, Artificial Sequence
  Synthetic oligonucleotide
tcaagatcggtctgtgtatatcggctcgaa

SEQ ID NO: 157612 - DNA, 30 bp, Artificial Sequence
  Synthetic oligonucleotide
accaccaacataggtgcgctgcctctcgaa

SEQ ID NO: 157613 - DNA, 31 bp, Artificial Sequence
  Synthetic oligonucleotide
aacagaaaaacctcatcggtcgtctctcgaa

SEQ ID NO: 157614 - DNA, 30 bp, Artificial Sequence
  Synthetic oligonucleotide
agggaaaggttgccgtactacgttctcgaa

SEQ ID NO: 157615 - DNA, 30 bp, Artificial Sequence
  Synthetic oligonucleotide
ccactggctcatttcgagtgtttagtcgaa

SEQ ID NO: 157616 - DNA, 30 bp, Artificial Sequence
  Synthetic oligonucleotide
aagagtggctatctggcatttatcgtcgaa

SEQ ID NO: 157617 - DNA, 30 bp, Artificial Sequence
  Synthetic oligonucleotide
cacttgacatccgaaatcattgcggtcgaa

SEQ ID NO: 157618 - DNA, 30 bp, Artificial Sequence
  Synthetic oligonucleotide
aacatggctttgattgtgctgagggtcgaa

SEQ ID NO: 157619 - DNA, 30 bp, Artificial Sequence
  Synthetic oligonucleotide
gaagtgcattagtgggggcggagtgtcgaa

SEQ ID NO: 157620 - DNA, 30 bp, Artificial Sequence
  Synthetic oligonucleotide
atcgttgcattgggatggggagcattcgaa

SEQ ID NO: 157621 - DNA, 30 bp, Artificial Sequence
  Synthetic oligonucleotide
ggaaaggaaggaagactggactccaaggaa

SEQ ID NO: 157622 - DNA, 30 bp, Artificial Sequence
  Synthetic oligonucleotide
ggactacggcgtgcgcaccaattgaaggaa

SEQ ID NO: 157623 - DNA, 30 bp, Artificial Sequence
  Synthetic oligonucleotide
ggccgcgtcggcgttggtaaagctaaggaa

SEQ ID NO: 157624 - DNA, 30 bp, Artificial Sequence
  Synthetic oligonucleotide
gacctgagaatgtgtacctgagaccaggaa

SEQ ID NO: 157625 - DNA, 30 bp, Artificial Sequence
  Synthetic oligonucleotide
ctgctgcaaaccagactcgttgcccaggaa

SEQ ID NO: 157626 - DNA, 30 bp, Artificial Sequence
  Synthetic oligonucleotide
gggccgcctaatgcgcagggtggccaggaa

SEQ ID NO: 157627 - DNA, 30 bp, Artificial Sequence
  Synthetic oligonucleotide
taagtcaagcgggattgcaatcatcaggaa

SEQ ID NO: 157628 - DNA, 30 bp, Artificial Sequence
  Synthetic oligonucleotide
aagagaaactttgggttccacagtcaggaa

SEQ ID NO: 157629 - DNA, 30 bp, Artificial Sequence
  Synthetic oligonucleotide
cgtcgcaccctactagagttaattcaggaa

SEQ ID NO: 157630 - DNA, 30 bp, Artificial Sequence
  Synthetic oligonucleotide
atcgaatagttacgtgccaagctcgaggaa

SEQ ID NO: 157631 - DNA, 30 bp, Artificial Sequence
  Synthetic oligonucleotide
tcgtaagtggtcatcgtcgagttcgaggaa

SEQ ID NO: 157632 - DNA, 30 bp, Artificial Sequence
  Synthetic oligonucleotide
tccgatggtcatgtttcgaaagaataggaa

SEQ ID NO: 157633 - DNA, 30 bp, Artificial Sequence
  Synthetic oligonucleotide
tacgtggctcacaagaggggcggataggaa

SEQ ID NO: 157634 - DNA, 30 bp, Artificial Sequence
  Synthetic oligonucleotide
aaactgtatcgcattccggtgagctaggaa

SEQ ID NO: 157635 - DNA, 30 bp, Artificial Sequence
  Synthetic oligonucleotide
gccacgacgacgtattacagacgctaggaa

SEQ ID NO: 157636 - DNA, 30 bp, Artificial Sequence
  Synthetic oligonucleotide
gcgtccacttgattaaatctaatgtaggaa

SEQ ID NO: 157637 - DNA, 30 bp, Artificial Sequence
  Synthetic oligonucleotide
tccgtctgtaattggaatccattgtaggaa

SEQ ID NO: 157638 - DNA, 30 bp, Artificial Sequence
  Synthetic oligonucleotide
cccgaaataacggtccactacatttaggaa

SEQ ID NO: 157639 - DNA, 30 bp, Artificial Sequence
  Synthetic oligonucleotide
ggttatgctgataataacactgggacggaa

SEQ ID NO: 157640 - DNA, 30 bp, Artificial Sequence
  Synthetic oligonucleotide
cataaggtagggtggcatcgatggacggaa

SEQ ID NO: 157641 - DNA, 30 bp, Artificial Sequence
  Synthetic oligonucleotide
agtttgagtctcggtagtttgaaaccggaa

SEQ ID NO: 157642 - DNA, 30 bp, Artificial Sequence
  Synthetic oligonucleotide
agttcaaggttagcaaataacagaccggaa

SEQ ID NO: 157643 - DNA, 30 bp, Artificial Sequence
  Synthetic oligonucleotide
cgcagaaggcacgagggaaagggtccggaa

SEQ ID NO: 157644 - DNA, 30 bp, Artificial Sequence
  Synthetic oligonucleotide
ttgtgatcccgtctaactcttcgcgcggaa

SEQ ID NO: 157645 - DNA, 30 bp, Artificial Sequence
  Synthetic oligonucleotide
cggagggcaccgcactttacctgggcggaa

SEQ ID NO: 157646 - DNA, 30 bp, Artificial Sequence
  Synthetic oligonucleotide
cttagaccagttgaaaaccacatatcggaa

SEQ ID NO: 157647 - DNA, 30 bp, Artificial Sequence
  Synthetic oligonucleotide
cggttaaccaagccgcgtgagaactcggaa

SEQ ID NO: 157648 - DNA, 30 bp, Artificial Sequence
  Synthetic oligonucleotide
tctgctggcattatgccacccacctcggaa

SEQ ID NO: 157649 - DNA, 30 bp, Artificial Sequence
  Synthetic oligonucleotide
gcgaccaaggtctgatgagtcttaagggaa

SEQ ID NO: 157650 - DNA, 30 bp, Artificial Sequence
  Synthetic oligonucleotide
aggatgacagcgagggatattccgagggaa

SEQ ID NO: 157651 - DNA, 30 bp, Artificial Sequence
  Synthetic oligonucleotide
aaggttagaatagtacaacggtcgagggaa

SEQ ID NO: 157652 - DNA, 30 bp, Artificial Sequence
  Synthetic oligonucleotide
gtaatgttgggcagatccggcatgagggaa

SEQ ID NO: 157653 - DNA, 30 bp, Artificial Sequence
  Synthetic oligonucleotide
cgagtgcggaacgggaattagccacgggaa

SEQ ID NO: 157654 - DNA, 30 bp, Artificial Sequence
  Synthetic oligonucleotide
aacacgaagggcccgtcatgcaatcgggaa

SEQ ID NO: 157655 - DNA, 30 bp, Artificial Sequence
  Synthetic oligonucleotide
taaagtcataaatacatgtgtgatcgggaa

SEQ ID NO: 157656 - DNA, 30 bp, Artificial Sequence
  Synthetic oligonucleotide
cctaccccggtacacaatcgcaacggggaa

SEQ ID NO: 157657 - DNA, 30 bp, Artificial Sequence
  Synthetic oligonucleotide
catgtggagccggagacggagcggggggaa

SEQ ID NO: 157658 - DNA, 30 bp, Artificial Sequence
  Synthetic oligonucleotide
tcggatcgtggcggtaggagcactggggaa

SEQ ID NO: 157659 - DNA, 30 bp, Artificial Sequence
  Synthetic oligonucleotide
ggcgaacaacctcagtggagaacctgggaa

SEQ ID NO: 157660 - DNA, 30 bp, Artificial Sequence
  Synthetic oligonucleotide
caatttggtccgagctggactccgtgggaa

SEQ ID NO: 157661 - DNA, 30 bp, Artificial Sequence
  Synthetic oligonucleotide
ccgctatttagcagtgaaccgacaatggaa

SEQ ID NO: 157662 - DNA, 30 bp, Artificial Sequence
  Synthetic oligonucleotide
ggatgcatgtgagttccgcgatacatggaa

SEQ ID NO: 157663 - DNA, 30 bp, Artificial Sequence
  Synthetic oligonucleotide
ggctgtccatgcgccccttataatatggaa

SEQ ID NO: 157664 - DNA, 30 bp, Artificial Sequence
  Synthetic oligonucleotide
tgcgtactacaatttctacgggctatggaa

SEQ ID NO: 157665 - DNA, 30 bp, Artificial Sequence
  Synthetic oligonucleotide
gtcaagcgtaggcaaaataacccactggaa

SEQ ID NO: 157666 - DNA, 31 bp, Artificial Sequence
  Synthetic oligonucleotide
ggcgtcttttaaaggaatatggctcctggaa

SEQ ID NO: 157667 - DNA, 30 bp, Artificial Sequence
  Synthetic oligonucleotide
ttcagtctttatgaactccgacaagtggaa

SEQ ID NO: 157668 - DNA, 30 bp, Artificial Sequence
  Synthetic oligonucleotide
gccaatgagttacaactggatggcgtggaa

SEQ ID NO: 157669 - DNA, 30 bp, Artificial Sequence
  Synthetic oligonucleotide
ctaagagggacgctgaaaatcagggtggaa

SEQ ID NO: 157670 - DNA, 30 bp, Artificial Sequence
  Synthetic oligonucleotide
aactagctcgatattcctgagatggtggaa

SEQ ID NO: 157671 - DNA, 30 bp, Artificial Sequence
  Synthetic oligonucleotide
ggcgaaccgtgggccaatagacatgtggaa

SEQ ID NO: 157672 - DNA, 30 bp, Artificial Sequence
  Synthetic oligonucleotide
gagaagaaggaaacaagtcgaagattggaa

SEQ ID NO: 157673 - DNA, 30 bp, Artificial Sequence
  Synthetic oligonucleotide
atgcacccgggcaaattgtctgtattggaa

SEQ ID NO: 157674 - DNA, 30 bp, Artificial Sequence
  Synthetic oligonucleotide
tacatggggggctagtatttgtagttggaa

SEQ ID NO: 157675 - DNA, 30 bp, Artificial Sequence
  Synthetic oligonucleotide
gaatcccccgagggtcgataataaaatgaa

SEQ ID NO: 157676 - DNA, 30 bp, Artificial Sequence
  Synthetic oligonucleotide
ccaataagaccggcatgaacttaaaatgaa

SEQ ID NO: 157677 - DNA, 30 bp, Artificial Sequence
  Synthetic oligonucleotide
cagccggaaacgcaaaattttctcaatgaa

SEQ ID NO: 157678 - DNA, 30 bp, Artificial Sequence
  Synthetic oligonucleotide
atacgggatcgtatgatgcaattcaatgaa

SEQ ID NO: 157679 - DNA, 30 bp, Artificial Sequence
  Synthetic oligonucleotide
catctaatgggcaatcggggcttgaatgaa

SEQ ID NO: 157680 - DNA, 30 bp, Artificial Sequence
  Synthetic oligonucleotide
gatatagaggcgtattaggaccgtaatgaa

SEQ ID NO: 157681 - DNA, 30 bp, Artificial Sequence
  Synthetic oligonucleotide
tgtgcagaaagtcagcctgcgcttaatgaa

SEQ ID NO: 157682 - DNA, 30 bp, Artificial Sequence
  Synthetic oligonucleotide
ggtaacgaaggtcgttcatacgaccatgaa

SEQ ID NO: 157683 - DNA, 30 bp, Artificial Sequence
  Synthetic oligonucleotide
cggttctttaggtgttggcctgcccatgaa

SEQ ID NO: 157684 - DNA, 30 bp, Artificial Sequence
  Synthetic oligonucleotide
cgacgtgtcagtcttattggatcccatgaa

SEQ ID NO: 157685 - DNA, 30 bp, Artificial Sequence
  Synthetic oligonucleotide
gagattagacccgtaagaagaagccatgaa

SEQ ID NO: 157686 - DNA, 30 bp, Artificial Sequence
  Synthetic oligonucleotide
ccgtatttgggatcggtagcgtgccatgaa

SEQ ID NO: 157687 - DNA, 30 bp, Artificial Sequence
  Synthetic oligonucleotide
caggtaacacgcaatagaatatatcatgaa

SEQ ID NO: 157688 - DNA, 30 bp, Artificial Sequence
  Synthetic oligonucleotide
aactactcctgataggcggaagcagatgaa

SEQ ID NO: 157689 - DNA, 30 bp, Artificial Sequence
  Synthetic oligonucleotide
ctggtttcggcattagtaagtatagatgaa

SEQ ID NO: 157690 - DNA, 30 bp, Artificial Sequence
  Synthetic oligonucleotide
cactaggtcaatgagatggacttagatgaa

SEQ ID NO: 157691 - DNA, 30 bp, Artificial Sequence
  Synthetic oligonucleotide
tgcagcgcatagtattgcggtttagatgaa

SEQ ID NO: 157692 - DNA, 30 bp, Artificial Sequence
  Synthetic oligonucleotide
cgggataggctacatggggagatggatgaa

SEQ ID NO: 157693 - DNA, 30 bp, Artificial Sequence
  Synthetic oligonucleotide
ggcatgagctcgctgaacatagcatatgaa

SEQ ID NO: 157694 - DNA, 30 bp, Artificial Sequence
  Synthetic oligonucleotide
cttggagaaactgaggcggtagtatatgaa

SEQ ID NO: 157695 - DNA, 30 bp, Artificial Sequence
  Synthetic oligonucleotide
agcgattgcgcagagggagccgaaactgaa

SEQ ID NO: 157696 - DNA, 30 bp, Artificial Sequence
  Synthetic oligonucleotide
aagagtagaaccgatccccggcagactgaa

SEQ ID NO: 157697 - DNA, 30 bp, Artificial Sequence
  Synthetic oligonucleotide
gaaacgctgcttacaaaggatgagactgaa

SEQ ID NO: 157698 - DNA, 30 bp, Artificial Sequence
  Synthetic oligonucleotide
ggtaaagcccttgaaaagactgatactgaa

SEQ ID NO: 157699 - DNA, 30 bp, Artificial Sequence
  Synthetic oligonucleotide
gagatgattaaagataagtcctaacctgaa

SEQ ID NO: 157700 - DNA, 30 bp, Artificial Sequence
  Synthetic oligonucleotide
tcaatacgaaggtatgacgcactgcctgaa

SEQ ID NO: 157701 - DNA, 30 bp, Artificial Sequence
  Synthetic oligonucleotide
agttcgacgatggcctttatgcatcctgaa

SEQ ID NO: 157702 - DNA, 30 bp, Artificial Sequence
  Synthetic oligonucleotide
tgggccgatcttatctcaggcggtcctgaa

SEQ ID NO: 157703 - DNA, 30 bp, Artificial Sequence
  Synthetic oligonucleotide
cttaagacctaagaacgtacggtagctgaa

SEQ ID NO: 157704 - DNA, 30 bp, Artificial Sequence
  Synthetic oligonucleotide
tacactagggaaggctagcttgacgctgaa

SEQ ID NO: 157705 - DNA, 30 bp, Artificial Sequence
  Synthetic oligonucleotide
gcacgagagccgtagcggcccggcgctgaa

SEQ ID NO: 157706 - DNA, 30 bp, Artificial Sequence
  Synthetic oligonucleotide
gctacggacggggatggtgggacggctgaa

SEQ ID NO: 157707 - DNA, 30 bp, Artificial Sequence
  Synthetic oligonucleotide
aagacggacaaaacgacaccccgggctgaa

SEQ ID NO: 157708 - DNA, 30 bp, Artificial Sequence
  Synthetic oligonucleotide
tcgatggatgataaccagggttgatctgaa

SEQ ID NO: 157709 - DNA, 30 bp, Artificial Sequence
  Synthetic oligonucleotide
gcctattgtaggggacacctggcctctgaa

SEQ ID NO: 157710 - DNA, 30 bp, Artificial Sequence
  Synthetic oligonucleotide
acacatatacgagcgtctggcacgtctgaa

SEQ ID NO: 157711 - DNA, 30 bp, Artificial Sequence
  Synthetic oligonucleotide
ggacctgacgaatgtgtacgcgcgtctgaa

SEQ ID NO: 157712 - DNA, 30 bp, Artificial Sequence
  Synthetic oligonucleotide
gggtaagaaggcataaatcttttaagtgaa

SEQ ID NO: 157713 - DNA, 30 bp, Artificial Sequence
  Synthetic oligonucleotide
gctaagatatttctgattgtaccacgtgaa

SEQ ID NO: 157714 - DNA, 30 bp, Artificial Sequence
  Synthetic oligonucleotide
gatgatagagtggttctactagggcgtgaa

SEQ ID NO: 157715 - DNA, 30 bp, Artificial Sequence
  Synthetic oligonucleotide
tactcgtgtgtcacgagatggctgcgtgaa

SEQ ID NO: 157716 - DNA, 30 bp, Artificial Sequence
  Synthetic oligonucleotide
taacagcatcgggcatctagtcctcgtgaa

SEQ ID NO: 157717 - DNA, 31 bp, Artificial Sequence
  Synthetic oligonucleotide
tagcacgtctagaggactaaactgtcgtgaa

SEQ ID NO: 157718 - DNA, 30 bp, Artificial Sequence
  Synthetic oligonucleotide
tcactagttaggtggcggtgtccaggtgaa

SEQ ID NO: 157719 - DNA, 30 bp, Artificial Sequence
  Synthetic oligonucleotide
ccggaattagcggcagagatactgggtgaa

SEQ ID NO: 157720 - DNA, 31 bp, Artificial Sequence
  Synthetic oligonucleotide
cgggcataattgcgggagagcgtaatgtgaa

SEQ ID NO: 157721 - DNA, 30 bp, Artificial Sequence
  Synthetic oligonucleotide
cttaacaagtagagcaaacccgcatgtgaa

SEQ ID NO: 157722 - DNA, 30 bp, Artificial Sequence
  Synthetic oligonucleotide
cagtattcgtctaaagtgcgtacgtgtgaa

SEQ ID NO: 157723 - DNA, 30 bp, Artificial Sequence
  Synthetic oligonucleotide
aattacagggatgggcgactggggtgtgaa

SEQ ID NO: 157724 - DNA, 30 bp, Artificial Sequence
  Synthetic oligonucleotide
ttgggcagcttcctgaaggtctggtgtgaa

SEQ ID NO: 157725 - DNA, 30 bp, Artificial Sequence
  Synthetic oligonucleotide
aggttttgtctaaagtgggtgagttgtgaa

SEQ ID NO: 157726 - DNA, 30 bp, Artificial Sequence
  Synthetic oligonucleotide
aaagaaaacacactgtaagccctttgtgaa

SEQ ID NO: 157727 - DNA, 30 bp, Artificial Sequence
  Synthetic oligonucleotide
ggtggattcttcgcagaacaagaaattgaa

SEQ ID NO: 157728 - DNA, 31 bp, Artificial Sequence
  Synthetic oligonucleotide
gttcattgaacaatggatctcactaattgaa

SEQ ID NO: 157729 - DNA, 30 bp, Artificial Sequence
  Synthetic oligonucleotide
acggaaatttaccccgacggtcagattgaa

SEQ ID NO: 157730 - DNA, 30 bp, Artificial Sequence
  Synthetic oligonucleotide
tggcgtgacgccttgtgaagatagattgaa

SEQ ID NO: 157731 - DNA, 30 bp, Artificial Sequence
  Synthetic oligonucleotide
actacacgaatgttggaatgtgggattgaa

SEQ ID NO: 157732 - DNA, 30 bp, Artificial Sequence
  Synthetic oligonucleotide
ccgacatctactaaacttttatatattgaa

SEQ ID NO: 157733 - DNA, 30 bp, Artificial Sequence
  Synthetic oligonucleotide
aaggttaccggtgctaaagtaattattgaa

SEQ ID NO: 157734 - DNA, 30 bp, Artificial Sequence
  Synthetic oligonucleotide
gactaaagtcagaaaacggttcgacttgaa

SEQ ID NO: 157735 - DNA, 30 bp, Artificial Sequence
  Synthetic oligonucleotide
caccatgggttcgtttaagtttcccttgaa

SEQ ID NO: 157736 - DNA, 30 bp, Artificial Sequence
  Synthetic oligonucleotide
gaactcccactaagggcggcggaagttgaa

SEQ ID NO: 157737 - DNA, 30 bp, Artificial Sequence
  Synthetic oligonucleotide
taacaccgaccggcttggaccagagttgaa

SEQ ID NO: 157738 - DNA, 30 bp, Artificial Sequence
  Synthetic oligonucleotide
ggtaagacggatattaagccataggttgaa

SEQ ID NO: 157739 - DNA, 30 bp, Artificial Sequence
  Synthetic oligonucleotide
ctgggtgtctccggacttggccaatttgaa

SEQ ID NO: 157740 - DNA, 30 bp, Artificial Sequence
  Synthetic oligonucleotide
acgacacaaatttatacgggtatatttgaa

SEQ ID NO: 157741 - DNA, 30 bp, Artificial Sequence
  Synthetic oligonucleotide
gtgccaacgcttacgcgtgcccactttgaa

SEQ ID NO: 157742 - DNA, 30 bp, Artificial Sequence
  Synthetic oligonucleotide
aactcatgatagtgaattgcccactttgaa

SEQ ID NO: 157743 - DNA, 30 bp, Artificial Sequence
  Synthetic oligonucleotide
gatggtcgaagatgatccaaggaaaaataa

SEQ ID NO: 157744 - DNA, 30 bp, Artificial Sequence
  Synthetic oligonucleotide
tggtgaaaatccagacgattttgaaaataa

SEQ ID NO: 157745 - DNA, 30 bp, Artificial Sequence
  Synthetic oligonucleotide
cagtcacctaagtggttacagttaaaataa

SEQ ID NO: 157746 - DNA, 30 bp, Artificial Sequence
  Synthetic oligonucleotide
cggtaccaccctcggcgggggggcaaataa

SEQ ID NO: 157747 - DNA, 30 bp, Artificial Sequence
  Synthetic oligonucleotide
gtgagaatcgcttttttaggagggaaataa

SEQ ID NO: 157748 - DNA, 30 bp, Artificial Sequence
  Synthetic oligonucleotide
ctcgagactcgagtacgaccttctaaataa

SEQ ID NO: 157749 - DNA, 30 bp, Artificial Sequence
  Synthetic oligonucleotide
ccatgtaacgcaaaagtgagaatacaataa

SEQ ID NO: 157750 - DNA, 30 bp, Artificial Sequence
  Synthetic oligonucleotide
gtgaaccgctcctaagcgttcatacaataa

SEQ ID NO: 157751 - DNA, 31 bp, Artificial Sequence
  Synthetic oligonucleotide
gtaggtgcggccatgcggcaaaattcaataa

SEQ ID NO: 157752 - DNA, 30 bp, Artificial Sequence
  Synthetic oligonucleotide
catctagggaaccgcatagcttcagaataa

SEQ ID NO: 157753 - DNA, 30 bp, Artificial Sequence
  Synthetic oligonucleotide
ccggtcgagatcggatagatctgagaataa

SEQ ID NO: 157754 - DNA, 30 bp, Artificial Sequence
  Synthetic oligonucleotide
tagcgtggtcgcttagcctaagccgaataa

SEQ ID NO: 157755 - DNA, 30 bp, Artificial Sequence
  Synthetic oligonucleotide
cgggtacagattcgggtgataactgaataa

SEQ ID NO: 157756 - DNA, 30 bp, Artificial Sequence
  Synthetic oligonucleotide
gcgtaagtcatggccgtccaagcataataa

SEQ ID NO: 157757 - DNA, 30 bp, Artificial Sequence
  Synthetic oligonucleotide
gccgtactcattggggtcaaattataataa

SEQ ID NO: 157758 - DNA, 30 bp, Artificial Sequence
  Synthetic oligonucleotide
tggtgtgacgtttcgtaggtccaaacataa

SEQ ID NO: 157759 - DNA, 30 bp, Artificial Sequence
  Synthetic oligonucleotide
gctcgtcgctgacgaaacgatgccacataa

SEQ ID NO: 157760 - DNA, 30 bp, Artificial Sequence
  Synthetic oligonucleotide
cattgtattcgaagactcgatcagacataa

SEQ ID NO: 157761 - DNA, 30 bp, Artificial Sequence
  Synthetic oligonucleotide
cgtattataggatgacgagaatagacataa

SEQ ID NO: 157762 - DNA, 30 bp, Artificial Sequence
  Synthetic oligonucleotide
ctcgacatcgtggcgactagttgtacataa

SEQ ID NO: 157763 - DNA, 30 bp, Artificial Sequence
  Synthetic oligonucleotide
tctacgggggtctagctggttaaaccataa

SEQ ID NO: 157764 - DNA, 30 bp, Artificial Sequence
  Synthetic oligonucleotide
tagactgtccactcaattaagtcaccataa

SEQ ID NO: 157765 - DNA, 30 bp, Artificial Sequence
  Synthetic oligonucleotide
tcaatgacattggcgtcctagctaccataa

SEQ ID NO: 157766 - DNA, 30 bp, Artificial Sequence
  Synthetic oligonucleotide
catggaaaacaaaaattttctgggccataa

SEQ ID NO: 157767 - DNA, 30 bp, Artificial Sequence
  Synthetic oligonucleotide
agtgcagcccgtaaatggaggaaggcataa

SEQ ID NO: 157768 - DNA, 30 bp, Artificial Sequence
  Synthetic oligonucleotide
gccttcgacccgtcgaaggataaggcataa

SEQ ID NO: 157769 - DNA, 30 bp, Artificial Sequence
  Synthetic oligonucleotide
acttctatacaggccagtctcgctgcataa

SEQ ID NO: 157770 - DNA, 30 bp, Artificial Sequence
  Synthetic oligonucleotide
cgctcaaggttaaaaataacaatatcataa

SEQ ID NO: 157771 - DNA, 30 bp, Artificial Sequence
  Synthetic oligonucleotide
ccgacaaaggacacgtcgcacgtatcataa

SEQ ID NO: 157772 - DNA, 30 bp, Artificial Sequence
  Synthetic oligonucleotide
aggacaaggcatcgccataatcgctcataa

SEQ ID NO: 157773 - DNA, 30 bp, Artificial Sequence
  Synthetic oligonucleotide
tttcgaatatgattgaggtttggctcataa

SEQ ID NO: 157774 - DNA, 30 bp, Artificial Sequence
  Synthetic oligonucleotide
cgggaaactgcaattaaattaaagtcataa

SEQ ID NO: 157775 - DNA, 30 bp, Artificial Sequence
  Synthetic oligonucleotide
cggaggtccaccgaaagtctggcaagataa

SEQ ID NO: 157776 - DNA, 30 bp, Artificial Sequence
  Synthetic oligonucleotide
tcgggatgtcaaggaattgacgcgagataa

SEQ ID NO: 157777 - DNA, 30 bp, Artificial Sequence
  Synthetic oligonucleotide
ggatcgggtcacatccaggagtcgagataa

SEQ ID NO: 157778 - DNA, 30 bp, Artificial Sequence
  Synthetic oligonucleotide
cttttacgggtccgcgaacgttcgagataa

SEQ ID NO: 157779 - DNA, 30 bp, Artificial Sequence
  Synthetic oligonucleotide
aaaagcacgattgaagttagtaatagataa

SEQ ID NO: 157780 - DNA, 30 bp, Artificial Sequence
  Synthetic oligonucleotide
gcaacgttagaagcacaaaccgatagataa

SEQ ID NO: 157781 - DNA, 30 bp, Artificial Sequence
  Synthetic oligonucleotide
aactgtgtgcgacctcaactacctagataa

SEQ ID NO: 157782 - DNA, 30 bp, Artificial Sequence
  Synthetic oligonucleotide
agttatcaattacaaaagagaccacgataa

SEQ ID NO: 157783 - DNA, 30 bp, Artificial Sequence
  Synthetic oligonucleotide
tgctggaggcatgagggtgtttgacgataa

SEQ ID NO: 157784 - DNA, 30 bp, Artificial Sequence
  Synthetic oligonucleotide
ccggcccaaggctcaaatcagttacgataa

SEQ ID NO: 157785 - DNA, 30 bp, Artificial Sequence
  Synthetic oligonucleotide
ggtaaaaggctcacgtaattttggcgataa

SEQ ID NO: 157786 - DNA, 30 bp, Artificial Sequence
  Synthetic oligonucleotide
cattggtatagccacagaagagtaggataa

SEQ ID NO: 157787 - DNA, 30 bp, Artificial Sequence
  Synthetic oligonucleotide
ttatgagaccagggccctgtgggcggataa

SEQ ID NO: 157788 - DNA, 30 bp, Artificial Sequence
  Synthetic oligonucleotide
cgccaaatctggttcgcgatcatcggataa

SEQ ID NO: 157789 - DNA, 30 bp, Artificial Sequence
  Synthetic oligonucleotide
ctggggcgtcagccactggcagtcggataa

SEQ ID NO: 157790 - DNA, 30 bp, Artificial Sequence
  Synthetic oligonucleotide
cgcaaaacgttccaagtcaaagtgggataa

SEQ ID NO: 157791 - DNA, 30 bp, Artificial Sequence
  Synthetic oligonucleotide
ctatccgcggccatagaatgctatggataa

SEQ ID NO: 157792 - DNA, 30 bp, Artificial Sequence
  Synthetic oligonucleotide
aaccctcattttcaaggagctaaatgataa

SEQ ID NO: 157793 - DNA, 30 bp, Artificial Sequence
  Synthetic oligonucleotide
ttaaaaccttccccgtgccaataatgataa

SEQ ID NO: 157794 - DNA, 30 bp, Artificial Sequence
  Synthetic oligonucleotide
aggcttcagccgagggctcagtaatgataa

SEQ ID NO: 157795 - DNA, 30 bp, Artificial Sequence
  Synthetic oligonucleotide
gggcgccaacttggttatggcacatgataa

SEQ ID NO: 157796 - DNA, 30 bp, Artificial Sequence
  Synthetic oligonucleotide
gtgcaacaggatctcattatacgatgataa

SEQ ID NO: 157797 - DNA, 30 bp, Artificial Sequence
  Synthetic oligonucleotide
cgagcttgaatgcaataggtggcctgataa

SEQ ID NO: 157798 - DNA, 30 bp, Artificial Sequence
  Synthetic oligonucleotide
ggcgaccggaattagccacatctctgataa

SEQ ID NO: 157799 - DNA, 30 bp, Artificial Sequence
  Synthetic oligonucleotide
tcaggtgccaagttttcaatcaagtgataa

SEQ ID NO: 157800 - DNA, 30 bp, Artificial Sequence
  Synthetic oligonucleotide
catggatacgacatttatcagtacatataa

SEQ ID NO: 157801 - DNA, 30 bp, Artificial Sequence
  Synthetic oligonucleotide
ggctcataactaatcgtagatagcatataa

SEQ ID NO: 157802 - DNA, 30 bp, Artificial Sequence
  Synthetic oligonucleotide
gctgaacccgaaaacttgagcggcatataa

SEQ ID NO: 157803 - DNA, 30 bp, Artificial Sequence
  Synthetic oligonucleotide
catcagccaaagctttcaagcatcatataa

SEQ ID NO: 157804 - DNA, 31 bp, Artificial Sequence
  Synthetic oligonucleotide
catgcccgggcagtgtcagtccccgatataa

SEQ ID NO: 157805 - DNA, 30 bp, Artificial Sequence
  Synthetic oligonucleotide
gagaaagcgtaaagctgaaagccgatataa

SEQ ID NO: 157806 - DNA, 30 bp, Artificial Sequence
  Synthetic oligonucleotide
ttacacacacaattcgtaagatcgatataa

SEQ ID NO: 157807 - DNA, 30 bp, Artificial Sequence
  Synthetic oligonucleotide
gcctaccgagggtgctaggataggatataa

SEQ ID NO: 157808 - DNA, 30 bp, Artificial Sequence
  Synthetic oligonucleotide
ccgaagatcgcctggatttagacactataa

SEQ ID NO: 157809 - DNA, 30 bp, Artificial Sequence
  Synthetic oligonucleotide
cccttcagggcttaacaacttaccctataa

SEQ ID NO: 157810 - DNA, 30 bp, Artificial Sequence
  Synthetic oligonucleotide
ccattgccacaaagtgcatacacagtataa

SEQ ID NO: 157811 - DNA, 30 bp, Artificial Sequence
  Synthetic oligonucleotide
tacgtcaaaacttgcaagggacccgtataa

SEQ ID NO: 157812 - DNA, 30 bp, Artificial Sequence
  Synthetic oligonucleotide
actaccatcctgtctttcgacccggtataa

SEQ ID NO: 157813 - DNA, 30 bp, Artificial Sequence
  Synthetic oligonucleotide
taggcaacatctagctgggtcgtattataa

SEQ ID NO: 157814 - DNA, 30 bp, Artificial Sequence
  Synthetic oligonucleotide
gtgagtgaggtttgcgggaaccccttataa

SEQ ID NO: 157815 - DNA, 30 bp, Artificial Sequence
  Synthetic oligonucleotide
acgcgacccttctagccggccatcttataa

SEQ ID NO: 157816 - DNA, 30 bp, Artificial Sequence
  Synthetic oligonucleotide
catcgaagcgggttactctcagggttataa

SEQ ID NO: 157817 - DNA, 30 bp, Artificial Sequence
  Synthetic oligonucleotide
aagggcaaagggttccgcttctatttataa

SEQ ID NO: 157818 - DNA, 30 bp, Artificial Sequence
  Synthetic oligonucleotide
atggggcgtaagtattggcatagaaactaa

SEQ ID NO: 157819 - DNA, 30 bp, Artificial Sequence
  Synthetic oligonucleotide
tcaacgagatcaggtttacaattaaactaa

SEQ ID NO: 157820 - DNA, 30 bp, Artificial Sequence
  Synthetic oligonucleotide
tggagtggtggtcggaaacgggccaactaa

SEQ ID NO: 157821 - DNA, 30 bp, Artificial Sequence
  Synthetic oligonucleotide
atattcgatcagcataacgtaggcaactaa

SEQ ID NO: 157822 - DNA, 30 bp, Artificial Sequence
  Synthetic oligonucleotide
tggaacttgacaaaagcatatggcaactaa

SEQ ID NO: 157823 - DNA, 30 bp, Artificial Sequence
  Synthetic oligonucleotide
cctaaggatggggactttactttcaactaa

SEQ ID NO: 157824 - DNA, 30 bp, Artificial Sequence
  Synthetic oligonucleotide
cgacacacgatgccagatgtagaacactaa

SEQ ID NO: 157825 - DNA, 30 bp, Artificial Sequence
  Synthetic oligonucleotide
cggcggtaactcataaatacttcacactaa

SEQ ID NO: 157826 - DNA, 30 bp, Artificial Sequence
  Synthetic oligonucleotide
gtgcaacagtatgggacactgctccactaa

SEQ ID NO: 157827 - DNA, 30 bp, Artificial Sequence
  Synthetic oligonucleotide
gcgcttcatgaccacaacagaatagactaa

SEQ ID NO: 157828 - DNA, 30 bp, Artificial Sequence
  Synthetic oligonucleotide
cgagattgcaaacaaaatctcacggactaa

SEQ ID NO: 157829 - DNA, 30 bp, Artificial Sequence
  Synthetic oligonucleotide
ccatatatactgggggttggctatgactaa

SEQ ID NO: 157830 - DNA, 30 bp, Artificial Sequence
  Synthetic oligonucleotide
tgctgggaaacgatgtgcgttcaatactaa

SEQ ID NO: 157831 - DNA, 30 bp, Artificial Sequence
  Synthetic oligonucleotide
actgagggttacggatcactttaatactaa

SEQ ID NO: 157832 - DNA, 30 bp, Artificial Sequence
  Synthetic oligonucleotide
caagaagttccatgatagtgaagttactaa

SEQ ID NO: 157833 - DNA, 30 bp, Artificial Sequence
  Synthetic oligonucleotide
ccatatactaaaacggcgtagtagacctaa

SEQ ID NO: 157834 - DNA, 30 bp, Artificial Sequence
  Synthetic oligonucleotide
atctcagcacatagataatttgcgacctaa

SEQ ID NO: 157835 - DNA, 30 bp, Artificial Sequence
  Synthetic oligonucleotide
aggctgtatatggagttattgctaccctaa

SEQ ID NO: 157836 - DNA, 27 bp, Artificial Sequence
  Synthetic oligonucleotide
atgaccgtgcattgatctctaccctaa

SEQ ID NO: 157837 - DNA, 30 bp, Artificial Sequence
  Synthetic oligonucleotide
gtggcgagacacgaaagggcgacagcctaa

SEQ ID NO: 157838 - DNA, 30 bp, Artificial Sequence
  Synthetic oligonucleotide
gctgtcgaacacccactgggagcggcctaa

SEQ ID NO: 157839 - DNA, 30 bp, Artificial Sequence
  Synthetic oligonucleotide
gagctggtgtcctccatgtcctctgcctaa

SEQ ID NO: 157840 - DNA, 30 bp, Artificial Sequence
  Synthetic oligonucleotide
cacatgtgtggaaaaggtcactgatcctaa

SEQ ID NO: 157841 - DNA, 30 bp, Artificial Sequence
  Synthetic oligonucleotide
gtcttgctgtgcttggtactaggctcctaa

SEQ ID NO: 157842 - DNA, 30 bp, Artificial Sequence
  Synthetic oligonucleotide
catggcgggtcgccttggggtgagtcctaa

SEQ ID NO: 157843 - DNA, 30 bp, Artificial Sequence
  Synthetic oligonucleotide
taccgaagtgaattgaaactaatgtcctaa

SEQ ID NO: 157844 - DNA, 30 bp, Artificial Sequence
  Synthetic oligonucleotide
cgatatcgggccaggtaggtggtgtcctaa

SEQ ID NO: 157845 - DNA, 30 bp, Artificial Sequence
  Synthetic oligonucleotide
aaacaaggaggattgaacctcccttcctaa

SEQ ID NO: 157846 - DNA, 30 bp, Artificial Sequence
  Synthetic oligonucleotide
atccggtaagagaagttagtcctaagctaa

SEQ ID NO: 157847 - DNA, 30 bp, Artificial Sequence
  Synthetic oligonucleotide
gggactcggtgacgtgagaaaaatagctaa

SEQ ID NO: 157848 - DNA, 30 bp, Artificial Sequence
  Synthetic oligonucleotide
gagaagatacctatatccgcccctagctaa

SEQ ID NO: 157849 - DNA, 30 bp, Artificial Sequence
  Synthetic oligonucleotide
gaggaattctagtgagggtttgcgcgctaa

SEQ ID NO: 157850 - DNA, 30 bp, Artificial Sequence
  Synthetic oligonucleotide
agctggaattttatgggaacttggcgctaa

SEQ ID NO: 157851 - DNA, 30 bp, Artificial Sequence
  Synthetic oligonucleotide
actgccttggggtccacatagggaggctaa

SEQ ID NO: 157852 - DNA, 30 bp, Artificial Sequence
  Synthetic oligonucleotide
cattcgtcaacaaagaaggggtagggctaa

SEQ ID NO: 157853 - DNA, 30 bp, Artificial Sequence
  Synthetic oligonucleotide
gcccacataaacctacccagattgggctaa

SEQ ID NO: 157854 - DNA, 30 bp, Artificial Sequence
  Synthetic oligonucleotide
acacccgcctccgcccaacaaccctgctaa

SEQ ID NO: 157855 - DNA, 30 bp, Artificial Sequence
  Synthetic oligonucleotide
tttagacatcaaaaaagttacgggtgctaa

SEQ ID NO: 157856 - DNA, 30 bp, Artificial Sequence
  Synthetic oligonucleotide
gaatggcaggtgatcttctgctcaatctaa

SEQ ID NO: 157857 - DNA, 30 bp, Artificial Sequence
  Synthetic oligonucleotide
aagcgaatagccccttagtgaggcatctaa

SEQ ID NO: 157858 - DNA, 30 bp, Artificial Sequence
  Synthetic oligonucleotide
ggtgtgcctgcaatgcggtaggagatctaa

SEQ ID NO: 157859 - DNA, 30 bp, Artificial Sequence
  Synthetic oligonucleotide
cactctaaactaatgacaggaatactctaa

SEQ ID NO: 157860 - DNA, 30 bp, Artificial Sequence
  Synthetic oligonucleotide
gtgaaccatgccgacggaagatacctctaa

SEQ ID NO: 157861 - DNA, 30 bp, Artificial Sequence
  Synthetic oligonucleotide
actttagcgaacgagcagcgtgatctctaa

SEQ ID NO: 157862 - DNA, 30 bp, Artificial Sequence
  Synthetic oligonucleotide
gagggcaacatgactaatccagtcgtctaa

SEQ ID NO: 157863 - DNA, 30 bp, Artificial Sequence
  Synthetic oligonucleotide
gttggagcggaccaaaagggacaggtctaa

SEQ ID NO: 157864 - DNA, 30 bp, Artificial Sequence
  Synthetic oligonucleotide
cacccaacgatagaggttgtttaattctaa

SEQ ID NO: 157865 - DNA, 30 bp, Artificial Sequence
  Synthetic oligonucleotide
tggagcctaatagttatgggccgattctaa

SEQ ID NO: 157866 - DNA, 30 bp, Artificial Sequence
  Synthetic oligonucleotide
gtagattgtgatcgctggggtaagttctaa

SEQ ID NO: 157867 - DNA, 30 bp, Artificial Sequence
  Synthetic oligonucleotide
agttatcggaattggtgtatcactttctaa

SEQ ID NO: 157868 - DNA, 30 bp, Artificial Sequence
  Synthetic oligonucleotide
ctgaagacactatctgtgcaaagaaagtaa

SEQ ID NO: 157869 - DNA, 30 bp, Artificial Sequence
  Synthetic oligonucleotide
gaggtgcggttagaggagactagaaagtaa

SEQ ID NO: 157870 - DNA, 29 bp, Artificial Sequence
  Synthetic oligonucleotide
cgccgtcacagtgttggcagtgaaagtaa

SEQ ID NO: 157871 - DNA, 30 bp, Artificial Sequence
  Synthetic oligonucleotide
aaatctaagtcaagggaccagcgcaagtaa

SEQ ID NO: 157872 - DNA, 30 bp, Artificial Sequence
  Synthetic oligonucleotide
cccataatgaaagaatcaacaaggcagtaa

SEQ ID NO: 157873 - DNA, 30 bp, Artificial Sequence
  Synthetic oligonucleotide
tacactgtctgttcaaatgagagagagtaa

SEQ ID NO: 157874 - DNA, 30 bp, Artificial Sequence
  Synthetic oligonucleotide
agcgctgggaccggcacaacaggagagtaa

SEQ ID NO: 157875 - DNA, 30 bp, Artificial Sequence
  Synthetic oligonucleotide
aaggagttggatacgctatttctagagtaa

SEQ ID NO: 157876 - DNA, 30 bp, Artificial Sequence
  Synthetic oligonucleotide
cggatcgaatgaaacgtttaattagagtaa

SEQ ID NO: 157877 - DNA, 30 bp, Artificial Sequence
  Synthetic oligonucleotide
ggtttatttgcaggatgacataacgagtaa

SEQ ID NO: 157878 - DNA, 30 bp, Artificial Sequence
  Synthetic oligonucleotide
acccatctgtttaccacgatagtcgagtaa

SEQ ID NO: 157879 - DNA, 30 bp, Artificial Sequence
  Synthetic oligonucleotide
cacgtcgcagcgggcctgctacgatagtaa

SEQ ID NO: 157880 - DNA, 30 bp, Artificial Sequence
  Synthetic oligonucleotide
tgatgcataggacttccgacgcactagtaa

SEQ ID NO: 157881 - DNA, 30 bp, Artificial Sequence
  Synthetic oligonucleotide
cacgctccagcggagaacaagttaacgtaa

SEQ ID NO: 157882 - DNA, 30 bp, Artificial Sequence
  Synthetic oligonucleotide
agcgtaaaaacgcaacggagccccacgtaa

SEQ ID NO: 157883 - DNA, 30 bp, Artificial Sequence
  Synthetic oligonucleotide
gggttagaatagagactagtcccgacgtaa

SEQ ID NO: 157884 - DNA, 30 bp, Artificial Sequence
  Synthetic oligonucleotide
acacttaagattcgagattaccggacgtaa

SEQ ID NO: 157885 - DNA, 30 bp, Artificial Sequence
  Synthetic oligonucleotide
tcttggtatactgcttacatcgctacgtaa

SEQ ID NO: 157886 - DNA, 30 bp, Artificial Sequence
  Synthetic oligonucleotide
gcactaataagtggatacgtggaaccgtaa

SEQ ID NO: 157887 - DNA, 30 bp, Artificial Sequence
  Synthetic oligonucleotide
ctcaaaatgaggggcgtgggaaccccgtaa

SEQ ID NO: 157888 - DNA, 30 bp, Artificial Sequence
  Synthetic oligonucleotide
tagaatggggatcacgtaaaacccccgtaa

SEQ ID NO: 157889 - DNA, 30 bp, Artificial Sequence
  Synthetic oligonucleotide
catcggggtagactaacctggtgagcgtaa

SEQ ID NO: 157890 - DNA, 30 bp, Artificial Sequence
  Synthetic oligonucleotide
aggtcctcaattgacctcacgtccgcgtaa

SEQ ID NO: 157891 - DNA, 30 bp, Artificial Sequence
  Synthetic oligonucleotide
ccaggcaaaccgttctatcctttggcgtaa

SEQ ID NO: 157892 - DNA, 30 bp, Artificial Sequence
  Synthetic oligonucleotide
gacgacgtgtatacacatcgaactgcgtaa

SEQ ID NO: 157893 - DNA, 30 bp, Artificial Sequence
  Synthetic oligonucleotide
tcaacggctccaatagtgttatcatcgtaa

SEQ ID NO: 157894 - DNA, 30 bp, Artificial Sequence
  Synthetic oligonucleotide
ggaaggtgctcgtagcgcaaatactcgtaa

SEQ ID NO: 157895 - DNA, 30 bp, Artificial Sequence
  Synthetic oligonucleotide
taggtctgactatcgttagacgtaaggtaa

SEQ ID NO: 157896 - DNA, 30 bp, Artificial Sequence
  Synthetic oligonucleotide
tgactgcacattctcaaaaaaatcaggtaa

SEQ ID NO: 157897 - DNA, 30 bp, Artificial Sequence
  Synthetic oligonucleotide
gcgatatgaatcaccatgtatgctaggtaa

SEQ ID NO: 157898 - DNA, 30 bp, Artificial Sequence
  Synthetic oligonucleotide
ccttgagaaatgcgggcactagtacggtaa

SEQ ID NO: 157899 - DNA, 30 bp, Artificial Sequence
  Synthetic oligonucleotide
accgctccgatagcggatcctagtcggtaa

SEQ ID NO: 157900 - DNA, 30 bp, Artificial Sequence
  Synthetic oligonucleotide
ccgtggccctgcggtcaggagaaagggtaa

SEQ ID NO: 157901 - DNA, 30 bp, Artificial Sequence
  Synthetic oligonucleotide
caaaacactctgtgaacaatgtacgggtaa

SEQ ID NO: 157902 - DNA, 30 bp, Artificial Sequence
  Synthetic oligonucleotide
ttggggacggcgggggagaaatcggggtaa

SEQ ID NO: 157903 - DNA, 30 bp, Artificial Sequence
  Synthetic oligonucleotide
agcttggatcccatccgaaggcgggggtaa

SEQ ID NO: 157904 - DNA, 30 bp, Artificial Sequence
  Synthetic oligonucleotide
cctacatcctttgagaaggtgtgggggtaa

SEQ ID NO: 157905 - DNA, 30 bp, Artificial Sequence
  Synthetic oligonucleotide
gcggtatgacccgttgaaaggttatggtaa

SEQ ID NO: 157906 - DNA, 30 bp, Artificial Sequence
  Synthetic oligonucleotide
tgggcgttctgagaagcagattactggtaa

SEQ ID NO: 157907 - DNA, 30 bp, Artificial Sequence
  Synthetic oligonucleotide
atgtgccaacttgaactcgggccgtggtaa

SEQ ID NO: 157908 - DNA, 30 bp, Artificial Sequence
  Synthetic oligonucleotide
aacggttgaactaagtgtatttggtggtaa

SEQ ID NO: 157909 - DNA, 30 bp, Artificial Sequence
  Synthetic oligonucleotide
attaatatcggtaaaagtatacattggtaa

SEQ ID NO: 157910 - DNA, 30 bp, Artificial Sequence
  Synthetic oligonucleotide
tccactaccatagataaagcgacaatgtaa

SEQ ID NO: 157911 - DNA, 30 bp, Artificial Sequence
  Synthetic oligonucleotide
caactgtatcgctaccatgtcataatgtaa

SEQ ID NO: 157912 - DNA, 30 bp, Artificial Sequence
  Synthetic oligonucleotide
tagttatttacacattggactatactgtaa

SEQ ID NO: 157913 - DNA, 30 bp, Artificial Sequence
  Synthetic oligonucleotide
ttcatgagagacgatctaagcgtactgtaa

SEQ ID NO: 157914 - DNA, 30 bp, Artificial Sequence
  Synthetic oligonucleotide
gatcgtgatttgtatcgaattatcctgtaa

SEQ ID NO: 157915 - DNA, 30 bp, Artificial Sequence
  Synthetic oligonucleotide
agctctcaaatgcatatgtcccgagtgtaa

SEQ ID NO: 157916 - DNA, 30 bp, Artificial Sequence
  Synthetic oligonucleotide
ggactcacgttccgtatttcagaggtgtaa

SEQ ID NO: 157917 - DNA, 30 bp, Artificial Sequence
  Synthetic oligonucleotide
tataggggcattatgggctgatgtgtgtaa

SEQ ID NO: 157918 - DNA, 30 bp, Artificial Sequence
  Synthetic oligonucleotide
cactaccgttgggcagaatccgttgtgtaa

SEQ ID NO: 157919 - DNA, 30 bp, Artificial Sequence
  Synthetic oligonucleotide
ccaaagctatctaattacaaaacattgtaa

SEQ ID NO: 157920 - DNA, 30 bp, Artificial Sequence
  Synthetic oligonucleotide
cacagtcgaatgtaaggctgattattgtaa

SEQ ID NO: 157921 - DNA, 30 bp, Artificial Sequence
  Synthetic oligonucleotide
ccgagggaatgaggctgcagctgcttgtaa

SEQ ID NO: 157922 - DNA, 30 bp, Artificial Sequence
  Synthetic oligonucleotide
ctaaaacacattatgaatgggacgttgtaa

SEQ ID NO: 157923 - DNA, 30 bp, Artificial Sequence
  Synthetic oligonucleotide
ccagtcgggcctgtctagaggacaaattaa

SEQ ID NO: 157924 - DNA, 30 bp, Artificial Sequence
  Synthetic oligonucleotide
cgtatagaatcgtgaatttcacacaattaa

SEQ ID NO: 157925 - DNA, 30 bp, Artificial Sequence
  Synthetic oligonucleotide
ccacaagtagcggatctcaataagaattaa

SEQ ID NO: 157926 - DNA, 30 bp, Artificial Sequence
  Synthetic oligonucleotide
agcgacgatgtgagtttcaaactgaattaa

SEQ ID NO: 157927 - DNA, 30 bp, Artificial Sequence
  Synthetic oligonucleotide
gcacagctgatacgtggtgacacccattaa

SEQ ID NO: 157928 - DNA, 30 bp, Artificial Sequence
  Synthetic oligonucleotide
aacgactgcatagaaataattatccattaa

SEQ ID NO: 157929 - DNA, 30 bp, Artificial Sequence
  Synthetic oligonucleotide
aggctagaacagtgcggtgtcaagcattaa

SEQ ID NO: 157930 - DNA, 30 bp, Artificial Sequence
  Synthetic oligonucleotide
caaaagtggttccggcggaatcagcattaa

SEQ ID NO: 157931 - DNA, 30 bp, Artificial Sequence
  Synthetic oligonucleotide
tgtctcaggaagtagatacagctgcattaa

SEQ ID NO: 157932 - DNA, 30 bp, Artificial Sequence
  Synthetic oligonucleotide
gaaagattttatggacatctacctcattaa

SEQ ID NO: 157933 - DNA, 30 bp, Artificial Sequence
  Synthetic oligonucleotide
ctggcgaattccaaggaaaaccttcattaa

SEQ ID NO: 157934 - DNA, 30 bp, Artificial Sequence
  Synthetic oligonucleotide
catacgacaatagtcgcccgataagattaa

SEQ ID NO: 157935 - DNA, 30 bp, Artificial Sequence
  Synthetic oligonucleotide
gcttgtatcatgcaactgaggtaagattaa

SEQ ID NO: 157936 - DNA, 30 bp, Artificial Sequence
  Synthetic oligonucleotide
agatttagagaacggtgaccgaccgattaa

SEQ ID NO: 157937 - DNA, 30 bp, Artificial Sequence
  Synthetic oligonucleotide
aaggtcattcgacacttatttggcgattaa

SEQ ID NO: 157938 - DNA, 30 bp, Artificial Sequence
  Synthetic oligonucleotide
aaagatatcgagaacaagaatggggattaa

SEQ ID NO: 157939 - DNA, 30 bp, Artificial Sequence
  Synthetic oligonucleotide
tgagttggacatgcggtcactgtggattaa

SEQ ID NO: 157940 - DNA, 30 bp, Artificial Sequence
  Synthetic oligonucleotide
ctgcgaccggaaatagagggtggtgattaa

SEQ ID NO: 157941 - DNA, 30 bp, Artificial Sequence
  Synthetic oligonucleotide
gcccaaggggaccgatcgtaaattgattaa

SEQ ID NO: 157942 - DNA, 30 bp, Artificial Sequence
  Synthetic oligonucleotide
ctattcgttgaatccaaggcgagctattaa

SEQ ID NO: 157943 - DNA, 29 bp, Artificial Sequence
  Synthetic oligonucleotide
caggcaagttgaatgagcataattattaa

SEQ ID NO: 157944 - DNA, 30 bp, Artificial Sequence
  Synthetic oligonucleotide
atccacatgacctgagtttaaagtacttaa

SEQ ID NO: 157945 - DNA, 30 bp, Artificial Sequence
  Synthetic oligonucleotide
gatgaaaaagcagcattttactttacttaa

SEQ ID NO: 157946 - DNA, 30 bp, Artificial Sequence
  Synthetic oligonucleotide
tcaagcgcctaagcgctctaagccccttaa

SEQ ID NO: 157947 - DNA, 30 bp, Artificial Sequence
  Synthetic oligonucleotide
ggggccttccaatcgaggtaaatcccttaa

SEQ ID NO: 157948 - DNA, 30 bp, Artificial Sequence
  Synthetic oligonucleotide
gcgattttcctggagcggtgcacagcttaa

SEQ ID NO: 157949 - DNA, 30 bp, Artificial Sequence
  Synthetic oligonucleotide
atcagtacgccactgccaagaaagtcttaa

SEQ ID NO: 157950 - DNA, 30 bp, Artificial Sequence
  Synthetic oligonucleotide
aaagcggcgtgcaacgacggagggtcttaa

SEQ ID NO: 157951 - DNA, 30 bp, Artificial Sequence
  Synthetic oligonucleotide
ctgtggcgcgtgacctcacgtatttcttaa

SEQ ID NO: 157952 - DNA, 30 bp, Artificial Sequence
  Synthetic oligonucleotide
cagaccaaatctaggcggtagcaaagttaa

SEQ ID NO: 157953 - DNA, 30 bp, Artificial Sequence
  Synthetic oligonucleotide
gacaatacttgatatactgtgcaaagttaa

SEQ ID NO: 157954 - DNA, 30 bp, Artificial Sequence
  Synthetic oligonucleotide
ccagtactgaattgggggtgtgtaagttaa

SEQ ID NO: 157955 - DNA, 30 bp, Artificial Sequence
  Synthetic oligonucleotide
atttcgaaagtggaggcttatatcagttaa

SEQ ID NO: 157956 - DNA, 30 bp, Artificial Sequence
  Synthetic oligonucleotide
ttgtttagagtggaggaaagtccgagttaa

SEQ ID NO: 157957 - DNA, 30 bp, Artificial Sequence
  Synthetic oligonucleotide
ctataataatgataattccataatagttaa

SEQ ID NO: 157958 - DNA, 30 bp, Artificial Sequence
  Synthetic oligonucleotide
aaagagcctacgtcgaatacgaggcgttaa

SEQ ID NO: 157959 - DNA, 30 bp, Artificial Sequence
  Synthetic oligonucleotide
ctgtagtgagaataattgaacatgcgttaa

SEQ ID NO: 157960 - DNA, 30 bp, Artificial Sequence
  Synthetic oligonucleotide
tcaagttggaaatgactggtatatcgttaa

SEQ ID NO: 157961 - DNA, 30 bp, Artificial Sequence
  Synthetic oligonucleotide
gtgaagaaaacagcggtttagattcgttaa

SEQ ID NO: 157962 - DNA, 30 bp, Artificial Sequence
  Synthetic oligonucleotide
ataggctctttttacgtgaagtgaggttaa

SEQ ID NO: 157963 - DNA, 30 bp, Artificial Sequence
  Synthetic oligonucleotide
tacaatggaaaaggaccaggaaagggttaa

SEQ ID NO: 157964 - DNA, 30 bp, Artificial Sequence
  Synthetic oligonucleotide
ctggcatgaatgcccagtctggcatgttaa

SEQ ID NO: 157965 - DNA, 30 bp, Artificial Sequence
  Synthetic oligonucleotide
gacaacacctaaaccatataactctgttaa

SEQ ID NO: 157966 - DNA, 30 bp, Artificial Sequence
  Synthetic oligonucleotide
cagctctatttaatccgcgaaacttgttaa

SEQ ID NO: 157967 - DNA, 30 bp, Artificial Sequence
  Synthetic oligonucleotide
tcatacgcataggacatagtactcatttaa

SEQ ID NO: 157968 - DNA, 30 bp, Artificial Sequence
  Synthetic oligonucleotide
aaagtcggttactaaacaagcgtcatttaa

SEQ ID NO: 157969 - DNA, 30 bp, Artificial Sequence
  Synthetic oligonucleotide
ggtttgattcggacgatgtgcgagatttaa

SEQ ID NO: 157970 - DNA, 30 bp, Artificial Sequence
  Synthetic oligonucleotide
tcagccgagatatgtaccttcaaagtttaa

SEQ ID NO: 157971 - DNA, 30 bp, Artificial Sequence
  Synthetic oligonucleotide
tgggacacgattatagtcgaacacgtttaa

SEQ ID NO: 157972 - DNA, 30 bp, Artificial Sequence
  Synthetic oligonucleotide
ggagcggtacatttattaaactgcgtttaa

SEQ ID NO: 157973 - DNA, 30 bp, Artificial Sequence
  Synthetic oligonucleotide
cctcataaaacacaacgcgcaatggtttaa

SEQ ID NO: 157974 - DNA, 30 bp, Artificial Sequence
  Synthetic oligonucleotide
acgtacctaacgaacatgaagggtgtttaa

SEQ ID NO: 157975 - DNA, 30 bp, Artificial Sequence
  Synthetic oligonucleotide
ggacatcgcacgtgtacgtaacaattttaa

SEQ ID NO: 157976 - DNA, 30 bp, Artificial Sequence
  Synthetic oligonucleotide
gcgggcggcgaaagaactgtcacattttaa

SEQ ID NO: 157977 - DNA, 30 bp, Artificial Sequence
  Synthetic oligonucleotide
ataggataccggacggttagtaagttttaa

SEQ ID NO: 157978 - DNA, 30 bp, Artificial Sequence
  Synthetic oligonucleotide
ggtaaataataatacttccagaggttttaa

SEQ ID NO: 157979 - DNA, 30 bp, Artificial Sequence
  Synthetic oligonucleotide
ctcataccgcgtgcgatttggaaaaaaaca

SEQ ID NO: 157980 - DNA, 30 bp, Artificial Sequence
  Synthetic oligonucleotide
cgagaatctttctcggaaagcaacaaaaca

SEQ ID NO: 157981 - DNA, 30 bp, Artificial Sequence
  Synthetic oligonucleotide
atcacgaaagcttgtgctctctcgaaaaca

SEQ ID NO: 157982 - DNA, 30 bp, Artificial Sequence
  Synthetic oligonucleotide
tgggagccggaagaactcctcgcacaaaca

SEQ ID NO: 157983 - DNA, 30 bp, Artificial Sequence
  Synthetic oligonucleotide
ggaaagtatataaacacaggaaaccaaaca

SEQ ID NO: 157984 - DNA, 29 bp, Artificial Sequence
  Synthetic oligonucleotide
cgagagagataaagtcgaccttccaaaca

SEQ ID NO: 157985 - DNA, 30 bp, Artificial Sequence
  Synthetic oligonucleotide
ctcgccgcaccggtccaggcgccagaaaca

SEQ ID NO: 157986 - DNA, 30 bp, Artificial Sequence
  Synthetic oligonucleotide
aagacgattgagagtcgcgatcccgaaaca

SEQ ID NO: 157987 - DNA, 30 bp, Artificial Sequence
  Synthetic oligonucleotide
ccccgacccgtagatcgctcggaggaaaca

SEQ ID NO: 157988 - DNA, 30 bp, Artificial Sequence
  Synthetic oligonucleotide
ttacaacgcattctgatgatgggggaaaca

SEQ ID NO: 157989 - DNA, 30 bp, Artificial Sequence
  Synthetic oligonucleotide
agcccaccgagatcgaggccagtggaaaca

SEQ ID NO: 157990 - DNA, 30 bp, Artificial Sequence
  Synthetic oligonucleotide
cgacgcagaggccacttgtgatgtgaaaca

SEQ ID NO: 157991 - DNA, 30 bp, Artificial Sequence
  Synthetic oligonucleotide
gcggggtgccggtggagaaggcgataaaca

SEQ ID NO: 157992 - DNA, 30 bp, Artificial Sequence
  Synthetic oligonucleotide
cgggaaaagtggaatctactcacgtaaaca

SEQ ID NO: 157993 - DNA, 30 bp, Artificial Sequence
  Synthetic oligonucleotide
gtaaccgtggacggccctttccaaacaaca

SEQ ID NO: 157994 - DNA, 30 bp, Artificial Sequence
  Synthetic oligonucleotide
taaagcgaataaagtcgcatcgacacaaca

SEQ ID NO: 157995 - DNA, 30 bp, Artificial Sequence
  Synthetic oligonucleotide
agggccggcccagcgccctgttacacaaca

SEQ ID NO: 157996 - DNA, 30 bp, Artificial Sequence
  Synthetic oligonucleotide
cccgaaggcagtgattagaaactcacaaca

SEQ ID NO: 157997 - DNA, 30 bp, Artificial Sequence
  Synthetic oligonucleotide
atgttgcggattccttgcgcaacgacaaca

SEQ ID NO: 157998 - DNA, 30 bp, Artificial Sequence
  Synthetic oligonucleotide
aagaaccccgtgtcagaacccgctacaaca

SEQ ID NO: 157999 - DNA, 30 bp, Artificial Sequence
  Synthetic oligonucleotide
cttggggggagccatcctaagtctacaaca

SEQ ID NO: 158000 - DNA, 30 bp, Artificial Sequence
  Synthetic oligonucleotide
cataatgtagcgcatggactatacccaaca

SEQ ID NO: 158001 - DNA, 30 bp, Artificial Sequence
  Synthetic oligonucleotide
cacttttgtagtggcttaagttagccaaca

SEQ ID NO: 158002 - DNA, 30 bp, Artificial Sequence
  Synthetic oligonucleotide
ttcgaccggcaccccatccgtcttccaaca

SEQ ID NO: 158003 - DNA, 30 bp, Artificial Sequence
  Synthetic oligonucleotide
ttgtcggcgtgataagtcggagttccaaca

SEQ ID NO: 158004 - DNA, 30 bp, Artificial Sequence
  Synthetic oligonucleotide
tgtgactataaaggagatattcgggcaaca

SEQ ID NO: 158005 - DNA, 30 bp, Artificial Sequence
  Synthetic oligonucleotide
cagacgagaaacaggcttggttagtcaaca

SEQ ID NO: 158006 - DNA, 30 bp, Artificial Sequence
  Synthetic oligonucleotide
taactaggtaaatcgggggctctgtcaaca

SEQ ID NO: 158007 - DNA, 30 bp, Artificial Sequence
  Synthetic oligonucleotide
cgcgagagaaacaaagatttagtgtcaaca

SEQ ID NO: 158008 - DNA, 30 bp, Artificial Sequence
  Synthetic oligonucleotide
ggggttactgtcgtcagccgtggaagaaca

SEQ ID NO: 158009 - DNA, 30 bp, Artificial Sequence
  Synthetic oligonucleotide
aattgcacaagtgagtgtaggaccagaaca

SEQ ID NO: 158010 - DNA, 30 bp, Artificial Sequence
  Synthetic oligonucleotide
acagcacacactttaggtaaagtcagaaca

SEQ ID NO: 158011 - DNA, 30 bp, Artificial Sequence
  Synthetic oligonucleotide
tctagagatatccgggcttctccgagaaca

SEQ ID NO: 158012 - DNA, 30 bp, Artificial Sequence
  Synthetic oligonucleotide
aacaagagtgggcactcttggtggagaaca

SEQ ID NO: 158013 - DNA, 30 bp, Artificial Sequence
  Synthetic oligonucleotide
taccagtgaccttaagcttgaaaacgaaca

SEQ ID NO: 158014 - DNA, 30 bp, Artificial Sequence
  Synthetic oligonucleotide
cgagcaataactagttttggagtacgaaca

SEQ ID NO: 158015 - DNA, 30 bp, Artificial Sequence
  Synthetic oligonucleotide
gaagtgtaaatcaacgctcccgtgcgaaca

SEQ ID NO: 158016 - DNA, 30 bp, Artificial Sequence
  Synthetic oligonucleotide
taaagtactctatgcgagatatttcgaaca

SEQ ID NO: 158017 - DNA, 30 bp, Artificial Sequence
  Synthetic oligonucleotide
cagatagctttataatctgagttcggaaca

SEQ ID NO: 158018 - DNA, 30 bp, Artificial Sequence
  Synthetic oligonucleotide
ctggattttttagtcctataagatggaaca

SEQ ID NO: 158019 - DNA, 30 bp, Artificial Sequence
  Synthetic oligonucleotide
acgtaggtgtcatgactggatgatggaaca

SEQ ID NO: 158020 - DNA, 30 bp, Artificial Sequence
  Synthetic oligonucleotide
caacaagttcgcgaaaaactatctggaaca

SEQ ID NO: 158021 - DNA, 30 bp, Artificial Sequence
  Synthetic oligonucleotide
ttgcagcgtacacgaaagggatgtggaaca

SEQ ID NO: 158022 - DNA, 30 bp, Artificial Sequence
  Synthetic oligonucleotide
tgctggtagttagcgtggccatttggaaca

SEQ ID NO: 158023 - DNA, 30 bp, Artificial Sequence
  Synthetic oligonucleotide
ggtggagcgtgcggagaggctgtctgaaca

SEQ ID NO: 158024 - DNA, 30 bp, Artificial Sequence
  Synthetic oligonucleotide
tatcggctatgcagtaaggccgcttgaaca

SEQ ID NO: 158025 - DNA, 30 bp, Artificial Sequence
  Synthetic oligonucleotide
gggaaaaattatttgtaggccgtcataaca

SEQ ID NO: 158026 - DNA, 30 bp, Artificial Sequence
  Synthetic oligonucleotide
agtcccatcattgggagtgggcggataaca

SEQ ID NO: 158027 - DNA, 30 bp, Artificial Sequence
  Synthetic oligonucleotide
ccgtgtgccgatgagtgaagtgaactaaca

SEQ ID NO: 158028 - DNA, 30 bp, Artificial Sequence
  Synthetic oligonucleotide
ggcaatcggaaccgcctcaggtaactaaca

SEQ ID NO: 158029 - DNA, 30 bp, Artificial Sequence
  Synthetic oligonucleotide
gtggtggaacagcaaaatttgtacctaaca

SEQ ID NO: 158030 - DNA, 30 bp, Artificial Sequence
  Synthetic oligonucleotide
ggattggagattagatgatctccgctaaca

SEQ ID NO: 158031 - DNA, 30 bp, Artificial Sequence
  Synthetic oligonucleotide
ccacaagtagcgtatcggggggcgctaaca

SEQ ID NO: 158032 - DNA, 30 bp, Artificial Sequence
  Synthetic oligonucleotide
ggctgcctacctgagcagggactgctaaca

SEQ ID NO: 158033 - DNA, 30 bp, Artificial Sequence
  Synthetic oligonucleotide
ccaccgctcgggtgaagcacacatctaaca

SEQ ID NO: 158034 - DNA, 30 bp, Artificial Sequence
  Synthetic oligonucleotide
agcggtataaagtcgccaacagcggtaaca

SEQ ID NO: 158035 - DNA, 30 bp, Artificial Sequence
  Synthetic oligonucleotide
atgttacgccgtaaaagctaagtggtaaca

SEQ ID NO: 158036 - DNA, 30 bp, Artificial Sequence
  Synthetic oligonucleotide
gggcatcaggagggcagcccctttgtaaca

SEQ ID NO: 158037 - DNA, 30 bp, Artificial Sequence
  Synthetic oligonucleotide
ggtactgtctccggttactaagaattaaca

SEQ ID NO: 158038 - DNA, 30 bp, Artificial Sequence
  Synthetic oligonucleotide
aggcattaggttcgctagcaagcattaaca

SEQ ID NO: 158039 - DNA, 30 bp, Artificial Sequence
  Synthetic oligonucleotide
atatagcgcgttaattaagtggcattaaca

SEQ ID NO: 158040 - DNA, 30 bp, Artificial Sequence
  Synthetic oligonucleotide
cagttatcgcctagtatcaacaccaacaca

SEQ ID NO: 158041 - DNA, 30 bp, Artificial Sequence
  Synthetic oligonucleotide
tacgatgaggaaccggcataagtcaacaca

SEQ ID NO: 158042 - DNA, 30 bp, Artificial Sequence
  Synthetic oligonucleotide
agcgaataccattaggggcgtgggaacaca

SEQ ID NO: 158043 - DNA, 30 bp, Artificial Sequence
  Synthetic oligonucleotide
ccctctgttacttgataaacacataacaca

SEQ ID NO: 158044 - DNA, 30 bp, Artificial Sequence
  Synthetic oligonucleotide
tgcgacggaagagaatcacccgttaacaca

SEQ ID NO: 158045 - DNA, 30 bp, Artificial Sequence
  Synthetic oligonucleotide
agactggcaggagacttttaggcagacaca

SEQ ID NO: 158046 - DNA, 30 bp, Artificial Sequence
  Synthetic oligonucleotide
aaacacggataaattgaagcgattgacaca

SEQ ID NO: 158047 - DNA, 30 bp, Artificial Sequence
  Synthetic oligonucleotide
aagtcacaacctaggctgattagatacaca

SEQ ID NO: 158048 - DNA, 30 bp, Artificial Sequence
  Synthetic oligonucleotide
cagactgagtagtactgatcgaattacaca

SEQ ID NO: 158049 - DNA, 30 bp, Artificial Sequence
  Synthetic oligonucleotide
ccggggtcagggagtatatcagaaaccaca

SEQ ID NO: 158050 - DNA, 30 bp, Artificial Sequence
  Synthetic oligonucleotide
aggcgggcacaagcctccccggaaaccaca

SEQ ID NO: 158051 - DNA, 30 bp, Artificial Sequence
  Synthetic oligonucleotide
agaggtagtagaacagactaacataccaca

SEQ ID NO: 158052 - DNA, 30 bp, Artificial Sequence
  Synthetic oligonucleotide
taggacttaagtgcgagggaaattaccaca

SEQ ID NO: 158053 - DNA, 30 bp, Artificial Sequence
  Synthetic oligonucleotide
tagacagagttggtttgctaaacacccaca

SEQ ID NO: 158054 - DNA, 30 bp, Artificial Sequence
  Synthetic oligonucleotide
cccatatcaaccttcattcactcacccaca

SEQ ID NO: 158055 - DNA, 30 bp, Artificial Sequence
  Synthetic oligonucleotide
cgaactgcacggtatagttttgcccccaca

SEQ ID NO: 158056 - DNA, 30 bp, Artificial Sequence
  Synthetic oligonucleotide
agccgctgggaggaggtgggaggccccaca

SEQ ID NO: 158057 - DNA, 30 bp, Artificial Sequence
  Synthetic oligonucleotide
cttgagtttggaacatggatgggtcccaca

SEQ ID NO: 158058 - DNA, 30 bp, Artificial Sequence
  Synthetic oligonucleotide
gtctgaagagggattggggataatgccaca

SEQ ID NO: 158059 - DNA, 30 bp, Artificial Sequence
  Synthetic oligonucleotide
ctcggcacttagggtataagacgtgccaca

SEQ ID NO: 158060 - DNA, 30 bp, Artificial Sequence
  Synthetic oligonucleotide
tccggcattcatggcggtgatgttgccaca

SEQ ID NO: 158061 - DNA, 30 bp, Artificial Sequence
  Synthetic oligonucleotide
gtgctcgtctaaaattaatggttatccaca

SEQ ID NO: 158062 - DNA, 30 bp, Artificial Sequence
  Synthetic oligonucleotide
gtccggcaatgacaagatgtaggcagcaca

SEQ ID NO: 158063 - DNA, 30 bp, Artificial Sequence
  Synthetic oligonucleotide
ccgatggttgtatgggacataacgagcaca

SEQ ID NO: 158064 - DNA, 30 bp, Artificial Sequence
  Synthetic oligonucleotide
ctcgtatagcaaggcgcacgagggagcaca

SEQ ID NO: 158065 - DNA, 30 bp, Artificial Sequence
  Synthetic oligonucleotide
ggcgcgaagccgttcatccgccttagcaca

SEQ ID NO: 158066 - DNA, 30 bp, Artificial Sequence
  Synthetic oligonucleotide
cccttgcttgggatcggtgccaagcgcaca

SEQ ID NO: 158067 - DNA, 30 bp, Artificial Sequence
  Synthetic oligonucleotide
caagagtagacgcctatcaaaaatcgcaca

SEQ ID NO: 158068 - DNA, 30 bp, Artificial Sequence
  Synthetic oligonucleotide
aggttatggactccgaattgatagggcaca

SEQ ID NO: 158069 - DNA, 30 bp, Artificial Sequence
  Synthetic oligonucleotide
acctcaccctggaaaccaatgcgctgcaca

SEQ ID NO: 158070 - DNA, 30 bp, Artificial Sequence
  Synthetic oligonucleotide
gggcgcactggccatttgagcgtgtgcaca

SEQ ID NO: 158071 - DNA, 30 bp, Artificial Sequence
  Synthetic oligonucleotide
actgttatatgtcgttctatagcttgcaca

SEQ ID NO: 158072 - DNA, 30 bp, Artificial Sequence
  Synthetic oligonucleotide
tcgcgcattctatcgctcgtctcaatcaca

SEQ ID NO: 158073 - DNA, 30 bp, Artificial Sequence
  Synthetic oligonucleotide
gactacactcagaccacttcacacatcaca

SEQ ID NO: 158074 - DNA, 30 bp, Artificial Sequence
  Synthetic oligonucleotide
tgctgtctctagtggttcaagtgcatcaca

SEQ ID NO: 158075 - DNA, 30 bp, Artificial Sequence
  Synthetic oligonucleotide
atgtgaagtctacccgattatgcgctcaca

SEQ ID NO: 158076 - DNA, 30 bp, Artificial Sequence
  Synthetic oligonucleotide
attaggactgaatgacagaagcccgtcaca

SEQ ID NO: 158077 - DNA, 30 bp, Artificial Sequence
  Synthetic oligonucleotide
caaaagtgcctaatgacggtggttgtcaca

SEQ ID NO: 158078 - DNA, 30 bp, Artificial Sequence
  Synthetic oligonucleotide
tgtctggtaaatcaaagagcgtcattcaca

SEQ ID NO: 158079 - DNA, 30 bp, Artificial Sequence
  Synthetic oligonucleotide
tgtgaacgggcttgcataagttcgaagaca

SEQ ID NO: 158080 - DNA, 30 bp, Artificial Sequence
  Synthetic oligonucleotide
aggactaaggcaccaggagattataagaca

SEQ ID NO: 158081 - DNA, 30 bp, Artificial Sequence
  Synthetic oligonucleotide
agcatcctaggatgcacacctcctaagaca

SEQ ID NO: 158082 - DNA, 30 bp, Artificial Sequence
  Synthetic oligonucleotide
gagtaataactaacctagtatgctaagaca

SEQ ID NO: 158083 - DNA, 30 bp, Artificial Sequence
  Synthetic oligonucleotide
gggtacatctgggagagaacacgacagaca

SEQ ID NO: 158084 - DNA, 30 bp, Artificial Sequence
  Synthetic oligonucleotide
acgtgacagaagcttaggctgggacagaca

SEQ ID NO: 158085 - DNA, 30 bp, Artificial Sequence
  Synthetic oligonucleotide
ctgcccatactgcgatcctcacaccagaca

SEQ ID NO: 158086 - DNA, 30 bp, Artificial Sequence
  Synthetic oligonucleotide
aacgttcctaggggaatagcagtccagaca

SEQ ID NO: 158087 - DNA, 30 bp, Artificial Sequence
  Synthetic oligonucleotide
atagcgcgtgtgatgagaaataatcagaca

SEQ ID NO: 158088 - DNA, 30 bp, Artificial Sequence
  Synthetic oligonucleotide
actatatccctcatttcgaaatgagagaca

SEQ ID NO: 158089 - DNA, 30 bp, Artificial Sequence
  Synthetic oligonucleotide
aaggtgtagctcacgtgccaaggatagaca

SEQ ID NO: 158090 - DNA, 30 bp, Artificial Sequence
  Synthetic oligonucleotide
gcaatgacaaatggaaggtcacggtagaca

SEQ ID NO: 158091 - DNA, 30 bp, Artificial Sequence
  Synthetic oligonucleotide
gcgtaaattcaggggcggcatcattagaca

SEQ ID NO: 158092 - DNA, 30 bp, Artificial Sequence
  Synthetic oligonucleotide
aggtcaacctgcttaatagtcaacacgaca

SEQ ID NO: 158093 - DNA, 30 bp, Artificial Sequence
  Synthetic oligonucleotide
tagtcttagaaaacactctagcgaccgaca

SEQ ID NO: 158094 - DNA, 30 bp, Artificial Sequence
  Synthetic oligonucleotide
gttggagccgatgcttctaaatgaccgaca

SEQ ID NO: 158095 - DNA, 30 bp, Artificial Sequence
  Synthetic oligonucleotide
agaggaatacccaaaggttagcacccgaca

SEQ ID NO: 158096 - DNA, 30 bp, Artificial Sequence
  Synthetic oligonucleotide
gtgcgtattcctgcgtaactagtgccgaca

SEQ ID NO: 158097 - DNA, 30 bp, Artificial Sequence
  Synthetic oligonucleotide
tgcgttatcccacctttccagttgccgaca

SEQ ID NO: 158098 - DNA, 30 bp, Artificial Sequence
  Synthetic oligonucleotide
agaaagttggtagaagagcgttaagcgaca

SEQ ID NO: 158099 - DNA, 30 bp, Artificial Sequence
  Synthetic oligonucleotide
cgtggaccacccattgaggtaacagcgaca

SEQ ID NO: 158100 - DNA, 30 bp, Artificial Sequence
  Synthetic oligonucleotide
aggtcatgtaagaatgaagttttagcgaca

SEQ ID NO: 158101 - DNA, 30 bp, Artificial Sequence
  Synthetic oligonucleotide
agtattcaaggatataggcgccccgcgaca

SEQ ID NO: 158102 - DNA, 30 bp, Artificial Sequence
  Synthetic oligonucleotide
tcctagtgatggcaggtgtgccgcgcgaca

SEQ ID NO: 158103 - DNA, 30 bp, Artificial Sequence
  Synthetic oligonucleotide
gggggtaccctgatagataaggcctcgaca

SEQ ID NO: 158104 - DNA, 30 bp, Artificial Sequence
  Synthetic oligonucleotide
cgtccacaggctgtttgtgaaagctcgaca

SEQ ID NO: 158105 - DNA, 30 bp, Artificial Sequence
  Synthetic oligonucleotide
ttaaactagccatctcctttcaattcgaca

SEQ ID NO: 158106 - DNA, 30 bp, Artificial Sequence
  Synthetic oligonucleotide
accgtttgggggtgggcgaccttttcgaca

SEQ ID NO: 158107 - DNA, 30 bp, Artificial Sequence
  Synthetic oligonucleotide
ttgccggatgcgccccacacgttaaggaca

SEQ ID NO: 158108 - DNA, 30 bp, Artificial Sequence
  Synthetic oligonucleotide
ccacaaatagtcaggtagacaaacaggaca

SEQ ID NO: 158109 - DNA, 30 bp, Artificial Sequence
  Synthetic oligonucleotide
gagctgaatagccatttgagccacaggaca

SEQ ID NO: 158110 - DNA, 30 bp, Artificial Sequence
  Synthetic oligonucleotide
cgccctctccggaaaggatacgccaggaca

SEQ ID NO: 158111 - DNA, 30 bp, Artificial Sequence
  Synthetic oligonucleotide
agtaaggggcgagacgattcgtataggaca

SEQ ID NO: 158112 - DNA, 30 bp, Artificial Sequence
  Synthetic oligonucleotide
ggtgggcgacgtatcacggttcctaggaca

SEQ ID NO: 158113 - DNA, 30 bp, Artificial Sequence
  Synthetic oligonucleotide
ttgacgcgactgtaaattagtcgtaggaca

SEQ ID NO: 158114 - DNA, 30 bp, Artificial Sequence
  Synthetic oligonucleotide
gggatgtatgttagatgccagtaccggaca

SEQ ID NO: 158115 - DNA, 30 bp, Artificial Sequence
  Synthetic oligonucleotide
atgagttggaaatatagatcgaggcggaca

SEQ ID NO: 158116 - DNA, 30 bp, Artificial Sequence
  Synthetic oligonucleotide
gggacggaataccgttgggtgtaagggaca

SEQ ID NO: 158117 - DNA, 30 bp, Artificial Sequence
  Synthetic oligonucleotide
ggctcttaacccacggtcatttcagggaca

SEQ ID NO: 158118 - DNA, 30 bp, Artificial Sequence
  Synthetic oligonucleotide
aaacgggtggctagtcgattatatgggaca

SEQ ID NO: 158119 - DNA, 30 bp, Artificial Sequence
  Synthetic oligonucleotide
cgaaatcggacactaaaaccgcgatggaca

SEQ ID NO: 158120 - DNA, 30 bp, Artificial Sequence
  Synthetic oligonucleotide
gggtagggaaagagaggaggtccaatgaca

SEQ ID NO: 158121 - DNA, 30 bp, Artificial Sequence
  Synthetic oligonucleotide
caaacagagcggagttctcgtaccatgaca

SEQ ID NO: 158122 - DNA, 30 bp, Artificial Sequence
  Synthetic oligonucleotide
gggaagaatctgggcaatcaatgcatgaca

SEQ ID NO: 158123 - DNA, 30 bp, Artificial Sequence
  Synthetic oligonucleotide
ggtaaaaacgctgtataaaagtttatgaca

SEQ ID NO: 158124 - DNA, 30 bp, Artificial Sequence
  Synthetic oligonucleotide
atcgaaaatctccgatcccagtaactgaca

SEQ ID NO: 158125 - DNA, 30 bp, Artificial Sequence
  Synthetic oligonucleotide
ccacgttggtaaaggttatgaggagtgaca

SEQ ID NO: 158126 - DNA, 30 bp, Artificial Sequence
  Synthetic oligonucleotide
tgatcacgtgatatccatctcacggtgaca

SEQ ID NO: 158127 - DNA, 30 bp, Artificial Sequence
  Synthetic oligonucleotide
tccgaggggctaccgagtgtggtggtgaca

SEQ ID NO: 158128 - DNA, 30 bp, Artificial Sequence
  Synthetic oligonucleotide
gttcggcaaaagtgggtttatgatgtgaca

SEQ ID NO: 158129 - DNA, 30 bp, Artificial Sequence
  Synthetic oligonucleotide
cccgttggtaggggggagtacacattgaca

SEQ ID NO: 158130 - DNA, 30 bp, Artificial Sequence
  Synthetic oligonucleotide
ctcatggaggtttgatgctaatggttgaca

SEQ ID NO: 158131 - DNA, 30 bp, Artificial Sequence
  Synthetic oligonucleotide
tctaacagtcaacccatgccagatttgaca

SEQ ID NO: 158132 - DNA, 30 bp, Artificial Sequence
  Synthetic oligonucleotide
taaagcatagggcgtgtggcaatgaataca

SEQ ID NO: 158133 - DNA, 30 bp, Artificial Sequence
  Synthetic oligonucleotide
cgcacgcgacaagcgtgattgaaacataca

SEQ ID NO: 158134 - DNA, 30 bp, Artificial Sequence
  Synthetic oligonucleotide
ctctggtccccgaaagggtagggtcataca

SEQ ID NO: 158135 - DNA, 30 bp, Artificial Sequence
  Synthetic oligonucleotide
ggaccgtcttagtatccgggaatagataca

SEQ ID NO: 158136 - DNA, 30 bp, Artificial Sequence
  Synthetic oligonucleotide
ataccggcccccggcagtagcgtggataca

SEQ ID NO: 158137 - DNA, 30 bp, Artificial Sequence
  Synthetic oligonucleotide
atgaactgcgatagcgatcaggaatataca

SEQ ID NO: 158138 - DNA, 30 bp, Artificial Sequence
  Synthetic oligonucleotide
ggtgcgcgtcactacaatctgttgtataca

SEQ ID NO: 158139 - DNA, 30 bp, Artificial Sequence
  Synthetic oligonucleotide
ctaaggtgctttacctatctctaaactaca

SEQ ID NO: 158140 - DNA, 30 bp, Artificial Sequence
  Synthetic oligonucleotide
tagccgcaaccgtgcaagctaggaactaca

SEQ ID NO: 158141 - DNA, 30 bp, Artificial Sequence
  Synthetic oligonucleotide
gtcatgacggggttgaccggcaaacctaca

SEQ ID NO: 158142 - DNA, 30 bp, Artificial Sequence
  Synthetic oligonucleotide
acgggaatatgaacagtcttatcacctaca

SEQ ID NO: 158143 - DNA, 30 bp, Artificial Sequence
  Synthetic oligonucleotide
gatcgtcggacattcgactaattccctaca

SEQ ID NO: 158144 - DNA, 30 bp, Artificial Sequence
  Synthetic oligonucleotide
tcggctcctagtgtaaagcttgagcctaca

SEQ ID NO: 158145 - DNA, 30 bp, Artificial Sequence
  Synthetic oligonucleotide
gctatggttgcaaagacaaaaacagctaca

SEQ ID NO: 158146 - DNA, 30 bp, Artificial Sequence
  Synthetic oligonucleotide
tggtaggaacatcaacgatttggagctaca

SEQ ID NO: 158147 - DNA, 30 bp, Artificial Sequence
  Synthetic oligonucleotide
caggacaggagggggttcagactagctaca

SEQ ID NO: 158148 - DNA, 30 bp, Artificial Sequence
  Synthetic oligonucleotide
cgcggtttatgtggtcaagctgacgctaca

SEQ ID NO: 158149 - DNA, 30 bp, Artificial Sequence
  Synthetic oligonucleotide
ccgccgtggccgctcagagacatatctaca

SEQ ID NO: 158150 - DNA, 30 bp, Artificial Sequence
  Synthetic oligonucleotide
atcgcaagcggcccgacaaaagactctaca

SEQ ID NO: 158151 - DNA, 30 bp, Artificial Sequence
  Synthetic oligonucleotide
ggtaattatcaaaatctcgacaaaagtaca

SEQ ID NO: 158152 - DNA, 30 bp, Artificial Sequence
  Synthetic oligonucleotide
aataaagcagtggcccagtgtgcaagtaca

SEQ ID NO: 158153 - DNA, 30 bp, Artificial Sequence
  Synthetic oligonucleotide
gcttatcggtggaaataactttgtagtaca

SEQ ID NO: 158154 - DNA, 30 bp, Artificial Sequence
  Synthetic oligonucleotide
gtcgggcattcggggtacaggctacgtaca

SEQ ID NO: 158155 - DNA, 30 bp, Artificial Sequence
  Synthetic oligonucleotide
cgtactgctgaagtggatgaacagcgtaca

SEQ ID NO: 158156 - DNA, 30 bp, Artificial Sequence
  Synthetic oligonucleotide
tgctgattgtgtctccgatgaaccggtaca

SEQ ID NO: 158157 - DNA, 30 bp, Artificial Sequence
  Synthetic oligonucleotide
tgcagagactaaaaaacaccccgtggtaca

SEQ ID NO: 158158 - DNA, 30 bp, Artificial Sequence
  Synthetic oligonucleotide
cgtgtcatttagtgtcatctagttggtaca

SEQ ID NO: 158159 - DNA, 30 bp, Artificial Sequence
  Synthetic oligonucleotide
cggacgaaggtgccctttatataatgtaca

SEQ ID NO: 158160 - DNA, 30 bp, Artificial Sequence
  Synthetic oligonucleotide
gagaaaagaataagattatttgcatgtaca

SEQ ID NO: 158161 - DNA, 30 bp, Artificial Sequence
  Synthetic oligonucleotide
actgagaatatatcgagaaaaaactgtaca

SEQ ID NO: 158162 - DNA, 30 bp, Artificial Sequence
  Synthetic oligonucleotide
tggtcgagacgcaatcagcgcgactgtaca

SEQ ID NO: 158163 - DNA, 30 bp, Artificial Sequence
  Synthetic oligonucleotide
tacgatggggacctcagtgaaccgtgtaca

SEQ ID NO: 158164 - DNA, 30 bp, Artificial Sequence
  Synthetic oligonucleotide
gtcctattgttcatgatggataggtgtaca

SEQ ID NO: 158165 - DNA, 30 bp, Artificial Sequence
  Synthetic oligonucleotide
agagtcagtaacttacgtcatctttgtaca

SEQ ID NO: 158166 - DNA, 30 bp, Artificial Sequence
  Synthetic oligonucleotide
acctgagaatcggtgaatcttcaaattaca

SEQ ID NO: 158167 - DNA, 30 bp, Artificial Sequence
  Synthetic oligonucleotide
aggaaaaattgaccgtcggaagtcattaca

SEQ ID NO: 158168 - DNA, 30 bp, Artificial Sequence
  Synthetic oligonucleotide
gcgtgatggcaaggaaggtttggtattaca

SEQ ID NO: 158169 - DNA, 30 bp, Artificial Sequence
  Synthetic oligonucleotide
aaaggccactaggcacttgtgcaagttaca

SEQ ID NO: 158170 - DNA, 30 bp, Artificial Sequence
  Synthetic oligonucleotide
ggccatcgttaccagcttcttggagttaca

SEQ ID NO: 158171 - DNA, 30 bp, Artificial Sequence
  Synthetic oligonucleotide
gctcccacacaactgagtagtcgcgttaca

SEQ ID NO: 158172 - DNA, 30 bp, Artificial Sequence
  Synthetic oligonucleotide
gggtgttaagatcagtcgtacgttgttaca

SEQ ID NO: 158173 - DNA, 30 bp, Artificial Sequence
  Synthetic oligonucleotide
ggtgagtataagtgatggttactctttaca

SEQ ID NO: 158174 - DNA, 30 bp, Artificial Sequence
  Synthetic oligonucleotide
agaggagattgagaaatcctgtaaaaacca

SEQ ID NO: 158175 - DNA, 30 bp, Artificial Sequence
  Synthetic oligonucleotide
ctggtgggtaagtataatagtagaaaacca

SEQ ID NO: 158176 - DNA, 30 bp, Artificial Sequence
  Synthetic oligonucleotide
cgcgtgtcttgcacagcccactgaaaacca

SEQ ID NO: 158177 - DNA, 30 bp, Artificial Sequence
  Synthetic oligonucleotide
cgcgcttgatatcagaaaggaggcaaacca

SEQ ID NO: 158178 - DNA, 30 bp, Artificial Sequence
  Synthetic oligonucleotide
atcagcgtatgatgtaattagccgaaacca

SEQ ID NO: 158179 - DNA, 30 bp, Artificial Sequence
  Synthetic oligonucleotide
cgtttcacagcgaagtgctgattgaaacca

SEQ ID NO: 158180 - DNA, 30 bp, Artificial Sequence
  Synthetic oligonucleotide
tacatggttcctaaaagaacgaaacaacca

SEQ ID NO: 158181 - DNA, 30 bp, Artificial Sequence
  Synthetic oligonucleotide
ggcctgaggtagatgagacaaggccaacca

SEQ ID NO: 158182 - DNA, 30 bp, Artificial Sequence
  Synthetic oligonucleotide
catgtcagcaacaaatgtcaagtccaacca

SEQ ID NO: 158183 - DNA, 30 bp, Artificial Sequence
  Synthetic oligonucleotide
tcaatcccgtgagtctacggtctgcaacca

SEQ ID NO: 158184 - DNA, 30 bp, Artificial Sequence
  Synthetic oligonucleotide
acgcgcttttctgcgaaatccgtgcaacca

SEQ ID NO: 158185 - DNA, 30 bp, Artificial Sequence
  Synthetic oligonucleotide
tcatcggagttgactttatgtgatcaacca

SEQ ID NO: 158186 - DNA, 30 bp, Artificial Sequence
  Synthetic oligonucleotide
gtatcaaacgacctagctgactaggaacca

SEQ ID NO: 158187 - DNA, 30 bp, Artificial Sequence
  Synthetic oligonucleotide
acagagcgtgctctggtccgacgggaacca

SEQ ID NO: 158188 - DNA, 30 bp, Artificial Sequence
  Synthetic oligonucleotide
ttgtattcacaatagaactacatggaacca

SEQ ID NO: 158189 - DNA, 30 bp, Artificial Sequence
  Synthetic oligonucleotide
cgtagcagctggggcctattagatgaacca

SEQ ID NO: 158190 - DNA, 30 bp, Artificial Sequence
  Synthetic oligonucleotide
tcgtcacaagcatgtgggctacgtgaacca

SEQ ID NO: 158191 - DNA, 30 bp, Artificial Sequence
  Synthetic oligonucleotide
gaatactagtgtgtctgttgtgggtaacca

SEQ ID NO: 158192 - DNA, 30 bp, Artificial Sequence
  Synthetic oligonucleotide
ggtagtgcagtctgtagtagggattaacca

SEQ ID NO: 158193 - DNA, 30 bp, Artificial Sequence
  Synthetic oligonucleotide
agggaagctcgtctttttatcgcaacacca

SEQ ID NO: 158194 - DNA, 30 bp, Artificial Sequence
  Synthetic oligonucleotide
tctatgaaaccgcctggggtcttaacacca

SEQ ID NO: 158195 - DNA, 30 bp, Artificial Sequence
  Synthetic oligonucleotide
tgcaaaaggattctaagggggcgcacacca

SEQ ID NO: 158196 - DNA, 30 bp, Artificial Sequence
  Synthetic oligonucleotide
acaagaagccccatacatgtagagacacca

SEQ ID NO: 158197 - DNA, 30 bp, Artificial Sequence
  Synthetic oligonucleotide
acgtgctataatcaatgtacggctacacca

SEQ ID NO: 158198 - DNA, 30 bp, Artificial Sequence
  Synthetic oligonucleotide
gtaggaactttcctgagcgacaaaccacca

SEQ ID NO: 158199 - DNA, 30 bp, Artificial Sequence
  Synthetic oligonucleotide
ggtttgcgagctgataaggtactaccacca

SEQ ID NO: 158200 - DNA, 30 bp, Artificial Sequence
  Synthetic oligonucleotide
gcgttccagagtctgaggcatgtaccacca

SEQ ID NO: 158201 - DNA, 30 bp, Artificial Sequence
  Synthetic oligonucleotide
gcactttaggcagggagatttgtcccacca

SEQ ID NO: 158202 - DNA, 30 bp, Artificial Sequence
  Synthetic oligonucleotide
gccagggcgttccagaatactcagccacca

SEQ ID NO: 158203 - DNA, 30 bp, Artificial Sequence
  Synthetic oligonucleotide
taagcattttgccagtagtagccgccacca

SEQ ID NO: 158204 - DNA, 30 bp, Artificial Sequence
  Synthetic oligonucleotide
agaagctctaccaccgatgcatttccacca

SEQ ID NO: 158205 - DNA, 30 bp, Artificial Sequence
  Synthetic oligonucleotide
tccctagatgctacacgagcgcacgcacca

SEQ ID NO: 158206 - DNA, 30 bp, Artificial Sequence
  Synthetic oligonucleotide
cggctacaactcagtggcaaatatgcacca

SEQ ID NO: 158207 - DNA, 30 bp, Artificial Sequence
  Synthetic oligonucleotide
agatagtcgcaccttcggcccgcgcgacca

SEQ ID NO: 158208 - DNA, 30 bp, Artificial Sequence
  Synthetic oligonucleotide
ggtgttcagacagtcaagaatcgtcgacca

SEQ ID NO: 158209 - DNA, 30 bp, Artificial Sequence
  Synthetic oligonucleotide
taacttaagatcagaaccctgtcaggacca

SEQ ID NO: 158210 - DNA, 30 bp, Artificial Sequence
  Synthetic oligonucleotide
cggagcgtttgccaggggccggggggacca

SEQ ID NO: 158211 - DNA, 30 bp, Artificial Sequence
  Synthetic oligonucleotide
tcgagtagttcagagtcaccacgtggacca

SEQ ID NO: 158212 - DNA, 30 bp, Artificial Sequence
  Synthetic oligonucleotide
ttctacggttgtggtggtagatcatgacca

SEQ ID NO: 158213 - DNA, 30 bp, Artificial Sequence
  Synthetic oligonucleotide
gaagatgcgtcgcaatttacacggtgacca

SEQ ID NO: 158214 - DNA, 30 bp, Artificial Sequence
  Synthetic oligonucleotide
gtgcggggaatttgacctatgagaatacca

SEQ ID NO: 158215 - DNA, 30 bp, Artificial Sequence
  Synthetic oligonucleotide
gcgtccccatataggctgggtaccatacca

SEQ ID NO: 158216 - DNA, 30 bp, Artificial Sequence
  Synthetic oligonucleotide
cttaacactaagcctttggaacatatacca

SEQ ID NO: 158217 - DNA, 30 bp, Artificial Sequence
  Synthetic oligonucleotide
acaccgtgaaaccaagcaggctatatacca

SEQ ID NO: 158218 - DNA, 30 bp, Artificial Sequence
  Synthetic oligonucleotide
tgagcacgttatgcttcagtctaactacca

SEQ ID NO: 158219 - DNA, 30 bp, Artificial Sequence
  Synthetic oligonucleotide
tatgtatggattcgaccactacatctacca

SEQ ID NO: 158220 - DNA, 30 bp, Artificial Sequence
  Synthetic oligonucleotide
actggtgcatgaataaaataggccgtacca

SEQ ID NO: 158221 - DNA, 30 bp, Artificial Sequence
  Synthetic oligonucleotide
attctcctgctcgagatataaagggtacca

SEQ ID NO: 158222 - DNA, 30 bp, Artificial Sequence
  Synthetic oligonucleotide
tcgagcgctaagttggtggggtgtgtacca

SEQ ID NO: 158223 - DNA, 30 bp, Artificial Sequence
  Synthetic oligonucleotide
tgaagaatattagtaccactagttttacca

SEQ ID NO: 158224 - DNA, 30 bp, Artificial Sequence
  Synthetic oligonucleotide
attggaagtgcgaagagagtacaaaaccca

SEQ ID NO: 158225 - DNA, 30 bp, Artificial Sequence
  Synthetic oligonucleotide
aggcatcctaggaagaaccctgacaaccca

SEQ ID NO: 158226 - DNA, 30 bp, Artificial Sequence
  Synthetic oligonucleotide
taggattgtggcacctcacgcgagaaccca

SEQ ID NO: 158227 - DNA, 30 bp, Artificial Sequence
  Synthetic oligonucleotide
gtaggatactggattggattttcgaaccca

SEQ ID NO: 158228 - DNA, 30 bp, Artificial Sequence
  Synthetic oligonucleotide
aaagataatcaccgggacattctgaaccca

SEQ ID NO: 158229 - DNA, 30 bp, Artificial Sequence
  Synthetic oligonucleotide
ctgattaataagttcgtcgacaataaccca

SEQ ID NO: 158230 - DNA, 30 bp, Artificial Sequence
  Synthetic oligonucleotide
gctaaggcatgggacacgggaagtaaccca

SEQ ID NO: 158231 - DNA, 30 bp, Artificial Sequence
  Synthetic oligonucleotide
ggtcctgggtatgccaccacttgagaccca

SEQ ID NO: 158232 - DNA, 30 bp, Artificial Sequence
  Synthetic oligonucleotide
acggacctaaacatactttgatatgaccca

SEQ ID NO: 158233 - DNA, 30 bp, Artificial Sequence
  Synthetic oligonucleotide
tgagaccaagtcgggttcgtgtttgaccca

SEQ ID NO: 158234 - DNA, 30 bp, Artificial Sequence
  Synthetic oligonucleotide
gtacataacctcctgtcatgggcataccca

SEQ ID NO: 158235 - DNA, 30 bp, Artificial Sequence
  Synthetic oligonucleotide
catgcttatttagccaactcatcataccca

SEQ ID NO: 158236 - DNA, 30 bp, Artificial Sequence
  Synthetic oligonucleotide
gcttacgtctcgtaatcggaaagataccca

SEQ ID NO: 158237 - DNA, 30 bp, Artificial Sequence
  Synthetic oligonucleotide
ctcggtgcctaatagggcttaaactaccca

SEQ ID NO: 158238 - DNA, 30 bp, Artificial Sequence
  Synthetic oligonucleotide
ctaggaccaggggtgtgcgactagtaccca

SEQ ID NO: 158239 - DNA, 30 bp, Artificial Sequence
  Synthetic oligonucleotide
acatggcgctggctccgaggtgtttaccca

SEQ ID NO: 158240 - DNA, 30 bp, Artificial Sequence
  Synthetic oligonucleotide
agaccccactctcggagattgaaaacccca

SEQ ID NO: 158241 - DNA, 30 bp, Artificial Sequence
  Synthetic oligonucleotide
gccgcgccacgagaagtctaattgacccca

SEQ ID NO: 158242 - DNA, 30 bp, Artificial Sequence
  Synthetic oligonucleotide
ttgatctcgcccgacgaacagttgacccca

SEQ ID NO: 158243 - DNA, 30 bp, Artificial Sequence
  Synthetic oligonucleotide
ggctcggcgtcttaagtgaggaatacccca

SEQ ID NO: 158244 - DNA, 30 bp, Artificial Sequence
  Synthetic oligonucleotide
tatagggacaaaacggaccacaacgcccca

SEQ ID NO: 158245 - DNA, 30 bp, Artificial Sequence
  Synthetic oligonucleotide
cggccgcggagtcgaagcggttgcgcccca

SEQ ID NO: 158246 - DNA, 30 bp, Artificial Sequence
  Synthetic oligonucleotide
cgactcgcccgtggcgagacttaatcccca

SEQ ID NO: 158247 - DNA, 30 bp, Artificial Sequence
  Synthetic oligonucleotide
tgtgaaatgtgcttaagggatagatcccca

SEQ ID NO: 158248 - DNA, 30 bp, Artificial Sequence
  Synthetic oligonucleotide
ctcagggacggcaggggctcttactcccca

SEQ ID NO: 158249 - DNA, 30 bp, Artificial Sequence
  Synthetic oligonucleotide
tcatgtaagtaacgctgtctgaaaagccca

SEQ ID NO: 158250 - DNA, 30 bp, Artificial Sequence
  Synthetic oligonucleotide
gcgtccgtccaactccgaggacccagccca

SEQ ID NO: 158251 - DNA, 30 bp, Artificial Sequence
  Synthetic oligonucleotide
cgggtcaagattaaattctttacgagccca

SEQ ID NO: 158252 - DNA, 30 bp, Artificial Sequence
  Synthetic oligonucleotide
agagacgaaccacgttgacacgggagccca

SEQ ID NO: 158253 - DNA, 30 bp, Artificial Sequence
  Synthetic oligonucleotide
gctaagcgtgctgattccgagattagccca

SEQ ID NO: 158254 - DNA, 30 bp, Artificial Sequence
  Synthetic oligonucleotide
cggcatgtgaaccaatgctaaaaacgccca

SEQ ID NO: 158255 - DNA, 30 bp, Artificial Sequence
  Synthetic oligonucleotide
tggtaactctgcaagattacgtgccgccca

SEQ ID NO: 158256 - DNA, 30 bp, Artificial Sequence
  Synthetic oligonucleotide
gctacgtgtactcgcattttcgtccgccca

SEQ ID NO: 158257 - DNA, 30 bp, Artificial Sequence
  Synthetic oligonucleotide
gtactgatggaagtctagtctgcgcgccca

SEQ ID NO: 158258 - DNA, 30 bp, Artificial Sequence
  Synthetic oligonucleotide
ggaacgcgtaaagttgatgggatgcgccca

SEQ ID NO: 158259 - DNA, 30 bp, Artificial Sequence
  Synthetic oligonucleotide
actggtatagtggacgctcgtcacggccca

SEQ ID NO: 158260 - DNA, 30 bp, Artificial Sequence
  Synthetic oligonucleotide
gccataaacaaagcggcagcttagggccca

SEQ ID NO: 158261 - DNA, 30 bp, Artificial Sequence
  Synthetic oligonucleotide
catcatcagttgctttctttcatctgccca

SEQ ID NO: 158262 - DNA, 30 bp, Artificial Sequence
  Synthetic oligonucleotide
cgatagatatcgtcgactcgcaagtgccca

SEQ ID NO: 158263 - DNA, 30 bp, Artificial Sequence
  Synthetic oligonucleotide
gatggtagaccgtgcagtttatagtgccca

SEQ ID NO: 158264 - DNA, 30 bp, Artificial Sequence
  Synthetic oligonucleotide
cctataagaagcgaagaagcaccgtgccca

SEQ ID NO: 158265 - DNA, 30 bp, Artificial Sequence
  Synthetic oligonucleotide
caggatgacaggccaatcgacccgtgccca

SEQ ID NO: 158266 - DNA, 30 bp, Artificial Sequence
  Synthetic oligonucleotide
gaaaggccaatgaggaaattggtgtgccca

SEQ ID NO: 158267 - DNA, 30 bp, Artificial Sequence
  Synthetic oligonucleotide
ccgacgcaaagtgatccgactaaaatccca

SEQ ID NO: 158268 - DNA, 30 bp, Artificial Sequence
  Synthetic oligonucleotide
gtttgggacaacaattatgattcaatccca

SEQ ID NO: 158269 - DNA, 30 bp, Artificial Sequence
  Synthetic oligonucleotide
acgtcgctagggagtgaaacggagatccca

SEQ ID NO: 158270 - DNA, 30 bp, Artificial Sequence
  Synthetic oligonucleotide
caataggcacaatatcaattcgcgatccca

SEQ ID NO: 158271 - DNA, 30 bp, Artificial Sequence
  Synthetic oligonucleotide
agtgtggaccaagcggcgcctctcctccca

SEQ ID NO: 158272 - DNA, 30 bp, Artificial Sequence
  Synthetic oligonucleotide
aaaaaccgatatcacccatacaaagtccca

SEQ ID NO: 158273 - DNA, 30 bp, Artificial Sequence
  Synthetic oligonucleotide
gcctttcaatacaaataatctgaagtccca

SEQ ID NO: 158274 - DNA, 30 bp, Artificial Sequence
  Synthetic oligonucleotide
tgagtcctcccgcggaagtacaccttccca

SEQ ID NO: 158275 - DNA, 30 bp, Artificial Sequence
  Synthetic oligonucleotide
acggtgggttaaaggcgggcaacgttccca

SEQ ID NO: 158276 - DNA, 30 bp, Artificial Sequence
  Synthetic oligonucleotide
aaaccaagactcgatacttatagaaagcca

SEQ ID NO: 158277 - DNA, 30 bp, Artificial Sequence
  Synthetic oligonucleotide
cagatagcagcgtttgtgcgtgccaagcca

SEQ ID NO: 158278 - DNA, 30 bp, Artificial Sequence
  Synthetic oligonucleotide
ggcaatacgtcttagcgattaatcaagcca

SEQ ID NO: 158279 - DNA, 30 bp, Artificial Sequence
  Synthetic oligonucleotide
aatatcacccactacgattaggggaagcca

SEQ ID NO: 158280 - DNA, 30 bp, Artificial Sequence
  Synthetic oligonucleotide
tcatatagtcataagaaggcgtataagcca

SEQ ID NO: 158281 - DNA, 30 bp, Artificial Sequence
  Synthetic oligonucleotide
ctgtatagtagtactccatcgtataagcca

SEQ ID NO: 158282 - DNA, 30 bp, Artificial Sequence
  Synthetic oligonucleotide
atcgactagagtgccgtagccactaagcca

SEQ ID NO: 158283 - DNA, 30 bp, Artificial Sequence
  Synthetic oligonucleotide
ggtattcagttagggcgcggtgttaagcca

SEQ ID NO: 158284 - DNA, 30 bp, Artificial Sequence
  Synthetic oligonucleotide
acgaatatattaacaagggacccacagcca

SEQ ID NO: 158285 - DNA, 30 bp, Artificial Sequence
  Synthetic oligonucleotide
tagtcgtcggggttgtacgactaccagcca

SEQ ID NO: 158286 - DNA, 30 bp, Artificial Sequence
  Synthetic oligonucleotide
aaccgtagcacgagtcgccgaacccagcca

SEQ ID NO: 158287 - DNA, 31 bp, Artificial Sequence
  Synthetic oligonucleotide
atcgcagcacaaggaaaaatcttagcagcca

SEQ ID NO: 158288 - DNA, 30 bp, Artificial Sequence
  Synthetic oligonucleotide
acaataccgtatattgccttttaggagcca

SEQ ID NO: 158289 - DNA, 30 bp, Artificial Sequence
  Synthetic oligonucleotide
gcgcatacaccaaaacatcacggggagcca

SEQ ID NO: 158290 - DNA, 30 bp, Artificial Sequence
  Synthetic oligonucleotide
cacccataaccggtaaatgcaatatagcca

SEQ ID NO: 158291 - DNA, 30 bp, Artificial Sequence
  Synthetic oligonucleotide
accacggtatcagatggagtaaagtagcca

SEQ ID NO: 158292 - DNA, 30 bp, Artificial Sequence
  Synthetic oligonucleotide
ggtggtgccagattaagtttaataacgcca

SEQ ID NO: 158293 - DNA, 30 bp, Artificial Sequence
  Synthetic oligonucleotide
acctagtcagatctgtcaaaagggccgcca

SEQ ID NO: 158294 - DNA, 30 bp, Artificial Sequence
  Synthetic oligonucleotide
gtaagtgagcatcaaagccatggtccgcca

SEQ ID NO: 158295 - DNA, 30 bp, Artificial Sequence
  Synthetic oligonucleotide
aggatcataattatccctattggagcgcca

SEQ ID NO: 158296 - DNA, 30 bp, Artificial Sequence
  Synthetic oligonucleotide
tcacacctcagcgatgagtaaacggcgcca

SEQ ID NO: 158297 - DNA, 30 bp, Artificial Sequence
  Synthetic oligonucleotide
cacagggggatgttgggcggaattgcgcca

SEQ ID NO: 158298 - DNA, 30 bp, Artificial Sequence
  Synthetic oligonucleotide
aggttccaatcagggcaattaaggtcgcca

SEQ ID NO: 158299 - DNA, 30 bp, Artificial Sequence
  Synthetic oligonucleotide
aaaatacataacagaaaggctcggtcgcca

SEQ ID NO: 158300 - DNA, 30 bp, Artificial Sequence
  Synthetic oligonucleotide
gctgcaatcggggaccttcggcaaaggcca

SEQ ID NO: 158301 - DNA, 30 bp, Artificial Sequence
  Synthetic oligonucleotide
gatctcgtgtcatgaacgttcgaaaggcca

SEQ ID NO: 158302 - DNA, 30 bp, Artificial Sequence
  Synthetic oligonucleotide
gctggggagcaatactagcgactaaggcca

SEQ ID NO: 158303 - DNA, 30 bp, Artificial Sequence
  Synthetic oligonucleotide
taggagtcgagattcacgacgaacaggcca

SEQ ID NO: 158304 - DNA, 30 bp, Artificial Sequence
  Synthetic oligonucleotide
gacacatcagccacccctaagcagaggcca

SEQ ID NO: 158305 - DNA, 30 bp, Artificial Sequence
  Synthetic oligonucleotide
gaaaaaaattcccgatctacctcgaggcca

SEQ ID NO: 158306 - DNA, 30 bp, Artificial Sequence
  Synthetic oligonucleotide
cacaaatttatcagatactcatctaggcca

SEQ ID NO: 158307 - DNA, 30 bp, Artificial Sequence
  Synthetic oligonucleotide
gtatagtcggcgtcacagacgggtaggcca

SEQ ID NO: 158308 - DNA, 30 bp, Artificial Sequence
  Synthetic oligonucleotide
caggggaaacgttagcttaatttccggcca

SEQ ID NO: 158309 - DNA, 30 bp, Artificial Sequence
  Synthetic oligonucleotide
aacaaccattcgttctcgtgaaatcggcca

SEQ ID NO: 158310 - DNA, 30 bp, Artificial Sequence
  Synthetic oligonucleotide
cacacagggtgtttgttagtaggtcggcca

SEQ ID NO: 158311 - DNA, 30 bp, Artificial Sequence
  Synthetic oligonucleotide
cgatcttgaaatctcccgcgcattcggcca

SEQ ID NO: 158312 - DNA, 30 bp, Artificial Sequence
  Synthetic oligonucleotide
acctctggtcaatggaatactagagggcca

SEQ ID NO: 158313 - DNA, 30 bp, Artificial Sequence
  Synthetic oligonucleotide
ttaatccaagttgactacttagcatggcca

SEQ ID NO: 158314 - DNA, 30 bp, Artificial Sequence
  Synthetic oligonucleotide
tggttacttacgggggtgaagctgtggcca

SEQ ID NO: 158315 - DNA, 30 bp, Artificial Sequence
  Synthetic oligonucleotide
tgatgggatcagatccccgtgttttggcca

SEQ ID NO: 158316 - DNA, 30 bp, Artificial Sequence
  Synthetic oligonucleotide
ccgcgatgagaacatgctgaaaaaatgcca

SEQ ID NO: 158317 - DNA, 30 bp, Artificial Sequence
  Synthetic oligonucleotide
gatgctggaggaagtcaggttgcaatgcca

SEQ ID NO: 158318 - DNA, 30 bp, Artificial Sequence
  Synthetic oligonucleotide
tgaaactggtctccgtgttattaagtgcca

SEQ ID NO: 158319 - DNA, 30 bp, Artificial Sequence
  Synthetic oligonucleotide
gggcctcgagccgtggcctagcgcgtgcca

SEQ ID NO: 158320 - DNA, 30 bp, Artificial Sequence
  Synthetic oligonucleotide
ggaataaaagagtctaatgaaccgttgcca

SEQ ID NO: 158321 - DNA, 30 bp, Artificial Sequence
  Synthetic oligonucleotide
ccgcacgaaccactccttctatggttgcca

SEQ ID NO: 158322 - DNA, 29 bp, Artificial Sequence
  Synthetic oligonucleotide
taatcgtgtggaagggcgggtggttgcca

SEQ ID NO: 158323 - DNA, 30 bp, Artificial Sequence
  Synthetic oligonucleotide
tgggacaatatgcctcgcttcgagaatcca

SEQ ID NO: 158324 - DNA, 30 bp, Artificial Sequence
  Synthetic oligonucleotide
ccacgcaaaagttagcatactctgcatcca

SEQ ID NO: 158325 - DNA, 30 bp, Artificial Sequence
  Synthetic oligonucleotide
gccgcaaccaaggtgcaaggctctcatcca

SEQ ID NO: 158326 - DNA, 30 bp, Artificial Sequence
  Synthetic oligonucleotide
ggctctgagaaggcatagagaaaagatcca

SEQ ID NO: 158327 - DNA, 30 bp, Artificial Sequence
  Synthetic oligonucleotide
aatgcaaatggagcgggacaacgagatcca

SEQ ID NO: 158328 - DNA, 30 bp, Artificial Sequence
  Synthetic oligonucleotide
agagtgaagttggctatggtacaggatcca

SEQ ID NO: 158329 - DNA, 30 bp, Artificial Sequence
  Synthetic oligonucleotide
taaaatcgtcaagggcgcaaagtggatcca

SEQ ID NO: 158330 - DNA, 30 bp, Artificial Sequence
  Synthetic oligonucleotide
ttatacgcatcgtacaatttcaaaactcca

SEQ ID NO: 158331 - DNA, 30 bp, Artificial Sequence
  Synthetic oligonucleotide
tactaaagagagtaagtataatagactcca

SEQ ID NO: 158332 - DNA, 30 bp, Artificial Sequence
  Synthetic oligonucleotide
atcaacgccacggcccgggacgcccctcca

SEQ ID NO: 158333 - DNA, 30 bp, Artificial Sequence
  Synthetic oligonucleotide
gtgacctgggacgcccgacagtgccctcca

SEQ ID NO: 158334 - DNA, 30 bp, Artificial Sequence
  Synthetic oligonucleotide
aaggtcaaaaagacacgcttacagcctcca

SEQ ID NO: 158335 - DNA, 30 bp, Artificial Sequence
  Synthetic oligonucleotide
atcgaaggagtctttgcaccacggcctcca

SEQ ID NO: 158336 - DNA, 30 bp, Artificial Sequence
  Synthetic oligonucleotide
ttctgggagattcctccgcccactcctcca

SEQ ID NO: 158337 - DNA, 30 bp, Artificial Sequence
  Synthetic oligonucleotide
ctgggggctcgctggtataaatgtcctcca

SEQ ID NO: 158338 - DNA, 30 bp, Artificial Sequence
  Synthetic oligonucleotide
atggtgcatgtctttgtacctaacgctcca

SEQ ID NO: 158339 - DNA, 30 bp, Artificial Sequence
  Synthetic oligonucleotide
cggcagacggactggtcggaaaaggctcca

SEQ ID NO: 158340 - DNA, 30 bp, Artificial Sequence
  Synthetic oligonucleotide
tgtaaaatttaggtctgatcgcgatctcca

SEQ ID NO: 158341 - DNA, 30 bp, Artificial Sequence
  Synthetic oligonucleotide
atgacctatcgctacttcacggtatctcca

SEQ ID NO: 158342 - DNA, 30 bp, Artificial Sequence
  Synthetic oligonucleotide
ataaccggcttgcggttagaattatctcca

SEQ ID NO: 158343 - DNA, 30 bp, Artificial Sequence
  Synthetic oligonucleotide
gtgaagccgacagaccggggtttatctcca

SEQ ID NO: 158344 - DNA, 30 bp, Artificial Sequence
  Synthetic oligonucleotide
tggagcgattcgatgataccaagaagtcca

SEQ ID NO: 158345 - DNA, 30 bp, Artificial Sequence
  Synthetic oligonucleotide
ataaaccagctggagattctccatagtcca

SEQ ID NO: 158346 - DNA, 30 bp, Artificial Sequence
  Synthetic oligonucleotide
agctatggcgggtaacgacccgaacgtcca

SEQ ID NO: 158347 - DNA, 30 bp, Artificial Sequence
  Synthetic oligonucleotide
gcactcctgcaacgtgcagagtaacgtcca

SEQ ID NO: 158348 - DNA, 30 bp, Artificial Sequence
  Synthetic oligonucleotide
cgagggtgccacctcaacatagcccgtcca

SEQ ID NO: 158349 - DNA, 30 bp, Artificial Sequence
  Synthetic oligonucleotide
gcctcgggtggtgttattgtagcgcgtcca

SEQ ID NO: 158350 - DNA, 30 bp, Artificial Sequence
  Synthetic oligonucleotide
cctcacggtcagggttgggggggtcgtcca

SEQ ID NO: 158351 - DNA, 30 bp, Artificial Sequence
  Synthetic oligonucleotide
aggaggtgagcttacgggggatcgggtcca

SEQ ID NO: 158352 - DNA, 30 bp, Artificial Sequence
  Synthetic oligonucleotide
gtaactgacggagtgtgaataccatgtcca

SEQ ID NO: 158353 - DNA, 30 bp, Artificial Sequence
  Synthetic oligonucleotide
agcaacaaatatttttacggcgattgtcca

SEQ ID NO: 158354 - DNA, 30 bp, Artificial Sequence
  Synthetic oligonucleotide
tagggcgcgggcgtcctggatgattgtcca

SEQ ID NO: 158355 - DNA, 30 bp, Artificial Sequence
  Synthetic oligonucleotide
aggacacctgcaaagagacatacttgtcca

SEQ ID NO: 158356 - DNA, 30 bp, Artificial Sequence
  Synthetic oligonucleotide
agttcgaagtgagtaattagcgtccttcca

SEQ ID NO: 158357 - DNA, 30 bp, Artificial Sequence
  Synthetic oligonucleotide
cgcttcagtgggggaagaatgtaagttcca

SEQ ID NO: 158358 - DNA, 30 bp, Artificial Sequence
  Synthetic oligonucleotide
gtgaagactatatagcccataggagttcca

SEQ ID NO: 158359 - DNA, 30 bp, Artificial Sequence
  Synthetic oligonucleotide
gtgacaatgaccggtccttgttaggttcca

SEQ ID NO: 158360 - DNA, 30 bp, Artificial Sequence
  Synthetic oligonucleotide
ccggggcgtcctagcatcaatcgggttcca

SEQ ID NO: 158361 - DNA, 30 bp, Artificial Sequence
  Synthetic oligonucleotide
gcatgatgcttaccgcgttcaactgttcca

SEQ ID NO: 158362 - DNA, 30 bp, Artificial Sequence
  Synthetic oligonucleotide
ctataatctcgccagcactacagtgttcca

SEQ ID NO: 158363 - DNA, 30 bp, Artificial Sequence
  Synthetic oligonucleotide
tacagtatgtctggtcgagtaggtgttcca

SEQ ID NO: 158364 - DNA, 30 bp, Artificial Sequence
  Synthetic oligonucleotide
gcataaccgtaagtaggggaaggatttcca

SEQ ID NO: 158365 - DNA, 30 bp, Artificial Sequence
  Synthetic oligonucleotide
gtgcgggatataatttctcaccagaaagca

SEQ ID NO: 158366 - DNA, 30 bp, Artificial Sequence
  Synthetic oligonucleotide
cgaaggtccctgtgcgggcggatgaaagca

SEQ ID NO: 158367 - DNA, 30 bp, Artificial Sequence
  Synthetic oligonucleotide
cgagcatgggtaactgacactcgacaagca

SEQ ID NO: 158368 - DNA, 30 bp, Artificial Sequence
  Synthetic oligonucleotide
ccctgaagatcccagctagaatgacaagca

SEQ ID NO: 158369 - DNA, 30 bp, Artificial Sequence
  Synthetic oligonucleotide
atttgctaattgggagggaattgacaagca

SEQ ID NO: 158370 - DNA, 30 bp, Artificial Sequence
  Synthetic oligonucleotide
catgcattgccactgggtacacgccaagca

SEQ ID NO: 158371 - DNA, 30 bp, Artificial Sequence
  Synthetic oligonucleotide
atagactcctgggcataagcgttgcaagca

SEQ ID NO: 158372 - DNA, 30 bp, Artificial Sequence
  Synthetic oligonucleotide
agtttcggtttggaatgaaaggctcaagca

SEQ ID NO: 158373 - DNA, 30 bp, Artificial Sequence
  Synthetic oligonucleotide
tctgtttggtcacggacctcagtagaagca

SEQ ID NO: 158374 - DNA, 30 bp, Artificial Sequence
  Synthetic oligonucleotide
gcaaaaggaggggtgccatccttagaagca

SEQ ID NO: 158375 - DNA, 30 bp, Artificial Sequence
  Synthetic oligonucleotide
gcatgcgcaaagtagacaagtcgtgaagca

SEQ ID NO: 158376 - DNA, 30 bp, Artificial Sequence
  Synthetic oligonucleotide
tgtgtccttgtgagggtcagcgaataagca

SEQ ID NO: 158377 - DNA, 30 bp, Artificial Sequence
  Synthetic oligonucleotide
ggttgaaaagtatcatatgacacataagca

SEQ ID NO: 158378 - DNA, 30 bp, Artificial Sequence
  Synthetic oligonucleotide
ttgaatggggggatcacctcgtacacagca

SEQ ID NO: 158379 - DNA, 30 bp, Artificial Sequence
  Synthetic oligonucleotide
aggccaggggattcatcccaatggacagca

SEQ ID NO: 158380 - DNA, 30 bp, Artificial Sequence
  Synthetic oligonucleotide
atccctgcatccatgttcatcgttacagca

SEQ ID NO: 158381 - DNA, 30 bp, Artificial Sequence
  Synthetic oligonucleotide
tctatgggtatgaaaaaaccgacaccagca

SEQ ID NO: 158382 - DNA, 30 bp, Artificial Sequence
  Synthetic oligonucleotide
aggatttaaacctgattcagaaccccagca

SEQ ID NO: 158383 - DNA, 30 bp, Artificial Sequence
  Synthetic oligonucleotide
acttggttgtgaagatagcaagcgccagca

SEQ ID NO: 158384 - DNA, 30 bp, Artificial Sequence
  Synthetic oligonucleotide
aactacgagacatggatgcgggcgccagca

SEQ ID NO: 158385 - DNA, 30 bp, Artificial Sequence
  Synthetic oligonucleotide
agcagtgggctttgtgctccttgtccagca

SEQ ID NO: 158386 - DNA, 30 bp, Artificial Sequence
  Synthetic oligonucleotide
aggtgaacccgggctatattaattccagca

SEQ ID NO: 158387 - DNA, 30 bp, Artificial Sequence
  Synthetic oligonucleotide
tagtatttacggaagaacggggttccagca

SEQ ID NO: 158388 - DNA, 30 bp, Artificial Sequence
  Synthetic oligonucleotide
agcgcgtgtacgttcttcatacgagcagca

SEQ ID NO: 158389 - DNA, 30 bp, Artificial Sequence
  Synthetic oligonucleotide
caaaggaggaattagcacggcagcgcagca

SEQ ID NO: 158390 - DNA, 30 bp, Artificial Sequence
  Synthetic oligonucleotide
atggacagtcttatggtcgcctaggcagca

SEQ ID NO: 158391 - DNA, 30 bp, Artificial Sequence
  Synthetic oligonucleotide
ggaactaaaaatggaagcggaccggcagca

SEQ ID NO: 158392 - DNA, 30 bp, Artificial Sequence
  Synthetic oligonucleotide
gttggggtagccgtatgcgtaatggcagca

SEQ ID NO: 158393 - DNA, 30 bp, Artificial Sequence
  Synthetic oligonucleotide
tacggagtagggtgaggagccgcatcagca

SEQ ID NO: 158394 - DNA, 30 bp, Artificial Sequence
  Synthetic oligonucleotide
cataacgctttaaggccgtccagatcagca

SEQ ID NO: 158395 - DNA, 30 bp, Artificial Sequence
  Synthetic oligonucleotide
gcttgctgtcgaggatcgagcatctcagca

SEQ ID NO: 158396 - DNA, 30 bp, Artificial Sequence
  Synthetic oligonucleotide
gcggttcctgggaggggctcctattcagca

SEQ ID NO: 158397 - DNA, 30 bp, Artificial Sequence
  Synthetic oligonucleotide
tttgtagctccctgcaacgcgccttcagca

SEQ ID NO: 158398 - DNA, 30 bp, Artificial Sequence
  Synthetic oligonucleotide
agaaacataagctggttatttgcaagagca

SEQ ID NO: 158399 - DNA, 30 bp, Artificial Sequence
  Synthetic oligonucleotide
gctcgtgattttaggcagacacgaagagca

SEQ ID NO: 158400 - DNA, 30 bp, Artificial Sequence
  Synthetic oligonucleotide
tttcgggatatagaaactgtatgacgagca

SEQ ID NO: 158401 - DNA, 30 bp, Artificial Sequence
  Synthetic oligonucleotide
actcggggagttccggtactaaagggagca

SEQ ID NO: 158402 - DNA, 30 bp, Artificial Sequence
  Synthetic oligonucleotide
cctgcgggacaacggtagagacttggagca

SEQ ID NO: 158403 - DNA, 30 bp, Artificial Sequence
  Synthetic oligonucleotide
aggatgcctagaccaaatttgccgtgagca

SEQ ID NO: 158404 - DNA, 30 bp, Artificial Sequence
  Synthetic oligonucleotide
cggacgtaaatacaattagttccgtgagca

SEQ ID NO: 158405 - DNA, 30 bp, Artificial Sequence
  Synthetic oligonucleotide
cactacgggtctccagagtgcctttgagca

SEQ ID NO: 158406 - DNA, 30 bp, Artificial Sequence
  Synthetic oligonucleotide
ttactttgagtttaccagtaaaaaatagca

SEQ ID NO: 158407 - DNA, 30 bp, Artificial Sequence
  Synthetic oligonucleotide
ctgttgtccctataatcagccggcatagca

SEQ ID NO: 158408 - DNA, 30 bp, Artificial Sequence
  Synthetic oligonucleotide
cgggctatgggtatcgttgagatgatagca

SEQ ID NO: 158409 - DNA, 30 bp, Artificial Sequence
  Synthetic oligonucleotide
gaagaacttcaggtatccgtagcgctagca

SEQ ID NO: 158410 - DNA, 30 bp, Artificial Sequence
  Synthetic oligonucleotide
gcagaggggggattgtttctcgaattagca

SEQ ID NO: 158411 - DNA, 30 bp, Artificial Sequence
  Synthetic oligonucleotide
gaagttggcacgggggtatgcagattagca

SEQ ID NO: 158412 - DNA, 30 bp, Artificial Sequence
  Synthetic oligonucleotide
ggggcaggacgtaatttggtgcacttagca

SEQ ID NO: 158413 - DNA, 30 bp, Artificial Sequence
  Synthetic oligonucleotide
caagctagcgacatgactggcacgttagca

SEQ ID NO: 158414 - DNA, 30 bp, Artificial Sequence
  Synthetic oligonucleotide
gggtttggtttaaaactgacagatttagca

SEQ ID NO: 158415 - DNA, 30 bp, Artificial Sequence
  Synthetic oligonucleotide
cccggaaaaggacgtaatgcgcagaacgca

SEQ ID NO: 158416 - DNA, 30 bp, Artificial Sequence
  Synthetic oligonucleotide
taagataagcaggctcgctcctgtaacgca

SEQ ID NO: 158417 - DNA, 30 bp, Artificial Sequence
  Synthetic oligonucleotide
gcaaatggtataattagaaatcttaacgca

SEQ ID NO: 158418 - DNA, 30 bp, Artificial Sequence
  Synthetic oligonucleotide
atattagagggtcgggtggccaaacacgca

SEQ ID NO: 158419 - DNA, 30 bp, Artificial Sequence
  Synthetic oligonucleotide
ccttattcttggcattgcggacaacacgca

SEQ ID NO: 158420 - DNA, 30 bp, Artificial Sequence
  Synthetic oligonucleotide
gcgaactgtgattttgacaaactccacgca

SEQ ID NO: 158421 - DNA, 30 bp, Artificial Sequence
  Synthetic oligonucleotide
tcacgggttacatgttctccaggatacgca

SEQ ID NO: 158422 - DNA, 30 bp, Artificial Sequence
  Synthetic oligonucleotide
ttgacgggttagatcgggcgaggctacgca

SEQ ID NO: 158423 - DNA, 30 bp, Artificial Sequence
  Synthetic oligonucleotide
ttaccatctccttggatcgacttctacgca

SEQ ID NO: 158424 - DNA, 30 bp, Artificial Sequence
  Synthetic oligonucleotide
acccgtgtaggggactggttgggaaccgca

SEQ ID NO: 158425 - DNA, 30 bp, Artificial Sequence
  Synthetic oligonucleotide
tagcgtatgctctaaatatagtagaccgca

SEQ ID NO: 158426 - DNA, 30 bp, Artificial Sequence
  Synthetic oligonucleotide
acccaggactgagaagagacctcgaccgca

SEQ ID NO: 158427 - DNA, 30 bp, Artificial Sequence
  Synthetic oligonucleotide
cgacatagaatcttatagttaatacccgca

SEQ ID NO: 158428 - DNA, 30 bp, Artificial Sequence
  Synthetic oligonucleotide
aagaagttctgggtccgtggtaagcccgca

SEQ ID NO: 158429 - DNA, 30 bp, Artificial Sequence
  Synthetic oligonucleotide
cgatgagtcacgtgaacctaagagcccgca

SEQ ID NO: 158430 - DNA, 30 bp, Artificial Sequence
  Synthetic oligonucleotide
cagactcgcaatctcccagtatgagccgca

SEQ ID NO: 158431 - DNA, 30 bp, Artificial Sequence
  Synthetic oligonucleotide
taatatgacagatcctgcggtgaggccgca

SEQ ID NO: 158432 - DNA, 30 bp, Artificial Sequence
  Synthetic oligonucleotide
aagcgagccagcagtacggtcagggccgca

SEQ ID NO: 158433 - DNA, 30 bp, Artificial Sequence
  Synthetic oligonucleotide
ctatgtatttgctagggaggatgggccgca

SEQ ID NO: 158434 - DNA, 30 bp, Artificial Sequence
  Synthetic oligonucleotide
acaattgttgcaagttctcaaagatccgca

SEQ ID NO: 158435 - DNA, 30 bp, Artificial Sequence
  Synthetic oligonucleotide
tatgataagaacttgtctggagtgtccgca

SEQ ID NO: 158436 - DNA, 30 bp, Artificial Sequence
  Synthetic oligonucleotide
ggtaaaaagggataccctttaaaaagcgca

SEQ ID NO: 158437 - DNA, 30 bp, Artificial Sequence
  Synthetic oligonucleotide
ttccaagtggggtatatacctaccagcgca

SEQ ID NO: 158438 - DNA, 30 bp, Artificial Sequence
  Synthetic oligonucleotide
aaggcgtctcagtggccggaaggcagcgca

SEQ ID NO: 158439 - DNA, 30 bp, Artificial Sequence
  Synthetic oligonucleotide
taggtgaaatctgtaaaagagaagagcgca

SEQ ID NO: 158440 - DNA, 30 bp, Artificial Sequence
  Synthetic oligonucleotide
tgcgaacccaccgtacctgacctgagcgca

SEQ ID NO: 158441 - DNA, 30 bp, Artificial Sequence
  Synthetic oligonucleotide
tcggggaatgttataccgttgacacgcgca

SEQ ID NO: 158442 - DNA, 30 bp, Artificial Sequence
  Synthetic oligonucleotide
attgacacccggaaatatcaggtccgcgca

SEQ ID NO: 158443 - DNA, 30 bp, Artificial Sequence
  Synthetic oligonucleotide
cgatataggtaggatattccggcgcgcgca

SEQ ID NO: 158444 - DNA, 30 bp, Artificial Sequence
  Synthetic oligonucleotide
attcccaaaaagggacgatgcagtcgcgca

SEQ ID NO: 158445 - DNA, 30 bp, Artificial Sequence
  Synthetic oligonucleotide
cagagcgggatgcgattcgcttggggcgca

SEQ ID NO: 158446 - DNA, 30 bp, Artificial Sequence
  Synthetic oligonucleotide
cgggtttggtcttggattaatgttggcgca

SEQ ID NO: 158447 - DNA, 30 bp, Artificial Sequence
  Synthetic oligonucleotide
cgcatctctctagcagcacactaatgcgca

SEQ ID NO: 158448 - DNA, 30 bp, Artificial Sequence
  Synthetic oligonucleotide
ccgttgggaataatacgtgaatcctgcgca

SEQ ID NO: 158449 - DNA, 30 bp, Artificial Sequence
  Synthetic oligonucleotide
cctcaaaaccttgattgctcggctatcgca

SEQ ID NO: 158450 - DNA, 30 bp, Artificial Sequence
  Synthetic oligonucleotide
ccatgtgcgtggtgaatagcgtcgctcgca

SEQ ID NO: 158451 - DNA, 30 bp, Artificial Sequence
  Synthetic oligonucleotide
atggaagcgtgttgaaccggaacagtcgca

SEQ ID NO: 158452 - DNA, 30 bp, Artificial Sequence
  Synthetic oligonucleotide
caagcggggggtatattctagtgggtcgca

SEQ ID NO: 158453 - DNA, 30 bp, Artificial Sequence
  Synthetic oligonucleotide
ctcgatgtgtcagggatcacaagattcgca

SEQ ID NO: 158454 - DNA, 30 bp, Artificial Sequence
  Synthetic oligonucleotide
acactcaccaagccaccagcggacttcgca

SEQ ID NO: 158455 - DNA, 30 bp, Artificial Sequence
  Synthetic oligonucleotide
atacagggagccaaaagacattttttcgca

SEQ ID NO: 158456 - DNA, 30 bp, Artificial Sequence
  Synthetic oligonucleotide
ccgtcgtgatggcactgttaacaaaaggca

SEQ ID NO: 158457 - DNA, 30 bp, Artificial Sequence
  Synthetic oligonucleotide
caggtgtaatacacggataaagtaaaggca

SEQ ID NO: 158458 - DNA, 30 bp, Artificial Sequence
  Synthetic oligonucleotide
ctcaacaccaacctctctcatggcaaggca

SEQ ID NO: 158459 - DNA, 30 bp, Artificial Sequence
  Synthetic oligonucleotide
ccgggaacttactgccgtcacatcaaggca

SEQ ID NO: 158460 - DNA, 30 bp, Artificial Sequence
  Synthetic oligonucleotide
gaaggagtgcgaattgtatcgattaaggca

SEQ ID NO: 158461 - DNA, 30 bp, Artificial Sequence
  Synthetic oligonucleotide
cacgaaacgcacctatggaggtttaaggca

SEQ ID NO: 158462 - DNA, 30 bp, Artificial Sequence
  Synthetic oligonucleotide
aaatggagtacaccggtgcgggcacaggca

SEQ ID NO: 158463 - DNA, 30 bp, Artificial Sequence
  Synthetic oligonucleotide
atcaagatacgtgcaagtttgctacaggca

SEQ ID NO: 158464 - DNA, 30 bp, Artificial Sequence
  Synthetic oligonucleotide
gcatgaactagtgctatctaattgcaggca

SEQ ID NO: 158465 - DNA, 30 bp, Artificial Sequence
  Synthetic oligonucleotide
aacccgtgcagtcaggaatgagttcaggca

SEQ ID NO: 158466 - DNA, 30 bp, Artificial Sequence
  Synthetic oligonucleotide
ttcgacgtgacgttgaggcaggtagaggca

SEQ ID NO: 158467 - DNA, 30 bp, Artificial Sequence
  Synthetic oligonucleotide
acaaggtagaatcttcttcagcgcgaggca

SEQ ID NO: 158468 - DNA, 30 bp, Artificial Sequence
  Synthetic oligonucleotide
ggcccagtcatgacgatggtaatggaggca

SEQ ID NO: 158469 - DNA, 30 bp, Artificial Sequence
  Synthetic oligonucleotide
gggctcattacgatgttcctccgtgaggca

SEQ ID NO: 158470 - DNA, 30 bp, Artificial Sequence
  Synthetic oligonucleotide
tggctcccgatagtgtcaatatcataggca

SEQ ID NO: 158471 - DNA, 30 bp, Artificial Sequence
  Synthetic oligonucleotide
tcaaagtcggctacacgaggggcctaggca

SEQ ID NO: 158472 - DNA, 30 bp, Artificial Sequence
  Synthetic oligonucleotide
aagtaaagcgtgatggcgcacaacacggca

SEQ ID NO: 158473 - DNA, 30 bp, Artificial Sequence
  Synthetic oligonucleotide
aagggcctttatttgtagaggaccacggca

SEQ ID NO: 158474 - DNA, 30 bp, Artificial Sequence
  Synthetic oligonucleotide
ggccacagaagtcacgtactgcccacggca

SEQ ID NO: 158475 - DNA, 30 bp, Artificial Sequence
  Synthetic oligonucleotide
acggatcagcggcgctggggttggacggca

SEQ ID NO: 158476 - DNA, 30 bp, Artificial Sequence
  Synthetic oligonucleotide
gtatagaaacccgctgagggtaatacggca

SEQ ID NO: 158477 - DNA, 30 bp, Artificial Sequence
  Synthetic oligonucleotide
tagaaagacatgtatagtcaggttacggca

SEQ ID NO: 158478 - DNA, 30 bp, Artificial Sequence
  Synthetic oligonucleotide
ccggaggggttgttggaacagcaaccggca

SEQ ID NO: 158479 - DNA, 30 bp, Artificial Sequence
  Synthetic oligonucleotide
ggagggttaacgactgtgattgaaccggca

SEQ ID NO: 158480 - DNA, 30 bp, Artificial Sequence
  Synthetic oligonucleotide
atactactacctcaatgttaatggccggca

SEQ ID NO: 158481 - DNA, 30 bp, Artificial Sequence
  Synthetic oligonucleotide
gctagcttgagtgggcataaatacgcggca

SEQ ID NO: 158482 - DNA, 30 bp, Artificial Sequence
  Synthetic oligonucleotide
ctcgcactaatcgggatagatacggcggca

SEQ ID NO: 158483 - DNA, 30 bp, Artificial Sequence
  Synthetic oligonucleotide
agaggtagatggccaaatagcgtggcggca

SEQ ID NO: 158484 - DNA, 30 bp, Artificial Sequence
  Synthetic oligonucleotide
ctggtacccacctgaagtaaggatgcggca

SEQ ID NO: 158485 - DNA, 30 bp, Artificial Sequence
  Synthetic oligonucleotide
gagggcaagtgtgcgagaaaggttgcggca

SEQ ID NO: 158486 - DNA, 30 bp, Artificial Sequence
  Synthetic oligonucleotide
ttacgccaacccggagcgtagacatcggca

SEQ ID NO: 158487 - DNA, 30 bp, Artificial Sequence
  Synthetic oligonucleotide
aagtcaggtctgtgctcccgagactcggca

SEQ ID NO: 158488 - DNA, 30 bp, Artificial Sequence
  Synthetic oligonucleotide
caagctatcccgattgtcgcctactcggca

SEQ ID NO: 158489 - DNA, 30 bp, Artificial Sequence
  Synthetic oligonucleotide
cggacgtgttcgtacaattatggctcggca

SEQ ID NO: 158490 - DNA, 30 bp, Artificial Sequence
  Synthetic oligonucleotide
caccacgattctatacaacagatctcggca

SEQ ID NO: 158491 - DNA, 30 bp, Artificial Sequence
  Synthetic oligonucleotide
gcgttaaaaacaaattgcaatccttcggca

SEQ ID NO: 158492 - DNA, 30 bp, Artificial Sequence
  Synthetic oligonucleotide
cggatacgggtcaccatctcgcaaagggca

SEQ ID NO: 158493 - DNA, 30 bp, Artificial Sequence
  Synthetic oligonucleotide
aactagactgagtcataagagcatagggca

SEQ ID NO: 158494 - DNA, 30 bp, Artificial Sequence
  Synthetic oligonucleotide
gcagcgagaaggtactcagagcctagggca

SEQ ID NO: 158495 - DNA, 30 bp, Artificial Sequence
  Synthetic oligonucleotide
agaaatcacgagcctggacaaccccgggca

SEQ ID NO: 158496 - DNA, 30 bp, Artificial Sequence
  Synthetic oligonucleotide
ctgatggcgtctacggttgggaagcgggca

SEQ ID NO: 158497 - DNA, 30 bp, Artificial Sequence
  Synthetic oligonucleotide
gatggaaacaggagatcttgtaaaggggca

SEQ ID NO: 158498 - DNA, 30 bp, Artificial Sequence
  Synthetic oligonucleotide
cacgggcgctttataaccgacagaggggca

SEQ ID NO: 158499 - DNA, 30 bp, Artificial Sequence
  Synthetic oligonucleotide
cgaaaccatccggttatctcacacggggca

SEQ ID NO: 158500 - DNA, 30 bp, Artificial Sequence
  Synthetic oligonucleotide
ccgacgagcgatggtaggggatccggggca

SEQ ID NO: 158501 - DNA, 30 bp, Artificial Sequence
  Synthetic oligonucleotide
ccggagataacgatccgcggctccggggca

SEQ ID NO: 158502 - DNA, 30 bp, Artificial Sequence
  Synthetic oligonucleotide
ggggacaagtttttctgttaagcgggggca

SEQ ID NO: 158503 - DNA, 30 bp, Artificial Sequence
  Synthetic oligonucleotide
tatacgtctagtacttaatgtacatgggca

SEQ ID NO: 158504 - DNA, 30 bp, Artificial Sequence
  Synthetic oligonucleotide
tcagcgtaacgcctgttatatgtatgggca

SEQ ID NO: 158505 - DNA, 30 bp, Artificial Sequence
  Synthetic oligonucleotide
agtgtgaagacgtgtatccgggactgggca

SEQ ID NO: 158506 - DNA, 30 bp, Artificial Sequence
  Synthetic oligonucleotide
attgtatatccgggcagtgtgccgtgggca

SEQ ID NO: 158507 - DNA, 30 bp, Artificial Sequence
  Synthetic oligonucleotide
tcgcagggaaggagcaaagcccattgggca

SEQ ID NO: 158508 - DNA, 30 bp, Artificial Sequence
  Synthetic oligonucleotide
agtcataagtacctcctccatgcttgggca

SEQ ID NO: 158509 - DNA, 30 bp, Artificial Sequence
  Synthetic oligonucleotide
caatttcaacccttcgattggaacatggca

SEQ ID NO: 158510 - DNA, 30 bp, Artificial Sequence
  Synthetic oligonucleotide
atcgcatcattaaggatgccttagatggca

SEQ ID NO: 158511 - DNA, 30 bp, Artificial Sequence
  Synthetic oligonucleotide
gatgcgcaactggtgccggagtggatggca

SEQ ID NO: 158512 - DNA, 30 bp, Artificial Sequence
  Synthetic oligonucleotide
cgcgatgaaggtaaagcagcctagctggca

SEQ ID NO: 158513 - DNA, 30 bp, Artificial Sequence
  Synthetic oligonucleotide
tctgagttacggagggctcagtcgctggca

SEQ ID NO: 158514 - DNA, 30 bp, Artificial Sequence
  Synthetic oligonucleotide
aggaacgactggccgcgttaggtcgtggca

SEQ ID NO: 158515 - DNA, 30 bp, Artificial Sequence
  Synthetic oligonucleotide
cgatgccggtctggcactagtttcgtggca

SEQ ID NO: 158516 - DNA, 30 bp, Artificial Sequence
  Synthetic oligonucleotide
ttcgatggttccttgacgataggtgtggca

SEQ ID NO: 158517 - DNA, 28 bp, Artificial Sequence
  Synthetic oligonucleotide
agaatggaaagatgggacgaggttggca

SEQ ID NO: 158518 - DNA, 30 bp, Artificial Sequence
  Synthetic oligonucleotide
tcgactgagacttcgcgatgactcaatgca

SEQ ID NO: 158519 - DNA, 30 bp, Artificial Sequence
  Synthetic oligonucleotide
tgccgtgcgcggatggattggccgaatgca

SEQ ID NO: 158520 - DNA, 30 bp, Artificial Sequence
  Synthetic oligonucleotide
tgtggatgggtgagccgacccagtaatgca

SEQ ID NO: 158521 - DNA, 30 bp, Artificial Sequence
  Synthetic oligonucleotide
gtggatcaacccaaacaggcctttaatgca

SEQ ID NO: 158522 - DNA, 30 bp, Artificial Sequence
  Synthetic oligonucleotide
aaaggggatggtgagacattcgaacatgca

SEQ ID NO: 158523 - DNA, 30 bp, Artificial Sequence
  Synthetic oligonucleotide
cttagcgagatattctcattttcacatgca

SEQ ID NO: 158524 - DNA, 30 bp, Artificial Sequence
  Synthetic oligonucleotide
gcgtgctccatgcattgttcaatccatgca

SEQ ID NO: 158525 - DNA, 30 bp, Artificial Sequence
  Synthetic oligonucleotide
cgtggcctcataaaaattgcgaacgatgca

SEQ ID NO: 158526 - DNA, 30 bp, Artificial Sequence
  Synthetic oligonucleotide
ttcgtgccttaatgcaacaccagggatgca

SEQ ID NO: 158527 - DNA, 30 bp, Artificial Sequence
  Synthetic oligonucleotide
agtgttacagtactaatacaagatgatgca

SEQ ID NO: 158528 - DNA, 30 bp, Artificial Sequence
  Synthetic oligonucleotide
catatattgcggtgacgccagattgatgca

SEQ ID NO: 158529 - DNA, 30 bp, Artificial Sequence
  Synthetic oligonucleotide
gtactatagaggtccagtgggattgatgca

SEQ ID NO: 158530 - DNA, 30 bp, Artificial Sequence
  Synthetic oligonucleotide
ggctcgtaccgagaattaagcccgtatgca

SEQ ID NO: 158531 - DNA, 30 bp, Artificial Sequence
  Synthetic oligonucleotide
tgtattatgcggtcataggcgaggtatgca

SEQ ID NO: 158532 - DNA, 30 bp, Artificial Sequence
  Synthetic oligonucleotide
tcccaggggcatctatccgcgaattatgca

SEQ ID NO: 158533 - DNA, 30 bp, Artificial Sequence
  Synthetic oligonucleotide
gctcgacaaacggcactgcacggttatgca

SEQ ID NO: 158534 - DNA, 30 bp, Artificial Sequence
  Synthetic oligonucleotide
tgatctaaccactgactggaaacaactgca

SEQ ID NO: 158535 - DNA, 30 bp, Artificial Sequence
  Synthetic oligonucleotide
gcgctcggattcactgccgatgcaactgca

SEQ ID NO: 158536 - DNA, 30 bp, Artificial Sequence
  Synthetic oligonucleotide
ttgcggactgtgtagcgagttttaactgca

SEQ ID NO: 158537 - DNA, 30 bp, Artificial Sequence
  Synthetic oligonucleotide
agagattcgaacagaccggtaacgactgca

SEQ ID NO: 158538 - DNA, 30 bp, Artificial Sequence
  Synthetic oligonucleotide
gaataacttgtatacatttaggcacctgca

SEQ ID NO: 158539 - DNA, 30 bp, Artificial Sequence
  Synthetic oligonucleotide
tcggcctacggagcgatggaaatccctgca

SEQ ID NO: 158540 - DNA, 30 bp, Artificial Sequence
  Synthetic oligonucleotide
ctccggtacatcgaatcgggtcgtcctgca

SEQ ID NO: 158541 - DNA, 31 bp, Artificial Sequence
  Synthetic oligonucleotide
cgtatttagcgcgtcccaaataaacgctgca

SEQ ID NO: 158542 - DNA, 30 bp, Artificial Sequence
  Synthetic oligonucleotide
aaattgttgttcttacacagaaaggctgca

SEQ ID NO: 158543 - DNA, 30 bp, Artificial Sequence
  Synthetic oligonucleotide
tattaggagcattgttaaagaatatctgca

SEQ ID NO: 158544 - DNA, 30 bp, Artificial Sequence
  Synthetic oligonucleotide
agtgacagagacttatcatgcgcttctgca

SEQ ID NO: 158545 - DNA, 30 bp, Artificial Sequence
  Synthetic oligonucleotide
gtatgtcaacgaacgtaaatctgaagtgca

SEQ ID NO: 158546 - DNA, 30 bp, Artificial Sequence
  Synthetic oligonucleotide
aatatgtgaaccagcgcagaggcgagtgca

SEQ ID NO: 158547 - DNA, 30 bp, Artificial Sequence
  Synthetic oligonucleotide
gcaacaaacgcgcgcacgtgccatagtgca

SEQ ID NO: 158548 - DNA, 30 bp, Artificial Sequence
  Synthetic oligonucleotide
gggttgcaggtcataaccgccaagggtgca

SEQ ID NO: 158549 - DNA, 30 bp, Artificial Sequence
  Synthetic oligonucleotide
gtggtaaccccgttgcgctgaacatgtgca

SEQ ID NO: 158550 - DNA, 30 bp, Artificial Sequence
  Synthetic oligonucleotide
cctacttcggtatcatatagtaattgtgca

SEQ ID NO: 158551 - DNA, 30 bp, Artificial Sequence
  Synthetic oligonucleotide
ccatctactgtccattcatgccattgtgca

SEQ ID NO: 158552 - DNA, 30 bp, Artificial Sequence
  Synthetic oligonucleotide
acacgatcgagaaagacgatggtttgtgca

SEQ ID NO: 158553 - DNA, 30 bp, Artificial Sequence
  Synthetic oligonucleotide
tcaaagtgactggttctcaaagccattgca

SEQ ID NO: 158554 - DNA, 30 bp, Artificial Sequence
  Synthetic oligonucleotide
atgatgttgcggcgaacagattagattgca

SEQ ID NO: 158555 - DNA, 30 bp, Artificial Sequence
  Synthetic oligonucleotide
tctaaaagggggcatggtgcggcgattgca

SEQ ID NO: 158556 - DNA, 30 bp, Artificial Sequence
  Synthetic oligonucleotide
cgcgaatcaacgttcgccaagtcgattgca

SEQ ID NO: 158557 - DNA, 30 bp, Artificial Sequence
  Synthetic oligonucleotide
acgacgtagtattggtaacctccacttgca

SEQ ID NO: 158558 - DNA, 30 bp, Artificial Sequence
  Synthetic oligonucleotide
cgggcacaccgaacatgtctcagccttgca

SEQ ID NO: 158559 - DNA, 30 bp, Artificial Sequence
  Synthetic oligonucleotide
taagcggtcgtaattaagcagtgccttgca

SEQ ID NO: 158560 - DNA, 30 bp, Artificial Sequence
  Synthetic oligonucleotide
agcaattcggcagtttaggtcaatcttgca

SEQ ID NO: 158561 - DNA, 30 bp, Artificial Sequence
  Synthetic oligonucleotide
gagaatgaagactgccaaaggctcgttgca

SEQ ID NO: 158562 - DNA, 30 bp, Artificial Sequence
  Synthetic oligonucleotide
tgcacggagcgagaggcctacactgttgca

SEQ ID NO: 158563 - DNA, 30 bp, Artificial Sequence
  Synthetic oligonucleotide
acctacatggtttaacacaaccctgttgca

SEQ ID NO: 158564 - DNA, 30 bp, Artificial Sequence
  Synthetic oligonucleotide
cattggtagagtagtgactaacgtgttgca

SEQ ID NO: 158565 - DNA, 30 bp, Artificial Sequence
  Synthetic oligonucleotide
tcgttctgttgaagttaagtctattttgca

SEQ ID NO: 158566 - DNA, 30 bp, Artificial Sequence
  Synthetic oligonucleotide
ttgcggcgtcgggcatcgcctccaaaatca

SEQ ID NO: 158567 - DNA, 30 bp, Artificial Sequence
  Synthetic oligonucleotide
taccgcgtagatgtcacactccgaaaatca

SEQ ID NO: 158568 - DNA, 30 bp, Artificial Sequence
  Synthetic oligonucleotide
cactgcttgtgcccgagaacgggaaaatca

SEQ ID NO: 158569 - DNA, 30 bp, Artificial Sequence
  Synthetic oligonucleotide
gtgtcagatcgtctctgaacactcaaatca

SEQ ID NO: 158570 - DNA, 30 bp, Artificial Sequence
  Synthetic oligonucleotide
tagattaacgtgtattttcacaaccaatca

SEQ ID NO: 158571 - DNA, 30 bp, Artificial Sequence
  Synthetic oligonucleotide
ttccagcggtggaatatacatccgcaatca

SEQ ID NO: 158572 - DNA, 30 bp, Artificial Sequence
  Synthetic oligonucleotide
tcttacatggcaagtggaagcctgcaatca

SEQ ID NO: 158573 - DNA, 30 bp, Artificial Sequence
  Synthetic oligonucleotide
gaagacccagtacctccaggtccagaatca

SEQ ID NO: 158574 - DNA, 30 bp, Artificial Sequence
  Synthetic oligonucleotide
agagttcttcccaggttacgtacggaatca

SEQ ID NO: 158575 - DNA, 30 bp, Artificial Sequence
  Synthetic oligonucleotide
cctgtgtaactcagtgccgtaatggaatca

SEQ ID NO: 158576 - DNA, 30 bp, Artificial Sequence
  Synthetic oligonucleotide
gtaagtagaacaatattttttgatgaatca

SEQ ID NO: 158577 - DNA, 30 bp, Artificial Sequence
  Synthetic oligonucleotide
agaaggttgaggagtcgatagattgaatca

SEQ ID NO: 158578 - DNA, 30 bp, Artificial Sequence
  Synthetic oligonucleotide
gggcaaaggttcggcggtaagagataatca

SEQ ID NO: 158579 - DNA, 30 bp, Artificial Sequence
  Synthetic oligonucleotide
atatacgaatcaaacactcagagataatca

SEQ ID NO: 158580 - DNA, 30 bp, Artificial Sequence
  Synthetic oligonucleotide
gacggccgccaccgcgccccatgctaatca

SEQ ID NO: 158581 - DNA, 29 bp, Artificial Sequence
  Synthetic oligonucleotide
ctactagctaggtgctaacatcgtaatca

SEQ ID NO: 158582 - DNA, 30 bp, Artificial Sequence
  Synthetic oligonucleotide
cggttcatgttcaacagatggggttaatca

SEQ ID NO: 158583 - DNA, 30 bp, Artificial Sequence
  Synthetic oligonucleotide
gttggtaagttacgagaaaatccaacatca

SEQ ID NO: 158584 - DNA, 30 bp, Artificial Sequence
  Synthetic oligonucleotide
atacggctgcaacgtgtgggctatacatca

SEQ ID NO: 158585 - DNA, 30 bp, Artificial Sequence
  Synthetic oligonucleotide
attgaggtggccaactgggcagctacatca

SEQ ID NO: 158586 - DNA, 30 bp, Artificial Sequence
  Synthetic oligonucleotide
cggcggttacccccactgcaagtaccatca

SEQ ID NO: 158587 - DNA, 30 bp, Artificial Sequence
  Synthetic oligonucleotide
agttagtttaacggcaaggtagacccatca

SEQ ID NO: 158588 - DNA, 30 bp, Artificial Sequence
  Synthetic oligonucleotide
aggtgattgagctatttgtgtaagccatca

SEQ ID NO: 158589 - DNA, 31 bp, Artificial Sequence
  Synthetic oligonucleotide
gagaagaagagtgaatgcttgaaaagcatca

SEQ ID NO: 158590 - DNA, 30 bp, Artificial Sequence
  Synthetic oligonucleotide
cgccgtacaagtagttaggcgcgcgcatca

SEQ ID NO: 158591 - DNA, 30 bp, Artificial Sequence
  Synthetic oligonucleotide
gattagtaggatcgcgtaagggaggcatca

SEQ ID NO: 158592 - DNA, 30 bp, Artificial Sequence
  Synthetic oligonucleotide
gtgcaactgccagtttgtgaaggtgcatca

SEQ ID NO: 158593 - DNA, 30 bp, Artificial Sequence
  Synthetic oligonucleotide
tcatcaaggaactcgcgggcaagaagatca

SEQ ID NO: 158594 - DNA, 30 bp, Artificial Sequence
  Synthetic oligonucleotide
ttacgtcacactttgcatcagcgcagatca

SEQ ID NO: 158595 - DNA, 30 bp, Artificial Sequence
  Synthetic oligonucleotide
cggggaatcttggccggccatatcagatca

SEQ ID NO: 158596 - DNA, 30 bp, Artificial Sequence
  Synthetic oligonucleotide
cgtgagttgtcaatccttgaagggagatca

SEQ ID NO: 158597 - DNA, 30 bp, Artificial Sequence
  Synthetic oligonucleotide
ctgaatgtacacacttcctgcgatagatca

SEQ ID NO: 158598 - DNA, 30 bp, Artificial Sequence
  Synthetic oligonucleotide
ggagttagcgcttagttgggtagtagatca

SEQ ID NO: 158599 - DNA, 30 bp, Artificial Sequence
  Synthetic oligonucleotide
acattccacatgcggaaatttacacgatca

SEQ ID NO: 158600 - DNA, 30 bp, Artificial Sequence
  Synthetic oligonucleotide
cctaatctacgaccgcgtatgccacgatca

SEQ ID NO: 158601 - DNA, 30 bp, Artificial Sequence
  Synthetic oligonucleotide
gatccacacgtacggtcaacaatccgatca

SEQ ID NO: 158602 - DNA, 30 bp, Artificial Sequence
  Synthetic oligonucleotide
ctgaaagaatagatctagcgggtccgatca

SEQ ID NO: 158603 - DNA, 30 bp, Artificial Sequence
  Synthetic oligonucleotide
acttgatttcgtcagtccactttgcgatca

SEQ ID NO: 158604 - DNA, 30 bp, Artificial Sequence
  Synthetic oligonucleotide
gcatagcaatagtccataaggacaggatca

SEQ ID NO: 158605 - DNA, 30 bp, Artificial Sequence
  Synthetic oligonucleotide
gaatgtccccgcgctcaaataccaggatca

SEQ ID NO: 158606 - DNA, 30 bp, Artificial Sequence
  Synthetic oligonucleotide
gggaaccccgcccggcgagtattaggatca

SEQ ID NO: 158607 - DNA, 30 bp, Artificial Sequence
  Synthetic oligonucleotide
cggataacggtcgtagtttttatctgatca

SEQ ID NO: 158608 - DNA, 30 bp, Artificial Sequence
  Synthetic oligonucleotide
tggacgatagagttgtttccgcggatatca

SEQ ID NO: 158609 - DNA, 30 bp, Artificial Sequence
  Synthetic oligonucleotide
agacttcgccgcctaacttgacaactatca

SEQ ID NO: 158610 - DNA, 30 bp, Artificial Sequence
  Synthetic oligonucleotide
aagtccgaagcttgggcaacagaactatca

SEQ ID NO: 158611 - DNA, 30 bp, Artificial Sequence
  Synthetic oligonucleotide
cgggttagatactgtgcggtgggactatca

SEQ ID NO: 158612 - DNA, 30 bp, Artificial Sequence
  Synthetic oligonucleotide
acagaaccacacgtgaaaactcacctatca

SEQ ID NO: 158613 - DNA, 30 bp, Artificial Sequence
  Synthetic oligonucleotide
atatatagtgtcatcgaatgaggagtatca

SEQ ID NO: 158614 - DNA, 30 bp, Artificial Sequence
  Synthetic oligonucleotide
gcagctacatcaggctggaatgtggtatca

SEQ ID NO: 158615 - DNA, 30 bp, Artificial Sequence
  Synthetic oligonucleotide
gtataaggtatgtagacataattggtatca

SEQ ID NO: 158616 - DNA, 30 bp, Artificial Sequence
  Synthetic oligonucleotide
tggagcgcggaatccggttattaattatca

SEQ ID NO: 158617 - DNA, 30 bp, Artificial Sequence
  Synthetic oligonucleotide
gcgtccatcggacgacatctgaagttatca

SEQ ID NO: 158618 - DNA, 30 bp, Artificial Sequence
  Synthetic oligonucleotide
tgacgtggtattggcaaaactcttttatca

SEQ ID NO: 158619 - DNA, 30 bp, Artificial Sequence
  Synthetic oligonucleotide
ctcgctcgtttcataaaacgcgcacactca

SEQ ID NO: 158620 - DNA, 30 bp, Artificial Sequence
  Synthetic oligonucleotide
tgcaaagctaacgagcagcgcagacactca

SEQ ID NO: 158621 - DNA, 30 bp, Artificial Sequence
  Synthetic oligonucleotide
aggaacgatcactcttacaggaaccactca

SEQ ID NO: 158622 - DNA, 30 bp, Artificial Sequence
  Synthetic oligonucleotide
cacggcaacgtaccatattattaccactca

SEQ ID NO: 158623 - DNA, 30 bp, Artificial Sequence
  Synthetic oligonucleotide
atgcgtccaaatgcgcgcactgggcactca

SEQ ID NO: 158624 - DNA, 30 bp, Artificial Sequence
  Synthetic oligonucleotide
gatctcgcaaacaatatccgaatgcactca

SEQ ID NO: 158625 - DNA, 30 bp, Artificial Sequence
  Synthetic oligonucleotide
gatttactcgcgccaatcaacatgcactca

SEQ ID NO: 158626 - DNA, 30 bp, Artificial Sequence
  Synthetic oligonucleotide
tatgggaacacttaatcgactattcactca

SEQ ID NO: 158627 - DNA, 30 bp, Artificial Sequence
  Synthetic oligonucleotide
cgggtggtttgccgttgcacagaagactca

SEQ ID NO: 158628 - DNA, 30 bp, Artificial Sequence
  Synthetic oligonucleotide
cgttacaagagcggagagggctcggactca

SEQ ID NO: 158629 - DNA, 30 bp, Artificial Sequence
  Synthetic oligonucleotide
attacgggtgagataagcaccactgactca

SEQ ID NO: 158630 - DNA, 30 bp, Artificial Sequence
  Synthetic oligonucleotide
tgagggtgcacagtatggactattgactca

SEQ ID NO: 158631 - DNA, 30 bp, Artificial Sequence
  Synthetic oligonucleotide
gcgtaccggatttgaacggctcgctactca

SEQ ID NO: 158632 - DNA, 30 bp, Artificial Sequence
  Synthetic oligonucleotide
caaaagcgtataagagccaacaacccctca

SEQ ID NO: 158633 - DNA, 30 bp, Artificial Sequence
  Synthetic oligonucleotide
gcgtgcagatgctttgtttctcccccctca

SEQ ID NO: 158634 - DNA, 30 bp, Artificial Sequence
  Synthetic oligonucleotide
aggctgtctttgcttatggttcatgcctca

SEQ ID NO: 158635 - DNA, 30 bp, Artificial Sequence
  Synthetic oligonucleotide
aacaagtcgaagagttgtgaatttgcctca

SEQ ID NO: 158636 - DNA, 30 bp, Artificial Sequence
  Synthetic oligonucleotide
tctggacgagtccctagttcttgctcctca

SEQ ID NO: 158637 - DNA, 30 bp, Artificial Sequence
  Synthetic oligonucleotide
ccaataggctcgtgcaaacgcctctcctca

SEQ ID NO: 158638 - DNA, 30 bp, Artificial Sequence
  Synthetic oligonucleotide
aacacattatatagacaggcctcttcctca

SEQ ID NO: 158639 - DNA, 30 bp, Artificial Sequence
  Synthetic oligonucleotide
tagtccgaccgagaatcgccaggcagctca

SEQ ID NO: 158640 - DNA, 30 bp, Artificial Sequence
  Synthetic oligonucleotide
aatagcgcgaggccttcaagttgcagctca

SEQ ID NO: 158641 - DNA, 30 bp, Artificial Sequence
  Synthetic oligonucleotide
gccgattgctacggatagctactgagctca

SEQ ID NO: 158642 - DNA, 30 bp, Artificial Sequence
  Synthetic oligonucleotide
tactaactaggaaaattccaaactagctca

SEQ ID NO: 158643 - DNA, 30 bp, Artificial Sequence
  Synthetic oligonucleotide
ggaatctggcgtcacgcacagaggcgctca

SEQ ID NO: 158644 - DNA, 30 bp, Artificial Sequence
  Synthetic oligonucleotide
ggacagtcaccagttggacgctttcgctca

SEQ ID NO: 158645 - DNA, 30 bp, Artificial Sequence
  Synthetic oligonucleotide
cgattaaggatgtcaggccgtcgaggctca

SEQ ID NO: 158646 - DNA, 30 bp, Artificial Sequence
  Synthetic oligonucleotide
tagaagcgatcaaaatgactgagcggctca

SEQ ID NO: 158647 - DNA, 30 bp, Artificial Sequence
  Synthetic oligonucleotide
ctgagatacacgagactttcgcggggctca

SEQ ID NO: 158648 - DNA, 30 bp, Artificial Sequence
  Synthetic oligonucleotide
ccgcttagacaacgcttaccgatgggctca

SEQ ID NO: 158649 - DNA, 30 bp, Artificial Sequence
  Synthetic oligonucleotide
taggaaatagctgggttaccctatggctca

SEQ ID NO: 158650 - DNA, 30 bp, Artificial Sequence
  Synthetic oligonucleotide
ttgcctgtacacatcgacaccggatgctca

SEQ ID NO: 158651 - DNA, 30 bp, Artificial Sequence
  Synthetic oligonucleotide
tctgcaaacatggttaatctctcctgctca

SEQ ID NO: 158652 - DNA, 30 bp, Artificial Sequence
  Synthetic oligonucleotide
tggtactagtttgatcgatagccgtgctca

SEQ ID NO: 158653 - DNA, 30 bp, Artificial Sequence
  Synthetic oligonucleotide
acagggcccgtgcctagttgagcttgctca

SEQ ID NO: 158654 - DNA, 30 bp, Artificial Sequence
  Synthetic oligonucleotide
aacgtaaaagaaatcatacctggttgctca

SEQ ID NO: 158655 - DNA, 30 bp, Artificial Sequence
  Synthetic oligonucleotide
attgtatagcacaaatatagaacgctctca

SEQ ID NO: 158656 - DNA, 30 bp, Artificial Sequence
  Synthetic oligonucleotide
cccaagaaaaaaggcacggggactctctca

SEQ ID NO: 158657 - DNA, 30 bp, Artificial Sequence
  Synthetic oligonucleotide
caccacttagcgactagactcgtcgtctca

SEQ ID NO: 158658 - DNA, 30 bp, Artificial Sequence
  Synthetic oligonucleotide
cgaccctagcgcattgccaaacaggtctca

SEQ ID NO: 158659 - DNA, 30 bp, Artificial Sequence
  Synthetic oligonucleotide
gccaatctcgtcatcgctcgggcggtctca

SEQ ID NO: 158660 - DNA, 30 bp, Artificial Sequence
  Synthetic oligonucleotide
tcagatggaagtgggttaatacagttctca

SEQ ID NO: 158661 - DNA, 30 bp, Artificial Sequence
  Synthetic oligonucleotide
cggagaaaagacaatttgaaactgttctca

SEQ ID NO: 158662 - DNA, 30 bp, Artificial Sequence
  Synthetic oligonucleotide
tgttatttagcaaatcgtcgaaaaaagtca

SEQ ID NO: 158663 - DNA, 30 bp, Artificial Sequence
  Synthetic oligonucleotide
cacgataactaaatttctagacaaaagtca

SEQ ID NO: 158664 - DNA, 30 bp, Artificial Sequence
  Synthetic oligonucleotide
gtgcagactcagggcaataaaataaagtca

SEQ ID NO: 158665 - DNA, 30 bp, Artificial Sequence
  Synthetic oligonucleotide
cgtcgggctcaattctttttgtggaagtca

SEQ ID NO: 158666 - DNA, 30 bp, Artificial Sequence
  Synthetic oligonucleotide
agagggtgctgaatatgatctcgtaagtca

SEQ ID NO: 158667 - DNA, 30 bp, Artificial Sequence
  Synthetic oligonucleotide
aggggctgcttgatacggtcggttaagtca

SEQ ID NO: 158668 - DNA, 30 bp, Artificial Sequence
  Synthetic oligonucleotide
atgtatcaatggcagggcgtcacacagtca

SEQ ID NO: 158669 - DNA, 30 bp, Artificial Sequence
  Synthetic oligonucleotide
ggatgtgctcaacagatacgtcaccagtca

SEQ ID NO: 158670 - DNA, 30 bp, Artificial Sequence
  Synthetic oligonucleotide
gtcttagtaagcaaactaaagatccagtca

SEQ ID NO: 158671 - DNA, 30 bp, Artificial Sequence
  Synthetic oligonucleotide
ctacggagaagcgacgcgtaggaagagtca

SEQ ID NO: 158672 - DNA, 30 bp, Artificial Sequence
  Synthetic oligonucleotide
taggataggtaagaggtacgttaagagtca

SEQ ID NO: 158673 - DNA, 30 bp, Artificial Sequence
  Synthetic oligonucleotide
aagccttaacaacgaagtaaggccgagtca

SEQ ID NO: 158674 - DNA, 30 bp, Artificial Sequence
  Synthetic oligonucleotide
acggcgcgataaggtctgtcttcggagtca

SEQ ID NO: 158675 - DNA, 30 bp, Artificial Sequence
  Synthetic oligonucleotide
ggagaatagggtaggagcagcctatagtca

SEQ ID NO: 158676 - DNA, 30 bp, Artificial Sequence
  Synthetic oligonucleotide
ctatagtcggctgactaatagtggtagtca

SEQ ID NO: 158677 - DNA, 30 bp, Artificial Sequence
  Synthetic oligonucleotide
aagcataaactaaccttagacctgtagtca

SEQ ID NO: 158678 - DNA, 30 bp, Artificial Sequence
  Synthetic oligonucleotide
gatatcatgttgacagcggtgtccccgtca

SEQ ID NO: 158679 - DNA, 30 bp, Artificial Sequence
  Synthetic oligonucleotide
tatatatacgaacaccgccgtaagccgtca

SEQ ID NO: 158680 - DNA, 30 bp, Artificial Sequence
  Synthetic oligonucleotide
cgcaacttaaatcctggaccaccgccgtca

SEQ ID NO: 158681 - DNA, 30 bp, Artificial Sequence
  Synthetic oligonucleotide
agttgtctggccttcctagttcatgcgtca

SEQ ID NO: 158682 - DNA, 30 bp, Artificial Sequence
  Synthetic oligonucleotide
ggccaatcggcgtactgcacaaactcgtca

SEQ ID NO: 158683 - DNA, 30 bp, Artificial Sequence
  Synthetic oligonucleotide
tcccaaacatcaactagacttaactcgtca

SEQ ID NO: 158684 - DNA, 30 bp, Artificial Sequence
  Synthetic oligonucleotide
taacacgctgcgctgcttggatcgtcgtca

SEQ ID NO: 158685 - DNA, 30 bp, Artificial Sequence
  Synthetic oligonucleotide
atcaggaagagacgggaatgggtgtcgtca

SEQ ID NO: 158686 - DNA, 30 bp, Artificial Sequence
  Synthetic oligonucleotide
gccgatccctagtcactgtgacattcgtca

SEQ ID NO: 158687 - DNA, 30 bp, Artificial Sequence
  Synthetic oligonucleotide
tgagtatttcacggagtgcgacgaaggtca

SEQ ID NO: 158688 - DNA, 30 bp, Artificial Sequence
  Synthetic oligonucleotide
tgattatatatagtattgttgccgaggtca

SEQ ID NO: 158689 - DNA, 30 bp, Artificial Sequence
  Synthetic oligonucleotide
ttggggcacgtaaaatcatgttataggtca

SEQ ID NO: 158690 - DNA, 30 bp, Artificial Sequence
  Synthetic oligonucleotide
gggaattcgcagatcagggatcttaggtca

SEQ ID NO: 158691 - DNA, 30 bp, Artificial Sequence
  Synthetic oligonucleotide
agtgcctagtgatagcctacctcacggtca

SEQ ID NO: 158692 - DNA, 30 bp, Artificial Sequence
  Synthetic oligonucleotide
ttgaagatcgtcctcacttatacccggtca

SEQ ID NO: 158693 - DNA, 30 bp, Artificial Sequence
  Synthetic oligonucleotide
aactgtcagtggagcccgtaatgtcggtca

SEQ ID NO: 158694 - DNA, 29 bp, Artificial Sequence
  Synthetic oligonucleotide
cgtactagacgcgtatctttgccgggtca

SEQ ID NO: 158695 - DNA, 30 bp, Artificial Sequence
  Synthetic oligonucleotide
ggacgagcatagccgatcgcatctgggtca

SEQ ID NO: 158696 - DNA, 30 bp, Artificial Sequence
  Synthetic oligonucleotide
gcggcacggcaaacatgttcctctgggtca

SEQ ID NO: 158697 - DNA, 30 bp, Artificial Sequence
  Synthetic oligonucleotide
tccgctcgtaatcagctgaccgaaatgtca

SEQ ID NO: 158698 - DNA, 30 bp, Artificial Sequence
  Synthetic oligonucleotide
gaattgaatggcgtagcgatcgaaatgtca

SEQ ID NO: 158699 - DNA, 30 bp, Artificial Sequence
  Synthetic oligonucleotide
tgactattgtctcactacttccgaatgtca

SEQ ID NO: 158700 - DNA, 30 bp, Artificial Sequence
  Synthetic oligonucleotide
tggtctgaaccaaagcacttgtacatgtca

SEQ ID NO: 158701 - DNA, 30 bp, Artificial Sequence
  Synthetic oligonucleotide
actgagatctgttttaaaaatcatatgtca

SEQ ID NO: 158702 - DNA, 30 bp, Artificial Sequence
  Synthetic oligonucleotide
atcgtatattaatacgacacccgactgtca

SEQ ID NO: 158703 - DNA, 30 bp, Artificial Sequence
  Synthetic oligonucleotide
tatagtattaggcatatccctgtactgtca

SEQ ID NO: 158704 - DNA, 30 bp, Artificial Sequence
  Synthetic oligonucleotide
tcagcggagagtcagagttaccttctgtca

SEQ ID NO: 158705 - DNA, 30 bp, Artificial Sequence
  Synthetic oligonucleotide
gcttgcttggctcaaccagtataagtgtca

SEQ ID NO: 158706 - DNA, 30 bp, Artificial Sequence
  Synthetic oligonucleotide
acggactggctctcttgaactccagtgtca

SEQ ID NO: 158707 - DNA, 30 bp, Artificial Sequence
  Synthetic oligonucleotide
caggggtattgcttaaggatattagtgtca

SEQ ID NO: 158708 - DNA, 30 bp, Artificial Sequence
  Synthetic oligonucleotide
caatcgaggtagggtgttaaggtcgtgtca

SEQ ID NO: 158709 - DNA, 29 bp, Artificial Sequence
  Synthetic oligonucleotide
accgataatgctgtgacctcgaggtgtca

SEQ ID NO: 158710 - DNA, 30 bp, Artificial Sequence
  Synthetic oligonucleotide
acggcttgaattagaaccagtgaggtgtca

SEQ ID NO: 158711 - DNA, 31 bp, Artificial Sequence
  Synthetic oligonucleotide
gcggcatcaaaatacttcagtagcattgtca

SEQ ID NO: 158712 - DNA, 30 bp, Artificial Sequence
  Synthetic oligonucleotide
atgcgctaagctgctcagtaatggttgtca

SEQ ID NO: 158713 - DNA, 30 bp, Artificial Sequence
  Synthetic oligonucleotide
tcgaaccagagtgcttcggtgattttgtca

SEQ ID NO: 158714 - DNA, 30 bp, Artificial Sequence
  Synthetic oligonucleotide
tatatatgtgctcagaacgaaagaaattca

SEQ ID NO: 158715 - DNA, 30 bp, Artificial Sequence
  Synthetic oligonucleotide
agaacaccagagtttgtataaagaaattca

SEQ ID NO: 158716 - DNA, 30 bp, Artificial Sequence
  Synthetic oligonucleotide
agcagcgtctcgctcagcaggtgaaattca

SEQ ID NO: 158717 - DNA, 30 bp, Artificial Sequence
  Synthetic oligonucleotide
ccgtcaccaaggatcggaaacagcaattca

SEQ ID NO: 158718 - DNA, 30 bp, Artificial Sequence
  Synthetic oligonucleotide
gagattagaatgggttgggggctacattca

SEQ ID NO: 158719 - DNA, 30 bp, Artificial Sequence
  Synthetic oligonucleotide
tggctgacagcaaccgcgcttcaccattca

SEQ ID NO: 158720 - DNA, 30 bp, Artificial Sequence
  Synthetic oligonucleotide
agacttagtaaggtatatcttatagattca

SEQ ID NO: 158721 - DNA, 30 bp, Artificial Sequence
  Synthetic oligonucleotide
cgtattccccgtaagatacaattagattca

SEQ ID NO: 158722 - DNA, 30 bp, Artificial Sequence
  Synthetic oligonucleotide
tggcaatccttgagcaatcggtccgattca

SEQ ID NO: 158723 - DNA, 30 bp, Artificial Sequence
  Synthetic oligonucleotide
gaacttcgagagattgggatcagcgattca

SEQ ID NO: 158724 - DNA, 30 bp, Artificial Sequence
  Synthetic oligonucleotide
tggccaaattgattccctagctcggattca

SEQ ID NO: 158725 - DNA, 30 bp, Artificial Sequence
  Synthetic oligonucleotide
tagttggtataggaagacgtctatgattca

SEQ ID NO: 158726 - DNA, 30 bp, Artificial Sequence
  Synthetic oligonucleotide
caccaagtaaacagaggaataggatattca

SEQ ID NO: 158727 - DNA, 30 bp, Artificial Sequence
  Synthetic oligonucleotide
gcgcttaataacatgtgggcatactattca

SEQ ID NO: 158728 - DNA, 30 bp, Artificial Sequence
  Synthetic oligonucleotide
tcagacagagagcacggcagggtctattca

SEQ ID NO: 158729 - DNA, 30 bp, Artificial Sequence
  Synthetic oligonucleotide
tgcatcgaggcttatagtctgtattattca

SEQ ID NO: 158730 - DNA, 30 bp, Artificial Sequence
  Synthetic oligonucleotide
agacattggcaatcaggccaggtgacttca

SEQ ID NO: 158731 - DNA, 30 bp, Artificial Sequence
  Synthetic oligonucleotide
acaaagggccactgtattagacatacttca

SEQ ID NO: 158732 - DNA, 30 bp, Artificial Sequence
  Synthetic oligonucleotide
cgtcgtggcgaacctgaactcgatccttca

SEQ ID NO: 158733 - DNA, 30 bp, Artificial Sequence
  Synthetic oligonucleotide
aacgcggtaagtctttaacgtttagcttca

SEQ ID NO: 158734 - DNA, 30 bp, Artificial Sequence
  Synthetic oligonucleotide
gactccagatactaaactgtgagggcttca

SEQ ID NO: 158735 - DNA, 30 bp, Artificial Sequence
  Synthetic oligonucleotide
aaagaacaaccatattccgattttgcttca

SEQ ID NO: 158736 - DNA, 30 bp, Artificial Sequence
  Synthetic oligonucleotide
acgggggaggtaaaaacttcctgctcttca

SEQ ID NO: 158737 - DNA, 30 bp, Artificial Sequence
  Synthetic oligonucleotide
ccgttaggtattttacacgctatgtcttca

SEQ ID NO: 158738 - DNA, 30 bp, Artificial Sequence
  Synthetic oligonucleotide
caataatggtgacatcctgcgcaaagttca

SEQ ID NO: 158739 - DNA, 30 bp, Artificial Sequence
  Synthetic oligonucleotide
ataaggagtgctggcgtcgcattaagttca

SEQ ID NO: 158740 - DNA, 30 bp, Artificial Sequence
  Synthetic oligonucleotide
taagtaatcccgtaaagccttggcagttca

SEQ ID NO: 158741 - DNA, 30 bp, Artificial Sequence
  Synthetic oligonucleotide
gtaattgactgggtttggaagtatagttca

SEQ ID NO: 158742 - DNA, 30 bp, Artificial Sequence
  Synthetic oligonucleotide
tggaccttggttttcgattcaagccgttca

SEQ ID NO: 158743 - DNA, 30 bp, Artificial Sequence
  Synthetic oligonucleotide
gatccggcttaatcttgtgtcaagcgttca

SEQ ID NO: 158744 - DNA, 30 bp, Artificial Sequence
  Synthetic oligonucleotide
cttcagttatgaagactttgatagcgttca

SEQ ID NO: 158745 - DNA, 30 bp, Artificial Sequence
  Synthetic oligonucleotide
gtcgtgttcagaatttttcgctagcgttca

SEQ ID NO: 158746 - DNA, 30 bp, Artificial Sequence
  Synthetic oligonucleotide
gtcatctcgaccctcacgaggtcgcgttca

SEQ ID NO: 158747 - DNA, 30 bp, Artificial Sequence
  Synthetic oligonucleotide
tatggagatgtaagcttagcgcggcgttca

SEQ ID NO: 158748 - DNA, 31 bp, Artificial Sequence
  Synthetic oligonucleotide
ctgacacaaatcaacacctagagccggttca

SEQ ID NO: 158749 - DNA, 30 bp, Artificial Sequence
  Synthetic oligonucleotide
tctagggtgcggccgctgcagcctggttca

SEQ ID NO: 158750 - DNA, 30 bp, Artificial Sequence
  Synthetic oligonucleotide
ctatttaggacactgattccagaatgttca

SEQ ID NO: 158751 - DNA, 30 bp, Artificial Sequence
  Synthetic oligonucleotide
cgacgcatagaggagcaccagagatgttca

SEQ ID NO: 158752 - DNA, 30 bp, Artificial Sequence
  Synthetic oligonucleotide
catcgtaggccgaaacgcgggatatgttca

SEQ ID NO: 158753 - DNA, 30 bp, Artificial Sequence
  Synthetic oligonucleotide
tgtgcgagtccaaaattagtagcgtgttca

SEQ ID NO: 158754 - DNA, 30 bp, Artificial Sequence
  Synthetic oligonucleotide
ctgccctcccatgctcagtccgaaatttca

SEQ ID NO: 158755 - DNA, 30 bp, Artificial Sequence
  Synthetic oligonucleotide
gaataggggtcgctaagtcagtgcatttca

SEQ ID NO: 158756 - DNA, 30 bp, Artificial Sequence
  Synthetic oligonucleotide
actcacccgtcagacgtgatccgcctttca

SEQ ID NO: 158757 - DNA, 30 bp, Artificial Sequence
  Synthetic oligonucleotide
tggcatatgctcttagttaggtcgctttca

SEQ ID NO: 158758 - DNA, 30 bp, Artificial Sequence
  Synthetic oligonucleotide
ggagtcccaccgaggttaatttcagtttca

SEQ ID NO: 158759 - DNA, 30 bp, Artificial Sequence
  Synthetic oligonucleotide
ttcattcgaaataagtttgcccacgtttca

SEQ ID NO: 158760 - DNA, 30 bp, Artificial Sequence
  Synthetic oligonucleotide
acgttgacatccctatagacgtcggtttca

SEQ ID NO: 158761 - DNA, 30 bp, Artificial Sequence
  Synthetic oligonucleotide
tattcgaactacggtcaatcgggtgtttca

SEQ ID NO: 158762 - DNA, 30 bp, Artificial Sequence
  Synthetic oligonucleotide
cgctctgcgggaccccaaagtaacttttca

SEQ ID NO: 158763 - DNA, 30 bp, Artificial Sequence
  Synthetic oligonucleotide
catcggacagatactgtaaaagttttttca

SEQ ID NO: 158764 - DNA, 30 bp, Artificial Sequence
  Synthetic oligonucleotide
acgttggaacctacgcaactttccaaaaga

SEQ ID NO: 158765 - DNA, 30 bp, Artificial Sequence
  Synthetic oligonucleotide
gtacttatgcgtgccaaaagaaggaaaaga

SEQ ID NO: 158766 - DNA, 30 bp, Artificial Sequence
  Synthetic oligonucleotide
gccgtttagaatcgtaggaggctgaaaaga

SEQ ID NO: 158767 - DNA, 30 bp, Artificial Sequence
  Synthetic oligonucleotide
tcgacggaattacaccacgaggtgaaaaga

SEQ ID NO: 158768 - DNA, 30 bp, Artificial Sequence
  Synthetic oligonucleotide
cataaatggataacgacgaaagataaaaga

SEQ ID NO: 158769 - DNA, 30 bp, Artificial Sequence
  Synthetic oligonucleotide
tggcaatacttgcgtcggttgtctaaaaga

SEQ ID NO: 158770 - DNA, 30 bp, Artificial Sequence
  Synthetic oligonucleotide
gccgtctccccaaatcgaagtggacaaaga

SEQ ID NO: 158771 - DNA, 30 bp, Artificial Sequence
  Synthetic oligonucleotide
ttagtaatacgtgggctcgggtgacaaaga

SEQ ID NO: 158772 - DNA, 30 bp, Artificial Sequence
  Synthetic oligonucleotide
ttgacgttttggctgaccaccgaccaaaga

SEQ ID NO: 158773 - DNA, 30 bp, Artificial Sequence
  Synthetic oligonucleotide
cctcccgggctcaaggagcactcccaaaga

SEQ ID NO: 158774 - DNA, 30 bp, Artificial Sequence
  Synthetic oligonucleotide
ggcagggaactctggaaacgtcagcaaaga

SEQ ID NO: 158775 - DNA, 30 bp, Artificial Sequence
  Synthetic oligonucleotide
tgcactgcgcattagttaagacgcgaaaga

SEQ ID NO: 158776 - DNA, 30 bp, Artificial Sequence
  Synthetic oligonucleotide
acatttacgtgttgagctataccggaaaga

SEQ ID NO: 158777 - DNA, 30 bp, Artificial Sequence
  Synthetic oligonucleotide
attcgagattgaaatcattagccggaaaga

SEQ ID NO: 158778 - DNA, 30 bp, Artificial Sequence
  Synthetic oligonucleotide
taaggtcagcactcttggacactggaaaga

SEQ ID NO: 158779 - DNA, 30 bp, Artificial Sequence
  Synthetic oligonucleotide
gcccacatccgagatgatgctttggaaaga

SEQ ID NO: 158780 - DNA, 30 bp, Artificial Sequence
  Synthetic oligonucleotide
aggtctacaatggcgcgctaattataaaga

SEQ ID NO: 158781 - DNA, 30 bp, Artificial Sequence
  Synthetic oligonucleotide
gtgcacacgggggaaataccccaaacaaga

SEQ ID NO: 158782 - DNA, 30 bp, Artificial Sequence
  Synthetic oligonucleotide
gcacgtgaatgtctatagtaacccacaaga

SEQ ID NO: 158783 - DNA, 30 bp, Artificial Sequence
  Synthetic oligonucleotide
cttcacgccggtacgagccaaggcacaaga

SEQ ID NO: 158784 - DNA, 30 bp, Artificial Sequence
  Synthetic oligonucleotide
aacacttcaatactgactttcattacaaga

SEQ ID NO: 158785 - DNA, 30 bp, Artificial Sequence
  Synthetic oligonucleotide
agggagatcagtgtagctgcctttacaaga

SEQ ID NO: 158786 - DNA, 30 bp, Artificial Sequence
  Synthetic oligonucleotide
tagaccgctcagacgatcgaagagccaaga

SEQ ID NO: 158787 - DNA, 30 bp, Artificial Sequence
  Synthetic oligonucleotide
aaaacagaaaactcagttatatcgccaaga

SEQ ID NO: 158788 - DNA, 30 bp, Artificial Sequence
  Synthetic oligonucleotide
gggaccatattgtcccattgtaggccaaga

SEQ ID NO: 158789 - DNA, 30 bp, Artificial Sequence
  Synthetic oligonucleotide
ctggtgtcacaaggaggacattttccaaga

SEQ ID NO: 158790 - DNA, 30 bp, Artificial Sequence
  Synthetic oligonucleotide
caagtaggtactaattagttttaagcaaga

SEQ ID NO: 158791 - DNA, 30 bp, Artificial Sequence
  Synthetic oligonucleotide
acgggcgtcttccactgatggaaggcaaga

SEQ ID NO: 158792 - DNA, 30 bp, Artificial Sequence
  Synthetic oligonucleotide
gggtaacggggaagtagaacacaatcaaga

SEQ ID NO: 158793 - DNA, 30 bp, Artificial Sequence
  Synthetic oligonucleotide
gtgggacaaaatttctgagtaaagtcaaga

SEQ ID NO: 158794 - DNA, 30 bp, Artificial Sequence
  Synthetic oligonucleotide
tgtgcccaccagggtatgatctagtcaaga

SEQ ID NO: 158795 - DNA, 30 bp, Artificial Sequence
  Synthetic oligonucleotide
tctctgtgtgcaattgtgaatacgtcaaga

SEQ ID NO: 158796 - DNA, 30 bp, Artificial Sequence
  Synthetic oligonucleotide
cttaggtgtctgtaatagagggaaagaaga

SEQ ID NO: 158797 - DNA, 30 bp, Artificial Sequence
  Synthetic oligonucleotide
tggtgtcctggatggataacctcaagaaga

SEQ ID NO: 158798 - DNA, 30 bp, Artificial Sequence
  Synthetic oligonucleotide
gacggctatgatcgggccttaggaagaaga

SEQ ID NO: 158799 - DNA, 30 bp, Artificial Sequence
  Synthetic oligonucleotide
agagattgtggtggctgggccccgagaaga

SEQ ID NO: 158800 - DNA, 30 bp, Artificial Sequence
  Synthetic oligonucleotide
tcaactggggggctcgcttcccggagaaga

SEQ ID NO: 158801 - DNA, 30 bp, Artificial Sequence
  Synthetic oligonucleotide
gacatactcctgctcctaccattgagaaga

SEQ ID NO: 158802 - DNA, 30 bp, Artificial Sequence
  Synthetic oligonucleotide
gacccatagtccggtagcttagctagaaga

SEQ ID NO: 158803 - DNA, 30 bp, Artificial Sequence
  Synthetic oligonucleotide
ccgccgagatctagttgaatattacgaaga

SEQ ID NO: 158804 - DNA, 30 bp, Artificial Sequence
  Synthetic oligonucleotide
cccgaaccaagtttaggcccccaccgaaga

SEQ ID NO: 158805 - DNA, 30 bp, Artificial Sequence
  Synthetic oligonucleotide
tgggaccgtaactagttagtaagccgaaga

SEQ ID NO: 158806 - DNA, 30 bp, Artificial Sequence
  Synthetic oligonucleotide
acgatatgaggaagctcaacacgccgaaga

SEQ ID NO: 158807 - DNA, 30 bp, Artificial Sequence
  Synthetic oligonucleotide
gatggtagagttggcgaggattgccgaaga

SEQ ID NO: 158808 - DNA, 30 bp, Artificial Sequence
  Synthetic oligonucleotide
cctgatggcatcacctcgccaatccgaaga

SEQ ID NO: 158809 - DNA, 30 bp, Artificial Sequence
  Synthetic oligonucleotide
tggttaggtacggagtaaggccagcgaaga

SEQ ID NO: 158810 - DNA, 30 bp, Artificial Sequence
  Synthetic oligonucleotide
gggctcaagtgatctgacctggagcgaaga

SEQ ID NO: 158811 - DNA, 30 bp, Artificial Sequence
  Synthetic oligonucleotide
aactgacgtaggacgatatacgatcgaaga

SEQ ID NO: 158812 - DNA, 30 bp, Artificial Sequence
  Synthetic oligonucleotide
cggctcgctcatcaacagcaacgtcgaaga

SEQ ID NO: 158813 - DNA, 30 bp, Artificial Sequence
  Synthetic oligonucleotide
agaatcagtgggatgatgtagaaaggaaga

SEQ ID NO: 158814 - DNA, 30 bp, Artificial Sequence
  Synthetic oligonucleotide
aaaattacgtcccgatatagttccggaaga

SEQ ID NO: 158815 - DNA, 30 bp, Artificial Sequence
  Synthetic oligonucleotide
agcaggccaccctgaactgaaaggggaaga

SEQ ID NO: 158816 - DNA, 30 bp, Artificial Sequence
  Synthetic oligonucleotide
cggatgcgtgcaagaggggctctgggaaga

SEQ ID NO: 158817 - DNA, 31 bp, Artificial Sequence
  Synthetic oligonucleotide
agggttgtacttcctcacgtgttcctgaaga

SEQ ID NO: 158818 - DNA, 30 bp, Artificial Sequence
  Synthetic oligonucleotide
ccctcggcattgattgatcaaggctgaaga

SEQ ID NO: 158819 - DNA, 30 bp, Artificial Sequence
  Synthetic oligonucleotide
cgggaccctgtggaatcccagcagtgaaga

SEQ ID NO: 158820 - DNA, 30 bp, Artificial Sequence
  Synthetic oligonucleotide
ggctgtcatgagacagggaacatgtgaaga

SEQ ID NO: 158821 - DNA, 30 bp, Artificial Sequence
  Synthetic oligonucleotide
tcgggcatacatccgtacaaggtttgaaga

SEQ ID NO: 158822 - DNA, 30 bp, Artificial Sequence
  Synthetic oligonucleotide
ggcgcgtgataagtgatagtgaaaataaga

SEQ ID NO: 158823 - DNA, 30 bp, Artificial Sequence
  Synthetic oligonucleotide
tcatcctgagcgaccctcccgataataaga

SEQ ID NO: 158824 - DNA, 30 bp, Artificial Sequence
  Synthetic oligonucleotide
cagccaaccataaattgtatcaacataaga

SEQ ID NO: 158825 - DNA, 30 bp, Artificial Sequence
  Synthetic oligonucleotide
ctcggttatcgtgtatgtaatcagataaga

SEQ ID NO: 158826 - DNA, 30 bp, Artificial Sequence
  Synthetic oligonucleotide
gaggaacatcaccggagaggacctataaga

SEQ ID NO: 158827 - DNA, 30 bp, Artificial Sequence
  Synthetic oligonucleotide
cgcctgctgcgcgaggtaggcctcctaaga

SEQ ID NO: 158828 - DNA, 30 bp, Artificial Sequence
  Synthetic oligonucleotide
caagcactattccaccccatcagggtaaga

SEQ ID NO: 158829 - DNA, 30 bp, Artificial Sequence
  Synthetic oligonucleotide
ctaatcgacgcaaatgtacacagtgtaaga

SEQ ID NO: 158830 - DNA, 30 bp, Artificial Sequence
  Synthetic oligonucleotide
cggccggcaactagttttggcagtgtaaga

SEQ ID NO: 158831 - DNA, 30 bp, Artificial Sequence
  Synthetic oligonucleotide
aagtccatcagtctcactggaaaattaaga

SEQ ID NO: 158832 - DNA, 30 bp, Artificial Sequence
  Synthetic oligonucleotide
tcagaaaacaccgatttacataacttaaga

SEQ ID NO: 158833 - DNA, 30 bp, Artificial Sequence
  Synthetic oligonucleotide
tcacgagcattctgggccgcgagcttaaga

SEQ ID NO: 158834 - DNA, 30 bp, Artificial Sequence
  Synthetic oligonucleotide
aatgatagtatagatagacacatgttaaga

SEQ ID NO: 158835 - DNA, 30 bp, Artificial Sequence
  Synthetic oligonucleotide
tgtggtgcttgagtcgtacgtctgttaaga

SEQ ID NO: 158836 - DNA, 30 bp, Artificial Sequence
  Synthetic oligonucleotide
ccgacacggtaatgtggcattggtttaaga

SEQ ID NO: 158837 - DNA, 30 bp, Artificial Sequence
  Synthetic oligonucleotide
aaaacacgcacttggttggggaaaaacaga

SEQ ID NO: 158838 - DNA, 30 bp, Artificial Sequence
  Synthetic oligonucleotide
ccctaaatgatctgtgacttcataaacaga

SEQ ID NO: 158839 - DNA, 30 bp, Artificial Sequence
  Synthetic oligonucleotide
ttggtgcaggtaaccttcattctcaacaga

SEQ ID NO: 158840 - DNA, 30 bp, Artificial Sequence
  Synthetic oligonucleotide
ctcaggagattcaaaattcccttgaacaga

SEQ ID NO: 158841 - DNA, 30 bp, Artificial Sequence
  Synthetic oligonucleotide
ggtggttaggattcttcctagagacacaga

SEQ ID NO: 158842 - DNA, 30 bp, Artificial Sequence
  Synthetic oligonucleotide
cgcaaacggagcatatgtactgggcacaga

SEQ ID NO: 158843 - DNA, 30 bp, Artificial Sequence
  Synthetic oligonucleotide
ccacccatggacgttattaatgcagacaga

SEQ ID NO: 158844 - DNA, 30 bp, Artificial Sequence
  Synthetic oligonucleotide
tgcctcgttggcgtgcgcgaggaggacaga

SEQ ID NO: 158845 - DNA, 30 bp, Artificial Sequence
  Synthetic oligonucleotide
gtcattgtcgtactgaataaacgggacaga

SEQ ID NO: 158846 - DNA, 29 bp, Artificial Sequence
  Synthetic oligonucleotide
cggatatgaattctgccgtagtggacaga

SEQ ID NO: 158847 - DNA, 30 bp, Artificial Sequence
  Synthetic oligonucleotide
gaagtgggagctacggttggtagtgacaga

SEQ ID NO: 158848 - DNA, 30 bp, Artificial Sequence
  Synthetic oligonucleotide
gttcaagggattgtaacaatggttgacaga

SEQ ID NO: 158849 - DNA, 30 bp, Artificial Sequence
  Synthetic oligonucleotide
atgttttatgcaatattgagatttgacaga

SEQ ID NO: 158850 - DNA, 31 bp, Artificial Sequence
  Synthetic oligonucleotide
cgggtggcacctaggattctgtccatacaga

SEQ ID NO: 158851 - DNA, 30 bp, Artificial Sequence
  Synthetic oligonucleotide
gttagctcacgccgcccggaggtatacaga

SEQ ID NO: 158852 - DNA, 30 bp, Artificial Sequence
  Synthetic oligonucleotide
aggtcgagcccgcggcgtgctttatacaga

SEQ ID NO: 158853 - DNA, 30 bp, Artificial Sequence
  Synthetic oligonucleotide
ctcgtatcgtggggaagcttgtgctacaga

SEQ ID NO: 158854 - DNA, 30 bp, Artificial Sequence
  Synthetic oligonucleotide
aagtgtggtcttgaaatgcatctgtacaga

SEQ ID NO: 158855 - DNA, 30 bp, Artificial Sequence
  Synthetic oligonucleotide
tagccaacgtacttggcagtacattacaga

SEQ ID NO: 158856 - DNA, 30 bp, Artificial Sequence
  Synthetic oligonucleotide
gccgatgctccctagtagatccaaaccaga

SEQ ID NO: 158857 - DNA, 30 bp, Artificial Sequence
  Synthetic oligonucleotide
tggggtttggtggagaaagcgaacaccaga

SEQ ID NO: 158858 - DNA, 30 bp, Artificial Sequence
  Synthetic oligonucleotide
aagtacctctgtaattatccacacaccaga

SEQ ID NO: 158859 - DNA, 30 bp, Artificial Sequence
  Synthetic oligonucleotide
tcataagtagcggggaactgttccaccaga

SEQ ID NO: 158860 - DNA, 30 bp, Artificial Sequence
  Synthetic oligonucleotide
cgatcgagcggggcagcggtatgcaccaga

SEQ ID NO: 158861 - DNA, 31 bp, Artificial Sequence
  Synthetic oligonucleotide
gtattgagtaggaaggtgctccattaccaga

SEQ ID NO: 158862 - DNA, 30 bp, Artificial Sequence
  Synthetic oligonucleotide
caaagtggtccaggtggagctaagcccaga

SEQ ID NO: 158863 - DNA, 30 bp, Artificial Sequence
  Synthetic oligonucleotide
ctgcgagatggtaggtgacgtgggcccaga

SEQ ID NO: 158864 - DNA, 30 bp, Artificial Sequence
  Synthetic oligonucleotide
taactaaggaagttggttaggcatcccaga

SEQ ID NO: 158865 - DNA, 30 bp, Artificial Sequence
  Synthetic oligonucleotide
cgcttattcagccatcactcatgcgccaga

SEQ ID NO: 158866 - DNA, 30 bp, Artificial Sequence
  Synthetic oligonucleotide
tgcccttacggccttattagaccggccaga

SEQ ID NO: 158867 - DNA, 30 bp, Artificial Sequence
  Synthetic oligonucleotide
atcctattggatcataatagtactgccaga

SEQ ID NO: 158868 - DNA, 30 bp, Artificial Sequence
  Synthetic oligonucleotide
ccgcgttatacggctgaaggttaatccaga

SEQ ID NO: 158869 - DNA, 30 bp, Artificial Sequence
  Synthetic oligonucleotide
gatcagaactgccgaggcactaactccaga

SEQ ID NO: 158870 - DNA, 30 bp, Artificial Sequence
  Synthetic oligonucleotide
caaaaccctatgaacaagacttcctccaga

SEQ ID NO: 158871 - DNA, 30 bp, Artificial Sequence
  Synthetic oligonucleotide
catcccagaacatcgggagcaaggtccaga

SEQ ID NO: 158872 - DNA, 30 bp, Artificial Sequence
  Synthetic oligonucleotide
gcgaaggaactgaagattgatgcttccaga

SEQ ID NO: 158873 - DNA, 30 bp, Artificial Sequence
  Synthetic oligonucleotide
gatgctaagagagtagaactgtgaagcaga

SEQ ID NO: 158874 - DNA, 30 bp, Artificial Sequence
  Synthetic oligonucleotide
tacaacgtcccgcacgattatataagcaga

SEQ ID NO: 158875 - DNA, 30 bp, Artificial Sequence
  Synthetic oligonucleotide
tgtggtaactgtatggccgagacgagcaga

SEQ ID NO: 158876 - DNA, 30 bp, Artificial Sequence
  Synthetic oligonucleotide
gagcagaactatacgtcagatctccgcaga

SEQ ID NO: 158877 - DNA, 30 bp, Artificial Sequence
  Synthetic oligonucleotide
cccgcccatgcaatgcacccttagcgcaga

SEQ ID NO: 158878 - DNA, 30 bp, Artificial Sequence
  Synthetic oligonucleotide
atggcttctattgcacaaaacatgcgcaga

SEQ ID NO: 158879 - DNA, 30 bp, Artificial Sequence
  Synthetic oligonucleotide
cggcaataacccgggatgcaatatcgcaga

SEQ ID NO: 158880 - DNA, 30 bp, Artificial Sequence
  Synthetic oligonucleotide
agttggaatcggagactgaggtgtcgcaga

SEQ ID NO: 158881 - DNA, 30 bp, Artificial Sequence
  Synthetic oligonucleotide
ggcagcttcctacgagatagagcaggcaga

SEQ ID NO: 158882 - DNA, 30 bp, Artificial Sequence
  Synthetic oligonucleotide
tattatcaggcatatcgtgtgatcggcaga

SEQ ID NO: 158883 - DNA, 30 bp, Artificial Sequence
  Synthetic oligonucleotide
aaagtcgcataaagtagaggggtgggcaga

SEQ ID NO: 158884 - DNA, 30 bp, Artificial Sequence
  Synthetic oligonucleotide
acaaacagtagttccccctcgttgggcaga

SEQ ID NO: 158885 - DNA, 30 bp, Artificial Sequence
  Synthetic oligonucleotide
gtattaaagccgtgaggtagccgatgcaga

SEQ ID NO: 158886 - DNA, 30 bp, Artificial Sequence
  Synthetic oligonucleotide
gtcactcgacgaagaaatgatcagtgcaga

SEQ ID NO: 158887 - DNA, 30 bp, Artificial Sequence
  Synthetic oligonucleotide
actgtctctcgccgccacgtgaacatcaga

SEQ ID NO: 158888 - DNA, 30 bp, Artificial Sequence
  Synthetic oligonucleotide
ggctatcccacggcatgggtcacgatcaga

SEQ ID NO: 158889 - DNA, 30 bp, Artificial Sequence
  Synthetic oligonucleotide
gggtatctcaaactgccgacatggatcaga

SEQ ID NO: 158890 - DNA, 30 bp, Artificial Sequence
  Synthetic oligonucleotide
acgcggtatgttaatcgaactcatatcaga

SEQ ID NO: 158891 - DNA, 30 bp, Artificial Sequence
  Synthetic oligonucleotide
cacacaccgacttcgggtttcaagctcaga

SEQ ID NO: 158892 - DNA, 29 bp, Artificial Sequence
  Synthetic oligonucleotide
ggcagcaagcaccgagacatgttctcaga

SEQ ID NO: 158893 - DNA, 30 bp, Artificial Sequence
  Synthetic oligonucleotide
atggcaatttaacggagacagcaagtcaga

SEQ ID NO: 158894 - DNA, 30 bp, Artificial Sequence
  Synthetic oligonucleotide
tatacagcgtagcgatgcgtacgcgtcaga

SEQ ID NO: 158895 - DNA, 30 bp, Artificial Sequence
  Synthetic oligonucleotide
gacgggataagcaatttggcgccggtcaga

SEQ ID NO: 158896 - DNA, 30 bp, Artificial Sequence
  Synthetic oligonucleotide
taacgaataatgtcgatcacctatgtcaga

SEQ ID NO: 158897 - DNA, 30 bp, Artificial Sequence
  Synthetic oligonucleotide
catagttgtgtcttaagcaatggtgtcaga

SEQ ID NO: 158898 - DNA, 30 bp, Artificial Sequence
  Synthetic oligonucleotide
tcggtcgtgggagattccgattttgtcaga

SEQ ID NO: 158899 - DNA, 30 bp, Artificial Sequence
  Synthetic oligonucleotide
tgcgatgcgggcgatgtccttagattcaga

SEQ ID NO: 158900 - DNA, 30 bp, Artificial Sequence
  Synthetic oligonucleotide
gtgagtgcgccagtgtacacgtgattcaga

SEQ ID NO: 158901 - DNA, 30 bp, Artificial Sequence
  Synthetic oligonucleotide
gtatggtgactagcacaccgaaagttcaga

SEQ ID NO: 158902 - DNA, 30 bp, Artificial Sequence
  Synthetic oligonucleotide
aggatcctccgcacatcgtgggacaagaga

SEQ ID NO: 158903 - DNA, 30 bp, Artificial Sequence
  Synthetic oligonucleotide
tattatattaagcacgttgcttacaagaga

SEQ ID NO: 158904 - DNA, 30 bp, Artificial Sequence
  Synthetic oligonucleotide
aagtatagggagaagattaaacgcaagaga

SEQ ID NO: 158905 - DNA, 30 bp, Artificial Sequence
  Synthetic oligonucleotide
atggggttggcttttcttcgttggaagaga

SEQ ID NO: 158906 - DNA, 31 bp, Artificial Sequence
  Synthetic oligonucleotide
ctagtagaggagtgatgaatcaaataagaga

SEQ ID NO: 158907 - DNA, 30 bp, Artificial Sequence
  Synthetic oligonucleotide
gcgaagggtaaactatacacccgtaagaga

SEQ ID NO: 158908 - DNA, 30 bp, Artificial Sequence
  Synthetic oligonucleotide
tactctgcgagggtaaaaggtcttaagaga

SEQ ID NO: 158909 - DNA, 30 bp, Artificial Sequence
  Synthetic oligonucleotide
cgttttggaattagatacggaggacagaga

SEQ ID NO: 158910 - DNA, 30 bp, Artificial Sequence
  Synthetic oligonucleotide
acccctaccccgagagattcttgacagaga

SEQ ID NO: 158911 - DNA, 30 bp, Artificial Sequence
  Synthetic oligonucleotide
taggaccatcggggttataaggatcagaga

SEQ ID NO: 158912 - DNA, 30 bp, Artificial Sequence
  Synthetic oligonucleotide
tttcgggaccctagcccgaatccagagaga

SEQ ID NO: 158913 - DNA, 30 bp, Artificial Sequence
  Synthetic oligonucleotide
gcccatccactgtgaatgcgaggagagaga

SEQ ID NO: 158914 - DNA, 30 bp, Artificial Sequence
  Synthetic oligonucleotide
tgccagagggataaagcgccgtccgagaga

SEQ ID NO: 158915 - DNA, 30 bp, Artificial Sequence
  Synthetic oligonucleotide
tgatgttatataaccgccctggaatagaga

SEQ ID NO: 158916 - DNA, 30 bp, Artificial Sequence
  Synthetic oligonucleotide
agtcctttcagatatcaccaggcaacgaga

SEQ ID NO: 158917 - DNA, 30 bp, Artificial Sequence
  Synthetic oligonucleotide
atcgaaataaacatggtgcatagcacgaga

SEQ ID NO: 158918 - DNA, 30 bp, Artificial Sequence
  Synthetic oligonucleotide
aaaggcggctaatcattgagtggcacgaga

SEQ ID NO: 158919 - DNA, 30 bp, Artificial Sequence
  Synthetic oligonucleotide
ggccgggagtatggcatgacttatacgaga

SEQ ID NO: 158920 - DNA, 30 bp, Artificial Sequence
  Synthetic oligonucleotide
tatctgtactaagcggcgagatttacgaga

SEQ ID NO: 158921 - DNA, 30 bp, Artificial Sequence
  Synthetic oligonucleotide
aacgtccagtagcagtggtataatccgaga

SEQ ID NO: 158922 - DNA, 30 bp, Artificial Sequence
  Synthetic oligonucleotide
gttgtagatgatatatcacaggcagcgaga

SEQ ID NO: 158923 - DNA, 30 bp, Artificial Sequence
  Synthetic oligonucleotide
actgcaactcagatggttctcggcgcgaga

SEQ ID NO: 158924 - DNA, 30 bp, Artificial Sequence
  Synthetic oligonucleotide
tcgagagagctctcatgaaggttggcgaga

SEQ ID NO: 158925 - DNA, 30 bp, Artificial Sequence
  Synthetic oligonucleotide
gtggtattttcatgtctattccctgcgaga

SEQ ID NO: 158926 - DNA, 30 bp, Artificial Sequence
  Synthetic oligonucleotide
ggtcagcactattaacgagctcgtgcgaga

SEQ ID NO: 158927 - DNA, 30 bp, Artificial Sequence
  Synthetic oligonucleotide
ctcgagtggtactgtggtttaatatcgaga

SEQ ID NO: 158928 - DNA, 30 bp, Artificial Sequence
  Synthetic oligonucleotide
ttggccttctgcctgaaatcggtatcgaga

SEQ ID NO: 158929 - DNA, 30 bp, Artificial Sequence
  Synthetic oligonucleotide
aaactccaaacataggcttcagcctcgaga

SEQ ID NO: 158930 - DNA, 30 bp, Artificial Sequence
  Synthetic oligonucleotide
gacccgacaacgagccccggagcgtcgaga

SEQ ID NO: 158931 - DNA, 30 bp, Artificial Sequence
  Synthetic oligonucleotide
ctgagcgaataggtatggtgtgtaaggaga

SEQ ID NO: 158932 - DNA, 30 bp, Artificial Sequence
  Synthetic oligonucleotide
gtccagcgacaggtgactccatgcaggaga

SEQ ID NO: 158933 - DNA, 30 bp, Artificial Sequence
  Synthetic oligonucleotide
cgggcgttccttcgaaagtacagacggaga

SEQ ID NO: 158934 - DNA, 30 bp, Artificial Sequence
  Synthetic oligonucleotide
aagagttacacataacggacggggcggaga

SEQ ID NO: 158935 - DNA, 30 bp, Artificial Sequence
  Synthetic oligonucleotide
atttgcaaggtcgtggtggaagctcggaga

SEQ ID NO: 158936 - DNA, 30 bp, Artificial Sequence
  Synthetic oligonucleotide
gcatgaaggtatcgacgataccgtcggaga

SEQ ID NO: 158937 - DNA, 30 bp, Artificial Sequence
  Synthetic oligonucleotide
tacgggagatggatgctagcaattcggaga

SEQ ID NO: 158938 - DNA, 30 bp, Artificial Sequence
  Synthetic oligonucleotide
ctgaagtcaacacgcgttttaaccgggaga

SEQ ID NO: 158939 - DNA, 30 bp, Artificial Sequence
  Synthetic oligonucleotide
gttcatattgcagggagtagacccgggaga

SEQ ID NO: 158940 - DNA, 30 bp, Artificial Sequence
  Synthetic oligonucleotide
agcggcaggtcctggacgttaaatgggaga

SEQ ID NO: 158941 - DNA, 30 bp, Artificial Sequence
  Synthetic oligonucleotide
catgccagctgtgggcgcacggatgggaga

SEQ ID NO: 158942 - DNA, 30 bp, Artificial Sequence
  Synthetic oligonucleotide
tctcgttggcaagagaggaacggatggaga

SEQ ID NO: 158943 - DNA, 29 bp, Artificial Sequence
  Synthetic oligonucleotide
cttaataagcccgtgcgaggctatggaga

SEQ ID NO: 158944 - DNA, 30 bp, Artificial Sequence
  Synthetic oligonucleotide
ccacaatagggtctactgaaactctggaga

SEQ ID NO: 158945 - DNA, 30 bp, Artificial Sequence
  Synthetic oligonucleotide
tgttcgtaagtaaacaacgacacgtggaga

SEQ ID NO: 158946 - DNA, 30 bp, Artificial Sequence
  Synthetic oligonucleotide
cagttgggatacggtaggactatgtggaga

SEQ ID NO: 158947 - DNA, 29 bp, Artificial Sequence
  Synthetic oligonucleotide
tagtcagaaggcccagctattattggaga

SEQ ID NO: 158948 - DNA, 30 bp, Artificial Sequence
  Synthetic oligonucleotide
aaggtacggtaaattggggcgataatgaga

SEQ ID NO: 158949 - DNA, 30 bp, Artificial Sequence
  Synthetic oligonucleotide
ctgggtataggtacacggctaacgatgaga

SEQ ID NO: 158950 - DNA, 30 bp, Artificial Sequence
  Synthetic oligonucleotide
tgaaaatgaaaatgacatccagccgtgaga

SEQ ID NO: 158951 - DNA, 30 bp, Artificial Sequence
  Synthetic oligonucleotide
attagaggtaggagtggctcacatgtgaga

SEQ ID NO: 158952 - DNA, 30 bp, Artificial Sequence
  Synthetic oligonucleotide
ctaaatattataaagtcgtagacattgaga

SEQ ID NO: 158953 - DNA, 30 bp, Artificial Sequence
  Synthetic oligonucleotide
agctggcggataaacgctccatcgttgaga

SEQ ID NO: 158954 - DNA, 30 bp, Artificial Sequence
  Synthetic oligonucleotide
tgcgggacatgtgtgagtcgtgctttgaga

SEQ ID NO: 158955 - DNA, 30 bp, Artificial Sequence
  Synthetic oligonucleotide
cgagacataatcgtggaccagcacaataga

SEQ ID NO: 158956 - DNA, 30 bp, Artificial Sequence
  Synthetic oligonucleotide
gatgaaacgggatattctgtagacaataga

SEQ ID NO: 158957 - DNA, 30 bp, Artificial Sequence
  Synthetic oligonucleotide
agatctatgtcaggcatacatgccaataga

SEQ ID NO: 158958 - DNA, 30 bp, Artificial Sequence
  Synthetic oligonucleotide
gatgtagatctcattatcggatcacataga

SEQ ID NO: 158959 - DNA, 30 bp, Artificial Sequence
  Synthetic oligonucleotide
ccagtgtggtagtcgcatggtggacataga

SEQ ID NO: 158960 - DNA, 30 bp, Artificial Sequence
  Synthetic oligonucleotide
ggcactgacacgatccaacggttacataga

SEQ ID NO: 158961 - DNA, 30 bp, Artificial Sequence
  Synthetic oligonucleotide
cgtacggttttgacgattaatgcgcataga

SEQ ID NO: 158962 - DNA, 30 bp, Artificial Sequence
  Synthetic oligonucleotide
aatcaggagtgctgaaatcaggctcataga

SEQ ID NO: 158963 - DNA, 30 bp, Artificial Sequence
  Synthetic oligonucleotide
gagcaaggggtcgtccgttttattcataga

SEQ ID NO: 158964 - DNA, 30 bp, Artificial Sequence
  Synthetic oligonucleotide
tatcgattgagaagcaccgagtttcataga

SEQ ID NO: 158965 - DNA, 30 bp, Artificial Sequence
  Synthetic oligonucleotide
aaacgccaggtgcatctgaagcccgataga

SEQ ID NO: 158966 - DNA, 30 bp, Artificial Sequence
  Synthetic oligonucleotide
cttagcaagaatctaaaaggacttgataga

SEQ ID NO: 158967 - DNA, 30 bp, Artificial Sequence
  Synthetic oligonucleotide
gacgaaggcacctgtatgcggtaatataga

SEQ ID NO: 158968 - DNA, 30 bp, Artificial Sequence
  Synthetic oligonucleotide
taaagcaaacagacaacattttcatataga

SEQ ID NO: 158969 - DNA, 30 bp, Artificial Sequence
  Synthetic oligonucleotide
cttgtaatctggagccaggccagatataga

SEQ ID NO: 158970 - DNA, 30 bp, Artificial Sequence
  Synthetic oligonucleotide
gcagatataaaaacaccggtaatatataga

SEQ ID NO: 158971 - DNA, 30 bp, Artificial Sequence
  Synthetic oligonucleotide
ttgaacagatgaaatatgactatatataga

SEQ ID NO: 158972 - DNA, 30 bp, Artificial Sequence
  Synthetic oligonucleotide
ccacggtctttgtattcagtggattataga

SEQ ID NO: 158973 - DNA, 30 bp, Artificial Sequence
  Synthetic oligonucleotide
gcacgctagcaaggactgcctccttataga

SEQ ID NO: 158974 - DNA, 30 bp, Artificial Sequence
  Synthetic oligonucleotide
gccgtcaagggcaattagttaatttataga

SEQ ID NO: 158975 - DNA, 30 bp, Artificial Sequence
  Synthetic oligonucleotide
attgacacatctacgcgtccacacactaga

SEQ ID NO: 158976 - DNA, 30 bp, Artificial Sequence
  Synthetic oligonucleotide
accttgccaaaaaaatgcagacacactaga

SEQ ID NO: 158977 - DNA, 30 bp, Artificial Sequence
  Synthetic oligonucleotide
ctaagagtggatctcggtaagcacactaga

SEQ ID NO: 158978 - DNA, 30 bp, Artificial Sequence
  Synthetic oligonucleotide
ccgatttgtctggcctatgtgcacactaga

SEQ ID NO: 158979 - DNA, 30 bp, Artificial Sequence
  Synthetic oligonucleotide
tccaggcatgtgcgccttgtgcccactaga

SEQ ID NO: 158980 - DNA, 30 bp, Artificial Sequence
  Synthetic oligonucleotide
actaggggggttatgcaataaaagactaga

SEQ ID NO: 158981 - DNA, 30 bp, Artificial Sequence
  Synthetic oligonucleotide
ggtgttacataactaaaccacaggactaga

SEQ ID NO: 158982 - DNA, 30 bp, Artificial Sequence
  Synthetic oligonucleotide
ggtcaaacgaccgaaataggttggactaga

SEQ ID NO: 158983 - DNA, 30 bp, Artificial Sequence
  Synthetic oligonucleotide
aggctactcactcggtgtgtgaggcctaga

SEQ ID NO: 158984 - DNA, 30 bp, Artificial Sequence
  Synthetic oligonucleotide
cagtaatggggaatgggtctgatgcctaga

SEQ ID NO: 158985 - DNA, 30 bp, Artificial Sequence
  Synthetic oligonucleotide
caacgtgttctgggatcagttagtcctaga

SEQ ID NO: 158986 - DNA, 30 bp, Artificial Sequence
  Synthetic oligonucleotide
ggaggggcaagggcaaaatcaattcctaga

SEQ ID NO: 158987 - DNA, 30 bp, Artificial Sequence
  Synthetic oligonucleotide
agacagattggagtatcacacgcggctaga

SEQ ID NO: 158988 - DNA, 30 bp, Artificial Sequence
  Synthetic oligonucleotide
gggacgtatagttcgatacttggggctaga

SEQ ID NO: 158989 - DNA, 30 bp, Artificial Sequence
  Synthetic oligonucleotide
aatctgcgaacccaaaaccccactgctaga

SEQ ID NO: 158990 - DNA, 30 bp, Artificial Sequence
  Synthetic oligonucleotide
cgtgagagcgctcatacagtcaaatctaga

SEQ ID NO: 158991 - DNA, 30 bp, Artificial Sequence
  Synthetic oligonucleotide
atcataaaagggcttagtcatcgatctaga

SEQ ID NO: 158992 - DNA, 30 bp, Artificial Sequence
  Synthetic oligonucleotide
tcatagacacaatatacttacatatctaga

SEQ ID NO: 158993 - DNA, 30 bp, Artificial Sequence
  Synthetic oligonucleotide
cgcgcgtgcctgggacgcaagacgtctaga

SEQ ID NO: 158994 - DNA, 30 bp, Artificial Sequence
  Synthetic oligonucleotide
atcagtcatagcgaagataactaaagtaga

SEQ ID NO: 158995 - DNA, 30 bp, Artificial Sequence
  Synthetic oligonucleotide
gagtccagagtgtagtgtcaacttagtaga

SEQ ID NO: 158996 - DNA, 30 bp, Artificial Sequence
  Synthetic oligonucleotide
tgcactcgatggcggattaggtcccgtaga

SEQ ID NO: 158997 - DNA, 30 bp, Artificial Sequence
  Synthetic oligonucleotide
aggtgctagaaccaacgggcgcgccgtaga

SEQ ID NO: 158998 - DNA, 30 bp, Artificial Sequence
  Synthetic oligonucleotide
ccggacaaactgctcgcatgacatcgtaga

SEQ ID NO: 158999 - DNA, 30 bp, Artificial Sequence
  Synthetic oligonucleotide
accggggtccaaggttccccgggtcgtaga

SEQ ID NO: 159000 - DNA, 30 bp, Artificial Sequence
  Synthetic oligonucleotide
aaacgggaagagaactttttgaatggtaga

SEQ ID NO: 159001 - DNA, 30 bp, Artificial Sequence
  Synthetic oligonucleotide
ttgatgagtagagcgtgtccccatggtaga

SEQ ID NO: 159002 - DNA, 30 bp, Artificial Sequence
  Synthetic oligonucleotide
ttgaatgaccggacgtgggcctgtggtaga

SEQ ID NO: 159003 - DNA, 30 bp, Artificial Sequence
  Synthetic oligonucleotide
cgggccgcggtaaagggacttattggtaga

SEQ ID NO: 159004 - DNA, 30 bp, Artificial Sequence
  Synthetic oligonucleotide
agtgataattaggattggcctggatgtaga

SEQ ID NO: 159005 - DNA, 30 bp, Artificial Sequence
  Synthetic oligonucleotide
cgtgattcaccatgggaagtaaagtgtaga

SEQ ID NO: 159006 - DNA, 30 bp, Artificial Sequence
  Synthetic oligonucleotide
cagtacggacacaatgtgacgtagtgtaga

SEQ ID NO: 159007 - DNA, 30 bp, Artificial Sequence
  Synthetic oligonucleotide
agggccggcggtaccacaaactggtgtaga

SEQ ID NO: 159008 - DNA, 30 bp, Artificial Sequence
  Synthetic oligonucleotide
tattcagcttaagtagattgtatttgtaga

SEQ ID NO: 159009 - DNA, 30 bp, Artificial Sequence
  Synthetic oligonucleotide
cgtagctcgagaagggctggagtttgtaga

SEQ ID NO: 159010 - DNA, 30 bp, Artificial Sequence
  Synthetic oligonucleotide
tactctcagaaagaaattaattccattaga

SEQ ID NO: 159011 - DNA, 30 bp, Artificial Sequence
  Synthetic oligonucleotide
aagagttaagtgaaacgtcgtggcattaga

SEQ ID NO: 159012 - DNA, 30 bp, Artificial Sequence
  Synthetic oligonucleotide
cggtttaacttaaatgtaaactaacttaga

SEQ ID NO: 159013 - DNA, 30 bp, Artificial Sequence
  Synthetic oligonucleotide
cccactgaacggctaaggctattgcttaga

SEQ ID NO: 159014 - DNA, 30 bp, Artificial Sequence
  Synthetic oligonucleotide
caatgctaaattccgggcagccgtcttaga

SEQ ID NO: 159015 - DNA, 30 bp, Artificial Sequence
  Synthetic oligonucleotide
tacctctaggagcaaccgtaagttcttaga

SEQ ID NO: 159016 - DNA, 30 bp, Artificial Sequence
  Synthetic oligonucleotide
agttttaaggtaatatgtaaactagttaga

SEQ ID NO: 159017 - DNA, 30 bp, Artificial Sequence
  Synthetic oligonucleotide
tgcacgtgccccttttatagttaggttaga

SEQ ID NO: 159018 - DNA, 30 bp, Artificial Sequence
  Synthetic oligonucleotide
tctgcatgatcatcaaatcagcgggttaga

SEQ ID NO: 159019 - DNA, 30 bp, Artificial Sequence
  Synthetic oligonucleotide
gatagtgatagagaggctacggtggttaga

SEQ ID NO: 159020 - DNA, 30 bp, Artificial Sequence
  Synthetic oligonucleotide
ttgtgtattaacaagtccatgtatgttaga

SEQ ID NO: 159021 - DNA, 30 bp, Artificial Sequence
  Synthetic oligonucleotide
tcacaataaacatcagtttcaagatttaga

SEQ ID NO: 159022 - DNA, 30 bp, Artificial Sequence
  Synthetic oligonucleotide
tcgtcggaacgtgagtgtgaggagtttaga

SEQ ID NO: 159023 - DNA, 30 bp, Artificial Sequence
  Synthetic oligonucleotide
gcacggggtagcattatcgcgtattttaga

SEQ ID NO: 159024 - DNA, 30 bp, Artificial Sequence
  Synthetic oligonucleotide
ctaagttaatgagggacatatccttttaga

SEQ ID NO: 159025 - DNA, 30 bp, Artificial Sequence
  Synthetic oligonucleotide
gaatgcgaccccagtcagactgcttttaga

SEQ ID NO: 159026 - DNA, 30 bp, Artificial Sequence
  Synthetic oligonucleotide
gtccaaccgaatgtgtatctgtcgaaacga

SEQ ID NO: 159027 - DNA, 30 bp, Artificial Sequence
  Synthetic oligonucleotide
gtaaagtcgcgtcccacttggggccaacga

SEQ ID NO: 159028 - DNA, 30 bp, Artificial Sequence
  Synthetic oligonucleotide
taatcggtaatttggagccctttgcaacga

SEQ ID NO: 159029 - DNA, 30 bp, Artificial Sequence
  Synthetic oligonucleotide
agctaggcgttgagctctttgtaagaacga

SEQ ID NO: 159030 - DNA, 30 bp, Artificial Sequence
  Synthetic oligonucleotide
acgccgtacaattcgcaccccccagaacga

SEQ ID NO: 159031 - DNA, 30 bp, Artificial Sequence
  Synthetic oligonucleotide
gtaattcacacaatcgaggattgagaacga

SEQ ID NO: 159032 - DNA, 30 bp, Artificial Sequence
  Synthetic oligonucleotide
ccggataagggaattttcatgtaggaacga

SEQ ID NO: 159033 - DNA, 30 bp, Artificial Sequence
  Synthetic oligonucleotide
acgcatgacggcgcactaactggggaacga

SEQ ID NO: 159034 - DNA, 30 bp, Artificial Sequence
  Synthetic oligonucleotide
aatcaggaagggtcctcaaaaactgaacga

SEQ ID NO: 159035 - DNA, 30 bp, Artificial Sequence
  Synthetic oligonucleotide
ggattaacgcgcctgccatagaaataacga

SEQ ID NO: 159036 - DNA, 30 bp, Artificial Sequence
  Synthetic oligonucleotide
tccgtcactcgggtcctgcgagtgtaacga

SEQ ID NO: 159037 - DNA, 30 bp, Artificial Sequence
  Synthetic oligonucleotide
gaccagcaggccgcggccatgtcaacacga

SEQ ID NO: 159038 - DNA, 27 bp, Artificial Sequence
  Synthetic oligonucleotide
ggattacgttcacttgaaagaacacga

SEQ ID NO: 159039 - DNA, 30 bp, Artificial Sequence
  Synthetic oligonucleotide
tatgcctacgaaatgacttacgctacacga

SEQ ID NO: 159040 - DNA, 30 bp, Artificial Sequence
  Synthetic oligonucleotide
gcagcaaagagaacgttgaagtctacacga

SEQ ID NO: 159041 - DNA, 30 bp, Artificial Sequence
  Synthetic oligonucleotide
tagcaaggcttacgccccggagcaccacga

SEQ ID NO: 159042 - DNA, 30 bp, Artificial Sequence
  Synthetic oligonucleotide
agcttgagcccgtatctacttgcagcacga

SEQ ID NO: 159043 - DNA, 30 bp, Artificial Sequence
  Synthetic oligonucleotide
gtcgctttacattctaatagaggagcacga

SEQ ID NO: 159044 - DNA, 30 bp, Artificial Sequence
  Synthetic oligonucleotide
ccttctgactgataaaaacttgcggcacga

SEQ ID NO: 159045 - DNA, 30 bp, Artificial Sequence
  Synthetic oligonucleotide
cggccatttaaaccttgtcgtcctgcacga

SEQ ID NO: 159046 - DNA, 30 bp, Artificial Sequence
  Synthetic oligonucleotide
tacggagttgtatggaggcgacgatcacga

SEQ ID NO: 159047 - DNA, 30 bp, Artificial Sequence
  Synthetic oligonucleotide
accggctacacattaggttatcggtcacga

SEQ ID NO: 159048 - DNA, 30 bp, Artificial Sequence
  Synthetic oligonucleotide
gtagaatacaactattagcctgcacgacga

SEQ ID NO: 159049 - DNA, 30 bp, Artificial Sequence
  Synthetic oligonucleotide
atgttaacctatattgcgacgggccgacga

SEQ ID NO: 159050 - DNA, 30 bp, Artificial Sequence
  Synthetic oligonucleotide
tctttggagttccctcttaccatccgacga

SEQ ID NO: 159051 - DNA, 30 bp, Artificial Sequence
  Synthetic oligonucleotide
agttgcgtcattaaagattcggaaggacga

SEQ ID NO: 159052 - DNA, 30 bp, Artificial Sequence
  Synthetic oligonucleotide
taaggccattcttgttctggctgaggacga

SEQ ID NO: 159053 - DNA, 30 bp, Artificial Sequence
  Synthetic oligonucleotide
ggtgcggttgggctagttcggataggacga

SEQ ID NO: 159054 - DNA, 30 bp, Artificial Sequence
  Synthetic oligonucleotide
tcatactcagggcgcctataacagggacga

SEQ ID NO: 159055 - DNA, 30 bp, Artificial Sequence
  Synthetic oligonucleotide
atgccgatgcggccggcgaggaggggacga

SEQ ID NO: 159056 - DNA, 31 bp, Artificial Sequence
  Synthetic oligonucleotide
acgccggttaggtttcggaaaggggggacga

SEQ ID NO: 159057 - DNA, 30 bp, Artificial Sequence
  Synthetic oligonucleotide
accgtcaatcaccgcataaaggggggacga

SEQ ID NO: 159058 - DNA, 30 bp, Artificial Sequence
  Synthetic oligonucleotide
tagtacgcgactcgagtttgcgactgacga

SEQ ID NO: 159059 - DNA, 30 bp, Artificial Sequence
  Synthetic oligonucleotide
actcatattgtcgtcaccgggataatacga

SEQ ID NO: 159060 - DNA, 30 bp, Artificial Sequence
  Synthetic oligonucleotide
caaaaacattggtggcaactgcgcatacga

SEQ ID NO: 159061 - DNA, 30 bp, Artificial Sequence
  Synthetic oligonucleotide
ctgatcggccatgtcggcctacggatacga

SEQ ID NO: 159062 - DNA, 30 bp, Artificial Sequence
  Synthetic oligonucleotide
aaacaggacgcaattacattcaaactacga

SEQ ID NO: 159063 - DNA, 30 bp, Artificial Sequence
  Synthetic oligonucleotide
gaagccggtcaaagtttgcgataactacga

SEQ ID NO: 159064 - DNA, 30 bp, Artificial Sequence
  Synthetic oligonucleotide
gatggtaagaattagtcgtgattactacga

SEQ ID NO: 159065 - DNA, 30 bp, Artificial Sequence
  Synthetic oligonucleotide
gggtttcaacggattagtagtcccctacga

SEQ ID NO: 159066 - DNA, 30 bp, Artificial Sequence
  Synthetic oligonucleotide
cttgcatccccgtcagtacagaagctacga

SEQ ID NO: 159067 - DNA, 30 bp, Artificial Sequence
  Synthetic oligonucleotide
gttcgtggtctcagatacaatccgctacga

SEQ ID NO: 159068 - DNA, 30 bp, Artificial Sequence
  Synthetic oligonucleotide
accacaatgccaacgaccgtgccagtacga

SEQ ID NO: 159069 - DNA, 30 bp, Artificial Sequence
  Synthetic oligonucleotide
ccccagagtccgagtatttaggcagtacga

SEQ ID NO: 159070 - DNA, 30 bp, Artificial Sequence
  Synthetic oligonucleotide
acttctcatccgctggcaccaatagtacga

SEQ ID NO: 159071 - DNA, 30 bp, Artificial Sequence
  Synthetic oligonucleotide
ttatcggacttgccgtaaagtttagtacga

SEQ ID NO: 159072 - DNA, 30 bp, Artificial Sequence
  Synthetic oligonucleotide
tacgtggagtaaaggaagatccacgtacga

SEQ ID NO: 159073 - DNA, 25 bp, Artificial Sequence
  Synthetic oligonucleotide
gaaagaaaaactcggctgcgtacga

SEQ ID NO: 159074 - DNA, 30 bp, Artificial Sequence
  Synthetic oligonucleotide
agccgcggaaacgctatggaagatgtacga

SEQ ID NO: 159075 - DNA, 30 bp, Artificial Sequence
  Synthetic oligonucleotide
ttctacaatgctttcttgcatgcattacga

SEQ ID NO: 159076 - DNA, 30 bp, Artificial Sequence
  Synthetic oligonucleotide
gctattcggatggtcattttgtacttacga

SEQ ID NO: 159077 - DNA, 30 bp, Artificial Sequence
  Synthetic oligonucleotide
ggacgattatgagttgtagtgtagttacga

SEQ ID NO: 159078 - DNA, 30 bp, Artificial Sequence
  Synthetic oligonucleotide
ccagctcaaaattatataagacggttacga

SEQ ID NO: 159079 - DNA, 30 bp, Artificial Sequence
  Synthetic oligonucleotide
ggttgactggagacgcgtcggttgttacga

SEQ ID NO: 159080 - DNA, 30 bp, Artificial Sequence
  Synthetic oligonucleotide
cgacccttagaagtcgataagcatttacga

SEQ ID NO: 159081 - DNA, 30 bp, Artificial Sequence
  Synthetic oligonucleotide
tcgacgtgtgtaatgagtcgcagtttacga

SEQ ID NO: 159082 - DNA, 30 bp, Artificial Sequence
  Synthetic oligonucleotide
cccgagaattgtgtagccatgcacaaccga

SEQ ID NO: 159083 - DNA, 30 bp, Artificial Sequence
  Synthetic oligonucleotide
gcgagcggaacggcccccatataacaccga

SEQ ID NO: 159084 - DNA, 30 bp, Artificial Sequence
  Synthetic oligonucleotide
attcgtatcaatgtcggtcaaacacaccga

SEQ ID NO: 159085 - DNA, 30 bp, Artificial Sequence
  Synthetic oligonucleotide
tgagcggtgccatttgcgccctgtcaccga

SEQ ID NO: 159086 - DNA, 30 bp, Artificial Sequence
  Synthetic oligonucleotide
gttacattctcagtgtcaagtacagaccga

SEQ ID NO: 159087 - DNA, 30 bp, Artificial Sequence
  Synthetic oligonucleotide
gccgttctaggggcgcgcgtatgggaccga

SEQ ID NO: 159088 - DNA, 30 bp, Artificial Sequence
  Synthetic oligonucleotide
tgcctgcgcctcgacaaacgcgctgaccga

SEQ ID NO: 159089 - DNA, 30 bp, Artificial Sequence
  Synthetic oligonucleotide
gcccagccgcatactgatcggagtgaccga

SEQ ID NO: 159090 - DNA, 30 bp, Artificial Sequence
  Synthetic oligonucleotide
tatatgaacacttagggagacgactaccga

SEQ ID NO: 159091 - DNA, 30 bp, Artificial Sequence
  Synthetic oligonucleotide
gcgcggtgtacctaaagaacaggctaccga

SEQ ID NO: 159092 - DNA, 30 bp, Artificial Sequence
  Synthetic oligonucleotide
tattgaatcacgaagacggcattgtaccga

SEQ ID NO: 159093 - DNA, 30 bp, Artificial Sequence
  Synthetic oligonucleotide
cacacgcgagcgtagtgagttagttaccga

SEQ ID NO: 159094 - DNA, 30 bp, Artificial Sequence
  Synthetic oligonucleotide
gaatcatacagaacggcacaaaccacccga

SEQ ID NO: 159095 - DNA, 30 bp, Artificial Sequence
  Synthetic oligonucleotide
taccgacgaagaacaacgtctaccacccga

SEQ ID NO: 159096 - DNA, 30 bp, Artificial Sequence
  Synthetic oligonucleotide
tacttctgcactataatacctatcacccga

SEQ ID NO: 159097 - DNA, 30 bp, Artificial Sequence
  Synthetic oligonucleotide
gtcagaagcgcagaaagacgatgtacccga

SEQ ID NO: 159098 - DNA, 30 bp, Artificial Sequence
  Synthetic oligonucleotide
gttagtgtaacactgtcgatggttccccga

SEQ ID NO: 159099 - DNA, 30 bp, Artificial Sequence
  Synthetic oligonucleotide
catagggtaccttgagattatatagcccga

SEQ ID NO: 159100 - DNA, 30 bp, Artificial Sequence
  Synthetic oligonucleotide
gagatctgcatccaatgaaagtaggcccga

SEQ ID NO: 159101 - DNA, 30 bp, Artificial Sequence
  Synthetic oligonucleotide
cttgtgactagcgagaattgggtggcccga

SEQ ID NO: 159102 - DNA, 30 bp, Artificial Sequence
  Synthetic oligonucleotide
tgcggtgcttacgacgcgagttgtgcccga

SEQ ID NO: 159103 - DNA, 30 bp, Artificial Sequence
  Synthetic oligonucleotide
acccgtactagcactaaaacgataagccga

SEQ ID NO: 159104 - DNA, 30 bp, Artificial Sequence
  Synthetic oligonucleotide
ccgcgttaacaagatcatagtgacagccga

SEQ ID NO: 159105 - DNA, 30 bp, Artificial Sequence
  Synthetic oligonucleotide
cgtacaggggtcatgtacttagtgagccga

SEQ ID NO: 159106 - DNA, 30 bp, Artificial Sequence
  Synthetic oligonucleotide
aacaaagcgactcctacagaccatagccga

SEQ ID NO: 159107 - DNA, 30 bp, Artificial Sequence
  Synthetic oligonucleotide
gcggcaaaaggcgatctgtaggctagccga

SEQ ID NO: 159108 - DNA, 30 bp, Artificial Sequence
  Synthetic oligonucleotide
tggttactcgaacaaacctggtttagccga

SEQ ID NO: 159109 - DNA, 30 bp, Artificial Sequence
  Synthetic oligonucleotide
tccaatacagcggcagtcacagtccgccga

SEQ ID NO: 159110 - DNA, 30 bp, Artificial Sequence
  Synthetic oligonucleotide
caaggtcggaagtcgttgacataaggccga

SEQ ID NO: 159111 - DNA, 30 bp, Artificial Sequence
  Synthetic oligonucleotide
gcgccaacccattcggctccatgaggccga

SEQ ID NO: 159112 - DNA, 30 bp, Artificial Sequence
  Synthetic oligonucleotide
cggaatcgcatcgaacaggcagaatgccga

SEQ ID NO: 159113 - DNA, 30 bp, Artificial Sequence
  Synthetic oligonucleotide
ctggtagaggctccggttaacggctgccga

SEQ ID NO: 159114 - DNA, 30 bp, Artificial Sequence
  Synthetic oligonucleotide
tacaaatcaaaggcttgaaacctttgccga

SEQ ID NO: 159115 - DNA, 30 bp, Artificial Sequence
  Synthetic oligonucleotide
tcagtgaatagtttcacggtaatgatccga

SEQ ID NO: 159116 - DNA, 30 bp, Artificial Sequence
  Synthetic oligonucleotide
gcaattgctagaaagtaggagactgtccga

SEQ ID NO: 159117 - DNA, 30 bp, Artificial Sequence
  Synthetic oligonucleotide
aggtacaaggtggagttcaagtttgtccga

SEQ ID NO: 159118 - DNA, 30 bp, Artificial Sequence
  Synthetic oligonucleotide
gctgctgcccatacagggaggtttgtccga

SEQ ID NO: 159119 - DNA, 30 bp, Artificial Sequence
  Synthetic oligonucleotide
tggtgtcatccgggaccaagccgattccga

SEQ ID NO: 159120 - DNA, 30 bp, Artificial Sequence
  Synthetic oligonucleotide
aactgttagttacacaaccgtcagttccga

SEQ ID NO: 159121 - DNA, 30 bp, Artificial Sequence
  Synthetic oligonucleotide
acacgcaggggccaacgtctgtagttccga

SEQ ID NO: 159122 - DNA, 30 bp, Artificial Sequence
  Synthetic oligonucleotide
cctcaacctagcggcggtaataccaagcga

SEQ ID NO: 159123 - DNA, 31 bp, Artificial Sequence
  Synthetic oligonucleotide
cgcaaacgtcattgtggacttgaagaagcga

SEQ ID NO: 159124 - DNA, 30 bp, Artificial Sequence
  Synthetic oligonucleotide
gctgtaagaagcggttattatccgaagcga

SEQ ID NO: 159125 - DNA, 30 bp, Artificial Sequence
  Synthetic oligonucleotide
gtagaggttcacccacattgcgcgaagcga

SEQ ID NO: 159126 - DNA, 30 bp, Artificial Sequence
  Synthetic oligonucleotide
attcgcggagtgtatgagtggaaacagcga

SEQ ID NO: 159127 - DNA, 30 bp, Artificial Sequence
  Synthetic oligonucleotide
cagatgagttctgaagtctccgaccagcga

SEQ ID NO: 159128 - DNA, 30 bp, Artificial Sequence
  Synthetic oligonucleotide
aggaagcttaagggaacatcggttcagcga

SEQ ID NO: 159129 - DNA, 25 bp, Artificial Sequence
  Synthetic oligonucleotide
cctacggatcgcactagacgagcga

SEQ ID NO: 159130 - DNA, 30 bp, Artificial Sequence
  Synthetic oligonucleotide
cgtagtggagatgttggtaacgccgagcga

SEQ ID NO: 159131 - DNA, 30 bp, Artificial Sequence
  Synthetic oligonucleotide
ccctcacgtcccagatctcgtgtcgagcga

SEQ ID NO: 159132 - DNA, 29 bp, Artificial Sequence
  Synthetic oligonucleotide
gcacggggtaacttgacgcgactgagcga

SEQ ID NO: 159133 - DNA, 30 bp, Artificial Sequence
  Synthetic oligonucleotide
cccatgcgagcgccgtgttgagctgagcga

SEQ ID NO: 159134 - DNA, 30 bp, Artificial Sequence
  Synthetic oligonucleotide
taggcctagttatgtgaccatgaatagcga

SEQ ID NO: 159135 - DNA, 30 bp, Artificial Sequence
  Synthetic oligonucleotide
atcaaatggactagactgggcttatagcga

SEQ ID NO: 159136 - DNA, 30 bp, Artificial Sequence
  Synthetic oligonucleotide
aggcggggtcagatccctgacaactagcga

SEQ ID NO: 159137 - DNA, 30 bp, Artificial Sequence
  Synthetic oligonucleotide
tggggtcgcgcctagtagatcaaaacgcga

SEQ ID NO: 159138 - DNA, 30 bp, Artificial Sequence
  Synthetic oligonucleotide
tcgaggtcactaacgtcagggcgaacgcga

SEQ ID NO: 159139 - DNA, 30 bp, Artificial Sequence
  Synthetic oligonucleotide
acttatgtacggctaaagacacagacgcga

SEQ ID NO: 159140 - DNA, 30 bp, Artificial Sequence
  Synthetic oligonucleotide
atgttaatgatcaatcacttacatacgcga

SEQ ID NO: 159141 - DNA, 30 bp, Artificial Sequence
  Synthetic oligonucleotide
cacctacaatcaacggggaagacaccgcga

SEQ ID NO: 159142 - DNA, 30 bp, Artificial Sequence
  Synthetic oligonucleotide
ctgacattatgcgccctattaaacccgcga

SEQ ID NO: 159143 - DNA, 30 bp, Artificial Sequence
  Synthetic oligonucleotide
cactgtgactcgaccacggtgtaagcgcga

SEQ ID NO: 159144 - DNA, 30 bp, Artificial Sequence
  Synthetic oligonucleotide
caacattgcgggcgactccctaaggcgcga

SEQ ID NO: 159145 - DNA, 30 bp, Artificial Sequence
  Synthetic oligonucleotide
aggtatctcctgcaccttgaaggggcgcga

SEQ ID NO: 159146 - DNA, 30 bp, Artificial Sequence
  Synthetic oligonucleotide
gcgttctcgggtggagaggaaactgcgcga

SEQ ID NO: 159147 - DNA, 30 bp, Artificial Sequence
  Synthetic oligonucleotide
ccgttgcgcatccacgaggacattgcgcga

SEQ ID NO: 159148 - DNA, 30 bp, Artificial Sequence
  Synthetic oligonucleotide
ccaggggtaggcgcttaggtaatctcgcga

SEQ ID NO: 159149 - DNA, 30 bp, Artificial Sequence
  Synthetic oligonucleotide
actaagcaagttgtgtagcttaggtcgcga

SEQ ID NO: 159150 - DNA, 30 bp, Artificial Sequence
  Synthetic oligonucleotide
attgcctactgggtgatcccatggtcgcga

SEQ ID NO: 159151 - DNA, 30 bp, Artificial Sequence
  Synthetic oligonucleotide
cgacagtttctatcgatcttgacttcgcga

SEQ ID NO: 159152 - DNA, 30 bp, Artificial Sequence
  Synthetic oligonucleotide
agttttgctggtcgaactaatttttcgcga

SEQ ID NO: 159153 - DNA, 30 bp, Artificial Sequence
  Synthetic oligonucleotide
agcctagagtcgaacgtacgaaggaggcga

SEQ ID NO: 159154 - DNA, 30 bp, Artificial Sequence
  Synthetic oligonucleotide
taaagttccgtggtaagtggaacacggcga

SEQ ID NO: 159155 - DNA, 30 bp, Artificial Sequence
  Synthetic oligonucleotide
caacacacacttgcggttgcattccggcga

SEQ ID NO: 159156 - DNA, 30 bp, Artificial Sequence
  Synthetic oligonucleotide
gcttcaaccaatcagcgccttgatcggcga

SEQ ID NO: 159157 - DNA, 30 bp, Artificial Sequence
  Synthetic oligonucleotide
gagcgttcacttgcaatcatacaagggcga

SEQ ID NO: 159158 - DNA, 30 bp, Artificial Sequence
  Synthetic oligonucleotide
gggagcccatgcctgaaataactcgggcga

SEQ ID NO: 159159 - DNA, 30 bp, Artificial Sequence
  Synthetic oligonucleotide
tgacggcgttgaactggattatctgggcga

SEQ ID NO: 159160 - DNA, 30 bp, Artificial Sequence
  Synthetic oligonucleotide
atcgaaacgggggtggcctgaagatggcga

SEQ ID NO: 159161 - DNA, 30 bp, Artificial Sequence
  Synthetic oligonucleotide
ctaaggagaccgacatcttctaggtggcga

SEQ ID NO: 159162 - DNA, 30 bp, Artificial Sequence
  Synthetic oligonucleotide
gagagtggattattcctggtaagaatgcga

SEQ ID NO: 159163 - DNA, 30 bp, Artificial Sequence
  Synthetic oligonucleotide
cgacggtaaaatccattctttgctatgcga

SEQ ID NO: 159164 - DNA, 30 bp, Artificial Sequence
  Synthetic oligonucleotide
aatatacgaaagtaatttcgtcgtatgcga

SEQ ID NO: 159165 - DNA, 30 bp, Artificial Sequence
  Synthetic oligonucleotide
ggtcatcagcggttaccacaagttatgcga

SEQ ID NO: 159166 - DNA, 30 bp, Artificial Sequence
  Synthetic oligonucleotide
tgtttcatcaggaccaccagaaaactgcga

SEQ ID NO: 159167 - DNA, 30 bp, Artificial Sequence
  Synthetic oligonucleotide
ggagttatctagggtagaatggaactgcga

SEQ ID NO: 159168 - DNA, 30 bp, Artificial Sequence
  Synthetic oligonucleotide
cggaactcactccacttatatgtactgcga

SEQ ID NO: 159169 - DNA, 30 bp, Artificial Sequence
  Synthetic oligonucleotide
atacgtagaatgacccgtagaagcctgcga

SEQ ID NO: 159170 - DNA, 30 bp, Artificial Sequence
  Synthetic oligonucleotide
cttcatgtagcagagtcagtagcgctgcga

SEQ ID NO: 159171 - DNA, 30 bp, Artificial Sequence
  Synthetic oligonucleotide
aggacgagctcaccgcgtgcgctgctgcga

SEQ ID NO: 159172 - DNA, 30 bp, Artificial Sequence
  Synthetic oligonucleotide
acgtcgcttgttttccttatcgttctgcga

SEQ ID NO: 159173 - DNA, 30 bp, Artificial Sequence
  Synthetic oligonucleotide
tcgaggctacgagaacagtaggaagtgcga

SEQ ID NO: 159174 - DNA, 30 bp, Artificial Sequence
  Synthetic oligonucleotide
caaaaacactcgcacaagggttcggtgcga

SEQ ID NO: 159175 - DNA, 30 bp, Artificial Sequence
  Synthetic oligonucleotide
ggacgggacatggggcgtggcggggtgcga

SEQ ID NO: 159176 - DNA, 30 bp, Artificial Sequence
  Synthetic oligonucleotide
gggtccatcccacaagatgggccgttgcga

SEQ ID NO: 159177 - DNA, 30 bp, Artificial Sequence
  Synthetic oligonucleotide
ctgtgatggccctgtgtgcaagtgttgcga

SEQ ID NO: 159178 - DNA, 30 bp, Artificial Sequence
  Synthetic oligonucleotide
aacggatataaaagatagggttgtttgcga

SEQ ID NO: 159179 - DNA, 30 bp, Artificial Sequence
  Synthetic oligonucleotide
tggttccaagagtataaagactgcaatcga

SEQ ID NO: 159180 - DNA, 30 bp, Artificial Sequence
  Synthetic oligonucleotide
actaggttcaactcgcatcagtgacatcga

SEQ ID NO: 159181 - DNA, 30 bp, Artificial Sequence
  Synthetic oligonucleotide
gagcaggaggttaggaagtaactccatcga

SEQ ID NO: 159182 - DNA, 30 bp, Artificial Sequence
  Synthetic oligonucleotide
caataactttattacggatcagggcatcga

SEQ ID NO: 159183 - DNA, 30 bp, Artificial Sequence
  Synthetic oligonucleotide
agtggtaaggcagcgtgtactgtgcatcga

SEQ ID NO: 159184 - DNA, 30 bp, Artificial Sequence
  Synthetic oligonucleotide
aacgagcgggttaaagatacgaatcatcga

SEQ ID NO: 159185 - DNA, 30 bp, Artificial Sequence
  Synthetic oligonucleotide
atgagtcacccttcttcaatatgatatcga

SEQ ID NO: 159186 - DNA, 30 bp, Artificial Sequence
  Synthetic oligonucleotide
gggcagttagcctctacgtggatatatcga

SEQ ID NO: 159187 - DNA, 30 bp, Artificial Sequence
  Synthetic oligonucleotide
actggactgtttcggaagatacggtatcga

SEQ ID NO: 159188 - DNA, 30 bp, Artificial Sequence
  Synthetic oligonucleotide
agtcattcgtcatcacgggagcggtatcga

SEQ ID NO: 159189 - DNA, 29 bp, Artificial Sequence
  Synthetic oligonucleotide
acgttaaaatggacacagggatttatcga

SEQ ID NO: 159190 - DNA, 30 bp, Artificial Sequence
  Synthetic oligonucleotide
acacatctgtgaatatggaacaaaactcga

SEQ ID NO: 159191 - DNA, 30 bp, Artificial Sequence
  Synthetic oligonucleotide
cttatacatcgacgatgttaccgaactcga

SEQ ID NO: 159192 - DNA, 30 bp, Artificial Sequence
  Synthetic oligonucleotide
ctgcaaagctgattaaaggatatcactcga

SEQ ID NO: 159193 - DNA, 30 bp, Artificial Sequence
  Synthetic oligonucleotide
acagcgggtatgacgctctaatggactcga

SEQ ID NO: 159194 - DNA, 30 bp, Artificial Sequence
  Synthetic oligonucleotide
tacacttaatgccagacgaggcatactcga

SEQ ID NO: 159195 - DNA, 30 bp, Artificial Sequence
  Synthetic oligonucleotide
tgctacgatgacgagccgccgtgtactcga

SEQ ID NO: 159196 - DNA, 30 bp, Artificial Sequence
  Synthetic oligonucleotide
gacgcaaacatagcagcggagaagcctcga

SEQ ID NO: 159197 - DNA, 30 bp, Artificial Sequence
  Synthetic oligonucleotide
cattagggtatatgacgaagtgcagctcga

SEQ ID NO: 159198 - DNA, 30 bp, Artificial Sequence
  Synthetic oligonucleotide
gttggccctgatcttgacattttagctcga

SEQ ID NO: 159199 - DNA, 30 bp, Artificial Sequence
  Synthetic oligonucleotide
atgcggcctaaaaaggtagctaaatctcga

SEQ ID NO: 159200 - DNA, 30 bp, Artificial Sequence
  Synthetic oligonucleotide
ggctggactatatagcgcatgcaatctcga

SEQ ID NO: 159201 - DNA, 30 bp, Artificial Sequence
  Synthetic oligonucleotide
gcgacctcaaggggccatacgacatctcga

SEQ ID NO: 159202 - DNA, 30 bp, Artificial Sequence
  Synthetic oligonucleotide
ctggtggggcggagcacatattgaagtcga

SEQ ID NO: 159203 - DNA, 30 bp, Artificial Sequence
  Synthetic oligonucleotide
gaaaggtggtttacttgcagtgtaagtcga

SEQ ID NO: 159204 - DNA, 30 bp, Artificial Sequence
  Synthetic oligonucleotide
cctcccatcgttgagtctaaatctagtcga

SEQ ID NO: 159205 - DNA, 30 bp, Artificial Sequence
  Synthetic oligonucleotide
gaacaagcgttaggcggtgtcttccgtcga

SEQ ID NO: 159206 - DNA, 30 bp, Artificial Sequence
  Synthetic oligonucleotide
gtaccatgcaggtccccccgcaagcgtcga

SEQ ID NO: 159207 - DNA, 30 bp, Artificial Sequence
  Synthetic oligonucleotide
ctagcgataggtaagtagcggggcggtcga

SEQ ID NO: 159208 - DNA, 30 bp, Artificial Sequence
  Synthetic oligonucleotide
ttgggatgtctacgattccgaccgggtcga

SEQ ID NO: 159209 - DNA, 30 bp, Artificial Sequence
  Synthetic oligonucleotide
caaaatgatggggaagggctctcgggtcga

SEQ ID NO: 159210 - DNA, 30 bp, Artificial Sequence
  Synthetic oligonucleotide
gtggcacatgtttcacctctctctggtcga

SEQ ID NO: 159211 - DNA, 30 bp, Artificial Sequence
  Synthetic oligonucleotide
ggtacttttcaccagtaaaactcgtgtcga

SEQ ID NO: 159212 - DNA, 30 bp, Artificial Sequence
  Synthetic oligonucleotide
ggatcgaaaacggccatgtcttcgtgtcga

SEQ ID NO: 159213 - DNA, 30 bp, Artificial Sequence
  Synthetic oligonucleotide
gtgctagagacttaggtacgggacattcga

SEQ ID NO: 159214 - DNA, 30 bp, Artificial Sequence
  Synthetic oligonucleotide
aataagcccaccaagaccctaggcattcga

SEQ ID NO: 159215 - DNA, 30 bp, Artificial Sequence
  Synthetic oligonucleotide
tccagatactcacgactctaccttattcga

SEQ ID NO: 159216 - DNA, 30 bp, Artificial Sequence
  Synthetic oligonucleotide
aatcgtatgggaatcattattacccttcga

SEQ ID NO: 159217 - DNA, 30 bp, Artificial Sequence
  Synthetic oligonucleotide
tcgttacagaaaaagcacacgaggcttcga

SEQ ID NO: 159218 - DNA, 30 bp, Artificial Sequence
  Synthetic oligonucleotide
agattgggacgccggctaaaaagttttcga

SEQ ID NO: 159219 - DNA, 30 bp, Artificial Sequence
  Synthetic oligonucleotide
tcttaaatagcataggctgcggcaaaagga

SEQ ID NO: 159220 - DNA, 30 bp, Artificial Sequence
  Synthetic oligonucleotide
gagacgggggtctagtggcctgacaaagga

SEQ ID NO: 159221 - DNA, 30 bp, Artificial Sequence
  Synthetic oligonucleotide
ctgagccataccccatcgagggccaaagga

SEQ ID NO: 159222 - DNA, 30 bp, Artificial Sequence
  Synthetic oligonucleotide
tgtacaacgatggctatgaaaccgaaagga

SEQ ID NO: 159223 - DNA, 30 bp, Artificial Sequence
  Synthetic oligonucleotide
gaccaagccaggtacgattgcgaacaagga

SEQ ID NO: 159224 - DNA, 30 bp, Artificial Sequence
  Synthetic oligonucleotide
acattgcggatgaagcgcagccgacaagga

SEQ ID NO: 159225 - DNA, 30 bp, Artificial Sequence
  Synthetic oligonucleotide
agtcgccgtcaaatccccaaaaaccaagga

SEQ ID NO: 159226 - DNA, 30 bp, Artificial Sequence
  Synthetic oligonucleotide
cacattgtagaaatatctagcgcgcaagga

SEQ ID NO: 159227 - DNA, 30 bp, Artificial Sequence
  Synthetic oligonucleotide
taggcctcgagcgggaatccgattcaagga

SEQ ID NO: 159228 - DNA, 30 bp, Artificial Sequence
  Synthetic oligonucleotide
aaggtatattagtatggcccattagaagga

SEQ ID NO: 159229 - DNA, 30 bp, Artificial Sequence
  Synthetic oligonucleotide
gcacagagacttcagcgaccattggaagga

SEQ ID NO: 159230 - DNA, 30 bp, Artificial Sequence
  Synthetic oligonucleotide
cggttcagcggtgagttacgacgataagga

SEQ ID NO: 159231 - DNA, 30 bp, Artificial Sequence
  Synthetic oligonucleotide
tgatcaagcctaagtttaaagtgataagga

SEQ ID NO: 159232 - DNA, 30 bp, Artificial Sequence
  Synthetic oligonucleotide
atctgcctacctcgctccgactactaagga

SEQ ID NO: 159233 - DNA, 30 bp, Artificial Sequence
  Synthetic oligonucleotide
acgataatagagacgtatcattcgtaagga

SEQ ID NO: 159234 - DNA, 30 bp, Artificial Sequence
  Synthetic oligonucleotide
ctataatttatccatcaagggtggtaagga

SEQ ID NO: 159235 - DNA, 30 bp, Artificial Sequence
  Synthetic oligonucleotide
tccacgagaaggcatctaagaaattaagga

SEQ ID NO: 159236 - DNA, 30 bp, Artificial Sequence
  Synthetic oligonucleotide
gctacttccatatataatcgtttaacagga

SEQ ID NO: 159237 - DNA, 30 bp, Artificial Sequence
  Synthetic oligonucleotide
aaacactcagcacaccgcggtgtcacagga

SEQ ID NO: 159238 - DNA, 30 bp, Artificial Sequence
  Synthetic oligonucleotide
gtttaccaccgcggcgaaaatacgacagga

SEQ ID NO: 159239 - DNA, 30 bp, Artificial Sequence
  Synthetic oligonucleotide
aaagagcctgagatgaacccaaggacagga

SEQ ID NO: 159240 - DNA, 30 bp, Artificial Sequence
  Synthetic oligonucleotide
taataggatacaggtaagacgaggacagga

SEQ ID NO: 159241 - DNA, 30 bp, Artificial Sequence
  Synthetic oligonucleotide
acatttgcacgcgtcgaggttaggacagga

SEQ ID NO: 159242 - DNA, 30 bp, Artificial Sequence
  Synthetic oligonucleotide
aattaggctgaagtcacgtttatgacagga

SEQ ID NO: 159243 - DNA, 30 bp, Artificial Sequence
  Synthetic oligonucleotide
atggcatccgattatcgcagttgtacagga

SEQ ID NO: 159244 - DNA, 30 bp, Artificial Sequence
  Synthetic oligonucleotide
gactcggtgagtcgaagggatacaccagga

SEQ ID NO: 159245 - DNA, 30 bp, Artificial Sequence
  Synthetic oligonucleotide
agtcattcaccgaaagacggccacccagga

SEQ ID NO: 159246 - DNA, 30 bp, Artificial Sequence
  Synthetic oligonucleotide
tgaacaagctgcattctacacgacccagga

SEQ ID NO: 159247 - DNA, 30 bp, Artificial Sequence
  Synthetic oligonucleotide
ctcattgagagtattggaaagggcccagga

SEQ ID NO: 159248 - DNA, 30 bp, Artificial Sequence
  Synthetic oligonucleotide
tatgaggcggttgtaaaacgagctccagga

SEQ ID NO: 159249 - DNA, 30 bp, Artificial Sequence
  Synthetic oligonucleotide
aagtactactacgcactatggtaggcagga

SEQ ID NO: 159250 - DNA, 30 bp, Artificial Sequence
  Synthetic oligonucleotide
gagcgggggggaccacaaagcgcggcagga

SEQ ID NO: 159251 - DNA, 30 bp, Artificial Sequence
  Synthetic oligonucleotide
cccggccaacgtcccacgcgtgctgcagga

SEQ ID NO: 159252 - DNA, 30 bp, Artificial Sequence
  Synthetic oligonucleotide
ccttaaactagagctgacccgggtgcagga

SEQ ID NO: 159253 - DNA, 30 bp, Artificial Sequence
  Synthetic oligonucleotide
ttgggaagggtttgcggttcgcgctcagga

SEQ ID NO: 159254 - DNA, 30 bp, Artificial Sequence
  Synthetic oligonucleotide
gaccaagccccccgcaatgtacattcagga

SEQ ID NO: 159255 - DNA, 30 bp, Artificial Sequence
  Synthetic oligonucleotide
gcgcgccaacgatggattcccatccgagga

SEQ ID NO: 159256 - DNA, 30 bp, Artificial Sequence
  Synthetic oligonucleotide
tcccgatgtctggcacaagtaccgcgagga

SEQ ID NO: 159257 - DNA, 30 bp, Artificial Sequence
  Synthetic oligonucleotide
tgatcccctctgagggtgcttacaggagga

SEQ ID NO: 159258 - DNA, 30 bp, Artificial Sequence
  Synthetic oligonucleotide
tcattgatcggtgagatattacggggagga

SEQ ID NO: 159259 - DNA, 30 bp, Artificial Sequence
  Synthetic oligonucleotide
tcgccgtgcgctcaatggtatgatggagga

SEQ ID NO: 159260 - DNA, 30 bp, Artificial Sequence
  Synthetic oligonucleotide
tgtctttggaactaactatcattatgagga

SEQ ID NO: 159261 - DNA, 30 bp, Artificial Sequence
  Synthetic oligonucleotide
tatacgcttagagacatattcaattgagga

SEQ ID NO: 159262 - DNA, 30 bp, Artificial Sequence
  Synthetic oligonucleotide
cgtttcgggtccctccaattcatttgagga

SEQ ID NO: 159263 - DNA, 30 bp, Artificial Sequence
  Synthetic oligonucleotide
tgaggctttgtctgctcactttaaatagga

SEQ ID NO: 159264 - DNA, 30 bp, Artificial Sequence
  Synthetic oligonucleotide
gggaaccagtcagggctcagcgagatagga

SEQ ID NO: 159265 - DNA, 30 bp, Artificial Sequence
  Synthetic oligonucleotide
cacccttcgttatagattccacggatagga

SEQ ID NO: 159266 - DNA, 30 bp, Artificial Sequence
  Synthetic oligonucleotide
catattctgagttacaagacacgactagga

SEQ ID NO: 159267 - DNA, 30 bp, Artificial Sequence
  Synthetic oligonucleotide
catgcacgggagtatgatccttacctagga

SEQ ID NO: 159268 - DNA, 30 bp, Artificial Sequence
  Synthetic oligonucleotide
cgctcggcgatgatcggattgaccctagga

SEQ ID NO: 159269 - DNA, 30 bp, Artificial Sequence
  Synthetic oligonucleotide
caacagtatcgctcaacagagatcctagga

SEQ ID NO: 159270 - DNA, 29 bp, Artificial Sequence
  Synthetic oligonucleotide
agtcgaaacttgattagtgggatctagga

SEQ ID NO: 159271 - DNA, 30 bp, Artificial Sequence
  Synthetic oligonucleotide
agtgtgtggcaattggtgggagctctagga

SEQ ID NO: 159272 - DNA, 30 bp, Artificial Sequence
  Synthetic oligonucleotide
taggactagatgtcacagggggctctagga

SEQ ID NO: 159273 - DNA, 30 bp, Artificial Sequence
  Synthetic oligonucleotide
tcacgcgcctacgctcgagcgtcagtagga

SEQ ID NO: 159274 - DNA, 30 bp, Artificial Sequence
  Synthetic oligonucleotide
tgtcaagggctattgcctgcctgagtagga

SEQ ID NO: 159275 - DNA, 30 bp, Artificial Sequence
  Synthetic oligonucleotide
ataacctagaactctgaaagttcggtagga

SEQ ID NO: 159276 - DNA, 30 bp, Artificial Sequence
  Synthetic oligonucleotide
aagcagagtaggacataccgttgggtagga

SEQ ID NO: 159277 - DNA, 30 bp, Artificial Sequence
  Synthetic oligonucleotide
cggtgcaaacaggagtaaaggtatgtagga

SEQ ID NO: 159278 - DNA, 30 bp, Artificial Sequence
  Synthetic oligonucleotide
ataggcaccaaagagctgcggggtgtagga

SEQ ID NO: 159279 - DNA, 30 bp, Artificial Sequence
  Synthetic oligonucleotide
agcttagatcggagtatacgggaattagga

SEQ ID NO: 159280 - DNA, 30 bp, Artificial Sequence
  Synthetic oligonucleotide
gtaaaggcacgcctgtaatcggtattagga

SEQ ID NO: 159281 - DNA, 30 bp, Artificial Sequence
  Synthetic oligonucleotide
cgtctgaatcacggactccatctcttagga

SEQ ID NO: 159282 - DNA, 30 bp, Artificial Sequence
  Synthetic oligonucleotide
ctgaggcgtacgctccgccgtttgttagga

SEQ ID NO: 159283 - DNA, 30 bp, Artificial Sequence
  Synthetic oligonucleotide
tgacggaaaatgatagaggcaagtttagga

SEQ ID NO: 159284 - DNA, 30 bp, Artificial Sequence
  Synthetic oligonucleotide
tcttaggacgtgtcaagcccgggtttagga

SEQ ID NO: 159285 - DNA, 30 bp, Artificial Sequence
  Synthetic oligonucleotide
gggatgaccgctacgcccgaattgaacgga

SEQ ID NO: 159286 - DNA, 30 bp, Artificial Sequence
  Synthetic oligonucleotide
ggcgcgattaactgttaaaatgcacacgga

SEQ ID NO: 159287 - DNA, 30 bp, Artificial Sequence
  Synthetic oligonucleotide
taccgtctacatccggtcaattatcacgga

SEQ ID NO: 159288 - DNA, 30 bp, Artificial Sequence
  Synthetic oligonucleotide
agctcgggagtgtgatagtcaggtcacgga

SEQ ID NO: 159289 - DNA, 30 bp, Artificial Sequence
  Synthetic oligonucleotide
cagcggggggtaccaatgggttaagacgga

SEQ ID NO: 159290 - DNA, 30 bp, Artificial Sequence
  Synthetic oligonucleotide
tacgatttgttcgaaaaaagacgggacgga

SEQ ID NO: 159291 - DNA, 30 bp, Artificial Sequence
  Synthetic oligonucleotide
atacggctacgcctccaacacggggacgga

SEQ ID NO: 159292 - DNA, 30 bp, Artificial Sequence
  Synthetic oligonucleotide
ttagacagagactataggtttttatacgga

SEQ ID NO: 159293 - DNA, 30 bp, Artificial Sequence
  Synthetic oligonucleotide
gcgatcgtgtaggacggatcgtactacgga

SEQ ID NO: 159294 - DNA, 29 bp, Artificial Sequence
  Synthetic oligonucleotide
atatacgggcccatggcaaagagtacgga

SEQ ID NO: 159295 - DNA, 30 bp, Artificial Sequence
  Synthetic oligonucleotide
atcaaagcgtaacctggattgtcgtacgga

SEQ ID NO: 159296 - DNA, 30 bp, Artificial Sequence
  Synthetic oligonucleotide
ataccgatccaaacgaacaaatggtacgga

SEQ ID NO: 159297 - DNA, 30 bp, Artificial Sequence
  Synthetic oligonucleotide
ctggatttctagtaggaattgtggtacgga

SEQ ID NO: 159298 - DNA, 30 bp, Artificial Sequence
  Synthetic oligonucleotide
gcgaacgacatagagcgttctggcaccgga

SEQ ID NO: 159299 - DNA, 30 bp, Artificial Sequence
  Synthetic oligonucleotide
ctcggcgtcctaactcgcggaatcaccgga

SEQ ID NO: 159300 - DNA, 30 bp, Artificial Sequence
  Synthetic oligonucleotide
aacttcaggttcagcttagtccaccccgga

SEQ ID NO: 159301 - DNA, 30 bp, Artificial Sequence
  Synthetic oligonucleotide
cagagtcataggtaagcgtcgcaccccgga

SEQ ID NO: 159302 - DNA, 30 bp, Artificial Sequence
  Synthetic oligonucleotide
gcttcgtgaagaacttctcccgaccccgga

SEQ ID NO: 159303 - DNA, 30 bp, Artificial Sequence
  Synthetic oligonucleotide
cggggtgatttcttagaaagggccgccgga

SEQ ID NO: 159304 - DNA, 30 bp, Artificial Sequence
  Synthetic oligonucleotide
tcgggtttcggcacggaagcacctgccgga

SEQ ID NO: 159305 - DNA, 30 bp, Artificial Sequence
  Synthetic oligonucleotide
gaaggggggtatattgacatggctgccgga

SEQ ID NO: 159306 - DNA, 30 bp, Artificial Sequence
  Synthetic oligonucleotide
gtcttaacgtaatacacgagattttccgga

SEQ ID NO: 159307 - DNA, 30 bp, Artificial Sequence
  Synthetic oligonucleotide
ggggtcgtgctgatcccgaagccaagcgga

SEQ ID NO: 159308 - DNA, 30 bp, Artificial Sequence
  Synthetic oligonucleotide
actaatcacgcgaacggttaatagagcgga

SEQ ID NO: 159309 - DNA, 30 bp, Artificial Sequence
  Synthetic oligonucleotide
acagcttattcaagtgtaaagctgagcgga

SEQ ID NO: 159310 - DNA, 30 bp, Artificial Sequence
  Synthetic oligonucleotide
gttgactagaaggccatgtttcctagcgga

SEQ ID NO: 159311 - DNA, 30 bp, Artificial Sequence
  Synthetic oligonucleotide
acatctgctgtcatgattagacatcgcgga

SEQ ID NO: 159312 - DNA, 30 bp, Artificial Sequence
  Synthetic oligonucleotide
atggggatcgtataagtcccacaaggcgga

SEQ ID NO: 159313 - DNA, 30 bp, Artificial Sequence
  Synthetic oligonucleotide
agtagtaactttgaaaagtggtcaggcgga

SEQ ID NO: 159314 - DNA, 30 bp, Artificial Sequence
  Synthetic oligonucleotide
agcagcataaagcgaagaagtctaggcgga

SEQ ID NO: 159315 - DNA, 30 bp, Artificial Sequence
  Synthetic oligonucleotide
caataatggtgtgggcagcagcatggcgga

SEQ ID NO: 159316 - DNA, 30 bp, Artificial Sequence
  Synthetic oligonucleotide
acaactgtagcacggggcgactatggcgga

SEQ ID NO: 159317 - DNA, 30 bp, Artificial Sequence
  Synthetic oligonucleotide
gtagatactggtcctgaggaacgtggcgga

SEQ ID NO: 159318 - DNA, 30 bp, Artificial Sequence
  Synthetic oligonucleotide
acaatgtacggtgcggactaccgtggcgga

SEQ ID NO: 159319 - DNA, 30 bp, Artificial Sequence
  Synthetic oligonucleotide
cgcaatacggtccataacgacaaatgcgga

SEQ ID NO: 159320 - DNA, 30 bp, Artificial Sequence
  Synthetic oligonucleotide
cttactgtctaacttaacatgaactgcgga

SEQ ID NO: 159321 - DNA, 30 bp, Artificial Sequence
  Synthetic oligonucleotide
atgggttgaccttcggaccagagctgcgga

SEQ ID NO: 159322 - DNA, 30 bp, Artificial Sequence
  Synthetic oligonucleotide
gcaataaatagccgtgatgccgagtgcgga

SEQ ID NO: 159323 - DNA, 30 bp, Artificial Sequence
  Synthetic oligonucleotide
gtggagcaatttttatttaaactgtgcgga

SEQ ID NO: 159324 - DNA, 30 bp, Artificial Sequence
  Synthetic oligonucleotide
tcacagaatggaccttgaaacttgtgcgga

SEQ ID NO: 159325 - DNA, 30 bp, Artificial Sequence
  Synthetic oligonucleotide
ggcaaaccagctacgtgccctgattgcgga

SEQ ID NO: 159326 - DNA, 30 bp, Artificial Sequence
  Synthetic oligonucleotide
ataatacagattgaactgctgttttgcgga

SEQ ID NO: 159327 - DNA, 30 bp, Artificial Sequence
  Synthetic oligonucleotide
ggtaaggctgttggccggaaactaatcgga

SEQ ID NO: 159328 - DNA, 30 bp, Artificial Sequence
  Synthetic oligonucleotide
cctccttaactacataggattaagatcgga

SEQ ID NO: 159329 - DNA, 30 bp, Artificial Sequence
  Synthetic oligonucleotide
gagttaaactagttgtgatagtcgctcgga

SEQ ID NO: 159330 - DNA, 30 bp, Artificial Sequence
  Synthetic oligonucleotide
ttcttagggtcggggtactccatgctcgga

SEQ ID NO: 159331 - DNA, 30 bp, Artificial Sequence
  Synthetic oligonucleotide
acttaacgatcccattctggagtgctcgga

SEQ ID NO: 159332 - DNA, 30 bp, Artificial Sequence
  Synthetic oligonucleotide
ttcggatccgttgtcaactatggtctcgga

SEQ ID NO: 159333 - DNA, 30 bp, Artificial Sequence
  Synthetic oligonucleotide
ggcaaaatagggagccttacagttctcgga

SEQ ID NO: 159334 - DNA, 30 bp, Artificial Sequence
  Synthetic oligonucleotide
ttcgaacaaatagccgtacacgttctcgga

SEQ ID NO: 159335 - DNA, 30 bp, Artificial Sequence
  Synthetic oligonucleotide
gttatgcccagaaaacaccgccacgtcgga

SEQ ID NO: 159336 - DNA, 30 bp, Artificial Sequence
  Synthetic oligonucleotide
gtggcgatccaccctataagtatcgtcgga

SEQ ID NO: 159337 - DNA, 30 bp, Artificial Sequence
  Synthetic oligonucleotide
caggacagaatgaattcgtcccgtgtcgga

SEQ ID NO: 159338 - DNA, 30 bp, Artificial Sequence
  Synthetic oligonucleotide
agaggtagtgtattgggcgtctaattcgga

SEQ ID NO: 159339 - DNA, 30 bp, Artificial Sequence
  Synthetic oligonucleotide
aattgttgggcgagcggacagtcccaggga

SEQ ID NO: 159340 - DNA, 30 bp, Artificial Sequence
  Synthetic oligonucleotide
tagatttataatagcaatgcatagcaggga

SEQ ID NO: 159341 - DNA, 30 bp, Artificial Sequence
  Synthetic oligonucleotide
accaatcatagtccctggccaatgcaggga

SEQ ID NO: 159342 - DNA, 30 bp, Artificial Sequence
  Synthetic oligonucleotide
caggcgcagtcgtaagtcatggtagaggga

SEQ ID NO: 159343 - DNA, 30 bp, Artificial Sequence
  Synthetic oligonucleotide
ggtagtccttatcctaggtacatggaggga

SEQ ID NO: 159344 - DNA, 30 bp, Artificial Sequence
  Synthetic oligonucleotide
tgtaatctgcgcccaggctatggtgaggga

SEQ ID NO: 159345 - DNA, 30 bp, Artificial Sequence
  Synthetic oligonucleotide
gaaccgcaggacttgcaacggtttgaggga

SEQ ID NO: 159346 - DNA, 30 bp, Artificial Sequence
  Synthetic oligonucleotide
caattaacacagtccgagatcgcataggga

SEQ ID NO: 159347 - DNA, 30 bp, Artificial Sequence
  Synthetic oligonucleotide
ggccgacactgaaacgtaacggtataggga

SEQ ID NO: 159348 - DNA, 30 bp, Artificial Sequence
  Synthetic oligonucleotide
gactgagggaagataagtcctaggtaggga

SEQ ID NO: 159349 - DNA, 30 bp, Artificial Sequence
  Synthetic oligonucleotide
cgtttgtcaagtgctgcaattctgtaggga

SEQ ID NO: 159350 - DNA, 30 bp, Artificial Sequence
  Synthetic oligonucleotide
aagtgaaggtctcaacagctgccttaggga

SEQ ID NO: 159351 - DNA, 30 bp, Artificial Sequence
  Synthetic oligonucleotide
caagcgtgcactaacctctgagtaacggga

SEQ ID NO: 159352 - DNA, 30 bp, Artificial Sequence
  Synthetic oligonucleotide
atggacgaaatcttaaacgaaaggacggga

SEQ ID NO: 159353 - DNA, 30 bp, Artificial Sequence
  Synthetic oligonucleotide
cagtagaaaaaaaagggaatgtggacggga

SEQ ID NO: 159354 - DNA, 30 bp, Artificial Sequence
  Synthetic oligonucleotide
tggagtttgaaaaggtgcagcgtgacggga

SEQ ID NO: 159355 - DNA, 30 bp, Artificial Sequence
  Synthetic oligonucleotide
acgcaagttgttaccactgtcccaccggga

SEQ ID NO: 159356 - DNA, 30 bp, Artificial Sequence
  Synthetic oligonucleotide
ctgctagcagcaaactactcacgaccggga

SEQ ID NO: 159357 - DNA, 31 bp, Artificial Sequence
  Synthetic oligonucleotide
aactactcgactatccatcgtaggaccggga

SEQ ID NO: 159358 - DNA, 30 bp, Artificial Sequence
  Synthetic oligonucleotide
catgttgtgggtcgcctaagtgatccggga

SEQ ID NO: 159359 - DNA, 30 bp, Artificial Sequence
  Synthetic oligonucleotide
ctctatgagtattctgctgaaagcgcggga

SEQ ID NO: 159360 - DNA, 30 bp, Artificial Sequence
  Synthetic oligonucleotide
ccttatgccaattaaagcgaataggcggga

SEQ ID NO: 159361 - DNA, 29 bp, Artificial Sequence
  Synthetic oligonucleotide
gctcgctacaggaaatggtactggcggga

SEQ ID NO: 159362 - DNA, 30 bp, Artificial Sequence
  Synthetic oligonucleotide
gcttgtgcagataataaatcttctgcggga

SEQ ID NO: 159363 - DNA, 30 bp, Artificial Sequence
  Synthetic oligonucleotide
ggaaataatataaaccggtgccattcggga

SEQ ID NO: 159364 - DNA, 30 bp, Artificial Sequence
  Synthetic oligonucleotide
acttaacacaacagttttagtcgaagggga

SEQ ID NO: 159365 - DNA, 30 bp, Artificial Sequence
  Synthetic oligonucleotide
tcggcacttatggcgtacctctacagggga

SEQ ID NO: 159366 - DNA, 30 bp, Artificial Sequence
  Synthetic oligonucleotide
gaactatgaaactctaaaccgtggagggga

SEQ ID NO: 159367 - DNA, 30 bp, Artificial Sequence
  Synthetic oligonucleotide
gtcatcgttttcgtcggacaataacgggga

SEQ ID NO: 159368 - DNA, 30 bp, Artificial Sequence
  Synthetic oligonucleotide
gtcaagcttagataatcaaagacacgggga

SEQ ID NO: 159369 - DNA, 30 bp, Artificial Sequence
  Synthetic oligonucleotide
agtcacgttcggtcccggaggtgacgggga

SEQ ID NO: 159370 - DNA, 30 bp, Artificial Sequence
  Synthetic oligonucleotide
acggcgagtttttcatccaatgaccgggga

SEQ ID NO: 159371 - DNA, 30 bp, Artificial Sequence
  Synthetic oligonucleotide
tgggacgttatccggaaaacgaagcgggga

SEQ ID NO: 159372 - DNA, 30 bp, Artificial Sequence
  Synthetic oligonucleotide
ttagtgggccgggttcgatagaatcgggga

SEQ ID NO: 159373 - DNA, 30 bp, Artificial Sequence
  Synthetic oligonucleotide
ggatactgtcctggtgtggggcaaggggga

SEQ ID NO: 159374 - DNA, 30 bp, Artificial Sequence
  Synthetic oligonucleotide
tcccacaaaactagtgattgcggaggggga

SEQ ID NO: 159375 - DNA, 31 bp, Artificial Sequence
  Synthetic oligonucleotide
tgacttgaacaagtttcttgggtccggggga

SEQ ID NO: 159376 - DNA, 30 bp, Artificial Sequence
  Synthetic oligonucleotide
ccgaccggtatactagcccatatcggggga

SEQ ID NO: 159377 - DNA, 30 bp, Artificial Sequence
  Synthetic oligonucleotide
ggagtgcttggttttgatcaaaggggggga

SEQ ID NO: 159378 - DNA, 40 bp, Artificial Sequence
  Synthetic oligonucleotide
aagataatactttcatggtatggtcggggatcggggggga

SEQ ID NO: 159379 - DNA, 30 bp, Artificial Sequence
  Synthetic oligonucleotide
cgactcggggcgacgccgagtggtggggga

SEQ ID NO: 159380 - DNA, 30 bp, Artificial Sequence
  Synthetic oligonucleotide
atctagccccgaagagtgtgagaatgggga

SEQ ID NO: 159381 - DNA, 30 bp, Artificial Sequence
  Synthetic oligonucleotide
atatatgcgcgttgaggacgaatatgggga

SEQ ID NO: 159382 - DNA, 30 bp, Artificial Sequence
  Synthetic oligonucleotide
gcatgatatactcccatgccagtatgggga

SEQ ID NO: 159383 - DNA, 30 bp, Artificial Sequence
  Synthetic oligonucleotide
tccttgccaacgacagttggattatgggga

SEQ ID NO: 159384 - DNA, 30 bp, Artificial Sequence
  Synthetic oligonucleotide
tgtgaaaagctattcgctaatatctgggga

SEQ ID NO: 159385 - DNA, 30 bp, Artificial Sequence
  Synthetic oligonucleotide
taaggttagactcatggcttcacttgggga

SEQ ID NO: 159386 - DNA, 30 bp, Artificial Sequence
  Synthetic oligonucleotide
tgaatatcaagtgttcacttgttttgggga

SEQ ID NO: 159387 - DNA, 30 bp, Artificial Sequence
  Synthetic oligonucleotide
agtcgctggggaataccgacttgaatggga

SEQ ID NO: 159388 - DNA, 30 bp, Artificial Sequence
  Synthetic oligonucleotide
ggcttggttctgctagctgtaataatggga

SEQ ID NO: 159389 - DNA, 30 bp, Artificial Sequence
  Synthetic oligonucleotide
ctagtaacaacgaacgaggcggacatggga

SEQ ID NO: 159390 - DNA, 30 bp, Artificial Sequence
  Synthetic oligonucleotide
ctaatgctaggatacaccagtaccatggga

SEQ ID NO: 159391 - DNA, 30 bp, Artificial Sequence
  Synthetic oligonucleotide
tagaatgtccggtgaactccgtagatggga

SEQ ID NO: 159392 - DNA, 30 bp, Artificial Sequence
  Synthetic oligonucleotide
attaaccaatttctgcctaacaggatggga

SEQ ID NO: 159393 - DNA, 30 bp, Artificial Sequence
  Synthetic oligonucleotide
gcttctacgcatacattatcgaggatggga

SEQ ID NO: 159394 - DNA, 30 bp, Artificial Sequence
  Synthetic oligonucleotide
ggaagcactgcctaatgataacctatggga

SEQ ID NO: 159395 - DNA, 30 bp, Artificial Sequence
  Synthetic oligonucleotide
atccatagaagggttggcgacattatggga

SEQ ID NO: 159396 - DNA, 30 bp, Artificial Sequence
  Synthetic oligonucleotide
gcttcaacatcccggagaaagacactggga

SEQ ID NO: 159397 - DNA, 30 bp, Artificial Sequence
  Synthetic oligonucleotide
agccattgaacttatggacagtccctggga

SEQ ID NO: 159398 - DNA, 30 bp, Artificial Sequence
  Synthetic oligonucleotide
gaccggccgagtcagcgttgtcggctggga

SEQ ID NO: 159399 - DNA, 30 bp, Artificial Sequence
  Synthetic oligonucleotide
cctctgacctaccgcctaacaactctggga

SEQ ID NO: 159400 - DNA, 30 bp, Artificial Sequence
  Synthetic oligonucleotide
gcgggactaatccattagggttctctggga

SEQ ID NO: 159401 - DNA, 30 bp, Artificial Sequence
  Synthetic oligonucleotide
cttcactgaatagaaggggtaacagtggga

SEQ ID NO: 159402 - DNA, 30 bp, Artificial Sequence
  Synthetic oligonucleotide
tctgcgcgatagtgccgtttgatcgtggga

SEQ ID NO: 159403 - DNA, 30 bp, Artificial Sequence
  Synthetic oligonucleotide
acgattctgagtttgcactctgaggtggga

SEQ ID NO: 159404 - DNA, 29 bp, Artificial Sequence
  Synthetic oligonucleotide
atgggaaggttaggctatgctaggtggga

SEQ ID NO: 159405 - DNA, 30 bp, Artificial Sequence
  Synthetic oligonucleotide
gggaaacttttgcaaactattctattggga

SEQ ID NO: 159406 - DNA, 30 bp, Artificial Sequence
  Synthetic oligonucleotide
ccatcttgaagtattacgaatcaaaatgga

SEQ ID NO: 159407 - DNA, 30 bp, Artificial Sequence
  Synthetic oligonucleotide
acttcggcaacgccaatggaggaaaatgga

SEQ ID NO: 159408 - DNA, 30 bp, Artificial Sequence
  Synthetic oligonucleotide
aagatcggtattaagaccccacccaatgga

SEQ ID NO: 159409 - DNA, 30 bp, Artificial Sequence
  Synthetic oligonucleotide
ctaggtcgggtaggcaggccaaaccatgga

SEQ ID NO: 159410 - DNA, 30 bp, Artificial Sequence
  Synthetic oligonucleotide
tagcctgttgtaggcaaagaatagcatgga

SEQ ID NO: 159411 - DNA, 30 bp, Artificial Sequence
  Synthetic oligonucleotide
ggcctggtcaagcagcgtcggtagcatgga

SEQ ID NO: 159412 - DNA, 30 bp, Artificial Sequence
  Synthetic oligonucleotide
gagacgcgttgggcctgtgcggtgcatgga

SEQ ID NO: 159413 - DNA, 30 bp, Artificial Sequence
  Synthetic oligonucleotide
aggcaatcacattctacgtcctgtcatgga

SEQ ID NO: 159414 - DNA, 30 bp, Artificial Sequence
  Synthetic oligonucleotide
ggttggtgattccgttggccaccagatgga

SEQ ID NO: 159415 - DNA, 30 bp, Artificial Sequence
  Synthetic oligonucleotide
gctcgcagtagcatggtcctgcgagatgga

SEQ ID NO: 159416 - DNA, 30 bp, Artificial Sequence
  Synthetic oligonucleotide
gatgtgggctcaaggcgtgggctagatgga

SEQ ID NO: 159417 - DNA, 30 bp, Artificial Sequence
  Synthetic oligonucleotide
ccctacagtcaaaccatttgagcggatgga

SEQ ID NO: 159418 - DNA, 30 bp, Artificial Sequence
  Synthetic oligonucleotide
taatctgatcccacgagttgacatgatgga

SEQ ID NO: 159419 - DNA, 30 bp, Artificial Sequence
  Synthetic oligonucleotide
gttgcctgactaatgaacgagaactatgga

SEQ ID NO: 159420 - DNA, 30 bp, Artificial Sequence
  Synthetic oligonucleotide
tcagcacggagtaagggcccgctctatgga

SEQ ID NO: 159421 - DNA, 30 bp, Artificial Sequence
  Synthetic oligonucleotide
tattgcagggttagatagtccacgtatgga

SEQ ID NO: 159422 - DNA, 30 bp, Artificial Sequence
  Synthetic oligonucleotide
ttgagttacattcactctatctcttatgga

SEQ ID NO: 159423 - DNA, 31 bp, Artificial Sequence
  Synthetic oligonucleotide
tacggtgtccgtccgcatttcaccaactgga

SEQ ID NO: 159424 - DNA, 30 bp, Artificial Sequence
  Synthetic oligonucleotide
tcctattcaccctccacgtcgtacactgga

SEQ ID NO: 159425 - DNA, 30 bp, Artificial Sequence
  Synthetic oligonucleotide
tatcacagtgaatattgtgcagccactgga

SEQ ID NO: 159426 - DNA, 30 bp, Artificial Sequence
  Synthetic oligonucleotide
tgggtttggcgtgaggaagaacgcactgga

SEQ ID NO: 159427 - DNA, 30 bp, Artificial Sequence
  Synthetic oligonucleotide
ggcgtgtattgtgtgaggtagatgactgga

SEQ ID NO: 159428 - DNA, 30 bp, Artificial Sequence
  Synthetic oligonucleotide
atgcggagtgcggctggccctcatactgga

SEQ ID NO: 159429 - DNA, 30 bp, Artificial Sequence
  Synthetic oligonucleotide
tcatgtgaacggcgtatggactatactgga

SEQ ID NO: 159430 - DNA, 30 bp, Artificial Sequence
  Synthetic oligonucleotide
ccaaaagaattttcattcctaggtactgga

SEQ ID NO: 159431 - DNA, 30 bp, Artificial Sequence
  Synthetic oligonucleotide
gtgaggaaccatgttgggagctcagctgga

SEQ ID NO: 159432 - DNA, 30 bp, Artificial Sequence
  Synthetic oligonucleotide
cgatgttagaattcccccgtccccgctgga

SEQ ID NO: 159433 - DNA, 30 bp, Artificial Sequence
  Synthetic oligonucleotide
tacctatacacatggattatgtaggctgga

SEQ ID NO: 159434 - DNA, 30 bp, Artificial Sequence
  Synthetic oligonucleotide
tggtcaacctatcttacaccctctgctgga

SEQ ID NO: 159435 - DNA, 30 bp, Artificial Sequence
  Synthetic oligonucleotide
gcttttacgcgaaagcaagggcgctctgga

SEQ ID NO: 159436 - DNA, 30 bp, Artificial Sequence
  Synthetic oligonucleotide
gagggtgatctgcataaggcggtctctgga

SEQ ID NO: 159437 - DNA, 30 bp, Artificial Sequence
  Synthetic oligonucleotide
ggaaagtctaacatacgtgagtagtctgga

SEQ ID NO: 159438 - DNA, 30 bp, Artificial Sequence
  Synthetic oligonucleotide
aaagtctactgtgcttcgttccccagtgga

SEQ ID NO: 159439 - DNA, 30 bp, Artificial Sequence
  Synthetic oligonucleotide
ggctgagactgactcgggtcgatcagtgga

SEQ ID NO: 159440 - DNA, 30 bp, Artificial Sequence
  Synthetic oligonucleotide
gcgcggctacagcactaagtgaaccgtgga

SEQ ID NO: 159441 - DNA, 30 bp, Artificial Sequence
  Synthetic oligonucleotide
caaggcttgacgagatttcccgaccgtgga

SEQ ID NO: 159442 - DNA, 30 bp, Artificial Sequence
  Synthetic oligonucleotide
ataaacgacgaatctggagagttgcgtgga

SEQ ID NO: 159443 - DNA, 30 bp, Artificial Sequence
  Synthetic oligonucleotide
gctaaacattatccagggtgtaatcgtgga

SEQ ID NO: 159444 - DNA, 30 bp, Artificial Sequence
  Synthetic oligonucleotide
tcatagataacggtgacccgataaggtgga

SEQ ID NO: 159445 - DNA, 30 bp, Artificial Sequence
  Synthetic oligonucleotide
cctaaaatcgaaattttgttatgaggtgga

SEQ ID NO: 159446 - DNA, 30 bp, Artificial Sequence
  Synthetic oligonucleotide
taaaataaaccaaaggtacgagtaggtgga

SEQ ID NO: 159447 - DNA, 30 bp, Artificial Sequence
  Synthetic oligonucleotide
ttgccagtcaacccaaaggaaagcggtgga

SEQ ID NO: 159448 - DNA, 30 bp, Artificial Sequence
  Synthetic oligonucleotide
tccacaaatggcctacactccctgggtgga

SEQ ID NO: 159449 - DNA, 30 bp, Artificial Sequence
  Synthetic oligonucleotide
caaatcctccgacaaacctgagatggtgga

SEQ ID NO: 159450 - DNA, 30 bp, Artificial Sequence
  Synthetic oligonucleotide
aggggtggagcggtacacgacaaatgtgga

SEQ ID NO: 159451 - DNA, 30 bp, Artificial Sequence
  Synthetic oligonucleotide
actatcggggctaggatactcatatgtgga

SEQ ID NO: 159452 - DNA, 30 bp, Artificial Sequence
  Synthetic oligonucleotide
caaagcagcacgaagtgcacgcgctgtgga

SEQ ID NO: 159453 - DNA, 30 bp, Artificial Sequence
  Synthetic oligonucleotide
accagcataaggttaaggtgaatctgtgga

SEQ ID NO: 159454 - DNA, 30 bp, Artificial Sequence
  Synthetic oligonucleotide
agtaggcgaatcgcgagacctatctgtgga

SEQ ID NO: 159455 - DNA, 30 bp, Artificial Sequence
  Synthetic oligonucleotide
acggtattgagggctgtttgcctctgtgga

SEQ ID NO: 159456 - DNA, 30 bp, Artificial Sequence
  Synthetic oligonucleotide
ggagtcagaatggagcacttcgtctgtgga

SEQ ID NO: 159457 - DNA, 30 bp, Artificial Sequence
  Synthetic oligonucleotide
caatatgttgtgtagggtcgtttctgtgga

SEQ ID NO: 159458 - DNA, 30 bp, Artificial Sequence
  Synthetic oligonucleotide
cgcgaggctccgtggtgcaaatggtgtgga

SEQ ID NO: 159459 - DNA, 30 bp, Artificial Sequence
  Synthetic oligonucleotide
gtaacggagatgtgggacccccagattgga

SEQ ID NO: 159460 - DNA, 30 bp, Artificial Sequence
  Synthetic oligonucleotide
tatagagacgtacggagtataaggattgga

SEQ ID NO: 159461 - DNA, 30 bp, Artificial Sequence
  Synthetic oligonucleotide
aatgaaacacataagtatcggtcacttgga

SEQ ID NO: 159462 - DNA, 30 bp, Artificial Sequence
  Synthetic oligonucleotide
cataacagtatcatctgactagcccttgga

SEQ ID NO: 159463 - DNA, 30 bp, Artificial Sequence
  Synthetic oligonucleotide
ctcagataccgagacccgacacgtcttgga

SEQ ID NO: 159464 - DNA, 30 bp, Artificial Sequence
  Synthetic oligonucleotide
cttcggcacctgcagtttagtcgtcttgga

SEQ ID NO: 159465 - DNA, 30 bp, Artificial Sequence
  Synthetic oligonucleotide
gacatcactccgagtctagtcgttcttgga

SEQ ID NO: 159466 - DNA, 30 bp, Artificial Sequence
  Synthetic oligonucleotide
taggctcaacgggacataccccgagttgga

SEQ ID NO: 159467 - DNA, 30 bp, Artificial Sequence
  Synthetic oligonucleotide
tgggccgtacatgcagaggcaaaggttgga

SEQ ID NO: 159468 - DNA, 30 bp, Artificial Sequence
  Synthetic oligonucleotide
gggaccaggcgtctaaatgcccaatttgga

SEQ ID NO: 159469 - DNA, 30 bp, Artificial Sequence
  Synthetic oligonucleotide
gcaccgagtacaacaacgggtgcatttgga

SEQ ID NO: 159470 - DNA, 30 bp, Artificial Sequence
  Synthetic oligonucleotide
gccgccaaacgtagcctgggaggatttgga

SEQ ID NO: 159471 - DNA, 30 bp, Artificial Sequence
  Synthetic oligonucleotide
tgggaaagtgttttggtacatatatttgga

SEQ ID NO: 159472 - DNA, 30 bp, Artificial Sequence
  Synthetic oligonucleotide
gcgaagccaatagagactcgtggctttgga

SEQ ID NO: 159473 - DNA, 30 bp, Artificial Sequence
  Synthetic oligonucleotide
cctgtcaagggcctacaggagaattttgga

SEQ ID NO: 159474 - DNA, 30 bp, Artificial Sequence
  Synthetic oligonucleotide
gggagtcgggtgacacctgctcattttgga

SEQ ID NO: 159475 - DNA, 30 bp, Artificial Sequence
  Synthetic oligonucleotide
cggaggactacctgagggacgacaaaatga

SEQ ID NO: 159476 - DNA, 30 bp, Artificial Sequence
  Synthetic oligonucleotide
tgaataacgttagggatggtgcggaaatga

SEQ ID NO: 159477 - DNA, 30 bp, Artificial Sequence
  Synthetic oligonucleotide
tagtaggttcgcttacgtctcacccaatga

SEQ ID NO: 159478 - DNA, 29 bp, Artificial Sequence
  Synthetic oligonucleotide
atctgccagagtaaaaatcgtcccaatga

SEQ ID NO: 159479 - DNA, 29 bp, Artificial Sequence
  Synthetic oligonucleotide
gtgtgaatagtgaactcgtcattcaatga

SEQ ID NO: 159480 - DNA, 30 bp, Artificial Sequence
  Synthetic oligonucleotide
acaggggctttacaggtaaggtttcaatga

SEQ ID NO: 159481 - DNA, 30 bp, Artificial Sequence
  Synthetic oligonucleotide
tttggatagtcaaaagtaaagaccgaatga

SEQ ID NO: 159482 - DNA, 30 bp, Artificial Sequence
  Synthetic oligonucleotide
gcagcgaaattggtaagttgtagggaatga

SEQ ID NO: 159483 - DNA, 30 bp, Artificial Sequence
  Synthetic oligonucleotide
cgcttatccctgggcggcgtacgataatga

SEQ ID NO: 159484 - DNA, 30 bp, Artificial Sequence
  Synthetic oligonucleotide
tgaccacttacgggcaggagagcctaatga

SEQ ID NO: 159485 - DNA, 30 bp, Artificial Sequence
  Synthetic oligonucleotide
gcaacggaccccgtgtacaccaaaacatga

SEQ ID NO: 159486 - DNA, 30 bp, Artificial Sequence
  Synthetic oligonucleotide
atattctcgatcaattagtatgcgacatga

SEQ ID NO: 159487 - DNA, 30 bp, Artificial Sequence
  Synthetic oligonucleotide
gatcagacgggtaagtaatccgggacatga

SEQ ID NO: 159488 - DNA, 30 bp, Artificial Sequence
  Synthetic oligonucleotide
gacccaagcgtggacatgctgatgacatga

SEQ ID NO: 159489 - DNA, 30 bp, Artificial Sequence
  Synthetic oligonucleotide
atggtagacgaacgtatgagatgcccatga

SEQ ID NO: 159490 - DNA, 30 bp, Artificial Sequence
  Synthetic oligonucleotide
atgaaaatcacccgcggataaaggccatga

SEQ ID NO: 159491 - DNA, 30 bp, Artificial Sequence
  Synthetic oligonucleotide
gccagtgggtagcacctcacctcagcatga

SEQ ID NO: 159492 - DNA, 30 bp, Artificial Sequence
  Synthetic oligonucleotide
acatgtcagaagccagacaccgccgcatga

SEQ ID NO: 159493 - DNA, 30 bp, Artificial Sequence
  Synthetic oligonucleotide
atgatagaaattgagtggccttaggcatga

SEQ ID NO: 159494 - DNA, 30 bp, Artificial Sequence
  Synthetic oligonucleotide
cgtcagggatgttggtaaaccatatcatga

SEQ ID NO: 159495 - DNA, 30 bp, Artificial Sequence
  Synthetic oligonucleotide
gggtttaaacacaaggacaggctatcatga

SEQ ID NO: 159496 - DNA, 30 bp, Artificial Sequence
  Synthetic oligonucleotide
tagaagtaccggtgaacgtgaacgtcatga

SEQ ID NO: 159497 - DNA, 30 bp, Artificial Sequence
  Synthetic oligonucleotide
tcgcgacaggaacgacatttagaaagatga

SEQ ID NO: 159498 - DNA, 30 bp, Artificial Sequence
  Synthetic oligonucleotide
tgagccggtgtttaataccttgtaagatga

SEQ ID NO: 159499 - DNA, 30 bp, Artificial Sequence
  Synthetic oligonucleotide
caccgtttagtgcgaagcttacggagatga

SEQ ID NO: 159500 - DNA, 30 bp, Artificial Sequence
  Synthetic oligonucleotide
caccgaacgatggccgctcgctgccgatga

SEQ ID NO: 159501 - DNA, 30 bp, Artificial Sequence
  Synthetic oligonucleotide
gactagaggataacaagagcaatgcgatga

SEQ ID NO: 159502 - DNA, 30 bp, Artificial Sequence
  Synthetic oligonucleotide
cccgctatgaaacaatgatgtgtcggatga

SEQ ID NO: 159503 - DNA, 30 bp, Artificial Sequence
  Synthetic oligonucleotide
gctaaaaaaagttatctcgccttgggatga

SEQ ID NO: 159504 - DNA, 30 bp, Artificial Sequence
  Synthetic oligonucleotide
tcagactttctcaattgtaggattggatga

SEQ ID NO: 159505 - DNA, 30 bp, Artificial Sequence
  Synthetic oligonucleotide
gtagcagagggcggtctaggggcttgatga

SEQ ID NO: 159506 - DNA, 30 bp, Artificial Sequence
  Synthetic oligonucleotide
agccattaaccggggctggacccaatatga

SEQ ID NO: 159507 - DNA, 30 bp, Artificial Sequence
  Synthetic oligonucleotide
tgatcgagtagagaggcgccaagaatatga

SEQ ID NO: 159508 - DNA, 30 bp, Artificial Sequence
  Synthetic oligonucleotide
tctaatctaagcagagttggtataatatga

SEQ ID NO: 159509 - DNA, 30 bp, Artificial Sequence
  Synthetic oligonucleotide
acgctctcgaacataggatatcccatatga

SEQ ID NO: 159510 - DNA, 30 bp, Artificial Sequence
  Synthetic oligonucleotide
tatggggtgcggatggccggcttcatatga

SEQ ID NO: 159511 - DNA, 30 bp, Artificial Sequence
  Synthetic oligonucleotide
gtccatcctcatgctgattgaacgatatga

SEQ ID NO: 159512 - DNA, 30 bp, Artificial Sequence
  Synthetic oligonucleotide
gtccacatatctctaacaaagctgctatga

SEQ ID NO: 159513 - DNA, 30 bp, Artificial Sequence
  Synthetic oligonucleotide
gaaataagtctccacgctcgagcagtatga

SEQ ID NO: 159514 - DNA, 30 bp, Artificial Sequence
  Synthetic oligonucleotide
aggcatgtaaccgtaactaggggagtatga

SEQ ID NO: 159515 - DNA, 30 bp, Artificial Sequence
  Synthetic oligonucleotide
gcaacaacgtgaatattgtaaatggtatga

SEQ ID NO: 159516 - DNA, 30 bp, Artificial Sequence
  Synthetic oligonucleotide
tactaacgaggagtttagtagagtgtatga

SEQ ID NO: 159517 - DNA, 30 bp, Artificial Sequence
  Synthetic oligonucleotide
gcaggcggacacccacaacaccaattatga

SEQ ID NO: 159518 - DNA, 30 bp, Artificial Sequence
  Synthetic oligonucleotide
ttggatacgcgttacgggaccggattatga

SEQ ID NO: 159519 - DNA, 30 bp, Artificial Sequence
  Synthetic oligonucleotide
ctgctaagatcgaccacactacttttatga

SEQ ID NO: 159520 - DNA, 30 bp, Artificial Sequence
  Synthetic oligonucleotide
agtgccgtgggaggcgcgcagtttttatga

SEQ ID NO: 159521 - DNA, 30 bp, Artificial Sequence
  Synthetic oligonucleotide
agaggagcccgtcaccggggaccaaactga

SEQ ID NO: 159522 - DNA, 30 bp, Artificial Sequence
  Synthetic oligonucleotide
cacagctgaaggagaaagatcttaaactga

SEQ ID NO: 159523 - DNA, 30 bp, Artificial Sequence
  Synthetic oligonucleotide
atcacccgctagtgatgtgcgaagaactga

SEQ ID NO: 159524 - DNA, 30 bp, Artificial Sequence
  Synthetic oligonucleotide
aacaggggtccagggaaaggctggaactga

SEQ ID NO: 159525 - DNA, 30 bp, Artificial Sequence
  Synthetic oligonucleotide
attgttgaaaatataggaccgtataactga

SEQ ID NO: 159526 - DNA, 30 bp, Artificial Sequence
  Synthetic oligonucleotide
ccttcctctagaactgagtccgggcactga

SEQ ID NO: 159527 - DNA, 30 bp, Artificial Sequence
  Synthetic oligonucleotide
aactcgtggtggtccggggcgtgtcactga

SEQ ID NO: 159528 - DNA, 30 bp, Artificial Sequence
  Synthetic oligonucleotide
ctacaccattcacgtctgatcgactactga

SEQ ID NO: 159529 - DNA, 30 bp, Artificial Sequence
  Synthetic oligonucleotide
acaggttcagcaggaaggcggcacacctga

SEQ ID NO: 159530 - DNA, 30 bp, Artificial Sequence
  Synthetic oligonucleotide
ggtgtactaggcgtctcacatggcacctga

SEQ ID NO: 159531 - DNA, 30 bp, Artificial Sequence
  Synthetic oligonucleotide
gggagtactacggtatcaccaaatacctga

SEQ ID NO: 159532 - DNA, 30 bp, Artificial Sequence
  Synthetic oligonucleotide
agacactagcacccattagactatacctga

SEQ ID NO: 159533 - DNA, 30 bp, Artificial Sequence
  Synthetic oligonucleotide
acgaggtgcgcctgagtgcgggatccctga

SEQ ID NO: 159534 - DNA, 30 bp, Artificial Sequence
  Synthetic oligonucleotide
tggctgcgacaccgccaattccttccctga

SEQ ID NO: 159535 - DNA, 30 bp, Artificial Sequence
  Synthetic oligonucleotide
tgaataattatggggaaatacagcgcctga

SEQ ID NO: 159536 - DNA, 30 bp, Artificial Sequence
  Synthetic oligonucleotide
cgtcggatcgttgtatcaaagggcgcctga

SEQ ID NO: 159537 - DNA, 30 bp, Artificial Sequence
  Synthetic oligonucleotide
agattcatgggtggagagacttactcctga

SEQ ID NO: 159538 - DNA, 30 bp, Artificial Sequence
  Synthetic oligonucleotide
atgttcacgtactaaggagtgacctcctga

SEQ ID NO: 159539 - DNA, 30 bp, Artificial Sequence
  Synthetic oligonucleotide
gcggcaacgacatggcgccgaggctcctga

SEQ ID NO: 159540 - DNA, 30 bp, Artificial Sequence
  Synthetic oligonucleotide
gtattgcgggtgaacgctcggatctcctga

SEQ ID NO: 159541 - DNA, 30 bp, Artificial Sequence
  Synthetic oligonucleotide
gcataaacgctgaacatcaattaaagctga

SEQ ID NO: 159542 - DNA, 30 bp, Artificial Sequence
  Synthetic oligonucleotide
agtcctagtctggattacacaccacgctga

SEQ ID NO: 159543 - DNA, 30 bp, Artificial Sequence
  Synthetic oligonucleotide
aggagtatccaggctgttgcgatacgctga

SEQ ID NO: 159544 - DNA, 30 bp, Artificial Sequence
  Synthetic oligonucleotide
gtgcattgtatagtgagtcgtgttcgctga

SEQ ID NO: 159545 - DNA, 30 bp, Artificial Sequence
  Synthetic oligonucleotide
acgtgtatcccactggacgttgcaggctga

SEQ ID NO: 159546 - DNA, 30 bp, Artificial Sequence
  Synthetic oligonucleotide
gtgtcgatgacagagtcagtgggaggctga

SEQ ID NO: 159547 - DNA, 30 bp, Artificial Sequence
  Synthetic oligonucleotide
tccgaacgttagaggatcgccagcatctga

SEQ ID NO: 159548 - DNA, 30 bp, Artificial Sequence
  Synthetic oligonucleotide
acacacaggttcgagtccattgagatctga

SEQ ID NO: 159549 - DNA, 30 bp, Artificial Sequence
  Synthetic oligonucleotide
ttgtagtaagattaaagacacactatctga

SEQ ID NO: 159550 - DNA, 30 bp, Artificial Sequence
  Synthetic oligonucleotide
agcaaaaatgcgtattaaccgcagctctga

SEQ ID NO: 159551 - DNA, 30 bp, Artificial Sequence
  Synthetic oligonucleotide
gtagctggctttctaaatttcacgctctga

SEQ ID NO: 159552 - DNA, 30 bp, Artificial Sequence
  Synthetic oligonucleotide
atcagccgatcaacgatccgtagtctctga

SEQ ID NO: 159553 - DNA, 30 bp, Artificial Sequence
  Synthetic oligonucleotide
ccgggtagagggtatcgcctcacagtctga

SEQ ID NO: 159554 - DNA, 30 bp, Artificial Sequence
  Synthetic oligonucleotide
taaggtatgtgtgtcatacgccacgtctga

SEQ ID NO: 159555 - DNA, 30 bp, Artificial Sequence
  Synthetic oligonucleotide
gccccgcgcagaacgatgggctaggtctga

SEQ ID NO: 159556 - DNA, 30 bp, Artificial Sequence
  Synthetic oligonucleotide
gaagcgtatgaattacagatgctcttctga

SEQ ID NO: 159557 - DNA, 30 bp, Artificial Sequence
  Synthetic oligonucleotide
taggaggccggcaagcggtggtgcaagtga

SEQ ID NO: 159558 - DNA, 30 bp, Artificial Sequence
  Synthetic oligonucleotide
ccacgtgctagcccatggtaaatcaagtga

SEQ ID NO: 159559 - DNA, 30 bp, Artificial Sequence
  Synthetic oligonucleotide
gcccgaatcatggttatatcggaccagtga

SEQ ID NO: 159560 - DNA, 30 bp, Artificial Sequence
  Synthetic oligonucleotide
tgtttaagagaatataaccgagagcagtga

SEQ ID NO: 159561 - DNA, 30 bp, Artificial Sequence
  Synthetic oligonucleotide
ttaaaacataggacgctcggccggcagtga

SEQ ID NO: 159562 - DNA, 30 bp, Artificial Sequence
  Synthetic oligonucleotide
aagtgcgacagagtttatggactgcagtga

SEQ ID NO: 159563 - DNA, 30 bp, Artificial Sequence
  Synthetic oligonucleotide
tggctgagattctgcccggatcctgagtga

SEQ ID NO: 159564 - DNA, 30 bp, Artificial Sequence
  Synthetic oligonucleotide
aagtgcagagtcagagcttaccgtgagtga

SEQ ID NO: 159565 - DNA, 30 bp, Artificial Sequence
  Synthetic oligonucleotide
tggaatagaataagctgaaagcggtagtga

SEQ ID NO: 159566 - DNA, 30 bp, Artificial Sequence
  Synthetic oligonucleotide
gactagacatggggccaagcagtgtagtga

SEQ ID NO: 159567 - DNA, 30 bp, Artificial Sequence
  Synthetic oligonucleotide
ggtctagtcaacattgtccccgtgtagtga

SEQ ID NO: 159568 - DNA, 30 bp, Artificial Sequence
  Synthetic oligonucleotide
cccagcgccaggcgtcgtgcgagaccgtga

SEQ ID NO: 159569 - DNA, 30 bp, Artificial Sequence
  Synthetic oligonucleotide
gctaatctaagacagccgggtaccccgtga

SEQ ID NO: 159570 - DNA, 30 bp, Artificial Sequence
  Synthetic oligonucleotide
tagcgcggatgtctttcaaccaaagcgtga

SEQ ID NO: 159571 - DNA, 30 bp, Artificial Sequence
  Synthetic oligonucleotide
ctaaaattcgaagatatttggcgagcgtga

SEQ ID NO: 159572 - DNA, 30 bp, Artificial Sequence
  Synthetic oligonucleotide
ttgccatcgtctttgtcgatgttagcgtga

SEQ ID NO: 159573 - DNA, 30 bp, Artificial Sequence
  Synthetic oligonucleotide
gcaaactttgtgtgggaacgttaggcgtga

SEQ ID NO: 159574 - DNA, 30 bp, Artificial Sequence
  Synthetic oligonucleotide
tgtagtcgtttcctggggtagcgggcgtga

SEQ ID NO: 159575 - DNA, 30 bp, Artificial Sequence
  Synthetic oligonucleotide
gaccaaaaaattaccaaacagtatgcgtga

SEQ ID NO: 159576 - DNA, 30 bp, Artificial Sequence
  Synthetic oligonucleotide
tagtaggttgcgtaccacagggtatcgtga

SEQ ID NO: 159577 - DNA, 30 bp, Artificial Sequence
  Synthetic oligonucleotide
ttagaacggcactattctttcccgtcgtga

SEQ ID NO: 159578 - DNA, 30 bp, Artificial Sequence
  Synthetic oligonucleotide
tcggatccggttggtggctcctcttcgtga

SEQ ID NO: 159579 - DNA, 30 bp, Artificial Sequence
  Synthetic oligonucleotide
ttcgatatacgcttcggacttcaaaggtga

SEQ ID NO: 159580 - DNA, 30 bp, Artificial Sequence
  Synthetic oligonucleotide
agtcgtgtagcgtagagaagcttaaggtga

SEQ ID NO: 159581 - DNA, 30 bp, Artificial Sequence
  Synthetic oligonucleotide
aacggtagagtgttgttcgccagcaggtga

SEQ ID NO: 159582 - DNA, 30 bp, Artificial Sequence
  Synthetic oligonucleotide
tcccgcgagggccgaggaattgggaggtga

SEQ ID NO: 159583 - DNA, 30 bp, Artificial Sequence
  Synthetic oligonucleotide
ggggtctaatttgcatcgggtaataggtga

SEQ ID NO: 159584 - DNA, 30 bp, Artificial Sequence
  Synthetic oligonucleotide
cgttcaaatccgtcacttcgtctacggtga

SEQ ID NO: 159585 - DNA, 30 bp, Artificial Sequence
  Synthetic oligonucleotide
gcatggtgattagccgtcatgcaccggtga

SEQ ID NO: 159586 - DNA, 31 bp, Artificial Sequence
  Synthetic oligonucleotide
tcatggggcagacactgtgtatttgcggtga

SEQ ID NO: 159587 - DNA, 30 bp, Artificial Sequence
  Synthetic oligonucleotide
tgtgataatcataattggaccgatcggtga

SEQ ID NO: 159588 - DNA, 30 bp, Artificial Sequence
  Synthetic oligonucleotide
aaatgatcgacgtaaccggattaagggtga

SEQ ID NO: 159589 - DNA, 30 bp, Artificial Sequence
  Synthetic oligonucleotide
agacgatagggctctccttagtcagggtga

SEQ ID NO: 159590 - DNA, 30 bp, Artificial Sequence
  Synthetic oligonucleotide
gagagggatgaagccgagggactcgggtga

SEQ ID NO: 159591 - DNA, 30 bp, Artificial Sequence
  Synthetic oligonucleotide
atgtagggaagtaccctccacctggggtga

SEQ ID NO: 159592 - DNA, 30 bp, Artificial Sequence
  Synthetic oligonucleotide
catgaatttaaacttaatagtaatgggtga

SEQ ID NO: 159593 - DNA, 30 bp, Artificial Sequence
  Synthetic oligonucleotide
atgattgagactgggacggtgtatgggtga

SEQ ID NO: 159594 - DNA, 30 bp, Artificial Sequence
  Synthetic oligonucleotide
gcttaagacagctctaacaacgtatggtga

SEQ ID NO: 159595 - DNA, 30 bp, Artificial Sequence
  Synthetic oligonucleotide
gcgaaacaaaatctcgaggctgtatggtga

SEQ ID NO: 159596 - DNA, 30 bp, Artificial Sequence
  Synthetic oligonucleotide
ggtcccgtcttgcagtgccggttgtggtga

SEQ ID NO: 159597 - DNA, 30 bp, Artificial Sequence
  Synthetic oligonucleotide
agcaagaaatttagtgtcaaacggatgtga

SEQ ID NO: 159598 - DNA, 30 bp, Artificial Sequence
  Synthetic oligonucleotide
ggcgatatattacaagtgaaagtgatgtga

SEQ ID NO: 159599 - DNA, 30 bp, Artificial Sequence
  Synthetic oligonucleotide
agaccgggtcgcccaggcggatcactgtga

SEQ ID NO: 159600 - DNA, 30 bp, Artificial Sequence
  Synthetic oligonucleotide
ctctgcaccatccttataatcaccctgtga

SEQ ID NO: 159601 - DNA, 30 bp, Artificial Sequence
  Synthetic oligonucleotide
cagatacacgcacttactaaattcctgtga

SEQ ID NO: 159602 - DNA, 30 bp, Artificial Sequence
  Synthetic oligonucleotide
tactccgtgcggttcgaggcggtgctgtga

SEQ ID NO: 159603 - DNA, 30 bp, Artificial Sequence
  Synthetic oligonucleotide
caacgaaggaatcggaacttggttctgtga

SEQ ID NO: 159604 - DNA, 30 bp, Artificial Sequence
  Synthetic oligonucleotide
caacacaggcttatgtaaacgagggtgtga

SEQ ID NO: 159605 - DNA, 30 bp, Artificial Sequence
  Synthetic oligonucleotide
ctcgtatcgcaagttgtgctgaatgtgtga

SEQ ID NO: 159606 - DNA, 30 bp, Artificial Sequence
  Synthetic oligonucleotide
gactagtagtctggggaagaagatgtgtga

SEQ ID NO: 159607 - DNA, 30 bp, Artificial Sequence
  Synthetic oligonucleotide
tccatgtattggcgcccgtgtgatgtgtga

SEQ ID NO: 159608 - DNA, 30 bp, Artificial Sequence
  Synthetic oligonucleotide
ttataaacatgcggattaaagagtgtgtga

SEQ ID NO: 159609 - DNA, 30 bp, Artificial Sequence
  Synthetic oligonucleotide
taaactgggtatgatatgctaaaattgtga

SEQ ID NO: 159610 - DNA, 30 bp, Artificial Sequence
  Synthetic oligonucleotide
cgatcatttactggtgaccttaacttgtga

SEQ ID NO: 159611 - DNA, 30 bp, Artificial Sequence
  Synthetic oligonucleotide
gcagcggtaagggactacactctcttgtga

SEQ ID NO: 159612 - DNA, 30 bp, Artificial Sequence
  Synthetic oligonucleotide
ctgagatcaacaacattaggggcgttgtga

SEQ ID NO: 159613 - DNA, 30 bp, Artificial Sequence
  Synthetic oligonucleotide
cttatgccgattaagatctggtcgttgtga

SEQ ID NO: 159614 - DNA, 30 bp, Artificial Sequence
  Synthetic oligonucleotide
tacctgcacacgcgggtgcacctaaattga

SEQ ID NO: 159615 - DNA, 30 bp, Artificial Sequence
  Synthetic oligonucleotide
taagtttcacccggcggttaaccgaattga

SEQ ID NO: 159616 - DNA, 30 bp, Artificial Sequence
  Synthetic oligonucleotide
tatgcaggcgccactgaacttgcgaattga

SEQ ID NO: 159617 - DNA, 30 bp, Artificial Sequence
  Synthetic oligonucleotide
ctacccgagagcgccacgatgtggaattga

SEQ ID NO: 159618 - DNA, 30 bp, Artificial Sequence
  Synthetic oligonucleotide
aagtaatttagtaacaatgactataattga

SEQ ID NO: 159619 - DNA, 30 bp, Artificial Sequence
  Synthetic oligonucleotide
gcgccacttacttagtgtagaaaacattga

SEQ ID NO: 159620 - DNA, 30 bp, Artificial Sequence
  Synthetic oligonucleotide
cgacgggcgcgctatcatgtacgtcattga

SEQ ID NO: 159621 - DNA, 30 bp, Artificial Sequence
  Synthetic oligonucleotide
tacgccgtgatagtatcaaccgttcattga

SEQ ID NO: 159622 - DNA, 30 bp, Artificial Sequence
  Synthetic oligonucleotide
caaagagaattaagtgagatggcagattga

SEQ ID NO: 159623 - DNA, 30 bp, Artificial Sequence
  Synthetic oligonucleotide
aggtaccgcgataattttagttgagattga

SEQ ID NO: 159624 - DNA, 30 bp, Artificial Sequence
  Synthetic oligonucleotide
tgggaacaacatctcggagggcgtgattga

SEQ ID NO: 159625 - DNA, 30 bp, Artificial Sequence
  Synthetic oligonucleotide
agggcttctagctgaacctagcttgattga

SEQ ID NO: 159626 - DNA, 30 bp, Artificial Sequence
  Synthetic oligonucleotide
ccgcggtgtgcacatggctacctctattga

SEQ ID NO: 159627 - DNA, 30 bp, Artificial Sequence
  Synthetic oligonucleotide
acagcaatacagaaaccagtttcgtattga

SEQ ID NO: 159628 - DNA, 30 bp, Artificial Sequence
  Synthetic oligonucleotide
aggaaatggcggtttcgatgagaaacttga

SEQ ID NO: 159629 - DNA, 30 bp, Artificial Sequence
  Synthetic oligonucleotide
gttagatcgacttgtcgagatccaacttga

SEQ ID NO: 159630 - DNA, 30 bp, Artificial Sequence
  Synthetic oligonucleotide
cgaagtgttagattgtaaggcaatacttga

SEQ ID NO: 159631 - DNA, 30 bp, Artificial Sequence
  Synthetic oligonucleotide
gggttaacgacattattaccgtccccttga

SEQ ID NO: 159632 - DNA, 30 bp, Artificial Sequence
  Synthetic oligonucleotide
gtgaagaacctggtttgcgtaccgccttga

SEQ ID NO: 159633 - DNA, 30 bp, Artificial Sequence
  Synthetic oligonucleotide
tacgtttagtcgcttattagtcgatcttga

SEQ ID NO: 159634 - DNA, 30 bp, Artificial Sequence
  Synthetic oligonucleotide
gttatgggaacaaagaggtgtgccagttga

SEQ ID NO: 159635 - DNA, 30 bp, Artificial Sequence
  Synthetic oligonucleotide
acatccgcactttactacaatagcagttga

SEQ ID NO: 159636 - DNA, 30 bp, Artificial Sequence
  Synthetic oligonucleotide
tcaaataaatgatggggatctcaccgttga

SEQ ID NO: 159637 - DNA, 30 bp, Artificial Sequence
  Synthetic oligonucleotide
ctgaactgaacgggtacgggtaggcgttga

SEQ ID NO: 159638 - DNA, 30 bp, Artificial Sequence
  Synthetic oligonucleotide
taagatccacagatcaggaattaaggttga

SEQ ID NO: 159639 - DNA, 30 bp, Artificial Sequence
  Synthetic oligonucleotide
tagtggcttcaggattcactcctaggttga

SEQ ID NO: 159640 - DNA, 30 bp, Artificial Sequence
  Synthetic oligonucleotide
acctgcaaccttagcgtgaagatcggttga

SEQ ID NO: 159641 - DNA, 30 bp, Artificial Sequence
  Synthetic oligonucleotide
atcatcgacattcgggagtcccagggttga

SEQ ID NO: 159642 - DNA, 30 bp, Artificial Sequence
  Synthetic oligonucleotide
ccagggattcgtggaaaggacaggggttga

SEQ ID NO: 159643 - DNA, 30 bp, Artificial Sequence
  Synthetic oligonucleotide
ctacgaaatttgtgccgttggtatggttga

SEQ ID NO: 159644 - DNA, 30 bp, Artificial Sequence
  Synthetic oligonucleotide
ggcacccgttgcctcttaatgcgtggttga

SEQ ID NO: 159645 - DNA, 30 bp, Artificial Sequence
  Synthetic oligonucleotide
acaacgcactttactgcgagtctatgttga

SEQ ID NO: 159646 - DNA, 30 bp, Artificial Sequence
  Synthetic oligonucleotide
ttagccgcgaagtgcactgggatgtgttga

SEQ ID NO: 159647 - DNA, 30 bp, Artificial Sequence
  Synthetic oligonucleotide
gcatagggaagttgtctcgaggaaatttga

SEQ ID NO: 159648 - DNA, 30 bp, Artificial Sequence
  Synthetic oligonucleotide
tgatggggtactgtatgtttggaaatttga

SEQ ID NO: 159649 - DNA, 30 bp, Artificial Sequence
  Synthetic oligonucleotide
tgagtgaacgcagtaagaagtttaatttga

SEQ ID NO: 159650 - DNA, 30 bp, Artificial Sequence
  Synthetic oligonucleotide
gaaggcgtcctcagtcaagatcagatttga

SEQ ID NO: 159651 - DNA, 30 bp, Artificial Sequence
  Synthetic oligonucleotide
gtgtatcgccgcgtcggctaggaactttga

SEQ ID NO: 159652 - DNA, 30 bp, Artificial Sequence
  Synthetic oligonucleotide
ctagtcgcgacgatatctttccatctttga

SEQ ID NO: 159653 - DNA, 30 bp, Artificial Sequence
  Synthetic oligonucleotide
accatagtcggaaaagaaggcgtggtttga

SEQ ID NO: 159654 - DNA, 30 bp, Artificial Sequence
  Synthetic oligonucleotide
atacctggccgcgttgataagtgattttga

SEQ ID NO: 159655 - DNA, 30 bp, Artificial Sequence
  Synthetic oligonucleotide
taaagtgcgcctgacactctacccttttga

SEQ ID NO: 159656 - DNA, 30 bp, Artificial Sequence
  Synthetic oligonucleotide
cgtatcaattaaagaagcatgcatttttga

SEQ ID NO: 159657 - DNA, 30 bp, Artificial Sequence
  Synthetic oligonucleotide
ataccgaaaggaggaggcttcgcaaaaata

SEQ ID NO: 159658 - DNA, 30 bp, Artificial Sequence
  Synthetic oligonucleotide
atgattactagacgagtaggatacaaaata

SEQ ID NO: 159659 - DNA, 30 bp, Artificial Sequence
  Synthetic oligonucleotide
atttacgtgcggtgggcacaggggaaaata

SEQ ID NO: 159660 - DNA, 30 bp, Artificial Sequence
  Synthetic oligonucleotide
ctgcgtaaggaccgggcatctgggaaaata

SEQ ID NO: 159661 - DNA, 30 bp, Artificial Sequence
  Synthetic oligonucleotide
ccgctccgacctgtgctacctttgaaaata

SEQ ID NO: 159662 - DNA, 30 bp, Artificial Sequence
  Synthetic oligonucleotide
aacggagcctccgcatacaagactaaaata

SEQ ID NO: 159663 - DNA, 30 bp, Artificial Sequence
  Synthetic oligonucleotide
agaaactaagcggtatggaacttgcaaata

SEQ ID NO: 159664 - DNA, 30 bp, Artificial Sequence
  Synthetic oligonucleotide
aggctcagtgtgtaagagggtaacgaaata

SEQ ID NO: 159665 - DNA, 31 bp, Artificial Sequence
  Synthetic oligonucleotide
tgtatcgttgagcaagcatccacgcgaaata

SEQ ID NO: 159666 - DNA, 30 bp, Artificial Sequence
  Synthetic oligonucleotide
gcacaacatgcctactcctggcgcgaaata

SEQ ID NO: 159667 - DNA, 30 bp, Artificial Sequence
  Synthetic oligonucleotide
tgcgacgggccatctttatactgcgaaata

SEQ ID NO: 159668 - DNA, 30 bp, Artificial Sequence
  Synthetic oligonucleotide
taaagatgttgggatactgtaggggaaata

SEQ ID NO: 159669 - DNA, 30 bp, Artificial Sequence
  Synthetic oligonucleotide
taattcgcgtgaaattacgtatgggaaata

SEQ ID NO: 159670 - DNA, 30 bp, Artificial Sequence
  Synthetic oligonucleotide
gtcagtaagaaaagccatggaaaataaata

SEQ ID NO: 159671 - DNA, 30 bp, Artificial Sequence
  Synthetic oligonucleotide
aatgggcggcgctataaagactactaaata

SEQ ID NO: 159672 - DNA, 30 bp, Artificial Sequence
  Synthetic oligonucleotide
cgaggcgaatcctcttataccgtctaaata

SEQ ID NO: 159673 - DNA, 30 bp, Artificial Sequence
  Synthetic oligonucleotide
acacaaagcggtaagtacatggcgtaaata

SEQ ID NO: 159674 - DNA, 30 bp, Artificial Sequence
  Synthetic oligonucleotide
gactatgcgtccttgggttgtatgtaaata

SEQ ID NO: 159675 - DNA, 30 bp, Artificial Sequence
  Synthetic oligonucleotide
gggagttaaatggtcagcttcctttaaata

SEQ ID NO: 159676 - DNA, 30 bp, Artificial Sequence
  Synthetic oligonucleotide
tattaagaaagtatgagtggaaaaacaata

SEQ ID NO: 159677 - DNA, 30 bp, Artificial Sequence
  Synthetic oligonucleotide
gcactgggacccctttgttcggccacaata

SEQ ID NO: 159678 - DNA, 30 bp, Artificial Sequence
  Synthetic oligonucleotide
gcgaataagtgccgggtactgaatacaata

SEQ ID NO: 159679 - DNA, 30 bp, Artificial Sequence
  Synthetic oligonucleotide
aaaacaagcttgatttctatgtggccaata

SEQ ID NO: 159680 - DNA, 30 bp, Artificial Sequence
  Synthetic oligonucleotide
tgtcttctatcgaggaatagcctgccaata

SEQ ID NO: 159681 - DNA, 30 bp, Artificial Sequence
  Synthetic oligonucleotide
aattggtgagtgtggcaataagatccaata

SEQ ID NO: 159682 - DNA, 30 bp, Artificial Sequence
  Synthetic oligonucleotide
ggtggtggcaccttcgactggagagcaata

SEQ ID NO: 159683 - DNA, 30 bp, Artificial Sequence
  Synthetic oligonucleotide
tccgatacaacggaaatcgaccgggcaata

SEQ ID NO: 159684 - DNA, 30 bp, Artificial Sequence
  Synthetic oligonucleotide
ccgccatgatttcgtataggccgggcaata

SEQ ID NO: 159685 - DNA, 30 bp, Artificial Sequence
  Synthetic oligonucleotide
gagaactcagtaataaatagtccatcaata

SEQ ID NO: 159686 - DNA, 30 bp, Artificial Sequence
  Synthetic oligonucleotide
ccatacgagttttctaaccttgcctcaata

SEQ ID NO: 159687 - DNA, 30 bp, Artificial Sequence
  Synthetic oligonucleotide
tcggtcgtcttgtgcggattgatctcaata

SEQ ID NO: 159688 - DNA, 30 bp, Artificial Sequence
  Synthetic oligonucleotide
ctaaatctcaggcacggaccggtctcaata

SEQ ID NO: 159689 - DNA, 30 bp, Artificial Sequence
  Synthetic oligonucleotide
ggactgagggataaaggcgcgttttcaata

SEQ ID NO: 159690 - DNA, 30 bp, Artificial Sequence
  Synthetic oligonucleotide
aaatcaatgctgcgcgattagccaagaata

SEQ ID NO: 159691 - DNA, 30 bp, Artificial Sequence
  Synthetic oligonucleotide
aggcgtatggcggagactcactgaagaata

SEQ ID NO: 159692 - DNA, 30 bp, Artificial Sequence
  Synthetic oligonucleotide
aaagtagagtagttctttcgatccagaata

SEQ ID NO: 159693 - DNA, 30 bp, Artificial Sequence
  Synthetic oligonucleotide
ggtggtgggaagggtacccccggcagaata

SEQ ID NO: 159694 - DNA, 30 bp, Artificial Sequence
  Synthetic oligonucleotide
atggttaagcgaagtgaatggtggagaata

SEQ ID NO: 159695 - DNA, 30 bp, Artificial Sequence
  Synthetic oligonucleotide
agtgctatgagtcgtgacgctttgagaata

SEQ ID NO: 159696 - DNA, 30 bp, Artificial Sequence
  Synthetic oligonucleotide
ctggaaggaaacagtacctgtcatagaata

SEQ ID NO: 159697 - DNA, 30 bp, Artificial Sequence
  Synthetic oligonucleotide
cccactctaatggacaggaaggctagaata

SEQ ID NO: 159698 - DNA, 30 bp, Artificial Sequence
  Synthetic oligonucleotide
gcggtccaatctgtcttctgaagtagaata

SEQ ID NO: 159699 - DNA, 30 bp, Artificial Sequence
  Synthetic oligonucleotide
agggaaatcactttctccgggggtagaata

SEQ ID NO: 159700 - DNA, 30 bp, Artificial Sequence
  Synthetic oligonucleotide
ctgccttaaataaagaaacgagttagaata

SEQ ID NO: 159701 - DNA, 30 bp, Artificial Sequence
  Synthetic oligonucleotide
accgagggctcttaagcatgaaaacgaata

SEQ ID NO: 159702 - DNA, 30 bp, Artificial Sequence
  Synthetic oligonucleotide
cctgtcgtggttaagagggcagcccgaata

SEQ ID NO: 159703 - DNA, 30 bp, Artificial Sequence
  Synthetic oligonucleotide
agggtacttgcacgtcctgggcagcgaata

SEQ ID NO: 159704 - DNA, 30 bp, Artificial Sequence
  Synthetic oligonucleotide
cgcaaggtctggcgcaactgtgatcgaata

SEQ ID NO: 159705 - DNA, 30 bp, Artificial Sequence
  Synthetic oligonucleotide
tgctcggcgagtcaacgcctctaaggaata

SEQ ID NO: 159706 - DNA, 30 bp, Artificial Sequence
  Synthetic oligonucleotide
atttttattacaccagaggagccaggaata

SEQ ID NO: 159707 - DNA, 30 bp, Artificial Sequence
  Synthetic oligonucleotide
tattatggtgaagacaaggtatagggaata

SEQ ID NO: 159708 - DNA, 30 bp, Artificial Sequence
  Synthetic oligonucleotide
ctcgcgggattgatccgatgcctgggaata

SEQ ID NO: 159709 - DNA, 30 bp, Artificial Sequence
  Synthetic oligonucleotide
ggtacaacacggcagggtctgtctggaata

SEQ ID NO: 159710 - DNA, 30 bp, Artificial Sequence
  Synthetic oligonucleotide
acataaactcacttgtgagtcacgtgaata

SEQ ID NO: 159711 - DNA, 30 bp, Artificial Sequence
  Synthetic oligonucleotide
cttgctccacactgagtcattcaaataata

SEQ ID NO: 159712 - DNA, 30 bp, Artificial Sequence
  Synthetic oligonucleotide
tgtgggagcgaaagcccacaattaataata

SEQ ID NO: 159713 - DNA, 30 bp, Artificial Sequence
  Synthetic oligonucleotide
gttagtgaccgggcctaattcggcataata

SEQ ID NO: 159714 - DNA, 30 bp, Artificial Sequence
  Synthetic oligonucleotide
tccagggaggatcctcattagttcataata

SEQ ID NO: 159715 - DNA, 30 bp, Artificial Sequence
  Synthetic oligonucleotide
gcctcccacggagatagcgcacagataata

SEQ ID NO: 159716 - DNA, 30 bp, Artificial Sequence
  Synthetic oligonucleotide
agttagccaacatgcccgtggtatataata

SEQ ID NO: 159717 - DNA, 30 bp, Artificial Sequence
  Synthetic oligonucleotide
gcgatgacaagcgggccgtagtctataata

SEQ ID NO: 159718 - DNA, 30 bp, Artificial Sequence
  Synthetic oligonucleotide
agggacggtgggtgtcacaaccgtataata

SEQ ID NO: 159719 - DNA, 30 bp, Artificial Sequence
  Synthetic oligonucleotide
ggcaaacaaggaacacgatggtgtataata

SEQ ID NO: 159720 - DNA, 30 bp, Artificial Sequence
  Synthetic oligonucleotide
ccactcttagccatcgaagacaaagtaata

SEQ ID NO: 159721 - DNA, 30 bp, Artificial Sequence
  Synthetic oligonucleotide
gggtcgagggatccggtacgccacgtaata

SEQ ID NO: 159722 - DNA, 30 bp, Artificial Sequence
  Synthetic oligonucleotide
ggtcgtgacgggaaagtaatgggcgtaata

SEQ ID NO: 159723 - DNA, 30 bp, Artificial Sequence
  Synthetic oligonucleotide
gtttgggtgaccgaagacatgggtgtaata

SEQ ID NO: 159724 - DNA, 30 bp, Artificial Sequence
  Synthetic oligonucleotide
ggcaactaggggcttcggaataaattaata

SEQ ID NO: 159725 - DNA, 30 bp, Artificial Sequence
  Synthetic oligonucleotide
aatagcgacgaggagcacacttgtttaata

SEQ ID NO: 159726 - DNA, 30 bp, Artificial Sequence
  Synthetic oligonucleotide
tcagcgaacacacaatgctagataaacata

SEQ ID NO: 159727 - DNA, 30 bp, Artificial Sequence
  Synthetic oligonucleotide
aacggctcccgtccagagaagtataacata

SEQ ID NO: 159728 - DNA, 30 bp, Artificial Sequence
  Synthetic oligonucleotide
ggtatgcggtaagaccaaggcactaacata

SEQ ID NO: 159729 - DNA, 30 bp, Artificial Sequence
  Synthetic oligonucleotide
tgctggatgcgttggtactgttgacacata

SEQ ID NO: 159730 - DNA, 30 bp, Artificial Sequence
  Synthetic oligonucleotide
ggaacgactacttaccaacactagcacata

SEQ ID NO: 159731 - DNA, 30 bp, Artificial Sequence
  Synthetic oligonucleotide
acgcctggccgaggggctgggcaagacata

SEQ ID NO: 159732 - DNA, 30 bp, Artificial Sequence
  Synthetic oligonucleotide
gtcgtgtaccatgattaaatgtgagacata

SEQ ID NO: 159733 - DNA, 30 bp, Artificial Sequence
  Synthetic oligonucleotide
ggtagggagacatcagtggtcaacgacata

SEQ ID NO: 159734 - DNA, 30 bp, Artificial Sequence
  Synthetic oligonucleotide
ttatcctaccggaatagggcgaacgacata

SEQ ID NO: 159735 - DNA, 30 bp, Artificial Sequence
  Synthetic oligonucleotide
ggtcataatgcacacaataccttcgacata

SEQ ID NO: 159736 - DNA, 30 bp, Artificial Sequence
  Synthetic oligonucleotide
ttaggttaaaggcgtcgtcaaaaatacata

SEQ ID NO: 159737 - DNA, 30 bp, Artificial Sequence
  Synthetic oligonucleotide
gccggaagttggagggactgaaattacata

SEQ ID NO: 159738 - DNA, 30 bp, Artificial Sequence
  Synthetic oligonucleotide
ataagggaacagttgttggttgattacata

SEQ ID NO: 159739 - DNA, 30 bp, Artificial Sequence
  Synthetic oligonucleotide
cgataacgtttacggactacgggaaccata

SEQ ID NO: 159740 - DNA, 30 bp, Artificial Sequence
  Synthetic oligonucleotide
ttattaagtcctcgtcatgtaccgaccata

SEQ ID NO: 159741 - DNA, 30 bp, Artificial Sequence
  Synthetic oligonucleotide
gtgcgctaagatgtggtactcattcccata

SEQ ID NO: 159742 - DNA, 30 bp, Artificial Sequence
  Synthetic oligonucleotide
cgcaagaatagttgatcaggagtagccata

SEQ ID NO: 159743 - DNA, 30 bp, Artificial Sequence
  Synthetic oligonucleotide
cacgggtcacccgtgccctatttagccata

SEQ ID NO: 159744 - DNA, 30 bp, Artificial Sequence
  Synthetic oligonucleotide
atatcaagcgaaagtgaccatggcgccata

SEQ ID NO: 159745 - DNA, 30 bp, Artificial Sequence
  Synthetic oligonucleotide
gatactctacagacgacaaagactgccata

SEQ ID NO: 159746 - DNA, 30 bp, Artificial Sequence
  Synthetic oligonucleotide
cacagagtacacaacataggattatccata

SEQ ID NO: 159747 - DNA, 30 bp, Artificial Sequence
  Synthetic oligonucleotide
gcgcgtcttacgaaccgcaggtacagcata

SEQ ID NO: 159748 - DNA, 30 bp, Artificial Sequence
  Synthetic oligonucleotide
gttggccgatgctaggttggagtccgcata

SEQ ID NO: 159749 - DNA, 30 bp, Artificial Sequence
  Synthetic oligonucleotide
tggtaggtctggtcagaattcagaggcata

SEQ ID NO: 159750 - DNA, 30 bp, Artificial Sequence
  Synthetic oligonucleotide
ctttaaagtaggcataggcatatcggcata

SEQ ID NO: 159751 - DNA, 30 bp, Artificial Sequence
  Synthetic oligonucleotide
tgggagaggatgggccggtagactggcata

SEQ ID NO: 159752 - DNA, 30 bp, Artificial Sequence
  Synthetic oligonucleotide
atagccagagctacgggaatgccgtgcata

SEQ ID NO: 159753 - DNA, 30 bp, Artificial Sequence
  Synthetic oligonucleotide
cgcacccggctggaaggtaatcattgcata

SEQ ID NO: 159754 - DNA, 30 bp, Artificial Sequence
  Synthetic oligonucleotide
acaaagtggtaccttatttcaggttgcata

SEQ ID NO: 159755 - DNA, 30 bp, Artificial Sequence
  Synthetic oligonucleotide
accgcgtacccgtgcttgagtggttgcata

SEQ ID NO: 159756 - DNA, 30 bp, Artificial Sequence
  Synthetic oligonucleotide
ccaaatctgttatctcatcttaacatcata

SEQ ID NO: 159757 - DNA, 30 bp, Artificial Sequence
  Synthetic oligonucleotide
aagaggtgcataccgcgttggagcatcata

SEQ ID NO: 159758 - DNA, 30 bp, Artificial Sequence
  Synthetic oligonucleotide
tctggtggaatataccaaaaaggactcata

SEQ ID NO: 159759 - DNA, 30 bp, Artificial Sequence
  Synthetic oligonucleotide
agcggtaccaccaggtacttgtccctcata

SEQ ID NO: 159760 - DNA, 30 bp, Artificial Sequence
  Synthetic oligonucleotide
gaggattgttggtcgtgaattacgctcata

SEQ ID NO: 159761 - DNA, 30 bp, Artificial Sequence
  Synthetic oligonucleotide
cggcgtattgggtcacaccatgcgctcata

SEQ ID NO: 159762 - DNA, 30 bp, Artificial Sequence
  Synthetic oligonucleotide
acacgagtaaatggctctcgttcagtcata

SEQ ID NO: 159763 - DNA, 30 bp, Artificial Sequence
  Synthetic oligonucleotide
tcggctgtctccgccttctcgatagtcata

SEQ ID NO: 159764 - DNA, 30 bp, Artificial Sequence
  Synthetic oligonucleotide
gaggagcgaatgcgcctactcggggtcata

SEQ ID NO: 159765 - DNA, 30 bp, Artificial Sequence
  Synthetic oligonucleotide
cagactcccgtaaagaatattagtgtcata

SEQ ID NO: 159766 - DNA, 30 bp, Artificial Sequence
  Synthetic oligonucleotide
caatagatcatcttgtaagcttgtgtcata

SEQ ID NO: 159767 - DNA, 30 bp, Artificial Sequence
  Synthetic oligonucleotide
gaccgcaagcgagcctgagatattgtcata

SEQ ID NO: 159768 - DNA, 30 bp, Artificial Sequence
  Synthetic oligonucleotide
agcatagggacgtgcagtgaattcttcata

SEQ ID NO: 159769 - DNA, 30 bp, Artificial Sequence
  Synthetic oligonucleotide
gtaaacgaactacgtgtagctgcgttcata

SEQ ID NO: 159770 - DNA, 30 bp, Artificial Sequence
  Synthetic oligonucleotide
gaatccaaacggaaccgttaatggttcata

SEQ ID NO: 159771 - DNA, 30 bp, Artificial Sequence
  Synthetic oligonucleotide
acagctaatttctaagtttgttggttcata

SEQ ID NO: 159772 - DNA, 30 bp, Artificial Sequence
  Synthetic oligonucleotide
gacgatcacgacacgtatccggagaagata

SEQ ID NO: 159773 - DNA, 30 bp, Artificial Sequence
  Synthetic oligonucleotide
ttggactaaagaacgacccaaagtaagata

SEQ ID NO: 159774 - DNA, 30 bp, Artificial Sequence
  Synthetic oligonucleotide
ggacgtgtaggcttatacaatgtgcagata

SEQ ID NO: 159775 - DNA, 30 bp, Artificial Sequence
  Synthetic oligonucleotide
cgatggattgaagtttaatgccacgagata

SEQ ID NO: 159776 - DNA, 30 bp, Artificial Sequence
  Synthetic oligonucleotide
tggcatgagctacgtcgtattcaatagata

SEQ ID NO: 159777 - DNA, 30 bp, Artificial Sequence
  Synthetic oligonucleotide
cggccctaaatcgaaattttaaactagata

SEQ ID NO: 159778 - DNA, 30 bp, Artificial Sequence
  Synthetic oligonucleotide
cctcactcggtagattgttgtaagtagata

SEQ ID NO: 159779 - DNA, 30 bp, Artificial Sequence
  Synthetic oligonucleotide
cggcaaaagctggcagcttgtaattagata

SEQ ID NO: 159780 - DNA, 30 bp, Artificial Sequence
  Synthetic oligonucleotide
cacaagctatacaccccagatcattagata

SEQ ID NO: 159781 - DNA, 30 bp, Artificial Sequence
  Synthetic oligonucleotide
atcaaggccaatatctacgatagaacgata

SEQ ID NO: 159782 - DNA, 30 bp, Artificial Sequence
  Synthetic oligonucleotide
agttatgggagactgagtatcgcaccgata

SEQ ID NO: 159783 - DNA, 30 bp, Artificial Sequence
  Synthetic oligonucleotide
gacagcaggaggggtgcagtgtatccgata

SEQ ID NO: 159784 - DNA, 30 bp, Artificial Sequence
  Synthetic oligonucleotide
tctccagaggtgaaggaaatgcgtccgata

SEQ ID NO: 159785 - DNA, 30 bp, Artificial Sequence
  Synthetic oligonucleotide
ggggccctgagagggcgaacctcagcgata

SEQ ID NO: 159786 - DNA, 30 bp, Artificial Sequence
  Synthetic oligonucleotide
gtgatatgaggatgtttgcggagcgcgata

SEQ ID NO: 159787 - DNA, 30 bp, Artificial Sequence
  Synthetic oligonucleotide
ggacaagtaggtcctcagggcgcggcgata

SEQ ID NO: 159788 - DNA, 30 bp, Artificial Sequence
  Synthetic oligonucleotide
gccagaatcgaactaggactgtaatcgata

SEQ ID NO: 159789 - DNA, 30 bp, Artificial Sequence
  Synthetic oligonucleotide
catattgttgactgacggtctggatcgata

SEQ ID NO: 159790 - DNA, 30 bp, Artificial Sequence
  Synthetic oligonucleotide
aaagcagaatgtagtctgcactactcgata

SEQ ID NO: 159791 - DNA, 30 bp, Artificial Sequence
  Synthetic oligonucleotide
agtcagtgccgtcagatatgtaagtcgata

SEQ ID NO: 159792 - DNA, 30 bp, Artificial Sequence
  Synthetic oligonucleotide
gccaggtaaccagagcgagctcagtcgata

SEQ ID NO: 159793 - DNA, 30 bp, Artificial Sequence
  Synthetic oligonucleotide
agaaagggcgggcaaaagcccacttcgata

SEQ ID NO: 159794 - DNA, 30 bp, Artificial Sequence
  Synthetic oligonucleotide
tatggccccgatataaatacgatttcgata

SEQ ID NO: 159795 - DNA, 30 bp, Artificial Sequence
  Synthetic oligonucleotide
ttgaaggtcagtgggaaggagttcaggata

SEQ ID NO: 159796 - DNA, 30 bp, Artificial Sequence
  Synthetic oligonucleotide
agggctcgagtgtgggtcccaaggaggata

SEQ ID NO: 159797 - DNA, 30 bp, Artificial Sequence
  Synthetic oligonucleotide
gactcatggactaaccacaaaggggggata

SEQ ID NO: 159798 - DNA, 30 bp, Artificial Sequence
  Synthetic oligonucleotide
aggacggatgccccatagatagttgggata

SEQ ID NO: 159799 - DNA, 30 bp, Artificial Sequence
  Synthetic oligonucleotide
attccccgtcatcgtatcaacgaatggata

SEQ ID NO: 159800 - DNA, 30 bp, Artificial Sequence
  Synthetic oligonucleotide
agaaaccgtcccgaagcgaggcgatggata

SEQ ID NO: 159801 - DNA, 30 bp, Artificial Sequence
  Synthetic oligonucleotide
catgtcagtcgagtctcaaatagttggata

SEQ ID NO: 159802 - DNA, 30 bp, Artificial Sequence
  Synthetic oligonucleotide
ctatagggcagggtgcggttaggttggata

SEQ ID NO: 159803 - DNA, 30 bp, Artificial Sequence
  Synthetic oligonucleotide
tcttcccggagaccgtacgaggcaatgata

SEQ ID NO: 159804 - DNA, 30 bp, Artificial Sequence
  Synthetic oligonucleotide
accagtacggagtgcactcgacatatgata

SEQ ID NO: 159805 - DNA, 30 bp, Artificial Sequence
  Synthetic oligonucleotide
aaacgtccgtaccacgtgtatgctatgata

SEQ ID NO: 159806 - DNA, 30 bp, Artificial Sequence
  Synthetic oligonucleotide
tgccatctaggccgaaaagtagtcctgata

SEQ ID NO: 159807 - DNA, 30 bp, Artificial Sequence
  Synthetic oligonucleotide
ggttagtgaacgagggcagccaagctgata

SEQ ID NO: 159808 - DNA, 30 bp, Artificial Sequence
  Synthetic oligonucleotide
gcggatgcggtgacagataagcagctgata

SEQ ID NO: 159809 - DNA, 30 bp, Artificial Sequence
  Synthetic oligonucleotide
atatcaaattgggcaaggataagcgtgata

SEQ ID NO: 159810 - DNA, 30 bp, Artificial Sequence
  Synthetic oligonucleotide
gcgtatgttgtttttaacccgttggtgata

SEQ ID NO: 159811 - DNA, 30 bp, Artificial Sequence
  Synthetic oligonucleotide
aacaacctgtaccaaattacttgcttgata

SEQ ID NO: 159812 - DNA, 30 bp, Artificial Sequence
  Synthetic oligonucleotide
ggttgaagaaggcgcatactaagcaatata

SEQ ID NO: 159813 - DNA, 31 bp, Artificial Sequence
  Synthetic oligonucleotide
aagctaactagccctaaggccaaagaatata

SEQ ID NO: 159814 - DNA, 30 bp, Artificial Sequence
  Synthetic oligonucleotide
taggaacaaaaagggtgcttggtacatata

SEQ ID NO: 159815 - DNA, 30 bp, Artificial Sequence
  Synthetic oligonucleotide
ggagaactgatgttattgaattgccatata

SEQ ID NO: 159816 - DNA, 30 bp, Artificial Sequence
  Synthetic oligonucleotide
cgcggaggttgatctcggtttcagcatata

SEQ ID NO: 159817 - DNA, 30 bp, Artificial Sequence
  Synthetic oligonucleotide
aagggaaggttgcgccattaagcgcatata

SEQ ID NO: 159818 - DNA, 30 bp, Artificial Sequence
  Synthetic oligonucleotide
gtggaagttcgtaacgctcaagggcatata

SEQ ID NO: 159819 - DNA, 30 bp, Artificial Sequence
  Synthetic oligonucleotide
accggtcacaaatctattcaagggcatata

SEQ ID NO: 159820 - DNA, 30 bp, Artificial Sequence
  Synthetic oligonucleotide
gtcattgagctggcaaacttcggagatata

SEQ ID NO: 159821 - DNA, 30 bp, Artificial Sequence
  Synthetic oligonucleotide
gtgtgtgtaatcgccaatccgaacgatata

SEQ ID NO: 159822 - DNA, 30 bp, Artificial Sequence
  Synthetic oligonucleotide
cgagcacttacgcggccaggtgacgatata

SEQ ID NO: 159823 - DNA, 30 bp, Artificial Sequence
  Synthetic oligonucleotide
gccgggctaaccctgcgagccggcgatata

SEQ ID NO: 159824 - DNA, 30 bp, Artificial Sequence
  Synthetic oligonucleotide
aactgaggtccgggttatctgcttgatata

SEQ ID NO: 159825 - DNA, 30 bp, Artificial Sequence
  Synthetic oligonucleotide
gatgaagagaggtcggtgaaacgctatata

SEQ ID NO: 159826 - DNA, 30 bp, Artificial Sequence
  Synthetic oligonucleotide
gttcaaggcgacctttgatgttgctatata

SEQ ID NO: 159827 - DNA, 30 bp, Artificial Sequence
  Synthetic oligonucleotide
agtcagatggtcgattcggatgggtatata

SEQ ID NO: 159828 - DNA, 30 bp, Artificial Sequence
  Synthetic oligonucleotide
tcagtcccgatctaatagcgaacttatata

SEQ ID NO: 159829 - DNA, 30 bp, Artificial Sequence
  Synthetic oligonucleotide
atgtaaatgggcaatgcccgcctaactata

SEQ ID NO: 159830 - DNA, 30 bp, Artificial Sequence
  Synthetic oligonucleotide
acgtataatcgtcgcagacggagcactata

SEQ ID NO: 159831 - DNA, 30 bp, Artificial Sequence
  Synthetic oligonucleotide
tagatctcatcgccttcgccaagacctata

SEQ ID NO: 159832 - DNA, 30 bp, Artificial Sequence
  Synthetic oligonucleotide
tcacaaaaagaagcatgtgaacgccctata

SEQ ID NO: 159833 - DNA, 30 bp, Artificial Sequence
  Synthetic oligonucleotide
aacgcctatggttcggggaccccggctata

SEQ ID NO: 159834 - DNA, 30 bp, Artificial Sequence
  Synthetic oligonucleotide
caacgttgaagtagattgtcctattctata

SEQ ID NO: 159835 - DNA, 30 bp, Artificial Sequence
  Synthetic oligonucleotide
ttagtgcccgctgaaaacggcagaagtata

SEQ ID NO: 159836 - DNA, 30 bp, Artificial Sequence
  Synthetic oligonucleotide
ggctagcgcgggcaactcatctagagtata

SEQ ID NO: 159837 - DNA, 30 bp, Artificial Sequence
  Synthetic oligonucleotide
gaaaaatcaacggcattgacccaccgtata

SEQ ID NO: 159838 - DNA, 30 bp, Artificial Sequence
  Synthetic oligonucleotide
agagcgaacttataggacggaggccgtata

SEQ ID NO: 159839 - DNA, 30 bp, Artificial Sequence
  Synthetic oligonucleotide
acacacaccaaatcggcttcgggtcgtata

SEQ ID NO: 159840 - DNA, 30 bp, Artificial Sequence
  Synthetic oligonucleotide
cggtacaaccggtaaccgataacaggtata

SEQ ID NO: 159841 - DNA, 30 bp, Artificial Sequence
  Synthetic oligonucleotide
gacgaatagtaatgagcaggggtcggtata

SEQ ID NO: 159842 - DNA, 30 bp, Artificial Sequence
  Synthetic oligonucleotide
ggatacctccccgagataacatctggtata

SEQ ID NO: 159843 - DNA, 30 bp, Artificial Sequence
  Synthetic oligonucleotide
cccgagccaaccaagggtacttctggtata

SEQ ID NO: 159844 - DNA, 30 bp, Artificial Sequence
  Synthetic oligonucleotide
actgggacagtgaataggcagtaatgtata

SEQ ID NO: 159845 - DNA, 30 bp, Artificial Sequence
  Synthetic oligonucleotide
gagctccttgagggaatacgggagtgtata

SEQ ID NO: 159846 - DNA, 30 bp, Artificial Sequence
  Synthetic oligonucleotide
ggtggggggcctacgctctcatcgtgtata

SEQ ID NO: 159847 - DNA, 30 bp, Artificial Sequence
  Synthetic oligonucleotide
caatagaatccggaatcttatgtaattata

SEQ ID NO: 159848 - DNA, 30 bp, Artificial Sequence
  Synthetic oligonucleotide
gcggacgtatcgatacggtgtctgattata

SEQ ID NO: 159849 - DNA, 30 bp, Artificial Sequence
  Synthetic oligonucleotide
ctgaagtgtaaatcccccggataccttata

SEQ ID NO: 159850 - DNA, 30 bp, Artificial Sequence
  Synthetic oligonucleotide
ctcgctctcgagaaattttacccgcttata

SEQ ID NO: 159851 - DNA, 30 bp, Artificial Sequence
  Synthetic oligonucleotide
attgtaaaattcaacagggtcatggttata

SEQ ID NO: 159852 - DNA, 30 bp, Artificial Sequence
  Synthetic oligonucleotide
ccgcttagcaaagatggatcggctgttata

SEQ ID NO: 159853 - DNA, 30 bp, Artificial Sequence
  Synthetic oligonucleotide
gccgcggggcgtagaaaatttgagtttata

SEQ ID NO: 159854 - DNA, 30 bp, Artificial Sequence
  Synthetic oligonucleotide
cactccggaagcccagatcgcaattttata

SEQ ID NO: 159855 - DNA, 30 bp, Artificial Sequence
  Synthetic oligonucleotide
gtcttcaaatgcagaagactagattttata

SEQ ID NO: 159856 - DNA, 30 bp, Artificial Sequence
  Synthetic oligonucleotide
gtatgaaatgagagaaaagatatttttata

SEQ ID NO: 159857 - DNA, 30 bp, Artificial Sequence
  Synthetic oligonucleotide
cacgaagatcattagctaaggtagaaacta

SEQ ID NO: 159858 - DNA, 30 bp, Artificial Sequence
  Synthetic oligonucleotide
tccacgagcgaccatagttgacttaaacta

SEQ ID NO: 159859 - DNA, 30 bp, Artificial Sequence
  Synthetic oligonucleotide
ttcaggttgataaagattttgaaacaacta

SEQ ID NO: 159860 - DNA, 30 bp, Artificial Sequence
  Synthetic oligonucleotide
ttggtagagtacgatcctggaaagcaacta

SEQ ID NO: 159861 - DNA, 30 bp, Artificial Sequence
  Synthetic oligonucleotide
gttacgtggtatggtaggatgaagcaacta

SEQ ID NO: 159862 - DNA, 30 bp, Artificial Sequence
  Synthetic oligonucleotide
ccgctaacactagggtaaatggggcaacta

SEQ ID NO: 159863 - DNA, 30 bp, Artificial Sequence
  Synthetic oligonucleotide
agaggagatacctcaatcaattgtcaacta

SEQ ID NO: 159864 - DNA, 30 bp, Artificial Sequence
  Synthetic oligonucleotide
gtggtatgtcaaaagatattgtccgaacta

SEQ ID NO: 159865 - DNA, 30 bp, Artificial Sequence
  Synthetic oligonucleotide
gcagggaagtaacttcaccaccgcgaacta

SEQ ID NO: 159866 - DNA, 30 bp, Artificial Sequence
  Synthetic oligonucleotide
caggacaacgggatgtaaatgtgggaacta

SEQ ID NO: 159867 - DNA, 30 bp, Artificial Sequence
  Synthetic oligonucleotide
caagacgtaaggttcacaccgttggaacta

SEQ ID NO: 159868 - DNA, 30 bp, Artificial Sequence
  Synthetic oligonucleotide
gtggtatggcaaattgaacgcgttgaacta

SEQ ID NO: 159869 - DNA, 30 bp, Artificial Sequence
  Synthetic oligonucleotide
gaagattcaacgagacggtactgataacta

SEQ ID NO: 159870 - DNA, 30 bp, Artificial Sequence
  Synthetic oligonucleotide
tggtgacccgcagagacgaattcgtaacta

SEQ ID NO: 159871 - DNA, 30 bp, Artificial Sequence
  Synthetic oligonucleotide
atacgggcggctgatcatgagtcttaacta

SEQ ID NO: 159872 - DNA, 30 bp, Artificial Sequence
  Synthetic oligonucleotide
actgcaccgagctaaatacaggaaacacta

SEQ ID NO: 159873 - DNA, 30 bp, Artificial Sequence
  Synthetic oligonucleotide
tgacatcgagaccggcgtagctaaacacta

SEQ ID NO: 159874 - DNA, 30 bp, Artificial Sequence
  Synthetic oligonucleotide
gcagagaacagtagcgaagccgcaacacta

SEQ ID NO: 159875 - DNA, 30 bp, Artificial Sequence
  Synthetic oligonucleotide
agccactgtctcggggcccaccgcccacta

SEQ ID NO: 159876 - DNA, 30 bp, Artificial Sequence
  Synthetic oligonucleotide
gcacagggtactggctacagatagccacta

SEQ ID NO: 159877 - DNA, 30 bp, Artificial Sequence
  Synthetic oligonucleotide
gtgcggtaaaggacagccctgtttccacta

SEQ ID NO: 159878 - DNA, 30 bp, Artificial Sequence
  Synthetic oligonucleotide
tgaagacatctacgcaatagaaaagcacta

SEQ ID NO: 159879 - DNA, 30 bp, Artificial Sequence
  Synthetic oligonucleotide
gtgcggtactgtcgcgttctacgagcacta

SEQ ID NO: 159880 - DNA, 30 bp, Artificial Sequence
  Synthetic oligonucleotide
atcgaggcaatttggcaatagtaggcacta

SEQ ID NO: 159881 - DNA, 30 bp, Artificial Sequence
  Synthetic oligonucleotide
cataagcactagttggtgaagtgggcacta

SEQ ID NO: 159882 - DNA, 30 bp, Artificial Sequence
  Synthetic oligonucleotide
ggttacccatggacttgggtatactcacta

SEQ ID NO: 159883 - DNA, 30 bp, Artificial Sequence
  Synthetic oligonucleotide
ggtcggattagggtagtatccatctcacta

SEQ ID NO: 159884 - DNA, 30 bp, Artificial Sequence
  Synthetic oligonucleotide
acgctcactgaaacctagtgtagttcacta

SEQ ID NO: 159885 - DNA, 30 bp, Artificial Sequence
  Synthetic oligonucleotide
agtaaccacttggtggacatgaacagacta

SEQ ID NO: 159886 - DNA, 30 bp, Artificial Sequence
  Synthetic oligonucleotide
gaagcaaaacggagagtgtatttcagacta

SEQ ID NO: 159887 - DNA, 30 bp, Artificial Sequence
  Synthetic oligonucleotide
acagtcgagtaggcgaggcccaaacgacta

SEQ ID NO: 159888 - DNA, 30 bp, Artificial Sequence
  Synthetic oligonucleotide
tcgtccaagtcaggggttatctaacgacta

SEQ ID NO: 159889 - DNA, 30 bp, Artificial Sequence
  Synthetic oligonucleotide
cgaaccgctgtatgtatgggcacgcgacta

SEQ ID NO: 159890 - DNA, 30 bp, Artificial Sequence
  Synthetic oligonucleotide
tcagagtggtataggtgattttcgcgacta

SEQ ID NO: 159891 - DNA, 30 bp, Artificial Sequence
  Synthetic oligonucleotide
aggtacgtggccagtcatttcaggcgacta

SEQ ID NO: 159892 - DNA, 30 bp, Artificial Sequence
  Synthetic oligonucleotide
tggactgctgacgcttagcattctcgacta

SEQ ID NO: 159893 - DNA, 30 bp, Artificial Sequence
  Synthetic oligonucleotide
ggcggtacataatcgacgcatatcggacta

SEQ ID NO: 159894 - DNA, 30 bp, Artificial Sequence
  Synthetic oligonucleotide
tgccgaggaggagccatgttaattggacta

SEQ ID NO: 159895 - DNA, 30 bp, Artificial Sequence
  Synthetic oligonucleotide
gatggggtagtccgtctgataatatgacta

SEQ ID NO: 159896 - DNA, 30 bp, Artificial Sequence
  Synthetic oligonucleotide
acagtggcattggtttatctgctatgacta

SEQ ID NO: 159897 - DNA, 30 bp, Artificial Sequence
  Synthetic oligonucleotide
gaggttaacggtcgaccctaccgctgacta

SEQ ID NO: 159898 - DNA, 30 bp, Artificial Sequence
  Synthetic oligonucleotide
ggtaactccccgtacgacgtgtgctgacta

SEQ ID NO: 159899 - DNA, 30 bp, Artificial Sequence
  Synthetic oligonucleotide
tggcatgaggcgtcaatagccgattgacta

SEQ ID NO: 159900 - DNA, 30 bp, Artificial Sequence
  Synthetic oligonucleotide
gccagctaaatacctctagaagtcatacta

SEQ ID NO: 159901 - DNA, 30 bp, Artificial Sequence
  Synthetic oligonucleotide
acgcgagataaaaggttcacttccctacta

SEQ ID NO: 159902 - DNA, 30 bp, Artificial Sequence
  Synthetic oligonucleotide
tatcgtataagaactaaacaccagctacta

SEQ ID NO: 159903 - DNA, 30 bp, Artificial Sequence
  Synthetic oligonucleotide
attgcgtggcttcagagaatcaggctacta

SEQ ID NO: 159904 - DNA, 30 bp, Artificial Sequence
  Synthetic oligonucleotide
ctcgcagtgccaggactcgacaatctacta

SEQ ID NO: 159905 - DNA, 30 bp, Artificial Sequence
  Synthetic oligonucleotide
cgcatgctcgggctgtcggactgagtacta

SEQ ID NO: 159906 - DNA, 30 bp, Artificial Sequence
  Synthetic oligonucleotide
ttgagaatccaatctgtgaagctgttacta

SEQ ID NO: 159907 - DNA, 30 bp, Artificial Sequence
  Synthetic oligonucleotide
ctgtgataccggttcaccgaaagtttacta

SEQ ID NO: 159908 - DNA, 30 bp, Artificial Sequence
  Synthetic oligonucleotide
tttgagcaagcctagcccacgaagaaccta

SEQ ID NO: 159909 - DNA, 30 bp, Artificial Sequence
  Synthetic oligonucleotide
acgagcgtggtatatgggggtgggaaccta

SEQ ID NO: 159910 - DNA, 30 bp, Artificial Sequence
  Synthetic oligonucleotide
atagactaaatatagaggaggtggcaccta

SEQ ID NO: 159911 - DNA, 30 bp, Artificial Sequence
  Synthetic oligonucleotide
gagcgccgctcatacgctacaactcaccta

SEQ ID NO: 159912 - DNA, 29 bp, Artificial Sequence
  Synthetic oligonucleotide
gtatgtgtagattaacgaataacgaccta

SEQ ID NO: 159913 - DNA, 30 bp, Artificial Sequence
  Synthetic oligonucleotide
tacgtacgtttaaactgttgtcccgaccta

SEQ ID NO: 159914 - DNA, 30 bp, Artificial Sequence
  Synthetic oligonucleotide
tagtcgctgtgtagcgcaatccttgaccta

SEQ ID NO: 159915 - DNA, 30 bp, Artificial Sequence
  Synthetic oligonucleotide
tgggaactaggtataatacatcagtaccta

SEQ ID NO: 159916 - DNA, 30 bp, Artificial Sequence
  Synthetic oligonucleotide
ctggcaattcggttataagttatgtaccta

SEQ ID NO: 159917 - DNA, 30 bp, Artificial Sequence
  Synthetic oligonucleotide
aggtggtaagcaataggggtactgtaccta

SEQ ID NO: 159918 - DNA, 30 bp, Artificial Sequence
  Synthetic oligonucleotide
agtgcatggtaagggggtacgctgtaccta

SEQ ID NO: 159919 - DNA, 30 bp, Artificial Sequence
  Synthetic oligonucleotide
ctaatcaccgaatactctccattgtaccta

SEQ ID NO: 159920 - DNA, 30 bp, Artificial Sequence
  Synthetic oligonucleotide
tgaaaaggaacggacaggcagtgaacccta

SEQ ID NO: 159921 - DNA, 30 bp, Artificial Sequence
  Synthetic oligonucleotide
ttccagtgcgaattatgtaagtggacccta

SEQ ID NO: 159922 - DNA, 30 bp, Artificial Sequence
  Synthetic oligonucleotide
gttctgaggaaatgttcgggtggtacccta

SEQ ID NO: 159923 - DNA, 30 bp, Artificial Sequence
  Synthetic oligonucleotide
tccgagtatctggaagtagaaaaagcccta

SEQ ID NO: 159924 - DNA, 30 bp, Artificial Sequence
  Synthetic oligonucleotide
ggttaagccatcacgcaaaaatgcgcccta

SEQ ID NO: 159925 - DNA, 30 bp, Artificial Sequence
  Synthetic oligonucleotide
ctggcgccctattcataacctgtatcccta

SEQ ID NO: 159926 - DNA, 30 bp, Artificial Sequence
  Synthetic oligonucleotide
tctatgaacataaaaaatttcagctcccta

SEQ ID NO: 159927 - DNA, 30 bp, Artificial Sequence
  Synthetic oligonucleotide
gattgaagcaggccgtggagagcaagccta

SEQ ID NO: 159928 - DNA, 30 bp, Artificial Sequence
  Synthetic oligonucleotide
gagatggtgggtacgtcacgaacgagccta

SEQ ID NO: 159929 - DNA, 30 bp, Artificial Sequence
  Synthetic oligonucleotide
gacaccgccataagcgaatttggtagccta

SEQ ID NO: 159930 - DNA, 30 bp, Artificial Sequence
  Synthetic oligonucleotide
ggcggttcacctctgacgcaacttagccta

SEQ ID NO: 159931 - DNA, 30 bp, Artificial Sequence
  Synthetic oligonucleotide
tttcagaggctgtggcttttggttagccta

SEQ ID NO: 159932 - DNA, 30 bp, Artificial Sequence
  Synthetic oligonucleotide
cgtaatccgatatactccttcgcccgccta

SEQ ID NO: 159933 - DNA, 30 bp, Artificial Sequence
  Synthetic oligonucleotide
gtgctacgattttccacaggagagcgccta

SEQ ID NO: 159934 - DNA, 30 bp, Artificial Sequence
  Synthetic oligonucleotide
agtcgggtagcgtggaccatttcgcgccta

SEQ ID NO: 159935 - DNA, 30 bp, Artificial Sequence
  Synthetic oligonucleotide
gcttggcgtagcaattaactattgcgccta

SEQ ID NO: 159936 - DNA, 31 bp, Artificial Sequence
  Synthetic oligonucleotide
gtgggaactaagcagcgacggtaaaggccta

SEQ ID NO: 159937 - DNA, 30 bp, Artificial Sequence
  Synthetic oligonucleotide
tggatcctgactgccacagatacaggccta

SEQ ID NO: 159938 - DNA, 30 bp, Artificial Sequence
  Synthetic oligonucleotide
gaagagacgacttgcggattgcacggccta

SEQ ID NO: 159939 - DNA, 30 bp, Artificial Sequence
  Synthetic oligonucleotide
acatattactatggggtgcacatgggccta

SEQ ID NO: 159940 - DNA, 30 bp, Artificial Sequence
  Synthetic oligonucleotide
ccggcgtttgggatgatcactctgggccta

SEQ ID NO: 159941 - DNA, 30 bp, Artificial Sequence
  Synthetic oligonucleotide
agctatcgcacaaactagcagggctgccta

SEQ ID NO: 159942 - DNA, 30 bp, Artificial Sequence
  Synthetic oligonucleotide
ttgaggggtggcgggaaggcgcgcatccta

SEQ ID NO: 159943 - DNA, 30 bp, Artificial Sequence
  Synthetic oligonucleotide
gcgtttcaccagcaccgtctacaactccta

SEQ ID NO: 159944 - DNA, 30 bp, Artificial Sequence
  Synthetic oligonucleotide
actgagtatgtggtgttcggctgcgtccta

SEQ ID NO: 159945 - DNA, 30 bp, Artificial Sequence
  Synthetic oligonucleotide
caaggacgcacaataagtcttattgtccta

SEQ ID NO: 159946 - DNA, 30 bp, Artificial Sequence
  Synthetic oligonucleotide
tcacgccatgacttcgtaggctcgttccta

SEQ ID NO: 159947 - DNA, 30 bp, Artificial Sequence
  Synthetic oligonucleotide
aaggtggcacaggagaatcaattgttccta

SEQ ID NO: 159948 - DNA, 30 bp, Artificial Sequence
  Synthetic oligonucleotide
gaggcggcgatggcattcatgtgcaagcta

SEQ ID NO: 159949 - DNA, 30 bp, Artificial Sequence
  Synthetic oligonucleotide
caatcacacgtccaaagcacagtgaagcta

SEQ ID NO: 159950 - DNA, 30 bp, Artificial Sequence
  Synthetic oligonucleotide
cgttcggatttatgcaatagtgtgaagcta

SEQ ID NO: 159951 - DNA, 30 bp, Artificial Sequence
  Synthetic oligonucleotide
gtatgacttacgtagataatcagacagcta

SEQ ID NO: 159952 - DNA, 30 bp, Artificial Sequence
  Synthetic oligonucleotide
cgacggtgatacgtttgaaacatacagcta

SEQ ID NO: 159953 - DNA, 30 bp, Artificial Sequence
  Synthetic oligonucleotide
gtcattagaattgcatttcctttccagcta

SEQ ID NO: 159954 - DNA, 30 bp, Artificial Sequence
  Synthetic oligonucleotide
tcgagtaacagctactaggctacagagcta

SEQ ID NO: 159955 - DNA, 30 bp, Artificial Sequence
  Synthetic oligonucleotide
gatctagacggtgcatacgtgaacgagcta

SEQ ID NO: 159956 - DNA, 30 bp, Artificial Sequence
  Synthetic oligonucleotide
ttatccgtgagcgtgaaatgtatcgagcta

SEQ ID NO: 159957 - DNA, 30 bp, Artificial Sequence
  Synthetic oligonucleotide
aggctgacaaaaatattcctaagggagcta

SEQ ID NO: 159958 - DNA, 30 bp, Artificial Sequence
  Synthetic oligonucleotide
tagagaaagaaacctagagatgctgagcta

SEQ ID NO: 159959 - DNA, 30 bp, Artificial Sequence
  Synthetic oligonucleotide
gcgagtcagcgtgtaaaacatgcatagcta

SEQ ID NO: 159960 - DNA, 30 bp, Artificial Sequence
  Synthetic oligonucleotide
gtttgagtaggtcacacagggggatagcta

SEQ ID NO: 159961 - DNA, 30 bp, Artificial Sequence
  Synthetic oligonucleotide
ggcatactgctttcacaaggagtctagcta

SEQ ID NO: 159962 - DNA, 30 bp, Artificial Sequence
  Synthetic oligonucleotide
acatgccatggtccggtagccaagtagcta

SEQ ID NO: 159963 - DNA, 30 bp, Artificial Sequence
  Synthetic oligonucleotide
ataaatacatctgtcacgagtcgaacgcta

SEQ ID NO: 159964 - DNA, 30 bp, Artificial Sequence
  Synthetic oligonucleotide
ggcacggatttgcacaaacgaggaacgcta

SEQ ID NO: 159965 - DNA, 30 bp, Artificial Sequence
  Synthetic oligonucleotide
catgagaggtgtcgtgaccggaatacgcta

SEQ ID NO: 159966 - DNA, 30 bp, Artificial Sequence
  Synthetic oligonucleotide
cacgccggtacaacgtcgccgtgtccgcta

SEQ ID NO: 159967 - DNA, 30 bp, Artificial Sequence
  Synthetic oligonucleotide
ccactatccacgacgaacctatttccgcta

SEQ ID NO: 159968 - DNA, 30 bp, Artificial Sequence
  Synthetic oligonucleotide
gggcaattcacttgggggattcatgcgcta

SEQ ID NO: 159969 - DNA, 30 bp, Artificial Sequence
  Synthetic oligonucleotide
agaggacatagtcgatttgatcctgcgcta

SEQ ID NO: 159970 - DNA, 30 bp, Artificial Sequence
  Synthetic oligonucleotide
gccaacgggattagtcgcgccggctcgcta

SEQ ID NO: 159971 - DNA, 30 bp, Artificial Sequence
  Synthetic oligonucleotide
gcaagtattgacagatatccaaggtcgcta

SEQ ID NO: 159972 - DNA, 30 bp, Artificial Sequence
  Synthetic oligonucleotide
atgggttaaaatctcgagaacaaaaggcta

SEQ ID NO: 159973 - DNA, 30 bp, Artificial Sequence
  Synthetic oligonucleotide
gctattatgggtatactgagggaaaggcta

SEQ ID NO: 159974 - DNA, 30 bp, Artificial Sequence
  Synthetic oligonucleotide
atgatgtctggcacagacaaaaccaggcta

SEQ ID NO: 159975 - DNA, 30 bp, Artificial Sequence
  Synthetic oligonucleotide
tctaacacggttacgtgtcggagcaggcta

SEQ ID NO: 159976 - DNA, 30 bp, Artificial Sequence
  Synthetic oligonucleotide
ggagtggggataagctcatgcgcgaggcta

SEQ ID NO: 159977 - DNA, 30 bp, Artificial Sequence
  Synthetic oligonucleotide
tgttataggctaaacaacccttcgaggcta

SEQ ID NO: 159978 - DNA, 30 bp, Artificial Sequence
  Synthetic oligonucleotide
tcattcgcaacagaacgtagcaggaggcta

SEQ ID NO: 159979 - DNA, 30 bp, Artificial Sequence
  Synthetic oligonucleotide
gaccacaggatccgcgagtaaggccggcta

SEQ ID NO: 159980 - DNA, 30 bp, Artificial Sequence
  Synthetic oligonucleotide
atcatgtagcacggcggtagtgtccggcta

SEQ ID NO: 159981 - DNA, 30 bp, Artificial Sequence
  Synthetic oligonucleotide
tactggagggtccatggaaattagcggcta

SEQ ID NO: 159982 - DNA, 30 bp, Artificial Sequence
  Synthetic oligonucleotide
caaaaagtggtacgagagtaatcagggcta

SEQ ID NO: 159983 - DNA, 30 bp, Artificial Sequence
  Synthetic oligonucleotide
caggctggaagaagcgcacgggcatggcta

SEQ ID NO: 159984 - DNA, 30 bp, Artificial Sequence
  Synthetic oligonucleotide
aagtggcgttggctaccacagcgttggcta

SEQ ID NO: 159985 - DNA, 30 bp, Artificial Sequence
  Synthetic oligonucleotide
cgtataagacatcggtggtcgtgaatgcta

SEQ ID NO: 159986 - DNA, 30 bp, Artificial Sequence
  Synthetic oligonucleotide
ttgggatttacaacagtgttctagatgcta

SEQ ID NO: 159987 - DNA, 30 bp, Artificial Sequence
  Synthetic oligonucleotide
aacggatcgagcgcaccgcgtaatctgcta

SEQ ID NO: 159988 - DNA, 30 bp, Artificial Sequence
  Synthetic oligonucleotide
ggaacatagtaaatgattctacctctgcta

SEQ ID NO: 159989 - DNA, 30 bp, Artificial Sequence
  Synthetic oligonucleotide
ttgtccaatgccttgacactgttcgtgcta

SEQ ID NO: 159990 - DNA, 30 bp, Artificial Sequence
  Synthetic oligonucleotide
acacatggaaagatcgcaatgaaggtgcta

SEQ ID NO: 159991 - DNA, 30 bp, Artificial Sequence
  Synthetic oligonucleotide
gagcgtacgcgttaggttaggacattgcta

SEQ ID NO: 159992 - DNA, 30 bp, Artificial Sequence
  Synthetic oligonucleotide
atgtttacgtcaaaaagtggacctttgcta

SEQ ID NO: 159993 - DNA, 30 bp, Artificial Sequence
  Synthetic oligonucleotide
aacatcattggcatggagtgtagcaatcta

SEQ ID NO: 159994 - DNA, 30 bp, Artificial Sequence
  Synthetic oligonucleotide
agggggaagcctttaagaaggttgaatcta

SEQ ID NO: 159995 - DNA, 30 bp, Artificial Sequence
  Synthetic oligonucleotide
acgtatatgcggcggctggacgcccatcta

SEQ ID NO: 159996 - DNA, 30 bp, Artificial Sequence
  Synthetic oligonucleotide
cgagttgtggccaaggtcgttttccatcta

SEQ ID NO: 159997 - DNA, 30 bp, Artificial Sequence
  Synthetic oligonucleotide
gatgtccgcgcttgataaagttaggatcta

SEQ ID NO: 159998 - DNA, 30 bp, Artificial Sequence
  Synthetic oligonucleotide
cacaatagcactatatcctggacggatcta

SEQ ID NO: 159999 - DNA, 30 bp, Artificial Sequence
  Synthetic oligonucleotide
accttaccaccaggtgtgagcagggatcta

SEQ ID NO: 160000 - DNA, 30 bp, Artificial Sequence
  Synthetic oligonucleotide
gcgacctgtatgattgactacggatatcta

SEQ ID NO: 160001 - DNA, 30 bp, Artificial Sequence
  Synthetic oligonucleotide
tcatcggctcgaaatttgatttagtatcta

SEQ ID NO: 160002 - DNA, 30 bp, Artificial Sequence
  Synthetic oligonucleotide
cgccccccacctagtgaagcggcaactcta

SEQ ID NO: 160003 - DNA, 30 bp, Artificial Sequence
  Synthetic oligonucleotide
tcgtggacggcaattttcgagtggactcta

SEQ ID NO: 160004 - DNA, 30 bp, Artificial Sequence
  Synthetic oligonucleotide
tcgcctcgaccgggatttttccagcctcta

SEQ ID NO: 160005 - DNA, 30 bp, Artificial Sequence
  Synthetic oligonucleotide
tggtctaagcaatccgggtgtcctcctcta

SEQ ID NO: 160006 - DNA, 30 bp, Artificial Sequence
  Synthetic oligonucleotide
gcttaccctgtctgaccgatctacgctcta

SEQ ID NO: 160007 - DNA, 30 bp, Artificial Sequence
  Synthetic oligonucleotide
ctggaaacagtgattcaggtgggggctcta

SEQ ID NO: 160008 - DNA, 30 bp, Artificial Sequence
  Synthetic oligonucleotide
gcttaaaacgtagacaagtatcagagtcta

SEQ ID NO: 160009 - DNA, 30 bp, Artificial Sequence
  Synthetic oligonucleotide
gttggacgcgggcgggagaaacagcgtcta

SEQ ID NO: 160010 - DNA, 30 bp, Artificial Sequence
  Synthetic oligonucleotide
agcgcagggacacatccaattacaggtcta

SEQ ID NO: 160011 - DNA, 30 bp, Artificial Sequence
  Synthetic oligonucleotide
catacggaggggctacttccggacggtcta

SEQ ID NO: 160012 - DNA, 30 bp, Artificial Sequence
  Synthetic oligonucleotide
tcgtaacccgggactaggcaacgcggtcta

SEQ ID NO: 160013 - DNA, 30 bp, Artificial Sequence
  Synthetic oligonucleotide
atcaggtaatcccgaagtcagcggggtcta

SEQ ID NO: 160014 - DNA, 30 bp, Artificial Sequence
  Synthetic oligonucleotide
agatgtgtaatcctatcgagtgtgggtcta

SEQ ID NO: 160015 - DNA, 30 bp, Artificial Sequence
  Synthetic oligonucleotide
gataactagggcggatatcgcgaatgtcta

SEQ ID NO: 160016 - DNA, 30 bp, Artificial Sequence
  Synthetic oligonucleotide
atagttcagaggaataaatttagatgtcta

SEQ ID NO: 160017 - DNA, 30 bp, Artificial Sequence
  Synthetic oligonucleotide
ggagatagctacttgcttacagcgtgtcta

SEQ ID NO: 160018 - DNA, 30 bp, Artificial Sequence
  Synthetic oligonucleotide
cactgtaatgcatcaacgcagtgttgtcta

SEQ ID NO: 160019 - DNA, 30 bp, Artificial Sequence
  Synthetic oligonucleotide
taccacacaacactatagtgccgcattcta

SEQ ID NO: 160020 - DNA, 30 bp, Artificial Sequence
  Synthetic oligonucleotide
tctttcaaaggacgaggtggtacgattcta

SEQ ID NO: 160021 - DNA, 30 bp, Artificial Sequence
  Synthetic oligonucleotide
cgtgctattgagggtgaggcatcgattcta

SEQ ID NO: 160022 - DNA, 30 bp, Artificial Sequence
  Synthetic oligonucleotide
tacgactgtgatcgtccgaaagctattcta

SEQ ID NO: 160023 - DNA, 30 bp, Artificial Sequence
  Synthetic oligonucleotide
acaacatagctgcgaaagccggaacttcta

SEQ ID NO: 160024 - DNA, 30 bp, Artificial Sequence
  Synthetic oligonucleotide
acgtaactttcatccgaaagtgacgttcta

SEQ ID NO: 160025 - DNA, 30 bp, Artificial Sequence
  Synthetic oligonucleotide
ctaaagcgacacgttcggaaacaatttcta

SEQ ID NO: 160026 - DNA, 30 bp, Artificial Sequence
  Synthetic oligonucleotide
gatattgccaaggtcaagtccgcatttcta

SEQ ID NO: 160027 - DNA, 30 bp, Artificial Sequence
  Synthetic oligonucleotide
gtaacgaaggtaatcgcataacgatttcta

SEQ ID NO: 160028 - DNA, 30 bp, Artificial Sequence
  Synthetic oligonucleotide
cgggtccgtaagagctagaaattctttcta

SEQ ID NO: 160029 - DNA, 30 bp, Artificial Sequence
  Synthetic oligonucleotide
gggaaaaaaacagttcccaggcattttcta

SEQ ID NO: 160030 - DNA, 30 bp, Artificial Sequence
  Synthetic oligonucleotide
ggtaagtacggattgcacaagccaaaagta

SEQ ID NO: 160031 - DNA, 30 bp, Artificial Sequence
  Synthetic oligonucleotide
acgaaaagagcttgcgtcttggtaaaagta

SEQ ID NO: 160032 - DNA, 30 bp, Artificial Sequence
  Synthetic oligonucleotide
gggctcgctgactccatgggcagcaaagta

SEQ ID NO: 160033 - DNA, 30 bp, Artificial Sequence
  Synthetic oligonucleotide
gcttatccagatctccaagcgggcaaagta

SEQ ID NO: 160034 - DNA, 30 bp, Artificial Sequence
  Synthetic oligonucleotide
ggtcgcaaccgtcgactcagaccgaaagta

SEQ ID NO: 160035 - DNA, 30 bp, Artificial Sequence
  Synthetic oligonucleotide
attccgtaaccgcaagtaggggataaagta

SEQ ID NO: 160036 - DNA, 30 bp, Artificial Sequence
  Synthetic oligonucleotide
catgccagtgtgaccgtttggccacaagta

SEQ ID NO: 160037 - DNA, 30 bp, Artificial Sequence
  Synthetic oligonucleotide
gtgttctgcgaatcaggctgagtacaagta

SEQ ID NO: 160038 - DNA, 30 bp, Artificial Sequence
  Synthetic oligonucleotide
tccgtcatctagaacgtgcagatgcaagta

SEQ ID NO: 160039 - DNA, 30 bp, Artificial Sequence
  Synthetic oligonucleotide
aaagggataaaacaattcttggctcaagta

SEQ ID NO: 160040 - DNA, 30 bp, Artificial Sequence
  Synthetic oligonucleotide
agctgtgagttcgaaacggagaaagaagta

SEQ ID NO: 160041 - DNA, 30 bp, Artificial Sequence
  Synthetic oligonucleotide
ttgtgttaatctaaattcagatcagaagta

SEQ ID NO: 160042 - DNA, 30 bp, Artificial Sequence
  Synthetic oligonucleotide
agtctggttcctcacggcaatggcgaagta

SEQ ID NO: 160043 - DNA, 30 bp, Artificial Sequence
  Synthetic oligonucleotide
taatgacacagtcctgtatgttaggaagta

SEQ ID NO: 160044 - DNA, 30 bp, Artificial Sequence
  Synthetic oligonucleotide
aagtaagagaatttgcagttgggggaagta

SEQ ID NO: 160045 - DNA, 30 bp, Artificial Sequence
  Synthetic oligonucleotide
ctctacggaaaccgcgataggagataagta

SEQ ID NO: 160046 - DNA, 30 bp, Artificial Sequence
  Synthetic oligonucleotide
tgtctcaagtaaagggttgaatactaagta

SEQ ID NO: 160047 - DNA, 30 bp, Artificial Sequence
  Synthetic oligonucleotide
ggtgggcgttagccttgcgtttactaagta

SEQ ID NO: 160048 - DNA, 30 bp, Artificial Sequence
  Synthetic oligonucleotide
gaaaatgggacatagaggatcatctaagta

SEQ ID NO: 160049 - DNA, 30 bp, Artificial Sequence
  Synthetic oligonucleotide
ccatggcttggtagaatccgagattaagta

SEQ ID NO: 160050 - DNA, 30 bp, Artificial Sequence
  Synthetic oligonucleotide
cgcatcaaacacgaactgtcagcttaagta

SEQ ID NO: 160051 - DNA, 30 bp, Artificial Sequence
  Synthetic oligonucleotide
tgcataaaactaggttacgcccgcacagta

SEQ ID NO: 160052 - DNA, 30 bp, Artificial Sequence
  Synthetic oligonucleotide
ttggtagcgagtagtgtggaaaggacagta

SEQ ID NO: 160053 - DNA, 30 bp, Artificial Sequence
  Synthetic oligonucleotide
cggcgttggtggccgactgtctatacagta

SEQ ID NO: 160054 - DNA, 30 bp, Artificial Sequence
  Synthetic oligonucleotide
ggctggcgctatataagatactacccagta

SEQ ID NO: 160055 - DNA, 30 bp, Artificial Sequence
  Synthetic oligonucleotide
agggtccgggcctcttgcgcctcgccagta

SEQ ID NO: 160056 - DNA, 30 bp, Artificial Sequence
  Synthetic oligonucleotide
cgctccatcgggagggtgtgaaggccagta

SEQ ID NO: 160057 - DNA, 30 bp, Artificial Sequence
  Synthetic oligonucleotide
cctcgatggaggtaataccagaccgcagta

SEQ ID NO: 160058 - DNA, 30 bp, Artificial Sequence
  Synthetic oligonucleotide
caggcctggcagctagcgcttgcttcagta

SEQ ID NO: 160059 - DNA, 30 bp, Artificial Sequence
  Synthetic oligonucleotide
ggtcaaaaaccaggactttgcgcaagagta

SEQ ID NO: 160060 - DNA, 30 bp, Artificial Sequence
  Synthetic oligonucleotide
tatacgcatctttggactgcaataagagta

SEQ ID NO: 160061 - DNA, 30 bp, Artificial Sequence
  Synthetic oligonucleotide
ttaagggtgttttcgtacaaatggagagta

SEQ ID NO: 160062 - DNA, 30 bp, Artificial Sequence
  Synthetic oligonucleotide
agtggtaacagccgtccagcgtttagagta

SEQ ID NO: 160063 - DNA, 30 bp, Artificial Sequence
  Synthetic oligonucleotide
acggaaactactgcgtcatttatacgagta

SEQ ID NO: 160064 - DNA, 30 bp, Artificial Sequence
  Synthetic oligonucleotide
gtgcttcgatgatggaccgagagtcgagta

SEQ ID NO: 160065 - DNA, 31 bp, Artificial Sequence
  Synthetic oligonucleotide
gacaacatgctcagcgaacaaattaggagta

SEQ ID NO: 160066 - DNA, 30 bp, Artificial Sequence
  Synthetic oligonucleotide
cccgaggcaaggcaaaggtctcacggagta

SEQ ID NO: 160067 - DNA, 29 bp, Artificial Sequence
  Synthetic oligonucleotide
gtatgcaagttctcagacggacgggagta

SEQ ID NO: 160068 - DNA, 30 bp, Artificial Sequence
  Synthetic oligonucleotide
tacatctaaggtaatgtatcagtgggagta

SEQ ID NO: 160069 - DNA, 30 bp, Artificial Sequence
  Synthetic oligonucleotide
gctcgaaacaacaacccatcagatggagta

SEQ ID NO: 160070 - DNA, 30 bp, Artificial Sequence
  Synthetic oligonucleotide
ttgaagacggggcattggtttgatggagta

SEQ ID NO: 160071 - DNA, 30 bp, Artificial Sequence
  Synthetic oligonucleotide
acgtcccaagcctttgggaatgctggagta

SEQ ID NO: 160072 - DNA, 30 bp, Artificial Sequence
  Synthetic oligonucleotide
atcacgaatctgaaataaagtacatgagta

SEQ ID NO: 160073 - DNA, 30 bp, Artificial Sequence
  Synthetic oligonucleotide
actgtcgggctataagagggtgtatgagta

SEQ ID NO: 160074 - DNA, 30 bp, Artificial Sequence
  Synthetic oligonucleotide
attgacatactaagacaatatatttgagta

SEQ ID NO: 160075 - DNA, 30 bp, Artificial Sequence
  Synthetic oligonucleotide
atttggcgtgttaggaatgaccaaatagta

SEQ ID NO: 160076 - DNA, 30 bp, Artificial Sequence
  Synthetic oligonucleotide
gcgttagaatgtagattaggtgcaatagta

SEQ ID NO: 160077 - DNA, 30 bp, Artificial Sequence
  Synthetic oligonucleotide
tctgaatgccaaaacttagtatgtatagta

SEQ ID NO: 160078 - DNA, 30 bp, Artificial Sequence
  Synthetic oligonucleotide
ggcgagtatgcgtccaatctgtttatagta

SEQ ID NO: 160079 - DNA, 30 bp, Artificial Sequence
  Synthetic oligonucleotide
aataaaggaggtaagcgctaataactagta

SEQ ID NO: 160080 - DNA, 30 bp, Artificial Sequence
  Synthetic oligonucleotide
gctggacgtcacccgatagcgtgcctagta

SEQ ID NO: 160081 - DNA, 30 bp, Artificial Sequence
  Synthetic oligonucleotide
gtcgcgagaggtttacctcgtacagtagta

SEQ ID NO: 160082 - DNA, 30 bp, Artificial Sequence
  Synthetic oligonucleotide
ttacagttttcaagccaacggggtgtagta

SEQ ID NO: 160083 - DNA, 30 bp, Artificial Sequence
  Synthetic oligonucleotide
caaggagccctcgacacgactcccttagta

SEQ ID NO: 160084 - DNA, 30 bp, Artificial Sequence
  Synthetic oligonucleotide
ggagcactgttctcagagtaaaagttagta

SEQ ID NO: 160085 - DNA, 30 bp, Artificial Sequence
  Synthetic oligonucleotide
catatgaagacggtcccgatgacgttagta

SEQ ID NO: 160086 - DNA, 30 bp, Artificial Sequence
  Synthetic oligonucleotide
gcggcctcagaagtgaacggttgtttagta

SEQ ID NO: 160087 - DNA, 30 bp, Artificial Sequence
  Synthetic oligonucleotide
gttgtcaatgcggcctggacctgcaacgta

SEQ ID NO: 160088 - DNA, 30 bp, Artificial Sequence
  Synthetic oligonucleotide
atagatcaggttagcgtcgtctcgaacgta

SEQ ID NO: 160089 - DNA, 30 bp, Artificial Sequence
  Synthetic oligonucleotide
ggctggtgcaattctaggacggaacacgta

SEQ ID NO: 160090 - DNA, 30 bp, Artificial Sequence
  Synthetic oligonucleotide
ccaatggggtagctcgctttagcccacgta

SEQ ID NO: 160091 - DNA, 30 bp, Artificial Sequence
  Synthetic oligonucleotide
agtatcggttgtattaacaatgagcacgta

SEQ ID NO: 160092 - DNA, 30 bp, Artificial Sequence
  Synthetic oligonucleotide
gagggcataggtacccaaccgtcagacgta

SEQ ID NO: 160093 - DNA, 30 bp, Artificial Sequence
  Synthetic oligonucleotide
atgaactcgagcatatccaagcaggacgta

SEQ ID NO: 160094 - DNA, 30 bp, Artificial Sequence
  Synthetic oligonucleotide
gacctaattcacgatatagatgtggacgta

SEQ ID NO: 160095 - DNA, 30 bp, Artificial Sequence
  Synthetic oligonucleotide
acgtaggtatgaatacttaagttggacgta

SEQ ID NO: 160096 - DNA, 30 bp, Artificial Sequence
  Synthetic oligonucleotide
ggctcatccattagggccgcccgtgacgta

SEQ ID NO: 160097 - DNA, 30 bp, Artificial Sequence
  Synthetic oligonucleotide
agcagagggtaaaaacacgctgcatacgta

SEQ ID NO: 160098 - DNA, 30 bp, Artificial Sequence
  Synthetic oligonucleotide
agttggggctaagtctctacaagatacgta

SEQ ID NO: 160099 - DNA, 30 bp, Artificial Sequence
  Synthetic oligonucleotide
agtcactcatctcgatgccctggatacgta

SEQ ID NO: 160100 - DNA, 30 bp, Artificial Sequence
  Synthetic oligonucleotide
cgagagtcccacaggcggttggtgtacgta

SEQ ID NO: 160101 - DNA, 30 bp, Artificial Sequence
  Synthetic oligonucleotide
caagtgcctaatttgtcgaggatttacgta

SEQ ID NO: 160102 - DNA, 30 bp, Artificial Sequence
  Synthetic oligonucleotide
gaagacatgcggcaacaacgagtttacgta

SEQ ID NO: 160103 - DNA, 30 bp, Artificial Sequence
  Synthetic oligonucleotide
caatatcgtatggagttctatactaccgta

SEQ ID NO: 160104 - DNA, 30 bp, Artificial Sequence
  Synthetic oligonucleotide
cataggccgtcactcgcgatacagcccgta

SEQ ID NO: 160105 - DNA, 30 bp, Artificial Sequence
  Synthetic oligonucleotide
ctacaaacgggatatccaactctatccgta

SEQ ID NO: 160106 - DNA, 30 bp, Artificial Sequence
  Synthetic oligonucleotide
gggactgaaatcccgaaggaatggtccgta

SEQ ID NO: 160107 - DNA, 30 bp, Artificial Sequence
  Synthetic oligonucleotide
ctccgaggaaatcgctactacagaagcgta

SEQ ID NO: 160108 - DNA, 30 bp, Artificial Sequence
  Synthetic oligonucleotide
cagggttcgctcacataagtgcgaagcgta

SEQ ID NO: 160109 - DNA, 30 bp, Artificial Sequence
  Synthetic oligonucleotide
atcgcactgattctgacttctgagcgcgta

SEQ ID NO: 160110 - DNA, 30 bp, Artificial Sequence
  Synthetic oligonucleotide
tcgcaaggctcctgcaaaattacgcgcgta

SEQ ID NO: 160111 - DNA, 30 bp, Artificial Sequence
  Synthetic oligonucleotide
attcacacaatcagcggcatagctcgcgta

SEQ ID NO: 160112 - DNA, 30 bp, Artificial Sequence
  Synthetic oligonucleotide
ccactgaggttccacgctactggtcgcgta

SEQ ID NO: 160113 - DNA, 30 bp, Artificial Sequence
  Synthetic oligonucleotide
ttaggcgttaccacaacgagcgtaggcgta

SEQ ID NO: 160114 - DNA, 30 bp, Artificial Sequence
  Synthetic oligonucleotide
tggacacgaatccggacaaacgccggcgta

SEQ ID NO: 160115 - DNA, 30 bp, Artificial Sequence
  Synthetic oligonucleotide
gagcagaatgagatttatccgcgtggcgta

SEQ ID NO: 160116 - DNA, 30 bp, Artificial Sequence
  Synthetic oligonucleotide
caggtgaaccacgtccccgaattatgcgta

SEQ ID NO: 160117 - DNA, 30 bp, Artificial Sequence
  Synthetic oligonucleotide
ctccccgtcgggacctatagaatctgcgta

SEQ ID NO: 160118 - DNA, 30 bp, Artificial Sequence
  Synthetic oligonucleotide
tttaacaattgtcaagaggagctgtgcgta

SEQ ID NO: 160119 - DNA, 30 bp, Artificial Sequence
  Synthetic oligonucleotide
gagaagtagcagtcaagaacactaatcgta

SEQ ID NO: 160120 - DNA, 30 bp, Artificial Sequence
  Synthetic oligonucleotide
atgggagtatcaccaatacgacgcatcgta

SEQ ID NO: 160121 - DNA, 30 bp, Artificial Sequence
  Synthetic oligonucleotide
gcagtggtgggtatgccataggggatcgta

SEQ ID NO: 160122 - DNA, 30 bp, Artificial Sequence
  Synthetic oligonucleotide
ttgcacaccgacattcatcctattatcgta

SEQ ID NO: 160123 - DNA, 30 bp, Artificial Sequence
  Synthetic oligonucleotide
gtctcaggttcgtatgtcatagtcctcgta

SEQ ID NO: 160124 - DNA, 30 bp, Artificial Sequence
  Synthetic oligonucleotide
tcggtgatttcctggcaccacgatgtcgta

SEQ ID NO: 160125 - DNA, 30 bp, Artificial Sequence
  Synthetic oligonucleotide
gtgaaaaaaccacgcgcatagcttgtcgta

SEQ ID NO: 160126 - DNA, 30 bp, Artificial Sequence
  Synthetic oligonucleotide
gtgtagtgtcatttaaacatggaattcgta

SEQ ID NO: 160127 - DNA, 30 bp, Artificial Sequence
  Synthetic oligonucleotide
gagtccgagtattgcttgtaaaccttcgta

SEQ ID NO: 160128 - DNA, 30 bp, Artificial Sequence
  Synthetic oligonucleotide
cgcgacagtaaaagctgttgcaacaaggta

SEQ ID NO: 160129 - DNA, 30 bp, Artificial Sequence
  Synthetic oligonucleotide
gtgcagcaccgcgttcaacattataaggta

SEQ ID NO: 160130 - DNA, 30 bp, Artificial Sequence
  Synthetic oligonucleotide
accccaattgaaatgcggaactaacaggta

SEQ ID NO: 160131 - DNA, 30 bp, Artificial Sequence
  Synthetic oligonucleotide
tggagtttcatcaaactttatgcacaggta

SEQ ID NO: 160132 - DNA, 30 bp, Artificial Sequence
  Synthetic oligonucleotide
gttaataatcaaaggaaacagcagcaggta

SEQ ID NO: 160133 - DNA, 30 bp, Artificial Sequence
  Synthetic oligonucleotide
ggagttactactgattactagtagcaggta

SEQ ID NO: 160134 - DNA, 30 bp, Artificial Sequence
  Synthetic oligonucleotide
tgggggaaccttgagtataggagtcaggta

SEQ ID NO: 160135 - DNA, 30 bp, Artificial Sequence
  Synthetic oligonucleotide
ccttgctaacgggggcgtcttcgtcaggta

SEQ ID NO: 160136 - DNA, 30 bp, Artificial Sequence
  Synthetic oligonucleotide
ccataagacgtcgggtcgtcgaaggaggta

SEQ ID NO: 160137 - DNA, 30 bp, Artificial Sequence
  Synthetic oligonucleotide
agagattgtcttcgctccaacgtggaggta

SEQ ID NO: 160138 - DNA, 30 bp, Artificial Sequence
  Synthetic oligonucleotide
agggaggcgtctccttagaacaactaggta

SEQ ID NO: 160139 - DNA, 30 bp, Artificial Sequence
  Synthetic oligonucleotide
gtgaccccgaagcgtacacgtgagtaggta

SEQ ID NO: 160140 - DNA, 30 bp, Artificial Sequence
  Synthetic oligonucleotide
gtaagtattaggaatacatgtgtttaggta

SEQ ID NO: 160141 - DNA, 30 bp, Artificial Sequence
  Synthetic oligonucleotide
ctcgagtgtgtcagttatttagcgccggta

SEQ ID NO: 160142 - DNA, 30 bp, Artificial Sequence
  Synthetic oligonucleotide
gctgcgacggaaagggatgcaaggccggta

SEQ ID NO: 160143 - DNA, 30 bp, Artificial Sequence
  Synthetic oligonucleotide
agtatggtgacacgagagagtgggccggta

SEQ ID NO: 160144 - DNA, 30 bp, Artificial Sequence
  Synthetic oligonucleotide
tctgggggacccgcacactccattccggta

SEQ ID NO: 160145 - DNA, 30 bp, Artificial Sequence
  Synthetic oligonucleotide
ctcggatgctttatatggcatagagcggta

SEQ ID NO: 160146 - DNA, 30 bp, Artificial Sequence
  Synthetic oligonucleotide
ttctccaatgggtagaaaccgcgagcggta

SEQ ID NO: 160147 - DNA, 30 bp, Artificial Sequence
  Synthetic oligonucleotide
tgatcggctcgaccggagataaaggcggta

SEQ ID NO: 160148 - DNA, 30 bp, Artificial Sequence
  Synthetic oligonucleotide
catgaggacgtagccataagcctggcggta

SEQ ID NO: 160149 - DNA, 30 bp, Artificial Sequence
  Synthetic oligonucleotide
aactgttttatgcctacaaatcaaagggta

SEQ ID NO: 160150 - DNA, 30 bp, Artificial Sequence
  Synthetic oligonucleotide
gttcatgaacgatcaccgactacaagggta

SEQ ID NO: 160151 - DNA, 30 bp, Artificial Sequence
  Synthetic oligonucleotide
cggagtacgcagagtaatattgccagggta

SEQ ID NO: 160152 - DNA, 30 bp, Artificial Sequence
  Synthetic oligonucleotide
tgcggtcttactgtaccataaatcagggta

SEQ ID NO: 160153 - DNA, 30 bp, Artificial Sequence
  Synthetic oligonucleotide
aagttcccacgaaactgctattagagggta

SEQ ID NO: 160154 - DNA, 30 bp, Artificial Sequence
  Synthetic oligonucleotide
taagtagtactggacaagtaagtgagggta

SEQ ID NO: 160155 - DNA, 30 bp, Artificial Sequence
  Synthetic oligonucleotide
agacacacaggtccgggagtgttgagggta

SEQ ID NO: 160156 - DNA, 30 bp, Artificial Sequence
  Synthetic oligonucleotide
gatagggaactatgcagataatgtagggta

SEQ ID NO: 160157 - DNA, 30 bp, Artificial Sequence
  Synthetic oligonucleotide
caggaagtcctcgagacgggcatacgggta

SEQ ID NO: 160158 - DNA, 30 bp, Artificial Sequence
  Synthetic oligonucleotide
cagagagagttggttcctcgaaaccgggta

SEQ ID NO: 160159 - DNA, 30 bp, Artificial Sequence
  Synthetic oligonucleotide
gagggtggtcctggaaccgttagccgggta

SEQ ID NO: 160160 - DNA, 30 bp, Artificial Sequence
  Synthetic oligonucleotide
accgtaaatctagacttgagaaagcgggta

SEQ ID NO: 160161 - DNA, 30 bp, Artificial Sequence
  Synthetic oligonucleotide
ggcaaaattggtccacatcaacaaggggta

SEQ ID NO: 160162 - DNA, 30 bp, Artificial Sequence
  Synthetic oligonucleotide
cgagtgcaacacgaaggttccacaggggta

SEQ ID NO: 160163 - DNA, 30 bp, Artificial Sequence
  Synthetic oligonucleotide
acctatacaagagagtgtacgcacggggta

SEQ ID NO: 160164 - DNA, 30 bp, Artificial Sequence
  Synthetic oligonucleotide
aataaacaacagcatcgaagacggggggta

SEQ ID NO: 160165 - DNA, 30 bp, Artificial Sequence
  Synthetic oligonucleotide
acccaaaagaacacattttttgggggggta

SEQ ID NO: 160166 - DNA, 30 bp, Artificial Sequence
  Synthetic oligonucleotide
agaaccaggtgcataagcccaatgggggta

SEQ ID NO: 160167 - DNA, 30 bp, Artificial Sequence
  Synthetic oligonucleotide
tctaagaaacaactgtcggctagtggggta

SEQ ID NO: 160168 - DNA, 30 bp, Artificial Sequence
  Synthetic oligonucleotide
tcgaaggtgtgggttgtagtcccatgggta

SEQ ID NO: 160169 - DNA, 31 bp, Artificial Sequence
  Synthetic oligonucleotide
aaaggtctacattaagtatagtgactgggta

SEQ ID NO: 160170 - DNA, 30 bp, Artificial Sequence
  Synthetic oligonucleotide
gtcctgaccttattacactcaagctgggta

SEQ ID NO: 160171 - DNA, 30 bp, Artificial Sequence
  Synthetic oligonucleotide
ttaagccatgcaattcgtagcttctgggta

SEQ ID NO: 160172 - DNA, 30 bp, Artificial Sequence
  Synthetic oligonucleotide
ccaagccgctgttaatgtggctcgtgggta

SEQ ID NO: 160173 - DNA, 30 bp, Artificial Sequence
  Synthetic oligonucleotide
gatggtcgctgtaggtgtcctgccatggta

SEQ ID NO: 160174 - DNA, 30 bp, Artificial Sequence
  Synthetic oligonucleotide
gtggctccgcgacactattactccatggta

SEQ ID NO: 160175 - DNA, 30 bp, Artificial Sequence
  Synthetic oligonucleotide
aatggtggcatagactcaaggagcatggta

SEQ ID NO: 160176 - DNA, 30 bp, Artificial Sequence
  Synthetic oligonucleotide
taggaagtgcgctagtggtcggatatggta

SEQ ID NO: 160177 - DNA, 30 bp, Artificial Sequence
  Synthetic oligonucleotide
ccactaaccaatacacaacaagaactggta

SEQ ID NO: 160178 - DNA, 30 bp, Artificial Sequence
  Synthetic oligonucleotide
tcatctggcaagaccttggagtgactggta

SEQ ID NO: 160179 - DNA, 30 bp, Artificial Sequence
  Synthetic oligonucleotide
ctacatgttcgaatttcgtgcgatctggta

SEQ ID NO: 160180 - DNA, 30 bp, Artificial Sequence
  Synthetic oligonucleotide
agtgccttggcggtttgctgatgagtggta

SEQ ID NO: 160181 - DNA, 30 bp, Artificial Sequence
  Synthetic oligonucleotide
tgaggtagcgaaagctgctgctgggtggta

SEQ ID NO: 160182 - DNA, 30 bp, Artificial Sequence
  Synthetic oligonucleotide
acatattctgtattgacgaagtgggtggta

SEQ ID NO: 160183 - DNA, 30 bp, Artificial Sequence
  Synthetic oligonucleotide
gtgctatccagttcaatcgtatctgtggta

SEQ ID NO: 160184 - DNA, 30 bp, Artificial Sequence
  Synthetic oligonucleotide
acagctacgtttccatggtagtgattggta

SEQ ID NO: 160185 - DNA, 30 bp, Artificial Sequence
  Synthetic oligonucleotide
aagcagtactgtgtgcgagatgtattggta

SEQ ID NO: 160186 - DNA, 30 bp, Artificial Sequence
  Synthetic oligonucleotide
tagccccgtgatactattgcaaacttggta

SEQ ID NO: 160187 - DNA, 30 bp, Artificial Sequence
  Synthetic oligonucleotide
agtggcacaggggcaatagtcacgttggta

SEQ ID NO: 160188 - DNA, 30 bp, Artificial Sequence
  Synthetic oligonucleotide
aatcggaaccgggtgggaaaggttttggta

SEQ ID NO: 160189 - DNA, 30 bp, Artificial Sequence
  Synthetic oligonucleotide
tactggtgatcgtcgtgttaggttttggta

SEQ ID NO: 160190 - DNA, 30 bp, Artificial Sequence
  Synthetic oligonucleotide
ctggcctagtgccgcaataaggcaaatgta

SEQ ID NO: 160191 - DNA, 30 bp, Artificial Sequence
  Synthetic oligonucleotide
tgataaaggagacacccccgggcacatgta

SEQ ID NO: 160192 - DNA, 30 bp, Artificial Sequence
  Synthetic oligonucleotide
ttgcaatagcattgcttggtctagcatgta

SEQ ID NO: 160193 - DNA, 30 bp, Artificial Sequence
  Synthetic oligonucleotide
tgtgaatggacagttccccgaactcatgta

SEQ ID NO: 160194 - DNA, 30 bp, Artificial Sequence
  Synthetic oligonucleotide
acctattaattcagcgaggatgaagatgta

SEQ ID NO: 160195 - DNA, 30 bp, Artificial Sequence
  Synthetic oligonucleotide
gccacaaccactctcgaagaatgggatgta

SEQ ID NO: 160196 - DNA, 30 bp, Artificial Sequence
  Synthetic oligonucleotide
tttagagggaggtcgattaatcctgatgta

SEQ ID NO: 160197 - DNA, 30 bp, Artificial Sequence
  Synthetic oligonucleotide
gtatctccgatttgaactataagtgatgta

SEQ ID NO: 160198 - DNA, 30 bp, Artificial Sequence
  Synthetic oligonucleotide
tctcagggaagaggacatcatatatatgta

SEQ ID NO: 160199 - DNA, 30 bp, Artificial Sequence
  Synthetic oligonucleotide
taatggacgagataagaaaccatttatgta

SEQ ID NO: 160200 - DNA, 30 bp, Artificial Sequence
  Synthetic oligonucleotide
gaacgattaggttccgacgggcaaactgta

SEQ ID NO: 160201 - DNA, 30 bp, Artificial Sequence
  Synthetic oligonucleotide
ccgtgccatcacataatcggttgacctgta

SEQ ID NO: 160202 - DNA, 30 bp, Artificial Sequence
  Synthetic oligonucleotide
agtagcagcgaagacaggacattacctgta

SEQ ID NO: 160203 - DNA, 30 bp, Artificial Sequence
  Synthetic oligonucleotide
tgtaaagggcggagtgctaagattcctgta

SEQ ID NO: 160204 - DNA, 30 bp, Artificial Sequence
  Synthetic oligonucleotide
cacagcggtcatcttcgtgcgagggctgta

SEQ ID NO: 160205 - DNA, 30 bp, Artificial Sequence
  Synthetic oligonucleotide
acgagttaaagaacactttcgttggctgta

SEQ ID NO: 160206 - DNA, 30 bp, Artificial Sequence
  Synthetic oligonucleotide
aagatagggtatggcaaggctgctgctgta

SEQ ID NO: 160207 - DNA, 30 bp, Artificial Sequence
  Synthetic oligonucleotide
gagacttataaagccaagaatccatctgta

SEQ ID NO: 160208 - DNA, 30 bp, Artificial Sequence
  Synthetic oligonucleotide
acagatggtctagacattgaacactctgta

SEQ ID NO: 160209 - DNA, 30 bp, Artificial Sequence
  Synthetic oligonucleotide
ggtggaataatcgtaggcgcatattctgta

SEQ ID NO: 160210 - DNA, 30 bp, Artificial Sequence
  Synthetic oligonucleotide
gcgggccaggagcggatgtgtcgttctgta

SEQ ID NO: 160211 - DNA, 30 bp, Artificial Sequence
  Synthetic oligonucleotide
agacctttatacgtattagcttaaagtgta

SEQ ID NO: 160212 - DNA, 30 bp, Artificial Sequence
  Synthetic oligonucleotide
agaaggtgggcaagcctggtatacagtgta

SEQ ID NO: 160213 - DNA, 30 bp, Artificial Sequence
  Synthetic oligonucleotide
gtctgctgcgtgggaggatcttctagtgta

SEQ ID NO: 160214 - DNA, 30 bp, Artificial Sequence
  Synthetic oligonucleotide
aaagaggtgcgcgccacacactgccgtgta

SEQ ID NO: 160215 - DNA, 30 bp, Artificial Sequence
  Synthetic oligonucleotide
atagtaaactccgggggccggactcgtgta

SEQ ID NO: 160216 - DNA, 30 bp, Artificial Sequence
  Synthetic oligonucleotide
tgactcacgacgcattgttgaggtcgtgta

SEQ ID NO: 160217 - DNA, 30 bp, Artificial Sequence
  Synthetic oligonucleotide
gaggaccgggtcacggtctgcgaaggtgta

SEQ ID NO: 160218 - DNA, 30 bp, Artificial Sequence
  Synthetic oligonucleotide
gcggttcctgggtgggaaaagacaggtgta

SEQ ID NO: 160219 - DNA, 31 bp, Artificial Sequence
  Synthetic oligonucleotide
caaatatgggatcaagttcgggtgaggtgta

SEQ ID NO: 160220 - DNA, 29 bp, Artificial Sequence
  Synthetic oligonucleotide
gagagcggaggacgggccaagagggtgta

SEQ ID NO: 160221 - DNA, 30 bp, Artificial Sequence
  Synthetic oligonucleotide
gagatgtgcaagcagtaggcatggggtgta

SEQ ID NO: 160222 - DNA, 30 bp, Artificial Sequence
  Synthetic oligonucleotide
tctaccttgttacgttccgagagtggtgta

SEQ ID NO: 160223 - DNA, 30 bp, Artificial Sequence
  Synthetic oligonucleotide
catgtacaacactgacctcgtggtggtgta

SEQ ID NO: 160224 - DNA, 30 bp, Artificial Sequence
  Synthetic oligonucleotide
gtcgggggttggcggatcgcacaatgtgta

SEQ ID NO: 160225 - DNA, 30 bp, Artificial Sequence
  Synthetic oligonucleotide
atcgggacccaaaggtaccaccaatgtgta

SEQ ID NO: 160226 - DNA, 30 bp, Artificial Sequence
  Synthetic oligonucleotide
aagtacacgatcagtgctgtaggctgtgta

SEQ ID NO: 160227 - DNA, 30 bp, Artificial Sequence
  Synthetic oligonucleotide
gtaagaagctttacgtctagcatctgtgta

SEQ ID NO: 160228 - DNA, 30 bp, Artificial Sequence
  Synthetic oligonucleotide
tagcgttaatctccgggagtgaagattgta

SEQ ID NO: 160229 - DNA, 30 bp, Artificial Sequence
  Synthetic oligonucleotide
gggaaattgctagtccactacgcgattgta

SEQ ID NO: 160230 - DNA, 30 bp, Artificial Sequence
  Synthetic oligonucleotide
caagtgagaccccagatctggttgattgta

SEQ ID NO: 160231 - DNA, 30 bp, Artificial Sequence
  Synthetic oligonucleotide
gcgggaaagcgataaacgttacgtattgta

SEQ ID NO: 160232 - DNA, 30 bp, Artificial Sequence
  Synthetic oligonucleotide
cgagcggcacaaagcttgctttcacttgta

SEQ ID NO: 160233 - DNA, 30 bp, Artificial Sequence
  Synthetic oligonucleotide
gacgagacactttgcaccacatcccttgta

SEQ ID NO: 160234 - DNA, 30 bp, Artificial Sequence
  Synthetic oligonucleotide
tccagggggactgccgtgctacatcttgta

SEQ ID NO: 160235 - DNA, 30 bp, Artificial Sequence
  Synthetic oligonucleotide
agaagtgccgggaacttagttcatcttgta

SEQ ID NO: 160236 - DNA, 30 bp, Artificial Sequence
  Synthetic oligonucleotide
gtcgagtcattcatatcatcatgcgttgta

SEQ ID NO: 160237 - DNA, 30 bp, Artificial Sequence
  Synthetic oligonucleotide
tggcgaaatctcacatcgctgcctgttgta

SEQ ID NO: 160238 - DNA, 30 bp, Artificial Sequence
  Synthetic oligonucleotide
gcgatctacacaagatggtccacctttgta

SEQ ID NO: 160239 - DNA, 30 bp, Artificial Sequence
  Synthetic oligonucleotide
tagcgcgtaaatcatggggcacggtttgta

SEQ ID NO: 160240 - DNA, 30 bp, Artificial Sequence
  Synthetic oligonucleotide
gcaagtgcaatcggtggactagggtttgta

SEQ ID NO: 160241 - DNA, 30 bp, Artificial Sequence
  Synthetic oligonucleotide
tatcgttagctcgcggaatcacgaaaatta

SEQ ID NO: 160242 - DNA, 30 bp, Artificial Sequence
  Synthetic oligonucleotide
atcgtgtgcgtttccctttacccacaatta

SEQ ID NO: 160243 - DNA, 30 bp, Artificial Sequence
  Synthetic oligonucleotide
tgactgtagtgtaacgatacaaagcaatta

SEQ ID NO: 160244 - DNA, 30 bp, Artificial Sequence
  Synthetic oligonucleotide
cacctggtacgtcacgagggaactcaatta

SEQ ID NO: 160245 - DNA, 30 bp, Artificial Sequence
  Synthetic oligonucleotide
acttgagtctgcaaggtgcgcgctcaatta

SEQ ID NO: 160246 - DNA, 30 bp, Artificial Sequence
  Synthetic oligonucleotide
taggagcggttggctgcaacatatgaatta

SEQ ID NO: 160247 - DNA, 30 bp, Artificial Sequence
  Synthetic oligonucleotide
ttgagatggtgcctatctaaaaaataatta

SEQ ID NO: 160248 - DNA, 30 bp, Artificial Sequence
  Synthetic oligonucleotide
atagtaaagcatgaagatgagggataatta

SEQ ID NO: 160249 - DNA, 30 bp, Artificial Sequence
  Synthetic oligonucleotide
gagagtctcgctgaagggattgcctaatta

SEQ ID NO: 160250 - DNA, 30 bp, Artificial Sequence
  Synthetic oligonucleotide
gatacagagttgttcgatacagggtaatta

SEQ ID NO: 160251 - DNA, 30 bp, Artificial Sequence
  Synthetic oligonucleotide
ccgacgcttggttgggcaggtagttaatta

SEQ ID NO: 160252 - DNA, 30 bp, Artificial Sequence
  Synthetic oligonucleotide
agacgtggataagatatagtcgtcacatta

SEQ ID NO: 160253 - DNA, 30 bp, Artificial Sequence
  Synthetic oligonucleotide
atgctggagataagcccgtttttgacatta

SEQ ID NO: 160254 - DNA, 30 bp, Artificial Sequence
  Synthetic oligonucleotide
gagagagagttgcggtcaaaatatacatta

SEQ ID NO: 160255 - DNA, 30 bp, Artificial Sequence
  Synthetic oligonucleotide
tgacaccggacaatctgtaatagtacatta

SEQ ID NO: 160256 - DNA, 30 bp, Artificial Sequence
  Synthetic oligonucleotide
gattcgattgtgatagcgcttggtacatta

SEQ ID NO: 160257 - DNA, 30 bp, Artificial Sequence
  Synthetic oligonucleotide
gcctaggctcagtacaaattagcgccatta

SEQ ID NO: 160258 - DNA, 30 bp, Artificial Sequence
  Synthetic oligonucleotide
cgggttgcaacgttatcggggctgccatta

SEQ ID NO: 160259 - DNA, 30 bp, Artificial Sequence
  Synthetic oligonucleotide
ctaccacgagatggcataaagcctccatta

SEQ ID NO: 160260 - DNA, 30 bp, Artificial Sequence
  Synthetic oligonucleotide
tcagcacacacgacgaaacgggaagcatta

SEQ ID NO: 160261 - DNA, 30 bp, Artificial Sequence
  Synthetic oligonucleotide
gtgcgtaatatgaaggtgacgtccgcatta

SEQ ID NO: 160262 - DNA, 30 bp, Artificial Sequence
  Synthetic oligonucleotide
tcctaaaggtacgagctgctatgctcatta

SEQ ID NO: 160263 - DNA, 30 bp, Artificial Sequence
  Synthetic oligonucleotide
cgctatcactatggcatccaaacgtcatta

SEQ ID NO: 160264 - DNA, 30 bp, Artificial Sequence
  Synthetic oligonucleotide
tatggctagcagaagccaataacgtcatta

SEQ ID NO: 160265 - DNA, 30 bp, Artificial Sequence
  Synthetic oligonucleotide
caagatccaacgccggtcgaaccgtcatta

SEQ ID NO: 160266 - DNA, 30 bp, Artificial Sequence
  Synthetic oligonucleotide
tcctaagagaattagatttgcaattcatta

SEQ ID NO: 160267 - DNA, 30 bp, Artificial Sequence
  Synthetic oligonucleotide
taacacaggaggttgggacgctattcatta

SEQ ID NO: 160268 - DNA, 30 bp, Artificial Sequence
  Synthetic oligonucleotide
agaaaaacgacgcgctccacataaagatta

SEQ ID NO: 160269 - DNA, 30 bp, Artificial Sequence
  Synthetic oligonucleotide
ttaagatcaaatgcaaggctgaatagatta

SEQ ID NO: 160270 - DNA, 30 bp, Artificial Sequence
  Synthetic oligonucleotide
aggcaaaagtacagatgcataggacgatta

SEQ ID NO: 160271 - DNA, 30 bp, Artificial Sequence
  Synthetic oligonucleotide
tggaggggaaggagggtcgcagtgcgatta

SEQ ID NO: 160272 - DNA, 30 bp, Artificial Sequence
  Synthetic oligonucleotide
agcccactggacattggtctcccaggatta

SEQ ID NO: 160273 - DNA, 30 bp, Artificial Sequence
  Synthetic oligonucleotide
gtcaagatcaatcgcggagggtgcggatta

SEQ ID NO: 160274 - DNA, 30 bp, Artificial Sequence
  Synthetic oligonucleotide
agtaaattgccttgtaaaaggaaatgatta

SEQ ID NO: 160275 - DNA, 30 bp, Artificial Sequence
  Synthetic oligonucleotide
tgcgccgattcaaccaatcattaatgatta

SEQ ID NO: 160276 - DNA, 30 bp, Artificial Sequence
  Synthetic oligonucleotide
tagaggtcccaaagtgagcgagcttgatta

SEQ ID NO: 160277 - DNA, 30 bp, Artificial Sequence
  Synthetic oligonucleotide
ttgtgcgcgcaaatgtgaatcgacatatta

SEQ ID NO: 160278 - DNA, 30 bp, Artificial Sequence
  Synthetic oligonucleotide
tgtgcgcaactcgcttgtcgggtgatatta

SEQ ID NO: 160279 - DNA, 30 bp, Artificial Sequence
  Synthetic oligonucleotide
tgatcaccctgtgtgagctaaattatatta

SEQ ID NO: 160280 - DNA, 30 bp, Artificial Sequence
  Synthetic oligonucleotide
aggaaagccggaaaaaatggggttatatta

SEQ ID NO: 160281 - DNA, 30 bp, Artificial Sequence
  Synthetic oligonucleotide
atggaatacctgtgtgaatgtgtcctatta

SEQ ID NO: 160282 - DNA, 30 bp, Artificial Sequence
  Synthetic oligonucleotide
ttcaaagtcagaaaagcgggcactctatta

SEQ ID NO: 160283 - DNA, 30 bp, Artificial Sequence
  Synthetic oligonucleotide
gggtctagggatttcatacacagagtatta

SEQ ID NO: 160284 - DNA, 30 bp, Artificial Sequence
  Synthetic oligonucleotide
cttaagccacgggaacgttcactagtatta

SEQ ID NO: 160285 - DNA, 30 bp, Artificial Sequence
  Synthetic oligonucleotide
cggtcataacttgggtctgggttggtatta

SEQ ID NO: 160286 - DNA, 30 bp, Artificial Sequence
  Synthetic oligonucleotide
ggtacacaaggataccgtcattctgtatta

SEQ ID NO: 160287 - DNA, 30 bp, Artificial Sequence
  Synthetic oligonucleotide
caagtattggaaagcatccgattcttatta

SEQ ID NO: 160288 - DNA, 30 bp, Artificial Sequence
  Synthetic oligonucleotide
tgagggacaaggaataccaaccggttatta

SEQ ID NO: 160289 - DNA, 30 bp, Artificial Sequence
  Synthetic oligonucleotide
gaggaaaagcgaatatgggcatggttatta

SEQ ID NO: 160290 - DNA, 30 bp, Artificial Sequence
  Synthetic oligonucleotide
acaggatgcaaagaacttgtagatttatta

SEQ ID NO: 160291 - DNA, 30 bp, Artificial Sequence
  Synthetic oligonucleotide
taggggaagatgcctagtacccgaaactta

SEQ ID NO: 160292 - DNA, 30 bp, Artificial Sequence
  Synthetic oligonucleotide
ctgattatcgacacccttcgattaaactta

SEQ ID NO: 160293 - DNA, 30 bp, Artificial Sequence
  Synthetic oligonucleotide
cacaacggagggagtgaagttatcaactta

SEQ ID NO: 160294 - DNA, 30 bp, Artificial Sequence
  Synthetic oligonucleotide
cgagcccggtaacctagctgtaagaactta

SEQ ID NO: 160295 - DNA, 30 bp, Artificial Sequence
  Synthetic oligonucleotide
atcacttgcataccaaagctggcgaactta

SEQ ID NO: 160296 - DNA, 30 bp, Artificial Sequence
  Synthetic oligonucleotide
ctagacggtgaatgtcagatacgacactta

SEQ ID NO: 160297 - DNA, 30 bp, Artificial Sequence
  Synthetic oligonucleotide
ggaaatttagtaggcatacagtgacactta

SEQ ID NO: 160298 - DNA, 30 bp, Artificial Sequence
  Synthetic oligonucleotide
tttgggccgagttgggctctcatacactta

SEQ ID NO: 160299 - DNA, 30 bp, Artificial Sequence
  Synthetic oligonucleotide
gcgtcagttctatgtcgcaactaggactta

SEQ ID NO: 160300 - DNA, 30 bp, Artificial Sequence
  Synthetic oligonucleotide
gatcgagctagagtgggtcaaccggactta

SEQ ID NO: 160301 - DNA, 31 bp, Artificial Sequence
  Synthetic oligonucleotide
gtcactcacctgaatgagagaaaggacctta

SEQ ID NO: 160302 - DNA, 30 bp, Artificial Sequence
  Synthetic oligonucleotide
gggagttgtggacgtcatgggatgccctta

SEQ ID NO: 160303 - DNA, 30 bp, Artificial Sequence
  Synthetic oligonucleotide
cgtagatccagagactttacagccgcctta

SEQ ID NO: 160304 - DNA, 30 bp, Artificial Sequence
  Synthetic oligonucleotide
tgaatagcaactacctggagctcatcctta

SEQ ID NO: 160305 - DNA, 30 bp, Artificial Sequence
  Synthetic oligonucleotide
gacaatccggctctcaaccaacccagctta

SEQ ID NO: 160306 - DNA, 30 bp, Artificial Sequence
  Synthetic oligonucleotide
ccgaggagactgttggcttgcaatagctta

SEQ ID NO: 160307 - DNA, 30 bp, Artificial Sequence
  Synthetic oligonucleotide
ttggtgggtcacggctgagtctcacgctta

SEQ ID NO: 160308 - DNA, 30 bp, Artificial Sequence
  Synthetic oligonucleotide
caaatgaactggataacagtaaaaggctta

SEQ ID NO: 160309 - DNA, 30 bp, Artificial Sequence
  Synthetic oligonucleotide
ccgcacggatagtgcacagaggcaggctta

SEQ ID NO: 160310 - DNA, 30 bp, Artificial Sequence
  Synthetic oligonucleotide
agaggtgggattgtggggatggatggctta

SEQ ID NO: 160311 - DNA, 30 bp, Artificial Sequence
  Synthetic oligonucleotide
cggtccgtttgagatcaccacaactgctta

SEQ ID NO: 160312 - DNA, 30 bp, Artificial Sequence
  Synthetic oligonucleotide
gcactcggaactggctcaaggaattgctta

SEQ ID NO: 160313 - DNA, 30 bp, Artificial Sequence
  Synthetic oligonucleotide
acgcttaaaatcgcctgaccgacgatctta

SEQ ID NO: 160314 - DNA, 30 bp, Artificial Sequence
  Synthetic oligonucleotide
cgggtattcggattaggtagaatgctctta

SEQ ID NO: 160315 - DNA, 30 bp, Artificial Sequence
  Synthetic oligonucleotide
gcggaggttctatgcatagggactctctta

SEQ ID NO: 160316 - DNA, 30 bp, Artificial Sequence
  Synthetic oligonucleotide
tggagtgaggcgaacatataacaagtctta

SEQ ID NO: 160317 - DNA, 30 bp, Artificial Sequence
  Synthetic oligonucleotide
gtgcaagaatcgcagcgtgcacaagtctta

SEQ ID NO: 160318 - DNA, 30 bp, Artificial Sequence
  Synthetic oligonucleotide
ggacgaccgggtgataaagcgttagtctta

SEQ ID NO: 160319 - DNA, 30 bp, Artificial Sequence
  Synthetic oligonucleotide
tcaaagggacgcaagtataggggcgtctta

SEQ ID NO: 160320 - DNA, 30 bp, Artificial Sequence
  Synthetic oligonucleotide
caaccaattcgattgttgtgcaacttctta

SEQ ID NO: 160321 - DNA, 30 bp, Artificial Sequence
  Synthetic oligonucleotide
aggccgagactccaggtcggtcacttctta

SEQ ID NO: 160322 - DNA, 30 bp, Artificial Sequence
  Synthetic oligonucleotide
actagagaaagagagtatgccaccttctta

SEQ ID NO: 160323 - DNA, 30 bp, Artificial Sequence
  Synthetic oligonucleotide
cggcagattccatggtatctgcataagtta

SEQ ID NO: 160324 - DNA, 30 bp, Artificial Sequence
  Synthetic oligonucleotide
accagtgctgatacaggaacctgtaagtta

SEQ ID NO: 160325 - DNA, 30 bp, Artificial Sequence
  Synthetic oligonucleotide
acgaagttaacccaccctcaagttaagtta

SEQ ID NO: 160326 - DNA, 30 bp, Artificial Sequence
  Synthetic oligonucleotide
ctcgctcagcgcatcagtccccctcagtta

SEQ ID NO: 160327 - DNA, 30 bp, Artificial Sequence
  Synthetic oligonucleotide
atcctccccgagtagggggaacgagagtta

SEQ ID NO: 160328 - DNA, 30 bp, Artificial Sequence
  Synthetic oligonucleotide
gcgaaggccctcgctcagtatgctgagtta

SEQ ID NO: 160329 - DNA, 30 bp, Artificial Sequence
  Synthetic oligonucleotide
aagtcgtaggaatggtcagggtctgagtta

SEQ ID NO: 160330 - DNA, 30 bp, Artificial Sequence
  Synthetic oligonucleotide
cgatcgaattgcctcccgtactgtgagtta

SEQ ID NO: 160331 - DNA, 30 bp, Artificial Sequence
  Synthetic oligonucleotide
accaagtttcgcacgtgttggccatagtta

SEQ ID NO: 160332 - DNA, 30 bp, Artificial Sequence
  Synthetic oligonucleotide
aaggggctactgtgagggttgggatagtta

SEQ ID NO: 160333 - DNA, 30 bp, Artificial Sequence
  Synthetic oligonucleotide
tcttatcccctatctctaaaccgctagtta

SEQ ID NO: 160334 - DNA, 30 bp, Artificial Sequence
  Synthetic oligonucleotide
attcccatcccttacaatagcgggtagtta

SEQ ID NO: 160335 - DNA, 30 bp, Artificial Sequence
  Synthetic oligonucleotide
ttgctagaggaatggacagcagtgtagtta

SEQ ID NO: 160336 - DNA, 30 bp, Artificial Sequence
  Synthetic oligonucleotide
gtggctcgacgatgaagtgccctttagtta

SEQ ID NO: 160337 - DNA, 30 bp, Artificial Sequence
  Synthetic oligonucleotide
atcacactagttcttcggacatctacgtta

SEQ ID NO: 160338 - DNA, 30 bp, Artificial Sequence
  Synthetic oligonucleotide
ccttgagtagtaacagatctatttacgtta

SEQ ID NO: 160339 - DNA, 30 bp, Artificial Sequence
  Synthetic oligonucleotide
atactcgtcctcgcccaggccccaccgtta

SEQ ID NO: 160340 - DNA, 30 bp, Artificial Sequence
  Synthetic oligonucleotide
atcattcatagtacatgttcaactccgtta

SEQ ID NO: 160341 - DNA, 30 bp, Artificial Sequence
  Synthetic oligonucleotide
cgagcaagtcgcgcttcttacgttccgtta

SEQ ID NO: 160342 - DNA, 30 bp, Artificial Sequence
  Synthetic oligonucleotide
ggcgcatgctgcgctgacgcaatggcgtta

SEQ ID NO: 160343 - DNA, 30 bp, Artificial Sequence
  Synthetic oligonucleotide
ctcgggaagataggtcgtgttctggcgtta

SEQ ID NO: 160344 - DNA, 30 bp, Artificial Sequence
  Synthetic oligonucleotide
caaagaagctgcgacatatgagtggcgtta

SEQ ID NO: 160345 - DNA, 30 bp, Artificial Sequence
  Synthetic oligonucleotide
tgagtagagtggaattttgtggtggcgtta

SEQ ID NO: 160346 - DNA, 30 bp, Artificial Sequence
  Synthetic oligonucleotide
cggaatcaatcgatgcccgcattatcgtta

SEQ ID NO: 160347 - DNA, 30 bp, Artificial Sequence
  Synthetic oligonucleotide
gggaagcctagggccactgggcattcgtta

SEQ ID NO: 160348 - DNA, 30 bp, Artificial Sequence
  Synthetic oligonucleotide
agggtaacaaagattcatgtgccaaggtta

SEQ ID NO: 160349 - DNA, 30 bp, Artificial Sequence
  Synthetic oligonucleotide
gtcttaatcaacgtgatagaatcaaggtta

SEQ ID NO: 160350 - DNA, 30 bp, Artificial Sequence
  Synthetic oligonucleotide
ttgagaagaccaatttttcaagtgaggtta

SEQ ID NO: 160351 - DNA, 30 bp, Artificial Sequence
  Synthetic oligonucleotide
cacatagcgcaacgttcatctcgtaggtta

SEQ ID NO: 160352 - DNA, 30 bp, Artificial Sequence
  Synthetic oligonucleotide
atgcgtgaatgtcctggaatactacggtta

SEQ ID NO: 160353 - DNA, 30 bp, Artificial Sequence
  Synthetic oligonucleotide
gagggttgttcgatgatggtcgtgcggtta

SEQ ID NO: 160354 - DNA, 30 bp, Artificial Sequence
  Synthetic oligonucleotide
gcacccatagcattgtcgtagggtcggtta

SEQ ID NO: 160355 - DNA, 30 bp, Artificial Sequence
  Synthetic oligonucleotide
gcaacctgatctcaatccgatcacgggtta

SEQ ID NO: 160356 - DNA, 30 bp, Artificial Sequence
  Synthetic oligonucleotide
tgctaatggataggttgtgggcccgggtta

SEQ ID NO: 160357 - DNA, 30 bp, Artificial Sequence
  Synthetic oligonucleotide
aagtgaggcgggactagttctacatggtta

SEQ ID NO: 160358 - DNA, 30 bp, Artificial Sequence
  Synthetic oligonucleotide
ggaccgtctttaaccgaagcgagatggtta

SEQ ID NO: 160359 - DNA, 30 bp, Artificial Sequence
  Synthetic oligonucleotide
gaagcttggttagccttagtgttaatgtta

SEQ ID NO: 160360 - DNA, 30 bp, Artificial Sequence
  Synthetic oligonucleotide
agggattagtatgtgatcatcgccatgtta

SEQ ID NO: 160361 - DNA, 30 bp, Artificial Sequence
  Synthetic oligonucleotide
gggtaatgataacagctcaaaactatgtta

SEQ ID NO: 160362 - DNA, 30 bp, Artificial Sequence
  Synthetic oligonucleotide
cgattaattggatcgtgtattactctgtta

SEQ ID NO: 160363 - DNA, 30 bp, Artificial Sequence
  Synthetic oligonucleotide
atgaaacgatggcggatctcccaagtgtta

SEQ ID NO: 160364 - DNA, 30 bp, Artificial Sequence
  Synthetic oligonucleotide
ttcacgaattgtatgtaagcaggagtgtta

SEQ ID NO: 160365 - DNA, 30 bp, Artificial Sequence
  Synthetic oligonucleotide
caggtcgcttgcgcgggggtggctgtgtta

SEQ ID NO: 160366 - DNA, 30 bp, Artificial Sequence
  Synthetic oligonucleotide
tccggttctgggcggggcaggtgtgtgtta

SEQ ID NO: 160367 - DNA, 30 bp, Artificial Sequence
  Synthetic oligonucleotide
tgttacacgaccatgtcagcacttgtgtta

SEQ ID NO: 160368 - DNA, 30 bp, Artificial Sequence
  Synthetic oligonucleotide
tccaccattacaaagttaggcgcgttgtta

SEQ ID NO: 160369 - DNA, 30 bp, Artificial Sequence
  Synthetic oligonucleotide
tcttcgtaggcagtgccactgtttttgtta

SEQ ID NO: 160370 - DNA, 30 bp, Artificial Sequence
  Synthetic oligonucleotide
gcctcggagcgctacatgctgaaaaattta

SEQ ID NO: 160371 - DNA, 30 bp, Artificial Sequence
  Synthetic oligonucleotide
catcatcttttactagggtccaccaattta

SEQ ID NO: 160372 - DNA, 30 bp, Artificial Sequence
  Synthetic oligonucleotide
ctaaccatgagtacatatcctaccaattta

SEQ ID NO: 160373 - DNA, 30 bp, Artificial Sequence
  Synthetic oligonucleotide
aacggtaagctgggtcatgggctcaattta

SEQ ID NO: 160374 - DNA, 30 bp, Artificial Sequence
  Synthetic oligonucleotide
ctaggctgacttatatggtgttggaattta

SEQ ID NO: 160375 - DNA, 30 bp, Artificial Sequence
  Synthetic oligonucleotide
gttaacgaaaaacgatgtcatggtaattta

SEQ ID NO: 160376 - DNA, 30 bp, Artificial Sequence
  Synthetic oligonucleotide
aaacttcgtcgtcacccgtcaacacattta

SEQ ID NO: 160377 - DNA, 30 bp, Artificial Sequence
  Synthetic oligonucleotide
acataaagggaacactgccccgtacattta

SEQ ID NO: 160378 - DNA, 30 bp, Artificial Sequence
  Synthetic oligonucleotide
taacgtcacctgggtgaacgggatcattta

SEQ ID NO: 160379 - DNA, 30 bp, Artificial Sequence
  Synthetic oligonucleotide
agcaatggcctgtgctatagttgtcattta

SEQ ID NO: 160380 - DNA, 30 bp, Artificial Sequence
  Synthetic oligonucleotide
gcaggaacctctgggattatatgagattta

SEQ ID NO: 160381 - DNA, 30 bp, Artificial Sequence
  Synthetic oligonucleotide
gatgggccgaagagcagagttagggattta

SEQ ID NO: 160382 - DNA, 30 bp, Artificial Sequence
  Synthetic oligonucleotide
cacaacgttacgaaaagtggacgtgattta

SEQ ID NO: 160383 - DNA, 30 bp, Artificial Sequence
  Synthetic oligonucleotide
cctccaagagccaaaccgcgtgaatattta

SEQ ID NO: 160384 - DNA, 30 bp, Artificial Sequence
  Synthetic oligonucleotide
cgaatttgagttgagcaccggggtacttta

SEQ ID NO: 160385 - DNA, 30 bp, Artificial Sequence
  Synthetic oligonucleotide
aggcatatactagcagcatgaggaccttta

SEQ ID NO: 160386 - DNA, 30 bp, Artificial Sequence
  Synthetic oligonucleotide
gttagggactgcactctcattgtggcttta

SEQ ID NO: 160387 - DNA, 30 bp, Artificial Sequence
  Synthetic oligonucleotide
aagatacaatgcaatcgataattgtcttta

SEQ ID NO: 160388 - DNA, 30 bp, Artificial Sequence
  Synthetic oligonucleotide
cacggccagctagccctagagtattcttta

SEQ ID NO: 160389 - DNA, 30 bp, Artificial Sequence
  Synthetic oligonucleotide
tggaagtgcgtctattaaacagcaagttta

SEQ ID NO: 160390 - DNA, 30 bp, Artificial Sequence
  Synthetic oligonucleotide
aactgcttacagcaagaaagtaggagttta

SEQ ID NO: 160391 - DNA, 30 bp, Artificial Sequence
  Synthetic oligonucleotide
aagctaatcagcagggcgcaactgagttta

SEQ ID NO: 160392 - DNA, 30 bp, Artificial Sequence
  Synthetic oligonucleotide
gcacctgaaaggaattgcccgtgaggttta

SEQ ID NO: 160393 - DNA, 30 bp, Artificial Sequence
  Synthetic oligonucleotide
ctaaaataccgtagtccgtcactgggttta

SEQ ID NO: 160394 - DNA, 30 bp, Artificial Sequence
  Synthetic oligonucleotide
agtgtgtacgtttcttatggcgtgggttta

SEQ ID NO: 160395 - DNA, 30 bp, Artificial Sequence
  Synthetic oligonucleotide
cataagctaggcaatccccaagtatgttta

SEQ ID NO: 160396 - DNA, 30 bp, Artificial Sequence
  Synthetic oligonucleotide
gcgggcagttgtcgcgaaagtatcatttta

SEQ ID NO: 160397 - DNA, 30 bp, Artificial Sequence
  Synthetic oligonucleotide
aaaatgaccaactgacgtgcgcaagtttta

SEQ ID NO: 160398 - DNA, 30 bp, Artificial Sequence
  Synthetic oligonucleotide
cacggtatactggccaagccgtaggtttta

SEQ ID NO: 160399 - DNA, 30 bp, Artificial Sequence
  Synthetic oligonucleotide
cggacaaacgatgcccttcctcttgtttta

SEQ ID NO: 160400 - DNA, 30 bp, Artificial Sequence
  Synthetic oligonucleotide
gcttggcaaaagagacacatctttgtttta

SEQ ID NO: 160401 - DNA, 30 bp, Artificial Sequence
  Synthetic oligonucleotide
aacgttcaggtgggtacaaacgacttttta

SEQ ID NO: 160402 - DNA, 30 bp, Artificial Sequence
  Synthetic oligonucleotide
tacgttgaaactagaggcgctcgcttttta

SEQ ID NO: 160403 - DNA, 30 bp, Artificial Sequence
  Synthetic oligonucleotide
acgttgggtgttacctcatgatcgaaaaac

SEQ ID NO: 160404 - DNA, 30 bp, Artificial Sequence
  Synthetic oligonucleotide
atgaagaaatttggggtaagtgtacaaaac

SEQ ID NO: 160405 - DNA, 30 bp, Artificial Sequence
  Synthetic oligonucleotide
tggatggataagctagcctagcaccaaaac

SEQ ID NO: 160406 - DNA, 30 bp, Artificial Sequence
  Synthetic oligonucleotide
gccgcaaacgtcagttaacatacccaaaac

SEQ ID NO: 160407 - DNA, 30 bp, Artificial Sequence
  Synthetic oligonucleotide
gagttgccaccccttagaacacgccaaaac

SEQ ID NO: 160408 - DNA, 30 bp, Artificial Sequence
  Synthetic oligonucleotide
gggaacaatccctgttccagggcgcaaaac

SEQ ID NO: 160409 - DNA, 30 bp, Artificial Sequence
  Synthetic oligonucleotide
gattcaacagtcactgttcgagatcaaaac

SEQ ID NO: 160410 - DNA, 30 bp, Artificial Sequence
  Synthetic oligonucleotide
aggagcgttaaacgggtaatcgatcaaaac

SEQ ID NO: 160411 - DNA, 30 bp, Artificial Sequence
  Synthetic oligonucleotide
ggcgccaccactggccatatccaagaaaac

SEQ ID NO: 160412 - DNA, 28 bp, Artificial Sequence
  Synthetic oligonucleotide
agaccactaataaagggcatacgaaaac

SEQ ID NO: 160413 - DNA, 30 bp, Artificial Sequence
  Synthetic oligonucleotide
atgggtatgaaagatcgtgtattcgaaaac

SEQ ID NO: 160414 - DNA, 30 bp, Artificial Sequence
  Synthetic oligonucleotide
ttagtaagcaagcgtaatgcagaggaaaac

SEQ ID NO: 160415 - DNA, 30 bp, Artificial Sequence
  Synthetic oligonucleotide
tgaatcgaacgattataatccgatgaaaac

SEQ ID NO: 160416 - DNA, 30 bp, Artificial Sequence
  Synthetic oligonucleotide
gaatcgtgtagttcgccggatgcctaaaac

SEQ ID NO: 160417 - DNA, 30 bp, Artificial Sequence
  Synthetic oligonucleotide
cgagaatacaatactcccaacagctaaaac

SEQ ID NO: 160418 - DNA, 30 bp, Artificial Sequence
  Synthetic oligonucleotide
ggactgacccagatgtcgtagcggtaaaac

SEQ ID NO: 160419 - DNA, 30 bp, Artificial Sequence
  Synthetic oligonucleotide
actatacgtccgagtaagaagcattaaaac

SEQ ID NO: 160420 - DNA, 30 bp, Artificial Sequence
  Synthetic oligonucleotide
agcaggagaacagggcttgtgggttaaaac

SEQ ID NO: 160421 - DNA, 30 bp, Artificial Sequence
  Synthetic oligonucleotide
tcatgtgtgtctcttccggctagaacaaac

SEQ ID NO: 160422 - DNA, 30 bp, Artificial Sequence
  Synthetic oligonucleotide
tgaaagtttacactacgaacatgaacaaac

SEQ ID NO: 160423 - DNA, 30 bp, Artificial Sequence
  Synthetic oligonucleotide
gcgcttctgacccgatggcctgagccaaac

SEQ ID NO: 160424 - DNA, 30 bp, Artificial Sequence
  Synthetic oligonucleotide
gaaggtgatatttaagacaatcgtccaaac

SEQ ID NO: 160425 - DNA, 30 bp, Artificial Sequence
  Synthetic oligonucleotide
tagtcttccgcacaatttaggacagcaaac

SEQ ID NO: 160426 - DNA, 30 bp, Artificial Sequence
  Synthetic oligonucleotide
agtcccgtataaacaactaatctagcaaac

SEQ ID NO: 160427 - DNA, 30 bp, Artificial Sequence
  Synthetic oligonucleotide
gatagtcggtaacctccctggcccgcaaac

SEQ ID NO: 160428 - DNA, 30 bp, Artificial Sequence
  Synthetic oligonucleotide
caaatttacgaaaatggtgacctggcaaac

SEQ ID NO: 160429 - DNA, 30 bp, Artificial Sequence
  Synthetic oligonucleotide
gtcccagaaggggttcgcacgggtgcaaac

SEQ ID NO: 160430 - DNA, 30 bp, Artificial Sequence
  Synthetic oligonucleotide
atggccacccagataatcgacacatcaaac

SEQ ID NO: 160431 - DNA, 30 bp, Artificial Sequence
  Synthetic oligonucleotide
actaccaggcggggttttgcggtgtcaaac

SEQ ID NO: 160432 - DNA, 30 bp, Artificial Sequence
  Synthetic oligonucleotide
ccaaccagaaatggtgcatcgtgaagaaac

SEQ ID NO: 160433 - DNA, 30 bp, Artificial Sequence
  Synthetic oligonucleotide
tgggcaaagaaaattacggtaaacagaaac

SEQ ID NO: 160434 - DNA, 30 bp, Artificial Sequence
  Synthetic oligonucleotide
taggaaagactggccacattggatcgaaac

SEQ ID NO: 160435 - DNA, 30 bp, Artificial Sequence
  Synthetic oligonucleotide
aagagcaactggcgagccaatagaggaaac

SEQ ID NO: 160436 - DNA, 30 bp, Artificial Sequence
  Synthetic oligonucleotide
gcagacagacaagtgaaccaggacggaaac

SEQ ID NO: 160437 - DNA, 30 bp, Artificial Sequence
  Synthetic oligonucleotide
cctccgggacattacacacctccgggaaac

SEQ ID NO: 160438 - DNA, 30 bp, Artificial Sequence
  Synthetic oligonucleotide
cagggatgccgcttacgatttgactgaaac

SEQ ID NO: 160439 - DNA, 30 bp, Artificial Sequence
  Synthetic oligonucleotide
caggtcatacaagttggcctcgtgtgaaac

SEQ ID NO: 160440 - DNA, 30 bp, Artificial Sequence
  Synthetic oligonucleotide
agaatgatctagggaactgtgacgataaac

SEQ ID NO: 160441 - DNA, 30 bp, Artificial Sequence
  Synthetic oligonucleotide
attccccagtaggagaccaccggactaaac

SEQ ID NO: 160442 - DNA, 31 bp, Artificial Sequence
  Synthetic oligonucleotide
cgtagggaataacggtgtgtgtgggctaaac

SEQ ID NO: 160443 - DNA, 30 bp, Artificial Sequence
  Synthetic oligonucleotide
tcagcacagtagacgagtacatggctaaac

SEQ ID NO: 160444 - DNA, 30 bp, Artificial Sequence
  Synthetic oligonucleotide
gcacatcgcacgccagtccggccagtaaac

SEQ ID NO: 160445 - DNA, 30 bp, Artificial Sequence
  Synthetic oligonucleotide
ctatggcgtggacatacaaatgtattaaac

SEQ ID NO: 160446 - DNA, 30 bp, Artificial Sequence
  Synthetic oligonucleotide
agactcaagacgctataaaggactttaaac

SEQ ID NO: 160447 - DNA, 30 bp, Artificial Sequence
  Synthetic oligonucleotide
cacacgatggagccacgtgattcgaacaac

SEQ ID NO: 160448 - DNA, 30 bp, Artificial Sequence
  Synthetic oligonucleotide
tcatgccaaacacgtgctgggactaacaac

SEQ ID NO: 160449 - DNA, 30 bp, Artificial Sequence
  Synthetic oligonucleotide
ttcaggtaaacaggagggggccgtaacaac

SEQ ID NO: 160450 - DNA, 30 bp, Artificial Sequence
  Synthetic oligonucleotide
agagacgacaacacaccctactcacacaac

SEQ ID NO: 160451 - DNA, 30 bp, Artificial Sequence
  Synthetic oligonucleotide
agtatgtaacgggactaatgcaggcacaac

SEQ ID NO: 160452 - DNA, 30 bp, Artificial Sequence
  Synthetic oligonucleotide
atagagttagacctagcatgggatcacaac

SEQ ID NO: 160453 - DNA, 30 bp, Artificial Sequence
  Synthetic oligonucleotide
ttactgtgagtagaaactcgtgaagacaac

SEQ ID NO: 160454 - DNA, 30 bp, Artificial Sequence
  Synthetic oligonucleotide
tagggggggcgatcgcatgtcagtgacaac

SEQ ID NO: 160455 - DNA, 30 bp, Artificial Sequence
  Synthetic oligonucleotide
ctaaagaaattagaatcttcctcatacaac

SEQ ID NO: 160456 - DNA, 30 bp, Artificial Sequence
  Synthetic oligonucleotide
agactattgatcgaacagtatagatacaac

SEQ ID NO: 160457 - DNA, 30 bp, Artificial Sequence
  Synthetic oligonucleotide
agagggcgcattgtaagccctgattacaac

SEQ ID NO: 160458 - DNA, 30 bp, Artificial Sequence
  Synthetic oligonucleotide
agcacatgctattcggaaacctcttacaac

SEQ ID NO: 160459 - DNA, 30 bp, Artificial Sequence
  Synthetic oligonucleotide
agcaaaatggttgggacaccgagttacaac

SEQ ID NO: 160460 - DNA, 30 bp, Artificial Sequence
  Synthetic oligonucleotide
cgaaaattgataataggccaatgttacaac

SEQ ID NO: 160461 - DNA, 30 bp, Artificial Sequence
  Synthetic oligonucleotide
gaccaagttagtagtccgacatgttacaac

SEQ ID NO: 160462 - DNA, 30 bp, Artificial Sequence
  Synthetic oligonucleotide
acataggcaagtggtcacttaggaaccaac

SEQ ID NO: 160463 - DNA, 30 bp, Artificial Sequence
  Synthetic oligonucleotide
tcactgacgcgacagtgattcgagcccaac

SEQ ID NO: 160464 - DNA, 30 bp, Artificial Sequence
  Synthetic oligonucleotide
gtagagcggacgttgaaaccctaagccaac

SEQ ID NO: 160465 - DNA, 30 bp, Artificial Sequence
  Synthetic oligonucleotide
tctccgagggatcagatacgttacgccaac

SEQ ID NO: 160466 - DNA, 30 bp, Artificial Sequence
  Synthetic oligonucleotide
cccgtgagactgtacaagaaactctccaac

SEQ ID NO: 160467 - DNA, 30 bp, Artificial Sequence
  Synthetic oligonucleotide
ttaccatctaagctcggtctgcaaagcaac

SEQ ID NO: 160468 - DNA, 30 bp, Artificial Sequence
  Synthetic oligonucleotide
tcggcttaaattaaaccaaccgcaagcaac

SEQ ID NO: 160469 - DNA, 30 bp, Artificial Sequence
  Synthetic oligonucleotide
gacgtcttccacaacagatttgtaagcaac

SEQ ID NO: 160470 - DNA, 30 bp, Artificial Sequence
  Synthetic oligonucleotide
gtcgcccccatcaaactttttaagagcaac

SEQ ID NO: 160471 - DNA, 30 bp, Artificial Sequence
  Synthetic oligonucleotide
taggaaggtagcgtttttgccgggagcaac

SEQ ID NO: 160472 - DNA, 30 bp, Artificial Sequence
  Synthetic oligonucleotide
taccgattaacatgcataaatcctagcaac

SEQ ID NO: 160473 - DNA, 30 bp, Artificial Sequence
  Synthetic oligonucleotide
atgcgcgcattcaatgggatgtaccgcaac

SEQ ID NO: 160474 - DNA, 30 bp, Artificial Sequence
  Synthetic oligonucleotide
ttgacgtggtgggcccatgattgccgcaac

SEQ ID NO: 160475 - DNA, 30 bp, Artificial Sequence
  Synthetic oligonucleotide
tctacagcgcgaattaaagactggcgcaac

SEQ ID NO: 160476 - DNA, 30 bp, Artificial Sequence
  Synthetic oligonucleotide
tcggctttaaaaccctgttgtaatcgcaac

SEQ ID NO: 160477 - DNA, 30 bp, Artificial Sequence
  Synthetic oligonucleotide
ggatctcaaggaggtgttaaagaaggcaac

SEQ ID NO: 160478 - DNA, 30 bp, Artificial Sequence
  Synthetic oligonucleotide
gcgaactgtcaccattagcgcctaggcaac

SEQ ID NO: 160479 - DNA, 30 bp, Artificial Sequence
  Synthetic oligonucleotide
acaaataaaccgctcacaaactgcggcaac

SEQ ID NO: 160480 - DNA, 30 bp, Artificial Sequence
  Synthetic oligonucleotide
ctcgttaatggacgcgtatagccgggcaac

SEQ ID NO: 160481 - DNA, 30 bp, Artificial Sequence
  Synthetic oligonucleotide
gtgcctgcaccttgtacgtgttttggcaac

SEQ ID NO: 160482 - DNA, 30 bp, Artificial Sequence
  Synthetic oligonucleotide
aaagaaggcagaccgacaaggcaatgcaac

SEQ ID NO: 160483 - DNA, 30 bp, Artificial Sequence
  Synthetic oligonucleotide
tatcggagtggcatgttaaaaagatgcaac

SEQ ID NO: 160484 - DNA, 30 bp, Artificial Sequence
  Synthetic oligonucleotide
caagggcggaaggtagttccacgatgcaac

SEQ ID NO: 160485 - DNA, 30 bp, Artificial Sequence
  Synthetic oligonucleotide
acccggggagttcagtttcttgtatgcaac

SEQ ID NO: 160486 - DNA, 31 bp, Artificial Sequence
  Synthetic oligonucleotide
gcgcgtaccgcaaccctcaggttactgcaac

SEQ ID NO: 160487 - DNA, 30 bp, Artificial Sequence
  Synthetic oligonucleotide
tgtgaaccgtgtgatgctcggggttgcaac

SEQ ID NO: 160488 - DNA, 30 bp, Artificial Sequence
  Synthetic oligonucleotide
gtcgctcgattccagtccagccaaatcaac

SEQ ID NO: 160489 - DNA, 30 bp, Artificial Sequence
  Synthetic oligonucleotide
ggacacctatggcggaacaacgccatcaac

SEQ ID NO: 160490 - DNA, 30 bp, Artificial Sequence
  Synthetic oligonucleotide
tgcgcactaacgtcctagtatactatcaac

SEQ ID NO: 160491 - DNA, 30 bp, Artificial Sequence
  Synthetic oligonucleotide
tcctcgtcactaccgcatggacctctcaac

SEQ ID NO: 160492 - DNA, 30 bp, Artificial Sequence
  Synthetic oligonucleotide
gaccaatggaggtcgggtccatgagtcaac

SEQ ID NO: 160493 - DNA, 30 bp, Artificial Sequence
  Synthetic oligonucleotide
gggttcaccagcgcaaggcagtacgtcaac

SEQ ID NO: 160494 - DNA, 30 bp, Artificial Sequence
  Synthetic oligonucleotide
ggactgtgcccagggaaggtttccgtcaac

SEQ ID NO: 160495 - DNA, 30 bp, Artificial Sequence
  Synthetic oligonucleotide
tagtccacccagaagtcgaaattcgtcaac

SEQ ID NO: 160496 - DNA, 30 bp, Artificial Sequence
  Synthetic oligonucleotide
ggtacgtcgctcacctcgatctctaagaac

SEQ ID NO: 160497 - DNA, 30 bp, Artificial Sequence
  Synthetic oligonucleotide
tgaagatagacttgcgacgagccacagaac

SEQ ID NO: 160498 - DNA, 30 bp, Artificial Sequence
  Synthetic oligonucleotide
acagtgcgccaggtagattgcgagcagaac

SEQ ID NO: 160499 - DNA, 30 bp, Artificial Sequence
  Synthetic oligonucleotide
tatcgcgttgggaaacggattaacgagaac

SEQ ID NO: 160500 - DNA, 30 bp, Artificial Sequence
  Synthetic oligonucleotide
cttgcaaattagcgatactaaatcgagaac

SEQ ID NO: 160501 - DNA, 30 bp, Artificial Sequence
  Synthetic oligonucleotide
aaagtcaaagcatgcaagtccatcgagaac

SEQ ID NO: 160502 - DNA, 30 bp, Artificial Sequence
  Synthetic oligonucleotide
gttatcaccatactgaaaaaacgtgagaac

SEQ ID NO: 160503 - DNA, 30 bp, Artificial Sequence
  Synthetic oligonucleotide
agggaacacactcgataaagtgtctagaac

SEQ ID NO: 160504 - DNA, 30 bp, Artificial Sequence
  Synthetic oligonucleotide
ttaagagcgtaatcgctcaggctaacgaac

SEQ ID NO: 160505 - DNA, 30 bp, Artificial Sequence
  Synthetic oligonucleotide
agacgtacaaacataatggtaaccacgaac

SEQ ID NO: 160506 - DNA, 30 bp, Artificial Sequence
  Synthetic oligonucleotide
gcgtgaccgcacagactcttcatcacgaac

SEQ ID NO: 160507 - DNA, 30 bp, Artificial Sequence
  Synthetic oligonucleotide
cggaagttctggggtcccgcgtggacgaac

SEQ ID NO: 160508 - DNA, 30 bp, Artificial Sequence
  Synthetic oligonucleotide
cgggatactcaatggttcaaagccccgaac

SEQ ID NO: 160509 - DNA, 30 bp, Artificial Sequence
  Synthetic oligonucleotide
tgagagtaaacacgtccttggacggcgaac

SEQ ID NO: 160510 - DNA, 30 bp, Artificial Sequence
  Synthetic oligonucleotide
agcgtgatagcactgtcacaacaatcgaac

SEQ ID NO: 160511 - DNA, 30 bp, Artificial Sequence
  Synthetic oligonucleotide
agccttcccgctatcaatgggcgatcgaac

SEQ ID NO: 160512 - DNA, 30 bp, Artificial Sequence
  Synthetic oligonucleotide
agcaagtagcagatatatgcatcgaggaac

SEQ ID NO: 160513 - DNA, 30 bp, Artificial Sequence
  Synthetic oligonucleotide
ttcgcaggtgaggtttatgcaaggaggaac

SEQ ID NO: 160514 - DNA, 30 bp, Artificial Sequence
  Synthetic oligonucleotide
gcgatgatgattggtgaaccgctgaggaac

SEQ ID NO: 160515 - DNA, 30 bp, Artificial Sequence
  Synthetic oligonucleotide
atgtctcggttgtagcgtatcgtgaggaac

SEQ ID NO: 160516 - DNA, 30 bp, Artificial Sequence
  Synthetic oligonucleotide
cgaagctaggctagtggtggcgtacggaac

SEQ ID NO: 160517 - DNA, 30 bp, Artificial Sequence
  Synthetic oligonucleotide
cgagactaaggcgcccgcgcattagggaac

SEQ ID NO: 160518 - DNA, 30 bp, Artificial Sequence
  Synthetic oligonucleotide
ccatatcaattaattaacgcacacgggaac

SEQ ID NO: 160519 - DNA, 30 bp, Artificial Sequence
  Synthetic oligonucleotide
tatggtgggtacgtctgttcagccgggaac

SEQ ID NO: 160520 - DNA, 30 bp, Artificial Sequence
  Synthetic oligonucleotide
tctggtccgggtatagagtgcggtgggaac

SEQ ID NO: 160521 - DNA, 30 bp, Artificial Sequence
  Synthetic oligonucleotide
agacatcagggacaaccagtgacctggaac

SEQ ID NO: 160522 - DNA, 30 bp, Artificial Sequence
  Synthetic oligonucleotide
tggtcgtacagggagcacatggcgtggaac

SEQ ID NO: 160523 - DNA, 30 bp, Artificial Sequence
  Synthetic oligonucleotide
cggatagaactcgggtgccatgcgtggaac

SEQ ID NO: 160524 - DNA, 30 bp, Artificial Sequence
  Synthetic oligonucleotide
tggggcgccaccggaggggacacttggaac

SEQ ID NO: 160525 - DNA, 30 bp, Artificial Sequence
  Synthetic oligonucleotide
agcgccactttattaaccagtaaaatgaac

SEQ ID NO: 160526 - DNA, 30 bp, Artificial Sequence
  Synthetic oligonucleotide
attgcactctcaccccaaggtcgaatgaac

SEQ ID NO: 160527 - DNA, 30 bp, Artificial Sequence
  Synthetic oligonucleotide
ctcaaggttgagcagtatattgggatgaac

SEQ ID NO: 160528 - DNA, 30 bp, Artificial Sequence
  Synthetic oligonucleotide
acaatcccagtcaaagcggcaaatctgaac

SEQ ID NO: 160529 - DNA, 30 bp, Artificial Sequence
  Synthetic oligonucleotide
ggatttctgggggaacttaccgaagtgaac

SEQ ID NO: 160530 - DNA, 30 bp, Artificial Sequence
  Synthetic oligonucleotide
atccggcttgtgtaggaatctagagtgaac

SEQ ID NO: 160531 - DNA, 30 bp, Artificial Sequence
  Synthetic oligonucleotide
agcgctccaagggtcatatactatgtgaac

SEQ ID NO: 160532 - DNA, 30 bp, Artificial Sequence
  Synthetic oligonucleotide
aaggattagggaactcacatgcgtgtgaac

SEQ ID NO: 160533 - DNA, 30 bp, Artificial Sequence
  Synthetic oligonucleotide
ttaactagagcaaatgacaagaacttgaac

SEQ ID NO: 160534 - DNA, 30 bp, Artificial Sequence
  Synthetic oligonucleotide
acttaagcaacagaggccatgaagttgaac

SEQ ID NO: 160535 - DNA, 30 bp, Artificial Sequence
  Synthetic oligonucleotide
tgacagctctatatcgagcgtaccaataac

SEQ ID NO: 160536 - DNA, 30 bp, Artificial Sequence
  Synthetic oligonucleotide
cccgaaatgatttaggttgggcccaataac

SEQ ID NO: 160537 - DNA, 30 bp, Artificial Sequence
  Synthetic oligonucleotide
cgcgcgattggaatgttatgatataataac

SEQ ID NO: 160538 - DNA, 30 bp, Artificial Sequence
  Synthetic oligonucleotide
cgggcttgggcgtcaaccagcgggcataac

SEQ ID NO: 160539 - DNA, 30 bp, Artificial Sequence
  Synthetic oligonucleotide
caggtatcctacgcggggtcaacagataac

SEQ ID NO: 160540 - DNA, 30 bp, Artificial Sequence
  Synthetic oligonucleotide
gctcgcccagttcacactctcgacgataac

SEQ ID NO: 160541 - DNA, 30 bp, Artificial Sequence
  Synthetic oligonucleotide
ccggaaacttcctggcttggaaatgataac

SEQ ID NO: 160542 - DNA, 30 bp, Artificial Sequence
  Synthetic oligonucleotide
tgcgtggtacctgtcatcagcgcatataac

SEQ ID NO: 160543 - DNA, 30 bp, Artificial Sequence
  Synthetic oligonucleotide
aatcgaatgagggcttcagtacgttataac

SEQ ID NO: 160544 - DNA, 30 bp, Artificial Sequence
  Synthetic oligonucleotide
gcgtcgtggcgagtagtcatcagcactaac

SEQ ID NO: 160545 - DNA, 30 bp, Artificial Sequence
  Synthetic oligonucleotide
accaaaagggctagaaggaatgtgactaac

SEQ ID NO: 160546 - DNA, 30 bp, Artificial Sequence
  Synthetic oligonucleotide
gaagcagaacggctggtacttgatactaac

SEQ ID NO: 160547 - DNA, 30 bp, Artificial Sequence
  Synthetic oligonucleotide
cctggtcaagcggcaaccgcgaagcctaac

SEQ ID NO: 160548 - DNA, 30 bp, Artificial Sequence
  Synthetic oligonucleotide
taactatgctgaccattgcttagggctaac

SEQ ID NO: 160549 - DNA, 30 bp, Artificial Sequence
  Synthetic oligonucleotide
gttgtccaaaaagagtgttcgggggctaac

SEQ ID NO: 160550 - DNA, 30 bp, Artificial Sequence
  Synthetic oligonucleotide
tcgctaccataactcaggccttgggctaac

SEQ ID NO: 160551 - DNA, 30 bp, Artificial Sequence
  Synthetic oligonucleotide
aattcggcaatacaactgcataatgctaac

SEQ ID NO: 160552 - DNA, 30 bp, Artificial Sequence
  Synthetic oligonucleotide
aatagagactccataaaccgaagtgctaac

SEQ ID NO: 160553 - DNA, 30 bp, Artificial Sequence
  Synthetic oligonucleotide
agggatgcactatctaaagcgcagtctaac

SEQ ID NO: 160554 - DNA, 30 bp, Artificial Sequence
  Synthetic oligonucleotide
taccagatatccggattctcggagtctaac

SEQ ID NO: 160555 - DNA, 30 bp, Artificial Sequence
  Synthetic oligonucleotide
tcatacagattgcacgtatggaaaagtaac

SEQ ID NO: 160556 - DNA, 30 bp, Artificial Sequence
  Synthetic oligonucleotide
cgacgtggtatcggggcgtacgccagtaac

SEQ ID NO: 160557 - DNA, 30 bp, Artificial Sequence
  Synthetic oligonucleotide
tgactccttgtagaccgtgaaagcagtaac

SEQ ID NO: 160558 - DNA, 30 bp, Artificial Sequence
  Synthetic oligonucleotide
cggaaaaaggaccctatgcactatagtaac

SEQ ID NO: 160559 - DNA, 30 bp, Artificial Sequence
  Synthetic oligonucleotide
gaatgtggtcggaacttaaacgctagtaac

SEQ ID NO: 160560 - DNA, 30 bp, Artificial Sequence
  Synthetic oligonucleotide
ttctgcaatctcatataaacaaaacgtaac

SEQ ID NO: 160561 - DNA, 30 bp, Artificial Sequence
  Synthetic oligonucleotide
aggggacctcgctcgttggcagaacgtaac

SEQ ID NO: 160562 - DNA, 30 bp, Artificial Sequence
  Synthetic oligonucleotide
ttgatagaagaagttcgccggaagcgtaac

SEQ ID NO: 160563 - DNA, 30 bp, Artificial Sequence
  Synthetic oligonucleotide
taacttacgccgttctacacagctcgtaac

SEQ ID NO: 160564 - DNA, 30 bp, Artificial Sequence
  Synthetic oligonucleotide
ttaaagcgggtctaaggcacgtttcgtaac

SEQ ID NO: 160565 - DNA, 30 bp, Artificial Sequence
  Synthetic oligonucleotide
tactcagacaagagtacgaggacaggtaac

SEQ ID NO: 160566 - DNA, 30 bp, Artificial Sequence
  Synthetic oligonucleotide
agcatagaggtacttcataccttgggtaac

SEQ ID NO: 160567 - DNA, 30 bp, Artificial Sequence
  Synthetic oligonucleotide
actgggagccgggctggatcagctggtaac

SEQ ID NO: 160568 - DNA, 30 bp, Artificial Sequence
  Synthetic oligonucleotide
ggacggcatgatgttgtgggtcaatgtaac

SEQ ID NO: 160569 - DNA, 30 bp, Artificial Sequence
  Synthetic oligonucleotide
aaggtgctttagtgcgcgagctaatgtaac

SEQ ID NO: 160570 - DNA, 30 bp, Artificial Sequence
  Synthetic oligonucleotide
tactgacaccgcaagacccacacctgtaac

SEQ ID NO: 160571 - DNA, 30 bp, Artificial Sequence
  Synthetic oligonucleotide
tgacgcgattaataaaagaggctgtgtaac

SEQ ID NO: 160572 - DNA, 30 bp, Artificial Sequence
  Synthetic oligonucleotide
ggggtgttgtaagcggtaactctgtgtaac

SEQ ID NO: 160573 - DNA, 30 bp, Artificial Sequence
  Synthetic oligonucleotide
tatagcgaattaagcccagctttgtgtaac

SEQ ID NO: 160574 - DNA, 30 bp, Artificial Sequence
  Synthetic oligonucleotide
caagttagagacaaaaatatacccattaac

SEQ ID NO: 160575 - DNA, 30 bp, Artificial Sequence
  Synthetic oligonucleotide
tagaacaaggaaggttaatcggctattaac

SEQ ID NO: 160576 - DNA, 30 bp, Artificial Sequence
  Synthetic oligonucleotide
catatcgctgtgaggtgagtagcacttaac

SEQ ID NO: 160577 - DNA, 30 bp, Artificial Sequence
  Synthetic oligonucleotide
cggaacctatctttgttataaagacttaac

SEQ ID NO: 160578 - DNA, 30 bp, Artificial Sequence
  Synthetic oligonucleotide
actgcccgcggcaaacgcctcaatcttaac

SEQ ID NO: 160579 - DNA, 30 bp, Artificial Sequence
  Synthetic oligonucleotide
gaagaagaggcctattcgacgcatcttaac

SEQ ID NO: 160580 - DNA, 30 bp, Artificial Sequence
  Synthetic oligonucleotide
tgcccccttctaagcgcccttgccgttaac

SEQ ID NO: 160581 - DNA, 30 bp, Artificial Sequence
  Synthetic oligonucleotide
tcggcatgacaatgaacgctctccgttaac

SEQ ID NO: 160582 - DNA, 31 bp, Artificial Sequence
  Synthetic oligonucleotide
tgggcgcacgcgcattgttcaaagggttaac

SEQ ID NO: 160583 - DNA, 30 bp, Artificial Sequence
  Synthetic oligonucleotide
cgctacaagccacgaacactcgagtttaac

SEQ ID NO: 160584 - DNA, 30 bp, Artificial Sequence
  Synthetic oligonucleotide
atggccgccgtgctcctaggctgttttaac

SEQ ID NO: 160585 - DNA, 30 bp, Artificial Sequence
  Synthetic oligonucleotide
ggtgacagcggaaccactttgttaaaacac

SEQ ID NO: 160586 - DNA, 30 bp, Artificial Sequence
  Synthetic oligonucleotide
tcgagacctcggatgctccaagacaaacac

SEQ ID NO: 160587 - DNA, 30 bp, Artificial Sequence
  Synthetic oligonucleotide
gatggtctagccgttcccctcagcaaacac

SEQ ID NO: 160588 - DNA, 30 bp, Artificial Sequence
  Synthetic oligonucleotide
atatgagtgttggaggttgagtttaaacac

SEQ ID NO: 160589 - DNA, 30 bp, Artificial Sequence
  Synthetic oligonucleotide
tcactatcaagacgagccccggcacaacac

SEQ ID NO: 160590 - DNA, 30 bp, Artificial Sequence
  Synthetic oligonucleotide
atggtggtgaggacacaaccctcccaacac

SEQ ID NO: 160591 - DNA, 30 bp, Artificial Sequence
  Synthetic oligonucleotide
cgtgacatagcccgtagtagtggccaacac

SEQ ID NO: 160592 - DNA, 30 bp, Artificial Sequence
  Synthetic oligonucleotide
gctgtacagaaattaacaccttttcaacac

SEQ ID NO: 160593 - DNA, 30 bp, Artificial Sequence
  Synthetic oligonucleotide
tggggtagaccccccttcccaatagaacac

SEQ ID NO: 160594 - DNA, 30 bp, Artificial Sequence
  Synthetic oligonucleotide
gtcggtgtggttcgtaaaatcctagaacac

SEQ ID NO: 160595 - DNA, 30 bp, Artificial Sequence
  Synthetic oligonucleotide
agcgcgctttgtaacccagctctcgaacac

SEQ ID NO: 160596 - DNA, 30 bp, Artificial Sequence
  Synthetic oligonucleotide
ggcacacacagctgaatgtgtctataacac

SEQ ID NO: 160597 - DNA, 30 bp, Artificial Sequence
  Synthetic oligonucleotide
cgtgggtccagattggagaccatctaacac

SEQ ID NO: 160598 - DNA, 30 bp, Artificial Sequence
  Synthetic oligonucleotide
tgtctacaaacaagtaacctggagtaacac

SEQ ID NO: 160599 - DNA, 30 bp, Artificial Sequence
  Synthetic oligonucleotide
tgggtcctacagcacaaaccagtgtaacac

SEQ ID NO: 160600 - DNA, 30 bp, Artificial Sequence
  Synthetic oligonucleotide
ccaagagcaatctgttcattcgattaacac

SEQ ID NO: 160601 - DNA, 30 bp, Artificial Sequence
  Synthetic oligonucleotide
agggcgtggccctgaatgaagaaaacacac

SEQ ID NO: 160602 - DNA, 30 bp, Artificial Sequence
  Synthetic oligonucleotide
ggccggcgaccgaggggtcgggaaacacac

SEQ ID NO: 160603 - DNA, 30 bp, Artificial Sequence
  Synthetic oligonucleotide
tgggagtaatctgctgaccggacaacacac

SEQ ID NO: 160604 - DNA, 30 bp, Artificial Sequence
  Synthetic oligonucleotide
cttgggcgcacgttccgaatctacacacac

SEQ ID NO: 160605 - DNA, 30 bp, Artificial Sequence
  Synthetic oligonucleotide
ccttaccaggggaacgaagaccgcacacac

SEQ ID NO: 160606 - DNA, 30 bp, Artificial Sequence
  Synthetic oligonucleotide
ggagtcacatgaacgttccggcaaccacac

SEQ ID NO: 160607 - DNA, 30 bp, Artificial Sequence
  Synthetic oligonucleotide
cgatgtgagaagtgtcctggggacccacac

SEQ ID NO: 160608 - DNA, 30 bp, Artificial Sequence
  Synthetic oligonucleotide
atccggaagttgctttctgatgtcccacac

SEQ ID NO: 160609 - DNA, 30 bp, Artificial Sequence
  Synthetic oligonucleotide
cattatacagaggaccaagagatagcacac

SEQ ID NO: 160610 - DNA, 29 bp, Artificial Sequence
  Synthetic oligonucleotide
acgataccaatggatgagtctaggcacac

SEQ ID NO: 160611 - DNA, 30 bp, Artificial Sequence
  Synthetic oligonucleotide
agaatgaacttttatggagctaatgcacac

SEQ ID NO: 160612 - DNA, 30 bp, Artificial Sequence
  Synthetic oligonucleotide
gtagcgagagtcgagaaacaccgttcacac

SEQ ID NO: 160613 - DNA, 30 bp, Artificial Sequence
  Synthetic oligonucleotide
taggccaaggatacagcacactgttcacac

SEQ ID NO: 160614 - DNA, 30 bp, Artificial Sequence
  Synthetic oligonucleotide
gactcacttttcaagtttcattgttcacac

SEQ ID NO: 160615 - DNA, 30 bp, Artificial Sequence
  Synthetic oligonucleotide
cagaactgggggcgggttcttgcaagacac

SEQ ID NO: 160616 - DNA, 30 bp, Artificial Sequence
  Synthetic oligonucleotide
cccaatccagcacgtaagagatcaagacac

SEQ ID NO: 160617 - DNA, 30 bp, Artificial Sequence
  Synthetic oligonucleotide
tgggaactgtcacaataatgcaagagacac

SEQ ID NO: 160618 - DNA, 30 bp, Artificial Sequence
  Synthetic oligonucleotide
tggatggatataaaatccaacttgagacac

SEQ ID NO: 160619 - DNA, 30 bp, Artificial Sequence
  Synthetic oligonucleotide
catggatatctcgaagcccatgatagacac

SEQ ID NO: 160620 - DNA, 30 bp, Artificial Sequence
  Synthetic oligonucleotide
aagtgcatctcggtaaggacatcccgacac

SEQ ID NO: 160621 - DNA, 30 bp, Artificial Sequence
  Synthetic oligonucleotide
aacagctcgtgagtaatgaaggccggacac

SEQ ID NO: 160622 - DNA, 30 bp, Artificial Sequence
  Synthetic oligonucleotide
agcgatcatctcgtaagacgcgcgggacac

SEQ ID NO: 160623 - DNA, 30 bp, Artificial Sequence
  Synthetic oligonucleotide
tcacgttcctcgccgcgtcccgggggacac

SEQ ID NO: 160624 - DNA, 30 bp, Artificial Sequence
  Synthetic oligonucleotide
gggacagatgattttacagtttgtggacac

SEQ ID NO: 160625 - DNA, 30 bp, Artificial Sequence
  Synthetic oligonucleotide
tcctaggcagaacatgcgaccattggacac

SEQ ID NO: 160626 - DNA, 30 bp, Artificial Sequence
  Synthetic oligonucleotide
gtgtgtgcatagaaaaccgatagctgacac

SEQ ID NO: 160627 - DNA, 30 bp, Artificial Sequence
  Synthetic oligonucleotide
ccaagatatcaatcgcctcgatcgtgacac

SEQ ID NO: 160628 - DNA, 30 bp, Artificial Sequence
  Synthetic oligonucleotide
aacccccagaagacccagaagaaaatacac

SEQ ID NO: 160629 - DNA, 30 bp, Artificial Sequence
  Synthetic oligonucleotide
cccactcgcgtacacacacagacaatacac

SEQ ID NO: 160630 - DNA, 30 bp, Artificial Sequence
  Synthetic oligonucleotide
acagatacgttgagtcacacggccatacac

SEQ ID NO: 160631 - DNA, 30 bp, Artificial Sequence
  Synthetic oligonucleotide
aaaggaccagttcgttccacggaactacac

SEQ ID NO: 160632 - DNA, 30 bp, Artificial Sequence
  Synthetic oligonucleotide
tgcatacgtgcgtgggacaagggcctacac

SEQ ID NO: 160633 - DNA, 30 bp, Artificial Sequence
  Synthetic oligonucleotide
gaaaacgggtcgatcattaataatctacac

SEQ ID NO: 160634 - DNA, 30 bp, Artificial Sequence
  Synthetic oligonucleotide
gtgggattgaaaccggtacgctatctacac

SEQ ID NO: 160635 - DNA, 30 bp, Artificial Sequence
  Synthetic oligonucleotide
aggccacatcaacaccaatacggagtacac

SEQ ID NO: 160636 - DNA, 30 bp, Artificial Sequence
  Synthetic oligonucleotide
ggccaagcccgtaatttgatcaccgtacac

SEQ ID NO: 160637 - DNA, 30 bp, Artificial Sequence
  Synthetic oligonucleotide
tggcgggaacgggctgcatcccgtgtacac

SEQ ID NO: 160638 - DNA, 30 bp, Artificial Sequence
  Synthetic oligonucleotide
gagaatacgtagtttctcatcaagttacac

SEQ ID NO: 160639 - DNA, 30 bp, Artificial Sequence
  Synthetic oligonucleotide
taagcgacgtctcaacaatatcagttacac

SEQ ID NO: 160640 - DNA, 30 bp, Artificial Sequence
  Synthetic oligonucleotide
aggaagatgatgtgaaagacatcgttacac

SEQ ID NO: 160641 - DNA, 30 bp, Artificial Sequence
  Synthetic oligonucleotide
tgggacgatcatgggaactccgctttacac

SEQ ID NO: 160642 - DNA, 30 bp, Artificial Sequence
  Synthetic oligonucleotide
cctacggtaagttccgtaactgctaaccac

SEQ ID NO: 160643 - DNA, 30 bp, Artificial Sequence
  Synthetic oligonucleotide
atgatagtacactcctcggtgagacaccac

SEQ ID NO: 160644 - DNA, 30 bp, Artificial Sequence
  Synthetic oligonucleotide
aagtggtagagctgagtgcggcgacaccac

SEQ ID NO: 160645 - DNA, 30 bp, Artificial Sequence
  Synthetic oligonucleotide
tcgacgtcattccatcccgataggcaccac

SEQ ID NO: 160646 - DNA, 30 bp, Artificial Sequence
  Synthetic oligonucleotide
cctgttcaacagcactccgggagagaccac

SEQ ID NO: 160647 - DNA, 30 bp, Artificial Sequence
  Synthetic oligonucleotide
atggaacggcgcctggggggtatagaccac

SEQ ID NO: 160648 - DNA, 30 bp, Artificial Sequence
  Synthetic oligonucleotide
tagcagcatgattggctgagcggtgaccac

SEQ ID NO: 160649 - DNA, 30 bp, Artificial Sequence
  Synthetic oligonucleotide
gtagtgaaggtgttactagtaacataccac

SEQ ID NO: 160650 - DNA, 30 bp, Artificial Sequence
  Synthetic oligonucleotide
tccgttacgatcaagagacatgactaccac

SEQ ID NO: 160651 - DNA, 30 bp, Artificial Sequence
  Synthetic oligonucleotide
agtatgcaatgtccataacaaacctaccac

SEQ ID NO: 160652 - DNA, 30 bp, Artificial Sequence
  Synthetic oligonucleotide
tacatgattgggtgcttattagtgtaccac

SEQ ID NO: 160653 - DNA, 30 bp, Artificial Sequence
  Synthetic oligonucleotide
cggtagcgctcagacttgggtgattaccac

SEQ ID NO: 160654 - DNA, 30 bp, Artificial Sequence
  Synthetic oligonucleotide
ctggtaccgtactcgttcgaaaaaacccac

SEQ ID NO: 160655 - DNA, 30 bp, Artificial Sequence
  Synthetic oligonucleotide
tacaaatagtaaagtgtactttacacccac

SEQ ID NO: 160656 - DNA, 30 bp, Artificial Sequence
  Synthetic oligonucleotide
ctggcaattagagcttatgccaagacccac

SEQ ID NO: 160657 - DNA, 30 bp, Artificial Sequence
  Synthetic oligonucleotide
tcggcggcttcacgtcaaagctaaccccac

SEQ ID NO: 160658 - DNA, 30 bp, Artificial Sequence
  Synthetic oligonucleotide
catctgtgacgagcaaaatggggagcccac

SEQ ID NO: 160659 - DNA, 30 bp, Artificial Sequence
  Synthetic oligonucleotide
actaaatgttgagcccactgttgggcccac

SEQ ID NO: 160660 - DNA, 30 bp, Artificial Sequence
  Synthetic oligonucleotide
gcggcgccactgctccaggtactatcccac

SEQ ID NO: 160661 - DNA, 30 bp, Artificial Sequence
  Synthetic oligonucleotide
acagattcagtgtttcacgtaacgtcccac

SEQ ID NO: 160662 - DNA, 30 bp, Artificial Sequence
  Synthetic oligonucleotide
cgtcttcgagcttgataatttgcgtcccac

SEQ ID NO: 160663 - DNA, 30 bp, Artificial Sequence
  Synthetic oligonucleotide
acaatccccaggtcaacggctggaagccac

SEQ ID NO: 160664 - DNA, 30 bp, Artificial Sequence
  Synthetic oligonucleotide
gtcaatgcttcaaactcgtggaggagccac

SEQ ID NO: 160665 - DNA, 30 bp, Artificial Sequence
  Synthetic oligonucleotide
gtcttaattccgtcttttttcgtgagccac

SEQ ID NO: 160666 - DNA, 30 bp, Artificial Sequence
  Synthetic oligonucleotide
atattagctacgggattccagttgagccac

SEQ ID NO: 160667 - DNA, 30 bp, Artificial Sequence
  Synthetic oligonucleotide
atgttaacataatatccattgcgtagccac

SEQ ID NO: 160668 - DNA, 30 bp, Artificial Sequence
  Synthetic oligonucleotide
caacgtagtaaagtgtgtagaggtagccac

SEQ ID NO: 160669 - DNA, 30 bp, Artificial Sequence
  Synthetic oligonucleotide
ggagtcaccacagtctagagacgtcgccac

SEQ ID NO: 160670 - DNA, 30 bp, Artificial Sequence
  Synthetic oligonucleotide
gtactgattgcccggggacaacaaggccac

SEQ ID NO: 160671 - DNA, 30 bp, Artificial Sequence
  Synthetic oligonucleotide
ctgagtgagttagtaggagaaaggggccac

SEQ ID NO: 160672 - DNA, 30 bp, Artificial Sequence
  Synthetic oligonucleotide
aacggtcggagtccaccgagatactgccac

SEQ ID NO: 160673 - DNA, 30 bp, Artificial Sequence
  Synthetic oligonucleotide
cataggtggaactgctacttatgctgccac

SEQ ID NO: 160674 - DNA, 30 bp, Artificial Sequence
  Synthetic oligonucleotide
gctaactaagtctctgcgggaggaatccac

SEQ ID NO: 160675 - DNA, 30 bp, Artificial Sequence
  Synthetic oligonucleotide
cgtggcccgagcgactttactgacatccac

SEQ ID NO: 160676 - DNA, 30 bp, Artificial Sequence
  Synthetic oligonucleotide
gaaggtccaaaccaaaccttgaatatccac

SEQ ID NO: 160677 - DNA, 30 bp, Artificial Sequence
  Synthetic oligonucleotide
gcgtgcgagctgcggacaggtgatatccac

SEQ ID NO: 160678 - DNA, 30 bp, Artificial Sequence
  Synthetic oligonucleotide
acgcgttatcctgtatagttgtatatccac

SEQ ID NO: 160679 - DNA, 30 bp, Artificial Sequence
  Synthetic oligonucleotide
ccggaaagcgttgcagtccgctaactccac

SEQ ID NO: 160680 - DNA, 30 bp, Artificial Sequence
  Synthetic oligonucleotide
actagggtcagctcaggcagtccactccac

SEQ ID NO: 160681 - DNA, 30 bp, Artificial Sequence
  Synthetic oligonucleotide
ctccatacatatagagcataaaagctccac

SEQ ID NO: 160682 - DNA, 30 bp, Artificial Sequence
  Synthetic oligonucleotide
tggggatctagggtgcggtttcagctccac

SEQ ID NO: 160683 - DNA, 30 bp, Artificial Sequence
  Synthetic oligonucleotide
aggaccctcgcctcaacgaaatcgctccac

SEQ ID NO: 160684 - DNA, 30 bp, Artificial Sequence
  Synthetic oligonucleotide
ataggaactacgggtagcttttgggtccac

SEQ ID NO: 160685 - DNA, 30 bp, Artificial Sequence
  Synthetic oligonucleotide
accggctaaatgcgaaagtcatgcttccac

SEQ ID NO: 160686 - DNA, 30 bp, Artificial Sequence
  Synthetic oligonucleotide
cgcttatcaggttgcctgtgtagaaagcac

SEQ ID NO: 160687 - DNA, 30 bp, Artificial Sequence
  Synthetic oligonucleotide
ttatctgaggagcgtatggtggtaaagcac

SEQ ID NO: 160688 - DNA, 30 bp, Artificial Sequence
  Synthetic oligonucleotide
ggaagtacaagtagcagcattcacaagcac

SEQ ID NO: 160689 - DNA, 30 bp, Artificial Sequence
  Synthetic oligonucleotide
agatcttcagtgataagtagattcaagcac

SEQ ID NO: 160690 - DNA, 30 bp, Artificial Sequence
  Synthetic oligonucleotide
cgactggagatgtccgcgtgttggaagcac

SEQ ID NO: 160691 - DNA, 30 bp, Artificial Sequence
  Synthetic oligonucleotide
agtgacttaaaactctccgtgcgacagcac

SEQ ID NO: 160692 - DNA, 30 bp, Artificial Sequence
  Synthetic oligonucleotide
cattcgcgatcttctaaacgtatacagcac

SEQ ID NO: 160693 - DNA, 30 bp, Artificial Sequence
  Synthetic oligonucleotide
ccaaagcgcggcgcggcgatattacagcac

SEQ ID NO: 160694 - DNA, 30 bp, Artificial Sequence
  Synthetic oligonucleotide
actccgctttaagtaacctttttacagcac

SEQ ID NO: 160695 - DNA, 30 bp, Artificial Sequence
  Synthetic oligonucleotide
aactaagtagttcggctccgaacccagcac

SEQ ID NO: 160696 - DNA, 30 bp, Artificial Sequence
  Synthetic oligonucleotide
gactccgaccaaaccgaaatctcgcagcac

SEQ ID NO: 160697 - DNA, 30 bp, Artificial Sequence
  Synthetic oligonucleotide
acacttaaagcatggcaccgtgaagagcac

SEQ ID NO: 160698 - DNA, 30 bp, Artificial Sequence
  Synthetic oligonucleotide
cgaaagagtatggggccggtagtagagcac

SEQ ID NO: 160699 - DNA, 30 bp, Artificial Sequence
  Synthetic oligonucleotide
ccatacccaaaatgatgacggtacgagcac

SEQ ID NO: 160700 - DNA, 30 bp, Artificial Sequence
  Synthetic oligonucleotide
tgtgtggatcaacatctagggtaatagcac

SEQ ID NO: 160701 - DNA, 30 bp, Artificial Sequence
  Synthetic oligonucleotide
agcacccacgatttgaactacatatagcac

SEQ ID NO: 160702 - DNA, 30 bp, Artificial Sequence
  Synthetic oligonucleotide
ccaacgtcatatagacctctaacctagcac

SEQ ID NO: 160703 - DNA, 30 bp, Artificial Sequence
  Synthetic oligonucleotide
gggactctacggctttggactaggtagcac

SEQ ID NO: 160704 - DNA, 30 bp, Artificial Sequence
  Synthetic oligonucleotide
tggaatctgacggcccgatgaataacgcac

SEQ ID NO: 160705 - DNA, 30 bp, Artificial Sequence
  Synthetic oligonucleotide
ccttcgaggtgctactgacctcccacgcac

SEQ ID NO: 160706 - DNA, 30 bp, Artificial Sequence
  Synthetic oligonucleotide
acaaggacgatctgtgatgaccaaccgcac

SEQ ID NO: 160707 - DNA, 30 bp, Artificial Sequence
  Synthetic oligonucleotide
agggcatgtttgaacgcatctaaagcgcac

SEQ ID NO: 160708 - DNA, 30 bp, Artificial Sequence
  Synthetic oligonucleotide
actacttaacgacacacacaaagagcgcac

SEQ ID NO: 160709 - DNA, 30 bp, Artificial Sequence
  Synthetic oligonucleotide
acggaagtgttggcagtgttttccgcgcac

SEQ ID NO: 160710 - DNA, 30 bp, Artificial Sequence
  Synthetic oligonucleotide
tacgtgggggacatcgtgcttctatcgcac

SEQ ID NO: 160711 - DNA, 30 bp, Artificial Sequence
  Synthetic oligonucleotide
gtagaggatttggataattactgctcgcac

SEQ ID NO: 160712 - DNA, 30 bp, Artificial Sequence
  Synthetic oligonucleotide
gctgggtaaatctgagctacactctcgcac

SEQ ID NO: 160713 - DNA, 30 bp, Artificial Sequence
  Synthetic oligonucleotide
tccggtattatgggtaagagagcaaggcac

SEQ ID NO: 160714 - DNA, 30 bp, Artificial Sequence
  Synthetic oligonucleotide
cgcaatcgatagtagtatcacatgaggcac

SEQ ID NO: 160715 - DNA, 30 bp, Artificial Sequence
  Synthetic oligonucleotide
taagtcgtagcctcagctactactaggcac

SEQ ID NO: 160716 - DNA, 30 bp, Artificial Sequence
  Synthetic oligonucleotide
aggtagggcggcaatgttgagcggcggcac

SEQ ID NO: 160717 - DNA, 30 bp, Artificial Sequence
  Synthetic oligonucleotide
acgaaaagcctagcaaaagatttgcggcac

SEQ ID NO: 160718 - DNA, 30 bp, Artificial Sequence
  Synthetic oligonucleotide
tatgacgttaaaaccgctaattcggggcac

SEQ ID NO: 160719 - DNA, 30 bp, Artificial Sequence
  Synthetic oligonucleotide
ggtaaagagggaacgacgccttctgggcac

SEQ ID NO: 160720 - DNA, 30 bp, Artificial Sequence
  Synthetic oligonucleotide
aggggtcgacactgttgctttctatggcac

SEQ ID NO: 160721 - DNA, 30 bp, Artificial Sequence
  Synthetic oligonucleotide
gtggcgcttatatccaaactcgcgtggcac

SEQ ID NO: 160722 - DNA, 30 bp, Artificial Sequence
  Synthetic oligonucleotide
ggtgagcgcaaaaaaccttctgcgtggcac

SEQ ID NO: 160723 - DNA, 30 bp, Artificial Sequence
  Synthetic oligonucleotide
ttgtagcctggtcgcggtacatcgtggcac

SEQ ID NO: 160724 - DNA, 30 bp, Artificial Sequence
  Synthetic oligonucleotide
ggaccgtcaaaaagcatgagggtgatgcac

SEQ ID NO: 160725 - DNA, 30 bp, Artificial Sequence
  Synthetic oligonucleotide
gtgtgatggttcaacactgaacctatgcac

SEQ ID NO: 160726 - DNA, 30 bp, Artificial Sequence
  Synthetic oligonucleotide
taatgaccagccatttcaagtgccctgcac

SEQ ID NO: 160727 - DNA, 30 bp, Artificial Sequence
  Synthetic oligonucleotide
tcggacggatatgtgtaggcgttcctgcac

SEQ ID NO: 160728 - DNA, 30 bp, Artificial Sequence
  Synthetic oligonucleotide
ctcgctaggagaattagttgacatctgcac

SEQ ID NO: 160729 - DNA, 30 bp, Artificial Sequence
  Synthetic oligonucleotide
gaaccgccgaacgggctacacagcgtgcac

SEQ ID NO: 160730 - DNA, 30 bp, Artificial Sequence
  Synthetic oligonucleotide
agtgtagacaagtatgaacttatcgtgcac

SEQ ID NO: 160731 - DNA, 30 bp, Artificial Sequence
  Synthetic oligonucleotide
agtggaatgccagcagatcgaagggtgcac

SEQ ID NO: 160732 - DNA, 30 bp, Artificial Sequence
  Synthetic oligonucleotide
aggtagctgatttcacgaacacaattgcac

SEQ ID NO: 160733 - DNA, 30 bp, Artificial Sequence
  Synthetic oligonucleotide
ggattgagacggactgatcccgaattgcac

SEQ ID NO: 160734 - DNA, 30 bp, Artificial Sequence
  Synthetic oligonucleotide
gtgcgaaggtatcaggccgataggttgcac

SEQ ID NO: 160735 - DNA, 30 bp, Artificial Sequence
  Synthetic oligonucleotide
cgtcctcctgaatggaagtgccgcaatcac

SEQ ID NO: 160736 - DNA, 30 bp, Artificial Sequence
  Synthetic oligonucleotide
gttgttgacaggatggggacatgtaatcac

SEQ ID NO: 160737 - DNA, 30 bp, Artificial Sequence
  Synthetic oligonucleotide
atcgatatactgtttgccacttgtaatcac

SEQ ID NO: 160738 - DNA, 30 bp, Artificial Sequence
  Synthetic oligonucleotide
caaaattgaaaggattaagcgagacatcac

SEQ ID NO: 160739 - DNA, 30 bp, Artificial Sequence
  Synthetic oligonucleotide
acacgagtgtggctgaaaggattccatcac

SEQ ID NO: 160740 - DNA, 30 bp, Artificial Sequence
  Synthetic oligonucleotide
tctttgagcacatctctcactgcgcatcac

SEQ ID NO: 160741 - DNA, 30 bp, Artificial Sequence
  Synthetic oligonucleotide
ccatttgttggcacaactacggggcatcac

SEQ ID NO: 160742 - DNA, 30 bp, Artificial Sequence
  Synthetic oligonucleotide
cggacgtcaatgaagacggattgctatcac

SEQ ID NO: 160743 - DNA, 30 bp, Artificial Sequence
  Synthetic oligonucleotide
ttggtgtggcttgaaagcgttatctatcac

SEQ ID NO: 160744 - DNA, 30 bp, Artificial Sequence
  Synthetic oligonucleotide
ccggctactattgctggtgtccgaactcac

SEQ ID NO: 160745 - DNA, 30 bp, Artificial Sequence
  Synthetic oligonucleotide
gtaagaaggcggagggatccctgtactcac

SEQ ID NO: 160746 - DNA, 30 bp, Artificial Sequence
  Synthetic oligonucleotide
gtagtaaagcatctggctcacccacctcac

SEQ ID NO: 160747 - DNA, 30 bp, Artificial Sequence
  Synthetic oligonucleotide
ccaatgtaaaacaccaccgtggtgcctcac

SEQ ID NO: 160748 - DNA, 30 bp, Artificial Sequence
  Synthetic oligonucleotide
gtaacgggacgacggtttgggctatctcac

SEQ ID NO: 160749 - DNA, 30 bp, Artificial Sequence
  Synthetic oligonucleotide
ctgctacggggaagttgggtgctatctcac

SEQ ID NO: 160750 - DNA, 30 bp, Artificial Sequence
  Synthetic oligonucleotide
tcgatgatcgctagaccgttctgttctcac

SEQ ID NO: 160751 - DNA, 30 bp, Artificial Sequence
  Synthetic oligonucleotide
gcgagagacagtaagtgatccaaaagtcac

SEQ ID NO: 160752 - DNA, 30 bp, Artificial Sequence
  Synthetic oligonucleotide
tgaaccaatggatattagacccacagtcac

SEQ ID NO: 160753 - DNA, 30 bp, Artificial Sequence
  Synthetic oligonucleotide
cagacagcactcagactgttatagagtcac

SEQ ID NO: 160754 - DNA, 30 bp, Artificial Sequence
  Synthetic oligonucleotide
gtagctcgagcatgggcgttagctagtcac

SEQ ID NO: 160755 - DNA, 30 bp, Artificial Sequence
  Synthetic oligonucleotide
ccaccgtaggtaggcgactgaattagtcac

SEQ ID NO: 160756 - DNA, 30 bp, Artificial Sequence
  Synthetic oligonucleotide
acttctcggtagcgcctatgccgacgtcac

SEQ ID NO: 160757 - DNA, 30 bp, Artificial Sequence
  Synthetic oligonucleotide
gaggcgtaattggtcacaagagttcgtcac

SEQ ID NO: 160758 - DNA, 30 bp, Artificial Sequence
  Synthetic oligonucleotide
atcgcgtcttgagccacttggtaaggtcac

SEQ ID NO: 160759 - DNA, 30 bp, Artificial Sequence
  Synthetic oligonucleotide
tgactaattccagtcagaccggagggtcac

SEQ ID NO: 160760 - DNA, 30 bp, Artificial Sequence
  Synthetic oligonucleotide
ctacggcaatttacttacgatacgggtcac

SEQ ID NO: 160761 - DNA, 30 bp, Artificial Sequence
  Synthetic oligonucleotide
gcctaatatcgatcgatcaaggcgggtcac

SEQ ID NO: 160762 - DNA, 30 bp, Artificial Sequence
  Synthetic oligonucleotide
accgtgcttagagtgcgtggttgatgtcac

SEQ ID NO: 160763 - DNA, 30 bp, Artificial Sequence
  Synthetic oligonucleotide
atagtcggtactctttctcagctatgtcac

SEQ ID NO: 160764 - DNA, 30 bp, Artificial Sequence
  Synthetic oligonucleotide
gacctgaccataggcttggtaacgtgtcac

SEQ ID NO: 160765 - DNA, 30 bp, Artificial Sequence
  Synthetic oligonucleotide
aggacgtcatatgcgttcaaaaattgtcac

SEQ ID NO: 160766 - DNA, 30 bp, Artificial Sequence
  Synthetic oligonucleotide
gctagcgtcgtgttctgtagcgcttgtcac

SEQ ID NO: 160767 - DNA, 30 bp, Artificial Sequence
  Synthetic oligonucleotide
gcagagagatacgaaccgagttcaattcac

SEQ ID NO: 160768 - DNA, 30 bp, Artificial Sequence
  Synthetic oligonucleotide
gaggaacaggtagatccccgagcgattcac

SEQ ID NO: 160769 - DNA, 30 bp, Artificial Sequence
  Synthetic oligonucleotide
tggtgtatcatcgcccggaagcttattcac

SEQ ID NO: 160770 - DNA, 30 bp, Artificial Sequence
  Synthetic oligonucleotide
cattaatgtgcgacctgacatgttattcac

SEQ ID NO: 160771 - DNA, 30 bp, Artificial Sequence
  Synthetic oligonucleotide
tgcccaacgaccaggtgtaggaggcttcac

SEQ ID NO: 160772 - DNA, 30 bp, Artificial Sequence
  Synthetic oligonucleotide
atataaacgaatttaaacgggtaagttcac

SEQ ID NO: 160773 - DNA, 30 bp, Artificial Sequence
  Synthetic oligonucleotide
cagggggagcgctccttggcttgagttcac

SEQ ID NO: 160774 - DNA, 30 bp, Artificial Sequence
  Synthetic oligonucleotide
actgaccataagggagcggtaaccgttcac

SEQ ID NO: 160775 - DNA, 30 bp, Artificial Sequence
  Synthetic oligonucleotide
cagattccaccagagaacgggaaggttcac

SEQ ID NO: 160776 - DNA, 30 bp, Artificial Sequence
  Synthetic oligonucleotide
tacagactgggcaatttaacgacggttcac

SEQ ID NO: 160777 - DNA, 30 bp, Artificial Sequence
  Synthetic oligonucleotide
ccatatgtaacaactgcaaaaaagtttcac

SEQ ID NO: 160778 - DNA, 30 bp, Artificial Sequence
  Synthetic oligonucleotide
ttctggatactagcatacacctgttttcac

SEQ ID NO: 160779 - DNA, 34 bp, Artificial Sequence
  Synthetic oligonucleotide
gatactagaccaccacgtgtacatcacaaaagac

SEQ ID NO: 160780 - DNA, 35 bp, Artificial Sequence
  Synthetic oligonucleotide
gatacttagaccaccacgtgtccatcagaaaagac

SEQ ID NO: 160781 - DNA, 34 bp, Artificial Sequence
  Synthetic oligonucleotide
gatactagaccaccccgtgtccatgagaaaagac

SEQ ID NO: 160782 - DNA, 30 bp, Artificial Sequence
  Synthetic oligonucleotide
taaatccggtgaggcatggaaggaaaagac

SEQ ID NO: 160783 - DNA, 30 bp, Artificial Sequence
  Synthetic oligonucleotide
cttattggagcaatgtgaggatgaaaagac

SEQ ID NO: 160784 - DNA, 30 bp, Artificial Sequence
  Synthetic oligonucleotide
taatcgaaaggcggaaacgtactaaaagac

SEQ ID NO: 160785 - DNA, 30 bp, Artificial Sequence
  Synthetic oligonucleotide
agagagtaaatagacccgctcaagaaagac

SEQ ID NO: 160786 - DNA, 30 bp, Artificial Sequence
  Synthetic oligonucleotide
gtaggaagtctacatctcatacgtaaagac

SEQ ID NO: 160787 - DNA, 30 bp, Artificial Sequence
  Synthetic oligonucleotide
agcacccattaattcgatcatcccgaagac

SEQ ID NO: 160788 - DNA, 30 bp, Artificial Sequence
  Synthetic oligonucleotide
gattaggggtagcatctcaaggccgaagac

SEQ ID NO: 160789 - DNA, 30 bp, Artificial Sequence
  Synthetic oligonucleotide
cagcatctacacggaacttattcaacagac

SEQ ID NO: 160790 - DNA, 30 bp, Artificial Sequence
  Synthetic oligonucleotide
ccacaggcgcgtcaaagcaataagacagac

SEQ ID NO: 160791 - DNA, 30 bp, Artificial Sequence
  Synthetic oligonucleotide
gtaaccttgagaatacctaaagcaccagac

SEQ ID NO: 160792 - DNA, 30 bp, Artificial Sequence
  Synthetic oligonucleotide
caccgcactactggtgatggatgaccagac

SEQ ID NO: 160793 - DNA, 30 bp, Artificial Sequence
  Synthetic oligonucleotide
cgagggcggatggcattggaggagccagac

SEQ ID NO: 160794 - DNA, 30 bp, Artificial Sequence
  Synthetic oligonucleotide
atgagtgagggtattcgacggtgtccagac

SEQ ID NO: 160795 - DNA, 30 bp, Artificial Sequence
  Synthetic oligonucleotide
ggtggtgcagactccaagaggtaagcagac

SEQ ID NO: 160796 - DNA, 30 bp, Artificial Sequence
  Synthetic oligonucleotide
tgagggataaggatatcaccgctggcagac

SEQ ID NO: 160797 - DNA, 30 bp, Artificial Sequence
  Synthetic oligonucleotide
tggcgttccactcgtagccgtgttgcagac

SEQ ID NO: 160798 - DNA, 30 bp, Artificial Sequence
  Synthetic oligonucleotide
tcaaaagcttacttctaaaacacctcagac

SEQ ID NO: 160799 - DNA, 31 bp, Artificial Sequence
  Synthetic oligonucleotide
gatagttgatcaatgcgatacaagctcagac

SEQ ID NO: 160800 - DNA, 30 bp, Artificial Sequence
  Synthetic oligonucleotide
ggataatggagacgatttagacgaagagac

SEQ ID NO: 160801 - DNA, 30 bp, Artificial Sequence
  Synthetic oligonucleotide
gaggtctgggcccgtctgcagagcagagac

SEQ ID NO: 160802 - DNA, 30 bp, Artificial Sequence
  Synthetic oligonucleotide
agcagttagccgagagcatggagcagagac

SEQ ID NO: 160803 - DNA, 30 bp, Artificial Sequence
  Synthetic oligonucleotide
accccaccattcgattgatttcggagagac

SEQ ID NO: 160804 - DNA, 30 bp, Artificial Sequence
  Synthetic oligonucleotide
aacatataaggattcgagtgcgctagagac

SEQ ID NO: 160805 - DNA, 30 bp, Artificial Sequence
  Synthetic oligonucleotide
aagtggccaaaattagacaagctctgagac

SEQ ID NO: 160806 - DNA, 30 bp, Artificial Sequence
  Synthetic oligonucleotide
tggatgcccactgacgtccagttgtgagac

SEQ ID NO: 160807 - DNA, 30 bp, Artificial Sequence
  Synthetic oligonucleotide
ggccgtagaggaagtgagtgatattgagac

SEQ ID NO: 160808 - DNA, 30 bp, Artificial Sequence
  Synthetic oligonucleotide
aacgcaaacagatgaaaagccctgatagac

SEQ ID NO: 160809 - DNA, 30 bp, Artificial Sequence
  Synthetic oligonucleotide
tggagtaagactgaagaaatcgtgatagac

SEQ ID NO: 160810 - DNA, 30 bp, Artificial Sequence
  Synthetic oligonucleotide
gattgatacgtccaaaatcaacaactagac

SEQ ID NO: 160811 - DNA, 30 bp, Artificial Sequence
  Synthetic oligonucleotide
gggcatatgctacttcccgcgcaactagac

SEQ ID NO: 160812 - DNA, 30 bp, Artificial Sequence
  Synthetic oligonucleotide
tctatatcgttagagtccactgagctagac

SEQ ID NO: 160813 - DNA, 30 bp, Artificial Sequence
  Synthetic oligonucleotide
cgccgcccgcgggaaaggtttccagtagac

SEQ ID NO: 160814 - DNA, 30 bp, Artificial Sequence
  Synthetic oligonucleotide
aaagtggtgctggattagggctaggtagac

SEQ ID NO: 160815 - DNA, 30 bp, Artificial Sequence
  Synthetic oligonucleotide
atctacgtccaggttgccgtaactgtagac

SEQ ID NO: 160816 - DNA, 30 bp, Artificial Sequence
  Synthetic oligonucleotide
gatatggtgcaaggggtagtgtctgtagac

SEQ ID NO: 160817 - DNA, 30 bp, Artificial Sequence
  Synthetic oligonucleotide
gtaaaattgggaaggacctgtgaattagac

SEQ ID NO: 160818 - DNA, 30 bp, Artificial Sequence
  Synthetic oligonucleotide
acgaaggcacgtgattcattcggcttagac

SEQ ID NO: 160819 - DNA, 30 bp, Artificial Sequence
  Synthetic oligonucleotide
tcctgatgtgagtgcgccaacgggttagac

SEQ ID NO: 160820 - DNA, 30 bp, Artificial Sequence
  Synthetic oligonucleotide
aaagggttgagaacctgccaagcaaacgac

SEQ ID NO: 160821 - DNA, 30 bp, Artificial Sequence
  Synthetic oligonucleotide
agaaggaacaatctcggaaactttaacgac

SEQ ID NO: 160822 - DNA, 30 bp, Artificial Sequence
  Synthetic oligonucleotide
tactagtaacgtcaaaagaggccccacgac

SEQ ID NO: 160823 - DNA, 30 bp, Artificial Sequence
  Synthetic oligonucleotide
acacaaagttaggacgaagccacgtacgac

SEQ ID NO: 160824 - DNA, 30 bp, Artificial Sequence
  Synthetic oligonucleotide
gggttcggttaactgtgaggaatttacgac

SEQ ID NO: 160825 - DNA, 30 bp, Artificial Sequence
  Synthetic oligonucleotide
gaaggatacgccgtaacgttcaaaaccgac

SEQ ID NO: 160826 - DNA, 30 bp, Artificial Sequence
  Synthetic oligonucleotide
gctaggtgcactcgtcgcattcacaccgac

SEQ ID NO: 160827 - DNA, 30 bp, Artificial Sequence
  Synthetic oligonucleotide
ggaaagtaaatcagtgcggaggacaccgac

SEQ ID NO: 160828 - DNA, 30 bp, Artificial Sequence
  Synthetic oligonucleotide
gacacacatcctcggatccgtactaccgac

SEQ ID NO: 160829 - DNA, 30 bp, Artificial Sequence
  Synthetic oligonucleotide
catcgtttccagcacttagtctctaccgac

SEQ ID NO: 160830 - DNA, 30 bp, Artificial Sequence
  Synthetic oligonucleotide
gtgagtgaatcatgcagagggcggcccgac

SEQ ID NO: 160831 - DNA, 30 bp, Artificial Sequence
  Synthetic oligonucleotide
gcgtatggaggacaacctccatcagccgac

SEQ ID NO: 160832 - DNA, 30 bp, Artificial Sequence
  Synthetic oligonucleotide
ccgtttttcgtgctcctttgtcgtgccgac

SEQ ID NO: 160833 - DNA, 30 bp, Artificial Sequence
  Synthetic oligonucleotide
cgatatgtggtagctcggaagctatccgac

SEQ ID NO: 160834 - DNA, 30 bp, Artificial Sequence
  Synthetic oligonucleotide
ggaacgggaatagtgacggcctggtccgac

SEQ ID NO: 160835 - DNA, 30 bp, Artificial Sequence
  Synthetic oligonucleotide
tgcaaagtgtacggtattcaagcaagcgac

SEQ ID NO: 160836 - DNA, 30 bp, Artificial Sequence
  Synthetic oligonucleotide
attacgccaacgaaattctagtacagcgac

SEQ ID NO: 160837 - DNA, 30 bp, Artificial Sequence
  Synthetic oligonucleotide
ctaccagtttgatcggtgctatagagcgac

SEQ ID NO: 160838 - DNA, 31 bp, Artificial Sequence
  Synthetic oligonucleotide
cgtatcaaatacaggcctagggacacgcgac

SEQ ID NO: 160839 - DNA, 30 bp, Artificial Sequence
  Synthetic oligonucleotide
tgaaaagccggttgagtcgatagacgcgac

SEQ ID NO: 160840 - DNA, 30 bp, Artificial Sequence
  Synthetic oligonucleotide
gactaaggccgacaaaggatacgacgcgac

SEQ ID NO: 160841 - DNA, 31 bp, Artificial Sequence
  Synthetic oligonucleotide
agtggctcgggcaatgagtgagtagcgcgac

SEQ ID NO: 160842 - DNA, 30 bp, Artificial Sequence
  Synthetic oligonucleotide
accacttcagaggcccggaggtcgcgcgac

SEQ ID NO: 160843 - DNA, 30 bp, Artificial Sequence
  Synthetic oligonucleotide
cacttttggtacaagaaataagggcgcgac

SEQ ID NO: 160844 - DNA, 30 bp, Artificial Sequence
  Synthetic oligonucleotide
ttattgaggagttcccaagtggactgcgac

SEQ ID NO: 160845 - DNA, 30 bp, Artificial Sequence
  Synthetic oligonucleotide
ggggtaagaataatattaataagctgcgac

SEQ ID NO: 160846 - DNA, 30 bp, Artificial Sequence
  Synthetic oligonucleotide
tcggaattggtcaaaggactccgctgcgac

SEQ ID NO: 160847 - DNA, 30 bp, Artificial Sequence
  Synthetic oligonucleotide
cgccgtactaggatgtattacgtttgcgac

SEQ ID NO: 160848 - DNA, 30 bp, Artificial Sequence
  Synthetic oligonucleotide
cagaaggttggctttacgcgatacatcgac

SEQ ID NO: 160849 - DNA, 30 bp, Artificial Sequence
  Synthetic oligonucleotide
cgaactcacggccaatgatattcgatcgac

SEQ ID NO: 160850 - DNA, 30 bp, Artificial Sequence
  Synthetic oligonucleotide
aagcccggtagatagggctaaaggatcgac

SEQ ID NO: 160851 - DNA, 30 bp, Artificial Sequence
  Synthetic oligonucleotide
ggcacatccgaggtaccgagcctactcgac

SEQ ID NO: 160852 - DNA, 30 bp, Artificial Sequence
  Synthetic oligonucleotide
cgggcccaatgcaactctctcgggctcgac

SEQ ID NO: 160853 - DNA, 30 bp, Artificial Sequence
  Synthetic oligonucleotide
aagtgatttgttaacgacatgcgagtcgac

SEQ ID NO: 160854 - DNA, 30 bp, Artificial Sequence
  Synthetic oligonucleotide
gtaaaacgtcactaccaccagatagtcgac

SEQ ID NO: 160855 - DNA, 30 bp, Artificial Sequence
  Synthetic oligonucleotide
gcgcatatcgatatttggcgaaacgtcgac

SEQ ID NO: 160856 - DNA, 30 bp, Artificial Sequence
  Synthetic oligonucleotide
caatcccagtggcgtgtgtgtttcgtcgac

SEQ ID NO: 160857 - DNA, 30 bp, Artificial Sequence
  Synthetic oligonucleotide
gaattgtatattgctctgagtaaggtcgac

SEQ ID NO: 160858 - DNA, 30 bp, Artificial Sequence
  Synthetic oligonucleotide
gcatcctagggggggcctacgcgattcgac

SEQ ID NO: 160859 - DNA, 30 bp, Artificial Sequence
  Synthetic oligonucleotide
cggtaagcaaagtccggtcgagtattcgac

SEQ ID NO: 160860 - DNA, 30 bp, Artificial Sequence
  Synthetic oligonucleotide
tagcgatcttgtcacttgggcagtttcgac

SEQ ID NO: 160861 - DNA, 30 bp, Artificial Sequence
  Synthetic oligonucleotide
caggcatcgtcactgtatcttctcaaggac

SEQ ID NO: 160862 - DNA, 30 bp, Artificial Sequence
  Synthetic oligonucleotide
caaagctaggctgtcgtaagtcggaaggac

SEQ ID NO: 160863 - DNA, 30 bp, Artificial Sequence
  Synthetic oligonucleotide
ctactctgggtgtgttacggttaacaggac

SEQ ID NO: 160864 - DNA, 30 bp, Artificial Sequence
  Synthetic oligonucleotide
gttaccccttagatgccggccagagaggac

SEQ ID NO: 160865 - DNA, 30 bp, Artificial Sequence
  Synthetic oligonucleotide
gaaacgtttcgtatctccgcggtcgaggac

SEQ ID NO: 160866 - DNA, 30 bp, Artificial Sequence
  Synthetic oligonucleotide
cggaggtacccggggtagtctacggaggac

SEQ ID NO: 160867 - DNA, 30 bp, Artificial Sequence
  Synthetic oligonucleotide
gttattcattagagacaacgaactgaggac

SEQ ID NO: 160868 - DNA, 30 bp, Artificial Sequence
  Synthetic oligonucleotide
taaggtcagtcagagcgaatatttgaggac

SEQ ID NO: 160869 - DNA, 30 bp, Artificial Sequence
  Synthetic oligonucleotide
tgaatgggctcaaagtttgcgcagtaggac

SEQ ID NO: 160870 - DNA, 30 bp, Artificial Sequence
  Synthetic oligonucleotide
cccgatgaatggtgagaccccaatacggac

SEQ ID NO: 160871 - DNA, 30 bp, Artificial Sequence
  Synthetic oligonucleotide
tacacgatcagtgtagtccgcattacggac

SEQ ID NO: 160872 - DNA, 30 bp, Artificial Sequence
  Synthetic oligonucleotide
cgggtattaaacacagatattgttacggac

SEQ ID NO: 160873 - DNA, 30 bp, Artificial Sequence
  Synthetic oligonucleotide
gcgattcagaaacaattgagttttacggac

SEQ ID NO: 160874 - DNA, 30 bp, Artificial Sequence
  Synthetic oligonucleotide
tggggagcgtgcagggactgaagaccggac

SEQ ID NO: 160875 - DNA, 30 bp, Artificial Sequence
  Synthetic oligonucleotide
cctaaacatcgcacactgctcaagccggac

SEQ ID NO: 160876 - DNA, 30 bp, Artificial Sequence
  Synthetic oligonucleotide
gatgtgtgagcgtagaacacggggtcggac

SEQ ID NO: 160877 - DNA, 30 bp, Artificial Sequence
  Synthetic oligonucleotide
tgagcacgcagaatacttgaggattcggac

SEQ ID NO: 160878 - DNA, 30 bp, Artificial Sequence
  Synthetic oligonucleotide
gtgctgggccagagggtaggttaaagggac

SEQ ID NO: 160879 - DNA, 30 bp, Artificial Sequence
  Synthetic oligonucleotide
tgagattgtaggcctactaggtcaagggac

SEQ ID NO: 160880 - DNA, 30 bp, Artificial Sequence
  Synthetic oligonucleotide
catactggtgggcgtgtctatcacagggac

SEQ ID NO: 160881 - DNA, 30 bp, Artificial Sequence
  Synthetic oligonucleotide
gggccaaagcgtaaccacgttggcagggac

SEQ ID NO: 160882 - DNA, 30 bp, Artificial Sequence
  Synthetic oligonucleotide
aacgaattcaacgtctgaatcatcagggac

SEQ ID NO: 160883 - DNA, 30 bp, Artificial Sequence
  Synthetic oligonucleotide
tctcaaacattgttctgcgtagagagggac

SEQ ID NO: 160884 - DNA, 30 bp, Artificial Sequence
  Synthetic oligonucleotide
aaattagcccaggtttaaatagcgagggac

SEQ ID NO: 160885 - DNA, 30 bp, Artificial Sequence
  Synthetic oligonucleotide
tggcacggcctacagttaatggcgagggac

SEQ ID NO: 160886 - DNA, 30 bp, Artificial Sequence
  Synthetic oligonucleotide
aactaggatgagcgttatgttatccgggac

SEQ ID NO: 160887 - DNA, 30 bp, Artificial Sequence
  Synthetic oligonucleotide
gttacaacaatgtaaagggcaaagcgggac

SEQ ID NO: 160888 - DNA, 30 bp, Artificial Sequence
  Synthetic oligonucleotide
gagacgtccacgagtaatgttctcggggac

SEQ ID NO: 160889 - DNA, 30 bp, Artificial Sequence
  Synthetic oligonucleotide
cgattcaaccaaggacagcgaaggggggac

SEQ ID NO: 160890 - DNA, 30 bp, Artificial Sequence
  Synthetic oligonucleotide
gccaccacggcggtgaaactacatggggac

SEQ ID NO: 160891 - DNA, 30 bp, Artificial Sequence
  Synthetic oligonucleotide
actctccgtcatggcatgagggaatgggac

SEQ ID NO: 160892 - DNA, 30 bp, Artificial Sequence
  Synthetic oligonucleotide
tcgaaaaaacgttaatggagtccatgggac

SEQ ID NO: 160893 - DNA, 30 bp, Artificial Sequence
  Synthetic oligonucleotide
gtacggggcaggatcgtttaatagtgggac

SEQ ID NO: 160894 - DNA, 30 bp, Artificial Sequence
  Synthetic oligonucleotide
gataatggagcagtaacagaggtaatggac

SEQ ID NO: 160895 - DNA, 30 bp, Artificial Sequence
  Synthetic oligonucleotide
accgcatcttcattattcccaaccatggac

SEQ ID NO: 160896 - DNA, 30 bp, Artificial Sequence
  Synthetic oligonucleotide
gtgcggtggacgatgagctagatcatggac

SEQ ID NO: 160897 - DNA, 30 bp, Artificial Sequence
  Synthetic oligonucleotide
atgtatgtaattggttatagtgcgatggac

SEQ ID NO: 160898 - DNA, 30 bp, Artificial Sequence
  Synthetic oligonucleotide
gatggatgtgtttacgcgaatgggatggac

SEQ ID NO: 160899 - DNA, 30 bp, Artificial Sequence
  Synthetic oligonucleotide
cattcgtaggcgcccctgagcagtatggac

SEQ ID NO: 160900 - DNA, 30 bp, Artificial Sequence
  Synthetic oligonucleotide
taatgagcttccaatggtggtaaactggac

SEQ ID NO: 160901 - DNA, 30 bp, Artificial Sequence
  Synthetic oligonucleotide
tgacgggaagaaaaatcagggtaactggac

SEQ ID NO: 160902 - DNA, 30 bp, Artificial Sequence
  Synthetic oligonucleotide
tgaggaaaaatggaagctgctacactggac

SEQ ID NO: 160903 - DNA, 30 bp, Artificial Sequence
  Synthetic oligonucleotide
cgcttcggtagtttcatggtgttactggac

SEQ ID NO: 160904 - DNA, 30 bp, Artificial Sequence
  Synthetic oligonucleotide
cgttggcacactcatggccggaacctggac

SEQ ID NO: 160905 - DNA, 30 bp, Artificial Sequence
  Synthetic oligonucleotide
agattaagtgggactggcataatagtggac

SEQ ID NO: 160906 - DNA, 30 bp, Artificial Sequence
  Synthetic oligonucleotide
cggtccaggtctttccacgtaacggtggac

SEQ ID NO: 160907 - DNA, 30 bp, Artificial Sequence
  Synthetic oligonucleotide
gtaccgcctggaaggagactcacattggac

SEQ ID NO: 160908 - DNA, 30 bp, Artificial Sequence
  Synthetic oligonucleotide
accagccgaagcgctcaccaggtcttggac

SEQ ID NO: 160909 - DNA, 30 bp, Artificial Sequence
  Synthetic oligonucleotide
tccgcgcattaaaaggtggcatgtttggac

SEQ ID NO: 160910 - DNA, 30 bp, Artificial Sequence
  Synthetic oligonucleotide
agtttaaatccgaactagtcccccaatgac

SEQ ID NO: 160911 - DNA, 30 bp, Artificial Sequence
  Synthetic oligonucleotide
aataaggcgctggttatggaagttaatgac

SEQ ID NO: 160912 - DNA, 30 bp, Artificial Sequence
  Synthetic oligonucleotide
aacgtagaggtattacccgcagcacatgac

SEQ ID NO: 160913 - DNA, 30 bp, Artificial Sequence
  Synthetic oligonucleotide
aatacggtcccattgtcagattcacatgac

SEQ ID NO: 160914 - DNA, 30 bp, Artificial Sequence
  Synthetic oligonucleotide
gtgcgatttgaaataagggcaaggcatgac

SEQ ID NO: 160915 - DNA, 30 bp, Artificial Sequence
  Synthetic oligonucleotide
cgcaattgagtccactatgaccaggatgac

SEQ ID NO: 160916 - DNA, 30 bp, Artificial Sequence
  Synthetic oligonucleotide
cgtgtagtgcgagcggacatatcggatgac

SEQ ID NO: 160917 - DNA, 30 bp, Artificial Sequence
  Synthetic oligonucleotide
aggtcatttcacccgtccatagtggatgac

SEQ ID NO: 160918 - DNA, 30 bp, Artificial Sequence
  Synthetic oligonucleotide
atcgttcgaactctcattcgtgcaactgac

SEQ ID NO: 160919 - DNA, 30 bp, Artificial Sequence
  Synthetic oligonucleotide
tgctaggtgttctgaacaaacgccactgac

SEQ ID NO: 160920 - DNA, 30 bp, Artificial Sequence
  Synthetic oligonucleotide
gccgtaggtggggaacgttggaatactgac

SEQ ID NO: 160921 - DNA, 30 bp, Artificial Sequence
  Synthetic oligonucleotide
tcagcgaggtatgtcaggccagaccctgac

SEQ ID NO: 160922 - DNA, 30 bp, Artificial Sequence
  Synthetic oligonucleotide
tgtgcacaataaagtcagtgacagcctgac

SEQ ID NO: 160923 - DNA, 30 bp, Artificial Sequence
  Synthetic oligonucleotide
agtgctgggaagtgggtcttaacgcctgac

SEQ ID NO: 160924 - DNA, 30 bp, Artificial Sequence
  Synthetic oligonucleotide
tttgcgaaccggcggggtcgaggtcctgac

SEQ ID NO: 160925 - DNA, 30 bp, Artificial Sequence
  Synthetic oligonucleotide
cggagaaggcgtcccagcattcgggctgac

SEQ ID NO: 160926 - DNA, 30 bp, Artificial Sequence
  Synthetic oligonucleotide
cgttgaaggatccacggacttagtgctgac

SEQ ID NO: 160927 - DNA, 30 bp, Artificial Sequence
  Synthetic oligonucleotide
ccatgctatacacgtgctgttgttgctgac

SEQ ID NO: 160928 - DNA, 30 bp, Artificial Sequence
  Synthetic oligonucleotide
gcctaccgctcgtgctcaccacactctgac

SEQ ID NO: 160929 - DNA, 30 bp, Artificial Sequence
  Synthetic oligonucleotide
cctgtaccaccgtagaaataggtgtctgac

SEQ ID NO: 160930 - DNA, 30 bp, Artificial Sequence
  Synthetic oligonucleotide
accggatcagttctcggatgaataagtgac

SEQ ID NO: 160931 - DNA, 30 bp, Artificial Sequence
  Synthetic oligonucleotide
gacttccgataagaaataggtataagtgac

SEQ ID NO: 160932 - DNA, 30 bp, Artificial Sequence
  Synthetic oligonucleotide
cgttgggtaggacagcgatattaccgtgac

SEQ ID NO: 160933 - DNA, 30 bp, Artificial Sequence
  Synthetic oligonucleotide
acaccacagtgcaacaggaacgtccgtgac

SEQ ID NO: 160934 - DNA, 30 bp, Artificial Sequence
  Synthetic oligonucleotide
gctatcgtaacctttgcggagctgcgtgac

SEQ ID NO: 160935 - DNA, 30 bp, Artificial Sequence
  Synthetic oligonucleotide
agagtttcccgacttttcgatttaggtgac

SEQ ID NO: 160936 - DNA, 30 bp, Artificial Sequence
  Synthetic oligonucleotide
cgatcagtgtagaaatctaatgttggtgac

SEQ ID NO: 160937 - DNA, 30 bp, Artificial Sequence
  Synthetic oligonucleotide
aggttctctacgacataaaagaaaattgac

SEQ ID NO: 160938 - DNA, 30 bp, Artificial Sequence
  Synthetic oligonucleotide
aaaagctgcggacctggttaaagaattgac

SEQ ID NO: 160939 - DNA, 30 bp, Artificial Sequence
  Synthetic oligonucleotide
agtgcaacgaccaatagtaagagaattgac

SEQ ID NO: 160940 - DNA, 30 bp, Artificial Sequence
  Synthetic oligonucleotide
tgctacgacatgataggtatgaacattgac

SEQ ID NO: 160941 - DNA, 30 bp, Artificial Sequence
  Synthetic oligonucleotide
atgtcacttgataccacaacagacattgac

SEQ ID NO: 160942 - DNA, 30 bp, Artificial Sequence
  Synthetic oligonucleotide
gatactcttctaaagagcaggtacattgac

SEQ ID NO: 160943 - DNA, 30 bp, Artificial Sequence
  Synthetic oligonucleotide
ccggagtcatgggcaaatccgcgcattgac

SEQ ID NO: 160944 - DNA, 30 bp, Artificial Sequence
  Synthetic oligonucleotide
tggctgaactgatcacagcgaaagattgac

SEQ ID NO: 160945 - DNA, 30 bp, Artificial Sequence
  Synthetic oligonucleotide
gctacgcaaagaaactaagtccgtattgac

SEQ ID NO: 160946 - DNA, 30 bp, Artificial Sequence
  Synthetic oligonucleotide
gtcggtcccgaatcgagaattagtcttgac

SEQ ID NO: 160947 - DNA, 30 bp, Artificial Sequence
  Synthetic oligonucleotide
ggaagtagccgagatgccttgaaggttgac

SEQ ID NO: 160948 - DNA, 30 bp, Artificial Sequence
  Synthetic oligonucleotide
ggaaacccgtgcatctagcgaacggttgac

SEQ ID NO: 160949 - DNA, 30 bp, Artificial Sequence
  Synthetic oligonucleotide
ttacagtatttagaatcggaaaggtttgac

SEQ ID NO: 160950 - DNA, 30 bp, Artificial Sequence
  Synthetic oligonucleotide
actggcattggctggcaatcagcgaaatac

SEQ ID NO: 160951 - DNA, 30 bp, Artificial Sequence
  Synthetic oligonucleotide
caggaataggattctgctgctctgaaatac

SEQ ID NO: 160952 - DNA, 30 bp, Artificial Sequence
  Synthetic oligonucleotide
ccgggaggaagatccagcacccataaatac

SEQ ID NO: 160953 - DNA, 30 bp, Artificial Sequence
  Synthetic oligonucleotide
acggattagacggaggtagtcccacaatac

SEQ ID NO: 160954 - DNA, 30 bp, Artificial Sequence
  Synthetic oligonucleotide
ttcgccggcggatcgatagtcagacaatac

SEQ ID NO: 160955 - DNA, 30 bp, Artificial Sequence
  Synthetic oligonucleotide
ttgcttgggacgaaggcgcataggcaatac

SEQ ID NO: 160956 - DNA, 30 bp, Artificial Sequence
  Synthetic oligonucleotide
aaaaaacggatggcatgaaaagggcaatac

SEQ ID NO: 160957 - DNA, 30 bp, Artificial Sequence
  Synthetic oligonucleotide
cgacacaagccacaattcatagacgaatac

SEQ ID NO: 160958 - DNA, 30 bp, Artificial Sequence
  Synthetic oligonucleotide
gaggagatgtaccctatcttgcccgaatac

SEQ ID NO: 160959 - DNA, 30 bp, Artificial Sequence
  Synthetic oligonucleotide
ccgggacgacggcgtttttaggtcgaatac

SEQ ID NO: 160960 - DNA, 30 bp, Artificial Sequence
  Synthetic oligonucleotide
gcctagcttctgccagccgtcaaggaatac

SEQ ID NO: 160961 - DNA, 30 bp, Artificial Sequence
  Synthetic oligonucleotide
tctccgggtatacgatgaactatggaatac

SEQ ID NO: 160962 - DNA, 30 bp, Artificial Sequence
  Synthetic oligonucleotide
tcgggggcataattacttcgtgtggaatac

SEQ ID NO: 160963 - DNA, 30 bp, Artificial Sequence
  Synthetic oligonucleotide
tagagtagcccgtcgactaacttggaatac

SEQ ID NO: 160964 - DNA, 30 bp, Artificial Sequence
  Synthetic oligonucleotide
ggatcctttaatgctacgattactgaatac

SEQ ID NO: 160965 - DNA, 30 bp, Artificial Sequence
  Synthetic oligonucleotide
acaataacgaagcggaggggtaaaacatac

SEQ ID NO: 160966 - DNA, 30 bp, Artificial Sequence
  Synthetic oligonucleotide
ctccggcctagcacataagggagtacatac

SEQ ID NO: 160967 - DNA, 30 bp, Artificial Sequence
  Synthetic oligonucleotide
aagactgcactgccgttggctaccccatac

SEQ ID NO: 160968 - DNA, 30 bp, Artificial Sequence
  Synthetic oligonucleotide
catagaacggtggatagatatccagcatac

SEQ ID NO: 160969 - DNA, 30 bp, Artificial Sequence
  Synthetic oligonucleotide
gggctgccatcacagcaacatcacgcatac

SEQ ID NO: 160970 - DNA, 30 bp, Artificial Sequence
  Synthetic oligonucleotide
agaggggacagttctttttgatctgcatac

SEQ ID NO: 160971 - DNA, 30 bp, Artificial Sequence
  Synthetic oligonucleotide
ggggattgtgagtggagtccctaatcatac

SEQ ID NO: 160972 - DNA, 30 bp, Artificial Sequence
  Synthetic oligonucleotide
gcggcctgaagaccatgtacgcgatcatac

SEQ ID NO: 160973 - DNA, 30 bp, Artificial Sequence
  Synthetic oligonucleotide
acctagccccccagagttaccagttcatac

SEQ ID NO: 160974 - DNA, 30 bp, Artificial Sequence
  Synthetic oligonucleotide
atcacacgtctctcattaccctgcagatac

SEQ ID NO: 160975 - DNA, 30 bp, Artificial Sequence
  Synthetic oligonucleotide
cgggcctatattctcgtaatgagtagatac

SEQ ID NO: 160976 - DNA, 30 bp, Artificial Sequence
  Synthetic oligonucleotide
gaacccggcccgactgtgcgtcatggatac

SEQ ID NO: 160977 - DNA, 30 bp, Artificial Sequence
  Synthetic oligonucleotide
caaaagaaccttgtttcagccggtggatac

SEQ ID NO: 160978 - DNA, 30 bp, Artificial Sequence
  Synthetic oligonucleotide
gtggggcggcttaaatgtcaaaactgatac

SEQ ID NO: 160979 - DNA, 30 bp, Artificial Sequence
  Synthetic oligonucleotide
ggcgagcgaggtgttaaagtagcctgatac

SEQ ID NO: 160980 - DNA, 30 bp, Artificial Sequence
  Synthetic oligonucleotide
agtctagtgcgcaatgagaacaattgatac

SEQ ID NO: 160981 - DNA, 30 bp, Artificial Sequence
  Synthetic oligonucleotide
gtctggtgtcggctgtacatcggaatatac

SEQ ID NO: 160982 - DNA, 30 bp, Artificial Sequence
  Synthetic oligonucleotide
acgagctaacaacaaacataatctatatac

SEQ ID NO: 160983 - DNA, 30 bp, Artificial Sequence
  Synthetic oligonucleotide
gatcgagacggattgaccaacggtctatac

SEQ ID NO: 160984 - DNA, 30 bp, Artificial Sequence
  Synthetic oligonucleotide
gtcatgggaaccaatcgattggcagtatac

SEQ ID NO: 160985 - DNA, 30 bp, Artificial Sequence
  Synthetic oligonucleotide
gaggggaattacgtctcggggccggtatac

SEQ ID NO: 160986 - DNA, 30 bp, Artificial Sequence
  Synthetic oligonucleotide
gtgtttgagggacaggcgagagaattatac

SEQ ID NO: 160987 - DNA, 30 bp, Artificial Sequence
  Synthetic oligonucleotide
cgagagctgtactcctaaccataattatac

SEQ ID NO: 160988 - DNA, 30 bp, Artificial Sequence
  Synthetic oligonucleotide
ggctcgtttaaacactttagccagttatac

SEQ ID NO: 160989 - DNA, 30 bp, Artificial Sequence
  Synthetic oligonucleotide
atagagaccttacgtgcacaggatttatac

SEQ ID NO: 160990 - DNA, 30 bp, Artificial Sequence
  Synthetic oligonucleotide
atatgatcgacaggtgcgcaagtgaactac

SEQ ID NO: 160991 - DNA, 30 bp, Artificial Sequence
  Synthetic oligonucleotide
caacgctgattagatgaacactggcactac

SEQ ID NO: 160992 - DNA, 30 bp, Artificial Sequence
  Synthetic oligonucleotide
atcatggaccgtacgagattgcgtcactac

SEQ ID NO: 160993 - DNA, 30 bp, Artificial Sequence
  Synthetic oligonucleotide
cggtgatgtacagcagctgtccttcactac

SEQ ID NO: 160994 - DNA, 30 bp, Artificial Sequence
  Synthetic oligonucleotide
ggaccacgacgactgaggccattcgactac

SEQ ID NO: 160995 - DNA, 30 bp, Artificial Sequence
  Synthetic oligonucleotide
ggcaatggtcacctgaccgtccaggactac

SEQ ID NO: 160996 - DNA, 30 bp, Artificial Sequence
  Synthetic oligonucleotide
ctcgagtatacctatacgctatgatactac

SEQ ID NO: 160997 - DNA, 31 bp, Artificial Sequence
  Synthetic oligonucleotide
tctcgcaaggcgtatcaagctcaggacctac

SEQ ID NO: 160998 - DNA, 30 bp, Artificial Sequence
  Synthetic oligonucleotide
caaaaaactacctaccgcactgggacctac

SEQ ID NO: 160999 - DNA, 30 bp, Artificial Sequence
  Synthetic oligonucleotide
cggcctaaggagcaatactgaattacctac

SEQ ID NO: 161000 - DNA, 30 bp, Artificial Sequence
  Synthetic oligonucleotide
gattctggaagaagatattacgcgccctac

SEQ ID NO: 161001 - DNA, 30 bp, Artificial Sequence
  Synthetic oligonucleotide
atggacagtgcgtcatagcaccggccctac

SEQ ID NO: 161002 - DNA, 30 bp, Artificial Sequence
  Synthetic oligonucleotide
ggtcagatagctccagcaacgacagcctac

SEQ ID NO: 161003 - DNA, 30 bp, Artificial Sequence
  Synthetic oligonucleotide
ccgcctgctcttaacgaaaaacttgcctac

SEQ ID NO: 161004 - DNA, 30 bp, Artificial Sequence
  Synthetic oligonucleotide
atcatagggaagagtaggggtttgtcctac

SEQ ID NO: 161005 - DNA, 30 bp, Artificial Sequence
  Synthetic oligonucleotide
taattggaaaattagtcgtacacttcctac

SEQ ID NO: 161006 - DNA, 30 bp, Artificial Sequence
  Synthetic oligonucleotide
gttcgaaaggtgtgtaagtactgaagctac

SEQ ID NO: 161007 - DNA, 30 bp, Artificial Sequence
  Synthetic oligonucleotide
gtcaacacaaactgagcaagcttaagctac

SEQ ID NO: 161008 - DNA, 30 bp, Artificial Sequence
  Synthetic oligonucleotide
aacgcggctatacagcggatggacagctac

SEQ ID NO: 161009 - DNA, 30 bp, Artificial Sequence
  Synthetic oligonucleotide
cgctaaacggtaccgggttgccatagctac

SEQ ID NO: 161010 - DNA, 30 bp, Artificial Sequence
  Synthetic oligonucleotide
tagtcaaaagagactacggagttccgctac

SEQ ID NO: 161011 - DNA, 30 bp, Artificial Sequence
  Synthetic oligonucleotide
atcggggtagatctaaatatccagcgctac

SEQ ID NO: 161012 - DNA, 30 bp, Artificial Sequence
  Synthetic oligonucleotide
gggcactcagatatagggaggaagggctac

SEQ ID NO: 161013 - DNA, 30 bp, Artificial Sequence
  Synthetic oligonucleotide
agtgtcagtggggtatgaacatggggctac

SEQ ID NO: 161014 - DNA, 30 bp, Artificial Sequence
  Synthetic oligonucleotide
gtctcgttcgtagtcttgtgagctggctac

SEQ ID NO: 161015 - DNA, 30 bp, Artificial Sequence
  Synthetic oligonucleotide
tggtaaatcttaactttctgactatgctac

SEQ ID NO: 161016 - DNA, 30 bp, Artificial Sequence
  Synthetic oligonucleotide
cctccaatgtacataagcaaggacatctac

SEQ ID NO: 161017 - DNA, 30 bp, Artificial Sequence
  Synthetic oligonucleotide
gctctaacgtaggctgagtaccggatctac

SEQ ID NO: 161018 - DNA, 30 bp, Artificial Sequence
  Synthetic oligonucleotide
tacacgactttcaaattgttcttgatctac

SEQ ID NO: 161019 - DNA, 30 bp, Artificial Sequence
  Synthetic oligonucleotide
ttaggaatacggctaaccgaggtactctac

SEQ ID NO: 161020 - DNA, 30 bp, Artificial Sequence
  Synthetic oligonucleotide
ttgatgtccaggtcctatcgtgtagtctac

SEQ ID NO: 161021 - DNA, 30 bp, Artificial Sequence
  Synthetic oligonucleotide
aggccgacaaagccgccccaataggtctac

SEQ ID NO: 161022 - DNA, 30 bp, Artificial Sequence
  Synthetic oligonucleotide
taacgggacggtatattagcccatgtctac

SEQ ID NO: 161023 - DNA, 30 bp, Artificial Sequence
  Synthetic oligonucleotide
gtaggagcacagatcgcaggtacaaagtac

SEQ ID NO: 161024 - DNA, 30 bp, Artificial Sequence
  Synthetic oligonucleotide
gctcccatttcaacatgattgcgaaagtac

SEQ ID NO: 161025 - DNA, 30 bp, Artificial Sequence
  Synthetic oligonucleotide
ccaatgaaactaaaaggtagcataaagtac

SEQ ID NO: 161026 - DNA, 30 bp, Artificial Sequence
  Synthetic oligonucleotide
atgaatgccgtggcgggaagtaataagtac

SEQ ID NO: 161027 - DNA, 30 bp, Artificial Sequence
  Synthetic oligonucleotide
gggattaagagtgtttgcggaactaagtac

SEQ ID NO: 161028 - DNA, 30 bp, Artificial Sequence
  Synthetic oligonucleotide
tacggttagtcgtaggacaatatacagtac

SEQ ID NO: 161029 - DNA, 30 bp, Artificial Sequence
  Synthetic oligonucleotide
tcgctgaacacgatgaccaataaccagtac

SEQ ID NO: 161030 - DNA, 30 bp, Artificial Sequence
  Synthetic oligonucleotide
cttatgcgaccagcaccgtagagagagtac

SEQ ID NO: 161031 - DNA, 30 bp, Artificial Sequence
  Synthetic oligonucleotide
gtcaacaatggccccttgtataccgagtac

SEQ ID NO: 161032 - DNA, 30 bp, Artificial Sequence
  Synthetic oligonucleotide
cggttgggttagacgggggtagctgagtac

SEQ ID NO: 161033 - DNA, 30 bp, Artificial Sequence
  Synthetic oligonucleotide
tatatcgagaagcaaaatacaggtgagtac

SEQ ID NO: 161034 - DNA, 30 bp, Artificial Sequence
  Synthetic oligonucleotide
ggccgctgttttgacaccctatgctagtac

SEQ ID NO: 161035 - DNA, 30 bp, Artificial Sequence
  Synthetic oligonucleotide
gtcactcaggttaaggagcgatcaacgtac

SEQ ID NO: 161036 - DNA, 30 bp, Artificial Sequence
  Synthetic oligonucleotide
atcgaacatttggccaatggcagaacgtac

SEQ ID NO: 161037 - DNA, 30 bp, Artificial Sequence
  Synthetic oligonucleotide
cagagcattggtccatcgacatccacgtac

SEQ ID NO: 161038 - DNA, 30 bp, Artificial Sequence
  Synthetic oligonucleotide
gcggcaaaatcgcgttcggacaacccgtac

SEQ ID NO: 161039 - DNA, 30 bp, Artificial Sequence
  Synthetic oligonucleotide
ataaaagttgagccggaagatatgccgtac

SEQ ID NO: 161040 - DNA, 30 bp, Artificial Sequence
  Synthetic oligonucleotide
ctaatacaagagttgaggcccaatccgtac

SEQ ID NO: 161041 - DNA, 30 bp, Artificial Sequence
  Synthetic oligonucleotide
gcttagccgaaaattacggatgatccgtac

SEQ ID NO: 161042 - DNA, 30 bp, Artificial Sequence
  Synthetic oligonucleotide
taggtggcatttagcgagcgttaagcgtac

SEQ ID NO: 161043 - DNA, 30 bp, Artificial Sequence
  Synthetic oligonucleotide
ttgaaaccatcggatacaacatcagcgtac

SEQ ID NO: 161044 - DNA, 30 bp, Artificial Sequence
  Synthetic oligonucleotide
tattctgggtgggatccaagtttagcgtac

SEQ ID NO: 161045 - DNA, 30 bp, Artificial Sequence
  Synthetic oligonucleotide
ccttggtcccaagaaaactcgcacgcgtac

SEQ ID NO: 161046 - DNA, 30 bp, Artificial Sequence
  Synthetic oligonucleotide
gacttcaccacaagagcattcgcatcgtac

SEQ ID NO: 161047 - DNA, 30 bp, Artificial Sequence
  Synthetic oligonucleotide
gatagcattgtcacgggccaaggcaggtac

SEQ ID NO: 161048 - DNA, 29 bp, Artificial Sequence
  Synthetic oligonucleotide
ttagcgaatgcgtgagtccatataggtac

SEQ ID NO: 161049 - DNA, 30 bp, Artificial Sequence
  Synthetic oligonucleotide
ccagaggtggcaaccagactttgacggtac

SEQ ID NO: 161050 - DNA, 30 bp, Artificial Sequence
  Synthetic oligonucleotide
atagccacacacccatatgagagccggtac

SEQ ID NO: 161051 - DNA, 30 bp, Artificial Sequence
  Synthetic oligonucleotide
cagagtcgatctgcccaaaagtatcggtac

SEQ ID NO: 161052 - DNA, 30 bp, Artificial Sequence
  Synthetic oligonucleotide
tcaattgcgatgtttcaggggggtcggtac

SEQ ID NO: 161053 - DNA, 30 bp, Artificial Sequence
  Synthetic oligonucleotide
atactcgacgttacgggtgcatgagggtac

SEQ ID NO: 161054 - DNA, 30 bp, Artificial Sequence
  Synthetic oligonucleotide
ttggcggattaggtgcaactgacggggtac

SEQ ID NO: 161055 - DNA, 30 bp, Artificial Sequence
  Synthetic oligonucleotide
aggggagtataagcgtatatcggggggtac

SEQ ID NO: 161056 - DNA, 30 bp, Artificial Sequence
  Synthetic oligonucleotide
ctagtgagatggttatgataacgtgggtac

SEQ ID NO: 161057 - DNA, 30 bp, Artificial Sequence
  Synthetic oligonucleotide
aggaaatggtccccatacgctattgggtac

SEQ ID NO: 161058 - DNA, 30 bp, Artificial Sequence
  Synthetic oligonucleotide
tacaaacctagcgtaagcatacactggtac

SEQ ID NO: 161059 - DNA, 30 bp, Artificial Sequence
  Synthetic oligonucleotide
ggtacgaatcccgcacataggctcatgtac

SEQ ID NO: 161060 - DNA, 30 bp, Artificial Sequence
  Synthetic oligonucleotide
acagtggttaacggaccgggccagatgtac

SEQ ID NO: 161061 - DNA, 30 bp, Artificial Sequence
  Synthetic oligonucleotide
ggcgggctgaatagaccccgcatgatgtac

SEQ ID NO: 161062 - DNA, 30 bp, Artificial Sequence
  Synthetic oligonucleotide
cccaggcattggctggtgctacgtatgtac

SEQ ID NO: 161063 - DNA, 30 bp, Artificial Sequence
  Synthetic oligonucleotide
cgcaacacagcatattacagtcgtatgtac

SEQ ID NO: 161064 - DNA, 30 bp, Artificial Sequence
  Synthetic oligonucleotide
ttccaacagcacactagcaacatactgtac

SEQ ID NO: 161065 - DNA, 30 bp, Artificial Sequence
  Synthetic oligonucleotide
tggcaccacgaatttgcggagtgcctgtac

SEQ ID NO: 161066 - DNA, 30 bp, Artificial Sequence
  Synthetic oligonucleotide
ggttaccatatctgctaatcatcgctgtac

SEQ ID NO: 161067 - DNA, 30 bp, Artificial Sequence
  Synthetic oligonucleotide
gatagggcggtatgaatcaaaaatctgtac

SEQ ID NO: 161068 - DNA, 30 bp, Artificial Sequence
  Synthetic oligonucleotide
ggggcatgttcaactccgtccccagtgtac

SEQ ID NO: 161069 - DNA, 30 bp, Artificial Sequence
  Synthetic oligonucleotide
aaacaagtcaatgatgccgaaatggtgtac

SEQ ID NO: 161070 - DNA, 30 bp, Artificial Sequence
  Synthetic oligonucleotide
gacaaccaaaactattcggacatggtgtac

SEQ ID NO: 161071 - DNA, 30 bp, Artificial Sequence
  Synthetic oligonucleotide
tgcaattctatttcgacgagtagtgtgtac

SEQ ID NO: 161072 - DNA, 30 bp, Artificial Sequence
  Synthetic oligonucleotide
aggggcgggtagcgcatagagtttgtgtac

SEQ ID NO: 161073 - DNA, 30 bp, Artificial Sequence
  Synthetic oligonucleotide
acgactaccgttcgggtcgcctcgaattac

SEQ ID NO: 161074 - DNA, 30 bp, Artificial Sequence
  Synthetic oligonucleotide
aactccacgtgtatggagaaggggaattac

SEQ ID NO: 161075 - DNA, 30 bp, Artificial Sequence
  Synthetic oligonucleotide
tggcggcgttaaagttggaaatctaattac

SEQ ID NO: 161076 - DNA, 30 bp, Artificial Sequence
  Synthetic oligonucleotide
tagatagagcaaatgcatgtatctaattac

SEQ ID NO: 161077 - DNA, 30 bp, Artificial Sequence
  Synthetic oligonucleotide
gcacgagaccggaaggatatataacattac

SEQ ID NO: 161078 - DNA, 30 bp, Artificial Sequence
  Synthetic oligonucleotide
ttaccagtcgagatccaatgaaaatattac

SEQ ID NO: 161079 - DNA, 30 bp, Artificial Sequence
  Synthetic oligonucleotide
tggctttacaacggtaattggtagtattac

SEQ ID NO: 161080 - DNA, 30 bp, Artificial Sequence
  Synthetic oligonucleotide
cgagttcatgttatgttacggcattattac

SEQ ID NO: 161081 - DNA, 30 bp, Artificial Sequence
  Synthetic oligonucleotide
cagagaatgcgagatgcggacggttattac

SEQ ID NO: 161082 - DNA, 30 bp, Artificial Sequence
  Synthetic oligonucleotide
taccgtctaaaccattgtgaaacaacttac

SEQ ID NO: 161083 - DNA, 30 bp, Artificial Sequence
  Synthetic oligonucleotide
tggtgcgcgctcgaatatagccagccttac

SEQ ID NO: 161084 - DNA, 30 bp, Artificial Sequence
  Synthetic oligonucleotide
tctgcggcaacgttataaggcaaagcttac

SEQ ID NO: 161085 - DNA, 30 bp, Artificial Sequence
  Synthetic oligonucleotide
ggacgccactcacgtcctgtgctagcttac

SEQ ID NO: 161086 - DNA, 31 bp, Artificial Sequence
  Synthetic oligonucleotide
cgtccccgacggcgctgagcatgccgcttac

SEQ ID NO: 161087 - DNA, 30 bp, Artificial Sequence
  Synthetic oligonucleotide
agaggtctcagtgtcgctacggaatcttac

SEQ ID NO: 161088 - DNA, 30 bp, Artificial Sequence
  Synthetic oligonucleotide
tagcacacctggatgagtaagttatcttac

SEQ ID NO: 161089 - DNA, 30 bp, Artificial Sequence
  Synthetic oligonucleotide
gactgtcaagagttcaacgttagaagttac

SEQ ID NO: 161090 - DNA, 30 bp, Artificial Sequence
  Synthetic oligonucleotide
accagcgtatcgaatgtagcgcgaagttac

SEQ ID NO: 161091 - DNA, 30 bp, Artificial Sequence
  Synthetic oligonucleotide
gatacccccatgccacgaatctgcagttac

SEQ ID NO: 161092 - DNA, 30 bp, Artificial Sequence
  Synthetic oligonucleotide
ttaacgaagaagatgcgatcggatagttac

SEQ ID NO: 161093 - DNA, 30 bp, Artificial Sequence
  Synthetic oligonucleotide
aagtataagattaaattaccataaggttac

SEQ ID NO: 161094 - DNA, 30 bp, Artificial Sequence
  Synthetic oligonucleotide
aggtctccgcgcaaggggggtaagggttac

SEQ ID NO: 161095 - DNA, 30 bp, Artificial Sequence
  Synthetic oligonucleotide
tgaggtaaaagacgtaaggtaacgggttac

SEQ ID NO: 161096 - DNA, 31 bp, Artificial Sequence
  Synthetic oligonucleotide
atcctgaattgagtggaggtcagatggttac

SEQ ID NO: 161097 - DNA, 30 bp, Artificial Sequence
  Synthetic oligonucleotide
aacgccaactcgtccatccatcgatgttac

SEQ ID NO: 161098 - DNA, 30 bp, Artificial Sequence
  Synthetic oligonucleotide
gacatagtgaactcatcacgatattgttac

SEQ ID NO: 161099 - DNA, 30 bp, Artificial Sequence
  Synthetic oligonucleotide
ccacgtacagcacctccgtacatcatttac

SEQ ID NO: 161100 - DNA, 30 bp, Artificial Sequence
  Synthetic oligonucleotide
aactgagtatgtcgtccgaccgggatttac

SEQ ID NO: 161101 - DNA, 30 bp, Artificial Sequence
  Synthetic oligonucleotide
tagtactgcggtaagttagtttatatttac

SEQ ID NO: 161102 - DNA, 30 bp, Artificial Sequence
  Synthetic oligonucleotide
agagtgatactacacgtgttatgtatttac

SEQ ID NO: 161103 - DNA, 30 bp, Artificial Sequence
  Synthetic oligonucleotide
agagaggctcgtcagcgttatcgactttac

SEQ ID NO: 161104 - DNA, 30 bp, Artificial Sequence
  Synthetic oligonucleotide
agtatgccttacagcggataccggctttac

SEQ ID NO: 161105 - DNA, 30 bp, Artificial Sequence
  Synthetic oligonucleotide
gccgatgtgaatgtgaagtgtctgttttac

SEQ ID NO: 161106 - DNA, 30 bp, Artificial Sequence
  Synthetic oligonucleotide
ttgggatgccgctctttctgagtgttttac

SEQ ID NO: 161107 - DNA, 30 bp, Artificial Sequence
  Synthetic oligonucleotide
gtctgggcgggaactggggcgtaaaaaacc

SEQ ID NO: 161108 - DNA, 30 bp, Artificial Sequence
  Synthetic oligonucleotide
aggtggtctcaatccggtcgcaacaaaacc

SEQ ID NO: 161109 - DNA, 30 bp, Artificial Sequence
  Synthetic oligonucleotide
gtccatgtcagggtgagcacgaacaaaacc

SEQ ID NO: 161110 - DNA, 30 bp, Artificial Sequence
  Synthetic oligonucleotide
ctgagagtgttccctaggacatagaaaacc

SEQ ID NO: 161111 - DNA, 30 bp, Artificial Sequence
  Synthetic oligonucleotide
tccgacaaaaagactcgagaccctaaaacc

SEQ ID NO: 161112 - DNA, 30 bp, Artificial Sequence
  Synthetic oligonucleotide
catcgtgtccgccaacagctctaccaaacc

SEQ ID NO: 161113 - DNA, 30 bp, Artificial Sequence
  Synthetic oligonucleotide
tctaggagtcccccttattgagtgcaaacc

SEQ ID NO: 161114 - DNA, 30 bp, Artificial Sequence
  Synthetic oligonucleotide
gggctaactctgtgcttaacggctcaaacc

SEQ ID NO: 161115 - DNA, 30 bp, Artificial Sequence
  Synthetic oligonucleotide
tgcagcaatatacaaatagaaggtcaaacc

SEQ ID NO: 161116 - DNA, 30 bp, Artificial Sequence
  Synthetic oligonucleotide
tgacagtagttaggagacatgcttcaaacc

SEQ ID NO: 161117 - DNA, 30 bp, Artificial Sequence
  Synthetic oligonucleotide
cgtatgaccgctacgtcgtctgtataaacc

SEQ ID NO: 161118 - DNA, 30 bp, Artificial Sequence
  Synthetic oligonucleotide
acatccactatcggttgattctagtaaacc

SEQ ID NO: 161119 - DNA, 30 bp, Artificial Sequence
  Synthetic oligonucleotide
gacaatcgtcctacaaaagagttttaaacc

SEQ ID NO: 161120 - DNA, 30 bp, Artificial Sequence
  Synthetic oligonucleotide
agcagagcccctctgcgaggatcaacaacc

SEQ ID NO: 161121 - DNA, 30 bp, Artificial Sequence
  Synthetic oligonucleotide
tgtggatgggtaagggataagagaacaacc

SEQ ID NO: 161122 - DNA, 30 bp, Artificial Sequence
  Synthetic oligonucleotide
atgggcccctcagtgcaaaggaacacaacc

SEQ ID NO: 161123 - DNA, 30 bp, Artificial Sequence
  Synthetic oligonucleotide
gcagcggcacagggacagggctacacaacc

SEQ ID NO: 161124 - DNA, 30 bp, Artificial Sequence
  Synthetic oligonucleotide
cggaagctcgattaaaagaagccgacaacc

SEQ ID NO: 161125 - DNA, 30 bp, Artificial Sequence
  Synthetic oligonucleotide
tctggagacaaccggctgtgcaaagcaacc

SEQ ID NO: 161126 - DNA, 30 bp, Artificial Sequence
  Synthetic oligonucleotide
tttgtgaagtagtatacagtgagagcaacc

SEQ ID NO: 161127 - DNA, 30 bp, Artificial Sequence
  Synthetic oligonucleotide
ttccggaccattgaggtaacctgcgcaacc

SEQ ID NO: 161128 - DNA, 30 bp, Artificial Sequence
  Synthetic oligonucleotide
cgaaacaacgatgttttacgtacggcaacc

SEQ ID NO: 161129 - DNA, 30 bp, Artificial Sequence
  Synthetic oligonucleotide
atacatatagcccaatgggactgggcaacc

SEQ ID NO: 161130 - DNA, 30 bp, Artificial Sequence
  Synthetic oligonucleotide
tgacacagggcgtttactccaggtgcaacc

SEQ ID NO: 161131 - DNA, 30 bp, Artificial Sequence
  Synthetic oligonucleotide
agtgtcaaatggatagcagggaactcaacc

SEQ ID NO: 161132 - DNA, 30 bp, Artificial Sequence
  Synthetic oligonucleotide
ggtgccgaagtcgtccttaaattctcaacc

SEQ ID NO: 161133 - DNA, 30 bp, Artificial Sequence
  Synthetic oligonucleotide
ctcggtcacccgttggaagatcggtcaacc

SEQ ID NO: 161134 - DNA, 30 bp, Artificial Sequence
  Synthetic oligonucleotide
gaaagaagttactaaattctcatcagaacc

SEQ ID NO: 161135 - DNA, 30 bp, Artificial Sequence
  Synthetic oligonucleotide
cgctaagcccagtcattcattcggagaacc

SEQ ID NO: 161136 - DNA, 30 bp, Artificial Sequence
  Synthetic oligonucleotide
actcgaaatgggcatgaagtatttagaacc

SEQ ID NO: 161137 - DNA, 30 bp, Artificial Sequence
  Synthetic oligonucleotide
tgtctacagttaagcaagttagaacgaacc

SEQ ID NO: 161138 - DNA, 30 bp, Artificial Sequence
  Synthetic oligonucleotide
ggatcatccttggaactaaccagccgaacc

SEQ ID NO: 161139 - DNA, 30 bp, Artificial Sequence
  Synthetic oligonucleotide
cctgctaacctcccgcccgtcatccgaacc

SEQ ID NO: 161140 - DNA, 30 bp, Artificial Sequence
  Synthetic oligonucleotide
ctccacgacaagatttgcgccgcgcgaacc

SEQ ID NO: 161141 - DNA, 30 bp, Artificial Sequence
  Synthetic oligonucleotide
atatggagttgggtagaatccaatcgaacc

SEQ ID NO: 161142 - DNA, 30 bp, Artificial Sequence
  Synthetic oligonucleotide
cattcgactgcttagcatacgagtcgaacc

SEQ ID NO: 161143 - DNA, 30 bp, Artificial Sequence
  Synthetic oligonucleotide
tcgatgtatcttgttacctcaaacggaacc

SEQ ID NO: 161144 - DNA, 30 bp, Artificial Sequence
  Synthetic oligonucleotide
taaatatcagatgtcagaggggacggaacc

SEQ ID NO: 161145 - DNA, 30 bp, Artificial Sequence
  Synthetic oligonucleotide
tccaatggagctgatcacaaatcgggaacc

SEQ ID NO: 161146 - DNA, 30 bp, Artificial Sequence
  Synthetic oligonucleotide
aataaggccgagtgaacaatcgggggaacc

SEQ ID NO: 161147 - DNA, 30 bp, Artificial Sequence
  Synthetic oligonucleotide
tgatttaacggtgaaacacgggcatgaacc

SEQ ID NO: 161148 - DNA, 30 bp, Artificial Sequence
  Synthetic oligonucleotide
ggccggaacggggacagtgactactgaacc

SEQ ID NO: 161149 - DNA, 30 bp, Artificial Sequence
  Synthetic oligonucleotide
atccgcaacgaactccaagttcgaataacc

SEQ ID NO: 161150 - DNA, 30 bp, Artificial Sequence
  Synthetic oligonucleotide
ggtaatgacgtcattctagtaaatataacc

SEQ ID NO: 161151 - DNA, 30 bp, Artificial Sequence
  Synthetic oligonucleotide
tcctcagaaattccccagtacgttataacc

SEQ ID NO: 161152 - DNA, 30 bp, Artificial Sequence
  Synthetic oligonucleotide
aagttcgtataacgaatagtgcctctaacc

SEQ ID NO: 161153 - DNA, 30 bp, Artificial Sequence
  Synthetic oligonucleotide
tgtaaagagctatcaacggtctcagtaacc

SEQ ID NO: 161154 - DNA, 30 bp, Artificial Sequence
  Synthetic oligonucleotide
cgcgaaagcggcgtatccgtgagggtaacc

SEQ ID NO: 161155 - DNA, 30 bp, Artificial Sequence
  Synthetic oligonucleotide
cgaggacgagactcaaaggtatgggtaacc

SEQ ID NO: 161156 - DNA, 30 bp, Artificial Sequence
  Synthetic oligonucleotide
gtaggggtaaccaagagtcaacctgtaacc

SEQ ID NO: 161157 - DNA, 30 bp, Artificial Sequence
  Synthetic oligonucleotide
actccaatcatgtttgaggattgattaacc

SEQ ID NO: 161158 - DNA, 30 bp, Artificial Sequence
  Synthetic oligonucleotide
gaaggactacatagaattattaagttaacc

SEQ ID NO: 161159 - DNA, 30 bp, Artificial Sequence
  Synthetic oligonucleotide
tcgaaaaactttatgcggtaaaaacacacc

SEQ ID NO: 161160 - DNA, 30 bp, Artificial Sequence
  Synthetic oligonucleotide
atgtggagtcatagtccatgagaccacacc

SEQ ID NO: 161161 - DNA, 30 bp, Artificial Sequence
  Synthetic oligonucleotide
tatagcactaattcgctcggattgcacacc

SEQ ID NO: 161162 - DNA, 30 bp, Artificial Sequence
  Synthetic oligonucleotide
acattgggcaaattaaacaattaagacacc

SEQ ID NO: 161163 - DNA, 30 bp, Artificial Sequence
  Synthetic oligonucleotide
ggtatgaggtcaaataacaaaaacgacacc

SEQ ID NO: 161164 - DNA, 30 bp, Artificial Sequence
  Synthetic oligonucleotide
gagccaagtgctgtaacatggagggacacc

SEQ ID NO: 161165 - DNA, 30 bp, Artificial Sequence
  Synthetic oligonucleotide
aaccatcatagcgtaaaatacaatgacacc

SEQ ID NO: 161166 - DNA, 30 bp, Artificial Sequence
  Synthetic oligonucleotide
acgtacatctcgtttagaaggtggtacacc

SEQ ID NO: 161167 - DNA, 30 bp, Artificial Sequence
  Synthetic oligonucleotide
tagtgttcattgcttaaggaaaatcccacc

SEQ ID NO: 161168 - DNA, 30 bp, Artificial Sequence
  Synthetic oligonucleotide
ggtgacacacacccgatgcactgtcccacc

SEQ ID NO: 161169 - DNA, 30 bp, Artificial Sequence
  Synthetic oligonucleotide
acgcgggttggttctaattactcagccacc

SEQ ID NO: 161170 - DNA, 30 bp, Artificial Sequence
  Synthetic oligonucleotide
atgggatgagcagggtacagtgccgccacc

SEQ ID NO: 161171 - DNA, 30 bp, Artificial Sequence
  Synthetic oligonucleotide
atacgacaccccttcccagtgtctgccacc

SEQ ID NO: 161172 - DNA, 30 bp, Artificial Sequence
  Synthetic oligonucleotide
gagaggcggctctatacatcgacatccacc

SEQ ID NO: 161173 - DNA, 30 bp, Artificial Sequence
  Synthetic oligonucleotide
aagtacatgaagcgaagggggacatccacc

SEQ ID NO: 161174 - DNA, 30 bp, Artificial Sequence
  Synthetic oligonucleotide
tacacgagtttaagctaatagctatccacc

SEQ ID NO: 161175 - DNA, 30 bp, Artificial Sequence
  Synthetic oligonucleotide
ccgaccggactgtgttacacctacagcacc

SEQ ID NO: 161176 - DNA, 30 bp, Artificial Sequence
  Synthetic oligonucleotide
gggatgggacgccgggcgcagaagagcacc

SEQ ID NO: 161177 - DNA, 30 bp, Artificial Sequence
  Synthetic oligonucleotide
ggtccctgcacgcgtatatagtttagcacc

SEQ ID NO: 161178 - DNA, 30 bp, Artificial Sequence
  Synthetic oligonucleotide
atgcgagcatagtagctcgctccacgcacc

SEQ ID NO: 161179 - DNA, 30 bp, Artificial Sequence
  Synthetic oligonucleotide
gaggccgattaggaccctcggattcgcacc

SEQ ID NO: 161180 - DNA, 30 bp, Artificial Sequence
  Synthetic oligonucleotide
ttcataaggaccaagtaaagacttcgcacc

SEQ ID NO: 161181 - DNA, 30 bp, Artificial Sequence
  Synthetic oligonucleotide
aagtgatttggatcaaaggggaaaggcacc

SEQ ID NO: 161182 - DNA, 31 bp, Artificial Sequence
  Synthetic oligonucleotide
tggaggacaggaggttccaatttcaggcacc

SEQ ID NO: 161183 - DNA, 30 bp, Artificial Sequence
  Synthetic oligonucleotide
gtcaagactaatataagaaaacacggcacc

SEQ ID NO: 161184 - DNA, 30 bp, Artificial Sequence
  Synthetic oligonucleotide
ccttggccgacacatgggggcacgggcacc

SEQ ID NO: 161185 - DNA, 30 bp, Artificial Sequence
  Synthetic oligonucleotide
aggaagcgtaagcaaccaggtctatgcacc

SEQ ID NO: 161186 - DNA, 30 bp, Artificial Sequence
  Synthetic oligonucleotide
actttgggtacaacacgtgtggactgcacc

SEQ ID NO: 161187 - DNA, 30 bp, Artificial Sequence
  Synthetic oligonucleotide
cgggccgagccactccggatctactgcacc

SEQ ID NO: 161188 - DNA, 30 bp, Artificial Sequence
  Synthetic oligonucleotide
cgccaaacgggaaatagaaccgtgtgcacc

SEQ ID NO: 161189 - DNA, 30 bp, Artificial Sequence
  Synthetic oligonucleotide
ggacgaatcaaagtagtctcatattgcacc

SEQ ID NO: 161190 - DNA, 30 bp, Artificial Sequence
  Synthetic oligonucleotide
tggaattcgaaactcggggcaccttgcacc

SEQ ID NO: 161191 - DNA, 30 bp, Artificial Sequence
  Synthetic oligonucleotide
aatcatcgcacactcaatgcgaggatcacc

SEQ ID NO: 161192 - DNA, 30 bp, Artificial Sequence
  Synthetic oligonucleotide
tgaatggccagagtcgacggccttatcacc

SEQ ID NO: 161193 - DNA, 30 bp, Artificial Sequence
  Synthetic oligonucleotide
atggcaaattagcgttgatttcctctcacc

SEQ ID NO: 161194 - DNA, 30 bp, Artificial Sequence
  Synthetic oligonucleotide
aacacgctcgcaaacctttgggctctcacc

SEQ ID NO: 161195 - DNA, 30 bp, Artificial Sequence
  Synthetic oligonucleotide
agtcgtacatgcaactccgtcagaaagacc

SEQ ID NO: 161196 - DNA, 30 bp, Artificial Sequence
  Synthetic oligonucleotide
tcgtaggaatttagaagttaaaacaagacc

SEQ ID NO: 161197 - DNA, 30 bp, Artificial Sequence
  Synthetic oligonucleotide
tttgtaaggggctcaataaatcctaagacc

SEQ ID NO: 161198 - DNA, 30 bp, Artificial Sequence
  Synthetic oligonucleotide
atcaaggtcccctcagagagcattcagacc

SEQ ID NO: 161199 - DNA, 30 bp, Artificial Sequence
  Synthetic oligonucleotide
aactaactggtaatgagcaactgcgagacc

SEQ ID NO: 161200 - DNA, 30 bp, Artificial Sequence
  Synthetic oligonucleotide
ccgattgggcgtggcctgatctgggagacc

SEQ ID NO: 161201 - DNA, 30 bp, Artificial Sequence
  Synthetic oligonucleotide
cagcgtgctccagtaagatacgaaacgacc

SEQ ID NO: 161202 - DNA, 30 bp, Artificial Sequence
  Synthetic oligonucleotide
gtcaggatatactaggaccaaaagacgacc

SEQ ID NO: 161203 - DNA, 30 bp, Artificial Sequence
  Synthetic oligonucleotide
ggcacggtgagtaccaagatatagacgacc

SEQ ID NO: 161204 - DNA, 30 bp, Artificial Sequence
  Synthetic oligonucleotide
tgtgcgatcgtcacgaggcccaggacgacc

SEQ ID NO: 161205 - DNA, 30 bp, Artificial Sequence
  Synthetic oligonucleotide
tacaacgacatacggcgtgctgatacgacc

SEQ ID NO: 161206 - DNA, 30 bp, Artificial Sequence
  Synthetic oligonucleotide
gatccacggatcaggcgccatataccgacc

SEQ ID NO: 161207 - DNA, 30 bp, Artificial Sequence
  Synthetic oligonucleotide
cggtgaaacccgaatgtgtgccaagcgacc

SEQ ID NO: 161208 - DNA, 30 bp, Artificial Sequence
  Synthetic oligonucleotide
tttcatgaaaaggaatgtacataggcgacc

SEQ ID NO: 161209 - DNA, 30 bp, Artificial Sequence
  Synthetic oligonucleotide
tctgtccgaacatacggattcacggcgacc

SEQ ID NO: 161210 - DNA, 30 bp, Artificial Sequence
  Synthetic oligonucleotide
gtcccgcgtgggactctaactctggcgacc

SEQ ID NO: 161211 - DNA, 30 bp, Artificial Sequence
  Synthetic oligonucleotide
ttggaatgtgaggctactgagttctcgacc

SEQ ID NO: 161212 - DNA, 30 bp, Artificial Sequence
  Synthetic oligonucleotide
actagctaatgtcgagagagttattcgacc

SEQ ID NO: 161213 - DNA, 30 bp, Artificial Sequence
  Synthetic oligonucleotide
gcagacggaagagctatcacagtcaggacc

SEQ ID NO: 161214 - DNA, 30 bp, Artificial Sequence
  Synthetic oligonucleotide
ggcaggaatgacccagagtcaggacggacc

SEQ ID NO: 161215 - DNA, 30 bp, Artificial Sequence
  Synthetic oligonucleotide
taccagaccgatctcggtatgaaagggacc

SEQ ID NO: 161216 - DNA, 30 bp, Artificial Sequence
  Synthetic oligonucleotide
cctgccctcaggaataacaggaccgggacc

SEQ ID NO: 161217 - DNA, 30 bp, Artificial Sequence
  Synthetic oligonucleotide
gagcggtcgaagttagcggggttcgggacc

SEQ ID NO: 161218 - DNA, 30 bp, Artificial Sequence
  Synthetic oligonucleotide
agcttgcccaatgtgacgttctaggggacc

SEQ ID NO: 161219 - DNA, 30 bp, Artificial Sequence
  Synthetic oligonucleotide
cgaatctcatgagcacagcgtcatgggacc

SEQ ID NO: 161220 - DNA, 30 bp, Artificial Sequence
  Synthetic oligonucleotide
tgggggtagcacctagggttgaaatggacc

SEQ ID NO: 161221 - DNA, 30 bp, Artificial Sequence
  Synthetic oligonucleotide
gaaggctaatctggcgctggttacatgacc

SEQ ID NO: 161222 - DNA, 30 bp, Artificial Sequence
  Synthetic oligonucleotide
aattacatccgtctgtgataaagcatgacc

SEQ ID NO: 161223 - DNA, 30 bp, Artificial Sequence
  Synthetic oligonucleotide
cgacgggtatgttcccgcccagagatgacc

SEQ ID NO: 161224 - DNA, 30 bp, Artificial Sequence
  Synthetic oligonucleotide
gataagagcgatacggtagagcgactgacc

SEQ ID NO: 161225 - DNA, 30 bp, Artificial Sequence
  Synthetic oligonucleotide
attggaaaccagccgtcagtagcagtgacc

SEQ ID NO: 161226 - DNA, 30 bp, Artificial Sequence
  Synthetic oligonucleotide
cgcgggcaaggcggggtggaggcggtgacc

SEQ ID NO: 161227 - DNA, 30 bp, Artificial Sequence
  Synthetic oligonucleotide
ggattaggcaggaaacatatggcggtgacc

SEQ ID NO: 161228 - DNA, 30 bp, Artificial Sequence
  Synthetic oligonucleotide
cgacatatcatattattcgacatattgacc

SEQ ID NO: 161229 - DNA, 30 bp, Artificial Sequence
  Synthetic oligonucleotide
ttgaacaggtcgcctatacgccacttgacc

SEQ ID NO: 161230 - DNA, 30 bp, Artificial Sequence
  Synthetic oligonucleotide
gcatcggatgttcatatccgtagtttgacc

SEQ ID NO: 161231 - DNA, 30 bp, Artificial Sequence
  Synthetic oligonucleotide
cgaacttccccatgcccttagccaaatacc

SEQ ID NO: 161232 - DNA, 30 bp, Artificial Sequence
  Synthetic oligonucleotide
cgaccgatgggagtaaatctgaataatacc

SEQ ID NO: 161233 - DNA, 30 bp, Artificial Sequence
  Synthetic oligonucleotide
ccgaccaatctcgggtgatcacatcatacc

SEQ ID NO: 161234 - DNA, 30 bp, Artificial Sequence
  Synthetic oligonucleotide
ccggtcttatttcggatacgatgggatacc

SEQ ID NO: 161235 - DNA, 30 bp, Artificial Sequence
  Synthetic oligonucleotide
aagggtaaatgtgcgaagtatatggatacc

SEQ ID NO: 161236 - DNA, 30 bp, Artificial Sequence
  Synthetic oligonucleotide
agctagctacagaacgatcttcgtgatacc

SEQ ID NO: 161237 - DNA, 30 bp, Artificial Sequence
  Synthetic oligonucleotide
taaaacgaaagtaacaaactgtcgtatacc

SEQ ID NO: 161238 - DNA, 30 bp, Artificial Sequence
  Synthetic oligonucleotide
agagagaatgttggccaaaccataactacc

SEQ ID NO: 161239 - DNA, 30 bp, Artificial Sequence
  Synthetic oligonucleotide
ggcccgaataggaccaaatggggcactacc

SEQ ID NO: 161240 - DNA, 30 bp, Artificial Sequence
  Synthetic oligonucleotide
ggttctagtaacttaccgagagcgactacc

SEQ ID NO: 161241 - DNA, 30 bp, Artificial Sequence
  Synthetic oligonucleotide
ctgcatattactatcgagtcaaggactacc

SEQ ID NO: 161242 - DNA, 31 bp, Artificial Sequence
  Synthetic oligonucleotide
aagggacaataattgaagcggtctacctacc

SEQ ID NO: 161243 - DNA, 30 bp, Artificial Sequence
  Synthetic oligonucleotide
gtcaacctttaccgatacatctttcctacc

SEQ ID NO: 161244 - DNA, 30 bp, Artificial Sequence
  Synthetic oligonucleotide
ctattcgccttaagaatatgcaaagctacc

SEQ ID NO: 161245 - DNA, 30 bp, Artificial Sequence
  Synthetic oligonucleotide
gtgagacaggtacttgatagtcgcgctacc

SEQ ID NO: 161246 - DNA, 30 bp, Artificial Sequence
  Synthetic oligonucleotide
aaccgagcgaagtcagctacttaggctacc

SEQ ID NO: 161247 - DNA, 30 bp, Artificial Sequence
  Synthetic oligonucleotide
gagataactacaaggcatctcgtcagtacc

SEQ ID NO: 161248 - DNA, 30 bp, Artificial Sequence
  Synthetic oligonucleotide
tgcgtaagggcgcgctggctcccgagtacc

SEQ ID NO: 161249 - DNA, 30 bp, Artificial Sequence
  Synthetic oligonucleotide
tggattctccaggggttcagagctcgtacc

SEQ ID NO: 161250 - DNA, 30 bp, Artificial Sequence
  Synthetic oligonucleotide
aaattctatccagaccgggtagcgggtacc

SEQ ID NO: 161251 - DNA, 30 bp, Artificial Sequence
  Synthetic oligonucleotide
ttgggatggaattttaccagatggggtacc

SEQ ID NO: 161252 - DNA, 30 bp, Artificial Sequence
  Synthetic oligonucleotide
gagaaggcgttccaaaaaagattgggtacc

SEQ ID NO: 161253 - DNA, 30 bp, Artificial Sequence
  Synthetic oligonucleotide
ggctaatgtccaccgatactcaatggtacc

SEQ ID NO: 161254 - DNA, 30 bp, Artificial Sequence
  Synthetic oligonucleotide
gccgacgagtaactactctttccatgtacc

SEQ ID NO: 161255 - DNA, 30 bp, Artificial Sequence
  Synthetic oligonucleotide
tgtgttaacatacaactagtaagctgtacc

SEQ ID NO: 161256 - DNA, 30 bp, Artificial Sequence
  Synthetic oligonucleotide
aatatgagggactgaaatgagctgtgtacc

SEQ ID NO: 161257 - DNA, 30 bp, Artificial Sequence
  Synthetic oligonucleotide
tggaccaaaccagtaggatgaatttgtacc

SEQ ID NO: 161258 - DNA, 30 bp, Artificial Sequence
  Synthetic oligonucleotide
gtgacatcaatgctcaacacacgaattacc

SEQ ID NO: 161259 - DNA, 30 bp, Artificial Sequence
  Synthetic oligonucleotide
catgtgcgcgtactaactcgaggacttacc

SEQ ID NO: 161260 - DNA, 30 bp, Artificial Sequence
  Synthetic oligonucleotide
acacacggtgaagttctacagtagcttacc

SEQ ID NO: 161261 - DNA, 30 bp, Artificial Sequence
  Synthetic oligonucleotide
ggtcaacgactatagccgggagtgcttacc

SEQ ID NO: 161262 - DNA, 30 bp, Artificial Sequence
  Synthetic oligonucleotide
cggagttttatagggcaacacggtcttacc

SEQ ID NO: 161263 - DNA, 30 bp, Artificial Sequence
  Synthetic oligonucleotide
gcgtaagaaggggatatatgttccgttacc

SEQ ID NO: 161264 - DNA, 30 bp, Artificial Sequence
  Synthetic oligonucleotide
tgatagtggggcgcgagttagctggttacc

SEQ ID NO: 161265 - DNA, 30 bp, Artificial Sequence
  Synthetic oligonucleotide
cctgaaaagttggtttggccttcgtttacc

SEQ ID NO: 161266 - DNA, 30 bp, Artificial Sequence
  Synthetic oligonucleotide
caaaaaaccttttacacaatggacaaaccc

SEQ ID NO: 161267 - DNA, 30 bp, Artificial Sequence
  Synthetic oligonucleotide
gggcattgcaatcagcggctggacaaaccc

SEQ ID NO: 161268 - DNA, 30 bp, Artificial Sequence
  Synthetic oligonucleotide
gggttagacccttgcacgtgccaacaaccc

SEQ ID NO: 161269 - DNA, 30 bp, Artificial Sequence
  Synthetic oligonucleotide
gactaaccaccgaacaaattacgacaaccc

SEQ ID NO: 161270 - DNA, 30 bp, Artificial Sequence
  Synthetic oligonucleotide
aacactaagaggggaaaacaatacgaaccc

SEQ ID NO: 161271 - DNA, 30 bp, Artificial Sequence
  Synthetic oligonucleotide
ctggcagttacaacccttcgcaccgaaccc

SEQ ID NO: 161272 - DNA, 30 bp, Artificial Sequence
  Synthetic oligonucleotide
tgctaagccaagccaatagcggccgaaccc

SEQ ID NO: 161273 - DNA, 30 bp, Artificial Sequence
  Synthetic oligonucleotide
tgtaggcgacgttcctgcaacagcgaaccc

SEQ ID NO: 161274 - DNA, 30 bp, Artificial Sequence
  Synthetic oligonucleotide
acagcggtaacgtggtgtcacacggaaccc

SEQ ID NO: 161275 - DNA, 30 bp, Artificial Sequence
  Synthetic oligonucleotide
ttgagtctgaggccaaatgctcatgaaccc

SEQ ID NO: 161276 - DNA, 30 bp, Artificial Sequence
  Synthetic oligonucleotide
cggataattatatagtagacggatgaaccc

SEQ ID NO: 161277 - DNA, 30 bp, Artificial Sequence
  Synthetic oligonucleotide
tgtttatgactggccatacgatctgaaccc

SEQ ID NO: 161278 - DNA, 30 bp, Artificial Sequence
  Synthetic oligonucleotide
gaacggagcgataatatttcgacaacaccc

SEQ ID NO: 161279 - DNA, 30 bp, Artificial Sequence
  Synthetic oligonucleotide
cgtaacgagactgccctggaggcaacaccc

SEQ ID NO: 161280 - DNA, 30 bp, Artificial Sequence
  Synthetic oligonucleotide
gtcaggaactagataaaggggcctacaccc

SEQ ID NO: 161281 - DNA, 30 bp, Artificial Sequence
  Synthetic oligonucleotide
cttctcaatgggtaggacaacgttacaccc

SEQ ID NO: 161282 - DNA, 30 bp, Artificial Sequence
  Synthetic oligonucleotide
atgaatcaacgtaagctcttctggccaccc

SEQ ID NO: 161283 - DNA, 30 bp, Artificial Sequence
  Synthetic oligonucleotide
tttcagacgagtaacaactacacatcaccc

SEQ ID NO: 161284 - DNA, 30 bp, Artificial Sequence
  Synthetic oligonucleotide
gatgcgagtagttggcccgaaagttcaccc

SEQ ID NO: 161285 - DNA, 30 bp, Artificial Sequence
  Synthetic oligonucleotide
gaaatccggggtgcagtgcgcatcagaccc

SEQ ID NO: 161286 - DNA, 30 bp, Artificial Sequence
  Synthetic oligonucleotide
cgagaggcaaggggctaccagcggagaccc

SEQ ID NO: 161287 - DNA, 30 bp, Artificial Sequence
  Synthetic oligonucleotide
taagggagacgttaatctatcatgagaccc

SEQ ID NO: 161288 - DNA, 30 bp, Artificial Sequence
  Synthetic oligonucleotide
cagctaattacggcaaaaaagattagaccc

SEQ ID NO: 161289 - DNA, 30 bp, Artificial Sequence
  Synthetic oligonucleotide
aatcgcgccgagtggtactgacaccgaccc

SEQ ID NO: 161290 - DNA, 30 bp, Artificial Sequence
  Synthetic oligonucleotide
tttgcaactgggctcgtatgaaagggaccc

SEQ ID NO: 161291 - DNA, 30 bp, Artificial Sequence
  Synthetic oligonucleotide
cttatcagattacgatggtgagagggaccc

SEQ ID NO: 161292 - DNA, 30 bp, Artificial Sequence
  Synthetic oligonucleotide
atgtgagaacaacccacgggtgttggaccc

SEQ ID NO: 161293 - DNA, 30 bp, Artificial Sequence
  Synthetic oligonucleotide
aaacagcccgatgatatctggcactgaccc

SEQ ID NO: 161294 - DNA, 30 bp, Artificial Sequence
  Synthetic oligonucleotide
ccatgcaatgtgttcatgaaacggtgaccc

SEQ ID NO: 161295 - DNA, 30 bp, Artificial Sequence
  Synthetic oligonucleotide
gataaaaaatcgccggctggtgcttgaccc

SEQ ID NO: 161296 - DNA, 30 bp, Artificial Sequence
  Synthetic oligonucleotide
ttggatggcgctatccctggctcaataccc

SEQ ID NO: 161297 - DNA, 30 bp, Artificial Sequence
  Synthetic oligonucleotide
tatcaggtagaacctacatggaggataccc

SEQ ID NO: 161298 - DNA, 30 bp, Artificial Sequence
  Synthetic oligonucleotide
cggaccgtcattcatgcggcatggataccc

SEQ ID NO: 161299 - DNA, 30 bp, Artificial Sequence
  Synthetic oligonucleotide
atggcatcatagagactgaatcatataccc

SEQ ID NO: 161300 - DNA, 30 bp, Artificial Sequence
  Synthetic oligonucleotide
aataaaccgatcgcgaaatcaactataccc

SEQ ID NO: 161301 - DNA, 30 bp, Artificial Sequence
  Synthetic oligonucleotide
tcctgtcaagtaggattgattactataccc

SEQ ID NO: 161302 - DNA, 30 bp, Artificial Sequence
  Synthetic oligonucleotide
agactccatcgcaaacacccagttctaccc

SEQ ID NO: 161303 - DNA, 30 bp, Artificial Sequence
  Synthetic oligonucleotide
agctggcctgtcatgtatatcaaggtaccc

SEQ ID NO: 161304 - DNA, 30 bp, Artificial Sequence
  Synthetic oligonucleotide
tcataccgaaggccgaattgagatgtaccc

SEQ ID NO: 161305 - DNA, 30 bp, Artificial Sequence
  Synthetic oligonucleotide
aacggttcgatgaatcgatccacaaacccc

SEQ ID NO: 161306 - DNA, 30 bp, Artificial Sequence
  Synthetic oligonucleotide
gtatagtgtatcagtacgggactaaacccc

SEQ ID NO: 161307 - DNA, 30 bp, Artificial Sequence
  Synthetic oligonucleotide
cggcaaccggtttagatttcttacaacccc

SEQ ID NO: 161308 - DNA, 30 bp, Artificial Sequence
  Synthetic oligonucleotide
tcggaatcactcccaaacgagctcaacccc

SEQ ID NO: 161309 - DNA, 30 bp, Artificial Sequence
  Synthetic oligonucleotide
actaaaaggtatagtgaattagctaacccc

SEQ ID NO: 161310 - DNA, 30 bp, Artificial Sequence
  Synthetic oligonucleotide
acagagggaaaaacaccacatcctcacccc

SEQ ID NO: 161311 - DNA, 30 bp, Artificial Sequence
  Synthetic oligonucleotide
cggggaaaatgtcgcgcaaggttgtacccc

SEQ ID NO: 161312 - DNA, 30 bp, Artificial Sequence
  Synthetic oligonucleotide
agatgctcgggtaccatcgtgcaaaccccc

SEQ ID NO: 161313 - DNA, 30 bp, Artificial Sequence
  Synthetic oligonucleotide
agatccaggttccaagcgcgtttcaccccc

SEQ ID NO: 161314 - DNA, 30 bp, Artificial Sequence
  Synthetic oligonucleotide
aaagaatacaagtcttgtcactaacccccc

SEQ ID NO: 161315 - DNA, 30 bp, Artificial Sequence
  Synthetic oligonucleotide
atcacgccgtgaccaccggtaactcccccc

SEQ ID NO: 161316 - DNA, 30 bp, Artificial Sequence
  Synthetic oligonucleotide
taggagactgggaggattcatgccgccccc

SEQ ID NO: 161317 - DNA, 30 bp, Artificial Sequence
  Synthetic oligonucleotide
ttcttgggttgaattgatcgaactgccccc

SEQ ID NO: 161318 - DNA, 31 bp, Artificial Sequence
  Synthetic oligonucleotide
gtagaccacggaatcgggtagtttgtccccc

SEQ ID NO: 161319 - DNA, 30 bp, Artificial Sequence
  Synthetic oligonucleotide
cgtcttaaacgggagaaaggaaaaagcccc

SEQ ID NO: 161320 - DNA, 30 bp, Artificial Sequence
  Synthetic oligonucleotide
tggcgcaaccaagagaccatcacaagcccc

SEQ ID NO: 161321 - DNA, 30 bp, Artificial Sequence
  Synthetic oligonucleotide
gagagtaatttgtacatagcgaaccgcccc

SEQ ID NO: 161322 - DNA, 30 bp, Artificial Sequence
  Synthetic oligonucleotide
gccgcttaagaacggagaccacaccgcccc

SEQ ID NO: 161323 - DNA, 30 bp, Artificial Sequence
  Synthetic oligonucleotide
agcgttgacattgctccagatacgcgcccc

SEQ ID NO: 161324 - DNA, 30 bp, Artificial Sequence
  Synthetic oligonucleotide
gggaaacgtcaatgccgacgttgcggcccc

SEQ ID NO: 161325 - DNA, 30 bp, Artificial Sequence
  Synthetic oligonucleotide
gtttgatatagggtgaaggtaatatgcccc

SEQ ID NO: 161326 - DNA, 30 bp, Artificial Sequence
  Synthetic oligonucleotide
gggtgcgactacgtaatgctattatgcccc

SEQ ID NO: 161327 - DNA, 30 bp, Artificial Sequence
  Synthetic oligonucleotide
aaaccagcatcattatacatcgcctgcccc

SEQ ID NO: 161328 - DNA, 30 bp, Artificial Sequence
  Synthetic oligonucleotide
actaggaagtcgagctgaaagaattgcccc

SEQ ID NO: 161329 - DNA, 30 bp, Artificial Sequence
  Synthetic oligonucleotide
acagtcgaaatagcgctcgaaggactcccc

SEQ ID NO: 161330 - DNA, 30 bp, Artificial Sequence
  Synthetic oligonucleotide
cgtgaatcgaaataagacactatcctcccc

SEQ ID NO: 161331 - DNA, 30 bp, Artificial Sequence
  Synthetic oligonucleotide
gtcgggggtatggaataaacgcatctcccc

SEQ ID NO: 161332 - DNA, 30 bp, Artificial Sequence
  Synthetic oligonucleotide
tctaacatactcactaagggatatctcccc

SEQ ID NO: 161333 - DNA, 30 bp, Artificial Sequence
  Synthetic oligonucleotide
ttagtgagccagcttcgccatgaggtcccc

SEQ ID NO: 161334 - DNA, 30 bp, Artificial Sequence
  Synthetic oligonucleotide
catcctcggacgacccctcacccattcccc

SEQ ID NO: 161335 - DNA, 30 bp, Artificial Sequence
  Synthetic oligonucleotide
ggtaaatcgttccttgcacactggttcccc

SEQ ID NO: 161336 - DNA, 30 bp, Artificial Sequence
  Synthetic oligonucleotide
tggcgagtgccgacaacgtctgaaaagccc

SEQ ID NO: 161337 - DNA, 30 bp, Artificial Sequence
  Synthetic oligonucleotide
ggtatacgtaagtcccaactaagcaagccc

SEQ ID NO: 161338 - DNA, 30 bp, Artificial Sequence
  Synthetic oligonucleotide
ctcgaggtagcctaaatcggtagtaagccc

SEQ ID NO: 161339 - DNA, 30 bp, Artificial Sequence
  Synthetic oligonucleotide
gtgaatgttgagggaggggtccttaagccc

SEQ ID NO: 161340 - DNA, 30 bp, Artificial Sequence
  Synthetic oligonucleotide
cagagcgttcaccgcgtgactttccagccc

SEQ ID NO: 161341 - DNA, 30 bp, Artificial Sequence
  Synthetic oligonucleotide
tggagatcaaatccgtgctatgaatagccc

SEQ ID NO: 161342 - DNA, 30 bp, Artificial Sequence
  Synthetic oligonucleotide
aataggaggttggagtaggatgactagccc

SEQ ID NO: 161343 - DNA, 30 bp, Artificial Sequence
  Synthetic oligonucleotide
gtagaacggttggcactctcaaggtagccc

SEQ ID NO: 161344 - DNA, 30 bp, Artificial Sequence
  Synthetic oligonucleotide
agtgagagtgaaggggtataaccttagccc

SEQ ID NO: 161345 - DNA, 30 bp, Artificial Sequence
  Synthetic oligonucleotide
gaaggcggaaatctctatcaacaaacgccc

SEQ ID NO: 161346 - DNA, 30 bp, Artificial Sequence
  Synthetic oligonucleotide
ctactggccaatgtgattctgtggacgccc

SEQ ID NO: 161347 - DNA, 30 bp, Artificial Sequence
  Synthetic oligonucleotide
acagaattcaggccgcaatgacaaccgccc

SEQ ID NO: 161348 - DNA, 30 bp, Artificial Sequence
  Synthetic oligonucleotide
agacgatgcagacagatattacagccgccc

SEQ ID NO: 161349 - DNA, 30 bp, Artificial Sequence
  Synthetic oligonucleotide
tactagggtcgaggagaagtgcacgcgccc

SEQ ID NO: 161350 - DNA, 30 bp, Artificial Sequence
  Synthetic oligonucleotide
ggcttaaaaaacgtagaaactgagtcgccc

SEQ ID NO: 161351 - DNA, 30 bp, Artificial Sequence
  Synthetic oligonucleotide
gaatggtctgaagccccacgactgtcgccc

SEQ ID NO: 161352 - DNA, 30 bp, Artificial Sequence
  Synthetic oligonucleotide
taccgcccaatgctaggggtctaaaggccc

SEQ ID NO: 161353 - DNA, 30 bp, Artificial Sequence
  Synthetic oligonucleotide
gaacgacacacttcgagctggtgtaggccc

SEQ ID NO: 161354 - DNA, 30 bp, Artificial Sequence
  Synthetic oligonucleotide
cgctgacgagtacctcgcaatagtcggccc

SEQ ID NO: 161355 - DNA, 30 bp, Artificial Sequence
  Synthetic oligonucleotide
aaacgcagagtgggggaatagcaagggccc

SEQ ID NO: 161356 - DNA, 30 bp, Artificial Sequence
  Synthetic oligonucleotide
agacaagagatgtcaggctagcaagggccc

SEQ ID NO: 161357 - DNA, 30 bp, Artificial Sequence
  Synthetic oligonucleotide
tggtgtgttctaagtacccgaacagggccc

SEQ ID NO: 161358 - DNA, 30 bp, Artificial Sequence
  Synthetic oligonucleotide
tgaagaagacataaatcacgtgcatggccc

SEQ ID NO: 161359 - DNA, 30 bp, Artificial Sequence
  Synthetic oligonucleotide
cttagcaagatactgttcggcaagtggccc

SEQ ID NO: 161360 - DNA, 30 bp, Artificial Sequence
  Synthetic oligonucleotide
tgaattgtattgaaatccgacgaaatgccc

SEQ ID NO: 161361 - DNA, 30 bp, Artificial Sequence
  Synthetic oligonucleotide
tataggcaacgccacaaaagtgaaatgccc

SEQ ID NO: 161362 - DNA, 30 bp, Artificial Sequence
  Synthetic oligonucleotide
ctagggatcgtttctaccccccgtatgccc

SEQ ID NO: 161363 - DNA, 29 bp, Artificial Sequence
  Synthetic oligonucleotide
aggtaaagaaggcgcaccaaaggctgccc

SEQ ID NO: 161364 - DNA, 30 bp, Artificial Sequence
  Synthetic oligonucleotide
gtcagtgagcagcgtaagatgggagtgccc

SEQ ID NO: 161365 - DNA, 30 bp, Artificial Sequence
  Synthetic oligonucleotide
tggccaagttgcgtgaactggtacgtgccc

SEQ ID NO: 161366 - DNA, 30 bp, Artificial Sequence
  Synthetic oligonucleotide
tcacggaatgtcctgtagtacagcgtgccc

SEQ ID NO: 161367 - DNA, 30 bp, Artificial Sequence
  Synthetic oligonucleotide
gtcaaatgtggactacaagcttgtgtgccc

SEQ ID NO: 161368 - DNA, 30 bp, Artificial Sequence
  Synthetic oligonucleotide
ccgccggaagctaccctcactccattgccc

SEQ ID NO: 161369 - DNA, 30 bp, Artificial Sequence
  Synthetic oligonucleotide
cggatttatgaatcgaaaaaacgcttgccc

SEQ ID NO: 161370 - DNA, 30 bp, Artificial Sequence
  Synthetic oligonucleotide
gcggaactatctggaggggttgggttgccc

SEQ ID NO: 161371 - DNA, 28 bp, Artificial Sequence
  Synthetic oligonucleotide
gggattcaaacgtgcgatattgttgccc

SEQ ID NO: 161372 - DNA, 30 bp, Artificial Sequence
  Synthetic oligonucleotide
cacgtgtatacggctagcctctatttgccc

SEQ ID NO: 161373 - DNA, 30 bp, Artificial Sequence
  Synthetic oligonucleotide
cgtgtcatgctccaggtgtagattttgccc

SEQ ID NO: 161374 - DNA, 30 bp, Artificial Sequence
  Synthetic oligonucleotide
atgggcaacgagtggtaaatcagtaatccc

SEQ ID NO: 161375 - DNA, 30 bp, Artificial Sequence
  Synthetic oligonucleotide
cggacaatttggcaacgcctgatacatccc

SEQ ID NO: 161376 - DNA, 30 bp, Artificial Sequence
  Synthetic oligonucleotide
tgacaccaacgcatcacaaaaagctatccc

SEQ ID NO: 161377 - DNA, 30 bp, Artificial Sequence
  Synthetic oligonucleotide
cgaacatagatccgaaaatagatctatccc

SEQ ID NO: 161378 - DNA, 30 bp, Artificial Sequence
  Synthetic oligonucleotide
tcgtagacgacatacttatgcgcgtatccc

SEQ ID NO: 161379 - DNA, 30 bp, Artificial Sequence
  Synthetic oligonucleotide
agacaaatgcgcctatgatcgaggtatccc

SEQ ID NO: 161380 - DNA, 30 bp, Artificial Sequence
  Synthetic oligonucleotide
caagcgggtcacatttaacgggcttatccc

SEQ ID NO: 161381 - DNA, 30 bp, Artificial Sequence
  Synthetic oligonucleotide
atacaggagcggaagaccgaggcacctccc

SEQ ID NO: 161382 - DNA, 30 bp, Artificial Sequence
  Synthetic oligonucleotide
agaatgagacggtgcttacgaatacctccc

SEQ ID NO: 161383 - DNA, 30 bp, Artificial Sequence
  Synthetic oligonucleotide
acataaaattgcatactttgcttgcctccc

SEQ ID NO: 161384 - DNA, 30 bp, Artificial Sequence
  Synthetic oligonucleotide
tggttaggtgcgaagtctgcgttgtctccc

SEQ ID NO: 161385 - DNA, 30 bp, Artificial Sequence
  Synthetic oligonucleotide
tcaaggggtggtaaatattatacaagtccc

SEQ ID NO: 161386 - DNA, 30 bp, Artificial Sequence
  Synthetic oligonucleotide
tgtggaagttaatgatacaaaaggagtccc

SEQ ID NO: 161387 - DNA, 30 bp, Artificial Sequence
  Synthetic oligonucleotide
tcctgctcgtcgtgtgagtttgatagtccc

SEQ ID NO: 161388 - DNA, 30 bp, Artificial Sequence
  Synthetic oligonucleotide
acacagtccgggccaacgagtcagcgtccc

SEQ ID NO: 161389 - DNA, 30 bp, Artificial Sequence
  Synthetic oligonucleotide
gcagttcgtaagaggcggacatatcgtccc

SEQ ID NO: 161390 - DNA, 30 bp, Artificial Sequence
  Synthetic oligonucleotide
taagtctcggctggggatgatcaaggtccc

SEQ ID NO: 161391 - DNA, 30 bp, Artificial Sequence
  Synthetic oligonucleotide
aggtatttttttagaatgagcgggggtccc

SEQ ID NO: 161392 - DNA, 30 bp, Artificial Sequence
  Synthetic oligonucleotide
ggtaggtctcaattaccgtattgaattccc

SEQ ID NO: 161393 - DNA, 30 bp, Artificial Sequence
  Synthetic oligonucleotide
tctcttgtagaggtcaacaagggacttccc

SEQ ID NO: 161394 - DNA, 30 bp, Artificial Sequence
  Synthetic oligonucleotide
gggatcaatatctcggaacagcatgttccc

SEQ ID NO: 161395 - DNA, 30 bp, Artificial Sequence
  Synthetic oligonucleotide
agcgtgctgaaagtcgagttccgaaaagcc

SEQ ID NO: 161396 - DNA, 30 bp, Artificial Sequence
  Synthetic oligonucleotide
ttgtactgacgaatgatagtgtgcaaagcc

SEQ ID NO: 161397 - DNA, 30 bp, Artificial Sequence
  Synthetic oligonucleotide
ggcaactcacgcactgttactggacaagcc

SEQ ID NO: 161398 - DNA, 30 bp, Artificial Sequence
  Synthetic oligonucleotide
cgaggccaagatggcatagaaacgcaagcc

SEQ ID NO: 161399 - DNA, 30 bp, Artificial Sequence
  Synthetic oligonucleotide
ccggattatgaaaaggccaggtaagaagcc

SEQ ID NO: 161400 - DNA, 30 bp, Artificial Sequence
  Synthetic oligonucleotide
cccgaccggcgtgcgtagtgagtagaagcc

SEQ ID NO: 161401 - DNA, 30 bp, Artificial Sequence
  Synthetic oligonucleotide
ggaacaaccctcgcgtctcaatgcgaagcc

SEQ ID NO: 161402 - DNA, 30 bp, Artificial Sequence
  Synthetic oligonucleotide
aagaattatcagaagcgttgggaggaagcc

SEQ ID NO: 161403 - DNA, 30 bp, Artificial Sequence
  Synthetic oligonucleotide
tatgatgcgtggggtttaggtgttgaagcc

SEQ ID NO: 161404 - DNA, 30 bp, Artificial Sequence
  Synthetic oligonucleotide
gatctcccgagcagcctatcagtgtaagcc

SEQ ID NO: 161405 - DNA, 30 bp, Artificial Sequence
  Synthetic oligonucleotide
agattgatgtatcagaagtatagttaagcc

SEQ ID NO: 161406 - DNA, 30 bp, Artificial Sequence
  Synthetic oligonucleotide
acgtaggatgtgttaaaggcattcacagcc

SEQ ID NO: 161407 - DNA, 30 bp, Artificial Sequence
  Synthetic oligonucleotide
ttcgtggcatttcaccactatgcgacagcc

SEQ ID NO: 161408 - DNA, 30 bp, Artificial Sequence
  Synthetic oligonucleotide
gcagagtgagatatacttcgtcggacagcc

SEQ ID NO: 161409 - DNA, 30 bp, Artificial Sequence
  Synthetic oligonucleotide
gtgctagccgtcacaagtaagtaaccagcc

SEQ ID NO: 161410 - DNA, 30 bp, Artificial Sequence
  Synthetic oligonucleotide
gccggaatggcttcggtacgttaagcagcc

SEQ ID NO: 161411 - DNA, 30 bp, Artificial Sequence
  Synthetic oligonucleotide
aataacctgagccacataatctatgcagcc

SEQ ID NO: 161412 - DNA, 30 bp, Artificial Sequence
  Synthetic oligonucleotide
gtcagtcaccgtggcgtgcaagaatcagcc

SEQ ID NO: 161413 - DNA, 30 bp, Artificial Sequence
  Synthetic oligonucleotide
tatagcaactatttcgctccactatcagcc

SEQ ID NO: 161414 - DNA, 30 bp, Artificial Sequence
  Synthetic oligonucleotide
tcgaatagcgggtcatatcacaattcagcc

SEQ ID NO: 161415 - DNA, 30 bp, Artificial Sequence
  Synthetic oligonucleotide
ctgttagcatttcaggactccgcttcagcc

SEQ ID NO: 161416 - DNA, 30 bp, Artificial Sequence
  Synthetic oligonucleotide
aacaaatttggaagaggggatcacagagcc

SEQ ID NO: 161417 - DNA, 29 bp, Artificial Sequence
  Synthetic oligonucleotide
tcccagagggaggtgaagaaagcagagcc

SEQ ID NO: 161418 - DNA, 30 bp, Artificial Sequence
  Synthetic oligonucleotide
tttgcaccaaatagacgatggtcgagagcc

SEQ ID NO: 161419 - DNA, 30 bp, Artificial Sequence
  Synthetic oligonucleotide
tttagtcaacgatattcaagctgacgagcc

SEQ ID NO: 161420 - DNA, 30 bp, Artificial Sequence
  Synthetic oligonucleotide
gcttcaggaatagcaagtccatatcgagcc

SEQ ID NO: 161421 - DNA, 30 bp, Artificial Sequence
  Synthetic oligonucleotide
aacactcaggatgaagtcgaaacgggagcc

SEQ ID NO: 161422 - DNA, 30 bp, Artificial Sequence
  Synthetic oligonucleotide
caatcgtaggcattgccgcttaactgagcc

SEQ ID NO: 161423 - DNA, 30 bp, Artificial Sequence
  Synthetic oligonucleotide
actcaagtccatctctcatgtcactgagcc

SEQ ID NO: 161424 - DNA, 30 bp, Artificial Sequence
  Synthetic oligonucleotide
aaagaatcgccttcaacttttacctgagcc

SEQ ID NO: 161425 - DNA, 30 bp, Artificial Sequence
  Synthetic oligonucleotide
caactcataaccttggggtagctctgagcc

SEQ ID NO: 161426 - DNA, 30 bp, Artificial Sequence
  Synthetic oligonucleotide
gtccggcatttcatgctttaagggtgagcc

SEQ ID NO: 161427 - DNA, 30 bp, Artificial Sequence
  Synthetic oligonucleotide
tttgatcggcaacgccataagttcatagcc

SEQ ID NO: 161428 - DNA, 30 bp, Artificial Sequence
  Synthetic oligonucleotide
cgtagaagaagaagcaattacactatagcc

SEQ ID NO: 161429 - DNA, 30 bp, Artificial Sequence
  Synthetic oligonucleotide
atgaggagacaagaaagtgctattatagcc

SEQ ID NO: 161430 - DNA, 30 bp, Artificial Sequence
  Synthetic oligonucleotide
gggaggaagcaatgtcggttagaactagcc

SEQ ID NO: 161431 - DNA, 30 bp, Artificial Sequence
  Synthetic oligonucleotide
acgcaattttcgctaagggggtgactagcc

SEQ ID NO: 161432 - DNA, 30 bp, Artificial Sequence
  Synthetic oligonucleotide
catacatagaaacgaggagtgtctctagcc

SEQ ID NO: 161433 - DNA, 30 bp, Artificial Sequence
  Synthetic oligonucleotide
acgtcgcttatagtattaagatcagtagcc

SEQ ID NO: 161434 - DNA, 30 bp, Artificial Sequence
  Synthetic oligonucleotide
tagcttgctgagattgtccacatcgtagcc

SEQ ID NO: 161435 - DNA, 30 bp, Artificial Sequence
  Synthetic oligonucleotide
gaggaaattgactatagagtcccggtagcc

SEQ ID NO: 161436 - DNA, 30 bp, Artificial Sequence
  Synthetic oligonucleotide
aatagagtatcgatcacggctcatgtagcc

SEQ ID NO: 161437 - DNA, 30 bp, Artificial Sequence
  Synthetic oligonucleotide
aggagcgtcatgattcccttaacattagcc

SEQ ID NO: 161438 - DNA, 30 bp, Artificial Sequence
  Synthetic oligonucleotide
cataagagtgcctcaacgtgggctttagcc

SEQ ID NO: 161439 - DNA, 30 bp, Artificial Sequence
  Synthetic oligonucleotide
agagtaagtgacagctgtagtataaacgcc

SEQ ID NO: 161440 - DNA, 30 bp, Artificial Sequence
  Synthetic oligonucleotide
cggcaagatccccgtatacacgagaacgcc

SEQ ID NO: 161441 - DNA, 30 bp, Artificial Sequence
  Synthetic oligonucleotide
ccgatgaaacacgtctcacattaacacgcc

SEQ ID NO: 161442 - DNA, 30 bp, Artificial Sequence
  Synthetic oligonucleotide
cggactcttatgtatccactaggccacgcc

SEQ ID NO: 161443 - DNA, 30 bp, Artificial Sequence
  Synthetic oligonucleotide
gaggagtaagttagggaacagtgccacgcc

SEQ ID NO: 161444 - DNA, 30 bp, Artificial Sequence
  Synthetic oligonucleotide
tacgtatagaaaggaatcgtccttcacgcc

SEQ ID NO: 161445 - DNA, 30 bp, Artificial Sequence
  Synthetic oligonucleotide
tctgggcaacatgaagataggggatacgcc

SEQ ID NO: 161446 - DNA, 30 bp, Artificial Sequence
  Synthetic oligonucleotide
tgggcgtggaagacattacgtccgtacgcc

SEQ ID NO: 161447 - DNA, 30 bp, Artificial Sequence
  Synthetic oligonucleotide
tgttaacactcagtaaaacgcgcgcccgcc

SEQ ID NO: 161448 - DNA, 30 bp, Artificial Sequence
  Synthetic oligonucleotide
ctgggtggggaaccatacgtcgcgcccgcc

SEQ ID NO: 161449 - DNA, 30 bp, Artificial Sequence
  Synthetic oligonucleotide
acgtgcgttttcttgtagaaaatgcccgcc

SEQ ID NO: 161450 - DNA, 30 bp, Artificial Sequence
  Synthetic oligonucleotide
aacgccttacattatctaagattgcccgcc

SEQ ID NO: 161451 - DNA, 30 bp, Artificial Sequence
  Synthetic oligonucleotide
gttggtccgtagcgaaggtacctggccgcc

SEQ ID NO: 161452 - DNA, 30 bp, Artificial Sequence
  Synthetic oligonucleotide
tttgctcatcccaagtgattgttgtccgcc

SEQ ID NO: 161453 - DNA, 30 bp, Artificial Sequence
  Synthetic oligonucleotide
aagaggtcgtgttgactgatacaacgcgcc

SEQ ID NO: 161454 - DNA, 30 bp, Artificial Sequence
  Synthetic oligonucleotide
cgagtagactgtcaataaaagtggggcgcc

SEQ ID NO: 161455 - DNA, 30 bp, Artificial Sequence
  Synthetic oligonucleotide
gacagtggcgtcatcgaaatactgggcgcc

SEQ ID NO: 161456 - DNA, 30 bp, Artificial Sequence
  Synthetic oligonucleotide
gcctgtggaacataaggcagatttatcgcc

SEQ ID NO: 161457 - DNA, 30 bp, Artificial Sequence
  Synthetic oligonucleotide
agtgactatcagtcacgaggtcagctcgcc

SEQ ID NO: 161458 - DNA, 30 bp, Artificial Sequence
  Synthetic oligonucleotide
cgtaatccacgcgggttgttttaggtcgcc

SEQ ID NO: 161459 - DNA, 30 bp, Artificial Sequence
  Synthetic oligonucleotide
agggacaatatcgtcctgaggtcattcgcc

SEQ ID NO: 161460 - DNA, 30 bp, Artificial Sequence
  Synthetic oligonucleotide
acatgggttcctacgtccccgagattcgcc

SEQ ID NO: 161461 - DNA, 30 bp, Artificial Sequence
  Synthetic oligonucleotide
gctaactccagacaggtactcgagttcgcc

SEQ ID NO: 161462 - DNA, 30 bp, Artificial Sequence
  Synthetic oligonucleotide
gcataaagtaaatggtgtgggagccaggcc

SEQ ID NO: 161463 - DNA, 31 bp, Artificial Sequence
  Synthetic oligonucleotide
ccgtgcaaatgcttattggggcgatcaggcc

SEQ ID NO: 161464 - DNA, 30 bp, Artificial Sequence
  Synthetic oligonucleotide
ctacactatgagggacaacttcctcaggcc

SEQ ID NO: 161465 - DNA, 30 bp, Artificial Sequence
  Synthetic oligonucleotide
atggttaccacaaagcagcggtcagaggcc

SEQ ID NO: 161466 - DNA, 30 bp, Artificial Sequence
  Synthetic oligonucleotide
catgcgccgattaccattacaagtgaggcc

SEQ ID NO: 161467 - DNA, 30 bp, Artificial Sequence
  Synthetic oligonucleotide
ttagatataagtgactaagagtggtaggcc

SEQ ID NO: 161468 - DNA, 30 bp, Artificial Sequence
  Synthetic oligonucleotide
ggggaaaggctaagaggggtgtggtaggcc

SEQ ID NO: 161469 - DNA, 30 bp, Artificial Sequence
  Synthetic oligonucleotide
accctcgtactaggttggaactcttaggcc

SEQ ID NO: 161470 - DNA, 30 bp, Artificial Sequence
  Synthetic oligonucleotide
catgttgtctaactgagtaggttaacggcc

SEQ ID NO: 161471 - DNA, 30 bp, Artificial Sequence
  Synthetic oligonucleotide
atataatcattcaatccaagtgggccggcc

SEQ ID NO: 161472 - DNA, 30 bp, Artificial Sequence
  Synthetic oligonucleotide
tcgcgtgccagtcgaccggaaatagcggcc

SEQ ID NO: 161473 - DNA, 30 bp, Artificial Sequence
  Synthetic oligonucleotide
cggtgtgtagctatgtcttcactcgcggcc

SEQ ID NO: 161474 - DNA, 30 bp, Artificial Sequence
  Synthetic oligonucleotide
cataggtagataagcgcaaggtgtgcggcc

SEQ ID NO: 161475 - DNA, 30 bp, Artificial Sequence
  Synthetic oligonucleotide
tacgaaatgtggtgagtgcagttatcggcc

SEQ ID NO: 161476 - DNA, 30 bp, Artificial Sequence
  Synthetic oligonucleotide
ttaacgttgtggtatgtgggagactcggcc

SEQ ID NO: 161477 - DNA, 30 bp, Artificial Sequence
  Synthetic oligonucleotide
ttgcttcgtgtggaagacgggggctcggcc

SEQ ID NO: 161478 - DNA, 30 bp, Artificial Sequence
  Synthetic oligonucleotide
tccggagcattggaacaggtgcacagggcc

SEQ ID NO: 161479 - DNA, 30 bp, Artificial Sequence
  Synthetic oligonucleotide
gtgagcgtagtggatcccagaaatagggcc

SEQ ID NO: 161480 - DNA, 30 bp, Artificial Sequence
  Synthetic oligonucleotide
ctgcattagggatagaggagacaccgggcc

SEQ ID NO: 161481 - DNA, 30 bp, Artificial Sequence
  Synthetic oligonucleotide
aacaaatggtcaacttctttggtccgggcc

SEQ ID NO: 161482 - DNA, 30 bp, Artificial Sequence
  Synthetic oligonucleotide
gccttccgaaccgtgatgggaactcgggcc

SEQ ID NO: 161483 - DNA, 30 bp, Artificial Sequence
  Synthetic oligonucleotide
cagaacgacagggtgagcctcaaatgggcc

SEQ ID NO: 161484 - DNA, 30 bp, Artificial Sequence
  Synthetic oligonucleotide
gcggtccgaacgcgcaatgttacctgggcc

SEQ ID NO: 161485 - DNA, 30 bp, Artificial Sequence
  Synthetic oligonucleotide
aacggtcatcgaagcgtcatcatgtgggcc

SEQ ID NO: 161486 - DNA, 30 bp, Artificial Sequence
  Synthetic oligonucleotide
gacaatgaaacatacccgatccacatggcc

SEQ ID NO: 161487 - DNA, 30 bp, Artificial Sequence
  Synthetic oligonucleotide
gtcggtagccaatggagaccagatatggcc

SEQ ID NO: 161488 - DNA, 30 bp, Artificial Sequence
  Synthetic oligonucleotide
agataaggaagtttccaaattagtatggcc

SEQ ID NO: 161489 - DNA, 30 bp, Artificial Sequence
  Synthetic oligonucleotide
ctcgcaagacaaccaaggggccacctggcc

SEQ ID NO: 161490 - DNA, 30 bp, Artificial Sequence
  Synthetic oligonucleotide
gacagctcgttccggagtgtgaatctggcc

SEQ ID NO: 161491 - DNA, 30 bp, Artificial Sequence
  Synthetic oligonucleotide
gctcgtcgggagtctttataagtggtggcc

SEQ ID NO: 161492 - DNA, 30 bp, Artificial Sequence
  Synthetic oligonucleotide
gggaaaaatgggcggggcaaggatgtggcc

SEQ ID NO: 161493 - DNA, 30 bp, Artificial Sequence
  Synthetic oligonucleotide
caactcacccatacgaaattggccttggcc

SEQ ID NO: 161494 - DNA, 30 bp, Artificial Sequence
  Synthetic oligonucleotide
ggtttaggtccacaggtggagttcttggcc

SEQ ID NO: 161495 - DNA, 30 bp, Artificial Sequence
  Synthetic oligonucleotide
ggtgcatgaggtggtgtgcgattgttggcc

SEQ ID NO: 161496 - DNA, 30 bp, Artificial Sequence
  Synthetic oligonucleotide
tcggcttacggtcagactaccggtttggcc

SEQ ID NO: 161497 - DNA, 30 bp, Artificial Sequence
  Synthetic oligonucleotide
cgtaaacatgattaacgttagaggaatgcc

SEQ ID NO: 161498 - DNA, 30 bp, Artificial Sequence
  Synthetic oligonucleotide
aaaagagagctgggacgtaaacgcgatgcc

SEQ ID NO: 161499 - DNA, 30 bp, Artificial Sequence
  Synthetic oligonucleotide
gagccctatagagatactaccatcgatgcc

SEQ ID NO: 161500 - DNA, 30 bp, Artificial Sequence
  Synthetic oligonucleotide
gactatgtcgtaaggtcggaatatgatgcc

SEQ ID NO: 161501 - DNA, 30 bp, Artificial Sequence
  Synthetic oligonucleotide
acacgttacttccataaggcgggtgatgcc

SEQ ID NO: 161502 - DNA, 30 bp, Artificial Sequence
  Synthetic oligonucleotide
gacgtcggtgctttatagaagaaatatgcc

SEQ ID NO: 161503 - DNA, 30 bp, Artificial Sequence
  Synthetic oligonucleotide
cgaggggattttggccagtataaatatgcc

SEQ ID NO: 161504 - DNA, 30 bp, Artificial Sequence
  Synthetic oligonucleotide
acccgcctggagaataggccaacatatgcc

SEQ ID NO: 161505 - DNA, 30 bp, Artificial Sequence
  Synthetic oligonucleotide
acgggaggaatacccgcaaaggtgtatgcc

SEQ ID NO: 161506 - DNA, 30 bp, Artificial Sequence
  Synthetic oligonucleotide
ctgactacggcggtgctatattcttatgcc

SEQ ID NO: 161507 - DNA, 30 bp, Artificial Sequence
  Synthetic oligonucleotide
tggaactcttaatgcgcggcggagactgcc

SEQ ID NO: 161508 - DNA, 30 bp, Artificial Sequence
  Synthetic oligonucleotide
cttagcaaagtcttaagctgagcgactgcc

SEQ ID NO: 161509 - DNA, 30 bp, Artificial Sequence
  Synthetic oligonucleotide
gctaggggttatggaaattgccgtactgcc

SEQ ID NO: 161510 - DNA, 30 bp, Artificial Sequence
  Synthetic oligonucleotide
tacgtgatatttcaatggcgatagcctgcc

SEQ ID NO: 161511 - DNA, 30 bp, Artificial Sequence
  Synthetic oligonucleotide
aggttccggctggctaccaagttgcctgcc

SEQ ID NO: 161512 - DNA, 30 bp, Artificial Sequence
  Synthetic oligonucleotide
gggttgcgaggtgggcggggtctagctgcc

SEQ ID NO: 161513 - DNA, 30 bp, Artificial Sequence
  Synthetic oligonucleotide
agcggctaacattttaaggtcaacgctgcc

SEQ ID NO: 161514 - DNA, 30 bp, Artificial Sequence
  Synthetic oligonucleotide
gcaaataaagaattagttggataatctgcc

SEQ ID NO: 161515 - DNA, 30 bp, Artificial Sequence
  Synthetic oligonucleotide
aagaggcgcaaagcacgactccggtctgcc

SEQ ID NO: 161516 - DNA, 30 bp, Artificial Sequence
  Synthetic oligonucleotide
ggattaatagagctatcatctgaacgtgcc

SEQ ID NO: 161517 - DNA, 30 bp, Artificial Sequence
  Synthetic oligonucleotide
aggacgaacatgcgcaggccaacccgtgcc

SEQ ID NO: 161518 - DNA, 30 bp, Artificial Sequence
  Synthetic oligonucleotide
ttaggatatactggtgcatccgggcgtgcc

SEQ ID NO: 161519 - DNA, 30 bp, Artificial Sequence
  Synthetic oligonucleotide
gagcgtcaggggagcagaactacatgtgcc

SEQ ID NO: 161520 - DNA, 30 bp, Artificial Sequence
  Synthetic oligonucleotide
tcgggtcacgaggatctttggaagtgtgcc

SEQ ID NO: 161521 - DNA, 31 bp, Artificial Sequence
  Synthetic oligonucleotide
ggagaaatctctccgatcgccaatcattgcc

SEQ ID NO: 161522 - DNA, 30 bp, Artificial Sequence
  Synthetic oligonucleotide
ttaccgggaaaccagagctcgtctattgcc

SEQ ID NO: 161523 - DNA, 30 bp, Artificial Sequence
  Synthetic oligonucleotide
cgaagaagcatcgttctcttggagcttgcc

SEQ ID NO: 161524 - DNA, 30 bp, Artificial Sequence
  Synthetic oligonucleotide
atcataggctcaaacaacagggaagttgcc

SEQ ID NO: 161525 - DNA, 30 bp, Artificial Sequence
  Synthetic oligonucleotide
gggcgctaagtgaccaaatacacagttgcc

SEQ ID NO: 161526 - DNA, 30 bp, Artificial Sequence
  Synthetic oligonucleotide
cgaccgacgacggacttccgccccgttgcc

SEQ ID NO: 161527 - DNA, 30 bp, Artificial Sequence
  Synthetic oligonucleotide
aacttaactgctcaatactagtaggttgcc

SEQ ID NO: 161528 - DNA, 30 bp, Artificial Sequence
  Synthetic oligonucleotide
catactccatcgtagtgggggacatttgcc

SEQ ID NO: 161529 - DNA, 30 bp, Artificial Sequence
  Synthetic oligonucleotide
agtgtcagaatcgggggcatggcctttgcc

SEQ ID NO: 161530 - DNA, 30 bp, Artificial Sequence
  Synthetic oligonucleotide
tatatcccgtaaaattgtcacccgtttgcc

SEQ ID NO: 161531 - DNA, 30 bp, Artificial Sequence
  Synthetic oligonucleotide
ttagaccagcccaatcgtgcaagaaaatcc

SEQ ID NO: 161532 - DNA, 30 bp, Artificial Sequence
  Synthetic oligonucleotide
gataaggtccggggtacggcattaaaatcc

SEQ ID NO: 161533 - DNA, 30 bp, Artificial Sequence
  Synthetic oligonucleotide
gaaaagttacacttaaagactaacaaatcc

SEQ ID NO: 161534 - DNA, 30 bp, Artificial Sequence
  Synthetic oligonucleotide
agggaaactgcgactatccggggcaaatcc

SEQ ID NO: 161535 - DNA, 30 bp, Artificial Sequence
  Synthetic oligonucleotide
cacgtggtcagggatgagtgagcgaaatcc

SEQ ID NO: 161536 - DNA, 30 bp, Artificial Sequence
  Synthetic oligonucleotide
tttctaagacataggtccactgcgaaatcc

SEQ ID NO: 161537 - DNA, 30 bp, Artificial Sequence
  Synthetic oligonucleotide
aaggcagactaaaatcctgtccggaaatcc

SEQ ID NO: 161538 - DNA, 30 bp, Artificial Sequence
  Synthetic oligonucleotide
ttcgaacgggggacgggactgcataaatcc

SEQ ID NO: 161539 - DNA, 30 bp, Artificial Sequence
  Synthetic oligonucleotide
tgtccttgtcgggcaatgtgtagccaatcc

SEQ ID NO: 161540 - DNA, 30 bp, Artificial Sequence
  Synthetic oligonucleotide
ccaacgatccattggagcagttagcaatcc

SEQ ID NO: 161541 - DNA, 30 bp, Artificial Sequence
  Synthetic oligonucleotide
ctgtcatatccatgcggtaccaatcaatcc

SEQ ID NO: 161542 - DNA, 30 bp, Artificial Sequence
  Synthetic oligonucleotide
agaagtaagggcgaggcgctgtgagaatcc

SEQ ID NO: 161543 - DNA, 30 bp, Artificial Sequence
  Synthetic oligonucleotide
gtcttgtgcgtctagcgttcaaaggaatcc

SEQ ID NO: 161544 - DNA, 30 bp, Artificial Sequence
  Synthetic oligonucleotide
acacatgtgcaatatgcagatgtggaatcc

SEQ ID NO: 161545 - DNA, 30 bp, Artificial Sequence
  Synthetic oligonucleotide
ggtcacaaccagaagtattaacaataatcc

SEQ ID NO: 161546 - DNA, 30 bp, Artificial Sequence
  Synthetic oligonucleotide
catacaaaataccaagcgttggtgtaatcc

SEQ ID NO: 161547 - DNA, 30 bp, Artificial Sequence
  Synthetic oligonucleotide
gagggggtgagtcatttaggcgtttaatcc

SEQ ID NO: 161548 - DNA, 30 bp, Artificial Sequence
  Synthetic oligonucleotide
ctccgcatgggttcgggggagccaacatcc

SEQ ID NO: 161549 - DNA, 30 bp, Artificial Sequence
  Synthetic oligonucleotide
tcacttagtgatcgccgccatgagacatcc

SEQ ID NO: 161550 - DNA, 30 bp, Artificial Sequence
  Synthetic oligonucleotide
agatgaatatcggatcaagtgggaccatcc

SEQ ID NO: 161551 - DNA, 30 bp, Artificial Sequence
  Synthetic oligonucleotide
ttgaagtggaactgtgggaacttgccatcc

SEQ ID NO: 161552 - DNA, 30 bp, Artificial Sequence
  Synthetic oligonucleotide
aaacggggtacgctaggtggcggtccatcc

SEQ ID NO: 161553 - DNA, 30 bp, Artificial Sequence
  Synthetic oligonucleotide
atgaggacatcttcatcgctttaagcatcc

SEQ ID NO: 161554 - DNA, 30 bp, Artificial Sequence
  Synthetic oligonucleotide
gatccttgtagttcggataagcgaagatcc

SEQ ID NO: 161555 - DNA, 30 bp, Artificial Sequence
  Synthetic oligonucleotide
tgagcaaaggtgatagggtaccctagatcc

SEQ ID NO: 161556 - DNA, 30 bp, Artificial Sequence
  Synthetic oligonucleotide
ccatacaaaataaaggatgcgtaacgatcc

SEQ ID NO: 161557 - DNA, 30 bp, Artificial Sequence
  Synthetic oligonucleotide
tcaaatgagaatcactgctagatacgatcc

SEQ ID NO: 161558 - DNA, 30 bp, Artificial Sequence
  Synthetic oligonucleotide
ccgacaaatcaagcggtagttatccgatcc

SEQ ID NO: 161559 - DNA, 30 bp, Artificial Sequence
  Synthetic oligonucleotide
gcagaccgggtagacgtccaccgaggatcc

SEQ ID NO: 161560 - DNA, 30 bp, Artificial Sequence
  Synthetic oligonucleotide
gatcagttctgatagtgagccaagggatcc

SEQ ID NO: 161561 - DNA, 30 bp, Artificial Sequence
  Synthetic oligonucleotide
atgcgtaaaagacgaaacacttgtggatcc

SEQ ID NO: 161562 - DNA, 30 bp, Artificial Sequence
  Synthetic oligonucleotide
agctagaagtataagaagttttcatgatcc

SEQ ID NO: 161563 - DNA, 30 bp, Artificial Sequence
  Synthetic oligonucleotide
caggttagggtgacggtgggtaaaatatcc

SEQ ID NO: 161564 - DNA, 30 bp, Artificial Sequence
  Synthetic oligonucleotide
ggcgtagcgtagtggacaatgggcctatcc

SEQ ID NO: 161565 - DNA, 30 bp, Artificial Sequence
  Synthetic oligonucleotide
gcctagtggagtcgaaacagattgctatcc

SEQ ID NO: 161566 - DNA, 30 bp, Artificial Sequence
  Synthetic oligonucleotide
acaaggtaaatctagatatattctctatcc

SEQ ID NO: 161567 - DNA, 30 bp, Artificial Sequence
  Synthetic oligonucleotide
gaggggtgccagggattcatgagagtatcc

SEQ ID NO: 161568 - DNA, 30 bp, Artificial Sequence
  Synthetic oligonucleotide
gtacgagcaacttagaatttagcggtatcc

SEQ ID NO: 161569 - DNA, 30 bp, Artificial Sequence
  Synthetic oligonucleotide
ttgaacggtatgcgagagtagcgtgtatcc

SEQ ID NO: 161570 - DNA, 30 bp, Artificial Sequence
  Synthetic oligonucleotide
tctgcgaaggattcgattaaccacttatcc

SEQ ID NO: 161571 - DNA, 30 bp, Artificial Sequence
  Synthetic oligonucleotide
cagggtcctagacgggtagggaagttatcc

SEQ ID NO: 161572 - DNA, 30 bp, Artificial Sequence
  Synthetic oligonucleotide
gttataatcaattgaggtcaagcgttatcc

SEQ ID NO: 161573 - DNA, 30 bp, Artificial Sequence
  Synthetic oligonucleotide
gaagcaaagtctaaaagatagtacaactcc

SEQ ID NO: 161574 - DNA, 30 bp, Artificial Sequence
  Synthetic oligonucleotide
agcttcctccaagatgttgcaccgaactcc

SEQ ID NO: 161575 - DNA, 30 bp, Artificial Sequence
  Synthetic oligonucleotide
agcggcattaaggaacctcggccgaactcc

SEQ ID NO: 161576 - DNA, 30 bp, Artificial Sequence
  Synthetic oligonucleotide
acggtcccgtatagagttatgtggaactcc

SEQ ID NO: 161577 - DNA, 30 bp, Artificial Sequence
  Synthetic oligonucleotide
cagggcaacatactttttcagtttaactcc

SEQ ID NO: 161578 - DNA, 30 bp, Artificial Sequence
  Synthetic oligonucleotide
acagacatcggttgaggaaatgaagactcc

SEQ ID NO: 161579 - DNA, 31 bp, Artificial Sequence
  Synthetic oligonucleotide
ggaggtgacttcaagaaatataccagactcc

SEQ ID NO: 161580 - DNA, 30 bp, Artificial Sequence
  Synthetic oligonucleotide
cgtcttcggcctaagcgtggaaaggactcc

SEQ ID NO: 161581 - DNA, 30 bp, Artificial Sequence
  Synthetic oligonucleotide
cctcccatcaagggaaagctaggtgactcc

SEQ ID NO: 161582 - DNA, 30 bp, Artificial Sequence
  Synthetic oligonucleotide
cgtcttctttgtaaaaataaccgctactcc

SEQ ID NO: 161583 - DNA, 30 bp, Artificial Sequence
  Synthetic oligonucleotide
ggtaaggagataatgggataagcgtactcc

SEQ ID NO: 161584 - DNA, 30 bp, Artificial Sequence
  Synthetic oligonucleotide
acatgcgttatagcatcaggcttgtactcc

SEQ ID NO: 161585 - DNA, 30 bp, Artificial Sequence
  Synthetic oligonucleotide
ccgcgcacgctcgaggacatatcgacctcc

SEQ ID NO: 161586 - DNA, 30 bp, Artificial Sequence
  Synthetic oligonucleotide
gcgggcctaatcttacatggaaatacctcc

SEQ ID NO: 161587 - DNA, 30 bp, Artificial Sequence
  Synthetic oligonucleotide
tagatcgacatgcaaggtcaatctacctcc

SEQ ID NO: 161588 - DNA, 30 bp, Artificial Sequence
  Synthetic oligonucleotide
tggtacacggagagtatctacaaaccctcc

SEQ ID NO: 161589 - DNA, 30 bp, Artificial Sequence
  Synthetic oligonucleotide
tcggcgttatattgcaagtagcgagcctcc

SEQ ID NO: 161590 - DNA, 30 bp, Artificial Sequence
  Synthetic oligonucleotide
tgtctgagaatcgatcagactagctcctcc

SEQ ID NO: 161591 - DNA, 30 bp, Artificial Sequence
  Synthetic oligonucleotide
cacaatgaggctctctaggatacgagctcc

SEQ ID NO: 161592 - DNA, 30 bp, Artificial Sequence
  Synthetic oligonucleotide
ctagacaacccgtcataagtgggccgctcc

SEQ ID NO: 161593 - DNA, 30 bp, Artificial Sequence
  Synthetic oligonucleotide
cgagactggtcgaacgcccttgggcgctcc

SEQ ID NO: 161594 - DNA, 30 bp, Artificial Sequence
  Synthetic oligonucleotide
tattgggttcacggaactcgctccggctcc

SEQ ID NO: 161595 - DNA, 30 bp, Artificial Sequence
  Synthetic oligonucleotide
tgtgacggctatcctgacgaattcggctcc

SEQ ID NO: 161596 - DNA, 30 bp, Artificial Sequence
  Synthetic oligonucleotide
cgactcgacgctattccataaatgggctcc

SEQ ID NO: 161597 - DNA, 30 bp, Artificial Sequence
  Synthetic oligonucleotide
ctgcggtgtgctcccaacaagaaatgctcc

SEQ ID NO: 161598 - DNA, 30 bp, Artificial Sequence
  Synthetic oligonucleotide
atatccggaaaccgagcccgtccatgctcc

SEQ ID NO: 161599 - DNA, 30 bp, Artificial Sequence
  Synthetic oligonucleotide
agtgcctgtacgctttaaaaccacatctcc

SEQ ID NO: 161600 - DNA, 30 bp, Artificial Sequence
  Synthetic oligonucleotide
ggcgagaattggaccgtctcagtgatctcc

SEQ ID NO: 161601 - DNA, 30 bp, Artificial Sequence
  Synthetic oligonucleotide
ggcctatgtggcatgactggcaacctctcc

SEQ ID NO: 161602 - DNA, 30 bp, Artificial Sequence
  Synthetic oligonucleotide
gcggtcgagacaagggcccgatacctctcc

SEQ ID NO: 161603 - DNA, 30 bp, Artificial Sequence
  Synthetic oligonucleotide
cctgcacaagcctatccaatgagagtctcc

SEQ ID NO: 161604 - DNA, 30 bp, Artificial Sequence
  Synthetic oligonucleotide
ctaacttgaaatcgttggctatcattctcc

SEQ ID NO: 161605 - DNA, 30 bp, Artificial Sequence
  Synthetic oligonucleotide
cgtgacggtagtcctaaaaagaggttctcc

SEQ ID NO: 161606 - DNA, 30 bp, Artificial Sequence
  Synthetic oligonucleotide
gggaggtaaactctaaagcgataaaagtcc

SEQ ID NO: 161607 - DNA, 30 bp, Artificial Sequence
  Synthetic oligonucleotide
acgataccaagcgtatatgcaggaaagtcc

SEQ ID NO: 161608 - DNA, 30 bp, Artificial Sequence
  Synthetic oligonucleotide
aagcgagaggcctgcatactctaacagtcc

SEQ ID NO: 161609 - DNA, 30 bp, Artificial Sequence
  Synthetic oligonucleotide
agattcgtacgtccgttagatcaccagtcc

SEQ ID NO: 161610 - DNA, 30 bp, Artificial Sequence
  Synthetic oligonucleotide
ctatttaacaaaaggtcgtgtagccagtcc

SEQ ID NO: 161611 - DNA, 30 bp, Artificial Sequence
  Synthetic oligonucleotide
gcgagcattagactacttgccacagagtcc

SEQ ID NO: 161612 - DNA, 30 bp, Artificial Sequence
  Synthetic oligonucleotide
cgacggtatcatggcctagaagaggagtcc

SEQ ID NO: 161613 - DNA, 30 bp, Artificial Sequence
  Synthetic oligonucleotide
gatggttaactgggcaaaacagaggagtcc

SEQ ID NO: 161614 - DNA, 30 bp, Artificial Sequence
  Synthetic oligonucleotide
agcaaagcttctacgaggatcggggagtcc

SEQ ID NO: 161615 - DNA, 30 bp, Artificial Sequence
  Synthetic oligonucleotide
ggtataggcggtgtcattattacatagtcc

SEQ ID NO: 161616 - DNA, 30 bp, Artificial Sequence
  Synthetic oligonucleotide
cccaggtttgatgtggaataaaactagtcc

SEQ ID NO: 161617 - DNA, 30 bp, Artificial Sequence
  Synthetic oligonucleotide
taccacaagttatgcggatagcattagtcc

SEQ ID NO: 161618 - DNA, 30 bp, Artificial Sequence
  Synthetic oligonucleotide
gctagtgtgcgtcttaaccgtgaaacgtcc

SEQ ID NO: 161619 - DNA, 30 bp, Artificial Sequence
  Synthetic oligonucleotide
gatgaaatggcacctagcagcgcaccgtcc

SEQ ID NO: 161620 - DNA, 30 bp, Artificial Sequence
  Synthetic oligonucleotide
gtgagagcgtacaccaaatcagtcccgtcc

SEQ ID NO: 161621 - DNA, 30 bp, Artificial Sequence
  Synthetic oligonucleotide
cggaatcatcaaaggtttagaggcgcgtcc

SEQ ID NO: 161622 - DNA, 30 bp, Artificial Sequence
  Synthetic oligonucleotide
ggaaatacaatagcgcatggtatggcgtcc

SEQ ID NO: 161623 - DNA, 30 bp, Artificial Sequence
  Synthetic oligonucleotide
gtattgtgatgagacggtagagaatcgtcc

SEQ ID NO: 161624 - DNA, 30 bp, Artificial Sequence
  Synthetic oligonucleotide
agcgcaaatgtaacgtggcgtggatcgtcc

SEQ ID NO: 161625 - DNA, 30 bp, Artificial Sequence
  Synthetic oligonucleotide
ggagagtatcccataccgagctcctcgtcc

SEQ ID NO: 161626 - DNA, 30 bp, Artificial Sequence
  Synthetic oligonucleotide
gcactctttcgaacattgactaagtcgtcc

SEQ ID NO: 161627 - DNA, 30 bp, Artificial Sequence
  Synthetic oligonucleotide
acacgtgcttaaaggaacaaccagtcgtcc

SEQ ID NO: 161628 - DNA, 30 bp, Artificial Sequence
  Synthetic oligonucleotide
acaatggcttaatcaaaggggccgtcgtcc

SEQ ID NO: 161629 - DNA, 30 bp, Artificial Sequence
  Synthetic oligonucleotide
tgcgaacaacgacgcgaggccaagaggtcc

SEQ ID NO: 161630 - DNA, 30 bp, Artificial Sequence
  Synthetic oligonucleotide
tctcacagccgaggcattacgtgccggtcc

SEQ ID NO: 161631 - DNA, 30 bp, Artificial Sequence
  Synthetic oligonucleotide
tattgggtatggagggcataatttcggtcc

SEQ ID NO: 161632 - DNA, 30 bp, Artificial Sequence
  Synthetic oligonucleotide
acttagtgttgaggttacggtagggggtcc

SEQ ID NO: 161633 - DNA, 30 bp, Artificial Sequence
  Synthetic oligonucleotide
ggcacacccaatgctgacgaggtggggtcc

SEQ ID NO: 161634 - DNA, 30 bp, Artificial Sequence
  Synthetic oligonucleotide
gaagttgtctggcgaggggggtgatggtcc

SEQ ID NO: 161635 - DNA, 30 bp, Artificial Sequence
  Synthetic oligonucleotide
atagtctccgtgcccagaactttgtggtcc

SEQ ID NO: 161636 - DNA, 30 bp, Artificial Sequence
  Synthetic oligonucleotide
aacagctagctcaggacggggagttggtcc

SEQ ID NO: 161637 - DNA, 30 bp, Artificial Sequence
  Synthetic oligonucleotide
cggaaatatgtggggttggcatcactgtcc

SEQ ID NO: 161638 - DNA, 30 bp, Artificial Sequence
  Synthetic oligonucleotide
ccatccgagggcgttgatacatgactgtcc

SEQ ID NO: 161639 - DNA, 30 bp, Artificial Sequence
  Synthetic oligonucleotide
taggcaccagctgcaatccaggccgtgtcc

SEQ ID NO: 161640 - DNA, 30 bp, Artificial Sequence
  Synthetic oligonucleotide
tcatttggtgttgggccatcattggtgtcc

SEQ ID NO: 161641 - DNA, 30 bp, Artificial Sequence
  Synthetic oligonucleotide
ggggggtcaaaaccatagcttgcattgtcc

SEQ ID NO: 161642 - DNA, 30 bp, Artificial Sequence
  Synthetic oligonucleotide
ttagcaccaagtgaatccacacgtttgtcc

SEQ ID NO: 161643 - DNA, 30 bp, Artificial Sequence
  Synthetic oligonucleotide
taacgtaatacaaggatacccgaccattcc

SEQ ID NO: 161644 - DNA, 30 bp, Artificial Sequence
  Synthetic oligonucleotide
acttgatccatggccagacccaatcattcc

SEQ ID NO: 161645 - DNA, 30 bp, Artificial Sequence
  Synthetic oligonucleotide
atagccgagtaatgaaatgcctaagattcc

SEQ ID NO: 161646 - DNA, 30 bp, Artificial Sequence
  Synthetic oligonucleotide
tgtactagtttaggagtaagttaagattcc

SEQ ID NO: 161647 - DNA, 30 bp, Artificial Sequence
  Synthetic oligonucleotide
acataacatgccgatatcattaattattcc

SEQ ID NO: 161648 - DNA, 30 bp, Artificial Sequence
  Synthetic oligonucleotide
taaccctctgtggaaaaatgcagcacttcc

SEQ ID NO: 161649 - DNA, 30 bp, Artificial Sequence
  Synthetic oligonucleotide
aggggcgatcagcacaatgcggaaccttcc

SEQ ID NO: 161650 - DNA, 30 bp, Artificial Sequence
  Synthetic oligonucleotide
aagacaacaaggcaagggcgatagccttcc

SEQ ID NO: 161651 - DNA, 30 bp, Artificial Sequence
  Synthetic oligonucleotide
aactcaacgtcacagttagcaggagcttcc

SEQ ID NO: 161652 - DNA, 30 bp, Artificial Sequence
  Synthetic oligonucleotide
atcacttaaatggcgacattcactgcttcc

SEQ ID NO: 161653 - DNA, 30 bp, Artificial Sequence
  Synthetic oligonucleotide
tgagcactaatatagtgaaatacacgttcc

SEQ ID NO: 161654 - DNA, 30 bp, Artificial Sequence
  Synthetic oligonucleotide
tctacccctagatacgaaaaagagcgttcc

SEQ ID NO: 161655 - DNA, 30 bp, Artificial Sequence
  Synthetic oligonucleotide
ccacggccacctaagatgggtcatggttcc

SEQ ID NO: 161656 - DNA, 30 bp, Artificial Sequence
  Synthetic oligonucleotide
atagcgataaaatattgcaactatatttcc

SEQ ID NO: 161657 - DNA, 30 bp, Artificial Sequence
  Synthetic oligonucleotide
atgtattaccagtccagatggcagctttcc

SEQ ID NO: 161658 - DNA, 30 bp, Artificial Sequence
  Synthetic oligonucleotide
aggggcgccttaaggacttgggaggtttcc

SEQ ID NO: 161659 - DNA, 30 bp, Artificial Sequence
  Synthetic oligonucleotide
cccagagctgaagttctcctgccgttttcc

SEQ ID NO: 161660 - DNA, 30 bp, Artificial Sequence
  Synthetic oligonucleotide
gtgtgcgctcgaacaatgagccttaaaagc

SEQ ID NO: 161661 - DNA, 30 bp, Artificial Sequence
  Synthetic oligonucleotide
ctagtagagggacgggggcatagccaaagc

SEQ ID NO: 161662 - DNA, 30 bp, Artificial Sequence
  Synthetic oligonucleotide
gcgctctactataattgtgaactgcaaagc

SEQ ID NO: 161663 - DNA, 30 bp, Artificial Sequence
  Synthetic oligonucleotide
cgatcatacttagcatacacacatcaaagc

SEQ ID NO: 161664 - DNA, 30 bp, Artificial Sequence
  Synthetic oligonucleotide
tgttaatcatcacacggaaaacgggaaagc

SEQ ID NO: 161665 - DNA, 30 bp, Artificial Sequence
  Synthetic oligonucleotide
gcgaagcgtagtcgttcattgtcataaagc

SEQ ID NO: 161666 - DNA, 30 bp, Artificial Sequence
  Synthetic oligonucleotide
ctgcactgctaactgggctcgtgataaagc

SEQ ID NO: 161667 - DNA, 30 bp, Artificial Sequence
  Synthetic oligonucleotide
ttattactcgagtcgaagggtcgctaaagc

SEQ ID NO: 161668 - DNA, 30 bp, Artificial Sequence
  Synthetic oligonucleotide
ttccggagtaggagatactgcaagtaaagc

SEQ ID NO: 161669 - DNA, 30 bp, Artificial Sequence
  Synthetic oligonucleotide
ggtgtgctcccgaccgtttgcctgtaaagc

SEQ ID NO: 161670 - DNA, 30 bp, Artificial Sequence
  Synthetic oligonucleotide
tacagaaagctccttaggaagaattaaagc

SEQ ID NO: 161671 - DNA, 30 bp, Artificial Sequence
  Synthetic oligonucleotide
tcaataccagtacataggtctcattaaagc

SEQ ID NO: 161672 - DNA, 30 bp, Artificial Sequence
  Synthetic oligonucleotide
agacggttcgtcgactctggcccttaaagc

SEQ ID NO: 161673 - DNA, 30 bp, Artificial Sequence
  Synthetic oligonucleotide
ggcatctataggggcggcatccgaacaagc

SEQ ID NO: 161674 - DNA, 30 bp, Artificial Sequence
  Synthetic oligonucleotide
atctaggagctaaggccggaacggacaagc

SEQ ID NO: 161675 - DNA, 30 bp, Artificial Sequence
  Synthetic oligonucleotide
gctctcctgcgtggcatagtagtgacaagc

SEQ ID NO: 161676 - DNA, 30 bp, Artificial Sequence
  Synthetic oligonucleotide
gggcatgaagcaacgtatagcaatacaagc

SEQ ID NO: 161677 - DNA, 30 bp, Artificial Sequence
  Synthetic oligonucleotide
agcagataagtctacaagtttagcccaagc

SEQ ID NO: 161678 - DNA, 30 bp, Artificial Sequence
  Synthetic oligonucleotide
ggaagcccaaaaaaagcatgggtcccaagc

SEQ ID NO: 161679 - DNA, 30 bp, Artificial Sequence
  Synthetic oligonucleotide
acacacaagaaatggtcatttgggccaagc

SEQ ID NO: 161680 - DNA, 30 bp, Artificial Sequence
  Synthetic oligonucleotide
aactcgaagctggatcccgattgcgcaagc

SEQ ID NO: 161681 - DNA, 30 bp, Artificial Sequence
  Synthetic oligonucleotide
gtagctagaaaagacgtctttggggcaagc

SEQ ID NO: 161682 - DNA, 30 bp, Artificial Sequence
  Synthetic oligonucleotide
aggaaaacggttggctaacaggctgcaagc

SEQ ID NO: 161683 - DNA, 30 bp, Artificial Sequence
  Synthetic oligonucleotide
aaagggattacgtatgtctgctctgcaagc

SEQ ID NO: 161684 - DNA, 30 bp, Artificial Sequence
  Synthetic oligonucleotide
gcttagcaccaggttcctcgtaaatcaagc

SEQ ID NO: 161685 - DNA, 30 bp, Artificial Sequence
  Synthetic oligonucleotide
acatacttacatcccctaattcgctcaagc

SEQ ID NO: 161686 - DNA, 30 bp, Artificial Sequence
  Synthetic oligonucleotide
ctaagtgagacgggttaatggctctcaagc

SEQ ID NO: 161687 - DNA, 30 bp, Artificial Sequence
  Synthetic oligonucleotide
tatggcggcgcatctggaaagacttcaagc

SEQ ID NO: 161688 - DNA, 30 bp, Artificial Sequence
  Synthetic oligonucleotide
cgagtggcatgtgcccaatgtccaagaagc

SEQ ID NO: 161689 - DNA, 30 bp, Artificial Sequence
  Synthetic oligonucleotide
tcggcagatcacaacggctataacagaagc

SEQ ID NO: 161690 - DNA, 30 bp, Artificial Sequence
  Synthetic oligonucleotide
aaagtatcatagctagcgaggtcgagaagc

SEQ ID NO: 161691 - DNA, 30 bp, Artificial Sequence
  Synthetic oligonucleotide
gaaggactagcgccgcaatactggagaagc

SEQ ID NO: 161692 - DNA, 30 bp, Artificial Sequence
  Synthetic oligonucleotide
ttgatcttatcgcaaaatatgtatagaagc

SEQ ID NO: 161693 - DNA, 30 bp, Artificial Sequence
  Synthetic oligonucleotide
ccaacatccattgtacaataaaagcgaagc

SEQ ID NO: 161694 - DNA, 30 bp, Artificial Sequence
  Synthetic oligonucleotide
gatcgattcggtactctcacatcgcgaagc

SEQ ID NO: 161695 - DNA, 30 bp, Artificial Sequence
  Synthetic oligonucleotide
gtggccctgggagtgagcgtatatcgaagc

SEQ ID NO: 161696 - DNA, 30 bp, Artificial Sequence
  Synthetic oligonucleotide
aggtaactgggaactacgttcttaggaagc

SEQ ID NO: 161697 - DNA, 30 bp, Artificial Sequence
  Synthetic oligonucleotide
gacatgtactcaaaagtgtgtaagtgaagc

SEQ ID NO: 161698 - DNA, 30 bp, Artificial Sequence
  Synthetic oligonucleotide
acctgaattatcaaccatgaggcttgaagc

SEQ ID NO: 161699 - DNA, 30 bp, Artificial Sequence
  Synthetic oligonucleotide
tgacgagaacatgcatggcacatttgaagc

SEQ ID NO: 161700 - DNA, 30 bp, Artificial Sequence
  Synthetic oligonucleotide
cgattaatgcatggtaagcgctcaataagc

SEQ ID NO: 161701 - DNA, 30 bp, Artificial Sequence
  Synthetic oligonucleotide
gtgaaaatgaaataccctacgtttataagc

SEQ ID NO: 161702 - DNA, 30 bp, Artificial Sequence
  Synthetic oligonucleotide
gccaattctaacgtactgattggcctaagc

SEQ ID NO: 161703 - DNA, 30 bp, Artificial Sequence
  Synthetic oligonucleotide
tatggatagctgatcctcgttgcgctaagc

SEQ ID NO: 161704 - DNA, 40 bp, Artificial Sequence
  Synthetic oligonucleotide
acccttgcctttacgatacctttcaatcttaatgctaagc

SEQ ID NO: 161705 - DNA, 30 bp, Artificial Sequence
  Synthetic oligonucleotide
tataatgatcattcattgagcgaagtaagc

SEQ ID NO: 161706 - DNA, 30 bp, Artificial Sequence
  Synthetic oligonucleotide
caaaatgtgcgcggctagtcgagagtaagc

SEQ ID NO: 161707 - DNA, 30 bp, Artificial Sequence
  Synthetic oligonucleotide
accacggagccatcgccctgacccgtaagc

SEQ ID NO: 161708 - DNA, 30 bp, Artificial Sequence
  Synthetic oligonucleotide
ggagacgagtcagactattatcccgtaagc

SEQ ID NO: 161709 - DNA, 30 bp, Artificial Sequence
  Synthetic oligonucleotide
agtcgctcccgtggagtaatccaggtaagc

SEQ ID NO: 161710 - DNA, 30 bp, Artificial Sequence
  Synthetic oligonucleotide
ccgcatgtatctcgcatacggggtgtaagc

SEQ ID NO: 161711 - DNA, 30 bp, Artificial Sequence
  Synthetic oligonucleotide
acggggttttgatgatgagactgtgtaagc

SEQ ID NO: 161712 - DNA, 30 bp, Artificial Sequence
  Synthetic oligonucleotide
ctaggataggaataatttcaaaagttaagc

SEQ ID NO: 161713 - DNA, 30 bp, Artificial Sequence
  Synthetic oligonucleotide
gcgttcccccgtaccggcttgaggttaagc

SEQ ID NO: 161714 - DNA, 30 bp, Artificial Sequence
  Synthetic oligonucleotide
cccaaagcagatccgtagctatgtttaagc

SEQ ID NO: 161715 - DNA, 30 bp, Artificial Sequence
  Synthetic oligonucleotide
tgcatcaaggatcaaaggatcaaaaacagc

SEQ ID NO: 161716 - DNA, 30 bp, Artificial Sequence
  Synthetic oligonucleotide
acggttgagtgcgtacgcactttaaacagc

SEQ ID NO: 161717 - DNA, 30 bp, Artificial Sequence
  Synthetic oligonucleotide
agctgtcaggcgttgaagacttcacacagc

SEQ ID NO: 161718 - DNA, 30 bp, Artificial Sequence
  Synthetic oligonucleotide
tgagctagctatggatacatactccacagc

SEQ ID NO: 161719 - DNA, 30 bp, Artificial Sequence
  Synthetic oligonucleotide
ccatctatggacaatcaatacggggacagc

SEQ ID NO: 161720 - DNA, 30 bp, Artificial Sequence
  Synthetic oligonucleotide
cgccgtaggttccggaacgaatcatacagc

SEQ ID NO: 161721 - DNA, 30 bp, Artificial Sequence
  Synthetic oligonucleotide
gctcacatacaaatagctacacggtacagc

SEQ ID NO: 161722 - DNA, 30 bp, Artificial Sequence
  Synthetic oligonucleotide
ataaggtgattattgagagatagttacagc

SEQ ID NO: 161723 - DNA, 30 bp, Artificial Sequence
  Synthetic oligonucleotide
gacaataaatccagggagcgttcaaccagc

SEQ ID NO: 161724 - DNA, 30 bp, Artificial Sequence
  Synthetic oligonucleotide
tgtcgcaagtacgatttcgatttgaccagc

SEQ ID NO: 161725 - DNA, 30 bp, Artificial Sequence
  Synthetic oligonucleotide
gcaataaggcctaatgttatgatacccagc

SEQ ID NO: 161726 - DNA, 30 bp, Artificial Sequence
  Synthetic oligonucleotide
tatggaagcgtatgggtgcgagccgccagc

SEQ ID NO: 161727 - DNA, 30 bp, Artificial Sequence
  Synthetic oligonucleotide
agcaaaggggggttgtctcgggtcgccagc

SEQ ID NO: 161728 - DNA, 30 bp, Artificial Sequence
  Synthetic oligonucleotide
taggaaggcagcacgccttcgtatgccagc

SEQ ID NO: 161729 - DNA, 30 bp, Artificial Sequence
  Synthetic oligonucleotide
gttcgatcttaaagagagtcatctgccagc

SEQ ID NO: 161730 - DNA, 30 bp, Artificial Sequence
  Synthetic oligonucleotide
tgtcactggaggtaaagggcagactccagc

SEQ ID NO: 161731 - DNA, 30 bp, Artificial Sequence
  Synthetic oligonucleotide
atttggaacagaaaacgtgcagggtccagc

SEQ ID NO: 161732 - DNA, 30 bp, Artificial Sequence
  Synthetic oligonucleotide
ggaaatatcacaaatccgagaaaaagcagc

SEQ ID NO: 161733 - DNA, 30 bp, Artificial Sequence
  Synthetic oligonucleotide
ggtaatggtctccggtcaaaggccagcagc

SEQ ID NO: 161734 - DNA, 30 bp, Artificial Sequence
  Synthetic oligonucleotide
ggtgtaatatccagggattgcgttcgcagc

SEQ ID NO: 161735 - DNA, 30 bp, Artificial Sequence
  Synthetic oligonucleotide
tgtctaggacttttttcaaaaaacggcagc

SEQ ID NO: 161736 - DNA, 30 bp, Artificial Sequence
  Synthetic oligonucleotide
tgtaccgattgctacaattcatatggcagc

SEQ ID NO: 161737 - DNA, 30 bp, Artificial Sequence
  Synthetic oligonucleotide
actgaaaatgttcgttaacccagttgcagc

SEQ ID NO: 161738 - DNA, 30 bp, Artificial Sequence
  Synthetic oligonucleotide
ttcattctaacgaggctgatggacatcagc

SEQ ID NO: 161739 - DNA, 30 bp, Artificial Sequence
  Synthetic oligonucleotide
cctggccggttgagccaagacgcgatcagc

SEQ ID NO: 161740 - DNA, 30 bp, Artificial Sequence
  Synthetic oligonucleotide
cataatgattggtctggtgaatgtatcagc

SEQ ID NO: 161741 - DNA, 30 bp, Artificial Sequence
  Synthetic oligonucleotide
gaggaagtgacattttgttctaaactcagc

SEQ ID NO: 161742 - DNA, 30 bp, Artificial Sequence
  Synthetic oligonucleotide
actgtatctccctacgagaccagactcagc

SEQ ID NO: 161743 - DNA, 30 bp, Artificial Sequence
  Synthetic oligonucleotide
tgaatagtgcgagattaagaacacgtcagc

SEQ ID NO: 161744 - DNA, 30 bp, Artificial Sequence
  Synthetic oligonucleotide
atcgagtaacgagtaatgctccacgtcagc

SEQ ID NO: 161745 - DNA, 30 bp, Artificial Sequence
  Synthetic oligonucleotide
cgttaaataaaagagatcggtaacttcagc

SEQ ID NO: 161746 - DNA, 30 bp, Artificial Sequence
  Synthetic oligonucleotide
actgaggatctatacgtttgttagttcagc

SEQ ID NO: 161747 - DNA, 30 bp, Artificial Sequence
  Synthetic oligonucleotide
acccgctacgaagaacatcttcgcaagagc

SEQ ID NO: 161748 - DNA, 30 bp, Artificial Sequence
  Synthetic oligonucleotide
cagtaaagcgcgctctcgttagtgaagagc

SEQ ID NO: 161749 - DNA, 30 bp, Artificial Sequence
  Synthetic oligonucleotide
gggacaatttgcgtatgtgcactccagagc

SEQ ID NO: 161750 - DNA, 30 bp, Artificial Sequence
  Synthetic oligonucleotide
gccgcggtttgcatataccaacatcagagc

SEQ ID NO: 161751 - DNA, 30 bp, Artificial Sequence
  Synthetic oligonucleotide
gcaaattgggaagcaagggcgctagagagc

SEQ ID NO: 161752 - DNA, 30 bp, Artificial Sequence
  Synthetic oligonucleotide
tgtgattaagcaagtcgatgtaacgagagc

SEQ ID NO: 161753 - DNA, 30 bp, Artificial Sequence
  Synthetic oligonucleotide
tggccgtaaggaactctgtagtgggagagc

SEQ ID NO: 161754 - DNA, 30 bp, Artificial Sequence
  Synthetic oligonucleotide
gagccgaagttttgccagacgtgggagagc

SEQ ID NO: 161755 - DNA, 30 bp, Artificial Sequence
  Synthetic oligonucleotide
gaaccagtgaccacgtatgatacgtagagc

SEQ ID NO: 161756 - DNA, 30 bp, Artificial Sequence
  Synthetic oligonucleotide
aggactgcgcttaacctccaactaacgagc

SEQ ID NO: 161757 - DNA, 30 bp, Artificial Sequence
  Synthetic oligonucleotide
acttgaatctcgacagcagttcggacgagc

SEQ ID NO: 161758 - DNA, 30 bp, Artificial Sequence
  Synthetic oligonucleotide
caatgagttgtgactctggggagtacgagc

SEQ ID NO: 161759 - DNA, 30 bp, Artificial Sequence
  Synthetic oligonucleotide
tggataagctcaagctaccgggatccgagc

SEQ ID NO: 161760 - DNA, 30 bp, Artificial Sequence
  Synthetic oligonucleotide
tgagaaaccgccaacccccttacagcgagc

SEQ ID NO: 161761 - DNA, 30 bp, Artificial Sequence
  Synthetic oligonucleotide
ttattcgcggagcatgaagggcgagcgagc

SEQ ID NO: 161762 - DNA, 30 bp, Artificial Sequence
  Synthetic oligonucleotide
gggtacgtaagaacggtactggtcgcgagc

SEQ ID NO: 161763 - DNA, 30 bp, Artificial Sequence
  Synthetic oligonucleotide
cgtggttatcgccgaaattcccaggcgagc

SEQ ID NO: 161764 - DNA, 30 bp, Artificial Sequence
  Synthetic oligonucleotide
caagagaccgcgagcgtgatcggatcgagc

SEQ ID NO: 161765 - DNA, 30 bp, Artificial Sequence
  Synthetic oligonucleotide
aactgtactatcctcacactaggctcgagc

SEQ ID NO: 161766 - DNA, 30 bp, Artificial Sequence
  Synthetic oligonucleotide
aaaagaccgtgtttggactgctgctcgagc

SEQ ID NO: 161767 - DNA, 30 bp, Artificial Sequence
  Synthetic oligonucleotide
agcaaatactgtatagatcccgattcgagc

SEQ ID NO: 161768 - DNA, 30 bp, Artificial Sequence
  Synthetic oligonucleotide
catagttattgtacaataacggtttcgagc

SEQ ID NO: 161769 - DNA, 30 bp, Artificial Sequence
  Synthetic oligonucleotide
cgaatctggttaaatagattcataaggagc

SEQ ID NO: 161770 - DNA, 30 bp, Artificial Sequence
  Synthetic oligonucleotide
catatattgagaaagccaccgaacaggagc

SEQ ID NO: 161771 - DNA, 30 bp, Artificial Sequence
  Synthetic oligonucleotide
tgtatgtcgaggagatagccttacaggagc

SEQ ID NO: 161772 - DNA, 30 bp, Artificial Sequence
  Synthetic oligonucleotide
cttgctaaggacgttaactttgccaggagc

SEQ ID NO: 161773 - DNA, 30 bp, Artificial Sequence
  Synthetic oligonucleotide
tcattatgggtcaaccggaccgagaggagc

SEQ ID NO: 161774 - DNA, 30 bp, Artificial Sequence
  Synthetic oligonucleotide
cgaagcggttgttttgatggggataggagc

SEQ ID NO: 161775 - DNA, 30 bp, Artificial Sequence
  Synthetic oligonucleotide
gtccacttgcttaggaatctggttaggagc

SEQ ID NO: 161776 - DNA, 30 bp, Artificial Sequence
  Synthetic oligonucleotide
ggcgtagacgtctttggatcagaacggagc

SEQ ID NO: 161777 - DNA, 30 bp, Artificial Sequence
  Synthetic oligonucleotide
ctgcagttaatggtctggtgaatacggagc

SEQ ID NO: 161778 - DNA, 30 bp, Artificial Sequence
  Synthetic oligonucleotide
ctggtagaccgtaggtcttgcatgcggagc

SEQ ID NO: 161779 - DNA, 31 bp, Artificial Sequence
  Synthetic oligonucleotide
tgcggataaggaggaacctttcattcggagc

SEQ ID NO: 161780 - DNA, 30 bp, Artificial Sequence
  Synthetic oligonucleotide
acgaacctccggttcacagaagttcggagc

SEQ ID NO: 161781 - DNA, 30 bp, Artificial Sequence
  Synthetic oligonucleotide
tgttaaacgcggttacaacagcgggggagc

SEQ ID NO: 161782 - DNA, 30 bp, Artificial Sequence
  Synthetic oligonucleotide
gtctgctttaaaaacatggaactggggagc

SEQ ID NO: 161783 - DNA, 30 bp, Artificial Sequence
  Synthetic oligonucleotide
gttgtgcccgcggtgtgctgacatgggagc

SEQ ID NO: 161784 - DNA, 30 bp, Artificial Sequence
  Synthetic oligonucleotide
cactagcttagcggcggaatcaaatggagc

SEQ ID NO: 161785 - DNA, 30 bp, Artificial Sequence
  Synthetic oligonucleotide
aacaagctctctcagctacggacctggagc

SEQ ID NO: 161786 - DNA, 30 bp, Artificial Sequence
  Synthetic oligonucleotide
acaccacgggggaagagggggagctggagc

SEQ ID NO: 161787 - DNA, 30 bp, Artificial Sequence
  Synthetic oligonucleotide
gaccatttcctcgaagctcggcagtggagc

SEQ ID NO: 161788 - DNA, 30 bp, Artificial Sequence
  Synthetic oligonucleotide
caagcaagaagtgtatacgtaatgtggagc

SEQ ID NO: 161789 - DNA, 30 bp, Artificial Sequence
  Synthetic oligonucleotide
gaaaatgtgtacgttatagaggtaatgagc

SEQ ID NO: 161790 - DNA, 30 bp, Artificial Sequence
  Synthetic oligonucleotide
caacgtctttgttggggaatattaatgagc

SEQ ID NO: 161791 - DNA, 30 bp, Artificial Sequence
  Synthetic oligonucleotide
tgggttaaacgtaacggtagcgcgatgagc

SEQ ID NO: 161792 - DNA, 30 bp, Artificial Sequence
  Synthetic oligonucleotide
cgttggaaggatctgattccaatgatgagc

SEQ ID NO: 161793 - DNA, 30 bp, Artificial Sequence
  Synthetic oligonucleotide
ctgcataagaaccgttttgcccttatgagc

SEQ ID NO: 161794 - DNA, 30 bp, Artificial Sequence
  Synthetic oligonucleotide
ttcgccaaatgtgtctaatataccctgagc

SEQ ID NO: 161795 - DNA, 30 bp, Artificial Sequence
  Synthetic oligonucleotide
gcgtacagtgatatatctctccttctgagc

SEQ ID NO: 161796 - DNA, 30 bp, Artificial Sequence
  Synthetic oligonucleotide
tccaaatagatcggctcaaatacagtgagc

SEQ ID NO: 161797 - DNA, 30 bp, Artificial Sequence
  Synthetic oligonucleotide
gggcagttagtggccgtacagtgagtgagc

SEQ ID NO: 161798 - DNA, 30 bp, Artificial Sequence
  Synthetic oligonucleotide
ctgacctggaactgggaagtagtcgtgagc

SEQ ID NO: 161799 - DNA, 30 bp, Artificial Sequence
  Synthetic oligonucleotide
gtgtaccagagcgaactccgacatgtgagc

SEQ ID NO: 161800 - DNA, 30 bp, Artificial Sequence
  Synthetic oligonucleotide
gatttacagtttactcgcataaaattgagc

SEQ ID NO: 161801 - DNA, 30 bp, Artificial Sequence
  Synthetic oligonucleotide
gcgacaaccacgagactagggagcttgagc

SEQ ID NO: 161802 - DNA, 30 bp, Artificial Sequence
  Synthetic oligonucleotide
cacggtatattgcagaactaaggcttgagc

SEQ ID NO: 161803 - DNA, 30 bp, Artificial Sequence
  Synthetic oligonucleotide
cagagaacgccccttagtcgcaggttgagc

SEQ ID NO: 161804 - DNA, 30 bp, Artificial Sequence
  Synthetic oligonucleotide
cggggtcgttgatgagttgcagatttgagc

SEQ ID NO: 161805 - DNA, 30 bp, Artificial Sequence
  Synthetic oligonucleotide
gcaaaatatcgccaaaataaccaaaatagc

SEQ ID NO: 161806 - DNA, 30 bp, Artificial Sequence
  Synthetic oligonucleotide
acgcgaacgatagagaaatagcaaaatagc

SEQ ID NO: 161807 - DNA, 30 bp, Artificial Sequence
  Synthetic oligonucleotide
tgacgttcagccagcacactggacaatagc

SEQ ID NO: 161808 - DNA, 30 bp, Artificial Sequence
  Synthetic oligonucleotide
ggtccagtcgacttgcacgcgtagaatagc

SEQ ID NO: 161809 - DNA, 30 bp, Artificial Sequence
  Synthetic oligonucleotide
tatctgaggggaggtggctgtacgaatagc

SEQ ID NO: 161810 - DNA, 30 bp, Artificial Sequence
  Synthetic oligonucleotide
caaagccatatgctgtatggtccccatagc

SEQ ID NO: 161811 - DNA, 30 bp, Artificial Sequence
  Synthetic oligonucleotide
ggggcacgttcaaacgcgtgaatgcatagc

SEQ ID NO: 161812 - DNA, 30 bp, Artificial Sequence
  Synthetic oligonucleotide
tcctgactatccgcggaatcgaatcatagc

SEQ ID NO: 161813 - DNA, 30 bp, Artificial Sequence
  Synthetic oligonucleotide
ctcatcaaggtggccaagctcgtagatagc

SEQ ID NO: 161814 - DNA, 30 bp, Artificial Sequence
  Synthetic oligonucleotide
ctaggaagggcaagccaaatacacgatagc

SEQ ID NO: 161815 - DNA, 30 bp, Artificial Sequence
  Synthetic oligonucleotide
aaggtccaccatcgggacgattatgatagc

SEQ ID NO: 161816 - DNA, 30 bp, Artificial Sequence
  Synthetic oligonucleotide
aagatggaaacgccaggactggcatatagc

SEQ ID NO: 161817 - DNA, 30 bp, Artificial Sequence
  Synthetic oligonucleotide
gggactagatttgacatacgaatatatagc

SEQ ID NO: 161818 - DNA, 30 bp, Artificial Sequence
  Synthetic oligonucleotide
tggtatccctaatatgcgaatgtatatagc

SEQ ID NO: 161819 - DNA, 30 bp, Artificial Sequence
  Synthetic oligonucleotide
gtatatactctaccgttggctaaacctagc

SEQ ID NO: 161820 - DNA, 30 bp, Artificial Sequence
  Synthetic oligonucleotide
ggatcggccccctagattgcaaacgctagc

SEQ ID NO: 161821 - DNA, 30 bp, Artificial Sequence
  Synthetic oligonucleotide
ggatggcatcttaagagcgcctacgctagc

SEQ ID NO: 161822 - DNA, 30 bp, Artificial Sequence
  Synthetic oligonucleotide
gtatcctaagaatcactcgctccaagtagc

SEQ ID NO: 161823 - DNA, 30 bp, Artificial Sequence
  Synthetic oligonucleotide
ctggttgcgtcctcgatgtcttcaagtagc

SEQ ID NO: 161824 - DNA, 30 bp, Artificial Sequence
  Synthetic oligonucleotide
cgtataacgtggaagtggacactaagtagc

SEQ ID NO: 161825 - DNA, 30 bp, Artificial Sequence
  Synthetic oligonucleotide
gcaatgcaggtatgcgagtttcagcgtagc

SEQ ID NO: 161826 - DNA, 30 bp, Artificial Sequence
  Synthetic oligonucleotide
tgggcctttaggtcctatagaccgcgtagc

SEQ ID NO: 161827 - DNA, 30 bp, Artificial Sequence
  Synthetic oligonucleotide
acctttaaggttaaagatagaaatcgtagc

SEQ ID NO: 161828 - DNA, 30 bp, Artificial Sequence
  Synthetic oligonucleotide
agctttggtctattgctaagtcatcgtagc

SEQ ID NO: 161829 - DNA, 30 bp, Artificial Sequence
  Synthetic oligonucleotide
aggtggggtatgtgaatatcttctcgtagc

SEQ ID NO: 161830 - DNA, 30 bp, Artificial Sequence
  Synthetic oligonucleotide
atgtagtcaatccgacttggagaaggtagc

SEQ ID NO: 161831 - DNA, 30 bp, Artificial Sequence
  Synthetic oligonucleotide
gcattgtagactcattagcgagcaggtagc

SEQ ID NO: 161832 - DNA, 30 bp, Artificial Sequence
  Synthetic oligonucleotide
gaggccatgttgtaagtgtggaacggtagc

SEQ ID NO: 161833 - DNA, 30 bp, Artificial Sequence
  Synthetic oligonucleotide
aggacgtaagtaaattgacgctacggtagc

SEQ ID NO: 161834 - DNA, 30 bp, Artificial Sequence
  Synthetic oligonucleotide
ggggagttgtgctataatgatgcatgtagc

SEQ ID NO: 161835 - DNA, 30 bp, Artificial Sequence
  Synthetic oligonucleotide
tgatgtagtggaggagttccaagatgtagc

SEQ ID NO: 161836 - DNA, 30 bp, Artificial Sequence
  Synthetic oligonucleotide
ttcgatgtggcaaaccagacacgatgtagc

SEQ ID NO: 161837 - DNA, 30 bp, Artificial Sequence
  Synthetic oligonucleotide
agcttagaagggggtagggcaacctgtagc

SEQ ID NO: 161838 - DNA, 30 bp, Artificial Sequence
  Synthetic oligonucleotide
cttaacagcttgtggcggggcccctgtagc

SEQ ID NO: 161839 - DNA, 30 bp, Artificial Sequence
  Synthetic oligonucleotide
acatcatgctttgcgttactttattgtagc

SEQ ID NO: 161840 - DNA, 30 bp, Artificial Sequence
  Synthetic oligonucleotide
aggtgtgagttagcgtcaatggtttgtagc

SEQ ID NO: 161841 - DNA, 30 bp, Artificial Sequence
  Synthetic oligonucleotide
gcgattccaacaaattgggatgtgattagc

SEQ ID NO: 161842 - DNA, 30 bp, Artificial Sequence
  Synthetic oligonucleotide
gggctcataaaccctgtaacataacttagc

SEQ ID NO: 161843 - DNA, 30 bp, Artificial Sequence
  Synthetic oligonucleotide
atggcggatccaggtcttctacgacttagc

SEQ ID NO: 161844 - DNA, 30 bp, Artificial Sequence
  Synthetic oligonucleotide
gtgtacgacaagaagcctgtcatccttagc

SEQ ID NO: 161845 - DNA, 30 bp, Artificial Sequence
  Synthetic oligonucleotide
atcttatcagttccatgggggacgcttagc

SEQ ID NO: 161846 - DNA, 30 bp, Artificial Sequence
  Synthetic oligonucleotide
ccgtgaacgaatggaattcgcattcttagc

SEQ ID NO: 161847 - DNA, 30 bp, Artificial Sequence
  Synthetic oligonucleotide
tccgacgtccaagctagccggcaagttagc

SEQ ID NO: 161848 - DNA, 30 bp, Artificial Sequence
  Synthetic oligonucleotide
cactgagcacgtaaggcgctaaccgttagc

SEQ ID NO: 161849 - DNA, 30 bp, Artificial Sequence
  Synthetic oligonucleotide
ttagatgaacggtcagacgactgggttagc

SEQ ID NO: 161850 - DNA, 30 bp, Artificial Sequence
  Synthetic oligonucleotide
gtaccgattggcgcaattctcattgttagc

SEQ ID NO: 161851 - DNA, 30 bp, Artificial Sequence
  Synthetic oligonucleotide
ccgaaagataaaaagcgcccatttgttagc

SEQ ID NO: 161852 - DNA, 30 bp, Artificial Sequence
  Synthetic oligonucleotide
gctggcagagaaacacctagccaatttagc

SEQ ID NO: 161853 - DNA, 30 bp, Artificial Sequence
  Synthetic oligonucleotide
gggggtgatgttttcgacgtctcatttagc

SEQ ID NO: 161854 - DNA, 30 bp, Artificial Sequence
  Synthetic oligonucleotide
ccagccaaggtagaagcatgcgagtttagc

SEQ ID NO: 161855 - DNA, 30 bp, Artificial Sequence
  Synthetic oligonucleotide
ctgagataaataacgaaggatccttttagc

SEQ ID NO: 161856 - DNA, 30 bp, Artificial Sequence
  Synthetic oligonucleotide
gcgaataacattgaagtaaaaacgaaacgc

SEQ ID NO: 161857 - DNA, 30 bp, Artificial Sequence
  Synthetic oligonucleotide
caagtctcggacgacttgtaggggcaacgc

SEQ ID NO: 161858 - DNA, 30 bp, Artificial Sequence
  Synthetic oligonucleotide
gcttgggcacgcgtcataatgtatcaacgc

SEQ ID NO: 161859 - DNA, 30 bp, Artificial Sequence
  Synthetic oligonucleotide
tctcggggttaatacataaaacgagaacgc

SEQ ID NO: 161860 - DNA, 30 bp, Artificial Sequence
  Synthetic oligonucleotide
aatatacataacaagttcccaacataacgc

SEQ ID NO: 161861 - DNA, 30 bp, Artificial Sequence
  Synthetic oligonucleotide
gtcgagaaaagatattcgcaggcataacgc

SEQ ID NO: 161862 - DNA, 30 bp, Artificial Sequence
  Synthetic oligonucleotide
taaatggagacttcaaaatcaaaaacacgc

SEQ ID NO: 161863 - DNA, 30 bp, Artificial Sequence
  Synthetic oligonucleotide
taggactgcacattctcttccagcacacgc

SEQ ID NO: 161864 - DNA, 30 bp, Artificial Sequence
  Synthetic oligonucleotide
tctaagccagtctctatcgcgaatacacgc

SEQ ID NO: 161865 - DNA, 30 bp, Artificial Sequence
  Synthetic oligonucleotide
accgttttaacagtgacaggagttacacgc

SEQ ID NO: 161866 - DNA, 30 bp, Artificial Sequence
  Synthetic oligonucleotide
cgcccagccccgagtgctaacaaaccacgc

SEQ ID NO: 161867 - DNA, 30 bp, Artificial Sequence
  Synthetic oligonucleotide
aacaaatcgtacgtccggacggacccacgc

SEQ ID NO: 161868 - DNA, 30 bp, Artificial Sequence
  Synthetic oligonucleotide
gacatcgacatgcacgccccattcccacgc

SEQ ID NO: 161869 - DNA, 30 bp, Artificial Sequence
  Synthetic oligonucleotide
taccggaaacggtcagacgtgacgccacgc

SEQ ID NO: 161870 - DNA, 30 bp, Artificial Sequence
  Synthetic oligonucleotide
acggaacatatattgcgatataatccacgc

SEQ ID NO: 161871 - DNA, 30 bp, Artificial Sequence
  Synthetic oligonucleotide
gcgatggcagcccttatgtagagagcacgc

SEQ ID NO: 161872 - DNA, 30 bp, Artificial Sequence
  Synthetic oligonucleotide
agggattgagcgacgtaaggagtagcacgc

SEQ ID NO: 161873 - DNA, 30 bp, Artificial Sequence
  Synthetic oligonucleotide
aagcagaatgacgaacaacagtgggcacgc

SEQ ID NO: 161874 - DNA, 30 bp, Artificial Sequence
  Synthetic oligonucleotide
acaaaccaggggaagccgtcgaattcacgc

SEQ ID NO: 161875 - DNA, 30 bp, Artificial Sequence
  Synthetic oligonucleotide
ccaacgaaaagaatggtaccacgttcacgc

SEQ ID NO: 161876 - DNA, 30 bp, Artificial Sequence
  Synthetic oligonucleotide
gtccgcacaggtaccggagaccgaagacgc

SEQ ID NO: 161877 - DNA, 30 bp, Artificial Sequence
  Synthetic oligonucleotide
agggaagggagtgagagagaaacaggacgc

SEQ ID NO: 161878 - DNA, 30 bp, Artificial Sequence
  Synthetic oligonucleotide
cctatgagttccgactgtgtaaaaatacgc

SEQ ID NO: 161879 - DNA, 30 bp, Artificial Sequence
  Synthetic oligonucleotide
ctcgggcacgcgtcaagaccctgcatacgc

SEQ ID NO: 161880 - DNA, 31 bp, Artificial Sequence
  Synthetic oligonucleotide
agggtaaacactaggtaacccagtcatacgc

SEQ ID NO: 161881 - DNA, 30 bp, Artificial Sequence
  Synthetic oligonucleotide
taggatggggtatgctgattacggctacgc

SEQ ID NO: 161882 - DNA, 30 bp, Artificial Sequence
  Synthetic oligonucleotide
caacggaatcctgcttaccgtgggctacgc

SEQ ID NO: 161883 - DNA, 30 bp, Artificial Sequence
  Synthetic oligonucleotide
cctagacttcaaactggggcgcgggtacgc

SEQ ID NO: 161884 - DNA, 30 bp, Artificial Sequence
  Synthetic oligonucleotide
aaaagaggacgacacaaacgaacgttacgc

SEQ ID NO: 161885 - DNA, 30 bp, Artificial Sequence
  Synthetic oligonucleotide
tccattgcaagacatgagccgagtttacgc

SEQ ID NO: 161886 - DNA, 30 bp, Artificial Sequence
  Synthetic oligonucleotide
acgtgttatccggcccaatcgcgtttacgc

SEQ ID NO: 161887 - DNA, 30 bp, Artificial Sequence
  Synthetic oligonucleotide
ttaaggagagtccataagcatgtacaccgc

SEQ ID NO: 161888 - DNA, 30 bp, Artificial Sequence
  Synthetic oligonucleotide
tatgttcatcgtgcttgggcccggcaccgc

SEQ ID NO: 161889 - DNA, 30 bp, Artificial Sequence
  Synthetic oligonucleotide
ttcggtgcactttagcctaaaaaggaccgc

SEQ ID NO: 161890 - DNA, 30 bp, Artificial Sequence
  Synthetic oligonucleotide
agtgttgagcgttttaaccgcccgtaccgc

SEQ ID NO: 161891 - DNA, 30 bp, Artificial Sequence
  Synthetic oligonucleotide
ctatagtaaacaccggtagataggtaccgc

SEQ ID NO: 161892 - DNA, 30 bp, Artificial Sequence
  Synthetic oligonucleotide
tcgtagccctctagggtacgagcttaccgc

SEQ ID NO: 161893 - DNA, 30 bp, Artificial Sequence
  Synthetic oligonucleotide
actgcagcgctaagaactgtggcaacccgc

SEQ ID NO: 161894 - DNA, 30 bp, Artificial Sequence
  Synthetic oligonucleotide
acgattatagatattggctttcgaacccgc

SEQ ID NO: 161895 - DNA, 30 bp, Artificial Sequence
  Synthetic oligonucleotide
agcgcggatgtcacgacggcatctacccgc

SEQ ID NO: 161896 - DNA, 30 bp, Artificial Sequence
  Synthetic oligonucleotide
ggtttgaaccggatgtggcctcaaccccgc

SEQ ID NO: 161897 - DNA, 30 bp, Artificial Sequence
  Synthetic oligonucleotide
aaagtcattggaggtatggtcccgccccgc

SEQ ID NO: 161898 - DNA, 30 bp, Artificial Sequence
  Synthetic oligonucleotide
atcgactgatcataatgtactgtgccccgc

SEQ ID NO: 161899 - DNA, 30 bp, Artificial Sequence
  Synthetic oligonucleotide
tctttcataggaggtcatcccgatccccgc

SEQ ID NO: 161900 - DNA, 30 bp, Artificial Sequence
  Synthetic oligonucleotide
taggtgaggtatccacatgctcaagcccgc

SEQ ID NO: 161901 - DNA, 30 bp, Artificial Sequence
  Synthetic oligonucleotide
caaactaagcgcacttaaagcgaagcccgc

SEQ ID NO: 161902 - DNA, 30 bp, Artificial Sequence
  Synthetic oligonucleotide
tgtatgacatgcgataaagttccagcccgc

SEQ ID NO: 161903 - DNA, 30 bp, Artificial Sequence
  Synthetic oligonucleotide
ggaggaggcggtatggtctccatggcccgc

SEQ ID NO: 161904 - DNA, 30 bp, Artificial Sequence
  Synthetic oligonucleotide
aagggcgagagtagttcacggacaagccgc

SEQ ID NO: 161905 - DNA, 30 bp, Artificial Sequence
  Synthetic oligonucleotide
ctctcgtagtggtcatgatgaaagagccgc

SEQ ID NO: 161906 - DNA, 30 bp, Artificial Sequence
  Synthetic oligonucleotide
aggtgaattggtgcttataaagcgagccgc

SEQ ID NO: 161907 - DNA, 30 bp, Artificial Sequence
  Synthetic oligonucleotide
tcagccccatctattaagctcaggagccgc

SEQ ID NO: 161908 - DNA, 30 bp, Artificial Sequence
  Synthetic oligonucleotide
cgcaagtcacactcatctattgaacgccgc

SEQ ID NO: 161909 - DNA, 30 bp, Artificial Sequence
  Synthetic oligonucleotide
aagactgatcgaaaaaccgccacacgccgc

SEQ ID NO: 161910 - DNA, 30 bp, Artificial Sequence
  Synthetic oligonucleotide
cacggtcaaacataggacgccttacgccgc

SEQ ID NO: 161911 - DNA, 30 bp, Artificial Sequence
  Synthetic oligonucleotide
gtcacgtaggtcggtaattctagcggccgc

SEQ ID NO: 161912 - DNA, 30 bp, Artificial Sequence
  Synthetic oligonucleotide
ctcatgctagaagtagtaacatgtggccgc

SEQ ID NO: 161913 - DNA, 30 bp, Artificial Sequence
  Synthetic oligonucleotide
atctgcgaatatgcgtattaaccctgccgc

SEQ ID NO: 161914 - DNA, 30 bp, Artificial Sequence
  Synthetic oligonucleotide
tacagtgctagacaaggactattctgccgc

SEQ ID NO: 161915 - DNA, 30 bp, Artificial Sequence
  Synthetic oligonucleotide
tgcggcggtcagtcgtctcacctaatccgc

SEQ ID NO: 161916 - DNA, 30 bp, Artificial Sequence
  Synthetic oligonucleotide
agtgaaatcggttggttgctctacatccgc

SEQ ID NO: 161917 - DNA, 30 bp, Artificial Sequence
  Synthetic oligonucleotide
atccaaatgattatgcccaccttcatccgc

SEQ ID NO: 161918 - DNA, 30 bp, Artificial Sequence
  Synthetic oligonucleotide
ttgcgggacagcaaacgatgcaggatccgc

SEQ ID NO: 161919 - DNA, 30 bp, Artificial Sequence
  Synthetic oligonucleotide
tgatgtttacgtcgaagtgagtacctccgc

SEQ ID NO: 161920 - DNA, 30 bp, Artificial Sequence
  Synthetic oligonucleotide
tgggtaaaaagctagtcgcattacgtccgc

SEQ ID NO: 161921 - DNA, 30 bp, Artificial Sequence
  Synthetic oligonucleotide
taatagtatgccatccctgagtatgtccgc

SEQ ID NO: 161922 - DNA, 30 bp, Artificial Sequence
  Synthetic oligonucleotide
ctcgtggtagggactggaaagttaaagcgc

SEQ ID NO: 161923 - DNA, 30 bp, Artificial Sequence
  Synthetic oligonucleotide
ggatgagcctcgctcggctgtaagaagcgc

SEQ ID NO: 161924 - DNA, 30 bp, Artificial Sequence
  Synthetic oligonucleotide
aggctcgggtccccaacgtcttcgaagcgc

SEQ ID NO: 161925 - DNA, 30 bp, Artificial Sequence
  Synthetic oligonucleotide
tcgtttgatagtaacaaggcgaggaagcgc

SEQ ID NO: 161926 - DNA, 30 bp, Artificial Sequence
  Synthetic oligonucleotide
tcggatcttacccgacaacgccagcagcgc

SEQ ID NO: 161927 - DNA, 30 bp, Artificial Sequence
  Synthetic oligonucleotide
ggacttagcttcggttatcaaaatcagcgc

SEQ ID NO: 161928 - DNA, 30 bp, Artificial Sequence
  Synthetic oligonucleotide
agaaaatctccctgaaatactagtcagcgc

SEQ ID NO: 161929 - DNA, 30 bp, Artificial Sequence
  Synthetic oligonucleotide
acaaattccaacagtgcgacctaagagcgc

SEQ ID NO: 161930 - DNA, 30 bp, Artificial Sequence
  Synthetic oligonucleotide
gtctaataccactcgcagttagcggagcgc

SEQ ID NO: 161931 - DNA, 30 bp, Artificial Sequence
  Synthetic oligonucleotide
ggtcacaggaactagaccgtgggctagcgc

SEQ ID NO: 161932 - DNA, 30 bp, Artificial Sequence
  Synthetic oligonucleotide
taactgcaggcgagggtctagagttagcgc

SEQ ID NO: 161933 - DNA, 30 bp, Artificial Sequence
  Synthetic oligonucleotide
tgtacctctaaagcactcaggatttagcgc

SEQ ID NO: 161934 - DNA, 30 bp, Artificial Sequence
  Synthetic oligonucleotide
tcccttaggagttgcaagatctgaacgcgc

SEQ ID NO: 161935 - DNA, 30 bp, Artificial Sequence
  Synthetic oligonucleotide
catctttacggggcgcccggatacacgcgc

SEQ ID NO: 161936 - DNA, 30 bp, Artificial Sequence
  Synthetic oligonucleotide
cacaccgataagtgaggcgcgagcccgcgc

SEQ ID NO: 161937 - DNA, 30 bp, Artificial Sequence
  Synthetic oligonucleotide
tatagtaggcgttactgtctctggccgcgc

SEQ ID NO: 161938 - DNA, 30 bp, Artificial Sequence
  Synthetic oligonucleotide
ggagaaaggtcctagtagcgcactccgcgc

SEQ ID NO: 161939 - DNA, 30 bp, Artificial Sequence
  Synthetic oligonucleotide
tggatactgggactgaattagtatgcgcgc

SEQ ID NO: 161940 - DNA, 30 bp, Artificial Sequence
  Synthetic oligonucleotide
aacgataacccctgcgccccttttgcgcgc

SEQ ID NO: 161941 - DNA, 30 bp, Artificial Sequence
  Synthetic oligonucleotide
ggcgtccgatacagttggtggaacaggcgc

SEQ ID NO: 161942 - DNA, 30 bp, Artificial Sequence
  Synthetic oligonucleotide
gccataacaatctcagcgctgaccaggcgc

SEQ ID NO: 161943 - DNA, 30 bp, Artificial Sequence
  Synthetic oligonucleotide
ctttcatggacattaacgctaatcaggcgc

SEQ ID NO: 161944 - DNA, 30 bp, Artificial Sequence
  Synthetic oligonucleotide
cgatacttttcgatgtacgtattcaggcgc

SEQ ID NO: 161945 - DNA, 30 bp, Artificial Sequence
  Synthetic oligonucleotide
aaagcatgctagtcgtcagcacggaggcgc

SEQ ID NO: 161946 - DNA, 30 bp, Artificial Sequence
  Synthetic oligonucleotide
gaaggcgaatcttagttgatttataggcgc

SEQ ID NO: 161947 - DNA, 30 bp, Artificial Sequence
  Synthetic oligonucleotide
caaatagtcaaacggtatatagctaggcgc

SEQ ID NO: 161948 - DNA, 30 bp, Artificial Sequence
  Synthetic oligonucleotide
ttgcatggcctcaaaggaggctcccggcgc

SEQ ID NO: 161949 - DNA, 30 bp, Artificial Sequence
  Synthetic oligonucleotide
aagggagggagcaatggaccgactcggcgc

SEQ ID NO: 161950 - DNA, 30 bp, Artificial Sequence
  Synthetic oligonucleotide
gtatgtgtatagagtgcgctcacttggcgc

SEQ ID NO: 161951 - DNA, 30 bp, Artificial Sequence
  Synthetic oligonucleotide
agagaattaaggaaatgaagatcttggcgc

SEQ ID NO: 161952 - DNA, 28 bp, Artificial Sequence
  Synthetic oligonucleotide
caaggtcgcgatacattcgagttggcgc

SEQ ID NO: 161953 - DNA, 30 bp, Artificial Sequence
  Synthetic oligonucleotide
acgctgttaataacggtggtctaaatgcgc

SEQ ID NO: 161954 - DNA, 30 bp, Artificial Sequence
  Synthetic oligonucleotide
atagttttgtgtaggtttactcccatgcgc

SEQ ID NO: 161955 - DNA, 30 bp, Artificial Sequence
  Synthetic oligonucleotide
acgagctcatattggaaagcgtgcatgcgc

SEQ ID NO: 161956 - DNA, 30 bp, Artificial Sequence
  Synthetic oligonucleotide
tcgcaattaagttcacggtgatccctgcgc

SEQ ID NO: 161957 - DNA, 30 bp, Artificial Sequence
  Synthetic oligonucleotide
acattgtggccacagccctaggagctgcgc

SEQ ID NO: 161958 - DNA, 30 bp, Artificial Sequence
  Synthetic oligonucleotide
gttggcagtccaacgcaaccttacgtgcgc

SEQ ID NO: 161959 - DNA, 30 bp, Artificial Sequence
  Synthetic oligonucleotide
gtcacggtcggggttcacgaatgcgtgcgc

SEQ ID NO: 161960 - DNA, 30 bp, Artificial Sequence
  Synthetic oligonucleotide
gtggataccatctcgcgcaaggatgtgcgc

SEQ ID NO: 161961 - DNA, 30 bp, Artificial Sequence
  Synthetic oligonucleotide
aatatgatgagggcttggtatggtgtgcgc

SEQ ID NO: 161962 - DNA, 30 bp, Artificial Sequence
  Synthetic oligonucleotide
atcaatcaacgcgtaaggggccctttgcgc

SEQ ID NO: 161963 - DNA, 30 bp, Artificial Sequence
  Synthetic oligonucleotide
gggcgtcgggagaaagctgatctgaatcgc

SEQ ID NO: 161964 - DNA, 30 bp, Artificial Sequence
  Synthetic oligonucleotide
cgattttctctgagcttcggaaataatcgc

SEQ ID NO: 161965 - DNA, 30 bp, Artificial Sequence
  Synthetic oligonucleotide
cgggctggatgttaatttgtgtaccatcgc

SEQ ID NO: 161966 - DNA, 30 bp, Artificial Sequence
  Synthetic oligonucleotide
acttctagcaagcggtgccgaacccatcgc

SEQ ID NO: 161967 - DNA, 30 bp, Artificial Sequence
  Synthetic oligonucleotide
tacacatacgcgtatacgaccgacgatcgc

SEQ ID NO: 161968 - DNA, 30 bp, Artificial Sequence
  Synthetic oligonucleotide
agggcccactttcatcccacttgggatcgc

SEQ ID NO: 161969 - DNA, 30 bp, Artificial Sequence
  Synthetic oligonucleotide
ggccaattctcacaaaaccacagatatcgc

SEQ ID NO: 161970 - DNA, 30 bp, Artificial Sequence
  Synthetic oligonucleotide
gcataatatttaatcgatgaagcgtatcgc

SEQ ID NO: 161971 - DNA, 30 bp, Artificial Sequence
  Synthetic oligonucleotide
cgaactggctagggagagacaccttatcgc

SEQ ID NO: 161972 - DNA, 30 bp, Artificial Sequence
  Synthetic oligonucleotide
tttgacttggcgtcaatcaagcacactcgc

SEQ ID NO: 161973 - DNA, 30 bp, Artificial Sequence
  Synthetic oligonucleotide
tataaccgtcagggtaattggaccactcgc

SEQ ID NO: 161974 - DNA, 30 bp, Artificial Sequence
  Synthetic oligonucleotide
aacaattctctatcactgttccgcactcgc

SEQ ID NO: 161975 - DNA, 30 bp, Artificial Sequence
  Synthetic oligonucleotide
cccagtatattcgtgaacaaagctcctcgc

SEQ ID NO: 161976 - DNA, 30 bp, Artificial Sequence
  Synthetic oligonucleotide
cagacaataagtacgcacgtgagcgctcgc

SEQ ID NO: 161977 - DNA, 30 bp, Artificial Sequence
  Synthetic oligonucleotide
tagggcttcgcctcataagcggaggctcgc

SEQ ID NO: 161978 - DNA, 30 bp, Artificial Sequence
  Synthetic oligonucleotide
cgatgggctggtatagcaccaagatctcgc

SEQ ID NO: 161979 - DNA, 30 bp, Artificial Sequence
  Synthetic oligonucleotide
ggatcgtccattttaagcagatgatctcgc

SEQ ID NO: 161980 - DNA, 30 bp, Artificial Sequence
  Synthetic oligonucleotide
cggaggcatgtgttgccgaacaggtctcgc

SEQ ID NO: 161981 - DNA, 29 bp, Artificial Sequence
  Synthetic oligonucleotide
caggcgacggggtggccgagttaagtcgc

SEQ ID NO: 161982 - DNA, 30 bp, Artificial Sequence
  Synthetic oligonucleotide
ataaacgagtaattggcatcggccagtcgc

SEQ ID NO: 161983 - DNA, 30 bp, Artificial Sequence
  Synthetic oligonucleotide
gggagccaagtatagagctggtgcagtcgc

SEQ ID NO: 161984 - DNA, 30 bp, Artificial Sequence
  Synthetic oligonucleotide
actagggggcagaagctacaagcgagtcgc

SEQ ID NO: 161985 - DNA, 30 bp, Artificial Sequence
  Synthetic oligonucleotide
caacattttcggggggtgcagggtagtcgc

SEQ ID NO: 161986 - DNA, 30 bp, Artificial Sequence
  Synthetic oligonucleotide
actaagcactactggagcggggttagtcgc

SEQ ID NO: 161987 - DNA, 30 bp, Artificial Sequence
  Synthetic oligonucleotide
accacgagctggcctcagtacagacgtcgc

SEQ ID NO: 161988 - DNA, 30 bp, Artificial Sequence
  Synthetic oligonucleotide
actgcgagaaattcacggcaagcaggtcgc

SEQ ID NO: 161989 - DNA, 30 bp, Artificial Sequence
  Synthetic oligonucleotide
tgaagtccattatcaaggtgaggtggtcgc

SEQ ID NO: 161990 - DNA, 30 bp, Artificial Sequence
  Synthetic oligonucleotide
acagtatgaatacggtgtgagtgtggtcgc

SEQ ID NO: 161991 - DNA, 30 bp, Artificial Sequence
  Synthetic oligonucleotide
ggtcccagaaacaaagcaatatttggtcgc

SEQ ID NO: 161992 - DNA, 30 bp, Artificial Sequence
  Synthetic oligonucleotide
ctcaaatcagtagcagctcaaaaatgtcgc

SEQ ID NO: 161993 - DNA, 30 bp, Artificial Sequence
  Synthetic oligonucleotide
tgtctacaggggtattgcatttcaattcgc

SEQ ID NO: 161994 - DNA, 30 bp, Artificial Sequence
  Synthetic oligonucleotide
gggaatcgtcgagccggaatgaacattcgc

SEQ ID NO: 161995 - DNA, 30 bp, Artificial Sequence
  Synthetic oligonucleotide
cacgaaccctcattgtgtcaaaagattcgc

SEQ ID NO: 161996 - DNA, 30 bp, Artificial Sequence
  Synthetic oligonucleotide
ttattgtcacgaggaggcgacgtgattcgc

SEQ ID NO: 161997 - DNA, 30 bp, Artificial Sequence
  Synthetic oligonucleotide
ggtacaacacgtaaatcaaggggacttcgc

SEQ ID NO: 161998 - DNA, 30 bp, Artificial Sequence
  Synthetic oligonucleotide
ataatatgtcgattgcgacggctacttcgc

SEQ ID NO: 161999 - DNA, 30 bp, Artificial Sequence
  Synthetic oligonucleotide
tggtctccgggtatataggaatgagttcgc

SEQ ID NO: 162000 - DNA, 30 bp, Artificial Sequence
  Synthetic oligonucleotide
atgtccttgatcggttctagaaaggttcgc

SEQ ID NO: 162001 - DNA, 30 bp, Artificial Sequence
  Synthetic oligonucleotide
caccgcggtgatactatgcgtacatttcgc

SEQ ID NO: 162002 - DNA, 30 bp, Artificial Sequence
  Synthetic oligonucleotide
tgcgaaggagtcgaccattgtacatttcgc

SEQ ID NO: 162003 - DNA, 30 bp, Artificial Sequence
  Synthetic oligonucleotide
atcaatgagatcatggttgcgttatttcgc

SEQ ID NO: 162004 - DNA, 30 bp, Artificial Sequence
  Synthetic oligonucleotide
gatgataaagcgcatgaggaaagctttcgc

SEQ ID NO: 162005 - DNA, 30 bp, Artificial Sequence
  Synthetic oligonucleotide
gttacggttcccgcaccccggaaaaaaggc

SEQ ID NO: 162006 - DNA, 30 bp, Artificial Sequence
  Synthetic oligonucleotide
agataaacgaatgcgtgctcttgaaaaggc

SEQ ID NO: 162007 - DNA, 30 bp, Artificial Sequence
  Synthetic oligonucleotide
ctcattgatgcgagatatgagctaaaaggc

SEQ ID NO: 162008 - DNA, 31 bp, Artificial Sequence
  Synthetic oligonucleotide
tttatgtgattttctacaaaggagcaaaggc

SEQ ID NO: 162009 - DNA, 30 bp, Artificial Sequence
  Synthetic oligonucleotide
ccttataatgccatatagtgcacgaaaggc

SEQ ID NO: 162010 - DNA, 30 bp, Artificial Sequence
  Synthetic oligonucleotide
agggaattggacttgaatagaatgaaaggc

SEQ ID NO: 162011 - DNA, 30 bp, Artificial Sequence
  Synthetic oligonucleotide
ccacgaatcttaccgtgggcgtcccaaggc

SEQ ID NO: 162012 - DNA, 30 bp, Artificial Sequence
  Synthetic oligonucleotide
tctggacaaaattaggtgagtcctcaaggc

SEQ ID NO: 162013 - DNA, 30 bp, Artificial Sequence
  Synthetic oligonucleotide
gccgaataagtcaccaccggaggagaaggc

SEQ ID NO: 162014 - DNA, 30 bp, Artificial Sequence
  Synthetic oligonucleotide
ttgtcagcttaaagtaggggcggagaaggc

SEQ ID NO: 162015 - DNA, 30 bp, Artificial Sequence
  Synthetic oligonucleotide
tgcctgtgaaaggtcttcggggaggaaggc

SEQ ID NO: 162016 - DNA, 30 bp, Artificial Sequence
  Synthetic oligonucleotide
ttgtataggatgggctaaaagactgaaggc

SEQ ID NO: 162017 - DNA, 30 bp, Artificial Sequence
  Synthetic oligonucleotide
aggattggacgtcgagtaggtactgaaggc

SEQ ID NO: 162018 - DNA, 30 bp, Artificial Sequence
  Synthetic oligonucleotide
tgcaatgagaaattcaaacggccataaggc

SEQ ID NO: 162019 - DNA, 30 bp, Artificial Sequence
  Synthetic oligonucleotide
tggagccacaaagagccaatctggtaaggc

SEQ ID NO: 162020 - DNA, 30 bp, Artificial Sequence
  Synthetic oligonucleotide
gtgcaggcagagaccagacgaaaaacaggc

SEQ ID NO: 162021 - DNA, 30 bp, Artificial Sequence
  Synthetic oligonucleotide
ggtcacagaacaagagttgttgacacaggc

SEQ ID NO: 162022 - DNA, 30 bp, Artificial Sequence
  Synthetic oligonucleotide
ccttctgaaattaattatgacatcacaggc

SEQ ID NO: 162023 - DNA, 30 bp, Artificial Sequence
  Synthetic oligonucleotide
tctccgtctcaccttattaccgaaccaggc

SEQ ID NO: 162024 - DNA, 30 bp, Artificial Sequence
  Synthetic oligonucleotide
ctaaacactacaaacttcgactcaccaggc

SEQ ID NO: 162025 - DNA, 30 bp, Artificial Sequence
  Synthetic oligonucleotide
gcccactacggcagatcaacgaagccaggc

SEQ ID NO: 162026 - DNA, 30 bp, Artificial Sequence
  Synthetic oligonucleotide
caaatggcgccgactatcatctgtccaggc

SEQ ID NO: 162027 - DNA, 30 bp, Artificial Sequence
  Synthetic oligonucleotide
agggtaagaccaaatcagtgttcagcaggc

SEQ ID NO: 162028 - DNA, 30 bp, Artificial Sequence
  Synthetic oligonucleotide
cgcccttctagacctggccagttagcaggc

SEQ ID NO: 162029 - DNA, 30 bp, Artificial Sequence
  Synthetic oligonucleotide
gtgacccgtacacgcgacgagagcgcaggc

SEQ ID NO: 162030 - DNA, 30 bp, Artificial Sequence
  Synthetic oligonucleotide
acgcgaaccagacgggtccgtcgtgcaggc

SEQ ID NO: 162031 - DNA, 30 bp, Artificial Sequence
  Synthetic oligonucleotide
gacaacggcatattggtcgctggatcaggc

SEQ ID NO: 162032 - DNA, 30 bp, Artificial Sequence
  Synthetic oligonucleotide
tggggtctctgcgagatcccacactcaggc

SEQ ID NO: 162033 - DNA, 30 bp, Artificial Sequence
  Synthetic oligonucleotide
gtgaaggtgcctcgggcagtgtcttcaggc

SEQ ID NO: 162034 - DNA, 30 bp, Artificial Sequence
  Synthetic oligonucleotide
gcgcgcaacattaagttgctcggaagaggc

SEQ ID NO: 162035 - DNA, 30 bp, Artificial Sequence
  Synthetic oligonucleotide
cgaggatttacataaaataggatgagaggc

SEQ ID NO: 162036 - DNA, 30 bp, Artificial Sequence
  Synthetic oligonucleotide
ttatgtcgagtatgggttgctatccgaggc

SEQ ID NO: 162037 - DNA, 30 bp, Artificial Sequence
  Synthetic oligonucleotide
aagggttcgcgactcgatgcgcctcgaggc

SEQ ID NO: 162038 - DNA, 30 bp, Artificial Sequence
  Synthetic oligonucleotide
tagccatacaggatacggaaaggcggaggc

SEQ ID NO: 162039 - DNA, 30 bp, Artificial Sequence
  Synthetic oligonucleotide
gtcaatagcgagctcggctgtgcctgaggc

SEQ ID NO: 162040 - DNA, 29 bp, Artificial Sequence
  Synthetic oligonucleotide
gtaggtgtgacctgtgggatctttgaggc

SEQ ID NO: 162041 - DNA, 30 bp, Artificial Sequence
  Synthetic oligonucleotide
tgtcacggtagcgatggcgtcaccataggc

SEQ ID NO: 162042 - DNA, 30 bp, Artificial Sequence
  Synthetic oligonucleotide
cgaagaattaatgtcgttgtgtatataggc

SEQ ID NO: 162043 - DNA, 30 bp, Artificial Sequence
  Synthetic oligonucleotide
gggcatcggacctgtcccagctctataggc

SEQ ID NO: 162044 - DNA, 30 bp, Artificial Sequence
  Synthetic oligonucleotide
cgcacacggagcgtggagtgtacactaggc

SEQ ID NO: 162045 - DNA, 30 bp, Artificial Sequence
  Synthetic oligonucleotide
aaccttgctggggagtaacttacactaggc

SEQ ID NO: 162046 - DNA, 30 bp, Artificial Sequence
  Synthetic oligonucleotide
cgacggtatcccctcgaagggcatctaggc

SEQ ID NO: 162047 - DNA, 30 bp, Artificial Sequence
  Synthetic oligonucleotide
atcccaatccagacagtgtgctttctaggc

SEQ ID NO: 162048 - DNA, 30 bp, Artificial Sequence
  Synthetic oligonucleotide
acagtgtgtctctcaccaatacaagtaggc

SEQ ID NO: 162049 - DNA, 30 bp, Artificial Sequence
  Synthetic oligonucleotide
gaataaagcgtaaacgttacgcaagtaggc

SEQ ID NO: 162050 - DNA, 30 bp, Artificial Sequence
  Synthetic oligonucleotide
gcgagaaggggcgcgcttcgcggagtaggc

SEQ ID NO: 162051 - DNA, 30 bp, Artificial Sequence
  Synthetic oligonucleotide
tagccgagagccaggggcgccttagtaggc

SEQ ID NO: 162052 - DNA, 30 bp, Artificial Sequence
  Synthetic oligonucleotide
cttgccagcataaatcaatccaccttaggc

SEQ ID NO: 162053 - DNA, 30 bp, Artificial Sequence
  Synthetic oligonucleotide
agtgatcgggctgcaccggtcttgttaggc

SEQ ID NO: 162054 - DNA, 30 bp, Artificial Sequence
  Synthetic oligonucleotide
atagcatgtagccgtgatcaggatttaggc

SEQ ID NO: 162055 - DNA, 30 bp, Artificial Sequence
  Synthetic oligonucleotide
ggcacattaacatctttcttatctttaggc

SEQ ID NO: 162056 - DNA, 30 bp, Artificial Sequence
  Synthetic oligonucleotide
gactaacagttacagtcatatatacacggc

SEQ ID NO: 162057 - DNA, 30 bp, Artificial Sequence
  Synthetic oligonucleotide
tcccgacagggctagaatagagagcacggc

SEQ ID NO: 162058 - DNA, 30 bp, Artificial Sequence
  Synthetic oligonucleotide
catgctgcactcaccacgcacacgcacggc

SEQ ID NO: 162059 - DNA, 30 bp, Artificial Sequence
  Synthetic oligonucleotide
ctccaggggtgatccgacaccaggcacggc

SEQ ID NO: 162060 - DNA, 30 bp, Artificial Sequence
  Synthetic oligonucleotide
gtagagtggtccttcaagacatttcacggc

SEQ ID NO: 162061 - DNA, 30 bp, Artificial Sequence
  Synthetic oligonucleotide
cgaagtccgcgaactaagaacctcgacggc

SEQ ID NO: 162062 - DNA, 30 bp, Artificial Sequence
  Synthetic oligonucleotide
atctaattaattggcacctgagcatacggc

SEQ ID NO: 162063 - DNA, 30 bp, Artificial Sequence
  Synthetic oligonucleotide
cttacggtatgtcctctcattggatacggc

SEQ ID NO: 162064 - DNA, 30 bp, Artificial Sequence
  Synthetic oligonucleotide
atgaggcccctgggcggattggtatacggc

SEQ ID NO: 162065 - DNA, 30 bp, Artificial Sequence
  Synthetic oligonucleotide
gaaggtacttcaaatggttcgacgtacggc

SEQ ID NO: 162066 - DNA, 30 bp, Artificial Sequence
  Synthetic oligonucleotide
gagagggtgtaacatcgataaaacaccggc

SEQ ID NO: 162067 - DNA, 30 bp, Artificial Sequence
  Synthetic oligonucleotide
tgccctacacaggttagggtactgaccggc

SEQ ID NO: 162068 - DNA, 30 bp, Artificial Sequence
  Synthetic oligonucleotide
tcggaagaccgaggctgtcaatctaccggc

SEQ ID NO: 162069 - DNA, 30 bp, Artificial Sequence
  Synthetic oligonucleotide
aagtgataatcatctcagttgatacccggc

SEQ ID NO: 162070 - DNA, 30 bp, Artificial Sequence
  Synthetic oligonucleotide
acgacgaaccgacgtcgcatcaagcccggc

SEQ ID NO: 162071 - DNA, 30 bp, Artificial Sequence
  Synthetic oligonucleotide
tcactcgagaatagtactagactgcccggc

SEQ ID NO: 162072 - DNA, 30 bp, Artificial Sequence
  Synthetic oligonucleotide
tggatgttattgattgcaatagcatccggc

SEQ ID NO: 162073 - DNA, 30 bp, Artificial Sequence
  Synthetic oligonucleotide
cacatggtcaagtgtgctgttagctccggc

SEQ ID NO: 162074 - DNA, 30 bp, Artificial Sequence
  Synthetic oligonucleotide
tgggcaagggcgaaagaatttgattccggc

SEQ ID NO: 162075 - DNA, 30 bp, Artificial Sequence
  Synthetic oligonucleotide
tctagaggtgcctccctactcccttccggc

SEQ ID NO: 162076 - DNA, 30 bp, Artificial Sequence
  Synthetic oligonucleotide
agccggcaaagtgacttggcgtgttccggc

SEQ ID NO: 162077 - DNA, 30 bp, Artificial Sequence
  Synthetic oligonucleotide
cgatcggccatgattgttcatatttccggc

SEQ ID NO: 162078 - DNA, 30 bp, Artificial Sequence
  Synthetic oligonucleotide
cttggatgtaagttataagttataagcggc

SEQ ID NO: 162079 - DNA, 30 bp, Artificial Sequence
  Synthetic oligonucleotide
ggatcctgcccaatttcgatcttcagcggc

SEQ ID NO: 162080 - DNA, 30 bp, Artificial Sequence
  Synthetic oligonucleotide
cacaccccctcgtattattagaagagcggc

SEQ ID NO: 162081 - DNA, 30 bp, Artificial Sequence
  Synthetic oligonucleotide
caaggaatggtggtgtcatggtagagcggc

SEQ ID NO: 162082 - DNA, 30 bp, Artificial Sequence
  Synthetic oligonucleotide
atgaaggggtaagctgaatatccgagcggc

SEQ ID NO: 162083 - DNA, 30 bp, Artificial Sequence
  Synthetic oligonucleotide
gggaatgcgtttcagtaaagtcttagcggc

SEQ ID NO: 162084 - DNA, 30 bp, Artificial Sequence
  Synthetic oligonucleotide
agcgctttagctcctcagtgaaaacgcggc

SEQ ID NO: 162085 - DNA, 30 bp, Artificial Sequence
  Synthetic oligonucleotide
gtatgacagtcccagagataagtccgcggc

SEQ ID NO: 162086 - DNA, 30 bp, Artificial Sequence
  Synthetic oligonucleotide
gcgaattgcggcctacagcacttccgcggc

SEQ ID NO: 162087 - DNA, 30 bp, Artificial Sequence
  Synthetic oligonucleotide
acaggccggatcctttagcgcgtgcgcggc

SEQ ID NO: 162088 - DNA, 30 bp, Artificial Sequence
  Synthetic oligonucleotide
ttaattgactattaacttatatctcgcggc

SEQ ID NO: 162089 - DNA, 30 bp, Artificial Sequence
  Synthetic oligonucleotide
cctagtatgctgatccttcactttcgcggc

SEQ ID NO: 162090 - DNA, 30 bp, Artificial Sequence
  Synthetic oligonucleotide
ccaccggctaaaaaagatgataccggcggc

SEQ ID NO: 162091 - DNA, 30 bp, Artificial Sequence
  Synthetic oligonucleotide
tgtctaggacgtaacttgggtgcgggcggc

SEQ ID NO: 162092 - DNA, 30 bp, Artificial Sequence
  Synthetic oligonucleotide
atgaccctctgtggagggagatgctgcggc

SEQ ID NO: 162093 - DNA, 30 bp, Artificial Sequence
  Synthetic oligonucleotide
aaagtggatttgtaccacctagtaatcggc

SEQ ID NO: 162094 - DNA, 30 bp, Artificial Sequence
  Synthetic oligonucleotide
ttggctacgcgccaatatgtgcagatcggc

SEQ ID NO: 162095 - DNA, 30 bp, Artificial Sequence
  Synthetic oligonucleotide
tactgccaacatgcgagttcgggcctcggc

SEQ ID NO: 162096 - DNA, 30 bp, Artificial Sequence
  Synthetic oligonucleotide
agagttagcgactggttggttcagctcggc

SEQ ID NO: 162097 - DNA, 30 bp, Artificial Sequence
  Synthetic oligonucleotide
cgcaatacataacgggtagctacgctcggc

SEQ ID NO: 162098 - DNA, 30 bp, Artificial Sequence
  Synthetic oligonucleotide
aagccaagctggcacagtaaacggctcggc

SEQ ID NO: 162099 - DNA, 30 bp, Artificial Sequence
  Synthetic oligonucleotide
cctggatctaaaatttctccatgggtcggc

SEQ ID NO: 162100 - DNA, 30 bp, Artificial Sequence
  Synthetic oligonucleotide
tacactaggagcatggagaatgatgtcggc

SEQ ID NO: 162101 - DNA, 30 bp, Artificial Sequence
  Synthetic oligonucleotide
gaccaaagtaatagcgcgcgacacttcggc

SEQ ID NO: 162102 - DNA, 30 bp, Artificial Sequence
  Synthetic oligonucleotide
cggctagaaaacagcgacacgatgttcggc

SEQ ID NO: 162103 - DNA, 30 bp, Artificial Sequence
  Synthetic oligonucleotide
tcctgccaggattgtgggcctccaaagggc

SEQ ID NO: 162104 - DNA, 30 bp, Artificial Sequence
  Synthetic oligonucleotide
acgtttccctcgaacactggttgaaagggc

SEQ ID NO: 162105 - DNA, 30 bp, Artificial Sequence
  Synthetic oligonucleotide
gggggcacatgaagcgggcacgacaagggc

SEQ ID NO: 162106 - DNA, 30 bp, Artificial Sequence
  Synthetic oligonucleotide
tggtggcccggaatatagacccgcaagggc

SEQ ID NO: 162107 - DNA, 30 bp, Artificial Sequence
  Synthetic oligonucleotide
tctgtacgtccaggtaagagtctcaagggc

SEQ ID NO: 162108 - DNA, 30 bp, Artificial Sequence
  Synthetic oligonucleotide
gcgagcccgactcccaggtatgagaagggc

SEQ ID NO: 162109 - DNA, 30 bp, Artificial Sequence
  Synthetic oligonucleotide
aagggtttgtctcaccacgagcataagggc

SEQ ID NO: 162110 - DNA, 30 bp, Artificial Sequence
  Synthetic oligonucleotide
ggtgatgactgctcggcataaatcgagggc

SEQ ID NO: 162111 - DNA, 30 bp, Artificial Sequence
  Synthetic oligonucleotide
ggtgggggtgaaggaaccagtcgggagggc

SEQ ID NO: 162112 - DNA, 30 bp, Artificial Sequence
  Synthetic oligonucleotide
ctgagataacgtggggagtctgcatagggc

SEQ ID NO: 162113 - DNA, 30 bp, Artificial Sequence
  Synthetic oligonucleotide
tctctcatgatccaaatatcgggatagggc

SEQ ID NO: 162114 - DNA, 30 bp, Artificial Sequence
  Synthetic oligonucleotide
tagaggttaagctagtagtagggctagggc

SEQ ID NO: 162115 - DNA, 30 bp, Artificial Sequence
  Synthetic oligonucleotide
tgaattctaagcgtgacgtctgcgtagggc

SEQ ID NO: 162116 - DNA, 30 bp, Artificial Sequence
  Synthetic oligonucleotide
acagcctactcgaatcgtatggtttagggc

SEQ ID NO: 162117 - DNA, 30 bp, Artificial Sequence
  Synthetic oligonucleotide
gagagcgtatatgagtcgtgtttaacgggc

SEQ ID NO: 162118 - DNA, 30 bp, Artificial Sequence
  Synthetic oligonucleotide
gtgttcagttacaccgaatagcacacgggc

SEQ ID NO: 162119 - DNA, 29 bp, Artificial Sequence
  Synthetic oligonucleotide
gtgccaagcactatgagtaggtcacgggc

SEQ ID NO: 162120 - DNA, 30 bp, Artificial Sequence
  Synthetic oligonucleotide
cagtgaatccgagaatgccccgcgacgggc

SEQ ID NO: 162121 - DNA, 30 bp, Artificial Sequence
  Synthetic oligonucleotide
acgttatgtaacttggacgtgttgacgggc

SEQ ID NO: 162122 - DNA, 30 bp, Artificial Sequence
  Synthetic oligonucleotide
aactaggggccgcgtgattcccaaccgggc

SEQ ID NO: 162123 - DNA, 30 bp, Artificial Sequence
  Synthetic oligonucleotide
cgcacctgcggggcattgacatatccgggc

SEQ ID NO: 162124 - DNA, 30 bp, Artificial Sequence
  Synthetic oligonucleotide
agactcattcgggcaaacgcttctccgggc

SEQ ID NO: 162125 - DNA, 30 bp, Artificial Sequence
  Synthetic oligonucleotide
cctggatcgttaaacgaacgccccgcgggc

SEQ ID NO: 162126 - DNA, 30 bp, Artificial Sequence
  Synthetic oligonucleotide
tgtaggactataagtgggtacttcgcgggc

SEQ ID NO: 162127 - DNA, 29 bp, Artificial Sequence
  Synthetic oligonucleotide
atgtattaaataaatagaatggtgcgggc

SEQ ID NO: 162128 - DNA, 30 bp, Artificial Sequence
  Synthetic oligonucleotide
gtactatcttaacagctaggactatcgggc

SEQ ID NO: 162129 - DNA, 30 bp, Artificial Sequence
  Synthetic oligonucleotide
gggcgcattagggggtcggctacctcgggc

SEQ ID NO: 162130 - DNA, 30 bp, Artificial Sequence
  Synthetic oligonucleotide
agctcgttattcatcggcgcaagctcgggc

SEQ ID NO: 162131 - DNA, 30 bp, Artificial Sequence
  Synthetic oligonucleotide
cacgtagaatcattttgggcgccgtcgggc

SEQ ID NO: 162132 - DNA, 30 bp, Artificial Sequence
  Synthetic oligonucleotide
gtaattcaatggtacgacagtctaaggggc

SEQ ID NO: 162133 - DNA, 30 bp, Artificial Sequence
  Synthetic oligonucleotide
gcgtcagagaccctggaaaaaccgcggggc

SEQ ID NO: 162134 - DNA, 30 bp, Artificial Sequence
  Synthetic oligonucleotide
aaagaatcacaaggaatgtctcaagggggc

SEQ ID NO: 162135 - DNA, 30 bp, Artificial Sequence
  Synthetic oligonucleotide
tgcgcatctgtaaggaacgggtacgggggc

SEQ ID NO: 162136 - DNA, 30 bp, Artificial Sequence
  Synthetic oligonucleotide
gataaatcccagataagtatgggggggggc

SEQ ID NO: 162137 - DNA, 30 bp, Artificial Sequence
  Synthetic oligonucleotide
gatagtttcacatgtacttgcggtgggggc

SEQ ID NO: 162138 - DNA, 30 bp, Artificial Sequence
  Synthetic oligonucleotide
acggcgattatcctgtcgcccccatggggc

SEQ ID NO: 162139 - DNA, 30 bp, Artificial Sequence
  Synthetic oligonucleotide
accacccgttactgaaggcacatgtggggc

SEQ ID NO: 162140 - DNA, 30 bp, Artificial Sequence
  Synthetic oligonucleotide
caccatatgatctgaccttccgtcatgggc

SEQ ID NO: 162141 - DNA, 30 bp, Artificial Sequence
  Synthetic oligonucleotide
gggagaggtgacaacatgttcctgatgggc

SEQ ID NO: 162142 - DNA, 30 bp, Artificial Sequence
  Synthetic oligonucleotide
gacggtctagactaacaactgttgatgggc

SEQ ID NO: 162143 - DNA, 30 bp, Artificial Sequence
  Synthetic oligonucleotide
tggcggcggtcagagtctaacagtatgggc

SEQ ID NO: 162144 - DNA, 30 bp, Artificial Sequence
  Synthetic oligonucleotide
atataatatagttaagcgtcaaacctgggc

SEQ ID NO: 162145 - DNA, 30 bp, Artificial Sequence
  Synthetic oligonucleotide
tgtcaactgtgctaacattacaggctgggc

SEQ ID NO: 162146 - DNA, 30 bp, Artificial Sequence
  Synthetic oligonucleotide
acagcttgattaacgtaggtcgaagtgggc

SEQ ID NO: 162147 - DNA, 30 bp, Artificial Sequence
  Synthetic oligonucleotide
gggtagcggggccgtttgacgtacgtgggc

SEQ ID NO: 162148 - DNA, 30 bp, Artificial Sequence
  Synthetic oligonucleotide
gacggccgtctggttgggttctatgtgggc

SEQ ID NO: 162149 - DNA, 30 bp, Artificial Sequence
  Synthetic oligonucleotide
gtctaacgtacctaaaataattatgtgggc

SEQ ID NO: 162150 - DNA, 31 bp, Artificial Sequence
  Synthetic oligonucleotide
cagcatcacttccagggaggtctacttgggc

SEQ ID NO: 162151 - DNA, 30 bp, Artificial Sequence
  Synthetic oligonucleotide
gtatatcagcgtgaccctctagggttgggc

SEQ ID NO: 162152 - DNA, 30 bp, Artificial Sequence
  Synthetic oligonucleotide
aacgcatagtgtaaacagctataaaatggc

SEQ ID NO: 162153 - DNA, 30 bp, Artificial Sequence
  Synthetic oligonucleotide
aaacagatgttcttggcccactccaatggc

SEQ ID NO: 162154 - DNA, 30 bp, Artificial Sequence
  Synthetic oligonucleotide
accatacaaatacttaggaaacggaatggc

SEQ ID NO: 162155 - DNA, 30 bp, Artificial Sequence
  Synthetic oligonucleotide
gggggaagcaacggggaatcgttccatggc

SEQ ID NO: 162156 - DNA, 30 bp, Artificial Sequence
  Synthetic oligonucleotide
gatacacaattcgggaagtgccatcatggc

SEQ ID NO: 162157 - DNA, 30 bp, Artificial Sequence
  Synthetic oligonucleotide
ggggtgatataggcggggttaaaagatggc

SEQ ID NO: 162158 - DNA, 30 bp, Artificial Sequence
  Synthetic oligonucleotide
gctaggcgatagctagttagtaacgatggc

SEQ ID NO: 162159 - DNA, 30 bp, Artificial Sequence
  Synthetic oligonucleotide
agtcgcacggaccgtatagaaaatgatggc

SEQ ID NO: 162160 - DNA, 30 bp, Artificial Sequence
  Synthetic oligonucleotide
acaccgatatatcacgcgggtcatgatggc

SEQ ID NO: 162161 - DNA, 30 bp, Artificial Sequence
  Synthetic oligonucleotide
ataccctcaacggtccaaataattgatggc

SEQ ID NO: 162162 - DNA, 30 bp, Artificial Sequence
  Synthetic oligonucleotide
aatggtgaaatccgaaactaagttgatggc

SEQ ID NO: 162163 - DNA, 30 bp, Artificial Sequence
  Synthetic oligonucleotide
tagtggacaggaatctccgactactatggc

SEQ ID NO: 162164 - DNA, 30 bp, Artificial Sequence
  Synthetic oligonucleotide
cgaatcaacagtgtaccggcttcgtatggc

SEQ ID NO: 162165 - DNA, 30 bp, Artificial Sequence
  Synthetic oligonucleotide
atcgcacggggtcaattgacgcgtactggc

SEQ ID NO: 162166 - DNA, 30 bp, Artificial Sequence
  Synthetic oligonucleotide
atgagcgagatccgctctaagaactctggc

SEQ ID NO: 162167 - DNA, 30 bp, Artificial Sequence
  Synthetic oligonucleotide
agttctcgcagtatggttaaagggtctggc

SEQ ID NO: 162168 - DNA, 30 bp, Artificial Sequence
  Synthetic oligonucleotide
agtgagcggccaacctcagtgatttctggc

SEQ ID NO: 162169 - DNA, 31 bp, Artificial Sequence
  Synthetic oligonucleotide
taaatagtatccgatacactgcataagtggc

SEQ ID NO: 162170 - DNA, 30 bp, Artificial Sequence
  Synthetic oligonucleotide
cggattagtgcaaaaacaaatatcagtggc

SEQ ID NO: 162171 - DNA, 30 bp, Artificial Sequence
  Synthetic oligonucleotide
ggagcggcttgcaagtcatagtagagtggc

SEQ ID NO: 162172 - DNA, 30 bp, Artificial Sequence
  Synthetic oligonucleotide
tagtcgcgatagcagggatgctctagtggc

SEQ ID NO: 162173 - DNA, 30 bp, Artificial Sequence
  Synthetic oligonucleotide
ctaggcggaaataatgtttaaagtagtggc

SEQ ID NO: 162174 - DNA, 30 bp, Artificial Sequence
  Synthetic oligonucleotide
tgaccagaaacagacgacccttgtagtggc

SEQ ID NO: 162175 - DNA, 30 bp, Artificial Sequence
  Synthetic oligonucleotide
tttgaggacctatagtacccttaacgtggc

SEQ ID NO: 162176 - DNA, 30 bp, Artificial Sequence
  Synthetic oligonucleotide
gtcgtaaaacatggtcggtacaggcgtggc

SEQ ID NO: 162177 - DNA, 30 bp, Artificial Sequence
  Synthetic oligonucleotide
atggtcgtcacggccagatatgctcgtggc

SEQ ID NO: 162178 - DNA, 30 bp, Artificial Sequence
  Synthetic oligonucleotide
tcttgtcaaaacatgtagttattgggtggc

SEQ ID NO: 162179 - DNA, 30 bp, Artificial Sequence
  Synthetic oligonucleotide
gaaagagtgtttatcgtatgatctggtggc

SEQ ID NO: 162180 - DNA, 30 bp, Artificial Sequence
  Synthetic oligonucleotide
ggcagctatatctagatagcgttctgtggc

SEQ ID NO: 162181 - DNA, 30 bp, Artificial Sequence
  Synthetic oligonucleotide
atcgagacctttgtggcccctgtttgtggc

SEQ ID NO: 162182 - DNA, 30 bp, Artificial Sequence
  Synthetic oligonucleotide
caagagacgtaaggtccacacgaaattggc

SEQ ID NO: 162183 - DNA, 30 bp, Artificial Sequence
  Synthetic oligonucleotide
atggcgcctaaagaagggccaaccattggc

SEQ ID NO: 162184 - DNA, 30 bp, Artificial Sequence
  Synthetic oligonucleotide
ggatattagactagggcattcagtattggc

SEQ ID NO: 162185 - DNA, 30 bp, Artificial Sequence
  Synthetic oligonucleotide
gcgtcatacctgcctatttgacagcttggc

SEQ ID NO: 162186 - DNA, 30 bp, Artificial Sequence
  Synthetic oligonucleotide
ccgagaggcgacgggtcaaatctgcttggc

SEQ ID NO: 162187 - DNA, 30 bp, Artificial Sequence
  Synthetic oligonucleotide
accgtgcaaatctttaatcactaggttggc

SEQ ID NO: 162188 - DNA, 30 bp, Artificial Sequence
  Synthetic oligonucleotide
gtggatatgcaaacgagtcgcaatgttggc

SEQ ID NO: 162189 - DNA, 30 bp, Artificial Sequence
  Synthetic oligonucleotide
cctcacgcatgatttttgtaggcatttggc

SEQ ID NO: 162190 - DNA, 30 bp, Artificial Sequence
  Synthetic oligonucleotide
tcagcaacagctgtacgagggagatttggc

SEQ ID NO: 162191 - DNA, 30 bp, Artificial Sequence
  Synthetic oligonucleotide
tgagtattgcctcctaacttgaactttggc

SEQ ID NO: 162192 - DNA, 30 bp, Artificial Sequence
  Synthetic oligonucleotide
ccggactaattgcagggttatgattttggc

SEQ ID NO: 162193 - DNA, 30 bp, Artificial Sequence
  Synthetic oligonucleotide
cgatacagcggccaaaccaaacaaaaatgc

SEQ ID NO: 162194 - DNA, 30 bp, Artificial Sequence
  Synthetic oligonucleotide
ggcgtgtataagcagacaggcgctaaatgc

SEQ ID NO: 162195 - DNA, 30 bp, Artificial Sequence
  Synthetic oligonucleotide
ccaataaatattgctacattatgtaaatgc

SEQ ID NO: 162196 - DNA, 30 bp, Artificial Sequence
  Synthetic oligonucleotide
cagctcaaaacgcggttggatttccaatgc

SEQ ID NO: 162197 - DNA, 30 bp, Artificial Sequence
  Synthetic oligonucleotide
gaatatcgcaggataccgtgcgacgaatgc

SEQ ID NO: 162198 - DNA, 30 bp, Artificial Sequence
  Synthetic oligonucleotide
taaagaagctaccaaccccttctcgaatgc

SEQ ID NO: 162199 - DNA, 30 bp, Artificial Sequence
  Synthetic oligonucleotide
cggtttggtattagggatcccgctgaatgc

SEQ ID NO: 162200 - DNA, 30 bp, Artificial Sequence
  Synthetic oligonucleotide
caccttcattgacgtgcattcgaataatgc

SEQ ID NO: 162201 - DNA, 30 bp, Artificial Sequence
  Synthetic oligonucleotide
agattaggccgtcgggtccacggctaatgc

SEQ ID NO: 162202 - DNA, 30 bp, Artificial Sequence
  Synthetic oligonucleotide
tatgatctaagatacgtctgagattaatgc

SEQ ID NO: 162203 - DNA, 30 bp, Artificial Sequence
  Synthetic oligonucleotide
ctcgcggtaagttcaaaccagagttaatgc

SEQ ID NO: 162204 - DNA, 30 bp, Artificial Sequence
  Synthetic oligonucleotide
agtacgcccacaacgttctatacaacatgc

SEQ ID NO: 162205 - DNA, 30 bp, Artificial Sequence
  Synthetic oligonucleotide
cgacctatctgactgcacctaaagacatgc

SEQ ID NO: 162206 - DNA, 30 bp, Artificial Sequence
  Synthetic oligonucleotide
ttaatccaagctccgcggtaactagcatgc

SEQ ID NO: 162207 - DNA, 30 bp, Artificial Sequence
  Synthetic oligonucleotide
aactctgcgtctagggtggcgtccgcatgc

SEQ ID NO: 162208 - DNA, 30 bp, Artificial Sequence
  Synthetic oligonucleotide
ccatctatactggcagctcgtctcgcatgc

SEQ ID NO: 162209 - DNA, 30 bp, Artificial Sequence
  Synthetic oligonucleotide
agcacataacttctgtctagaagggcatgc

SEQ ID NO: 162210 - DNA, 30 bp, Artificial Sequence
  Synthetic oligonucleotide
gtgacttggggccaggacggaggggcatgc

SEQ ID NO: 162211 - DNA, 30 bp, Artificial Sequence
  Synthetic oligonucleotide
gcggcatcggtagtcgggacgtctgcatgc

SEQ ID NO: 162212 - DNA, 30 bp, Artificial Sequence
  Synthetic oligonucleotide
gcttgcatgttaaacagctatgttgcatgc

SEQ ID NO: 162213 - DNA, 30 bp, Artificial Sequence
  Synthetic oligonucleotide
ttacaagggtggcgttcgtgtcactcatgc

SEQ ID NO: 162214 - DNA, 30 bp, Artificial Sequence
  Synthetic oligonucleotide
ggcggtcgagctgggcctgtggcgtcatgc

SEQ ID NO: 162215 - DNA, 30 bp, Artificial Sequence
  Synthetic oligonucleotide
agcctcatgtgtatacggtggtggtcatgc

SEQ ID NO: 162216 - DNA, 30 bp, Artificial Sequence
  Synthetic oligonucleotide
tgcaccccacttagcgggcagttgtcatgc

SEQ ID NO: 162217 - DNA, 30 bp, Artificial Sequence
  Synthetic oligonucleotide
atcgagacacagtccgaataacattcatgc

SEQ ID NO: 162218 - DNA, 30 bp, Artificial Sequence
  Synthetic oligonucleotide
gcatagagtagcaaggccaacacttcatgc

SEQ ID NO: 162219 - DNA, 30 bp, Artificial Sequence
  Synthetic oligonucleotide
acgggtcgactttaacgtaaacacagatgc

SEQ ID NO: 162220 - DNA, 30 bp, Artificial Sequence
  Synthetic oligonucleotide
agggtagagaaaggatctctaacccgatgc

SEQ ID NO: 162221 - DNA, 30 bp, Artificial Sequence
  Synthetic oligonucleotide
acgcggctctgactgaaaggatatcgatgc

SEQ ID NO: 162222 - DNA, 30 bp, Artificial Sequence
  Synthetic oligonucleotide
tgtgcggctggtgggggagaacctcgatgc

SEQ ID NO: 162223 - DNA, 30 bp, Artificial Sequence
  Synthetic oligonucleotide
aggatcaagacacttgcaaagaaaggatgc

SEQ ID NO: 162224 - DNA, 30 bp, Artificial Sequence
  Synthetic oligonucleotide
tagattagccgtattgacagtccctgatgc

SEQ ID NO: 162225 - DNA, 30 bp, Artificial Sequence
  Synthetic oligonucleotide
gaagtggctaaatctaacgtgggctgatgc

SEQ ID NO: 162226 - DNA, 30 bp, Artificial Sequence
  Synthetic oligonucleotide
agcatacgtcgtacgctgaccctctgatgc

SEQ ID NO: 162227 - DNA, 30 bp, Artificial Sequence
  Synthetic oligonucleotide
aaatgctggactgtgaagctgtggtgatgc

SEQ ID NO: 162228 - DNA, 30 bp, Artificial Sequence
  Synthetic oligonucleotide
aacatatatcgatagaagtgaaaaatatgc

SEQ ID NO: 162229 - DNA, 30 bp, Artificial Sequence
  Synthetic oligonucleotide
tgtaaggatattttcctctacaaaatatgc

SEQ ID NO: 162230 - DNA, 30 bp, Artificial Sequence
  Synthetic oligonucleotide
caactacccagaggatcggtgtcaatatgc

SEQ ID NO: 162231 - DNA, 30 bp, Artificial Sequence
  Synthetic oligonucleotide
ttcacaaaaatagtgttcgggtccatatgc

SEQ ID NO: 162232 - DNA, 30 bp, Artificial Sequence
  Synthetic oligonucleotide
agttcccaaggcagaggcgggggcatatgc

SEQ ID NO: 162233 - DNA, 30 bp, Artificial Sequence
  Synthetic oligonucleotide
tgagggcaattagagggaccggtcatatgc

SEQ ID NO: 162234 - DNA, 30 bp, Artificial Sequence
  Synthetic oligonucleotide
ggggattggtcatcctacttggtcatatgc

SEQ ID NO: 162235 - DNA, 30 bp, Artificial Sequence
  Synthetic oligonucleotide
cggactgaggttctgggcaaacgcctatgc

SEQ ID NO: 162236 - DNA, 30 bp, Artificial Sequence
  Synthetic oligonucleotide
atggaggcccggatatgatctaagctatgc

SEQ ID NO: 162237 - DNA, 30 bp, Artificial Sequence
  Synthetic oligonucleotide
gggcaccacataaaactgatggctctatgc

SEQ ID NO: 162238 - DNA, 30 bp, Artificial Sequence
  Synthetic oligonucleotide
atgaagagaaataattcaaaggaagtatgc

SEQ ID NO: 162239 - DNA, 30 bp, Artificial Sequence
  Synthetic oligonucleotide
agttggtagccttacattcactgcgtatgc

SEQ ID NO: 162240 - DNA, 30 bp, Artificial Sequence
  Synthetic oligonucleotide
taaccaagcacgccccgagggtatgtatgc

SEQ ID NO: 162241 - DNA, 30 bp, Artificial Sequence
  Synthetic oligonucleotide
acccacgccatgagtcaccgggaattatgc

SEQ ID NO: 162242 - DNA, 30 bp, Artificial Sequence
  Synthetic oligonucleotide
ctcgaggtctatacgggttcataattatgc

SEQ ID NO: 162243 - DNA, 30 bp, Artificial Sequence
  Synthetic oligonucleotide
ggctgagttggccaactcgatggtttatgc

SEQ ID NO: 162244 - DNA, 30 bp, Artificial Sequence
  Synthetic oligonucleotide
acgtctcatcagatacggagtcgcaactgc

SEQ ID NO: 162245 - DNA, 30 bp, Artificial Sequence
  Synthetic oligonucleotide
tggtccagtcgctgggatgtcaagaactgc

SEQ ID NO: 162246 - DNA, 30 bp, Artificial Sequence
  Synthetic oligonucleotide
cagcgaccttagactacagttcagaactgc

SEQ ID NO: 162247 - DNA, 30 bp, Artificial Sequence
  Synthetic oligonucleotide
gatagtaactgtgagccttaagggaactgc

SEQ ID NO: 162248 - DNA, 30 bp, Artificial Sequence
  Synthetic oligonucleotide
tagatgttcagcgtgcgaccccaacactgc

SEQ ID NO: 162249 - DNA, 30 bp, Artificial Sequence
  Synthetic oligonucleotide
aaacataagccgatttcatttgcccactgc

SEQ ID NO: 162250 - DNA, 30 bp, Artificial Sequence
  Synthetic oligonucleotide
atgaactgagggtagctggagttgcactgc

SEQ ID NO: 162251 - DNA, 30 bp, Artificial Sequence
  Synthetic oligonucleotide
tggggtcattgataggtcccgggtcactgc

SEQ ID NO: 162252 - DNA, 30 bp, Artificial Sequence
  Synthetic oligonucleotide
cgatcagtgagtgggcgctaataggactgc

SEQ ID NO: 162253 - DNA, 30 bp, Artificial Sequence
  Synthetic oligonucleotide
agcaggcacctcatataaaacgaatactgc

SEQ ID NO: 162254 - DNA, 30 bp, Artificial Sequence
  Synthetic oligonucleotide
aggacagcgtcccgggacaattactactgc

SEQ ID NO: 162255 - DNA, 30 bp, Artificial Sequence
  Synthetic oligonucleotide
gttcgcgatcagcgagtgtgagattactgc

SEQ ID NO: 162256 - DNA, 30 bp, Artificial Sequence
  Synthetic oligonucleotide
ttgccgtacgattggtgatgctcaacctgc

SEQ ID NO: 162257 - DNA, 30 bp, Artificial Sequence
  Synthetic oligonucleotide
gtagacgaaagaacgctctaggtaacctgc

SEQ ID NO: 162258 - DNA, 30 bp, Artificial Sequence
  Synthetic oligonucleotide
ctggtggtacggtctaaatgagcgacctgc

SEQ ID NO: 162259 - DNA, 30 bp, Artificial Sequence
  Synthetic oligonucleotide
cattgagccacaaggttctcagttacctgc

SEQ ID NO: 162260 - DNA, 30 bp, Artificial Sequence
  Synthetic oligonucleotide
agaaaagaatcttgaccaaccaaaccctgc

SEQ ID NO: 162261 - DNA, 30 bp, Artificial Sequence
  Synthetic oligonucleotide
ttcggtagggccgacgctgtgaacgcctgc

SEQ ID NO: 162262 - DNA, 30 bp, Artificial Sequence
  Synthetic oligonucleotide
ggaggtaaaataaattcggttcgcgcctgc

SEQ ID NO: 162263 - DNA, 30 bp, Artificial Sequence
  Synthetic oligonucleotide
atggaggtcggcgacaggttacgggcctgc

SEQ ID NO: 162264 - DNA, 30 bp, Artificial Sequence
  Synthetic oligonucleotide
gagcgcatgagggggtggctgtctgcctgc

SEQ ID NO: 162265 - DNA, 30 bp, Artificial Sequence
  Synthetic oligonucleotide
ggagcacagttggaaacagcttcttcctgc

SEQ ID NO: 162266 - DNA, 30 bp, Artificial Sequence
  Synthetic oligonucleotide
agcggtgtagtctcgtgctcgcaacgctgc

SEQ ID NO: 162267 - DNA, 30 bp, Artificial Sequence
  Synthetic oligonucleotide
gtaagtcaagttcgattactggagcgctgc

SEQ ID NO: 162268 - DNA, 30 bp, Artificial Sequence
  Synthetic oligonucleotide
ataagcgggtgaacgagccatagaggctgc

SEQ ID NO: 162269 - DNA, 30 bp, Artificial Sequence
  Synthetic oligonucleotide
ctatttaagtacccgatccccaccggctgc

SEQ ID NO: 162270 - DNA, 30 bp, Artificial Sequence
  Synthetic oligonucleotide
gcgccaagggcagttactaattagggctgc

SEQ ID NO: 162271 - DNA, 30 bp, Artificial Sequence
  Synthetic oligonucleotide
gtgcatgccggttgagcgagaggtggctgc

SEQ ID NO: 162272 - DNA, 30 bp, Artificial Sequence
  Synthetic oligonucleotide
cgtgatagaaaagcgttaggggcgtgctgc

SEQ ID NO: 162273 - DNA, 30 bp, Artificial Sequence
  Synthetic oligonucleotide
attgctaaaagcaaccaattttcgtgctgc

SEQ ID NO: 162274 - DNA, 30 bp, Artificial Sequence
  Synthetic oligonucleotide
ccactaggtgcgatagcggactcttgctgc

SEQ ID NO: 162275 - DNA, 30 bp, Artificial Sequence
  Synthetic oligonucleotide
acccaatcctgaaacagaatgttaatctgc

SEQ ID NO: 162276 - DNA, 30 bp, Artificial Sequence
  Synthetic oligonucleotide
ccaggaaaacttacgcgcctaatgatctgc

SEQ ID NO: 162277 - DNA, 30 bp, Artificial Sequence
  Synthetic oligonucleotide
ttaaggatccggggattttaggaattctgc

SEQ ID NO: 162278 - DNA, 30 bp, Artificial Sequence
  Synthetic oligonucleotide
taggaagaggtttgcgtctcctaattctgc

SEQ ID NO: 162279 - DNA, 30 bp, Artificial Sequence
  Synthetic oligonucleotide
tgccaggagacgtcagtgtcgccgaagtgc

SEQ ID NO: 162280 - DNA, 30 bp, Artificial Sequence
  Synthetic oligonucleotide
ggtgacccaggtatagttgaaggtaagtgc

SEQ ID NO: 162281 - DNA, 30 bp, Artificial Sequence
  Synthetic oligonucleotide
tgtacaaggaagcgtcgggctctacagtgc

SEQ ID NO: 162282 - DNA, 30 bp, Artificial Sequence
  Synthetic oligonucleotide
aatggtcctaggagagcatttgtccagtgc

SEQ ID NO: 162283 - DNA, 30 bp, Artificial Sequence
  Synthetic oligonucleotide
ggcaaaagggtgtcgactggggggcagtgc

SEQ ID NO: 162284 - DNA, 30 bp, Artificial Sequence
  Synthetic oligonucleotide
agcagattcaaattctgagaaggagagtgc

SEQ ID NO: 162285 - DNA, 30 bp, Artificial Sequence
  Synthetic oligonucleotide
ctttatatcagtgccaatttcggggagtgc

SEQ ID NO: 162286 - DNA, 30 bp, Artificial Sequence
  Synthetic oligonucleotide
tatgtatagcgcaaaatgccaaatgagtgc

SEQ ID NO: 162287 - DNA, 30 bp, Artificial Sequence
  Synthetic oligonucleotide
ggtataaagtctttctgccaatctgagtgc

SEQ ID NO: 162288 - DNA, 30 bp, Artificial Sequence
  Synthetic oligonucleotide
tggtaaagagataggcgctacggtgagtgc

SEQ ID NO: 162289 - DNA, 30 bp, Artificial Sequence
  Synthetic oligonucleotide
ctgaaacggcattcggagggggttgagtgc

SEQ ID NO: 162290 - DNA, 30 bp, Artificial Sequence
  Synthetic oligonucleotide
gggcaaggtcctaggcgccgctttgagtgc

SEQ ID NO: 162291 - DNA, 30 bp, Artificial Sequence
  Synthetic oligonucleotide
atgggagtattccgacgatccttctagtgc

SEQ ID NO: 162292 - DNA, 30 bp, Artificial Sequence
  Synthetic oligonucleotide
cgggtgcctaacctatgataaaattagtgc

SEQ ID NO: 162293 - DNA, 30 bp, Artificial Sequence
  Synthetic oligonucleotide
tattgtctatgcttaaggtcggaaacgtgc

SEQ ID NO: 162294 - DNA, 30 bp, Artificial Sequence
  Synthetic oligonucleotide
ggtccaaggaagtgataggtcaaaccgtgc

SEQ ID NO: 162295 - DNA, 30 bp, Artificial Sequence
  Synthetic oligonucleotide
ggtcgttaatggtggatgacaaacccgtgc

SEQ ID NO: 162296 - DNA, 30 bp, Artificial Sequence
  Synthetic oligonucleotide
ggccactttatcctctcaaccaagccgtgc

SEQ ID NO: 162297 - DNA, 30 bp, Artificial Sequence
  Synthetic oligonucleotide
ggtcccatagcgcctagaacagcagcgtgc

SEQ ID NO: 162298 - DNA, 30 bp, Artificial Sequence
  Synthetic oligonucleotide
tggattctaagtggacgagggaacgcgtgc

SEQ ID NO: 162299 - DNA, 30 bp, Artificial Sequence
  Synthetic oligonucleotide
cctccgtgtcgtgggtttaaggagtcgtgc

SEQ ID NO: 162300 - DNA, 30 bp, Artificial Sequence
  Synthetic oligonucleotide
cgttgttacatatacgtagagagttcgtgc

SEQ ID NO: 162301 - DNA, 30 bp, Artificial Sequence
  Synthetic oligonucleotide
acatccaatacgccgtaacggaccaggtgc

SEQ ID NO: 162302 - DNA, 30 bp, Artificial Sequence
  Synthetic oligonucleotide
ggggtagaagggttacaggactgtaggtgc

SEQ ID NO: 162303 - DNA, 30 bp, Artificial Sequence
  Synthetic oligonucleotide
gcccaaggtccagggtgtccgtgtaggtgc

SEQ ID NO: 162304 - DNA, 30 bp, Artificial Sequence
  Synthetic oligonucleotide
cacacataggtttaccatcgaaaacggtgc

SEQ ID NO: 162305 - DNA, 30 bp, Artificial Sequence
  Synthetic oligonucleotide
tctctgtgattacgcgaacgagtccggtgc

SEQ ID NO: 162306 - DNA, 30 bp, Artificial Sequence
  Synthetic oligonucleotide
aactaccctaaaaaacctcataagcggtgc

SEQ ID NO: 162307 - DNA, 30 bp, Artificial Sequence
  Synthetic oligonucleotide
tggcaagttgagcatgtgcggactcggtgc

SEQ ID NO: 162308 - DNA, 30 bp, Artificial Sequence
  Synthetic oligonucleotide
ggtcatacacccaacagtatcgacgggtgc

SEQ ID NO: 162309 - DNA, 29 bp, Artificial Sequence
  Synthetic oligonucleotide
atgtagaacggtttttgagtcaggggtgc

SEQ ID NO: 162310 - DNA, 30 bp, Artificial Sequence
  Synthetic oligonucleotide
gcttccggccaagcaagtagggaggggtgc

SEQ ID NO: 162311 - DNA, 30 bp, Artificial Sequence
  Synthetic oligonucleotide
cagtaatcgaaggctgtaagtcactggtgc

SEQ ID NO: 162312 - DNA, 30 bp, Artificial Sequence
  Synthetic oligonucleotide
cgtgaggtttgcttcggatactcctggtgc

SEQ ID NO: 162313 - DNA, 30 bp, Artificial Sequence
  Synthetic oligonucleotide
aaggggatgcacttatacggtcattggtgc

SEQ ID NO: 162314 - DNA, 30 bp, Artificial Sequence
  Synthetic oligonucleotide
gggcggactgctagaggcaatgaaatgtgc

SEQ ID NO: 162315 - DNA, 30 bp, Artificial Sequence
  Synthetic oligonucleotide
cgttggactgacctctctatttagatgtgc

SEQ ID NO: 162316 - DNA, 30 bp, Artificial Sequence
  Synthetic oligonucleotide
aaataagacgtgaccgaagagcgtatgtgc

SEQ ID NO: 162317 - DNA, 30 bp, Artificial Sequence
  Synthetic oligonucleotide
acgaaacaagaaggaccggagcttatgtgc

SEQ ID NO: 162318 - DNA, 30 bp, Artificial Sequence
  Synthetic oligonucleotide
tgctggaattgtcgcgacaagccactgtgc

SEQ ID NO: 162319 - DNA, 30 bp, Artificial Sequence
  Synthetic oligonucleotide
ccatgaaaaacttaaaggaaggacctgtgc

SEQ ID NO: 162320 - DNA, 30 bp, Artificial Sequence
  Synthetic oligonucleotide
ggtttaagtctcacgtcacggtccctgtgc

SEQ ID NO: 162321 - DNA, 30 bp, Artificial Sequence
  Synthetic oligonucleotide
acttagtttgtccataattgcgctctgtgc

SEQ ID NO: 162322 - DNA, 30 bp, Artificial Sequence
  Synthetic oligonucleotide
atcagagagtgtgacgctctacaagtgtgc

SEQ ID NO: 162323 - DNA, 30 bp, Artificial Sequence
  Synthetic oligonucleotide
aagtcaaaatgttgcgtgctgcaagtgtgc

SEQ ID NO: 162324 - DNA, 30 bp, Artificial Sequence
  Synthetic oligonucleotide
ctttgggagaccacgagtttcgaagtgtgc

SEQ ID NO: 162325 - DNA, 30 bp, Artificial Sequence
  Synthetic oligonucleotide
ggggcaagagaacacacactaccagtgtgc

SEQ ID NO: 162326 - DNA, 30 bp, Artificial Sequence
  Synthetic oligonucleotide
ggatttcgagaagaactcaatatcgtgtgc

SEQ ID NO: 162327 - DNA, 30 bp, Artificial Sequence
  Synthetic oligonucleotide
cgtgtcaacacctcggcccagtctgtgtgc

SEQ ID NO: 162328 - DNA, 30 bp, Artificial Sequence
  Synthetic oligonucleotide
ggcagctagcctggtactaggggattgtgc

SEQ ID NO: 162329 - DNA, 30 bp, Artificial Sequence
  Synthetic oligonucleotide
atcggtcattatccatcgttgcccttgtgc

SEQ ID NO: 162330 - DNA, 30 bp, Artificial Sequence
  Synthetic oligonucleotide
gccaggctaggatgtagcatgacgttgtgc

SEQ ID NO: 162331 - DNA, 30 bp, Artificial Sequence
  Synthetic oligonucleotide
tctacgcgacacaaagatgtggaaaattgc

SEQ ID NO: 162332 - DNA, 30 bp, Artificial Sequence
  Synthetic oligonucleotide
acccaagctaacagtcgcctcatgaattgc

SEQ ID NO: 162333 - DNA, 30 bp, Artificial Sequence
  Synthetic oligonucleotide
atgaacccgtttaaggacaaggaccattgc

SEQ ID NO: 162334 - DNA, 30 bp, Artificial Sequence
  Synthetic oligonucleotide
atcggagtaaggggaatcgcagatgattgc

SEQ ID NO: 162335 - DNA, 30 bp, Artificial Sequence
  Synthetic oligonucleotide
aagctcagggcagtgaaaggctatgattgc

SEQ ID NO: 162336 - DNA, 30 bp, Artificial Sequence
  Synthetic oligonucleotide
accacaacaagcgtggactggttatattgc

SEQ ID NO: 162337 - DNA, 30 bp, Artificial Sequence
  Synthetic oligonucleotide
tccagggcgtccggcctatccctgtattgc

SEQ ID NO: 162338 - DNA, 30 bp, Artificial Sequence
  Synthetic oligonucleotide
tcaaagaatgtgggaagttcagaaacttgc

SEQ ID NO: 162339 - DNA, 30 bp, Artificial Sequence
  Synthetic oligonucleotide
ccttaatagcccgtccttgaagcaacttgc

SEQ ID NO: 162340 - DNA, 30 bp, Artificial Sequence
  Synthetic oligonucleotide
gggaaggagatataaccggctgcaacttgc

SEQ ID NO: 162341 - DNA, 30 bp, Artificial Sequence
  Synthetic oligonucleotide
aacagtagtccgggctcccctccgacttgc

SEQ ID NO: 162342 - DNA, 30 bp, Artificial Sequence
  Synthetic oligonucleotide
ccacttgggaattctcggcgctgaccttgc

SEQ ID NO: 162343 - DNA, 30 bp, Artificial Sequence
  Synthetic oligonucleotide
cggttggcggtgtcatattactcgccttgc

SEQ ID NO: 162344 - DNA, 30 bp, Artificial Sequence
  Synthetic oligonucleotide
cgtgtataaagggggcctgctaggccttgc

SEQ ID NO: 162345 - DNA, 30 bp, Artificial Sequence
  Synthetic oligonucleotide
gtctcagactagagtcgatcactagcttgc

SEQ ID NO: 162346 - DNA, 30 bp, Artificial Sequence
  Synthetic oligonucleotide
ggatccaatatgtcaatctataacgcttgc

SEQ ID NO: 162347 - DNA, 30 bp, Artificial Sequence
  Synthetic oligonucleotide
aggagacgtgtttggcgcgtaatggcttgc

SEQ ID NO: 162348 - DNA, 30 bp, Artificial Sequence
  Synthetic oligonucleotide
gcggtcatgaattgcagcccaggtgcttgc

SEQ ID NO: 162349 - DNA, 30 bp, Artificial Sequence
  Synthetic oligonucleotide
ggaatgggcttcagcttagccatgtcttgc

SEQ ID NO: 162350 - DNA, 30 bp, Artificial Sequence
  Synthetic oligonucleotide
ggaacctcggatcctaatttgaagagttgc

SEQ ID NO: 162351 - DNA, 30 bp, Artificial Sequence
  Synthetic oligonucleotide
tcggaaattaccagaattgccccgagttgc

SEQ ID NO: 162352 - DNA, 25 bp, Artificial Sequence
  Synthetic oligonucleotide
attatagaatgtggaagtgcgttgc

SEQ ID NO: 162353 - DNA, 30 bp, Artificial Sequence
  Synthetic oligonucleotide
catgcagatcgtgcaaacagcagcggttgc

SEQ ID NO: 162354 - DNA, 30 bp, Artificial Sequence
  Synthetic oligonucleotide
agtgggctgaatcgtgcatgggcgtgttgc

SEQ ID NO: 162355 - DNA, 30 bp, Artificial Sequence
  Synthetic oligonucleotide
tcacgagaaattaagaatggctcgtgttgc

SEQ ID NO: 162356 - DNA, 30 bp, Artificial Sequence
  Synthetic oligonucleotide
tcatcaagtcttaagggtaaagcaatttgc

SEQ ID NO: 162357 - DNA, 30 bp, Artificial Sequence
  Synthetic oligonucleotide
gtacgcacaatcgcccaacaacgaatttgc

SEQ ID NO: 162358 - DNA, 30 bp, Artificial Sequence
  Synthetic oligonucleotide
gcgaactgggggtctcgtatcgtaatttgc

SEQ ID NO: 162359 - DNA, 30 bp, Artificial Sequence
  Synthetic oligonucleotide
catggactaagtataaattggagcatttgc

SEQ ID NO: 162360 - DNA, 30 bp, Artificial Sequence
  Synthetic oligonucleotide
ttacattagtgctaatagcacccgatttgc

SEQ ID NO: 162361 - DNA, 30 bp, Artificial Sequence
  Synthetic oligonucleotide
atgatatcccggaagaggtgggccctttgc

SEQ ID NO: 162362 - DNA, 30 bp, Artificial Sequence
  Synthetic oligonucleotide
aaataggaggtatagacgatggaggtttgc

SEQ ID NO: 162363 - DNA, 30 bp, Artificial Sequence
  Synthetic oligonucleotide
tgcgacagcatgacatggcgggccttttgc

SEQ ID NO: 162364 - DNA, 30 bp, Artificial Sequence
  Synthetic oligonucleotide
gtaaacgcttctcgcggtgaccatttttgc

SEQ ID NO: 162365 - DNA, 30 bp, Artificial Sequence
  Synthetic oligonucleotide
gcgggcataggacgttgtattaggaaaatc

SEQ ID NO: 162366 - DNA, 30 bp, Artificial Sequence
  Synthetic oligonucleotide
cgggttcaagtccctctggcaaataaaatc

SEQ ID NO: 162367 - DNA, 30 bp, Artificial Sequence
  Synthetic oligonucleotide
ggacatctgtgggattggttgcataaaatc

SEQ ID NO: 162368 - DNA, 30 bp, Artificial Sequence
  Synthetic oligonucleotide
gtgcatcagcttgcctgagttgaccaaatc

SEQ ID NO: 162369 - DNA, 30 bp, Artificial Sequence
  Synthetic oligonucleotide
gtaaaggagtgatgtcgcgatcagcaaatc

SEQ ID NO: 162370 - DNA, 30 bp, Artificial Sequence
  Synthetic oligonucleotide
aacactggcgagaagggtgaagcgcaaatc

SEQ ID NO: 162371 - DNA, 30 bp, Artificial Sequence
  Synthetic oligonucleotide
ccgggaagccaggcgagcaagttataaatc

SEQ ID NO: 162372 - DNA, 30 bp, Artificial Sequence
  Synthetic oligonucleotide
acattcttcccgcggtggtctggttaaatc

SEQ ID NO: 162373 - DNA, 30 bp, Artificial Sequence
  Synthetic oligonucleotide
tcttgaataagacggcgtggtacaacaatc

SEQ ID NO: 162374 - DNA, 30 bp, Artificial Sequence
  Synthetic oligonucleotide
ggagggatactggcaaggtcttgaacaatc

SEQ ID NO: 162375 - DNA, 30 bp, Artificial Sequence
  Synthetic oligonucleotide
acaatatacagtttctcgccagagacaatc

SEQ ID NO: 162376 - DNA, 30 bp, Artificial Sequence
  Synthetic oligonucleotide
caggagcgcaggtcttaagtacatacaatc

SEQ ID NO: 162377 - DNA, 30 bp, Artificial Sequence
  Synthetic oligonucleotide
gacgtaatgccgaacactgggattacaatc

SEQ ID NO: 162378 - DNA, 30 bp, Artificial Sequence
  Synthetic oligonucleotide
tacacctgatgcttcgatattaaaccaatc

SEQ ID NO: 162379 - DNA, 30 bp, Artificial Sequence
  Synthetic oligonucleotide
gcggccacttgagggcgccctgcagcaatc

SEQ ID NO: 162380 - DNA, 30 bp, Artificial Sequence
  Synthetic oligonucleotide
tgtaggtcgtgatttgtaatctgagcaatc

SEQ ID NO: 162381 - DNA, 30 bp, Artificial Sequence
  Synthetic oligonucleotide
tcgcaacctaaacataagaaacttgcaatc

SEQ ID NO: 162382 - DNA, 30 bp, Artificial Sequence
  Synthetic oligonucleotide
cgagcatcgtcctggttcgagtgtagaatc

SEQ ID NO: 162383 - DNA, 30 bp, Artificial Sequence
  Synthetic oligonucleotide
cgcccaatcgtgctaacagcaaaacgaatc

SEQ ID NO: 162384 - DNA, 30 bp, Artificial Sequence
  Synthetic oligonucleotide
tgcctctcctctggaatacgatgacgaatc

SEQ ID NO: 162385 - DNA, 30 bp, Artificial Sequence
  Synthetic oligonucleotide
ggtccacctgatgaagtctgcatgcgaatc

SEQ ID NO: 162386 - DNA, 30 bp, Artificial Sequence
  Synthetic oligonucleotide
tccaagtattgcaatctcgaaaatcgaatc

SEQ ID NO: 162387 - DNA, 30 bp, Artificial Sequence
  Synthetic oligonucleotide
aaatcgacgagtaagtgtatcgaaggaatc

SEQ ID NO: 162388 - DNA, 30 bp, Artificial Sequence
  Synthetic oligonucleotide
agaggataggtagcggaggggaggggaatc

SEQ ID NO: 162389 - DNA, 30 bp, Artificial Sequence
  Synthetic oligonucleotide
atagctaagtttggcccgtcacagtgaatc

SEQ ID NO: 162390 - DNA, 30 bp, Artificial Sequence
  Synthetic oligonucleotide
ctcgcctggtgtgagttgactccttgaatc

SEQ ID NO: 162391 - DNA, 30 bp, Artificial Sequence
  Synthetic oligonucleotide
atgaagggcccgctaagaactagcataatc

SEQ ID NO: 162392 - DNA, 30 bp, Artificial Sequence
  Synthetic oligonucleotide
cggtagaattcacaaagcgtcgttataatc

SEQ ID NO: 162393 - DNA, 30 bp, Artificial Sequence
  Synthetic oligonucleotide
gtagggccgcgggagcagtggatcctaatc

SEQ ID NO: 162394 - DNA, 30 bp, Artificial Sequence
  Synthetic oligonucleotide
ccgtttgtgggagtgattccggctctaatc

SEQ ID NO: 162395 - DNA, 30 bp, Artificial Sequence
  Synthetic oligonucleotide
taactcgcgatgttcaatgaaaaagtaatc

SEQ ID NO: 162396 - DNA, 30 bp, Artificial Sequence
  Synthetic oligonucleotide
attgggcaggtgcgatatgggctagtaatc

SEQ ID NO: 162397 - DNA, 30 bp, Artificial Sequence
  Synthetic oligonucleotide
aacgccacgtaagtgatgcgaaccgtaatc

SEQ ID NO: 162398 - DNA, 30 bp, Artificial Sequence
  Synthetic oligonucleotide
tccccagcggacaagatattgaatgtaatc

SEQ ID NO: 162399 - DNA, 30 bp, Artificial Sequence
  Synthetic oligonucleotide
tccagcgtagcggtcacaagacctgtaatc

SEQ ID NO: 162400 - DNA, 30 bp, Artificial Sequence
  Synthetic oligonucleotide
agtagtgctgcataggcattcacaaacatc

SEQ ID NO: 162401 - DNA, 30 bp, Artificial Sequence
  Synthetic oligonucleotide
ctacatggataagtgaatgcacggaacatc

SEQ ID NO: 162402 - DNA, 30 bp, Artificial Sequence
  Synthetic oligonucleotide
cgaaaccgccccttaaacgccgataacatc

SEQ ID NO: 162403 - DNA, 30 bp, Artificial Sequence
  Synthetic oligonucleotide
gccgaataaagtgcggcctcgcgtaacatc

SEQ ID NO: 162404 - DNA, 30 bp, Artificial Sequence
  Synthetic oligonucleotide
aagagtatgcgtcttgtaatgagacacatc

SEQ ID NO: 162405 - DNA, 30 bp, Artificial Sequence
  Synthetic oligonucleotide
aggtaccaggggcagtgtgctacagacatc

SEQ ID NO: 162406 - DNA, 30 bp, Artificial Sequence
  Synthetic oligonucleotide
aacgtactactccgttgccctcgtgacatc

SEQ ID NO: 162407 - DNA, 30 bp, Artificial Sequence
  Synthetic oligonucleotide
gttagaataaggtgtgttgagtgatacatc

SEQ ID NO: 162408 - DNA, 30 bp, Artificial Sequence
  Synthetic oligonucleotide
ccgtcccggtagcatgcttgcgagtacatc

SEQ ID NO: 162409 - DNA, 30 bp, Artificial Sequence
  Synthetic oligonucleotide
gaataagcacgatagctttaagacaccatc

SEQ ID NO: 162410 - DNA, 30 bp, Artificial Sequence
  Synthetic oligonucleotide
taccggcaaatggcattagatctcaccatc

SEQ ID NO: 162411 - DNA, 30 bp, Artificial Sequence
  Synthetic oligonucleotide
ggacatgattgttgtccactcttgaccatc

SEQ ID NO: 162412 - DNA, 31 bp, Artificial Sequence
  Synthetic oligonucleotide
gcggggaattgttgacagtaaacagcccatc

SEQ ID NO: 162413 - DNA, 30 bp, Artificial Sequence
  Synthetic oligonucleotide
tcacaaacgcgagactcgtcacagcccatc

SEQ ID NO: 162414 - DNA, 30 bp, Artificial Sequence
  Synthetic oligonucleotide
aatgtgtgtcatccgtaaaatgggcccatc

SEQ ID NO: 162415 - DNA, 30 bp, Artificial Sequence
  Synthetic oligonucleotide
gctagtttcactaccgatttcattcccatc

SEQ ID NO: 162416 - DNA, 30 bp, Artificial Sequence
  Synthetic oligonucleotide
catgatcctttagtcaaatggaaagccatc

SEQ ID NO: 162417 - DNA, 30 bp, Artificial Sequence
  Synthetic oligonucleotide
tcaggagatgctaaacgtgctgcttccatc

SEQ ID NO: 162418 - DNA, 30 bp, Artificial Sequence
  Synthetic oligonucleotide
tttgataggtaattgtcaagaacaagcatc

SEQ ID NO: 162419 - DNA, 30 bp, Artificial Sequence
  Synthetic oligonucleotide
tcggagaaggtttacatgatatgaagcatc

SEQ ID NO: 162420 - DNA, 30 bp, Artificial Sequence
  Synthetic oligonucleotide
cagtgagaaacgtccttcataaacagcatc

SEQ ID NO: 162421 - DNA, 30 bp, Artificial Sequence
  Synthetic oligonucleotide
tcgaatagatcattaccagattcgagcatc

SEQ ID NO: 162422 - DNA, 30 bp, Artificial Sequence
  Synthetic oligonucleotide
ccgcgcagaagatgagacggaatgagcatc

SEQ ID NO: 162423 - DNA, 30 bp, Artificial Sequence
  Synthetic oligonucleotide
ttggtgtttagagtgtgaatactgagcatc

SEQ ID NO: 162424 - DNA, 30 bp, Artificial Sequence
  Synthetic oligonucleotide
tctacagggagaagacccagtaatagcatc

SEQ ID NO: 162425 - DNA, 30 bp, Artificial Sequence
  Synthetic oligonucleotide
tacagttaaggtgaacaagtacctagcatc

SEQ ID NO: 162426 - DNA, 30 bp, Artificial Sequence
  Synthetic oligonucleotide
gatcctatatacgtattgggagttagcatc

SEQ ID NO: 162427 - DNA, 30 bp, Artificial Sequence
  Synthetic oligonucleotide
gacatggatctgagaaatccgcgccgcatc

SEQ ID NO: 162428 - DNA, 30 bp, Artificial Sequence
  Synthetic oligonucleotide
actgcacccctttcgccgaaatagggcatc

SEQ ID NO: 162429 - DNA, 30 bp, Artificial Sequence
  Synthetic oligonucleotide
ggaacaagactcaatgtcaactgctgcatc

SEQ ID NO: 162430 - DNA, 30 bp, Artificial Sequence
  Synthetic oligonucleotide
aagaaacgtatggcagatccggaaatcatc

SEQ ID NO: 162431 - DNA, 30 bp, Artificial Sequence
  Synthetic oligonucleotide
ggagaccataccgtggtgatgatactcatc

SEQ ID NO: 162432 - DNA, 30 bp, Artificial Sequence
  Synthetic oligonucleotide
cccgagcttgggtgcgttgataacctcatc

SEQ ID NO: 162433 - DNA, 30 bp, Artificial Sequence
  Synthetic oligonucleotide
agacactaaaaggtatgcgggattctcatc

SEQ ID NO: 162434 - DNA, 30 bp, Artificial Sequence
  Synthetic oligonucleotide
gagggtattggggcttacatggctgtcatc

SEQ ID NO: 162435 - DNA, 30 bp, Artificial Sequence
  Synthetic oligonucleotide
tcgtatctagaatttattaaacgtgtcatc

SEQ ID NO: 162436 - DNA, 30 bp, Artificial Sequence
  Synthetic oligonucleotide
agtcgtcccgtgcggattacaggtttcatc

SEQ ID NO: 162437 - DNA, 30 bp, Artificial Sequence
  Synthetic oligonucleotide
tcaaacctaaggaccgataacccaaagatc

SEQ ID NO: 162438 - DNA, 30 bp, Artificial Sequence
  Synthetic oligonucleotide
cagagctgacgctcccttgggcagaagatc

SEQ ID NO: 162439 - DNA, 30 bp, Artificial Sequence
  Synthetic oligonucleotide
atattgggaatacgtgtaggacggcagatc

SEQ ID NO: 162440 - DNA, 30 bp, Artificial Sequence
  Synthetic oligonucleotide
ccgaacgaaggcgactccggggcagagatc

SEQ ID NO: 162441 - DNA, 30 bp, Artificial Sequence
  Synthetic oligonucleotide
gattaggcatactagagtctcctagagatc

SEQ ID NO: 162442 - DNA, 30 bp, Artificial Sequence
  Synthetic oligonucleotide
taggataaggtttgacgacctttagagatc

SEQ ID NO: 162443 - DNA, 30 bp, Artificial Sequence
  Synthetic oligonucleotide
gggtttagtgtgactgggcgacgtgagatc

SEQ ID NO: 162444 - DNA, 30 bp, Artificial Sequence
  Synthetic oligonucleotide
ttacttgttagggtgtgcgtacagtagatc

SEQ ID NO: 162445 - DNA, 30 bp, Artificial Sequence
  Synthetic oligonucleotide
tgatgtgcttgcataaggatactaacgatc

SEQ ID NO: 162446 - DNA, 30 bp, Artificial Sequence
  Synthetic oligonucleotide
agatatgaccgtagttaataccgtacgatc

SEQ ID NO: 162447 - DNA, 30 bp, Artificial Sequence
  Synthetic oligonucleotide
attgaccagggtgcatgacgtcgcccgatc

SEQ ID NO: 162448 - DNA, 30 bp, Artificial Sequence
  Synthetic oligonucleotide
ctcataagttcgtatcatatgcagccgatc

SEQ ID NO: 162449 - DNA, 30 bp, Artificial Sequence
  Synthetic oligonucleotide
gtcacacccaaaggaaccaggcgggcgatc

SEQ ID NO: 162450 - DNA, 30 bp, Artificial Sequence
  Synthetic oligonucleotide
ctaactctaaactcgactatggtctcgatc

SEQ ID NO: 162451 - DNA, 30 bp, Artificial Sequence
  Synthetic oligonucleotide
acccggggctcgacagttaataacaggatc

SEQ ID NO: 162452 - DNA, 30 bp, Artificial Sequence
  Synthetic oligonucleotide
aggaccattcgaaccataccgggcaggatc

SEQ ID NO: 162453 - DNA, 30 bp, Artificial Sequence
  Synthetic oligonucleotide
caataccgcagaccctagtcagtgaggatc

SEQ ID NO: 162454 - DNA, 30 bp, Artificial Sequence
  Synthetic oligonucleotide
aagtaccccccaagtgtgatggtgaggatc

SEQ ID NO: 162455 - DNA, 30 bp, Artificial Sequence
  Synthetic oligonucleotide
gtgtgcacgactgcgactatggaacggatc

SEQ ID NO: 162456 - DNA, 30 bp, Artificial Sequence
  Synthetic oligonucleotide
tgtgccacagtatgctggcgtatgcggatc

SEQ ID NO: 162457 - DNA, 30 bp, Artificial Sequence
  Synthetic oligonucleotide
agacatataaggggacttgaagctcggatc

SEQ ID NO: 162458 - DNA, 30 bp, Artificial Sequence
  Synthetic oligonucleotide
taaattcaatataaatttgagtgagggatc

SEQ ID NO: 162459 - DNA, 30 bp, Artificial Sequence
  Synthetic oligonucleotide
gggttagtatgcctcgccccacaggggatc

SEQ ID NO: 162460 - DNA, 30 bp, Artificial Sequence
  Synthetic oligonucleotide
agcacacgtacaagaacgacacgtgggatc

SEQ ID NO: 162461 - DNA, 30 bp, Artificial Sequence
  Synthetic oligonucleotide
ggtgcatgagacaattaatgaggtgggatc

SEQ ID NO: 162462 - DNA, 30 bp, Artificial Sequence
  Synthetic oligonucleotide
atctcgcgagaaacgagaatgacatggatc

SEQ ID NO: 162463 - DNA, 30 bp, Artificial Sequence
  Synthetic oligonucleotide
cactctagaacagctggccctgcatggatc

SEQ ID NO: 162464 - DNA, 30 bp, Artificial Sequence
  Synthetic oligonucleotide
agcgacttagtgtcgtaggccgacatgatc

SEQ ID NO: 162465 - DNA, 30 bp, Artificial Sequence
  Synthetic oligonucleotide
gctaagacgcgttagtgattctagatgatc

SEQ ID NO: 162466 - DNA, 30 bp, Artificial Sequence
  Synthetic oligonucleotide
ggacactcccacatcagagtacctatgatc

SEQ ID NO: 162467 - DNA, 30 bp, Artificial Sequence
  Synthetic oligonucleotide
gtcaaccctagaataatccaacaagtgatc

SEQ ID NO: 162468 - DNA, 30 bp, Artificial Sequence
  Synthetic oligonucleotide
gtcccaaatcaatgtgaggctacagtgatc

SEQ ID NO: 162469 - DNA, 30 bp, Artificial Sequence
  Synthetic oligonucleotide
ctagacatcgatcgctggaaccaggtgatc

SEQ ID NO: 162470 - DNA, 30 bp, Artificial Sequence
  Synthetic oligonucleotide
aatggaccaagggaacttggcggggtgatc

SEQ ID NO: 162471 - DNA, 30 bp, Artificial Sequence
  Synthetic oligonucleotide
ccgggagatctcgtatgcgacatcttgatc

SEQ ID NO: 162472 - DNA, 30 bp, Artificial Sequence
  Synthetic oligonucleotide
aggtaatcccccgatacgattctcttgatc

SEQ ID NO: 162473 - DNA, 30 bp, Artificial Sequence
  Synthetic oligonucleotide
ccgcgaaacgactacggttctcctaatatc

SEQ ID NO: 162474 - DNA, 30 bp, Artificial Sequence
  Synthetic oligonucleotide
ggcctacggtagtgagacgttcaacatatc

SEQ ID NO: 162475 - DNA, 30 bp, Artificial Sequence
  Synthetic oligonucleotide
acactgataaatggggtactatcacatatc

SEQ ID NO: 162476 - DNA, 30 bp, Artificial Sequence
  Synthetic oligonucleotide
gcttagtcaatcatatatctccgacatatc

SEQ ID NO: 162477 - DNA, 30 bp, Artificial Sequence
  Synthetic oligonucleotide
tatcgtgctggatccagagttactcatatc

SEQ ID NO: 162478 - DNA, 30 bp, Artificial Sequence
  Synthetic oligonucleotide
gggtctaatgcgtgactaccaggtcatatc

SEQ ID NO: 162479 - DNA, 30 bp, Artificial Sequence
  Synthetic oligonucleotide
cctacgggatatagggtgcgatccgatatc

SEQ ID NO: 162480 - DNA, 30 bp, Artificial Sequence
  Synthetic oligonucleotide
gccgaacgcgagcatctatttcgcgatatc

SEQ ID NO: 162481 - DNA, 30 bp, Artificial Sequence
  Synthetic oligonucleotide
gacgtggtactctacggccacgatgatatc

SEQ ID NO: 162482 - DNA, 30 bp, Artificial Sequence
  Synthetic oligonucleotide
tatacggaccgtagatggctacagtatatc

SEQ ID NO: 162483 - DNA, 30 bp, Artificial Sequence
  Synthetic oligonucleotide
acggagagtaactatgagtgcaggtatatc

SEQ ID NO: 162484 - DNA, 30 bp, Artificial Sequence
  Synthetic oligonucleotide
gtagcacagggctgtaacttaatgtatatc

SEQ ID NO: 162485 - DNA, 30 bp, Artificial Sequence
  Synthetic oligonucleotide
tggcggtgagcaaagtacagctgttatatc

SEQ ID NO: 162486 - DNA, 30 bp, Artificial Sequence
  Synthetic oligonucleotide
caggttatcgattcaggggcgagcactatc

SEQ ID NO: 162487 - DNA, 30 bp, Artificial Sequence
  Synthetic oligonucleotide
taggcgaaagctcacctatagggcactatc

SEQ ID NO: 162488 - DNA, 30 bp, Artificial Sequence
  Synthetic oligonucleotide
gggctcatgacccatctaactgtgactatc

SEQ ID NO: 162489 - DNA, 30 bp, Artificial Sequence
  Synthetic oligonucleotide
ccaaggagcggtttgtcttatcaacctatc

SEQ ID NO: 162490 - DNA, 30 bp, Artificial Sequence
  Synthetic oligonucleotide
cattcgcagtgagagtagcagttacctatc

SEQ ID NO: 162491 - DNA, 30 bp, Artificial Sequence
  Synthetic oligonucleotide
cactagcaacatgggagagtacatgctatc

SEQ ID NO: 162492 - DNA, 30 bp, Artificial Sequence
  Synthetic oligonucleotide
cggctacatgagccaaagacagatgctatc

SEQ ID NO: 162493 - DNA, 30 bp, Artificial Sequence
  Synthetic oligonucleotide
ggtaggaacccaccgtcaatgaactctatc

SEQ ID NO: 162494 - DNA, 30 bp, Artificial Sequence
  Synthetic oligonucleotide
aagaataagggtccaagcttaaattctatc

SEQ ID NO: 162495 - DNA, 30 bp, Artificial Sequence
  Synthetic oligonucleotide
acaacgggaccttcgcgtgtggattctatc

SEQ ID NO: 162496 - DNA, 30 bp, Artificial Sequence
  Synthetic oligonucleotide
tcaggtcagaaacaatttaaatgtagtatc

SEQ ID NO: 162497 - DNA, 30 bp, Artificial Sequence
  Synthetic oligonucleotide
atccctattcaagacacgagggaacgtatc

SEQ ID NO: 162498 - DNA, 30 bp, Artificial Sequence
  Synthetic oligonucleotide
agtaaatagaagtagtctgggtcacgtatc

SEQ ID NO: 162499 - DNA, 30 bp, Artificial Sequence
  Synthetic oligonucleotide
ttcggacgatgaagcttctaagcaggtatc

SEQ ID NO: 162500 - DNA, 30 bp, Artificial Sequence
  Synthetic oligonucleotide
tcgatgaactttggcttaaatgcctgtatc

SEQ ID NO: 162501 - DNA, 30 bp, Artificial Sequence
  Synthetic oligonucleotide
atttaaataccaaggattcggctctgtatc

SEQ ID NO: 162502 - DNA, 30 bp, Artificial Sequence
  Synthetic oligonucleotide
aaagcaacttcattagcagtggcgattatc

SEQ ID NO: 162503 - DNA, 30 bp, Artificial Sequence
  Synthetic oligonucleotide
cggatatcccgaaatcattgtattattatc

SEQ ID NO: 162504 - DNA, 30 bp, Artificial Sequence
  Synthetic oligonucleotide
cagctcatcgttggcatatttttgcttatc

SEQ ID NO: 162505 - DNA, 30 bp, Artificial Sequence
  Synthetic oligonucleotide
gcagcatccgactgatagtgactagttatc

SEQ ID NO: 162506 - DNA, 30 bp, Artificial Sequence
  Synthetic oligonucleotide
tgctgggtcacggcacctgtattcgttatc

SEQ ID NO: 162507 - DNA, 30 bp, Artificial Sequence
  Synthetic oligonucleotide
atgcactttgatcattaaaggtgcaaactc

SEQ ID NO: 162508 - DNA, 30 bp, Artificial Sequence
  Synthetic oligonucleotide
agtatggcccgtatttcttgtctcaaactc

SEQ ID NO: 162509 - DNA, 30 bp, Artificial Sequence
  Synthetic oligonucleotide
ggtggaggggcattcggtagtgttaaactc

SEQ ID NO: 162510 - DNA, 30 bp, Artificial Sequence
  Synthetic oligonucleotide
agcatgtgatcataactgggaccgcaactc

SEQ ID NO: 162511 - DNA, 30 bp, Artificial Sequence
  Synthetic oligonucleotide
agctgctgtggtaggcttctcaatcaactc

SEQ ID NO: 162512 - DNA, 30 bp, Artificial Sequence
  Synthetic oligonucleotide
gtaaaccactaaaatacaaacccagaactc

SEQ ID NO: 162513 - DNA, 30 bp, Artificial Sequence
  Synthetic oligonucleotide
atggggaacgcattatgttgaagagaactc

SEQ ID NO: 162514 - DNA, 30 bp, Artificial Sequence
  Synthetic oligonucleotide
gcataagaataccattagaaaaacgaactc

SEQ ID NO: 162515 - DNA, 30 bp, Artificial Sequence
  Synthetic oligonucleotide
ggtgcaggctcgcactggacagaataactc

SEQ ID NO: 162516 - DNA, 30 bp, Artificial Sequence
  Synthetic oligonucleotide
gtgtggacccatacccttctctaataactc

SEQ ID NO: 162517 - DNA, 30 bp, Artificial Sequence
  Synthetic oligonucleotide
tgaacataggctccaactcaacgataactc

SEQ ID NO: 162518 - DNA, 30 bp, Artificial Sequence
  Synthetic oligonucleotide
cggaggacttgtcttcccgccaactaactc

SEQ ID NO: 162519 - DNA, 30 bp, Artificial Sequence
  Synthetic oligonucleotide
ttaggaaaatagtcacctctagcctaactc

SEQ ID NO: 162520 - DNA, 30 bp, Artificial Sequence
  Synthetic oligonucleotide
atgatcggccaggcgatctgtaaaccactc

SEQ ID NO: 162521 - DNA, 30 bp, Artificial Sequence
  Synthetic oligonucleotide
gcccctcgaaacaacagaactgtagcactc

SEQ ID NO: 162522 - DNA, 31 bp, Artificial Sequence
  Synthetic oligonucleotide
ttggtcgtggaaacttcggtacacggcactc

SEQ ID NO: 162523 - DNA, 30 bp, Artificial Sequence
  Synthetic oligonucleotide
gataggaagatgacagcacgtcgggcactc

SEQ ID NO: 162524 - DNA, 30 bp, Artificial Sequence
  Synthetic oligonucleotide
ccgtgacggtgcgctatcgcatttgcactc

SEQ ID NO: 162525 - DNA, 30 bp, Artificial Sequence
  Synthetic oligonucleotide
gtaagcaaagtaatctattcggtctcactc

SEQ ID NO: 162526 - DNA, 30 bp, Artificial Sequence
  Synthetic oligonucleotide
acttcatcacgatataaaacattctcactc

SEQ ID NO: 162527 - DNA, 30 bp, Artificial Sequence
  Synthetic oligonucleotide
tgcattatcagcgactacacggcgtcactc

SEQ ID NO: 162528 - DNA, 30 bp, Artificial Sequence
  Synthetic oligonucleotide
tcttaattgatggcatagggaggacgactc

SEQ ID NO: 162529 - DNA, 31 bp, Artificial Sequence
  Synthetic oligonucleotide
acaagtgtacctatgagtggttgggcgactc

SEQ ID NO: 162530 - DNA, 30 bp, Artificial Sequence
  Synthetic oligonucleotide
cttagctgttttagaagggacaaaggactc

SEQ ID NO: 162531 - DNA, 30 bp, Artificial Sequence
  Synthetic oligonucleotide
aagcgtcgagcgtattaagtggacggactc

SEQ ID NO: 162532 - DNA, 30 bp, Artificial Sequence
  Synthetic oligonucleotide
gggagaatattggttggtatcaggggactc

SEQ ID NO: 162533 - DNA, 30 bp, Artificial Sequence
  Synthetic oligonucleotide
gactcaacagacttcgatccgcggggactc

SEQ ID NO: 162534 - DNA, 30 bp, Artificial Sequence
  Synthetic oligonucleotide
gaatagtgatgcgtacatacctatggactc

SEQ ID NO: 162535 - DNA, 30 bp, Artificial Sequence
  Synthetic oligonucleotide
attgtgtatacattatgaacgtaatgactc

SEQ ID NO: 162536 - DNA, 30 bp, Artificial Sequence
  Synthetic oligonucleotide
atattgtcatgcggattcgctatctgactc

SEQ ID NO: 162537 - DNA, 30 bp, Artificial Sequence
  Synthetic oligonucleotide
atagacagtctagtcgtttcatagtgactc

SEQ ID NO: 162538 - DNA, 30 bp, Artificial Sequence
  Synthetic oligonucleotide
ggcacaacagacgctgtctttccgtgactc

SEQ ID NO: 162539 - DNA, 30 bp, Artificial Sequence
  Synthetic oligonucleotide
cttacctttgccgagcgaccgaacatactc

SEQ ID NO: 162540 - DNA, 30 bp, Artificial Sequence
  Synthetic oligonucleotide
ggcagacgcgggaacgaggtatgcctactc

SEQ ID NO: 162541 - DNA, 30 bp, Artificial Sequence
  Synthetic oligonucleotide
cggtctacacgatctactaatttcctactc

SEQ ID NO: 162542 - DNA, 30 bp, Artificial Sequence
  Synthetic oligonucleotide
agttactcaccgagttcgggtacgctactc

SEQ ID NO: 162543 - DNA, 30 bp, Artificial Sequence
  Synthetic oligonucleotide
gcgtagtgctggtagaagtcccaagtactc

SEQ ID NO: 162544 - DNA, 30 bp, Artificial Sequence
  Synthetic oligonucleotide
gatggacagtagcctttgcgagaagtactc

SEQ ID NO: 162545 - DNA, 30 bp, Artificial Sequence
  Synthetic oligonucleotide
gcatgacacgatccggccccaaccgtactc

SEQ ID NO: 162546 - DNA, 30 bp, Artificial Sequence
  Synthetic oligonucleotide
ttaggcaactaaagtttcaaggcattactc

SEQ ID NO: 162547 - DNA, 30 bp, Artificial Sequence
  Synthetic oligonucleotide
gaccaaggcggacaaatatacagattactc

SEQ ID NO: 162548 - DNA, 30 bp, Artificial Sequence
  Synthetic oligonucleotide
agagcatgtagaatcaaagcttggttactc

SEQ ID NO: 162549 - DNA, 30 bp, Artificial Sequence
  Synthetic oligonucleotide
acgaatataaccacaatattggctttactc

SEQ ID NO: 162550 - DNA, 30 bp, Artificial Sequence
  Synthetic oligonucleotide
attgggagaattcgtagtgcttcgcacctc

SEQ ID NO: 162551 - DNA, 30 bp, Artificial Sequence
  Synthetic oligonucleotide
agtcggggttgaagtaagtcccgtcacctc

SEQ ID NO: 162552 - DNA, 30 bp, Artificial Sequence
  Synthetic oligonucleotide
tccgagcgaagtcgaccttttcgggacctc

SEQ ID NO: 162553 - DNA, 30 bp, Artificial Sequence
  Synthetic oligonucleotide
atagatcgaaagtatcgctagttggacctc

SEQ ID NO: 162554 - DNA, 30 bp, Artificial Sequence
  Synthetic oligonucleotide
ggtcaggagggtgtcgacgcttggtacctc

SEQ ID NO: 162555 - DNA, 30 bp, Artificial Sequence
  Synthetic oligonucleotide
tgtgtgtaccctaatctctgaatgtacctc

SEQ ID NO: 162556 - DNA, 30 bp, Artificial Sequence
  Synthetic oligonucleotide
tttgggacgttcaggtgcttgttaaccctc

SEQ ID NO: 162557 - DNA, 30 bp, Artificial Sequence
  Synthetic oligonucleotide
catcccgaagtatagtacaagttcaccctc

SEQ ID NO: 162558 - DNA, 30 bp, Artificial Sequence
  Synthetic oligonucleotide
tatagcgatagtcctaggctggctaccctc

SEQ ID NO: 162559 - DNA, 30 bp, Artificial Sequence
  Synthetic oligonucleotide
ggagatgcgcttcgctgtggataccccctc

SEQ ID NO: 162560 - DNA, 30 bp, Artificial Sequence
  Synthetic oligonucleotide
gacgacgggagcggcacgaacattcccctc

SEQ ID NO: 162561 - DNA, 30 bp, Artificial Sequence
  Synthetic oligonucleotide
cggagtaaccaggtaatgataaaaagcctc

SEQ ID NO: 162562 - DNA, 30 bp, Artificial Sequence
  Synthetic oligonucleotide
gactcacggatccctgtgatacgtcgcctc

SEQ ID NO: 162563 - DNA, 30 bp, Artificial Sequence
  Synthetic oligonucleotide
atgaactatctccaacatgcttaaggcctc

SEQ ID NO: 162564 - DNA, 30 bp, Artificial Sequence
  Synthetic oligonucleotide
agatgcacgtagagcgagtgtattggcctc

SEQ ID NO: 162565 - DNA, 30 bp, Artificial Sequence
  Synthetic oligonucleotide
taccaacggcaagtacgaatgtttggcctc

SEQ ID NO: 162566 - DNA, 30 bp, Artificial Sequence
  Synthetic oligonucleotide
ggaaaggctaggtaatttatagcatgcctc

SEQ ID NO: 162567 - DNA, 30 bp, Artificial Sequence
  Synthetic oligonucleotide
tatcatcctagcttatattgcccttgcctc

SEQ ID NO: 162568 - DNA, 30 bp, Artificial Sequence
  Synthetic oligonucleotide
tgagcgaaatctcatggtgctctaatcctc

SEQ ID NO: 162569 - DNA, 30 bp, Artificial Sequence
  Synthetic oligonucleotide
tgtgctggaacgtgacgactgttaatcctc

SEQ ID NO: 162570 - DNA, 30 bp, Artificial Sequence
  Synthetic oligonucleotide
aaaccgaagacaggtacagaatgcatcctc

SEQ ID NO: 162571 - DNA, 30 bp, Artificial Sequence
  Synthetic oligonucleotide
ctaaccgcctatcggaagtcagtcatcctc

SEQ ID NO: 162572 - DNA, 30 bp, Artificial Sequence
  Synthetic oligonucleotide
taatctacgacctaattacagtagatcctc

SEQ ID NO: 162573 - DNA, 30 bp, Artificial Sequence
  Synthetic oligonucleotide
gacggcgtaacgctgtgcgagggactcctc

SEQ ID NO: 162574 - DNA, 30 bp, Artificial Sequence
  Synthetic oligonucleotide
gccacgaatttcgaagaatcacgtttcctc

SEQ ID NO: 162575 - DNA, 30 bp, Artificial Sequence
  Synthetic oligonucleotide
gggactcaccagtagcggtccaacaagctc

SEQ ID NO: 162576 - DNA, 30 bp, Artificial Sequence
  Synthetic oligonucleotide
atatgagacctcagtatacgtgccaagctc

SEQ ID NO: 162577 - DNA, 30 bp, Artificial Sequence
  Synthetic oligonucleotide
agcagaggggacactcgtataaagaagctc

SEQ ID NO: 162578 - DNA, 30 bp, Artificial Sequence
  Synthetic oligonucleotide
ccgttagccaggccctgtcctaggaagctc

SEQ ID NO: 162579 - DNA, 30 bp, Artificial Sequence
  Synthetic oligonucleotide
ctaacaagacagaagtacaggcctaagctc

SEQ ID NO: 162580 - DNA, 30 bp, Artificial Sequence
  Synthetic oligonucleotide
tactgactactactaaggagagggcagctc

SEQ ID NO: 162581 - DNA, 30 bp, Artificial Sequence
  Synthetic oligonucleotide
actgggcacttatggtattatcttcagctc

SEQ ID NO: 162582 - DNA, 30 bp, Artificial Sequence
  Synthetic oligonucleotide
gctagcgagggtcccgataagggcgagctc

SEQ ID NO: 162583 - DNA, 31 bp, Artificial Sequence
  Synthetic oligonucleotide
atgcccctagaactcccaagcataatagctc

SEQ ID NO: 162584 - DNA, 30 bp, Artificial Sequence
  Synthetic oligonucleotide
ccttcgccgaatcaaggcgatccctagctc

SEQ ID NO: 162585 - DNA, 30 bp, Artificial Sequence
  Synthetic oligonucleotide
gacgtgtaggaccgtgtttgacagtagctc

SEQ ID NO: 162586 - DNA, 30 bp, Artificial Sequence
  Synthetic oligonucleotide
tcggtcctgcttcgttacgtagggtagctc

SEQ ID NO: 162587 - DNA, 30 bp, Artificial Sequence
  Synthetic oligonucleotide
gggtgcaccaccgtgtactgtacaacgctc

SEQ ID NO: 162588 - DNA, 30 bp, Artificial Sequence
  Synthetic oligonucleotide
tgccaaataacactcatgctcgccacgctc

SEQ ID NO: 162589 - DNA, 30 bp, Artificial Sequence
  Synthetic oligonucleotide
acgactggcaacccatggggtttcacgctc

SEQ ID NO: 162590 - DNA, 30 bp, Artificial Sequence
  Synthetic oligonucleotide
ttgccggtgtgctgtaaacaggcgacgctc

SEQ ID NO: 162591 - DNA, 30 bp, Artificial Sequence
  Synthetic oligonucleotide
aacgaaatccttgatggagtaggcgcgctc

SEQ ID NO: 162592 - DNA, 30 bp, Artificial Sequence
  Synthetic oligonucleotide
cacgactggtcatggcgatattgggcgctc

SEQ ID NO: 162593 - DNA, 30 bp, Artificial Sequence
  Synthetic oligonucleotide
agttccctggaaaccggaagtatgtcgctc

SEQ ID NO: 162594 - DNA, 30 bp, Artificial Sequence
  Synthetic oligonucleotide
gatgagcaatgcggagctgggagttcgctc

SEQ ID NO: 162595 - DNA, 30 bp, Artificial Sequence
  Synthetic oligonucleotide
cgagctagactattttatctaacaaggctc

SEQ ID NO: 162596 - DNA, 30 bp, Artificial Sequence
  Synthetic oligonucleotide
tttgccagtagatggaactaaggcaggctc

SEQ ID NO: 162597 - DNA, 30 bp, Artificial Sequence
  Synthetic oligonucleotide
cgcagtggcatcaagctttagatcaggctc

SEQ ID NO: 162598 - DNA, 30 bp, Artificial Sequence
  Synthetic oligonucleotide
cgcaagcttgggaaatcgactgcgaggctc

SEQ ID NO: 162599 - DNA, 30 bp, Artificial Sequence
  Synthetic oligonucleotide
tttgctgggaggatatttcggacccggctc

SEQ ID NO: 162600 - DNA, 30 bp, Artificial Sequence
  Synthetic oligonucleotide
agatatgtgcggcgaaaactggagcggctc

SEQ ID NO: 162601 - DNA, 30 bp, Artificial Sequence
  Synthetic oligonucleotide
aatgcgaggttatacccttctactcggctc

SEQ ID NO: 162602 - DNA, 30 bp, Artificial Sequence
  Synthetic oligonucleotide
caatgacaacagttcgctagcgttcggctc

SEQ ID NO: 162603 - DNA, 30 bp, Artificial Sequence
  Synthetic oligonucleotide
cggaatcgtatagcaatatcgtgtgggctc

SEQ ID NO: 162604 - DNA, 30 bp, Artificial Sequence
  Synthetic oligonucleotide
agcatcggtaaggtgacaccggaatggctc

SEQ ID NO: 162605 - DNA, 30 bp, Artificial Sequence
  Synthetic oligonucleotide
gtattcagcccagagttcaagtagatgctc

SEQ ID NO: 162606 - DNA, 30 bp, Artificial Sequence
  Synthetic oligonucleotide
gttgagcgtgacaaggaggggtatatgctc

SEQ ID NO: 162607 - DNA, 30 bp, Artificial Sequence
  Synthetic oligonucleotide
gtcaaggcctaggtactatggtacctgctc

SEQ ID NO: 162608 - DNA, 30 bp, Artificial Sequence
  Synthetic oligonucleotide
catatttaagagggattcggtaccctgctc

SEQ ID NO: 162609 - DNA, 29 bp, Artificial Sequence
  Synthetic oligonucleotide
gtgtgaataaccgagtcagcgcagtgctc

SEQ ID NO: 162610 - DNA, 30 bp, Artificial Sequence
  Synthetic oligonucleotide
gttgttgaggtgagttggagaagtgtgctc

SEQ ID NO: 162611 - DNA, 30 bp, Artificial Sequence
  Synthetic oligonucleotide
gctgcacgagcagtcgtagcagccaatctc

SEQ ID NO: 162612 - DNA, 30 bp, Artificial Sequence
  Synthetic oligonucleotide
gcatagccttcaactgaaaccacgaatctc

SEQ ID NO: 162613 - DNA, 30 bp, Artificial Sequence
  Synthetic oligonucleotide
caactttaagactgttctcatcgtaatctc

SEQ ID NO: 162614 - DNA, 31 bp, Artificial Sequence
  Synthetic oligonucleotide
caactaaacctttaatcgcttagggcatctc

SEQ ID NO: 162615 - DNA, 30 bp, Artificial Sequence
  Synthetic oligonucleotide
ttccaacaaggaatctttcatatgcatctc

SEQ ID NO: 162616 - DNA, 30 bp, Artificial Sequence
  Synthetic oligonucleotide
tgcctcggacacaaggtttcattgcatctc

SEQ ID NO: 162617 - DNA, 30 bp, Artificial Sequence
  Synthetic oligonucleotide
tcgattgcgtgtgtcgcccaatgtcatctc

SEQ ID NO: 162618 - DNA, 30 bp, Artificial Sequence
  Synthetic oligonucleotide
cgtctataggcggcgaacatagtagatctc

SEQ ID NO: 162619 - DNA, 30 bp, Artificial Sequence
  Synthetic oligonucleotide
actgtgaaccactaccggatagttgatctc

SEQ ID NO: 162620 - DNA, 30 bp, Artificial Sequence
  Synthetic oligonucleotide
caatcgtaaaaagggagtcgggaatatctc

SEQ ID NO: 162621 - DNA, 31 bp, Artificial Sequence
  Synthetic oligonucleotide
ccagccgtgactattacagggcgtatatctc

SEQ ID NO: 162622 - DNA, 30 bp, Artificial Sequence
  Synthetic oligonucleotide
aagggaatgattgttcgaatatgctatctc

SEQ ID NO: 162623 - DNA, 30 bp, Artificial Sequence
  Synthetic oligonucleotide
acgttaggctatgcgcgatatggttatctc

SEQ ID NO: 162624 - DNA, 30 bp, Artificial Sequence
  Synthetic oligonucleotide
cacaagcccataaaaaccggaagccctctc

SEQ ID NO: 162625 - DNA, 30 bp, Artificial Sequence
  Synthetic oligonucleotide
acagtcagacagcatgcttcaccagctctc

SEQ ID NO: 162626 - DNA, 30 bp, Artificial Sequence
  Synthetic oligonucleotide
ccatagggattaagactgtgggcagctctc

SEQ ID NO: 162627 - DNA, 30 bp, Artificial Sequence
  Synthetic oligonucleotide
aggtataacatggatcgtacccagtctctc

SEQ ID NO: 162628 - DNA, 30 bp, Artificial Sequence
  Synthetic oligonucleotide
caaacaggggtgcgatttgactacagtctc

SEQ ID NO: 162629 - DNA, 30 bp, Artificial Sequence
  Synthetic oligonucleotide
ttacaatggcactactcggattcgagtctc

SEQ ID NO: 162630 - DNA, 30 bp, Artificial Sequence
  Synthetic oligonucleotide
ccagaagtaattcgggaataactccgtctc

SEQ ID NO: 162631 - DNA, 30 bp, Artificial Sequence
  Synthetic oligonucleotide
cgttggttattccgaacagacccaggtctc

SEQ ID NO: 162632 - DNA, 30 bp, Artificial Sequence
  Synthetic oligonucleotide
aaagtgttggagaagggagtggactgtctc

SEQ ID NO: 162633 - DNA, 30 bp, Artificial Sequence
  Synthetic oligonucleotide
gtcgatagaggtggtttttattactgtctc

SEQ ID NO: 162634 - DNA, 30 bp, Artificial Sequence
  Synthetic oligonucleotide
gggcagaagcccgaatgagggtcgattctc

SEQ ID NO: 162635 - DNA, 30 bp, Artificial Sequence
  Synthetic oligonucleotide
gggacttagtaattgacatcccggcttctc

SEQ ID NO: 162636 - DNA, 30 bp, Artificial Sequence
  Synthetic oligonucleotide
tagaagtactagcgctaattactggttctc

SEQ ID NO: 162637 - DNA, 30 bp, Artificial Sequence
  Synthetic oligonucleotide
ggatcaatcttaaggcaaaagcatgttctc

SEQ ID NO: 162638 - DNA, 30 bp, Artificial Sequence
  Synthetic oligonucleotide
ccgtaccataaatatgtttaaactgttctc

SEQ ID NO: 162639 - DNA, 30 bp, Artificial Sequence
  Synthetic oligonucleotide
gaccgttatctcagtacgtgtatatttctc

SEQ ID NO: 162640 - DNA, 30 bp, Artificial Sequence
  Synthetic oligonucleotide
cctagcaggcgagaacgcatgctaaaagtc

SEQ ID NO: 162641 - DNA, 30 bp, Artificial Sequence
  Synthetic oligonucleotide
taatcggatccgactatgaatgtaaaagtc

SEQ ID NO: 162642 - DNA, 30 bp, Artificial Sequence
  Synthetic oligonucleotide
tcgcgtcggggcatgagtccgaacaaagtc

SEQ ID NO: 162643 - DNA, 30 bp, Artificial Sequence
  Synthetic oligonucleotide
gtatagacccgattaggttctagcaaagtc

SEQ ID NO: 162644 - DNA, 30 bp, Artificial Sequence
  Synthetic oligonucleotide
aagaagctagctcaggctaaagtgaaagtc

SEQ ID NO: 162645 - DNA, 30 bp, Artificial Sequence
  Synthetic oligonucleotide
acggcgatgctcgttgtagttgttaaagtc

SEQ ID NO: 162646 - DNA, 30 bp, Artificial Sequence
  Synthetic oligonucleotide
gaacatattgcgctgagtgcctaacaagtc

SEQ ID NO: 162647 - DNA, 30 bp, Artificial Sequence
  Synthetic oligonucleotide
gctagtgtgtagaagtacggcccacaagtc

SEQ ID NO: 162648 - DNA, 30 bp, Artificial Sequence
  Synthetic oligonucleotide
gatcactcttcttctgttcgtccccaagtc

SEQ ID NO: 162649 - DNA, 30 bp, Artificial Sequence
  Synthetic oligonucleotide
agcatggagacggcacgcgttgggcaagtc

SEQ ID NO: 162650 - DNA, 29 bp, Artificial Sequence
  Synthetic oligonucleotide
cggcttttgcgcaataccacacagaagtc

SEQ ID NO: 162651 - DNA, 30 bp, Artificial Sequence
  Synthetic oligonucleotide
gatggctctgaacggtgactctcagaagtc

SEQ ID NO: 162652 - DNA, 30 bp, Artificial Sequence
  Synthetic oligonucleotide
ggggatcctactccgactgaccgtgaagtc

SEQ ID NO: 162653 - DNA, 30 bp, Artificial Sequence
  Synthetic oligonucleotide
ttcacagcgatcctgacatgtcaataagtc

SEQ ID NO: 162654 - DNA, 30 bp, Artificial Sequence
  Synthetic oligonucleotide
aagatgtaggattatgcaagaagctaagtc

SEQ ID NO: 162655 - DNA, 30 bp, Artificial Sequence
  Synthetic oligonucleotide
cttggcgagaagggtaactgtataacagtc

SEQ ID NO: 162656 - DNA, 30 bp, Artificial Sequence
  Synthetic oligonucleotide
aggggcgagtttctcaaacggcccacagtc

SEQ ID NO: 162657 - DNA, 30 bp, Artificial Sequence
  Synthetic oligonucleotide
atgaaattagatgtgtggcctgtcacagtc

SEQ ID NO: 162658 - DNA, 30 bp, Artificial Sequence
  Synthetic oligonucleotide
cgggattttcgtcaaggcgtggaaccagtc

SEQ ID NO: 162659 - DNA, 30 bp, Artificial Sequence
  Synthetic oligonucleotide
gccgaaaccagagtaatctagataccagtc

SEQ ID NO: 162660 - DNA, 30 bp, Artificial Sequence
  Synthetic oligonucleotide
actccgactggaggtccaaaaatcccagtc

SEQ ID NO: 162661 - DNA, 30 bp, Artificial Sequence
  Synthetic oligonucleotide
atgacgcagtcccaacgtgaagttccagtc

SEQ ID NO: 162662 - DNA, 30 bp, Artificial Sequence
  Synthetic oligonucleotide
aacggtcccaaccgggtccatctggcagtc

SEQ ID NO: 162663 - DNA, 30 bp, Artificial Sequence
  Synthetic oligonucleotide
gggtcacaatctcagtcaggctatgcagtc

SEQ ID NO: 162664 - DNA, 30 bp, Artificial Sequence
  Synthetic oligonucleotide
atgtgtctcaatatacaatgccaatcagtc

SEQ ID NO: 162665 - DNA, 30 bp, Artificial Sequence
  Synthetic oligonucleotide
acggatcagcgaatttgaacgcgatcagtc

SEQ ID NO: 162666 - DNA, 30 bp, Artificial Sequence
  Synthetic oligonucleotide
gtcgatcgccattgtctattcggatcagtc

SEQ ID NO: 162667 - DNA, 30 bp, Artificial Sequence
  Synthetic oligonucleotide
cacaatgttgccgtgttatgaggttcagtc

SEQ ID NO: 162668 - DNA, 30 bp, Artificial Sequence
  Synthetic oligonucleotide
ttacgggcgactgttctcgagaaaagagtc

SEQ ID NO: 162669 - DNA, 30 bp, Artificial Sequence
  Synthetic oligonucleotide
cgcaactaccattctctggcaccgagagtc

SEQ ID NO: 162670 - DNA, 30 bp, Artificial Sequence
  Synthetic oligonucleotide
gaaaacattcatgtgtatagacatagagtc

SEQ ID NO: 162671 - DNA, 30 bp, Artificial Sequence
  Synthetic oligonucleotide
aaaacgcaggcgaaaactacgcgtagagtc

SEQ ID NO: 162672 - DNA, 30 bp, Artificial Sequence
  Synthetic oligonucleotide
tacgcgtgttaagtacccatatatcgagtc

SEQ ID NO: 162673 - DNA, 30 bp, Artificial Sequence
  Synthetic oligonucleotide
aggtgtaggtccgcgatgtgctacggagtc

SEQ ID NO: 162674 - DNA, 30 bp, Artificial Sequence
  Synthetic oligonucleotide
ggctagaaaacgggctagttatccggagtc

SEQ ID NO: 162675 - DNA, 30 bp, Artificial Sequence
  Synthetic oligonucleotide
tgctgactctttttttcaagtcgcggagtc

SEQ ID NO: 162676 - DNA, 30 bp, Artificial Sequence
  Synthetic oligonucleotide
accggatgctgaaagtttctgtctggagtc

SEQ ID NO: 162677 - DNA, 30 bp, Artificial Sequence
  Synthetic oligonucleotide
ctagcatgagcaacgatcgtgtcatgagtc

SEQ ID NO: 162678 - DNA, 30 bp, Artificial Sequence
  Synthetic oligonucleotide
tcgatttggcccactcgtatgaactgagtc

SEQ ID NO: 162679 - DNA, 30 bp, Artificial Sequence
  Synthetic oligonucleotide
atcggatagggtggtttaaaaataatagtc

SEQ ID NO: 162680 - DNA, 30 bp, Artificial Sequence
  Synthetic oligonucleotide
taattgttggccgaggttctcgatatagtc

SEQ ID NO: 162681 - DNA, 30 bp, Artificial Sequence
  Synthetic oligonucleotide
cgcgtaaagatttgatttgtcgttatagtc

SEQ ID NO: 162682 - DNA, 30 bp, Artificial Sequence
  Synthetic oligonucleotide
ttgtaattccactccgagttccccctagtc

SEQ ID NO: 162683 - DNA, 30 bp, Artificial Sequence
  Synthetic oligonucleotide
cgaggggggcgcgtattacccgcgctagtc

SEQ ID NO: 162684 - DNA, 30 bp, Artificial Sequence
  Synthetic oligonucleotide
gcaatggcgcgacggataaagtgcgtagtc

SEQ ID NO: 162685 - DNA, 30 bp, Artificial Sequence
  Synthetic oligonucleotide
ggcaagtttcgggaagaatcatagttagtc

SEQ ID NO: 162686 - DNA, 30 bp, Artificial Sequence
  Synthetic oligonucleotide
cactcccaatgaggcgaacggtacaacgtc

SEQ ID NO: 162687 - DNA, 30 bp, Artificial Sequence
  Synthetic oligonucleotide
ccgtcgcgtcgtagccactctttcaacgtc

SEQ ID NO: 162688 - DNA, 30 bp, Artificial Sequence
  Synthetic oligonucleotide
taacgggatagatatggcgcgcttaacgtc

SEQ ID NO: 162689 - DNA, 30 bp, Artificial Sequence
  Synthetic oligonucleotide
actgtaccgaatcgaattcaagggcacgtc

SEQ ID NO: 162690 - DNA, 30 bp, Artificial Sequence
  Synthetic oligonucleotide
agtccttaatctccaagggatgttcacgtc

SEQ ID NO: 162691 - DNA, 30 bp, Artificial Sequence
  Synthetic oligonucleotide
cagtcgatggtgtgtctagtatttcacgtc

SEQ ID NO: 162692 - DNA, 30 bp, Artificial Sequence
  Synthetic oligonucleotide
aatcaaatgaaccataattgcaaggacgtc

SEQ ID NO: 162693 - DNA, 30 bp, Artificial Sequence
  Synthetic oligonucleotide
attaatggttcaatgcgcgtacagtacgtc

SEQ ID NO: 162694 - DNA, 30 bp, Artificial Sequence
  Synthetic oligonucleotide
gataccgacggggtggagcgctcgtacgtc

SEQ ID NO: 162695 - DNA, 30 bp, Artificial Sequence
  Synthetic oligonucleotide
cggaagtgaggcactttctagaggtacgtc

SEQ ID NO: 162696 - DNA, 30 bp, Artificial Sequence
  Synthetic oligonucleotide
taactgggagcttatggtattgaaaccgtc

SEQ ID NO: 162697 - DNA, 30 bp, Artificial Sequence
  Synthetic oligonucleotide
gtattctgccagcacaagcacagaaccgtc

SEQ ID NO: 162698 - DNA, 30 bp, Artificial Sequence
  Synthetic oligonucleotide
taattctcaaacagatacgctaacaccgtc

SEQ ID NO: 162699 - DNA, 30 bp, Artificial Sequence
  Synthetic oligonucleotide
atacatctatatattgaatgacaacccgtc

SEQ ID NO: 162700 - DNA, 30 bp, Artificial Sequence
  Synthetic oligonucleotide
tgaaacatacgacatgggtccgaggccgtc

SEQ ID NO: 162701 - DNA, 30 bp, Artificial Sequence
  Synthetic oligonucleotide
gactttctgactcgtgtacttattgccgtc

SEQ ID NO: 162702 - DNA, 30 bp, Artificial Sequence
  Synthetic oligonucleotide
tgaaatggaaccataacagcagtatccgtc

SEQ ID NO: 162703 - DNA, 30 bp, Artificial Sequence
  Synthetic oligonucleotide
gtgagggttgttatagatgatcagtccgtc

SEQ ID NO: 162704 - DNA, 30 bp, Artificial Sequence
  Synthetic oligonucleotide
ggtgttcgctatagaagtacgatttccgtc

SEQ ID NO: 162705 - DNA, 30 bp, Artificial Sequence
  Synthetic oligonucleotide
tgcaccagggtttgcgactcgtaaagcgtc

SEQ ID NO: 162706 - DNA, 30 bp, Artificial Sequence
  Synthetic oligonucleotide
ttcgtgggggtcattcccgggacaagcgtc

SEQ ID NO: 162707 - DNA, 30 bp, Artificial Sequence
  Synthetic oligonucleotide
aatatcaaaatgaactgcacaagcagcgtc

SEQ ID NO: 162708 - DNA, 30 bp, Artificial Sequence
  Synthetic oligonucleotide
taaataatggtgcaccggggcaggagcgtc

SEQ ID NO: 162709 - DNA, 30 bp, Artificial Sequence
  Synthetic oligonucleotide
aggatgcgatataagcaccgcatgagcgtc

SEQ ID NO: 162710 - DNA, 30 bp, Artificial Sequence
  Synthetic oligonucleotide
ccatgggcagggatgggtttggaccgcgtc

SEQ ID NO: 162711 - DNA, 30 bp, Artificial Sequence
  Synthetic oligonucleotide
cagctccccgggtcggatcccatgcgcgtc

SEQ ID NO: 162712 - DNA, 30 bp, Artificial Sequence
  Synthetic oligonucleotide
tagcatagtaccgggcactgcgtgggcgtc

SEQ ID NO: 162713 - DNA, 30 bp, Artificial Sequence
  Synthetic oligonucleotide
cttgatggggccgaggaatttcgatgcgtc

SEQ ID NO: 162714 - DNA, 30 bp, Artificial Sequence
  Synthetic oligonucleotide
aagcttgggaggctctatcggatatgcgtc

SEQ ID NO: 162715 - DNA, 30 bp, Artificial Sequence
  Synthetic oligonucleotide
aagataacgcttgggaattatgtatgcgtc

SEQ ID NO: 162716 - DNA, 30 bp, Artificial Sequence
  Synthetic oligonucleotide
gatgatggggattgtgaatgtcactgcgtc

SEQ ID NO: 162717 - DNA, 30 bp, Artificial Sequence
  Synthetic oligonucleotide
agatctactctcaatgtaccagactgcgtc

SEQ ID NO: 162718 - DNA, 30 bp, Artificial Sequence
  Synthetic oligonucleotide
gaaaccagatgaatgcatgggaagtgcgtc

SEQ ID NO: 162719 - DNA, 30 bp, Artificial Sequence
  Synthetic oligonucleotide
cgttgtgttacggctctttagtattgcgtc

SEQ ID NO: 162720 - DNA, 30 bp, Artificial Sequence
  Synthetic oligonucleotide
tgcaactgtggctttcattgagcaatcgtc

SEQ ID NO: 162721 - DNA, 30 bp, Artificial Sequence
  Synthetic oligonucleotide
cataggccgccgttatatctgcccatcgtc

SEQ ID NO: 162722 - DNA, 30 bp, Artificial Sequence
  Synthetic oligonucleotide
tgttgagcataataggaagtggctatcgtc

SEQ ID NO: 162723 - DNA, 30 bp, Artificial Sequence
  Synthetic oligonucleotide
ggtgcattagcgctgttataagtactcgtc

SEQ ID NO: 162724 - DNA, 30 bp, Artificial Sequence
  Synthetic oligonucleotide
cacacaggatgggcaggcgccgagctcgtc

SEQ ID NO: 162725 - DNA, 30 bp, Artificial Sequence
  Synthetic oligonucleotide
caccgacatacggatggaaattatctcgtc

SEQ ID NO: 162726 - DNA, 30 bp, Artificial Sequence
  Synthetic oligonucleotide
acattaattatattaagtcataaagtcgtc

SEQ ID NO: 162727 - DNA, 30 bp, Artificial Sequence
  Synthetic oligonucleotide
ctcaacgatcatcagtctcgaagagtcgtc

SEQ ID NO: 162728 - DNA, 30 bp, Artificial Sequence
  Synthetic oligonucleotide
ggatatttcagctcccaaacgggcgtcgtc

SEQ ID NO: 162729 - DNA, 30 bp, Artificial Sequence
  Synthetic oligonucleotide
ggcaagcgaggggctactgatggcttcgtc

SEQ ID NO: 162730 - DNA, 30 bp, Artificial Sequence
  Synthetic oligonucleotide
caatggagagtacactaagcagcaaaggtc

SEQ ID NO: 162731 - DNA, 30 bp, Artificial Sequence
  Synthetic oligonucleotide
cagagctagggcacgaccatcgcgaaggtc

SEQ ID NO: 162732 - DNA, 30 bp, Artificial Sequence
  Synthetic oligonucleotide
ggagataaagcccgccaacgacgtaaggtc

SEQ ID NO: 162733 - DNA, 30 bp, Artificial Sequence
  Synthetic oligonucleotide
cgcccgtgatcctcacctttacaacaggtc

SEQ ID NO: 162734 - DNA, 30 bp, Artificial Sequence
  Synthetic oligonucleotide
ccgggtggcgaaaacgtttacagccaggtc

SEQ ID NO: 162735 - DNA, 30 bp, Artificial Sequence
  Synthetic oligonucleotide
gtcacggtccgaggacggccgctccaggtc

SEQ ID NO: 162736 - DNA, 30 bp, Artificial Sequence
  Synthetic oligonucleotide
ttacgtggaggttaggagtaacttcaggtc

SEQ ID NO: 162737 - DNA, 30 bp, Artificial Sequence
  Synthetic oligonucleotide
gattgagcagagatcaaggtcagagaggtc

SEQ ID NO: 162738 - DNA, 30 bp, Artificial Sequence
  Synthetic oligonucleotide
aaaatgccacttgattttcggcccgaggtc

SEQ ID NO: 162739 - DNA, 30 bp, Artificial Sequence
  Synthetic oligonucleotide
gcccgcatctcaccagatgtgcgcgaggtc

SEQ ID NO: 162740 - DNA, 30 bp, Artificial Sequence
  Synthetic oligonucleotide
gcgctcagctgcgagttcgatttcgaggtc

SEQ ID NO: 162741 - DNA, 30 bp, Artificial Sequence
  Synthetic oligonucleotide
tcaagtgtagttgcgagagcatttgaggtc

SEQ ID NO: 162742 - DNA, 30 bp, Artificial Sequence
  Synthetic oligonucleotide
aggtccggcaatagtacacaaacataggtc

SEQ ID NO: 162743 - DNA, 30 bp, Artificial Sequence
  Synthetic oligonucleotide
ctagggagtcgattgtgtcaactctaggtc

SEQ ID NO: 162744 - DNA, 30 bp, Artificial Sequence
  Synthetic oligonucleotide
gagagctcgcaaaacaaacaaaggtaggtc

SEQ ID NO: 162745 - DNA, 30 bp, Artificial Sequence
  Synthetic oligonucleotide
cggatcgggggattcgtcgcactttaggtc

SEQ ID NO: 162746 - DNA, 30 bp, Artificial Sequence
  Synthetic oligonucleotide
ggatttctttaccaccacgatagtacggtc

SEQ ID NO: 162747 - DNA, 30 bp, Artificial Sequence
  Synthetic oligonucleotide
agaggtagacactcttcctgatttacggtc

SEQ ID NO: 162748 - DNA, 30 bp, Artificial Sequence
  Synthetic oligonucleotide
gaagcgtaacgggctgtgaattagccggtc

SEQ ID NO: 162749 - DNA, 30 bp, Artificial Sequence
  Synthetic oligonucleotide
taagggaatctcagcgtcgcgtcggcggtc

SEQ ID NO: 162750 - DNA, 30 bp, Artificial Sequence
  Synthetic oligonucleotide
ggaacaatgagaaccgccttcgcttcggtc

SEQ ID NO: 162751 - DNA, 30 bp, Artificial Sequence
  Synthetic oligonucleotide
gagatagggtcgttagtctgactaagggtc

SEQ ID NO: 162752 - DNA, 30 bp, Artificial Sequence
  Synthetic oligonucleotide
acctagtcgggcacaaccgaccagagggtc

SEQ ID NO: 162753 - DNA, 30 bp, Artificial Sequence
  Synthetic oligonucleotide
tggtatgtgtacggtaggaaactgagggtc

SEQ ID NO: 162754 - DNA, 30 bp, Artificial Sequence
  Synthetic oligonucleotide
aagggcaagcactagtctaacattagggtc

SEQ ID NO: 162755 - DNA, 30 bp, Artificial Sequence
  Synthetic oligonucleotide
gcgggcccaggatactagacatgacgggtc

SEQ ID NO: 162756 - DNA, 30 bp, Artificial Sequence
  Synthetic oligonucleotide
gtgtcgctaggttcaacactgttccgggtc

SEQ ID NO: 162757 - DNA, 30 bp, Artificial Sequence
  Synthetic oligonucleotide
tcggacgataaagttaacgtcaggcgggtc

SEQ ID NO: 162758 - DNA, 30 bp, Artificial Sequence
  Synthetic oligonucleotide
cgcactaatgtaaatgtcaataatcgggtc

SEQ ID NO: 162759 - DNA, 30 bp, Artificial Sequence
  Synthetic oligonucleotide
ttggctgggtgcacttgtgtgaaaggggtc

SEQ ID NO: 162760 - DNA, 30 bp, Artificial Sequence
  Synthetic oligonucleotide
ggtcataagcgagccatgtgtttcggggtc

SEQ ID NO: 162761 - DNA, 30 bp, Artificial Sequence
  Synthetic oligonucleotide
agccgtgaccggcccgcttatcaatgggtc

SEQ ID NO: 162762 - DNA, 30 bp, Artificial Sequence
  Synthetic oligonucleotide
ataaggctgagatcggtagagtaatgggtc

SEQ ID NO: 162763 - DNA, 30 bp, Artificial Sequence
  Synthetic oligonucleotide
gacggcctatctttggttttgatctgggtc

SEQ ID NO: 162764 - DNA, 30 bp, Artificial Sequence
  Synthetic oligonucleotide
tggaacgattgagttaattggggtatggtc

SEQ ID NO: 162765 - DNA, 29 bp, Artificial Sequence
  Synthetic oligonucleotide
cgaaaagtaggcgaccgacacaactggtc

SEQ ID NO: 162766 - DNA, 30 bp, Artificial Sequence
  Synthetic oligonucleotide
ggtgggagtgtcccctgacctcaactggtc

SEQ ID NO: 162767 - DNA, 30 bp, Artificial Sequence
  Synthetic oligonucleotide
ttcataggtaaggaatggttgagcctggtc

SEQ ID NO: 162768 - DNA, 30 bp, Artificial Sequence
  Synthetic oligonucleotide
aaatcgtcatctggaatgctccatctggtc

SEQ ID NO: 162769 - DNA, 30 bp, Artificial Sequence
  Synthetic oligonucleotide
taggcgtagttagtatgcgtccatctggtc

SEQ ID NO: 162770 - DNA, 30 bp, Artificial Sequence
  Synthetic oligonucleotide
gggcggctacaggtcgatcacgctctggtc

SEQ ID NO: 162771 - DNA, 30 bp, Artificial Sequence
  Synthetic oligonucleotide
cctcccaaatagggggacccccaagtggtc

SEQ ID NO: 162772 - DNA, 30 bp, Artificial Sequence
  Synthetic oligonucleotide
gctggctccagtatagaacaggcagtggtc

SEQ ID NO: 162773 - DNA, 30 bp, Artificial Sequence
  Synthetic oligonucleotide
tgatatggagtaaaacaaagttcattggtc

SEQ ID NO: 162774 - DNA, 30 bp, Artificial Sequence
  Synthetic oligonucleotide
gtaatgtctcattaggttgttgacttggtc

SEQ ID NO: 162775 - DNA, 30 bp, Artificial Sequence
  Synthetic oligonucleotide
atgcataggttatgtcactccatcttggtc

SEQ ID NO: 162776 - DNA, 30 bp, Artificial Sequence
  Synthetic oligonucleotide
accgtgggtgcattctagatagacaatgtc

SEQ ID NO: 162777 - DNA, 30 bp, Artificial Sequence
  Synthetic oligonucleotide
gtggataagagcacaataatctacaatgtc

SEQ ID NO: 162778 - DNA, 30 bp, Artificial Sequence
  Synthetic oligonucleotide
agggtcggtagactcattactgggaatgtc

SEQ ID NO: 162779 - DNA, 30 bp, Artificial Sequence
  Synthetic oligonucleotide
agtaccggggtcacctctgggggcgatgtc

SEQ ID NO: 162780 - DNA, 30 bp, Artificial Sequence
  Synthetic oligonucleotide
tagcgggcaggcccgatccggtcggatgtc

SEQ ID NO: 162781 - DNA, 30 bp, Artificial Sequence
  Synthetic oligonucleotide
ggaaaggtaattaggcatgaaagggatgtc

SEQ ID NO: 162782 - DNA, 30 bp, Artificial Sequence
  Synthetic oligonucleotide
catatttccgtacagtaaatatttgatgtc

SEQ ID NO: 162783 - DNA, 30 bp, Artificial Sequence
  Synthetic oligonucleotide
tccatcaccgagtatagtcaaaaatatgtc

SEQ ID NO: 162784 - DNA, 30 bp, Artificial Sequence
  Synthetic oligonucleotide
aaaaggtggtgcccccggggctgatatgtc

SEQ ID NO: 162785 - DNA, 30 bp, Artificial Sequence
  Synthetic oligonucleotide
taggaagtattaagttgagcgatctatgtc

SEQ ID NO: 162786 - DNA, 30 bp, Artificial Sequence
  Synthetic oligonucleotide
gtcggttagcgtgaacgaactgagtatgtc

SEQ ID NO: 162787 - DNA, 30 bp, Artificial Sequence
  Synthetic oligonucleotide
cacgcttgtaagtaacttgctatgtatgtc

SEQ ID NO: 162788 - DNA, 30 bp, Artificial Sequence
  Synthetic oligonucleotide
ctctatccgatcttcttcgagtgttatgtc

SEQ ID NO: 162789 - DNA, 30 bp, Artificial Sequence
  Synthetic oligonucleotide
aatcgtttcaagcacatcgcaaatactgtc

SEQ ID NO: 162790 - DNA, 30 bp, Artificial Sequence
  Synthetic oligonucleotide
cctattgttggactttacgatattactgtc

SEQ ID NO: 162791 - DNA, 30 bp, Artificial Sequence
  Synthetic oligonucleotide
tcctgacacacattgcagctcgttactgtc

SEQ ID NO: 162792 - DNA, 30 bp, Artificial Sequence
  Synthetic oligonucleotide
agatgtgacaatgttgcatctgcgcctgtc

SEQ ID NO: 162793 - DNA, 30 bp, Artificial Sequence
  Synthetic oligonucleotide
acgttacctgagtccacgcatcaagctgtc

SEQ ID NO: 162794 - DNA, 30 bp, Artificial Sequence
  Synthetic oligonucleotide
tccaaccaggccagaatgtgtctcgctgtc

SEQ ID NO: 162795 - DNA, 30 bp, Artificial Sequence
  Synthetic oligonucleotide
ccataattcataaggaaggaggaggctgtc

SEQ ID NO: 162796 - DNA, 30 bp, Artificial Sequence
  Synthetic oligonucleotide
aggttacgtcgcctgggaaagagtgctgtc

SEQ ID NO: 162797 - DNA, 30 bp, Artificial Sequence
  Synthetic oligonucleotide
tagtcctagtttggcggaataattgctgtc

SEQ ID NO: 162798 - DNA, 30 bp, Artificial Sequence
  Synthetic oligonucleotide
gcacggctgggcgcgactctctgatctgtc

SEQ ID NO: 162799 - DNA, 30 bp, Artificial Sequence
  Synthetic oligonucleotide
ggtcgtagagacaaaatggcctgcagtgtc

SEQ ID NO: 162800 - DNA, 30 bp, Artificial Sequence
  Synthetic oligonucleotide
ggccgaactgcaagaaggtgctgtagtgtc

SEQ ID NO: 162801 - DNA, 30 bp, Artificial Sequence
  Synthetic oligonucleotide
gcgattggaagaatgcggaataaacgtgtc

SEQ ID NO: 162802 - DNA, 30 bp, Artificial Sequence
  Synthetic oligonucleotide
cctcggtatacagaatacttagcacgtgtc

SEQ ID NO: 162803 - DNA, 30 bp, Artificial Sequence
  Synthetic oligonucleotide
tgctggcacttctacttcgcccagcgtgtc

SEQ ID NO: 162804 - DNA, 30 bp, Artificial Sequence
  Synthetic oligonucleotide
gcgtaacgtctaactaaatcttttcgtgtc

SEQ ID NO: 162805 - DNA, 30 bp, Artificial Sequence
  Synthetic oligonucleotide
aatcggcagtcggcatgaatgataggtgtc

SEQ ID NO: 162806 - DNA, 30 bp, Artificial Sequence
  Synthetic oligonucleotide
tccgggctaacgtacccatggatgggtgtc

SEQ ID NO: 162807 - DNA, 30 bp, Artificial Sequence
  Synthetic oligonucleotide
gcctcactagagatagcatattatggtgtc

SEQ ID NO: 162808 - DNA, 30 bp, Artificial Sequence
  Synthetic oligonucleotide
gtaagcggcgccaaaccgaaagctggtgtc

SEQ ID NO: 162809 - DNA, 30 bp, Artificial Sequence
  Synthetic oligonucleotide
agggttaatgagccggaccgagcgtgtgtc

SEQ ID NO: 162810 - DNA, 30 bp, Artificial Sequence
  Synthetic oligonucleotide
aggttgctcctgcctgtaccgtggtgtgtc

SEQ ID NO: 162811 - DNA, 30 bp, Artificial Sequence
  Synthetic oligonucleotide
gcaggatgactacaatagatagtgtgtgtc

SEQ ID NO: 162812 - DNA, 30 bp, Artificial Sequence
  Synthetic oligonucleotide
tatgagggtacaacctttgttgcttgtgtc

SEQ ID NO: 162813 - DNA, 30 bp, Artificial Sequence
  Synthetic oligonucleotide
ttagggaagcgcggacgtgtcagttgtgtc

SEQ ID NO: 162814 - DNA, 30 bp, Artificial Sequence
  Synthetic oligonucleotide
cttcgaactgttagtgttaaaagaattgtc

SEQ ID NO: 162815 - DNA, 30 bp, Artificial Sequence
  Synthetic oligonucleotide
gtgagcccataaagagctatcacgattgtc

SEQ ID NO: 162816 - DNA, 30 bp, Artificial Sequence
  Synthetic oligonucleotide
agcgtgctcacaacgtggccaggccttgtc

SEQ ID NO: 162817 - DNA, 30 bp, Artificial Sequence
  Synthetic oligonucleotide
aaaataaacagttccccgaaagttcttgtc

SEQ ID NO: 162818 - DNA, 30 bp, Artificial Sequence
  Synthetic oligonucleotide
acaaacacatggcggaatttgacggttgtc

SEQ ID NO: 162819 - DNA, 30 bp, Artificial Sequence
  Synthetic oligonucleotide
tagtcgcccgagaggtctttcaatgttgtc

SEQ ID NO: 162820 - DNA, 30 bp, Artificial Sequence
  Synthetic oligonucleotide
ctcactagcgggaatggtcgacgatttgtc

SEQ ID NO: 162821 - DNA, 30 bp, Artificial Sequence
  Synthetic oligonucleotide
taatacgaggccgtgaactctcccaaattc

SEQ ID NO: 162822 - DNA, 30 bp, Artificial Sequence
  Synthetic oligonucleotide
gctgtgggcgctagagcctgattccaattc

SEQ ID NO: 162823 - DNA, 30 bp, Artificial Sequence
  Synthetic oligonucleotide
tgcaaacgagccgaggtagggtagcaattc

SEQ ID NO: 162824 - DNA, 30 bp, Artificial Sequence
  Synthetic oligonucleotide
accgagctgcgaagctaagaaacgcaattc

SEQ ID NO: 162825 - DNA, 30 bp, Artificial Sequence
  Synthetic oligonucleotide
cgggtgatccatccgaattggcctcaattc

SEQ ID NO: 162826 - DNA, 30 bp, Artificial Sequence
  Synthetic oligonucleotide
tgattcgcgtgctaccatgaacaagaattc

SEQ ID NO: 162827 - DNA, 30 bp, Artificial Sequence
  Synthetic oligonucleotide
cacgaatagtttggcaatctgcatgaattc

SEQ ID NO: 162828 - DNA, 30 bp, Artificial Sequence
  Synthetic oligonucleotide
cgcattgaagcggattcgtggtgtgaattc

SEQ ID NO: 162829 - DNA, 30 bp, Artificial Sequence
  Synthetic oligonucleotide
agatctaggcgtgtactgtggccataattc

SEQ ID NO: 162830 - DNA, 30 bp, Artificial Sequence
  Synthetic oligonucleotide
cttaacaaagggcatagtcggggataattc

SEQ ID NO: 162831 - DNA, 30 bp, Artificial Sequence
  Synthetic oligonucleotide
ccatctcactgcgagttcgtagtctaattc

SEQ ID NO: 162832 - DNA, 30 bp, Artificial Sequence
  Synthetic oligonucleotide
aaggcatacggtttatgacttaagtaattc

SEQ ID NO: 162833 - DNA, 30 bp, Artificial Sequence
  Synthetic oligonucleotide
gcgataggcacgtacgaagcgtcgtaattc

SEQ ID NO: 162834 - DNA, 30 bp, Artificial Sequence
  Synthetic oligonucleotide
cgacgcccaaaaacctggatcaattaattc

SEQ ID NO: 162835 - DNA, 30 bp, Artificial Sequence
  Synthetic oligonucleotide
tggctctttcatcactcagagtgttaattc

SEQ ID NO: 162836 - DNA, 30 bp, Artificial Sequence
  Synthetic oligonucleotide
ctgagatacttttgctgtctactcacattc

SEQ ID NO: 162837 - DNA, 30 bp, Artificial Sequence
  Synthetic oligonucleotide
aagccgggaacctgacgacgtcagacattc

SEQ ID NO: 162838 - DNA, 30 bp, Artificial Sequence
  Synthetic oligonucleotide
ccgtgtacccgaatagattaagagacattc

SEQ ID NO: 162839 - DNA, 30 bp, Artificial Sequence
  Synthetic oligonucleotide
gccatgtgagggccacataattgaccattc

SEQ ID NO: 162840 - DNA, 30 bp, Artificial Sequence
  Synthetic oligonucleotide
aggctcgagtgtgagggtgggaggccattc

SEQ ID NO: 162841 - DNA, 30 bp, Artificial Sequence
  Synthetic oligonucleotide
aggggaatagtaacgtgaatccaagcattc

SEQ ID NO: 162842 - DNA, 30 bp, Artificial Sequence
  Synthetic oligonucleotide
taatggttgggcttttttcagcgagcattc

SEQ ID NO: 162843 - DNA, 31 bp, Artificial Sequence
  Synthetic oligonucleotide
ccactcaaattaaaaggtgaagcgcgcattc

SEQ ID NO: 162844 - DNA, 30 bp, Artificial Sequence
  Synthetic oligonucleotide
aaggtaagaatcggcgacacaaaatcattc

SEQ ID NO: 162845 - DNA, 30 bp, Artificial Sequence
  Synthetic oligonucleotide
gccttcaaaactaatatagacccatcattc

SEQ ID NO: 162846 - DNA, 30 bp, Artificial Sequence
  Synthetic oligonucleotide
acagattgtgcgtagcgtcaaagatcattc

SEQ ID NO: 162847 - DNA, 30 bp, Artificial Sequence
  Synthetic oligonucleotide
aaggcggtcgagggaggctttctgtcattc

SEQ ID NO: 162848 - DNA, 31 bp, Artificial Sequence
  Synthetic oligonucleotide
tagtgaaatagcgttgcgggatcgttcattc

SEQ ID NO: 162849 - DNA, 30 bp, Artificial Sequence
  Synthetic oligonucleotide
taaaatgagtggcaatgttgcaacagattc

SEQ ID NO: 162850 - DNA, 30 bp, Artificial Sequence
  Synthetic oligonucleotide
tcctcgcccgcggacacaacattcagattc

SEQ ID NO: 162851 - DNA, 30 bp, Artificial Sequence
  Synthetic oligonucleotide
taacttcgataccatataagacagagattc

SEQ ID NO: 162852 - DNA, 30 bp, Artificial Sequence
  Synthetic oligonucleotide
gcatgtcatcggaggtaccgtacgagattc

SEQ ID NO: 162853 - DNA, 30 bp, Artificial Sequence
  Synthetic oligonucleotide
tctcgagaccgggggagacgcaatagattc

SEQ ID NO: 162854 - DNA, 30 bp, Artificial Sequence
  Synthetic oligonucleotide
agaaagtacaatacctgtcgcacacgattc

SEQ ID NO: 162855 - DNA, 30 bp, Artificial Sequence
  Synthetic oligonucleotide
atgcacgtgtgttgcgcttgttagcgattc

SEQ ID NO: 162856 - DNA, 30 bp, Artificial Sequence
  Synthetic oligonucleotide
ggctgagagtccgaaagagggcggggattc

SEQ ID NO: 162857 - DNA, 30 bp, Artificial Sequence
  Synthetic oligonucleotide
caaagtcaatgacatcttggtcaaatattc

SEQ ID NO: 162858 - DNA, 30 bp, Artificial Sequence
  Synthetic oligonucleotide
tgcacttaaagttttacgggctagatattc

SEQ ID NO: 162859 - DNA, 30 bp, Artificial Sequence
  Synthetic oligonucleotide
gcttagctagagtgcgcttgtgatatattc

SEQ ID NO: 162860 - DNA, 30 bp, Artificial Sequence
  Synthetic oligonucleotide
cgaagatgtagtattaacccttcagtattc

SEQ ID NO: 162861 - DNA, 30 bp, Artificial Sequence
  Synthetic oligonucleotide
ggagacataattcgtggaagctgtgtattc

SEQ ID NO: 162862 - DNA, 30 bp, Artificial Sequence
  Synthetic oligonucleotide
agagtgcctgagcgataaccccgcttattc

SEQ ID NO: 162863 - DNA, 30 bp, Artificial Sequence
  Synthetic oligonucleotide
accaggtaagtctgtagaaaagcgttattc

SEQ ID NO: 162864 - DNA, 30 bp, Artificial Sequence
  Synthetic oligonucleotide
gcaataaggtgcgagtggatttcgttattc

SEQ ID NO: 162865 - DNA, 30 bp, Artificial Sequence
  Synthetic oligonucleotide
cgggagccaccggtatagcgtctgttattc

SEQ ID NO: 162866 - DNA, 30 bp, Artificial Sequence
  Synthetic oligonucleotide
acacaaccgtcctgagtgttgtgcaacttc

SEQ ID NO: 162867 - DNA, 30 bp, Artificial Sequence
  Synthetic oligonucleotide
cctggtgtggtgtgcacgtaggtgaacttc

SEQ ID NO: 162868 - DNA, 30 bp, Artificial Sequence
  Synthetic oligonucleotide
accgacagtaatcgcgccaagcctaacttc

SEQ ID NO: 162869 - DNA, 30 bp, Artificial Sequence
  Synthetic oligonucleotide
tcctaacggccaccttgcctgtagcacttc

SEQ ID NO: 162870 - DNA, 30 bp, Artificial Sequence
  Synthetic oligonucleotide
cctgttaggggacataatacctctcacttc

SEQ ID NO: 162871 - DNA, 30 bp, Artificial Sequence
  Synthetic oligonucleotide
acaagggactccgaagggagcagagacttc

SEQ ID NO: 162872 - DNA, 30 bp, Artificial Sequence
  Synthetic oligonucleotide
ccagaggcccaccccgtcacacgggacttc

SEQ ID NO: 162873 - DNA, 30 bp, Artificial Sequence
  Synthetic oligonucleotide
ctgtcgcgtaacgtagtgctaccatacttc

SEQ ID NO: 162874 - DNA, 30 bp, Artificial Sequence
  Synthetic oligonucleotide
cggccttgacaagtggctcaattatacttc

SEQ ID NO: 162875 - DNA, 30 bp, Artificial Sequence
  Synthetic oligonucleotide
ggatcactctcggaacgtatgccctacttc

SEQ ID NO: 162876 - DNA, 30 bp, Artificial Sequence
  Synthetic oligonucleotide
tcgagtcgggtaaacatccagggttacttc

SEQ ID NO: 162877 - DNA, 30 bp, Artificial Sequence
  Synthetic oligonucleotide
ctcggacaatcgaaacagtatctcaccttc

SEQ ID NO: 162878 - DNA, 30 bp, Artificial Sequence
  Synthetic oligonucleotide
cgatttcctaccccacgagataaccccttc

SEQ ID NO: 162879 - DNA, 30 bp, Artificial Sequence
  Synthetic oligonucleotide
gggaaagctgcactcggtccgtcccccttc

SEQ ID NO: 162880 - DNA, 30 bp, Artificial Sequence
  Synthetic oligonucleotide
tagatgccggccctcccatatcgtcccttc

SEQ ID NO: 162881 - DNA, 30 bp, Artificial Sequence
  Synthetic oligonucleotide
tgaaaaagatggcattacgaagtcgccttc

SEQ ID NO: 162882 - DNA, 30 bp, Artificial Sequence
  Synthetic oligonucleotide
agcatggcgattgggaaatccatatccttc

SEQ ID NO: 162883 - DNA, 30 bp, Artificial Sequence
  Synthetic oligonucleotide
aacggcgcgtctgaggcctggtggtccttc

SEQ ID NO: 162884 - DNA, 30 bp, Artificial Sequence
  Synthetic oligonucleotide
gtatcataaagctagcacaaaatgtccttc

SEQ ID NO: 162885 - DNA, 30 bp, Artificial Sequence
  Synthetic oligonucleotide
acagcgtcttcgtcatgaatactttccttc

SEQ ID NO: 162886 - DNA, 30 bp, Artificial Sequence
  Synthetic oligonucleotide
tcgattggtcatttaaaacgatctagcttc

SEQ ID NO: 162887 - DNA, 30 bp, Artificial Sequence
  Synthetic oligonucleotide
tagacacgtggacaggcctatgcgcgcttc

SEQ ID NO: 162888 - DNA, 30 bp, Artificial Sequence
  Synthetic oligonucleotide
taaatttcacggcaaggaaaaacaggcttc

SEQ ID NO: 162889 - DNA, 30 bp, Artificial Sequence
  Synthetic oligonucleotide
cgctggtagcattacgatacgaacggcttc

SEQ ID NO: 162890 - DNA, 30 bp, Artificial Sequence
  Synthetic oligonucleotide
actgggcgacctgaataacacaagggcttc

SEQ ID NO: 162891 - DNA, 30 bp, Artificial Sequence
  Synthetic oligonucleotide
acttattgcgatttagcgagtggtggcttc

SEQ ID NO: 162892 - DNA, 30 bp, Artificial Sequence
  Synthetic oligonucleotide
aacgttacgagcgacgactcgaaatgcttc

SEQ ID NO: 162893 - DNA, 30 bp, Artificial Sequence
  Synthetic oligonucleotide
cggtcaggggctcgccggaatcaatgcttc

SEQ ID NO: 162894 - DNA, 30 bp, Artificial Sequence
  Synthetic oligonucleotide
ttcggcaccaagccttgggttcagtgcttc

SEQ ID NO: 162895 - DNA, 30 bp, Artificial Sequence
  Synthetic oligonucleotide
gaagcaaagaaggcataaaatgcgtgcttc

SEQ ID NO: 162896 - DNA, 30 bp, Artificial Sequence
  Synthetic oligonucleotide
tctgctggacaaataccattcgattgcttc

SEQ ID NO: 162897 - DNA, 30 bp, Artificial Sequence
  Synthetic oligonucleotide
caggtacgggtagtggccccacgaatcttc

SEQ ID NO: 162898 - DNA, 30 bp, Artificial Sequence
  Synthetic oligonucleotide
aataatataggtgggcacaatttgctcttc

SEQ ID NO: 162899 - DNA, 30 bp, Artificial Sequence
  Synthetic oligonucleotide
cgcgattgccttaagtcgagtgtggtcttc

SEQ ID NO: 162900 - DNA, 30 bp, Artificial Sequence
  Synthetic oligonucleotide
gcacgtaaaggtattttggtaaagttcttc

SEQ ID NO: 162901 - DNA, 30 bp, Artificial Sequence
  Synthetic oligonucleotide
tacaccactacaaactacgtcgggcagttc

SEQ ID NO: 162902 - DNA, 30 bp, Artificial Sequence
  Synthetic oligonucleotide
ataaggttcgcgccgtgcatcttgcagttc

SEQ ID NO: 162903 - DNA, 30 bp, Artificial Sequence
  Synthetic oligonucleotide
ggtcagggctttatttttagaaacgagttc

SEQ ID NO: 162904 - DNA, 30 bp, Artificial Sequence
  Synthetic oligonucleotide
ctaggggcgtaatcttgccctgccgagttc

SEQ ID NO: 162905 - DNA, 30 bp, Artificial Sequence
  Synthetic oligonucleotide
taagaaaccactgagattagaaaggagttc

SEQ ID NO: 162906 - DNA, 30 bp, Artificial Sequence
  Synthetic oligonucleotide
gtactcagcataaggtagcggggggagttc

SEQ ID NO: 162907 - DNA, 30 bp, Artificial Sequence
  Synthetic oligonucleotide
ggtatgcgcttggatggtgccctggagttc

SEQ ID NO: 162908 - DNA, 30 bp, Artificial Sequence
  Synthetic oligonucleotide
caggtttcgtaagatccagaaattgagttc

SEQ ID NO: 162909 - DNA, 30 bp, Artificial Sequence
  Synthetic oligonucleotide
gatgctggatgtatcggtgaccactagttc

SEQ ID NO: 162910 - DNA, 30 bp, Artificial Sequence
  Synthetic oligonucleotide
acctaccaggagttgcttggcacaacgttc

SEQ ID NO: 162911 - DNA, 30 bp, Artificial Sequence
  Synthetic oligonucleotide
atgctgtcgacgaacggaatggacacgttc

SEQ ID NO: 162912 - DNA, 30 bp, Artificial Sequence
  Synthetic oligonucleotide
cgcacctgagtcatccgtccttacacgttc

SEQ ID NO: 162913 - DNA, 30 bp, Artificial Sequence
  Synthetic oligonucleotide
taggtaagaggcatcgttaaccggacgttc

SEQ ID NO: 162914 - DNA, 30 bp, Artificial Sequence
  Synthetic oligonucleotide
tggggtttgaagagtctatggccaccgttc

SEQ ID NO: 162915 - DNA, 30 bp, Artificial Sequence
  Synthetic oligonucleotide
atgggatgaaggcccgcatgtctaccgttc

SEQ ID NO: 162916 - DNA, 30 bp, Artificial Sequence
  Synthetic oligonucleotide
aggagtttacgctctcctatcgctccgttc

SEQ ID NO: 162917 - DNA, 30 bp, Artificial Sequence
  Synthetic oligonucleotide
cggccaacatgcaggggaagggaagcgttc

SEQ ID NO: 162918 - DNA, 30 bp, Artificial Sequence
  Synthetic oligonucleotide
cggaaagatatggaggcctggagagcgttc

SEQ ID NO: 162919 - DNA, 30 bp, Artificial Sequence
  Synthetic oligonucleotide
cgtacttctcgccgcgcgtgtcttgcgttc

SEQ ID NO: 162920 - DNA, 31 bp, Artificial Sequence
  Synthetic oligonucleotide
tcgcattccagatgcaaactacgcctcgttc

SEQ ID NO: 162921 - DNA, 30 bp, Artificial Sequence
  Synthetic oligonucleotide
aggagggtcttggcgaaagggcaaaggttc

SEQ ID NO: 162922 - DNA, 30 bp, Artificial Sequence
  Synthetic oligonucleotide
actcaaaatgaattacttgatagaaggttc

SEQ ID NO: 162923 - DNA, 30 bp, Artificial Sequence
  Synthetic oligonucleotide
gcgattgtagcgggctcttctgacaggttc

SEQ ID NO: 162924 - DNA, 30 bp, Artificial Sequence
  Synthetic oligonucleotide
ggcacaggccttacttaaagtgacaggttc

SEQ ID NO: 162925 - DNA, 30 bp, Artificial Sequence
  Synthetic oligonucleotide
agaacgatccgagggaatttgggacggttc

SEQ ID NO: 162926 - DNA, 30 bp, Artificial Sequence
  Synthetic oligonucleotide
cgcaaagtggcacctggggttggtcggttc

SEQ ID NO: 162927 - DNA, 30 bp, Artificial Sequence
  Synthetic oligonucleotide
ctaagcatgaattccactctctcaatgttc

SEQ ID NO: 162928 - DNA, 30 bp, Artificial Sequence
  Synthetic oligonucleotide
ggcaggtgacgcgttagttgtaggatgttc

SEQ ID NO: 162929 - DNA, 30 bp, Artificial Sequence
  Synthetic oligonucleotide
caggctctgatcatgacctcgtggatgttc

SEQ ID NO: 162930 - DNA, 30 bp, Artificial Sequence
  Synthetic oligonucleotide
agtgccttgtaagagagacgtattatgttc

SEQ ID NO: 162931 - DNA, 30 bp, Artificial Sequence
  Synthetic oligonucleotide
cagcgtggagagctgctttgactcctgttc

SEQ ID NO: 162932 - DNA, 30 bp, Artificial Sequence
  Synthetic oligonucleotide
tgtacggcgtcacctcctaaagcagtgttc

SEQ ID NO: 162933 - DNA, 30 bp, Artificial Sequence
  Synthetic oligonucleotide
ataccgcatatttaggagatagtcgtgttc

SEQ ID NO: 162934 - DNA, 30 bp, Artificial Sequence
  Synthetic oligonucleotide
caaccatagcggcttaaaattcatttgttc

SEQ ID NO: 162935 - DNA, 30 bp, Artificial Sequence
  Synthetic oligonucleotide
aagcgaagtttagcccgcgaagaacatttc

SEQ ID NO: 162936 - DNA, 30 bp, Artificial Sequence
  Synthetic oligonucleotide
ggcgacgacgtacatatttcagatcatttc

SEQ ID NO: 162937 - DNA, 30 bp, Artificial Sequence
  Synthetic oligonucleotide
tgggcatcgggcgccacatggatcgatttc

SEQ ID NO: 162938 - DNA, 30 bp, Artificial Sequence
  Synthetic oligonucleotide
caagcgtatcgtcgaaaggcagtggatttc

SEQ ID NO: 162939 - DNA, 30 bp, Artificial Sequence
  Synthetic oligonucleotide
gatcgtaatagaggcaaggggttggatttc

SEQ ID NO: 162940 - DNA, 35 bp, Artificial Sequence
  Synthetic oligonucleotide
gttgactctatccagcgggcgttgtaagtgatttc

SEQ ID NO: 162941 - DNA, 30 bp, Artificial Sequence
  Synthetic oligonucleotide
tactggtcggtaagtcctatgcgctatttc

SEQ ID NO: 162942 - DNA, 30 bp, Artificial Sequence
  Synthetic oligonucleotide
agaacgacttaggagcttggaatctatttc

SEQ ID NO: 162943 - DNA, 30 bp, Artificial Sequence
  Synthetic oligonucleotide
ggcctccgaagggagagtatgatgtatttc

SEQ ID NO: 162944 - DNA, 30 bp, Artificial Sequence
  Synthetic oligonucleotide
tcctcaatgaacggcgcgacctcaactttc

SEQ ID NO: 162945 - DNA, 30 bp, Artificial Sequence
  Synthetic oligonucleotide
gggaggcggtggtatgtcagggtcactttc

SEQ ID NO: 162946 - DNA, 30 bp, Artificial Sequence
  Synthetic oligonucleotide
aggggcgagatagaggtctaccgagctttc

SEQ ID NO: 162947 - DNA, 30 bp, Artificial Sequence
  Synthetic oligonucleotide
aactgtgaaatcgtgtttgcgcgagctttc

SEQ ID NO: 162948 - DNA, 30 bp, Artificial Sequence
  Synthetic oligonucleotide
tgaaaggtatttgacaaggcgtatgctttc

SEQ ID NO: 162949 - DNA, 30 bp, Artificial Sequence
  Synthetic oligonucleotide
agcgtcgagtggttgctgggtgctgctttc

SEQ ID NO: 162950 - DNA, 30 bp, Artificial Sequence
  Synthetic oligonucleotide
tttgaagctcaaatgagaatacggtctttc

SEQ ID NO: 162951 - DNA, 29 bp, Artificial Sequence
  Synthetic oligonucleotide
ttagcgacatgcttgtcatcggcagtttc

SEQ ID NO: 162952 - DNA, 30 bp, Artificial Sequence
  Synthetic oligonucleotide
gtcccggaagctacaagacaagagagtttc

SEQ ID NO: 162953 - DNA, 30 bp, Artificial Sequence
  Synthetic oligonucleotide
aaagccacacaataccagtccattagtttc

SEQ ID NO: 162954 - DNA, 30 bp, Artificial Sequence
  Synthetic oligonucleotide
agaaaaaggacagctgcatagcttagtttc

SEQ ID NO: 162955 - DNA, 30 bp, Artificial Sequence
  Synthetic oligonucleotide
acctacgagactacggatatcacacgtttc

SEQ ID NO: 162956 - DNA, 30 bp, Artificial Sequence
  Synthetic oligonucleotide
acaatttaagggtcaactatctagcgtttc

SEQ ID NO: 162957 - DNA, 30 bp, Artificial Sequence
  Synthetic oligonucleotide
tggaacaggtggcgcgattattggcgtttc

SEQ ID NO: 162958 - DNA, 30 bp, Artificial Sequence
  Synthetic oligonucleotide
cataactaattgaggagtaacaaaggtttc

SEQ ID NO: 162959 - DNA, 30 bp, Artificial Sequence
  Synthetic oligonucleotide
cctcaccagggtaacgttccttaaggtttc

SEQ ID NO: 162960 - DNA, 30 bp, Artificial Sequence
  Synthetic oligonucleotide
agaaagatgcttaatcagatagcgggtttc

SEQ ID NO: 162961 - DNA, 30 bp, Artificial Sequence
  Synthetic oligonucleotide
agagtgctatacaagactggatgtggtttc

SEQ ID NO: 162962 - DNA, 30 bp, Artificial Sequence
  Synthetic oligonucleotide
aataatattcacgtaattattgtatgtttc

SEQ ID NO: 162963 - DNA, 30 bp, Artificial Sequence
  Synthetic oligonucleotide
catggagaattgtttaacctatggtgtttc

SEQ ID NO: 162964 - DNA, 30 bp, Artificial Sequence
  Synthetic oligonucleotide
aaggtgtaatctcaaatatccgcgattttc

SEQ ID NO: 162965 - DNA, 30 bp, Artificial Sequence
  Synthetic oligonucleotide
aggtcgctcgagaacctgggatttgttttc

SEQ ID NO: 162966 - DNA, 30 bp, Artificial Sequence
  Synthetic oligonucleotide
gggccgcggtctgatcagggaaattttttc

SEQ ID NO: 162967 - DNA, 30 bp, Artificial Sequence
  Synthetic oligonucleotide
acaaggatgtgtgctttcaaggaaaaaaag

SEQ ID NO: 162968 - DNA, 30 bp, Artificial Sequence
  Synthetic oligonucleotide
ggtgctctgcggttcatcgtctaaaaaaag

SEQ ID NO: 162969 - DNA, 30 bp, Artificial Sequence
  Synthetic oligonucleotide
gacgtacggcacagaaggaattgaaaaaag

SEQ ID NO: 162970 - DNA, 30 bp, Artificial Sequence
  Synthetic oligonucleotide
ctcctagagagagataacatgttaaaaaag

SEQ ID NO: 162971 - DNA, 30 bp, Artificial Sequence
  Synthetic oligonucleotide
aggctagagttattgatcttatgcaaaaag

SEQ ID NO: 162972 - DNA, 30 bp, Artificial Sequence
  Synthetic oligonucleotide
gctgcgttagagctgaaacgaccgaaaaag

SEQ ID NO: 162973 - DNA, 30 bp, Artificial Sequence
  Synthetic oligonucleotide
acgaggttgcacaataggcggcataaaaag

SEQ ID NO: 162974 - DNA, 30 bp, Artificial Sequence
  Synthetic oligonucleotide
catgccaacgttctcagtgaattacaaaag

SEQ ID NO: 162975 - DNA, 30 bp, Artificial Sequence
  Synthetic oligonucleotide
ctatatagcatcgacattgaccggcaaaag

SEQ ID NO: 162976 - DNA, 30 bp, Artificial Sequence
  Synthetic oligonucleotide
caggtcggggagtccccgctccggcaaaag

SEQ ID NO: 162977 - DNA, 30 bp, Artificial Sequence
  Synthetic oligonucleotide
ttcgcacaatgaaagacggaaatgcaaaag

SEQ ID NO: 162978 - DNA, 30 bp, Artificial Sequence
  Synthetic oligonucleotide
gacaggtagatagacaaagaagctcaaaag

SEQ ID NO: 162979 - DNA, 30 bp, Artificial Sequence
  Synthetic oligonucleotide
agtcacatcgctaatgatcgaagtcaaaag

SEQ ID NO: 162980 - DNA, 30 bp, Artificial Sequence
  Synthetic oligonucleotide
gtcctgcgacgcgcaggaacataggaaaag

SEQ ID NO: 162981 - DNA, 30 bp, Artificial Sequence
  Synthetic oligonucleotide
agaccggtgccgagtagcacgcctgaaaag

SEQ ID NO: 162982 - DNA, 30 bp, Artificial Sequence
  Synthetic oligonucleotide
cggttgacatacgtataggagtctgaaaag

SEQ ID NO: 162983 - DNA, 30 bp, Artificial Sequence
  Synthetic oligonucleotide
cggaatcagaccgggcaaaaatttgaaaag

SEQ ID NO: 162984 - DNA, 30 bp, Artificial Sequence
  Synthetic oligonucleotide
tcgggggaaaggcatccagttatttaaaag

SEQ ID NO: 162985 - DNA, 30 bp, Artificial Sequence
  Synthetic oligonucleotide
gactgtaagatttatttcacaacaacaaag

SEQ ID NO: 162986 - DNA, 30 bp, Artificial Sequence
  Synthetic oligonucleotide
gtggtccacgcacccctatagctaacaaag

SEQ ID NO: 162987 - DNA, 30 bp, Artificial Sequence
  Synthetic oligonucleotide
cggggtcctttccgaagtagtagcacaaag

SEQ ID NO: 162988 - DNA, 30 bp, Artificial Sequence
  Synthetic oligonucleotide
gcccatacttcgcccgacaagaatacaaag

SEQ ID NO: 162989 - DNA, 30 bp, Artificial Sequence
  Synthetic oligonucleotide
atccttggatttgtattcagagttacaaag

SEQ ID NO: 162990 - DNA, 30 bp, Artificial Sequence
  Synthetic oligonucleotide
gcactacgaaatcttggtcggtttacaaag

SEQ ID NO: 162991 - DNA, 30 bp, Artificial Sequence
  Synthetic oligonucleotide
ttcattgggttgagacttggttaaccaaag

SEQ ID NO: 162992 - DNA, 30 bp, Artificial Sequence
  Synthetic oligonucleotide
gtaaggttcgtgctaatagataccccaaag

SEQ ID NO: 162993 - DNA, 30 bp, Artificial Sequence
  Synthetic oligonucleotide
aaacattgtttgtatcgttgagccccaaag

SEQ ID NO: 162994 - DNA, 30 bp, Artificial Sequence
  Synthetic oligonucleotide
gttgaagggttactgacgaactgggcaaag

SEQ ID NO: 162995 - DNA, 30 bp, Artificial Sequence
  Synthetic oligonucleotide
agaccccaacggcactcgcggttggcaaag

SEQ ID NO: 162996 - DNA, 30 bp, Artificial Sequence
  Synthetic oligonucleotide
gccgcgtccggcggtctgagtcatgcaaag

SEQ ID NO: 162997 - DNA, 30 bp, Artificial Sequence
  Synthetic oligonucleotide
gacgtattaaaggactgctatgctgcaaag

SEQ ID NO: 162998 - DNA, 30 bp, Artificial Sequence
  Synthetic oligonucleotide
gaggcaaaatgggaggttatgtctgcaaag

SEQ ID NO: 162999 - DNA, 30 bp, Artificial Sequence
  Synthetic oligonucleotide
tctgtgaaagatatcgtaagtggatcaaag

SEQ ID NO: 163000 - DNA, 30 bp, Artificial Sequence
  Synthetic oligonucleotide
gactggagtgggcgcccacggtcttcaaag

SEQ ID NO: 163001 - DNA, 30 bp, Artificial Sequence
  Synthetic oligonucleotide
tgcatgttgacaatagcgcctcaaagaaag

SEQ ID NO: 163002 - DNA, 30 bp, Artificial Sequence
  Synthetic oligonucleotide
agggttcctacggcctaaacaagcagaaag

SEQ ID NO: 163003 - DNA, 30 bp, Artificial Sequence
  Synthetic oligonucleotide
atggatgtaaaatcggcccgctggagaaag

SEQ ID NO: 163004 - DNA, 30 bp, Artificial Sequence
  Synthetic oligonucleotide
tgctacgttttgtacattggtctgagaaag

SEQ ID NO: 163005 - DNA, 30 bp, Artificial Sequence
  Synthetic oligonucleotide
ggtaggatatactctcttattcaacgaaag

SEQ ID NO: 163006 - DNA, 30 bp, Artificial Sequence
  Synthetic oligonucleotide
tgtgactggtagatttcatgtatacgaaag

SEQ ID NO: 163007 - DNA, 30 bp, Artificial Sequence
  Synthetic oligonucleotide
cgagcacttgtagttacaggtccccgaaag

SEQ ID NO: 163008 - DNA, 30 bp, Artificial Sequence
  Synthetic oligonucleotide
gtaaaaacgaagatttggctatcgcgaaag

SEQ ID NO: 163009 - DNA, 30 bp, Artificial Sequence
  Synthetic oligonucleotide
agcttaaatgggtttagacctcggcgaaag

SEQ ID NO: 163010 - DNA, 30 bp, Artificial Sequence
  Synthetic oligonucleotide
ggcctgcctggtcctaaggcgcttcgaaag

SEQ ID NO: 163011 - DNA, 30 bp, Artificial Sequence
  Synthetic oligonucleotide
gtgtagagggaatagctcgatgttcgaaag

SEQ ID NO: 163012 - DNA, 30 bp, Artificial Sequence
  Synthetic oligonucleotide
ggagccaacggcagcacgcgcacaggaaag

SEQ ID NO: 163013 - DNA, 30 bp, Artificial Sequence
  Synthetic oligonucleotide
catgcgggtccctatgaataatcaggaaag

SEQ ID NO: 163014 - DNA, 30 bp, Artificial Sequence
  Synthetic oligonucleotide
tgccaggccgtgtactcatggagaggaaag

SEQ ID NO: 163015 - DNA, 30 bp, Artificial Sequence
  Synthetic oligonucleotide
caaacgtgcggggctaagggaaacggaaag

SEQ ID NO: 163016 - DNA, 30 bp, Artificial Sequence
  Synthetic oligonucleotide
atgcgtacaccgagttggaccttgggaaag

SEQ ID NO: 163017 - DNA, 30 bp, Artificial Sequence
  Synthetic oligonucleotide
aggttcaagaattcgctcatcactggaaag

SEQ ID NO: 163018 - DNA, 30 bp, Artificial Sequence
  Synthetic oligonucleotide
ttcaggtgtcaacacacgaaaggtggaaag

SEQ ID NO: 163019 - DNA, 30 bp, Artificial Sequence
  Synthetic oligonucleotide
gtcaaacgaaccaattttttaggtggaaag

SEQ ID NO: 163020 - DNA, 30 bp, Artificial Sequence
  Synthetic oligonucleotide
ttgtgggttcaggggtaattacttggaaag

SEQ ID NO: 163021 - DNA, 30 bp, Artificial Sequence
  Synthetic oligonucleotide
aaaccaacaggaatagataataactgaaag

SEQ ID NO: 163022 - DNA, 30 bp, Artificial Sequence
  Synthetic oligonucleotide
gactaacggaagtacgcccatcagtgaaag

SEQ ID NO: 163023 - DNA, 30 bp, Artificial Sequence
  Synthetic oligonucleotide
gcatgcaccatggatttaacatggtgaaag

SEQ ID NO: 163024 - DNA, 30 bp, Artificial Sequence
  Synthetic oligonucleotide
aaacggggctttggtttgggcatgtgaaag

SEQ ID NO: 163025 - DNA, 30 bp, Artificial Sequence
  Synthetic oligonucleotide
caccgggtggaagtgtaagtgttaataaag

SEQ ID NO: 163026 - DNA, 30 bp, Artificial Sequence
  Synthetic oligonucleotide
ctaagagtagatgttccaatgaacataaag

SEQ ID NO: 163027 - DNA, 30 bp, Artificial Sequence
  Synthetic oligonucleotide
gcgatgcacctatggcaaaataccataaag

SEQ ID NO: 163028 - DNA, 30 bp, Artificial Sequence
  Synthetic oligonucleotide
gtgacagccggaggcttaccaacgataaag

SEQ ID NO: 163029 - DNA, 30 bp, Artificial Sequence
  Synthetic oligonucleotide
atgctaagtcccataattcagcgactaaag

SEQ ID NO: 163030 - DNA, 30 bp, Artificial Sequence
  Synthetic oligonucleotide
atgcataatcaccgaccgtggttactaaag

SEQ ID NO: 163031 - DNA, 30 bp, Artificial Sequence
  Synthetic oligonucleotide
tccagtttcggcaggctgaatctgctaaag

SEQ ID NO: 163032 - DNA, 30 bp, Artificial Sequence
  Synthetic oligonucleotide
caaccaatcctaagttggggaggtctaaag

SEQ ID NO: 163033 - DNA, 30 bp, Artificial Sequence
  Synthetic oligonucleotide
cttttggtctattacacgccgtgtctaaag

SEQ ID NO: 163034 - DNA, 30 bp, Artificial Sequence
  Synthetic oligonucleotide
aggtacttatttaactacccggcagtaaag

SEQ ID NO: 163035 - DNA, 30 bp, Artificial Sequence
  Synthetic oligonucleotide
tgtggacatttacgcttgtggagagtaaag

SEQ ID NO: 163036 - DNA, 30 bp, Artificial Sequence
  Synthetic oligonucleotide
ggggtcttcgacttacaacgggacgtaaag

SEQ ID NO: 163037 - DNA, 30 bp, Artificial Sequence
  Synthetic oligonucleotide
tggacacagttagtccgagtagaggtaaag

SEQ ID NO: 163038 - DNA, 30 bp, Artificial Sequence
  Synthetic oligonucleotide
gccacccaagacttccgaaagtctgtaaag

SEQ ID NO: 163039 - DNA, 30 bp, Artificial Sequence
  Synthetic oligonucleotide
cgtggcgcataggtttcacgtgcattaaag

SEQ ID NO: 163040 - DNA, 30 bp, Artificial Sequence
  Synthetic oligonucleotide
tggcccatgacttacgtacgatccttaaag

SEQ ID NO: 163041 - DNA, 30 bp, Artificial Sequence
  Synthetic oligonucleotide
gcgttactagtcgtatgttatgcgttaaag

SEQ ID NO: 163042 - DNA, 30 bp, Artificial Sequence
  Synthetic oligonucleotide
aaataaaagaatagggtcaggaggttaaag

SEQ ID NO: 163043 - DNA, 30 bp, Artificial Sequence
  Synthetic oligonucleotide
acgattcggcgccctctttcccatttaaag

SEQ ID NO: 163044 - DNA, 30 bp, Artificial Sequence
  Synthetic oligonucleotide
atgttaaggagtatcgaggactttttaaag

SEQ ID NO: 163045 - DNA, 30 bp, Artificial Sequence
  Synthetic oligonucleotide
tgattacataaagtccgtctctttttaaag

SEQ ID NO: 163046 - DNA, 30 bp, Artificial Sequence
  Synthetic oligonucleotide
accaaggggttacagtgtaagaccaacaag

SEQ ID NO: 163047 - DNA, 30 bp, Artificial Sequence
  Synthetic oligonucleotide
tataagtttactagcgtacggcccaacaag

SEQ ID NO: 163048 - DNA, 30 bp, Artificial Sequence
  Synthetic oligonucleotide
atgattttagagctacgcgtgtccaacaag

SEQ ID NO: 163049 - DNA, 30 bp, Artificial Sequence
  Synthetic oligonucleotide
ggcatagaggtggaaccagcgtgcaacaag

SEQ ID NO: 163050 - DNA, 30 bp, Artificial Sequence
  Synthetic oligonucleotide
catcctgtacgtgtctgccaggtcaacaag

SEQ ID NO: 163051 - DNA, 30 bp, Artificial Sequence
  Synthetic oligonucleotide
gtcctaagaatcctgctcggatataacaag

SEQ ID NO: 163052 - DNA, 30 bp, Artificial Sequence
  Synthetic oligonucleotide
tctgttacaatcgggagtccctttaacaag

SEQ ID NO: 163053 - DNA, 30 bp, Artificial Sequence
  Synthetic oligonucleotide
cgcgcgtcgtacccttgtataggccacaag

SEQ ID NO: 163054 - DNA, 30 bp, Artificial Sequence
  Synthetic oligonucleotide
gtcagcccaacccgactgtcactccacaag

SEQ ID NO: 163055 - DNA, 30 bp, Artificial Sequence
  Synthetic oligonucleotide
aagccgaacgcggcgcatctgaagcacaag

SEQ ID NO: 163056 - DNA, 30 bp, Artificial Sequence
  Synthetic oligonucleotide
gggcacgcctgggagataaaagctcacaag

SEQ ID NO: 163057 - DNA, 30 bp, Artificial Sequence
  Synthetic oligonucleotide
ggtcctgcaagaaccgcaccgtacgacaag

SEQ ID NO: 163058 - DNA, 30 bp, Artificial Sequence
  Synthetic oligonucleotide
acacctctataaaccgaagataaggacaag

SEQ ID NO: 163059 - DNA, 30 bp, Artificial Sequence
  Synthetic oligonucleotide
agatctgtttgtttcgagagagcatacaag

SEQ ID NO: 163060 - DNA, 30 bp, Artificial Sequence
  Synthetic oligonucleotide
agcatttggccaaaacgtatcagaaccaag

SEQ ID NO: 163061 - DNA, 30 bp, Artificial Sequence
  Synthetic oligonucleotide
ttggtataaacttgtaggtcctctaccaag

SEQ ID NO: 163062 - DNA, 30 bp, Artificial Sequence
  Synthetic oligonucleotide
cgaataccaagtccttagacacgacccaag

SEQ ID NO: 163063 - DNA, 30 bp, Artificial Sequence
  Synthetic oligonucleotide
aataagcagtactcccttatgatacccaag

SEQ ID NO: 163064 - DNA, 30 bp, Artificial Sequence
  Synthetic oligonucleotide
cgcataaatccgtcatttggcttacccaag

SEQ ID NO: 163065 - DNA, 30 bp, Artificial Sequence
  Synthetic oligonucleotide
tatcctaattagcgatagaagaggcccaag

SEQ ID NO: 163066 - DNA, 30 bp, Artificial Sequence
  Synthetic oligonucleotide
gagggaagttggatcgatagcttgcccaag

SEQ ID NO: 163067 - DNA, 30 bp, Artificial Sequence
  Synthetic oligonucleotide
atcgggagggctagttgggaaagagccaag

SEQ ID NO: 163068 - DNA, 30 bp, Artificial Sequence
  Synthetic oligonucleotide
accacccaatgccccaaccgttccgccaag

SEQ ID NO: 163069 - DNA, 30 bp, Artificial Sequence
  Synthetic oligonucleotide
gcggaaatagccacggactaccgtgccaag

SEQ ID NO: 163070 - DNA, 30 bp, Artificial Sequence
  Synthetic oligonucleotide
ttcgtaaacgcaacgttcaagtttgccaag

SEQ ID NO: 163071 - DNA, 30 bp, Artificial Sequence
  Synthetic oligonucleotide
tggtcctttgtgtcgtgtttgggatccaag

SEQ ID NO: 163072 - DNA, 30 bp, Artificial Sequence
  Synthetic oligonucleotide
aatgacagtcctcgcccggaggtatccaag

SEQ ID NO: 163073 - DNA, 30 bp, Artificial Sequence
  Synthetic oligonucleotide
ctcggtaaatttctaatgcgtctttccaag

SEQ ID NO: 163074 - DNA, 30 bp, Artificial Sequence
  Synthetic oligonucleotide
ggggcgggagatccccgcaagtcccgcaag

SEQ ID NO: 163075 - DNA, 30 bp, Artificial Sequence
  Synthetic oligonucleotide
aggagggctgttcacgttacaggccgcaag

SEQ ID NO: 163076 - DNA, 30 bp, Artificial Sequence
  Synthetic oligonucleotide
caaatagacctccgagatgtagtgcgcaag

SEQ ID NO: 163077 - DNA, 30 bp, Artificial Sequence
  Synthetic oligonucleotide
acgtgcataggccagtatatcgtaggcaag

SEQ ID NO: 163078 - DNA, 30 bp, Artificial Sequence
  Synthetic oligonucleotide
tggccgatggtcatagatgagcagggcaag

SEQ ID NO: 163079 - DNA, 30 bp, Artificial Sequence
  Synthetic oligonucleotide
cgcattccctgtatccaggacacgggcaag

SEQ ID NO: 163080 - DNA, 30 bp, Artificial Sequence
  Synthetic oligonucleotide
actctgggggtgactggagggaggggcaag

SEQ ID NO: 163081 - DNA, 35 bp, Artificial Sequence
  Synthetic oligonucleotide
caatgtaggcgtgcatcggctcctgacggggcaag

SEQ ID NO: 163082 - DNA, 30 bp, Artificial Sequence
  Synthetic oligonucleotide
tagtacagcccgagacctcaatctggcaag

SEQ ID NO: 163083 - DNA, 30 bp, Artificial Sequence
  Synthetic oligonucleotide
taacccgggaagttagcggaatttggcaag

SEQ ID NO: 163084 - DNA, 30 bp, Artificial Sequence
  Synthetic oligonucleotide
acgctaccacgagattctctgttatgcaag

SEQ ID NO: 163085 - DNA, 30 bp, Artificial Sequence
  Synthetic oligonucleotide
aagtaatgtctgccgagcgttgtcatcaag

SEQ ID NO: 163086 - DNA, 30 bp, Artificial Sequence
  Synthetic oligonucleotide
cacggtagggaaacggcgttggatatcaag

SEQ ID NO: 163087 - DNA, 30 bp, Artificial Sequence
  Synthetic oligonucleotide
gccgtggagcttaacctaggacctatcaag

SEQ ID NO: 163088 - DNA, 30 bp, Artificial Sequence
  Synthetic oligonucleotide
acgaaaatatgccgccgatccattatcaag

SEQ ID NO: 163089 - DNA, 30 bp, Artificial Sequence
  Synthetic oligonucleotide
cggtattggcgcatgaagattgcactcaag

SEQ ID NO: 163090 - DNA, 30 bp, Artificial Sequence
  Synthetic oligonucleotide
atacaacgcttggatcagcaaagactcaag

SEQ ID NO: 163091 - DNA, 30 bp, Artificial Sequence
  Synthetic oligonucleotide
ggccctgtcgatactcggtagtagctcaag

SEQ ID NO: 163092 - DNA, 30 bp, Artificial Sequence
  Synthetic oligonucleotide
ttaacttgagtatactggacatggctcaag

SEQ ID NO: 163093 - DNA, 30 bp, Artificial Sequence
  Synthetic oligonucleotide
actgcccggtgagccatactgctgctcaag

SEQ ID NO: 163094 - DNA, 30 bp, Artificial Sequence
  Synthetic oligonucleotide
agatattaccggatatctagcgtgctcaag

SEQ ID NO: 163095 - DNA, 30 bp, Artificial Sequence
  Synthetic oligonucleotide
acctcgtgaggatcgaccagtggtctcaag

SEQ ID NO: 163096 - DNA, 30 bp, Artificial Sequence
  Synthetic oligonucleotide
ggaccacatatatacgatatatgtctcaag

SEQ ID NO: 163097 - DNA, 31 bp, Artificial Sequence
  Synthetic oligonucleotide
tgcgggaaaggtgaatccttagcaagtcaag

SEQ ID NO: 163098 - DNA, 30 bp, Artificial Sequence
  Synthetic oligonucleotide
ttcacatacaagctagtggcgagagtcaag

SEQ ID NO: 163099 - DNA, 30 bp, Artificial Sequence
  Synthetic oligonucleotide
tataacgaagtttccgagcggcgagtcaag

SEQ ID NO: 163100 - DNA, 30 bp, Artificial Sequence
  Synthetic oligonucleotide
tcaggccgtgctacctcacaaggcgtcaag

SEQ ID NO: 163101 - DNA, 30 bp, Artificial Sequence
  Synthetic oligonucleotide
gatcgttgtctcggcaggtcgtcggtcaag

SEQ ID NO: 163102 - DNA, 30 bp, Artificial Sequence
  Synthetic oligonucleotide
ctcgttgtaaacacgaacgtgattgtcaag

SEQ ID NO: 163103 - DNA, 30 bp, Artificial Sequence
  Synthetic oligonucleotide
ggcacagggcgccactcgatctttgtcaag

SEQ ID NO: 163104 - DNA, 30 bp, Artificial Sequence
  Synthetic oligonucleotide
atatgcccgcctcttgtgaacggattcaag

SEQ ID NO: 163105 - DNA, 30 bp, Artificial Sequence
  Synthetic oligonucleotide
gatggcaccatagatttttcggatttcaag

SEQ ID NO: 163106 - DNA, 30 bp, Artificial Sequence
  Synthetic oligonucleotide
atctacgcatgtagcacaacgcctttcaag

SEQ ID NO: 163107 - DNA, 30 bp, Artificial Sequence
  Synthetic oligonucleotide
tgaatctagatgcgctgaggaagtttcaag

SEQ ID NO: 163108 - DNA, 30 bp, Artificial Sequence
  Synthetic oligonucleotide
tggggaccgattatttaggtcgttttcaag

SEQ ID NO: 163109 - DNA, 30 bp, Artificial Sequence
  Synthetic oligonucleotide
taaggacaggtaaaaaaaatgggaaagaag

SEQ ID NO: 163110 - DNA, 30 bp, Artificial Sequence
  Synthetic oligonucleotide
tcctcaatggggtctgaagttcggaagaag

SEQ ID NO: 163111 - DNA, 30 bp, Artificial Sequence
  Synthetic oligonucleotide
taaacttctgtctcgggaatccgccagaag

SEQ ID NO: 163112 - DNA, 30 bp, Artificial Sequence
  Synthetic oligonucleotide
tgtgcgctcgtcgctaatcagggtcagaag

SEQ ID NO: 163113 - DNA, 30 bp, Artificial Sequence
  Synthetic oligonucleotide
tgaaagtgggccagaatacacgttcagaag

SEQ ID NO: 163114 - DNA, 30 bp, Artificial Sequence
  Synthetic oligonucleotide
gaagcatgggcacatgcacaaaaagagaag

SEQ ID NO: 163115 - DNA, 30 bp, Artificial Sequence
  Synthetic oligonucleotide
gctacggacaataaacggctataagagaag

SEQ ID NO: 163116 - DNA, 30 bp, Artificial Sequence
  Synthetic oligonucleotide
ataaccgaagtaacctttgaactcgagaag

SEQ ID NO: 163117 - DNA, 30 bp, Artificial Sequence
  Synthetic oligonucleotide
aagacacaggtggttaccggtaaggagaag

SEQ ID NO: 163118 - DNA, 30 bp, Artificial Sequence
  Synthetic oligonucleotide
acacatcaagtgttacgccacactgagaag

SEQ ID NO: 163119 - DNA, 30 bp, Artificial Sequence
  Synthetic oligonucleotide
tcacggcgggggctatagtgtccctagaag

SEQ ID NO: 163120 - DNA, 30 bp, Artificial Sequence
  Synthetic oligonucleotide
taatcgacagatccatagtcgtgctagaag

SEQ ID NO: 163121 - DNA, 30 bp, Artificial Sequence
  Synthetic oligonucleotide
acccgttccaagcatggaatagagtagaag

SEQ ID NO: 163122 - DNA, 30 bp, Artificial Sequence
  Synthetic oligonucleotide
ggctgggctgattacctatgtacgtagaag

SEQ ID NO: 163123 - DNA, 30 bp, Artificial Sequence
  Synthetic oligonucleotide
accgaaaataatcgggtagctgggtagaag

SEQ ID NO: 163124 - DNA, 30 bp, Artificial Sequence
  Synthetic oligonucleotide
ggtcacataatgacgtgcaggctgtagaag

SEQ ID NO: 163125 - DNA, 30 bp, Artificial Sequence
  Synthetic oligonucleotide
agagagattaacacatttagctcttagaag

SEQ ID NO: 163126 - DNA, 30 bp, Artificial Sequence
  Synthetic oligonucleotide
gttatgtgttcgtgtcgatctacaacgaag

SEQ ID NO: 163127 - DNA, 30 bp, Artificial Sequence
  Synthetic oligonucleotide
cctacaccagcgaggctcagcaacacgaag

SEQ ID NO: 163128 - DNA, 30 bp, Artificial Sequence
  Synthetic oligonucleotide
aaaatcggcgcgttagacttggacacgaag

SEQ ID NO: 163129 - DNA, 29 bp, Artificial Sequence
  Synthetic oligonucleotide
ggtggaagcgggaacccttaggcacgaag

SEQ ID NO: 163130 - DNA, 30 bp, Artificial Sequence
  Synthetic oligonucleotide
acgaccattctaataggccagcctacgaag

SEQ ID NO: 163131 - DNA, 30 bp, Artificial Sequence
  Synthetic oligonucleotide
agggtgttaaggtccagtgtgcacccgaag

SEQ ID NO: 163132 - DNA, 30 bp, Artificial Sequence
  Synthetic oligonucleotide
cctcgatgtagagccccgcaagcgccgaag

SEQ ID NO: 163133 - DNA, 30 bp, Artificial Sequence
  Synthetic oligonucleotide
tcaccgcagtgccgtatagaaaaagcgaag

SEQ ID NO: 163134 - DNA, 30 bp, Artificial Sequence
  Synthetic oligonucleotide
ccgcgctatccattaagcacctgagcgaag

SEQ ID NO: 163135 - DNA, 30 bp, Artificial Sequence
  Synthetic oligonucleotide
atgcattgtttcgaaatccaaaacgcgaag

SEQ ID NO: 163136 - DNA, 30 bp, Artificial Sequence
  Synthetic oligonucleotide
gcaaccttaaaactgaatctaggggcgaag

SEQ ID NO: 163137 - DNA, 30 bp, Artificial Sequence
  Synthetic oligonucleotide
acacaagtcccatatagggccaatgcgaag

SEQ ID NO: 163138 - DNA, 30 bp, Artificial Sequence
  Synthetic oligonucleotide
cttaagatggtttaggtcccggactcgaag

SEQ ID NO: 163139 - DNA, 30 bp, Artificial Sequence
  Synthetic oligonucleotide
caactgatgtaacggtctaggcattcgaag

SEQ ID NO: 163140 - DNA, 30 bp, Artificial Sequence
  Synthetic oligonucleotide
gactatctggatcggcgttacaaaaggaag

SEQ ID NO: 163141 - DNA, 30 bp, Artificial Sequence
  Synthetic oligonucleotide
gctgctgtcagcgcagaggccacaaggaag

SEQ ID NO: 163142 - DNA, 30 bp, Artificial Sequence
  Synthetic oligonucleotide
gttcagtggcgagcccgtattagaaggaag

SEQ ID NO: 163143 - DNA, 30 bp, Artificial Sequence
  Synthetic oligonucleotide
ttgcccttatatgtgtggggaataaggaag

SEQ ID NO: 163144 - DNA, 30 bp, Artificial Sequence
  Synthetic oligonucleotide
acgcgtcgtgtgctcttctttgccaggaag

SEQ ID NO: 163145 - DNA, 30 bp, Artificial Sequence
  Synthetic oligonucleotide
ctgatcagaacgagtagaagatccaggaag

SEQ ID NO: 163146 - DNA, 30 bp, Artificial Sequence
  Synthetic oligonucleotide
tcggcagagttagttttgcacaagaggaag

SEQ ID NO: 163147 - DNA, 30 bp, Artificial Sequence
  Synthetic oligonucleotide
agaaccacccaggaagatcactagaggaag

SEQ ID NO: 163148 - DNA, 30 bp, Artificial Sequence
  Synthetic oligonucleotide
ttcggcagtaggagacgggataataggaag

SEQ ID NO: 163149 - DNA, 30 bp, Artificial Sequence
  Synthetic oligonucleotide
cggccactcgggcggtatagcccacggaag

SEQ ID NO: 163150 - DNA, 30 bp, Artificial Sequence
  Synthetic oligonucleotide
tttcctcataccaacgtgtattcacggaag

SEQ ID NO: 163151 - DNA, 30 bp, Artificial Sequence
  Synthetic oligonucleotide
gtgagaggagttgccgaggtttccgggaag

SEQ ID NO: 163152 - DNA, 30 bp, Artificial Sequence
  Synthetic oligonucleotide
aacttgaaccgggaatgacatggcgggaag

SEQ ID NO: 163153 - DNA, 30 bp, Artificial Sequence
  Synthetic oligonucleotide
gagtctaacggtccggctacgatcgggaag

SEQ ID NO: 163154 - DNA, 30 bp, Artificial Sequence
  Synthetic oligonucleotide
cgtctattagacctgaatcagtaggggaag

SEQ ID NO: 163155 - DNA, 30 bp, Artificial Sequence
  Synthetic oligonucleotide
gtgacctgccaaggaggacccatggggaag

SEQ ID NO: 163156 - DNA, 30 bp, Artificial Sequence
  Synthetic oligonucleotide
attgcaggaacaactttgctctatgggaag

SEQ ID NO: 163157 - DNA, 30 bp, Artificial Sequence
  Synthetic oligonucleotide
gggatcgagcatgtgcgaatgactgggaag

SEQ ID NO: 163158 - DNA, 30 bp, Artificial Sequence
  Synthetic oligonucleotide
ctcaactttcgatgtaggtggccatggaag

SEQ ID NO: 163159 - DNA, 30 bp, Artificial Sequence
  Synthetic oligonucleotide
ccacgacatcagaatcagcatcgatggaag

SEQ ID NO: 163160 - DNA, 30 bp, Artificial Sequence
  Synthetic oligonucleotide
ccagtatcatacattctcgatggctggaag

SEQ ID NO: 163161 - DNA, 30 bp, Artificial Sequence
  Synthetic oligonucleotide
gtagccgtttcaaaactatctaggtggaag

SEQ ID NO: 163162 - DNA, 30 bp, Artificial Sequence
  Synthetic oligonucleotide
tggcaattcggttcctgcttctcttggaag

SEQ ID NO: 163163 - DNA, 30 bp, Artificial Sequence
  Synthetic oligonucleotide
ttggttaattgtaaaaactaggaaatgaag

SEQ ID NO: 163164 - DNA, 30 bp, Artificial Sequence
  Synthetic oligonucleotide
ggactcaggatagtttactatgggatgaag

SEQ ID NO: 163165 - DNA, 30 bp, Artificial Sequence
  Synthetic oligonucleotide
actgatcgctcctcagcttgcttgatgaag

SEQ ID NO: 163166 - DNA, 30 bp, Artificial Sequence
  Synthetic oligonucleotide
agtcgctgtcgagattttggttgactgaag

SEQ ID NO: 163167 - DNA, 30 bp, Artificial Sequence
  Synthetic oligonucleotide
ccgtttcatagggtacagcgtcggctgaag

SEQ ID NO: 163168 - DNA, 30 bp, Artificial Sequence
  Synthetic oligonucleotide
atcaaggaacagtcgcgatacattctgaag

SEQ ID NO: 163169 - DNA, 30 bp, Artificial Sequence
  Synthetic oligonucleotide
aggctattgacgaaccgaaggtttctgaag

SEQ ID NO: 163170 - DNA, 30 bp, Artificial Sequence
  Synthetic oligonucleotide
gacactgtgaactggtctgctccggtgaag

SEQ ID NO: 163171 - DNA, 30 bp, Artificial Sequence
  Synthetic oligonucleotide
tagggcgcccttgtcgtggtatcggtgaag

SEQ ID NO: 163172 - DNA, 30 bp, Artificial Sequence
  Synthetic oligonucleotide
tgggtagacagccaagctttgagggtgaag

SEQ ID NO: 163173 - DNA, 30 bp, Artificial Sequence
  Synthetic oligonucleotide
aagcagtgaaaagatacgaatggcttgaag

SEQ ID NO: 163174 - DNA, 30 bp, Artificial Sequence
  Synthetic oligonucleotide
acaagatagacctagccaaattgcttgaag

SEQ ID NO: 163175 - DNA, 30 bp, Artificial Sequence
  Synthetic oligonucleotide
tcctggagtctaaaaggtggaaaaaataag

SEQ ID NO: 163176 - DNA, 30 bp, Artificial Sequence
  Synthetic oligonucleotide
ctgggtataacgatcacgaaataaaataag

SEQ ID NO: 163177 - DNA, 30 bp, Artificial Sequence
  Synthetic oligonucleotide
catgtaagttggcttactcccgtaaataag

SEQ ID NO: 163178 - DNA, 30 bp, Artificial Sequence
  Synthetic oligonucleotide
gtggcacattagcctagtcttgacaataag

SEQ ID NO: 163179 - DNA, 30 bp, Artificial Sequence
  Synthetic oligonucleotide
cggatatccaagctaggtagtttcaataag

SEQ ID NO: 163180 - DNA, 30 bp, Artificial Sequence
  Synthetic oligonucleotide
acaaaggttaactgatttaaagataataag

SEQ ID NO: 163181 - DNA, 30 bp, Artificial Sequence
  Synthetic oligonucleotide
gccgatcgcgccttccctctaaaccataag

SEQ ID NO: 163182 - DNA, 30 bp, Artificial Sequence
  Synthetic oligonucleotide
tgtgccgcggggaagggttaagaccataag

SEQ ID NO: 163183 - DNA, 30 bp, Artificial Sequence
  Synthetic oligonucleotide
acacgatatttcgctggaagtaggcataag

SEQ ID NO: 163184 - DNA, 30 bp, Artificial Sequence
  Synthetic oligonucleotide
ggaccggttgtagatggcaagccagataag

SEQ ID NO: 163185 - DNA, 29 bp, Artificial Sequence
  Synthetic oligonucleotide
aggggaggctagcatcttcctgagataag

SEQ ID NO: 163186 - DNA, 30 bp, Artificial Sequence
  Synthetic oligonucleotide
gggcgcttagcgttggctcatcatgataag

SEQ ID NO: 163187 - DNA, 30 bp, Artificial Sequence
  Synthetic oligonucleotide
aggtccgtttacttattcacacaatataag

SEQ ID NO: 163188 - DNA, 30 bp, Artificial Sequence
  Synthetic oligonucleotide
gacatcaacgatactgtcccagaatataag

SEQ ID NO: 163189 - DNA, 30 bp, Artificial Sequence
  Synthetic oligonucleotide
ggcttgtagtccaggatctctgactataag

SEQ ID NO: 163190 - DNA, 30 bp, Artificial Sequence
  Synthetic oligonucleotide
gcgggtacagcaagaccgggccgctataag

SEQ ID NO: 163191 - DNA, 30 bp, Artificial Sequence
  Synthetic oligonucleotide
gcaaccgaagtatcggataagcattataag

SEQ ID NO: 163192 - DNA, 30 bp, Artificial Sequence
  Synthetic oligonucleotide
tagactaggcaggtgtagagtgattataag

SEQ ID NO: 163193 - DNA, 30 bp, Artificial Sequence
  Synthetic oligonucleotide
gatcgcactcacgtggcatcaacttataag

SEQ ID NO: 163194 - DNA, 31 bp, Artificial Sequence
  Synthetic oligonucleotide
ctggcgaacctggccccctgtacaaactaag

SEQ ID NO: 163195 - DNA, 30 bp, Artificial Sequence
  Synthetic oligonucleotide
gtccgttgtcgcagatgagccggaactaag

SEQ ID NO: 163196 - DNA, 30 bp, Artificial Sequence
  Synthetic oligonucleotide
tccgcatgagccgagcttcgggacactaag

SEQ ID NO: 163197 - DNA, 30 bp, Artificial Sequence
  Synthetic oligonucleotide
ggggcctggttacctgcggggacgactaag

SEQ ID NO: 163198 - DNA, 30 bp, Artificial Sequence
  Synthetic oligonucleotide
gtgaactctctccttgaaattgatactaag

SEQ ID NO: 163199 - DNA, 30 bp, Artificial Sequence
  Synthetic oligonucleotide
gcgcataattgacagggaggataacctaag

SEQ ID NO: 163200 - DNA, 30 bp, Artificial Sequence
  Synthetic oligonucleotide
aataaatatagttcgtgctacacccctaag

SEQ ID NO: 163201 - DNA, 30 bp, Artificial Sequence
  Synthetic oligonucleotide
gtccgtgagacagagcccgtaagccctaag

SEQ ID NO: 163202 - DNA, 30 bp, Artificial Sequence
  Synthetic oligonucleotide
cgaacccgtcactagtataacaggcctaag

SEQ ID NO: 163203 - DNA, 30 bp, Artificial Sequence
  Synthetic oligonucleotide
tcaccgacagccaatgttttgcctcctaag

SEQ ID NO: 163204 - DNA, 30 bp, Artificial Sequence
  Synthetic oligonucleotide
catctgcgcggccacctaacagctcctaag

SEQ ID NO: 163205 - DNA, 30 bp, Artificial Sequence
  Synthetic oligonucleotide
ccgcggattaaatacgccccgagagctaag

SEQ ID NO: 163206 - DNA, 30 bp, Artificial Sequence
  Synthetic oligonucleotide
gcatttggagtactattgcatgtggctaag

SEQ ID NO: 163207 - DNA, 30 bp, Artificial Sequence
  Synthetic oligonucleotide
ctatagaactgcttactgtaaaatgctaag

SEQ ID NO: 163208 - DNA, 31 bp, Artificial Sequence
  Synthetic oligonucleotide
taccaaatatgagaaaggagctactgctaag

SEQ ID NO: 163209 - DNA, 30 bp, Artificial Sequence
  Synthetic oligonucleotide
acatgctagtacaattctgcttaatctaag

SEQ ID NO: 163210 - DNA, 30 bp, Artificial Sequence
  Synthetic oligonucleotide
gcccatgttgaatcacatccgacatctaag

SEQ ID NO: 163211 - DNA, 30 bp, Artificial Sequence
  Synthetic oligonucleotide
ttcgcaacggagatggatacgggatctaag

SEQ ID NO: 163212 - DNA, 30 bp, Artificial Sequence
  Synthetic oligonucleotide
caggttctatcgtaccggtgtatatctaag

SEQ ID NO: 163213 - DNA, 30 bp, Artificial Sequence
  Synthetic oligonucleotide
gggaatcgggattcatttaccgtatctaag

SEQ ID NO: 163214 - DNA, 30 bp, Artificial Sequence
  Synthetic oligonucleotide
tgtgcatacaacctactagctaactctaag

SEQ ID NO: 163215 - DNA, 30 bp, Artificial Sequence
  Synthetic oligonucleotide
agtgtggtgtttaccgtgccgtagtctaag

SEQ ID NO: 163216 - DNA, 30 bp, Artificial Sequence
  Synthetic oligonucleotide
agtatactgcgaactacaatgcggtctaag

SEQ ID NO: 163217 - DNA, 29 bp, Artificial Sequence
  Synthetic oligonucleotide
gaacgatcctagggagctctgtgtctaag

SEQ ID NO: 163218 - DNA, 30 bp, Artificial Sequence
  Synthetic oligonucleotide
aggatcagcgatcaagtaagagccagtaag

SEQ ID NO: 163219 - DNA, 30 bp, Artificial Sequence
  Synthetic oligonucleotide
gtgggtcagatatggcattgtatcagtaag

SEQ ID NO: 163220 - DNA, 30 bp, Artificial Sequence
  Synthetic oligonucleotide
atatagtgggatagtgctcagatgagtaag

SEQ ID NO: 163221 - DNA, 30 bp, Artificial Sequence
  Synthetic oligonucleotide
ggcgggggtgcctagggggtacatagtaag

SEQ ID NO: 163222 - DNA, 30 bp, Artificial Sequence
  Synthetic oligonucleotide
catctcgctagacaggagatttaccgtaag

SEQ ID NO: 163223 - DNA, 30 bp, Artificial Sequence
  Synthetic oligonucleotide
ggaggtgcaccactgcaactgttccgtaag

SEQ ID NO: 163224 - DNA, 30 bp, Artificial Sequence
  Synthetic oligonucleotide
aaaacaggttctcctctgtgaaacggtaag

SEQ ID NO: 163225 - DNA, 30 bp, Artificial Sequence
  Synthetic oligonucleotide
tggccatgattgtaacttcaaccgggtaag

SEQ ID NO: 163226 - DNA, 30 bp, Artificial Sequence
  Synthetic oligonucleotide
gtctacgcgttttgtgaactacttggtaag

SEQ ID NO: 163227 - DNA, 30 bp, Artificial Sequence
  Synthetic oligonucleotide
tacctgtctgagcgaggcataaaatgtaag

SEQ ID NO: 163228 - DNA, 30 bp, Artificial Sequence
  Synthetic oligonucleotide
cggttacacctcagacatgtaacatgtaag

SEQ ID NO: 163229 - DNA, 30 bp, Artificial Sequence
  Synthetic oligonucleotide
agaggcaggcacagaagcaaatactgtaag

SEQ ID NO: 163230 - DNA, 30 bp, Artificial Sequence
  Synthetic oligonucleotide
cacttggggcagattcatgcctcctgtaag

SEQ ID NO: 163231 - DNA, 30 bp, Artificial Sequence
  Synthetic oligonucleotide
gcaatcaaacgtaaggagctccgctgtaag

SEQ ID NO: 163232 - DNA, 30 bp, Artificial Sequence
  Synthetic oligonucleotide
ccggtgagtctggtacgtatagagtgtaag

SEQ ID NO: 163233 - DNA, 30 bp, Artificial Sequence
  Synthetic oligonucleotide
tcgcatagtgcaatctcttccacgtgtaag

SEQ ID NO: 163234 - DNA, 30 bp, Artificial Sequence
  Synthetic oligonucleotide
ggacttggatcgtgtttgtcaacaattaag

SEQ ID NO: 163235 - DNA, 30 bp, Artificial Sequence
  Synthetic oligonucleotide
gattaggggtaggcgccctatcgaattaag

SEQ ID NO: 163236 - DNA, 30 bp, Artificial Sequence
  Synthetic oligonucleotide
gggcgtcagagcagaacaggagccattaag

SEQ ID NO: 163237 - DNA, 31 bp, Artificial Sequence
  Synthetic oligonucleotide
taatgattagaggcacatgctcgccattaag

SEQ ID NO: 163238 - DNA, 30 bp, Artificial Sequence
  Synthetic oligonucleotide
gatatatgcacaattgtgaactgcattaag

SEQ ID NO: 163239 - DNA, 30 bp, Artificial Sequence
  Synthetic oligonucleotide
aaatgagtacctaagataatgaagattaag

SEQ ID NO: 163240 - DNA, 30 bp, Artificial Sequence
  Synthetic oligonucleotide
taggatgtgaaaacgtggctggagattaag

SEQ ID NO: 163241 - DNA, 30 bp, Artificial Sequence
  Synthetic oligonucleotide
actggcggtcgcagggaacgccatattaag

SEQ ID NO: 163242 - DNA, 30 bp, Artificial Sequence
  Synthetic oligonucleotide
tgccagcatgaggtatatcccgatattaag

SEQ ID NO: 163243 - DNA, 30 bp, Artificial Sequence
  Synthetic oligonucleotide
tgaagtaggagctgggggttaggtattaag

SEQ ID NO: 163244 - DNA, 30 bp, Artificial Sequence
  Synthetic oligonucleotide
gggcccaatgaatttctcagttgccttaag

SEQ ID NO: 163245 - DNA, 30 bp, Artificial Sequence
  Synthetic oligonucleotide
aagtgggggaagagacagggtgtccttaag

SEQ ID NO: 163246 - DNA, 30 bp, Artificial Sequence
  Synthetic oligonucleotide
aggtgtaatgatacgaatacgaatcttaag

SEQ ID NO: 163247 - DNA, 30 bp, Artificial Sequence
  Synthetic oligonucleotide
ggggcacaacccagtatccggattcttaag

SEQ ID NO: 163248 - DNA, 30 bp, Artificial Sequence
  Synthetic oligonucleotide
cgttgctgtgaggcggtgtcgtttcttaag

SEQ ID NO: 163249 - DNA, 30 bp, Artificial Sequence
  Synthetic oligonucleotide
gtataaatactccacggacgttaagttaag

SEQ ID NO: 163250 - DNA, 30 bp, Artificial Sequence
  Synthetic oligonucleotide
tggttagccatgcatcaagcactagttaag

SEQ ID NO: 163251 - DNA, 30 bp, Artificial Sequence
  Synthetic oligonucleotide
gacactctgaaaagctcacggtccgttaag

SEQ ID NO: 163252 - DNA, 30 bp, Artificial Sequence
  Synthetic oligonucleotide
tgtagaaaaatgtgggcatgaggcgttaag

SEQ ID NO: 163253 - DNA, 30 bp, Artificial Sequence
  Synthetic oligonucleotide
gtggccaatccgcgtccagtactggttaag

SEQ ID NO: 163254 - DNA, 30 bp, Artificial Sequence
  Synthetic oligonucleotide
gccatgaatcaagctctgccagcatttaag

SEQ ID NO: 163255 - DNA, 30 bp, Artificial Sequence
  Synthetic oligonucleotide
gctgaggccttaggggttgtaggctttaag

SEQ ID NO: 163256 - DNA, 30 bp, Artificial Sequence
  Synthetic oligonucleotide
tggcggagtcaggaaactcgcgtgtttaag

SEQ ID NO: 163257 - DNA, 30 bp, Artificial Sequence
  Synthetic oligonucleotide
tgggatgggaggtgtaactcgaattttaag

SEQ ID NO: 163258 - DNA, 30 bp, Artificial Sequence
  Synthetic oligonucleotide
cacctcgtgcaaaggatcatagattttaag

SEQ ID NO: 163259 - DNA, 30 bp, Artificial Sequence
  Synthetic oligonucleotide
tatcgaaggtcggtcgcctattcttttaag

SEQ ID NO: 163260 - DNA, 30 bp, Artificial Sequence
  Synthetic oligonucleotide
tgcaagacgttatgatttggagtttttaag

SEQ ID NO: 163261 - DNA, 30 bp, Artificial Sequence
  Synthetic oligonucleotide
ataaaagttggctctcgattctcaaaacag

SEQ ID NO: 163262 - DNA, 30 bp, Artificial Sequence
  Synthetic oligonucleotide
atcagcggctgtatcggcctactaaaacag

SEQ ID NO: 163263 - DNA, 30 bp, Artificial Sequence
  Synthetic oligonucleotide
tgattgattaaaccaaggagtagcaaacag

SEQ ID NO: 163264 - DNA, 30 bp, Artificial Sequence
  Synthetic oligonucleotide
gaattcacacattggtctgacccgaaacag

SEQ ID NO: 163265 - DNA, 30 bp, Artificial Sequence
  Synthetic oligonucleotide
gatagcccaacggtggggttccaacaacag

SEQ ID NO: 163266 - DNA, 30 bp, Artificial Sequence
  Synthetic oligonucleotide
gacctggtaatccaatggtgctaacaacag

SEQ ID NO: 163267 - DNA, 30 bp, Artificial Sequence
  Synthetic oligonucleotide
cttcggtaaaagtatacgccgacacaacag

SEQ ID NO: 163268 - DNA, 30 bp, Artificial Sequence
  Synthetic oligonucleotide
gcgtgtaatcaaagcgccggtggacaacag

SEQ ID NO: 163269 - DNA, 30 bp, Artificial Sequence
  Synthetic oligonucleotide
tgacacgcgaatatgatcgcgttacaacag

SEQ ID NO: 163270 - DNA, 30 bp, Artificial Sequence
  Synthetic oligonucleotide
agggttgtcatgtggtatcgatcccaacag

SEQ ID NO: 163271 - DNA, 30 bp, Artificial Sequence
  Synthetic oligonucleotide
ctgtatacgtgtaccaattcgtcccaacag

SEQ ID NO: 163272 - DNA, 30 bp, Artificial Sequence
  Synthetic oligonucleotide
ttgtctcgaaggctatgagatggccaacag

SEQ ID NO: 163273 - DNA, 30 bp, Artificial Sequence
  Synthetic oligonucleotide
gtcacttagctcacgccatgcgggcaacag

SEQ ID NO: 163274 - DNA, 30 bp, Artificial Sequence
  Synthetic oligonucleotide
gtcataggagtctggctacacttgcaacag

SEQ ID NO: 163275 - DNA, 30 bp, Artificial Sequence
  Synthetic oligonucleotide
ttgagaaaaaggggttagatcagagaacag

SEQ ID NO: 163276 - DNA, 30 bp, Artificial Sequence
  Synthetic oligonucleotide
gtgaattgtagccacttttcgctagaacag

SEQ ID NO: 163277 - DNA, 30 bp, Artificial Sequence
  Synthetic oligonucleotide
gctatattagagaagtgccgtatcgaacag

SEQ ID NO: 163278 - DNA, 30 bp, Artificial Sequence
  Synthetic oligonucleotide
gaagatatacccacggttattctcgaacag

SEQ ID NO: 163279 - DNA, 30 bp, Artificial Sequence
  Synthetic oligonucleotide
gtgcactggagagacgccacagcggaacag

SEQ ID NO: 163280 - DNA, 30 bp, Artificial Sequence
  Synthetic oligonucleotide
acttacagacctgctagagggcgggaacag

SEQ ID NO: 163281 - DNA, 30 bp, Artificial Sequence
  Synthetic oligonucleotide
catcaatccagacgttgtggtttggaacag

SEQ ID NO: 163282 - DNA, 30 bp, Artificial Sequence
  Synthetic oligonucleotide
tggcgttattcgcacggcagtagtgaacag

SEQ ID NO: 163283 - DNA, 30 bp, Artificial Sequence
  Synthetic oligonucleotide
aggacggcacacctctggcgggcataacag

SEQ ID NO: 163284 - DNA, 30 bp, Artificial Sequence
  Synthetic oligonucleotide
acctgacgtccatcagcgtagtcataacag

SEQ ID NO: 163285 - DNA, 30 bp, Artificial Sequence
  Synthetic oligonucleotide
agcaaaaggaatactagaactttataacag

SEQ ID NO: 163286 - DNA, 30 bp, Artificial Sequence
  Synthetic oligonucleotide
gcacagccaactgtgttctttgcctaacag

SEQ ID NO: 163287 - DNA, 30 bp, Artificial Sequence
  Synthetic oligonucleotide
attaaggtatgtgtgtgggcccgctaacag

SEQ ID NO: 163288 - DNA, 30 bp, Artificial Sequence
  Synthetic oligonucleotide
ccaaatggttcatgtatgagttagtaacag

SEQ ID NO: 163289 - DNA, 30 bp, Artificial Sequence
  Synthetic oligonucleotide
tgtgtctattgaaagagtggttagtaacag

SEQ ID NO: 163290 - DNA, 30 bp, Artificial Sequence
  Synthetic oligonucleotide
tatccttatggatcgggaataacgtaacag

SEQ ID NO: 163291 - DNA, 30 bp, Artificial Sequence
  Synthetic oligonucleotide
ggaagtgagtaactgtggagtggcacacag

SEQ ID NO: 163292 - DNA, 30 bp, Artificial Sequence
  Synthetic oligonucleotide
aggggctgatgtttacgcgtactcacacag

SEQ ID NO: 163293 - DNA, 30 bp, Artificial Sequence
  Synthetic oligonucleotide
agaaggaacgctatcatgatgttgacacag

SEQ ID NO: 163294 - DNA, 29 bp, Artificial Sequence
  Synthetic oligonucleotide
gggctattggtccagtgactcgcccacag

SEQ ID NO: 163295 - DNA, 30 bp, Artificial Sequence
  Synthetic oligonucleotide
tcctgggtttcacaaaggaccgctccacag

SEQ ID NO: 163296 - DNA, 30 bp, Artificial Sequence
  Synthetic oligonucleotide
atagtggctcacttcctttaaagtccacag

SEQ ID NO: 163297 - DNA, 30 bp, Artificial Sequence
  Synthetic oligonucleotide
cacgaccggaagactccatggacagcacag

SEQ ID NO: 163298 - DNA, 30 bp, Artificial Sequence
  Synthetic oligonucleotide
gccgggacgaaggtccactactgcgcacag

SEQ ID NO: 163299 - DNA, 30 bp, Artificial Sequence
  Synthetic oligonucleotide
tcaggggctagtttgggggatacggcacag

SEQ ID NO: 163300 - DNA, 31 bp, Artificial Sequence
  Synthetic oligonucleotide
tctctaagggtttatacagaccggggcacag

SEQ ID NO: 163301 - DNA, 30 bp, Artificial Sequence
  Synthetic oligonucleotide
ccaccaggcctgaaaagacgaactgcacag

SEQ ID NO: 163302 - DNA, 30 bp, Artificial Sequence
  Synthetic oligonucleotide
tccgcggaaaagcatcctccgccatcacag

SEQ ID NO: 163303 - DNA, 30 bp, Artificial Sequence
  Synthetic oligonucleotide
gtccaagactgggctcactttacgtcacag

SEQ ID NO: 163304 - DNA, 30 bp, Artificial Sequence
  Synthetic oligonucleotide
tacgaggatatgtgatcaacctcgtcacag

SEQ ID NO: 163305 - DNA, 30 bp, Artificial Sequence
  Synthetic oligonucleotide
agggtcgctaaaagacccggaaggtcacag

SEQ ID NO: 163306 - DNA, 30 bp, Artificial Sequence
  Synthetic oligonucleotide
tctgaaggttggcacgtgtgaatgtcacag

SEQ ID NO: 163307 - DNA, 30 bp, Artificial Sequence
  Synthetic oligonucleotide
caacagaccatatttaactagttgtcacag

SEQ ID NO: 163308 - DNA, 30 bp, Artificial Sequence
  Synthetic oligonucleotide
tatgtccgggcataatacacgcgaagacag

SEQ ID NO: 163309 - DNA, 30 bp, Artificial Sequence
  Synthetic oligonucleotide
ctaaccatagtttagataatcaacagacag

SEQ ID NO: 163310 - DNA, 30 bp, Artificial Sequence
  Synthetic oligonucleotide
ctaagggaacgcctcatacgcaaccgacag

SEQ ID NO: 163311 - DNA, 30 bp, Artificial Sequence
  Synthetic oligonucleotide
acttatgttgcaactccgctgtgccgacag

SEQ ID NO: 163312 - DNA, 30 bp, Artificial Sequence
  Synthetic oligonucleotide
tctacaccgtagtggtcttaggcgcgacag

SEQ ID NO: 163313 - DNA, 30 bp, Artificial Sequence
  Synthetic oligonucleotide
cagcggcgtgccgggggactcgggcgacag

SEQ ID NO: 163314 - DNA, 30 bp, Artificial Sequence
  Synthetic oligonucleotide
gaagtgtaaacccggccagctggaggacag

SEQ ID NO: 163315 - DNA, 30 bp, Artificial Sequence
  Synthetic oligonucleotide
tctctgcgaaacccgggttgaaatggacag

SEQ ID NO: 163316 - DNA, 30 bp, Artificial Sequence
  Synthetic oligonucleotide
gtgcgcggaaacgtctatccgactggacag

SEQ ID NO: 163317 - DNA, 30 bp, Artificial Sequence
  Synthetic oligonucleotide
acagtgtggtgcatggacagatgtggacag

SEQ ID NO: 163318 - DNA, 30 bp, Artificial Sequence
  Synthetic oligonucleotide
tgctggctactcgtcaagacacactgacag

SEQ ID NO: 163319 - DNA, 30 bp, Artificial Sequence
  Synthetic oligonucleotide
atacgctaaataagtcggaaccactgacag

SEQ ID NO: 163320 - DNA, 30 bp, Artificial Sequence
  Synthetic oligonucleotide
gtgcgttggtacatgagtgtagcgatacag

SEQ ID NO: 163321 - DNA, 30 bp, Artificial Sequence
  Synthetic oligonucleotide
cgaatgtgaagtaagttttgtgggatacag

SEQ ID NO: 163322 - DNA, 30 bp, Artificial Sequence
  Synthetic oligonucleotide
gtgctgagcggctaagcccctaatatacag

SEQ ID NO: 163323 - DNA, 30 bp, Artificial Sequence
  Synthetic oligonucleotide
taaccaatcgtggcgaagtacagtatacag

SEQ ID NO: 163324 - DNA, 30 bp, Artificial Sequence
  Synthetic oligonucleotide
ggcggctttgtccaaccactctccctacag

SEQ ID NO: 163325 - DNA, 30 bp, Artificial Sequence
  Synthetic oligonucleotide
ttacagggttccaccaagtagttcctacag

SEQ ID NO: 163326 - DNA, 30 bp, Artificial Sequence
  Synthetic oligonucleotide
gcagtgcgaacaacaatagtgtgtctacag

SEQ ID NO: 163327 - DNA, 30 bp, Artificial Sequence
  Synthetic oligonucleotide
ggacccaatcgtctttgggacttagtacag

SEQ ID NO: 163328 - DNA, 30 bp, Artificial Sequence
  Synthetic oligonucleotide
agttccattttcatggaaaggaccgtacag

SEQ ID NO: 163329 - DNA, 30 bp, Artificial Sequence
  Synthetic oligonucleotide
tgagatagagaacccgtaccaaaggtacag

SEQ ID NO: 163330 - DNA, 30 bp, Artificial Sequence
  Synthetic oligonucleotide
tgtatcgaatacagtgcatccttggtacag

SEQ ID NO: 163331 - DNA, 30 bp, Artificial Sequence
  Synthetic oligonucleotide
gtcaagagggtcacgaacgagaatgtacag

SEQ ID NO: 163332 - DNA, 30 bp, Artificial Sequence
  Synthetic oligonucleotide
ggggccaaatccgttggtttgggattacag

SEQ ID NO: 163333 - DNA, 30 bp, Artificial Sequence
  Synthetic oligonucleotide
gaggacgacacaatattcatgaaaaaccag

SEQ ID NO: 163334 - DNA, 30 bp, Artificial Sequence
  Synthetic oligonucleotide
tatccggcgagatattttcctaaaaaccag

SEQ ID NO: 163335 - DNA, 30 bp, Artificial Sequence
  Synthetic oligonucleotide
acagaataaagggccacgaccctgaaccag

SEQ ID NO: 163336 - DNA, 30 bp, Artificial Sequence
  Synthetic oligonucleotide
tctggctcgcttttgttagccgataaccag

SEQ ID NO: 163337 - DNA, 30 bp, Artificial Sequence
  Synthetic oligonucleotide
aacttgctgtcacaagtggctattaaccag

SEQ ID NO: 163338 - DNA, 30 bp, Artificial Sequence
  Synthetic oligonucleotide
gcaagggggacagcctcggggcaccaccag

SEQ ID NO: 163339 - DNA, 30 bp, Artificial Sequence
  Synthetic oligonucleotide
cgtgtcgttcgtaccacggaagaagaccag

SEQ ID NO: 163340 - DNA, 30 bp, Artificial Sequence
  Synthetic oligonucleotide
aacgaaggccggcttcggattcatgaccag

SEQ ID NO: 163341 - DNA, 30 bp, Artificial Sequence
  Synthetic oligonucleotide
ggaagtaataattgttagcatccataccag

SEQ ID NO: 163342 - DNA, 30 bp, Artificial Sequence
  Synthetic oligonucleotide
aaccagtcgaagaccatgaccggataccag

SEQ ID NO: 163343 - DNA, 30 bp, Artificial Sequence
  Synthetic oligonucleotide
ctaaggactcatgtaagcaatacgtaccag

SEQ ID NO: 163344 - DNA, 30 bp, Artificial Sequence
  Synthetic oligonucleotide
gggggggtagtgtaccaccttctttaccag

SEQ ID NO: 163345 - DNA, 30 bp, Artificial Sequence
  Synthetic oligonucleotide
gtcgacataggaagtctggaattaacccag

SEQ ID NO: 163346 - DNA, 30 bp, Artificial Sequence
  Synthetic oligonucleotide
ctcagacggcttaattaatcgtatacccag

SEQ ID NO: 163347 - DNA, 30 bp, Artificial Sequence
  Synthetic oligonucleotide
atgagaaaggagacaccacccagtacccag

SEQ ID NO: 163348 - DNA, 30 bp, Artificial Sequence
  Synthetic oligonucleotide
ggtgtcatgtgtttggctaagtgtacccag

SEQ ID NO: 163349 - DNA, 30 bp, Artificial Sequence
  Synthetic oligonucleotide
agaatctagaatcatcgggcccaaccccag

SEQ ID NO: 163350 - DNA, 30 bp, Artificial Sequence
  Synthetic oligonucleotide
ttaactctgcgggttgagctagtcccccag

SEQ ID NO: 163351 - DNA, 30 bp, Artificial Sequence
  Synthetic oligonucleotide
taatgcaggaggccgctagccgacgcccag

SEQ ID NO: 163352 - DNA, 30 bp, Artificial Sequence
  Synthetic oligonucleotide
cttcgcttctagctttccggaaaggcccag

SEQ ID NO: 163353 - DNA, 30 bp, Artificial Sequence
  Synthetic oligonucleotide
gagacggaagagatgtccttgtcggcccag

SEQ ID NO: 163354 - DNA, 30 bp, Artificial Sequence
  Synthetic oligonucleotide
ttagccacgttgcaaagctaagattcccag

SEQ ID NO: 163355 - DNA, 30 bp, Artificial Sequence
  Synthetic oligonucleotide
cacgaggtgcaacggccgtaatattcccag

SEQ ID NO: 163356 - DNA, 30 bp, Artificial Sequence
  Synthetic oligonucleotide
aggacacgttcgatttaccacacaagccag

SEQ ID NO: 163357 - DNA, 30 bp, Artificial Sequence
  Synthetic oligonucleotide
gtacccataaaaatgtatgcggacagccag

SEQ ID NO: 163358 - DNA, 30 bp, Artificial Sequence
  Synthetic oligonucleotide
agtgaccacaatgccggatcgggtagccag

SEQ ID NO: 163359 - DNA, 31 bp, Artificial Sequence
  Synthetic oligonucleotide
ggcagggagggggcttgatcgttgtagccag

SEQ ID NO: 163360 - DNA, 29 bp, Artificial Sequence
  Synthetic oligonucleotide
agatctaacgttatgtaataattagccag

SEQ ID NO: 163361 - DNA, 30 bp, Artificial Sequence
  Synthetic oligonucleotide
gttaagctgaatttatgttcgagccgccag

SEQ ID NO: 163362 - DNA, 30 bp, Artificial Sequence
  Synthetic oligonucleotide
gtacagggcgcagggttatgcatccgccag

SEQ ID NO: 163363 - DNA, 30 bp, Artificial Sequence
  Synthetic oligonucleotide
tgcgggtgcagtttcaatgtcgtgcgccag

SEQ ID NO: 163364 - DNA, 30 bp, Artificial Sequence
  Synthetic oligonucleotide
tcggcgtgcgggctgtaaaaaacaggccag

SEQ ID NO: 163365 - DNA, 30 bp, Artificial Sequence
  Synthetic oligonucleotide
ttatttagtgtcgtaaattgtgacggccag

SEQ ID NO: 163366 - DNA, 30 bp, Artificial Sequence
  Synthetic oligonucleotide
aggaggggacgtatgagtgaggcgggccag

SEQ ID NO: 163367 - DNA, 30 bp, Artificial Sequence
  Synthetic oligonucleotide
cgagaagcgctgggtgacagttgtggccag

SEQ ID NO: 163368 - DNA, 30 bp, Artificial Sequence
  Synthetic oligonucleotide
aagtggtagtagaaggccggcccgtgccag

SEQ ID NO: 163369 - DNA, 30 bp, Artificial Sequence
  Synthetic oligonucleotide
ctacgcctcagacatgtgtgcgtcatccag

SEQ ID NO: 163370 - DNA, 30 bp, Artificial Sequence
  Synthetic oligonucleotide
accgcccatgtgagaaattcctcgatccag

SEQ ID NO: 163371 - DNA, 30 bp, Artificial Sequence
  Synthetic oligonucleotide
taggtgtggattacaccaggatatatccag

SEQ ID NO: 163372 - DNA, 30 bp, Artificial Sequence
  Synthetic oligonucleotide
agtgcgtctaactgtagggagtccctccag

SEQ ID NO: 163373 - DNA, 30 bp, Artificial Sequence
  Synthetic oligonucleotide
gtaagccaattcgacgttacgtgcctccag

SEQ ID NO: 163374 - DNA, 30 bp, Artificial Sequence
  Synthetic oligonucleotide
ttattgggctggtgcagatatatcctccag

SEQ ID NO: 163375 - DNA, 30 bp, Artificial Sequence
  Synthetic oligonucleotide
agttattgtcactcagaggctagtctccag

SEQ ID NO: 163376 - DNA, 30 bp, Artificial Sequence
  Synthetic oligonucleotide
accgactaggcgcacgctttgcaagtccag

SEQ ID NO: 163377 - DNA, 30 bp, Artificial Sequence
  Synthetic oligonucleotide
caacccacatgtttataacggcaggtccag

SEQ ID NO: 163378 - DNA, 30 bp, Artificial Sequence
  Synthetic oligonucleotide
gcaaagggtacgctactattgtttttccag

SEQ ID NO: 163379 - DNA, 30 bp, Artificial Sequence
  Synthetic oligonucleotide
cctgtaatgttatcatgcgcctaaaagcag

SEQ ID NO: 163380 - DNA, 30 bp, Artificial Sequence
  Synthetic oligonucleotide
gcgatgcataaatttctatattaaaagcag

SEQ ID NO: 163381 - DNA, 30 bp, Artificial Sequence
  Synthetic oligonucleotide
aaaggctcggactgtagtgcccccaagcag

SEQ ID NO: 163382 - DNA, 30 bp, Artificial Sequence
  Synthetic oligonucleotide
gtgcgcagagttcacccctaactcaagcag

SEQ ID NO: 163383 - DNA, 30 bp, Artificial Sequence
  Synthetic oligonucleotide
cgtcttgaaattggacccaacacgaagcag

SEQ ID NO: 163384 - DNA, 30 bp, Artificial Sequence
  Synthetic oligonucleotide
cctttgagttcttgggacatttataagcag

SEQ ID NO: 163385 - DNA, 30 bp, Artificial Sequence
  Synthetic oligonucleotide
gccgaacggctcctcattaatggtaagcag

SEQ ID NO: 163386 - DNA, 30 bp, Artificial Sequence
  Synthetic oligonucleotide
taaaacttatatatgtgggttatacagcag

SEQ ID NO: 163387 - DNA, 30 bp, Artificial Sequence
  Synthetic oligonucleotide
gcagactatcgaagttattgtaaccagcag

SEQ ID NO: 163388 - DNA, 30 bp, Artificial Sequence
  Synthetic oligonucleotide
ctgtacgtacggtaaaaggccttccagcag

SEQ ID NO: 163389 - DNA, 30 bp, Artificial Sequence
  Synthetic oligonucleotide
gacgatcatccttctcggtcgtatcagcag

SEQ ID NO: 163390 - DNA, 30 bp, Artificial Sequence
  Synthetic oligonucleotide
gagtcgcccgatattattgcggcagagcag

SEQ ID NO: 163391 - DNA, 30 bp, Artificial Sequence
  Synthetic oligonucleotide
caggagggtcatgttaataaaggagagcag

SEQ ID NO: 163392 - DNA, 30 bp, Artificial Sequence
  Synthetic oligonucleotide
gcgatttggtgtcttaagaaaggcgagcag

SEQ ID NO: 163393 - DNA, 30 bp, Artificial Sequence
  Synthetic oligonucleotide
cctatgacgtcttaagtgatttaggagcag

SEQ ID NO: 163394 - DNA, 30 bp, Artificial Sequence
  Synthetic oligonucleotide
gatgacgggattcccacggcctttgagcag

SEQ ID NO: 163395 - DNA, 30 bp, Artificial Sequence
  Synthetic oligonucleotide
agtttaggaggccagagagcattatagcag

SEQ ID NO: 163396 - DNA, 30 bp, Artificial Sequence
  Synthetic oligonucleotide
ctaaggcttgcagcgcccatcacgccgcag

SEQ ID NO: 163397 - DNA, 30 bp, Artificial Sequence
  Synthetic oligonucleotide
cgagtgtgtcgtcggttctgcctgccgcag

SEQ ID NO: 163398 - DNA, 28 bp, Artificial Sequence
  Synthetic oligonucleotide
ggggatattcaccaggtgatttccgcag

SEQ ID NO: 163399 - DNA, 30 bp, Artificial Sequence
  Synthetic oligonucleotide
agtaactacagccgggctcgttgagcgcag

SEQ ID NO: 163400 - DNA, 30 bp, Artificial Sequence
  Synthetic oligonucleotide
gtacatcaaatatgagtcgcgctcgcgcag

SEQ ID NO: 163401 - DNA, 30 bp, Artificial Sequence
  Synthetic oligonucleotide
tgactaccgagagggacttttcgtgcgcag

SEQ ID NO: 163402 - DNA, 30 bp, Artificial Sequence
  Synthetic oligonucleotide
aggtatgttgtgattaatgttaaatcgcag

SEQ ID NO: 163403 - DNA, 30 bp, Artificial Sequence
  Synthetic oligonucleotide
gtcaaaagtctctgagaacgaacatcgcag

SEQ ID NO: 163404 - DNA, 30 bp, Artificial Sequence
  Synthetic oligonucleotide
aggttggtcaacggtgttataggctcgcag

SEQ ID NO: 163405 - DNA, 30 bp, Artificial Sequence
  Synthetic oligonucleotide
cgggatcgcggcaaaggtcatcggtcgcag

SEQ ID NO: 163406 - DNA, 30 bp, Artificial Sequence
  Synthetic oligonucleotide
ggcggtcacgatgaataacttcgttcgcag

SEQ ID NO: 163407 - DNA, 30 bp, Artificial Sequence
  Synthetic oligonucleotide
gttgtgccatgtgtactgcgttcaaggcag

SEQ ID NO: 163408 - DNA, 30 bp, Artificial Sequence
  Synthetic oligonucleotide
gcagtagtaatggaccggaatgtcaggcag

SEQ ID NO: 163409 - DNA, 30 bp, Artificial Sequence
  Synthetic oligonucleotide
ttcgactggaaggcggcagatttcaggcag

SEQ ID NO: 163410 - DNA, 30 bp, Artificial Sequence
  Synthetic oligonucleotide
gaagttgatgtggagtgttcccggaggcag

SEQ ID NO: 163411 - DNA, 30 bp, Artificial Sequence
  Synthetic oligonucleotide
taaggctagttaaccagccagtctaggcag

SEQ ID NO: 163412 - DNA, 30 bp, Artificial Sequence
  Synthetic oligonucleotide
acaccgccaagaactctcgatagtaggcag

SEQ ID NO: 163413 - DNA, 30 bp, Artificial Sequence
  Synthetic oligonucleotide
acataaataaaatcagcacggaaccggcag

SEQ ID NO: 163414 - DNA, 30 bp, Artificial Sequence
  Synthetic oligonucleotide
cattattatgagactaacggacggcggcag

SEQ ID NO: 163415 - DNA, 30 bp, Artificial Sequence
  Synthetic oligonucleotide
tatcggttatgggacgtgcgcctgcggcag

SEQ ID NO: 163416 - DNA, 30 bp, Artificial Sequence
  Synthetic oligonucleotide
accgcagggataagatcacgagtggggcag

SEQ ID NO: 163417 - DNA, 30 bp, Artificial Sequence
  Synthetic oligonucleotide
aagaacagttgatagttttcatgtgggcag

SEQ ID NO: 163418 - DNA, 30 bp, Artificial Sequence
  Synthetic oligonucleotide
gcatcactggagaaagaacctaaatggcag

SEQ ID NO: 163419 - DNA, 30 bp, Artificial Sequence
  Synthetic oligonucleotide
aggcttgagtccggaggatcaatatggcag

SEQ ID NO: 163420 - DNA, 30 bp, Artificial Sequence
  Synthetic oligonucleotide
ttgctacgggcttatgagggtaattggcag

SEQ ID NO: 163421 - DNA, 30 bp, Artificial Sequence
  Synthetic oligonucleotide
agcatcaaactgataactcatcaaatgcag

SEQ ID NO: 163422 - DNA, 30 bp, Artificial Sequence
  Synthetic oligonucleotide
caagacagcctgcataaccagagaatgcag

SEQ ID NO: 163423 - DNA, 30 bp, Artificial Sequence
  Synthetic oligonucleotide
atttcaggaatcaggctccagcgcatgcag

SEQ ID NO: 163424 - DNA, 30 bp, Artificial Sequence
  Synthetic oligonucleotide
gggttcgggataaacgcattgtagatgcag

SEQ ID NO: 163425 - DNA, 30 bp, Artificial Sequence
  Synthetic oligonucleotide
atatcaaccgtttactgaccttatatgcag

SEQ ID NO: 163426 - DNA, 30 bp, Artificial Sequence
  Synthetic oligonucleotide
cggctagagcgtaagtgtcactgcctgcag

SEQ ID NO: 163427 - DNA, 30 bp, Artificial Sequence
  Synthetic oligonucleotide
taaggacaggacggtaaccgcctgctgcag

SEQ ID NO: 163428 - DNA, 30 bp, Artificial Sequence
  Synthetic oligonucleotide
gacataggggcgaccctcgggcacgtgcag

SEQ ID NO: 163429 - DNA, 30 bp, Artificial Sequence
  Synthetic oligonucleotide
ctgaggttaaacgatgggatggacgtgcag

SEQ ID NO: 163430 - DNA, 30 bp, Artificial Sequence
  Synthetic oligonucleotide
tcacgggaagttcatgcaggattggtgcag

SEQ ID NO: 163431 - DNA, 30 bp, Artificial Sequence
  Synthetic oligonucleotide
tagtgtagaacgagtcctcagtcgaatcag

SEQ ID NO: 163432 - DNA, 30 bp, Artificial Sequence
  Synthetic oligonucleotide
ttaaatcatctgtcgataaatctccatcag

SEQ ID NO: 163433 - DNA, 30 bp, Artificial Sequence
  Synthetic oligonucleotide
tggggtgtgcttgcaagtcgccagcatcag

SEQ ID NO: 163434 - DNA, 30 bp, Artificial Sequence
  Synthetic oligonucleotide
atccgtaatcgtaagaaaagcaaggatcag

SEQ ID NO: 163435 - DNA, 30 bp, Artificial Sequence
  Synthetic oligonucleotide
ggcgttcttgcgacaccccttcaggatcag

SEQ ID NO: 163436 - DNA, 30 bp, Artificial Sequence
  Synthetic oligonucleotide
gaataaagatccatggcgctgagtgatcag

SEQ ID NO: 163437 - DNA, 30 bp, Artificial Sequence
  Synthetic oligonucleotide
tcacacccgcagcgccacgcggggtatcag

SEQ ID NO: 163438 - DNA, 30 bp, Artificial Sequence
  Synthetic oligonucleotide
gggtccgagtcaggggacgagtaaactcag

SEQ ID NO: 163439 - DNA, 30 bp, Artificial Sequence
  Synthetic oligonucleotide
atattcaatgcaaaaatcgaacccactcag

SEQ ID NO: 163440 - DNA, 30 bp, Artificial Sequence
  Synthetic oligonucleotide
cgaggtggcccaagacgagcttgcactcag

SEQ ID NO: 163441 - DNA, 30 bp, Artificial Sequence
  Synthetic oligonucleotide
tagctacgcgtcacggtgtttgggactcag

SEQ ID NO: 163442 - DNA, 30 bp, Artificial Sequence
  Synthetic oligonucleotide
acccagcgattccgtacgtgtgttactcag

SEQ ID NO: 163443 - DNA, 30 bp, Artificial Sequence
  Synthetic oligonucleotide
ccgatagatgtgaacatatgcctccctcag

SEQ ID NO: 163444 - DNA, 30 bp, Artificial Sequence
  Synthetic oligonucleotide
aataaatagtaatctcccgggctccctcag

SEQ ID NO: 163445 - DNA, 30 bp, Artificial Sequence
  Synthetic oligonucleotide
atttcgctgactcgacatcatcgagctcag

SEQ ID NO: 163446 - DNA, 30 bp, Artificial Sequence
  Synthetic oligonucleotide
atggatctagatacaactggtatggctcag

SEQ ID NO: 163447 - DNA, 30 bp, Artificial Sequence
  Synthetic oligonucleotide
gcaatcgggtgagttcgttaaaaatctcag

SEQ ID NO: 163448 - DNA, 30 bp, Artificial Sequence
  Synthetic oligonucleotide
gtctattaagacggcctcaatctatctcag

SEQ ID NO: 163449 - DNA, 30 bp, Artificial Sequence
  Synthetic oligonucleotide
gacgttcaaagctagggtctgaggtctcag

SEQ ID NO: 163450 - DNA, 30 bp, Artificial Sequence
  Synthetic oligonucleotide
gtatctgtatccgcgaataaagattctcag

SEQ ID NO: 163451 - DNA, 30 bp, Artificial Sequence
  Synthetic oligonucleotide
agtaatgagcgacaagctactggttctcag

SEQ ID NO: 163452 - DNA, 30 bp, Artificial Sequence
  Synthetic oligonucleotide
ctacctcttcatggcgtctcgcaaagtcag

SEQ ID NO: 163453 - DNA, 30 bp, Artificial Sequence
  Synthetic oligonucleotide
cctggctacggtcaacttacctcaagtcag

SEQ ID NO: 163454 - DNA, 30 bp, Artificial Sequence
  Synthetic oligonucleotide
gccaagaagtgaacaggcgctaacagtcag

SEQ ID NO: 163455 - DNA, 30 bp, Artificial Sequence
  Synthetic oligonucleotide
ttacgagaaattagtcactgattacgtcag

SEQ ID NO: 163456 - DNA, 30 bp, Artificial Sequence
  Synthetic oligonucleotide
cttctgtccactcgttacagtacccgtcag

SEQ ID NO: 163457 - DNA, 30 bp, Artificial Sequence
  Synthetic oligonucleotide
aatacatccataggatagcgctagcgtcag

SEQ ID NO: 163458 - DNA, 30 bp, Artificial Sequence
  Synthetic oligonucleotide
tagcaaggggcagcccgccagcagggtcag

SEQ ID NO: 163459 - DNA, 30 bp, Artificial Sequence
  Synthetic oligonucleotide
ccttacgcgttaagtcatggggctggtcag

SEQ ID NO: 163460 - DNA, 30 bp, Artificial Sequence
  Synthetic oligonucleotide
cattggcaacacagcgcagcatgctgtcag

SEQ ID NO: 163461 - DNA, 30 bp, Artificial Sequence
  Synthetic oligonucleotide
tcaacgtccctatggccgcttcggtgtcag

SEQ ID NO: 163462 - DNA, 30 bp, Artificial Sequence
  Synthetic oligonucleotide
cccgttatttcacactatcaagtgtgtcag

SEQ ID NO: 163463 - DNA, 30 bp, Artificial Sequence
  Synthetic oligonucleotide
agaaaacggtcctaaaggccagattgtcag

SEQ ID NO: 163464 - DNA, 30 bp, Artificial Sequence
  Synthetic oligonucleotide
ttttcgacagggaacctgtcaaacattcag

SEQ ID NO: 163465 - DNA, 30 bp, Artificial Sequence
  Synthetic oligonucleotide
attaagaaattatgaaagacggtgattcag

SEQ ID NO: 163466 - DNA, 30 bp, Artificial Sequence
  Synthetic oligonucleotide
gatgagtttattccggactcacatattcag

SEQ ID NO: 163467 - DNA, 30 bp, Artificial Sequence
  Synthetic oligonucleotide
tgaaccgccggaatagtgcagtctattcag

SEQ ID NO: 163468 - DNA, 30 bp, Artificial Sequence
  Synthetic oligonucleotide
aagaggacgtagggtggtttcctccttcag

SEQ ID NO: 163469 - DNA, 30 bp, Artificial Sequence
  Synthetic oligonucleotide
acggcgtggacaaaagtcatgaagcttcag

SEQ ID NO: 163470 - DNA, 30 bp, Artificial Sequence
  Synthetic oligonucleotide
gcagagtaaattcccgtgtcgagtcttcag

SEQ ID NO: 163471 - DNA, 30 bp, Artificial Sequence
  Synthetic oligonucleotide
gctggcggcgagcatttcgatggagttcag

SEQ ID NO: 163472 - DNA, 30 bp, Artificial Sequence
  Synthetic oligonucleotide
ccgcaaatgcggtgtagaggtcgctttcag

SEQ ID NO: 163473 - DNA, 30 bp, Artificial Sequence
  Synthetic oligonucleotide
ttgaaggaccccggatgagactaaaaagag

SEQ ID NO: 163474 - DNA, 30 bp, Artificial Sequence
  Synthetic oligonucleotide
gtacggtccaggggtctctgaatgaaagag

SEQ ID NO: 163475 - DNA, 30 bp, Artificial Sequence
  Synthetic oligonucleotide
ttctgctgaaggtccccaatctataaagag

SEQ ID NO: 163476 - DNA, 30 bp, Artificial Sequence
  Synthetic oligonucleotide
caactgttctcctaccgcggatctaaagag

SEQ ID NO: 163477 - DNA, 28 bp, Artificial Sequence
  Synthetic oligonucleotide
ttaaaaacgtttgtcagactaacaagag

SEQ ID NO: 163478 - DNA, 30 bp, Artificial Sequence
  Synthetic oligonucleotide
tacttcgtaatcgcattacctctccaagag

SEQ ID NO: 163479 - DNA, 30 bp, Artificial Sequence
  Synthetic oligonucleotide
gtagatatggtaggtgttttattccaagag

SEQ ID NO: 163480 - DNA, 30 bp, Artificial Sequence
  Synthetic oligonucleotide
gatagattcgcggatacactataagaagag

SEQ ID NO: 163481 - DNA, 30 bp, Artificial Sequence
  Synthetic oligonucleotide
ttagcagcatgtaaagttaatcgagaagag

SEQ ID NO: 163482 - DNA, 30 bp, Artificial Sequence
  Synthetic oligonucleotide
taaatagcgcgttatctcattgaggaagag

SEQ ID NO: 163483 - DNA, 30 bp, Artificial Sequence
  Synthetic oligonucleotide
tagccagttgaactagaaccacgataagag

SEQ ID NO: 163484 - DNA, 30 bp, Artificial Sequence
  Synthetic oligonucleotide
gatataacagtgtctgacaggtcctaagag

SEQ ID NO: 163485 - DNA, 30 bp, Artificial Sequence
  Synthetic oligonucleotide
gttagctactttagtccgctagtctaagag

SEQ ID NO: 163486 - DNA, 30 bp, Artificial Sequence
  Synthetic oligonucleotide
atacgatgctctcgcctatgtgggtaagag

SEQ ID NO: 163487 - DNA, 30 bp, Artificial Sequence
  Synthetic oligonucleotide
caggtctggacccttagaatggattaagag

SEQ ID NO: 163488 - DNA, 30 bp, Artificial Sequence
  Synthetic oligonucleotide
tgcggaagagcttggggattgacttaagag

SEQ ID NO: 163489 - DNA, 30 bp, Artificial Sequence
  Synthetic oligonucleotide
tggctatccaccgttaaagatatttaagag

SEQ ID NO: 163490 - DNA, 30 bp, Artificial Sequence
  Synthetic oligonucleotide
caaacccttgatggctttgttggaacagag

SEQ ID NO: 163491 - DNA, 30 bp, Artificial Sequence
  Synthetic oligonucleotide
gggtcacggaattcttatttcgagacagag

SEQ ID NO: 163492 - DNA, 30 bp, Artificial Sequence
  Synthetic oligonucleotide
actcaactgtagctcgcagtttagacagag

SEQ ID NO: 163493 - DNA, 30 bp, Artificial Sequence
  Synthetic oligonucleotide
gctctacgacccgggaaggattcgacagag

SEQ ID NO: 163494 - DNA, 30 bp, Artificial Sequence
  Synthetic oligonucleotide
ggccggtgtgcctcctagaatcgtacagag

SEQ ID NO: 163495 - DNA, 30 bp, Artificial Sequence
  Synthetic oligonucleotide
aagaactgggctcaattctcgtaagcagag

SEQ ID NO: 163496 - DNA, 30 bp, Artificial Sequence
  Synthetic oligonucleotide
gtcgagcgcggcacagccatatgagcagag

SEQ ID NO: 163497 - DNA, 30 bp, Artificial Sequence
  Synthetic oligonucleotide
gaaggatgtggagggctaaggagcgcagag

SEQ ID NO: 163498 - DNA, 30 bp, Artificial Sequence
  Synthetic oligonucleotide
gcgcctgcgccaggtcagcgcaaggcagag

SEQ ID NO: 163499 - DNA, 30 bp, Artificial Sequence
  Synthetic oligonucleotide
cacggagatgtcgaagcatcatatgcagag

SEQ ID NO: 163500 - DNA, 30 bp, Artificial Sequence
  Synthetic oligonucleotide
gtaggttgtaccagttccaaggtatcagag

SEQ ID NO: 163501 - DNA, 30 bp, Artificial Sequence
  Synthetic oligonucleotide
atcgtagtcaacctacatcgtagttcagag

SEQ ID NO: 163502 - DNA, 30 bp, Artificial Sequence
  Synthetic oligonucleotide
gttgccagactcaagcaccagcgttcagag

SEQ ID NO: 163503 - DNA, 30 bp, Artificial Sequence
  Synthetic oligonucleotide
tgtggacttgacggtaattccggttcagag

SEQ ID NO: 163504 - DNA, 30 bp, Artificial Sequence
  Synthetic oligonucleotide
caatctaggctccggtacgactgttcagag

SEQ ID NO: 163505 - DNA, 30 bp, Artificial Sequence
  Synthetic oligonucleotide
tttcaagattgaaaatagctgtaacgagag

SEQ ID NO: 163506 - DNA, 30 bp, Artificial Sequence
  Synthetic oligonucleotide
gattgtttcgcggtcaatctggatcgagag

SEQ ID NO: 163507 - DNA, 30 bp, Artificial Sequence
  Synthetic oligonucleotide
gacaagtatgtacgttcacaatgtcgagag

SEQ ID NO: 163508 - DNA, 30 bp, Artificial Sequence
  Synthetic oligonucleotide
ctaagagacaggagtcgccgtgcaggagag

SEQ ID NO: 163509 - DNA, 30 bp, Artificial Sequence
  Synthetic oligonucleotide
ccttacgggcacgtgcgccaatcaggagag

SEQ ID NO: 163510 - DNA, 30 bp, Artificial Sequence
  Synthetic oligonucleotide
aataaatctgagagtgtattattaggagag

SEQ ID NO: 163511 - DNA, 30 bp, Artificial Sequence
  Synthetic oligonucleotide
ttagagtggaggacttcatgtcacggagag

SEQ ID NO: 163512 - DNA, 30 bp, Artificial Sequence
  Synthetic oligonucleotide
ggggggctactaaagtggatagccggagag

SEQ ID NO: 163513 - DNA, 30 bp, Artificial Sequence
  Synthetic oligonucleotide
aattcgacatgagatcgaacacatggagag

SEQ ID NO: 163514 - DNA, 30 bp, Artificial Sequence
  Synthetic oligonucleotide
gttagtgcgcatgccgtggctaaatgagag

SEQ ID NO: 163515 - DNA, 30 bp, Artificial Sequence
  Synthetic oligonucleotide
tcgcagtgagtaagtctccctgcgtgagag

SEQ ID NO: 163516 - DNA, 30 bp, Artificial Sequence
  Synthetic oligonucleotide
accctagtctgaattgtggctaggtgagag

SEQ ID NO: 163517 - DNA, 30 bp, Artificial Sequence
  Synthetic oligonucleotide
cacgacctgtacttattaggaacttgagag

SEQ ID NO: 163518 - DNA, 29 bp, Artificial Sequence
  Synthetic oligonucleotide
caaacatgtgggggaacactcaaatagag

SEQ ID NO: 163519 - DNA, 30 bp, Artificial Sequence
  Synthetic oligonucleotide
tggtaggccatcagttcactgtccatagag

SEQ ID NO: 163520 - DNA, 30 bp, Artificial Sequence
  Synthetic oligonucleotide
gttgcaggccaaatagcaggcgcgatagag

SEQ ID NO: 163521 - DNA, 30 bp, Artificial Sequence
  Synthetic oligonucleotide
tagactcacctaaccaatcgggcgatagag

SEQ ID NO: 163522 - DNA, 30 bp, Artificial Sequence
  Synthetic oligonucleotide
agtatggtaatgcttactccttggatagag

SEQ ID NO: 163523 - DNA, 30 bp, Artificial Sequence
  Synthetic oligonucleotide
ggctgagcaggactcatgcgaatgatagag

SEQ ID NO: 163524 - DNA, 30 bp, Artificial Sequence
  Synthetic oligonucleotide
tcaatgcgcgggttcgacagaaatatagag

SEQ ID NO: 163525 - DNA, 30 bp, Artificial Sequence
  Synthetic oligonucleotide
ataaaacctcagggaagcgttattatagag

SEQ ID NO: 163526 - DNA, 30 bp, Artificial Sequence
  Synthetic oligonucleotide
tcaaaatgcggaaagctctcgttactagag

SEQ ID NO: 163527 - DNA, 30 bp, Artificial Sequence
  Synthetic oligonucleotide
aagtaatacaatcttgtaaacggcctagag

SEQ ID NO: 163528 - DNA, 30 bp, Artificial Sequence
  Synthetic oligonucleotide
atgggcacatgattctctcggggcctagag

SEQ ID NO: 163529 - DNA, 30 bp, Artificial Sequence
  Synthetic oligonucleotide
ggtgtccaatccacagtctggtttctagag

SEQ ID NO: 163530 - DNA, 30 bp, Artificial Sequence
  Synthetic oligonucleotide
agcccccgtactcacatataacacgtagag

SEQ ID NO: 163531 - DNA, 30 bp, Artificial Sequence
  Synthetic oligonucleotide
taaatgttgtcggtggaaccttgcgtagag

SEQ ID NO: 163532 - DNA, 30 bp, Artificial Sequence
  Synthetic oligonucleotide
ggaatcaggcaaattaggaaaccggtagag

SEQ ID NO: 163533 - DNA, 30 bp, Artificial Sequence
  Synthetic oligonucleotide
aagcgaggcctgattataggcgcggtagag

SEQ ID NO: 163534 - DNA, 30 bp, Artificial Sequence
  Synthetic oligonucleotide
aacataacaccataaaacaacttggtagag

SEQ ID NO: 163535 - DNA, 30 bp, Artificial Sequence
  Synthetic oligonucleotide
gcgcgggcaaagacgtattgccctgtagag

SEQ ID NO: 163536 - DNA, 30 bp, Artificial Sequence
  Synthetic oligonucleotide
cagagtttagaacgggcgcgttctgtagag

SEQ ID NO: 163537 - DNA, 30 bp, Artificial Sequence
  Synthetic oligonucleotide
ccgagagaagtaacttttctttgtgtagag

SEQ ID NO: 163538 - DNA, 30 bp, Artificial Sequence
  Synthetic oligonucleotide
agccgggccgagcacggtgagacattagag

SEQ ID NO: 163539 - DNA, 30 bp, Artificial Sequence
  Synthetic oligonucleotide
tgcccttcccatgagcaccggatattagag

SEQ ID NO: 163540 - DNA, 30 bp, Artificial Sequence
  Synthetic oligonucleotide
aatgcatccatgcaaaacaaattgttagag

SEQ ID NO: 163541 - DNA, 30 bp, Artificial Sequence
  Synthetic oligonucleotide
ttggccgtaatagttacgcatcatttagag

SEQ ID NO: 163542 - DNA, 30 bp, Artificial Sequence
  Synthetic oligonucleotide
aggacggctctaggtaacgtccctttagag

SEQ ID NO: 163543 - DNA, 30 bp, Artificial Sequence
  Synthetic oligonucleotide
ggcggtattacttaaatcgccggaaacgag

SEQ ID NO: 163544 - DNA, 31 bp, Artificial Sequence
  Synthetic oligonucleotide
tttccagaagcacagagcgatattaaacgag

SEQ ID NO: 163545 - DNA, 30 bp, Artificial Sequence
  Synthetic oligonucleotide
atttataatcaacagcggtgaaggaacgag

SEQ ID NO: 163546 - DNA, 30 bp, Artificial Sequence
  Synthetic oligonucleotide
aagttcagatgggccttatttaggaacgag

SEQ ID NO: 163547 - DNA, 30 bp, Artificial Sequence
  Synthetic oligonucleotide
gtgaatgcggtcgtctacagatataacgag

SEQ ID NO: 163548 - DNA, 30 bp, Artificial Sequence
  Synthetic oligonucleotide
agctgggtccgataatgaaatctacacgag

SEQ ID NO: 163549 - DNA, 30 bp, Artificial Sequence
  Synthetic oligonucleotide
acgctaatcgcgagtctattagtacacgag

SEQ ID NO: 163550 - DNA, 30 bp, Artificial Sequence
  Synthetic oligonucleotide
aggcgccagtgtagctggttattccacgag

SEQ ID NO: 163551 - DNA, 30 bp, Artificial Sequence
  Synthetic oligonucleotide
ctcgtaccgatgttcatagggtagcacgag

SEQ ID NO: 163552 - DNA, 30 bp, Artificial Sequence
  Synthetic oligonucleotide
acaccattgttaggagagacaaggcacgag

SEQ ID NO: 163553 - DNA, 30 bp, Artificial Sequence
  Synthetic oligonucleotide
atcgcatggatccaaatggattggcacgag

SEQ ID NO: 163554 - DNA, 30 bp, Artificial Sequence
  Synthetic oligonucleotide
cattagatacgcgtaccatgaatgcacgag

SEQ ID NO: 163555 - DNA, 30 bp, Artificial Sequence
  Synthetic oligonucleotide
aagaccgggatgctgacgtatgatcacgag

SEQ ID NO: 163556 - DNA, 30 bp, Artificial Sequence
  Synthetic oligonucleotide
aatcctgatcataagcatttccacgacgag

SEQ ID NO: 163557 - DNA, 30 bp, Artificial Sequence
  Synthetic oligonucleotide
ggaccatgcactcctgtccaggtcgacgag

SEQ ID NO: 163558 - DNA, 30 bp, Artificial Sequence
  Synthetic oligonucleotide
cgcttaatcttcctggaggtaatggacgag

SEQ ID NO: 163559 - DNA, 30 bp, Artificial Sequence
  Synthetic oligonucleotide
tgcttgggtcgaggtgagtgcgtggacgag

SEQ ID NO: 163560 - DNA, 30 bp, Artificial Sequence
  Synthetic oligonucleotide
agatacgcaagatactgacatggtgacgag

SEQ ID NO: 163561 - DNA, 30 bp, Artificial Sequence
  Synthetic oligonucleotide
tcattccgctaacgacttcccgtgtacgag

SEQ ID NO: 163562 - DNA, 30 bp, Artificial Sequence
  Synthetic oligonucleotide
tagccgtaagcatatgcgaagtgaaccgag

SEQ ID NO: 163563 - DNA, 30 bp, Artificial Sequence
  Synthetic oligonucleotide
cctattgtataaatggctacctcgaccgag

SEQ ID NO: 163564 - DNA, 30 bp, Artificial Sequence
  Synthetic oligonucleotide
ggactgtcatgcattgtagatgttaccgag

SEQ ID NO: 163565 - DNA, 30 bp, Artificial Sequence
  Synthetic oligonucleotide
tagtgtaatcctggttgagcgaaacccgag

SEQ ID NO: 163566 - DNA, 30 bp, Artificial Sequence
  Synthetic oligonucleotide
cttcaaattatgtatggtaggcaccccgag

SEQ ID NO: 163567 - DNA, 30 bp, Artificial Sequence
  Synthetic oligonucleotide
gttggtagtctcgggcaagactaagccgag

SEQ ID NO: 163568 - DNA, 30 bp, Artificial Sequence
  Synthetic oligonucleotide
tataatcggggaagaagcaggagggccgag

SEQ ID NO: 163569 - DNA, 30 bp, Artificial Sequence
  Synthetic oligonucleotide
actttctggcacaaggcaccagttgccgag

SEQ ID NO: 163570 - DNA, 30 bp, Artificial Sequence
  Synthetic oligonucleotide
agtgacggtaaagccaagggggcatccgag

SEQ ID NO: 163571 - DNA, 30 bp, Artificial Sequence
  Synthetic oligonucleotide
atctacgcgaatatcgccttcaactccgag

SEQ ID NO: 163572 - DNA, 30 bp, Artificial Sequence
  Synthetic oligonucleotide
gcagatcagtgtctaagcattcactccgag

SEQ ID NO: 163573 - DNA, 30 bp, Artificial Sequence
  Synthetic oligonucleotide
gaggtagagagttcacgttaatgctccgag

SEQ ID NO: 163574 - DNA, 30 bp, Artificial Sequence
  Synthetic oligonucleotide
ccatcaacatctttgtctctcaagtccgag

SEQ ID NO: 163575 - DNA, 30 bp, Artificial Sequence
  Synthetic oligonucleotide
gatcaaacagcgtgctcgttaaggtccgag

SEQ ID NO: 163576 - DNA, 30 bp, Artificial Sequence
  Synthetic oligonucleotide
cagctattcctagtggagactcattccgag

SEQ ID NO: 163577 - DNA, 30 bp, Artificial Sequence
  Synthetic oligonucleotide
cggattcgatccacgtggcagaaaagcgag

SEQ ID NO: 163578 - DNA, 30 bp, Artificial Sequence
  Synthetic oligonucleotide
aatataatggaattggtggatgtgagcgag

SEQ ID NO: 163579 - DNA, 30 bp, Artificial Sequence
  Synthetic oligonucleotide
cggaatctgctccagagagcgaatagcgag

SEQ ID NO: 163580 - DNA, 30 bp, Artificial Sequence
  Synthetic oligonucleotide
agggtcgacgtgtcggcgccttcccgcgag

SEQ ID NO: 163581 - DNA, 30 bp, Artificial Sequence
  Synthetic oligonucleotide
attatcgtttggctgggtaaacgccgcgag

SEQ ID NO: 163582 - DNA, 30 bp, Artificial Sequence
  Synthetic oligonucleotide
gatactcagctagcatgcttgcatcgcgag

SEQ ID NO: 163583 - DNA, 30 bp, Artificial Sequence
  Synthetic oligonucleotide
accgcctatgtttctatagcagctcgcgag

SEQ ID NO: 163584 - DNA, 30 bp, Artificial Sequence
  Synthetic oligonucleotide
ctcaaatccgttcggggttttcgtcgcgag

SEQ ID NO: 163585 - DNA, 30 bp, Artificial Sequence
  Synthetic oligonucleotide
taccgcgacaagaatatctgccgtggcgag

SEQ ID NO: 163586 - DNA, 30 bp, Artificial Sequence
  Synthetic oligonucleotide
gcggaggattttgtaattcgtcactgcgag

SEQ ID NO: 163587 - DNA, 30 bp, Artificial Sequence
  Synthetic oligonucleotide
agctaacgagctagccaggaaggctgcgag

SEQ ID NO: 163588 - DNA, 30 bp, Artificial Sequence
  Synthetic oligonucleotide
gtaagttgaactggatcgagtcattgcgag

SEQ ID NO: 163589 - DNA, 30 bp, Artificial Sequence
  Synthetic oligonucleotide
cgggagtatgtgtgggtaaatacttgcgag

SEQ ID NO: 163590 - DNA, 30 bp, Artificial Sequence
  Synthetic oligonucleotide
attgcctcatcgcacttgcgcgacatcgag

SEQ ID NO: 163591 - DNA, 30 bp, Artificial Sequence
  Synthetic oligonucleotide
attgattatttggtcgctatatggatcgag

SEQ ID NO: 163592 - DNA, 30 bp, Artificial Sequence
  Synthetic oligonucleotide
accctcgtaccatccgtcggtcctatcgag

SEQ ID NO: 163593 - DNA, 30 bp, Artificial Sequence
  Synthetic oligonucleotide
cccatggtattctagatgatccgtctcgag

SEQ ID NO: 163594 - DNA, 30 bp, Artificial Sequence
  Synthetic oligonucleotide
tgcagattagcggtttccgacaaagtcgag

SEQ ID NO: 163595 - DNA, 30 bp, Artificial Sequence
  Synthetic oligonucleotide
gtcacgggaaatatcctgagaagggtcgag

SEQ ID NO: 163596 - DNA, 30 bp, Artificial Sequence
  Synthetic oligonucleotide
ctgtatagatccggctggtttcgggtcgag

SEQ ID NO: 163597 - DNA, 30 bp, Artificial Sequence
  Synthetic oligonucleotide
agagctttcgccgttgcattgattgtcgag

SEQ ID NO: 163598 - DNA, 30 bp, Artificial Sequence
  Synthetic oligonucleotide
gatactcacggctcttgagcaatcttcgag

SEQ ID NO: 163599 - DNA, 30 bp, Artificial Sequence
  Synthetic oligonucleotide
ccggtctcagccatgtgatgggtgttcgag

SEQ ID NO: 163600 - DNA, 30 bp, Artificial Sequence
  Synthetic oligonucleotide
tgattacacggggctcaaactcaaaaggag

SEQ ID NO: 163601 - DNA, 30 bp, Artificial Sequence
  Synthetic oligonucleotide
gcgctataccctctatccctaagcaaggag

SEQ ID NO: 163602 - DNA, 30 bp, Artificial Sequence
  Synthetic oligonucleotide
agcactcaagtgcgactggaactcaaggag

SEQ ID NO: 163603 - DNA, 30 bp, Artificial Sequence
  Synthetic oligonucleotide
ggtaagggcgatatggggcgatggaaggag

SEQ ID NO: 163604 - DNA, 30 bp, Artificial Sequence
  Synthetic oligonucleotide
tttacgcgtccgtggtgtgagggccaggag

SEQ ID NO: 163605 - DNA, 31 bp, Artificial Sequence
  Synthetic oligonucleotide
tcggttgatagggttatttggtgaagaggag

SEQ ID NO: 163606 - DNA, 30 bp, Artificial Sequence
  Synthetic oligonucleotide
gcccttgctagtaggcaaactgtagaggag

SEQ ID NO: 163607 - DNA, 29 bp, Artificial Sequence
  Synthetic oligonucleotide
acgatggcgtgtcacgcgaccgggaggag

SEQ ID NO: 163608 - DNA, 30 bp, Artificial Sequence
  Synthetic oligonucleotide
tggttgtgggctttgtacgggaaataggag

SEQ ID NO: 163609 - DNA, 30 bp, Artificial Sequence
  Synthetic oligonucleotide
gcctggaacggttgttttgatcgataggag

SEQ ID NO: 163610 - DNA, 30 bp, Artificial Sequence
  Synthetic oligonucleotide
gctgcaaaggaattaattattctataggag

SEQ ID NO: 163611 - DNA, 30 bp, Artificial Sequence
  Synthetic oligonucleotide
ggggcctggtcacatcatcaagactaggag

SEQ ID NO: 163612 - DNA, 30 bp, Artificial Sequence
  Synthetic oligonucleotide
ttatcggagagggtcacaagcctgtaggag

SEQ ID NO: 163613 - DNA, 31 bp, Artificial Sequence
  Synthetic oligonucleotide
tgtattcttggaggtctccggtgattaggag

SEQ ID NO: 163614 - DNA, 30 bp, Artificial Sequence
  Synthetic oligonucleotide
atctatgaacactgtatggagaaaacggag

SEQ ID NO: 163615 - DNA, 30 bp, Artificial Sequence
  Synthetic oligonucleotide
atatggatgttcgtaatacttaaaacggag

SEQ ID NO: 163616 - DNA, 30 bp, Artificial Sequence
  Synthetic oligonucleotide
tcccggattaatgtcgagcgtggaacggag

SEQ ID NO: 163617 - DNA, 29 bp, Artificial Sequence
  Synthetic oligonucleotide
agtagttgcattcctaatcccacacggag

SEQ ID NO: 163618 - DNA, 30 bp, Artificial Sequence
  Synthetic oligonucleotide
cagtaatatctcaagggcttagacacggag

SEQ ID NO: 163619 - DNA, 30 bp, Artificial Sequence
  Synthetic oligonucleotide
gtgaggctaccattggtacgagccacggag

SEQ ID NO: 163620 - DNA, 30 bp, Artificial Sequence
  Synthetic oligonucleotide
atcgggcgcaaatggtcatacaacccggag

SEQ ID NO: 163621 - DNA, 30 bp, Artificial Sequence
  Synthetic oligonucleotide
cgccggtgctcagttataatagtcccggag

SEQ ID NO: 163622 - DNA, 30 bp, Artificial Sequence
  Synthetic oligonucleotide
tcagggccgcgaagcgcgacaactccggag

SEQ ID NO: 163623 - DNA, 30 bp, Artificial Sequence
  Synthetic oligonucleotide
cgtacacgctgagcgtttcatagagcggag

SEQ ID NO: 163624 - DNA, 31 bp, Artificial Sequence
  Synthetic oligonucleotide
ggtcgccactcagttaatccaagatgcggag

SEQ ID NO: 163625 - DNA, 30 bp, Artificial Sequence
  Synthetic oligonucleotide
caagcgcccgcagttgaagccgatgcggag

SEQ ID NO: 163626 - DNA, 30 bp, Artificial Sequence
  Synthetic oligonucleotide
tagcagcgcattaatgaaacccgtgcggag

SEQ ID NO: 163627 - DNA, 30 bp, Artificial Sequence
  Synthetic oligonucleotide
agatagatacaggaatcaaaatgatcggag

SEQ ID NO: 163628 - DNA, 30 bp, Artificial Sequence
  Synthetic oligonucleotide
gcctaccgagatatcttgtagtagtcggag

SEQ ID NO: 163629 - DNA, 30 bp, Artificial Sequence
  Synthetic oligonucleotide
gctaatgcacgcacatgacaatggtcggag

SEQ ID NO: 163630 - DNA, 30 bp, Artificial Sequence
  Synthetic oligonucleotide
gccatagtcatgactgtcgcatggtcggag

SEQ ID NO: 163631 - DNA, 30 bp, Artificial Sequence
  Synthetic oligonucleotide
acggtggtgccatttgcgtttggttcggag

SEQ ID NO: 163632 - DNA, 30 bp, Artificial Sequence
  Synthetic oligonucleotide
atatggtgtccagagataggtttaagggag

SEQ ID NO: 163633 - DNA, 30 bp, Artificial Sequence
  Synthetic oligonucleotide
ttgatagctcctggactccgccccagggag

SEQ ID NO: 163634 - DNA, 30 bp, Artificial Sequence
  Synthetic oligonucleotide
ccggggaatgtaactccgtatacgagggag

SEQ ID NO: 163635 - DNA, 30 bp, Artificial Sequence
  Synthetic oligonucleotide
cgcaagtgaccctattgtatttatagggag

SEQ ID NO: 163636 - DNA, 30 bp, Artificial Sequence
  Synthetic oligonucleotide
tacctcatgtcgtgccttagtgctagggag

SEQ ID NO: 163637 - DNA, 30 bp, Artificial Sequence
  Synthetic oligonucleotide
agattgtggtatgtcgtaagctgtagggag

SEQ ID NO: 163638 - DNA, 30 bp, Artificial Sequence
  Synthetic oligonucleotide
tgaccaaatggctcaatgaatgttagggag

SEQ ID NO: 163639 - DNA, 30 bp, Artificial Sequence
  Synthetic oligonucleotide
caagtggaggcggagccactcatacgggag

SEQ ID NO: 163640 - DNA, 30 bp, Artificial Sequence
  Synthetic oligonucleotide
ggcaacggggctgacaaaaacttacgggag

SEQ ID NO: 163641 - DNA, 30 bp, Artificial Sequence
  Synthetic oligonucleotide
tcctcttgaccgagctaggacttgggggag

SEQ ID NO: 163642 - DNA, 30 bp, Artificial Sequence
  Synthetic oligonucleotide
ggcttatatgtgcgggtacatgagtgggag

SEQ ID NO: 163643 - DNA, 30 bp, Artificial Sequence
  Synthetic oligonucleotide
ttgggcacccttccaactccttagtgggag

SEQ ID NO: 163644 - DNA, 30 bp, Artificial Sequence
  Synthetic oligonucleotide
gaacaggttattggataaaaccggtgggag

SEQ ID NO: 163645 - DNA, 30 bp, Artificial Sequence
  Synthetic oligonucleotide
aactagtgtaatctagatctccggtgggag

SEQ ID NO: 163646 - DNA, 30 bp, Artificial Sequence
  Synthetic oligonucleotide
gggggctagggtccaaggtgattttgggag

SEQ ID NO: 163647 - DNA, 30 bp, Artificial Sequence
  Synthetic oligonucleotide
ccgcggtcaatgtcgtcttttgaaatggag

SEQ ID NO: 163648 - DNA, 30 bp, Artificial Sequence
  Synthetic oligonucleotide
tgtcgctaaatggtttaaggtgggatggag

SEQ ID NO: 163649 - DNA, 30 bp, Artificial Sequence
  Synthetic oligonucleotide
ttccgaccgatgatagtttgcacactggag

SEQ ID NO: 163650 - DNA, 30 bp, Artificial Sequence
  Synthetic oligonucleotide
gaactaagctgggttgtacccgcactggag

SEQ ID NO: 163651 - DNA, 30 bp, Artificial Sequence
  Synthetic oligonucleotide
agctatagggaggcgcgcgtggagctggag

SEQ ID NO: 163652 - DNA, 30 bp, Artificial Sequence
  Synthetic oligonucleotide
gcaataatccaacacatatgggcgctggag

SEQ ID NO: 163653 - DNA, 30 bp, Artificial Sequence
  Synthetic oligonucleotide
cactgccatggaaaagctacacgagtggag

SEQ ID NO: 163654 - DNA, 30 bp, Artificial Sequence
  Synthetic oligonucleotide
cataggtcccgaaccgtaaacacggtggag

SEQ ID NO: 163655 - DNA, 30 bp, Artificial Sequence
  Synthetic oligonucleotide
actcaatgatggagactttcgaatgtggag

SEQ ID NO: 163656 - DNA, 30 bp, Artificial Sequence
  Synthetic oligonucleotide
tgtggagtcactcttttgtagtatgtggag

SEQ ID NO: 163657 - DNA, 30 bp, Artificial Sequence
  Synthetic oligonucleotide
tctaaggtacggtatgagtctttattggag

SEQ ID NO: 163658 - DNA, 30 bp, Artificial Sequence
  Synthetic oligonucleotide
tactagatgaacacgactgggctcttggag

SEQ ID NO: 163659 - DNA, 30 bp, Artificial Sequence
  Synthetic oligonucleotide
gcgtagtgtctaaatatataagagttggag

SEQ ID NO: 163660 - DNA, 30 bp, Artificial Sequence
  Synthetic oligonucleotide
agaaaaaatctcaagcggtacaggttggag

SEQ ID NO: 163661 - DNA, 31 bp, Artificial Sequence
  Synthetic oligonucleotide
ttcgtttggggtgtggacagtccggttggag

SEQ ID NO: 163662 - DNA, 30 bp, Artificial Sequence
  Synthetic oligonucleotide
agttggggaaatgccaactagtggttggag

SEQ ID NO: 163663 - DNA, 30 bp, Artificial Sequence
  Synthetic oligonucleotide
tgtcacccgtcaggctgacaggtgttggag

SEQ ID NO: 163664 - DNA, 30 bp, Artificial Sequence
  Synthetic oligonucleotide
ttagagacaatagacggcagttatttggag

SEQ ID NO: 163665 - DNA, 30 bp, Artificial Sequence
  Synthetic oligonucleotide
atacgttatgagaagggcaaatttttggag

SEQ ID NO: 163666 - DNA, 30 bp, Artificial Sequence
  Synthetic oligonucleotide
aaagacaaattaaaactccggaaaaatgag

SEQ ID NO: 163667 - DNA, 30 bp, Artificial Sequence
  Synthetic oligonucleotide
gcacaattccaattaactgtaacaaatgag

SEQ ID NO: 163668 - DNA, 30 bp, Artificial Sequence
  Synthetic oligonucleotide
gacatgcgtccaggatatcatataaatgag

SEQ ID NO: 163669 - DNA, 30 bp, Artificial Sequence
  Synthetic oligonucleotide
acgttggactacagggcatcccccaatgag

SEQ ID NO: 163670 - DNA, 30 bp, Artificial Sequence
  Synthetic oligonucleotide
ggccgtgtactgaacgtcgttcggaatgag

SEQ ID NO: 163671 - DNA, 30 bp, Artificial Sequence
  Synthetic oligonucleotide
tgtcgctaggtccacgatgtcttgaatgag

SEQ ID NO: 163672 - DNA, 30 bp, Artificial Sequence
  Synthetic oligonucleotide
ccacgttttcacagcccgtggagacatgag

SEQ ID NO: 163673 - DNA, 30 bp, Artificial Sequence
  Synthetic oligonucleotide
caggaggttctgtagggagcacgacatgag

SEQ ID NO: 163674 - DNA, 30 bp, Artificial Sequence
  Synthetic oligonucleotide
acactcaggtgtgatctaatcatacatgag

SEQ ID NO: 163675 - DNA, 30 bp, Artificial Sequence
  Synthetic oligonucleotide
ccatgcctcggtatcgttcgctaccatgag

SEQ ID NO: 163676 - DNA, 30 bp, Artificial Sequence
  Synthetic oligonucleotide
gtctgaaagactaacacagaggcccatgag

SEQ ID NO: 163677 - DNA, 30 bp, Artificial Sequence
  Synthetic oligonucleotide
ccatcacaggcagcggggagtcttcatgag

SEQ ID NO: 163678 - DNA, 30 bp, Artificial Sequence
  Synthetic oligonucleotide
cactcctactgcataagcaagtacgatgag

SEQ ID NO: 163679 - DNA, 30 bp, Artificial Sequence
  Synthetic oligonucleotide
tacccgtaggttcaagggcgtgaggatgag

SEQ ID NO: 163680 - DNA, 30 bp, Artificial Sequence
  Synthetic oligonucleotide
ctacaaaccggtaataaccagctggatgag

SEQ ID NO: 163681 - DNA, 30 bp, Artificial Sequence
  Synthetic oligonucleotide
cctgcctcgatgagtcgatagtatgatgag

SEQ ID NO: 163682 - DNA, 30 bp, Artificial Sequence
  Synthetic oligonucleotide
gattgtggctgctaggatcactgtgatgag

SEQ ID NO: 163683 - DNA, 30 bp, Artificial Sequence
  Synthetic oligonucleotide
aagcttagatactacaccggcggatatgag

SEQ ID NO: 163684 - DNA, 30 bp, Artificial Sequence
  Synthetic oligonucleotide
gcagcacaatgtcgggacaatggatatgag

SEQ ID NO: 163685 - DNA, 30 bp, Artificial Sequence
  Synthetic oligonucleotide
ttctaaggggaccctacatcgctctatgag

SEQ ID NO: 163686 - DNA, 30 bp, Artificial Sequence
  Synthetic oligonucleotide
gttgtcactatgttgtggccaatttatgag

SEQ ID NO: 163687 - DNA, 30 bp, Artificial Sequence
  Synthetic oligonucleotide
gcgtcgagcagttttgttctatgaactgag

SEQ ID NO: 163688 - DNA, 30 bp, Artificial Sequence
  Synthetic oligonucleotide
tcggtataagagtggagagcaaccactgag

SEQ ID NO: 163689 - DNA, 30 bp, Artificial Sequence
  Synthetic oligonucleotide
gcaccgcaagaccgctctgtttggactgag

SEQ ID NO: 163690 - DNA, 30 bp, Artificial Sequence
  Synthetic oligonucleotide
agttttcgctgatccaatgtacatactgag

SEQ ID NO: 163691 - DNA, 30 bp, Artificial Sequence
  Synthetic oligonucleotide
ataaaacccccattcagcatacgtcctgag

SEQ ID NO: 163692 - DNA, 30 bp, Artificial Sequence
  Synthetic oligonucleotide
ctggatacgactggtctagcgattcctgag

SEQ ID NO: 163693 - DNA, 30 bp, Artificial Sequence
  Synthetic oligonucleotide
gtgtaactaagactgtgtgctctcgctgag

SEQ ID NO: 163694 - DNA, 30 bp, Artificial Sequence
  Synthetic oligonucleotide
ctggtcaggggccgtggtccgaaggctgag

SEQ ID NO: 163695 - DNA, 30 bp, Artificial Sequence
  Synthetic oligonucleotide
ggtaaacagttaagttcggctttggctgag

SEQ ID NO: 163696 - DNA, 30 bp, Artificial Sequence
  Synthetic oligonucleotide
tctatgaactggattgtaacggagtctgag

SEQ ID NO: 163697 - DNA, 30 bp, Artificial Sequence
  Synthetic oligonucleotide
tgtattaatggttgtgagtatgagtctgag

SEQ ID NO: 163698 - DNA, 30 bp, Artificial Sequence
  Synthetic oligonucleotide
ataatcctgtggcaacaccaaggttctgag

SEQ ID NO: 163699 - DNA, 30 bp, Artificial Sequence
  Synthetic oligonucleotide
catccacaaattcagcgtggtgcaagtgag

SEQ ID NO: 163700 - DNA, 30 bp, Artificial Sequence
  Synthetic oligonucleotide
cagtcgcatgtgtaggcaatgcagagtgag

SEQ ID NO: 163701 - DNA, 30 bp, Artificial Sequence
  Synthetic oligonucleotide
ctgatggctggggaagttaaatagagtgag

SEQ ID NO: 163702 - DNA, 30 bp, Artificial Sequence
  Synthetic oligonucleotide
agtggggttccccaaactgactatagtgag

SEQ ID NO: 163703 - DNA, 30 bp, Artificial Sequence
  Synthetic oligonucleotide
caggacattgatatatagtatactagtgag

SEQ ID NO: 163704 - DNA, 30 bp, Artificial Sequence
  Synthetic oligonucleotide
tgagcaggcggaggtatcaaatcaggtgag

SEQ ID NO: 163705 - DNA, 30 bp, Artificial Sequence
  Synthetic oligonucleotide
tcctgattctatttacgaacaagcggtgag

SEQ ID NO: 163706 - DNA, 30 bp, Artificial Sequence
  Synthetic oligonucleotide
atggcgccttcccaaactagaggcggtgag

SEQ ID NO: 163707 - DNA, 30 bp, Artificial Sequence
  Synthetic oligonucleotide
tccaggagcatagttccggccgagggtgag

SEQ ID NO: 163708 - DNA, 30 bp, Artificial Sequence
  Synthetic oligonucleotide
tgccattagagcgccgcgtttaatggtgag

SEQ ID NO: 163709 - DNA, 30 bp, Artificial Sequence
  Synthetic oligonucleotide
agcgtcggactaaaaccacttaattgtgag

SEQ ID NO: 163710 - DNA, 30 bp, Artificial Sequence
  Synthetic oligonucleotide
aggcctggtcacactacttgtggttgtgag

SEQ ID NO: 163711 - DNA, 30 bp, Artificial Sequence
  Synthetic oligonucleotide
gaagatcgtcgggctgtgttatgttgtgag

SEQ ID NO: 163712 - DNA, 30 bp, Artificial Sequence
  Synthetic oligonucleotide
taaatagctgcaacatcgacgaaaattgag

SEQ ID NO: 163713 - DNA, 30 bp, Artificial Sequence
  Synthetic oligonucleotide
atcagggatattactttacaataaattgag

SEQ ID NO: 163714 - DNA, 30 bp, Artificial Sequence
  Synthetic oligonucleotide
ttgctgtgtcccatggactcagacattgag

SEQ ID NO: 163715 - DNA, 30 bp, Artificial Sequence
  Synthetic oligonucleotide
agtcgggccctagaagactttgacattgag

SEQ ID NO: 163716 - DNA, 30 bp, Artificial Sequence
  Synthetic oligonucleotide
taatagggggcttggttaaggtatattgag

SEQ ID NO: 163717 - DNA, 30 bp, Artificial Sequence
  Synthetic oligonucleotide
cgtaatagataaggagtggcacctattgag

SEQ ID NO: 163718 - DNA, 30 bp, Artificial Sequence
  Synthetic oligonucleotide
tgatctctggcaaaattggtacgtattgag

SEQ ID NO: 163719 - DNA, 30 bp, Artificial Sequence
  Synthetic oligonucleotide
taatatctggtgtcgaacagaaaacttgag

SEQ ID NO: 163720 - DNA, 30 bp, Artificial Sequence
  Synthetic oligonucleotide
tgcacctggagagcgtcaatggtgcttgag

SEQ ID NO: 163721 - DNA, 30 bp, Artificial Sequence
  Synthetic oligonucleotide
acatgccagttgctttgttgcactgttgag

SEQ ID NO: 163722 - DNA, 30 bp, Artificial Sequence
  Synthetic oligonucleotide
cagtagacagttgggactatgttgtttgag

SEQ ID NO: 163723 - DNA, 30 bp, Artificial Sequence
  Synthetic oligonucleotide
tggcgcaaacggtctgtccgaaaaaaatag

SEQ ID NO: 163724 - DNA, 30 bp, Artificial Sequence
  Synthetic oligonucleotide
agctgcaccatgtagtacagtaccaaatag

SEQ ID NO: 163725 - DNA, 30 bp, Artificial Sequence
  Synthetic oligonucleotide
gacgcttatatcccgtggttcagcaaatag

SEQ ID NO: 163726 - DNA, 30 bp, Artificial Sequence
  Synthetic oligonucleotide
gttgtaagtaaggcatcagataggaaatag

SEQ ID NO: 163727 - DNA, 30 bp, Artificial Sequence
  Synthetic oligonucleotide
agggggtgcgtggggttggtcgataaatag

SEQ ID NO: 163728 - DNA, 30 bp, Artificial Sequence
  Synthetic oligonucleotide
aaaggtcttcgccgcggtggtaaacaatag

SEQ ID NO: 163729 - DNA, 30 bp, Artificial Sequence
  Synthetic oligonucleotide
ttctgagtaccacttctgaaataacaatag

SEQ ID NO: 163730 - DNA, 30 bp, Artificial Sequence
  Synthetic oligonucleotide
tagggtgcctagaagtgggggggacaatag

SEQ ID NO: 163731 - DNA, 30 bp, Artificial Sequence
  Synthetic oligonucleotide
cctaaggaccttcgatgataactacaatag

SEQ ID NO: 163732 - DNA, 30 bp, Artificial Sequence
  Synthetic oligonucleotide
atgaaacgactcgcataatacgcgcaatag

SEQ ID NO: 163733 - DNA, 30 bp, Artificial Sequence
  Synthetic oligonucleotide
ctgtgcgattctgtcccgtcgtggcaatag

SEQ ID NO: 163734 - DNA, 30 bp, Artificial Sequence
  Synthetic oligonucleotide
tagattacaagccggtgtagcgttcaatag

SEQ ID NO: 163735 - DNA, 30 bp, Artificial Sequence
  Synthetic oligonucleotide
aatgtagcaacgggaccgggatccgaatag

SEQ ID NO: 163736 - DNA, 30 bp, Artificial Sequence
  Synthetic oligonucleotide
cttcccctggggatagtgcggccggaatag

SEQ ID NO: 163737 - DNA, 30 bp, Artificial Sequence
  Synthetic oligonucleotide
ttaactagcgaccaagcatcattataatag

SEQ ID NO: 163738 - DNA, 30 bp, Artificial Sequence
  Synthetic oligonucleotide
ccgaagcggagtcgcagaacagcgtaatag

SEQ ID NO: 163739 - DNA, 30 bp, Artificial Sequence
  Synthetic oligonucleotide
tcaaatggctctgtcatctggcattaatag

SEQ ID NO: 163740 - DNA, 30 bp, Artificial Sequence
  Synthetic oligonucleotide
gaatacgcttttactgcatagataacatag

SEQ ID NO: 163741 - DNA, 30 bp, Artificial Sequence
  Synthetic oligonucleotide
aactccgtaggtgtttgaggcctaccatag

SEQ ID NO: 163742 - DNA, 30 bp, Artificial Sequence
  Synthetic oligonucleotide
attttgaacgacggtacggtccgcccatag

SEQ ID NO: 163743 - DNA, 30 bp, Artificial Sequence
  Synthetic oligonucleotide
ctcatggcgaactggttcgccgtcccatag

SEQ ID NO: 163744 - DNA, 30 bp, Artificial Sequence
  Synthetic oligonucleotide
ggtgtcttcaattgatttgtttttccatag

SEQ ID NO: 163745 - DNA, 30 bp, Artificial Sequence
  Synthetic oligonucleotide
tggtgtttctagtacctttacccagcatag

SEQ ID NO: 163746 - DNA, 30 bp, Artificial Sequence
  Synthetic oligonucleotide
ggacagaattgccattgaggaaaatcatag

SEQ ID NO: 163747 - DNA, 30 bp, Artificial Sequence
  Synthetic oligonucleotide
agctccagcaaataaaccggctcatcatag

SEQ ID NO: 163748 - DNA, 30 bp, Artificial Sequence
  Synthetic oligonucleotide
tacttaggaaccgtttaggaggactcatag

SEQ ID NO: 163749 - DNA, 30 bp, Artificial Sequence
  Synthetic oligonucleotide
gacgctcaagcggcgcaggaagtgtcatag

SEQ ID NO: 163750 - DNA, 30 bp, Artificial Sequence
  Synthetic oligonucleotide
gtcaaactcacaggtgatgtgcattcatag

SEQ ID NO: 163751 - DNA, 30 bp, Artificial Sequence
  Synthetic oligonucleotide
cgtcactagaatacaaagtgctattcatag

SEQ ID NO: 163752 - DNA, 30 bp, Artificial Sequence
  Synthetic oligonucleotide
gtagttcaaatgtgaacatagtattcatag

SEQ ID NO: 163753 - DNA, 30 bp, Artificial Sequence
  Synthetic oligonucleotide
cggaccactcgcgtttacaccgggagatag

SEQ ID NO: 163754 - DNA, 30 bp, Artificial Sequence
  Synthetic oligonucleotide
aagacatggcgtaataagttatggagatag

SEQ ID NO: 163755 - DNA, 30 bp, Artificial Sequence
  Synthetic oligonucleotide
tcaacggggcacgcatcattgcttagatag

SEQ ID NO: 163756 - DNA, 30 bp, Artificial Sequence
  Synthetic oligonucleotide
cgtcaaggatcggtttgcccactacgatag

SEQ ID NO: 163757 - DNA, 30 bp, Artificial Sequence
  Synthetic oligonucleotide
gagccaagcgcgagcgacattacccgatag

SEQ ID NO: 163758 - DNA, 30 bp, Artificial Sequence
  Synthetic oligonucleotide
gtgtataattaacaataaggctcgcgatag

SEQ ID NO: 163759 - DNA, 30 bp, Artificial Sequence
  Synthetic oligonucleotide
aacggtgaacaaagctcattaatgcgatag

SEQ ID NO: 163760 - DNA, 30 bp, Artificial Sequence
  Synthetic oligonucleotide
tgactggattgtggtacaagcttcggatag

SEQ ID NO: 163761 - DNA, 30 bp, Artificial Sequence
  Synthetic oligonucleotide
aggggctgtcggggtaataaacggggatag

SEQ ID NO: 163762 - DNA, 30 bp, Artificial Sequence
  Synthetic oligonucleotide
taccacacgtcccggtgggcctggggatag

SEQ ID NO: 163763 - DNA, 30 bp, Artificial Sequence
  Synthetic oligonucleotide
tctagcctaattcggcgtctctggggatag

SEQ ID NO: 163764 - DNA, 30 bp, Artificial Sequence
  Synthetic oligonucleotide
atgatattcgtgccttaacgccatggatag

SEQ ID NO: 163765 - DNA, 30 bp, Artificial Sequence
  Synthetic oligonucleotide
catatcaggttacaggtgaccactggatag

SEQ ID NO: 163766 - DNA, 30 bp, Artificial Sequence
  Synthetic oligonucleotide
aagcggaggggcaaggttggttctggatag

SEQ ID NO: 163767 - DNA, 30 bp, Artificial Sequence
  Synthetic oligonucleotide
ggtcgtgcaggtacggtcatttctggatag

SEQ ID NO: 163768 - DNA, 30 bp, Artificial Sequence
  Synthetic oligonucleotide
gggccttcacacgtcggcctaatatgatag

SEQ ID NO: 163769 - DNA, 30 bp, Artificial Sequence
  Synthetic oligonucleotide
tcgtaagaatcttagcaaggagtatgatag

SEQ ID NO: 163770 - DNA, 35 bp, Artificial Sequence
  Synthetic oligonucleotide
gggtgctagtggcgtggtgccgggctgactgatag

SEQ ID NO: 163771 - DNA, 30 bp, Artificial Sequence
  Synthetic oligonucleotide
tcgcgcggacaggggacgcatggctgatag

SEQ ID NO: 163772 - DNA, 30 bp, Artificial Sequence
  Synthetic oligonucleotide
ccggtgcactagtgagttactgggtgatag

SEQ ID NO: 163773 - DNA, 30 bp, Artificial Sequence
  Synthetic oligonucleotide
cccatctgcgcttccacaagacattgatag

SEQ ID NO: 163774 - DNA, 30 bp, Artificial Sequence
  Synthetic oligonucleotide
gtggcggcacggtacgggtgtcagatatag

SEQ ID NO: 163775 - DNA, 30 bp, Artificial Sequence
  Synthetic oligonucleotide
atataggagcgggcagcaagctgtatatag

SEQ ID NO: 163776 - DNA, 30 bp, Artificial Sequence
  Synthetic oligonucleotide
ctccggttaactcggtatcgttaagtatag

SEQ ID NO: 163777 - DNA, 30 bp, Artificial Sequence
  Synthetic oligonucleotide
tccgacggggtgaacaagcccagagtatag

SEQ ID NO: 163778 - DNA, 30 bp, Artificial Sequence
  Synthetic oligonucleotide
cagttatcccgaatctatcggcgagtatag

SEQ ID NO: 163779 - DNA, 30 bp, Artificial Sequence
  Synthetic oligonucleotide
acggacacacacaacttatcctccgtatag

SEQ ID NO: 163780 - DNA, 30 bp, Artificial Sequence
  Synthetic oligonucleotide
atgcgcttacgctataaacgagaggtatag

SEQ ID NO: 163781 - DNA, 30 bp, Artificial Sequence
  Synthetic oligonucleotide
aggaatggatggtatgtcgattctgtatag

SEQ ID NO: 163782 - DNA, 30 bp, Artificial Sequence
  Synthetic oligonucleotide
taagcctcaaccactgcttcaattgtatag

SEQ ID NO: 163783 - DNA, 30 bp, Artificial Sequence
  Synthetic oligonucleotide
attagaacaacaaagcgcctgcacttatag

SEQ ID NO: 163784 - DNA, 30 bp, Artificial Sequence
  Synthetic oligonucleotide
tcggacacacaaaggcgatctggcaactag

SEQ ID NO: 163785 - DNA, 30 bp, Artificial Sequence
  Synthetic oligonucleotide
gattcgagttactgtttataaaagaactag

SEQ ID NO: 163786 - DNA, 30 bp, Artificial Sequence
  Synthetic oligonucleotide
ataatccgaagactaagaattatgaactag

SEQ ID NO: 163787 - DNA, 30 bp, Artificial Sequence
  Synthetic oligonucleotide
atgatacaagaaatattgcacgctaactag

SEQ ID NO: 163788 - DNA, 30 bp, Artificial Sequence
  Synthetic oligonucleotide
gaatacgcctggggagagtcgccacactag

SEQ ID NO: 163789 - DNA, 30 bp, Artificial Sequence
  Synthetic oligonucleotide
gaccggccccaagtaagtacacgacactag

SEQ ID NO: 163790 - DNA, 30 bp, Artificial Sequence
  Synthetic oligonucleotide
cgtcgcgacgaagaggcatgtaagcactag

SEQ ID NO: 163791 - DNA, 30 bp, Artificial Sequence
  Synthetic oligonucleotide
catagacaatcatttagcgctttgcactag

SEQ ID NO: 163792 - DNA, 30 bp, Artificial Sequence
  Synthetic oligonucleotide
agagcacaaacagtcgataggtgagactag

SEQ ID NO: 163793 - DNA, 30 bp, Artificial Sequence
  Synthetic oligonucleotide
gtcctagattgactgggatttaacgactag

SEQ ID NO: 163794 - DNA, 30 bp, Artificial Sequence
  Synthetic oligonucleotide
gggatgattgagcgctctccgcccgactag

SEQ ID NO: 163795 - DNA, 30 bp, Artificial Sequence
  Synthetic oligonucleotide
tacgtgcagtcttcgtgtggataggactag

SEQ ID NO: 163796 - DNA, 30 bp, Artificial Sequence
  Synthetic oligonucleotide
agcaatcgggccttcgcaacatgggactag

SEQ ID NO: 163797 - DNA, 30 bp, Artificial Sequence
  Synthetic oligonucleotide
caatgcgttcgcgtcttggtaatggactag

SEQ ID NO: 163798 - DNA, 30 bp, Artificial Sequence
  Synthetic oligonucleotide
agaggcaaagaccgtgtgatcttggactag

SEQ ID NO: 163799 - DNA, 30 bp, Artificial Sequence
  Synthetic oligonucleotide
ataacatggacaggacttataaatgactag

SEQ ID NO: 163800 - DNA, 30 bp, Artificial Sequence
  Synthetic oligonucleotide
gtcattccttatgccaatgaaactgactag

SEQ ID NO: 163801 - DNA, 30 bp, Artificial Sequence
  Synthetic oligonucleotide
aatactcggctgtcactcaagaactactag

SEQ ID NO: 163802 - DNA, 30 bp, Artificial Sequence
  Synthetic oligonucleotide
ttagtagtagtatctcgcgcaacgtactag

SEQ ID NO: 163803 - DNA, 30 bp, Artificial Sequence
  Synthetic oligonucleotide
gtgttcagacctcaacgtaacgcgtactag

SEQ ID NO: 163804 - DNA, 30 bp, Artificial Sequence
  Synthetic oligonucleotide
cagtcttagtgttcagcattaaattactag

SEQ ID NO: 163805 - DNA, 30 bp, Artificial Sequence
  Synthetic oligonucleotide
ggcgttccgccagggatcggaatttactag

SEQ ID NO: 163806 - DNA, 30 bp, Artificial Sequence
  Synthetic oligonucleotide
gatcagcgggcggagcgcatcagcacctag

SEQ ID NO: 163807 - DNA, 30 bp, Artificial Sequence
  Synthetic oligonucleotide
caatgcgcgctcggagttgtgtctccctag

SEQ ID NO: 163808 - DNA, 30 bp, Artificial Sequence
  Synthetic oligonucleotide
ttaatgttggtccgtctcgatggggcctag

SEQ ID NO: 163809 - DNA, 30 bp, Artificial Sequence
  Synthetic oligonucleotide
aactacatggcaacgaccggttgtgcctag

SEQ ID NO: 163810 - DNA, 30 bp, Artificial Sequence
  Synthetic oligonucleotide
gggatcggtctgattctcaatggctcctag

SEQ ID NO: 163811 - DNA, 30 bp, Artificial Sequence
  Synthetic oligonucleotide
ggaaacaccttgtgtacgccacggtcctag

SEQ ID NO: 163812 - DNA, 30 bp, Artificial Sequence
  Synthetic oligonucleotide
cggggacttataggcccatatgaaagctag

SEQ ID NO: 163813 - DNA, 30 bp, Artificial Sequence
  Synthetic oligonucleotide
tctaactcgaatgagttaacactaagctag

SEQ ID NO: 163814 - DNA, 30 bp, Artificial Sequence
  Synthetic oligonucleotide
atccagactgcgcatgatagagacagctag

SEQ ID NO: 163815 - DNA, 30 bp, Artificial Sequence
  Synthetic oligonucleotide
tctaacctgcggtaactgaccgttagctag

SEQ ID NO: 163816 - DNA, 30 bp, Artificial Sequence
  Synthetic oligonucleotide
gagggcaatgaatgcactggcatgcgctag

SEQ ID NO: 163817 - DNA, 30 bp, Artificial Sequence
  Synthetic oligonucleotide
tactggcacgccactgatgattttcgctag

SEQ ID NO: 163818 - DNA, 30 bp, Artificial Sequence
  Synthetic oligonucleotide
cttgagaaacgttcaaaatcattcggctag

SEQ ID NO: 163819 - DNA, 30 bp, Artificial Sequence
  Synthetic oligonucleotide
tgcgctgagccgagagtagcgcagggctag

SEQ ID NO: 163820 - DNA, 30 bp, Artificial Sequence
  Synthetic oligonucleotide
tttgttggcttaaggatgtgtcagggctag

SEQ ID NO: 163821 - DNA, 30 bp, Artificial Sequence
  Synthetic oligonucleotide
agctattgatgggatttagtcaggggctag

SEQ ID NO: 163822 - DNA, 30 bp, Artificial Sequence
  Synthetic oligonucleotide
agctccgaagggtaatacccaagtggctag

SEQ ID NO: 163823 - DNA, 30 bp, Artificial Sequence
  Synthetic oligonucleotide
taatactctacggatgccttaagctgctag

SEQ ID NO: 163824 - DNA, 30 bp, Artificial Sequence
  Synthetic oligonucleotide
gtatgagggactagcccatatttaatctag

SEQ ID NO: 163825 - DNA, 30 bp, Artificial Sequence
  Synthetic oligonucleotide
atgagttaggagcatacatagaacatctag

SEQ ID NO: 163826 - DNA, 30 bp, Artificial Sequence
  Synthetic oligonucleotide
gaaaatctcaaaccagggtatcagatctag

SEQ ID NO: 163827 - DNA, 30 bp, Artificial Sequence
  Synthetic oligonucleotide
tatgcacgagccgaacctgtatgtatctag

SEQ ID NO: 163828 - DNA, 30 bp, Artificial Sequence
  Synthetic oligonucleotide
cattaaaggggctacccgtgaatactctag

SEQ ID NO: 163829 - DNA, 30 bp, Artificial Sequence
  Synthetic oligonucleotide
tgtcgagctgaagcattcgattccctctag

SEQ ID NO: 163830 - DNA, 30 bp, Artificial Sequence
  Synthetic oligonucleotide
aggcaattcaaagtgtctcgccaagtctag

SEQ ID NO: 163831 - DNA, 30 bp, Artificial Sequence
  Synthetic oligonucleotide
ccactaggggcgcaatggagactagtctag

SEQ ID NO: 163832 - DNA, 30 bp, Artificial Sequence
  Synthetic oligonucleotide
cacctcaagttgtaggggagcgtagtctag

SEQ ID NO: 163833 - DNA, 30 bp, Artificial Sequence
  Synthetic oligonucleotide
gtatattctgtcgtgaaatggcccgtctag

SEQ ID NO: 163834 - DNA, 30 bp, Artificial Sequence
  Synthetic oligonucleotide
ggtacgttccgtatgaccttcgtggtctag

SEQ ID NO: 163835 - DNA, 30 bp, Artificial Sequence
  Synthetic oligonucleotide
aatacagagaaggccataccttaattctag

SEQ ID NO: 163836 - DNA, 30 bp, Artificial Sequence
  Synthetic oligonucleotide
agagtacctcatgtgttgcaaaacttctag

SEQ ID NO: 163837 - DNA, 30 bp, Artificial Sequence
  Synthetic oligonucleotide
cgacatataataataagctgcgtcttctag

SEQ ID NO: 163838 - DNA, 30 bp, Artificial Sequence
  Synthetic oligonucleotide
catccagcccgtgaaagtacgaagttctag

SEQ ID NO: 163839 - DNA, 30 bp, Artificial Sequence
  Synthetic oligonucleotide
gtgcgccatgggagttttgcgggtaagtag

SEQ ID NO: 163840 - DNA, 30 bp, Artificial Sequence
  Synthetic oligonucleotide
ttgcatgatggggaggtgccttaccagtag

SEQ ID NO: 163841 - DNA, 30 bp, Artificial Sequence
  Synthetic oligonucleotide
aaaggtacgatgataggctattctcagtag

SEQ ID NO: 163842 - DNA, 30 bp, Artificial Sequence
  Synthetic oligonucleotide
gttggggcccgctatgggaactgcgagtag

SEQ ID NO: 163843 - DNA, 30 bp, Artificial Sequence
  Synthetic oligonucleotide
gacgctgaggctaatatataaatcgagtag

SEQ ID NO: 163844 - DNA, 30 bp, Artificial Sequence
  Synthetic oligonucleotide
aagttatcggttaacgtatacatcgagtag

SEQ ID NO: 163845 - DNA, 30 bp, Artificial Sequence
  Synthetic oligonucleotide
acatactagaggtaggccatcctggagtag

SEQ ID NO: 163846 - DNA, 30 bp, Artificial Sequence
  Synthetic oligonucleotide
atcagtggagctgaattctgcaaatagtag

SEQ ID NO: 163847 - DNA, 30 bp, Artificial Sequence
  Synthetic oligonucleotide
aggtaagggctgcaaattttagcctagtag

SEQ ID NO: 163848 - DNA, 30 bp, Artificial Sequence
  Synthetic oligonucleotide
cgcttaatcgctgaggatttttagtagtag

SEQ ID NO: 163849 - DNA, 30 bp, Artificial Sequence
  Synthetic oligonucleotide
cgcgggcaccggcatcggtgtgcgtagtag

SEQ ID NO: 163850 - DNA, 30 bp, Artificial Sequence
  Synthetic oligonucleotide
gcgactgggagaaggtagaaatcttagtag

SEQ ID NO: 163851 - DNA, 30 bp, Artificial Sequence
  Synthetic oligonucleotide
ttcaaagacacacgtacgccctacacgtag

SEQ ID NO: 163852 - DNA, 30 bp, Artificial Sequence
  Synthetic oligonucleotide
ttagagaaacggcgtactctctggacgtag

SEQ ID NO: 163853 - DNA, 30 bp, Artificial Sequence
  Synthetic oligonucleotide
acctgcaaacaacaccgttacgttacgtag

SEQ ID NO: 163854 - DNA, 30 bp, Artificial Sequence
  Synthetic oligonucleotide
taagtcgtagggtacgtacccggaccgtag

SEQ ID NO: 163855 - DNA, 30 bp, Artificial Sequence
  Synthetic oligonucleotide
cctccgttgacaagaatgtggtccccgtag

SEQ ID NO: 163856 - DNA, 30 bp, Artificial Sequence
  Synthetic oligonucleotide
atgatcgttgtgcaccaaaagtaagcgtag

SEQ ID NO: 163857 - DNA, 30 bp, Artificial Sequence
  Synthetic oligonucleotide
ggttaccaactactcctcggccacgcgtag

SEQ ID NO: 163858 - DNA, 30 bp, Artificial Sequence
  Synthetic oligonucleotide
tagtattcacaatggatattcagggcgtag

SEQ ID NO: 163859 - DNA, 30 bp, Artificial Sequence
  Synthetic oligonucleotide
gggacctatgcgacaccaggtcatgcgtag

SEQ ID NO: 163860 - DNA, 30 bp, Artificial Sequence
  Synthetic oligonucleotide
gcttgactactgtggcccgcggttgcgtag

SEQ ID NO: 163861 - DNA, 30 bp, Artificial Sequence
  Synthetic oligonucleotide
cggctactataaatgtacattcaatcgtag

SEQ ID NO: 163862 - DNA, 30 bp, Artificial Sequence
  Synthetic oligonucleotide
agtttcgccacaccgtgctaaacatcgtag

SEQ ID NO: 163863 - DNA, 30 bp, Artificial Sequence
  Synthetic oligonucleotide
tgacttcgggacaatagaggctactcgtag

SEQ ID NO: 163864 - DNA, 30 bp, Artificial Sequence
  Synthetic oligonucleotide
atgtgttgcaagttgaacatgtattcgtag

SEQ ID NO: 163865 - DNA, 30 bp, Artificial Sequence
  Synthetic oligonucleotide
cacggtcaagctgagcttagcgtttcgtag

SEQ ID NO: 163866 - DNA, 30 bp, Artificial Sequence
  Synthetic oligonucleotide
ttgagtagatccgtttgagtcaaaaggtag

SEQ ID NO: 163867 - DNA, 30 bp, Artificial Sequence
  Synthetic oligonucleotide
ttggtgagaacactgttcggagtaaggtag

SEQ ID NO: 163868 - DNA, 30 bp, Artificial Sequence
  Synthetic oligonucleotide
gagaccctgatcagctaaaccgacaggtag

SEQ ID NO: 163869 - DNA, 30 bp, Artificial Sequence
  Synthetic oligonucleotide
aacacccgttattacaccgtagccaggtag

SEQ ID NO: 163870 - DNA, 30 bp, Artificial Sequence
  Synthetic oligonucleotide
gtcctgctcgggtttagcgagatcaggtag

SEQ ID NO: 163871 - DNA, 30 bp, Artificial Sequence
  Synthetic oligonucleotide
caaagggtagcctcgagcaagcttaggtag

SEQ ID NO: 163872 - DNA, 31 bp, Artificial Sequence
  Synthetic oligonucleotide
aaccgcgggggcatggaagcatagacggtag

SEQ ID NO: 163873 - DNA, 30 bp, Artificial Sequence
  Synthetic oligonucleotide
actcattaagagttaaacatggtgcggtag

SEQ ID NO: 163874 - DNA, 30 bp, Artificial Sequence
  Synthetic oligonucleotide
gcatataacatattgtagctagttcggtag

SEQ ID NO: 163875 - DNA, 30 bp, Artificial Sequence
  Synthetic oligonucleotide
gtgtctcaagagtctcataacaaagggtag

SEQ ID NO: 163876 - DNA, 30 bp, Artificial Sequence
  Synthetic oligonucleotide
ggttattgcgtacacggagacgaagggtag

SEQ ID NO: 163877 - DNA, 30 bp, Artificial Sequence
  Synthetic oligonucleotide
gtgctggttaatcgacaagtggaagggtag

SEQ ID NO: 163878 - DNA, 30 bp, Artificial Sequence
  Synthetic oligonucleotide
tcctgtgtgggcttagcttgattagggtag

SEQ ID NO: 163879 - DNA, 30 bp, Artificial Sequence
  Synthetic oligonucleotide
acacataacgcggtcttatattccgggtag

SEQ ID NO: 163880 - DNA, 30 bp, Artificial Sequence
  Synthetic oligonucleotide
gacgagcgtgtgtcttagaacaaggggtag

SEQ ID NO: 163881 - DNA, 30 bp, Artificial Sequence
  Synthetic oligonucleotide
tcaccggcggctcgagtttacaaatggtag

SEQ ID NO: 163882 - DNA, 30 bp, Artificial Sequence
  Synthetic oligonucleotide
cattaggaaggcatttaggatccctggtag

SEQ ID NO: 163883 - DNA, 30 bp, Artificial Sequence
  Synthetic oligonucleotide
caccagcttagtgggaaatgcacgtggtag

SEQ ID NO: 163884 - DNA, 30 bp, Artificial Sequence
  Synthetic oligonucleotide
ggacatgcgcacgcggacatctggtggtag

SEQ ID NO: 163885 - DNA, 30 bp, Artificial Sequence
  Synthetic oligonucleotide
taattggaagcccctcgtggatattggtag

SEQ ID NO: 163886 - DNA, 30 bp, Artificial Sequence
  Synthetic oligonucleotide
aagtatgctcccggacagaattgttggtag

SEQ ID NO: 163887 - DNA, 30 bp, Artificial Sequence
  Synthetic oligonucleotide
ctgacagaaaagagtaaccaagaaatgtag

SEQ ID NO: 163888 - DNA, 30 bp, Artificial Sequence
  Synthetic oligonucleotide
gttgccattaagagtgatcgagcaatgtag

SEQ ID NO: 163889 - DNA, 30 bp, Artificial Sequence
  Synthetic oligonucleotide
tgcacggatcaagtgcgtagccacatgtag

SEQ ID NO: 163890 - DNA, 30 bp, Artificial Sequence
  Synthetic oligonucleotide
ttcgcttcaacgctactgtgtaggatgtag

SEQ ID NO: 163891 - DNA, 30 bp, Artificial Sequence
  Synthetic oligonucleotide
ggcccacgacggcatcgtggtcgtatgtag

SEQ ID NO: 163892 - DNA, 30 bp, Artificial Sequence
  Synthetic oligonucleotide
gttgacggacccgtaaacacgcgtctgtag

SEQ ID NO: 163893 - DNA, 30 bp, Artificial Sequence
  Synthetic oligonucleotide
accgcacgatttccgtccgacagcgtgtag

SEQ ID NO: 163894 - DNA, 30 bp, Artificial Sequence
  Synthetic oligonucleotide
tacttgtgggacccaaattgcgtggtgtag

SEQ ID NO: 163895 - DNA, 30 bp, Artificial Sequence
  Synthetic oligonucleotide
gcactgtgaacaggagcatggattgtgtag

SEQ ID NO: 163896 - DNA, 30 bp, Artificial Sequence
  Synthetic oligonucleotide
atgtccccgcgacaggtggctaaattgtag

SEQ ID NO: 163897 - DNA, 30 bp, Artificial Sequence
  Synthetic oligonucleotide
cgacatttgcagtttcaggcccaattgtag

SEQ ID NO: 163898 - DNA, 30 bp, Artificial Sequence
  Synthetic oligonucleotide
aactatgacaattgggggagattaaattag

SEQ ID NO: 163899 - DNA, 30 bp, Artificial Sequence
  Synthetic oligonucleotide
attcgggatcactaccccgaaaagaattag

SEQ ID NO: 163900 - DNA, 30 bp, Artificial Sequence
  Synthetic oligonucleotide
tagcggtcgtattaagcagcttagaattag

SEQ ID NO: 163901 - DNA, 30 bp, Artificial Sequence
  Synthetic oligonucleotide
ataccgccggcttatgagtcaagtaattag

SEQ ID NO: 163902 - DNA, 30 bp, Artificial Sequence
  Synthetic oligonucleotide
taacactgtcgtccggcccggggtaattag

SEQ ID NO: 163903 - DNA, 30 bp, Artificial Sequence
  Synthetic oligonucleotide
gtgcaactatatgatgagtatcttaattag

SEQ ID NO: 163904 - DNA, 30 bp, Artificial Sequence
  Synthetic oligonucleotide
cacagtgttggcggcatgtcgggccattag

SEQ ID NO: 163905 - DNA, 30 bp, Artificial Sequence
  Synthetic oligonucleotide
tttacgcaacaagttaaatcgtagcattag

SEQ ID NO: 163906 - DNA, 30 bp, Artificial Sequence
  Synthetic oligonucleotide
gcttaattatagtttacctggcaagattag

SEQ ID NO: 163907 - DNA, 30 bp, Artificial Sequence
  Synthetic oligonucleotide
tacaccatatcggaagagtggagagattag

SEQ ID NO: 163908 - DNA, 30 bp, Artificial Sequence
  Synthetic oligonucleotide
aaagcctgtctgaagttaggggacgattag

SEQ ID NO: 163909 - DNA, 30 bp, Artificial Sequence
  Synthetic oligonucleotide
tgtcacgccctatgtgaagctcaggattag

SEQ ID NO: 163910 - DNA, 30 bp, Artificial Sequence
  Synthetic oligonucleotide
gtgaagtgtggaaagatatagagggattag

SEQ ID NO: 163911 - DNA, 30 bp, Artificial Sequence
  Synthetic oligonucleotide
aactgcggaataggtctggcctgggattag

SEQ ID NO: 163912 - DNA, 30 bp, Artificial Sequence
  Synthetic oligonucleotide
cgaaatggctgcgatagccgcggtgattag

SEQ ID NO: 163913 - DNA, 30 bp, Artificial Sequence
  Synthetic oligonucleotide
agcatggaatcggtatctatgctatattag

SEQ ID NO: 163914 - DNA, 30 bp, Artificial Sequence
  Synthetic oligonucleotide
taaaagtgaatcacaacaactatctattag

SEQ ID NO: 163915 - DNA, 30 bp, Artificial Sequence
  Synthetic oligonucleotide
aaatggaaggcaccgttgggagcgtattag

SEQ ID NO: 163916 - DNA, 30 bp, Artificial Sequence
  Synthetic oligonucleotide
tcttggtctcggcacggcatacattattag

SEQ ID NO: 163917 - DNA, 30 bp, Artificial Sequence
  Synthetic oligonucleotide
aataggaaccacgatgcgacaggcacttag

SEQ ID NO: 163918 - DNA, 30 bp, Artificial Sequence
  Synthetic oligonucleotide
ttcagattgacccaaccgtaagtgacttag

SEQ ID NO: 163919 - DNA, 30 bp, Artificial Sequence
  Synthetic oligonucleotide
tcgacagcagtatttgtccggcacccttag

SEQ ID NO: 163920 - DNA, 30 bp, Artificial Sequence
  Synthetic oligonucleotide
ccgaccgtttcgggtcctacgagcccttag

SEQ ID NO: 163921 - DNA, 30 bp, Artificial Sequence
  Synthetic oligonucleotide
atgctgggacaagcgtgagtagttccttag

SEQ ID NO: 163922 - DNA, 30 bp, Artificial Sequence
  Synthetic oligonucleotide
tcgaagctttggttatgataaggagcttag

SEQ ID NO: 163923 - DNA, 30 bp, Artificial Sequence
  Synthetic oligonucleotide
gtcgtgcgctggtttcatctagccgcttag

SEQ ID NO: 163924 - DNA, 30 bp, Artificial Sequence
  Synthetic oligonucleotide
tggtgccgctcattataggccggtgcttag

SEQ ID NO: 163925 - DNA, 30 bp, Artificial Sequence
  Synthetic oligonucleotide
cgagtaccgattgctcagaagttatcttag

SEQ ID NO: 163926 - DNA, 30 bp, Artificial Sequence
  Synthetic oligonucleotide
gcttgctagcatgggcatggagtgtcttag

SEQ ID NO: 163927 - DNA, 30 bp, Artificial Sequence
  Synthetic oligonucleotide
tggggcagtcaagccggcggcacttcttag

SEQ ID NO: 163928 - DNA, 30 bp, Artificial Sequence
  Synthetic oligonucleotide
tcagggcgggaggattaggtccaaagttag

SEQ ID NO: 163929 - DNA, 30 bp, Artificial Sequence
  Synthetic oligonucleotide
ttctctggtaggagagccaggctaagttag

SEQ ID NO: 163930 - DNA, 30 bp, Artificial Sequence
  Synthetic oligonucleotide
attcgcaacatcacctcggtattaagttag

SEQ ID NO: 163931 - DNA, 30 bp, Artificial Sequence
  Synthetic oligonucleotide
cggacgtaggccgaaggagcggagagttag

SEQ ID NO: 163932 - DNA, 30 bp, Artificial Sequence
  Synthetic oligonucleotide
gttacatcacatcggggatgttttagttag

SEQ ID NO: 163933 - DNA, 30 bp, Artificial Sequence
  Synthetic oligonucleotide
ctccccggtcgttaatgtggctcgcgttag

SEQ ID NO: 163934 - DNA, 30 bp, Artificial Sequence
  Synthetic oligonucleotide
ccgcgtcagtccgtggcgctacggcgttag

SEQ ID NO: 163935 - DNA, 30 bp, Artificial Sequence
  Synthetic oligonucleotide
gcacggagatagcagcgcatctatcgttag
